United States Patent Application Publication US 2005/0244851 A1 - sequence listing, part 8

SEQ ID NO: 279276 - DNA, 25 bp, Homo sapien
gtcctcactggcgattccgtgggcg

SEQ ID NO: 279277 - DNA, 25 bp, Homo sapien
ctccttgtcgatgccctggacggcg

SEQ ID NO: 279278 - DNA, 25 bp, Homo sapien
ggacggcgtcctcgctggcgatgcc

SEQ ID NO: 279279 - DNA, 25 bp, Homo sapien
tggacggcgtcctcgctggcgatgc

SEQ ID NO: 279280 - DNA, 25 bp, Homo sapien
cttgtcgatgccctggacggcgtcc

SEQ ID NO: 279281 - DNA, 25 bp, Homo sapien
cgttggcgatgccctgggcggcatc

SEQ ID NO: 279282 - DNA, 25 bp, Homo sapien
ctcgttggcgatgccctgggcggca

SEQ ID NO: 279283 - DNA, 25 bp, Homo sapien
tcgttggcgatgccctgggcggcat

SEQ ID NO: 279284 - DNA, 25 bp, Homo sapien
gtcgtatacagctcgttggcgatgc

SEQ ID NO: 279285 - DNA, 25 bp, Homo sapien
gatgtcgtatacagctcgttggcga

SEQ ID NO: 279286 - DNA, 25 bp, Homo sapien
tgtcgtatacagctcgttggcgatg

SEQ ID NO: 279287 - DNA, 25 bp, Homo sapien
tcgtatacagctcgttggcgatgcc

SEQ ID NO: 279288 - DNA, 25 bp, Homo sapien
ttgttagcgacggcttgtagggtgt

SEQ ID NO: 279289 - DNA, 25 bp, Homo sapien
agcgacggcttgtagggtgtcctcg

SEQ ID NO: 279290 - DNA, 25 bp, Homo sapien
tagcgacggcttgtagggtgtcctc

SEQ ID NO: 279291 - DNA, 25 bp, Homo sapien
gttagcgacggcttgtagggtgtcc

SEQ ID NO: 279292 - DNA, 25 bp, Homo sapien
tagcaatgtcgtgtacagcgtccac

SEQ ID NO: 279293 - DNA, 25 bp, Homo sapien
ttagcaatgtcgtgtacagcgtcca

SEQ ID NO: 279294 - DNA, 25 bp, Homo sapien
gtcgtatacagcgtgctcactagcg

SEQ ID NO: 279295 - DNA, 25 bp, Homo sapien
gcgtgctcactagcgatgtcttttt

SEQ ID NO: 279296 - DNA, 25 bp, Homo sapien
gtatacagcgtgctcactagcgatg

SEQ ID NO: 279297 - DNA, 25 bp, Homo sapien
tacagcgtgctcactagcgatgtct

SEQ ID NO: 279298 - DNA, 25 bp, Homo sapien
tcgtatacagcgtcataattagcga

SEQ ID NO: 279299 - DNA, 25 bp, Homo sapien
gtcgtatacagcgtcataattagcg

SEQ ID NO: 279300 - DNA, 25 bp, Homo sapien
taagcaatgtcgtctacagcgtcct

SEQ ID NO: 279301 - DNA, 25 bp, Homo sapien
ttttacagatgtcttgtacagtgtc

SEQ ID NO: 279302 - DNA, 25 bp, Homo sapien
tacagcgtccttattagcgaattcg

SEQ ID NO: 279303 - DNA, 25 bp, Homo sapien
tgtcttgtacggtgtccttataagc

SEQ ID NO: 279304 - DNA, 25 bp, Homo sapien
taatccatgggggaaaactgctgtg

SEQ ID NO: 279305 - DNA, 25 bp, Homo sapien
tctgcattgcagtggatcgtggatg

SEQ ID NO: 279306 - DNA, 25 bp, Homo sapien
ctttaaagtgtatctagattggcag

SEQ ID NO: 279307 - DNA, 25 bp, Homo sapien
agtttcacaactcttaatccatggg

SEQ ID NO: 279308 - DNA, 25 bp, Homo sapien
tctgatagtctctcgacaacttgag

SEQ ID NO: 279309 - DNA, 25 bp, Homo sapien
ggtatagtgattgagtcaaaggtcg

SEQ ID NO: 279310 - DNA, 25 bp, Homo sapien
gattgagtcaaaggtcgaagtcccc

SEQ ID NO: 279311 - DNA, 25 bp, Homo sapien
gccatacacgtcacacagatctgat

SEQ ID NO: 279312 - DNA, 25 bp, Homo sapien
gagatggcgctttttcctcaggaag

SEQ ID NO: 279313 - DNA, 25 bp, Homo sapien
cagggtacgtatcattctccagtgt

SEQ ID NO: 279314 - DNA, 25 bp, Homo sapien
gtgagttatttcagggtacgtatca

SEQ ID NO: 279315 - DNA, 25 bp, Homo sapien
ctagagatggcgctttttcctcagg

SEQ ID NO: 279316 - DNA, 25 bp, Homo sapien
atggtgcttcgcacaggatcccctg

SEQ ID NO: 279317 - DNA, 25 bp, Homo sapien
tcccaccctagctgaagccatggtg

SEQ ID NO: 279318 - DNA, 25 bp, Homo sapien
tgggctcacagatatccctacagcc

SEQ ID NO: 279319 - DNA, 25 bp, Homo sapien
ataagtcattagagagaggcccacc

SEQ ID NO: 279320 - DNA, 25 bp, Homo sapien
atcatcagatatgctctccacaatc

SEQ ID NO: 279321 - DNA, 25 bp, Homo sapien
ccccatcatcagatatgctctccac

SEQ ID NO: 279322 - DNA, 25 bp, Homo sapien
ctacaaatccccatcatcagatatg

SEQ ID NO: 279323 - DNA, 25 bp, Homo sapien
tacaaatccccatcatcagatatgc

SEQ ID NO: 279324 - DNA, 25 bp, Homo sapien
tcagattctgttcaccacaggtgac

SEQ ID NO: 279325 - DNA, 25 bp, Homo sapien
aacctcttctgcacaatcccaaggg

SEQ ID NO: 279326 - DNA, 25 bp, Homo sapien
ctgggaactctctccaattggatct

SEQ ID NO: 279327 - DNA, 25 bp, Homo sapien
gcctgtgagagagttgtgtccctca

SEQ ID NO: 279328 - DNA, 25 bp, Homo sapien
cctttaagccaggagtcaacagtga

SEQ ID NO: 279329 - DNA, 25 bp, Homo sapien
ccctttaagccaggagtcaacagtg

SEQ ID NO: 279330 - DNA, 25 bp, Homo sapien
taacagaaacgcatggtctcccaga

SEQ ID NO: 279331 - DNA, 25 bp, Homo sapien
ccttccttggagcttgaccttgtca

SEQ ID NO: 279332 - DNA, 25 bp, Homo sapien
tcagacaggtatagatgagtgttcc

SEQ ID NO: 279333 - DNA, 25 bp, Homo sapien
tgatcagccatgcaagaataaatga

SEQ ID NO: 279334 - DNA, 25 bp, Homo sapien
tatcctcttcctagtcagtacaaga

SEQ ID NO: 279335 - DNA, 25 bp, Homo sapien
tacccccagtgacttatatgctaat

SEQ ID NO: 279336 - DNA, 25 bp, Homo sapien
cagtacaagaaccttggaacaggaa

SEQ ID NO: 279337 - DNA, 25 bp, Homo sapien
gcccagcctatgagttagtacttct

SEQ ID NO: 279338 - DNA, 25 bp, Homo sapien
ggtggagcgtctcaattatctggct

SEQ ID NO: 279339 - DNA, 25 bp, Homo sapien
gccaagtgccttgcagaggagaatg

SEQ ID NO: 279340 - DNA, 25 bp, Homo sapien
tggtgaccaggtggagcgtctcaat

SEQ ID NO: 279341 - DNA, 25 bp, Homo sapien
gaatgtttgggtggctggtgtccag

SEQ ID NO: 279342 - DNA, 25 bp, Homo sapien
tgagttgatagcagtgcggggaggg

SEQ ID NO: 279343 - DNA, 25 bp, Homo sapien
atttgagttgatagcagtgcgggga

SEQ ID NO: 279344 - DNA, 25 bp, Homo sapien
gtgaagctgtcaaaggaagattgta

SEQ ID NO: 279345 - DNA, 25 bp, Homo sapien
aggaagattgtaataaattaactgg

SEQ ID NO: 279346 - DNA, 25 bp, Homo sapien
tgggcatccctctgaactgtgcact

SEQ ID NO: 279347 - DNA, 25 bp, Homo sapien
tctgtggctgggcatccctctgaac

SEQ ID NO: 279348 - DNA, 25 bp, Homo sapien
ggagcaggtgattggttccagctct

SEQ ID NO: 279349 - DNA, 25 bp, Homo sapien
tccagctctgcgttttggcacctct

SEQ ID NO: 279350 - DNA, 25 bp, Homo sapien
agaggagactcgtatggggggtggt

SEQ ID NO: 279351 - DNA, 25 bp, Homo sapien
cagaggagactcgtatggggggtgg

SEQ ID NO: 279352 - DNA, 25 bp, Homo sapien
ccttctacaagcactcattgttctg

SEQ ID NO: 279353 - DNA, 25 bp, Homo sapien
gagggtagcccctgttttagcagaa

SEQ ID NO: 279354 - DNA, 25 bp, Homo sapien
ttcaacaaataaccgagtgccttct

SEQ ID NO: 279355 - DNA, 25 bp, Homo sapien
gttatctccggtgccacagaattca

SEQ ID NO: 279356 - DNA, 25 bp, Homo sapien
aagtcaagaatacccccgggagcag

SEQ ID NO: 279357 - DNA, 25 bp, Homo sapien
taagtcaagaatacccccgggagca

SEQ ID NO: 279358 - DNA, 25 bp, Homo sapien
tgatgtcatacactctccgctttcg

SEQ ID NO: 279359 - DNA, 25 bp, Homo sapien
tgtcatacactctccgctttcggac

SEQ ID NO: 279360 - DNA, 25 bp, Homo sapien
gatgtcatacactctccgctttcgg

SEQ ID NO: 279361 - DNA, 25 bp, Homo sapien
ggtgatgtcatacactctccgcttt

SEQ ID NO: 279362 - DNA, 25 bp, Homo sapien
tccaaaattgctaagatcagatcct

SEQ ID NO: 279363 - DNA, 25 bp, Homo sapien
cttaattaactcatccaaagcatct

SEQ ID NO: 279364 - DNA, 25 bp, Homo sapien
cttggatttcttttcaacgaggtcg

SEQ ID NO: 279365 - DNA, 25 bp, Homo sapien
tgctgagcacaatccttaattaact

SEQ ID NO: 279366 - DNA, 25 bp, Homo sapien
tgggagctggaacatccaatctggt

SEQ ID NO: 279367 - DNA, 25 bp, Homo sapien
gaaggcctgaatgctatgaatgtct

SEQ ID NO: 279368 - DNA, 25 bp, Homo sapien
tggagctttaactgcaatgacgatc

SEQ ID NO: 279369 - DNA, 25 bp, Homo sapien
gacgatctgttcatggaaggcctga

SEQ ID NO: 279370 - DNA, 25 bp, Homo sapien
gataggtccgttggtgctccttatg

SEQ ID NO: 279371 - DNA, 25 bp, Homo sapien
acatcgataggtccgttggtgctcc

SEQ ID NO: 279372 - DNA, 25 bp, Homo sapien
ggtccgttggtgctccttatgtgca

SEQ ID NO: 279373 - DNA, 25 bp, Homo sapien
aaatagacatcgataggtccgttgg

SEQ ID NO: 279374 - DNA, 25 bp, Homo sapien
ctggagagagggcaaggtacaactt

SEQ ID NO: 279375 - DNA, 25 bp, Homo sapien
catgatgccgctactgagaacgaga

SEQ ID NO: 279376 - DNA, 25 bp, Homo sapien
gaagatattcccaaaaaactcagtg

SEQ ID NO: 279377 - DNA, 25 bp, Homo sapien
caaagacactactggccatgatgcc

SEQ ID NO: 279378 - DNA, 25 bp, Homo sapien
gaggctaggggacgctggcggcata

SEQ ID NO: 279379 - DNA, 25 bp, Homo sapien
ttgggaagacctggcgcgcacaatg

SEQ ID NO: 279380 - DNA, 25 bp, Homo sapien
ctgctctcctgttgaggcggggatt

SEQ ID NO: 279381 - DNA, 25 bp, Homo sapien
cgctggcggcataggtactggaagg

SEQ ID NO: 279382 - DNA, 25 bp, Homo sapien
agagcgagcttaacggattaataag

SEQ ID NO: 279383 - DNA, 25 bp, Homo sapien
ggcgcccgtgacagagcgagcttaa

SEQ ID NO: 279384 - DNA, 25 bp, Homo sapien
cgcccgtgacagagcgagcttaacg

SEQ ID NO: 279385 - DNA, 25 bp, Homo sapien
cgagcttaacggattaataagcgca

SEQ ID NO: 279386 - DNA, 25 bp, Homo sapien
gagtccatgttctcagtgcagtggc

SEQ ID NO: 279387 - DNA, 25 bp, Homo sapien
catgttctcagtgcagtggctgagc

SEQ ID NO: 279388 - DNA, 25 bp, Homo sapien
tccatgttctcagtgcagtggctga

SEQ ID NO: 279389 - DNA, 25 bp, Homo sapien
cagagagtccatgttctcagtgcag

SEQ ID NO: 279390 - DNA, 25 bp, Homo sapien
agtcattcctgagggcgagtgtcta

SEQ ID NO: 279391 - DNA, 25 bp, Homo sapien
gcctcggatgtggaggagtcattcc

SEQ ID NO: 279392 - DNA, 25 bp, Homo sapien
gggaaacttgtgtgtactgggccta

SEQ ID NO: 279393 - DNA, 25 bp, Homo sapien
tactgggcctagaggcctcggatgt

SEQ ID NO: 279394 - DNA, 25 bp, Homo sapien
gtgctttagaaacggcaggcagacc

SEQ ID NO: 279395 - DNA, 25 bp, Homo sapien
ttagaaacggcaggcagaccagaag

SEQ ID NO: 279396 - DNA, 25 bp, Homo sapien
ctcccggtccaggtcttcaacagtg

SEQ ID NO: 279397 - DNA, 25 bp, Homo sapien
cagtcttgggacttgtgtgtctcct

SEQ ID NO: 279398 - DNA, 25 bp, Homo sapien
agcggtaggggctcgagatggcatt

SEQ ID NO: 279399 - DNA, 25 bp, Homo sapien
actccagtagtgaccccaacgtggg

SEQ ID NO: 279400 - DNA, 25 bp, Homo sapien
gcctcccgtagagcggtaggggctc

SEQ ID NO: 279401 - DNA, 25 bp, Homo sapien
ccgtagagcggtaggggctcgagat

SEQ ID NO: 279402 - DNA, 25 bp, Homo sapien
aggggaaacttgcatctacagggcc

SEQ ID NO: 279403 - DNA, 25 bp, Homo sapien
acttgcatctacagggcctagaggc

SEQ ID NO: 279404 - DNA, 25 bp, Homo sapien
gggaaacttgcatctacagggccta

SEQ ID NO: 279405 - DNA, 25 bp, Homo sapien
gaaacttgcatctacagggcctaga

SEQ ID NO: 279406 - DNA, 25 bp, Homo sapien
gggtctgcagtactaaatggccttg

SEQ ID NO: 279407 - DNA, 25 bp, Homo sapien
gtctgcagtactaaatggccttgtc

SEQ ID NO: 279408 - DNA, 25 bp, Homo sapien
ctcctgatgcgctggaaagccgcct

SEQ ID NO: 279409 - DNA, 25 bp, Homo sapien
gcactcctgatgcgctggaaagccg

SEQ ID NO: 279410 - DNA, 25 bp, Homo sapien
gagccatggcgtcacttaaatgtag

SEQ ID NO: 279411 - DNA, 25 bp, Homo sapien
ttaaatgtagtgagaggccgggctt

SEQ ID NO: 279412 - DNA, 25 bp, Homo sapien
tattgaggccgagatgctccagcat

SEQ ID NO: 279413 - DNA, 25 bp, Homo sapien
ctggcctggacatgactgtgctcat

SEQ ID NO: 279414 - DNA, 25 bp, Homo sapien
gctctgctcgtgagctgcctggtca

SEQ ID NO: 279415 - DNA, 25 bp, Homo sapien
gatcatttccctgacactgcgaggg

SEQ ID NO: 279416 - DNA, 25 bp, Homo sapien
gagtgtcaccgccaccatgatcatt

SEQ ID NO: 279417 - DNA, 25 bp, Homo sapien
tggagaccacgccaagggctggaca

SEQ ID NO: 279418 - DNA, 25 bp, Homo sapien
cttggcttcagtagctcacccagct

SEQ ID NO: 279419 - DNA, 25 bp, Homo sapien
tggcttcagtagctcacccagctta

SEQ ID NO: 279420 - DNA, 25 bp, Homo sapien
gcttcagtagctcacccagcttaca

SEQ ID NO: 279421 - DNA, 25 bp, Homo sapien
ttcagtagctcacccagcttacagg

SEQ ID NO: 279422 - DNA, 25 bp, Homo sapien
gggtttgaagcagcctggctttctc

SEQ ID NO: 279423 - DNA, 25 bp, Homo sapien
tcccacaaggcgtggcttccagact

SEQ ID NO: 279424 - DNA, 25 bp, Homo sapien
tagatgccagtgtgacctcccacaa

SEQ ID NO: 279425 - DNA, 25 bp, Homo sapien
caatgcaggcgaaggcctagatgcc

SEQ ID NO: 279426 - DNA, 25 bp, Homo sapien
ttttccatgttctaaaagtgctcct

SEQ ID NO: 279427 - DNA, 25 bp, Homo sapien
cagggctggtggttgctttgggtct

SEQ ID NO: 279428 - DNA, 25 bp, Homo sapien
tccatgttctaaaagtgctcctctc

SEQ ID NO: 279429 - DNA, 25 bp, Homo sapien
ctttgggtctacagctacgtcttac

SEQ ID NO: 279430 - DNA, 25 bp, Homo sapien
ggtggcgaggacagaacaggagcct

SEQ ID NO: 279431 - DNA, 25 bp, Homo sapien
cgtgggtggcgaggacagaacagga

SEQ ID NO: 279432 - DNA, 25 bp, Homo sapien
gggtggcgaggacagaacaggagcc

SEQ ID NO: 279433 - DNA, 25 bp, Homo sapien
tgggtggcgaggacagaacaggagc

SEQ ID NO: 279434 - DNA, 25 bp, Homo sapien
cctggacaatccgtgtcctggcagc

SEQ ID NO: 279435 - DNA, 25 bp, Homo sapien
ttggcacggtgtttggccccacgct

SEQ ID NO: 279436 - DNA, 25 bp, Homo sapien
tccggccctccgagaaggagagcaa

SEQ ID NO: 279437 - DNA, 25 bp, Homo sapien
ctgcacaaccttggcacggtgtttg

SEQ ID NO: 279438 - DNA, 25 bp, Homo sapien
cacaaccttggcacggtgtttggcc

SEQ ID NO: 279439 - DNA, 25 bp, Homo sapien
ctggtggtggcgttgaaacagcacc

SEQ ID NO: 279440 - DNA, 25 bp, Homo sapien
gggaccaaaactgagcctatcctgg

SEQ ID NO: 279441 - DNA, 25 bp, Homo sapien
gaccaaaactgagcctatcctggaa

SEQ ID NO: 279442 - DNA, 25 bp, Homo sapien
agcaggggaccaaaactgagcctat

SEQ ID NO: 279443 - DNA, 25 bp, Homo sapien
caaaactgagcctatcctggaaggc

SEQ ID NO: 279444 - DNA, 25 bp, Homo sapien
tattatttatggcatccagatttgc

SEQ ID NO: 279445 - DNA, 25 bp, Homo sapien
cataagatggactgggtcaatggcc

SEQ ID NO: 279446 - DNA, 25 bp, Homo sapien
cagtttcctaaagagccaaatcaca

SEQ ID NO: 279447 - DNA, 25 bp, Homo sapien
ggtcaatggccatgccctttataaa

SEQ ID NO: 279448 - DNA, 25 bp, Homo sapien
gttatccagatatagggccctcttt

SEQ ID NO: 279449 - DNA, 25 bp, Homo sapien
tttcaaaataccaatggccaggcca

SEQ ID NO: 279450 - DNA, 25 bp, Homo sapien
ggccaggccactagccagtcaatca

SEQ ID NO: 279451 - DNA, 25 bp, Homo sapien
aattttggtagatatcttgctaggg

SEQ ID NO: 279452 - DNA, 25 bp, Homo sapien
tttagcaaagatagggtttcactat

SEQ ID NO: 279453 - DNA, 25 bp, Homo sapien
cccgaccttgtgatctgcttgcctt

SEQ ID NO: 279454 - DNA, 25 bp, Homo sapien
aagatagggtttcactatgtcagcc

SEQ ID NO: 279455 - DNA, 25 bp, Homo sapien
ccgaccttgtgatctgcttgccttg

SEQ ID NO: 279456 - DNA, 25 bp, Homo sapien
gaagggatttcacaaaagcatggac

SEQ ID NO: 279457 - DNA, 25 bp, Homo sapien
ttagaagaaagtcacaggtcccatt

SEQ ID NO: 279458 - DNA, 25 bp, Homo sapien
tacgacgcagtcctaaataatgtgg

SEQ ID NO: 279459 - DNA, 25 bp, Homo sapien
catgtgggcttcctcaacttagcag

SEQ ID NO: 279460 - DNA, 25 bp, Homo sapien
gacagcgtgtcaatctctgaaggtt

SEQ ID NO: 279461 - DNA, 25 bp, Homo sapien
gaaaatgacagcgtgtcaatctctg

SEQ ID NO: 279462 - DNA, 25 bp, Homo sapien
cgtagatccaggaacggaaatggaa

SEQ ID NO: 279463 - DNA, 25 bp, Homo sapien
aaatctcttagaagactccgtagat

SEQ ID NO: 279464 - DNA, 25 bp, Homo sapien
tttgggctggagagcaaccactgga

SEQ ID NO: 279465 - DNA, 25 bp, Homo sapien
caaccactggaggagcattcatgag

SEQ ID NO: 279466 - DNA, 25 bp, Homo sapien
ccatttgggctggagagcaaccact

SEQ ID NO: 279467 - DNA, 25 bp, Homo sapien
gcaaccactggaggagcattcatga

SEQ ID NO: 279468 - DNA, 25 bp, Homo sapien
tctgaatctagcaccaatgggccaa

SEQ ID NO: 279469 - DNA, 25 bp, Homo sapien
aggcagccaacgcaggcagctcctt

SEQ ID NO: 279470 - DNA, 25 bp, Homo sapien
agccaacgcaggcagctccttgtgc

SEQ ID NO: 279471 - DNA, 25 bp, Homo sapien
gtcaaagtcagcaacaagaccacag

SEQ ID NO: 279472 - DNA, 25 bp, Homo sapien
tggcctcctcaatgtcccggtccac

SEQ ID NO: 279473 - DNA, 25 bp, Homo sapien
aatgtcccggtccacggaatcgtca

SEQ ID NO: 279474 - DNA, 25 bp, Homo sapien
tcctcaatgtcccggtccacggaat

SEQ ID NO: 279475 - DNA, 25 bp, Homo sapien
tggatggcctcctcaatgtcccggt

SEQ ID NO: 279476 - DNA, 25 bp, Homo sapien
tgtgagccagttcccgcttacatct

SEQ ID NO: 279477 - DNA, 25 bp, Homo sapien
tgctctgctcatgctgactggggag

SEQ ID NO: 279478 - DNA, 25 bp, Homo sapien
ctgctctgctcatgctgactgggga

SEQ ID NO: 279479 - DNA, 25 bp, Homo sapien
tgacttcgccgaattttcatgtgtg

SEQ ID NO: 279480 - DNA, 25 bp, Homo sapien
tgtacggcgctcgtgactcgctttc

SEQ ID NO: 279481 - DNA, 25 bp, Homo sapien
tggtcgtggtcgtgaccttggacct

SEQ ID NO: 279482 - DNA, 25 bp, Homo sapien
gtgggatttcgagagtgacttcgcc

SEQ ID NO: 279483 - DNA, 25 bp, Homo sapien
gtctgcctggcaagaggaccattcc

SEQ ID NO: 279484 - DNA, 25 bp, Homo sapien
tctgcctggcaagaggaccattcca

SEQ ID NO: 279485 - DNA, 25 bp, Homo sapien
ggaatggtcagcgtccagatcccct

SEQ ID NO: 279486 - DNA, 25 bp, Homo sapien
tggtcagcgtccagatcccctggac

SEQ ID NO: 279487 - DNA, 25 bp, Homo sapien
aacgtccagatttcctgctcaatgc

SEQ ID NO: 279488 - DNA, 25 bp, Homo sapien
tgagggccaaaaacgtccagatttc

SEQ ID NO: 279489 - DNA, 25 bp, Homo sapien
caaaaacgtccagatttcctgctca

SEQ ID NO: 279490 - DNA, 25 bp, Homo sapien
cttgagggccaaaaacgtccagatt

SEQ ID NO: 279491 - DNA, 25 bp, Homo sapien
cttcttcttgtctaggtgccttgcc

SEQ ID NO: 279492 - DNA, 25 bp, Homo sapien
tcttcttgtctaggtgccttgcctc

SEQ ID NO: 279493 - DNA, 25 bp, Homo sapien
ttcttcttgtctaggtgccttgcct

SEQ ID NO: 279494 - DNA, 25 bp, Homo sapien
ccggggcttcgtcctctcggccctg

SEQ ID NO: 279495 - DNA, 25 bp, Homo sapien
gggcttcgtcctctcggccctgctg

SEQ ID NO: 279496 - DNA, 25 bp, Homo sapien
ctggagccctcgcagctgtctctct

SEQ ID NO: 279497 - DNA, 25 bp, Homo sapien
caggaaggccggggcttcgtcctct

SEQ ID NO: 279498 - DNA, 25 bp, Homo sapien
tctccagttcgatgctatcgtcgct

SEQ ID NO: 279499 - DNA, 25 bp, Homo sapien
ccagttcgatgctatcgtcgctgtc

SEQ ID NO: 279500 - DNA, 25 bp, Homo sapien
cctaatctccagttcgatgctatcg

SEQ ID NO: 279501 - DNA, 25 bp, Homo sapien
cttcctaatctccagttcgatgcta

SEQ ID NO: 279502 - DNA, 25 bp, Homo sapien
cctgcaaggtacctctggcctggct

SEQ ID NO: 279503 - DNA, 25 bp, Homo sapien
tcctgcaaggtacctctggcctggc

SEQ ID NO: 279504 - DNA, 25 bp, Homo sapien
caaagtcactccagggcggggcgcg

SEQ ID NO: 279505 - DNA, 25 bp, Homo sapien
ggggcgcggttggcctgggctccag

SEQ ID NO: 279506 - DNA, 25 bp, Homo sapien
tccacgtgaaaggtccccctggctc

SEQ ID NO: 279507 - DNA, 25 bp, Homo sapien
gggctgaagaggccggtctccctgc

SEQ ID NO: 279508 - DNA, 25 bp, Homo sapien
ggctgaagaggccggtctccctgcc

SEQ ID NO: 279509 - DNA, 25 bp, Homo sapien
ctgcttggccggtgaccgcagtcct

SEQ ID NO: 279510 - DNA, 25 bp, Homo sapien
cttggccggtgaccgcagtccttct

SEQ ID NO: 279511 - DNA, 25 bp, Homo sapien
ggtgaccgcagtccttcttcgccag

SEQ ID NO: 279512 - DNA, 25 bp, Homo sapien
ttcctgcttggccggtgaccgcagt

SEQ ID NO: 279513 - DNA, 25 bp, Homo sapien
atcctttcctccgagccagagctct

SEQ ID NO: 279514 - DNA, 25 bp, Homo sapien
tcctttcctccgagccagagctctt

SEQ ID NO: 279515 - DNA, 25 bp, Homo sapien
gggtcctgggagtcgtagcaccagg

SEQ ID NO: 279516 - DNA, 25 bp, Homo sapien
gtcctgggagtcgtagcaccaggca

SEQ ID NO: 279517 - DNA, 25 bp, Homo sapien
cacacttggggtcctgggagtcgta

SEQ ID NO: 279518 - DNA, 25 bp, Homo sapien
ttggggtcctgggagtcgtagcacc

SEQ ID NO: 279519 - DNA, 25 bp, Homo sapien
gtgggggtggggtcagggaggcagc

SEQ ID NO: 279520 - DNA, 25 bp, Homo sapien
tcatagcctcggaagatgaagggcc

SEQ ID NO: 279521 - DNA, 25 bp, Homo sapien
gaggtgctgagtcatagcctcggaa

SEQ ID NO: 279522 - DNA, 25 bp, Homo sapien
agagttccgccggaccctgtgaaag

SEQ ID NO: 279523 - DNA, 25 bp, Homo sapien
agatgaagggccctagggtagagtt

SEQ ID NO: 279524 - DNA, 25 bp, Homo sapien
ctctgagcccagctgtgtgtggtca

SEQ ID NO: 279525 - DNA, 25 bp, Homo sapien
cctcctggggtggggctctgagccc

SEQ ID NO: 279526 - DNA, 25 bp, Homo sapien
ccagcatggcatggaagaaggcaga

SEQ ID NO: 279527 - DNA, 25 bp, Homo sapien
cagagggcagccctcctggggtggg

SEQ ID NO: 279528 - DNA, 25 bp, Homo sapien
cagatgtgggagatacccagctgcc

SEQ ID NO: 279529 - DNA, 25 bp, Homo sapien
gatgtgggagatacccagctgcccc

SEQ ID NO: 279530 - DNA, 25 bp, Homo sapien
acagatgtgggagatacccagctgc

SEQ ID NO: 279531 - DNA, 25 bp, Homo sapien
agatgtgggagatacccagctgccc

SEQ ID NO: 279532 - DNA, 25 bp, Homo sapien
ttgtgttactgtggaccacatgcat

SEQ ID NO: 279533 - DNA, 25 bp, Homo sapien
cctccatgctctggtactttgtgtt

SEQ ID NO: 279534 - DNA, 25 bp, Homo sapien
cgtggcgtggtgcctcctccatgct

SEQ ID NO: 279535 - DNA, 25 bp, Homo sapien
tggtactttgtgttactgtggacca

SEQ ID NO: 279536 - DNA, 25 bp, Homo sapien
cagaagttggtgttgctacagtcct

SEQ ID NO: 279537 - DNA, 25 bp, Homo sapien
aagttggtgttgctacagtcctgct

SEQ ID NO: 279538 - DNA, 25 bp, Homo sapien
ctcaagcccgacactatggcgcaga

SEQ ID NO: 279539 - DNA, 25 bp, Homo sapien
gacactatggcgcagaagttggtgt

SEQ ID NO: 279540 - DNA, 25 bp, Homo sapien
gggtcctcgaagacggtccagagca

SEQ ID NO: 279541 - DNA, 25 bp, Homo sapien
acccagcgaagcgacagtagctcga

SEQ ID NO: 279542 - DNA, 25 bp, Homo sapien
gagcaccgtgggctcgcagtcaggc

SEQ ID NO: 279543 - DNA, 25 bp, Homo sapien
agtagctcgaggtgttgggccgcat

SEQ ID NO: 279544 - DNA, 25 bp, Homo sapien
tacccgtgagcggtatggggtgaaa

SEQ ID NO: 279545 - DNA, 25 bp, Homo sapien
ccgtgagcggtatggggtgaaagtg

SEQ ID NO: 279546 - DNA, 25 bp, Homo sapien
gcggaagttacccgtgagcggtatg

SEQ ID NO: 279547 - DNA, 25 bp, Homo sapien
cggaagttacccgtgagcggtatgg

SEQ ID NO: 279548 - DNA, 25 bp, Homo sapien
tggacacaactttgctttggacagt

SEQ ID NO: 279549 - DNA, 25 bp, Homo sapien
cctttacttagccagaccacaggca

SEQ ID NO: 279550 - DNA, 25 bp, Homo sapien
cagcagaactcccagggaggcactg

SEQ ID NO: 279551 - DNA, 25 bp, Homo sapien
atcacctggacacagagcctcacct

SEQ ID NO: 279552 - DNA, 25 bp, Homo sapien
tggctactctggtacccccaggacg

SEQ ID NO: 279553 - DNA, 25 bp, Homo sapien
ggtgccgccagttagggctccggta

SEQ ID NO: 279554 - DNA, 25 bp, Homo sapien
aagtgagcagatcggtccccctcgt

SEQ ID NO: 279555 - DNA, 25 bp, Homo sapien
cctaggcgaggtgcggaaggcgtcg

SEQ ID NO: 279556 - DNA, 25 bp, Homo sapien
acggcccagcagaatgcggagcgca

SEQ ID NO: 279557 - DNA, 25 bp, Homo sapien
ctgctgcggacgctcggcaccgtga

SEQ ID NO: 279558 - DNA, 25 bp, Homo sapien
accgtgagcgccctggtcgccgcct

SEQ ID NO: 279559 - DNA, 25 bp, Homo sapien
aggcccgcagacgacgccccggacg

SEQ ID NO: 279560 - DNA, 25 bp, Homo sapien
ctgcgcgcggagcttcgagcggagc

SEQ ID NO: 279561 - DNA, 25 bp, Homo sapien
gcgcgcggagcttcgagcggagctg

SEQ ID NO: 279562 - DNA, 25 bp, Homo sapien
gcgcggagcttcgagcggagctgga

SEQ ID NO: 279563 - DNA, 25 bp, Homo sapien
tgcgcgcggagcttcgagcggagct

SEQ ID NO: 279564 - DNA, 25 bp, Homo sapien
agctccgggccgaagcggcttcgcg

SEQ ID NO: 279565 - DNA, 25 bp, Homo sapien
ttcgcggtccgaggtgccgcggctg

SEQ ID NO: 279566 - DNA, 25 bp, Homo sapien
gggccgcaatccaatgggccgggcc

SEQ ID NO: 279567 - DNA, 25 bp, Homo sapien
agagccagcgaggtgctgcggcgcg

SEQ ID NO: 279568 - DNA, 25 bp, Homo sapien
atgcttagtgccacactcggcccag

SEQ ID NO: 279569 - DNA, 25 bp, Homo sapien
ttcatccactcactccatggcaaga

SEQ ID NO: 279570 - DNA, 25 bp, Homo sapien
tccccagcctcctactgtaaaatgg

SEQ ID NO: 279571 - DNA, 25 bp, Homo sapien
catggcaagacagccactgacagct

SEQ ID NO: 279572 - DNA, 25 bp, Homo sapien
tgagaaggagtagggtgcagtagtg

SEQ ID NO: 279573 - DNA, 25 bp, Homo sapien
agcactgcttatgcagaggcactgg

SEQ ID NO: 279574 - DNA, 25 bp, Homo sapien
tgagggctccacagagggtggaagg

SEQ ID NO: 279575 - DNA, 25 bp, Homo sapien
gcactgcttatgcagaggcactggg

SEQ ID NO: 279576 - DNA, 25 bp, Homo sapien
ctttgggaccctctgccataagtac

SEQ ID NO: 279577 - DNA, 25 bp, Homo sapien
actttgggaccctctgccataagta

SEQ ID NO: 279578 - DNA, 25 bp, Homo sapien
tttgggaccctctgccataagtacc

SEQ ID NO: 279579 - DNA, 25 bp, Homo sapien
ctgagtagggcaatatctccaggca

SEQ ID NO: 279580 - DNA, 25 bp, Homo sapien
agggcgccacagcgcatggagcagc

SEQ ID NO: 279581 - DNA, 25 bp, Homo sapien
gggcgccacagcgcatggagcagct

SEQ ID NO: 279582 - DNA, 25 bp, Homo sapien
gggctggacatcttgaagtgccgca

SEQ ID NO: 279583 - DNA, 25 bp, Homo sapien
ctgtggggctggacatcttgaagtg

SEQ ID NO: 279584 - DNA, 25 bp, Homo sapien
ggctggacatcttgaagtgccgcac

SEQ ID NO: 279585 - DNA, 25 bp, Homo sapien
tggcgtctgtggggctggacatctt

SEQ ID NO: 279586 - DNA, 25 bp, Homo sapien
caggctgagcatctcgacagtctgg

SEQ ID NO: 279587 - DNA, 25 bp, Homo sapien
gctgagcatctcgacagtctgggcc

SEQ ID NO: 279588 - DNA, 25 bp, Homo sapien
ggctgagcatctcgacagtctgggc

SEQ ID NO: 279589 - DNA, 25 bp, Homo sapien
tgagcatctcgacagtctgggcccc

SEQ ID NO: 279590 - DNA, 25 bp, Homo sapien
ggcgacacgaagtgcacttgcccgg

SEQ ID NO: 279591 - DNA, 25 bp, Homo sapien
agtggccatcgtccagtgagatggt

SEQ ID NO: 279592 - DNA, 25 bp, Homo sapien
tggccatcgtccagtgagatggtga

SEQ ID NO: 279593 - DNA, 25 bp, Homo sapien
agcaggggcgacacgaagtgcactt

SEQ ID NO: 279594 - DNA, 25 bp, Homo sapien
tgccaatgcatctcgttcatcaact

SEQ ID NO: 279595 - DNA, 25 bp, Homo sapien
gcatctcgttcatcaactcactctt

SEQ ID NO: 279596 - DNA, 25 bp, Homo sapien
agtattgccaatgcatctcgttcat

SEQ ID NO: 279597 - DNA, 25 bp, Homo sapien
caatgcatctcgttcatcaactcac

SEQ ID NO: 279598 - DNA, 25 bp, Homo sapien
gtctgtgtgggcagcgcctcaacgt

SEQ ID NO: 279599 - DNA, 25 bp, Homo sapien
tcctcatagccccacagcttgatgg

SEQ ID NO: 279600 - DNA, 25 bp, Homo sapien
tctgtgtgggcagcgcctcaacgtg

SEQ ID NO: 279601 - DNA, 25 bp, Homo sapien
ccacagcttgatggtgtctgtgtgg

SEQ ID NO: 279602 - DNA, 25 bp, Homo sapien
actttgcagtccactcctgtgagta

SEQ ID NO: 279603 - DNA, 25 bp, Homo sapien
catctctggtagctgggaggagcag

SEQ ID NO: 279604 - DNA, 25 bp, Homo sapien
gaccactttgcagtccactcctgtg

SEQ ID NO: 279605 - DNA, 25 bp, Homo sapien
tttgcagtccactcctgtgagtagg

SEQ ID NO: 279606 - DNA, 25 bp, Homo sapien
tgccttctccaggttcaactttctc

SEQ ID NO: 279607 - DNA, 25 bp, Homo sapien
ctgctgccttctccaggttcaactt

SEQ ID NO: 279608 - DNA, 25 bp, Homo sapien
gccttctccaggttcaactttctca

SEQ ID NO: 279609 - DNA, 25 bp, Homo sapien
gctgccttctccaggttcaactttc

SEQ ID NO: 279610 - DNA, 25 bp, Homo sapien
cggtgatcccgacaaagccgggtgc

SEQ ID NO: 279611 - DNA, 25 bp, Homo sapien
aagtgcgccaggatgtacttgagga

SEQ ID NO: 279612 - DNA, 25 bp, Homo sapien
caggctgtctagagatccgagttgg

SEQ ID NO: 279613 - DNA, 25 bp, Homo sapien
tgcgctgtgcctcccacttggagcg

SEQ ID NO: 279614 - DNA, 25 bp, Homo sapien
tggcgtgcgtggagagcaggccgtc

SEQ ID NO: 279615 - DNA, 25 bp, Homo sapien
agctggagcacgcagaggacaccag

SEQ ID NO: 279616 - DNA, 25 bp, Homo sapien
caggtgcgaagcaatcaagggagct

SEQ ID NO: 279617 - DNA, 25 bp, Homo sapien
tgctgtcaagcgagcgggaacacgc

SEQ ID NO: 279618 - DNA, 25 bp, Homo sapien
gctttatcagctcgtggtggcccag

SEQ ID NO: 279619 - DNA, 25 bp, Homo sapien
tgcagcagctgttcggcgatcaagc

SEQ ID NO: 279620 - DNA, 25 bp, Homo sapien
tctctgacgttgagccactgggtgc

SEQ ID NO: 279621 - DNA, 25 bp, Homo sapien
gccagccaggcgtttttgagcagcg

SEQ ID NO: 279622 - DNA, 25 bp, Homo sapien
tctgctacctttaacttgggactcc

SEQ ID NO: 279623 - DNA, 25 bp, Homo sapien
tgggactccggcatttgactggtct

SEQ ID NO: 279624 - DNA, 25 bp, Homo sapien
tcttcaggccgtgcgtggaacttgg

SEQ ID NO: 279625 - DNA, 25 bp, Homo sapien
tctctgttgggctgtgacactgcgt

SEQ ID NO: 279626 - DNA, 25 bp, Homo sapien
caccctcagggtgatcattgggccc

SEQ ID NO: 279627 - DNA, 25 bp, Homo sapien
catcgacccctcagaggaggagttt

SEQ ID NO: 279628 - DNA, 25 bp, Homo sapien
caggtcatccacctcactggctgtg

SEQ ID NO: 279629 - DNA, 25 bp, Homo sapien
gatatatatgtagtccccagctgtg

SEQ ID NO: 279630 - DNA, 25 bp, Homo sapien
cagataataagctgtcttcctccag

SEQ ID NO: 279631 - DNA, 25 bp, Homo sapien
gctggcaggcttccgtcttggtatc

SEQ ID NO: 279632 - DNA, 25 bp, Homo sapien
cagcctgggatgtagctgtccggaa

SEQ ID NO: 279633 - DNA, 25 bp, Homo sapien
tcttggtatccaggatctctgttgc

SEQ ID NO: 279634 - DNA, 25 bp, Homo sapien
ggatgggtcgccacaagtgtagcta

SEQ ID NO: 279635 - DNA, 25 bp, Homo sapien
ggagtctctggccatcggtgacaca

SEQ ID NO: 279636 - DNA, 25 bp, Homo sapien
tcagggcatgctctcggtcatcaag

SEQ ID NO: 279637 - DNA, 25 bp, Homo sapien
gacggtggaggacatagttccccaa

SEQ ID NO: 279638 - DNA, 25 bp, Homo sapien
actttggcggatggagctggacaca

SEQ ID NO: 279639 - DNA, 25 bp, Homo sapien
ccttctgagcccaggttggacactg

SEQ ID NO: 279640 - DNA, 25 bp, Homo sapien
tttgccgaagtaccctctcaagggc

SEQ ID NO: 279641 - DNA, 25 bp, Homo sapien
ggcccacactcggtgcgtagatgga

SEQ ID NO: 279642 - DNA, 25 bp, Homo sapien
ccaggatcatagtccagagctgcta

SEQ ID NO: 279643 - DNA, 25 bp, Homo sapien
cacttgcctgttgcactcgctgagg

SEQ ID NO: 279644 - DNA, 25 bp, Homo sapien
tgagcccctgaaagtcctcgaggtg

SEQ ID NO: 279645 - DNA, 25 bp, Homo sapien
tccttggtcatccatgggcccgtaa

SEQ ID NO: 279646 - DNA, 25 bp, Homo sapien
gactaccatcagtttaacacagtgg

SEQ ID NO: 279647 - DNA, 25 bp, Homo sapien
gagactttcgtacaaggcaatggac

SEQ ID NO: 279648 - DNA, 25 bp, Homo sapien
aaaaaggcgcttctccgtatacctg

SEQ ID NO: 279649 - DNA, 25 bp, Homo sapien
cagaggccactacctgggcaaggat

SEQ ID NO: 279650 - DNA, 25 bp, Homo sapien
ctcttccattgagcacacagcttct

SEQ ID NO: 279651 - DNA, 25 bp, Homo sapien
actgaagaccgatcgtcctctatcg

SEQ ID NO: 279652 - DNA, 25 bp, Homo sapien
tcttccattgagcacacagcttctg

SEQ ID NO: 279653 - DNA, 25 bp, Homo sapien
cttatactcttgactgaagaccgat

SEQ ID NO: 279654 - DNA, 25 bp, Homo sapien
ggccctaccagcggcccttgtcctc

SEQ ID NO: 279655 - DNA, 25 bp, Homo sapien
gccctaccagcggcccttgtcctca

SEQ ID NO: 279656 - DNA, 25 bp, Homo sapien
ggctcggctccccgcctagcgcgcc

SEQ ID NO: 279657 - DNA, 25 bp, Homo sapien
agctcacacagtacccgtgggtccg

SEQ ID NO: 279658 - DNA, 25 bp, Homo sapien
gggtctcccaagcgggcttcacagc

SEQ ID NO: 279659 - DNA, 25 bp, Homo sapien
cttcacagctcacacagtacccgtg

SEQ ID NO: 279660 - DNA, 25 bp, Homo sapien
tggggtctcccaagcgggcttcaca

SEQ ID NO: 279661 - DNA, 25 bp, Homo sapien
aaagttgctatgtaggccaggtacg

SEQ ID NO: 279662 - DNA, 25 bp, Homo sapien
aacaaagttgctatgtaggctgggc

SEQ ID NO: 279663 - DNA, 25 bp, Homo sapien
cagtctcgctaacgtggtgaaatcc

SEQ ID NO: 279664 - DNA, 25 bp, Homo sapien
gcaagactccgcttcaaggaaaaac

SEQ ID NO: 279665 - DNA, 25 bp, Homo sapien
gctttggagggctcagttcccacaa

SEQ ID NO: 279666 - DNA, 25 bp, Homo sapien
caccctgtcctaatcatacaaagca

SEQ ID NO: 279667 - DNA, 25 bp, Homo sapien
cacacttgggcagctatgacaacaa

SEQ ID NO: 279668 - DNA, 25 bp, Homo sapien
taaagctgaggtgcactcacagagc

SEQ ID NO: 279669 - DNA, 25 bp, Homo sapien
tgtcacgcttagtgggacacccacg

SEQ ID NO: 279670 - DNA, 25 bp, Homo sapien
cacggcaagcgaggttcaaacagga

SEQ ID NO: 279671 - DNA, 25 bp, Homo sapien
ggaaaccgacaaaagccagcgaatg

SEQ ID NO: 279672 - DNA, 25 bp, Homo sapien
caatctatggtcctgtgcctgaaaa

SEQ ID NO: 279673 - DNA, 25 bp, Homo sapien
gtaaacgctcaagggatgggcatca

SEQ ID NO: 279674 - DNA, 25 bp, Homo sapien
caaggctgagcgtgttaccacaggt

SEQ ID NO: 279675 - DNA, 25 bp, Homo sapien
cacaggctggtgaatacaaacggta

SEQ ID NO: 279676 - DNA, 25 bp, Homo sapien
aaacggtagacctagaatgtgccac

SEQ ID NO: 279677 - DNA, 25 bp, Homo sapien
gagcctgtgcgttctgtccatgtga

SEQ ID NO: 279678 - DNA, 25 bp, Homo sapien
catgtgatcaggtgggctcctctca

SEQ ID NO: 279679 - DNA, 25 bp, Homo sapien
gaagctcagcacgataccctggaaa

SEQ ID NO: 279680 - DNA, 25 bp, Homo sapien
tgttgtatgcccgaccatgtgctat

SEQ ID NO: 279681 - DNA, 25 bp, Homo sapien
tgcaaactctgcctcccaggttcat

SEQ ID NO: 279682 - DNA, 25 bp, Homo sapien
gagtgccatggcgatctgggctcac

SEQ ID NO: 279683 - DNA, 25 bp, Homo sapien
ggagtgccatggcgatctgggctca

SEQ ID NO: 279684 - DNA, 25 bp, Homo sapien
tatctcccaagttaggatccctcag

SEQ ID NO: 279685 - DNA, 25 bp, Homo sapien
gctctctctgcggaatcctgaaggt

SEQ ID NO: 279686 - DNA, 25 bp, Homo sapien
ccctgtaggtggactggccccagct

SEQ ID NO: 279687 - DNA, 25 bp, Homo sapien
gcagacacacggccctgtttacgga

SEQ ID NO: 279688 - DNA, 25 bp, Homo sapien
gctggtggcagacacacaattcttg

SEQ ID NO: 279689 - DNA, 25 bp, Homo sapien
gcgctggtggcagacacacaattct

SEQ ID NO: 279690 - DNA, 25 bp, Homo sapien
ctggtggcagacacacaattcttgg

SEQ ID NO: 279691 - DNA, 25 bp, Homo sapien
cgctggtggcagacacacaattctt

SEQ ID NO: 279692 - DNA, 25 bp, Homo sapien
ctcctgagcgcgtggccttcctggg

SEQ ID NO: 279693 - DNA, 25 bp, Homo sapien
agccagcggcggggggggctcctga

SEQ ID NO: 279694 - DNA, 25 bp, Homo sapien
ccttcctgggggtgcatcaatgcct

SEQ ID NO: 279695 - DNA, 25 bp, Homo sapien
gggctcctgagcgcgtggccttcct

SEQ ID NO: 279696 - DNA, 25 bp, Homo sapien
cggagtgccaagggcccagacacca

SEQ ID NO: 279697 - DNA, 25 bp, Homo sapien
ggagtgccaagggcccagacaccat

SEQ ID NO: 279698 - DNA, 25 bp, Homo sapien
gtccccgcgccctgcccacgcgcac

SEQ ID NO: 279699 - DNA, 25 bp, Homo sapien
ccccgcgccctgcccacgcgcacca

SEQ ID NO: 279700 - DNA, 25 bp, Homo sapien
tccccgcgccctgcccacgcgcacc

SEQ ID NO: 279701 - DNA, 25 bp, Homo sapien
cccgcgccctgcccacgcgcaccac

SEQ ID NO: 279702 - DNA, 25 bp, Homo sapien
ggaccagggacttgaaatagatgct

SEQ ID NO: 279703 - DNA, 25 bp, Homo sapien
gagcccctgataccgagcttggatg

SEQ ID NO: 279704 - DNA, 25 bp, Homo sapien
caagaaagagttcatcgtctgagcc

SEQ ID NO: 279705 - DNA, 25 bp, Homo sapien
cagcttgcctgtgtagatgaagtcc

SEQ ID NO: 279706 - DNA, 25 bp, Homo sapien
ggcaagggtgggcttttcttggaca

SEQ ID NO: 279707 - DNA, 25 bp, Homo sapien
agctgggcagacagcccggcccaga

SEQ ID NO: 279708 - DNA, 25 bp, Homo sapien
ttggacaggtccaagcccagctcct

SEQ ID NO: 279709 - DNA, 25 bp, Homo sapien
cgctgctcccgttggtgctgctgct

SEQ ID NO: 279710 - DNA, 25 bp, Homo sapien
ccttggcgcagggaatgcacacata

SEQ ID NO: 279711 - DNA, 25 bp, Homo sapien
ccttcttccgagtggagtgccggag

SEQ ID NO: 279712 - DNA, 25 bp, Homo sapien
tcgcagaccgaacacttgaagggcc

SEQ ID NO: 279713 - DNA, 25 bp, Homo sapien
tcctgccggtacatgtagtgggcgc

SEQ ID NO: 279714 - DNA, 25 bp, Homo sapien
ggaaagcgaaacatctgcccatgca

SEQ ID NO: 279715 - DNA, 25 bp, Homo sapien
ggctctgcttggtacggactgtcca

SEQ ID NO: 279716 - DNA, 25 bp, Homo sapien
ggtcagaagtctccaccttgttcag

SEQ ID NO: 279717 - DNA, 25 bp, Homo sapien
ggactgtccattaaagctctgggtg

SEQ ID NO: 279718 - DNA, 25 bp, Homo sapien
tgatgaacggtaaacacacagggct

SEQ ID NO: 279719 - DNA, 25 bp, Homo sapien
gcgtgaacatttcccgtgcggtaca

SEQ ID NO: 279720 - DNA, 25 bp, Homo sapien
agatgacaataaaggctgccagccc

SEQ ID NO: 279721 - DNA, 25 bp, Homo sapien
gagggtccggatcgttcatttcaca

SEQ ID NO: 279722 - DNA, 25 bp, Homo sapien
ttatcgctgtacatttaagactgca

SEQ ID NO: 279723 - DNA, 25 bp, Homo sapien
gggacatgaactcaatgtgacaagt

SEQ ID NO: 279724 - DNA, 25 bp, Homo sapien
tggccagtacaggagtgcgatcccg

SEQ ID NO: 279725 - DNA, 25 bp, Homo sapien
tatttgcgagaaatgagccagtgcc

SEQ ID NO: 279726 - DNA, 25 bp, Homo sapien
cgcctagcgggctggatcacaatgg

SEQ ID NO: 279727 - DNA, 25 bp, Homo sapien
ctgcggctggcaggcgtcacaatgg

SEQ ID NO: 279728 - DNA, 25 bp, Homo sapien
aggcgtcacaatgggcggcagggag

SEQ ID NO: 279729 - DNA, 25 bp, Homo sapien
ctgtggagaccgagcctaaatgccg

SEQ ID NO: 279730 - DNA, 25 bp, Homo sapien
gaccatctcggttatccttctgcaa

SEQ ID NO: 279731 - DNA, 25 bp, Homo sapien
gcttccgctggcgaccatctcggtt

SEQ ID NO: 279732 - DNA, 25 bp, Homo sapien
gagcccgcgcatcagcttctctagc

SEQ ID NO: 279733 - DNA, 25 bp, Homo sapien
agcagcagctcctgcgtcgcggcca

SEQ ID NO: 279734 - DNA, 25 bp, Homo sapien
gcctggtactctgcgaagcacctcg

SEQ ID NO: 279735 - DNA, 25 bp, Homo sapien
atcacccgttcccaagggcctagag

SEQ ID NO: 279736 - DNA, 25 bp, Homo sapien
tggtactctgcgaagcacctcgcgg

SEQ ID NO: 279737 - DNA, 25 bp, Homo sapien
ggtccgctgggtggatcacccgttc

SEQ ID NO: 279738 - DNA, 25 bp, Homo sapien
ctcctccagtcttctgcgcacccgc

SEQ ID NO: 279739 - DNA, 25 bp, Homo sapien
tcctccagtcttctgcgcacccgct

SEQ ID NO: 279740 - DNA, 25 bp, Homo sapien
ggtcctggggcggtgccgacctctc

SEQ ID NO: 279741 - DNA, 25 bp, Homo sapien
caccctgggtccagccccattccag

SEQ ID NO: 279742 - DNA, 25 bp, Homo sapien
tctccgccggtcctacctcacccca

SEQ ID NO: 279743 - DNA, 25 bp, Homo sapien
ccaccctgggtccagccccattcca

SEQ ID NO: 279744 - DNA, 25 bp, Homo sapien
ctcccactgctcctgcagctgcctg

SEQ ID NO: 279745 - DNA, 25 bp, Homo sapien
cctgcagctgcctgctgtgctgctc

SEQ ID NO: 279746 - DNA, 25 bp, Homo sapien
ctgactcgacagctcctcccactgc

SEQ ID NO: 279747 - DNA, 25 bp, Homo sapien
tgctcctgcagctgcctgctgtgct

SEQ ID NO: 279748 - DNA, 25 bp, Homo sapien
caggacttccgagaggaaccaagag

SEQ ID NO: 279749 - DNA, 25 bp, Homo sapien
gcaggacttccgagaggaaccaaga

SEQ ID NO: 279750 - DNA, 25 bp, Homo sapien
ggacttccgagaggaaccaagagac

SEQ ID NO: 279751 - DNA, 25 bp, Homo sapien
aggacttccgagaggaaccaagaga

SEQ ID NO: 279752 - DNA, 25 bp, Homo sapien
tgcagttcccctccgtagtagaaga

SEQ ID NO: 279753 - DNA, 25 bp, Homo sapien
ctgcagttcccctccgtagtagaag

SEQ ID NO: 279754 - DNA, 25 bp, Homo sapien
aggtggtcacggcccagctcatgct

SEQ ID NO: 279755 - DNA, 25 bp, Homo sapien
gggaatgtcaggaggtccgcaggcc

SEQ ID NO: 279756 - DNA, 25 bp, Homo sapien
aggaggtccgcaggccggcaacccg

SEQ ID NO: 279757 - DNA, 25 bp, Homo sapien
atgtcaggaggtccgcaggccggca

SEQ ID NO: 279758 - DNA, 25 bp, Homo sapien
gaatgtcaggaggtccgcaggccgg

SEQ ID NO: 279759 - DNA, 25 bp, Homo sapien
tggtctccgccagctccagttcatt

SEQ ID NO: 279760 - DNA, 25 bp, Homo sapien
ttggtctccgccagctccagttcat

SEQ ID NO: 279761 - DNA, 25 bp, Homo sapien
gcagcttctcctcctgcaaggcgca

SEQ ID NO: 279762 - DNA, 25 bp, Homo sapien
cagcttctcctcctgcaaggcgcat

SEQ ID NO: 279763 - DNA, 25 bp, Homo sapien
ctgcagcttctcctcctgcaaggcg

SEQ ID NO: 279764 - DNA, 25 bp, Homo sapien
tgctgcagcttctcctcctgcaagg

SEQ ID NO: 279765 - DNA, 25 bp, Homo sapien
cggtctgctcctggaatatggccca

SEQ ID NO: 279766 - DNA, 25 bp, Homo sapien
tacggtctgctcctggaatatggcc

SEQ ID NO: 279767 - DNA, 25 bp, Homo sapien
gactacggtctgctcctggaatatg

SEQ ID NO: 279768 - DNA, 25 bp, Homo sapien
tgcaggactacggtctgctcctgga

SEQ ID NO: 279769 - DNA, 25 bp, Homo sapien
gcgggaggcaccttggcgtctgagt

SEQ ID NO: 279770 - DNA, 25 bp, Homo sapien
aggcgggaggcaccttggcgtctga

SEQ ID NO: 279771 - DNA, 25 bp, Homo sapien
gaggcgggaggcaccttggcgtctg

SEQ ID NO: 279772 - DNA, 25 bp, Homo sapien
ggcgggaggcaccttggcgtctgag

SEQ ID NO: 279773 - DNA, 25 bp, Homo sapien
gtgagagtgcggactgaggcctcgg

SEQ ID NO: 279774 - DNA, 25 bp, Homo sapien
cgtcctggcggtgggttgggagact

SEQ ID NO: 279775 - DNA, 25 bp, Homo sapien
ctggagcgggtgagagtgcggactg

SEQ ID NO: 279776 - DNA, 25 bp, Homo sapien
tcctggcggtgggttgggagactta

SEQ ID NO: 279777 - DNA, 25 bp, Homo sapien
tcccggccactctgccaggcgtcca

SEQ ID NO: 279778 - DNA, 25 bp, Homo sapien
cccggccactctgccaggcgtccag

SEQ ID NO: 279779 - DNA, 25 bp, Homo sapien
gcgcccgcaggcccaactcccttac

SEQ ID NO: 279780 - DNA, 25 bp, Homo sapien
gggacaggcatgcaggtgggagccc

SEQ ID NO: 279781 - DNA, 25 bp, Homo sapien
gggagcccatcccggccccacagtg

SEQ ID NO: 279782 - DNA, 25 bp, Homo sapien
aggcatgcaggtgggagcccatccc

SEQ ID NO: 279783 - DNA, 25 bp, Homo sapien
cggtgctgtactgcactccgcgaag

SEQ ID NO: 279784 - DNA, 25 bp, Homo sapien
tgctgtactgcactccgcgaagctg

SEQ ID NO: 279785 - DNA, 25 bp, Homo sapien
atctcctccatgagcgattcggtgc

SEQ ID NO: 279786 - DNA, 25 bp, Homo sapien
ccatgagcgattcggtgctgtactg

SEQ ID NO: 279787 - DNA, 25 bp, Homo sapien
cccgcccggacccgcgcaggcgctc

SEQ ID NO: 279788 - DNA, 25 bp, Homo sapien
ccgcccggacccgcgcaggcgctca

SEQ ID NO: 279789 - DNA, 25 bp, Homo sapien
cgcccggacccgcgcaggcgctcac

SEQ ID NO: 279790 - DNA, 25 bp, Homo sapien
gagggccgcatccagctacctccgc

SEQ ID NO: 279791 - DNA, 25 bp, Homo sapien
gggccgcatccagctacctccgcgc

SEQ ID NO: 279792 - DNA, 25 bp, Homo sapien
agggccgcatccagctacctccgcg

SEQ ID NO: 279793 - DNA, 25 bp, Homo sapien
ggccgcatccagctacctccgcgcc

SEQ ID NO: 279794 - DNA, 25 bp, Homo sapien
gagggccgccgaacagccgcgtctc

SEQ ID NO: 279795 - DNA, 25 bp, Homo sapien
gcgcgagggccgccgaacagccgcg

SEQ ID NO: 279796 - DNA, 25 bp, Homo sapien
gcgagggccgccgaacagccgcgtc

SEQ ID NO: 279797 - DNA, 25 bp, Homo sapien
ctgatggccagcgcgcgagggccgc

SEQ ID NO: 279798 - DNA, 25 bp, Homo sapien
ctgcagcgcgcccagcacgcaccgc

SEQ ID NO: 279799 - DNA, 25 bp, Homo sapien
tgaggctccagagccacgcggagac

SEQ ID NO: 279800 - DNA, 25 bp, Homo sapien
gggacagcgtgtagcgcaggcggcg

SEQ ID NO: 279801 - DNA, 25 bp, Homo sapien
gggtccaacagcaccgtccagagca

SEQ ID NO: 279802 - DNA, 25 bp, Homo sapien
gcgcagcgtcgtctccgaggtgagg

SEQ ID NO: 279803 - DNA, 25 bp, Homo sapien
accttggtctacactctcaggagag

SEQ ID NO: 279804 - DNA, 25 bp, Homo sapien
cacctggagccaggcgcggggcgct

SEQ ID NO: 279805 - DNA, 25 bp, Homo sapien
ttagaacacactctgttggcctggc

SEQ ID NO: 279806 - DNA, 25 bp, Homo sapien
ttgacggcgctaccaacaagaaagt

SEQ ID NO: 279807 - DNA, 25 bp, Homo sapien
ggacctgctgggtatttagaacaca

SEQ ID NO: 279808 - DNA, 25 bp, Homo sapien
tttcacaataagcaattgacggcgc

SEQ ID NO: 279809 - DNA, 25 bp, Homo sapien
caggcttagtaacgccgtggactgc

SEQ ID NO: 279810 - DNA, 25 bp, Homo sapien
tgaagctgccccacaatcatggagc

SEQ ID NO: 279811 - DNA, 25 bp, Homo sapien
tggactgcagcgacaatcagtggat

SEQ ID NO: 279812 - DNA, 25 bp, Homo sapien
gaatgacatcccctactgaggaggg

SEQ ID NO: 279813 - DNA, 25 bp, Homo sapien
tgtctggtatgtgggaatcttctgc

SEQ ID NO: 279814 - DNA, 25 bp, Homo sapien
tgtgcctttgccgaacacctccagg

SEQ ID NO: 279815 - DNA, 25 bp, Homo sapien
tgggaatcttctgccccacggcagc

SEQ ID NO: 279816 - DNA, 25 bp, Homo sapien
gcctttgccgaacacctccaggaga

SEQ ID NO: 279817 - DNA, 25 bp, Homo sapien
attctcatctgccagtgtctggact

SEQ ID NO: 279818 - DNA, 25 bp, Homo sapien
tctcatctgccagtgtctggactcc

SEQ ID NO: 279819 - DNA, 25 bp, Homo sapien
gagcacaggccatgtggttggtctg

SEQ ID NO: 279820 - DNA, 25 bp, Homo sapien
ctggcttggcttcttttcgtccatt

SEQ ID NO: 279821 - DNA, 25 bp, Homo sapien
tctcttgtgctgtcggagagctggc

SEQ ID NO: 279822 - DNA, 25 bp, Homo sapien
tctagtaggagttgccaagcacatc

SEQ ID NO: 279823 - DNA, 25 bp, Homo sapien
gggctgtcctccaaggatccaggat

SEQ ID NO: 279824 - DNA, 25 bp, Homo sapien
ggaagccacccctctgacatatgtg

SEQ ID NO: 279825 - DNA, 25 bp, Homo sapien
gcttcctagcatcttggccatgagg

SEQ ID NO: 279826 - DNA, 25 bp, Homo sapien
tccacaaggtcaggcgagataagcg

SEQ ID NO: 279827 - DNA, 25 bp, Homo sapien
tccatgccattaggccttggtccac

SEQ ID NO: 279828 - DNA, 25 bp, Homo sapien
tccctcatgactgtgaccagaggct

SEQ ID NO: 279829 - DNA, 25 bp, Homo sapien
gtgcggtggccacgtcatcattggc

SEQ ID NO: 279830 - DNA, 25 bp, Homo sapien
ggctgcagtctattcccagaacaca

SEQ ID NO: 279831 - DNA, 25 bp, Homo sapien
gctgcagtctattcccagaacacat

SEQ ID NO: 279832 - DNA, 25 bp, Homo sapien
ccagaactcagattgtgcggtggcc

SEQ ID NO: 279833 - DNA, 25 bp, Homo sapien
agacaagctggtggtttcctgctcc

SEQ ID NO: 279834 - DNA, 25 bp, Homo sapien
atcagtatagtacattacaatccag

SEQ ID NO: 279835 - DNA, 25 bp, Homo sapien
cagacaccccatcagtatagtacat

SEQ ID NO: 279836 - DNA, 25 bp, Homo sapien
ccaggaagtcaccaatttatgccaa

SEQ ID NO: 279837 - DNA, 25 bp, Homo sapien
gtcacagcgcccagcctacaaaaaa

SEQ ID NO: 279838 - DNA, 25 bp, Homo sapien
gagtcacagcgcccagcctacaaaa

SEQ ID NO: 279839 - DNA, 25 bp, Homo sapien
atgagtcacagcgcccagcctacaa

SEQ ID NO: 279840 - DNA, 25 bp, Homo sapien
gcatgagtcacagcgcccagcctac

SEQ ID NO: 279841 - DNA, 25 bp, Homo sapien
gcttaagtccaggaggcgaacgttg

SEQ ID NO: 279842 - DNA, 25 bp, Homo sapien
ttaagtccaggaggcgaacgttgca

SEQ ID NO: 279843 - DNA, 25 bp, Homo sapien
gggtgtcactatgtctcccaggcag

SEQ ID NO: 279844 - DNA, 25 bp, Homo sapien
cgaacgttgcagtatgccgagatca

SEQ ID NO: 279845 - DNA, 25 bp, Homo sapien
cagaatgcatcgcggccggccgggc

SEQ ID NO: 279846 - DNA, 25 bp, Homo sapien
cttccccagaatgcatcgcggccgg

SEQ ID NO: 279847 - DNA, 25 bp, Homo sapien
tccccagaatgcatcgcggccggcc

SEQ ID NO: 279848 - DNA, 25 bp, Homo sapien
cccagaatgcatcgcggccggccgg

SEQ ID NO: 279849 - DNA, 25 bp, Homo sapien
ttcatcagcctcctgctggccgcca

SEQ ID NO: 279850 - DNA, 25 bp, Homo sapien
tcatcagcctcctgctggccgccat

SEQ ID NO: 279851 - DNA, 25 bp, Homo sapien
cttcatcagcctcctgctggccgcc

SEQ ID NO: 279852 - DNA, 25 bp, Homo sapien
aaggcgacagtttgctaggacccag

SEQ ID NO: 279853 - DNA, 25 bp, Homo sapien
aaccgggctctcacattaacgacgc

SEQ ID NO: 279854 - DNA, 25 bp, Homo sapien
aaactgacctaactttggccgcctg

SEQ ID NO: 279855 - DNA, 25 bp, Homo sapien
taggacccagcgcaattccaaacga

SEQ ID NO: 279856 - DNA, 25 bp, Homo sapien
ctgccgggttcaagcgactcttcca

SEQ ID NO: 279857 - DNA, 25 bp, Homo sapien
ttccacctcagcctcccgggtagct

SEQ ID NO: 279858 - DNA, 25 bp, Homo sapien
gccgggttcaagcgactcttccacc

SEQ ID NO: 279859 - DNA, 25 bp, Homo sapien
tcttccacctcagcctcccgggtag

SEQ ID NO: 279860 - DNA, 25 bp, Homo sapien
ctcccaaagtgctcctgtaatccca

SEQ ID NO: 279861 - DNA, 25 bp, Homo sapien
cccaggctcaagtgcttcttatgcc

SEQ ID NO: 279862 - DNA, 25 bp, Homo sapien
agcactttgggttgccgaagcggga

SEQ ID NO: 279863 - DNA, 25 bp, Homo sapien
ttgggttgccgaagcgggaaaatca

SEQ ID NO: 279864 - DNA, 25 bp, Homo sapien
gatccaggggatccacagacaaaga

SEQ ID NO: 279865 - DNA, 25 bp, Homo sapien
tggtgctttggtatcaaggagatcc

SEQ ID NO: 279866 - DNA, 25 bp, Homo sapien
gggatccacagacaaagataaaaga

SEQ ID NO: 279867 - DNA, 25 bp, Homo sapien
tgctttggtatcaaggagatccagg

SEQ ID NO: 279868 - DNA, 25 bp, Homo sapien
gggtgtcaaataggggaaagcacca

SEQ ID NO: 279869 - DNA, 25 bp, Homo sapien
aagcataaaggggtgtcaaataggg

SEQ ID NO: 279870 - DNA, 25 bp, Homo sapien
tgtcaaataggggaaagcaccacat

SEQ ID NO: 279871 - DNA, 25 bp, Homo sapien
gacaaagcataaaggggtgtcaaat

SEQ ID NO: 279872 - DNA, 25 bp, Homo sapien
tgttacggaagtttttcatcccaca

SEQ ID NO: 279873 - DNA, 25 bp, Homo sapien
tcatcaacctggatgttacggaagt

SEQ ID NO: 279874 - DNA, 25 bp, Homo sapien
cccacatttgcggatttcttcaagc

SEQ ID NO: 279875 - DNA, 25 bp, Homo sapien
aaattagcttcatcaacctggatgt

SEQ ID NO: 279876 - DNA, 25 bp, Homo sapien
ggaagtggaagtgttcaatactcac

SEQ ID NO: 279877 - DNA, 25 bp, Homo sapien
tctggtaggaagtggaagtgttcaa

SEQ ID NO: 279878 - DNA, 25 bp, Homo sapien
ggtaggaagtggaagtgttcaatac

SEQ ID NO: 279879 - DNA, 25 bp, Homo sapien
cttaaagaataatctggtaggaagt

SEQ ID NO: 279880 - DNA, 25 bp, Homo sapien
tacaggaggaagcatgctccatgct

SEQ ID NO: 279881 - DNA, 25 bp, Homo sapien
tctacaggaggaagcatgctccatg

SEQ ID NO: 279882 - DNA, 25 bp, Homo sapien
tccatgctcaccttataaccagcat

SEQ ID NO: 279883 - DNA, 25 bp, Homo sapien
aggaggaagcatgctccatgctcac

SEQ ID NO: 279884 - DNA, 25 bp, Homo sapien
tgtctgaatgtatctccccaaaaat

SEQ ID NO: 279885 - DNA, 25 bp, Homo sapien
ggtgtccttatcaaagaggcccctg

SEQ ID NO: 279886 - DNA, 25 bp, Homo sapien
tctgttgcccactggatggtggcgt

SEQ ID NO: 279887 - DNA, 25 bp, Homo sapien
gtgaaaaggcaccatctataaacca

SEQ ID NO: 279888 - DNA, 25 bp, Homo sapien
tcaaaatgaacacaccatggttcat

SEQ ID NO: 279889 - DNA, 25 bp, Homo sapien
aatgaacacaccatggttcataaac

SEQ ID NO: 279890 - DNA, 25 bp, Homo sapien
ggaaagagagatcaaaatgaacaca

SEQ ID NO: 279891 - DNA, 25 bp, Homo sapien
gagagatcaaaatgaacacaccatg

SEQ ID NO: 279892 - DNA, 25 bp, Homo sapien
ctcccttatcatatggagggttgtc

SEQ ID NO: 279893 - DNA, 25 bp, Homo sapien
ttcgattctgaaggctcccttatca

SEQ ID NO: 279894 - DNA, 25 bp, Homo sapien
tctgaaggctcccttatcatatgga

SEQ ID NO: 279895 - DNA, 25 bp, Homo sapien
ccttttcgtcgatgtttgggtgata

SEQ ID NO: 279896 - DNA, 25 bp, Homo sapien
taacaaacatgggaatgtggccgtc

SEQ ID NO: 279897 - DNA, 25 bp, Homo sapien
tgtagaaccatgtagctaagcccag

SEQ ID NO: 279898 - DNA, 25 bp, Homo sapien
gggatcaaggccatgccacaaacaa

SEQ ID NO: 279899 - DNA, 25 bp, Homo sapien
tgtggccgtcaagtgcaaggaacaa

SEQ ID NO: 279900 - DNA, 25 bp, Homo sapien
agggacacccaacatatgaagaatc

SEQ ID NO: 279901 - DNA, 25 bp, Homo sapien
aacagcagtcaggaaatagcaccag

SEQ ID NO: 279902 - DNA, 25 bp, Homo sapien
cagggacacccaacatatgaagaat

SEQ ID NO: 279903 - DNA, 25 bp, Homo sapien
gggacacccaacatatgaagaatca

SEQ ID NO: 279904 - DNA, 25 bp, Homo sapien
tctgagagaagccataattgggaac

SEQ ID NO: 279905 - DNA, 25 bp, Homo sapien
aagaacttcaaggctggatctgaga

SEQ ID NO: 279906 - DNA, 25 bp, Homo sapien
gccataattgggaacgctgaagttt

SEQ ID NO: 279907 - DNA, 25 bp, Homo sapien
aaagaacttcaaggctggatctgag

SEQ ID NO: 279908 - DNA, 25 bp, Homo sapien
cagctacaggttgtgaattgaggag

SEQ ID NO: 279909 - DNA, 25 bp, Homo sapien
agtcagctacaggttgtgaattgag

SEQ ID NO: 279910 - DNA, 25 bp, Homo sapien
gtggctaaagtcagctacaggttgt

SEQ ID NO: 279911 - DNA, 25 bp, Homo sapien
gctaaagtcagctacaggttgtgaa

SEQ ID NO: 279912 - DNA, 25 bp, Homo sapien
aaacaagaaggcagggcatcgcact

SEQ ID NO: 279913 - DNA, 25 bp, Homo sapien
caagaagtttggcattagacagccc

SEQ ID NO: 279914 - DNA, 25 bp, Homo sapien
gacagcccacttgcttcagttgaga

SEQ ID NO: 279915 - DNA, 25 bp, Homo sapien
caacctcagctggaacacgtgcatg

SEQ ID NO: 279916 - DNA, 25 bp, Homo sapien
ggtttaggttcaaacaagcctctgc

SEQ ID NO: 279917 - DNA, 25 bp, Homo sapien
gcttatgttctataaacttgccatg

SEQ ID NO: 279918 - DNA, 25 bp, Homo sapien
tctgagcatcccatatacagctgaa

SEQ ID NO: 279919 - DNA, 25 bp, Homo sapien
aatggatccaccctagtctgagcat

SEQ ID NO: 279920 - DNA, 25 bp, Homo sapien
taagagcacaaataggtggctcccc

SEQ ID NO: 279921 - DNA, 25 bp, Homo sapien
ggcacgctcaggagttttcacctca

SEQ ID NO: 279922 - DNA, 25 bp, Homo sapien
tagcattttagaaacctcactgggc

SEQ ID NO: 279923 - DNA, 25 bp, Homo sapien
gaaattgagccacagtcgcctaaga

SEQ ID NO: 279924 - DNA, 25 bp, Homo sapien
cattcaacagcacacattaagtgag

SEQ ID NO: 279925 - DNA, 25 bp, Homo sapien
gctgacaggttccacgtttgttggg

SEQ ID NO: 279926 - DNA, 25 bp, Homo sapien
agcacaaagtactcctggcctggtg

SEQ ID NO: 279927 - DNA, 25 bp, Homo sapien
ctgctttttactgtgcctggtgaga

SEQ ID NO: 279928 - DNA, 25 bp, Homo sapien
tttactgcacggtaccctcaaactc

SEQ ID NO: 279929 - DNA, 25 bp, Homo sapien
aatcatactttactgcacggtaccc

SEQ ID NO: 279930 - DNA, 25 bp, Homo sapien
tactttactgcacggtaccctcaaa

SEQ ID NO: 279931 - DNA, 25 bp, Homo sapien
catactttactgcacggtaccctca

SEQ ID NO: 279932 - DNA, 25 bp, Homo sapien
caggaccgggtagaacttccctgca

SEQ ID NO: 279933 - DNA, 25 bp, Homo sapien
taggaggcctagtattgaactgact

SEQ ID NO: 279934 - DNA, 25 bp, Homo sapien
caggcagatgtcacgctgatggctc

SEQ ID NO: 279935 - DNA, 25 bp, Homo sapien
catgctcggctcagggaagtttcgg

SEQ ID NO: 279936 - DNA, 25 bp, Homo sapien
taggtcagcccgaagcgggtgctca

SEQ ID NO: 279937 - DNA, 25 bp, Homo sapien
ccacaggtcgcttttccccatattt

SEQ ID NO: 279938 - DNA, 25 bp, Homo sapien
tcaggctgggggtcattcaccagtg

SEQ ID NO: 279939 - DNA, 25 bp, Homo sapien
tagagtattcttcagctaggtcagc

SEQ ID NO: 279940 - DNA, 25 bp, Homo sapien
actgccacaagcgaacgccaggcgg

SEQ ID NO: 279941 - DNA, 25 bp, Homo sapien
ctgccacaagcgaacgccaggcggt

SEQ ID NO: 279942 - DNA, 25 bp, Homo sapien
tgccacaagcgaacgccaggcggtg

SEQ ID NO: 279943 - DNA, 25 bp, Homo sapien
taactgccacaagcgaacgccaggc

SEQ ID NO: 279944 - DNA, 25 bp, Homo sapien
tacaggttacctagaccacttttga

SEQ ID NO: 279945 - DNA, 25 bp, Homo sapien
acaggttacctagaccacttttgat

SEQ ID NO: 279946 - DNA, 25 bp, Homo sapien
caggttacctagaccacttttgatt

SEQ ID NO: 279947 - DNA, 25 bp, Homo sapien
aaataaactcggtgccagaaagtgg

SEQ ID NO: 279948 - DNA, 25 bp, Homo sapien
tacacacactgacatcagggcttgc

SEQ ID NO: 279949 - DNA, 25 bp, Homo sapien
tttaaaccaactcccacactgggca

SEQ ID NO: 279950 - DNA, 25 bp, Homo sapien
gggcttgcccaattaactgatgtta

SEQ ID NO: 279951 - DNA, 25 bp, Homo sapien
ctgtgattatagggcttctctgtgc

SEQ ID NO: 279952 - DNA, 25 bp, Homo sapien
tgtgattatagggcttctctgtgca

SEQ ID NO: 279953 - DNA, 25 bp, Homo sapien
tcaaacggacattctggctgtagct

SEQ ID NO: 279954 - DNA, 25 bp, Homo sapien
gatgagctaggagtttcaaacggac

SEQ ID NO: 279955 - DNA, 25 bp, Homo sapien
ggcgagattcatcacacacagtgtg

SEQ ID NO: 279956 - DNA, 25 bp, Homo sapien
cattcggatgaagctcggtgacaga

SEQ ID NO: 279957 - DNA, 25 bp, Homo sapien
aacacattgaaaggatattactgag

SEQ ID NO: 279958 - DNA, 25 bp, Homo sapien
cctgaacaatgttaggctgccgaac

SEQ ID NO: 279959 - DNA, 25 bp, Homo sapien
taatgaagacagatgtggaaacgcc

SEQ ID NO: 279960 - DNA, 25 bp, Homo sapien
tgtaggccccggaaagatctcaagt

SEQ ID NO: 279961 - DNA, 25 bp, Homo sapien
tgacacacggcatttggatcgtcgg

SEQ ID NO: 279962 - DNA, 25 bp, Homo sapien
cacacaggtatcctcccgtgatgag

SEQ ID NO: 279963 - DNA, 25 bp, Homo sapien
ggcagagctacgttggcagaaatac

SEQ ID NO: 279964 - DNA, 25 bp, Homo sapien
aaatacgaagcaatgggacagtttc

SEQ ID NO: 279965 - DNA, 25 bp, Homo sapien
ctcccgtgatgagcagagtgcagtg

SEQ ID NO: 279966 - DNA, 25 bp, Homo sapien
atggctggcaggagcaagccgccca

SEQ ID NO: 279967 - DNA, 25 bp, Homo sapien
aggagagacacccactggctcgaaa

SEQ ID NO: 279968 - DNA, 25 bp, Homo sapien
agagcctaccctgaaggcatggctg

SEQ ID NO: 279969 - DNA, 25 bp, Homo sapien
agcttgctcagagcctaccctgaag

SEQ ID NO: 279970 - DNA, 25 bp, Homo sapien
ggacccagcacacttcaagaaacca

SEQ ID NO: 279971 - DNA, 25 bp, Homo sapien
cacttcaagaaaccaggcgggtgtg

SEQ ID NO: 279972 - DNA, 25 bp, Homo sapien
aaaccaggcgggtgtgaattcctga

SEQ ID NO: 279973 - DNA, 25 bp, Homo sapien
cagcacacttcaagaaaccaggcgg

SEQ ID NO: 279974 - DNA, 25 bp, Homo sapien
tagggcccgcagagcatttggtgcc

SEQ ID NO: 279975 - DNA, 25 bp, Homo sapien
gtgaaggccccgacgctttctcttg

SEQ ID NO: 279976 - DNA, 25 bp, Homo sapien
cttcgtgggcctgagcacttgcggc

SEQ ID NO: 279977 - DNA, 25 bp, Homo sapien
ggacctggagcacgatctgttgact

SEQ ID NO: 279978 - DNA, 25 bp, Homo sapien
tgtgccaggtgttcgccgaggcgct

SEQ ID NO: 279979 - DNA, 25 bp, Homo sapien
gctttacgcgactgccgctggagcg

SEQ ID NO: 279980 - DNA, 25 bp, Homo sapien
ctggagcgcggtgtgggtggctgca

SEQ ID NO: 279981 - DNA, 25 bp, Homo sapien
caggcctatggggtgcgctttacgc

SEQ ID NO: 279982 - DNA, 25 bp, Homo sapien
ggtggatgacttccgcattcaaaca

SEQ ID NO: 279983 - DNA, 25 bp, Homo sapien
ggacgactttggttactgcccgcga

SEQ ID NO: 279984 - DNA, 25 bp, Homo sapien
cggccggagacgtggatttgcctca

SEQ ID NO: 279985 - DNA, 25 bp, Homo sapien
ttcaaacactggagccatcacacgg

SEQ ID NO: 279986 - DNA, 25 bp, Homo sapien
ttccctctccgacacaatggttggg

SEQ ID NO: 279987 - DNA, 25 bp, Homo sapien
ctctccgacacaatggttgggggcg

SEQ ID NO: 279988 - DNA, 25 bp, Homo sapien
ccacttccctctccgacacaatggt

SEQ ID NO: 279989 - DNA, 25 bp, Homo sapien
acttccctctccgacacaatggttg

SEQ ID NO: 279990 - DNA, 25 bp, Homo sapien
cttgctccgcacaggccagtacagt

SEQ ID NO: 279991 - DNA, 25 bp, Homo sapien
gtgcgaggaagtcggctggcggcct

SEQ ID NO: 279992 - DNA, 25 bp, Homo sapien
cagtacagtctgcgccctcactgga

SEQ ID NO: 279993 - DNA, 25 bp, Homo sapien
acagtgcgaggaagtcggctggcgg

SEQ ID NO: 279994 - DNA, 25 bp, Homo sapien
gggtctccaataggtccacgcatct

SEQ ID NO: 279995 - DNA, 25 bp, Homo sapien
acctgagggtctccaataggtccac

SEQ ID NO: 279996 - DNA, 25 bp, Homo sapien
gtctccaataggtccacgcatctgt

SEQ ID NO: 279997 - DNA, 25 bp, Homo sapien
tgagggtctccaataggtccacgca

SEQ ID NO: 279998 - DNA, 25 bp, Homo sapien
tctctcttcagctgcgcattcctct

SEQ ID NO: 279999 - DNA, 25 bp, Homo sapien
cctggcaggtgaccgggcctgctgc

SEQ ID NO: 280000 - DNA, 25 bp, Homo sapien
cctctctcttcagctgcgcattcct

SEQ ID NO: 280001 - DNA, 25 bp, Homo sapien
tcacctggcaggtgaccgggcctgc

SEQ ID NO: 280002 - DNA, 25 bp, Homo sapien
catcggccaggtaacccgagtggtg

SEQ ID NO: 280003 - DNA, 25 bp, Homo sapien
gagtggctggcctcgtcatcggcca

SEQ ID NO: 280004 - DNA, 25 bp, Homo sapien
tcgtcatcggccaggtaacccgagt

SEQ ID NO: 280005 - DNA, 25 bp, Homo sapien
ccgtgcactgcacatggagtggctg

SEQ ID NO: 280006 - DNA, 25 bp, Homo sapien
cttgcaggctggccgcatttctggg

SEQ ID NO: 280007 - DNA, 25 bp, Homo sapien
caggctggccgcatttctgggacca

SEQ ID NO: 280008 - DNA, 25 bp, Homo sapien
gcaggctggccgcatttctgggacc

SEQ ID NO: 280009 - DNA, 25 bp, Homo sapien
tgcaggctggccgcatttctgggac

SEQ ID NO: 280010 - DNA, 25 bp, Homo sapien
ctcttgtttcggcgttggccctgga

SEQ ID NO: 280011 - DNA, 25 bp, Homo sapien
tcttgtttcggcgttggccctggag

SEQ ID NO: 280012 - DNA, 25 bp, Homo sapien
cacaggtggcaatgagccttgggca

SEQ ID NO: 280013 - DNA, 25 bp, Homo sapien
gacctggctctcagttaggaaatcc

SEQ ID NO: 280014 - DNA, 25 bp, Homo sapien
acctaggtcactgtcccggctgtgg

SEQ ID NO: 280015 - DNA, 25 bp, Homo sapien
ttcatggcagccatgcgctcagtcg

SEQ ID NO: 280016 - DNA, 25 bp, Homo sapien
ccttattgaactctcgcttgcggaa

SEQ ID NO: 280017 - DNA, 25 bp, Homo sapien
gactccagctggctcagtaatgact

SEQ ID NO: 280018 - DNA, 25 bp, Homo sapien
tgaccacgctttgcagggcagggaa

SEQ ID NO: 280019 - DNA, 25 bp, Homo sapien
caggcctcggctctgatgcttcagg

SEQ ID NO: 280020 - DNA, 25 bp, Homo sapien
tgtccttgcgttttctctgaagcat

SEQ ID NO: 280021 - DNA, 25 bp, Homo sapien
tggccacctgggcactagacatgga

SEQ ID NO: 280022 - DNA, 25 bp, Homo sapien
gcagtgggcgccacggagcttatcc

SEQ ID NO: 280023 - DNA, 25 bp, Homo sapien
gcagatctgaggtgggctccaagct

SEQ ID NO: 280024 - DNA, 25 bp, Homo sapien
gacattgggcttctccgtgggtgtc

SEQ ID NO: 280025 - DNA, 25 bp, Homo sapien
ctggacacagtgaggcgggagatga

SEQ ID NO: 280026 - DNA, 25 bp, Homo sapien
gaaagtggaggtgtgacagggcccc

SEQ ID NO: 280027 - DNA, 25 bp, Homo sapien
accacaatccctggcgtgggcaggg

SEQ ID NO: 280028 - DNA, 25 bp, Homo sapien
tcatgcccggtcctacttttgagga

SEQ ID NO: 280029 - DNA, 25 bp, Homo sapien
aatagctaggccaggattcatgggc

SEQ ID NO: 280030 - DNA, 25 bp, Homo sapien
agggcaagagaccttgaccttgagc

SEQ ID NO: 280031 - DNA, 25 bp, Homo sapien
tgagcacctgttagtgacagtggct

SEQ ID NO: 280032 - DNA, 25 bp, Homo sapien
ccccatgtaggagcgtctctagatt

SEQ ID NO: 280033 - DNA, 25 bp, Homo sapien
ggagcgtctctagattcacatacaa

SEQ ID NO: 280034 - DNA, 25 bp, Homo sapien
gattcacatacaaacgttagaaaaa

SEQ ID NO: 280035 - DNA, 25 bp, Homo sapien
actttccacccccatgtaggagcgt

SEQ ID NO: 280036 - DNA, 25 bp, Homo sapien
tgaacctgctgctgctgcaggggct

SEQ ID NO: 280037 - DNA, 25 bp, Homo sapien
cttcgtgaacctgctgctgctgcag

SEQ ID NO: 280038 - DNA, 25 bp, Homo sapien
ttcgtgaacctgctgctgctgcagg

SEQ ID NO: 280039 - DNA, 25 bp, Homo sapien
cgtgaacctgctgctgctgcagggg

SEQ ID NO: 280040 - DNA, 25 bp, Homo sapien
aaaggtccctgagcacgtgggtgat

SEQ ID NO: 280041 - DNA, 25 bp, Homo sapien
tgagacatgctggacttcgacgaga

SEQ ID NO: 280042 - DNA, 25 bp, Homo sapien
aagtcggcgagctcctcataaaggc

SEQ ID NO: 280043 - DNA, 25 bp, Homo sapien
cgaactcgtacttgcggatgaccaa

SEQ ID NO: 280044 - DNA, 25 bp, Homo sapien
caggcagctccggtgggtctccgag

SEQ ID NO: 280045 - DNA, 25 bp, Homo sapien
tgggtctccgaggacaggtggatgc

SEQ ID NO: 280046 - DNA, 25 bp, Homo sapien
cagctccggtgggtctccgaggaca

SEQ ID NO: 280047 - DNA, 25 bp, Homo sapien
ggacaggtggatgcgggagcctttt

SEQ ID NO: 280048 - DNA, 25 bp, Homo sapien
gacatgtagagcttgggctccaaag

SEQ ID NO: 280049 - DNA, 25 bp, Homo sapien
gactggaacccatgccggtgcaggc

SEQ ID NO: 280050 - DNA, 25 bp, Homo sapien
ccatgccggtgcaggcagacatgta

SEQ ID NO: 280051 - DNA, 25 bp, Homo sapien
caagttggtgtagagggagcggcag

SEQ ID NO: 280052 - DNA, 25 bp, Homo sapien
tcttcatcttcaatctcggctttat

SEQ ID NO: 280053 - DNA, 25 bp, Homo sapien
ttcatcttcaatctcggctttatca

SEQ ID NO: 280054 - DNA, 25 bp, Homo sapien
cttcatcttcaatctcggctttatc

SEQ ID NO: 280055 - DNA, 25 bp, Homo sapien
tcatcttcaatctcggctttatcac

SEQ ID NO: 280056 - DNA, 25 bp, Homo sapien
tcaccgtggcccacgtccacggagt

SEQ ID NO: 280057 - DNA, 25 bp, Homo sapien
cgtggcccacgtccacggagtggct

SEQ ID NO: 280058 - DNA, 25 bp, Homo sapien
acagagcagggaatcgagtggctag

SEQ ID NO: 280059 - DNA, 25 bp, Homo sapien
aatcgagtggctagtggggacttca

SEQ ID NO: 280060 - DNA, 25 bp, Homo sapien
cccagcaacacaggctttatttcta

SEQ ID NO: 280061 - DNA, 25 bp, Homo sapien
gctcctcgtgggcattcagcctgtg

SEQ ID NO: 280062 - DNA, 25 bp, Homo sapien
ctcgtgggcattcagcctgtggtga

SEQ ID NO: 280063 - DNA, 25 bp, Homo sapien
cagcaacacaggctttatttctatt

SEQ ID NO: 280064 - DNA, 25 bp, Homo sapien
ggcgatggatatatactcttggaca

SEQ ID NO: 280065 - DNA, 25 bp, Homo sapien
gaagtactatctgagaggcgatgga

SEQ ID NO: 280066 - DNA, 25 bp, Homo sapien
tgccctggatttggtagtccctgca

SEQ ID NO: 280067 - DNA, 25 bp, Homo sapien
cagcatttaggtgtccaaacggtta

SEQ ID NO: 280068 - DNA, 25 bp, Homo sapien
tggtcacaaagtcgacagatcccgg

SEQ ID NO: 280069 - DNA, 25 bp, Homo sapien
ctttcgtggctaaatctcgtggtca

SEQ ID NO: 280070 - DNA, 25 bp, Homo sapien
tgaacagttggtgaagacgcggctc

SEQ ID NO: 280071 - DNA, 25 bp, Homo sapien
ggacttaccaatgagtgcccaggga

SEQ ID NO: 280072 - DNA, 25 bp, Homo sapien
tatttgatgtcgtgcgagtgcagcc

SEQ ID NO: 280073 - DNA, 25 bp, Homo sapien
acgagctccgcaccggtcttggcgg

SEQ ID NO: 280074 - DNA, 25 bp, Homo sapien
cggtggtgcgtattgagcagcttca

SEQ ID NO: 280075 - DNA, 25 bp, Homo sapien
gagtgcagccgcacgcggtggtgcg

SEQ ID NO: 280076 - DNA, 25 bp, Homo sapien
gtaagcacatgcgtgagcctcaccg

SEQ ID NO: 280077 - DNA, 25 bp, Homo sapien
tgcgtgtgcaggttcttgcccgtaa

SEQ ID NO: 280078 - DNA, 25 bp, Homo sapien
tctacgccggtcaccgattgctggc

SEQ ID NO: 280079 - DNA, 25 bp, Homo sapien
ccagtagctattggcgtcgtccgac

SEQ ID NO: 280080 - DNA, 25 bp, Homo sapien
tccatggccttccacgtattgtgcg

SEQ ID NO: 280081 - DNA, 25 bp, Homo sapien
cagcgcactgtccataggtccaggt

SEQ ID NO: 280082 - DNA, 25 bp, Homo sapien
tactgctcacccgtgactgacagga

SEQ ID NO: 280083 - DNA, 25 bp, Homo sapien
cagagggctccacactaggcttgat

SEQ ID NO: 280084 - DNA, 25 bp, Homo sapien
ttctttaatcacaaaggcacttgag

SEQ ID NO: 280085 - DNA, 25 bp, Homo sapien
acaaaggcacttgaggacccctaca

SEQ ID NO: 280086 - DNA, 25 bp, Homo sapien
taatcacaaaggcacttgaggaccc

SEQ ID NO: 280087 - DNA, 25 bp, Homo sapien
ccaagagtggccctgcagacgcccc

SEQ ID NO: 280088 - DNA, 25 bp, Homo sapien
gactgccacaactgacaggagagtg

SEQ ID NO: 280089 - DNA, 25 bp, Homo sapien
agtgagctcctcacatctagggatg

SEQ ID NO: 280090 - DNA, 25 bp, Homo sapien
gtcccttggtcatatacaggtgtca

SEQ ID NO: 280091 - DNA, 25 bp, Homo sapien
ctcacatctagggatgagggagctg

SEQ ID NO: 280092 - DNA, 25 bp, Homo sapien
tgtgcttagacaactgtgcccctgc

SEQ ID NO: 280093 - DNA, 25 bp, Homo sapien
tgtgatccactttgcggagaagcat

SEQ ID NO: 280094 - DNA, 25 bp, Homo sapien
gctgttgaacggctcctagagggaa

SEQ ID NO: 280095 - DNA, 25 bp, Homo sapien
gaagtatattgatcaccgggctgtt

SEQ ID NO: 280096 - DNA, 25 bp, Homo sapien
acagggaaagagtgtcgggcaggcc

SEQ ID NO: 280097 - DNA, 25 bp, Homo sapien
gacctgaccgatgccctttcatcat

SEQ ID NO: 280098 - DNA, 25 bp, Homo sapien
cgatgccctttcatcattgcactgc

SEQ ID NO: 280099 - DNA, 25 bp, Homo sapien
cactgcttcccagcggcctatagta

SEQ ID NO: 280100 - DNA, 25 bp, Homo sapien
tgtccacattcacgcacagcttctt

SEQ ID NO: 280101 - DNA, 25 bp, Homo sapien
catccaaatgaccactggggacgat

SEQ ID NO: 280102 - DNA, 25 bp, Homo sapien
gggacgattcttgggcatctcatgc

SEQ ID NO: 280103 - DNA, 25 bp, Homo sapien
tctccctgaaagctacttttcttac

SEQ ID NO: 280104 - DNA, 25 bp, Homo sapien
gacctcgagggggcgaacgcggctg

SEQ ID NO: 280105 - DNA, 25 bp, Homo sapien
gggcgaacgcggctgcgcgggtcct

SEQ ID NO: 280106 - DNA, 25 bp, Homo sapien
cagttccgcaggggccatcgggcct

SEQ ID NO: 280107 - DNA, 25 bp, Homo sapien
tggcccagttccgcaggggccatcg

SEQ ID NO: 280108 - DNA, 25 bp, Homo sapien
ctggaagcggagcaggcgtctgggc

SEQ ID NO: 280109 - DNA, 25 bp, Homo sapien
gtcgtgcgggactgccgggacgcac

SEQ ID NO: 280110 - DNA, 25 bp, Homo sapien
gacaatgcccgttgctctgggcacg

SEQ ID NO: 280111 - DNA, 25 bp, Homo sapien
aggtgcggactctctagcctactgc

SEQ ID NO: 280112 - DNA, 25 bp, Homo sapien
cgagcgcggctggagagcccgggtg

SEQ ID NO: 280113 - DNA, 25 bp, Homo sapien
acgagcgagcgcggctggagagccc

SEQ ID NO: 280114 - DNA, 25 bp, Homo sapien
ctacgagcgagcgcggctggagagc

SEQ ID NO: 280115 - DNA, 25 bp, Homo sapien
agcgagcgcggctggagagcccggg

SEQ ID NO: 280116 - DNA, 25 bp, Homo sapien
tctccgccagcgacgggttgcggac

SEQ ID NO: 280117 - DNA, 25 bp, Homo sapien
cagtgtaggtgtccgcctgcctctc

SEQ ID NO: 280118 - DNA, 25 bp, Homo sapien
tgctctgcgggacctcgctgtcgaa

SEQ ID NO: 280119 - DNA, 25 bp, Homo sapien
cagcgcgcgcccagtgtaggtgtcc

SEQ ID NO: 280120 - DNA, 25 bp, Homo sapien
gagagcccgcgctgttccaattgta

SEQ ID NO: 280121 - DNA, 25 bp, Homo sapien
agagcccgcgctgttccaattgtac

SEQ ID NO: 280122 - DNA, 25 bp, Homo sapien
ccaaagctccaatcgtcggagctct

SEQ ID NO: 280123 - DNA, 25 bp, Homo sapien
tccaatcgtcggagctctttcctag

SEQ ID NO: 280124 - DNA, 25 bp, Homo sapien
ttctgatagatcctaccctgcagcc

SEQ ID NO: 280125 - DNA, 25 bp, Homo sapien
tgcagccccagctaggccgacggcg

SEQ ID NO: 280126 - DNA, 25 bp, Homo sapien
gtgcacgcggtggatgctctgcttc

SEQ ID NO: 280127 - DNA, 25 bp, Homo sapien
tgttgcaatggttcagctccgcctg

SEQ ID NO: 280128 - DNA, 25 bp, Homo sapien
ccagggcgcccatgctgttgcaatg

SEQ ID NO: 280129 - DNA, 25 bp, Homo sapien
tcctcgccccgggagtagaggtgca

SEQ ID NO: 280130 - DNA, 25 bp, Homo sapien
tctctctctcggaaaggtggcccaa

SEQ ID NO: 280131 - DNA, 25 bp, Homo sapien
gggcaaatccaaccggaagaatgga

SEQ ID NO: 280132 - DNA, 25 bp, Homo sapien
aatggaggtggtcacctagccctcg

SEQ ID NO: 280133 - DNA, 25 bp, Homo sapien
gataaaacctgatccaaggagggca

SEQ ID NO: 280134 - DNA, 25 bp, Homo sapien
ggtgatgaggtcaccacggagacca

SEQ ID NO: 280135 - DNA, 25 bp, Homo sapien
gatgaggtcaccacggagaccatgg

SEQ ID NO: 280136 - DNA, 25 bp, Homo sapien
cggtcccacaagaggttgggttctg

SEQ ID NO: 280137 - DNA, 25 bp, Homo sapien
gcatggggaggtcaaccggtcccac

SEQ ID NO: 280138 - DNA, 25 bp, Homo sapien
tcaatgctgaaaaagatgagcggcc

SEQ ID NO: 280139 - DNA, 25 bp, Homo sapien
tgctgagtgaatgaaagccacgtca

SEQ ID NO: 280140 - DNA, 25 bp, Homo sapien
tgtacccctaaccaagctcaaggtg

SEQ ID NO: 280141 - DNA, 25 bp, Homo sapien
accaggatatccttcattgggcgaa

SEQ ID NO: 280142 - DNA, 25 bp, Homo sapien
catggagccgcagccgagttccgtg

SEQ ID NO: 280143 - DNA, 25 bp, Homo sapien
caacggctgacaactcagaccatgg

SEQ ID NO: 280144 - DNA, 25 bp, Homo sapien
ctagcgagcacgaaaaaacaacggc

SEQ ID NO: 280145 - DNA, 25 bp, Homo sapien
agccgagttccgtgaccacttccgg

SEQ ID NO: 280146 - DNA, 25 bp, Homo sapien
gtccttttggtgctgtcgcttcccc

SEQ ID NO: 280147 - DNA, 25 bp, Homo sapien
ccttttggtgctgtcgcttccccat

SEQ ID NO: 280148 - DNA, 25 bp, Homo sapien
ttgtccttttggtgctgtcgcttcc

SEQ ID NO: 280149 - DNA, 25 bp, Homo sapien
attttgtccttttggtgctgtcgct

SEQ ID NO: 280150 - DNA, 25 bp, Homo sapien
cttgccaccataaaagtgagtgtat

SEQ ID NO: 280151 - DNA, 25 bp, Homo sapien
cattcgtctaccatagtttccgtgt

SEQ ID NO: 280152 - DNA, 25 bp, Homo sapien
tctaccatagtttccgtgttcttgt

SEQ ID NO: 280153 - DNA, 25 bp, Homo sapien
aagacacagttccttaataccactc

SEQ ID NO: 280154 - DNA, 25 bp, Homo sapien
tcagcccattcgtctaccatagttt

SEQ ID NO: 280155 - DNA, 25 bp, Homo sapien
tcttctatcttgagtatatttctct

SEQ ID NO: 280156 - DNA, 25 bp, Homo sapien
tttttacttagctcccagcatcggg

SEQ ID NO: 280157 - DNA, 25 bp, Homo sapien
ctaagatgaagcaggttcttctatc

SEQ ID NO: 280158 - DNA, 25 bp, Homo sapien
aaaatcaccactaagatgaagcagg

SEQ ID NO: 280159 - DNA, 25 bp, Homo sapien
tattccttataaacttgatagagaa

SEQ ID NO: 280160 - DNA, 25 bp, Homo sapien
tttattccttataaacttgatagag

SEQ ID NO: 280161 - DNA, 25 bp, Homo sapien
ttattccttataaacttgatagaga

SEQ ID NO: 280162 - DNA, 25 bp, Homo sapien
ttccttataaacttgatagagaaaa

SEQ ID NO: 280163 - DNA, 25 bp, Homo sapien
gctcttgttattgtagtcttgatag

SEQ ID NO: 280164 - DNA, 25 bp, Homo sapien
tatgacagtgctcttgttattgtag

SEQ ID NO: 280165 - DNA, 25 bp, Homo sapien
attaaaattatgacagtgctcttgt

SEQ ID NO: 280166 - DNA, 25 bp, Homo sapien
cagtgctcttgttattgtagtcttg

SEQ ID NO: 280167 - DNA, 25 bp, Homo sapien
gcagtggtcaaaaggtaaacgacga

SEQ ID NO: 280168 - DNA, 25 bp, Homo sapien
agacgatgccatcgggagtgcagac

SEQ ID NO: 280169 - DNA, 25 bp, Homo sapien
agtaagtcaaagacgatgccatcgg

SEQ ID NO: 280170 - DNA, 25 bp, Homo sapien
ggagtgcagactgggtagacaaagg

SEQ ID NO: 280171 - DNA, 25 bp, Homo sapien
caaagacgatgccatcgggagtgca

SEQ ID NO: 280172 - DNA, 25 bp, Homo sapien
ggtcccgtacttcttaagccatgga

SEQ ID NO: 280173 - DNA, 25 bp, Homo sapien
ccgtacttcttaagccatggaacaa

SEQ ID NO: 280174 - DNA, 25 bp, Homo sapien
cttcttaagccatggaacaatgttc

SEQ ID NO: 280175 - DNA, 25 bp, Homo sapien
ttggtcccgtacttcttaagccatg

SEQ ID NO: 280176 - DNA, 25 bp, Homo sapien
tgtctgcagtacagctcttccacag

SEQ ID NO: 280177 - DNA, 25 bp, Homo sapien
gctgggccctaagctggcagcaggt

SEQ ID NO: 280178 - DNA, 25 bp, Homo sapien
acaaagtctggacaaccggaggtgg

SEQ ID NO: 280179 - DNA, 25 bp, Homo sapien
gctgggcccagctatgcctacccag

SEQ ID NO: 280180 - DNA, 25 bp, Homo sapien
tgatcagggacctcccgtccagctt

SEQ ID NO: 280181 - DNA, 25 bp, Homo sapien
cttgatcagggacctcccgtccagc

SEQ ID NO: 280182 - DNA, 25 bp, Homo sapien
ttgatcagggacctcccgtccagct

SEQ ID NO: 280183 - DNA, 25 bp, Homo sapien
gcttgatcagggacctcccgtccag

SEQ ID NO: 280184 - DNA, 25 bp, Homo sapien
ggcatgcatgcgtcaccatgtacga

SEQ ID NO: 280185 - DNA, 25 bp, Homo sapien
ctggggataaaaaagtaagtgcagt

SEQ ID NO: 280186 - DNA, 25 bp, Homo sapien
aaagtaagtgcagtagggggactca

SEQ ID NO: 280187 - DNA, 25 bp, Homo sapien
ctctgcctgtaagtccccacccagt

SEQ ID NO: 280188 - DNA, 25 bp, Homo sapien
ctcataggcgtagacgttgccggtc

SEQ ID NO: 280189 - DNA, 25 bp, Homo sapien
cctcacagccacgatgtgggtgttg

SEQ ID NO: 280190 - DNA, 25 bp, Homo sapien
cacagccacgatgtgggtgttgttg

SEQ ID NO: 280191 - DNA, 25 bp, Homo sapien
tagacgttgccggtcgtcctcacag

SEQ ID NO: 280192 - DNA, 25 bp, Homo sapien
ggccttgatatttagctgttccact

SEQ ID NO: 280193 - DNA, 25 bp, Homo sapien
ccttgatatttagctgttccactgc

SEQ ID NO: 280194 - DNA, 25 bp, Homo sapien
tgtcctgccgggagaagggctcgtc

SEQ ID NO: 280195 - DNA, 25 bp, Homo sapien
gagaagggctcgtcggtcagcaggt

SEQ ID NO: 280196 - DNA, 25 bp, Homo sapien
tgaacttgtccaaattggtggggtc

SEQ ID NO: 280197 - DNA, 25 bp, Homo sapien
agacattgaacttgtccaaattggt

SEQ ID NO: 280198 - DNA, 25 bp, Homo sapien
acattgaacttgtccaaattggtgg

SEQ ID NO: 280199 - DNA, 25 bp, Homo sapien
attgaacttgtccaaattggtgggg

SEQ ID NO: 280200 - DNA, 25 bp, Homo sapien
ttcagataataagacgggtcctgtt

SEQ ID NO: 280201 - DNA, 25 bp, Homo sapien
gggtctcggcatttgtatttttcag

SEQ ID NO: 280202 - DNA, 25 bp, Homo sapien
ctgcagggtctctcgggtctcggca

SEQ ID NO: 280203 - DNA, 25 bp, Homo sapien
agaatctcgtcccctttgaactcct

SEQ ID NO: 280204 - DNA, 25 bp, Homo sapien
ggccaaggcaggaggctctcacttg

SEQ ID NO: 280205 - DNA, 25 bp, Homo sapien
caggaggctctcacttgaagccagg

SEQ ID NO: 280206 - DNA, 25 bp, Homo sapien
gaattcaagaccagcttagacaaca

SEQ ID NO: 280207 - DNA, 25 bp, Homo sapien
ccagcttagacaacatagcaagatc

SEQ ID NO: 280208 - DNA, 25 bp, Homo sapien
gaaggaagcgctgaccttccctgtg

SEQ ID NO: 280209 - DNA, 25 bp, Homo sapien
gaggtgaaggaagcgctgaccttcc

SEQ ID NO: 280210 - DNA, 25 bp, Homo sapien
gtgaaggaagcgctgaccttccctg

SEQ ID NO: 280211 - DNA, 25 bp, Homo sapien
aggaagcgctgaccttccctgtgga

SEQ ID NO: 280212 - DNA, 25 bp, Homo sapien
ctgcttcatgtgtggtctccgggac

SEQ ID NO: 280213 - DNA, 25 bp, Homo sapien
tgtgcagccgcacgtagcccttctt

SEQ ID NO: 280214 - DNA, 25 bp, Homo sapien
agctccaggttgaggtcgcccttgt

SEQ ID NO: 280215 - DNA, 25 bp, Homo sapien
ttcttcacaaactggtagcgcagca

SEQ ID NO: 280216 - DNA, 25 bp, Homo sapien
tagcgcagcacatcctcgtcgatgg

SEQ ID NO: 280217 - DNA, 25 bp, Homo sapien
tttaagacatggctgtcagatgacc

SEQ ID NO: 280218 - DNA, 25 bp, Homo sapien
ggcagccctatatttaagacatggc

SEQ ID NO: 280219 - DNA, 25 bp, Homo sapien
tgtcagatgacccagagatgacctt

SEQ ID NO: 280220 - DNA, 25 bp, Homo sapien
taagacatggctgtcagatgaccca

SEQ ID NO: 280221 - DNA, 25 bp, Homo sapien
acgcggccccctaggaaggacacag

SEQ ID NO: 280222 - DNA, 25 bp, Homo sapien
gcactgctgcgggtcccgcctagtg

SEQ ID NO: 280223 - DNA, 25 bp, Homo sapien
tgcgggtcccgcctagtgacaggct

SEQ ID NO: 280224 - DNA, 25 bp, Homo sapien
tcccgcctagtgacaggctgaattt

SEQ ID NO: 280225 - DNA, 25 bp, Homo sapien
gatggtgccatcgtaataatgcttc

SEQ ID NO: 280226 - DNA, 25 bp, Homo sapien
cacaaagttccggatggatctgtgg

SEQ ID NO: 280227 - DNA, 25 bp, Homo sapien
gcttcttgcaaagcctgatgaagtt

SEQ ID NO: 280228 - DNA, 25 bp, Homo sapien
gcaaagcctgatgaagttttcgcag

SEQ ID NO: 280229 - DNA, 25 bp, Homo sapien
ccgtgcctgtgcctgtggggtcgcc

SEQ ID NO: 280230 - DNA, 25 bp, Homo sapien
tgcctgtggggtcgcccccttggat

SEQ ID NO: 280231 - DNA, 25 bp, Homo sapien
gtgcctgtgcctgtggggtcgcccc

SEQ ID NO: 280232 - DNA, 25 bp, Homo sapien
ctgtgcctgtggggtcgcccccttg

SEQ ID NO: 280233 - DNA, 25 bp, Homo sapien
ccatgctgaggatgccgcggcccgt

SEQ ID NO: 280234 - DNA, 25 bp, Homo sapien
tgtgcgagaggttgggccggaactc

SEQ ID NO: 280235 - DNA, 25 bp, Homo sapien
gggcttcccccagtatgactcccca

SEQ ID NO: 280236 - DNA, 25 bp, Homo sapien
cccggagttggccatgctgaggatg

SEQ ID NO: 280237 - DNA, 25 bp, Homo sapien
aaacagcgatttctgtggagcacag

SEQ ID NO: 280238 - DNA, 25 bp, Homo sapien
tgattttaaccattccaggccacaa

SEQ ID NO: 280239 - DNA, 25 bp, Homo sapien
tggagcacagcaagatgcccacatc

SEQ ID NO: 280240 - DNA, 25 bp, Homo sapien
caaccgagaccacgtgtgacagtga

SEQ ID NO: 280241 - DNA, 25 bp, Homo sapien
gggaagctaccaacaaccagcaagc

SEQ ID NO: 280242 - DNA, 25 bp, Homo sapien
tgcaccctcaaaatgacagacgtgg

SEQ ID NO: 280243 - DNA, 25 bp, Homo sapien
gaaggtggcaactgatctgtcagca

SEQ ID NO: 280244 - DNA, 25 bp, Homo sapien
taggcaatccttggctgagaagaaa

SEQ ID NO: 280245 - DNA, 25 bp, Homo sapien
cagaccacctgaagaattaagtcca

SEQ ID NO: 280246 - DNA, 25 bp, Homo sapien
gatcatagaacgcaacagaccacct

SEQ ID NO: 280247 - DNA, 25 bp, Homo sapien
tagaaagcaacaagatcatagaacg

SEQ ID NO: 280248 - DNA, 25 bp, Homo sapien
gattgtcaggattggccaggcacag

SEQ ID NO: 280249 - DNA, 25 bp, Homo sapien
ctgccatgagacgaggagagagttt

SEQ ID NO: 280250 - DNA, 25 bp, Homo sapien
agcactgccatgagacgaggagaga

SEQ ID NO: 280251 - DNA, 25 bp, Homo sapien
tggggtggaattaaaacagccaaca

SEQ ID NO: 280252 - DNA, 25 bp, Homo sapien
gggtggaattaaaacagccaacagc

SEQ ID NO: 280253 - DNA, 25 bp, Homo sapien
ataaacatggactaagaaaatgctc

SEQ ID NO: 280254 - DNA, 25 bp, Homo sapien
ggaggcaacaaagccagaacaggag

SEQ ID NO: 280255 - DNA, 25 bp, Homo sapien
atgtcatcaagggacctgttgaagg

SEQ ID NO: 280256 - DNA, 25 bp, Homo sapien
caggagtcaagggattaagaaacgt

SEQ ID NO: 280257 - DNA, 25 bp, Homo sapien
agggctggatggttagggagagcat

SEQ ID NO: 280258 - DNA, 25 bp, Homo sapien
gcagcttccacggacgcatgtgtgc

SEQ ID NO: 280259 - DNA, 25 bp, Homo sapien
gacgcatgtgtgcacgtggttccct

SEQ ID NO: 280260 - DNA, 25 bp, Homo sapien
tgtgtgcacgtggttccctgcgctg

SEQ ID NO: 280261 - DNA, 25 bp, Homo sapien
aggcacaggagcgaaacgtgatgaa

SEQ ID NO: 280262 - DNA, 25 bp, Homo sapien
ggcacaggagcgaaacgtgatgaag

SEQ ID NO: 280263 - DNA, 25 bp, Homo sapien
tggtaaacagagttccacttggcca

SEQ ID NO: 280264 - DNA, 25 bp, Homo sapien
gctctccccgctggtttggtaaaca

SEQ ID NO: 280265 - DNA, 25 bp, Homo sapien
ggtctagagagccagacttccctgg

SEQ ID NO: 280266 - DNA, 25 bp, Homo sapien
gcatggcacatgactcaggtccacg

SEQ ID NO: 280267 - DNA, 25 bp, Homo sapien
catggctgtcagtacgtcaaagccc

SEQ ID NO: 280268 - DNA, 25 bp, Homo sapien
gtcagtacgtcaaagcccccaacaa

SEQ ID NO: 280269 - DNA, 25 bp, Homo sapien
cagttttggggtcactctccacatt

SEQ ID NO: 280270 - DNA, 25 bp, Homo sapien
tttggggtcactctccacattctcc

SEQ ID NO: 280271 - DNA, 25 bp, Homo sapien
tagcagcaaagggggctcagtgcac

SEQ ID NO: 280272 - DNA, 25 bp, Homo sapien
gggctcagtgcacggcaggtcctcc

SEQ ID NO: 280273 - DNA, 25 bp, Homo sapien
aaagggggctcagtgcacggcaggt

SEQ ID NO: 280274 - DNA, 25 bp, Homo sapien
gcctggcccccagccgccacgcccc

SEQ ID NO: 280275 - DNA, 25 bp, Homo sapien
ggtccacgaacactgtagtggcatc

SEQ ID NO: 280276 - DNA, 25 bp, Homo sapien
tagtggcatcaatgcggatctcctc

SEQ ID NO: 280277 - DNA, 25 bp, Homo sapien
tgggcatcggcctcctcataggggt

SEQ ID NO: 280278 - DNA, 25 bp, Homo sapien
gcatcggcctcctcataggggtcca

SEQ ID NO: 280279 - DNA, 25 bp, Homo sapien
acaacagggcgctggctaaccggca

SEQ ID NO: 280280 - DNA, 25 bp, Homo sapien
cccagaccctcctaggtggtggcat

SEQ ID NO: 280281 - DNA, 25 bp, Homo sapien
tggaaaagtgcactagcccagaccc

SEQ ID NO: 280282 - DNA, 25 bp, Homo sapien
cctcgggcaggacagatgctaggct

SEQ ID NO: 280283 - DNA, 25 bp, Homo sapien
tctccggggctaccttgagctgtgt

SEQ ID NO: 280284 - DNA, 25 bp, Homo sapien
tggctgctgggttgatgtacttgcc

SEQ ID NO: 280285 - DNA, 25 bp, Homo sapien
ttgcccacgccctggcggaaggtct

SEQ ID NO: 280286 - DNA, 25 bp, Homo sapien
gagctgtgtcttccgctcctgcgca

SEQ ID NO: 280287 - DNA, 25 bp, Homo sapien
cttcagaggcagtccctcggctgca

SEQ ID NO: 280288 - DNA, 25 bp, Homo sapien
tccatacagccctcccggtgtaggc

SEQ ID NO: 280289 - DNA, 25 bp, Homo sapien
agcccctcctgacttgtctgtgtct

SEQ ID NO: 280290 - DNA, 25 bp, Homo sapien
gagaagaagccgctgggagcccaca

SEQ ID NO: 280291 - DNA, 25 bp, Homo sapien
cagtggcactggttgagggctcttc

SEQ ID NO: 280292 - DNA, 25 bp, Homo sapien
acagtggcactggttgagggctctt

SEQ ID NO: 280293 - DNA, 25 bp, Homo sapien
gacagtggcactggttgagggctct

SEQ ID NO: 280294 - DNA, 25 bp, Homo sapien
cccttggcaacaggttaagggatgg

SEQ ID NO: 280295 - DNA, 25 bp, Homo sapien
gccaaggcccttggcaacaggttaa

SEQ ID NO: 280296 - DNA, 25 bp, Homo sapien
ctaacctggcctgcctactagaggg

SEQ ID NO: 280297 - DNA, 25 bp, Homo sapien
tcctcactaacctggcctgcctact

SEQ ID NO: 280298 - DNA, 25 bp, Homo sapien
ggaaactcaatgctgccgtccaaca

SEQ ID NO: 280299 - DNA, 25 bp, Homo sapien
ttgtcaaaacagaccgagaagccca

SEQ ID NO: 280300 - DNA, 25 bp, Homo sapien
caggtggttcacagccagagcaggt

SEQ ID NO: 280301 - DNA, 25 bp, Homo sapien
tctgaaaacttgtcccaggtaatgg

SEQ ID NO: 280302 - DNA, 25 bp, Homo sapien
gcttcagcatcagtgattgatgaga

SEQ ID NO: 280303 - DNA, 25 bp, Homo sapien
gggcagaggtacagcctgcaagttg

SEQ ID NO: 280304 - DNA, 25 bp, Homo sapien
gcagagatgcagatgaggcgccacc

SEQ ID NO: 280305 - DNA, 25 bp, Homo sapien
gagacaaagggctcaggcctgcagc

SEQ ID NO: 280306 - DNA, 25 bp, Homo sapien
ggtgtctgagcctcttacaagccag

SEQ ID NO: 280307 - DNA, 25 bp, Homo sapien
ccagccatggcgcagttcttgttct

SEQ ID NO: 280308 - DNA, 25 bp, Homo sapien
gccaaaggtccttggtggcctgtcc

SEQ ID NO: 280309 - DNA, 25 bp, Homo sapien
gatggagggcgtcaaaagtcactct

SEQ ID NO: 280310 - DNA, 25 bp, Homo sapien
caaaatcctttaatttacctgatgc

SEQ ID NO: 280311 - DNA, 25 bp, Homo sapien
tttaatttacctgatgccctcatca

SEQ ID NO: 280312 - DNA, 25 bp, Homo sapien
taatttacctgatgccctcatcagg

SEQ ID NO: 280313 - DNA, 25 bp, Homo sapien
tcctttaatttacctgatgccctca

SEQ ID NO: 280314 - DNA, 25 bp, Homo sapien
ccttgagagccttgggaggtgatgt

SEQ ID NO: 280315 - DNA, 25 bp, Homo sapien
cttctgcaaaatacaagctcatttt

SEQ ID NO: 280316 - DNA, 25 bp, Homo sapien
ggcatctgtcagatattagaattga

SEQ ID NO: 280317 - DNA, 25 bp, Homo sapien
atttgctgtaggaatgtggtttggc

SEQ ID NO: 280318 - DNA, 25 bp, Homo sapien
ctagtagtcttatgacttttgtatt

SEQ ID NO: 280319 - DNA, 25 bp, Homo sapien
actagtagtcttatgacttttgtat

SEQ ID NO: 280320 - DNA, 25 bp, Homo sapien
tactagtagtcttatgacttttgta

SEQ ID NO: 280321 - DNA, 25 bp, Homo sapien
tttactagtagtcttatgacttttg

SEQ ID NO: 280322 - DNA, 25 bp, Homo sapien
gcccatgaagttagcaatgcctgtg

SEQ ID NO: 280323 - DNA, 25 bp, Homo sapien
gaaacagttggaggttcgtgccgtc

SEQ ID NO: 280324 - DNA, 25 bp, Homo sapien
actgtgaagaggctgaaagacacct

SEQ ID NO: 280325 - DNA, 25 bp, Homo sapien
tctgttttgggcaagttcgctgctc

SEQ ID NO: 280326 - DNA, 25 bp, Homo sapien
tatagagtaacacactggaccgagg

SEQ ID NO: 280327 - DNA, 25 bp, Homo sapien
ctttgtgcatgaagacgcctggcct

SEQ ID NO: 280328 - DNA, 25 bp, Homo sapien
tatctagaaagcaggtgagctagcc

SEQ ID NO: 280329 - DNA, 25 bp, Homo sapien
gctgacaataagaacgtggccacct

SEQ ID NO: 280330 - DNA, 25 bp, Homo sapien
gcttgctcatatgatcaaagacaat

SEQ ID NO: 280331 - DNA, 25 bp, Homo sapien
gtaatgtgcgaactttcccttctcc

SEQ ID NO: 280332 - DNA, 25 bp, Homo sapien
atggctgggagtaatgtgcgaactt

SEQ ID NO: 280333 - DNA, 25 bp, Homo sapien
ggtttttgccaaaagagtgatgaaa

SEQ ID NO: 280334 - DNA, 25 bp, Homo sapien
tggagaatccacaatcatcaattat

SEQ ID NO: 280335 - DNA, 25 bp, Homo sapien
caattattcacaaagcgcctctacc

SEQ ID NO: 280336 - DNA, 25 bp, Homo sapien
tttccttaattctggagaatccaca

SEQ ID NO: 280337 - DNA, 25 bp, Homo sapien
ttagtttaagactcatatttccacc

SEQ ID NO: 280338 - DNA, 25 bp, Homo sapien
gaagtcagaacgcttccttccatga

SEQ ID NO: 280339 - DNA, 25 bp, Homo sapien
cttccatgaactggtgcaacatgca

SEQ ID NO: 280340 - DNA, 25 bp, Homo sapien
caacatgcatggatttgaatgagct

SEQ ID NO: 280341 - DNA, 25 bp, Homo sapien
tgaatgagctactgacaagttgtca

SEQ ID NO: 280342 - DNA, 25 bp, Homo sapien
aaatgatgaacaaagtgaagggcag

SEQ ID NO: 280343 - DNA, 25 bp, Homo sapien
acccagtttgtgaataagtttcctg

SEQ ID NO: 280344 - DNA, 25 bp, Homo sapien
gaacgctagagacctgaatacccag

SEQ ID NO: 280345 - DNA, 25 bp, Homo sapien
ccgcccctggctgatactacttatt

SEQ ID NO: 280346 - DNA, 25 bp, Homo sapien
gaggctgcgcgcaagctcgcctcag

SEQ ID NO: 280347 - DNA, 25 bp, Homo sapien
cgaggaggctgcgcgcaagctcgcc

SEQ ID NO: 280348 - DNA, 25 bp, Homo sapien
cagcctctggagctgcgggccctgc

SEQ ID NO: 280349 - DNA, 25 bp, Homo sapien
aggaggctgcgcgcaagctcgcctc

SEQ ID NO: 280350 - DNA, 25 bp, Homo sapien
cttgaatagactgaagcgaagacgg

SEQ ID NO: 280351 - DNA, 25 bp, Homo sapien
tgaatagactgaagcgaagacggtt

SEQ ID NO: 280352 - DNA, 25 bp, Homo sapien
acatgtgcctccagtgctgcggccc

SEQ ID NO: 280353 - DNA, 25 bp, Homo sapien
ccctccggggaccatcagccaggcc

SEQ ID NO: 280354 - DNA, 25 bp, Homo sapien
caaaagactgagcaattgagaaaac

SEQ ID NO: 280355 - DNA, 25 bp, Homo sapien
gaggagagcaaatgtcacaaaagac

SEQ ID NO: 280356 - DNA, 25 bp, Homo sapien
gaccacagatgactgttaacgcctc

SEQ ID NO: 280357 - DNA, 25 bp, Homo sapien
gcctccacagtggaccaagaaagga

SEQ ID NO: 280358 - DNA, 25 bp, Homo sapien
gatggaaccatctacacaaggagga

SEQ ID NO: 280359 - DNA, 25 bp, Homo sapien
tgagcatttggaagccaaccctggt

SEQ ID NO: 280360 - DNA, 25 bp, Homo sapien
gaaggcactaagactacagatgaga

SEQ ID NO: 280361 - DNA, 25 bp, Homo sapien
cagatgagacccatgacagggctga

SEQ ID NO: 280362 - DNA, 25 bp, Homo sapien
taatgtcccacatccacacatcggg

SEQ ID NO: 280363 - DNA, 25 bp, Homo sapien
cagctcgatgcagaaccaccatgct

SEQ ID NO: 280364 - DNA, 25 bp, Homo sapien
tgctctggaactgtcacctgtgatg

SEQ ID NO: 280365 - DNA, 25 bp, Homo sapien
gatgctctcccttgaatcgactgga

SEQ ID NO: 280366 - DNA, 25 bp, Homo sapien
tattaccaaaataacacagcaccgt

SEQ ID NO: 280367 - DNA, 25 bp, Homo sapien
gctgtgagctgttcctcgagttgaa

SEQ ID NO: 280368 - DNA, 25 bp, Homo sapien
tatttgaatgtttatggcacctgac

SEQ ID NO: 280369 - DNA, 25 bp, Homo sapien
tcagtgctcctagggttctccaggt

SEQ ID NO: 280370 - DNA, 25 bp, Homo sapien
taaccaaggtacctatgaaaagcgc

SEQ ID NO: 280371 - DNA, 25 bp, Homo sapien
gaaaagcgctagctatcatgtgtag

SEQ ID NO: 280372 - DNA, 25 bp, Homo sapien
taactgggcagagaatggtcctaac

SEQ ID NO: 280373 - DNA, 25 bp, Homo sapien
ccttggctactaacatctggagact

SEQ ID NO: 280374 - DNA, 25 bp, Homo sapien
tttcacttgcgtgctcagagctgcc

SEQ ID NO: 280375 - DNA, 25 bp, Homo sapien
ctcggaaaacagacccacatctcta

SEQ ID NO: 280376 - DNA, 25 bp, Homo sapien
tggttctctctaaagagggcctgcc

SEQ ID NO: 280377 - DNA, 25 bp, Homo sapien
cagagctgccgtctgaaggtccaca

SEQ ID NO: 280378 - DNA, 25 bp, Homo sapien
tcaaatgtgggtgtttcagtaacca

SEQ ID NO: 280379 - DNA, 25 bp, Homo sapien
cgcccttgagctacttcaaatgtgg

SEQ ID NO: 280380 - DNA, 25 bp, Homo sapien
catgctggtgcatatacgcccttga

SEQ ID NO: 280381 - DNA, 25 bp, Homo sapien
cagtaaccacgttccatgcctgagg

SEQ ID NO: 280382 - DNA, 25 bp, Homo sapien
tgtcaagaagcgttatgtgcagtac

SEQ ID NO: 280383 - DNA, 25 bp, Homo sapien
tataaggtatgtgctattggcccag

SEQ ID NO: 280384 - DNA, 25 bp, Homo sapien
tgcagcaagtgcttccgtctccgga

SEQ ID NO: 280385 - DNA, 25 bp, Homo sapien
gagcttgtggaaataccttggctga

SEQ ID NO: 280386 - DNA, 25 bp, Homo sapien
gatcatgcctactacctgtgacaag

SEQ ID NO: 280387 - DNA, 25 bp, Homo sapien
cagtctcctaccctgtgaggcgggt

SEQ ID NO: 280388 - DNA, 25 bp, Homo sapien
tatttgtagtggtggccgaaaggtc

SEQ ID NO: 280389 - DNA, 25 bp, Homo sapien
ggcttagaaacatacaccccaggac

SEQ ID NO: 280390 - DNA, 25 bp, Homo sapien
ccaagcactaaccaggccaaccctg

SEQ ID NO: 280391 - DNA, 25 bp, Homo sapien
atccaagcactaaccaggccaaccc

SEQ ID NO: 280392 - DNA, 25 bp, Homo sapien
cgagatcagacaagatcgggcgtgt

SEQ ID NO: 280393 - DNA, 25 bp, Homo sapien
gatcagacaagatcgggcgtgttca

SEQ ID NO: 280394 - DNA, 25 bp, Homo sapien
ccattttggacaggatggtgtcaat

SEQ ID NO: 280395 - DNA, 25 bp, Homo sapien
gggactatgggcgcgcaccacccca

SEQ ID NO: 280396 - DNA, 25 bp, Homo sapien
ctatgggcgcgcaccaccccaccca

SEQ ID NO: 280397 - DNA, 25 bp, Homo sapien
actatgggcgcgcaccaccccaccc

SEQ ID NO: 280398 - DNA, 25 bp, Homo sapien
gacaaagcagtattatcagtaagtg

SEQ ID NO: 280399 - DNA, 25 bp, Homo sapien
gagcagagcctgacagataataaac

SEQ ID NO: 280400 - DNA, 25 bp, Homo sapien
tcagtaagtgtaagcaagtttaaag

SEQ ID NO: 280401 - DNA, 25 bp, Homo sapien
gaggtccacagatactaacatagag

SEQ ID NO: 280402 - DNA, 25 bp, Homo sapien
aagggatccacagcgtcagcttccc

SEQ ID NO: 280403 - DNA, 25 bp, Homo sapien
agggatccacagcgtcagcttccca

SEQ ID NO: 280404 - DNA, 25 bp, Homo sapien
ctcaagggatccacagcgtcagctt

SEQ ID NO: 280405 - DNA, 25 bp, Homo sapien
gataatttcatggagcctttttaaa

SEQ ID NO: 280406 - DNA, 25 bp, Homo sapien
tacatagataatttcatggagcctt

SEQ ID NO: 280407 - DNA, 25 bp, Homo sapien
ataggctagatacctatgtacatag

SEQ ID NO: 280408 - DNA, 25 bp, Homo sapien
gtgggatataggctagatacctatg

SEQ ID NO: 280409 - DNA, 25 bp, Homo sapien
caaccgaggctccacagttggctgc

SEQ ID NO: 280410 - DNA, 25 bp, Homo sapien
ggccgcctttctactgtgccaagtt

SEQ ID NO: 280411 - DNA, 25 bp, Homo sapien
tgacgggcaaaagtgtggccgcctt

SEQ ID NO: 280412 - DNA, 25 bp, Homo sapien
tgagaggctttccatatctggtcct

SEQ ID NO: 280413 - DNA, 25 bp, Homo sapien
tccaacagacttatgtgaggtaggc

SEQ ID NO: 280414 - DNA, 25 bp, Homo sapien
tgtgatcccattttaagtctgagga

SEQ ID NO: 280415 - DNA, 25 bp, Homo sapien
ggtgatgctatccacagatacaaga

SEQ ID NO: 280416 - DNA, 25 bp, Homo sapien
gaactctccaacttaagtgtctggg

SEQ ID NO: 280417 - DNA, 25 bp, Homo sapien
agacaaggtccttattgctcacccc

SEQ ID NO: 280418 - DNA, 25 bp, Homo sapien
gggataagagatggcagcccctgct

SEQ ID NO: 280419 - DNA, 25 bp, Homo sapien
gatggcagcccctgctatgtgaaaa

SEQ ID NO: 280420 - DNA, 25 bp, Homo sapien
ggaagacaaggtccttattgctcac

SEQ ID NO: 280421 - DNA, 25 bp, Homo sapien
cagagtcctgtgcattctgccaagg

SEQ ID NO: 280422 - DNA, 25 bp, Homo sapien
cgattctgcctctgtagctcaaggg

SEQ ID NO: 280423 - DNA, 25 bp, Homo sapien
tgccattccggtgcagtgcaggcct

SEQ ID NO: 280424 - DNA, 25 bp, Homo sapien
tatctgcgttcgtctcggtgggctt

SEQ ID NO: 280425 - DNA, 25 bp, Homo sapien
tcgcagcctcagtgtatgggaaacc

SEQ ID NO: 280426 - DNA, 25 bp, Homo sapien
gaggagcgctcttccatcttgacca

SEQ ID NO: 280427 - DNA, 25 bp, Homo sapien
gtctgattcataccctagcctgagg

SEQ ID NO: 280428 - DNA, 25 bp, Homo sapien
cctggctgccgagagtgaagtttca

SEQ ID NO: 280429 - DNA, 25 bp, Homo sapien
actgcagtgggctcggataggccca

SEQ ID NO: 280430 - DNA, 25 bp, Homo sapien
agttttccgcctctttgtgatgctg

SEQ ID NO: 280431 - DNA, 25 bp, Homo sapien
gcaggagctgcgactgccacgtagt

SEQ ID NO: 280432 - DNA, 25 bp, Homo sapien
gctttgaagaaactaggactgcagt

SEQ ID NO: 280433 - DNA, 25 bp, Homo sapien
caggaccagcaaggccccaagttgt

SEQ ID NO: 280434 - DNA, 25 bp, Homo sapien
cctctgggaacaatccttcctcggg

SEQ ID NO: 280435 - DNA, 25 bp, Homo sapien
gtaaaacctgattaatctactgcct

SEQ ID NO: 280436 - DNA, 25 bp, Homo sapien
gcaggctaccgacgtcctctgggaa

SEQ ID NO: 280437 - DNA, 25 bp, Homo sapien
gtaactcagttaacatgcgcccggg

SEQ ID NO: 280438 - DNA, 25 bp, Homo sapien
aatacagggcgtaagaatcgcaggc

SEQ ID NO: 280439 - DNA, 25 bp, Homo sapien
cagccttgccttagcctgggagaca

SEQ ID NO: 280440 - DNA, 25 bp, Homo sapien
ttagcaggcaacaaagggtgacgac

SEQ ID NO: 280441 - DNA, 25 bp, Homo sapien
gctctggcccacgaagcagtttcac

SEQ ID NO: 280442 - DNA, 25 bp, Homo sapien
cagtttcacagctgctacagacaga

SEQ ID NO: 280443 - DNA, 25 bp, Homo sapien
ggttgtgcgtctgcctttgctgtcc

SEQ ID NO: 280444 - DNA, 25 bp, Homo sapien
tagccgcaggctcaagtatggtcca

SEQ ID NO: 280445 - DNA, 25 bp, Homo sapien
aatgtgtgttgtccagcttccaggg

SEQ ID NO: 280446 - DNA, 25 bp, Homo sapien
tcagtagataccttgggtgcccagc

SEQ ID NO: 280447 - DNA, 25 bp, Homo sapien
tgctaaaagacgctaaccctcctgt

SEQ ID NO: 280448 - DNA, 25 bp, Homo sapien
ctcttcaaacagaccaaaggcggcc

SEQ ID NO: 280449 - DNA, 25 bp, Homo sapien
tcttgccttgtgtaggagcctgctc

SEQ ID NO: 280450 - DNA, 25 bp, Homo sapien
tataagcctcttgtaacagcccctg

SEQ ID NO: 280451 - DNA, 25 bp, Homo sapien
acgttgtctacactaagcctggctg

SEQ ID NO: 280452 - DNA, 25 bp, Homo sapien
tttcacagaccgtaaaaggcatcct

SEQ ID NO: 280453 - DNA, 25 bp, Homo sapien
ggtagcacaactagccgagcagatt

SEQ ID NO: 280454 - DNA, 25 bp, Homo sapien
tccaccggcagacagtgtgtagctg

SEQ ID NO: 280455 - DNA, 25 bp, Homo sapien
cacgatctgagagatagctggcact

SEQ ID NO: 280456 - DNA, 25 bp, Homo sapien
catagcagctgataagcagtacgtc

SEQ ID NO: 280457 - DNA, 25 bp, Homo sapien
gctgcgtcttttgtgaccccgtctt

SEQ ID NO: 280458 - DNA, 25 bp, Homo sapien
ctcccgggcgatgagacgcagcaca

SEQ ID NO: 280459 - DNA, 25 bp, Homo sapien
cgtcttttgtgaccccgtcttccag

SEQ ID NO: 280460 - DNA, 25 bp, Homo sapien
cccgggcgatgagacgcagcacatg

SEQ ID NO: 280461 - DNA, 25 bp, Homo sapien
gatgacttcgagctggtcctgtggt

SEQ ID NO: 280462 - DNA, 25 bp, Homo sapien
cagtgtgtcacaggttctgcatgac

SEQ ID NO: 280463 - DNA, 25 bp, Homo sapien
ttctgcacgcgtggagcaagagcca

SEQ ID NO: 280464 - DNA, 25 bp, Homo sapien
tcaagctctacaaggagctccgctg

SEQ ID NO: 280465 - DNA, 25 bp, Homo sapien
tgccagtggtgttgggagacttgag

SEQ ID NO: 280466 - DNA, 25 bp, Homo sapien
gggcctgtgggccatccagctgcat

SEQ ID NO: 280467 - DNA, 25 bp, Homo sapien
ctgggcctgtgggccatccagctgc

SEQ ID NO: 280468 - DNA, 25 bp, Homo sapien
cctgccagtggtgttgggagacttg

SEQ ID NO: 280469 - DNA, 25 bp, Homo sapien
ttgtcatgattgtctctccgtggcg

SEQ ID NO: 280470 - DNA, 25 bp, Homo sapien
gagccacggaacctaagaacgccga

SEQ ID NO: 280471 - DNA, 25 bp, Homo sapien
cgggccgggctctgcattcttgttg

SEQ ID NO: 280472 - DNA, 25 bp, Homo sapien
tgtttcctgaacgttggccggcgga

SEQ ID NO: 280473 - DNA, 25 bp, Homo sapien
ctgcccagtaagtgaggagggtaag

SEQ ID NO: 280474 - DNA, 25 bp, Homo sapien
tgcagagtgaggagaactaagagga

SEQ ID NO: 280475 - DNA, 25 bp, Homo sapien
gaggagaactaagaggagagtggcc

SEQ ID NO: 280476 - DNA, 25 bp, Homo sapien
agtgaggagaactaagaggagagtg

SEQ ID NO: 280477 - DNA, 25 bp, Homo sapien
tgaggagaactaagaggagagtggc

SEQ ID NO: 280478 - DNA, 25 bp, Homo sapien
taaatagtgataacaagcctcatcc

SEQ ID NO: 280479 - DNA, 25 bp, Homo sapien
tctctaagatccctgaggagaagtt

SEQ ID NO: 280480 - DNA, 25 bp, Homo sapien
aggaggccaaactgcctgacctgga

SEQ ID NO: 280481 - DNA, 25 bp, Homo sapien
gctgctgtcctgtactaaatagtga

SEQ ID NO: 280482 - DNA, 25 bp, Homo sapien
caggatcacaaggaggggaggagtc

SEQ ID NO: 280483 - DNA, 25 bp, Homo sapien
tacagtgagacaggatcacaaggag

SEQ ID NO: 280484 - DNA, 25 bp, Homo sapien
acgtacagtgagacaggatcacaag

SEQ ID NO: 280485 - DNA, 25 bp, Homo sapien
caaggaggggaggagtcaagtccat

SEQ ID NO: 280486 - DNA, 25 bp, Homo sapien
gaggagaggggtccaggccatggtg

SEQ ID NO: 280487 - DNA, 25 bp, Homo sapien
gtccaggccatggtggagatgcccc

SEQ ID NO: 280488 - DNA, 25 bp, Homo sapien
gagcagagggtgagaagctggagga

SEQ ID NO: 280489 - DNA, 25 bp, Homo sapien
gggtccaggccatggtggagatgcc

SEQ ID NO: 280490 - DNA, 25 bp, Homo sapien
agagggtgaccttctgtcccacggt

SEQ ID NO: 280491 - DNA, 25 bp, Homo sapien
ggtcagcgcagactgtgcccaggac

SEQ ID NO: 280492 - DNA, 25 bp, Homo sapien
gagaaatctgttggtaccagcccac

SEQ ID NO: 280493 - DNA, 25 bp, Homo sapien
gacaccgaggcttcctgggtcagcg

SEQ ID NO: 280494 - DNA, 25 bp, Homo sapien
tgtagtcccatgttgaacagtaata

SEQ ID NO: 280495 - DNA, 25 bp, Homo sapien
tttccaaacatcacagttttgggag

SEQ ID NO: 280496 - DNA, 25 bp, Homo sapien
tcctcaggctagaggcccgagatag

SEQ ID NO: 280497 - DNA, 25 bp, Homo sapien
tgagccagagaagcggtcagggatc

SEQ ID NO: 280498 - DNA, 25 bp, Homo sapien
ggtccaagccatggtgcagactccc

SEQ ID NO: 280499 - DNA, 25 bp, Homo sapien
aagccatggtgcagactccccagag

SEQ ID NO: 280500 - DNA, 25 bp, Homo sapien
agtggggtccaagccatggtgcaga

SEQ ID NO: 280501 - DNA, 25 bp, Homo sapien
caagccatggtgcagactccccaga

SEQ ID NO: 280502 - DNA, 25 bp, Homo sapien
aagcttcatcaagtaccgagggccc

SEQ ID NO: 280503 - DNA, 25 bp, Homo sapien
gcgattgagtcagcacaagctggga

SEQ ID NO: 280504 - DNA, 25 bp, Homo sapien
gcagagggcgattgagtcagcacaa

SEQ ID NO: 280505 - DNA, 25 bp, Homo sapien
catgcgatggcgtagctgctgtgcc

SEQ ID NO: 280506 - DNA, 25 bp, Homo sapien
gagagaccacagtggagacccatac

SEQ ID NO: 280507 - DNA, 25 bp, Homo sapien
gggagagaccacagtggagacccat

SEQ ID NO: 280508 - DNA, 25 bp, Homo sapien
tgaaggagaaggcgggggagagacc

SEQ ID NO: 280509 - DNA, 25 bp, Homo sapien
gagaccacagtggagacccatacat

SEQ ID NO: 280510 - DNA, 25 bp, Homo sapien
cctggagcctcagcattgggcctat

SEQ ID NO: 280511 - DNA, 25 bp, Homo sapien
gtctctcggaggcatgtttgtacca

SEQ ID NO: 280512 - DNA, 25 bp, Homo sapien
gtttgtaccagagcacatgcccgtg

SEQ ID NO: 280513 - DNA, 25 bp, Homo sapien
tgcccctaagggtcaatgactgctt

SEQ ID NO: 280514 - DNA, 25 bp, Homo sapien
tgctgaccctaatgggagcacaagg

SEQ ID NO: 280515 - DNA, 25 bp, Homo sapien
gaccctaatgggagcacaaggatgg

SEQ ID NO: 280516 - DNA, 25 bp, Homo sapien
cacagagtttagtgttgggaatgcc

SEQ ID NO: 280517 - DNA, 25 bp, Homo sapien
tgatgatatagacagcctcattcct

SEQ ID NO: 280518 - DNA, 25 bp, Homo sapien
atgaggaggagaggggaccagtcca

SEQ ID NO: 280519 - DNA, 25 bp, Homo sapien
ctgtacagtgagtgaggagtatgag

SEQ ID NO: 280520 - DNA, 25 bp, Homo sapien
cagtgagtgaggagtatgaggagga

SEQ ID NO: 280521 - DNA, 25 bp, Homo sapien
tacagtgagtgaggagtatgaggag

SEQ ID NO: 280522 - DNA, 25 bp, Homo sapien
cagaaatgctcagcgaagcctgtga

SEQ ID NO: 280523 - DNA, 25 bp, Homo sapien
cctgccactgatggaggttgagtca

SEQ ID NO: 280524 - DNA, 25 bp, Homo sapien
gaaggccaatggctgttttcacaaa

SEQ ID NO: 280525 - DNA, 25 bp, Homo sapien
ctatggagccattcctgggagctgc

SEQ ID NO: 280526 - DNA, 25 bp, Homo sapien
ggacagacatctggcagttgaggct

SEQ ID NO: 280527 - DNA, 25 bp, Homo sapien
tccaccctgtttttgagcccctaga

SEQ ID NO: 280528 - DNA, 25 bp, Homo sapien
tatcaagatgtacttgctcccctcg

SEQ ID NO: 280529 - DNA, 25 bp, Homo sapien
cagatggtgtctggtccatgaggac

SEQ ID NO: 280530 - DNA, 25 bp, Homo sapien
gggtggagatggaggagaggagccc

SEQ ID NO: 280531 - DNA, 25 bp, Homo sapien
gagatggaggagaggagcccagagc

SEQ ID NO: 280532 - DNA, 25 bp, Homo sapien
ctgaatagtgagggtggagatggag

SEQ ID NO: 280533 - DNA, 25 bp, Homo sapien
gatggaggagaggagcccagagcat

SEQ ID NO: 280534 - DNA, 25 bp, Homo sapien
gagtgtggttgtctatcccaagccc

SEQ ID NO: 280535 - DNA, 25 bp, Homo sapien
gagatgccatgttcctaaccgggag

SEQ ID NO: 280536 - DNA, 25 bp, Homo sapien
gtcccaggctgagcagtaataggca

SEQ ID NO: 280537 - DNA, 25 bp, Homo sapien
taaccgggagccagggaatctctct

SEQ ID NO: 280538 - DNA, 25 bp, Homo sapien
agattgtagctttcatcatgagact

SEQ ID NO: 280539 - DNA, 25 bp, Homo sapien
tgtccatggagccagagaactgatc

SEQ ID NO: 280540 - DNA, 25 bp, Homo sapien
ctccaatccgcagcccagagatggt

SEQ ID NO: 280541 - DNA, 25 bp, Homo sapien
catgagactgacaggagaagtcagc

SEQ ID NO: 280542 - DNA, 25 bp, Homo sapien
aatatcacaggagaataggtgccca

SEQ ID NO: 280543 - DNA, 25 bp, Homo sapien
tatcacaggagaataggtgcccagg

SEQ ID NO: 280544 - DNA, 25 bp, Homo sapien
atatcacaggagaataggtgcccag

SEQ ID NO: 280545 - DNA, 25 bp, Homo sapien
ggaaggctccgtgacttctgctggt

SEQ ID NO: 280546 - DNA, 25 bp, Homo sapien
ggtacaagaatatgtgacagcctcc

SEQ ID NO: 280547 - DNA, 25 bp, Homo sapien
gaatccctgcacattgcccgaggga

SEQ ID NO: 280548 - DNA, 25 bp, Homo sapien
taatagtcggacttgatctcaggct

SEQ ID NO: 280549 - DNA, 25 bp, Homo sapien
tgcagggatctcaaaagggcatcca

SEQ ID NO: 280550 - DNA, 25 bp, Homo sapien
tgatatataggagtaacgccccacc

SEQ ID NO: 280551 - DNA, 25 bp, Homo sapien
acttgagggtccagcgcatctgtga

SEQ ID NO: 280552 - DNA, 25 bp, Homo sapien
cagtcagagggttagcgtcctgcag

SEQ ID NO: 280553 - DNA, 25 bp, Homo sapien
aaggaggacaatgaggaggaggagt

SEQ ID NO: 280554 - DNA, 25 bp, Homo sapien
tgaaggaggacaatgaggaggagga

SEQ ID NO: 280555 - DNA, 25 bp, Homo sapien
ggaggacaatgaggaggaggagtgg

SEQ ID NO: 280556 - DNA, 25 bp, Homo sapien
gtgaaggaggacaatgaggaggagg

SEQ ID NO: 280557 - DNA, 25 bp, Homo sapien
tatagtggtcagctccagtcctgga

SEQ ID NO: 280558 - DNA, 25 bp, Homo sapien
ggctgctgccgaaagcattcaatgg

SEQ ID NO: 280559 - DNA, 25 bp, Homo sapien
cctcagacgggattgtagaaatgac

SEQ ID NO: 280560 - DNA, 25 bp, Homo sapien
gtaccacagatatagtcagctccat

SEQ ID NO: 280561 - DNA, 25 bp, Homo sapien
ctgagcaatgagagaggaacatgag

SEQ ID NO: 280562 - DNA, 25 bp, Homo sapien
gcaatgagagaggaacatgaggagc

SEQ ID NO: 280563 - DNA, 25 bp, Homo sapien
gagcaatgagagaggaacatgagga

SEQ ID NO: 280564 - DNA, 25 bp, Homo sapien
catgaggagcagaggggtccaggcc

SEQ ID NO: 280565 - DNA, 25 bp, Homo sapien
tctggctcatgctcccggagatgca

SEQ ID NO: 280566 - DNA, 25 bp, Homo sapien
tgtgacacgtacaacagtaatagcc

SEQ ID NO: 280567 - DNA, 25 bp, Homo sapien
gtgaggtcatctgagtcagcacagg

SEQ ID NO: 280568 - DNA, 25 bp, Homo sapien
aaagttaccaactctgaagccactg

SEQ ID NO: 280569 - DNA, 25 bp, Homo sapien
aggacagtgaggaggagaagaccca

SEQ ID NO: 280570 - DNA, 25 bp, Homo sapien
ctgtgtctgggtcatgtttcaggac

SEQ ID NO: 280571 - DNA, 25 bp, Homo sapien
ggacagtgaggaggagaagacccag

SEQ ID NO: 280572 - DNA, 25 bp, Homo sapien
tgtctgggtcatgtttcaggacagt

SEQ ID NO: 280573 - DNA, 25 bp, Homo sapien
gaggaggggactgttacttccagat

SEQ ID NO: 280574 - DNA, 25 bp, Homo sapien
gaggggactgttacttccagatgat

SEQ ID NO: 280575 - DNA, 25 bp, Homo sapien
ggccaggccacactgtccacccaaa

SEQ ID NO: 280576 - DNA, 25 bp, Homo sapien
gggactgttacttccagatgatggg

SEQ ID NO: 280577 - DNA, 25 bp, Homo sapien
aggccatggtcaacacagtcctcct

SEQ ID NO: 280578 - DNA, 25 bp, Homo sapien
catggtcaacacagtcctcctgagg

SEQ ID NO: 280579 - DNA, 25 bp, Homo sapien
gtcaacacagtcctcctgaggtcca

SEQ ID NO: 280580 - DNA, 25 bp, Homo sapien
gggcccaggccatggtcaacacagt

SEQ ID NO: 280581 - DNA, 25 bp, Homo sapien
cagtatatccagcagaaatcagcac

SEQ ID NO: 280582 - DNA, 25 bp, Homo sapien
ggaggctccctggtttatgctggta

SEQ ID NO: 280583 - DNA, 25 bp, Homo sapien
ctctgctgtgctcgatcatacagta

SEQ ID NO: 280584 - DNA, 25 bp, Homo sapien
ggagatcagatatgagcaagagccc

SEQ ID NO: 280585 - DNA, 25 bp, Homo sapien
ggtgagcaggaaatgggaccaggcc

SEQ ID NO: 280586 - DNA, 25 bp, Homo sapien
ctgtgcagtgaataaagggggtgag

SEQ ID NO: 280587 - DNA, 25 bp, Homo sapien
tgagcaggaaatgggaccaggccat

SEQ ID NO: 280588 - DNA, 25 bp, Homo sapien
tgcagtgaataaagggggtgagcag

SEQ ID NO: 280589 - DNA, 25 bp, Homo sapien
tagaattggcagtgataatcagcct

SEQ ID NO: 280590 - DNA, 25 bp, Homo sapien
aagccagagaattgtcagggaccca

SEQ ID NO: 280591 - DNA, 25 bp, Homo sapien
ctgaatcagcgcagatgggacccaa

SEQ ID NO: 280592 - DNA, 25 bp, Homo sapien
gagctgctggaaccagtgtatatca

SEQ ID NO: 280593 - DNA, 25 bp, Homo sapien
tgcagtgtgcaaggagagtgaggag

SEQ ID NO: 280594 - DNA, 25 bp, Homo sapien
tgaggaggagaggaaaccagaccat

SEQ ID NO: 280595 - DNA, 25 bp, Homo sapien
gcagtgtgcaaggagagtgaggagg

SEQ ID NO: 280596 - DNA, 25 bp, Homo sapien
ctgtgcagtgtgcaaggagagtgag

SEQ ID NO: 280597 - DNA, 25 bp, Homo sapien
cagagaattggtcagatacccagga

SEQ ID NO: 280598 - DNA, 25 bp, Homo sapien
cagtttacgttatagccagtcccag

SEQ ID NO: 280599 - DNA, 25 bp, Homo sapien
tcagcagatgtcacgggactggcag

SEQ ID NO: 280600 - DNA, 25 bp, Homo sapien
tcttatcaccatgcctgaggagttt

SEQ ID NO: 280601 - DNA, 25 bp, Homo sapien
gagccctgtttcttacttgagtcca

SEQ ID NO: 280602 - DNA, 25 bp, Homo sapien
tcacgagatattagatagggttccc

SEQ ID NO: 280603 - DNA, 25 bp, Homo sapien
gcatctttagatcccaagatgtggc

SEQ ID NO: 280604 - DNA, 25 bp, Homo sapien
aaaatccttgcacaggccgacgcat

SEQ ID NO: 280605 - DNA, 25 bp, Homo sapien
gcatgaggaggtgaccttaacttcc

SEQ ID NO: 280606 - DNA, 25 bp, Homo sapien
gggaacacagactgcatggaggacc

SEQ ID NO: 280607 - DNA, 25 bp, Homo sapien
atgagggaacacagactgcatggag

SEQ ID NO: 280608 - DNA, 25 bp, Homo sapien
aacttccagacaatgtggccagatg

SEQ ID NO: 280609 - DNA, 25 bp, Homo sapien
tggccagacctagagcaagagccca

SEQ ID NO: 280610 - DNA, 25 bp, Homo sapien
cctgaacactgatcatcaccctcat

SEQ ID NO: 280611 - DNA, 25 bp, Homo sapien
gatcccagagtattgcagaagccca

SEQ ID NO: 280612 - DNA, 25 bp, Homo sapien
aatcagaaccctgcaagctggagac

SEQ ID NO: 280613 - DNA, 25 bp, Homo sapien
gaggaggaggatgaggaggaagact

SEQ ID NO: 280614 - DNA, 25 bp, Homo sapien
gcagtggaggaggaggatgaggagg

SEQ ID NO: 280615 - DNA, 25 bp, Homo sapien
catgcagtggaggaggaggatgagg

SEQ ID NO: 280616 - DNA, 25 bp, Homo sapien
gaggaggatgaggaggaagactaag

SEQ ID NO: 280617 - DNA, 25 bp, Homo sapien
tggaaaaatagatacccattatggc

SEQ ID NO: 280618 - DNA, 25 bp, Homo sapien
acctggtgtccatcactgagctctg

SEQ ID NO: 280619 - DNA, 25 bp, Homo sapien
tggtgagtttgaccctttgtcccag

SEQ ID NO: 280620 - DNA, 25 bp, Homo sapien
gatagtctatgtggcagctgctgta

SEQ ID NO: 280621 - DNA, 25 bp, Homo sapien
gctaaatcagcacagattgggagaa

SEQ ID NO: 280622 - DNA, 25 bp, Homo sapien
cccactggatgcagtaaacagcacc

SEQ ID NO: 280623 - DNA, 25 bp, Homo sapien
tggatgcagtaaacagcaccactgc

SEQ ID NO: 280624 - DNA, 25 bp, Homo sapien
ggatgcagtaaacagcaccactgcc

SEQ ID NO: 280625 - DNA, 25 bp, Homo sapien
cactggatgcagtaaacagcaccac

SEQ ID NO: 280626 - DNA, 25 bp, Homo sapien
tgaaggagagaggaatccgggccat

SEQ ID NO: 280627 - DNA, 25 bp, Homo sapien
gatgaaggagagaggaatccgggcc

SEQ ID NO: 280628 - DNA, 25 bp, Homo sapien
actgaggaggatgaaggagagagga

SEQ ID NO: 280629 - DNA, 25 bp, Homo sapien
aggatgaaggagagaggaatccggg

SEQ ID NO: 280630 - DNA, 25 bp, Homo sapien
agaagcatcatccaggccatggtgg

SEQ ID NO: 280631 - DNA, 25 bp, Homo sapien
ctaagtgttctcaggcttcccagct

SEQ ID NO: 280632 - DNA, 25 bp, Homo sapien
tccataagcaaggagtccgaggaga

SEQ ID NO: 280633 - DNA, 25 bp, Homo sapien
gggacactcatgaaggctaagtgtt

SEQ ID NO: 280634 - DNA, 25 bp, Homo sapien
cagggatagagtcccttcccctgac

SEQ ID NO: 280635 - DNA, 25 bp, Homo sapien
gatgagagtaacctggaccctgttt

SEQ ID NO: 280636 - DNA, 25 bp, Homo sapien
gagacacagttatgatcatgaggat

SEQ ID NO: 280637 - DNA, 25 bp, Homo sapien
acaggagagacacagttatgatcat

SEQ ID NO: 280638 - DNA, 25 bp, Homo sapien
ctgtagatgagcgtgcgtggagcct

SEQ ID NO: 280639 - DNA, 25 bp, Homo sapien
cactgagaacgatggctcctgggtc

SEQ ID NO: 280640 - DNA, 25 bp, Homo sapien
tgagccagagctcaagccacaagtg

SEQ ID NO: 280641 - DNA, 25 bp, Homo sapien
gaccccagaagagcgagtgtttgtg

SEQ ID NO: 280642 - DNA, 25 bp, Homo sapien
ggtggaaaccatcattagggtggct

SEQ ID NO: 280643 - DNA, 25 bp, Homo sapien
ggtggttttagccaccaccagctgg

SEQ ID NO: 280644 - DNA, 25 bp, Homo sapien
ccatcattagggtggctgccacagc

SEQ ID NO: 280645 - DNA, 25 bp, Homo sapien
cgggtggttttagccaccaccagct

SEQ ID NO: 280646 - DNA, 25 bp, Homo sapien
ctgataagtgagaggggagcagcag

SEQ ID NO: 280647 - DNA, 25 bp, Homo sapien
agggaggagcaggggccccggccat

SEQ ID NO: 280648 - DNA, 25 bp, Homo sapien
cagcagggaggagcaggggccccgg

SEQ ID NO: 280649 - DNA, 25 bp, Homo sapien
gcagggaggagcaggggccccggcc

SEQ ID NO: 280650 - DNA, 25 bp, Homo sapien
agccatggtgcttacttgagtcaga

SEQ ID NO: 280651 - DNA, 25 bp, Homo sapien
gaccttagaagtccacaagcagatg

SEQ ID NO: 280652 - DNA, 25 bp, Homo sapien
tagcaggatatgtgctagccaccag

SEQ ID NO: 280653 - DNA, 25 bp, Homo sapien
tagtagcctcatcctctggctgcag

SEQ ID NO: 280654 - DNA, 25 bp, Homo sapien
tcccctttcggcccaagctggccat

SEQ ID NO: 280655 - DNA, 25 bp, Homo sapien
tgtgtcaccacaacctgggaagtaa

SEQ ID NO: 280656 - DNA, 25 bp, Homo sapien
gatatttcagatcaccacaccgagc

SEQ ID NO: 280657 - DNA, 25 bp, Homo sapien
tgttgggcccagctgtcgagatgct

SEQ ID NO: 280658 - DNA, 25 bp, Homo sapien
acactgggcctcattcttggtctag

SEQ ID NO: 280659 - DNA, 25 bp, Homo sapien
gactgaggcttgatccaagggtttg

SEQ ID NO: 280660 - DNA, 25 bp, Homo sapien
tctgagtctacagtggttgaaaacc

SEQ ID NO: 280661 - DNA, 25 bp, Homo sapien
gagttaccctgtagtctgctttgca

SEQ ID NO: 280662 - DNA, 25 bp, Homo sapien
tttgcttcagaagcataggactgag

SEQ ID NO: 280663 - DNA, 25 bp, Homo sapien
gaggggaggatagacatccaagcta

SEQ ID NO: 280664 - DNA, 25 bp, Homo sapien
agagaggggaggatagacatccaag

SEQ ID NO: 280665 - DNA, 25 bp, Homo sapien
aggggaggatagacatccaagctat

SEQ ID NO: 280666 - DNA, 25 bp, Homo sapien
agaggggaggatagacatccaagct

SEQ ID NO: 280667 - DNA, 25 bp, Homo sapien
tggtgctgaagccacacatgagaat

SEQ ID NO: 280668 - DNA, 25 bp, Homo sapien
tctctctctttaggacacagtcagt

SEQ ID NO: 280669 - DNA, 25 bp, Homo sapien
gaggacttgaccaggcttctgctga

SEQ ID NO: 280670 - DNA, 25 bp, Homo sapien
ggtgtagcccacagtatactcagcc

SEQ ID NO: 280671 - DNA, 25 bp, Homo sapien
ttgtaccccggatcagccaaaagct

SEQ ID NO: 280672 - DNA, 25 bp, Homo sapien
cccggatcagccaaaagctcgttca

SEQ ID NO: 280673 - DNA, 25 bp, Homo sapien
gatcagccaaaagctcgttcatgtc

SEQ ID NO: 280674 - DNA, 25 bp, Homo sapien
gttcatgtttgtaccccggatcagc

SEQ ID NO: 280675 - DNA, 25 bp, Homo sapien
gaggagtggggtccaggccatggtg

SEQ ID NO: 280676 - DNA, 25 bp, Homo sapien
gaggaggagtggggtccaggccatg

SEQ ID NO: 280677 - DNA, 25 bp, Homo sapien
aggaggagtggggtccaggccatgg

SEQ ID NO: 280678 - DNA, 25 bp, Homo sapien
ggaggagtggggtccaggccatggt

SEQ ID NO: 280679 - DNA, 25 bp, Homo sapien
cagcaggttgaggattttgtcccac

SEQ ID NO: 280680 - DNA, 25 bp, Homo sapien
cagaggatgattgagtcagcacagg

SEQ ID NO: 280681 - DNA, 25 bp, Homo sapien
aggaactccgctccccttgttgtag

SEQ ID NO: 280682 - DNA, 25 bp, Homo sapien
gagtgttactgtcccaggtctcaca

SEQ ID NO: 280683 - DNA, 25 bp, Homo sapien
aggaaagaggccacgagcccaggcc

SEQ ID NO: 280684 - DNA, 25 bp, Homo sapien
aaaggaaagaggccacgagcccagg

SEQ ID NO: 280685 - DNA, 25 bp, Homo sapien
gaaaaggaaagaggccacgagccca

SEQ ID NO: 280686 - DNA, 25 bp, Homo sapien
gaaagaggccacgagcccaggccat

SEQ ID NO: 280687 - DNA, 25 bp, Homo sapien
aacacgtgcatactcccatcattgg

SEQ ID NO: 280688 - DNA, 25 bp, Homo sapien
ctggtaccaaaacacgtgcatactc

SEQ ID NO: 280689 - DNA, 25 bp, Homo sapien
taccaaaacacgtgcatactcccat

SEQ ID NO: 280690 - DNA, 25 bp, Homo sapien
tgcatactcccatcattggtgctgc

SEQ ID NO: 280691 - DNA, 25 bp, Homo sapien
ggcaaagactgaacaggatggggaa

SEQ ID NO: 280692 - DNA, 25 bp, Homo sapien
gggcaaagactgaacaggatgggga

SEQ ID NO: 280693 - DNA, 25 bp, Homo sapien
gtactcagtctagcctatggattgg

SEQ ID NO: 280694 - DNA, 25 bp, Homo sapien
cactgtcgtgtagcttgagtagtac

SEQ ID NO: 280695 - DNA, 25 bp, Homo sapien
ggatagaaattgttggtgaccactc

SEQ ID NO: 280696 - DNA, 25 bp, Homo sapien
aggaaagagtcagtgagggctcctc

SEQ ID NO: 280697 - DNA, 25 bp, Homo sapien
tagcatagactcagatgtcagagcc

SEQ ID NO: 280698 - DNA, 25 bp, Homo sapien
catgtcttaccgctgtggctcagga

SEQ ID NO: 280699 - DNA, 25 bp, Homo sapien
gaatggtatctcacaagatgcaaga

SEQ ID NO: 280700 - DNA, 25 bp, Homo sapien
gagccaccggtgctgcatgggacat

SEQ ID NO: 280701 - DNA, 25 bp, Homo sapien
ggcagctggagacatccttctcatt

SEQ ID NO: 280702 - DNA, 25 bp, Homo sapien
tctagactcacaggttctcttagtg

SEQ ID NO: 280703 - DNA, 25 bp, Homo sapien
ggcctttctcctcgaggcagctgga

SEQ ID NO: 280704 - DNA, 25 bp, Homo sapien
cagaaacgttgaatgactggacaga

SEQ ID NO: 280705 - DNA, 25 bp, Homo sapien
cataaggagaagagaagttcaggcc

SEQ ID NO: 280706 - DNA, 25 bp, Homo sapien
ttcaggccagcagtgaaagaggatc

SEQ ID NO: 280707 - DNA, 25 bp, Homo sapien
gcagtgagagaggagcataaggaga

SEQ ID NO: 280708 - DNA, 25 bp, Homo sapien
caggccagcagtgaaagaggatcag

SEQ ID NO: 280709 - DNA, 25 bp, Homo sapien
ccccagagatgagcaaattgcctgc

SEQ ID NO: 280710 - DNA, 25 bp, Homo sapien
gactccagagccctagttttacttg

SEQ ID NO: 280711 - DNA, 25 bp, Homo sapien
gctgacagcgggatatgagataaat

SEQ ID NO: 280712 - DNA, 25 bp, Homo sapien
tctttggatttagagaagcagctgg

SEQ ID NO: 280713 - DNA, 25 bp, Homo sapien
aggaggaagagtggggtccaggcca

SEQ ID NO: 280714 - DNA, 25 bp, Homo sapien
ggaggaagagtggggtccaggccat

SEQ ID NO: 280715 - DNA, 25 bp, Homo sapien
gaggaggaggaagagtggggtccag

SEQ ID NO: 280716 - DNA, 25 bp, Homo sapien
ggaggaggaagagtggggtccaggc

SEQ ID NO: 280717 - DNA, 25 bp, Homo sapien
gctgatgccactcaataatgtaggt

SEQ ID NO: 280718 - DNA, 25 bp, Homo sapien
gctggatcctgagaactgtaactgg

SEQ ID NO: 280719 - DNA, 25 bp, Homo sapien
tttgctgctcagagtggaggtaagc

SEQ ID NO: 280720 - DNA, 25 bp, Homo sapien
tacatcaagtaccaagggaccttcc

SEQ ID NO: 280721 - DNA, 25 bp, Homo sapien
cacagatacaatcagcttcatcctc

SEQ ID NO: 280722 - DNA, 25 bp, Homo sapien
acagatacaatcagcttcatcctca

SEQ ID NO: 280723 - DNA, 25 bp, Homo sapien
ttcatcctcaaactggatgttggag

SEQ ID NO: 280724 - DNA, 25 bp, Homo sapien
ctggatgttggagatggtgacctac

SEQ ID NO: 280725 - DNA, 25 bp, Homo sapien
atgtccaaaaaaaataggtcagagt

SEQ ID NO: 280726 - DNA, 25 bp, Homo sapien
gcaaatgtccaaaaaaaataggtca

SEQ ID NO: 280727 - DNA, 25 bp, Homo sapien
caaatgtccaaaaaaaataggtcag

SEQ ID NO: 280728 - DNA, 25 bp, Homo sapien
ctatgcaaatgtccaaaaaaaatag

SEQ ID NO: 280729 - DNA, 25 bp, Homo sapien
acagactactagtggctgtgatgtc

SEQ ID NO: 280730 - DNA, 25 bp, Homo sapien
ggtctgcagctagagggtggatgtg

SEQ ID NO: 280731 - DNA, 25 bp, Homo sapien
cctctgtcactacgctcagctgaag

SEQ ID NO: 280732 - DNA, 25 bp, Homo sapien
gttacaacccacagactactagtgg

SEQ ID NO: 280733 - DNA, 25 bp, Homo sapien
gactgggtaaagtgagtacaactct

SEQ ID NO: 280734 - DNA, 25 bp, Homo sapien
tgctgtcaacgccagccagaggctg

SEQ ID NO: 280735 - DNA, 25 bp, Homo sapien
cttgggtgcgatgaaccagtcctgc

SEQ ID NO: 280736 - DNA, 25 bp, Homo sapien
gagacttgagccacgtagtgggact

SEQ ID NO: 280737 - DNA, 25 bp, Homo sapien
gatcacatggttgattgcattcaca

SEQ ID NO: 280738 - DNA, 25 bp, Homo sapien
cattgagtttagttggcacacagca

SEQ ID NO: 280739 - DNA, 25 bp, Homo sapien
tattcaggatctataaggtgaacca

SEQ ID NO: 280740 - DNA, 25 bp, Homo sapien
gaaccaaggtctgaatgatcacatg

SEQ ID NO: 280741 - DNA, 25 bp, Homo sapien
gagtggtagggctccatgcaaattt

SEQ ID NO: 280742 - DNA, 25 bp, Homo sapien
tgagctaccaccaggactgatccca

SEQ ID NO: 280743 - DNA, 25 bp, Homo sapien
tctgtcacgcgtatcctcagagtgg

SEQ ID NO: 280744 - DNA, 25 bp, Homo sapien
agcccttcttatctgtcacgcgtat

SEQ ID NO: 280745 - DNA, 25 bp, Homo sapien
gcgaggagggtgagaagtagtggag

SEQ ID NO: 280746 - DNA, 25 bp, Homo sapien
cagtgagcgaggagggtgagaagta

SEQ ID NO: 280747 - DNA, 25 bp, Homo sapien
gggtgagaagtagtggagcccaggc

SEQ ID NO: 280748 - DNA, 25 bp, Homo sapien
tgtgcagtgagcgaggagggtgaga

SEQ ID NO: 280749 - DNA, 25 bp, Homo sapien
cccagagggtctttggttatcctca

SEQ ID NO: 280750 - DNA, 25 bp, Homo sapien
caggagatggttaccgtcttccccg

SEQ ID NO: 280751 - DNA, 25 bp, Homo sapien
gctggtaccactgcacatagttgct

SEQ ID NO: 280752 - DNA, 25 bp, Homo sapien
cccggagactccgacacagagtggg

SEQ ID NO: 280753 - DNA, 25 bp, Homo sapien
ttccccatgggtctggagcactgtg

SEQ ID NO: 280754 - DNA, 25 bp, Homo sapien
taccctctctggtggagacaggctg

SEQ ID NO: 280755 - DNA, 25 bp, Homo sapien
gatgctctggggagtttctgtctca

SEQ ID NO: 280756 - DNA, 25 bp, Homo sapien
agactggcccaggtagagatgctct

SEQ ID NO: 280757 - DNA, 25 bp, Homo sapien
acaggctgagactggcccaggtaga

SEQ ID NO: 280758 - DNA, 25 bp, Homo sapien
gcaaagttcacctcaagcacttaga

SEQ ID NO: 280759 - DNA, 25 bp, Homo sapien
tcaagcacttagacaggagagatgg

SEQ ID NO: 280760 - DNA, 25 bp, Homo sapien
agttcacctcaagcacttagacagg

SEQ ID NO: 280761 - DNA, 25 bp, Homo sapien
cacctcaagcacttagacaggagag

SEQ ID NO: 280762 - DNA, 25 bp, Homo sapien
tcaaaaagcagaggggccaagccat

SEQ ID NO: 280763 - DNA, 25 bp, Homo sapien
ggtcaaaaagcagaggggccaagcc

SEQ ID NO: 280764 - DNA, 25 bp, Homo sapien
tgggcagggagggaagaggtcaaaa

SEQ ID NO: 280765 - DNA, 25 bp, Homo sapien
cagggagggaagaggtcaaaaagca

SEQ ID NO: 280766 - DNA, 25 bp, Homo sapien
gaggctgtcagtgccatgtggacca

SEQ ID NO: 280767 - DNA, 25 bp, Homo sapien
tgattgtaattgtcagtcccggagg

SEQ ID NO: 280768 - DNA, 25 bp, Homo sapien
gccattctgtgctaaatagtgaaaa

SEQ ID NO: 280769 - DNA, 25 bp, Homo sapien
gccagggaggccaaactgcctaaca

SEQ ID NO: 280770 - DNA, 25 bp, Homo sapien
cccactcacacggagaagaggctgg

SEQ ID NO: 280771 - DNA, 25 bp, Homo sapien
gaccaaagatatggaaagcctcagc

SEQ ID NO: 280772 - DNA, 25 bp, Homo sapien
caggtgagtctgaatgatgatccca

SEQ ID NO: 280773 - DNA, 25 bp, Homo sapien
gaatctcagtagataccagggaggg

SEQ ID NO: 280774 - DNA, 25 bp, Homo sapien
ctgtgcagtgagagaggagcaggag

SEQ ID NO: 280775 - DNA, 25 bp, Homo sapien
ggaggaggagaggagtcagggccat

SEQ ID NO: 280776 - DNA, 25 bp, Homo sapien
acagatcaggctggggaccaccctg

SEQ ID NO: 280777 - DNA, 25 bp, Homo sapien
ctgagccatgagggacagatcaggc

SEQ ID NO: 280778 - DNA, 25 bp, Homo sapien
cctgggctctgagccctgtccctac

SEQ ID NO: 280779 - DNA, 25 bp, Homo sapien
ggacagatcaggctggggaccaccc

SEQ ID NO: 280780 - DNA, 25 bp, Homo sapien
agggtcagggcgcagctgctgaggg

SEQ ID NO: 280781 - DNA, 25 bp, Homo sapien
cacagcacagtgaggagcagggtca

SEQ ID NO: 280782 - DNA, 25 bp, Homo sapien
gcagggtcagggcgcagctgctgag

SEQ ID NO: 280783 - DNA, 25 bp, Homo sapien
acagacacagcacagtgaggagcag

SEQ ID NO: 280784 - DNA, 25 bp, Homo sapien
caggaataacctgggagagctccct

SEQ ID NO: 280785 - DNA, 25 bp, Homo sapien
agcactactttcgtacacctggcag

SEQ ID NO: 280786 - DNA, 25 bp, Homo sapien
gagatgagcaaaaacgctgtgttac

SEQ ID NO: 280787 - DNA, 25 bp, Homo sapien
gttacttgaggtctccttggagcca

SEQ ID NO: 280788 - DNA, 25 bp, Homo sapien
gccccgcaggctcatctccgccatg

SEQ ID NO: 280789 - DNA, 25 bp, Homo sapien
ctgcagcttcgccgtgtcttctctc

SEQ ID NO: 280790 - DNA, 25 bp, Homo sapien
ttctcctggtggaccctggcgagga

SEQ ID NO: 280791 - DNA, 25 bp, Homo sapien
cgcaggctcatctccgccatgtgct

SEQ ID NO: 280792 - DNA, 25 bp, Homo sapien
aaggctagcttctcctgtgatccga

SEQ ID NO: 280793 - DNA, 25 bp, Homo sapien
tgggcagccgcgataataagcttcc

SEQ ID NO: 280794 - DNA, 25 bp, Homo sapien
ttattcagcatatgtggccccagag

SEQ ID NO: 280795 - DNA, 25 bp, Homo sapien
tgtgatccgacctggagagaaccac

SEQ ID NO: 280796 - DNA, 25 bp, Homo sapien
catgcactgactggaacccagagaa

SEQ ID NO: 280797 - DNA, 25 bp, Homo sapien
tcatcctcatgcactgactggaacc

SEQ ID NO: 280798 - DNA, 25 bp, Homo sapien
catcatcctcatgcactgactggaa

SEQ ID NO: 280799 - DNA, 25 bp, Homo sapien
tcctcatgcactgactggaacccag

SEQ ID NO: 280800 - DNA, 25 bp, Homo sapien
gcctccatgtgctggttactcaaag

SEQ ID NO: 280801 - DNA, 25 bp, Homo sapien
cccagggcatggtgcagattcccac

SEQ ID NO: 280802 - DNA, 25 bp, Homo sapien
ggtggagtcacagcatttaaataag

SEQ ID NO: 280803 - DNA, 25 bp, Homo sapien
gattcccactatgcttgctgaagct

SEQ ID NO: 280804 - DNA, 25 bp, Homo sapien
caatgctgagcagtaatagtcagcc

SEQ ID NO: 280805 - DNA, 25 bp, Homo sapien
gagtgtggcggtctgtctcaagccc

SEQ ID NO: 280806 - DNA, 25 bp, Homo sapien
ccctgagggccggttgttattcctg

SEQ ID NO: 280807 - DNA, 25 bp, Homo sapien
tctcaagcccttggacaccgagggt

SEQ ID NO: 280808 - DNA, 25 bp, Homo sapien
gagtgaggacaagcacgagaggggt

SEQ ID NO: 280809 - DNA, 25 bp, Homo sapien
tgaggacaagcacgagaggggtcca

SEQ ID NO: 280810 - DNA, 25 bp, Homo sapien
agtgaggacaagcacgagaggggtc

SEQ ID NO: 280811 - DNA, 25 bp, Homo sapien
ggacaagcacgagaggggtccaggc

SEQ ID NO: 280812 - DNA, 25 bp, Homo sapien
aacttgagactctggaggagcctct

SEQ ID NO: 280813 - DNA, 25 bp, Homo sapien
gaaagccgatatgctctgagtgcag

SEQ ID NO: 280814 - DNA, 25 bp, Homo sapien
tttttgccaccgatatgaaagccga

SEQ ID NO: 280815 - DNA, 25 bp, Homo sapien
tgaaggccagagacgaccaaataac

SEQ ID NO: 280816 - DNA, 25 bp, Homo sapien
gtggagctgaagcatgcggcctcct

SEQ ID NO: 280817 - DNA, 25 bp, Homo sapien
gcctactttgtatgatgaccctgtc

SEQ ID NO: 280818 - DNA, 25 bp, Homo sapien
ccaaggacaagatgtcagccctggc

SEQ ID NO: 280819 - DNA, 25 bp, Homo sapien
cccatgcaccgcggtggaccaggga

SEQ ID NO: 280820 - DNA, 25 bp, Homo sapien
gaaaagggactacacaccagaggag

SEQ ID NO: 280821 - DNA, 25 bp, Homo sapien
tgtgggagcattctgccatctgagc

SEQ ID NO: 280822 - DNA, 25 bp, Homo sapien
caggcttggcggctcacacatgtag

SEQ ID NO: 280823 - DNA, 25 bp, Homo sapien
ggagccataagacctaaccagcagg

SEQ ID NO: 280824 - DNA, 25 bp, Homo sapien
tacgagctcatggtgccaactgggc

SEQ ID NO: 280825 - DNA, 25 bp, Homo sapien
tctctgatgagactatgggcttccg

SEQ ID NO: 280826 - DNA, 25 bp, Homo sapien
gatgcagaaagaccctcgtatggag

SEQ ID NO: 280827 - DNA, 25 bp, Homo sapien
caacaggttatgaggccccaaggag

SEQ ID NO: 280828 - DNA, 25 bp, Homo sapien
ctccctgctctgagaggtggggccg

SEQ ID NO: 280829 - DNA, 25 bp, Homo sapien
cccgttcctggccactaccatccca

SEQ ID NO: 280830 - DNA, 25 bp, Homo sapien
tgctctgagaggtggggccgtggca

SEQ ID NO: 280831 - DNA, 25 bp, Homo sapien
tggcacaccccgttcctggccacta

SEQ ID NO: 280832 - DNA, 25 bp, Homo sapien
tgcagtagacaaacagcatgagcag

SEQ ID NO: 280833 - DNA, 25 bp, Homo sapien
ctgtgcagtagacaaacagcatgag

SEQ ID NO: 280834 - DNA, 25 bp, Homo sapien
tgtgcagtagacaaacagcatgagc

SEQ ID NO: 280835 - DNA, 25 bp, Homo sapien
cagtagacaaacagcatgagcagga

SEQ ID NO: 280836 - DNA, 25 bp, Homo sapien
ttgtggttccaagggccgaggacat

SEQ ID NO: 280837 - DNA, 25 bp, Homo sapien
tgtcatggtcgttcctcagggtgca

SEQ ID NO: 280838 - DNA, 25 bp, Homo sapien
catggccggcggctgatgcagcacc

SEQ ID NO: 280839 - DNA, 25 bp, Homo sapien
cagtagacgctgtacacaccgatgt

SEQ ID NO: 280840 - DNA, 25 bp, Homo sapien
tgagaaatatctcagcaggaacctg

SEQ ID NO: 280841 - DNA, 25 bp, Homo sapien
agaaatatctcagcaggaacctggg

SEQ ID NO: 280842 - DNA, 25 bp, Homo sapien
gagaaatatctcagcaggaacctgg

SEQ ID NO: 280843 - DNA, 25 bp, Homo sapien
gtgagaaatatctcagcaggaacct

SEQ ID NO: 280844 - DNA, 25 bp, Homo sapien
ctgcagctcagagatgctcaaatac

SEQ ID NO: 280845 - DNA, 25 bp, Homo sapien
gcacagtaatacatagcctcgtcct

SEQ ID NO: 280846 - DNA, 25 bp, Homo sapien
cgggcccccatagcacagtaataca

SEQ ID NO: 280847 - DNA, 25 bp, Homo sapien
ccccatagcacagtaatacatagcc

SEQ ID NO: 280848 - DNA, 25 bp, Homo sapien
gctgcgggcccccatagcacagtaa

SEQ ID NO: 280849 - DNA, 25 bp, Homo sapien
tcaagggacacgtgtcctggctgca

SEQ ID NO: 280850 - DNA, 25 bp, Homo sapien
gtcctggctgcagtgggttccattt

SEQ ID NO: 280851 - DNA, 25 bp, Homo sapien
ggctgcagtgggttccatttcttcc

SEQ ID NO: 280852 - DNA, 25 bp, Homo sapien
caagggacacgtgtcctggctgcag

SEQ ID NO: 280853 - DNA, 25 bp, Homo sapien
ctccaaggggatgcgtgcctctgct

SEQ ID NO: 280854 - DNA, 25 bp, Homo sapien
caacactgcaggaccaggagatgct

SEQ ID NO: 280855 - DNA, 25 bp, Homo sapien
ccatgacagtctctccaaggggatg

SEQ ID NO: 280856 - DNA, 25 bp, Homo sapien
tgacaagcagctttaattccctaat

SEQ ID NO: 280857 - DNA, 25 bp, Homo sapien
tgcggactgcaaacctttataagaa

SEQ ID NO: 280858 - DNA, 25 bp, Homo sapien
gcctgtcataatggccaccttgcgg

SEQ ID NO: 280859 - DNA, 25 bp, Homo sapien
tattgaatatgcatgcgttaggacc

SEQ ID NO: 280860 - DNA, 25 bp, Homo sapien
gaggctgagtacctttatgtccctg

SEQ ID NO: 280861 - DNA, 25 bp, Homo sapien
ccagattcagtgctgggagtccagt

SEQ ID NO: 280862 - DNA, 25 bp, Homo sapien
agattcagtgctgggagtccagtgt

SEQ ID NO: 280863 - DNA, 25 bp, Homo sapien
cagattcagtgctgggagtccagtg

SEQ ID NO: 280864 - DNA, 25 bp, Homo sapien
ctggagcagcggacctccttgctta

SEQ ID NO: 280865 - DNA, 25 bp, Homo sapien
gcggacctccttgcttactttgaat

SEQ ID NO: 280866 - DNA, 25 bp, Homo sapien
gcagcggacctccttgcttactttg

SEQ ID NO: 280867 - DNA, 25 bp, Homo sapien
gagcagcggacctccttgcttactt

SEQ ID NO: 280868 - DNA, 25 bp, Homo sapien
ccaaagtgctgcttgggctcaaggt

SEQ ID NO: 280869 - DNA, 25 bp, Homo sapien
cgagccgcttcatggtcccaaacca

SEQ ID NO: 280870 - DNA, 25 bp, Homo sapien
ctcaaggttgtaattatttgcagcc

SEQ ID NO: 280871 - DNA, 25 bp, Homo sapien
gagccgcttcatggtcccaaaccag

SEQ ID NO: 280872 - DNA, 25 bp, Homo sapien
ggatggagcctccagctggcatgac

SEQ ID NO: 280873 - DNA, 25 bp, Homo sapien
ctccagctggcatgacaggttgtag

SEQ ID NO: 280874 - DNA, 25 bp, Homo sapien
gagcctccagctggcatgacaggtt

SEQ ID NO: 280875 - DNA, 25 bp, Homo sapien
tggagcctccagctggcatgacagg

SEQ ID NO: 280876 - DNA, 25 bp, Homo sapien
ccaccctagtgccagctcaaagtgt

SEQ ID NO: 280877 - DNA, 25 bp, Homo sapien
agaagccaccctagtgccagctcaa

SEQ ID NO: 280878 - DNA, 25 bp, Homo sapien
accctagtgccagctcaaagtgtct

SEQ ID NO: 280879 - DNA, 25 bp, Homo sapien
agctggagaagccaccctagtgcca

SEQ ID NO: 280880 - DNA, 25 bp, Homo sapien
tgattgggcaactactcatctgagt

SEQ ID NO: 280881 - DNA, 25 bp, Homo sapien
aataggctacagtctaaccacagtg

SEQ ID NO: 280882 - DNA, 25 bp, Homo sapien
ttcttgttaaacacaggtctaagcc

SEQ ID NO: 280883 - DNA, 25 bp, Homo sapien
cagatgaatgaaaggtatttggtcc

SEQ ID NO: 280884 - DNA, 25 bp, Homo sapien
cctgccctggccttaccttggccct

SEQ ID NO: 280885 - DNA, 25 bp, Homo sapien
ttggccctcaccctagtcttcgcta

SEQ ID NO: 280886 - DNA, 25 bp, Homo sapien
gaccctgccctggccttaccttggc

SEQ ID NO: 280887 - DNA, 25 bp, Homo sapien
ctcaccctagtcttcgctagaccct

SEQ ID NO: 280888 - DNA, 25 bp, Homo sapien
ggtgcattggcaatgggcctggctt

SEQ ID NO: 280889 - DNA, 25 bp, Homo sapien
tgcattggcaatgggcctggctttg

SEQ ID NO: 280890 - DNA, 25 bp, Homo sapien
gtgcattggcaatgggcctggcttt

SEQ ID NO: 280891 - DNA, 25 bp, Homo sapien
ctccccgaggagtgcagccccggtg

SEQ ID NO: 280892 - DNA, 25 bp, Homo sapien
ttctcctgctccccgaggagtgcag

SEQ ID NO: 280893 - DNA, 25 bp, Homo sapien
tgcagccccggtgggcccaatggtt

SEQ ID NO: 280894 - DNA, 25 bp, Homo sapien
gagtgcagccccggtgggcccaatg

SEQ ID NO: 280895 - DNA, 25 bp, Homo sapien
gtctgggccggcgcctcgctgtgcc

SEQ ID NO: 280896 - DNA, 25 bp, Homo sapien
gagtctgggccggcgcctcgctgtg

SEQ ID NO: 280897 - DNA, 25 bp, Homo sapien
agtctgggccggcgcctcgctgtgc

SEQ ID NO: 280898 - DNA, 25 bp, Homo sapien
tctgggccggcgcctcgctgtgccg

SEQ ID NO: 280899 - DNA, 25 bp, Homo sapien
gctgctctgtcagcccggcatgcat

SEQ ID NO: 280900 - DNA, 25 bp, Homo sapien
gcccggcatgcatgtgctgctggcc

SEQ ID NO: 280901 - DNA, 25 bp, Homo sapien
acaggcccacaatgcgctccgtgtt

SEQ ID NO: 280902 - DNA, 25 bp, Homo sapien
caatgcgctccgtgttccaagtctg

SEQ ID NO: 280903 - DNA, 25 bp, Homo sapien
tgcacgtcccctgtttccaagtctt

SEQ ID NO: 280904 - DNA, 25 bp, Homo sapien
tcggggcccgattttcccttgtgca

SEQ ID NO: 280905 - DNA, 25 bp, Homo sapien
attttcccttgtgcacgtcccctgt

SEQ ID NO: 280906 - DNA, 25 bp, Homo sapien
caagtcttcaaagtcaccgtagagc

SEQ ID NO: 280907 - DNA, 25 bp, Homo sapien
tcttcgtcagggtcaatttcttcct

SEQ ID NO: 280908 - DNA, 25 bp, Homo sapien
ggcactttcttcttcgtcagggtca

SEQ ID NO: 280909 - DNA, 25 bp, Homo sapien
cactttcttcttcgtcagggtcaat

SEQ ID NO: 280910 - DNA, 25 bp, Homo sapien
tcttcttcgtcagggtcaatttctt

SEQ ID NO: 280911 - DNA, 25 bp, Homo sapien
gcatttctcctttaagatcatcaaa

SEQ ID NO: 280912 - DNA, 25 bp, Homo sapien
tcatcaaaatatgtgctttctcctt

SEQ ID NO: 280913 - DNA, 25 bp, Homo sapien
gcttgtttctgcatttctcctttaa

SEQ ID NO: 280914 - DNA, 25 bp, Homo sapien
ttcatcatattccacatcaaacatc

SEQ ID NO: 280915 - DNA, 25 bp, Homo sapien
cagaaagttctaagggcagctcagg

SEQ ID NO: 280916 - DNA, 25 bp, Homo sapien
gaagtggtccatatcaacctgcggc

SEQ ID NO: 280917 - DNA, 25 bp, Homo sapien
cctcacagagttaagtggcatctac

SEQ ID NO: 280918 - DNA, 25 bp, Homo sapien
tttgtacgtgcctctactcagggcc

SEQ ID NO: 280919 - DNA, 25 bp, Homo sapien
tcccaggtcgaaaaccctcatactg

SEQ ID NO: 280920 - DNA, 25 bp, Homo sapien
ccaggtcgaaaaccctcatactgaa

SEQ ID NO: 280921 - DNA, 25 bp, Homo sapien
gtcgaaaaccctcatactgaactct

SEQ ID NO: 280922 - DNA, 25 bp, Homo sapien
aggtcgaaaaccctcatactgaact

SEQ ID NO: 280923 - DNA, 25 bp, Homo sapien
gaacattttcaatctcaacgcagac

SEQ ID NO: 280924 - DNA, 25 bp, Homo sapien
agggaacattttcaatctcaacgca

SEQ ID NO: 280925 - DNA, 25 bp, Homo sapien
gggaacattttcaatctcaacgcag

SEQ ID NO: 280926 - DNA, 25 bp, Homo sapien
ggaacattttcaatctcaacgcaga

SEQ ID NO: 280927 - DNA, 25 bp, Homo sapien
cccaagccacccaggataatggggt

SEQ ID NO: 280928 - DNA, 25 bp, Homo sapien
ccaagccacccaggataatggggta

SEQ ID NO: 280929 - DNA, 25 bp, Homo sapien
caagccacccaggataatggggtaa

SEQ ID NO: 280930 - DNA, 25 bp, Homo sapien
gcctcaggcaccaaatatgcagcaa

SEQ ID NO: 280931 - DNA, 25 bp, Homo sapien
accaaatatgcagcaaagggaccca

SEQ ID NO: 280932 - DNA, 25 bp, Homo sapien
gagcctcaggcaccaaatatgcagc

SEQ ID NO: 280933 - DNA, 25 bp, Homo sapien
caggcaccaaatatgcagcaaaggg

SEQ ID NO: 280934 - DNA, 25 bp, Homo sapien
aggattttcttataccagcgatgtt

SEQ ID NO: 280935 - DNA, 25 bp, Homo sapien
taccagcgatgtttcttcagacgca

SEQ ID NO: 280936 - DNA, 25 bp, Homo sapien
tatgattggatctcgggacttgagg

SEQ ID NO: 280937 - DNA, 25 bp, Homo sapien
aaatatgattggatctcgggacttg

SEQ ID NO: 280938 - DNA, 25 bp, Homo sapien
tccattgtggtcttcgatataacag

SEQ ID NO: 280939 - DNA, 25 bp, Homo sapien
tgtggtcttcgatataacagagcgg

SEQ ID NO: 280940 - DNA, 25 bp, Homo sapien
ggtcttcgatataacagagcgggat

SEQ ID NO: 280941 - DNA, 25 bp, Homo sapien
ttcgatataacagagcgggatggtc

SEQ ID NO: 280942 - DNA, 25 bp, Homo sapien
ctgctccgcgatgcacatgctgtgg

SEQ ID NO: 280943 - DNA, 25 bp, Homo sapien
aggctgctccgcgatgcacatgctg

SEQ ID NO: 280944 - DNA, 25 bp, Homo sapien
tgctccgcgatgcacatgctgtggg

SEQ ID NO: 280945 - DNA, 25 bp, Homo sapien
aaaaggctgctccgcgatgcacatg

SEQ ID NO: 280946 - DNA, 25 bp, Homo sapien
gcaataggcaagttattgtaatcat

SEQ ID NO: 280947 - DNA, 25 bp, Homo sapien
caataggcaagttattgtaatcata

SEQ ID NO: 280948 - DNA, 25 bp, Homo sapien
ttagattctagtttaacatactgga

SEQ ID NO: 280949 - DNA, 25 bp, Homo sapien
tagattctagtttaacatactggat

SEQ ID NO: 280950 - DNA, 25 bp, Homo sapien
tttagattctagtttaacatactgg

SEQ ID NO: 280951 - DNA, 25 bp, Homo sapien
gacagactgtattgccaagaaacca

SEQ ID NO: 280952 - DNA, 25 bp, Homo sapien
gccactgacagactgtattgccaag

SEQ ID NO: 280953 - DNA, 25 bp, Homo sapien
ttatgccactgacagactgtattgc

SEQ ID NO: 280954 - DNA, 25 bp, Homo sapien
actgtattgccaagaaaccagttcc

SEQ ID NO: 280955 - DNA, 25 bp, Homo sapien
aaataggaaatgtaccattataatt

SEQ ID NO: 280956 - DNA, 25 bp, Homo sapien
tcttgtgtctgggtggtctctgatg

SEQ ID NO: 280957 - DNA, 25 bp, Homo sapien
atggtgagcactgcttaagtacttg

SEQ ID NO: 280958 - DNA, 25 bp, Homo sapien
gtacttgcttagataaataaatgca

SEQ ID NO: 280959 - DNA, 25 bp, Homo sapien
ctttcctgagagtgatttcagagga

SEQ ID NO: 280960 - DNA, 25 bp, Homo sapien
tgtgacacaataaattaccaaagtg

SEQ ID NO: 280961 - DNA, 25 bp, Homo sapien
tggtaagccaaactaacaagggtga

SEQ ID NO: 280962 - DNA, 25 bp, Homo sapien
gcaacccagtggcttgacaaaagca

SEQ ID NO: 280963 - DNA, 25 bp, Homo sapien
agaaagaccatctgaacttgcaacc

SEQ ID NO: 280964 - DNA, 25 bp, Homo sapien
tatgtggcagctatccgaaaatcag

SEQ ID NO: 280965 - DNA, 25 bp, Homo sapien
atgtggcagctatccgaaaatcagg

SEQ ID NO: 280966 - DNA, 25 bp, Homo sapien
ttatgtggcagctatccgaaaatca

SEQ ID NO: 280967 - DNA, 25 bp, Homo sapien
ttatggatttatccagatcaaggac

SEQ ID NO: 280968 - DNA, 25 bp, Homo sapien
tatggatttatccagatcaaggaca

SEQ ID NO: 280969 - DNA, 25 bp, Homo sapien
tttatggatttatccagatcaagga

SEQ ID NO: 280970 - DNA, 25 bp, Homo sapien
ttttatggatttatccagatcaagg

SEQ ID NO: 280971 - DNA, 25 bp, Homo sapien
tcacatggaagtcaggagtaacagc

SEQ ID NO: 280972 - DNA, 25 bp, Homo sapien
gtctcacatggaagtcaggagtaac

SEQ ID NO: 280973 - DNA, 25 bp, Homo sapien
cacatggaagtcaggagtaacagcc

SEQ ID NO: 280974 - DNA, 25 bp, Homo sapien
tctcacatggaagtcaggagtaaca

SEQ ID NO: 280975 - DNA, 25 bp, Homo sapien
cttccaaggctgaattaaacattcc

SEQ ID NO: 280976 - DNA, 25 bp, Homo sapien
aaatttggccacttccaaggctgaa

SEQ ID NO: 280977 - DNA, 25 bp, Homo sapien
cttcaaatttggccacttccaaggc

SEQ ID NO: 280978 - DNA, 25 bp, Homo sapien
tcaaatttggccacttccaaggctg

SEQ ID NO: 280979 - DNA, 25 bp, Homo sapien
tcttgatctgcccccttatcccact

SEQ ID NO: 280980 - DNA, 25 bp, Homo sapien
gctcatcagcagcttatcctcaaag

SEQ ID NO: 280981 - DNA, 25 bp, Homo sapien
cttatcctcaaagctggcccggaaa

SEQ ID NO: 280982 - DNA, 25 bp, Homo sapien
cgctcatcagcagcttatcctcaaa

SEQ ID NO: 280983 - DNA, 25 bp, Homo sapien
tcctcaaagctggcccggaaagctc

SEQ ID NO: 280984 - DNA, 25 bp, Homo sapien
caggataccaagtttgcatgaagac

SEQ ID NO: 280985 - DNA, 25 bp, Homo sapien
ggtccgcgttcctgaccaggtgtct

SEQ ID NO: 280986 - DNA, 25 bp, Homo sapien
cctttagtctgacaccatgggcaag

SEQ ID NO: 280987 - DNA, 25 bp, Homo sapien
catgggcaagcctgagttggcccgt

SEQ ID NO: 280988 - DNA, 25 bp, Homo sapien
tcataaaggatctgccctgtgaccc

SEQ ID NO: 280989 - DNA, 25 bp, Homo sapien
cacaactggcgagggtcttgtgctg

SEQ ID NO: 280990 - DNA, 25 bp, Homo sapien
gaaacacgagagtctaggaagctga

SEQ ID NO: 280991 - DNA, 25 bp, Homo sapien
ggctcaccctgcttgtgtctgaaaa

SEQ ID NO: 280992 - DNA, 25 bp, Homo sapien
acgagaaggagaagagtccaggcca

SEQ ID NO: 280993 - DNA, 25 bp, Homo sapien
cgagaaggagaagagtccaggccat

SEQ ID NO: 280994 - DNA, 25 bp, Homo sapien
tagagttgctgtgccatgtaccaca

SEQ ID NO: 280995 - DNA, 25 bp, Homo sapien
gagccttggcccttattggagtctg

SEQ ID NO: 280996 - DNA, 25 bp, Homo sapien
cagcatgcaggtgagtctgactgat

SEQ ID NO: 280997 - DNA, 25 bp, Homo sapien
tggagcccagagatacgcagaatcc

SEQ ID NO: 280998 - DNA, 25 bp, Homo sapien
cctcatgggtctggagcactgtgtg

SEQ ID NO: 280999 - DNA, 25 bp, Homo sapien
tcctcatgggtctggagcactgtgt

SEQ ID NO: 281000 - DNA, 25 bp, Homo sapien
tcatgggtctggagcactgtgtgag

SEQ ID NO: 281001 - DNA, 25 bp, Homo sapien
ctcatgggtctggagcactgtgtga

SEQ ID NO: 281002 - DNA, 25 bp, Homo sapien
cagtgctgtcgatgagacaacagat

SEQ ID NO: 281003 - DNA, 25 bp, Homo sapien
ggagctccagtgctgtcgatgagac

SEQ ID NO: 281004 - DNA, 25 bp, Homo sapien
ttcactagaccaggagagtagaggg

SEQ ID NO: 281005 - DNA, 25 bp, Homo sapien
gggtgatttcactagaccaggagag

SEQ ID NO: 281006 - DNA, 25 bp, Homo sapien
ttacccctgagcaagggatgtctgc

SEQ ID NO: 281007 - DNA, 25 bp, Homo sapien
tgtgaaatgcgagcaaggtaggact

SEQ ID NO: 281008 - DNA, 25 bp, Homo sapien
aacccagccctcttgccttcttcaa

SEQ ID NO: 281009 - DNA, 25 bp, Homo sapien
tgagagattttacccctgagcaagg

SEQ ID NO: 281010 - DNA, 25 bp, Homo sapien
gcagcatctctgagtcacttctaga

SEQ ID NO: 281011 - DNA, 25 bp, Homo sapien
cagcatctctgagtcacttctagac

SEQ ID NO: 281012 - DNA, 25 bp, Homo sapien
agcagcatctctgagtcacttctag

SEQ ID NO: 281013 - DNA, 25 bp, Homo sapien
cagcagcatctctgagtcacttcta

SEQ ID NO: 281014 - DNA, 25 bp, Homo sapien
tgcatccctgtattgtatcccaagg

SEQ ID NO: 281015 - DNA, 25 bp, Homo sapien
gaaagcttcctgtgcactctcctag

SEQ ID NO: 281016 - DNA, 25 bp, Homo sapien
caagtgataggtcactcgggccttc

SEQ ID NO: 281017 - DNA, 25 bp, Homo sapien
tctctacactctcacataaaaaggg

SEQ ID NO: 281018 - DNA, 25 bp, Homo sapien
tctggcatgatgcatcttggactca

SEQ ID NO: 281019 - DNA, 25 bp, Homo sapien
gtaccatgaggttttacatgcacca

SEQ ID NO: 281020 - DNA, 25 bp, Homo sapien
caccaggcagttgtagtaccatgag

SEQ ID NO: 281021 - DNA, 25 bp, Homo sapien
tatttactctggtgagtctgtcacc

SEQ ID NO: 281022 - DNA, 25 bp, Homo sapien
tcagcatgtcctaaagatgagagaa

SEQ ID NO: 281023 - DNA, 25 bp, Homo sapien
acacatggtagcttttaggatcaac

SEQ ID NO: 281024 - DNA, 25 bp, Homo sapien
aatatgctccgtatttgaagatgga

SEQ ID NO: 281025 - DNA, 25 bp, Homo sapien
taggatcaaccattccaactaggat

SEQ ID NO: 281026 - DNA, 25 bp, Homo sapien
accgggtcctctcttgtcgtgtggc

SEQ ID NO: 281027 - DNA, 25 bp, Homo sapien
gaatgccagtctgcaggagatcctg

SEQ ID NO: 281028 - DNA, 25 bp, Homo sapien
ccagggatctcacctaggagtctgt

SEQ ID NO: 281029 - DNA, 25 bp, Homo sapien
ggagatcctggcgaatgactttgca

SEQ ID NO: 281030 - DNA, 25 bp, Homo sapien
tgaagattgtcccgagtcctgcctt

SEQ ID NO: 281031 - DNA, 25 bp, Homo sapien
aagattgtcccgagtcctgccttct

SEQ ID NO: 281032 - DNA, 25 bp, Homo sapien
attgtcccgagtcctgccttctgcg

SEQ ID NO: 281033 - DNA, 25 bp, Homo sapien
agattgtcccgagtcctgccttctg

SEQ ID NO: 281034 - DNA, 25 bp, Homo sapien
ctgtgcagtgaatgagaagggtgag

SEQ ID NO: 281035 - DNA, 25 bp, Homo sapien
ggtgaggaggagaggggagcaggtc

SEQ ID NO: 281036 - DNA, 25 bp, Homo sapien
gtgcagtgaatgagaagggtgagga

SEQ ID NO: 281037 - DNA, 25 bp, Homo sapien
tgaggaggagaggggagcaggtcat

SEQ ID NO: 281038 - DNA, 25 bp, Homo sapien
ctggaagcaggagagacacagacac

SEQ ID NO: 281039 - DNA, 25 bp, Homo sapien
agagacacagacacggtgattcttg

SEQ ID NO: 281040 - DNA, 25 bp, Homo sapien
caggagagacacagacacggtgatt

SEQ ID NO: 281041 - DNA, 25 bp, Homo sapien
gaagcaggagagacacagacacggt

SEQ ID NO: 281042 - DNA, 25 bp, Homo sapien
ccctgagggtcgcttattattgtca

SEQ ID NO: 281043 - DNA, 25 bp, Homo sapien
ctggtaccaggatacataattattc

SEQ ID NO: 281044 - DNA, 25 bp, Homo sapien
cccatgttccgcagtaataatcggc

SEQ ID NO: 281045 - DNA, 25 bp, Homo sapien
tgctatcccatgttccgcagtaata

SEQ ID NO: 281046 - DNA, 25 bp, Homo sapien
gtctcagttccccattgggctggag

SEQ ID NO: 281047 - DNA, 25 bp, Homo sapien
tcagttccccattgggctggagcac

SEQ ID NO: 281048 - DNA, 25 bp, Homo sapien
tcttgtctcagttccccattgggct

SEQ ID NO: 281049 - DNA, 25 bp, Homo sapien
ggttcttgtctcagttccccattgg

SEQ ID NO: 281050 - DNA, 25 bp, Homo sapien
ctacagtgaggagagtgatgggagg

SEQ ID NO: 281051 - DNA, 25 bp, Homo sapien
gtgaggagagtgatgggaggagggt

SEQ ID NO: 281052 - DNA, 25 bp, Homo sapien
agtgaggagagtgatgggaggaggg

SEQ ID NO: 281053 - DNA, 25 bp, Homo sapien
acagtgaggagagtgatgggaggag

SEQ ID NO: 281054 - DNA, 25 bp, Homo sapien
aataactgtttctacagattcagag

SEQ ID NO: 281055 - DNA, 25 bp, Homo sapien
gggagccctgagtagattcctgatt

SEQ ID NO: 281056 - DNA, 25 bp, Homo sapien
agaggtgaggagcagtttgcaaggg

SEQ ID NO: 281057 - DNA, 25 bp, Homo sapien
ttggtgccctctaacccagtcctgg

SEQ ID NO: 281058 - DNA, 25 bp, Homo sapien
tccgctgcctggtataatgcctggg

SEQ ID NO: 281059 - DNA, 25 bp, Homo sapien
gctccgctgcctggtataatgcctg

SEQ ID NO: 281060 - DNA, 25 bp, Homo sapien
cgctgcctggtataatgcctgggcc

SEQ ID NO: 281061 - DNA, 25 bp, Homo sapien
gctgcctggtataatgcctgggcct

SEQ ID NO: 281062 - DNA, 25 bp, Homo sapien
tgggcctcagtttatgccacccgtc

SEQ ID NO: 281063 - DNA, 25 bp, Homo sapien
tacccaaactggaacacacgaagaa

SEQ ID NO: 281064 - DNA, 25 bp, Homo sapien
tcacttcagtaagagggtcctcact

SEQ ID NO: 281065 - DNA, 25 bp, Homo sapien
gctcaggagatctggtccaccatct

SEQ ID NO: 281066 - DNA, 25 bp, Homo sapien
tcactgtgcgatgccaccttatcac

SEQ ID NO: 281067 - DNA, 25 bp, Homo sapien
gaatattctaggcttatctatcagc

SEQ ID NO: 281068 - DNA, 25 bp, Homo sapien
tatcagtgctgggttcggctacgag

SEQ ID NO: 281069 - DNA, 25 bp, Homo sapien
ttttccacgagatggtgccagctag

SEQ ID NO: 281070 - DNA, 25 bp, Homo sapien
catgggagatggcatgaatgattta

SEQ ID NO: 281071 - DNA, 25 bp, Homo sapien
tgatttagtctggttgtcctgaagg

SEQ ID NO: 281072 - DNA, 25 bp, Homo sapien
tgctgtcatgggagatggcatgaat

SEQ ID NO: 281073 - DNA, 25 bp, Homo sapien
gatggcatgaatgatttagtctggt

SEQ ID NO: 281074 - DNA, 25 bp, Homo sapien
ggctacttaggcagagctcctggtc

SEQ ID NO: 281075 - DNA, 25 bp, Homo sapien
ggccagagagcccacgatggagatt

SEQ ID NO: 281076 - DNA, 25 bp, Homo sapien
ttttcacaagacaatacccatcacg

SEQ ID NO: 281077 - DNA, 25 bp, Homo sapien
ccatcacgaactgaagatgagggtg

SEQ ID NO: 281078 - DNA, 25 bp, Homo sapien
acaggtgccgaggtgatggtaatca

SEQ ID NO: 281079 - DNA, 25 bp, Homo sapien
aatcagtggcttctagtgtggcttc

SEQ ID NO: 281080 - DNA, 25 bp, Homo sapien
tcagcagtgatacggctgacctggc

SEQ ID NO: 281081 - DNA, 25 bp, Homo sapien
tcttggcccagaattgatgtgtgaa

SEQ ID NO: 281082 - DNA, 25 bp, Homo sapien
tgcagtgagcgaggagagtgaggag

SEQ ID NO: 281083 - DNA, 25 bp, Homo sapien
gcagtgagcgaggagagtgaggagg

SEQ ID NO: 281084 - DNA, 25 bp, Homo sapien
ctgtgcagtgagcgaggagagtgag

SEQ ID NO: 281085 - DNA, 25 bp, Homo sapien
tgaggaggagagaagaccaggccat

SEQ ID NO: 281086 - DNA, 25 bp, Homo sapien
tgcgtcagcacagactgggcccagg

SEQ ID NO: 281087 - DNA, 25 bp, Homo sapien
gtcagcacagactgggcccaggacc

SEQ ID NO: 281088 - DNA, 25 bp, Homo sapien
gcgtcagcacagactgggcccagga

SEQ ID NO: 281089 - DNA, 25 bp, Homo sapien
ctgcgtcagcacagactgggcccag

SEQ ID NO: 281090 - DNA, 25 bp, Homo sapien
gttatcccatgctttgcagtaataa

SEQ ID NO: 281091 - DNA, 25 bp, Homo sapien
aatgtacaacataacccgccccaat

SEQ ID NO: 281092 - DNA, 25 bp, Homo sapien
tgtacaacataacccgccccaatgt

SEQ ID NO: 281093 - DNA, 25 bp, Homo sapien
tgtgtgagcattcaggctgttatcc

SEQ ID NO: 281094 - DNA, 25 bp, Homo sapien
catcaaagcagggagtcaagcttga

SEQ ID NO: 281095 - DNA, 25 bp, Homo sapien
atgcagggctgtgcctagagctgcc

SEQ ID NO: 281096 - DNA, 25 bp, Homo sapien
tcttcctcactgaagagtgtggccc

SEQ ID NO: 281097 - DNA, 25 bp, Homo sapien
ccatttccaggttcccaatttctct

SEQ ID NO: 281098 - DNA, 25 bp, Homo sapien
tagtaaagccctgggatcttcacct

SEQ ID NO: 281099 - DNA, 25 bp, Homo sapien
acataggcaagggtccagggacaac

SEQ ID NO: 281100 - DNA, 25 bp, Homo sapien
tggactcagacataggcaagggtcc

SEQ ID NO: 281101 - DNA, 25 bp, Homo sapien
ctctctatagatgttgactgagatg

SEQ ID NO: 281102 - DNA, 25 bp, Homo sapien
ctctatagatgttgactgagatggg

SEQ ID NO: 281103 - DNA, 25 bp, Homo sapien
ccactcaatggtcttgctaccctta

SEQ ID NO: 281104 - DNA, 25 bp, Homo sapien
gtctatctgtaccactctgctttga

SEQ ID NO: 281105 - DNA, 25 bp, Homo sapien
tctttctgggtgctcaattctattc

SEQ ID NO: 281106 - DNA, 25 bp, Homo sapien
ctttgattggtgtagctctgtagta

SEQ ID NO: 281107 - DNA, 25 bp, Homo sapien
gaaagcaacagatgcccctttccag

SEQ ID NO: 281108 - DNA, 25 bp, Homo sapien
tcatgaaaggtaggcaggatgaagt

SEQ ID NO: 281109 - DNA, 25 bp, Homo sapien
ggaaagcaacagatgcccctttcca

SEQ ID NO: 281110 - DNA, 25 bp, Homo sapien
ggatgaagtatctatgccagatatt

SEQ ID NO: 281111 - DNA, 25 bp, Homo sapien
ctctttttgtgactgccatgtcaag

SEQ ID NO: 281112 - DNA, 25 bp, Homo sapien
ttgtgactgccatgtcaagttggcc

SEQ ID NO: 281113 - DNA, 25 bp, Homo sapien
ctttttgtgactgccatgtcaagtt

SEQ ID NO: 281114 - DNA, 25 bp, Homo sapien
ttttgtgactgccatgtcaagttgg

SEQ ID NO: 281115 - DNA, 25 bp, Homo sapien
aaagttccaatctagggtcatctcc

SEQ ID NO: 281116 - DNA, 25 bp, Homo sapien
gttctttactcactagatccagtgg

SEQ ID NO: 281117 - DNA, 25 bp, Homo sapien
caatgttaccaaggtcctggtctaa

SEQ ID NO: 281118 - DNA, 25 bp, Homo sapien
tcagattctcactggtagacaaggt

SEQ ID NO: 281119 - DNA, 25 bp, Homo sapien
aggaataaggaattttgcccagcag

SEQ ID NO: 281120 - DNA, 25 bp, Homo sapien
ataaggaattttgcccagcagtcaa

SEQ ID NO: 281121 - DNA, 25 bp, Homo sapien
caagttcaagcttctgaggaccaag

SEQ ID NO: 281122 - DNA, 25 bp, Homo sapien
gctagaatatactggtagttatctt

SEQ ID NO: 281123 - DNA, 25 bp, Homo sapien
tcaaggtaacccatgagaatcccgt

SEQ ID NO: 281124 - DNA, 25 bp, Homo sapien
ttatctaaagactgggaccaaccca

SEQ ID NO: 281125 - DNA, 25 bp, Homo sapien
gaatcccgtaccatagagtagacct

SEQ ID NO: 281126 - DNA, 25 bp, Homo sapien
ggagctcaattatgtcaggctaaca

SEQ ID NO: 281127 - DNA, 25 bp, Homo sapien
ctagaagagtagtgtttgccagtgg

SEQ ID NO: 281128 - DNA, 25 bp, Homo sapien
agtagtgtttgccagtggactggtg

SEQ ID NO: 281129 - DNA, 25 bp, Homo sapien
gagtagtgtttgccagtggactggt

SEQ ID NO: 281130 - DNA, 25 bp, Homo sapien
gaagagtagtgtttgccagtggact

SEQ ID NO: 281131 - DNA, 25 bp, Homo sapien
caggcaatgacttgactgtctttgt

SEQ ID NO: 281132 - DNA, 25 bp, Homo sapien
ggcaatgacttgactgtctttgttt

SEQ ID NO: 281133 - DNA, 25 bp, Homo sapien
tatcaggcaatgacttgactgtctt

SEQ ID NO: 281134 - DNA, 25 bp, Homo sapien
tcaggcaatgacttgactgtctttg

SEQ ID NO: 281135 - DNA, 25 bp, Homo sapien
gaagcacagtccaatgttcatggaa

SEQ ID NO: 281136 - DNA, 25 bp, Homo sapien
taagattgctggaaagtaaagcccc

SEQ ID NO: 281137 - DNA, 25 bp, Homo sapien
tctttgtaagccatgccttgactaa

SEQ ID NO: 281138 - DNA, 25 bp, Homo sapien
cagccagagtgtgctctaccagagc

SEQ ID NO: 281139 - DNA, 25 bp, Homo sapien
gattgaatccatttctagcaccaag

SEQ ID NO: 281140 - DNA, 25 bp, Homo sapien
aggactttcttgtccagtgattgaa

SEQ ID NO: 281141 - DNA, 25 bp, Homo sapien
gtccagtgattgaatccatttctag

SEQ ID NO: 281142 - DNA, 25 bp, Homo sapien
gaatccatttctagcaccaagacac

SEQ ID NO: 281143 - DNA, 25 bp, Homo sapien
gccatggtggagctgctgcaatgct

SEQ ID NO: 281144 - DNA, 25 bp, Homo sapien
aggagcccaggccatggtggagctg

SEQ ID NO: 281145 - DNA, 25 bp, Homo sapien
tggagctgctgcaatgctgggttct

SEQ ID NO: 281146 - DNA, 25 bp, Homo sapien
atggtggagctgctgcaatgctggg

SEQ ID NO: 281147 - DNA, 25 bp, Homo sapien
gatgcagaaggtggctgagtcagca

SEQ ID NO: 281148 - DNA, 25 bp, Homo sapien
tgcagaaggtggctgagtcagcaca

SEQ ID NO: 281149 - DNA, 25 bp, Homo sapien
gtcagcacaggctgggagagggacc

SEQ ID NO: 281150 - DNA, 25 bp, Homo sapien
ctgatgcagaaggtggctgagtcag

SEQ ID NO: 281151 - DNA, 25 bp, Homo sapien
gatggtcaggtaccgattcaggcct

SEQ ID NO: 281152 - DNA, 25 bp, Homo sapien
ttacacgaagttgctcccactgcca

SEQ ID NO: 281153 - DNA, 25 bp, Homo sapien
cctgagcccaagactgagaagcgat

SEQ ID NO: 281154 - DNA, 25 bp, Homo sapien
tttataattactgtagccgctgctc

SEQ ID NO: 281155 - DNA, 25 bp, Homo sapien
gcaatgcctccttgccagaccggta

SEQ ID NO: 281156 - DNA, 25 bp, Homo sapien
cagaccggtagcctgagattcagtc

SEQ ID NO: 281157 - DNA, 25 bp, Homo sapien
gccttgtcctaagcctgtagcccag

SEQ ID NO: 281158 - DNA, 25 bp, Homo sapien
gcaggtggatattcgccgcaggata

SEQ ID NO: 281159 - DNA, 25 bp, Homo sapien
gaggagaggattccaggccatggtg

SEQ ID NO: 281160 - DNA, 25 bp, Homo sapien
gaacaggaggaggagaggattccag

SEQ ID NO: 281161 - DNA, 25 bp, Homo sapien
aggaggaggagaggattccaggcca

SEQ ID NO: 281162 - DNA, 25 bp, Homo sapien
aggaggagaggattccaggccatgg

SEQ ID NO: 281163 - DNA, 25 bp, Homo sapien
gtcagcacaggctgcgagagggaac

SEQ ID NO: 281164 - DNA, 25 bp, Homo sapien
gagggaagttggctgagtcagcaca

SEQ ID NO: 281165 - DNA, 25 bp, Homo sapien
agtcagcacaggctgcgagagggaa

SEQ ID NO: 281166 - DNA, 25 bp, Homo sapien
ctgagagggaagttggctgagtcag

SEQ ID NO: 281167 - DNA, 25 bp, Homo sapien
aatatcctgtagctaccaagattga

SEQ ID NO: 281168 - DNA, 25 bp, Homo sapien
gaatatcctgtagctaccaagattg

SEQ ID NO: 281169 - DNA, 25 bp, Homo sapien
accagaatatcctgtagctaccaag

SEQ ID NO: 281170 - DNA, 25 bp, Homo sapien
cagaatatcctgtagctaccaagat

SEQ ID NO: 281171 - DNA, 25 bp, Homo sapien
gccaaatcatacagtaatagtcagc

SEQ ID NO: 281172 - DNA, 25 bp, Homo sapien
gtgccaaatcatacagtaatagtca

SEQ ID NO: 281173 - DNA, 25 bp, Homo sapien
tgccaaatcatacagtaatagtcag

SEQ ID NO: 281174 - DNA, 25 bp, Homo sapien
cgctgatgtcctaagtcacaaaatt

SEQ ID NO: 281175 - DNA, 25 bp, Homo sapien
ggacaatcgctgatgtcctaagtca

SEQ ID NO: 281176 - DNA, 25 bp, Homo sapien
gacccctgagggacaatcgctgatg

SEQ ID NO: 281177 - DNA, 25 bp, Homo sapien
aggctggagcgcagaagttgtccag

SEQ ID NO: 281178 - DNA, 25 bp, Homo sapien
gaagctgagcttcccccagatctct

SEQ ID NO: 281179 - DNA, 25 bp, Homo sapien
gagggtgaggaggagagggaagccg

SEQ ID NO: 281180 - DNA, 25 bp, Homo sapien
ctgcacagtgagtgaggagggtgag

SEQ ID NO: 281181 - DNA, 25 bp, Homo sapien
gggtgaggaggagagggaagccggc

SEQ ID NO: 281182 - DNA, 25 bp, Homo sapien
tgaggaggagagggaagccggccat

SEQ ID NO: 281183 - DNA, 25 bp, Homo sapien
ctggtaccagtatacataattactt

SEQ ID NO: 281184 - DNA, 25 bp, Homo sapien
tcatcccatgctgcacagtaataat

SEQ ID NO: 281185 - DNA, 25 bp, Homo sapien
tcccatgctgcacagtaataatcag

SEQ ID NO: 281186 - DNA, 25 bp, Homo sapien
gctgcacagtaataatcagcctcat

SEQ ID NO: 281187 - DNA, 25 bp, Homo sapien
catgctgcacagtaataatcagcct

SEQ ID NO: 281188 - DNA, 25 bp, Homo sapien
cccctgggcctggagcactgtggga

SEQ ID NO: 281189 - DNA, 25 bp, Homo sapien
cctcctgacagaggaggaagggggt

SEQ ID NO: 281190 - DNA, 25 bp, Homo sapien
ttcttgtctcagttccccctgggcc

SEQ ID NO: 281191 - DNA, 25 bp, Homo sapien
ccctgggcctggagcactgtgggac

SEQ ID NO: 281192 - DNA, 25 bp, Homo sapien
ggacccatgggggaagctacagcag

SEQ ID NO: 281193 - DNA, 25 bp, Homo sapien
gacccatgggggaagctacagcagc

SEQ ID NO: 281194 - DNA, 25 bp, Homo sapien
gaccctgtgtcccaagttgcaggaa

SEQ ID NO: 281195 - DNA, 25 bp, Homo sapien
accctgtgtcccaagttgcaggaag

SEQ ID NO: 281196 - DNA, 25 bp, Homo sapien
cctgtgtcccaagttgcaggaagca

SEQ ID NO: 281197 - DNA, 25 bp, Homo sapien
ccctgtgtcccaagttgcaggaagc

SEQ ID NO: 281198 - DNA, 25 bp, Homo sapien
gtgggtctgtgacgacacagctgta

SEQ ID NO: 281199 - DNA, 25 bp, Homo sapien
ggtgggtctgtgacgacacagctgt

SEQ ID NO: 281200 - DNA, 25 bp, Homo sapien
tgggtctgtgacgacacagctgtac

SEQ ID NO: 281201 - DNA, 25 bp, Homo sapien
aggtgggtctgtgacgacacagctg

SEQ ID NO: 281202 - DNA, 25 bp, Homo sapien
agacatgggcaaagagtccagggaa

SEQ ID NO: 281203 - DNA, 25 bp, Homo sapien
gaggcatggaccagaatcaaaagca

SEQ ID NO: 281204 - DNA, 25 bp, Homo sapien
gactgttatagcaagtgccccattt

SEQ ID NO: 281205 - DNA, 25 bp, Homo sapien
gatgagtctctcgaagccagtttct

SEQ ID NO: 281206 - DNA, 25 bp, Homo sapien
tccatcagaaacatagcagttgtca

SEQ ID NO: 281207 - DNA, 25 bp, Homo sapien
gatgatttcaaagtcccaggtccct

SEQ ID NO: 281208 - DNA, 25 bp, Homo sapien
cacagaaacaggctccgtagaggtc

SEQ ID NO: 281209 - DNA, 25 bp, Homo sapien
taggactgagaccaaccccattggc

SEQ ID NO: 281210 - DNA, 25 bp, Homo sapien
tgtgagatggctggaaatcaacccc

SEQ ID NO: 281211 - DNA, 25 bp, Homo sapien
catggtgctgatattggaagggacc

SEQ ID NO: 281212 - DNA, 25 bp, Homo sapien
aggccatggtgctgatattggaagg

SEQ ID NO: 281213 - DNA, 25 bp, Homo sapien
gccatggtgctgatattggaaggga

SEQ ID NO: 281214 - DNA, 25 bp, Homo sapien
ccatggtgctgatattggaagggac

SEQ ID NO: 281215 - DNA, 25 bp, Homo sapien
gtagggataatgaccactggtgaca

SEQ ID NO: 281216 - DNA, 25 bp, Homo sapien
gagccacaggtgagagtgactgtcc

SEQ ID NO: 281217 - DNA, 25 bp, Homo sapien
ccagtagggataatgaccactggtg

SEQ ID NO: 281218 - DNA, 25 bp, Homo sapien
taatgaccactggtgacagctccag

SEQ ID NO: 281219 - DNA, 25 bp, Homo sapien
cctcaggctgcgcacccaaaagggt

SEQ ID NO: 281220 - DNA, 25 bp, Homo sapien
aggctgcgcacccaaaagggtcagg

SEQ ID NO: 281221 - DNA, 25 bp, Homo sapien
ccactataggagagcaagcagtaat

SEQ ID NO: 281222 - DNA, 25 bp, Homo sapien
cgagcaccactataggagagcaagc

SEQ ID NO: 281223 - DNA, 25 bp, Homo sapien
ttatgtcttggttcctctcatgggt

SEQ ID NO: 281224 - DNA, 25 bp, Homo sapien
tcttggttcctctcatgggtctgtc

SEQ ID NO: 281225 - DNA, 25 bp, Homo sapien
tgtcttggttcctctcatgggtctg

SEQ ID NO: 281226 - DNA, 25 bp, Homo sapien
ttggttcctctcatgggtctgtcac

SEQ ID NO: 281227 - DNA, 25 bp, Homo sapien
tgggtccctgcaggcagatatttgc

SEQ ID NO: 281228 - DNA, 25 bp, Homo sapien
acagacagactgtgcaggctaccaa

SEQ ID NO: 281229 - DNA, 25 bp, Homo sapien
cagttgagatcagcgttgtcctcag

SEQ ID NO: 281230 - DNA, 25 bp, Homo sapien
gaaggcctccttgccaaactggtag

SEQ ID NO: 281231 - DNA, 25 bp, Homo sapien
ctgtgcagtgagagaggaacaggag

SEQ ID NO: 281232 - DNA, 25 bp, Homo sapien
agagaggaacaggaggaggagagga

SEQ ID NO: 281233 - DNA, 25 bp, Homo sapien
tgagagaggaacaggaggaggagag

SEQ ID NO: 281234 - DNA, 25 bp, Homo sapien
ggaggaggagaggagtccaggccat

SEQ ID NO: 281235 - DNA, 25 bp, Homo sapien
ccagaagagtcagaatcaggctggg

SEQ ID NO: 281236 - DNA, 25 bp, Homo sapien
cagaagagtcagaatcaggctgggt

SEQ ID NO: 281237 - DNA, 25 bp, Homo sapien
ttttcagggatctttgccagaagag

SEQ ID NO: 281238 - DNA, 25 bp, Homo sapien
gccagaagagtcagaatcaggctgg

SEQ ID NO: 281239 - DNA, 25 bp, Homo sapien
agatgagtaaaatccctgcattggc

SEQ ID NO: 281240 - DNA, 25 bp, Homo sapien
tgatttgtacctcaggagatactgg

SEQ ID NO: 281241 - DNA, 25 bp, Homo sapien
ccactgcgcaaggtgcaggtgagac

SEQ ID NO: 281242 - DNA, 25 bp, Homo sapien
gtatatcctgtaggtaccaacattg

SEQ ID NO: 281243 - DNA, 25 bp, Homo sapien
acactgataaccagccaggtcctca

SEQ ID NO: 281244 - DNA, 25 bp, Homo sapien
tcactattgtcctaggtcataaact

SEQ ID NO: 281245 - DNA, 25 bp, Homo sapien
acccctgagggaccatcactattgt

SEQ ID NO: 281246 - DNA, 25 bp, Homo sapien
ggaggctgtgtggataaacccagat

SEQ ID NO: 281247 - DNA, 25 bp, Homo sapien
ggtcaccgagtctgagcagtgtctc

SEQ ID NO: 281248 - DNA, 25 bp, Homo sapien
tcctccctgcccacggatgcgcttc

SEQ ID NO: 281249 - DNA, 25 bp, Homo sapien
gatgatgtatagatgttcacagtga

SEQ ID NO: 281250 - DNA, 25 bp, Homo sapien
cgttaatgaacagggggtcaccgag

SEQ ID NO: 281251 - DNA, 25 bp, Homo sapien
ctggagattgtcctgagtcctgtct

SEQ ID NO: 281252 - DNA, 25 bp, Homo sapien
gaagctgagcttcccccagatctct

SEQ ID NO: 281253 - DNA, 25 bp, Homo sapien
gctgctggtaccagtttacagtatt

SEQ ID NO: 281254 - DNA, 25 bp, Homo sapien
tctcagttccctattggcctggagc

SEQ ID NO: 281255 - DNA, 25 bp, Homo sapien
gggttcttgtctcagttccctattg

SEQ ID NO: 281256 - DNA, 25 bp, Homo sapien
cagttccctattggcctggagcact

SEQ ID NO: 281257 - DNA, 25 bp, Homo sapien
ggttcttgtctcagttccctattgg

SEQ ID NO: 281258 - DNA, 25 bp, Homo sapien
ggatgcccctggacccatgaaggaa

SEQ ID NO: 281259 - DNA, 25 bp, Homo sapien
tggatgcccctggacccatgaagga

SEQ ID NO: 281260 - DNA, 25 bp, Homo sapien
ctggatgcccctggacccatgaagg

SEQ ID NO: 281261 - DNA, 25 bp, Homo sapien
tagagaagccctgtctttgaggttc

SEQ ID NO: 281262 - DNA, 25 bp, Homo sapien
gctgtgttagagaagccctgtcttt

SEQ ID NO: 281263 - DNA, 25 bp, Homo sapien
gaagccctgtctttgaggttcagct

SEQ ID NO: 281264 - DNA, 25 bp, Homo sapien
cctgtctttgaggttcagctcatag

SEQ ID NO: 281265 - DNA, 25 bp, Homo sapien
ccatggtgctgatattggaagggac

SEQ ID NO: 281266 - DNA, 25 bp, Homo sapien
catggtgctgatattggaagggacc

SEQ ID NO: 281267 - DNA, 25 bp, Homo sapien
aggccatggtgctgatattggaagg

SEQ ID NO: 281268 - DNA, 25 bp, Homo sapien
gccatggtgctgatattggaaggga

SEQ ID NO: 281269 - DNA, 25 bp, Homo sapien
tggatagtaaccactggtgactgct

SEQ ID NO: 281270 - DNA, 25 bp, Homo sapien
gatagtaaccactggtgactgctcc

SEQ ID NO: 281271 - DNA, 25 bp, Homo sapien
tagtaaccactggtgactgctccag

SEQ ID NO: 281272 - DNA, 25 bp, Homo sapien
tttggatagtaaccactggtgactg

SEQ ID NO: 281273 - DNA, 25 bp, Homo sapien
ggcacccgacggccgaggtgcgggt

SEQ ID NO: 281274 - DNA, 25 bp, Homo sapien
acccgcacctcggccgtcgggtgcc

SEQ ID NO: 281275 - DNA, 25 bp, Homo sapien
ccaccatagtagagcaggcagtaat

SEQ ID NO: 281276 - DNA, 25 bp, Homo sapien
catagtagagcaggcagtaatactc

SEQ ID NO: 281277 - DNA, 25 bp, Homo sapien
tgctgagcaccaccatagtagagca

SEQ ID NO: 281278 - DNA, 25 bp, Homo sapien
cctcttatgagtctgtcactgtgct

SEQ ID NO: 281279 - DNA, 25 bp, Homo sapien
gggtgaggaggagggggtgcaggcc

SEQ ID NO: 281280 - DNA, 25 bp, Homo sapien
gtgaggaggagggggtgcaggccat

SEQ ID NO: 281281 - DNA, 25 bp, Homo sapien
ggagggtgaggaggagggggtgcag

SEQ ID NO: 281282 - DNA, 25 bp, Homo sapien
ctgtgccgcgactgaggagggtgag

SEQ ID NO: 281283 - DNA, 25 bp, Homo sapien
tggtttagccacagacagacggtgc

SEQ ID NO: 281284 - DNA, 25 bp, Homo sapien
gtctgtcctgaatccctgcgggcag

SEQ ID NO: 281285 - DNA, 25 bp, Homo sapien
catgcaagactggtagcctgagcgt

SEQ ID NO: 281286 - DNA, 25 bp, Homo sapien
tgaagccaacaggagtgatcagcct

SEQ ID NO: 281287 - DNA, 25 bp, Homo sapien
gggggagaaagggaggagctcaggc

SEQ ID NO: 281288 - DNA, 25 bp, Homo sapien
ctgtgcagtgaatgagaagggggag

SEQ ID NO: 281289 - DNA, 25 bp, Homo sapien
tgcagtgaatgagaagggggagaaa

SEQ ID NO: 281290 - DNA, 25 bp, Homo sapien
ggagaaagggaggagctcaggcctt

SEQ ID NO: 281291 - DNA, 25 bp, Homo sapien
tcaagatgagcgaaagaatcagcct

SEQ ID NO: 281292 - DNA, 25 bp, Homo sapien
gatagatggcggcagtttaccccac

SEQ ID NO: 281293 - DNA, 25 bp, Homo sapien
gacctgtgcagaccaatgactgctg

SEQ ID NO: 281294 - DNA, 25 bp, Homo sapien
tgagaacttcgctgggacctgtgca

SEQ ID NO: 281295 - DNA, 25 bp, Homo sapien
ctccccagaaacttgtgctgaaggg

SEQ ID NO: 281296 - DNA, 25 bp, Homo sapien
ctcctccccagaaacttgtgctgaa

SEQ ID NO: 281297 - DNA, 25 bp, Homo sapien
tcctccccagaaacttgtgctgaag

SEQ ID NO: 281298 - DNA, 25 bp, Homo sapien
cccagaaacttgtgctgaaggggtg

SEQ ID NO: 281299 - DNA, 25 bp, Homo sapien
ggtgaacgtcccatcagttcttagc

SEQ ID NO: 281300 - DNA, 25 bp, Homo sapien
ctccctggtgaacgtcccatcagtt

SEQ ID NO: 281301 - DNA, 25 bp, Homo sapien
ctttctgccaagggatgctctccct

SEQ ID NO: 281302 - DNA, 25 bp, Homo sapien
cctggtgaacgtcccatcagttctt

SEQ ID NO: 281303 - DNA, 25 bp, Homo sapien
tgtgggggcactgggtcctctcctc

SEQ ID NO: 281304 - DNA, 25 bp, Homo sapien
atagggagctcttccctccgggatg

SEQ ID NO: 281305 - DNA, 25 bp, Homo sapien
ggggcactgggtcctctcctctcgt

SEQ ID NO: 281306 - DNA, 25 bp, Homo sapien
ttctgcagtcctgggtcgataggga

SEQ ID NO: 281307 - DNA, 25 bp, Homo sapien
ctgtgcagtgaatgagaagggtgag

SEQ ID NO: 281308 - DNA, 25 bp, Homo sapien
ggaggagaggggagcaggtcatgat

SEQ ID NO: 281309 - DNA, 25 bp, Homo sapien
ggagaggggagcaggtcatgatgaa

SEQ ID NO: 281310 - DNA, 25 bp, Homo sapien
gtgcagtgaatgagaagggtgagga

SEQ ID NO: 281311 - DNA, 25 bp, Homo sapien
aggagagacacagacacggtgattc

SEQ ID NO: 281312 - DNA, 25 bp, Homo sapien
gtggaagcaggagagacacagacac

SEQ ID NO: 281313 - DNA, 25 bp, Homo sapien
agagacacagacacggtgattcttg

SEQ ID NO: 281314 - DNA, 25 bp, Homo sapien
gcaggagagacacagacacggtgat

SEQ ID NO: 281315 - DNA, 25 bp, Homo sapien
gcggctgcgtcaacacagactgggc

SEQ ID NO: 281316 - DNA, 25 bp, Homo sapien
gctgcgtcaacacagactgggccca

SEQ ID NO: 281317 - DNA, 25 bp, Homo sapien
ggctgcgtcaacacagactgggccc

SEQ ID NO: 281318 - DNA, 25 bp, Homo sapien
ggcggctgcgtcaacacagactggg

SEQ ID NO: 281319 - DNA, 25 bp, Homo sapien
ccctgagggtcgcttattattttca

SEQ ID NO: 281320 - DNA, 25 bp, Homo sapien
cccatgctaagcagtaataatcggc

SEQ ID NO: 281321 - DNA, 25 bp, Homo sapien
aggataccgcataattccccatgtc

SEQ ID NO: 281322 - DNA, 25 bp, Homo sapien
taatcggcctagtcctcaggccaga

SEQ ID NO: 281323 - DNA, 25 bp, Homo sapien
tcccggtgactagagctggtcccat

SEQ ID NO: 281324 - DNA, 25 bp, Homo sapien
cccggtgactagagctggtcccatg

SEQ ID NO: 281325 - DNA, 25 bp, Homo sapien
gatcctgcagcgctgaatagaaggg

SEQ ID NO: 281326 - DNA, 25 bp, Homo sapien
ccagggcacattcccagagggttat

SEQ ID NO: 281327 - DNA, 25 bp, Homo sapien
gatgccccatcagctcttagggtga

SEQ ID NO: 281328 - DNA, 25 bp, Homo sapien
ctggatcttgtgaccgggctgagct

SEQ ID NO: 281329 - DNA, 25 bp, Homo sapien
cggcacccgacggccgaggtgcggg

SEQ ID NO: 281330 - DNA, 25 bp, Homo sapien
cccgcacctcggccgtcgggtgccg

SEQ ID NO: 281331 - DNA, 25 bp, Homo sapien
tggagattgtcctgagtgctgcctc

SEQ ID NO: 281332 - DNA, 25 bp, Homo sapien
tgaagcagagcctccccaaatctct

SEQ ID NO: 281333 - DNA, 25 bp, Homo sapien
tgtcctgagtgctgcctcttgtgcc

SEQ ID NO: 281334 - DNA, 25 bp, Homo sapien
tgagtgctgcctcttgtgcccacag

SEQ ID NO: 281335 - DNA, 25 bp, Homo sapien
tgcagtgagcgaggagagtgaggag

SEQ ID NO: 281336 - DNA, 25 bp, Homo sapien
gcagtgagcgaggagagtgaggagg

SEQ ID NO: 281337 - DNA, 25 bp, Homo sapien
ctgtgcagtgagcgaggagagtgag

SEQ ID NO: 281338 - DNA, 25 bp, Homo sapien
tgaggaggagaggagaccaggccat

SEQ ID NO: 281339 - DNA, 25 bp, Homo sapien
ggaagtgggagagacacaggcatca

SEQ ID NO: 281340 - DNA, 25 bp, Homo sapien
tggaagtgggagagacacaggcatc

SEQ ID NO: 281341 - DNA, 25 bp, Homo sapien
ctggaagtgggagagacacaggcat

SEQ ID NO: 281342 - DNA, 25 bp, Homo sapien
gaagtgggagagacacaggcatcat

SEQ ID NO: 281343 - DNA, 25 bp, Homo sapien
gtcagcacagactgggcccaggacc

SEQ ID NO: 281344 - DNA, 25 bp, Homo sapien
ggcggctgcgtcagcacagactggg

SEQ ID NO: 281345 - DNA, 25 bp, Homo sapien
ctgcgtcagcacagactgggcccag

SEQ ID NO: 281346 - DNA, 25 bp, Homo sapien
gcgtcagcacagactgggcccagga

SEQ ID NO: 281347 - DNA, 25 bp, Homo sapien
tggtaccagtgtacatcataacctg

SEQ ID NO: 281348 - DNA, 25 bp, Homo sapien
ctggtaccagtgtacatcataacct

SEQ ID NO: 281349 - DNA, 25 bp, Homo sapien
tcataacctgccccgatgttggagc

SEQ ID NO: 281350 - DNA, 25 bp, Homo sapien
tacatcataacctgccccgatgttg

SEQ ID NO: 281351 - DNA, 25 bp, Homo sapien
cataggactggcagtaataatcagc

SEQ ID NO: 281352 - DNA, 25 bp, Homo sapien
ctggcagtaataatcagcctcatcc

SEQ ID NO: 281353 - DNA, 25 bp, Homo sapien
actggcagtaataatcagcctcatc

SEQ ID NO: 281354 - DNA, 25 bp, Homo sapien
ctgtcataggactggcagtaataat

SEQ ID NO: 281355 - DNA, 25 bp, Homo sapien
agaggaggaagtgggttcttgtctc

SEQ ID NO: 281356 - DNA, 25 bp, Homo sapien
gaagtgggttcttgtctcagttccc

SEQ ID NO: 281357 - DNA, 25 bp, Homo sapien
gaggaagtgggttcttgtctcagtt

SEQ ID NO: 281358 - DNA, 25 bp, Homo sapien
cttgtctcagttccccccgggcctg

SEQ ID NO: 281359 - DNA, 25 bp, Homo sapien
attctgtgtagggactaaagagccc

SEQ ID NO: 281360 - DNA, 25 bp, Homo sapien
gacatgcggtcccaggtccagaact

SEQ ID NO: 281361 - DNA, 25 bp, Homo sapien
tatttatgctctcctggctgaagcc

SEQ ID NO: 281362 - DNA, 25 bp, Homo sapien
cccttttgcatctggttgtgacagg

SEQ ID NO: 281363 - DNA, 25 bp, Homo sapien
tgggagtttcatagatggtctttac

SEQ ID NO: 281364 - DNA, 25 bp, Homo sapien
tctttttctaggctaaatgctctgc

SEQ ID NO: 281365 - DNA, 25 bp, Homo sapien
gtatgcatccttggtttgttcctga

SEQ ID NO: 281366 - DNA, 25 bp, Homo sapien
tctgggtcttttaatggcgttctac

SEQ ID NO: 281367 - DNA, 25 bp, Homo sapien
ctcataagtattaggtatgacttga

SEQ ID NO: 281368 - DNA, 25 bp, Homo sapien
gctcataagtattaggtatgacttg

SEQ ID NO: 281369 - DNA, 25 bp, Homo sapien
ctgctttagcgacaaagtctttttc

SEQ ID NO: 281370 - DNA, 25 bp, Homo sapien
gagtccgttttaggttcttctctgc

SEQ ID NO: 281371 - DNA, 25 bp, Homo sapien
cttctctgctttagcgacaaagtct

SEQ ID NO: 281372 - DNA, 25 bp, Homo sapien
gttcttctctgctttagcgacaaag

SEQ ID NO: 281373 - DNA, 25 bp, Homo sapien
cagggcagtaagtgacatcattttt

SEQ ID NO: 281374 - DNA, 25 bp, Homo sapien
cactcagggcagtaagtgacatcat

SEQ ID NO: 281375 - DNA, 25 bp, Homo sapien
ggcagtaagtgacatcatttttagg

SEQ ID NO: 281376 - DNA, 25 bp, Homo sapien
cagtaagtgacatcatttttaggaa

SEQ ID NO: 281377 - DNA, 25 bp, Homo sapien
agccagagtgtgctctaccacagca

SEQ ID NO: 281378 - DNA, 25 bp, Homo sapien
agagtgtgctctaccacagcatccc

SEQ ID NO: 281379 - DNA, 25 bp, Homo sapien
gccagagtgtgctctaccacagcat

SEQ ID NO: 281380 - DNA, 25 bp, Homo sapien
cagagtgtgctctaccacagcatcc

SEQ ID NO: 281381 - DNA, 25 bp, Homo sapien
caagaaaagccctacagtattactc

SEQ ID NO: 281382 - DNA, 25 bp, Homo sapien
aggagaggctgtgttcagtagcatc

SEQ ID NO: 281383 - DNA, 25 bp, Homo sapien
agagggacccatttgagatttcctg

SEQ ID NO: 281384 - DNA, 25 bp, Homo sapien
aagaaagagggacccatttgagatt

SEQ ID NO: 281385 - DNA, 25 bp, Homo sapien
tctattactttactgggagaggaca

SEQ ID NO: 281386 - DNA, 25 bp, Homo sapien
gatcaacaaggtctacataagcaac

SEQ ID NO: 281387 - DNA, 25 bp, Homo sapien
gtggaaattcaagtcggagtcagcc

SEQ ID NO: 281388 - DNA, 25 bp, Homo sapien
ggacaactgaatgcctgtgcttgga

SEQ ID NO: 281389 - DNA, 25 bp, Homo sapien
aggagcaagagaagaagaggagtcc

SEQ ID NO: 281390 - DNA, 25 bp, Homo sapien
ctgtgcagtgagagaggagcaagag

SEQ ID NO: 281391 - DNA, 25 bp, Homo sapien
agaggagcaagagaagaagaggagt

SEQ ID NO: 281392 - DNA, 25 bp, Homo sapien
agagaggagcaagagaagaagagga

SEQ ID NO: 281393 - DNA, 25 bp, Homo sapien
ctggtaccagtatatgttgtagcta

SEQ ID NO: 281394 - DNA, 25 bp, Homo sapien
tctggcggattctccaggagatgcg

SEQ ID NO: 281395 - DNA, 25 bp, Homo sapien
gagatgagtaaaatccctgtattgg

SEQ ID NO: 281396 - DNA, 25 bp, Homo sapien
gttgtagctaccaacattgatgtca

SEQ ID NO: 281397 - DNA, 25 bp, Homo sapien
ctggagattgtcctgagtcctgtct

SEQ ID NO: 281398 - DNA, 25 bp, Homo sapien
ctgggggcttcagacaccgagggtg

SEQ ID NO: 281399 - DNA, 25 bp, Homo sapien
agtcagcacagactgggcccaggac

SEQ ID NO: 281400 - DNA, 25 bp, Homo sapien
ctgagtcagcacagactgggcccag

SEQ ID NO: 281401 - DNA, 25 bp, Homo sapien
ttcagacaccgagggtggctgagtc

SEQ ID NO: 281402 - DNA, 25 bp, Homo sapien
agcagatcatcataatagatgagga

SEQ ID NO: 281403 - DNA, 25 bp, Homo sapien
gagcccactgatggccagggaggct

SEQ ID NO: 281404 - DNA, 25 bp, Homo sapien
ctggagcccactgatggccagggag

SEQ ID NO: 281405 - DNA, 25 bp, Homo sapien
ggccagggaggctgaggtgccagac

SEQ ID NO: 281406 - DNA, 25 bp, Homo sapien
tggccagggaggctgaggtgccaga

SEQ ID NO: 281407 - DNA, 25 bp, Homo sapien
tcatcccatgctgcacagtaataat

SEQ ID NO: 281408 - DNA, 25 bp, Homo sapien
tcccatgctgcacagtaataatcag

SEQ ID NO: 281409 - DNA, 25 bp, Homo sapien
gctgcacagtaataatcagcctcat

SEQ ID NO: 281410 - DNA, 25 bp, Homo sapien
catgctgcacagtaataatcagcct

SEQ ID NO: 281411 - DNA, 25 bp, Homo sapien
ttccccctgggcctggagcactgtg

SEQ ID NO: 281412 - DNA, 25 bp, Homo sapien
gttcttgtctctgttccccctgggc

SEQ ID NO: 281413 - DNA, 25 bp, Homo sapien
tctgttccccctgggcctggagcac

SEQ ID NO: 281414 - DNA, 25 bp, Homo sapien
tgttccccctgggcctggagcactg

SEQ ID NO: 281415 - DNA, 25 bp, Homo sapien
tcaggcagggccctggatatccctg

SEQ ID NO: 281416 - DNA, 25 bp, Homo sapien
gccctggatatccctggacccatgg

SEQ ID NO: 281417 - DNA, 25 bp, Homo sapien
aggcagggccctggatatccctgga

SEQ ID NO: 281418 - DNA, 25 bp, Homo sapien
gggccctggatatccctggacccat

SEQ ID NO: 281419 - DNA, 25 bp, Homo sapien
tgaccaaagcactaagggaaacttc

SEQ ID NO: 281420 - DNA, 25 bp, Homo sapien
tggatattcattcagtgttcaggac

SEQ ID NO: 281421 - DNA, 25 bp, Homo sapien
gataaaatatgccactctgatggca

SEQ ID NO: 281422 - DNA, 25 bp, Homo sapien
taaaaattgtagttgatcatgacag

SEQ ID NO: 281423 - DNA, 25 bp, Homo sapien
ccaaatctgcggtagtcttctttcc

SEQ ID NO: 281424 - DNA, 25 bp, Homo sapien
ttccggtctttataccctggatcca

SEQ ID NO: 281425 - DNA, 25 bp, Homo sapien
tctgcggtagtcttctttccggtct

SEQ ID NO: 281426 - DNA, 25 bp, Homo sapien
ggtctttataccctggatccaggtg

SEQ ID NO: 281427 - DNA, 25 bp, Homo sapien
cctgctgcagtttcctgactcagat

SEQ ID NO: 281428 - DNA, 25 bp, Homo sapien
gactcagattcccactgtagacaca

SEQ ID NO: 281429 - DNA, 25 bp, Homo sapien
tggttgtcgtaaacagggtcaatgt

SEQ ID NO: 281430 - DNA, 25 bp, Homo sapien
cagccctgagcggaaaacaaaaagt

SEQ ID NO: 281431 - DNA, 25 bp, Homo sapien
tcctgcccagcagttaatttcaagc

SEQ ID NO: 281432 - DNA, 25 bp, Homo sapien
tgaggaccaaccgtgtgaggatcag

SEQ ID NO: 281433 - DNA, 25 bp, Homo sapien
gcttctgaggaccaaccgtgtgagg

SEQ ID NO: 281434 - DNA, 25 bp, Homo sapien
taatttcaagcttctgaggaccaac

SEQ ID NO: 281435 - DNA, 25 bp, Homo sapien
tctctaactggggagcttaatcatg

SEQ ID NO: 281436 - DNA, 25 bp, Homo sapien
caaaacctgttcatagaagcagtca

SEQ ID NO: 281437 - DNA, 25 bp, Homo sapien
cagccagtcactggagatctctaac

SEQ ID NO: 281438 - DNA, 25 bp, Homo sapien
ggagcttaatcatgttgatctaaca

SEQ ID NO: 281439 - DNA, 25 bp, Homo sapien
cgtatcccatgagaggtctgcacca

SEQ ID NO: 281440 - DNA, 25 bp, Homo sapien
aggaccctttccgtatcccatgaga

SEQ ID NO: 281441 - DNA, 25 bp, Homo sapien
ctttccgtatcccatgagaggtctg

SEQ ID NO: 281442 - DNA, 25 bp, Homo sapien
gaccctttccgtatcccatgagagg

SEQ ID NO: 281443 - DNA, 25 bp, Homo sapien
aaaacagtagtgttcgccagtggac

SEQ ID NO: 281444 - DNA, 25 bp, Homo sapien
gtctccctgcccatagctaaaacag

SEQ ID NO: 281445 - DNA, 25 bp, Homo sapien
gcttcatagttaccttagggctgag

SEQ ID NO: 281446 - DNA, 25 bp, Homo sapien
tataaaatcgtaggatgtctccctg

SEQ ID NO: 281447 - DNA, 25 bp, Homo sapien
tggaaactatgaagctcttgtccag

SEQ ID NO: 281448 - DNA, 25 bp, Homo sapien
tgagatggctaaaagtaacccccta

SEQ ID NO: 281449 - DNA, 25 bp, Homo sapien
ggaaactatgaagctcttgtccagt

SEQ ID NO: 281450 - DNA, 25 bp, Homo sapien
ttggagcacagtccaaagttaatgg

SEQ ID NO: 281451 - DNA, 25 bp, Homo sapien
aggagaaggagaggagtccaggcca

SEQ ID NO: 281452 - DNA, 25 bp, Homo sapien
agaaggagaaggagaggagtccagg

SEQ ID NO: 281453 - DNA, 25 bp, Homo sapien
ggagaaggagaggagtccaggccat

SEQ ID NO: 281454 - DNA, 25 bp, Homo sapien
aaggagaaggagaggagtccaggcc

SEQ ID NO: 281455 - DNA, 25 bp, Homo sapien
gaaccagtaaggataatgaccccca

SEQ ID NO: 281456 - DNA, 25 bp, Homo sapien
tggggacacagtcagtgagggttcc

SEQ ID NO: 281457 - DNA, 25 bp, Homo sapien
gataatgacccccattgactgctcc

SEQ ID NO: 281458 - DNA, 25 bp, Homo sapien
cacccaagagtgtctgggcagcttt

SEQ ID NO: 281459 - DNA, 25 bp, Homo sapien
cacgactatggtgcagtaagcagta

SEQ ID NO: 281460 - DNA, 25 bp, Homo sapien
actatggtgcagtaagcagtagtac

SEQ ID NO: 281461 - DNA, 25 bp, Homo sapien
tatggtgcagtaagcagtagtactc

SEQ ID NO: 281462 - DNA, 25 bp, Homo sapien
ccaagcacgactatggtgcagtaag

SEQ ID NO: 281463 - DNA, 25 bp, Homo sapien
tacagagaattctggaaatacagag

SEQ ID NO: 281464 - DNA, 25 bp, Homo sapien
atcaacttcgggcttcttcagttct

SEQ ID NO: 281465 - DNA, 25 bp, Homo sapien
aagcatatctgagaggttcaagaaa

SEQ ID NO: 281466 - DNA, 25 bp, Homo sapien
cagaatcaatcaacttcgggcttct

SEQ ID NO: 281467 - DNA, 25 bp, Homo sapien
ggtggtgtcagtgctaaaaggtctt

SEQ ID NO: 281468 - DNA, 25 bp, Homo sapien
ggtgacggcccatttttctctcgct

SEQ ID NO: 281469 - DNA, 25 bp, Homo sapien
tagttagaagcactagatagtgtcc

SEQ ID NO: 281470 - DNA, 25 bp, Homo sapien
gatagtgtccttcccaagccggttc

SEQ ID NO: 281471 - DNA, 25 bp, Homo sapien
aggagggtgaggaagagagggtcca

SEQ ID NO: 281472 - DNA, 25 bp, Homo sapien
ctttgcagagactcaggagggtgag

SEQ ID NO: 281473 - DNA, 25 bp, Homo sapien
gagggtgaggaagagagggtccagg

SEQ ID NO: 281474 - DNA, 25 bp, Homo sapien
gggtgaggaagagagggtccaggcc

SEQ ID NO: 281475 - DNA, 25 bp, Homo sapien
cagacagactgtgcaggttaccaag

SEQ ID NO: 281476 - DNA, 25 bp, Homo sapien
ttaccaagtgagttctgactgccca

SEQ ID NO: 281477 - DNA, 25 bp, Homo sapien
acattagtgatcagccttgttctca

SEQ ID NO: 281478 - DNA, 25 bp, Homo sapien
tatattggcttctatggatcagagg

SEQ ID NO: 281479 - DNA, 25 bp, Homo sapien
ctgggcagtgactgagtgaggagga

SEQ ID NO: 281480 - DNA, 25 bp, Homo sapien
gcagtgactgagtgaggaggaggag

SEQ ID NO: 281481 - DNA, 25 bp, Homo sapien
gtgactgagtgaggaggaggagagg

SEQ ID NO: 281482 - DNA, 25 bp, Homo sapien
ggaggaggagaggagtctagaccac

SEQ ID NO: 281483 - DNA, 25 bp, Homo sapien
tgccgccctggagttgctgcccagg

SEQ ID NO: 281484 - DNA, 25 bp, Homo sapien
agagcctgctgaaggatgaggccct

SEQ ID NO: 281485 - DNA, 25 bp, Homo sapien
gcctgctgaaggatgaggccctggc

SEQ ID NO: 281486 - DNA, 25 bp, Homo sapien
ctggccattgccgccctggagttgc

SEQ ID NO: 281487 - DNA, 25 bp, Homo sapien
gaagcctgaccatccccctagaggg

SEQ ID NO: 281488 - DNA, 25 bp, Homo sapien
aagcctgaccatccccctagagggc

SEQ ID NO: 281489 - DNA, 25 bp, Homo sapien
agcctgaccatccccctagagggcc

SEQ ID NO: 281490 - DNA, 25 bp, Homo sapien
gcctgaccatccccctagagggcct

SEQ ID NO: 281491 - DNA, 25 bp, Homo sapien
tttttgttgtttaatccatccagtc

SEQ ID NO: 281492 - DNA, 25 bp, Homo sapien
aatttttgttgtttaatccatccag

SEQ ID NO: 281493 - DNA, 25 bp, Homo sapien
ttgttgtttaatccatccagtctgt

SEQ ID NO: 281494 - DNA, 25 bp, Homo sapien
tttgttgtttaatccatccagtctg

SEQ ID NO: 281495 - DNA, 25 bp, Homo sapien
cactgggacaggacacttaaggctc

SEQ ID NO: 281496 - DNA, 25 bp, Homo sapien
tatgcactaagtgtcgtgggagcac

SEQ ID NO: 281497 - DNA, 25 bp, Homo sapien
tattaagtcaggagcccagtatgca

SEQ ID NO: 281498 - DNA, 25 bp, Homo sapien
tcatgggaacgtaggcaagccactc

SEQ ID NO: 281499 - DNA, 25 bp, Homo sapien
gagaggaagagtcaacccaggtgcc

SEQ ID NO: 281500 - DNA, 25 bp, Homo sapien
aggtaaactctactggttctctcca

SEQ ID NO: 281501 - DNA, 25 bp, Homo sapien
aactcagagcatgaccccaggtaaa

SEQ ID NO: 281502 - DNA, 25 bp, Homo sapien
gggattaactcagagcatgacccca

SEQ ID NO: 281503 - DNA, 25 bp, Homo sapien
tgagagttgcatagggtcccattcc

SEQ ID NO: 281504 - DNA, 25 bp, Homo sapien
gaactctaggagcttcgggcactga

SEQ ID NO: 281505 - DNA, 25 bp, Homo sapien
tgcaaagccaagtcccctgggagat

SEQ ID NO: 281506 - DNA, 25 bp, Homo sapien
cactgaagagggagaccaagtctgc

SEQ ID NO: 281507 - DNA, 25 bp, Homo sapien
gagggtgagaaggagcagagcccag

SEQ ID NO: 281508 - DNA, 25 bp, Homo sapien
gagtgaggagggtgagaaggagcag

SEQ ID NO: 281509 - DNA, 25 bp, Homo sapien
tgccctgagtgaggagggtgagaag

SEQ ID NO: 281510 - DNA, 25 bp, Homo sapien
ctgtgccctgagtgaggagggtgag

SEQ ID NO: 281511 - DNA, 25 bp, Homo sapien
tccagtgcagaagatagtaacctac

SEQ ID NO: 281512 - DNA, 25 bp, Homo sapien
agtaacctactgtccaggagacctg

SEQ ID NO: 281513 - DNA, 25 bp, Homo sapien
ctgagggccaattagcgacatcata

SEQ ID NO: 281514 - DNA, 25 bp, Homo sapien
ggagacaaggtcataacccccaatg

SEQ ID NO: 281515 - DNA, 25 bp, Homo sapien
ctcattacgcatgaacttggaccac

SEQ ID NO: 281516 - DNA, 25 bp, Homo sapien
ttggaccactgtggaaattgtagct

SEQ ID NO: 281517 - DNA, 25 bp, Homo sapien
ttggtctcattacgcatgaacttgg

SEQ ID NO: 281518 - DNA, 25 bp, Homo sapien
ggcaggttttggtctcattacgcat

SEQ ID NO: 281519 - DNA, 25 bp, Homo sapien
tcagttggtgttgctttgggaagag

SEQ ID NO: 281520 - DNA, 25 bp, Homo sapien
tcactctctcaacatcttcagatct

SEQ ID NO: 281521 - DNA, 25 bp, Homo sapien
agttggtgttgctttgggaagagac

SEQ ID NO: 281522 - DNA, 25 bp, Homo sapien
actctctcaacatcttcagatcttc

SEQ ID NO: 281523 - DNA, 25 bp, Homo sapien
agggtgaggaggagcagagcccagg

SEQ ID NO: 281524 - DNA, 25 bp, Homo sapien
ggagggtgaggaggagcagagccca

SEQ ID NO: 281525 - DNA, 25 bp, Homo sapien
ctgtgccctgagtgaggagggtgag

SEQ ID NO: 281526 - DNA, 25 bp, Homo sapien
ggtgaggaggagcagagcccaggcc

SEQ ID NO: 281527 - DNA, 25 bp, Homo sapien
gatcataatccccaacgtcactgct

SEQ ID NO: 281528 - DNA, 25 bp, Homo sapien
gaaggccgagtattgacattgtaaa

SEQ ID NO: 281529 - DNA, 25 bp, Homo sapien
gaggtcagagatccctgaaggccga

SEQ ID NO: 281530 - DNA, 25 bp, Homo sapien
gtagtgctgagacgcttttggtacc

SEQ ID NO: 281531 - DNA, 25 bp, Homo sapien
agctgcagtgataattagcctcaac

SEQ ID NO: 281532 - DNA, 25 bp, Homo sapien
tacttgaatataagctgcagtgata

SEQ ID NO: 281533 - DNA, 25 bp, Homo sapien
gaccactatggaaagtgtaactact

SEQ ID NO: 281534 - DNA, 25 bp, Homo sapien
tggaccactatggaaagtgtaacta

SEQ ID NO: 281535 - DNA, 25 bp, Homo sapien
aatgtgactgagctgccaagacagc

SEQ ID NO: 281536 - DNA, 25 bp, Homo sapien
tgataaccaatgtgactgagctgcc

SEQ ID NO: 281537 - DNA, 25 bp, Homo sapien
tccgatttacctgataaccaatgtg

SEQ ID NO: 281538 - DNA, 25 bp, Homo sapien
taaccaatgtgactgagctgccaag

SEQ ID NO: 281539 - DNA, 25 bp, Homo sapien
ctgtgcagagagtgaggacgagcag

SEQ ID NO: 281540 - DNA, 25 bp, Homo sapien
tgaggacgagcaggggaggggtcca

SEQ ID NO: 281541 - DNA, 25 bp, Homo sapien
gagtgaggacgagcaggggaggggt

SEQ ID NO: 281542 - DNA, 25 bp, Homo sapien
cagagagtgaggacgagcaggggag

SEQ ID NO: 281543 - DNA, 25 bp, Homo sapien
gttggcccagaggaaataacggagc

SEQ ID NO: 281544 - DNA, 25 bp, Homo sapien
agttggcccagaggaaataacggag

SEQ ID NO: 281545 - DNA, 25 bp, Homo sapien
tggcaggtgatcctggccatttgtc

SEQ ID NO: 281546 - DNA, 25 bp, Homo sapien
gagggccggtcactgctatcataga

SEQ ID NO: 281547 - DNA, 25 bp, Homo sapien
gagtagcatggttgtctatcaactg

SEQ ID NO: 281548 - DNA, 25 bp, Homo sapien
gctggtaccagtgttcataagagcc

SEQ ID NO: 281549 - DNA, 25 bp, Homo sapien
tccacagtcggcagtgtggaggcct

SEQ ID NO: 281550 - DNA, 25 bp, Homo sapien
tagattggcaggtatagatgaaccg

SEQ ID NO: 281551 - DNA, 25 bp, Homo sapien
ccgtcatgaggaccgtactggtacc

SEQ ID NO: 281552 - DNA, 25 bp, Homo sapien
tatagatgaaccgtcatgaggaccg

SEQ ID NO: 281553 - DNA, 25 bp, Homo sapien
ttgttattgggcttatcacaagaat

SEQ ID NO: 281554 - DNA, 25 bp, Homo sapien
gttattgggcttatcacaagaatct

SEQ ID NO: 281555 - DNA, 25 bp, Homo sapien
tatcacaagaatcttcccactgaaa

SEQ ID NO: 281556 - DNA, 25 bp, Homo sapien
cttatcacaagaatcttcccactga

SEQ ID NO: 281557 - DNA, 25 bp, Homo sapien
ctgtgcagagagtgaggagggtgag

SEQ ID NO: 281558 - DNA, 25 bp, Homo sapien
gggtgagcaggggaggggtccaggc

SEQ ID NO: 281559 - DNA, 25 bp, Homo sapien
tgagcaggggaggggtccaggccat

SEQ ID NO: 281560 - DNA, 25 bp, Homo sapien
gtgcagagagtgaggagggtgagca

SEQ ID NO: 281561 - DNA, 25 bp, Homo sapien
cagtttacaacggagtcttctatgc

SEQ ID NO: 281562 - DNA, 25 bp, Homo sapien
ctgttaagttagatgaccagcccag

SEQ ID NO: 281563 - DNA, 25 bp, Homo sapien
tttacaacggagtcttctatgctgt

SEQ ID NO: 281564 - DNA, 25 bp, Homo sapien
tgtaccagtttacaacggagtcttc

SEQ ID NO: 281565 - DNA, 25 bp, Homo sapien
gccagagaatttcttaggaatccct

SEQ ID NO: 281566 - DNA, 25 bp, Homo sapien
agccagagaatttcttaggaatccc

SEQ ID NO: 281567 - DNA, 25 bp, Homo sapien
ccagagaatttcttaggaatccctg

SEQ ID NO: 281568 - DNA, 25 bp, Homo sapien
agagaatttcttaggaatccctgaa

SEQ ID NO: 281569 - DNA, 25 bp, Homo sapien
gtacgactgctgtcccatgactgac

SEQ ID NO: 281570 - DNA, 25 bp, Homo sapien
ccttctgcctgtgtcaccgcggaat

SEQ ID NO: 281571 - DNA, 25 bp, Homo sapien
tgtgtcaccgcggaatgagtacgac

SEQ ID NO: 281572 - DNA, 25 bp, Homo sapien
gaatgagtacgactgctgtcccatg

SEQ ID NO: 281573 - DNA, 25 bp, Homo sapien
atgctgagaagatgtaacaggactg

SEQ ID NO: 281574 - DNA, 25 bp, Homo sapien
tcttccctgttgcttttgttaccaa

SEQ ID NO: 281575 - DNA, 25 bp, Homo sapien
gctgagaagatgtaacaggactgat

SEQ ID NO: 281576 - DNA, 25 bp, Homo sapien
cctcagtcatatggggctcttccct

SEQ ID NO: 281577 - DNA, 25 bp, Homo sapien
ttctgcgggtaccaagacagagcag

SEQ ID NO: 281578 - DNA, 25 bp, Homo sapien
gacactgtcagagaatcaatcagca

SEQ ID NO: 281579 - DNA, 25 bp, Homo sapien
cactgcatgaggagttttgtcacca

SEQ ID NO: 281580 - DNA, 25 bp, Homo sapien
gcagagcttccctacttggtcctga

SEQ ID NO: 281581 - DNA, 25 bp, Homo sapien
ccacagactcgctgatctgagctga

SEQ ID NO: 281582 - DNA, 25 bp, Homo sapien
atgggtgactgatccctaatgtccc

SEQ ID NO: 281583 - DNA, 25 bp, Homo sapien
gccagagggtgagtaaagttcccaa

SEQ ID NO: 281584 - DNA, 25 bp, Homo sapien
ggaaaacactggacagaggagggaa

SEQ ID NO: 281585 - DNA, 25 bp, Homo sapien
cgaggaggctgagaaaggtccagtc

SEQ ID NO: 281586 - DNA, 25 bp, Homo sapien
gtgcagtgagcgaggaggctgagaa

SEQ ID NO: 281587 - DNA, 25 bp, Homo sapien
ctgtgcagtgagcgaggaggctgag

SEQ ID NO: 281588 - DNA, 25 bp, Homo sapien
ggaggctgagaaaggtccagtccat

SEQ ID NO: 281589 - DNA, 25 bp, Homo sapien
agccctgctgagctcacaatcaagg

SEQ ID NO: 281590 - DNA, 25 bp, Homo sapien
aggtcatgagcatcctttccaccac

SEQ ID NO: 281591 - DNA, 25 bp, Homo sapien
gctgggcgggtggctgggactctgg

SEQ ID NO: 281592 - DNA, 25 bp, Homo sapien
gagtgcccatgagcacaggagtaca

SEQ ID NO: 281593 - DNA, 25 bp, Homo sapien
tcagagtgcccatgagcacaggagt

SEQ ID NO: 281594 - DNA, 25 bp, Homo sapien
agggagaaaaggcttgaagctgagg

SEQ ID NO: 281595 - DNA, 25 bp, Homo sapien
tgatcctcaggattcctttgcacct

SEQ ID NO: 281596 - DNA, 25 bp, Homo sapien
gtggctgagacagctcatatgtggc

SEQ ID NO: 281597 - DNA, 25 bp, Homo sapien
gacagctcatatgtggccatgaaac

SEQ ID NO: 281598 - DNA, 25 bp, Homo sapien
ggtgatcctggccatctgtaatggg

SEQ ID NO: 281599 - DNA, 25 bp, Homo sapien
ctgagacagctcatatgtggccatg

SEQ ID NO: 281600 - DNA, 25 bp, Homo sapien
ggccccactaatggtcagagtggct

SEQ ID NO: 281601 - DNA, 25 bp, Homo sapien
tacagtaatagcctcgtccctggcc

SEQ ID NO: 281602 - DNA, 25 bp, Homo sapien
tcagccatcataggtgctacagtaa

SEQ ID NO: 281603 - DNA, 25 bp, Homo sapien
ccttgagggccacttgctgtcttta

SEQ ID NO: 281604 - DNA, 25 bp, Homo sapien
ggccctgaaggtcgtcagaggccac

SEQ ID NO: 281605 - DNA, 25 bp, Homo sapien
ccccaacccttagtcagaggcagag

SEQ ID NO: 281606 - DNA, 25 bp, Homo sapien
ttccccaacccttagtcagaggcag

SEQ ID NO: 281607 - DNA, 25 bp, Homo sapien
gtctgttcagaggccccacggggca

SEQ ID NO: 281608 - DNA, 25 bp, Homo sapien
cacttccccaacccttagtcagagg

SEQ ID NO: 281609 - DNA, 25 bp, Homo sapien
cattcatggcgatgacggcgcgctg

SEQ ID NO: 281610 - DNA, 25 bp, Homo sapien
cccattcatggcgatgacggcgcgc

SEQ ID NO: 281611 - DNA, 25 bp, Homo sapien
ccattcatggcgatgacggcgcgct

SEQ ID NO: 281612 - DNA, 25 bp, Homo sapien
attcatggcgatgacggcgcgctgc

SEQ ID NO: 281613 - DNA, 25 bp, Homo sapien
ggtgaccacagcaatcttgactccg

SEQ ID NO: 281614 - DNA, 25 bp, Homo sapien
gaacttgaccgagagctttacttcg

SEQ ID NO: 281615 - DNA, 25 bp, Homo sapien
tcttgactccgaagacccctgtctg

SEQ ID NO: 281616 - DNA, 25 bp, Homo sapien
gtctgttttcgggacggcatcctct

SEQ ID NO: 281617 - DNA, 25 bp, Homo sapien
ggccaccccagacatgcggtagatg

SEQ ID NO: 281618 - DNA, 25 bp, Homo sapien
accccagacatgcggtagatgccca

SEQ ID NO: 281619 - DNA, 25 bp, Homo sapien
ccaccccagacatgcggtagatgcc

SEQ ID NO: 281620 - DNA, 25 bp, Homo sapien
gccaccccagacatgcggtagatgc

SEQ ID NO: 281621 - DNA, 25 bp, Homo sapien
ggaagtacagcttcagcatgcctgc

SEQ ID NO: 281622 - DNA, 25 bp, Homo sapien
tagaactcgtcagtgaaaaggggct

SEQ ID NO: 281623 - DNA, 25 bp, Homo sapien
catgcctgcgatggcgttcacgtcc

SEQ ID NO: 281624 - DNA, 25 bp, Homo sapien
agctcacggaagtacagcttcagca

SEQ ID NO: 281625 - DNA, 25 bp, Homo sapien
ctgaacgccttttctctacctcgca

SEQ ID NO: 281626 - DNA, 25 bp, Homo sapien
tctctacctcgcaggggtcagcagc

SEQ ID NO: 281627 - DNA, 25 bp, Homo sapien
gaaccacctgaacgccttttctcta

SEQ ID NO: 281628 - DNA, 25 bp, Homo sapien
aacgccttttctctacctcgcaggg

SEQ ID NO: 281629 - DNA, 25 bp, Homo sapien
tgagcaggttggcctccggcaggga

SEQ ID NO: 281630 - DNA, 25 bp, Homo sapien
ggtgagcaggttggcctccggcagg

SEQ ID NO: 281631 - DNA, 25 bp, Homo sapien
gagcaggttggcctccggcagggac

SEQ ID NO: 281632 - DNA, 25 bp, Homo sapien
gtgagcaggttggcctccggcaggg

SEQ ID NO: 281633 - DNA, 25 bp, Homo sapien
agcgtggggccaaacaccgtgccaa

SEQ ID NO: 281634 - DNA, 25 bp, Homo sapien
caaacaccgtgccaaggttgtgcag

SEQ ID NO: 281635 - DNA, 25 bp, Homo sapien
ggccaaacaccgtgccaaggttgtg

SEQ ID NO: 281636 - DNA, 25 bp, Homo sapien
caccgtgccaaggttgtgcagggac

SEQ ID NO: 281637 - DNA, 25 bp, Homo sapien
gatgctctgtctcttgctgtccagg

SEQ ID NO: 281638 - DNA, 25 bp, Homo sapien
ttagacatcggtggagaacaggatg

SEQ ID NO: 281639 - DNA, 25 bp, Homo sapien
acatcggtggagaacaggatgctct

SEQ ID NO: 281640 - DNA, 25 bp, Homo sapien
cgcaagaagtacagcagcacctcga

SEQ ID NO: 281641 - DNA, 25 bp, Homo sapien
tgacacctgggggtggcccaaggat

SEQ ID NO: 281642 - DNA, 25 bp, Homo sapien
ctcagaaaatcttgattcccactct

SEQ ID NO: 281643 - DNA, 25 bp, Homo sapien
gctttcagacctgggcgggatctgc

SEQ ID NO: 281644 - DNA, 25 bp, Homo sapien
gaaaatcttgattcccactctacag

SEQ ID NO: 281645 - DNA, 25 bp, Homo sapien
gacacggattgtccagggattacat

SEQ ID NO: 281646 - DNA, 25 bp, Homo sapien
gattacattccagcatcttattagg

SEQ ID NO: 281647 - DNA, 25 bp, Homo sapien
gagccaggcgcttagaggaagacca

SEQ ID NO: 281648 - DNA, 25 bp, Homo sapien
cctccacgtatcctgttctccagag

SEQ ID NO: 281649 - DNA, 25 bp, Homo sapien
tcttgaaaatacttggcggcctcca

SEQ ID NO: 281650 - DNA, 25 bp, Homo sapien
tttcttgaaaatacttggcggcctc

SEQ ID NO: 281651 - DNA, 25 bp, Homo sapien
ttcttgaaaatacttggcggcctcc

SEQ ID NO: 281652 - DNA, 25 bp, Homo sapien
tcatcccatcattagacagcacaca

SEQ ID NO: 281653 - DNA, 25 bp, Homo sapien
tggaaaagtgtggtcatcccatcat

SEQ ID NO: 281654 - DNA, 25 bp, Homo sapien
ccagtttcaaggtaacagatgcaca

SEQ ID NO: 281655 - DNA, 25 bp, Homo sapien
tggcacagacattgatagactggtt

SEQ ID NO: 281656 - DNA, 25 bp, Homo sapien
attgcatgaccccccacgtccgcct

SEQ ID NO: 281657 - DNA, 25 bp, Homo sapien
ctattgcatgaccccccacgtccgc

SEQ ID NO: 281658 - DNA, 25 bp, Homo sapien
gcatgaccccccacgtccgcctccc

SEQ ID NO: 281659 - DNA, 25 bp, Homo sapien
tgcatgaccccccacgtccgcctcc

SEQ ID NO: 281660 - DNA, 25 bp, Homo sapien
tgtggaccacctgccgagaccccag

SEQ ID NO: 281661 - DNA, 25 bp, Homo sapien
gttgtggaccacctgccgagacccc

SEQ ID NO: 281662 - DNA, 25 bp, Homo sapien
tggaccacctgccgagaccccagag

SEQ ID NO: 281663 - DNA, 25 bp, Homo sapien
accacctgccgagaccccagagctg

SEQ ID NO: 281664 - DNA, 25 bp, Homo sapien
atcaaccggcgtgtagaactcgggc

SEQ ID NO: 281665 - DNA, 25 bp, Homo sapien
agtgcccccatcaaccggcgtgtag

SEQ ID NO: 281666 - DNA, 25 bp, Homo sapien
cccatcaaccggcgtgtagaactcg

SEQ ID NO: 281667 - DNA, 25 bp, Homo sapien
tgcccccatcaaccggcgtgtagaa

SEQ ID NO: 281668 - DNA, 25 bp, Homo sapien
ccatttcatcattgaacaggatctc

SEQ ID NO: 281669 - DNA, 25 bp, Homo sapien
gggagagctgaagtcatccatttca

SEQ ID NO: 281670 - DNA, 25 bp, Homo sapien
atcattgaacaggatctcgctgacc

SEQ ID NO: 281671 - DNA, 25 bp, Homo sapien
ggcaccccaaactcgttggtgatgt

SEQ ID NO: 281672 - DNA, 25 bp, Homo sapien
gcccaccatgatcgtcgggcacatt

SEQ ID NO: 281673 - DNA, 25 bp, Homo sapien
atcgtcgggcacattgacgagagcg

SEQ ID NO: 281674 - DNA, 25 bp, Homo sapien
caccatgatcgtcgggcacattgac

SEQ ID NO: 281675 - DNA, 25 bp, Homo sapien
cacattgacgagagcggctgcttcc

SEQ ID NO: 281676 - DNA, 25 bp, Homo sapien
tgtggtgatctgtgtgcccccagca

SEQ ID NO: 281677 - DNA, 25 bp, Homo sapien
gcagtggctgtggtgatctgtgtgc

SEQ ID NO: 281678 - DNA, 25 bp, Homo sapien
ggctgtggtgatctgtgtgccccca

SEQ ID NO: 281679 - DNA, 25 bp, Homo sapien
cagtggctgtggtgatctgtgtgcc

SEQ ID NO: 281680 - DNA, 25 bp, Homo sapien
ctgtgcagggtgggcacggccaggg

SEQ ID NO: 281681 - DNA, 25 bp, Homo sapien
ccagggagaaaaggggtgacacata

SEQ ID NO: 281682 - DNA, 25 bp, Homo sapien
tgcagggtgggcacggccagggaga

SEQ ID NO: 281683 - DNA, 25 bp, Homo sapien
cagggagaaaaggggtgacacatat

SEQ ID NO: 281684 - DNA, 25 bp, Homo sapien
ctggggcatgggagtgtgatcagca

SEQ ID NO: 281685 - DNA, 25 bp, Homo sapien
gcatgggagtgtgatcagcatggct

SEQ ID NO: 281686 - DNA, 25 bp, Homo sapien
gggcatgggagtgtgatcagcatgg

SEQ ID NO: 281687 - DNA, 25 bp, Homo sapien
catgggagtgtgatcagcatggctt

SEQ ID NO: 281688 - DNA, 25 bp, Homo sapien
gtcatagccgaaccagaggttgtag

SEQ ID NO: 281689 - DNA, 25 bp, Homo sapien
tggcttgcaccacagcgatgaaggt

SEQ ID NO: 281690 - DNA, 25 bp, Homo sapien
gaaggtggacgcgatctgggtgtga

SEQ ID NO: 281691 - DNA, 25 bp, Homo sapien
gtagccggcaggctccccgcctttc

SEQ ID NO: 281692 - DNA, 25 bp, Homo sapien
cagccgtgcggacgatggcttgcac

SEQ ID NO: 281693 - DNA, 25 bp, Homo sapien
cccttcctggtcctggtgagtatct

SEQ ID NO: 281694 - DNA, 25 bp, Homo sapien
gcttgtcagccttgtcctcctggag

SEQ ID NO: 281695 - DNA, 25 bp, Homo sapien
gagtccccttcctggtcctggtgag

SEQ ID NO: 281696 - DNA, 25 bp, Homo sapien
tggcacagtggcctcatttattgtg

SEQ ID NO: 281697 - DNA, 25 bp, Homo sapien
ttcccgggttctcagcagctctagg

SEQ ID NO: 281698 - DNA, 25 bp, Homo sapien
tcactgctggtaggtccaaaggccc

SEQ ID NO: 281699 - DNA, 25 bp, Homo sapien
gctgctgtgttaactccctcactgc

SEQ ID NO: 281700 - DNA, 25 bp, Homo sapien
cactgtcgcaatgtgcaggagaact

SEQ ID NO: 281701 - DNA, 25 bp, Homo sapien
gtccaatatccgagcagaccttgga

SEQ ID NO: 281702 - DNA, 25 bp, Homo sapien
tccaatatccgagcagaccttggag

SEQ ID NO: 281703 - DNA, 25 bp, Homo sapien
acttcgagtttaagtgggtgtcgca

SEQ ID NO: 281704 - DNA, 25 bp, Homo sapien
ttcgagtttaagtgggtgtcgcatc

SEQ ID NO: 281705 - DNA, 25 bp, Homo sapien
tctttgcaacttcgagtttaagtgg

SEQ ID NO: 281706 - DNA, 25 bp, Homo sapien
tgcaacttcgagtttaagtgggtgt

SEQ ID NO: 281707 - DNA, 25 bp, Homo sapien
cgaggaggaaaggggtccaggccat

SEQ ID NO: 281708 - DNA, 25 bp, Homo sapien
ctgtgcagtgagggaggaggccgag

SEQ ID NO: 281709 - DNA, 25 bp, Homo sapien
agtgagggaggaggccgaggaggaa

SEQ ID NO: 281710 - DNA, 25 bp, Homo sapien
tgagggaggaggccgaggaggaaag

SEQ ID NO: 281711 - DNA, 25 bp, Homo sapien
gaataaaagtgcccttagggcacca

SEQ ID NO: 281712 - DNA, 25 bp, Homo sapien
aaagtgcccttagggcaccaagaga

SEQ ID NO: 281713 - DNA, 25 bp, Homo sapien
tgccctgcggcaggttcatgagcat

SEQ ID NO: 281714 - DNA, 25 bp, Homo sapien
cctgccctgcggcaggttcatgagc

SEQ ID NO: 281715 - DNA, 25 bp, Homo sapien
tatttcccctacaggtgatcctggg

SEQ ID NO: 281716 - DNA, 25 bp, Homo sapien
ccatagatgacctgcacaagggcct

SEQ ID NO: 281717 - DNA, 25 bp, Homo sapien
atcacttagagatccctgaaggcca

SEQ ID NO: 281718 - DNA, 25 bp, Homo sapien
tccccgagttggagctggagaatca

SEQ ID NO: 281719 - DNA, 25 bp, Homo sapien
taaagactgggggtctcagatccag

SEQ ID NO: 281720 - DNA, 25 bp, Homo sapien
tggctttgtccacagtgttgccggg

SEQ ID NO: 281721 - DNA, 25 bp, Homo sapien
caggtgaactgggtcatgcatgctc

SEQ ID NO: 281722 - DNA, 25 bp, Homo sapien
gtcatgcatgctcatggctttgtcc

SEQ ID NO: 281723 - DNA, 25 bp, Homo sapien
acacagggcacatgttgtggggagc

SEQ ID NO: 281724 - DNA, 25 bp, Homo sapien
cacagggcacatgttgtggggagcc

SEQ ID NO: 281725 - DNA, 25 bp, Homo sapien
ggcatctgcagcatcgaatccctgg

SEQ ID NO: 281726 - DNA, 25 bp, Homo sapien
atggtggagacgtcccgagagcgct

SEQ ID NO: 281727 - DNA, 25 bp, Homo sapien
ccatggtggagacgtcccgagagcg

SEQ ID NO: 281728 - DNA, 25 bp, Homo sapien
ggccatggtggagacgtcccgagag

SEQ ID NO: 281729 - DNA, 25 bp, Homo sapien
ccaggccatggtggagacgtcccga

SEQ ID NO: 281730 - DNA, 25 bp, Homo sapien
actccagagagcctataactgactt

SEQ ID NO: 281731 - DNA, 25 bp, Homo sapien
gagacatagttataatgcccaacgt

SEQ ID NO: 281732 - DNA, 25 bp, Homo sapien
cccgggtactgagtgaggctgagtc

SEQ ID NO: 281733 - DNA, 25 bp, Homo sapien
cgactgtccaggagacccgggtact

SEQ ID NO: 281734 - DNA, 25 bp, Homo sapien
gtagcaggtgatggaccaaggccgg

SEQ ID NO: 281735 - DNA, 25 bp, Homo sapien
ggtagcaggtgatggaccaaggccg

SEQ ID NO: 281736 - DNA, 25 bp, Homo sapien
atctcctgaagcatcacctgggctg

SEQ ID NO: 281737 - DNA, 25 bp, Homo sapien
tgagctcagggtcaggaataggctt

SEQ ID NO: 281738 - DNA, 25 bp, Homo sapien
tcaggaataggcttagggtcctgtg

SEQ ID NO: 281739 - DNA, 25 bp, Homo sapien
gatgttggggctcattctcaggatc

SEQ ID NO: 281740 - DNA, 25 bp, Homo sapien
ggtgagacattcagagctctgcctc

SEQ ID NO: 281741 - DNA, 25 bp, Homo sapien
agggatccaggccatggtgagacat

SEQ ID NO: 281742 - DNA, 25 bp, Homo sapien
caggccatggtgagacattcagagc

SEQ ID NO: 281743 - DNA, 25 bp, Homo sapien
gagcaggagagggatccaggccatg

SEQ ID NO: 281744 - DNA, 25 bp, Homo sapien
ttcaggtcaggctcaacttggggtc

SEQ ID NO: 281745 - DNA, 25 bp, Homo sapien
agggctttgctcaggattcaggtca

SEQ ID NO: 281746 - DNA, 25 bp, Homo sapien
gcttgaggacaaaggacgcattgcc

SEQ ID NO: 281747 - DNA, 25 bp, Homo sapien
tctgtggagactgagcctaggggca

SEQ ID NO: 281748 - DNA, 25 bp, Homo sapien
tttgccagtacatctcctgagcagg

SEQ ID NO: 281749 - DNA, 25 bp, Homo sapien
gcttctgctggaaccaccgagcata

SEQ ID NO: 281750 - DNA, 25 bp, Homo sapien
ttttttgccagtacatctcctgagc

SEQ ID NO: 281751 - DNA, 25 bp, Homo sapien
gctggaaccaccgagcatatttttt

SEQ ID NO: 281752 - DNA, 25 bp, Homo sapien
tcagccgcagagtaacagtaatagt

SEQ ID NO: 281753 - DNA, 25 bp, Homo sapien
tgtcagccgcagagtaacagtaata

SEQ ID NO: 281754 - DNA, 25 bp, Homo sapien
tgttgtcagccgcagagtaacagta

SEQ ID NO: 281755 - DNA, 25 bp, Homo sapien
gccgcagagtaacagtaatagtcag

SEQ ID NO: 281756 - DNA, 25 bp, Homo sapien
atggcaaggggtttgtgtctcattt

SEQ ID NO: 281757 - DNA, 25 bp, Homo sapien
agatggcaaggggtttgtgtctcat

SEQ ID NO: 281758 - DNA, 25 bp, Homo sapien
gatggcaaggggtttgtgtctcatt

SEQ ID NO: 281759 - DNA, 25 bp, Homo sapien
tagggcctccgtagagatctggaag

SEQ ID NO: 281760 - DNA, 25 bp, Homo sapien
cttctgtagggcctccgtagagatc

SEQ ID NO: 281761 - DNA, 25 bp, Homo sapien
tgtagggcctccgtagagatctgga

SEQ ID NO: 281762 - DNA, 25 bp, Homo sapien
tctgtagggcctccgtagagatctg

SEQ ID NO: 281763 - DNA, 25 bp, Homo sapien
ggtgagcaagggaggggtccaggcc

SEQ ID NO: 281764 - DNA, 25 bp, Homo sapien
agagacggaggagggtgagcaaggg

SEQ ID NO: 281765 - DNA, 25 bp, Homo sapien
agacggaggagggtgagcaagggag

SEQ ID NO: 281766 - DNA, 25 bp, Homo sapien
tgagcaagggaggggtccaggccac

SEQ ID NO: 281767 - DNA, 25 bp, Homo sapien
acagaccctactggctcctgagtca

SEQ ID NO: 281768 - DNA, 25 bp, Homo sapien
ccctgagggctggttattttgtcga

SEQ ID NO: 281769 - DNA, 25 bp, Homo sapien
tgtatgacctgcacaggagcctagc

SEQ ID NO: 281770 - DNA, 25 bp, Homo sapien
gcactgctgtcccatgagtgatggt

SEQ ID NO: 281771 - DNA, 25 bp, Homo sapien
tattttgtcgatgtatgacctgcac

SEQ ID NO: 281772 - DNA, 25 bp, Homo sapien
cagcaaaaccgatgatgaccgactg

SEQ ID NO: 281773 - DNA, 25 bp, Homo sapien
actgagtcagagcagtcaggatccc

SEQ ID NO: 281774 - DNA, 25 bp, Homo sapien
actgccaggtgtccatgaggtagac

SEQ ID NO: 281775 - DNA, 25 bp, Homo sapien
ccatgaggtagacggagactgagtc

SEQ ID NO: 281776 - DNA, 25 bp, Homo sapien
tggaaccaggagacacaattgttac

SEQ ID NO: 281777 - DNA, 25 bp, Homo sapien
tctggatgcatgggcagctctgggg

SEQ ID NO: 281778 - DNA, 25 bp, Homo sapien
cttctggatgcatgggcagctctgg

SEQ ID NO: 281779 - DNA, 25 bp, Homo sapien
gatgcatgggcagctctggggggtc

SEQ ID NO: 281780 - DNA, 25 bp, Homo sapien
tggatgcatgggcagctctgggggg

SEQ ID NO: 281781 - DNA, 25 bp, Homo sapien
aggtggcaggcgaagggtctaggcc

SEQ ID NO: 281782 - DNA, 25 bp, Homo sapien
gaggtggcaggcgaagggtctaggc

SEQ ID NO: 281783 - DNA, 25 bp, Homo sapien
agaagaggtggcaggcgaagggtct

SEQ ID NO: 281784 - DNA, 25 bp, Homo sapien
aagaggtggcaggcgaagggtctag

SEQ ID NO: 281785 - DNA, 25 bp, Homo sapien
ggagctgcccttgagtcagagtctg

SEQ ID NO: 281786 - DNA, 25 bp, Homo sapien
aggagctgcccttgagtcagagtct

SEQ ID NO: 281787 - DNA, 25 bp, Homo sapien
ggtgagacacccagagttctgcctc

SEQ ID NO: 281788 - DNA, 25 bp, Homo sapien
gtgagacacccagagttctgcctcc

SEQ ID NO: 281789 - DNA, 25 bp, Homo sapien
agagggggagaagtagagggatcca

SEQ ID NO: 281790 - DNA, 25 bp, Homo sapien
gaagagggggagaagtagagggatc

SEQ ID NO: 281791 - DNA, 25 bp, Homo sapien
cagagaatcgctcagggatccctga

SEQ ID NO: 281792 - DNA, 25 bp, Homo sapien
gggacactgacaccgagggtggctg

SEQ ID NO: 281793 - DNA, 25 bp, Homo sapien
tttatatatcaccagcacaggggcc

SEQ ID NO: 281794 - DNA, 25 bp, Homo sapien
ggcttctgctggtaccaataagcat

SEQ ID NO: 281795 - DNA, 25 bp, Homo sapien
ttccctgtctgcttgtgtcactgtg

SEQ ID NO: 281796 - DNA, 25 bp, Homo sapien
catggctttgtccacagtcctcctg

SEQ ID NO: 281797 - DNA, 25 bp, Homo sapien
ctactcatggctttgtccacagtcc

SEQ ID NO: 281798 - DNA, 25 bp, Homo sapien
aagaggatgaaatagagggggaggg

SEQ ID NO: 281799 - DNA, 25 bp, Homo sapien
tagagggggaggggtttatgtctca

SEQ ID NO: 281800 - DNA, 25 bp, Homo sapien
ttatactagatgaccagcaccatgg

SEQ ID NO: 281801 - DNA, 25 bp, Homo sapien
tgtgctcatgattgtcagtcccagg

SEQ ID NO: 281802 - DNA, 25 bp, Homo sapien
agcctaagaattgggcagatgtccc

SEQ ID NO: 281803 - DNA, 25 bp, Homo sapien
aatagtcagtctcttcccgggcttg

SEQ ID NO: 281804 - DNA, 25 bp, Homo sapien
ccaaggaaaagaggggccaggccat

SEQ ID NO: 281805 - DNA, 25 bp, Homo sapien
ctgggcagtgagtcaggagaccaag

SEQ ID NO: 281806 - DNA, 25 bp, Homo sapien
cagtgagtcaggagaccaaggaaaa

SEQ ID NO: 281807 - DNA, 25 bp, Homo sapien
gggcagtgagtcaggagaccaagga

SEQ ID NO: 281808 - DNA, 25 bp, Homo sapien
gcttctgctggtaccattaagcact

SEQ ID NO: 281809 - DNA, 25 bp, Homo sapien
tctcagagatccctgaaggccgcct

SEQ ID NO: 281810 - DNA, 25 bp, Homo sapien
cttctgctggtaccattaagcactt

SEQ ID NO: 281811 - DNA, 25 bp, Homo sapien
ctctgctgtgtagtgcctgtgtctc

SEQ ID NO: 281812 - DNA, 25 bp, Homo sapien
gagtgagctcctggccctcagtgcc

SEQ ID NO: 281813 - DNA, 25 bp, Homo sapien
tgcctctgctgtgtagtgcctgtgt

SEQ ID NO: 281814 - DNA, 25 bp, Homo sapien
tgagtgagctcctggccctcagtgc

SEQ ID NO: 281815 - DNA, 25 bp, Homo sapien
gtggagacgtcccgagagcgctgcc

SEQ ID NO: 281816 - DNA, 25 bp, Homo sapien
ggagacgtcccgagagcgctgcctc

SEQ ID NO: 281817 - DNA, 25 bp, Homo sapien
tggagacgtcccgagagcgctgcct

SEQ ID NO: 281818 - DNA, 25 bp, Homo sapien
ggtggagacgtcccgagagcgctgc

SEQ ID NO: 281819 - DNA, 25 bp, Homo sapien
ctgtgtcctgagtgaggagagtgag

SEQ ID NO: 281820 - DNA, 25 bp, Homo sapien
gtgaggagcagcagagcccaggcca

SEQ ID NO: 281821 - DNA, 25 bp, Homo sapien
tgaggagcagcagagcccaggccat

SEQ ID NO: 281822 - DNA, 25 bp, Homo sapien
gtcctgagtgaggagagtgaggagc

SEQ ID NO: 281823 - DNA, 25 bp, Homo sapien
caggctgagtcagggcagactgggc

SEQ ID NO: 281824 - DNA, 25 bp, Homo sapien
tccaggagacccagacacggaggca

SEQ ID NO: 281825 - DNA, 25 bp, Homo sapien
acccagacacggaggcaggctgagt

SEQ ID NO: 281826 - DNA, 25 bp, Homo sapien
tgagtcagggcagactgggcccagg

SEQ ID NO: 281827 - DNA, 25 bp, Homo sapien
agacaaggttataactcccaacatc

SEQ ID NO: 281828 - DNA, 25 bp, Homo sapien
ggagacaaggttataactcccaaca

SEQ ID NO: 281829 - DNA, 25 bp, Homo sapien
gagacaaggttataactcccaacat

SEQ ID NO: 281830 - DNA, 25 bp, Homo sapien
atgagcagcagtaataatcagcctc

SEQ ID NO: 281831 - DNA, 25 bp, Homo sapien
taagtcagagcagtcaggaccctag

SEQ ID NO: 281832 - DNA, 25 bp, Homo sapien
aagtcagagcagtcaggaccctagt

SEQ ID NO: 281833 - DNA, 25 bp, Homo sapien
gtcagagcagtcaggaccctagtcc

SEQ ID NO: 281834 - DNA, 25 bp, Homo sapien
ctaagtcagagcagtcaggacccta

SEQ ID NO: 281835 - DNA, 25 bp, Homo sapien
ttctggtggaaccaggagacacaat

SEQ ID NO: 281836 - DNA, 25 bp, Homo sapien
tctggtggaaccaggagacacaatt

SEQ ID NO: 281837 - DNA, 25 bp, Homo sapien
tttctggtggaaccaggagacacaa

SEQ ID NO: 281838 - DNA, 25 bp, Homo sapien
agcaatagtgatcagtgtcactgct

SEQ ID NO: 281839 - DNA, 25 bp, Homo sapien
cagcaatagtgatcagtgtcactgc

SEQ ID NO: 281840 - DNA, 25 bp, Homo sapien
gagtgaggagaggtagcaggtgatg

SEQ ID NO: 281841 - DNA, 25 bp, Homo sapien
ctgtggaaagagtgaggagaggtag

SEQ ID NO: 281842 - DNA, 25 bp, Homo sapien
aggtagcaggtgatggaccaaggcc

SEQ ID NO: 281843 - DNA, 25 bp, Homo sapien
ggtagcaggtgatggaccaaggcca

SEQ ID NO: 281844 - DNA, 25 bp, Homo sapien
gtcaggaataggcttagagtcctgt

SEQ ID NO: 281845 - DNA, 25 bp, Homo sapien
ccatctcctgaagcatcacttgggc

SEQ ID NO: 281846 - DNA, 25 bp, Homo sapien
agggtcaggaataggcttagagtcc

SEQ ID NO: 281847 - DNA, 25 bp, Homo sapien
caggttaaagagacgttggcgctca

SEQ ID NO: 281848 - DNA, 25 bp, Homo sapien
tgtgtagaggttgaggagtgggagc

SEQ ID NO: 281849 - DNA, 25 bp, Homo sapien
gtgtagaggttgaggagtgggagca

SEQ ID NO: 281850 - DNA, 25 bp, Homo sapien
atcttcgtatatcaccaactcaggg

SEQ ID NO: 281851 - DNA, 25 bp, Homo sapien
taatagtcagcctcgtcttcggtca

SEQ ID NO: 281852 - DNA, 25 bp, Homo sapien
tcgttcagggattccagggtaccgc

SEQ ID NO: 281853 - DNA, 25 bp, Homo sapien
gaggtggacccagagaatcgttcag

SEQ ID NO: 281854 - DNA, 25 bp, Homo sapien
gatggcctggaggtctcagatccag

SEQ ID NO: 281855 - DNA, 25 bp, Homo sapien
atggcctggaggtctcagatccagt

SEQ ID NO: 281856 - DNA, 25 bp, Homo sapien
gtggctttgactggttctggataca

SEQ ID NO: 281857 - DNA, 25 bp, Homo sapien
gggccagcgtaccttcgtagtgact

SEQ ID NO: 281858 - DNA, 25 bp, Homo sapien
tggatacaaatacagggccagcgta

SEQ ID NO: 281859 - DNA, 25 bp, Homo sapien
gactggttctggatacaaatacagg

SEQ ID NO: 281860 - DNA, 25 bp, Homo sapien
atgcagggacgcttctcatctccca

SEQ ID NO: 281861 - DNA, 25 bp, Homo sapien
tcatgtccaagacgggtccccaaga

SEQ ID NO: 281862 - DNA, 25 bp, Homo sapien
caggggacggcacaagccttggaca

SEQ ID NO: 281863 - DNA, 25 bp, Homo sapien
gggtccccaagagcccaatgcaggg

SEQ ID NO: 281864 - DNA, 25 bp, Homo sapien
gagcggcccatgatgcaaatcagca

SEQ ID NO: 281865 - DNA, 25 bp, Homo sapien
catgatgcaaatcagcagagtcaga

SEQ ID NO: 281866 - DNA, 25 bp, Homo sapien
gagagagcggcccatgatgcaaatc

SEQ ID NO: 281867 - DNA, 25 bp, Homo sapien
ctcttatccccttgctggagagagc

SEQ ID NO: 281868 - DNA, 25 bp, Homo sapien
ccgaggaggagaacggtccaggcca

SEQ ID NO: 281869 - DNA, 25 bp, Homo sapien
gtgcagtgagagaggaggccgagga

SEQ ID NO: 281870 - DNA, 25 bp, Homo sapien
gaggccgaggaggagaacggtccag

SEQ ID NO: 281871 - DNA, 25 bp, Homo sapien
ggccgaggaggagaacggtccaggc

SEQ ID NO: 281872 - DNA, 25 bp, Homo sapien
ccccggcttcgaccctgctgatggt

SEQ ID NO: 281873 - DNA, 25 bp, Homo sapien
ccctgagggccggtcgctatcatca

SEQ ID NO: 281874 - DNA, 25 bp, Homo sapien
ctatcatcatagacgaccagcacag

SEQ ID NO: 281875 - DNA, 25 bp, Homo sapien
ggccggtcgctatcatcatagacga

SEQ ID NO: 281876 - DNA, 25 bp, Homo sapien
acctgaaaggctcagatccaggtga

SEQ ID NO: 281877 - DNA, 25 bp, Homo sapien
aagccttcattctctaactcacaca

SEQ ID NO: 281878 - DNA, 25 bp, Homo sapien
agccccaagtcaccagatgattctg

SEQ ID NO: 281879 - DNA, 25 bp, Homo sapien
tgaactgggccagattcactcatgg

SEQ ID NO: 281880 - DNA, 25 bp, Homo sapien
ggggatctgggcagacttcacagtg

SEQ ID NO: 281881 - DNA, 25 bp, Homo sapien
gcctgatccagacagttggtctaag

SEQ ID NO: 281882 - DNA, 25 bp, Homo sapien
gacttcacagtgtccattcctctgg

SEQ ID NO: 281883 - DNA, 25 bp, Homo sapien
ctggggcctgatccagacagttggt

SEQ ID NO: 281884 - DNA, 25 bp, Homo sapien
cctggcatgtcaggctcccttttca

SEQ ID NO: 281885 - DNA, 25 bp, Homo sapien
gagttttcagtttatagtggcctac

SEQ ID NO: 281886 - DNA, 25 bp, Homo sapien
caaggaaccatcagattgggcattt

SEQ ID NO: 281887 - DNA, 25 bp, Homo sapien
tctgcaaatttggacagaaaccaga

SEQ ID NO: 281888 - DNA, 25 bp, Homo sapien
tgaggctgctccccctgccccgggc

SEQ ID NO: 281889 - DNA, 25 bp, Homo sapien
ggggtgaggctgctccccctgcccc

SEQ ID NO: 281890 - DNA, 25 bp, Homo sapien
gctgctccccctgccccgggctttc

SEQ ID NO: 281891 - DNA, 25 bp, Homo sapien
gggtgaggctgctccccctgccccg

SEQ ID NO: 281892 - DNA, 25 bp, Homo sapien
gaaaggagcaacatttacagaggat

SEQ ID NO: 281893 - DNA, 25 bp, Homo sapien
tccgtattttacgtagttcgccaca

SEQ ID NO: 281894 - DNA, 25 bp, Homo sapien
catatctggttggagttgtagaaag

SEQ ID NO: 281895 - DNA, 25 bp, Homo sapien
tgtgattgggttctttgttgaccag

SEQ ID NO: 281896 - DNA, 25 bp, Homo sapien
gtgtcacccagtgttttggggccaa

SEQ ID NO: 281897 - DNA, 25 bp, Homo sapien
tgtgtcacccagtgttttggggcca

SEQ ID NO: 281898 - DNA, 25 bp, Homo sapien
ctgtgtcacccagtgttttggggcc

SEQ ID NO: 281899 - DNA, 25 bp, Homo sapien
tgtcacccagtgttttggggccaag

SEQ ID NO: 281900 - DNA, 25 bp, Homo sapien
gatggtcatggaggctgtgtttcca

SEQ ID NO: 281901 - DNA, 25 bp, Homo sapien
tgttcttcacaatttgggaggagga

SEQ ID NO: 281902 - DNA, 25 bp, Homo sapien
ctctgtccagattgttcttcacaat

SEQ ID NO: 281903 - DNA, 25 bp, Homo sapien
gttcttcacaatttgggaggaggat

SEQ ID NO: 281904 - DNA, 25 bp, Homo sapien
ggccatggtggagacaccccagaac

SEQ ID NO: 281905 - DNA, 25 bp, Homo sapien
agtgaggagagtgagccagagaggg

SEQ ID NO: 281906 - DNA, 25 bp, Homo sapien
gagtgagccagagaggggtccaggc

SEQ ID NO: 281907 - DNA, 25 bp, Homo sapien
aggccatggtggagacaccccagaa

SEQ ID NO: 281908 - DNA, 25 bp, Homo sapien
ccttggcatgtgatcctgactgtct

SEQ ID NO: 281909 - DNA, 25 bp, Homo sapien
tgctggtaccagcttgcataatagc

SEQ ID NO: 281910 - DNA, 25 bp, Homo sapien
cacagcagggtcctgagtcagctca

SEQ ID NO: 281911 - DNA, 25 bp, Homo sapien
gctgtcccgggagttacagtaatag

SEQ ID NO: 281912 - DNA, 25 bp, Homo sapien
ttccccatctgtctgtgtcaatgtg

SEQ ID NO: 281913 - DNA, 25 bp, Homo sapien
agagagaggatgacacagatagtga

SEQ ID NO: 281914 - DNA, 25 bp, Homo sapien
tgacacagatagtgaaggggtttct

SEQ ID NO: 281915 - DNA, 25 bp, Homo sapien
agagaggatgacacagatagtgaag

SEQ ID NO: 281916 - DNA, 25 bp, Homo sapien
gatagtgaaggggtttctgtctcac

SEQ ID NO: 281917 - DNA, 25 bp, Homo sapien
tccacacgggcacatgtgggaggga

SEQ ID NO: 281918 - DNA, 25 bp, Homo sapien
tggtggagatattccgagagagctg

SEQ ID NO: 281919 - DNA, 25 bp, Homo sapien
ggtggagatattccgagagagctgc

SEQ ID NO: 281920 - DNA, 25 bp, Homo sapien
gacacggttataactaccaacgtca

SEQ ID NO: 281921 - DNA, 25 bp, Homo sapien
gatcagggacccctgagggccgatt

SEQ ID NO: 281922 - DNA, 25 bp, Homo sapien
cagggacccctgagggccgattact

SEQ ID NO: 281923 - DNA, 25 bp, Homo sapien
ttggacccagagaagcgatcaggga

SEQ ID NO: 281924 - DNA, 25 bp, Homo sapien
ggacccctgagggccgattactgac

SEQ ID NO: 281925 - DNA, 25 bp, Homo sapien
ggagcccagagatggtcagggaggc

SEQ ID NO: 281926 - DNA, 25 bp, Homo sapien
gatggtcagggaggccgtgttgcca

SEQ ID NO: 281927 - DNA, 25 bp, Homo sapien
gcccagagatggtcagggaggccgt

SEQ ID NO: 281928 - DNA, 25 bp, Homo sapien
cagagatggtcagggaggccgtgtt

SEQ ID NO: 281929 - DNA, 25 bp, Homo sapien
gtgctgctgcttgtatataagctgc

SEQ ID NO: 281930 - DNA, 25 bp, Homo sapien
agaggttggaagagatgaacaagtc

SEQ ID NO: 281931 - DNA, 25 bp, Homo sapien
tcccgttgtcatctgggtgttcaga

SEQ ID NO: 281932 - DNA, 25 bp, Homo sapien
ttggaagagatgaacaagtcagcat

SEQ ID NO: 281933 - DNA, 25 bp, Homo sapien
ctcctctcccgttgtcatctgggtg

SEQ ID NO: 281934 - DNA, 25 bp, Homo sapien
gggtgagcaggggaggggtccaggc

SEQ ID NO: 281935 - DNA, 25 bp, Homo sapien
tgagcaggggaggggtccaggccac

SEQ ID NO: 281936 - DNA, 25 bp, Homo sapien
ttcagagagtgaagagggtgagcag

SEQ ID NO: 281937 - DNA, 25 bp, Homo sapien
gagggtgagcaggggaggggtccag

SEQ ID NO: 281938 - DNA, 25 bp, Homo sapien
ctctggagtcagcttacgggaagcc

SEQ ID NO: 281939 - DNA, 25 bp, Homo sapien
gtcagcttacgggaagccacaaagc

SEQ ID NO: 281940 - DNA, 25 bp, Homo sapien
gagggctggttgttgttaccatgta

SEQ ID NO: 281941 - DNA, 25 bp, Homo sapien
taccatgtatgacctgcacaggcat

SEQ ID NO: 281942 - DNA, 25 bp, Homo sapien
agtgaggtgggtgaataagagctaa

SEQ ID NO: 281943 - DNA, 25 bp, Homo sapien
ggtgggtgaataagagctaagccat

SEQ ID NO: 281944 - DNA, 25 bp, Homo sapien
gagtgaggtgggtgaataagagcta

SEQ ID NO: 281945 - DNA, 25 bp, Homo sapien
gagtctcaaagaagctcacttgcca

SEQ ID NO: 281946 - DNA, 25 bp, Homo sapien
tgtgtgggtctctactctgtttctg

SEQ ID NO: 281947 - DNA, 25 bp, Homo sapien
aatctatgaccccatacctcagctg

SEQ ID NO: 281948 - DNA, 25 bp, Homo sapien
aattgttaatcttctgaccaagcag

SEQ ID NO: 281949 - DNA, 25 bp, Homo sapien
ggtagcacgtgagaggtcgaggcca

SEQ ID NO: 281950 - DNA, 25 bp, Homo sapien
gaggtagcacgtgagaggtcgaggc

SEQ ID NO: 281951 - DNA, 25 bp, Homo sapien
aggtagcacgtgagaggtcgaggcc

SEQ ID NO: 281952 - DNA, 25 bp, Homo sapien
gtagcacgtgagaggtcgaggccat

SEQ ID NO: 281953 - DNA, 25 bp, Homo sapien
ggtcaggactaggattagggtcctg

SEQ ID NO: 281954 - DNA, 25 bp, Homo sapien
aggactaggattagggtcctgtggg

SEQ ID NO: 281955 - DNA, 25 bp, Homo sapien
tgggctgagctcagggtcaggacta

SEQ ID NO: 281956 - DNA, 25 bp, Homo sapien
tcaggactaggattagggtcctgtg

SEQ ID NO: 281957 - DNA, 25 bp, Homo sapien
agggatccaggccatggtgagattc

SEQ ID NO: 281958 - DNA, 25 bp, Homo sapien
ggatccaggccatggtgagattccc

SEQ ID NO: 281959 - DNA, 25 bp, Homo sapien
gagcaggagagggatccaggccatg

SEQ ID NO: 281960 - DNA, 25 bp, Homo sapien
aggagagggatccaggccatggtga

SEQ ID NO: 281961 - DNA, 25 bp, Homo sapien
cagagaatcgctcagggatccctga

SEQ ID NO: 281962 - DNA, 25 bp, Homo sapien
ggctgtgtcagctcataggaggcct

SEQ ID NO: 281963 - DNA, 25 bp, Homo sapien
ggcttctgctggtaccaataagcat

SEQ ID NO: 281964 - DNA, 25 bp, Homo sapien
gggacactgacaccgagggtggctg

SEQ ID NO: 281965 - DNA, 25 bp, Homo sapien
ttccctgtctccttgtgtcactgtg

SEQ ID NO: 281966 - DNA, 25 bp, Homo sapien
ccctgtctccttgtgtcactgtggg

SEQ ID NO: 281967 - DNA, 25 bp, Homo sapien
tccctgtctccttgtgtcactgtgg

SEQ ID NO: 281968 - DNA, 25 bp, Homo sapien
tagtaatagtcagccttgtcgcggg

SEQ ID NO: 281969 - DNA, 25 bp, Homo sapien
gatcatggttgtcagtctcagggcc

SEQ ID NO: 281970 - DNA, 25 bp, Homo sapien
agcctaagaattgggcagaggtccc

SEQ ID NO: 281971 - DNA, 25 bp, Homo sapien
tataccagattacaagcaccgaggc

SEQ ID NO: 281972 - DNA, 25 bp, Homo sapien
ccaaggaaaagaggggccaggccat

SEQ ID NO: 281973 - DNA, 25 bp, Homo sapien
cagtgagtcaggagaccaaggaaaa

SEQ ID NO: 281974 - DNA, 25 bp, Homo sapien
tgcagtgagtcaggagaccaaggaa

SEQ ID NO: 281975 - DNA, 25 bp, Homo sapien
ctgtgcagtgagtcaggagaccaag

SEQ ID NO: 281976 - DNA, 25 bp, Homo sapien
tgtgtcagctcataggtgacagagc

SEQ ID NO: 281977 - DNA, 25 bp, Homo sapien
cactgacgctgagggtgactgtgtc

SEQ ID NO: 281978 - DNA, 25 bp, Homo sapien
tactgctttccccacaggtgatcct

SEQ ID NO: 281979 - DNA, 25 bp, Homo sapien
ggtgatcctggtcatctgtcctggg

SEQ ID NO: 281980 - DNA, 25 bp, Homo sapien
ccacgttccccaagttggagccaga

SEQ ID NO: 281981 - DNA, 25 bp, Homo sapien
gagatccctgaaggccgcccgctat

SEQ ID NO: 281982 - DNA, 25 bp, Homo sapien
ggcttctgctggtaccattgagcac

SEQ ID NO: 281983 - DNA, 25 bp, Homo sapien
catagatgacccacacacgggcctg

SEQ ID NO: 281984 - DNA, 25 bp, Homo sapien
gtcctgagagcgctgcctcctgaga

SEQ ID NO: 281985 - DNA, 25 bp, Homo sapien
tcctgagagcgctgcctcctgagac

SEQ ID NO: 281986 - DNA, 25 bp, Homo sapien
aggagggtgaggagcagcagagccc

SEQ ID NO: 281987 - DNA, 25 bp, Homo sapien
gtgaggagggtgaggagcagcagag

SEQ ID NO: 281988 - DNA, 25 bp, Homo sapien
gtgaggagcagcagagcccaggcca

SEQ ID NO: 281989 - DNA, 25 bp, Homo sapien
tgaggagcagcagagcccaggccat

SEQ ID NO: 281990 - DNA, 25 bp, Homo sapien
agaaacacatgccagtgagtcagtg

SEQ ID NO: 281991 - DNA, 25 bp, Homo sapien
ctggaaagagggagaaacacatgcc

SEQ ID NO: 281992 - DNA, 25 bp, Homo sapien
tgggccccggtgagcctgaggagca

SEQ ID NO: 281993 - DNA, 25 bp, Homo sapien
gaccaaggatcagcccagaggtccc

SEQ ID NO: 281994 - DNA, 25 bp, Homo sapien
caggctgagtcagggcagactgggc

SEQ ID NO: 281995 - DNA, 25 bp, Homo sapien
gctgagtcagggcagactgggccca

SEQ ID NO: 281996 - DNA, 25 bp, Homo sapien
gaggcaggctgagtcagggcagact

SEQ ID NO: 281997 - DNA, 25 bp, Homo sapien
tgagtcagggcagactgggcccagg

SEQ ID NO: 281998 - DNA, 25 bp, Homo sapien
ttataaccaccaacgtcactgctgg

SEQ ID NO: 281999 - DNA, 25 bp, Homo sapien
caggagacatagttataaccaccaa

SEQ ID NO: 282000 - DNA, 25 bp, Homo sapien
cataaatcatgagtttgggggcttt

SEQ ID NO: 282001 - DNA, 25 bp, Homo sapien
tgctgttggtaccaggagacatagt

SEQ ID NO: 282002 - DNA, 25 bp, Homo sapien
cagagaagcgattagaaacccctga

SEQ ID NO: 282003 - DNA, 25 bp, Homo sapien
atgagctgcagtaataatcagcctc

SEQ ID NO: 282004 - DNA, 25 bp, Homo sapien
agccagagaagcgattagaaacccc

SEQ ID NO: 282005 - DNA, 25 bp, Homo sapien
ctgcagtaataatcagcctcgtcct

SEQ ID NO: 282006 - DNA, 25 bp, Homo sapien
ctttgtagagggtgaggaaggagag

SEQ ID NO: 282007 - DNA, 25 bp, Homo sapien
gaaggagaggcagagagggggtcca

SEQ ID NO: 282008 - DNA, 25 bp, Homo sapien
gaggcagagagggggtccaggccat

SEQ ID NO: 282009 - DNA, 25 bp, Homo sapien
ggagaggcagagagggggtccaggc

SEQ ID NO: 282010 - DNA, 25 bp, Homo sapien
ctgcaggagaggaaaggagaggggg

SEQ ID NO: 282011 - DNA, 25 bp, Homo sapien
ctgtgtcagctcataggaggccaca

SEQ ID NO: 282012 - DNA, 25 bp, Homo sapien
ttgcgggtaccagtcagcataatta

SEQ ID NO: 282013 - DNA, 25 bp, Homo sapien
cagtaatagtcagccccgcctttgg

SEQ ID NO: 282014 - DNA, 25 bp, Homo sapien
taatggtcagggcggttgtgttccc

SEQ ID NO: 282015 - DNA, 25 bp, Homo sapien
agtcagccccgcctttggtcaggac

SEQ ID NO: 282016 - DNA, 25 bp, Homo sapien
gaccctgctaatggtcagggcggtt

SEQ ID NO: 282017 - DNA, 25 bp, Homo sapien
ggtccaggccatggctgaggcactg

SEQ ID NO: 282018 - DNA, 25 bp, Homo sapien
tgtgcagtgagcgaggaggctgagg

SEQ ID NO: 282019 - DNA, 25 bp, Homo sapien
ggagaggggtccaggccatggctga

SEQ ID NO: 282020 - DNA, 25 bp, Homo sapien
ctgtgcagtgagcgaggaggctgag

SEQ ID NO: 282021 - DNA, 25 bp, Homo sapien
gctcatagtcatggccacactggac

SEQ ID NO: 282022 - DNA, 25 bp, Homo sapien
cctcctgagctcatagtcatggcca

SEQ ID NO: 282023 - DNA, 25 bp, Homo sapien
tgagctcatagtcatggccacactg

SEQ ID NO: 282024 - DNA, 25 bp, Homo sapien
catagtcatggccacactggaccca

SEQ ID NO: 282025 - DNA, 25 bp, Homo sapien
tgagtcagctcataggaggtcgcag

SEQ ID NO: 282026 - DNA, 25 bp, Homo sapien
ggtgatcctggccatctgtgctgtg

SEQ ID NO: 282027 - DNA, 25 bp, Homo sapien
ccaatgttgtttcccccacaggtga

SEQ ID NO: 282028 - DNA, 25 bp, Homo sapien
gccactgacactgagtgtggctgag

SEQ ID NO: 282029 - DNA, 25 bp, Homo sapien
cagagaatcgctcagggatccctga

SEQ ID NO: 282030 - DNA, 25 bp, Homo sapien
ccagagaatcgctcagggatccctg

SEQ ID NO: 282031 - DNA, 25 bp, Homo sapien
gtgggatgatcactactactgtccc

SEQ ID NO: 282032 - DNA, 25 bp, Homo sapien
caccgtgggatgatcactactactg

SEQ ID NO: 282033 - DNA, 25 bp, Homo sapien
ccgtgggatgatcactactactgtc

SEQ ID NO: 282034 - DNA, 25 bp, Homo sapien
ggatgatcactactactgtcccaca

SEQ ID NO: 282035 - DNA, 25 bp, Homo sapien
agaactgtgtcacccgttgttttgg

SEQ ID NO: 282036 - DNA, 25 bp, Homo sapien
ctgaatactgacaccataaatcatg

SEQ ID NO: 282037 - DNA, 25 bp, Homo sapien
atgggtctgagaactgtgtcacccg

SEQ ID NO: 282038 - DNA, 25 bp, Homo sapien
caccataaatcatgggtctgagaac

SEQ ID NO: 282039 - DNA, 25 bp, Homo sapien
tgagctgcagtaataatcagcctca

SEQ ID NO: 282040 - DNA, 25 bp, Homo sapien
agctgcagtaataatcagcctcatc

SEQ ID NO: 282041 - DNA, 25 bp, Homo sapien
gagctgcagtaataatcagcctcat

SEQ ID NO: 282042 - DNA, 25 bp, Homo sapien
gatggtcatggaggctgtgtttcca

SEQ ID NO: 282043 - DNA, 25 bp, Homo sapien
ttctctcattcagcagagctgcagc

SEQ ID NO: 282044 - DNA, 25 bp, Homo sapien
tgtttgcctgcctgcaagaggcgct

SEQ ID NO: 282045 - DNA, 25 bp, Homo sapien
tagagacccgggtatatggcctgcg

SEQ ID NO: 282046 - DNA, 25 bp, Homo sapien
tgagatctgctctagccactggcct

SEQ ID NO: 282047 - DNA, 25 bp, Homo sapien
aactggagctatcagcagctccaga

SEQ ID NO: 282048 - DNA, 25 bp, Homo sapien
ggacagaactggagctatcagcagc

SEQ ID NO: 282049 - DNA, 25 bp, Homo sapien
cagaactggagctatcagcagctcc

SEQ ID NO: 282050 - DNA, 25 bp, Homo sapien
gacagaactggagctatcagcagct

SEQ ID NO: 282051 - DNA, 25 bp, Homo sapien
ttccatgtgcagcaacacaggaaat

SEQ ID NO: 282052 - DNA, 25 bp, Homo sapien
caggaaattccagcgccagctgatg

SEQ ID NO: 282053 - DNA, 25 bp, Homo sapien
atctcctgttccatgtgcagcaaca

SEQ ID NO: 282054 - DNA, 25 bp, Homo sapien
attccagcgccagctgatgagccag

SEQ ID NO: 282055 - DNA, 25 bp, Homo sapien
gtggagacgtcccgagagtgctgcc

SEQ ID NO: 282056 - DNA, 25 bp, Homo sapien
ctgaggaggagcagagcccaggcca

SEQ ID NO: 282057 - DNA, 25 bp, Homo sapien
ggctgaggaggagcagagcccaggc

SEQ ID NO: 282058 - DNA, 25 bp, Homo sapien
ctgtgccctgagtgaggaggctgag

SEQ ID NO: 282059 - DNA, 25 bp, Homo sapien
ggaggctgaggaggagcagagccca

SEQ ID NO: 282060 - DNA, 25 bp, Homo sapien
gaggctgagtcagggcagactgagc

SEQ ID NO: 282061 - DNA, 25 bp, Homo sapien
gagcgaggctgagtcagggcagact

SEQ ID NO: 282062 - DNA, 25 bp, Homo sapien
tgagcgaggctgagtcagggcagac

SEQ ID NO: 282063 - DNA, 25 bp, Homo sapien
gctgagtcagggcagactgagccca

SEQ ID NO: 282064 - DNA, 25 bp, Homo sapien
ggagacatagttataaccaccaaca

SEQ ID NO: 282065 - DNA, 25 bp, Homo sapien
catagttataaccaccaacatcact

SEQ ID NO: 282066 - DNA, 25 bp, Homo sapien
gagacatagttataaccaccaacat

SEQ ID NO: 282067 - DNA, 25 bp, Homo sapien
gacatagttataaccaccaacatca

SEQ ID NO: 282068 - DNA, 25 bp, Homo sapien
ttggtctcagttccccaggaacttg

SEQ ID NO: 282069 - DNA, 25 bp, Homo sapien
ccaggaacttggaccactgtggaaa

SEQ ID NO: 282070 - DNA, 25 bp, Homo sapien
agagcaaaagggagcctgagagccc

SEQ ID NO: 282071 - DNA, 25 bp, Homo sapien
agcccagggtgggttttggtctcag

SEQ ID NO: 282072 - DNA, 25 bp, Homo sapien
ggagggtgaataggagctaagccac

SEQ ID NO: 282073 - DNA, 25 bp, Homo sapien
aggaggtagaaggagacacaggccg

SEQ ID NO: 282074 - DNA, 25 bp, Homo sapien
gggcaggaggtagaaggagacacag

SEQ ID NO: 282075 - DNA, 25 bp, Homo sapien
tgtggagaatatgaagggcaggagg

SEQ ID NO: 282076 - DNA, 25 bp, Homo sapien
ctgtggagaatatgaagggcaggag

SEQ ID NO: 282077 - DNA, 25 bp, Homo sapien
tattcactggtgtaggtgaccttgg

SEQ ID NO: 282078 - DNA, 25 bp, Homo sapien
agggctggagcccaataagtgactg

SEQ ID NO: 282079 - DNA, 25 bp, Homo sapien
tctccacagtgatactcggcctcat

SEQ ID NO: 282080 - DNA, 25 bp, Homo sapien
gcctcatcctcagattggaggttga

SEQ ID NO: 282081 - DNA, 25 bp, Homo sapien
tgccccatgagtcagagtcagtctc

SEQ ID NO: 282082 - DNA, 25 bp, Homo sapien
tgagactcccctgcgcacaggagct

SEQ ID NO: 282083 - DNA, 25 bp, Homo sapien
cccatgagtcagagtcagtctcgag

SEQ ID NO: 282084 - DNA, 25 bp, Homo sapien
ctgagactcccctgcgcacaggagc

SEQ ID NO: 282085 - DNA, 25 bp, Homo sapien
gctctgcctcctgagcccacagcac

SEQ ID NO: 282086 - DNA, 25 bp, Homo sapien
tgcctcctgagcccacagcacagct

SEQ ID NO: 282087 - DNA, 25 bp, Homo sapien
ggtgagattcccagagctctgcctc

SEQ ID NO: 282088 - DNA, 25 bp, Homo sapien
tctgcctcctgagcccacagcacag

SEQ ID NO: 282089 - DNA, 25 bp, Homo sapien
gggagcaggagaggggtccaggcca

SEQ ID NO: 282090 - DNA, 25 bp, Homo sapien
ctgtgcagaaagtgaggagggggag

SEQ ID NO: 282091 - DNA, 25 bp, Homo sapien
tgcagaaagtgaggagggggagcag

SEQ ID NO: 282092 - DNA, 25 bp, Homo sapien
ggagcaggagaggggtccaggccat

SEQ ID NO: 282093 - DNA, 25 bp, Homo sapien
gatcccggagggtcgtttgctgtcc

SEQ ID NO: 282094 - DNA, 25 bp, Homo sapien
agggatcccggagggtcgtttgctg

SEQ ID NO: 282095 - DNA, 25 bp, Homo sapien
ctgatagtcaaggtggccattgtcc

SEQ ID NO: 282096 - DNA, 25 bp, Homo sapien
cggagggtcgtttgctgtcctcata

SEQ ID NO: 282097 - DNA, 25 bp, Homo sapien
cactgctgtctgttgagtaacagta

SEQ ID NO: 282098 - DNA, 25 bp, Homo sapien
tgtctgttgagtaacagtagtagtc

SEQ ID NO: 282099 - DNA, 25 bp, Homo sapien
tgttgagtaacagtagtagtcagct

SEQ ID NO: 282100 - DNA, 25 bp, Homo sapien
tgagtaacagtagtagtcagcttca

SEQ ID NO: 282101 - DNA, 25 bp, Homo sapien
ttccccatctgccagtgtcactgtg

SEQ ID NO: 282102 - DNA, 25 bp, Homo sapien
cctgcttatgggttggtccacagcg

SEQ ID NO: 282103 - DNA, 25 bp, Homo sapien
caggtgaattctgccagacctgctt

SEQ ID NO: 282104 - DNA, 25 bp, Homo sapien
gaattctgccagacctgcttatggg

SEQ ID NO: 282105 - DNA, 25 bp, Homo sapien
cagacctgcttatgggttggtccac

SEQ ID NO: 282106 - DNA, 25 bp, Homo sapien
tattccgaggttatctccagagcat

SEQ ID NO: 282107 - DNA, 25 bp, Homo sapien
ctctgagggctggtcgatgttatac

SEQ ID NO: 282108 - DNA, 25 bp, Homo sapien
tagaggaccgacattgaggtctggc

SEQ ID NO: 282109 - DNA, 25 bp, Homo sapien
tccaaaatgcgtgtttattccgagg

SEQ ID NO: 282110 - DNA, 25 bp, Homo sapien
gtaatagtcagctttgtccctggcc

SEQ ID NO: 282111 - DNA, 25 bp, Homo sapien
tcagggtggccatgttcgctagttt

SEQ ID NO: 282112 - DNA, 25 bp, Homo sapien
cccactgtcacaatctgaggcacag

SEQ ID NO: 282113 - DNA, 25 bp, Homo sapien
gacagtttgttgcaagtccccatct

SEQ ID NO: 282114 - DNA, 25 bp, Homo sapien
aaggaggctcagaaggagagcggtc

SEQ ID NO: 282115 - DNA, 25 bp, Homo sapien
gcaaggaggctcagaaggagagcgg

SEQ ID NO: 282116 - DNA, 25 bp, Homo sapien
gagcaaggaggctcagaaggagagc

SEQ ID NO: 282117 - DNA, 25 bp, Homo sapien
tgagcaaggaggctcagaaggagag

SEQ ID NO: 282118 - DNA, 25 bp, Homo sapien
gcctcatccccggcttgggctctgc

SEQ ID NO: 282119 - DNA, 25 bp, Homo sapien
acaggtaatcctggccgtctgtccc

SEQ ID NO: 282120 - DNA, 25 bp, Homo sapien
gagggccggttgctatccctataga

SEQ ID NO: 282121 - DNA, 25 bp, Homo sapien
ctgcctgtgttactgtgtgcagtgc

SEQ ID NO: 282122 - DNA, 25 bp, Homo sapien
gtgttactgtgtgcagtgctgctgt

SEQ ID NO: 282123 - DNA, 25 bp, Homo sapien
ctgtgttactgtgtgcagtgctgct

SEQ ID NO: 282124 - DNA, 25 bp, Homo sapien
tcatctgcctgtgttactgtgtgca

SEQ ID NO: 282125 - DNA, 25 bp, Homo sapien
agagcgctgcctcctgagaccccag

SEQ ID NO: 282126 - DNA, 25 bp, Homo sapien
ggacctccatgcaaatctgcatcct

SEQ ID NO: 282127 - DNA, 25 bp, Homo sapien
tgagagcgctgcctcctgagacccc

SEQ ID NO: 282128 - DNA, 25 bp, Homo sapien
ctgcctcagagaagggcgggacctc

SEQ ID NO: 282129 - DNA, 25 bp, Homo sapien
agggtgaggaggagcagagcccagg

SEQ ID NO: 282130 - DNA, 25 bp, Homo sapien
ggagggtgaggaggagcagagccca

SEQ ID NO: 282131 - DNA, 25 bp, Homo sapien
ctgtgccctgagtgaggagggtgag

SEQ ID NO: 282132 - DNA, 25 bp, Homo sapien
ggtgaggaggagcagagcccaggcc

SEQ ID NO: 282133 - DNA, 25 bp, Homo sapien
gaggctgagtcagggcagactgggc

SEQ ID NO: 282134 - DNA, 25 bp, Homo sapien
gctgagtcagggcagactgggccca

SEQ ID NO: 282135 - DNA, 25 bp, Homo sapien
ggctgagtcagggcagactgggccc

SEQ ID NO: 282136 - DNA, 25 bp, Homo sapien
tgagtcagggcagactgggcccagg

SEQ ID NO: 282137 - DNA, 25 bp, Homo sapien
ctgtccaggagacccggacgcggag

SEQ ID NO: 282138 - DNA, 25 bp, Homo sapien
tagttataaccaccaacgtcactgc

SEQ ID NO: 282139 - DNA, 25 bp, Homo sapien
gacatagttataaccaccaacgtca

SEQ ID NO: 282140 - DNA, 25 bp, Homo sapien
caggagacatagttataaccaccaa

SEQ ID NO: 282141 - DNA, 25 bp, Homo sapien
ttataaccaccaacgtcactgctgg

SEQ ID NO: 282142 - DNA, 25 bp, Homo sapien
tgagctgcagtaataatcagcctca

SEQ ID NO: 282143 - DNA, 25 bp, Homo sapien
atgagctgcagtaataatcagcctc

SEQ ID NO: 282144 - DNA, 25 bp, Homo sapien
agctgcagtaataatcagcctcatc

SEQ ID NO: 282145 - DNA, 25 bp, Homo sapien
cataaatcatgagtttgggggcttt

SEQ ID NO: 282146 - DNA, 25 bp, Homo sapien
tgagagaggagaattgtcaaggcca

SEQ ID NO: 282147 - DNA, 25 bp, Homo sapien
ctgagagaggagaattgtcaaggcc

SEQ ID NO: 282148 - DNA, 25 bp, Homo sapien
gagagaggagaattgtcaaggccat

SEQ ID NO: 282149 - DNA, 25 bp, Homo sapien
aggaggtagaaggagacccagaccg

SEQ ID NO: 282150 - DNA, 25 bp, Homo sapien
ctgtggagaaaatgaagggcaggag

SEQ ID NO: 282151 - DNA, 25 bp, Homo sapien
ggcaggaggtagaaggagacccaga

SEQ ID NO: 282152 - DNA, 25 bp, Homo sapien
agggcaggaggtagaaggagaccca

SEQ ID NO: 282153 - DNA, 25 bp, Homo sapien
tgatgccgaatgctcgggagaactg

SEQ ID NO: 282154 - DNA, 25 bp, Homo sapien
gagaaatagcagtgaaagggtttcc

SEQ ID NO: 282155 - DNA, 25 bp, Homo sapien
catagaatttcatgaatgatgccga

SEQ ID NO: 282156 - DNA, 25 bp, Homo sapien
aactggaaagaatgcccctgaggat

SEQ ID NO: 282157 - DNA, 25 bp, Homo sapien
tgatgatgtaggtactgtgctcact

SEQ ID NO: 282158 - DNA, 25 bp, Homo sapien
tggtctctgttgataccatttgatg

SEQ ID NO: 282159 - DNA, 25 bp, Homo sapien
gtcctcagactggaggttggacatg

SEQ ID NO: 282160 - DNA, 25 bp, Homo sapien
catggtgagggagcagtcagcccca

SEQ ID NO: 282161 - DNA, 25 bp, Homo sapien
gcctctgagttcatagctagacagt

SEQ ID NO: 282162 - DNA, 25 bp, Homo sapien
taaaaatgtgccctatctccaggtc

SEQ ID NO: 282163 - DNA, 25 bp, Homo sapien
gtgactccttggtgagcacagaagg

SEQ ID NO: 282164 - DNA, 25 bp, Homo sapien
gctagacagtggacttcctgggccc

SEQ ID NO: 282165 - DNA, 25 bp, Homo sapien
ctgtgccgacagcaggaagggtgag

SEQ ID NO: 282166 - DNA, 25 bp, Homo sapien
gggtgagtagaggagagggattcag

SEQ ID NO: 282167 - DNA, 25 bp, Homo sapien
ggaagggtgagtagaggagagggat

SEQ ID NO: 282168 - DNA, 25 bp, Homo sapien
gagtagaggagagggattcaggtca

SEQ ID NO: 282169 - DNA, 25 bp, Homo sapien
cctggtaggtgatcctggccctctg

SEQ ID NO: 282170 - DNA, 25 bp, Homo sapien
gggcccattgattatcagggtggcc

SEQ ID NO: 282171 - DNA, 25 bp, Homo sapien
agtcagagagttgttcaggaatcac

SEQ ID NO: 282172 - DNA, 25 bp, Homo sapien
cagttgctgtcaccatagattacca

SEQ ID NO: 282173 - DNA, 25 bp, Homo sapien
gaatcccctgagcataggagctgcc

SEQ ID NO: 282174 - DNA, 25 bp, Homo sapien
aatcccctgagcataggagctgcct

SEQ ID NO: 282175 - DNA, 25 bp, Homo sapien
gagaatcccctgagcataggagctg

SEQ ID NO: 282176 - DNA, 25 bp, Homo sapien
cccctgagcataggagctgcctctg

SEQ ID NO: 282177 - DNA, 25 bp, Homo sapien
gggggagcaggagagggatccaggc

SEQ ID NO: 282178 - DNA, 25 bp, Homo sapien
gagggggagcaggagagggatccag

SEQ ID NO: 282179 - DNA, 25 bp, Homo sapien
tgtgcagagagtgaggagggggagc

SEQ ID NO: 282180 - DNA, 25 bp, Homo sapien
ggagcaggagagggatccaggccat

SEQ ID NO: 282181 - DNA, 25 bp, Homo sapien
atcagaaattcctgagggccgcttg

SEQ ID NO: 282182 - DNA, 25 bp, Homo sapien
tatctcaagagcaggtgatcatggc

SEQ ID NO: 282183 - DNA, 25 bp, Homo sapien
ttcatatatcaccagtatgggcctg

SEQ ID NO: 282184 - DNA, 25 bp, Homo sapien
tgccagaaccagtaaacatactcat

SEQ ID NO: 282185 - DNA, 25 bp, Homo sapien
caaggggtgacccaggcttcaccat

SEQ ID NO: 282186 - DNA, 25 bp, Homo sapien
tttaccactagatgaaagatacgct

SEQ ID NO: 282187 - DNA, 25 bp, Homo sapien
agatacgctttgtgtgtcctttcat

SEQ ID NO: 282188 - DNA, 25 bp, Homo sapien
gcttcaccatatggaactcacatcc

SEQ ID NO: 282189 - DNA, 25 bp, Homo sapien
aggtgaggaggagcagagcccaggc

SEQ ID NO: 282190 - DNA, 25 bp, Homo sapien
ggaggtgaggaggagcagagcccag

SEQ ID NO: 282191 - DNA, 25 bp, Homo sapien
tgaggaggagcagagcccaggccat

SEQ ID NO: 282192 - DNA, 25 bp, Homo sapien
ctgtgccctgagtgaggaggtgagg

SEQ ID NO: 282193 - DNA, 25 bp, Homo sapien
tattgacattgtagatcatgggttt

SEQ ID NO: 282194 - DNA, 25 bp, Homo sapien
gagacatagtcataactcccaacat

SEQ ID NO: 282195 - DNA, 25 bp, Homo sapien
gctgttggtaccaggagacatagtc

SEQ ID NO: 282196 - DNA, 25 bp, Homo sapien
aatcagggcagactgggcccaagag

SEQ ID NO: 282197 - DNA, 25 bp, Homo sapien
gagtgagcagggtgagcaggaaagg

SEQ ID NO: 282198 - DNA, 25 bp, Homo sapien
gggtgagcaggaaaggggtccaggc

SEQ ID NO: 282199 - DNA, 25 bp, Homo sapien
tgagcagggtgagcaggaaaggggt

SEQ ID NO: 282200 - DNA, 25 bp, Homo sapien
gcagagagtgagcagggtgagcagg

SEQ ID NO: 282201 - DNA, 25 bp, Homo sapien
tttctaagtcctctccatggcaggt

SEQ ID NO: 282202 - DNA, 25 bp, Homo sapien
gagtcagcttagagaaggccacaaa

SEQ ID NO: 282203 - DNA, 25 bp, Homo sapien
ggtaccagtgtgcataatagctttc

SEQ ID NO: 282204 - DNA, 25 bp, Homo sapien
tcttcaacgtgagccccagtaatgg

SEQ ID NO: 282205 - DNA, 25 bp, Homo sapien
agggcagtaggtagaaggagaccca

SEQ ID NO: 282206 - DNA, 25 bp, Homo sapien
gtaggtagaaggagacccaggccat

SEQ ID NO: 282207 - DNA, 25 bp, Homo sapien
aaatgaagggcagtaggtagaagga

SEQ ID NO: 282208 - DNA, 25 bp, Homo sapien
gaaaatgaagggcagtaggtagaag

SEQ ID NO: 282209 - DNA, 25 bp, Homo sapien
aactggaaagaatgcccctgaggac

SEQ ID NO: 282210 - DNA, 25 bp, Homo sapien
tgtaaacagaatgtcatgaatgatg

SEQ ID NO: 282211 - DNA, 25 bp, Homo sapien
ctgtaaacagaatgtcatgaatgat

SEQ ID NO: 282212 - DNA, 25 bp, Homo sapien
gaactggagcccatgaagcgatcgg

SEQ ID NO: 282213 - DNA, 25 bp, Homo sapien
ttcgatggtgtaggtgctgtgctca

SEQ ID NO: 282214 - DNA, 25 bp, Homo sapien
cttgatcgaggctcccagcaaggca

SEQ ID NO: 282215 - DNA, 25 bp, Homo sapien
taaccttcattatatactgggggga

SEQ ID NO: 282216 - DNA, 25 bp, Homo sapien
ggagaggaacccagggctgttgact

SEQ ID NO: 282217 - DNA, 25 bp, Homo sapien
aacccagggctgttgactctgagtc

SEQ ID NO: 282218 - DNA, 25 bp, Homo sapien
gaggaacccagggctgttgactctg

SEQ ID NO: 282219 - DNA, 25 bp, Homo sapien
ggaacccagggctgttgactctgag

SEQ ID NO: 282220 - DNA, 25 bp, Homo sapien
tatgcagagagtcgggagggtgagc

SEQ ID NO: 282221 - DNA, 25 bp, Homo sapien
gtgagcaggggagggtccaggccat

SEQ ID NO: 282222 - DNA, 25 bp, Homo sapien
gagggtgagcaggggagggtccagg

SEQ ID NO: 282223 - DNA, 25 bp, Homo sapien
ctatgcagagagtcgggagggtgag

SEQ ID NO: 282224 - DNA, 25 bp, Homo sapien
ggctgacccctggttccatggggct

SEQ ID NO: 282225 - DNA, 25 bp, Homo sapien
caggctgacccctggttccatgggg

SEQ ID NO: 282226 - DNA, 25 bp, Homo sapien
gctgacccctggttccatggggctt

SEQ ID NO: 282227 - DNA, 25 bp, Homo sapien
tgacccctggttccatggggcttat

SEQ ID NO: 282228 - DNA, 25 bp, Homo sapien
acctatgctatctccctggcagatg

SEQ ID NO: 282229 - DNA, 25 bp, Homo sapien
gagtttgtatcagagtcacctatgc

SEQ ID NO: 282230 - DNA, 25 bp, Homo sapien
atgatcctggccgtacgtcccaaag

SEQ ID NO: 282231 - DNA, 25 bp, Homo sapien
ggcttctgctggtacgagtttgtat

SEQ ID NO: 282232 - DNA, 25 bp, Homo sapien
catcctgtgccccattaataatcaa

SEQ ID NO: 282233 - DNA, 25 bp, Homo sapien
gggctggttgctgtcaccataaatt

SEQ ID NO: 282234 - DNA, 25 bp, Homo sapien
gaaaattgctcaggaatcactgagg

SEQ ID NO: 282235 - DNA, 25 bp, Homo sapien
agaagcagtgctgttccgagcgaca

SEQ ID NO: 282236 - DNA, 25 bp, Homo sapien
gaagagagggatccatgccatggct

SEQ ID NO: 282237 - DNA, 25 bp, Homo sapien
gaggcacctccgatgctgcttcctg

SEQ ID NO: 282238 - DNA, 25 bp, Homo sapien
cagtaagcaaggacgccgaggaaga

SEQ ID NO: 282239 - DNA, 25 bp, Homo sapien
tgtgcagtaagcaaggacgccgagg

SEQ ID NO: 282240 - DNA, 25 bp, Homo sapien
cctgggtcccgctgatggtcagagt

SEQ ID NO: 282241 - DNA, 25 bp, Homo sapien
tttatctccagagcaggtgatgctg

SEQ ID NO: 282242 - DNA, 25 bp, Homo sapien
gagggccgcttgctatcttgataga

SEQ ID NO: 282243 - DNA, 25 bp, Homo sapien
agtcagcctcatccatagcctgggt

SEQ ID NO: 282244 - DNA, 25 bp, Homo sapien
aacttgctcccgtctctcaggaaca

SEQ ID NO: 282245 - DNA, 25 bp, Homo sapien
ctcaggaacataagggcagggatag

SEQ ID NO: 282246 - DNA, 25 bp, Homo sapien
gccgaggtggctggtttctgtctca

SEQ ID NO: 282247 - DNA, 25 bp, Homo sapien
attccacatggaaggctccctcctg

SEQ ID NO: 282248 - DNA, 25 bp, Homo sapien
gcggtcacaatccagggctcaactg

SEQ ID NO: 282249 - DNA, 25 bp, Homo sapien
gaagcggtcacaatccagggctcaa

SEQ ID NO: 282250 - DNA, 25 bp, Homo sapien
ctgaagcggtcacaatccagggctc

SEQ ID NO: 282251 - DNA, 25 bp, Homo sapien
acaatccagggctcaactgcctccc

SEQ ID NO: 282252 - DNA, 25 bp, Homo sapien
gcagggctgttacagtacaccccag

SEQ ID NO: 282253 - DNA, 25 bp, Homo sapien
tcacaacccacttggcctgtcttgg

SEQ ID NO: 282254 - DNA, 25 bp, Homo sapien
ctccctggaggacggtgccctggtc

SEQ ID NO: 282255 - DNA, 25 bp, Homo sapien
gacttgcagcatgggctccctggag

SEQ ID NO: 282256 - DNA, 25 bp, Homo sapien
cagcagcagcaggggccagcgctgc

SEQ ID NO: 282257 - DNA, 25 bp, Homo sapien
gacccagcagcagcaggggccagcg

SEQ ID NO: 282258 - DNA, 25 bp, Homo sapien
cccagcagcagcaggggccagcgct

SEQ ID NO: 282259 - DNA, 25 bp, Homo sapien
catggccagacccagcagcagcagg

SEQ ID NO: 282260 - DNA, 25 bp, Homo sapien
tgcggtgcaaccattgggcgcagca

SEQ ID NO: 282261 - DNA, 25 bp, Homo sapien
tctgggtccccgctttgcggtgcaa

SEQ ID NO: 282262 - DNA, 25 bp, Homo sapien
acaggctccgcaggctggatcggct

SEQ ID NO: 282263 - DNA, 25 bp, Homo sapien
gctggatcggctgcttccaactgag

SEQ ID NO: 282264 - DNA, 25 bp, Homo sapien
gactaggtgattgaggcactgaccc

SEQ ID NO: 282265 - DNA, 25 bp, Homo sapien
gactgggaatggtgcacggacccta

SEQ ID NO: 282266 - DNA, 25 bp, Homo sapien
atttcataggaaactgggcccctgg

SEQ ID NO: 282267 - DNA, 25 bp, Homo sapien
tttaatgcccatagacagtccccga

SEQ ID NO: 282268 - DNA, 25 bp, Homo sapien
tttcacaccctttctggtagatatt

SEQ ID NO: 282269 - DNA, 25 bp, Homo sapien
tctcccatcactaataatgctgagc

SEQ ID NO: 282270 - DNA, 25 bp, Homo sapien
ttttcacaccctttctggtagatat

SEQ ID NO: 282271 - DNA, 25 bp, Homo sapien
tttctcccatcactaataatgctga

SEQ ID NO: 282272 - DNA, 25 bp, Homo sapien
gccagccagacacaccattgacatt

SEQ ID NO: 282273 - DNA, 25 bp, Homo sapien
caaaaagagtaatgcacatgagtac

SEQ ID NO: 282274 - DNA, 25 bp, Homo sapien
aattaggtgaaatcccatcagccag

SEQ ID NO: 282275 - DNA, 25 bp, Homo sapien
ttctgacaggtttttgaaaatgcat

SEQ ID NO: 282276 - DNA, 25 bp, Homo sapien
gttctggaagtatattgaccaacct

SEQ ID NO: 282277 - DNA, 25 bp, Homo sapien
tatattgaccaacctgacagtggct

SEQ ID NO: 282278 - DNA, 25 bp, Homo sapien
ggaagtatattgaccaacctgacag

SEQ ID NO: 282279 - DNA, 25 bp, Homo sapien
aagttctggaagtatattgaccaac

SEQ ID NO: 282280 - DNA, 25 bp, Homo sapien
cgaaggcactaccattcaccggagt

SEQ ID NO: 282281 - DNA, 25 bp, Homo sapien
tcaccggagtgagtggacacagact

SEQ ID NO: 282282 - DNA, 25 bp, Homo sapien
caactgaatggaaaggcgggcaaca

SEQ ID NO: 282283 - DNA, 25 bp, Homo sapien
aaagtacattctctctgatccagca

SEQ ID NO: 282284 - DNA, 25 bp, Homo sapien
tgtatagattccagccaatgaaatg

SEQ ID NO: 282285 - DNA, 25 bp, Homo sapien
gaattaatacaagagttaaagtgtc

SEQ ID NO: 282286 - DNA, 25 bp, Homo sapien
gctgaagaactgctggaattaatac

SEQ ID NO: 282287 - DNA, 25 bp, Homo sapien
ggcaaatggtgtgatagttaactaa

SEQ ID NO: 282288 - DNA, 25 bp, Homo sapien
tattccccaaggcaatttattcaca

SEQ ID NO: 282289 - DNA, 25 bp, Homo sapien
tatctccccaaatttacagcaacct

SEQ ID NO: 282290 - DNA, 25 bp, Homo sapien
tgtatttaagacatgtgcagaagat

SEQ ID NO: 282291 - DNA, 25 bp, Homo sapien
taactcagtgaagaatatctcccca

SEQ ID NO: 282292 - DNA, 25 bp, Homo sapien
tggcaggatcccctggctctcagcc

SEQ ID NO: 282293 - DNA, 25 bp, Homo sapien
ctgtttttatgctgggacatggcag

SEQ ID NO: 282294 - DNA, 25 bp, Homo sapien
atggcaggatcccctggctctcagc

SEQ ID NO: 282295 - DNA, 25 bp, Homo sapien
gtgtcaggtactgtttttatgctgg

SEQ ID NO: 282296 - DNA, 25 bp, Homo sapien
tttctacccatggagacgcggttca

SEQ ID NO: 282297 - DNA, 25 bp, Homo sapien
gccttggagttaccccagtgtgtgt

SEQ ID NO: 282298 - DNA, 25 bp, Homo sapien
tgactcaagtggagattcctctgct

SEQ ID NO: 282299 - DNA, 25 bp, Homo sapien
gattgagagcactgggtcattcctg

SEQ ID NO: 282300 - DNA, 25 bp, Homo sapien
ggccagcacctggggtctgctctct

SEQ ID NO: 282301 - DNA, 25 bp, Homo sapien
cccggggccagcacctggggtctgc

SEQ ID NO: 282302 - DNA, 25 bp, Homo sapien
ctgaggctcagaccaaaacccccgg

SEQ ID NO: 282303 - DNA, 25 bp, Homo sapien
ccagcacctggggtctgctctctgg

SEQ ID NO: 282304 - DNA, 25 bp, Homo sapien
ctaggacggtgaccttggtcccagt

SEQ ID NO: 282305 - DNA, 25 bp, Homo sapien
acatctgccctggaagagaggagga

SEQ ID NO: 282306 - DNA, 25 bp, Homo sapien
tctcctttctggtgactgtcctggg

SEQ ID NO: 282307 - DNA, 25 bp, Homo sapien
ggagtcactgggcaatgtccctaag

SEQ ID NO: 282308 - DNA, 25 bp, Homo sapien
ggttacccggagactaatgcacctc

SEQ ID NO: 282309 - DNA, 25 bp, Homo sapien
cagcctgtgatgaccccaaacttca

SEQ ID NO: 282310 - DNA, 25 bp, Homo sapien
tgctcatcctgtaggactgtcctgg

SEQ ID NO: 282311 - DNA, 25 bp, Homo sapien
cacagactatgagactcagcagccc

SEQ ID NO: 282312 - DNA, 25 bp, Homo sapien
gacccaagcctgctttgaactggag

SEQ ID NO: 282313 - DNA, 25 bp, Homo sapien
ggttcacagtgtggccatccggtcc

SEQ ID NO: 282314 - DNA, 25 bp, Homo sapien
ttcctaggagccctcccaagtcacc

SEQ ID NO: 282315 - DNA, 25 bp, Homo sapien
ttagaatctggccttgacccctgga

SEQ ID NO: 282316 - DNA, 25 bp, Homo sapien
tggagtctgagtttagaatctggcc

SEQ ID NO: 282317 - DNA, 25 bp, Homo sapien
ctcccgggtagaagtcactgatcag

SEQ ID NO: 282318 - DNA, 25 bp, Homo sapien
tccactcccgccttgacggggctgc

SEQ ID NO: 282319 - DNA, 25 bp, Homo sapien
tctccactcccgccttgacggggct

SEQ ID NO: 282320 - DNA, 25 bp, Homo sapien
gctcccgggtagaagtcactgatca

SEQ ID NO: 282321 - DNA, 25 bp, Homo sapien
tcttctccacggtgctcccttcatg

SEQ ID NO: 282322 - DNA, 25 bp, Homo sapien
ctatgaacattctgtaggggccact

SEQ ID NO: 282323 - DNA, 25 bp, Homo sapien
ccacggtgctcccttcatgcgtgac

SEQ ID NO: 282324 - DNA, 25 bp, Homo sapien
tctccacggtgctcccttcatgcgt

SEQ ID NO: 282325 - DNA, 25 bp, Homo sapien
ggctggatgacttgggatggggaga

SEQ ID NO: 282326 - DNA, 25 bp, Homo sapien
agggctggatgacttgggatgggga

SEQ ID NO: 282327 - DNA, 25 bp, Homo sapien
gctggatgacttgggatggggagag

SEQ ID NO: 282328 - DNA, 25 bp, Homo sapien
gggctggatgacttgggatggggag

SEQ ID NO: 282329 - DNA, 25 bp, Homo sapien
aggatatttattggggtttcatgag

SEQ ID NO: 282330 - DNA, 25 bp, Homo sapien
atatttattggggtttcatgagtgc

SEQ ID NO: 282331 - DNA, 25 bp, Homo sapien
gatatttattggggtttcatgagtg

SEQ ID NO: 282332 - DNA, 25 bp, Homo sapien
ggatatttattggggtttcatgagt

SEQ ID NO: 282333 - DNA, 25 bp, Homo sapien
ccagactggtagctcaggggtacag

SEQ ID NO: 282334 - DNA, 25 bp, Homo sapien
gggaggctagcaatttatgtgagaa

SEQ ID NO: 282335 - DNA, 25 bp, Homo sapien
ttttcacactgggtgcagaattccc

SEQ ID NO: 282336 - DNA, 25 bp, Homo sapien
tggtctgaactgatgccagactggt

SEQ ID NO: 282337 - DNA, 25 bp, Homo sapien
tagttctagttggataggcctggtc

SEQ ID NO: 282338 - DNA, 25 bp, Homo sapien
gaagtgccagtcacatctgttaggg

SEQ ID NO: 282339 - DNA, 25 bp, Homo sapien
cccaatatgaagtgccagtcacatc

SEQ ID NO: 282340 - DNA, 25 bp, Homo sapien
tgttagggtaaccttgggagcatcc

SEQ ID NO: 282341 - DNA, 25 bp, Homo sapien
cagtggccctggtggcatctgctca

SEQ ID NO: 282342 - DNA, 25 bp, Homo sapien
cagcccccactgcagctgtgaagga

SEQ ID NO: 282343 - DNA, 25 bp, Homo sapien
cactgcagctgtgaaggaggaagct

SEQ ID NO: 282344 - DNA, 25 bp, Homo sapien
tggccctggtggcatctgctcatga

SEQ ID NO: 282345 - DNA, 25 bp, Homo sapien
tgtgacacaggctcatacaaaaacc

SEQ ID NO: 282346 - DNA, 25 bp, Homo sapien
ctgtgacacaggctcatacaaaaac

SEQ ID NO: 282347 - DNA, 25 bp, Homo sapien
acggtcagcttggtccctccgccga

SEQ ID NO: 282348 - DNA, 25 bp, Homo sapien
aggacggtcagcttggtccctccgc

SEQ ID NO: 282349 - DNA, 25 bp, Homo sapien
taggacggtcagcttggtccctccg

SEQ ID NO: 282350 - DNA, 25 bp, Homo sapien
ggacggtcagcttggtccctccgcc

SEQ ID NO: 282351 - DNA, 25 bp, Homo sapien
cctgcgcctgtcagacagtcagaga

SEQ ID NO: 282352 - DNA, 25 bp, Homo sapien
ctgcgcctgtcagacagtcagagag

SEQ ID NO: 282353 - DNA, 25 bp, Homo sapien
agcctgcgcctgtcagacagtcaga

SEQ ID NO: 282354 - DNA, 25 bp, Homo sapien
gcctgcgcctgtcagacagtcagag

SEQ ID NO: 282355 - DNA, 25 bp, Homo sapien
gggctttcacgcagtggactctgcc

SEQ ID NO: 282356 - DNA, 25 bp, Homo sapien
ggctgttccagccaaatgtgtgttc

SEQ ID NO: 282357 - DNA, 25 bp, Homo sapien
ccggctacctggtcatagcagtggg

SEQ ID NO: 282358 - DNA, 25 bp, Homo sapien
gggatatgttctgaagagacccagg

SEQ ID NO: 282359 - DNA, 25 bp, Homo sapien
gccatcctgacagataaagagagct

SEQ ID NO: 282360 - DNA, 25 bp, Homo sapien
ccatcctgacagataaagagagctc

SEQ ID NO: 282361 - DNA, 25 bp, Homo sapien
tgccatcctgacagataaagagagc

SEQ ID NO: 282362 - DNA, 25 bp, Homo sapien
tgtcctgagatctctcggggccttg

SEQ ID NO: 282363 - DNA, 25 bp, Homo sapien
ggccttggcccccaacaccgacatc

SEQ ID NO: 282364 - DNA, 25 bp, Homo sapien
cttggcccccaacaccgacatctga

SEQ ID NO: 282365 - DNA, 25 bp, Homo sapien
gccttggcccccaacaccgacatct

SEQ ID NO: 282366 - DNA, 25 bp, Homo sapien
gggtgttttccactatgccctgatc

SEQ ID NO: 282367 - DNA, 25 bp, Homo sapien
agggggtcagagtcctggtgtccac

SEQ ID NO: 282368 - DNA, 25 bp, Homo sapien
tggatgaggggcagggggtcagagt

SEQ ID NO: 282369 - DNA, 25 bp, Homo sapien
gcagggggtcagagtcctggtgtcc

SEQ ID NO: 282370 - DNA, 25 bp, Homo sapien
gggcagggggtcagagtcctggtgt

SEQ ID NO: 282371 - DNA, 25 bp, Homo sapien
gggaacagagtgaccgagggggcag

SEQ ID NO: 282372 - DNA, 25 bp, Homo sapien
agtgtggccttgttggcttgaagct

SEQ ID NO: 282373 - DNA, 25 bp, Homo sapien
tgtggccttgttggcttgaagctcc

SEQ ID NO: 282374 - DNA, 25 bp, Homo sapien
gccttgttggcttgaagctcctcag

SEQ ID NO: 282375 - DNA, 25 bp, Homo sapien
actcccgccttgacggggctgctat

SEQ ID NO: 282376 - DNA, 25 bp, Homo sapien
ggctcccgggtagaagtcacttatg

SEQ ID NO: 282377 - DNA, 25 bp, Homo sapien
tgggacttccactgctcaggcgtca

SEQ ID NO: 282378 - DNA, 25 bp, Homo sapien
actgtcacggctcccgggtagaagt

SEQ ID NO: 282379 - DNA, 25 bp, Homo sapien
tcttctccacggtgctcccttcatg

SEQ ID NO: 282380 - DNA, 25 bp, Homo sapien
ctatgaacattctgtaggggccact

SEQ ID NO: 282381 - DNA, 25 bp, Homo sapien
ccacggtgctcccttcatgcgtgac

SEQ ID NO: 282382 - DNA, 25 bp, Homo sapien
tctccacggtgctcccttcatgcgt

SEQ ID NO: 282383 - DNA, 25 bp, Homo sapien
cctgcagctctagtctcccgtggtg

SEQ ID NO: 282384 - DNA, 25 bp, Homo sapien
gggatcctgcagctctagtctcccg

SEQ ID NO: 282385 - DNA, 25 bp, Homo sapien
atcctgcagctctagtctcccgtgg

SEQ ID NO: 282386 - DNA, 25 bp, Homo sapien
tgcagctctagtctcccgtggtggg

SEQ ID NO: 282387 - DNA, 25 bp, Homo sapien
tatttattgagggtttattgagtgc

SEQ ID NO: 282388 - DNA, 25 bp, Homo sapien
atatttattgagggtttattgagtg

SEQ ID NO: 282389 - DNA, 25 bp, Homo sapien
aatatttattgagggtttattgagt

SEQ ID NO: 282390 - DNA, 25 bp, Homo sapien
cggaccagcaactctttagcccaga

SEQ ID NO: 282391 - DNA, 25 bp, Homo sapien
gggacctggcatctgaccaagagcg

SEQ ID NO: 282392 - DNA, 25 bp, Homo sapien
tggcttgttgcatagggtcagggat

SEQ ID NO: 282393 - DNA, 25 bp, Homo sapien
cacagaaggcatgcgagaagtgccg

SEQ ID NO: 282394 - DNA, 25 bp, Homo sapien
ctaggacggtcagcttggtccctcc

SEQ ID NO: 282395 - DNA, 25 bp, Homo sapien
taggacggtcagcttggtccctccg

SEQ ID NO: 282396 - DNA, 25 bp, Homo sapien
ggacggtcagcttggtccctccgcc

SEQ ID NO: 282397 - DNA, 25 bp, Homo sapien
cggtcagcttggtccctccgccgaa

SEQ ID NO: 282398 - DNA, 25 bp, Homo sapien
tgttccgacaagaacccagactgag

SEQ ID NO: 282399 - DNA, 25 bp, Homo sapien
actgaggaggccagaacagaacaag

SEQ ID NO: 282400 - DNA, 25 bp, Homo sapien
gacgaggctcagtaggtcattctat

SEQ ID NO: 282401 - DNA, 25 bp, Homo sapien
gaccacaagttgagacaagatacag

SEQ ID NO: 282402 - DNA, 25 bp, Homo sapien
ctttctggtgtccagagtctgcttc

SEQ ID NO: 282403 - DNA, 25 bp, Homo sapien
tctggtgtccagagtctgcttctcc

SEQ ID NO: 282404 - DNA, 25 bp, Homo sapien
ggctttctggtgtccagagtctgct

SEQ ID NO: 282405 - DNA, 25 bp, Homo sapien
ctggctttctggtgtccagagtctg

SEQ ID NO: 282406 - DNA, 25 bp, Homo sapien
ggctgttccagccaaatgtgtgttc

SEQ ID NO: 282407 - DNA, 25 bp, Homo sapien
gggatatgttctgaagagacccagg

SEQ ID NO: 282408 - DNA, 25 bp, Homo sapien
ccggctacctggtcatagcagtggg

SEQ ID NO: 282409 - DNA, 25 bp, Homo sapien
gggctttcacgcagtggactctgcc

SEQ ID NO: 282410 - DNA, 25 bp, Homo sapien
cctcagtatatgatgaggtgttggg

SEQ ID NO: 282411 - DNA, 25 bp, Homo sapien
tttaccttagacacctgaccacctg

SEQ ID NO: 282412 - DNA, 25 bp, Homo sapien
gatctgcacggggagctgttttacc

SEQ ID NO: 282413 - DNA, 25 bp, Homo sapien
tgtcctgagatctctcggggccttg

SEQ ID NO: 282414 - DNA, 25 bp, Homo sapien
tggatgaggggcagggggtcagagt

SEQ ID NO: 282415 - DNA, 25 bp, Homo sapien
agggggtcagagtcctggtgtccac

SEQ ID NO: 282416 - DNA, 25 bp, Homo sapien
gggcagggggtcagagtcctggtgt

SEQ ID NO: 282417 - DNA, 25 bp, Homo sapien
gcagggggtcagagtcctggtgtcc

SEQ ID NO: 282418 - DNA, 25 bp, Homo sapien
agtgtggccttgttggcttgaagct

SEQ ID NO: 282419 - DNA, 25 bp, Homo sapien
tgtggccttgttggcttgaagctcc

SEQ ID NO: 282420 - DNA, 25 bp, Homo sapien
gccttgttggcttgaagctcctcag

SEQ ID NO: 282421 - DNA, 25 bp, Homo sapien
gggaacagagtgaccgagggggcag

SEQ ID NO: 282422 - DNA, 25 bp, Homo sapien
ggctcccgggtagaagtcacttatg

SEQ ID NO: 282423 - DNA, 25 bp, Homo sapien
actcccgccttgacggggctgctat

SEQ ID NO: 282424 - DNA, 25 bp, Homo sapien
tgggacttccactgctcaggcgtca

SEQ ID NO: 282425 - DNA, 25 bp, Homo sapien
actgtcacggctcccgggtagaagt

SEQ ID NO: 282426 - DNA, 25 bp, Homo sapien
tcttctccacggtgctcccttcatg

SEQ ID NO: 282427 - DNA, 25 bp, Homo sapien
ccacggtgctcccttcatgcgtgac

SEQ ID NO: 282428 - DNA, 25 bp, Homo sapien
ctatgaacattctgtaggggccact

SEQ ID NO: 282429 - DNA, 25 bp, Homo sapien
tctccacggtgctcccttcatgcgt

SEQ ID NO: 282430 - DNA, 25 bp, Homo sapien
cctgcagctctagtctcccgtggtg

SEQ ID NO: 282431 - DNA, 25 bp, Homo sapien
atcctgcagctctagtctcccgtgg

SEQ ID NO: 282432 - DNA, 25 bp, Homo sapien
gggatcctgcagctctagtctcccg

SEQ ID NO: 282433 - DNA, 25 bp, Homo sapien
tgcagctctagtctcccgtggtggg

SEQ ID NO: 282434 - DNA, 25 bp, Homo sapien
gaaggctaggaattatatgtgagaa

SEQ ID NO: 282435 - DNA, 25 bp, Homo sapien
agggaaggctaggaattatatgtga

SEQ ID NO: 282436 - DNA, 25 bp, Homo sapien
cagggaaggctaggaattatatgtg

SEQ ID NO: 282437 - DNA, 25 bp, Homo sapien
ggaaggctaggaattatatgtgaga

SEQ ID NO: 282438 - DNA, 25 bp, Homo sapien
ctaaaatgatcagctgggttcctcc

SEQ ID NO: 282439 - DNA, 25 bp, Homo sapien
agctgggttcctccaccaaatacaa

SEQ ID NO: 282440 - DNA, 25 bp, Homo sapien
aaatgatcagctgggttcctccacc

SEQ ID NO: 282441 - DNA, 25 bp, Homo sapien
gatcagctgggttcctccaccaaat

SEQ ID NO: 282442 - DNA, 25 bp, Homo sapien
catggctctcgggtagaagtcactc

SEQ ID NO: 282443 - DNA, 25 bp, Homo sapien
tggctctcgggtagaagtcactcat

SEQ ID NO: 282444 - DNA, 25 bp, Homo sapien
atggctctcgggtagaagtcactca

SEQ ID NO: 282445 - DNA, 25 bp, Homo sapien
gggacttccactgtcgggtgccagt

SEQ ID NO: 282446 - DNA, 25 bp, Homo sapien
tgccagtcttaggtagctgctggcc

SEQ ID NO: 282447 - DNA, 25 bp, Homo sapien
tccactgtcgggtgccagtcttagg

SEQ ID NO: 282448 - DNA, 25 bp, Homo sapien
gtgccagtcttaggtagctgctggc

SEQ ID NO: 282449 - DNA, 25 bp, Homo sapien
ttctccacagtgttcctttcatgcg

SEQ ID NO: 282450 - DNA, 25 bp, Homo sapien
tccacagtgttcctttcatgcgtga

SEQ ID NO: 282451 - DNA, 25 bp, Homo sapien
ctgtcttctccacagtgttcctttc

SEQ ID NO: 282452 - DNA, 25 bp, Homo sapien
ccacagtgttcctttcatgcgtgac

SEQ ID NO: 282453 - DNA, 25 bp, Homo sapien
accatggacttctcacccgataaac

SEQ ID NO: 282454 - DNA, 25 bp, Homo sapien
tccattcccagacctttccacaagt

SEQ ID NO: 282455 - DNA, 25 bp, Homo sapien
gacttctcacccgataaactgggca

SEQ ID NO: 282456 - DNA, 25 bp, Homo sapien
acctttccacaagttcctggtgatg

SEQ ID NO: 282457 - DNA, 25 bp, Homo sapien
ggtcagctccgtcccctcaccaaac

SEQ ID NO: 282458 - DNA, 25 bp, Homo sapien
ctaggacggtcagctccgtcccctc

SEQ ID NO: 282459 - DNA, 25 bp, Homo sapien
acggtcagctccgtcccctcaccaa

SEQ ID NO: 282460 - DNA, 25 bp, Homo sapien
ggacggtcagctccgtcccctcacc

SEQ ID NO: 282461 - DNA, 25 bp, Homo sapien
ggagggcgggaacagagtgaccaag

SEQ ID NO: 282462 - DNA, 25 bp, Homo sapien
tgaccaagggggtggccttgagcgg

SEQ ID NO: 282463 - DNA, 25 bp, Homo sapien
catggccttgttggcttggagctcc

SEQ ID NO: 282464 - DNA, 25 bp, Homo sapien
cagcatggccttgttggcttggagc

SEQ ID NO: 282465 - DNA, 25 bp, Homo sapien
ctatggctcctgggtagaagtcatt

SEQ ID NO: 282466 - DNA, 25 bp, Homo sapien
tggctcctgggtagaagtcatttat

SEQ ID NO: 282467 - DNA, 25 bp, Homo sapien
gctcctgggtagaagtcatttatga

SEQ ID NO: 282468 - DNA, 25 bp, Homo sapien
tatggctcctgggtagaagtcattt

SEQ ID NO: 282469 - DNA, 25 bp, Homo sapien
ctctatgcccttggtgactagggtg

SEQ ID NO: 282470 - DNA, 25 bp, Homo sapien
tggtgactagggtgccattttcctt

SEQ ID NO: 282471 - DNA, 25 bp, Homo sapien
ccttggtgactagggtgccattttc

SEQ ID NO: 282472 - DNA, 25 bp, Homo sapien
tatgcccttggtgactagggtgcca

SEQ ID NO: 282473 - DNA, 25 bp, Homo sapien
cattgtcttctccatggtactttct

SEQ ID NO: 282474 - DNA, 25 bp, Homo sapien
ttctccatggtactttctttgtgcg

SEQ ID NO: 282475 - DNA, 25 bp, Homo sapien
ccatggtactttctttgtgcgtgac

SEQ ID NO: 282476 - DNA, 25 bp, Homo sapien
taagaacattctgcatgggccattg

SEQ ID NO: 282477 - DNA, 25 bp, Homo sapien
gcagcaggaagcacaacagagacgt

SEQ ID NO: 282478 - DNA, 25 bp, Homo sapien
gggcagcaggaagcacaacagagac

SEQ ID NO: 282479 - DNA, 25 bp, Homo sapien
gggtaagaatgaagatgtctggttc

SEQ ID NO: 282480 - DNA, 25 bp, Homo sapien
caacagagacgtgggtaagaatgaa

SEQ ID NO: 282481 - DNA, 25 bp, Homo sapien
cccgggtagaagtcactgatcaggc

SEQ ID NO: 282482 - DNA, 25 bp, Homo sapien
tcccgggtagaagtcactgatcagg

SEQ ID NO: 282483 - DNA, 25 bp, Homo sapien
tgggacttccactgctcaggcgtca

SEQ ID NO: 282484 - DNA, 25 bp, Homo sapien
ttattgagtgtaggaagaagggctg

SEQ ID NO: 282485 - DNA, 25 bp, Homo sapien
agagatagatgtgggggtagagggc

SEQ ID NO: 282486 - DNA, 25 bp, Homo sapien
ggtccagtctgtgcctgcttcagag

SEQ ID NO: 282487 - DNA, 25 bp, Homo sapien
tctgtgcctgcttcagagatagatg

SEQ ID NO: 282488 - DNA, 25 bp, Homo sapien
tccagagggtcagggtccagtctgt

SEQ ID NO: 282489 - DNA, 25 bp, Homo sapien
cccgttccccgctgcagcagcttgg

SEQ ID NO: 282490 - DNA, 25 bp, Homo sapien
gacccgttccccgctgcagcagctt

SEQ ID NO: 282491 - DNA, 25 bp, Homo sapien
ccgacccgttccccgctgcagcagc

SEQ ID NO: 282492 - DNA, 25 bp, Homo sapien
gcttgggcgcccaggtccagtggcc

SEQ ID NO: 282493 - DNA, 25 bp, Homo sapien
cccacacacaaacccctcctgacac

SEQ ID NO: 282494 - DNA, 25 bp, Homo sapien
cacacacaaacccctcctgacacac

SEQ ID NO: 282495 - DNA, 25 bp, Homo sapien
cacacagtgacacagccccacacac

SEQ ID NO: 282496 - DNA, 25 bp, Homo sapien
cacagtgacacagccccacacacaa

SEQ ID NO: 282497 - DNA, 25 bp, Homo sapien
cgagggcggtcagctgggtgcctcc

SEQ ID NO: 282498 - DNA, 25 bp, Homo sapien
tcagctgggtgcctcctccgaacac

SEQ ID NO: 282499 - DNA, 25 bp, Homo sapien
ggtcagctgggtgcctcctccgaac

SEQ ID NO: 282500 - DNA, 25 bp, Homo sapien
agctgggtgcctcctccgaacacag

SEQ ID NO: 282501 - DNA, 25 bp, Homo sapien
tcccgggtagaagtcacttacgaga

SEQ ID NO: 282502 - DNA, 25 bp, Homo sapien
ccgggtagaagtcacttacgagaca

SEQ ID NO: 282503 - DNA, 25 bp, Homo sapien
gctcccgggtagaagtcacttacga

SEQ ID NO: 282504 - DNA, 25 bp, Homo sapien
ctcccgggtagaagtcacttacgag

SEQ ID NO: 282505 - DNA, 25 bp, Homo sapien
tgctcgggcgtcaggctcaggtagc

SEQ ID NO: 282506 - DNA, 25 bp, Homo sapien
agggctggatgacttgggatggggg

SEQ ID NO: 282507 - DNA, 25 bp, Homo sapien
tcccctgggaacctgcagctccagg

SEQ ID NO: 282508 - DNA, 25 bp, Homo sapien
atgggggcagagacccctcccctgg

SEQ ID NO: 282509 - DNA, 25 bp, Homo sapien
ggatatttattgagaagggctggat

SEQ ID NO: 282510 - DNA, 25 bp, Homo sapien
tcaggtcgcctcttgctcgaaagcc

SEQ ID NO: 282511 - DNA, 25 bp, Homo sapien
cagggcagcacgtgttatgttatcc

SEQ ID NO: 282512 - DNA, 25 bp, Homo sapien
cccagagttctccagggacgggtgc

SEQ ID NO: 282513 - DNA, 25 bp, Homo sapien
ggtgcgtgttgtcctagcctgtgcc

SEQ ID NO: 282514 - DNA, 25 bp, Homo sapien
agccccggggaatagatgtggatac

SEQ ID NO: 282515 - DNA, 25 bp, Homo sapien
tagccccggggaatagatgtggata

SEQ ID NO: 282516 - DNA, 25 bp, Homo sapien
aatagatgtggatacggatgtgcat

SEQ ID NO: 282517 - DNA, 25 bp, Homo sapien
gggaatagatgtggatacggatgtg

SEQ ID NO: 282518 - DNA, 25 bp, Homo sapien
tgaagatgtgtgaacgggctgctcc

SEQ ID NO: 282519 - DNA, 25 bp, Homo sapien
gaaggtcaggcacttggatggctgc

SEQ ID NO: 282520 - DNA, 25 bp, Homo sapien
ttgaaggtcaggcacttggatggct

SEQ ID NO: 282521 - DNA, 25 bp, Homo sapien
gaagatgtgtgaacgggctgctcct

SEQ ID NO: 282522 - DNA, 25 bp, Homo sapien
tggggagacccttacaccagaggcc

SEQ ID NO: 282523 - DNA, 25 bp, Homo sapien
gacccttacaccagaggccttggac

SEQ ID NO: 282524 - DNA, 25 bp, Homo sapien
agacccttacaccagaggccttgga

SEQ ID NO: 282525 - DNA, 25 bp, Homo sapien
cccttacaccagaggccttggacct

SEQ ID NO: 282526 - DNA, 25 bp, Homo sapien
ttcagttgttcccaagtccattcct

SEQ ID NO: 282527 - DNA, 25 bp, Homo sapien
gatctctcaaatcgacgaccttcag

SEQ ID NO: 282528 - DNA, 25 bp, Homo sapien
tctcaaatcgacgaccttcagttgt

SEQ ID NO: 282529 - DNA, 25 bp, Homo sapien
tcaaatcgacgaccttcagttgttc

SEQ ID NO: 282530 - DNA, 25 bp, Homo sapien
cctatggttccatgattgctcatca

SEQ ID NO: 282531 - DNA, 25 bp, Homo sapien
ccatgatagattttggccagccagg

SEQ ID NO: 282532 - DNA, 25 bp, Homo sapien
gcaaccatgatagattttggccagc

SEQ ID NO: 282533 - DNA, 25 bp, Homo sapien
aggaagaagtttcctatggttccat

SEQ ID NO: 282534 - DNA, 25 bp, Homo sapien
ttccaaagtggatgcaaggcctgct

SEQ ID NO: 282535 - DNA, 25 bp, Homo sapien
cttccaaagtggatgcaaggcctgc

SEQ ID NO: 282536 - DNA, 25 bp, Homo sapien
ttctatgttacttgcactcggtcct

SEQ ID NO: 282537 - DNA, 25 bp, Homo sapien
gttacttgcactcggtcctgagctg

SEQ ID NO: 282538 - DNA, 25 bp, Homo sapien
tatgttacttgcactcggtcctgag

SEQ ID NO: 282539 - DNA, 25 bp, Homo sapien
tgttacttgcactcggtcctgagct

SEQ ID NO: 282540 - DNA, 25 bp, Homo sapien
aacaggtcctccagatgtctgtcac

SEQ ID NO: 282541 - DNA, 25 bp, Homo sapien
cagtatcaacaggtcctccagatgt

SEQ ID NO: 282542 - DNA, 25 bp, Homo sapien
tcaacaggtcctccagatgtctgtc

SEQ ID NO: 282543 - DNA, 25 bp, Homo sapien
ctggaccagtatcaacaggtcctcc

SEQ ID NO: 282544 - DNA, 25 bp, Homo sapien
ggtttttcgatgacttcagatttgg

SEQ ID NO: 282545 - DNA, 25 bp, Homo sapien
agatttgggatcttcaaatttgaag

SEQ ID NO: 282546 - DNA, 25 bp, Homo sapien
catttgcttgaacttaaaaagctcc

SEQ ID NO: 282547 - DNA, 25 bp, Homo sapien
gtctgttttaccaaacatttgcttg

SEQ ID NO: 282548 - DNA, 25 bp, Homo sapien
gacccatgataaattaccagattaa

SEQ ID NO: 282549 - DNA, 25 bp, Homo sapien
tacaattgacccatgataaattacc

SEQ ID NO: 282550 - DNA, 25 bp, Homo sapien
taactagttgtacaattgacccatg

SEQ ID NO: 282551 - DNA, 25 bp, Homo sapien
tttttgaccgttatgaaatgtatgt

SEQ ID NO: 282552 - DNA, 25 bp, Homo sapien
ggtccataatatggctactgccaat

SEQ ID NO: 282553 - DNA, 25 bp, Homo sapien
attcctgaagatgcgtctatcccag

SEQ ID NO: 282554 - DNA, 25 bp, Homo sapien
tatcccagccaggtccataatatgg

SEQ ID NO: 282555 - DNA, 25 bp, Homo sapien
tactgccaatattgaaggccaaaag

SEQ ID NO: 282556 - DNA, 25 bp, Homo sapien
ggactgctgaattgggtgggaacct

SEQ ID NO: 282557 - DNA, 25 bp, Homo sapien
actgctgaattgggtgggaaccttt

SEQ ID NO: 282558 - DNA, 25 bp, Homo sapien
gactgctgaattgggtgggaacctt

SEQ ID NO: 282559 - DNA, 25 bp, Homo sapien
caaatatccaaccaatgccatagag

SEQ ID NO: 282560 - DNA, 25 bp, Homo sapien
acaaatatccaaccaatgccataga

SEQ ID NO: 282561 - DNA, 25 bp, Homo sapien
gctaccaaacctattcttgaaatat

SEQ ID NO: 282562 - DNA, 25 bp, Homo sapien
cactggtatcttattgaagatacag

SEQ ID NO: 282563 - DNA, 25 bp, Homo sapien
tctcactctgatagctaccaaacct

SEQ ID NO: 282564 - DNA, 25 bp, Homo sapien
tcttattgaagatacagaggaataa

SEQ ID NO: 282565 - DNA, 25 bp, Homo sapien
tgtcagcattcaagatgctggtata

SEQ ID NO: 282566 - DNA, 25 bp, Homo sapien
atccccaaagcataatgtcagcatt

SEQ ID NO: 282567 - DNA, 25 bp, Homo sapien
gatccccaaagcataatgtcagcat

SEQ ID NO: 282568 - DNA, 25 bp, Homo sapien
tgatccccaaagcataatgtcagca

SEQ ID NO: 282569 - DNA, 25 bp, Homo sapien
taaggtaaaacatcctctgggagcc

SEQ ID NO: 282570 - DNA, 25 bp, Homo sapien
tgctaggcagaggatccacaggaac

SEQ ID NO: 282571 - DNA, 25 bp, Homo sapien
gaaagtatgtgcaatgtgcccgcaa

SEQ ID NO: 282572 - DNA, 25 bp, Homo sapien
aaattggcatgctctctgaagcagg

SEQ ID NO: 282573 - DNA, 25 bp, Homo sapien
gatggacccccaattgaaagaagcc

SEQ ID NO: 282574 - DNA, 25 bp, Homo sapien
tctgtgagtaaggagatccctagca

SEQ ID NO: 282575 - DNA, 25 bp, Homo sapien
cagctcgaggggctataggcccgat

SEQ ID NO: 282576 - DNA, 25 bp, Homo sapien
ggagacagtgctgtaagctgcagat

SEQ ID NO: 282577 - DNA, 25 bp, Homo sapien
attgaggcatgtcccttgcatgccg

SEQ ID NO: 282578 - DNA, 25 bp, Homo sapien
aagggatactagattttgttgaatg

SEQ ID NO: 282579 - DNA, 25 bp, Homo sapien
catgtcccttgcatgccgattttgc

SEQ ID NO: 282580 - DNA, 25 bp, Homo sapien
agaggtcttttacattcttggttag

SEQ ID NO: 282581 - DNA, 25 bp, Homo sapien
tcattcagatcgggctcccagcagt

SEQ ID NO: 282582 - DNA, 25 bp, Homo sapien
tcccagcagtgtgcattgtgacgtc

SEQ ID NO: 282583 - DNA, 25 bp, Homo sapien
attcagatcgggctcccagcagtgt

SEQ ID NO: 282584 - DNA, 25 bp, Homo sapien
gtgtgcattgtgacgtcttctgggt

SEQ ID NO: 282585 - DNA, 25 bp, Homo sapien
tccagtccacagaacatgtcccaga

SEQ ID NO: 282586 - DNA, 25 bp, Homo sapien
gtccacagaacatgtcccagatcat

SEQ ID NO: 282587 - DNA, 25 bp, Homo sapien
cagtccacagaacatgtcccagatc

SEQ ID NO: 282588 - DNA, 25 bp, Homo sapien
ccagtccacagaacatgtcccagat

SEQ ID NO: 282589 - DNA, 25 bp, Homo sapien
gcaaagtagatgacgccaaggacct

SEQ ID NO: 282590 - DNA, 25 bp, Homo sapien
ggattgtctgacatgttgccccact

SEQ ID NO: 282591 - DNA, 25 bp, Homo sapien
tgatgcatgacaccaagggaacatt

SEQ ID NO: 282592 - DNA, 25 bp, Homo sapien
tctgtaatggcgaatggactttgct

SEQ ID NO: 282593 - DNA, 25 bp, Homo sapien
ttcaaacccagttcggcctcttgtg

SEQ ID NO: 282594 - DNA, 25 bp, Homo sapien
ctcgttccgtacgacgcgggcagcg

SEQ ID NO: 282595 - DNA, 25 bp, Homo sapien
tgacggacgggccagtagcccaatg

SEQ ID NO: 282596 - DNA, 25 bp, Homo sapien
gcagcccgggaaaccaagcctgagc

SEQ ID NO: 282597 - DNA, 25 bp, Homo sapien
cacaccccacgagggcaggccctgt

SEQ ID NO: 282598 - DNA, 25 bp, Homo sapien
actgcacaccccacgagggcaggcc

SEQ ID NO: 282599 - DNA, 25 bp, Homo sapien
gcacaccccacgagggcaggccctg

SEQ ID NO: 282600 - DNA, 25 bp, Homo sapien
tgcacaccccacgagggcaggccct

SEQ ID NO: 282601 - DNA, 25 bp, Homo sapien
gctcctgagggccagactgagaccc

SEQ ID NO: 282602 - DNA, 25 bp, Homo sapien
tcctggaattgttctagaagctcct

SEQ ID NO: 282603 - DNA, 25 bp, Homo sapien
gcaaattcctggaattgttctagaa

SEQ ID NO: 282604 - DNA, 25 bp, Homo sapien
actgagaccccacccatactcctgc

SEQ ID NO: 282605 - DNA, 25 bp, Homo sapien
ttacagtgagaagggagagcaccca

SEQ ID NO: 282606 - DNA, 25 bp, Homo sapien
gaggaatcggtcaacgtggctcacg

SEQ ID NO: 282607 - DNA, 25 bp, Homo sapien
taggtttgggacaatcacaacggac

SEQ ID NO: 282608 - DNA, 25 bp, Homo sapien
tacggttagtgaacacagtgtcccc

SEQ ID NO: 282609 - DNA, 25 bp, Homo sapien
gctccaccttggcacccagcagctg

SEQ ID NO: 282610 - DNA, 25 bp, Homo sapien
cagctccaccttggcacccagcagc

SEQ ID NO: 282611 - DNA, 25 bp, Homo sapien
gccagctccaccttggcacccagca

SEQ ID NO: 282612 - DNA, 25 bp, Homo sapien
ctgccagctccaccttggcacccag

SEQ ID NO: 282613 - DNA, 25 bp, Homo sapien
cttgccctctgtcctcctcctccat

SEQ ID NO: 282614 - DNA, 25 bp, Homo sapien
tgctgccgtctggttgctggttgct

SEQ ID NO: 282615 - DNA, 25 bp, Homo sapien
gatttgccgtagtcattccctgtcc

SEQ ID NO: 282616 - DNA, 25 bp, Homo sapien
ttgtgtttgcctcggctgctgccgt

SEQ ID NO: 282617 - DNA, 25 bp, Homo sapien
gccggtcgctggtgtgctccctgca

SEQ ID NO: 282618 - DNA, 25 bp, Homo sapien
gcccctccccactagtgacactcca

SEQ ID NO: 282619 - DNA, 25 bp, Homo sapien
tggcgctctgtgcagcgggcggtgg

SEQ ID NO: 282620 - DNA, 25 bp, Homo sapien
ccagccggcatggcgctctgtgcag

SEQ ID NO: 282621 - DNA, 25 bp, Homo sapien
ctgagaccaggcagacaagagccca

SEQ ID NO: 282622 - DNA, 25 bp, Homo sapien
cagcagcgggcccagacaaggagca

SEQ ID NO: 282623 - DNA, 25 bp, Homo sapien
agcagcgggcccagacaaggagcac

SEQ ID NO: 282624 - DNA, 25 bp, Homo sapien
cgggcccagacaaggagcacgggat

SEQ ID NO: 282625 - DNA, 25 bp, Homo sapien
gcccagacaaggagcacgggatggg

SEQ ID NO: 282626 - DNA, 25 bp, Homo sapien
tttcctctgagctttgccgacatcc

SEQ ID NO: 282627 - DNA, 25 bp, Homo sapien
caggtggcggtcaattctccgggac

SEQ ID NO: 282628 - DNA, 25 bp, Homo sapien
caggagcagcttgatttcgcggcgt

SEQ ID NO: 282629 - DNA, 25 bp, Homo sapien
tgaagccgccgctgtggatgatctt

SEQ ID NO: 282630 - DNA, 25 bp, Homo sapien
gccagggcccggatgatgcgggtca

SEQ ID NO: 282631 - DNA, 25 bp, Homo sapien
tggaagtcgatcctgagggcggcca

SEQ ID NO: 282632 - DNA, 25 bp, Homo sapien
ttgtggaagtcgatcctgagggcgg

SEQ ID NO: 282633 - DNA, 25 bp, Homo sapien
agtcgatggcattgtagatgatgag

SEQ ID NO: 282634 - DNA, 25 bp, Homo sapien
tggatccactttttgcgctctgacc

SEQ ID NO: 282635 - DNA, 25 bp, Homo sapien
tcgtagagtttcaggtcgtagccgc

SEQ ID NO: 282636 - DNA, 25 bp, Homo sapien
gatatagtcagctgcggcgatgcgc

SEQ ID NO: 282637 - DNA, 25 bp, Homo sapien
gttcaggtagtaggccgcgttgtcc

SEQ ID NO: 282638 - DNA, 25 bp, Homo sapien
tactggtagagcatgaaaggtcaga

SEQ ID NO: 282639 - DNA, 25 bp, Homo sapien
catctccagatattactggtagagc

SEQ ID NO: 282640 - DNA, 25 bp, Homo sapien
agcctgcgggaggaatcgcgggagg

SEQ ID NO: 282641 - DNA, 25 bp, Homo sapien
tgaatttccagcctcgcttgggttt

SEQ ID NO: 282642 - DNA, 25 bp, Homo sapien
cgttctccttggcaacgtgctgacg

SEQ ID NO: 282643 - DNA, 25 bp, Homo sapien
aacgtgctgacgcagaagccagcgg

SEQ ID NO: 282644 - DNA, 25 bp, Homo sapien
cccagagacactgacgttctccttg

SEQ ID NO: 282645 - DNA, 25 bp, Homo sapien
gaggccttggaagctgagcacggaa

SEQ ID NO: 282646 - DNA, 25 bp, Homo sapien
ctgtcacaaacagggttaagtccaa

SEQ ID NO: 282647 - DNA, 25 bp, Homo sapien
ttgccctgtggagcctggccgcttg

SEQ ID NO: 282648 - DNA, 25 bp, Homo sapien
tgccaccgggatctgaggactgtca

SEQ ID NO: 282649 - DNA, 25 bp, Homo sapien
tgcccactgccaccgggatctgagg

SEQ ID NO: 282650 - DNA, 25 bp, Homo sapien
acggtcttgggaggcaaagagcaaa

SEQ ID NO: 282651 - DNA, 25 bp, Homo sapien
agagcaaacggcctggtgagcactg

SEQ ID NO: 282652 - DNA, 25 bp, Homo sapien
agaaatgcagctgggaacctctttc

SEQ ID NO: 282653 - DNA, 25 bp, Homo sapien
gcagctgggaacctctttcttggtg

SEQ ID NO: 282654 - DNA, 25 bp, Homo sapien
taaagatgcagtttagccaacgtca

SEQ ID NO: 282655 - DNA, 25 bp, Homo sapien
cattgcagccagtctacaggtcgca

SEQ ID NO: 282656 - DNA, 25 bp, Homo sapien
gcagctgcatcgtgctcaccttgag

SEQ ID NO: 282657 - DNA, 25 bp, Homo sapien
gtaaaatgggccacgtcagacctga

SEQ ID NO: 282658 - DNA, 25 bp, Homo sapien
tggccagctacaactctgacaggtg

SEQ ID NO: 282659 - DNA, 25 bp, Homo sapien
aaagctgggagtgttcatccgaacc

SEQ ID NO: 282660 - DNA, 25 bp, Homo sapien
tttttcacgccgagagcagagctgt

SEQ ID NO: 282661 - DNA, 25 bp, Homo sapien
caagagcaggacgttttgactggac

SEQ ID NO: 282662 - DNA, 25 bp, Homo sapien
ggtgcgcgcatattccagcatcagc

SEQ ID NO: 282663 - DNA, 25 bp, Homo sapien
agatcccccagcaggtgcgcgcata

SEQ ID NO: 282664 - DNA, 25 bp, Homo sapien
agcaggtgcgcgcatattccagcat

SEQ ID NO: 282665 - DNA, 25 bp, Homo sapien
caggtgcgcgcatattccagcatca

SEQ ID NO: 282666 - DNA, 25 bp, Homo sapien
ggctgactccccagggtgcagttga

SEQ ID NO: 282667 - DNA, 25 bp, Homo sapien
gactccccagggtgcagttgagagc

SEQ ID NO: 282668 - DNA, 25 bp, Homo sapien
aaggcctcaagaggggctgactccc

SEQ ID NO: 282669 - DNA, 25 bp, Homo sapien
gcagttgagagcctggtattttcca

SEQ ID NO: 282670 - DNA, 25 bp, Homo sapien
tgctctttctttagaatgagcttcg

SEQ ID NO: 282671 - DNA, 25 bp, Homo sapien
tccaaaccaatcttgctctttcttt

SEQ ID NO: 282672 - DNA, 25 bp, Homo sapien
aatgagcttcggaataacaggagtc

SEQ ID NO: 282673 - DNA, 25 bp, Homo sapien
ctctttctttagaatgagcttcgga

SEQ ID NO: 282674 - DNA, 25 bp, Homo sapien
gatggagtcaaagaggcgcaagctc

SEQ ID NO: 282675 - DNA, 25 bp, Homo sapien
atggagtcaaagaggcgcaagctct

SEQ ID NO: 282676 - DNA, 25 bp, Homo sapien
gagtcaaagaggcgcaagctctctg

SEQ ID NO: 282677 - DNA, 25 bp, Homo sapien
tggagtcaaagaggcgcaagctctc

SEQ ID NO: 282678 - DNA, 25 bp, Homo sapien
atggtgagcgggatgcggcggatct

SEQ ID NO: 282679 - DNA, 25 bp, Homo sapien
cagatggtgagcgggatgcggcgga

SEQ ID NO: 282680 - DNA, 25 bp, Homo sapien
ggtgagcgggatgcggcggatcttc

SEQ ID NO: 282681 - DNA, 25 bp, Homo sapien
cgggatgcggcggatcttctctgcc

SEQ ID NO: 282682 - DNA, 25 bp, Homo sapien
caaactggatgttactggtgtcggt

SEQ ID NO: 282683 - DNA, 25 bp, Homo sapien
ttgcggttcaggtcttcaaactgcc

SEQ ID NO: 282684 - DNA, 25 bp, Homo sapien
tgtcaccgcgtcgaagacaaactgg

SEQ ID NO: 282685 - DNA, 25 bp, Homo sapien
tcaaactgccgctggatgtagacag

SEQ ID NO: 282686 - DNA, 25 bp, Homo sapien
attgggcctctctagcacgcgttgg

SEQ ID NO: 282687 - DNA, 25 bp, Homo sapien
caccccgtgggtttcaccataggca

SEQ ID NO: 282688 - DNA, 25 bp, Homo sapien
ttatgtacaacacgtgtcccgcgag

SEQ ID NO: 282689 - DNA, 25 bp, Homo sapien
tctgcgaaacaccacgagatttggc

SEQ ID NO: 282690 - DNA, 25 bp, Homo sapien
tgtgattccgcacactgacctcgga

SEQ ID NO: 282691 - DNA, 25 bp, Homo sapien
gacacacagctactgcacggagaga

SEQ ID NO: 282692 - DNA, 25 bp, Homo sapien
ttggcgaacgtcctttcaacgcagt

SEQ ID NO: 282693 - DNA, 25 bp, Homo sapien
tcgtatttacacacggcccttggcg

SEQ ID NO: 282694 - DNA, 25 bp, Homo sapien
tgctcatgatctgtgaagggcccag

SEQ ID NO: 282695 - DNA, 25 bp, Homo sapien
ttgggcagtaccatcacctgtggga

SEQ ID NO: 282696 - DNA, 25 bp, Homo sapien
gattagcgagtgtgactgtgcccca

SEQ ID NO: 282697 - DNA, 25 bp, Homo sapien
tggcatgtggctagcgctcaacaaa

SEQ ID NO: 282698 - DNA, 25 bp, Homo sapien
agcaacgagaacctgcctggagtct

SEQ ID NO: 282699 - DNA, 25 bp, Homo sapien
acaccctggagagccggagatcacc

SEQ ID NO: 282700 - DNA, 25 bp, Homo sapien
gcaacgagaacctgcctggagtctg

SEQ ID NO: 282701 - DNA, 25 bp, Homo sapien
tggacaccctggagagccggagatc

SEQ ID NO: 282702 - DNA, 25 bp, Homo sapien
tacacgaatcgtcgacgtcgtgggc

SEQ ID NO: 282703 - DNA, 25 bp, Homo sapien
gatcaccatggcaacgagagccacg

SEQ ID NO: 282704 - DNA, 25 bp, Homo sapien
caagcatccagcttgcaccggcgat

SEQ ID NO: 282705 - DNA, 25 bp, Homo sapien
gggacctgcgggctacacgaatcgt

SEQ ID NO: 282706 - DNA, 25 bp, Homo sapien
cctggcctcgggatgtgccagcacg

SEQ ID NO: 282707 - DNA, 25 bp, Homo sapien
gtcggacagagtgggcgagctgact

SEQ ID NO: 282708 - DNA, 25 bp, Homo sapien
tttgcgctccggaaatgaggacgcc

SEQ ID NO: 282709 - DNA, 25 bp, Homo sapien
ggccgcaggccgctttcaagttata

SEQ ID NO: 282710 - DNA, 25 bp, Homo sapien
tttttctgtccggactcctctccag

SEQ ID NO: 282711 - DNA, 25 bp, Homo sapien
tcctggcggagtccggttgtcttcc

SEQ ID NO: 282712 - DNA, 25 bp, Homo sapien
ctgactcctcgagcctcctcaacag

SEQ ID NO: 282713 - DNA, 25 bp, Homo sapien
gtccggttgtcttcccgcatctgac

SEQ ID NO: 282714 - DNA, 25 bp, Homo sapien
ggctgtgaggcatggcacagctcag

SEQ ID NO: 282715 - DNA, 25 bp, Homo sapien
tgggctgtgaggcatggcacagctc

SEQ ID NO: 282716 - DNA, 25 bp, Homo sapien
tgtgaggcatggcacagctcaggca

SEQ ID NO: 282717 - DNA, 25 bp, Homo sapien
ctgtgaggcatggcacagctcaggc

SEQ ID NO: 282718 - DNA, 25 bp, Homo sapien
cgatgacacggtcgcggctcacagg

SEQ ID NO: 282719 - DNA, 25 bp, Homo sapien
gaagctggcgatgacacggtcgcgg

SEQ ID NO: 282720 - DNA, 25 bp, Homo sapien
ctggcgatgacacggtcgcggctca

SEQ ID NO: 282721 - DNA, 25 bp, Homo sapien
cttagggaagctggcgatgacacgg

SEQ ID NO: 282722 - DNA, 25 bp, Homo sapien
cgtggaagtgctccctgagctgcaa

SEQ ID NO: 282723 - DNA, 25 bp, Homo sapien
tgcaaacaggcttccggcgtgtacc

SEQ ID NO: 282724 - DNA, 25 bp, Homo sapien
gacagtccccgtgttcctgcgttgg

SEQ ID NO: 282725 - DNA, 25 bp, Homo sapien
cagcgctgacctgcccgtggaagtg

SEQ ID NO: 282726 - DNA, 25 bp, Homo sapien
gtcttccccacgtagagatcgccaa

SEQ ID NO: 282727 - DNA, 25 bp, Homo sapien
atgaggctggtcttccccacgtaga

SEQ ID NO: 282728 - DNA, 25 bp, Homo sapien
gctggtcttccccacgtagagatcg

SEQ ID NO: 282729 - DNA, 25 bp, Homo sapien
tggatgaggctggtcttccccacgt

SEQ ID NO: 282730 - DNA, 25 bp, Homo sapien
tttcaaagtccaccccaatggtggc

SEQ ID NO: 282731 - DNA, 25 bp, Homo sapien
tctcaaagcgctcaatttcaaagtc

SEQ ID NO: 282732 - DNA, 25 bp, Homo sapien
tagggaatcccagcaatctcaaagc

SEQ ID NO: 282733 - DNA, 25 bp, Homo sapien
cttgtagtctcgatcaaaaacattc

SEQ ID NO: 282734 - DNA, 25 bp, Homo sapien
tagtaggcagatgcgatgcacttga

SEQ ID NO: 282735 - DNA, 25 bp, Homo sapien
taggcagatgcgatgcacttgaact

SEQ ID NO: 282736 - DNA, 25 bp, Homo sapien
ccggtagtaggcagatgcgatgcac

SEQ ID NO: 282737 - DNA, 25 bp, Homo sapien
gcagatgcgatgcacttgaacttct

SEQ ID NO: 282738 - DNA, 25 bp, Homo sapien
tgatcgccaaagtcagccagtgcct

SEQ ID NO: 282739 - DNA, 25 bp, Homo sapien
ggtccttaaagggtgtgatcgccaa

SEQ ID NO: 282740 - DNA, 25 bp, Homo sapien
tcttggaggacaaaaaactggtgcc

SEQ ID NO: 282741 - DNA, 25 bp, Homo sapien
cctgtgcagagaactcgggattccc

SEQ ID NO: 282742 - DNA, 25 bp, Homo sapien
gtgaggtcaaaggccgtgatgatca

SEQ ID NO: 282743 - DNA, 25 bp, Homo sapien
ctggtatgctccagggtctgcacgt

SEQ ID NO: 282744 - DNA, 25 bp, Homo sapien
cagggtctgcacgtcagtgaggtca

SEQ ID NO: 282745 - DNA, 25 bp, Homo sapien
tcagtgaggtcaaaggccgtgatga

SEQ ID NO: 282746 - DNA, 25 bp, Homo sapien
tgaagcaggagcctgcctcgttctc

SEQ ID NO: 282747 - DNA, 25 bp, Homo sapien
tggttcccacgaggaagatgaagca

SEQ ID NO: 282748 - DNA, 25 bp, Homo sapien
cagaaggtccttcttggttcccacg

SEQ ID NO: 282749 - DNA, 25 bp, Homo sapien
ctcgttctccctcagagcatcctcc

SEQ ID NO: 282750 - DNA, 25 bp, Homo sapien
catggctcctccaatgagggctgta

SEQ ID NO: 282751 - DNA, 25 bp, Homo sapien
cccagggggataggcagctgcctgc

SEQ ID NO: 282752 - DNA, 25 bp, Homo sapien
gctgtaaggggaggcattttcccaa

SEQ ID NO: 282753 - DNA, 25 bp, Homo sapien
atggctcctccaatgagggctgtaa

SEQ ID NO: 282754 - DNA, 25 bp, Homo sapien
actgaccagtactcggcctgcatct

SEQ ID NO: 282755 - DNA, 25 bp, Homo sapien
ttggccgacactgaccagtactcgg

SEQ ID NO: 282756 - DNA, 25 bp, Homo sapien
tgcttcggcctgctcacatgcggcc

SEQ ID NO: 282757 - DNA, 25 bp, Homo sapien
cagtcttggccgacactgaccagta

SEQ ID NO: 282758 - DNA, 25 bp, Homo sapien
tgctcgaatgccagggcggctacgc

SEQ ID NO: 282759 - DNA, 25 bp, Homo sapien
ccagggcggctacgcggctgaagaa

SEQ ID NO: 282760 - DNA, 25 bp, Homo sapien
gcagcaccgactgctcgaatgccag

SEQ ID NO: 282761 - DNA, 25 bp, Homo sapien
ggtcctgcagcaccgactgctcgaa

SEQ ID NO: 282762 - DNA, 25 bp, Homo sapien
gctctcctgggtctcgggcggactc

SEQ ID NO: 282763 - DNA, 25 bp, Homo sapien
tctcctgggtctcgggcggactccc

SEQ ID NO: 282764 - DNA, 25 bp, Homo sapien
ccaggctggagggcctcttgctctc

SEQ ID NO: 282765 - DNA, 25 bp, Homo sapien
ttgctctcctgggtctcgggcggac

SEQ ID NO: 282766 - DNA, 25 bp, Homo sapien
aagtcatttatggaggccggacgcg

SEQ ID NO: 282767 - DNA, 25 bp, Homo sapien
gaaaaccctgtggatgagcatactg

SEQ ID NO: 282768 - DNA, 25 bp, Homo sapien
tctgatgaccctgcaaatggactgg

SEQ ID NO: 282769 - DNA, 25 bp, Homo sapien
gccatggccgagtagtatagaccga

SEQ ID NO: 282770 - DNA, 25 bp, Homo sapien
taaaagctggacacaagccggatgg

SEQ ID NO: 282771 - DNA, 25 bp, Homo sapien
gaagggccttcctgagtacgcaaag

SEQ ID NO: 282772 - DNA, 25 bp, Homo sapien
cacatgaaaactgggcgctgctaca

SEQ ID NO: 282773 - DNA, 25 bp, Homo sapien
taactacaagaatggccactgcagc

SEQ ID NO: 282774 - DNA, 25 bp, Homo sapien
tcccgtcctgtgaagcttatgccca

SEQ ID NO: 282775 - DNA, 25 bp, Homo sapien
ggttctcccgtcctgtgaagcttat

SEQ ID NO: 282776 - DNA, 25 bp, Homo sapien
gcttatgcccagcaaacctggtctt

SEQ ID NO: 282777 - DNA, 25 bp, Homo sapien
tgtgaagcttatgcccagcaaacct

SEQ ID NO: 282778 - DNA, 25 bp, Homo sapien
tggtaacagctggacaccacaccca

SEQ ID NO: 282779 - DNA, 25 bp, Homo sapien
tgaggcagtacagctctagctcaga

SEQ ID NO: 282780 - DNA, 25 bp, Homo sapien
gacgatttaatcaaggaccatttac

SEQ ID NO: 282781 - DNA, 25 bp, Homo sapien
gtacagctctagctcagaagctggt

SEQ ID NO: 282782 - DNA, 25 bp, Homo sapien
caagcacaggattgttccccaggca

SEQ ID NO: 282783 - DNA, 25 bp, Homo sapien
tccccaggcaggtgtaagtttcgtg

SEQ ID NO: 282784 - DNA, 25 bp, Homo sapien
tctagctggcatgaagtgtccttcc

SEQ ID NO: 282785 - DNA, 25 bp, Homo sapien
gaagtccaattctttcctgtgccca

SEQ ID NO: 282786 - DNA, 25 bp, Homo sapien
tgtgaaaatggggtcgggctggcat

SEQ ID NO: 282787 - DNA, 25 bp, Homo sapien
gtcgggctggcatctgccgtgtggg

SEQ ID NO: 282788 - DNA, 25 bp, Homo sapien
aatggggtcgggctggcatctgccg

SEQ ID NO: 282789 - DNA, 25 bp, Homo sapien
gggtcgggctggcatctgccgtgtg

SEQ ID NO: 282790 - DNA, 25 bp, Homo sapien
ataaataaatgaaaagaaggccagg

SEQ ID NO: 282791 - DNA, 25 bp, Homo sapien
aataaatgaaaagaaggccaggcac

SEQ ID NO: 282792 - DNA, 25 bp, Homo sapien
agtggctgatgcctgtaatctcaga

SEQ ID NO: 282793 - DNA, 25 bp, Homo sapien
cagaactttgggaggccgaggcggg

SEQ ID NO: 282794 - DNA, 25 bp, Homo sapien
ataataacggagaagaagtttgaga

SEQ ID NO: 282795 - DNA, 25 bp, Homo sapien
taataacggagaagaagtttgagac

SEQ ID NO: 282796 - DNA, 25 bp, Homo sapien
aataataacggagaagaagtttgag

SEQ ID NO: 282797 - DNA, 25 bp, Homo sapien
gggccaggctgagtaaccaatgcca

SEQ ID NO: 282798 - DNA, 25 bp, Homo sapien
agcacccttgtttcagcgggcctct

SEQ ID NO: 282799 - DNA, 25 bp, Homo sapien
ctctcacgttgtggatctgctgtgg

SEQ ID NO: 282800 - DNA, 25 bp, Homo sapien
aggtcaccccgcaaggcagggaggg

SEQ ID NO: 282801 - DNA, 25 bp, Homo sapien
cggcactgcccagtcgtcgtgtcag

SEQ ID NO: 282802 - DNA, 25 bp, Homo sapien
cagtcgtcgtgtcagaggccaccat

SEQ ID NO: 282803 - DNA, 25 bp, Homo sapien
tctggcccaacgatgcggagggcac

SEQ ID NO: 282804 - DNA, 25 bp, Homo sapien
tcgtgggcatctgcaagaccaggca

SEQ ID NO: 282805 - DNA, 25 bp, Homo sapien
gcggcgcggatgacggagccaggcg

SEQ ID NO: 282806 - DNA, 25 bp, Homo sapien
tgcgcgcgccgctattgtgtgcggg

SEQ ID NO: 282807 - DNA, 25 bp, Homo sapien
ggcccgcactctgcgccgcaggaag

SEQ ID NO: 282808 - DNA, 25 bp, Homo sapien
tcggacgctaagctcagccagccgg

SEQ ID NO: 282809 - DNA, 25 bp, Homo sapien
cggggcccgtctcagcggcggcgcg

SEQ ID NO: 282810 - DNA, 25 bp, Homo sapien
cggcgcggcgcctcgccagcccggc

SEQ ID NO: 282811 - DNA, 25 bp, Homo sapien
tgcgcgcggggcccgtctcagcggc

SEQ ID NO: 282812 - DNA, 25 bp, Homo sapien
cgcggccggccttacctgcgccgcc

SEQ ID NO: 282813 - DNA, 25 bp, Homo sapien
tccaggcgccgaatggaggccttgc

SEQ ID NO: 282814 - DNA, 25 bp, Homo sapien
ttttccttggccagcaacgtctgca

SEQ ID NO: 282815 - DNA, 25 bp, Homo sapien
caggtagatcatgcggaagcgctcc

SEQ ID NO: 282816 - DNA, 25 bp, Homo sapien
tcgatgtcgcccactgagcgcagct

SEQ ID NO: 282817 - DNA, 25 bp, Homo sapien
cattggcgtcgatcaggttgtcctt

SEQ ID NO: 282818 - DNA, 25 bp, Homo sapien
ggagagcggcttttgtcccggaaca

SEQ ID NO: 282819 - DNA, 25 bp, Homo sapien
tgcggatccgctcgaagttggacct

SEQ ID NO: 282820 - DNA, 25 bp, Homo sapien
gacgttcacgtagaagggcttctcg

SEQ ID NO: 282821 - DNA, 25 bp, Homo sapien
tcaactcacaagctgtacttcacaa

SEQ ID NO: 282822 - DNA, 25 bp, Homo sapien
aagctgtacttcacaaacacattgc

SEQ ID NO: 282823 - DNA, 25 bp, Homo sapien
agctgtacttcacaaacacattgct

SEQ ID NO: 282824 - DNA, 25 bp, Homo sapien
tcacaagctgtacttcacaaacaca

SEQ ID NO: 282825 - DNA, 25 bp, Homo sapien
gagttattattcactgggtacagag

SEQ ID NO: 282826 - DNA, 25 bp, Homo sapien
cacaggactggacttacatgaggta

SEQ ID NO: 282827 - DNA, 25 bp, Homo sapien
cacacaatttctgccatcacatgga

SEQ ID NO: 282828 - DNA, 25 bp, Homo sapien
caaaaagacgaatgccacaggactg

SEQ ID NO: 282829 - DNA, 25 bp, Homo sapien
acacaagatctgtcccgtctcacaa

SEQ ID NO: 282830 - DNA, 25 bp, Homo sapien
gatctgtcccgtctcacaactgaca

SEQ ID NO: 282831 - DNA, 25 bp, Homo sapien
acaagatctgtcccgtctcacaact

SEQ ID NO: 282832 - DNA, 25 bp, Homo sapien
aagatctgtcccgtctcacaactga

SEQ ID NO: 282833 - DNA, 25 bp, Homo sapien
agcagggcatactctgtgcttaagg

SEQ ID NO: 282834 - DNA, 25 bp, Homo sapien
cagcagggcatactctgtgcttaag

SEQ ID NO: 282835 - DNA, 25 bp, Homo sapien
gcagggcatactctgtgcttaagga

SEQ ID NO: 282836 - DNA, 25 bp, Homo sapien
tatagtcattttgcaaagtcgtggc

SEQ ID NO: 282837 - DNA, 25 bp, Homo sapien
tatgaatgtgctgattgctctgccc

SEQ ID NO: 282838 - DNA, 25 bp, Homo sapien
caagaaactttcgagggcccatgaa

SEQ ID NO: 282839 - DNA, 25 bp, Homo sapien
cagccccaggaaggtgggtctatga

SEQ ID NO: 282840 - DNA, 25 bp, Homo sapien
cctctgcctcctgagttcaagcgat

SEQ ID NO: 282841 - DNA, 25 bp, Homo sapien
ccaccatgcccagctaattttgtat

SEQ ID NO: 282842 - DNA, 25 bp, Homo sapien
atggcgcgatcttggatgattgcaa

SEQ ID NO: 282843 - DNA, 25 bp, Homo sapien
ttcgctcttgtagcccaggctcaag

SEQ ID NO: 282844 - DNA, 25 bp, Homo sapien
gggaccaccatcaataaccaaaatg

SEQ ID NO: 282845 - DNA, 25 bp, Homo sapien
aaacctacacgacagagcctactac

SEQ ID NO: 282846 - DNA, 25 bp, Homo sapien
ggttatatgcaaaagctagctatgg

SEQ ID NO: 282847 - DNA, 25 bp, Homo sapien
taccgtaagcaattgtgacacagtg

SEQ ID NO: 282848 - DNA, 25 bp, Homo sapien
gagcccctacttggaataatctccc

SEQ ID NO: 282849 - DNA, 25 bp, Homo sapien
acacggacaaagatgtggccctgcc

SEQ ID NO: 282850 - DNA, 25 bp, Homo sapien
acagagcaggccgacggtggacact

SEQ ID NO: 282851 - DNA, 25 bp, Homo sapien
tgccccggaacagagcaggccgacg

SEQ ID NO: 282852 - DNA, 25 bp, Homo sapien
ggagatgacacaggcatggcgggac

SEQ ID NO: 282853 - DNA, 25 bp, Homo sapien
catggcgggacccagtctccgatgc

SEQ ID NO: 282854 - DNA, 25 bp, Homo sapien
ggcgggacccagtctccgatgcttc

SEQ ID NO: 282855 - DNA, 25 bp, Homo sapien
aggagatgacacaggcatggcggga

SEQ ID NO: 282856 - DNA, 25 bp, Homo sapien
agttaaagtcctcttgtagcctggg

SEQ ID NO: 282857 - DNA, 25 bp, Homo sapien
agactggcacgggcaacatgaagac

SEQ ID NO: 282858 - DNA, 25 bp, Homo sapien
aagttaaagtcctcttgtagcctgg

SEQ ID NO: 282859 - DNA, 25 bp, Homo sapien
aaagttaaagtcctcttgtagcctg

SEQ ID NO: 282860 - DNA, 25 bp, Homo sapien
tagggaaatactgcgaacaactctg

SEQ ID NO: 282861 - DNA, 25 bp, Homo sapien
gcagtgcttggaggcaaattcacag

SEQ ID NO: 282862 - DNA, 25 bp, Homo sapien
tagaagttctaaaagggtgcagcac

SEQ ID NO: 282863 - DNA, 25 bp, Homo sapien
cattcatggtgctaactaaggcctg

SEQ ID NO: 282864 - DNA, 25 bp, Homo sapien
caaagatctttatgcaccagtggcc

SEQ ID NO: 282865 - DNA, 25 bp, Homo sapien
tccctgaaggaacgctatgtgtcca

SEQ ID NO: 282866 - DNA, 25 bp, Homo sapien
gatggttcgggatactgtgccctct

SEQ ID NO: 282867 - DNA, 25 bp, Homo sapien
tatgtgtccaaaacaactgcgtggg

SEQ ID NO: 282868 - DNA, 25 bp, Homo sapien
tcctacatgaatgcgacacggcagc

SEQ ID NO: 282869 - DNA, 25 bp, Homo sapien
tccaggctgaagctattagagcacc

SEQ ID NO: 282870 - DNA, 25 bp, Homo sapien
tttgccaaatggatccagaacaggg

SEQ ID NO: 282871 - DNA, 25 bp, Homo sapien
aaatgtctcagcctatgtgtgtgca

SEQ ID NO: 282872 - DNA, 25 bp, Homo sapien
gcacctgggctttttaggactctgg

SEQ ID NO: 282873 - DNA, 25 bp, Homo sapien
cattcccggaggcaataataatttg

SEQ ID NO: 282874 - DNA, 25 bp, Homo sapien
gagaccctgaaggtttagccccaga

SEQ ID NO: 282875 - DNA, 25 bp, Homo sapien
tacagttattattcctcagcagcac

SEQ ID NO: 282876 - DNA, 25 bp, Homo sapien
caggcaaccctagacaccgcagatg

SEQ ID NO: 282877 - DNA, 25 bp, Homo sapien
tggaaaatgtcagtcgggaagggcc

SEQ ID NO: 282878 - DNA, 25 bp, Homo sapien
ctagacaccgcagatgagaaacagg

SEQ ID NO: 282879 - DNA, 25 bp, Homo sapien
gaggagaaagtccaacccacacgac

SEQ ID NO: 282880 - DNA, 25 bp, Homo sapien
ccaagaatggaaagccgcagctgcc

SEQ ID NO: 282881 - DNA, 25 bp, Homo sapien
cacccaagaatggaaagccgcagct

SEQ ID NO: 282882 - DNA, 25 bp, Homo sapien
gcagctgcccgggtagagagaggtc

SEQ ID NO: 282883 - DNA, 25 bp, Homo sapien
cgcagctgcccgggtagagagaggt

SEQ ID NO: 282884 - DNA, 25 bp, Homo sapien
gatgtggcattgataaccttacgac

SEQ ID NO: 282885 - DNA, 25 bp, Homo sapien
tcttggaatacgcacctgagtgggc

SEQ ID NO: 282886 - DNA, 25 bp, Homo sapien
tacccgtagtgcttcagggaggtaa

SEQ ID NO: 282887 - DNA, 25 bp, Homo sapien
gaaaacccacgtatcatctcttgga

SEQ ID NO: 282888 - DNA, 25 bp, Homo sapien
ctgaggttgatggtctcatcagcca

SEQ ID NO: 282889 - DNA, 25 bp, Homo sapien
gactgaggttgatggtctcatcagc

SEQ ID NO: 282890 - DNA, 25 bp, Homo sapien
ggcaggactgaggttgatggtctca

SEQ ID NO: 282891 - DNA, 25 bp, Homo sapien
aggactgaggttgatggtctcatca

SEQ ID NO: 282892 - DNA, 25 bp, Homo sapien
cagaaccaattgggaggcctggctc

SEQ ID NO: 282893 - DNA, 25 bp, Homo sapien
gccagaaccaattgggaggcctggc

SEQ ID NO: 282894 - DNA, 25 bp, Homo sapien
gctcctgcccccgtaccaggaatac

SEQ ID NO: 282895 - DNA, 25 bp, Homo sapien
ccaccatctcccaagagccagaacc

SEQ ID NO: 282896 - DNA, 25 bp, Homo sapien
ttatctgagtgctttccgagcccat

SEQ ID NO: 282897 - DNA, 25 bp, Homo sapien
tgggtggagcaccttttatctgagt

SEQ ID NO: 282898 - DNA, 25 bp, Homo sapien
aacacattcttcatcactgggtgga

SEQ ID NO: 282899 - DNA, 25 bp, Homo sapien
gaagacgatcttaagacatcaacac

SEQ ID NO: 282900 - DNA, 25 bp, Homo sapien
tgcccggtctgcagcgcagccgtat

SEQ ID NO: 282901 - DNA, 25 bp, Homo sapien
tatccaggtggtgttccgaacgagc

SEQ ID NO: 282902 - DNA, 25 bp, Homo sapien
tcaatgtagggcagcccatcttggt

SEQ ID NO: 282903 - DNA, 25 bp, Homo sapien
atgaggagggcgagtcatcaatgta

SEQ ID NO: 282904 - DNA, 25 bp, Homo sapien
ctggccctcctgccacacgtacacc

SEQ ID NO: 282905 - DNA, 25 bp, Homo sapien
ggccctcctgccacacgtacaccat

SEQ ID NO: 282906 - DNA, 25 bp, Homo sapien
tggccctcctgccacacgtacacca

SEQ ID NO: 282907 - DNA, 25 bp, Homo sapien
caggtaagtctcctcgctagccagg

SEQ ID NO: 282908 - DNA, 25 bp, Homo sapien
taagtctcctcgctagccaggattc

SEQ ID NO: 282909 - DNA, 25 bp, Homo sapien
caggattcccgacaggacccatttt

SEQ ID NO: 282910 - DNA, 25 bp, Homo sapien
gctagccaggattcccgacaggacc

SEQ ID NO: 282911 - DNA, 25 bp, Homo sapien
gcttctggaagaggtcgcccacccg

SEQ ID NO: 282912 - DNA, 25 bp, Homo sapien
gggaagagcccatcatagaactcct

SEQ ID NO: 282913 - DNA, 25 bp, Homo sapien
tggtggcagcggctttcaaaggctt

SEQ ID NO: 282914 - DNA, 25 bp, Homo sapien
ctcaggcactttgaagaagatggtc

SEQ ID NO: 282915 - DNA, 25 bp, Homo sapien
aagccttagctctggcctggagtct

SEQ ID NO: 282916 - DNA, 25 bp, Homo sapien
agccttagctctggcctggagtctg

SEQ ID NO: 282917 - DNA, 25 bp, Homo sapien
atctcctttgatgatgcctctcgcc

SEQ ID NO: 282918 - DNA, 25 bp, Homo sapien
ttgcccctctcgctcgcttttccct

SEQ ID NO: 282919 - DNA, 25 bp, Homo sapien
gggatgtaggcccaaacctgacctc

SEQ ID NO: 282920 - DNA, 25 bp, Homo sapien
gcttcctctcttgggcgtgtcctcg

SEQ ID NO: 282921 - DNA, 25 bp, Homo sapien
caggtcgcagttggtgaagtgccac

SEQ ID NO: 282922 - DNA, 25 bp, Homo sapien
gcgccggagcaggtcgcagttggtg

SEQ ID NO: 282923 - DNA, 25 bp, Homo sapien
cgcatgtcgaggtaggagcacatgt

SEQ ID NO: 282924 - DNA, 25 bp, Homo sapien
atgtcgaggtaggagcacatgtgca

SEQ ID NO: 282925 - DNA, 25 bp, Homo sapien
tcatcaggttggtgccgagccgcgt

SEQ ID NO: 282926 - DNA, 25 bp, Homo sapien
ggtcatcaggttggtgccgagccgc

SEQ ID NO: 282927 - DNA, 25 bp, Homo sapien
gtcatcaggttggtgccgagccgcg

SEQ ID NO: 282928 - DNA, 25 bp, Homo sapien
ttcagcagaatcccctctcggcagc

SEQ ID NO: 282929 - DNA, 25 bp, Homo sapien
gatgaaattagcctgggatatgtac

SEQ ID NO: 282930 - DNA, 25 bp, Homo sapien
taggccaggatgaaattagcctggg

SEQ ID NO: 282931 - DNA, 25 bp, Homo sapien
ctggtaggccaggatgaaattagcc

SEQ ID NO: 282932 - DNA, 25 bp, Homo sapien
gcaccatctggacggaactggtagg

SEQ ID NO: 282933 - DNA, 25 bp, Homo sapien
tggccagcacaaagtggcaaacgtc

SEQ ID NO: 282934 - DNA, 25 bp, Homo sapien
cccagtacttggcagcgaaggtgct

SEQ ID NO: 282935 - DNA, 25 bp, Homo sapien
gtgctgtgaatcttaccaaggccaa

SEQ ID NO: 282936 - DNA, 25 bp, Homo sapien
gttcatgagcccagtacttggcagc

SEQ ID NO: 282937 - DNA, 25 bp, Homo sapien
gctgtgaatcttaccaaggccaatc

SEQ ID NO: 282938 - DNA, 25 bp, Homo sapien
tatgatgccccctttgcaatccaca

SEQ ID NO: 282939 - DNA, 25 bp, Homo sapien
tgatatgatgccccctttgcaatcc

SEQ ID NO: 282940 - DNA, 25 bp, Homo sapien
atatgatgccccctttgcaatccac

SEQ ID NO: 282941 - DNA, 25 bp, Homo sapien
aatgatatgatgccccctttgcaat

SEQ ID NO: 282942 - DNA, 25 bp, Homo sapien
ccgtcctgtccctggagccactcac

SEQ ID NO: 282943 - DNA, 25 bp, Homo sapien
tggccgtcctgtccctggagccact

SEQ ID NO: 282944 - DNA, 25 bp, Homo sapien
cttggccgtcctgtccctggagcca

SEQ ID NO: 282945 - DNA, 25 bp, Homo sapien
gccgtcctgtccctggagccactca

SEQ ID NO: 282946 - DNA, 25 bp, Homo sapien
tagcaacagaccagatttggtcttc

SEQ ID NO: 282947 - DNA, 25 bp, Homo sapien
gcaacagaccagatttggtcttcag

SEQ ID NO: 282948 - DNA, 25 bp, Homo sapien
cagtctggatggtgtataaacacta

SEQ ID NO: 282949 - DNA, 25 bp, Homo sapien
atagcaacagaccagatttggtctt

SEQ ID NO: 282950 - DNA, 25 bp, Homo sapien
gagaagtgcccacaacaagccgtcc

SEQ ID NO: 282951 - DNA, 25 bp, Homo sapien
ttttcaggggtgagaagtgcccaca

SEQ ID NO: 282952 - DNA, 25 bp, Homo sapien
ctgttgaggtcccagattttcaggg

SEQ ID NO: 282953 - DNA, 25 bp, Homo sapien
gggtgagaagtgcccacaacaagcc

SEQ ID NO: 282954 - DNA, 25 bp, Homo sapien
cttgggggaaagtctctgtccaagt

SEQ ID NO: 282955 - DNA, 25 bp, Homo sapien
ttgggggaaagtctctgtccaagtg

SEQ ID NO: 282956 - DNA, 25 bp, Homo sapien
ggaaagtctctgtccaagtgtgtca

SEQ ID NO: 282957 - DNA, 25 bp, Homo sapien
aagtctctgtccaagtgtgtcatca

SEQ ID NO: 282958 - DNA, 25 bp, Homo sapien
catttccggacactggtgcggcagt

SEQ ID NO: 282959 - DNA, 25 bp, Homo sapien
tacaacgctatagaaggaggaacct

SEQ ID NO: 282960 - DNA, 25 bp, Homo sapien
acactggtgcggcagtcccagtagc

SEQ ID NO: 282961 - DNA, 25 bp, Homo sapien
gagcagtgcgaaaggggactcatat

SEQ ID NO: 282962 - DNA, 25 bp, Homo sapien
ctgccgaggcgggtcgacgtcagcg

SEQ ID NO: 282963 - DNA, 25 bp, Homo sapien
gccgaggcgggtcgacgtcagcggg

SEQ ID NO: 282964 - DNA, 25 bp, Homo sapien
ggtgtgcgggcaggccctttggtgc

SEQ ID NO: 282965 - DNA, 25 bp, Homo sapien
acgtcagcgggaaggtgtgcgggca

SEQ ID NO: 282966 - DNA, 25 bp, Homo sapien
cagcgcagcatagagatgcttggtg

SEQ ID NO: 282967 - DNA, 25 bp, Homo sapien
taagacagcgcagcatagagatgct

SEQ ID NO: 282968 - DNA, 25 bp, Homo sapien
ggttgtaagacagcgcagcatagag

SEQ ID NO: 282969 - DNA, 25 bp, Homo sapien
ggaggttgtaagacagcgcagcata

SEQ ID NO: 282970 - DNA, 25 bp, Homo sapien
ctggctggtgctagcgggctattgg

SEQ ID NO: 282971 - DNA, 25 bp, Homo sapien
gctctggccaaacagagtcgcaggg

SEQ ID NO: 282972 - DNA, 25 bp, Homo sapien
ggtgctagcgggctattggcagcct

SEQ ID NO: 282973 - DNA, 25 bp, Homo sapien
gccgaggttcagctgcactcctcta

SEQ ID NO: 282974 - DNA, 25 bp, Homo sapien
ggcctgacagcacttctcagccatt

SEQ ID NO: 282975 - DNA, 25 bp, Homo sapien
gaaggcccggtacacacccagctgg

SEQ ID NO: 282976 - DNA, 25 bp, Homo sapien
tgagcattggcctgacagcacttct

SEQ ID NO: 282977 - DNA, 25 bp, Homo sapien
tttccatggcaactccgtagttgtc

SEQ ID NO: 282978 - DNA, 25 bp, Homo sapien
ttcttggtcgttggatccttggcat

SEQ ID NO: 282979 - DNA, 25 bp, Homo sapien
gttcttggtcgttggatccttggca

SEQ ID NO: 282980 - DNA, 25 bp, Homo sapien
gagttcttggtcgttggatccttgg

SEQ ID NO: 282981 - DNA, 25 bp, Homo sapien
gcatctttgttgcttctggctctca

SEQ ID NO: 282982 - DNA, 25 bp, Homo sapien
tgctcctcgtcacacggtccacagg

SEQ ID NO: 282983 - DNA, 25 bp, Homo sapien
tcgtcacacggtccacaggcttgta

SEQ ID NO: 282984 - DNA, 25 bp, Homo sapien
atggaggaccagcgtgctcctcgtc

SEQ ID NO: 282985 - DNA, 25 bp, Homo sapien
tggaggaccagcgtgctcctcgtca

SEQ ID NO: 282986 - DNA, 25 bp, Homo sapien
tgtgtgagcaccatcctggaagcag

SEQ ID NO: 282987 - DNA, 25 bp, Homo sapien
tggacattttgcgtggagtaactct

SEQ ID NO: 282988 - DNA, 25 bp, Homo sapien
gctgcatgcacatggccaagaagga

SEQ ID NO: 282989 - DNA, 25 bp, Homo sapien
tgttccagcaaactcacgctgcatg

SEQ ID NO: 282990 - DNA, 25 bp, Homo sapien
ttcaccgtcatggactgccgtcggg

SEQ ID NO: 282991 - DNA, 25 bp, Homo sapien
tcttcaccgtcatggactgccgtcg

SEQ ID NO: 282992 - DNA, 25 bp, Homo sapien
atgcggagggcgtcctgcagcaagg

SEQ ID NO: 282993 - DNA, 25 bp, Homo sapien
tgccgtcggggtgtgatctcctcat

SEQ ID NO: 282994 - DNA, 25 bp, Homo sapien
tccgccttcaatgcgctcagagact

SEQ ID NO: 282995 - DNA, 25 bp, Homo sapien
atgcccatttgacagcccaggtgcc

SEQ ID NO: 282996 - DNA, 25 bp, Homo sapien
ggaacacttgcactgctcaacgcct

SEQ ID NO: 282997 - DNA, 25 bp, Homo sapien
gcgaggactgccactaaatcatgcc

SEQ ID NO: 282998 - DNA, 25 bp, Homo sapien
gggcctctcctcgatgccagacttg

SEQ ID NO: 282999 - DNA, 25 bp, Homo sapien
gggcaatgagattataggagccaca

SEQ ID NO: 283000 - DNA, 25 bp, Homo sapien
tgcagagggctcatacctgggcctc

SEQ ID NO: 283001 - DNA, 25 bp, Homo sapien
tcagcaggtagcaatgggccacctc

SEQ ID NO: 283002 - DNA, 25 bp, Homo sapien
tgacggcacccacgggaagcaagaa

SEQ ID NO: 283003 - DNA, 25 bp, Homo sapien
catcatgtagagctggagcgctgaa

SEQ ID NO: 283004 - DNA, 25 bp, Homo sapien
ctggtgacggcacccacgggaagca

SEQ ID NO: 283005 - DNA, 25 bp, Homo sapien
atcatgtagagctggagcgctgaag

SEQ ID NO: 283006 - DNA, 25 bp, Homo sapien
gctccccatttgcaagaacagcctg

SEQ ID NO: 283007 - DNA, 25 bp, Homo sapien
agtcctccgacactctcagaggtgg

SEQ ID NO: 283008 - DNA, 25 bp, Homo sapien
gctgctggtgcccataagtggaagg

SEQ ID NO: 283009 - DNA, 25 bp, Homo sapien
agcttggctcacgacaggcagccgg

SEQ ID NO: 283010 - DNA, 25 bp, Homo sapien
cctgcggcctgagaagggtgccttt

SEQ ID NO: 283011 - DNA, 25 bp, Homo sapien
tgcatcttggtctgcatctgaaagg

SEQ ID NO: 283012 - DNA, 25 bp, Homo sapien
aagggtcggtccttcttgctcaagg

SEQ ID NO: 283013 - DNA, 25 bp, Homo sapien
tgtctaggtaagtcacccctgcctg

SEQ ID NO: 283014 - DNA, 25 bp, Homo sapien
gtagagggaccatctcaggcacagg

SEQ ID NO: 283015 - DNA, 25 bp, Homo sapien
gcaggttgacccagagacattctct

SEQ ID NO: 283016 - DNA, 25 bp, Homo sapien
tagtcctcccaactagacaggatgg

SEQ ID NO: 283017 - DNA, 25 bp, Homo sapien
tgaaaagtggcagccctcgaggtca

SEQ ID NO: 283018 - DNA, 25 bp, Homo sapien
gtgaacaggaagacgtggcgcagct

SEQ ID NO: 283019 - DNA, 25 bp, Homo sapien
tcggtgaacaggaagacgtggcgca

SEQ ID NO: 283020 - DNA, 25 bp, Homo sapien
aggtcggtgaacaggaagacgtggc

SEQ ID NO: 283021 - DNA, 25 bp, Homo sapien
aacaggaagacgtggcgcagcttgc

SEQ ID NO: 283022 - DNA, 25 bp, Homo sapien
catctggaagctgagatccgtgagc

SEQ ID NO: 283023 - DNA, 25 bp, Homo sapien
catttgcagtcatactgctgcgttt

SEQ ID NO: 283024 - DNA, 25 bp, Homo sapien
tccgtgagcggaatgtaccatttgc

SEQ ID NO: 283025 - DNA, 25 bp, Homo sapien
gatctgggagatcttgatcttcaaa

SEQ ID NO: 283026 - DNA, 25 bp, Homo sapien
acccggcccttgctcccctggtgtg

SEQ ID NO: 283027 - DNA, 25 bp, Homo sapien
ccggcccttgctcccctggtgtgca

SEQ ID NO: 283028 - DNA, 25 bp, Homo sapien
cggcccttgctcccctggtgtgcac

SEQ ID NO: 283029 - DNA, 25 bp, Homo sapien
cccggcccttgctcccctggtgtgc

SEQ ID NO: 283030 - DNA, 25 bp, Homo sapien
gtcctcaccatttttacagtcttca

SEQ ID NO: 283031 - DNA, 25 bp, Homo sapien
ggcctggctaacctttgattgaggg

SEQ ID NO: 283032 - DNA, 25 bp, Homo sapien
gggcatacctggacccaggcctaac

SEQ ID NO: 283033 - DNA, 25 bp, Homo sapien
tggacccaggcctaaccttgatgcc

SEQ ID NO: 283034 - DNA, 25 bp, Homo sapien
tagccttgctgcccttgttcgccct

SEQ ID NO: 283035 - DNA, 25 bp, Homo sapien
ttcttcagcctctccgtagccttgc

SEQ ID NO: 283036 - DNA, 25 bp, Homo sapien
ttgccgttgcggctgtgcaccctga

SEQ ID NO: 283037 - DNA, 25 bp, Homo sapien
gccatgctgggagacataagcagca

SEQ ID NO: 283038 - DNA, 25 bp, Homo sapien
cactctgcacgctcatagtcagagg

SEQ ID NO: 283039 - DNA, 25 bp, Homo sapien
cagaggagatcaggaacgtgtaact

SEQ ID NO: 283040 - DNA, 25 bp, Homo sapien
tccctccactctgcacgctcatagt

SEQ ID NO: 283041 - DNA, 25 bp, Homo sapien
cgctcatagtcagaggagatcagga

SEQ ID NO: 283042 - DNA, 25 bp, Homo sapien
agtttcacacacgagttggtcagca

SEQ ID NO: 283043 - DNA, 25 bp, Homo sapien
tattgatggtcagcggaatgctgtg

SEQ ID NO: 283044 - DNA, 25 bp, Homo sapien
cttccttattgatggtcagcggaat

SEQ ID NO: 283045 - DNA, 25 bp, Homo sapien
gacagtctggagtttcacacacgag

SEQ ID NO: 283046 - DNA, 25 bp, Homo sapien
tgcaggtgccctgtacacggaaacg

SEQ ID NO: 283047 - DNA, 25 bp, Homo sapien
aaacagcttgaccaaaagtgccggc

SEQ ID NO: 283048 - DNA, 25 bp, Homo sapien
tgcttcaaaatcaaccatccggtgg

SEQ ID NO: 283049 - DNA, 25 bp, Homo sapien
ttgtgactaggaacagaagccgtgc

SEQ ID NO: 283050 - DNA, 25 bp, Homo sapien
taaatccagtggctgagtggacgat

SEQ ID NO: 283051 - DNA, 25 bp, Homo sapien
atccagtggctgagtggacgatgac

SEQ ID NO: 283052 - DNA, 25 bp, Homo sapien
tcagaaacccatagagccccggaga

SEQ ID NO: 283053 - DNA, 25 bp, Homo sapien
agaaacccatagagccccggagact

SEQ ID NO: 283054 - DNA, 25 bp, Homo sapien
aaaggtgtcccgtggtcatctgaac

SEQ ID NO: 283055 - DNA, 25 bp, Homo sapien
ccacagcggccagggtcaaaggtgt

SEQ ID NO: 283056 - DNA, 25 bp, Homo sapien
ccggcctcgagaaacttacacagtg

SEQ ID NO: 283057 - DNA, 25 bp, Homo sapien
gcaattactcgatccacctgcaggg

SEQ ID NO: 283058 - DNA, 25 bp, Homo sapien
tcacaaaatacccaaaggaatccac

SEQ ID NO: 283059 - DNA, 25 bp, Homo sapien
gtagacgcgcgtctttgctttattc

SEQ ID NO: 283060 - DNA, 25 bp, Homo sapien
tcgttccagtttggctcagctgtgt

SEQ ID NO: 283061 - DNA, 25 bp, Homo sapien
ctgtgtccctgtagacgcgcgtctt

SEQ ID NO: 283062 - DNA, 25 bp, Homo sapien
tgttgtctctgctgggtcgtggcac

SEQ ID NO: 283063 - DNA, 25 bp, Homo sapien
tggatcccctgtggctcttataccc

SEQ ID NO: 283064 - DNA, 25 bp, Homo sapien
tcgtggcactcttggtctctgcaaa

SEQ ID NO: 283065 - DNA, 25 bp, Homo sapien
tgcaaaggcttcttcgatggatccc

SEQ ID NO: 283066 - DNA, 25 bp, Homo sapien
caatcgccagggtacttgttaagat

SEQ ID NO: 283067 - DNA, 25 bp, Homo sapien
gaagtattccttgtaagcacccctg

SEQ ID NO: 283068 - DNA, 25 bp, Homo sapien
tccagtgtgaacaaacgggtcaatg

SEQ ID NO: 283069 - DNA, 25 bp, Homo sapien
cgatgcaggttcacttttatggcgg

SEQ ID NO: 283070 - DNA, 25 bp, Homo sapien
cccatgagtctgtccgtgctctcgc

SEQ ID NO: 283071 - DNA, 25 bp, Homo sapien
tgagtctgtccgtgctctcgccgtc

SEQ ID NO: 283072 - DNA, 25 bp, Homo sapien
gggatcttcgtcttgttgtaacact

SEQ ID NO: 283073 - DNA, 25 bp, Homo sapien
cttcgtcttgttgtaacacttttca

SEQ ID NO: 283074 - DNA, 25 bp, Homo sapien
ctataaggaaagcacgatcagggct

SEQ ID NO: 283075 - DNA, 25 bp, Homo sapien
cactccctctagaggcctcttgtga

SEQ ID NO: 283076 - DNA, 25 bp, Homo sapien
caacccactgatataatgcactata

SEQ ID NO: 283077 - DNA, 25 bp, Homo sapien
gggaagagagagctgtacccacaac

SEQ ID NO: 283078 - DNA, 25 bp, Homo sapien
gatctgaatgagaatgtgggatcca

SEQ ID NO: 283079 - DNA, 25 bp, Homo sapien
caaagatgacaggtgactcagggaa

SEQ ID NO: 283080 - DNA, 25 bp, Homo sapien
gaatgagaatgtgggatccatcagc

SEQ ID NO: 283081 - DNA, 25 bp, Homo sapien
cagcaaagatgacaggtgactcagg

SEQ ID NO: 283082 - DNA, 25 bp, Homo sapien
acatgcacagcgtggtggagaagcc

SEQ ID NO: 283083 - DNA, 25 bp, Homo sapien
atgaaggccccgaccaccactgggc

SEQ ID NO: 283084 - DNA, 25 bp, Homo sapien
acccctgggaacttcagcaccttca

SEQ ID NO: 283085 - DNA, 25 bp, Homo sapien
ccccgaccaccactgggcacatgca

SEQ ID NO: 283086 - DNA, 25 bp, Homo sapien
tccagatccaaccatgagggcagag

SEQ ID NO: 283087 - DNA, 25 bp, Homo sapien
agcatcccgggagtgtccagatcca

SEQ ID NO: 283088 - DNA, 25 bp, Homo sapien
agagaccctcccgtgaggtgaggca

SEQ ID NO: 283089 - DNA, 25 bp, Homo sapien
tcagaagttgcgtagagagaccctc

SEQ ID NO: 283090 - DNA, 25 bp, Homo sapien
gatcccaggaggaagtaagtcggag

SEQ ID NO: 283091 - DNA, 25 bp, Homo sapien
tggtggtgactatgccattggcgct

SEQ ID NO: 283092 - DNA, 25 bp, Homo sapien
ttggcgctctgcgacaccagcctgg

SEQ ID NO: 283093 - DNA, 25 bp, Homo sapien
gactatgccattggcgctctgcgac

SEQ ID NO: 283094 - DNA, 25 bp, Homo sapien
cttatctgtcgtttgtgaggaggcg

SEQ ID NO: 283095 - DNA, 25 bp, Homo sapien
gagtgacttatgctctcacgggtgg

SEQ ID NO: 283096 - DNA, 25 bp, Homo sapien
tagaaattgctgagccaggcacttg

SEQ ID NO: 283097 - DNA, 25 bp, Homo sapien
catgcagccttgacggttgagtgac

SEQ ID NO: 283098 - DNA, 25 bp, Homo sapien
ggctatgagtaaaccttccaaagga

SEQ ID NO: 283099 - DNA, 25 bp, Homo sapien
tcgtcaccagcctggatggtccagc

SEQ ID NO: 283100 - DNA, 25 bp, Homo sapien
gtctgcactataacctactcccggg

SEQ ID NO: 283101 - DNA, 25 bp, Homo sapien
gcttgttcacttagctccttgtaga

SEQ ID NO: 283102 - DNA, 25 bp, Homo sapien
ggtggatggtgactcttgcatgctt

SEQ ID NO: 283103 - DNA, 25 bp, Homo sapien
ggtgactcttgcatgcttggccttg

SEQ ID NO: 283104 - DNA, 25 bp, Homo sapien
gatggtgactcttgcatgcttggcc

SEQ ID NO: 283105 - DNA, 25 bp, Homo sapien
ggccagggtggatggtgactcttgc

SEQ ID NO: 283106 - DNA, 25 bp, Homo sapien
gagaagctgtccagacatcagcggc

SEQ ID NO: 283107 - DNA, 25 bp, Homo sapien
gaaagagaagctgtccagacatcag

SEQ ID NO: 283108 - DNA, 25 bp, Homo sapien
ggtgcttttcagcagaggccgcccg

SEQ ID NO: 283109 - DNA, 25 bp, Homo sapien
gtgcttttcagcagaggccgcccgg

SEQ ID NO: 283110 - DNA, 25 bp, Homo sapien
ggccctgaaggtcgtcagaggccac

SEQ ID NO: 283111 - DNA, 25 bp, Homo sapien
ggtgcgctgccagtctctgtcctgc

SEQ ID NO: 283112 - DNA, 25 bp, Homo sapien
cccattcatggcgatgacggtgcgc

SEQ ID NO: 283113 - DNA, 25 bp, Homo sapien
attcatggcgatgacggtgcgctgc

SEQ ID NO: 283114 - DNA, 25 bp, Homo sapien
ctgtcctgcagggcctgcgggtcca

SEQ ID NO: 283115 - DNA, 25 bp, Homo sapien
gatataggagcttgcaatgttgccc

SEQ ID NO: 283116 - DNA, 25 bp, Homo sapien
aatgaatgacgattcccgtgcatgg

SEQ ID NO: 283117 - DNA, 25 bp, Homo sapien
gatttgaaatgaacagaggccaccc

SEQ ID NO: 283118 - DNA, 25 bp, Homo sapien
ggtttctgcagaagcacctcctaaa

SEQ ID NO: 283119 - DNA, 25 bp, Homo sapien
ggtgaccacagcaatcttgactccg

SEQ ID NO: 283120 - DNA, 25 bp, Homo sapien
tcttgactccgaagacccctgtctg

SEQ ID NO: 283121 - DNA, 25 bp, Homo sapien
gaacttgaccgagagctttacttcg

SEQ ID NO: 283122 - DNA, 25 bp, Homo sapien
gtctgttttcgggacggcatcctct

SEQ ID NO: 283123 - DNA, 25 bp, Homo sapien
caagccaggtggcaaggacattcct

SEQ ID NO: 283124 - DNA, 25 bp, Homo sapien
gcagaaaaccctgcacttgggcagt

SEQ ID NO: 283125 - DNA, 25 bp, Homo sapien
tacggccattcaacaggaatctggg

SEQ ID NO: 283126 - DNA, 25 bp, Homo sapien
tctgggaccgtgataaattccaagc

SEQ ID NO: 283127 - DNA, 25 bp, Homo sapien
ctccacgcactggcgcacgatgtag

SEQ ID NO: 283128 - DNA, 25 bp, Homo sapien
ctcctccacgcactggcgcacgatg

SEQ ID NO: 283129 - DNA, 25 bp, Homo sapien
cacgcactggcgcacgatgtagggc

SEQ ID NO: 283130 - DNA, 25 bp, Homo sapien
cgcactggcgcacgatgtagggcac

SEQ ID NO: 283131 - DNA, 25 bp, Homo sapien
tccgtggccacaccggacacgcggt

SEQ ID NO: 283132 - DNA, 25 bp, Homo sapien
gatgtccgtggccacaccggacacg

SEQ ID NO: 283133 - DNA, 25 bp, Homo sapien
gtggccacaccggacacgcggtaga

SEQ ID NO: 283134 - DNA, 25 bp, Homo sapien
tgtccgtggccacaccggacacgcg

SEQ ID NO: 283135 - DNA, 25 bp, Homo sapien
ccatggagcactctgagatctcatc

SEQ ID NO: 283136 - DNA, 25 bp, Homo sapien
catggagcactctgagatctcatcg

SEQ ID NO: 283137 - DNA, 25 bp, Homo sapien
tgtgtgccccaaagaagggtctgca

SEQ ID NO: 283138 - DNA, 25 bp, Homo sapien
gttgaagatgctgggagggaccctc

SEQ ID NO: 283139 - DNA, 25 bp, Homo sapien
catttgtgacagttccaggtccttc

SEQ ID NO: 283140 - DNA, 25 bp, Homo sapien
aggtccttcatagcctgtgagggtt

SEQ ID NO: 283141 - DNA, 25 bp, Homo sapien
cggaagtacagcttcagcgtgcctg

SEQ ID NO: 283142 - DNA, 25 bp, Homo sapien
cgtgcctgcgatggcgttcacgtcc

SEQ ID NO: 283143 - DNA, 25 bp, Homo sapien
ttggggtagaactcgtcagtgaaga

SEQ ID NO: 283144 - DNA, 25 bp, Homo sapien
catcatcaccgacacgtccttgtta

SEQ ID NO: 283145 - DNA, 25 bp, Homo sapien
gaggagacgtctcccatgaggccaa

SEQ ID NO: 283146 - DNA, 25 bp, Homo sapien
ccctaagggtgatgcagaggccaca

SEQ ID NO: 283147 - DNA, 25 bp, Homo sapien
gaggacagcagactttaggacccca

SEQ ID NO: 283148 - DNA, 25 bp, Homo sapien
gttgggttaaaatgccgaccatggc

SEQ ID NO: 283149 - DNA, 25 bp, Homo sapien
ggtgagcaggttggcctccggcagg

SEQ ID NO: 283150 - DNA, 25 bp, Homo sapien
gagcaggttggcctccggcagggac

SEQ ID NO: 283151 - DNA, 25 bp, Homo sapien
tgagcaggttggcctccggcaggga

SEQ ID NO: 283152 - DNA, 25 bp, Homo sapien
gtgagcaggttggcctccggcaggg

SEQ ID NO: 283153 - DNA, 25 bp, Homo sapien
gcagtgagtgactgcagacaagggt

SEQ ID NO: 283154 - DNA, 25 bp, Homo sapien
tcaggagaaaaggtcctcggtgttg

SEQ ID NO: 283155 - DNA, 25 bp, Homo sapien
cctacttgatgtgactcggagggaa

SEQ ID NO: 283156 - DNA, 25 bp, Homo sapien
tggcagtggcactagtcgccaaagg

SEQ ID NO: 283157 - DNA, 25 bp, Homo sapien
ctgtagaggaccaaagcagcgggtg

SEQ ID NO: 283158 - DNA, 25 bp, Homo sapien
ggccaaagaccgtggcgaggttgtg

SEQ ID NO: 283159 - DNA, 25 bp, Homo sapien
ccaaagaccgtggcgaggttgtgca

SEQ ID NO: 283160 - DNA, 25 bp, Homo sapien
cagcgtggggccaaagaccgtggcg

SEQ ID NO: 283161 - DNA, 25 bp, Homo sapien
cgtggggccaaagaccgtggcgagg

SEQ ID NO: 283162 - DNA, 25 bp, Homo sapien
gggacatgacctccaaggaccagct

SEQ ID NO: 283163 - DNA, 25 bp, Homo sapien
ctgtcagtcatggtgataggctggc

SEQ ID NO: 283164 - DNA, 25 bp, Homo sapien
cagctgtcagtcatggtgataggct

SEQ ID NO: 283165 - DNA, 25 bp, Homo sapien
ctgggacatgacctccaaggaccag

SEQ ID NO: 283166 - DNA, 25 bp, Homo sapien
gaggtagttttaagcttccagcaaa

SEQ ID NO: 283167 - DNA, 25 bp, Homo sapien
acacctgggattggttatcctgcct

SEQ ID NO: 283168 - DNA, 25 bp, Homo sapien
cctctgtcaggtcagggttgcatgg

SEQ ID NO: 283169 - DNA, 25 bp, Homo sapien
tctctgtgaatgttggccacaccac

SEQ ID NO: 283170 - DNA, 25 bp, Homo sapien
tgcaggaagtacagcagcacctgga

SEQ ID NO: 283171 - DNA, 25 bp, Homo sapien
ttagacttcggtggagaacaggatg

SEQ ID NO: 283172 - DNA, 25 bp, Homo sapien
ctgcaggaagtacagcagcacctgg

SEQ ID NO: 283173 - DNA, 25 bp, Homo sapien
acttcggtggagaacaggatgctct

SEQ ID NO: 283174 - DNA, 25 bp, Homo sapien
ggtggcccaaggacacctcaggaag

SEQ ID NO: 283175 - DNA, 25 bp, Homo sapien
ctcaggaaggttcccgctctacgga

SEQ ID NO: 283176 - DNA, 25 bp, Homo sapien
gttcccgctctacggatggcccgat

SEQ ID NO: 283177 - DNA, 25 bp, Homo sapien
cttggcagatggcccaacacttggg

SEQ ID NO: 283178 - DNA, 25 bp, Homo sapien
aagtccaggcctgtggaagccaaac

SEQ ID NO: 283179 - DNA, 25 bp, Homo sapien
ggtcgctctccctggagaacgaacc

SEQ ID NO: 283180 - DNA, 25 bp, Homo sapien
ggacgaggtcgctctccctggagaa

SEQ ID NO: 283181 - DNA, 25 bp, Homo sapien
cgtgggccggaagggcggtcaggat

SEQ ID NO: 283182 - DNA, 25 bp, Homo sapien
gcccaccgggcccagataggtacag

SEQ ID NO: 283183 - DNA, 25 bp, Homo sapien
cgggcccagataggtacagagagca

SEQ ID NO: 283184 - DNA, 25 bp, Homo sapien
acacagacgcagacagaaagccttc

SEQ ID NO: 283185 - DNA, 25 bp, Homo sapien
cagacgcagacagaaagccttcaag

SEQ ID NO: 283186 - DNA, 25 bp, Homo sapien
gctaagacaccagccacttaccaag

SEQ ID NO: 283187 - DNA, 25 bp, Homo sapien
tcctggagaacgctgcgttccccag

SEQ ID NO: 283188 - DNA, 25 bp, Homo sapien
gtaagacgtagctgtagacccaaag

SEQ ID NO: 283189 - DNA, 25 bp, Homo sapien
agtctggaagccacgccttgtggga

SEQ ID NO: 283190 - DNA, 25 bp, Homo sapien
gttggctaccaacgtgcacctgtga

SEQ ID NO: 283191 - DNA, 25 bp, Homo sapien
tgacactcacgttatttggttggct

SEQ ID NO: 283192 - DNA, 25 bp, Homo sapien
gagcagtttgcataataccacacac

SEQ ID NO: 283193 - DNA, 25 bp, Homo sapien
tgtcaagtcagttatagagaaccac

SEQ ID NO: 283194 - DNA, 25 bp, Homo sapien
gcacagggtgccagacaagtctgcg

SEQ ID NO: 283195 - DNA, 25 bp, Homo sapien
gcaggaggactagggaagccttcca

SEQ ID NO: 283196 - DNA, 25 bp, Homo sapien
gacatagtgtgccaaatcccaaatg

SEQ ID NO: 283197 - DNA, 25 bp, Homo sapien
aggccgcagacgagacatagtgtgc

SEQ ID NO: 283198 - DNA, 25 bp, Homo sapien
ggcttagtcgggatcttccccaaga

SEQ ID NO: 283199 - DNA, 25 bp, Homo sapien
gattgttctggaataaagtagcccc

SEQ ID NO: 283200 - DNA, 25 bp, Homo sapien
tagccccatcggactgcctcaggaa

SEQ ID NO: 283201 - DNA, 25 bp, Homo sapien
tggaaaatggcttagtcgggatctt

SEQ ID NO: 283202 - DNA, 25 bp, Homo sapien
tattagcaatgaataactggaagct

SEQ ID NO: 283203 - DNA, 25 bp, Homo sapien
tgaccacatcccttcaaaaaactgg

SEQ ID NO: 283204 - DNA, 25 bp, Homo sapien
caaattacattaaggtctcaggata

SEQ ID NO: 283205 - DNA, 25 bp, Homo sapien
caatggaatccacaaaaaagctttg

SEQ ID NO: 283206 - DNA, 25 bp, Homo sapien
caatgggaggcaccgtcttgatgcg

SEQ ID NO: 283207 - DNA, 25 bp, Homo sapien
ccaatacagattgagggaccaggag

SEQ ID NO: 283208 - DNA, 25 bp, Homo sapien
ctcagagtagtgtaccaggaacctc

SEQ ID NO: 283209 - DNA, 25 bp, Homo sapien
gacatgcttattgtctgcctggcac

SEQ ID NO: 283210 - DNA, 25 bp, Homo sapien
aaccttcgccacccgggctcaagtg

SEQ ID NO: 283211 - DNA, 25 bp, Homo sapien
gagccaccgctcctgacccttcttt

SEQ ID NO: 283212 - DNA, 25 bp, Homo sapien
caccgctcctgacccttctttctct

SEQ ID NO: 283213 - DNA, 25 bp, Homo sapien
gccaccgctcctgacccttctttct

SEQ ID NO: 283214 - DNA, 25 bp, Homo sapien
tggaagccggaactcccggcctcga

SEQ ID NO: 283215 - DNA, 25 bp, Homo sapien
caggctccgggatgtcgtgcaggac

SEQ ID NO: 283216 - DNA, 25 bp, Homo sapien
caagcgccctgccaagcggtgtcct

SEQ ID NO: 283217 - DNA, 25 bp, Homo sapien
tacgctaacaaaggccaagcgccct

SEQ ID NO: 283218 - DNA, 25 bp, Homo sapien
cctgacctcacacctgctggacatc

SEQ ID NO: 283219 - DNA, 25 bp, Homo sapien
ctgacctcacacctgctggacatca

SEQ ID NO: 283220 - DNA, 25 bp, Homo sapien
tgacctcacacctgctggacatcag

SEQ ID NO: 283221 - DNA, 25 bp, Homo sapien
gacctcacacctgctggacatcagg

SEQ ID NO: 283222 - DNA, 25 bp, Homo sapien
agggtctgaccccggagccagtgaa

SEQ ID NO: 283223 - DNA, 25 bp, Homo sapien
gtctgaccccggagccagtgaatcc

SEQ ID NO: 283224 - DNA, 25 bp, Homo sapien
ctgggagccccctggttcgaccctg

SEQ ID NO: 283225 - DNA, 25 bp, Homo sapien
tgggcagggtctgaccccggagcca

SEQ ID NO: 283226 - DNA, 25 bp, Homo sapien
tgccttgggcaaggccagggcccct

SEQ ID NO: 283227 - DNA, 25 bp, Homo sapien
ggctgccttgggcaaggccagggcc

SEQ ID NO: 283228 - DNA, 25 bp, Homo sapien
tgaagctgggacagggctgccttgg

SEQ ID NO: 283229 - DNA, 25 bp, Homo sapien
ctgaagctgggacagggctgccttg

SEQ ID NO: 283230 - DNA, 25 bp, Homo sapien
gctccaggaaggactgttctgcaga

SEQ ID NO: 283231 - DNA, 25 bp, Homo sapien
tctcctgctccaggaaggactgttc

SEQ ID NO: 283232 - DNA, 25 bp, Homo sapien
cctgctccaggaaggactgttctgc

SEQ ID NO: 283233 - DNA, 25 bp, Homo sapien
gttctgcagagcccagaggcccaca

SEQ ID NO: 283234 - DNA, 25 bp, Homo sapien
tgcagcttgagtgttcgggacacag

SEQ ID NO: 283235 - DNA, 25 bp, Homo sapien
cagagcagtgcagcttgagtgttcg

SEQ ID NO: 283236 - DNA, 25 bp, Homo sapien
cagtgcagcttgagtgttcgggaca

SEQ ID NO: 283237 - DNA, 25 bp, Homo sapien
ccagagcagtgcagcttgagtgttc

SEQ ID NO: 283238 - DNA, 25 bp, Homo sapien
gcagaggtgccctgttccccaaggg

SEQ ID NO: 283239 - DNA, 25 bp, Homo sapien
ggctgcgtgccagccgggtcggggg

SEQ ID NO: 283240 - DNA, 25 bp, Homo sapien
gctgcgtgccagccgggtcgggggg

SEQ ID NO: 283241 - DNA, 25 bp, Homo sapien
gctgcagaggtgccctgttccccaa

SEQ ID NO: 283242 - DNA, 25 bp, Homo sapien
agcatcagcagggtggccggtacct

SEQ ID NO: 283243 - DNA, 25 bp, Homo sapien
atcagcagggtggccggtacctccc

SEQ ID NO: 283244 - DNA, 25 bp, Homo sapien
gcatcagcagggtggccggtacctc

SEQ ID NO: 283245 - DNA, 25 bp, Homo sapien
gcagcatcagcagggtggccggtac

SEQ ID NO: 283246 - DNA, 25 bp, Homo sapien
tgctgcagctcgttgagggtggggc

SEQ ID NO: 283247 - DNA, 25 bp, Homo sapien
gctgcagctcgttgagggtggggcc

SEQ ID NO: 283248 - DNA, 25 bp, Homo sapien
ctgctgcagctcgttgagggtgggg

SEQ ID NO: 283249 - DNA, 25 bp, Homo sapien
tgcagctcgttgagggtggggccca

SEQ ID NO: 283250 - DNA, 25 bp, Homo sapien
ttcttcctctcaaagcacaggcgga

SEQ ID NO: 283251 - DNA, 25 bp, Homo sapien
ctctgtgatgaccatcttcttcctc

SEQ ID NO: 283252 - DNA, 25 bp, Homo sapien
tcttcctctcaaagcacaggcggat

SEQ ID NO: 283253 - DNA, 25 bp, Homo sapien
atcttcttcctctcaaagcacaggc

SEQ ID NO: 283254 - DNA, 25 bp, Homo sapien
agggccacgtgcatctcagccacgt

SEQ ID NO: 283255 - DNA, 25 bp, Homo sapien
tgttcagggccacgtgcatctcagc

SEQ ID NO: 283256 - DNA, 25 bp, Homo sapien
gccacgtgcatctcagccacgttgt

SEQ ID NO: 283257 - DNA, 25 bp, Homo sapien
caggagcccggtggcctggttgttc

SEQ ID NO: 283258 - DNA, 25 bp, Homo sapien
atctggtccagcacgccccagatgt

SEQ ID NO: 283259 - DNA, 25 bp, Homo sapien
cgccccagatgtccttcttgaggtt

SEQ ID NO: 283260 - DNA, 25 bp, Homo sapien
ctgagaatctccagctggatgtcct

SEQ ID NO: 283261 - DNA, 25 bp, Homo sapien
ccagctggatgtcctccatctggtc

SEQ ID NO: 283262 - DNA, 25 bp, Homo sapien
tgctcgccatctgcggctccttctt

SEQ ID NO: 283263 - DNA, 25 bp, Homo sapien
catgctcgccatctgcggctccttc

SEQ ID NO: 283264 - DNA, 25 bp, Homo sapien
atgctcgccatctgcggctccttct

SEQ ID NO: 283265 - DNA, 25 bp, Homo sapien
ccatgctcgccatctgcggctcctt

SEQ ID NO: 283266 - DNA, 25 bp, Homo sapien
tggagctttccaactttggtctccc

SEQ ID NO: 283267 - DNA, 25 bp, Homo sapien
ccttggagctttccaactttggtct

SEQ ID NO: 283268 - DNA, 25 bp, Homo sapien
ctgccaggcccttggagctttccaa

SEQ ID NO: 283269 - DNA, 25 bp, Homo sapien
caggcccttggagctttccaacttt

SEQ ID NO: 283270 - DNA, 25 bp, Homo sapien
aagggcctggggttcaccatgtaca

SEQ ID NO: 283271 - DNA, 25 bp, Homo sapien
tacacgtaggcgaccagcagggtgc

SEQ ID NO: 283272 - DNA, 25 bp, Homo sapien
catccacctcaaggcgcaggaaggg

SEQ ID NO: 283273 - DNA, 25 bp, Homo sapien
ttcaccatgtacacgtaggcgacca

SEQ ID NO: 283274 - DNA, 25 bp, Homo sapien
tgaccccgcttcacttgggagagca

SEQ ID NO: 283275 - DNA, 25 bp, Homo sapien
gagagcagaggataccttgtgcgtt

SEQ ID NO: 283276 - DNA, 25 bp, Homo sapien
ctacagggccccgtatttccaagcg

SEQ ID NO: 283277 - DNA, 25 bp, Homo sapien
cagaggataccttgtgcgttcagtg

SEQ ID NO: 283278 - DNA, 25 bp, Homo sapien
cagaagccgagagaccaagaagaaa

SEQ ID NO: 283279 - DNA, 25 bp, Homo sapien
cgggcaggtacaatcaggacgagct

SEQ ID NO: 283280 - DNA, 25 bp, Homo sapien
ctgagtaccggataggacctgggct

SEQ ID NO: 283281 - DNA, 25 bp, Homo sapien
ttctgccccagagacgactaacgag

SEQ ID NO: 283282 - DNA, 25 bp, Homo sapien
cggcgtcgccatcggctgcaaattg

SEQ ID NO: 283283 - DNA, 25 bp, Homo sapien
tagtacttggtaatatcaccaagct

SEQ ID NO: 283284 - DNA, 25 bp, Homo sapien
caccaagctgtgagtttatggcttt

SEQ ID NO: 283285 - DNA, 25 bp, Homo sapien
ctttggcagggctcaaaatttgatc

SEQ ID NO: 283286 - DNA, 25 bp, Homo sapien
gcagtgcagatggtctcggccgtca

SEQ ID NO: 283287 - DNA, 25 bp, Homo sapien
tgcagatggtctcggccgtcactct

SEQ ID NO: 283288 - DNA, 25 bp, Homo sapien
atggtctcggccgtcactctgctgt

SEQ ID NO: 283289 - DNA, 25 bp, Homo sapien
ctcgcagtgcagatggtctcggccg

SEQ ID NO: 283290 - DNA, 25 bp, Homo sapien
tcctgacctcctcagcgaagaggaa

SEQ ID NO: 283291 - DNA, 25 bp, Homo sapien
tcatgaaacagacgagaagtcattc

SEQ ID NO: 283292 - DNA, 25 bp, Homo sapien
ggcggcctgtcatctagaagcttct

SEQ ID NO: 283293 - DNA, 25 bp, Homo sapien
tctcgcccggctgcatctgatggct

SEQ ID NO: 283294 - DNA, 25 bp, Homo sapien
tggagagtggcctgggcacagaggc

SEQ ID NO: 283295 - DNA, 25 bp, Homo sapien
cagaggccggggctgtggcatcagc

SEQ ID NO: 283296 - DNA, 25 bp, Homo sapien
ccggggctgtggcatcagcagccat

SEQ ID NO: 283297 - DNA, 25 bp, Homo sapien
aggctggagagtggcctgggcacag

SEQ ID NO: 283298 - DNA, 25 bp, Homo sapien
gacacaaggacaagctacacaacag

SEQ ID NO: 283299 - DNA, 25 bp, Homo sapien
gctacacaacagggcgccagcgtct

SEQ ID NO: 283300 - DNA, 25 bp, Homo sapien
taaaatggataaatgggcctcgcca

SEQ ID NO: 283301 - DNA, 25 bp, Homo sapien
actcaaactgtatcatgaacttaca

SEQ ID NO: 283302 - DNA, 25 bp, Homo sapien
gtccgtggaacacgtgggccaggga

SEQ ID NO: 283303 - DNA, 25 bp, Homo sapien
agctctgccacgtgagcagtgctca

SEQ ID NO: 283304 - DNA, 25 bp, Homo sapien
tcttactaagcgctggtcccaccat

SEQ ID NO: 283305 - DNA, 25 bp, Homo sapien
tcgcggcgtccattgtggccactgc

SEQ ID NO: 283306 - DNA, 25 bp, Homo sapien
ctccggcattagcaggacctgctga

SEQ ID NO: 283307 - DNA, 25 bp, Homo sapien
gggaaacgtgaacctcaactgagcg

SEQ ID NO: 283308 - DNA, 25 bp, Homo sapien
cctcaaagagctgaacgcagagtcc

SEQ ID NO: 283309 - DNA, 25 bp, Homo sapien
caaacaccatgagctgctgggtcga

SEQ ID NO: 283310 - DNA, 25 bp, Homo sapien
tcctgtaactggagaacgggcaagg

SEQ ID NO: 283311 - DNA, 25 bp, Homo sapien
ctacgccacggtctggaggctgaag

SEQ ID NO: 283312 - DNA, 25 bp, Homo sapien
cgagggtgagcgagctgaggaaggc

SEQ ID NO: 283313 - DNA, 25 bp, Homo sapien
cacggtgtgcgagaactctgtctcc

SEQ ID NO: 283314 - DNA, 25 bp, Homo sapien
tgcatcttggaacccgagggcctgg

SEQ ID NO: 283315 - DNA, 25 bp, Homo sapien
gtaggtcccagcgtgtctgtcagtc

SEQ ID NO: 283316 - DNA, 25 bp, Homo sapien
gctggtggccgacgcccacacacca

SEQ ID NO: 283317 - DNA, 25 bp, Homo sapien
ccccagcaggaagcccgacgtaggt

SEQ ID NO: 283318 - DNA, 25 bp, Homo sapien
aagcccgacgtaggtcccagcgtgt

SEQ ID NO: 283319 - DNA, 25 bp, Homo sapien
tatggaatgtatttctatggccctg

SEQ ID NO: 283320 - DNA, 25 bp, Homo sapien
gaaatgcctgactcaccctaacgtt

SEQ ID NO: 283321 - DNA, 25 bp, Homo sapien
tgcactccctgagcggaaatgcctg

SEQ ID NO: 283322 - DNA, 25 bp, Homo sapien
ctcgatgcacccttatctgtgagga

SEQ ID NO: 283323 - DNA, 25 bp, Homo sapien
tgtgtacagccacactaacatagtt

SEQ ID NO: 283324 - DNA, 25 bp, Homo sapien
ttcctctccacaagtgcctaatggg

SEQ ID NO: 283325 - DNA, 25 bp, Homo sapien
ggattgtaggtcaaagtgttactgc

SEQ ID NO: 283326 - DNA, 25 bp, Homo sapien
gcaaccaatggtcttgtgcaccagt

SEQ ID NO: 283327 - DNA, 25 bp, Homo sapien
gctttgttacttctccctagtattg

SEQ ID NO: 283328 - DNA, 25 bp, Homo sapien
caactaagcttatagattgctctca

SEQ ID NO: 283329 - DNA, 25 bp, Homo sapien
tctggaaaacaactgttggctttgt

SEQ ID NO: 283330 - DNA, 25 bp, Homo sapien
gagtttccagcgtaaacaactaagc

SEQ ID NO: 283331 - DNA, 25 bp, Homo sapien
tagaatagaaaattgggacaaacca

SEQ ID NO: 283332 - DNA, 25 bp, Homo sapien
tccatcacaaaggaaatagtaatac

SEQ ID NO: 283333 - DNA, 25 bp, Homo sapien
agtaatacagcaaatattatgcagg

SEQ ID NO: 283334 - DNA, 25 bp, Homo sapien
caaaaaggagctcaacttctgactt

SEQ ID NO: 283335 - DNA, 25 bp, Homo sapien
ttcagagccgatttgatcagctgcc

SEQ ID NO: 283336 - DNA, 25 bp, Homo sapien
ccagatctcccaattgtcagctgca

SEQ ID NO: 283337 - DNA, 25 bp, Homo sapien
ccaggatcttcagagccgatttgat

SEQ ID NO: 283338 - DNA, 25 bp, Homo sapien
caattgtcagctgcaacgttaacct

SEQ ID NO: 283339 - DNA, 25 bp, Homo sapien
ggaatgactaagaatccgcagccgc

SEQ ID NO: 283340 - DNA, 25 bp, Homo sapien
cccataatagtgtgtgagaccagaa

SEQ ID NO: 283341 - DNA, 25 bp, Homo sapien
caaccaagatggtgcatggtagcag

SEQ ID NO: 283342 - DNA, 25 bp, Homo sapien
cacagcatggtgagttttttcacgg

SEQ ID NO: 283343 - DNA, 25 bp, Homo sapien
catatgctcagtgcgtgcttggagg

SEQ ID NO: 283344 - DNA, 25 bp, Homo sapien
aagagcacaagagagctgggcttcc

SEQ ID NO: 283345 - DNA, 25 bp, Homo sapien
aatccgctgtcttgtgatgcctgca

SEQ ID NO: 283346 - DNA, 25 bp, Homo sapien
gatgcctggtggacggccgaccagg

SEQ ID NO: 283347 - DNA, 25 bp, Homo sapien
gccgagcgaggcgggatccggagcc

SEQ ID NO: 283348 - DNA, 25 bp, Homo sapien
tgccgagcgaggcgggatccggagc

SEQ ID NO: 283349 - DNA, 25 bp, Homo sapien
ccgagcgaggcgggatccggagccg

SEQ ID NO: 283350 - DNA, 25 bp, Homo sapien
agtggcgccgcgctgtctgccgcgg

SEQ ID NO: 283351 - DNA, 25 bp, Homo sapien
gggcgccgtgggagtgccctggcgc

SEQ ID NO: 283352 - DNA, 25 bp, Homo sapien
cctaggcctattcccgccgcctgct

SEQ ID NO: 283353 - DNA, 25 bp, Homo sapien
ggcgccccgacctgcgcattcgcag

SEQ ID NO: 283354 - DNA, 25 bp, Homo sapien
ttctggcaggaatccccagcgtgcc

SEQ ID NO: 283355 - DNA, 25 bp, Homo sapien
caagagaccgccttgatggggccca

SEQ ID NO: 283356 - DNA, 25 bp, Homo sapien
gaattctggcaggaatccccagcgt

SEQ ID NO: 283357 - DNA, 25 bp, Homo sapien
tcaggggcaagagaccgccttgatg

SEQ ID NO: 283358 - DNA, 25 bp, Homo sapien
atgaccacactcgagagtcccttca

SEQ ID NO: 283359 - DNA, 25 bp, Homo sapien
tcaatgaccacactcgagagtccct

SEQ ID NO: 283360 - DNA, 25 bp, Homo sapien
caatgaccacactcgagagtccctt

SEQ ID NO: 283361 - DNA, 25 bp, Homo sapien
gaccacactcgagagtcccttcacc

SEQ ID NO: 283362 - DNA, 25 bp, Homo sapien
cgaacccaagtccagcgcctaaaat

SEQ ID NO: 283363 - DNA, 25 bp, Homo sapien
taaatagttaggcagacagtaggag

SEQ ID NO: 283364 - DNA, 25 bp, Homo sapien
ttacaaagacgaacacacatacgcc

SEQ ID NO: 283365 - DNA, 25 bp, Homo sapien
gctgtggtgaaaacgcctccttctc

SEQ ID NO: 283366 - DNA, 25 bp, Homo sapien
aggacatgcaggagacggaggcctt

SEQ ID NO: 283367 - DNA, 25 bp, Homo sapien
aaggacatgcaggagacggaggcct

SEQ ID NO: 283368 - DNA, 25 bp, Homo sapien
ggacatgcaggagacggaggccttc

SEQ ID NO: 283369 - DNA, 25 bp, Homo sapien
tcctcaatgaccacactgtagagta

SEQ ID NO: 283370 - DNA, 25 bp, Homo sapien
ctcaatgaccacactgtagagtacc

SEQ ID NO: 283371 - DNA, 25 bp, Homo sapien
tacttgggactctctcgtcaacttg

SEQ ID NO: 283372 - DNA, 25 bp, Homo sapien
gctgaccgtggacgtacttgggact

SEQ ID NO: 283373 - DNA, 25 bp, Homo sapien
gatggccccaatgattctggacctc

SEQ ID NO: 283374 - DNA, 25 bp, Homo sapien
gatgattcagggtatattatctcct

SEQ ID NO: 283375 - DNA, 25 bp, Homo sapien
aatgtgaactttccgttccttgctg

SEQ ID NO: 283376 - DNA, 25 bp, Homo sapien
gatcgtggtttaggctctgatggcc

SEQ ID NO: 283377 - DNA, 25 bp, Homo sapien
atttagacttgatctccctcaaagg

SEQ ID NO: 283378 - DNA, 25 bp, Homo sapien
agtacctatgccgatgacagaaaca

SEQ ID NO: 283379 - DNA, 25 bp, Homo sapien
ctgaggcagtacctatgccgatgac

SEQ ID NO: 283380 - DNA, 25 bp, Homo sapien
aatttagacttgatctccctcaaag

SEQ ID NO: 283381 - DNA, 25 bp, Homo sapien
tgttattgtcagtcccgcgttggca

SEQ ID NO: 283382 - DNA, 25 bp, Homo sapien
gaattacggcattatacgccatctg

SEQ ID NO: 283383 - DNA, 25 bp, Homo sapien
gttctttattatttaggctggtgtg

SEQ ID NO: 283384 - DNA, 25 bp, Homo sapien
cagagcttgagctgacaaatagttg

SEQ ID NO: 283385 - DNA, 25 bp, Homo sapien
agggctctctcaatatcctttgtag

SEQ ID NO: 283386 - DNA, 25 bp, Homo sapien
gagtggccaggtgtagaatctgaca

SEQ ID NO: 283387 - DNA, 25 bp, Homo sapien
cataatgtatttgattagggctctc

SEQ ID NO: 283388 - DNA, 25 bp, Homo sapien
tgttaacactgtaatgacggcaacc

SEQ ID NO: 283389 - DNA, 25 bp, Homo sapien
tctttgcatctccagtgagttcatt

SEQ ID NO: 283390 - DNA, 25 bp, Homo sapien
ctggcgagtcgattggggtgtctcc

SEQ ID NO: 283391 - DNA, 25 bp, Homo sapien
gggtgtctccatctccacacttttc

SEQ ID NO: 283392 - DNA, 25 bp, Homo sapien
tgcatctccagtgagttcattgtag

SEQ ID NO: 283393 - DNA, 25 bp, Homo sapien
tatgaaatttacaatagtgaaactt

SEQ ID NO: 283394 - DNA, 25 bp, Homo sapien
cttctgatgcttttaacccaagtga

SEQ ID NO: 283395 - DNA, 25 bp, Homo sapien
gctttcacgattgtctccgttcctg

SEQ ID NO: 283396 - DNA, 25 bp, Homo sapien
tgtgaggctatcagcagctttcacg

SEQ ID NO: 283397 - DNA, 25 bp, Homo sapien
aaccaccatcgtcactatggcccat

SEQ ID NO: 283398 - DNA, 25 bp, Homo sapien
cttacagcacatgtttccgtgagca

SEQ ID NO: 283399 - DNA, 25 bp, Homo sapien
gatcccttaaaccttacagcacatg

SEQ ID NO: 283400 - DNA, 25 bp, Homo sapien
ccttacagcacatgtttccgtgagc

SEQ ID NO: 283401 - DNA, 25 bp, Homo sapien
tcagagcaaagaaccggcctgacct

SEQ ID NO: 283402 - DNA, 25 bp, Homo sapien
ggttcagagcaaagaaccggcctga

SEQ ID NO: 283403 - DNA, 25 bp, Homo sapien
gcttctgaagaaacaggaccagagc

SEQ ID NO: 283404 - DNA, 25 bp, Homo sapien
tgaagaaacaggaccagagcaaaat

SEQ ID NO: 283405 - DNA, 25 bp, Homo sapien
tccaagccaccctgttgggagcatt

SEQ ID NO: 283406 - DNA, 25 bp, Homo sapien
tgggagcatttccttgtaggcacct

SEQ ID NO: 283407 - DNA, 25 bp, Homo sapien
gaatgtcacttccacaagggtaggg

SEQ ID NO: 283408 - DNA, 25 bp, Homo sapien
cgtgtccatggcctcagtagaatgt

SEQ ID NO: 283409 - DNA, 25 bp, Homo sapien
catgggggagcctctgtcattctgg

SEQ ID NO: 283410 - DNA, 25 bp, Homo sapien
tctgtcattctggcaggtggagggt

SEQ ID NO: 283411 - DNA, 25 bp, Homo sapien
ctgtcattctggcaggtggagggtg

SEQ ID NO: 283412 - DNA, 25 bp, Homo sapien
ctccatgggggagcctctgtcattc

SEQ ID NO: 283413 - DNA, 25 bp, Homo sapien
ctcatttggttgctagcagtagcct

SEQ ID NO: 283414 - DNA, 25 bp, Homo sapien
tctgagtcactactctcaacccaga

SEQ ID NO: 283415 - DNA, 25 bp, Homo sapien
gttgctagcagtagccttcattttc

SEQ ID NO: 283416 - DNA, 25 bp, Homo sapien
tcactactctcaacccagacgtggg

SEQ ID NO: 283417 - DNA, 25 bp, Homo sapien
gcaacaacaagtacgcggccagcag

SEQ ID NO: 283418 - DNA, 25 bp, Homo sapien
gccagcagctacctgagcctgacgc

SEQ ID NO: 283419 - DNA, 25 bp, Homo sapien
caaacagagcaacaacaagtacgcg

SEQ ID NO: 283420 - DNA, 25 bp, Homo sapien
acctgagcctgacgcccgagcagtg

SEQ ID NO: 283421 - DNA, 25 bp, Homo sapien
aatgacttttatccgggaatcttga

SEQ ID NO: 283422 - DNA, 25 bp, Homo sapien
catgaatgacttttatccgggaatc

SEQ ID NO: 283423 - DNA, 25 bp, Homo sapien
tttatccgggaatcttgacggtgac

SEQ ID NO: 283424 - DNA, 25 bp, Homo sapien
cttttatccgggaatcttgacggtg

SEQ ID NO: 283425 - DNA, 25 bp, Homo sapien
caaagcacagggtcgcgagatgttg

SEQ ID NO: 283426 - DNA, 25 bp, Homo sapien
cagaagccatgacatgatgcactca

SEQ ID NO: 283427 - DNA, 25 bp, Homo sapien
gaacctgagactcttgggtgacctg

SEQ ID NO: 283428 - DNA, 25 bp, Homo sapien
ttgtgtgtatgttactgctttttca

SEQ ID NO: 283429 - DNA, 25 bp, Homo sapien
gaaagggacctctgtgcaaacctaa

SEQ ID NO: 283430 - DNA, 25 bp, Homo sapien
cagagtctcaaagggaggtgccacc

SEQ ID NO: 283431 - DNA, 25 bp, Homo sapien
ggcaggccaccaacacggaatttct

SEQ ID NO: 283432 - DNA, 25 bp, Homo sapien
catgagtgtagcagcttcaggagca

SEQ ID NO: 283433 - DNA, 25 bp, Homo sapien
catcgatggcgatctgggtcacctt

SEQ ID NO: 283434 - DNA, 25 bp, Homo sapien
gccctcataagccttgctgtcagag

SEQ ID NO: 283435 - DNA, 25 bp, Homo sapien
actcaatgacatcgatggcgatctg

SEQ ID NO: 283436 - DNA, 25 bp, Homo sapien
ttctataaggcctcgccctcataag

SEQ ID NO: 283437 - DNA, 25 bp, Homo sapien
tcaccaattatctgatcggcaggca

SEQ ID NO: 283438 - DNA, 25 bp, Homo sapien
tagccctgcagcttagcggtccagt

SEQ ID NO: 283439 - DNA, 25 bp, Homo sapien
cagtagcacatggacagaacaggga

SEQ ID NO: 283440 - DNA, 25 bp, Homo sapien
tcttggaagatgtgaaaagcatcct

SEQ ID NO: 283441 - DNA, 25 bp, Homo sapien
gaactgttaggtttcatggcagcac

SEQ ID NO: 283442 - DNA, 25 bp, Homo sapien
ggagaaatggatcctcaccttatga

SEQ ID NO: 283443 - DNA, 25 bp, Homo sapien
cagaattcttctgcggtgtgccaga

SEQ ID NO: 283444 - DNA, 25 bp, Homo sapien
aagcagttactcactcctggagaca

SEQ ID NO: 283445 - DNA, 25 bp, Homo sapien
tgcatggttcctgctcatcagggtg

SEQ ID NO: 283446 - DNA, 25 bp, Homo sapien
ggccatctttggaggaagcatcatt

SEQ ID NO: 283447 - DNA, 25 bp, Homo sapien
gccctaggacctggagagtttctca

SEQ ID NO: 283448 - DNA, 25 bp, Homo sapien
tacccagggcctcactattgatggg

SEQ ID NO: 283449 - DNA, 25 bp, Homo sapien
gtcacggacctcaggttgtggatgt

SEQ ID NO: 283450 - DNA, 25 bp, Homo sapien
ggcagacctgcttcacgctctcggg

SEQ ID NO: 283451 - DNA, 25 bp, Homo sapien
acctccttttcgcacaggtggtcac

SEQ ID NO: 283452 - DNA, 25 bp, Homo sapien
cacaggtggtcacggacctcaggtt

SEQ ID NO: 283453 - DNA, 25 bp, Homo sapien
cagtgacctcctagaaggccagtga

SEQ ID NO: 283454 - DNA, 25 bp, Homo sapien
gagttgcagggcacttaagcttggt

SEQ ID NO: 283455 - DNA, 25 bp, Homo sapien
cagagccaagctcagaggccgtggt

SEQ ID NO: 283456 - DNA, 25 bp, Homo sapien
gcttggtggagaccgtcagtgcctc

SEQ ID NO: 283457 - DNA, 25 bp, Homo sapien
gcacccagccctacaaaatttttca

SEQ ID NO: 283458 - DNA, 25 bp, Homo sapien
tggcacatgcttgtagtccgaacta

SEQ ID NO: 283459 - DNA, 25 bp, Homo sapien
aatttttcaaaaatgtataggtgtg

SEQ ID NO: 283460 - DNA, 25 bp, Homo sapien
tttcaaaaatgtataggtgtggtgg

SEQ ID NO: 283461 - DNA, 25 bp, Homo sapien
tgttgtgagttgtgtttttgaggta

SEQ ID NO: 283462 - DNA, 25 bp, Homo sapien
cagttgcactgtcaaggctcactgt

SEQ ID NO: 283463 - DNA, 25 bp, Homo sapien
gagtgcagttgcactgtcaaggctc

SEQ ID NO: 283464 - DNA, 25 bp, Homo sapien
tgatggcctttgtgtaatgttgtga

SEQ ID NO: 283465 - DNA, 25 bp, Homo sapien
ggacctgggtatagacctgccctgc

SEQ ID NO: 283466 - DNA, 25 bp, Homo sapien
gcacagacacataccatagggagga

SEQ ID NO: 283467 - DNA, 25 bp, Homo sapien
gcatcaggtcccatgccatcgtggg

SEQ ID NO: 283468 - DNA, 25 bp, Homo sapien
atagggaggactgccaacagaccca

SEQ ID NO: 283469 - DNA, 25 bp, Homo sapien
gacagatggttgcagccccatggaa

SEQ ID NO: 283470 - DNA, 25 bp, Homo sapien
tgagaggcacaattaacccctgtgg

SEQ ID NO: 283471 - DNA, 25 bp, Homo sapien
tcagttcagattttgcaggcacgag

SEQ ID NO: 283472 - DNA, 25 bp, Homo sapien
taactgtacggtttcaatgcacgca

SEQ ID NO: 283473 - DNA, 25 bp, Homo sapien
tcggcagcatgtcgggatacagcag

SEQ ID NO: 283474 - DNA, 25 bp, Homo sapien
cattttggcctcttgtgcgacgagg

SEQ ID NO: 283475 - DNA, 25 bp, Homo sapien
agggtgagggttgaaccaatgtcta

SEQ ID NO: 283476 - DNA, 25 bp, Homo sapien
ctatattctcgggaaagactctcat

SEQ ID NO: 283477 - DNA, 25 bp, Homo sapien
tttggcacataggagcatctgcata

SEQ ID NO: 283478 - DNA, 25 bp, Homo sapien
cacagctgaggcctagcctggatgg

SEQ ID NO: 283479 - DNA, 25 bp, Homo sapien
gggctgtgaacctgacatacctacc

SEQ ID NO: 283480 - DNA, 25 bp, Homo sapien
ggtctccggcagatgacagcttgag

SEQ ID NO: 283481 - DNA, 25 bp, Homo sapien
ggtgcacgtgccctttgaagaatat

SEQ ID NO: 283482 - DNA, 25 bp, Homo sapien
tggtgtggtgcacgtgccctttgaa

SEQ ID NO: 283483 - DNA, 25 bp, Homo sapien
ttggtggtgtggtgcacgtgccctt

SEQ ID NO: 283484 - DNA, 25 bp, Homo sapien
tcttgtttggtctgttgtgtggagc

SEQ ID NO: 283485 - DNA, 25 bp, Homo sapien
ttggttttcacaagtcctgtctgtg

SEQ ID NO: 283486 - DNA, 25 bp, Homo sapien
aagtcctgtctgtggagacccttct

SEQ ID NO: 283487 - DNA, 25 bp, Homo sapien
cctgtctgtggagacccttctgtgc

SEQ ID NO: 283488 - DNA, 25 bp, Homo sapien
tcctgtctgtggagacccttctgtg

SEQ ID NO: 283489 - DNA, 25 bp, Homo sapien
ctaaccagtagttccaaaaagtgtg

SEQ ID NO: 283490 - DNA, 25 bp, Homo sapien
cagtgccgggctggaaagttagcat

SEQ ID NO: 283491 - DNA, 25 bp, Homo sapien
tagcatcctgcagatctcattttca

SEQ ID NO: 283492 - DNA, 25 bp, Homo sapien
tccaaaaagtgtggcacagtgataa

SEQ ID NO: 283493 - DNA, 25 bp, Homo sapien
tataagaagtatgagccccagagct

SEQ ID NO: 283494 - DNA, 25 bp, Homo sapien
catcttcaagacagagccagtaggg

SEQ ID NO: 283495 - DNA, 25 bp, Homo sapien
tgaatgagtgaaccccaacctttgg

SEQ ID NO: 283496 - DNA, 25 bp, Homo sapien
ttccaaacagtgagtgatacaggcc

SEQ ID NO: 283497 - DNA, 25 bp, Homo sapien
agctccagatctgggtcccctggtc

SEQ ID NO: 283498 - DNA, 25 bp, Homo sapien
caaagctccagatctgggtcccctg

SEQ ID NO: 283499 - DNA, 25 bp, Homo sapien
aagctccagatctgggtcccctggt

SEQ ID NO: 283500 - DNA, 25 bp, Homo sapien
aaagctccagatctgggtcccctgg

SEQ ID NO: 283501 - DNA, 25 bp, Homo sapien
gggctgtacagaccctcgtgcgccc

SEQ ID NO: 283502 - DNA, 25 bp, Homo sapien
gctgcaggcagatttgtgagcagct

SEQ ID NO: 283503 - DNA, 25 bp, Homo sapien
tacagaccctcgtgcgccctggcgt

SEQ ID NO: 283504 - DNA, 25 bp, Homo sapien
ctgcaggcagatttgtgagcagctt

SEQ ID NO: 283505 - DNA, 25 bp, Homo sapien
ctggtgatggagtagacagctgagt

SEQ ID NO: 283506 - DNA, 25 bp, Homo sapien
ccgttgcgggggctgatagtaaact

SEQ ID NO: 283507 - DNA, 25 bp, Homo sapien
cttggcctcgttgggctccggaagc

SEQ ID NO: 283508 - DNA, 25 bp, Homo sapien
caactggcctaggacaatttcctga

SEQ ID NO: 283509 - DNA, 25 bp, Homo sapien
tgaaggccagctttatccggaaaga

SEQ ID NO: 283510 - DNA, 25 bp, Homo sapien
tagatatcctggtggacccagggct

SEQ ID NO: 283511 - DNA, 25 bp, Homo sapien
ggcattgttaatgcgtgttgcccag

SEQ ID NO: 283512 - DNA, 25 bp, Homo sapien
ccctggtgctgaatgtagatatcct

SEQ ID NO: 283513 - DNA, 25 bp, Homo sapien
tctttacagacccacgacagggaca

SEQ ID NO: 283514 - DNA, 25 bp, Homo sapien
cagatgcagcccaagcattcgtgga

SEQ ID NO: 283515 - DNA, 25 bp, Homo sapien
cctgttgaagtgtgcgatggtggca

SEQ ID NO: 283516 - DNA, 25 bp, Homo sapien
cgatggtggcacgaactgtgggtgc

SEQ ID NO: 283517 - DNA, 25 bp, Homo sapien
attccccttcagatgtccttggccc

SEQ ID NO: 283518 - DNA, 25 bp, Homo sapien
ctattgggttgctgcacagagcaga

SEQ ID NO: 283519 - DNA, 25 bp, Homo sapien
agagcagagacgatgacgtgcaccg

SEQ ID NO: 283520 - DNA, 25 bp, Homo sapien
tgacgtgcaccgaggagaagttgtt

SEQ ID NO: 283521 - DNA, 25 bp, Homo sapien
gcccacgtcttgtgtagctgaccta

SEQ ID NO: 283522 - DNA, 25 bp, Homo sapien
tgatcagtaggtccctcttcactgc

SEQ ID NO: 283523 - DNA, 25 bp, Homo sapien
cttgatcagtaggtccctcttcact

SEQ ID NO: 283524 - DNA, 25 bp, Homo sapien
tcagtaggtccctcttcactgcagt

SEQ ID NO: 283525 - DNA, 25 bp, Homo sapien
atcagtaggtccctcttcactgcag

SEQ ID NO: 283526 - DNA, 25 bp, Homo sapien
caggtgtcagcgacagggacagtga

SEQ ID NO: 283527 - DNA, 25 bp, Homo sapien
agccaccccgcacttggatccccag

SEQ ID NO: 283528 - DNA, 25 bp, Homo sapien
tgccaggtgtcagcgacagggacag

SEQ ID NO: 283529 - DNA, 25 bp, Homo sapien
ggagtggcgggagccacctggcacc

SEQ ID NO: 283530 - DNA, 25 bp, Homo sapien
tcctgggtggccaccttaaagctcc

SEQ ID NO: 283531 - DNA, 25 bp, Homo sapien
gcctccgcagcctcatctggactct

SEQ ID NO: 283532 - DNA, 25 bp, Homo sapien
ctcctgggtggccaccttaaagctc

SEQ ID NO: 283533 - DNA, 25 bp, Homo sapien
tcatctggactctctgggggttcct

SEQ ID NO: 283534 - DNA, 25 bp, Homo sapien
gtcgtccgggatggccgaatccagc

SEQ ID NO: 283535 - DNA, 25 bp, Homo sapien
caggtcgtccgggatggccgaatcc

SEQ ID NO: 283536 - DNA, 25 bp, Homo sapien
cgggatggccgaatccagcctctgt

SEQ ID NO: 283537 - DNA, 25 bp, Homo sapien
agcctctgtaactcagtcagaaaat

SEQ ID NO: 283538 - DNA, 25 bp, Homo sapien
tggaagttgctgtgggggcctttgg

SEQ ID NO: 283539 - DNA, 25 bp, Homo sapien
agttttctgaaggggtcccatgcag

SEQ ID NO: 283540 - DNA, 25 bp, Homo sapien
ggccgaagcctgtaattcatggcag

SEQ ID NO: 283541 - DNA, 25 bp, Homo sapien
aggtgacaaatttctcaagaggccg

SEQ ID NO: 283542 - DNA, 25 bp, Homo sapien
gaggccgaagcctgtaattcatggc

SEQ ID NO: 283543 - DNA, 25 bp, Homo sapien
caaatttctcaagaggccgaagcct

SEQ ID NO: 283544 - DNA, 25 bp, Homo sapien
caacagcagaacaaccggacatggt

SEQ ID NO: 283545 - DNA, 25 bp, Homo sapien
acagcagaacaaccggacatggtgg

SEQ ID NO: 283546 - DNA, 25 bp, Homo sapien
acaacaacagcagaacaaccggaca

SEQ ID NO: 283547 - DNA, 25 bp, Homo sapien
aacaacagcagaacaaccggacatg

SEQ ID NO: 283548 - DNA, 25 bp, Homo sapien
acatcaggtcccctgtcagtgcctg

SEQ ID NO: 283549 - DNA, 25 bp, Homo sapien
gaggcatggccataggctctctgca

SEQ ID NO: 283550 - DNA, 25 bp, Homo sapien
catgcaacagggcttgatgctggcc

SEQ ID NO: 283551 - DNA, 25 bp, Homo sapien
ccaccatgagccacacatcaggtcc

SEQ ID NO: 283552 - DNA, 25 bp, Homo sapien
ctacgggttttcgggctccagctgg

SEQ ID NO: 283553 - DNA, 25 bp, Homo sapien
agctgccagcctcctagatgtggtt

SEQ ID NO: 283554 - DNA, 25 bp, Homo sapien
tccctggtgtctacggtctgggtga

SEQ ID NO: 283555 - DNA, 25 bp, Homo sapien
tgttctggccagcatcccggtgggt

SEQ ID NO: 283556 - DNA, 25 bp, Homo sapien
taaacataaaatggtctcccgcctg

SEQ ID NO: 283557 - DNA, 25 bp, Homo sapien
tgggagcttactgaggatgtgacat

SEQ ID NO: 283558 - DNA, 25 bp, Homo sapien
gtcaaagacatgcaattccacttcg

SEQ ID NO: 283559 - DNA, 25 bp, Homo sapien
tggtcacccctcacatgacaaagtc

SEQ ID NO: 283560 - DNA, 25 bp, Homo sapien
aaaaaattaccccagcgcagtgtca

SEQ ID NO: 283561 - DNA, 25 bp, Homo sapien
tacccagagtatgaaaattggcagt

SEQ ID NO: 283562 - DNA, 25 bp, Homo sapien
cccagagtatgaaaattggcagttc

SEQ ID NO: 283563 - DNA, 25 bp, Homo sapien
tatacccagagtatgaaaattggca

SEQ ID NO: 283564 - DNA, 25 bp, Homo sapien
gagtatgaaaattggcagttctctt

SEQ ID NO: 283565 - DNA, 25 bp, Homo sapien
ccatttcagtgtcgactgtcaggga

SEQ ID NO: 283566 - DNA, 25 bp, Homo sapien
ccaaggatgcttcctcaggataaag

SEQ ID NO: 283567 - DNA, 25 bp, Homo sapien
gggactcagctgcagactcttttga

SEQ ID NO: 283568 - DNA, 25 bp, Homo sapien
caggataaaggcttatgtccatttc

SEQ ID NO: 283569 - DNA, 25 bp, Homo sapien
cactaagagtttgcagggtgcccag

SEQ ID NO: 283570 - DNA, 25 bp, Homo sapien
cacttatcatgttgtgggagacaga

SEQ ID NO: 283571 - DNA, 25 bp, Homo sapien
caggccctagggactctctggagga

SEQ ID NO: 283572 - DNA, 25 bp, Homo sapien
caggaaaccttgactgcactaagag

SEQ ID NO: 283573 - DNA, 25 bp, Homo sapien
gcagctagtccaagactcctggcct

SEQ ID NO: 283574 - DNA, 25 bp, Homo sapien
cctgcagctagtccaagactcctgg

SEQ ID NO: 283575 - DNA, 25 bp, Homo sapien
aaccctgcagctagtccaagactcc

SEQ ID NO: 283576 - DNA, 25 bp, Homo sapien
tgcagctagtccaagactcctggcc

SEQ ID NO: 283577 - DNA, 25 bp, Homo sapien
ccaaacatcaccttgataaacatag

SEQ ID NO: 283578 - DNA, 25 bp, Homo sapien
gggctttgatcccccaactctcgat

SEQ ID NO: 283579 - DNA, 25 bp, Homo sapien
caactctcgattccccaactaagga

SEQ ID NO: 283580 - DNA, 25 bp, Homo sapien
tgataaacatagctgcagcgggtga

SEQ ID NO: 283581 - DNA, 25 bp, Homo sapien
ctcaggtgggcggtgaggttcacca

SEQ ID NO: 283582 - DNA, 25 bp, Homo sapien
ggtgaggttcaccagcctgcaagag

SEQ ID NO: 283583 - DNA, 25 bp, Homo sapien
ggcggtgaggttcaccagcctgcaa

SEQ ID NO: 283584 - DNA, 25 bp, Homo sapien
ggtgggcggtgaggttcaccagcct

SEQ ID NO: 283585 - DNA, 25 bp, Homo sapien
tcctccaggctcactaggttgccat

SEQ ID NO: 283586 - DNA, 25 bp, Homo sapien
tatatggctcgctccttcagtaggg

SEQ ID NO: 283587 - DNA, 25 bp, Homo sapien
tgatgatccgaacgaggacatatat

SEQ ID NO: 283588 - DNA, 25 bp, Homo sapien
gttgcccatggtctgggcccgggaa

SEQ ID NO: 283589 - DNA, 25 bp, Homo sapien
cttacattctaccatagctgcaggg

SEQ ID NO: 283590 - DNA, 25 bp, Homo sapien
atggattggggctaggtccccagcc

SEQ ID NO: 283591 - DNA, 25 bp, Homo sapien
ttgggtggtctatggtctgctatgc

SEQ ID NO: 283592 - DNA, 25 bp, Homo sapien
acagggccttgggtggtctatggtc

SEQ ID NO: 283593 - DNA, 25 bp, Homo sapien
cacctgactggcctaatggtcccta

SEQ ID NO: 283594 - DNA, 25 bp, Homo sapien
aaggacacctgactggcctaatggt

SEQ ID NO: 283595 - DNA, 25 bp, Homo sapien
tctggaactgtttgctagtccaggc

SEQ ID NO: 283596 - DNA, 25 bp, Homo sapien
tggcctaatggtccctactctgcct

SEQ ID NO: 283597 - DNA, 25 bp, Homo sapien
tgccagctctgggtaatggtcatcc

SEQ ID NO: 283598 - DNA, 25 bp, Homo sapien
atagcgggtggaggccatgtcctct

SEQ ID NO: 283599 - DNA, 25 bp, Homo sapien
ctctgggtaatggtcatccaggttc

SEQ ID NO: 283600 - DNA, 25 bp, Homo sapien
ggttctccaatagggactcatagcg

SEQ ID NO: 283601 - DNA, 25 bp, Homo sapien
agggagaaggtgtgccctccccctg

SEQ ID NO: 283602 - DNA, 25 bp, Homo sapien
ccctgggctgtaccctgacactcac

SEQ ID NO: 283603 - DNA, 25 bp, Homo sapien
ctggaaggcccaggaagtcctgttg

SEQ ID NO: 283604 - DNA, 25 bp, Homo sapien
aaggcccaggaagtcctgttggtag

SEQ ID NO: 283605 - DNA, 25 bp, Homo sapien
tgctcatggcggcctcgccgagtgc

SEQ ID NO: 283606 - DNA, 25 bp, Homo sapien
gtgcccatacgcttcctccagttgt

SEQ ID NO: 283607 - DNA, 25 bp, Homo sapien
gaagtggggctttgctcatggcggc

SEQ ID NO: 283608 - DNA, 25 bp, Homo sapien
ggcctcgccgagtgcccatacgctt

SEQ ID NO: 283609 - DNA, 25 bp, Homo sapien
caactcctgggtggcagggagctca

SEQ ID NO: 283610 - DNA, 25 bp, Homo sapien
ctagcaactcctgggtggcagggag

SEQ ID NO: 283611 - DNA, 25 bp, Homo sapien
agcaactcctgggtggcagggagct

SEQ ID NO: 283612 - DNA, 25 bp, Homo sapien
aactcctgggtggcagggagctcac

SEQ ID NO: 283613 - DNA, 25 bp, Homo sapien
ccacatctgtgaagcctgaggacat

SEQ ID NO: 283614 - DNA, 25 bp, Homo sapien
tcaaacccagtgtgggccgtgccat

SEQ ID NO: 283615 - DNA, 25 bp, Homo sapien
acattccggcccttagtgcgctggc

SEQ ID NO: 283616 - DNA, 25 bp, Homo sapien
cattgagttcatccagcagttgtgc

SEQ ID NO: 283617 - DNA, 25 bp, Homo sapien
acttggctagttggcagtagtgtgc

SEQ ID NO: 283618 - DNA, 25 bp, Homo sapien
agaggtcatggctaacccccttggg

SEQ ID NO: 283619 - DNA, 25 bp, Homo sapien
cccttgggtctgagtccaacttggc

SEQ ID NO: 283620 - DNA, 25 bp, Homo sapien
ctgatcacacaaggcagaggtcatg

SEQ ID NO: 283621 - DNA, 25 bp, Homo sapien
gaggagccctgttgcaatctgcact

SEQ ID NO: 283622 - DNA, 25 bp, Homo sapien
gacagattccttgggcagtccagag

SEQ ID NO: 283623 - DNA, 25 bp, Homo sapien
cattagtcggtgatcccaagggcat

SEQ ID NO: 283624 - DNA, 25 bp, Homo sapien
cagattctgcaagaggagtcctgct

SEQ ID NO: 283625 - DNA, 25 bp, Homo sapien
gggtcaggatggatgtctcactaca

SEQ ID NO: 283626 - DNA, 25 bp, Homo sapien
gcctctctcgatggcctgtcttcag

SEQ ID NO: 283627 - DNA, 25 bp, Homo sapien
gtttattttagaccacagcctgttg

SEQ ID NO: 283628 - DNA, 25 bp, Homo sapien
ggatgtctcactacagtgtgcaatc

SEQ ID NO: 283629 - DNA, 25 bp, Homo sapien
ccctgaagaggtcggtgcagactcg

SEQ ID NO: 283630 - DNA, 25 bp, Homo sapien
ctacccctcgccgacagccagacca

SEQ ID NO: 283631 - DNA, 25 bp, Homo sapien
acaccagattgtacccagatagctg

SEQ ID NO: 283632 - DNA, 25 bp, Homo sapien
gaggaggtttctcaccccacagata

SEQ ID NO: 283633 - DNA, 25 bp, Homo sapien
gggccctgcgcctacgagatcaggc

SEQ ID NO: 283634 - DNA, 25 bp, Homo sapien
ggcagttcctggactgttccaccac

SEQ ID NO: 283635 - DNA, 25 bp, Homo sapien
tggactgttccaccactcagagtga

SEQ ID NO: 283636 - DNA, 25 bp, Homo sapien
ccctgaagcagtgcaagtactacca

SEQ ID NO: 283637 - DNA, 25 bp, Homo sapien
ggtctggccaggattaaccctgctt

SEQ ID NO: 283638 - DNA, 25 bp, Homo sapien
agtgtgggcactcccctaagggcgt

SEQ ID NO: 283639 - DNA, 25 bp, Homo sapien
ggctcatggctcagatggcgaccac

SEQ ID NO: 283640 - DNA, 25 bp, Homo sapien
aggattatctcgaggccacacaggg

SEQ ID NO: 283641 - DNA, 25 bp, Homo sapien
gctgctcggatgtcgcgtaaaggcc

SEQ ID NO: 283642 - DNA, 25 bp, Homo sapien
cgctagatttgaccgagccgggcaa

SEQ ID NO: 283643 - DNA, 25 bp, Homo sapien
gaagctgctaaaattgcgaggccgc

SEQ ID NO: 283644 - DNA, 25 bp, Homo sapien
taggcctttgggatagacacgctgc

SEQ ID NO: 283645 - DNA, 25 bp, Homo sapien
gatccaggcagtggctcgcatcctg

SEQ ID NO: 283646 - DNA, 25 bp, Homo sapien
cacagcttattcaagaagactccac

SEQ ID NO: 283647 - DNA, 25 bp, Homo sapien
aagcctgggccaagaaagggaagcg

SEQ ID NO: 283648 - DNA, 25 bp, Homo sapien
ctgcagagccacgatccaggcagtg

SEQ ID NO: 283649 - DNA, 25 bp, Homo sapien
gggctgctgggcttgctgggccgct

SEQ ID NO: 283650 - DNA, 25 bp, Homo sapien
tgggcttgctgggccgctccgggcc

SEQ ID NO: 283651 - DNA, 25 bp, Homo sapien
gctgctgggcttgctgggccgctcc

SEQ ID NO: 283652 - DNA, 25 bp, Homo sapien
tgctgggcttgctgggccgctccgg

SEQ ID NO: 283653 - DNA, 25 bp, Homo sapien
tcgggggcaggagggcgcgcgcggc

SEQ ID NO: 283654 - DNA, 25 bp, Homo sapien
gctgcggagccaggcggccggagcc

SEQ ID NO: 283655 - DNA, 25 bp, Homo sapien
cgcgcggccgcgctgcggagccagg

SEQ ID NO: 283656 - DNA, 25 bp, Homo sapien
caggagggcgcgcgcggccgcgctg

SEQ ID NO: 283657 - DNA, 25 bp, Homo sapien
tagcttcgtcccatccatcggactg

SEQ ID NO: 283658 - DNA, 25 bp, Homo sapien
gggacggtagcttcgtcccatccat

SEQ ID NO: 283659 - DNA, 25 bp, Homo sapien
caggagggacggtagcttcgtccca

SEQ ID NO: 283660 - DNA, 25 bp, Homo sapien
tcccatccatcggactgcagggctt

SEQ ID NO: 283661 - DNA, 25 bp, Homo sapien
ggcaggtgccgggctactgggcagg

SEQ ID NO: 283662 - DNA, 25 bp, Homo sapien
ccgggctactgggcagggctgcatg

SEQ ID NO: 283663 - DNA, 25 bp, Homo sapien
tgccgggctactgggcagggctgca

SEQ ID NO: 283664 - DNA, 25 bp, Homo sapien
aggtgccgggctactgggcagggct

SEQ ID NO: 283665 - DNA, 25 bp, Homo sapien
tgaggctgctggcaggccggggggc

SEQ ID NO: 283666 - DNA, 25 bp, Homo sapien
ctgaggctgctggcaggccgggggg

SEQ ID NO: 283667 - DNA, 25 bp, Homo sapien
gaggctgctggcaggccggggggct

SEQ ID NO: 283668 - DNA, 25 bp, Homo sapien
ggctgctggcaggccggggggcttc

SEQ ID NO: 283669 - DNA, 25 bp, Homo sapien
ctcttctgtcggttgcgggcactca

SEQ ID NO: 283670 - DNA, 25 bp, Homo sapien
atcagatgggtcgggcacgccacag

SEQ ID NO: 283671 - DNA, 25 bp, Homo sapien
cttctgtcggttgcgggcactcagc

SEQ ID NO: 283672 - DNA, 25 bp, Homo sapien
cggttgcgggcactcagcccatcag

SEQ ID NO: 283673 - DNA, 25 bp, Homo sapien
tgtaggtgaggtccgtcttctccca

SEQ ID NO: 283674 - DNA, 25 bp, Homo sapien
taggtgaggtccgtcttctcccagc

SEQ ID NO: 283675 - DNA, 25 bp, Homo sapien
ctgtaggtgaggtccgtcttctccc

SEQ ID NO: 283676 - DNA, 25 bp, Homo sapien
ggtgaggtccgtcttctcccagcgc

SEQ ID NO: 283677 - DNA, 25 bp, Homo sapien
gaattcagtggaaagaaccaggacc

SEQ ID NO: 283678 - DNA, 25 bp, Homo sapien
tcacaggtctcttgtaaaggctgcc

SEQ ID NO: 283679 - DNA, 25 bp, Homo sapien
ggtttgcccatagatgacctccctg

SEQ ID NO: 283680 - DNA, 25 bp, Homo sapien
cacccgcaggatgtgtgagcctcag

SEQ ID NO: 283681 - DNA, 25 bp, Homo sapien
tgcaccaactgccatgggaaccgaa

SEQ ID NO: 283682 - DNA, 25 bp, Homo sapien
gtaaaggtgagtggcgtcacatcgc

SEQ ID NO: 283683 - DNA, 25 bp, Homo sapien
tggcgaagtcgatcatgatgtcagc

SEQ ID NO: 283684 - DNA, 25 bp, Homo sapien
acggccctcgtgcacctcagtaaag

SEQ ID NO: 283685 - DNA, 25 bp, Homo sapien
aggcccatcaaacggcaggtcgtcc

SEQ ID NO: 283686 - DNA, 25 bp, Homo sapien
tcatcatagtcgaagtggacatccc

SEQ ID NO: 283687 - DNA, 25 bp, Homo sapien
ccaggcccatcaaacggcaggtcgt

SEQ ID NO: 283688 - DNA, 25 bp, Homo sapien
ccttctcggtgagtcttggggaaga

SEQ ID NO: 283689 - DNA, 25 bp, Homo sapien
tggccaaattcatgggctgccacct

SEQ ID NO: 283690 - DNA, 25 bp, Homo sapien
ggctggccatataggtgttgaacgc

SEQ ID NO: 283691 - DNA, 25 bp, Homo sapien
tcattggtgtctatcccagcctggg

SEQ ID NO: 283692 - DNA, 25 bp, Homo sapien
gactcagtgggtagcgaaaggtgta

SEQ ID NO: 283693 - DNA, 25 bp, Homo sapien
tataggtgttgaacgcccctgcagt

SEQ ID NO: 283694 - DNA, 25 bp, Homo sapien
gacacatgctgagggcatatgctgc

SEQ ID NO: 283695 - DNA, 25 bp, Homo sapien
catgctgagggcatatgctgcagtc

SEQ ID NO: 283696 - DNA, 25 bp, Homo sapien
tgagggcatatgctgcagtcacagt

SEQ ID NO: 283697 - DNA, 25 bp, Homo sapien
gctgagggcatatgctgcagtcaca

SEQ ID NO: 283698 - DNA, 25 bp, Homo sapien
tttgaagaaaaagagctcgcctcgg

SEQ ID NO: 283699 - DNA, 25 bp, Homo sapien
aggcgccacacaaagcccgctttga

SEQ ID NO: 283700 - DNA, 25 bp, Homo sapien
ccctgggcatcctcgaaggcagcgt

SEQ ID NO: 283701 - DNA, 25 bp, Homo sapien
ctgccagtggcgagaggccaatgct

SEQ ID NO: 283702 - DNA, 25 bp, Homo sapien
aagtccctggcatctgcaatgctcc

SEQ ID NO: 283703 - DNA, 25 bp, Homo sapien
tgaagtccctggcatctgcaatgct

SEQ ID NO: 283704 - DNA, 25 bp, Homo sapien
gaagtccctggcatctgcaatgctc

SEQ ID NO: 283705 - DNA, 25 bp, Homo sapien
ctgccctggaacccacgcaggtttc

SEQ ID NO: 283706 - DNA, 25 bp, Homo sapien
ctggggcagtgaatgctctgtaaac

SEQ ID NO: 283707 - DNA, 25 bp, Homo sapien
tcagtaaaacatgcaggccaataat

SEQ ID NO: 283708 - DNA, 25 bp, Homo sapien
ctgtaaactagtgcacgggtgaggt

SEQ ID NO: 283709 - DNA, 25 bp, Homo sapien
tccactggcatttggctgtgacaaa

SEQ ID NO: 283710 - DNA, 25 bp, Homo sapien
caggactggcttttcaccgtcgtac

SEQ ID NO: 283711 - DNA, 25 bp, Homo sapien
tcaccgtcgtacacccagtactgag

SEQ ID NO: 283712 - DNA, 25 bp, Homo sapien
agaccaaggcagcatggaccgggaa

SEQ ID NO: 283713 - DNA, 25 bp, Homo sapien
tgttcttctcgggaccccagaccaa

SEQ ID NO: 283714 - DNA, 25 bp, Homo sapien
cgggactgtctacacgccgggtgct

SEQ ID NO: 283715 - DNA, 25 bp, Homo sapien
atcctggaaggcagcgtcgatctca

SEQ ID NO: 283716 - DNA, 25 bp, Homo sapien
aggcagcgtcgatctcagagggcac

SEQ ID NO: 283717 - DNA, 25 bp, Homo sapien
tctccagtcagtggccctgcggggc

SEQ ID NO: 283718 - DNA, 25 bp, Homo sapien
tgctgagttcctcgagtcctgcagg

SEQ ID NO: 283719 - DNA, 25 bp, Homo sapien
tagccaggctattgacgggcaccct

SEQ ID NO: 283720 - DNA, 25 bp, Homo sapien
tcagtggttaggagcagggaccacc

SEQ ID NO: 283721 - DNA, 25 bp, Homo sapien
ggaatctgggctgggctaataccca

SEQ ID NO: 283722 - DNA, 25 bp, Homo sapien
ccttcacagggtcaaacttccagta

SEQ ID NO: 283723 - DNA, 25 bp, Homo sapien
acttccagtagaggcggccgcgcag

SEQ ID NO: 283724 - DNA, 25 bp, Homo sapien
caccttcacagggtcaaacttccag

SEQ ID NO: 283725 - DNA, 25 bp, Homo sapien
cggccgcgcaggaagtaggcatagc

SEQ ID NO: 283726 - DNA, 25 bp, Homo sapien
gaaagtgttggcaggctcggcacag

SEQ ID NO: 283727 - DNA, 25 bp, Homo sapien
caggctcggcacagccaaagaagtc

SEQ ID NO: 283728 - DNA, 25 bp, Homo sapien
ctcggcacagccaaagaagtcagga

SEQ ID NO: 283729 - DNA, 25 bp, Homo sapien
ggaaagtgttggcaggctcggcaca

SEQ ID NO: 283730 - DNA, 25 bp, Homo sapien
tagcctgatattcgtggcctggcag

SEQ ID NO: 283731 - DNA, 25 bp, Homo sapien
tcctcttaagtcatgccaaagcctc

SEQ ID NO: 283732 - DNA, 25 bp, Homo sapien
cagttgtcatggtggttgtacccca

SEQ ID NO: 283733 - DNA, 25 bp, Homo sapien
tgagacagtcgctggcaggtgacca

SEQ ID NO: 283734 - DNA, 25 bp, Homo sapien
caacagggatacagcaaggacactc

SEQ ID NO: 283735 - DNA, 25 bp, Homo sapien
tggaaggaacctcacaacagggata

SEQ ID NO: 283736 - DNA, 25 bp, Homo sapien
gaacctcacaacagggatacagcaa

SEQ ID NO: 283737 - DNA, 25 bp, Homo sapien
ggccctgccctacagcccagttgct

SEQ ID NO: 283738 - DNA, 25 bp, Homo sapien
ctttttggcctggattctggagaac

SEQ ID NO: 283739 - DNA, 25 bp, Homo sapien
cagtgctgcgaaaagggcttcagga

SEQ ID NO: 283740 - DNA, 25 bp, Homo sapien
gacaggattgaggtatgttgcagcc

SEQ ID NO: 283741 - DNA, 25 bp, Homo sapien
tttccaggattgtcagccagaaggc

SEQ ID NO: 283742 - DNA, 25 bp, Homo sapien
gaccaggccgccctcagtgcgcagg

SEQ ID NO: 283743 - DNA, 25 bp, Homo sapien
gtgctgggccgagggaaaccgaagc

SEQ ID NO: 283744 - DNA, 25 bp, Homo sapien
gaccgggccgggtactggcgcctca

SEQ ID NO: 283745 - DNA, 25 bp, Homo sapien
aagccggaaggcgaaatgcggaccg

SEQ ID NO: 283746 - DNA, 25 bp, Homo sapien
cggcggcagaggcgggcggccggag

SEQ ID NO: 283747 - DNA, 25 bp, Homo sapien
gcagaggcgggcggccggagccggg

SEQ ID NO: 283748 - DNA, 25 bp, Homo sapien
gcggcagaggcgggcggccggagcc

SEQ ID NO: 283749 - DNA, 25 bp, Homo sapien
tgcggcggcagaggcgggcggccgg

SEQ ID NO: 283750 - DNA, 25 bp, Homo sapien
tcggagccgatcatgtagaactcgc

SEQ ID NO: 283751 - DNA, 25 bp, Homo sapien
gaaggtcttgctcagcgccatcatc

SEQ ID NO: 283752 - DNA, 25 bp, Homo sapien
gatcatgtagaactcgccgtcgtcc

SEQ ID NO: 283753 - DNA, 25 bp, Homo sapien
tcgtcctccagctggaacttcacgg

SEQ ID NO: 283754 - DNA, 25 bp, Homo sapien
ttccacagtggctagtcgcctccag

SEQ ID NO: 283755 - DNA, 25 bp, Homo sapien
gagtgaggggtatctcttgtacaga

SEQ ID NO: 283756 - DNA, 25 bp, Homo sapien
acagtggctagtcgcctccagagtg

SEQ ID NO: 283757 - DNA, 25 bp, Homo sapien
catgtgacgatgcaactattttctt

SEQ ID NO: 283758 - DNA, 25 bp, Homo sapien
aacatcactgggtcactctgctggt

SEQ ID NO: 283759 - DNA, 25 bp, Homo sapien
catcactgggtcactctgctggtgg

SEQ ID NO: 283760 - DNA, 25 bp, Homo sapien
tggtggcggtggcacacagcagcca

SEQ ID NO: 283761 - DNA, 25 bp, Homo sapien
tcactgggtcactctgctggtggcg

SEQ ID NO: 283762 - DNA, 25 bp, Homo sapien
gtggctagagtcgtgtatccgtgat

SEQ ID NO: 283763 - DNA, 25 bp, Homo sapien
ccgaggcttttaacagggtcacact

SEQ ID NO: 283764 - DNA, 25 bp, Homo sapien
agaatctcttccacttccgaggctt

SEQ ID NO: 283765 - DNA, 25 bp, Homo sapien
cacactggtggctagagtcgtgtat

SEQ ID NO: 283766 - DNA, 25 bp, Homo sapien
tggctgttcctcttggccttctgtt

SEQ ID NO: 283767 - DNA, 25 bp, Homo sapien
gctgttcctcttggccttctgttcc

SEQ ID NO: 283768 - DNA, 25 bp, Homo sapien
ggctgttcctcttggccttctgttc

SEQ ID NO: 283769 - DNA, 25 bp, Homo sapien
cttgtctcggcccatgcggttcctg

SEQ ID NO: 283770 - DNA, 25 bp, Homo sapien
agcatggcacggcatctaagtggtg

SEQ ID NO: 283771 - DNA, 25 bp, Homo sapien
ttcctgttgatggttgtggagcatg

SEQ ID NO: 283772 - DNA, 25 bp, Homo sapien
tcggcccatgcggttcctgttgatg

SEQ ID NO: 283773 - DNA, 25 bp, Homo sapien
cacggagggtgagtgcagcgatgca

SEQ ID NO: 283774 - DNA, 25 bp, Homo sapien
aactaaggcggaatcagcacggagg

SEQ ID NO: 283775 - DNA, 25 bp, Homo sapien
ggagaactaaggcggaatcagcacg

SEQ ID NO: 283776 - DNA, 25 bp, Homo sapien
agggtgagtgcagcgatgcatccac

SEQ ID NO: 283777 - DNA, 25 bp, Homo sapien
tctgcaccatcagactggctgtggc

SEQ ID NO: 283778 - DNA, 25 bp, Homo sapien
caacagttcaaaggcgaggaggtac

SEQ ID NO: 283779 - DNA, 25 bp, Homo sapien
gctgtggcccactcatgtgaaactg

SEQ ID NO: 283780 - DNA, 25 bp, Homo sapien
gccaaggaggctatggacaatgtcc

SEQ ID NO: 283781 - DNA, 25 bp, Homo sapien
ggccggagccctaggtatgcaaatt

SEQ ID NO: 283782 - DNA, 25 bp, Homo sapien
cagagcacagattccgtgaggagca

SEQ ID NO: 283783 - DNA, 25 bp, Homo sapien
tgtctgcaatagaatcgacctgggc

SEQ ID NO: 283784 - DNA, 25 bp, Homo sapien
caaagctagcgggtgtcgaagcacc

SEQ ID NO: 283785 - DNA, 25 bp, Homo sapien
catgtccagccggatggggaccagc

SEQ ID NO: 283786 - DNA, 25 bp, Homo sapien
cacctcgggctgagatgcgttctca

SEQ ID NO: 283787 - DNA, 25 bp, Homo sapien
gagatgcgttctcatggatcacagc

SEQ ID NO: 283788 - DNA, 25 bp, Homo sapien
ggaccagcacctcgggctgagatgc

SEQ ID NO: 283789 - DNA, 25 bp, Homo sapien
ggtgaaggcgtctcgcagcttctgc

SEQ ID NO: 283790 - DNA, 25 bp, Homo sapien
caggtgaaggcgtctcgcagcttct

SEQ ID NO: 283791 - DNA, 25 bp, Homo sapien
gttccaggtgaaggcgtctcgcagc

SEQ ID NO: 283792 - DNA, 25 bp, Homo sapien
tccaggtgaaggcgtctcgcagctt

SEQ ID NO: 283793 - DNA, 25 bp, Homo sapien
tacacttcattcgtgctactcaagt

SEQ ID NO: 283794 - DNA, 25 bp, Homo sapien
gctactcaagtactgctacttcaca

SEQ ID NO: 283795 - DNA, 25 bp, Homo sapien
caatcctgattctgaaggtgggctg

SEQ ID NO: 283796 - DNA, 25 bp, Homo sapien
tctgaaggtgggctgaacatacact

SEQ ID NO: 283797 - DNA, 25 bp, Homo sapien
ctggttaggcaactcatcttttctg

SEQ ID NO: 283798 - DNA, 25 bp, Homo sapien
catcaccagtgattcagagaagcac

SEQ ID NO: 283799 - DNA, 25 bp, Homo sapien
tgtgtgccaagacagattccaaaac

SEQ ID NO: 283800 - DNA, 25 bp, Homo sapien
caagtgtagacactcagggccctaa

SEQ ID NO: 283801 - DNA, 25 bp, Homo sapien
atgcccagccttaaagccttaaatc

SEQ ID NO: 283802 - DNA, 25 bp, Homo sapien
acagcttcccgttcccgagtagctg

SEQ ID NO: 283803 - DNA, 25 bp, Homo sapien
agccttaaatctttctacatacctt

SEQ ID NO: 283804 - DNA, 25 bp, Homo sapien
aagcaattatccctgccacagcttc

SEQ ID NO: 283805 - DNA, 25 bp, Homo sapien
cttgctagagattgccagttttatt

SEQ ID NO: 283806 - DNA, 25 bp, Homo sapien
tgctagagattgccagttttattaa

SEQ ID NO: 283807 - DNA, 25 bp, Homo sapien
gccttgctagagattgccagtttta

SEQ ID NO: 283808 - DNA, 25 bp, Homo sapien
tcaaaaaaccagctagttttcatta

SEQ ID NO: 283809 - DNA, 25 bp, Homo sapien
tctctggcagaaagcatgcaacctt

SEQ ID NO: 283810 - DNA, 25 bp, Homo sapien
tattaaatgctagcaacagaaggcc

SEQ ID NO: 283811 - DNA, 25 bp, Homo sapien
ccttgggattttctacacggacaat

SEQ ID NO: 283812 - DNA, 25 bp, Homo sapien
tgtgtctaggtactcattaatggca

SEQ ID NO: 283813 - DNA, 25 bp, Homo sapien
ttgttgttgcttttttgggacagag

SEQ ID NO: 283814 - DNA, 25 bp, Homo sapien
ttgttgttgttgcttttttgggaca

SEQ ID NO: 283815 - DNA, 25 bp, Homo sapien
ctgtgcccagccttttttgttgttg

SEQ ID NO: 283816 - DNA, 25 bp, Homo sapien
tgtgcccagccttttttgttgttgt

SEQ ID NO: 283817 - DNA, 25 bp, Homo sapien
taatgagatgatccaggcgaggcca

SEQ ID NO: 283818 - DNA, 25 bp, Homo sapien
gacaagacgccttgcaggaataagc

SEQ ID NO: 283819 - DNA, 25 bp, Homo sapien
caacaaggtcacaagcgtggaggtc

SEQ ID NO: 283820 - DNA, 25 bp, Homo sapien
gtgccaagccacagcgatttccagg

SEQ ID NO: 283821 - DNA, 25 bp, Homo sapien
tgatgacgcgctggtctgactggtc

SEQ ID NO: 283822 - DNA, 25 bp, Homo sapien
aaacgtcagcgggttcaaatccaga

SEQ ID NO: 283823 - DNA, 25 bp, Homo sapien
cagaggcgatggctggcacaaacgt

SEQ ID NO: 283824 - DNA, 25 bp, Homo sapien
taggactcgatctgctgtctgatgg

SEQ ID NO: 283825 - DNA, 25 bp, Homo sapien
cctaaggcactctttctgaggagag

SEQ ID NO: 283826 - DNA, 25 bp, Homo sapien
gaagatgctgctctaacctaaggca

SEQ ID NO: 283827 - DNA, 25 bp, Homo sapien
gaaagaaatacccagctcttctgag

SEQ ID NO: 283828 - DNA, 25 bp, Homo sapien
gagagatggtcctcatgtgccatgg

SEQ ID NO: 283829 - DNA, 25 bp, Homo sapien
cagctgtccccggatgctgtatgcg

SEQ ID NO: 283830 - DNA, 25 bp, Homo sapien
tgtatgcgatggtggtgacaaactc

SEQ ID NO: 283831 - DNA, 25 bp, Homo sapien
tctctgacatgtcccactcaaactg

SEQ ID NO: 283832 - DNA, 25 bp, Homo sapien
gacatgtcccactcaaactggtcca

SEQ ID NO: 283833 - DNA, 25 bp, Homo sapien
tcagctccgcgaagtgctaggactg

SEQ ID NO: 283834 - DNA, 25 bp, Homo sapien
gaactactgggttctggtgatccac

SEQ ID NO: 283835 - DNA, 25 bp, Homo sapien
atgctacaggcagggatcaaggtga

SEQ ID NO: 283836 - DNA, 25 bp, Homo sapien
cacagaggacactggactggaatat

SEQ ID NO: 283837 - DNA, 25 bp, Homo sapien
attctcagcataagagagagcaggg

SEQ ID NO: 283838 - DNA, 25 bp, Homo sapien
gaggaatgacttttccagctataga

SEQ ID NO: 283839 - DNA, 25 bp, Homo sapien
aggaatgacttttccagctatagat

SEQ ID NO: 283840 - DNA, 25 bp, Homo sapien
ctcgtgttcctgtcctggtcgcgga

SEQ ID NO: 283841 - DNA, 25 bp, Homo sapien
tccgcatcgcccgtgttccggatgg

SEQ ID NO: 283842 - DNA, 25 bp, Homo sapien
tgttccggatggcaatctccactgt

SEQ ID NO: 283843 - DNA, 25 bp, Homo sapien
tctgtcagagtctccagcagtgggc

SEQ ID NO: 283844 - DNA, 25 bp, Homo sapien
gaaacataccctggcgtttggatgg

SEQ ID NO: 283845 - DNA, 25 bp, Homo sapien
ggagactgggaaaggcaatggccct

SEQ ID NO: 283846 - DNA, 25 bp, Homo sapien
tctgtctcagagaccatgggagact

SEQ ID NO: 283847 - DNA, 25 bp, Homo sapien
ctagcagcactagaggtactctgtc

SEQ ID NO: 283848 - DNA, 25 bp, Homo sapien
caggccggggccgtgttggcaagac

SEQ ID NO: 283849 - DNA, 25 bp, Homo sapien
ccggggccgtgttggcaagacgcct

SEQ ID NO: 283850 - DNA, 25 bp, Homo sapien
gggccgtgttggcaagacgcctcat

SEQ ID NO: 283851 - DNA, 25 bp, Homo sapien
cgtgttggcaagacgcctcatccgc

SEQ ID NO: 283852 - DNA, 25 bp, Homo sapien
caacaaatggaatgtgtgccgggaa

SEQ ID NO: 283853 - DNA, 25 bp, Homo sapien
gaggagaggcggcccaatcttctga

SEQ ID NO: 283854 - DNA, 25 bp, Homo sapien
ggactggggctcaacaaatggaatg

SEQ ID NO: 283855 - DNA, 25 bp, Homo sapien
tctgtccttgccagaagatggagga

SEQ ID NO: 283856 - DNA, 25 bp, Homo sapien
gaacatgacctgttgccttttattt

SEQ ID NO: 283857 - DNA, 25 bp, Homo sapien
catgacctgttgccttttatttaaa

SEQ ID NO: 283858 - DNA, 25 bp, Homo sapien
acatgacctgttgccttttatttaa

SEQ ID NO: 283859 - DNA, 25 bp, Homo sapien
aacatgacctgttgccttttattta

SEQ ID NO: 283860 - DNA, 25 bp, Homo sapien
gaagaaattgaacatgacctgttga

SEQ ID NO: 283861 - DNA, 25 bp, Homo sapien
gagagctcgcggcaccttcctgagg

SEQ ID NO: 283862 - DNA, 25 bp, Homo sapien
aaccttgttcacataccaccttcgt

SEQ ID NO: 283863 - DNA, 25 bp, Homo sapien
tgaggcctgtgtgccaaccttgttc

SEQ ID NO: 283864 - DNA, 25 bp, Homo sapien
tggcggtcaggagtgagggcccagc

SEQ ID NO: 283865 - DNA, 25 bp, Homo sapien
agccttcccggcacctcccagccag

SEQ ID NO: 283866 - DNA, 25 bp, Homo sapien
ttcccggcacctcccagccaggtgg

SEQ ID NO: 283867 - DNA, 25 bp, Homo sapien
tcccagccaggtggccctgcccgac

SEQ ID NO: 283868 - DNA, 25 bp, Homo sapien
tgtagccagaccttgtggagatggc

SEQ ID NO: 283869 - DNA, 25 bp, Homo sapien
tgagtctgccctccgtgttgtagcc

SEQ ID NO: 283870 - DNA, 25 bp, Homo sapien
ggtaacaacactgttctctgttgag

SEQ ID NO: 283871 - DNA, 25 bp, Homo sapien
caaagacaggttgtcattttcatgg

SEQ ID NO: 283872 - DNA, 25 bp, Homo sapien
tggtgtacgtgtggagccgccgcag

SEQ ID NO: 283873 - DNA, 25 bp, Homo sapien
gccatgctggtgtacgtgtggagcc

SEQ ID NO: 283874 - DNA, 25 bp, Homo sapien
cagccctcgggtgagggtcaacttc

SEQ ID NO: 283875 - DNA, 25 bp, Homo sapien
ggtcaacttcttcggcctgctcact

SEQ ID NO: 283876 - DNA, 25 bp, Homo sapien
gagtgtgtcgcctttattggactgg

SEQ ID NO: 283877 - DNA, 25 bp, Homo sapien
tcttgatgagggaatagcacatagg

SEQ ID NO: 283878 - DNA, 25 bp, Homo sapien
tcatcttgatgagggaatagcacat

SEQ ID NO: 283879 - DNA, 25 bp, Homo sapien
ttattggactggctcatcttgatga

SEQ ID NO: 283880 - DNA, 25 bp, Homo sapien
gggtcagggctagatcttcagtgct

SEQ ID NO: 283881 - DNA, 25 bp, Homo sapien
acaaagccatgcacaaaagagccag

SEQ ID NO: 283882 - DNA, 25 bp, Homo sapien
gagagggacacagtcgctgtctcca

SEQ ID NO: 283883 - DNA, 25 bp, Homo sapien
cctgaatgcgagtagccgggagaaa

SEQ ID NO: 283884 - DNA, 25 bp, Homo sapien
ccccgtaggtctggaggctcgtcac

SEQ ID NO: 283885 - DNA, 25 bp, Homo sapien
tggaggctcgtcaccaacttcctct

SEQ ID NO: 283886 - DNA, 25 bp, Homo sapien
aacatgctcttcgtgtatcctgcgc

SEQ ID NO: 283887 - DNA, 25 bp, Homo sapien
tcgggcccctgggattcagcttctt

SEQ ID NO: 283888 - DNA, 25 bp, Homo sapien
catctagaacagtgtcaggcaaaca

SEQ ID NO: 283889 - DNA, 25 bp, Homo sapien
cctggactcaatcccgcagtcctgc

SEQ ID NO: 283890 - DNA, 25 bp, Homo sapien
gacagtgtcttttattgcatgctac

SEQ ID NO: 283891 - DNA, 25 bp, Homo sapien
tgtccacttgctctggtgcgcctct

SEQ ID NO: 283892 - DNA, 25 bp, Homo sapien
ggaccctgcggccttggccttccgc

SEQ ID NO: 283893 - DNA, 25 bp, Homo sapien
ccctgcggccttggccttccgcagt

SEQ ID NO: 283894 - DNA, 25 bp, Homo sapien
ttgtcatcatggcccatccccaatg

SEQ ID NO: 283895 - DNA, 25 bp, Homo sapien
atggcccatccccaatgagccgctg

SEQ ID NO: 283896 - DNA, 25 bp, Homo sapien
agcgagagacttggcggaatgcggg

SEQ ID NO: 283897 - DNA, 25 bp, Homo sapien
tcttcggagcgctctcatctgtgcg

SEQ ID NO: 283898 - DNA, 25 bp, Homo sapien
gagaaccggtctcgggttgccgcca

SEQ ID NO: 283899 - DNA, 25 bp, Homo sapien
gatccattgcgtgagaggcaggtcc

SEQ ID NO: 283900 - DNA, 25 bp, Homo sapien
tctggactaaatgtctgcgggtctc

SEQ ID NO: 283901 - DNA, 25 bp, Homo sapien
tggtccaaggtcatctcggccaagc

SEQ ID NO: 283902 - DNA, 25 bp, Homo sapien
attcgccctcgcaagtgccagcaag

SEQ ID NO: 283903 - DNA, 25 bp, Homo sapien
agcaagcgactctggtcgccgcgct

SEQ ID NO: 283904 - DNA, 25 bp, Homo sapien
cctctgccgcagcactgaggctgaa

SEQ ID NO: 283905 - DNA, 25 bp, Homo sapien
tgaaaagccgctcactccttactcg

SEQ ID NO: 283906 - DNA, 25 bp, Homo sapien
ttactcggctaagccccaagctcat

SEQ ID NO: 283907 - DNA, 25 bp, Homo sapien
tgaggctgaaaagccgctcactcct

SEQ ID NO: 283908 - DNA, 25 bp, Homo sapien
cgaggccgtaaggacggctccagtt

SEQ ID NO: 283909 - DNA, 25 bp, Homo sapien
aggccgtaaggacggctccagttca

SEQ ID NO: 283910 - DNA, 25 bp, Homo sapien
gtccgaggccgtaaggacggctcca

SEQ ID NO: 283911 - DNA, 25 bp, Homo sapien
cgtaaggacggctccagttcatcct

SEQ ID NO: 283912 - DNA, 25 bp, Homo sapien
cagcgcgcagcgcccagtggtgaaa

SEQ ID NO: 283913 - DNA, 25 bp, Homo sapien
ccggcagcctgtgcgcggagggaag

SEQ ID NO: 283914 - DNA, 25 bp, Homo sapien
cgcgcagcgcccagtggtgaaagag

SEQ ID NO: 283915 - DNA, 25 bp, Homo sapien
tgccattagcaagcggtgagccggc

SEQ ID NO: 283916 - DNA, 25 bp, Homo sapien
attctagatcgcaggagggcgtgga

SEQ ID NO: 283917 - DNA, 25 bp, Homo sapien
cattctagatcgcaggagggcgtgg

SEQ ID NO: 283918 - DNA, 25 bp, Homo sapien
tgaaaagtcccaccaatgccggcag

SEQ ID NO: 283919 - DNA, 25 bp, Homo sapien
gggcattgatgatagagaggttata

SEQ ID NO: 283920 - DNA, 25 bp, Homo sapien
tagagaggttatagccaaactgaaa

SEQ ID NO: 283921 - DNA, 25 bp, Homo sapien
aaaagtcccaccaatgccggcagcg

SEQ ID NO: 283922 - DNA, 25 bp, Homo sapien
aagtgccacctagtggatgcctggc

SEQ ID NO: 283923 - DNA, 25 bp, Homo sapien
tacccactcagacagggacagtctc

SEQ ID NO: 283924 - DNA, 25 bp, Homo sapien
gtgggcagctgttagccagtaccca

SEQ ID NO: 283925 - DNA, 25 bp, Homo sapien
gaaagtgccacctagtggatgcctg

SEQ ID NO: 283926 - DNA, 25 bp, Homo sapien
cactcacagaacattggctcgggcc

SEQ ID NO: 283927 - DNA, 25 bp, Homo sapien
caggctaccatcaagggccagagat

SEQ ID NO: 283928 - DNA, 25 bp, Homo sapien
tcagtgctgtgtgaagccccacatc

SEQ ID NO: 283929 - DNA, 25 bp, Homo sapien
ggagatggacacaaaacagccctca

SEQ ID NO: 283930 - DNA, 25 bp, Homo sapien
catgatgtctagttaccctggcctg

SEQ ID NO: 283931 - DNA, 25 bp, Homo sapien
tggtttagctagaatcctcatcctc

SEQ ID NO: 283932 - DNA, 25 bp, Homo sapien
gcaagtatcgtgctaagttggttta

SEQ ID NO: 283933 - DNA, 25 bp, Homo sapien
tctcaaaatctaatcggcctcctta

SEQ ID NO: 283934 - DNA, 25 bp, Homo sapien
cacagcgttagccacaggtcagagt

SEQ ID NO: 283935 - DNA, 25 bp, Homo sapien
cagagttgtaccaggtagtttggac

SEQ ID NO: 283936 - DNA, 25 bp, Homo sapien
atgacttgctcacagcgttagccac

SEQ ID NO: 283937 - DNA, 25 bp, Homo sapien
tagccacaggtcagagttgtaccag

SEQ ID NO: 283938 - DNA, 25 bp, Homo sapien
caaagggctccattccacaagactg

SEQ ID NO: 283939 - DNA, 25 bp, Homo sapien
caatggctcacgaaactcaggaagg

SEQ ID NO: 283940 - DNA, 25 bp, Homo sapien
gaaagatgcactgggcctgatcctg

SEQ ID NO: 283941 - DNA, 25 bp, Homo sapien
caggcaatgacaacaggcaccgtgt

SEQ ID NO: 283942 - DNA, 25 bp, Homo sapien
ctgtggacagaaatgccagtcagcc

SEQ ID NO: 283943 - DNA, 25 bp, Homo sapien
tgtggacagaaatgccagtcagcct

SEQ ID NO: 283944 - DNA, 25 bp, Homo sapien
gcagtggctctccagtacgcgcctg

SEQ ID NO: 283945 - DNA, 25 bp, Homo sapien
cataagcaggactaggtgatcgggc

SEQ ID NO: 283946 - DNA, 25 bp, Homo sapien
gatacagagacacgatgagggacca

SEQ ID NO: 283947 - DNA, 25 bp, Homo sapien
caagggacctgcaagcagtgctcca

SEQ ID NO: 283948 - DNA, 25 bp, Homo sapien
ttgggggaagtgaaacacacagaaa

SEQ ID NO: 283949 - DNA, 25 bp, Homo sapien
gaagtgaaacacacagaaagagagg

SEQ ID NO: 283950 - DNA, 25 bp, Homo sapien
ggggaagtgaaacacacagaaagag

SEQ ID NO: 283951 - DNA, 25 bp, Homo sapien
cttgggggaagtgaaacacacagaa

SEQ ID NO: 283952 - DNA, 25 bp, Homo sapien
caaagatgttattcaccaggaggga

SEQ ID NO: 283953 - DNA, 25 bp, Homo sapien
ccaaacaggattgctgctgacacca

SEQ ID NO: 283954 - DNA, 25 bp, Homo sapien
gatcatctcaaaggagcctgctttg

SEQ ID NO: 283955 - DNA, 25 bp, Homo sapien
gctttgcggctgaatccaaacagga

SEQ ID NO: 283956 - DNA, 25 bp, Homo sapien
tcctcggagctccttaggggcgctc

SEQ ID NO: 283957 - DNA, 25 bp, Homo sapien
ccccagagccgtaaagatggctgag

SEQ ID NO: 283958 - DNA, 25 bp, Homo sapien
gtccgaccacctgtcccatcacgat

SEQ ID NO: 283959 - DNA, 25 bp, Homo sapien
catcacgatccccagagccgtaaag

SEQ ID NO: 283960 - DNA, 25 bp, Homo sapien
gtgaagaaacgcttttactggtatc

SEQ ID NO: 283961 - DNA, 25 bp, Homo sapien
ctccgaaatactcaatgcatgtggg

SEQ ID NO: 283962 - DNA, 25 bp, Homo sapien
gaaacgcttttactggtatctccga

SEQ ID NO: 283963 - DNA, 25 bp, Homo sapien
tggtatctccgaaatactcaatgca

SEQ ID NO: 283964 - DNA, 25 bp, Homo sapien
gaggcgagctggagcgccccgggca

SEQ ID NO: 283965 - DNA, 25 bp, Homo sapien
caggcctcggtgtctccacagtcaa

SEQ ID NO: 283966 - DNA, 25 bp, Homo sapien
aatgaggaggtagcgcgggctttca

SEQ ID NO: 283967 - DNA, 25 bp, Homo sapien
tgtctccacagtcaatgaggaggta

SEQ ID NO: 283968 - DNA, 25 bp, Homo sapien
ctggagttcttgagtaacagtggct

SEQ ID NO: 283969 - DNA, 25 bp, Homo sapien
ctgcctggcagttaggacaaccact

SEQ ID NO: 283970 - DNA, 25 bp, Homo sapien
gcctggcagttaggacaaccacttg

SEQ ID NO: 283971 - DNA, 25 bp, Homo sapien
agtggctaggtctgatccattctgc

SEQ ID NO: 283972 - DNA, 25 bp, Homo sapien
gcactgggtaggtgaggtcttgcac

SEQ ID NO: 283973 - DNA, 25 bp, Homo sapien
ggtgtttcaccgtgtgtgtgcgcgt

SEQ ID NO: 283974 - DNA, 25 bp, Homo sapien
ccaactctctataggcaggaaggag

SEQ ID NO: 283975 - DNA, 25 bp, Homo sapien
agcctgccccaactctctataggca

SEQ ID NO: 283976 - DNA, 25 bp, Homo sapien
ctgccccaactctctataggcagga

SEQ ID NO: 283977 - DNA, 25 bp, Homo sapien
ccccaactctctataggcaggaagg

SEQ ID NO: 283978 - DNA, 25 bp, Homo sapien
tatagcttaaagcagtgcctcacag

SEQ ID NO: 283979 - DNA, 25 bp, Homo sapien
ggcgttgattcacggtagcctgaca

SEQ ID NO: 283980 - DNA, 25 bp, Homo sapien
taccagcaattaggccttgggagag

SEQ ID NO: 283981 - DNA, 25 bp, Homo sapien
tccagctagcaaaagaatcccaaat

SEQ ID NO: 283982 - DNA, 25 bp, Homo sapien
cccagaggacttagaggcttaggct

SEQ ID NO: 283983 - DNA, 25 bp, Homo sapien
cagtgagggcgtaccatgttccagc

SEQ ID NO: 283984 - DNA, 25 bp, Homo sapien
ccaggagttggtgctaccgtaacaa

SEQ ID NO: 283985 - DNA, 25 bp, Homo sapien
gacaggacatgactattgcagcaca

SEQ ID NO: 283986 - DNA, 25 bp, Homo sapien
tgccaagtccccggagccccggagc

SEQ ID NO: 283987 - DNA, 25 bp, Homo sapien
ctgccaagtccccggagccccggag

SEQ ID NO: 283988 - DNA, 25 bp, Homo sapien
aaccacgaggcttgtcacctgtctc

SEQ ID NO: 283989 - DNA, 25 bp, Homo sapien
agaaccacgaggcttgtcacctgtc

SEQ ID NO: 283990 - DNA, 25 bp, Homo sapien
tgtctcctcagggcccgatgctgga

SEQ ID NO: 283991 - DNA, 25 bp, Homo sapien
cccagaaccacgaggcttgtcacct

SEQ ID NO: 283992 - DNA, 25 bp, Homo sapien
tcctgccttccggaacacggaggag

SEQ ID NO: 283993 - DNA, 25 bp, Homo sapien
taacaaccgccgtgagcagctcgca

SEQ ID NO: 283994 - DNA, 25 bp, Homo sapien
tggatcttcgcttccggcactcctg

SEQ ID NO: 283995 - DNA, 25 bp, Homo sapien
tcccagtcccgatgatcgcgtactg

SEQ ID NO: 283996 - DNA, 25 bp, Homo sapien
ggaggaagggcaccctccagactca

SEQ ID NO: 283997 - DNA, 25 bp, Homo sapien
tggagtgtaaactggtttaatgcag

SEQ ID NO: 283998 - DNA, 25 bp, Homo sapien
tggtggaggaagggcaccctccaga

SEQ ID NO: 283999 - DNA, 25 bp, Homo sapien
actggtttaatgcagaggacctggg

SEQ ID NO: 284000 - DNA, 25 bp, Homo sapien
cagtttccgcatctcaaaatggtgc

SEQ ID NO: 284001 - DNA, 25 bp, Homo sapien
ggaagtgacccgcaaaccgtagatg

SEQ ID NO: 284002 - DNA, 25 bp, Homo sapien
ggaacttggtcaatcaatcacccaa

SEQ ID NO: 284003 - DNA, 25 bp, Homo sapien
gctagcactacaggcgaagaccacc

SEQ ID NO: 284004 - DNA, 25 bp, Homo sapien
gacccaccctctcgattaccacaca

SEQ ID NO: 284005 - DNA, 25 bp, Homo sapien
cacagtgaagatgctcccccagcag

SEQ ID NO: 284006 - DNA, 25 bp, Homo sapien
gctgtacccaccgatgagcagcacg

SEQ ID NO: 284007 - DNA, 25 bp, Homo sapien
acgcgccgacccaccctctcgatta

SEQ ID NO: 284008 - DNA, 25 bp, Homo sapien
gggcgggggtgaggtggaagtcagc

SEQ ID NO: 284009 - DNA, 25 bp, Homo sapien
gtgaggtggaagtcagcccggcctg

SEQ ID NO: 284010 - DNA, 25 bp, Homo sapien
gtcagcccggcctggaccccccagc

SEQ ID NO: 284011 - DNA, 25 bp, Homo sapien
cccagccctcatccaccccagctac

SEQ ID NO: 284012 - DNA, 25 bp, Homo sapien
aggatgaaggcaaagatgcaggcca

SEQ ID NO: 284013 - DNA, 25 bp, Homo sapien
catggccaggtagagtgtccagggg

SEQ ID NO: 284014 - DNA, 25 bp, Homo sapien
cagggccaatgccaaagctgaggat

SEQ ID NO: 284015 - DNA, 25 bp, Homo sapien
aaggcaaagatgcaggccatggcca

SEQ ID NO: 284016 - DNA, 25 bp, Homo sapien
cccagtctgtatggggggcccctca

SEQ ID NO: 284017 - DNA, 25 bp, Homo sapien
cagaagccccggcatgaggtggtct

SEQ ID NO: 284018 - DNA, 25 bp, Homo sapien
agccccggcatgaggtggtctctga

SEQ ID NO: 284019 - DNA, 25 bp, Homo sapien
acccaggcacccatcactccttcta

SEQ ID NO: 284020 - DNA, 25 bp, Homo sapien
atgagcgccccgcagaccatgcagg

SEQ ID NO: 284021 - DNA, 25 bp, Homo sapien
ccgaccaggatgagcatgatccaca

SEQ ID NO: 284022 - DNA, 25 bp, Homo sapien
catgataaagggaaatcccaggccg

SEQ ID NO: 284023 - DNA, 25 bp, Homo sapien
ggcctggccatctggtcaaacagct

SEQ ID NO: 284024 - DNA, 25 bp, Homo sapien
caagacctggtgtgtctccatcaac

SEQ ID NO: 284025 - DNA, 25 bp, Homo sapien
cccatgacaggtcgtgaggaggcat

SEQ ID NO: 284026 - DNA, 25 bp, Homo sapien
gaggaggcatttgcccccctctttg

SEQ ID NO: 284027 - DNA, 25 bp, Homo sapien
tcaacccctaaacagaaggcccatg

SEQ ID NO: 284028 - DNA, 25 bp, Homo sapien
aggccagtgtagatggccccacaga

SEQ ID NO: 284029 - DNA, 25 bp, Homo sapien
catagaggaagtgggacaaggcctc

SEQ ID NO: 284030 - DNA, 25 bp, Homo sapien
gtaattccttggagatctcttggaa

SEQ ID NO: 284031 - DNA, 25 bp, Homo sapien
gggaagttgagtctgtgtaattcct

SEQ ID NO: 284032 - DNA, 25 bp, Homo sapien
ggaataccacgctcaccattgattg

SEQ ID NO: 284033 - DNA, 25 bp, Homo sapien
ggagtctctcctaatacgtgcaaca

SEQ ID NO: 284034 - DNA, 25 bp, Homo sapien
caaaaactttatctggagccaagcc

SEQ ID NO: 284035 - DNA, 25 bp, Homo sapien
taaaggttccatcttgatcacggtg

SEQ ID NO: 284036 - DNA, 25 bp, Homo sapien
ccaggctgtggttcttagttatagc

SEQ ID NO: 284037 - DNA, 25 bp, Homo sapien
taatccctcatatgatggtacttgg

SEQ ID NO: 284038 - DNA, 25 bp, Homo sapien
tctatgaatcaagacatgggccctc

SEQ ID NO: 284039 - DNA, 25 bp, Homo sapien
taagcccagcaattcatttacccaa

SEQ ID NO: 284040 - DNA, 25 bp, Homo sapien
ccagggaagccatttggagcacaaa

SEQ ID NO: 284041 - DNA, 25 bp, Homo sapien
tcaatggattcttactcatgactcc

SEQ ID NO: 284042 - DNA, 25 bp, Homo sapien
atgactccacgttggaggtctgcag

SEQ ID NO: 284043 - DNA, 25 bp, Homo sapien
atgcctgctctgctcgtggcacgta

SEQ ID NO: 284044 - DNA, 25 bp, Homo sapien
tgtccttcgaggctatctccatatt

SEQ ID NO: 284045 - DNA, 25 bp, Homo sapien
tgtccttcagtaccatggctcctgg

SEQ ID NO: 284046 - DNA, 25 bp, Homo sapien
acctgtcctgtccttcgaggctatc

SEQ ID NO: 284047 - DNA, 25 bp, Homo sapien
tcagccttagttccttgggaaagcc

SEQ ID NO: 284048 - DNA, 25 bp, Homo sapien
gccgcctaaatccagcccgaaaata

SEQ ID NO: 284049 - DNA, 25 bp, Homo sapien
ggagcattgccatcttgaacaaaca

SEQ ID NO: 284050 - DNA, 25 bp, Homo sapien
cataacaaagggttgccttacctgg

SEQ ID NO: 284051 - DNA, 25 bp, Homo sapien
cttacctggccagtgacggagcagg

SEQ ID NO: 284052 - DNA, 25 bp, Homo sapien
gaaagaagataagccatgacatagc

SEQ ID NO: 284053 - DNA, 25 bp, Homo sapien
gcaatccatataccagtctcagtga

SEQ ID NO: 284054 - DNA, 25 bp, Homo sapien
ggtgccaggcatacaagagacattg

SEQ ID NO: 284055 - DNA, 25 bp, Homo sapien
gccatgtgatataggaaggacaccc

SEQ ID NO: 284056 - DNA, 25 bp, Homo sapien
cttacccttccagagatgaagccca

SEQ ID NO: 284057 - DNA, 25 bp, Homo sapien
agttcattccactgcacgcactgag

SEQ ID NO: 284058 - DNA, 25 bp, Homo sapien
tccacttggcggctagaaatcggcc

SEQ ID NO: 284059 - DNA, 25 bp, Homo sapien
taagtcaccgatgttagtcgccagg

SEQ ID NO: 284060 - DNA, 25 bp, Homo sapien
gagacccgcgcagaggcacagacgc

SEQ ID NO: 284061 - DNA, 25 bp, Homo sapien
tgacttctcggacaccactgtggtc

SEQ ID NO: 284062 - DNA, 25 bp, Homo sapien
agaaggaccaggagacccgcgcaga

SEQ ID NO: 284063 - DNA, 25 bp, Homo sapien
ggccgccgctgagctacgtgcctga

SEQ ID NO: 284064 - DNA, 25 bp, Homo sapien
agctcggagaggaacccgtccggca

SEQ ID NO: 284065 - DNA, 25 bp, Homo sapien
gggcacgttggtgtttacgatgaac

SEQ ID NO: 284066 - DNA, 25 bp, Homo sapien
tggtgtttacgatgaacatcggcat

SEQ ID NO: 284067 - DNA, 25 bp, Homo sapien
ctcggagaggaacccgtccggcacg

SEQ ID NO: 284068 - DNA, 25 bp, Homo sapien
ctgcgaggaaagggcgcggtcagcc

SEQ ID NO: 284069 - DNA, 25 bp, Homo sapien
aaagggcgcggtcagcccgccccag

SEQ ID NO: 284070 - DNA, 25 bp, Homo sapien
tcagcccgccccagcgacctcgtcg

SEQ ID NO: 284071 - DNA, 25 bp, Homo sapien
gaggaaagggcgcggtcagcccgcc

SEQ ID NO: 284072 - DNA, 25 bp, Homo sapien
ccgggaccacgtgcaccgcgatgta

SEQ ID NO: 284073 - DNA, 25 bp, Homo sapien
ccgatcttgccgatgctgtgcaggc

SEQ ID NO: 284074 - DNA, 25 bp, Homo sapien
tgcaggctgcagagcgcgcacggct

SEQ ID NO: 284075 - DNA, 25 bp, Homo sapien
ctggagccgccgaaggccatgagct

SEQ ID NO: 284076 - DNA, 25 bp, Homo sapien
gtccgggctgatgcgcaggcgctcg

SEQ ID NO: 284077 - DNA, 25 bp, Homo sapien
cacagcagcttgctgtaggagcggt

SEQ ID NO: 284078 - DNA, 25 bp, Homo sapien
gctcggccagcaggccgcacagcag

SEQ ID NO: 284079 - DNA, 25 bp, Homo sapien
acagcagcttgctgtaggagcggtt

SEQ ID NO: 284080 - DNA, 25 bp, Homo sapien
ggaggccggactcagcgggtggctc

SEQ ID NO: 284081 - DNA, 25 bp, Homo sapien
aggaggccggactcagcgggtggct

SEQ ID NO: 284082 - DNA, 25 bp, Homo sapien
gaggaggccggactcagcgggtggc

SEQ ID NO: 284083 - DNA, 25 bp, Homo sapien
ggtggagttgttccagcccacattg

SEQ ID NO: 284084 - DNA, 25 bp, Homo sapien
cacattggccgcgttcatgtcgtaa

SEQ ID NO: 284085 - DNA, 25 bp, Homo sapien
taggcgaaggtggagttgttccagc

SEQ ID NO: 284086 - DNA, 25 bp, Homo sapien
gccgcgttcatgtcgtaatagttga

SEQ ID NO: 284087 - DNA, 25 bp, Homo sapien
cgggttcccgggtggagccagcgca

SEQ ID NO: 284088 - DNA, 25 bp, Homo sapien
ggttcccgggtggagccagcgcaga

SEQ ID NO: 284089 - DNA, 25 bp, Homo sapien
ccagcgcagacagcgtgggtccctg

SEQ ID NO: 284090 - DNA, 25 bp, Homo sapien
agcgcagacagcgtgggtccctgcg

SEQ ID NO: 284091 - DNA, 25 bp, Homo sapien
cagagacatggtcagtctcttcatt

SEQ ID NO: 284092 - DNA, 25 bp, Homo sapien
ttctccaataacgttcagggtgtta

SEQ ID NO: 284093 - DNA, 25 bp, Homo sapien
tagttctccaataacgttcagggtg

SEQ ID NO: 284094 - DNA, 25 bp, Homo sapien
gagacatggtcagtctcttcattta

SEQ ID NO: 284095 - DNA, 25 bp, Homo sapien
aggacactagctgtcctccactggg

SEQ ID NO: 284096 - DNA, 25 bp, Homo sapien
ggggatgttcccagtcttgagcagc

SEQ ID NO: 284097 - DNA, 25 bp, Homo sapien
agctgtgcttcctcatgcgactgct

SEQ ID NO: 284098 - DNA, 25 bp, Homo sapien
gactgctggcttgcatccccagcat

SEQ ID NO: 284099 - DNA, 25 bp, Homo sapien
atggacagtgggtgatatctgttgt

SEQ ID NO: 284100 - DNA, 25 bp, Homo sapien
aaaatggtataggatatcttgtggt

SEQ ID NO: 284101 - DNA, 25 bp, Homo sapien
aggatatcttgtggtttaagcccat

SEQ ID NO: 284102 - DNA, 25 bp, Homo sapien
tataggatatcttgtggtttaagcc

SEQ ID NO: 284103 - DNA, 25 bp, Homo sapien
ggtataggatatcttgtggtttaag

SEQ ID NO: 284104 - DNA, 25 bp, Homo sapien
ttaaatagggaggaagtctcactat

SEQ ID NO: 284105 - DNA, 25 bp, Homo sapien
cctccctgaattcaagcagtgttcc

SEQ ID NO: 284106 - DNA, 25 bp, Homo sapien
taaatagggaggaagtctcactatg

SEQ ID NO: 284107 - DNA, 25 bp, Homo sapien
cttgacctccctgaattcaagcagt

SEQ ID NO: 284108 - DNA, 25 bp, Homo sapien
cttggaaaaattcatgatgaacatg

SEQ ID NO: 284109 - DNA, 25 bp, Homo sapien
ttggaaaaattcatgatgaacatgg

SEQ ID NO: 284110 - DNA, 25 bp, Homo sapien
ttaaatgtttgttcggcataattca

SEQ ID NO: 284111 - DNA, 25 bp, Homo sapien
taaatgtttgttcggcataattcag

SEQ ID NO: 284112 - DNA, 25 bp, Homo sapien
tttaaatgtttgttcggcataattc

SEQ ID NO: 284113 - DNA, 25 bp, Homo sapien
tgcttctacagcctgtgaaagctga

SEQ ID NO: 284114 - DNA, 25 bp, Homo sapien
ggcgggttgtataagcatattggat

SEQ ID NO: 284115 - DNA, 25 bp, Homo sapien
aattcaaggcgggttgtataagcat

SEQ ID NO: 284116 - DNA, 25 bp, Homo sapien
aagaaggcaagctgtagatagcagg

SEQ ID NO: 284117 - DNA, 25 bp, Homo sapien
gctgagatctacactgggcggcaga

SEQ ID NO: 284118 - DNA, 25 bp, Homo sapien
agctgagatctacactgggcggcag

SEQ ID NO: 284119 - DNA, 25 bp, Homo sapien
gagctgagatctacactgggcggca

SEQ ID NO: 284120 - DNA, 25 bp, Homo sapien
tgagatctacactgggcggcagagc

SEQ ID NO: 284121 - DNA, 25 bp, Homo sapien
ttgtgagccactttatgcaaatctg

SEQ ID NO: 284122 - DNA, 25 bp, Homo sapien
gtgagccactttatgcaaatctgta

SEQ ID NO: 284123 - DNA, 25 bp, Homo sapien
gtataattgtgagccactttatgca

SEQ ID NO: 284124 - DNA, 25 bp, Homo sapien
aattgtgagccactttatgcaaatc

SEQ ID NO: 284125 - DNA, 25 bp, Homo sapien
gttccaaatcatgacagacccaagt

SEQ ID NO: 284126 - DNA, 25 bp, Homo sapien
tcaggaatgttcatgtcatcactag

SEQ ID NO: 284127 - DNA, 25 bp, Homo sapien
catgtctgccaggaactgtggtgaa

SEQ ID NO: 284128 - DNA, 25 bp, Homo sapien
tcaagaactttgcaattttgctggc

SEQ ID NO: 284129 - DNA, 25 bp, Homo sapien
cattgcttccataatgagtttctga

SEQ ID NO: 284130 - DNA, 25 bp, Homo sapien
attgcttccataatgagtttctgac

SEQ ID NO: 284131 - DNA, 25 bp, Homo sapien
tcattgcttccataatgagtttctg

SEQ ID NO: 284132 - DNA, 25 bp, Homo sapien
ttcattgcttccataatgagtttct

SEQ ID NO: 284133 - DNA, 25 bp, Homo sapien
tttgcctgaggactttgtaacgtgg

SEQ ID NO: 284134 - DNA, 25 bp, Homo sapien
tgaggactttgtaacgtgggtcatc

SEQ ID NO: 284135 - DNA, 25 bp, Homo sapien
cctgaggactttgtaacgtgggtca

SEQ ID NO: 284136 - DNA, 25 bp, Homo sapien
gattttgcctgaggactttgtaacg

SEQ ID NO: 284137 - DNA, 25 bp, Homo sapien
caactgtgctcctaggagtagacac

SEQ ID NO: 284138 - DNA, 25 bp, Homo sapien
gctgtgttcagatggccccagccct

SEQ ID NO: 284139 - DNA, 25 bp, Homo sapien
ctgagggtcccaaatttccgctgtg

SEQ ID NO: 284140 - DNA, 25 bp, Homo sapien
taagttttccacttagcactgccac

SEQ ID NO: 284141 - DNA, 25 bp, Homo sapien
ggccggcactagattgaaggctgca

SEQ ID NO: 284142 - DNA, 25 bp, Homo sapien
gtggaccccggacatctttcaagac

SEQ ID NO: 284143 - DNA, 25 bp, Homo sapien
taatggaggacatgtttacgagtaa

SEQ ID NO: 284144 - DNA, 25 bp, Homo sapien
cttagatttgtgttgcggcagggca

SEQ ID NO: 284145 - DNA, 25 bp, Homo sapien
cagcagtccgctccgggtcgttact

SEQ ID NO: 284146 - DNA, 25 bp, Homo sapien
agcatacagcagtccgctccgggtc

SEQ ID NO: 284147 - DNA, 25 bp, Homo sapien
gctccgggtcgttactcctatgcca

SEQ ID NO: 284148 - DNA, 25 bp, Homo sapien
tccgctccgggtcgttactcctatg

SEQ ID NO: 284149 - DNA, 25 bp, Homo sapien
agtcaagttggatgtgagagcatca

SEQ ID NO: 284150 - DNA, 25 bp, Homo sapien
gtcaagttggatgtgagagcatcat

SEQ ID NO: 284151 - DNA, 25 bp, Homo sapien
ttgattctactgtagtccacatgtc

SEQ ID NO: 284152 - DNA, 25 bp, Homo sapien
tgattctactgtagtccacatgtct

SEQ ID NO: 284153 - DNA, 25 bp, Homo sapien
cattgattctactgtagtccacatg

SEQ ID NO: 284154 - DNA, 25 bp, Homo sapien
tcattgattctactgtagtccacat

SEQ ID NO: 284155 - DNA, 25 bp, Homo sapien
cgggtccactctttgtctgggatca

SEQ ID NO: 284156 - DNA, 25 bp, Homo sapien
gagcaacccgggtccactctttgtc

SEQ ID NO: 284157 - DNA, 25 bp, Homo sapien
ctttgtctgggatcatgagcctcca

SEQ ID NO: 284158 - DNA, 25 bp, Homo sapien
cactctttgtctgggatcatgagcc

SEQ ID NO: 284159 - DNA, 25 bp, Homo sapien
gcataacagaaagctcgcactcgtc

SEQ ID NO: 284160 - DNA, 25 bp, Homo sapien
ttgccacccgcatgagtaagatgtg

SEQ ID NO: 284161 - DNA, 25 bp, Homo sapien
tgaataaatgagatccccagctagc

SEQ ID NO: 284162 - DNA, 25 bp, Homo sapien
gatgctggcgctactgctggacaaa

SEQ ID NO: 284163 - DNA, 25 bp, Homo sapien
gcagaaggggccggtcaggggcact

SEQ ID NO: 284164 - DNA, 25 bp, Homo sapien
tgcagaaggggccggtcaggggcac

SEQ ID NO: 284165 - DNA, 25 bp, Homo sapien
cagaaggggccggtcaggggcactg

SEQ ID NO: 284166 - DNA, 25 bp, Homo sapien
ctgcagaaggggccggtcaggggca

SEQ ID NO: 284167 - DNA, 25 bp, Homo sapien
cttgcggcacaggtagtaaaggatg

SEQ ID NO: 284168 - DNA, 25 bp, Homo sapien
acgaactcatccacacgggcacgtg

SEQ ID NO: 284169 - DNA, 25 bp, Homo sapien
caccagtgcgatggtgcgctgtact

SEQ ID NO: 284170 - DNA, 25 bp, Homo sapien
gtgcgtgcgggtctggcgggcacca

SEQ ID NO: 284171 - DNA, 25 bp, Homo sapien
tgggcagctgaaaggccgtgtgttg

SEQ ID NO: 284172 - DNA, 25 bp, Homo sapien
tcccggtgatgaacatcttatcctg

SEQ ID NO: 284173 - DNA, 25 bp, Homo sapien
tggttcccggtgatgaacatcttat

SEQ ID NO: 284174 - DNA, 25 bp, Homo sapien
atttggttcccggtgatgaacatct

SEQ ID NO: 284175 - DNA, 25 bp, Homo sapien
gttcccggtgatgaacatcttatcc

SEQ ID NO: 284176 - DNA, 25 bp, Homo sapien
ttgaaaagtcccagtcggccaactg

SEQ ID NO: 284177 - DNA, 25 bp, Homo sapien
cttggagctgttgaggaagacatta

SEQ ID NO: 284178 - DNA, 25 bp, Homo sapien
catacgccactcagctagcttggag

SEQ ID NO: 284179 - DNA, 25 bp, Homo sapien
cattagtcgatcatgggcctcccta

SEQ ID NO: 284180 - DNA, 25 bp, Homo sapien
caatggggtggggcgtgggagggca

SEQ ID NO: 284181 - DNA, 25 bp, Homo sapien
gcgtgggagggcagacctaaaccca

SEQ ID NO: 284182 - DNA, 25 bp, Homo sapien
tggggcgtgggagggcagacctaaa

SEQ ID NO: 284183 - DNA, 25 bp, Homo sapien
tggggtggggcgtgggagggcagac

SEQ ID NO: 284184 - DNA, 25 bp, Homo sapien
tccactgtgcgaagctcgaagggga

SEQ ID NO: 284185 - DNA, 25 bp, Homo sapien
ccactgtgcgaagctcgaaggggat

SEQ ID NO: 284186 - DNA, 25 bp, Homo sapien
gccattcttggcgaagatgtagact

SEQ ID NO: 284187 - DNA, 25 bp, Homo sapien
cgaagatgtagactgaacggcaggg

SEQ ID NO: 284188 - DNA, 25 bp, Homo sapien
acaggcagggatccgcggccaatat

SEQ ID NO: 284189 - DNA, 25 bp, Homo sapien
gcattcttggcccaactgcaaagca

SEQ ID NO: 284190 - DNA, 25 bp, Homo sapien
ttcttggcccaactgcaaagcagcg

SEQ ID NO: 284191 - DNA, 25 bp, Homo sapien
gggacaggcagggatccgcggccaa

SEQ ID NO: 284192 - DNA, 25 bp, Homo sapien
ggggttcacctgggcaaaggcatcg

SEQ ID NO: 284193 - DNA, 25 bp, Homo sapien
gggggttcacctgggcaaaggcatc

SEQ ID NO: 284194 - DNA, 25 bp, Homo sapien
cttcctcagggggttcacctgggca

SEQ ID NO: 284195 - DNA, 25 bp, Homo sapien
cctcagggggttcacctgggcaaag

SEQ ID NO: 284196 - DNA, 25 bp, Homo sapien
ctctcagccaaggtgaagtccccat

SEQ ID NO: 284197 - DNA, 25 bp, Homo sapien
ccaaggtgaagtccccatccttcaa

SEQ ID NO: 284198 - DNA, 25 bp, Homo sapien
tctcagccaaggtgaagtccccatc

SEQ ID NO: 284199 - DNA, 25 bp, Homo sapien
cagccaaggtgaagtccccatcctt

SEQ ID NO: 284200 - DNA, 25 bp, Homo sapien
gctcatatagagcaagctagccaca

SEQ ID NO: 284201 - DNA, 25 bp, Homo sapien
tacatgcagctcatatagagcaagc

SEQ ID NO: 284202 - DNA, 25 bp, Homo sapien
tgcagctcatatagagcaagctagc

SEQ ID NO: 284203 - DNA, 25 bp, Homo sapien
cagctcatatagagcaagctagcca

SEQ ID NO: 284204 - DNA, 25 bp, Homo sapien
tgaactgtttgagggacggccacga

SEQ ID NO: 284205 - DNA, 25 bp, Homo sapien
agccggtggctctcggctatgaact

SEQ ID NO: 284206 - DNA, 25 bp, Homo sapien
gctttcctgggtgctgagctatgcc

SEQ ID NO: 284207 - DNA, 25 bp, Homo sapien
tcttgagcatcctggaacaggcggc

SEQ ID NO: 284208 - DNA, 25 bp, Homo sapien
tggaacgcaacaggactgccatgga

SEQ ID NO: 284209 - DNA, 25 bp, Homo sapien
gaaggtggaacgcaacaggactgcc

SEQ ID NO: 284210 - DNA, 25 bp, Homo sapien
ggagaaggtggaacgcaacaggact

SEQ ID NO: 284211 - DNA, 25 bp, Homo sapien
caatggctggaggacaagttcctgg

SEQ ID NO: 284212 - DNA, 25 bp, Homo sapien
ggtatccatctgacctgcaggctcg

SEQ ID NO: 284213 - DNA, 25 bp, Homo sapien
cgtgttcatgagtacctgggctggc

SEQ ID NO: 284214 - DNA, 25 bp, Homo sapien
ggcatgccgactgcatccgtggcac

SEQ ID NO: 284215 - DNA, 25 bp, Homo sapien
gtggcacctttggtatacccctgtg

SEQ ID NO: 284216 - DNA, 25 bp, Homo sapien
gacttgtcgcagactacccaatcta

SEQ ID NO: 284217 - DNA, 25 bp, Homo sapien
ttccagccttttctgagccgcaggg

SEQ ID NO: 284218 - DNA, 25 bp, Homo sapien
ctgaaaagagcctctagtgacttgt

SEQ ID NO: 284219 - DNA, 25 bp, Homo sapien
cactgttgcgcatttgttcaacaaa

SEQ ID NO: 284220 - DNA, 25 bp, Homo sapien
tcagatgtccgtgcgctggggcctt

SEQ ID NO: 284221 - DNA, 25 bp, Homo sapien
tcgtttctgggtcagggcgacgcct

SEQ ID NO: 284222 - DNA, 25 bp, Homo sapien
tcagggcgacgcctggaactgggca

SEQ ID NO: 284223 - DNA, 25 bp, Homo sapien
gacggcggcgcccagtcgtttctgg

SEQ ID NO: 284224 - DNA, 25 bp, Homo sapien
ccacaaagtaaccttgtatatgtat

SEQ ID NO: 284225 - DNA, 25 bp, Homo sapien
cagacatcagagaaacagatcccgt

SEQ ID NO: 284226 - DNA, 25 bp, Homo sapien
gtctgatgggtttctaagaacatct

SEQ ID NO: 284227 - DNA, 25 bp, Homo sapien
tctgacgtatcttttaccgagatcc

SEQ ID NO: 284228 - DNA, 25 bp, Homo sapien
ccactcatagccaccagtagctctc

SEQ ID NO: 284229 - DNA, 25 bp, Homo sapien
actcatagccaccagtagctctcat

SEQ ID NO: 284230 - DNA, 25 bp, Homo sapien
ttctttccactcatagccaccagta

SEQ ID NO: 284231 - DNA, 25 bp, Homo sapien
tttccactcatagccaccagtagct

SEQ ID NO: 284232 - DNA, 25 bp, Homo sapien
ctcgggtggcactgactcgcccagg

SEQ ID NO: 284233 - DNA, 25 bp, Homo sapien
cgggtggcactgactcgcccaggaa

SEQ ID NO: 284234 - DNA, 25 bp, Homo sapien
tgactcgcccaggaacacagggatt

SEQ ID NO: 284235 - DNA, 25 bp, Homo sapien
cactgactcgcccaggaacacaggg

SEQ ID NO: 284236 - DNA, 25 bp, Homo sapien
agctccgtgattgccaccaagccag

SEQ ID NO: 284237 - DNA, 25 bp, Homo sapien
aggaacttgtcctcgagcagctgca

SEQ ID NO: 284238 - DNA, 25 bp, Homo sapien
gccacagagatacggggcccagtaa

SEQ ID NO: 284239 - DNA, 25 bp, Homo sapien
agctgcaggcatccgtccagctcag

SEQ ID NO: 284240 - DNA, 25 bp, Homo sapien
tgggtccgctttcaaagactcagca

SEQ ID NO: 284241 - DNA, 25 bp, Homo sapien
gctgcattaaggtcttcagattctc

SEQ ID NO: 284242 - DNA, 25 bp, Homo sapien
taacagcaggttctactggaggcag

SEQ ID NO: 284243 - DNA, 25 bp, Homo sapien
tgctgccaccgtgggtccgctttca

SEQ ID NO: 284244 - DNA, 25 bp, Homo sapien
caagctcttttcagaggtcacatgg

SEQ ID NO: 284245 - DNA, 25 bp, Homo sapien
taggagacaaaaggaatgcaggcat

SEQ ID NO: 284246 - DNA, 25 bp, Homo sapien
tgcaggcatgatatctggaggaact

SEQ ID NO: 284247 - DNA, 25 bp, Homo sapien
ggtcaagtaagcgtttgcccaagct

SEQ ID NO: 284248 - DNA, 25 bp, Homo sapien
gcaaggccttgaatgcaaagttcaa

SEQ ID NO: 284249 - DNA, 25 bp, Homo sapien
gccttgaatgcaaagttcaatgact

SEQ ID NO: 284250 - DNA, 25 bp, Homo sapien
aaggccttgaatgcaaagttcaatg

SEQ ID NO: 284251 - DNA, 25 bp, Homo sapien
ggccttgaatgcaaagttcaatgac

SEQ ID NO: 284252 - DNA, 25 bp, Homo sapien
ggctggggaggtcagggaagtctcc

SEQ ID NO: 284253 - DNA, 25 bp, Homo sapien
tccctggagaagagacagggtgcca

SEQ ID NO: 284254 - DNA, 25 bp, Homo sapien
gaagtctccctggagaagagacagg

SEQ ID NO: 284255 - DNA, 25 bp, Homo sapien
gaagagacagggtgccaaatgccaa

SEQ ID NO: 284256 - DNA, 25 bp, Homo sapien
ggtcacccctcatcgatgatacatg

SEQ ID NO: 284257 - DNA, 25 bp, Homo sapien
caggtcacccctcatcgatgataca

SEQ ID NO: 284258 - DNA, 25 bp, Homo sapien
atcgatgatacatgctcagtccggg

SEQ ID NO: 284259 - DNA, 25 bp, Homo sapien
ccctcatcgatgatacatgctcagt

SEQ ID NO: 284260 - DNA, 25 bp, Homo sapien
tcaaggttatgaggaggcatgggag

SEQ ID NO: 284261 - DNA, 25 bp, Homo sapien
tcctgcaaggaggttcatgaaccag

SEQ ID NO: 284262 - DNA, 25 bp, Homo sapien
ttgtggaacacaacatcgccccaca

SEQ ID NO: 284263 - DNA, 25 bp, Homo sapien
ttcccttcctgcaaggaggttcatg

SEQ ID NO: 284264 - DNA, 25 bp, Homo sapien
gatatcagaaggtctgagacacacg

SEQ ID NO: 284265 - DNA, 25 bp, Homo sapien
caggtaaatatgacagtcctaaggg

SEQ ID NO: 284266 - DNA, 25 bp, Homo sapien
tctgagacacacgacaggtaaatat

SEQ ID NO: 284267 - DNA, 25 bp, Homo sapien
gatgactcagatatcagaaggtctg

SEQ ID NO: 284268 - DNA, 25 bp, Homo sapien
ttgacatctgcctgtgtagcctctt

SEQ ID NO: 284269 - DNA, 25 bp, Homo sapien
gcctggtccccattgacatctgcct

SEQ ID NO: 284270 - DNA, 25 bp, Homo sapien
tctgcctgtgtagcctcttgtgccg

SEQ ID NO: 284271 - DNA, 25 bp, Homo sapien
cctcttgtgccggtggtgagccact

SEQ ID NO: 284272 - DNA, 25 bp, Homo sapien
ggcgggcagaggaacggaaacagct

SEQ ID NO: 284273 - DNA, 25 bp, Homo sapien
gcggcgcagagtcgtttctccagcc

SEQ ID NO: 284274 - DNA, 25 bp, Homo sapien
cagcggcggcgcagagtcgtttctc

SEQ ID NO: 284275 - DNA, 25 bp, Homo sapien
gcgggcaaattcgtgtccagctcca

SEQ ID NO: 284276 - DNA, 25 bp, Homo sapien
ggcgggcaaattcgtgtccagctcc

SEQ ID NO: 284277 - DNA, 25 bp, Homo sapien
tcgccccgtgctgcccggcccacgc

SEQ ID NO: 284278 - DNA, 25 bp, Homo sapien
ctcccctcgccccgtgctgcccggc

SEQ ID NO: 284279 - DNA, 25 bp, Homo sapien
ccccgtgctgcccggcccacgctta

SEQ ID NO: 284280 - DNA, 25 bp, Homo sapien
ctcgccccgtgctgcccggcccacg

SEQ ID NO: 284281 - DNA, 25 bp, Homo sapien
cagagcttggcgtgaggaaaggagt

SEQ ID NO: 284282 - DNA, 25 bp, Homo sapien
agtcagagcttggcgtgaggaaagg

SEQ ID NO: 284283 - DNA, 25 bp, Homo sapien
ctggggaaaagattcggggtcactg

SEQ ID NO: 284284 - DNA, 25 bp, Homo sapien
gtcactgtcggggaggcggagcagg

SEQ ID NO: 284285 - DNA, 25 bp, Homo sapien
ccgagcgcgcgaaagccgaaacgcg

SEQ ID NO: 284286 - DNA, 25 bp, Homo sapien
cgaaagccgaaacgcgcagtgttcg

SEQ ID NO: 284287 - DNA, 25 bp, Homo sapien
gagcgcgcgaaagccgaaacgcgca

SEQ ID NO: 284288 - DNA, 25 bp, Homo sapien
cgcgcgaaagccgaaacgcgcagtg

SEQ ID NO: 284289 - DNA, 25 bp, Homo sapien
catgaaaagttttgcccgaagttgg

SEQ ID NO: 284290 - DNA, 25 bp, Homo sapien
acatgaaaagttttgcccgaagttg

SEQ ID NO: 284291 - DNA, 25 bp, Homo sapien
ctgagggggacatgaaaagttttgc

SEQ ID NO: 284292 - DNA, 25 bp, Homo sapien
tgcccgaagttggagccggccgggc

SEQ ID NO: 284293 - DNA, 25 bp, Homo sapien
actacgccgatggaggagatggaca

SEQ ID NO: 284294 - DNA, 25 bp, Homo sapien
cagggctagctccttggtgagaaac

SEQ ID NO: 284295 - DNA, 25 bp, Homo sapien
tgcggttgtcctcggcggtgcccac

SEQ ID NO: 284296 - DNA, 25 bp, Homo sapien
agggctcggtggacccgctcagcgc

SEQ ID NO: 284297 - DNA, 25 bp, Homo sapien
gtggctccagtctgcggcagtccca

SEQ ID NO: 284298 - DNA, 25 bp, Homo sapien
catggatcccctactacccctacgc

SEQ ID NO: 284299 - DNA, 25 bp, Homo sapien
tggatcccctactacccctacgcac

SEQ ID NO: 284300 - DNA, 25 bp, Homo sapien
ctgcggcagtcccacatggatcccc

SEQ ID NO: 284301 - DNA, 25 bp, Homo sapien
ccctgatgtgtccttactgggcagg

SEQ ID NO: 284302 - DNA, 25 bp, Homo sapien
gaccctgatgtgtccttactgggca

SEQ ID NO: 284303 - DNA, 25 bp, Homo sapien
accctgatgtgtccttactgggcag

SEQ ID NO: 284304 - DNA, 25 bp, Homo sapien
cagaccctgatgtgtccttactggg

SEQ ID NO: 284305 - DNA, 25 bp, Homo sapien
tcctgctcgcactttgaagatggtc

SEQ ID NO: 284306 - DNA, 25 bp, Homo sapien
tcaatcctgctcgcactttgaagat

SEQ ID NO: 284307 - DNA, 25 bp, Homo sapien
caatcctgctcgcactttgaagatg

SEQ ID NO: 284308 - DNA, 25 bp, Homo sapien
aatcctgctcgcactttgaagatgg

SEQ ID NO: 284309 - DNA, 25 bp, Homo sapien
ctgaggagcagagccagaaattcat

SEQ ID NO: 284310 - DNA, 25 bp, Homo sapien
tcagaacatacccagaattccttct

SEQ ID NO: 284311 - DNA, 25 bp, Homo sapien
gaaaagttctagaaaatcacacttc

SEQ ID NO: 284312 - DNA, 25 bp, Homo sapien
agccacgtgtacctaccctgtcagg

SEQ ID NO: 284313 - DNA, 25 bp, Homo sapien
cacaggtccaaaatacgtaacttca

SEQ ID NO: 284314 - DNA, 25 bp, Homo sapien
tgtctagacatccaggccaatggtc

SEQ ID NO: 284315 - DNA, 25 bp, Homo sapien
ctttaactcggtcacagaacgccag

SEQ ID NO: 284316 - DNA, 25 bp, Homo sapien
ccaggtttgggttgcagacgcttct

SEQ ID NO: 284317 - DNA, 25 bp, Homo sapien
cctcctagacatggatgtggctcaa

SEQ ID NO: 284318 - DNA, 25 bp, Homo sapien
tgcaaaagtgctcatcccggtaatg

SEQ ID NO: 284319 - DNA, 25 bp, Homo sapien
cagttttcagtgaggagcgccacag

SEQ ID NO: 284320 - DNA, 25 bp, Homo sapien
gaaactcagattattgcagcctcga

SEQ ID NO: 284321 - DNA, 25 bp, Homo sapien
taggaacaatccaaaggcagccagc

SEQ ID NO: 284322 - DNA, 25 bp, Homo sapien
agcagggctggtggataagaccgta

SEQ ID NO: 284323 - DNA, 25 bp, Homo sapien
gggctggtggataagaccgtaggga

SEQ ID NO: 284324 - DNA, 25 bp, Homo sapien
gctggtggataagaccgtagggaac

SEQ ID NO: 284325 - DNA, 25 bp, Homo sapien
cagggctggtggataagaccgtagg

SEQ ID NO: 284326 - DNA, 25 bp, Homo sapien
aaccagctttggattatcccgcatg

SEQ ID NO: 284327 - DNA, 25 bp, Homo sapien
tcctgtgatcacataatcctcttct

SEQ ID NO: 284328 - DNA, 25 bp, Homo sapien
gagcttcctcattcaaacatgactt

SEQ ID NO: 284329 - DNA, 25 bp, Homo sapien
gattatcccgcatgcaacattcctg

SEQ ID NO: 284330 - DNA, 25 bp, Homo sapien
tttatgattgggcacggagggatcc

SEQ ID NO: 284331 - DNA, 25 bp, Homo sapien
cccttggagtcctggcagattggca

SEQ ID NO: 284332 - DNA, 25 bp, Homo sapien
ggctgtcctgagtacccacagtggg

SEQ ID NO: 284333 - DNA, 25 bp, Homo sapien
cagattggcaagatagggacggtca

SEQ ID NO: 284334 - DNA, 25 bp, Homo sapien
gaagacaggctgttcatactcccgc

SEQ ID NO: 284335 - DNA, 25 bp, Homo sapien
tacaggtactttacactcatgatcc

SEQ ID NO: 284336 - DNA, 25 bp, Homo sapien
acaaatctcccacggatactcaggg

SEQ ID NO: 284337 - DNA, 25 bp, Homo sapien
caagacatgctatccccatgaggta

SEQ ID NO: 284338 - DNA, 25 bp, Homo sapien
tctaatagggctaggaaccgggcga

SEQ ID NO: 284339 - DNA, 25 bp, Homo sapien
ttgtttgcagaagcgggaggtaccc

SEQ ID NO: 284340 - DNA, 25 bp, Homo sapien
agcttgagagggaaacccacctggc

SEQ ID NO: 284341 - DNA, 25 bp, Homo sapien
gagacgatgggacttccggaaatca

SEQ ID NO: 284342 - DNA, 25 bp, Homo sapien
tagacacgcgccctgctgaaagtaa

SEQ ID NO: 284343 - DNA, 25 bp, Homo sapien
tgaaagtaagggaccgcctctctgg

SEQ ID NO: 284344 - DNA, 25 bp, Homo sapien
taatatgtacagagcacttacccag

SEQ ID NO: 284345 - DNA, 25 bp, Homo sapien
tctggaggatccatcgggcaataag

SEQ ID NO: 284346 - DNA, 25 bp, Homo sapien
cctgagttcgaggagtagacgagac

SEQ ID NO: 284347 - DNA, 25 bp, Homo sapien
ggagctcccacttcgtgcacaggat

SEQ ID NO: 284348 - DNA, 25 bp, Homo sapien
tgggcccgggactctagctgaatct

SEQ ID NO: 284349 - DNA, 25 bp, Homo sapien
caggaatgactgtccgggaacctcc

SEQ ID NO: 284350 - DNA, 25 bp, Homo sapien
cccagaaacgactgggcgccgccgt

SEQ ID NO: 284351 - DNA, 25 bp, Homo sapien
tggaaaggccccagcgcacggacat

SEQ ID NO: 284352 - DNA, 25 bp, Homo sapien
gggaccctcgactggcagggaggac

SEQ ID NO: 284353 - DNA, 25 bp, Homo sapien
tgcccagttccaggcgtcgccctga

SEQ ID NO: 284354 - DNA, 25 bp, Homo sapien
agcacccaattggagcgcaccaccc

SEQ ID NO: 284355 - DNA, 25 bp, Homo sapien
ggggacagcacccaattggagcgca

SEQ ID NO: 284356 - DNA, 25 bp, Homo sapien
gggacagcacccaattggagcgcac

SEQ ID NO: 284357 - DNA, 25 bp, Homo sapien
gacagcacccaattggagcgcacca

SEQ ID NO: 284358 - DNA, 25 bp, Homo sapien
gcagctgtggcaggatcccggcgcg

SEQ ID NO: 284359 - DNA, 25 bp, Homo sapien
gcgctgagcgcggtgtgggcagcag

SEQ ID NO: 284360 - DNA, 25 bp, Homo sapien
gacagcggggatggcagtgaaggcg

SEQ ID NO: 284361 - DNA, 25 bp, Homo sapien
caggatcccggcgcgccgggaaata

SEQ ID NO: 284362 - DNA, 25 bp, Homo sapien
ggctgggacaccaggtcaagaaaca

SEQ ID NO: 284363 - DNA, 25 bp, Homo sapien
ctttgaccaaatccacggtgcgcag

SEQ ID NO: 284364 - DNA, 25 bp, Homo sapien
caaatccacggtgcgcagctctaag

SEQ ID NO: 284365 - DNA, 25 bp, Homo sapien
gcgaagatgtagacggcgcggctgg

SEQ ID NO: 284366 - DNA, 25 bp, Homo sapien
gagcagaaggtaacgttatcctcct

SEQ ID NO: 284367 - DNA, 25 bp, Homo sapien
tcagtccacagcattctctggtggc

SEQ ID NO: 284368 - DNA, 25 bp, Homo sapien
tgcactgggtttgtggacacgcggg

SEQ ID NO: 284369 - DNA, 25 bp, Homo sapien
gagaggctgtgatcccttcaaggcc

SEQ ID NO: 284370 - DNA, 25 bp, Homo sapien
tatgcgtgcattccacgcaagaact

SEQ ID NO: 284371 - DNA, 25 bp, Homo sapien
gctttgtgaatttatatgcgtgcat

SEQ ID NO: 284372 - DNA, 25 bp, Homo sapien
gaatttatatgcgtgcattccacgc

SEQ ID NO: 284373 - DNA, 25 bp, Homo sapien
cacgcaagaactctgtcaactccat

SEQ ID NO: 284374 - DNA, 25 bp, Homo sapien
gatctgcaagaactccttgctcttg

SEQ ID NO: 284375 - DNA, 25 bp, Homo sapien
aaatcaccatccttgagcgtcggca

SEQ ID NO: 284376 - DNA, 25 bp, Homo sapien
ttgagcgtcggcagtttccccaggc

SEQ ID NO: 284377 - DNA, 25 bp, Homo sapien
tccccaggctgttgatctgcaagaa

SEQ ID NO: 284378 - DNA, 25 bp, Homo sapien
gcgcccggccagatccctcgccttt

SEQ ID NO: 284379 - DNA, 25 bp, Homo sapien
ggtcacatgggctccggatgcggtg

SEQ ID NO: 284380 - DNA, 25 bp, Homo sapien
ggccagatccctcgcctttcccctc

SEQ ID NO: 284381 - DNA, 25 bp, Homo sapien
cctcgctgccccatggggtatggga

SEQ ID NO: 284382 - DNA, 25 bp, Homo sapien
taatacccttcagtctgggagtgga

SEQ ID NO: 284383 - DNA, 25 bp, Homo sapien
tagattgggtagtctgcgacaagtc

SEQ ID NO: 284384 - DNA, 25 bp, Homo sapien
aatgcgcaacagtggaaaaatgttc

SEQ ID NO: 284385 - DNA, 25 bp, Homo sapien
ctagaggctcttttcagctagcatt

SEQ ID NO: 284386 - DNA, 25 bp, Homo sapien
cttgggccatggcattggcctctag

SEQ ID NO: 284387 - DNA, 25 bp, Homo sapien
tgggccatggcattggcctctaggc

SEQ ID NO: 284388 - DNA, 25 bp, Homo sapien
ttgggccatggcattggcctctagg

SEQ ID NO: 284389 - DNA, 25 bp, Homo sapien
ccttgggccatggcattggcctcta

SEQ ID NO: 284390 - DNA, 25 bp, Homo sapien
tctttggcccccgtctgacaggccc

SEQ ID NO: 284391 - DNA, 25 bp, Homo sapien
aatgtctttggcccccgtctgacag

SEQ ID NO: 284392 - DNA, 25 bp, Homo sapien
gaggaatgtctttggcccccgtctg

SEQ ID NO: 284393 - DNA, 25 bp, Homo sapien
ttggcccccgtctgacaggccccca

SEQ ID NO: 284394 - DNA, 25 bp, Homo sapien
ggcaccaggcatttacccctaactg

SEQ ID NO: 284395 - DNA, 25 bp, Homo sapien
ctgggaacaaatgggcagtggctat

SEQ ID NO: 284396 - DNA, 25 bp, Homo sapien
cagtggctataaggacactggcacc

SEQ ID NO: 284397 - DNA, 25 bp, Homo sapien
ctaactgctcccatctgccagtggg

SEQ ID NO: 284398 - DNA, 25 bp, Homo sapien
gatggataccagtggtccggcgtct

SEQ ID NO: 284399 - DNA, 25 bp, Homo sapien
ggtacttacagctcaggtaaatcag

SEQ ID NO: 284400 - DNA, 25 bp, Homo sapien
ctgcaggtcagatggataccagtgg

SEQ ID NO: 284401 - DNA, 25 bp, Homo sapien
agtggtccggcgtctggtacttaca

SEQ ID NO: 284402 - DNA, 25 bp, Homo sapien
gggtataccaaaggtgccacggatg

SEQ ID NO: 284403 - DNA, 25 bp, Homo sapien
atgccagcccaggtactcatgaaca

SEQ ID NO: 284404 - DNA, 25 bp, Homo sapien
tgccacggatgcagtcggcatgcca

SEQ ID NO: 284405 - DNA, 25 bp, Homo sapien
ggtactcatgaacacgggcacgagc

SEQ ID NO: 284406 - DNA, 25 bp, Homo sapien
tggcagtcctgttgcgttccacctt

SEQ ID NO: 284407 - DNA, 25 bp, Homo sapien
ggcagtcctgttgcgttccaccttc

SEQ ID NO: 284408 - DNA, 25 bp, Homo sapien
agggccatgagatcagccagtgtca

SEQ ID NO: 284409 - DNA, 25 bp, Homo sapien
tccagggccatgagatcagccagtg

SEQ ID NO: 284410 - DNA, 25 bp, Homo sapien
gggccatgagatcagccagtgtcac

SEQ ID NO: 284411 - DNA, 25 bp, Homo sapien
tcctccagggccatgagatcagcca

SEQ ID NO: 284412 - DNA, 25 bp, Homo sapien
tggccgtccctcaaacagttcatag

SEQ ID NO: 284413 - DNA, 25 bp, Homo sapien
ttcttggccgcctgttccaggatgc

SEQ ID NO: 284414 - DNA, 25 bp, Homo sapien
gatcctggcgattcgaagcagcata

SEQ ID NO: 284415 - DNA, 25 bp, Homo sapien
tccaggatgctcaagatgatgctgt

SEQ ID NO: 284416 - DNA, 25 bp, Homo sapien
tattgcagatttagtctcttactgg

SEQ ID NO: 284417 - DNA, 25 bp, Homo sapien
cttcatgttactgatttgtaggagc

SEQ ID NO: 284418 - DNA, 25 bp, Homo sapien
taagtaacagaatgaatccttgttg

SEQ ID NO: 284419 - DNA, 25 bp, Homo sapien
tcttactggttatgtatgctgcacc

SEQ ID NO: 284420 - DNA, 25 bp, Homo sapien
ataacacaacaatgtagtaaaacca

SEQ ID NO: 284421 - DNA, 25 bp, Homo sapien
cacaacaatgtagtaaaaccaataa

SEQ ID NO: 284422 - DNA, 25 bp, Homo sapien
atgtagtaaaaccaataactcttgg

SEQ ID NO: 284423 - DNA, 25 bp, Homo sapien
acaatgtagtaaaaccaataactct

SEQ ID NO: 284424 - DNA, 25 bp, Homo sapien
ccaggacctgcaggcccgcgcccat

SEQ ID NO: 284425 - DNA, 25 bp, Homo sapien
ctccaggacctgcaggcccgcgccc

SEQ ID NO: 284426 - DNA, 25 bp, Homo sapien
tccaggacctgcaggcccgcgccca

SEQ ID NO: 284427 - DNA, 25 bp, Homo sapien
cttggctgagaggtaaccggtccgt

SEQ ID NO: 284428 - DNA, 25 bp, Homo sapien
gatggcttggatcatggactgtggg

SEQ ID NO: 284429 - DNA, 25 bp, Homo sapien
gggccagtcggctgtctgttcactg

SEQ ID NO: 284430 - DNA, 25 bp, Homo sapien
gtaaccggtccgtgggctgctgccg

SEQ ID NO: 284431 - DNA, 25 bp, Homo sapien
caggtgaaccccctgaggaaggtgc

SEQ ID NO: 284432 - DNA, 25 bp, Homo sapien
gaacaggggctggacacagaagcag

SEQ ID NO: 284433 - DNA, 25 bp, Homo sapien
cctgctacagaacaggggctggaca

SEQ ID NO: 284434 - DNA, 25 bp, Homo sapien
tcacctgctacagaacaggggctgg

SEQ ID NO: 284435 - DNA, 25 bp, Homo sapien
aacaggggctggacacagaagcagt

SEQ ID NO: 284436 - DNA, 25 bp, Homo sapien
gaggaggcagggctataactaagca

SEQ ID NO: 284437 - DNA, 25 bp, Homo sapien
ggagcacaattcagtggaggaggca

SEQ ID NO: 284438 - DNA, 25 bp, Homo sapien
cagggctataactaagcagtagggc

SEQ ID NO: 284439 - DNA, 25 bp, Homo sapien
ggctataactaagcagtagggcaga

SEQ ID NO: 284440 - DNA, 25 bp, Homo sapien
gtctggctggcatacagagatgcag

SEQ ID NO: 284441 - DNA, 25 bp, Homo sapien
tgagctccagcgtttgctggtctgg

SEQ ID NO: 284442 - DNA, 25 bp, Homo sapien
ggtctggctggcatacagagatgca

SEQ ID NO: 284443 - DNA, 25 bp, Homo sapien
agctccagcgtttgctggtctggct

SEQ ID NO: 284444 - DNA, 25 bp, Homo sapien
gcatattcgacgttaaagcccgaga

SEQ ID NO: 284445 - DNA, 25 bp, Homo sapien
cacaggatagagtagacagctaggc

SEQ ID NO: 284446 - DNA, 25 bp, Homo sapien
tctgttaggtctaaagaggctcggc

SEQ ID NO: 284447 - DNA, 25 bp, Homo sapien
taagtcatattatggccagaggtca

SEQ ID NO: 284448 - DNA, 25 bp, Homo sapien
ctggcttccgttggggggatcatca

SEQ ID NO: 284449 - DNA, 25 bp, Homo sapien
gggagctgcttgccttcgccaagca

SEQ ID NO: 284450 - DNA, 25 bp, Homo sapien
tcgcgctgtattccccgggcgggtg

SEQ ID NO: 284451 - DNA, 25 bp, Homo sapien
tggtcacgggtaagtttcaacactc

SEQ ID NO: 284452 - DNA, 25 bp, Homo sapien
caccaatgcctgcctagtatgatca

SEQ ID NO: 284453 - DNA, 25 bp, Homo sapien
gtgactggccccacaccaatgcctg

SEQ ID NO: 284454 - DNA, 25 bp, Homo sapien
accaatgcctgcctagtatgatcac

SEQ ID NO: 284455 - DNA, 25 bp, Homo sapien
tgactggccccacaccaatgcctgc

SEQ ID NO: 284456 - DNA, 25 bp, Homo sapien
tgatcataatggaatcaggaatatg

SEQ ID NO: 284457 - DNA, 25 bp, Homo sapien
tatatatgttatgcagtgctcctag

SEQ ID NO: 284458 - DNA, 25 bp, Homo sapien
tcaaggagatatatgagctgatcat

SEQ ID NO: 284459 - DNA, 25 bp, Homo sapien
ggaagacaatagtgattacgggatt

SEQ ID NO: 284460 - DNA, 25 bp, Homo sapien
ttaaacctctgtaatttattctatc

SEQ ID NO: 284461 - DNA, 25 bp, Homo sapien
taactcttttgtgagacatatttct

SEQ ID NO: 284462 - DNA, 25 bp, Homo sapien
acctctgtaatttattctatcaaag

SEQ ID NO: 284463 - DNA, 25 bp, Homo sapien
ctctgtaatttattctatcaaagta

SEQ ID NO: 284464 - DNA, 25 bp, Homo sapien
atagcttacttagctgtccttactg

SEQ ID NO: 284465 - DNA, 25 bp, Homo sapien
caatagcttacttagctgtccttac

SEQ ID NO: 284466 - DNA, 25 bp, Homo sapien
gcccaatagcttacttagctgtcct

SEQ ID NO: 284467 - DNA, 25 bp, Homo sapien
tgggcccaatagcttacttagctgt

SEQ ID NO: 284468 - DNA, 25 bp, Homo sapien
aagatgtagactgaacggcagggct

SEQ ID NO: 284469 - DNA, 25 bp, Homo sapien
gaagatgtagactgaacggcagggc

SEQ ID NO: 284470 - DNA, 25 bp, Homo sapien
acaggtggggatccgcagccaatat

SEQ ID NO: 284471 - DNA, 25 bp, Homo sapien
gacaggtggggatccgcagccaata

SEQ ID NO: 284472 - DNA, 25 bp, Homo sapien
gggacaggtggggatccgcagccaa

SEQ ID NO: 284473 - DNA, 25 bp, Homo sapien
ggtggggatccgcagccaatatccc

SEQ ID NO: 284474 - DNA, 25 bp, Homo sapien
ctgggcaaaggcatcactgtgctgc

SEQ ID NO: 284475 - DNA, 25 bp, Homo sapien
tgggcaaaggcatcactgtgctgct

SEQ ID NO: 284476 - DNA, 25 bp, Homo sapien
gcaaaggcatcactgtgctgctggc

SEQ ID NO: 284477 - DNA, 25 bp, Homo sapien
ggcaaaggcatcactgtgctgctgg

SEQ ID NO: 284478 - DNA, 25 bp, Homo sapien
ctctcagccaaggtgaagtccccat

SEQ ID NO: 284479 - DNA, 25 bp, Homo sapien
ccaaggtgaagtccccatccttcaa

SEQ ID NO: 284480 - DNA, 25 bp, Homo sapien
tctcagccaaggtgaagtccccatc

SEQ ID NO: 284481 - DNA, 25 bp, Homo sapien
cagccaaggtgaagtccccatcctt

SEQ ID NO: 284482 - DNA, 25 bp, Homo sapien
cagttcatacacagcaagctagcca

SEQ ID NO: 284483 - DNA, 25 bp, Homo sapien
tgcagttcatacacagcaagctagc

SEQ ID NO: 284484 - DNA, 25 bp, Homo sapien
catgcagttcatacacagcaagcta

SEQ ID NO: 284485 - DNA, 25 bp, Homo sapien
gttcatacacagcaagctagccaca

SEQ ID NO: 284486 - DNA, 25 bp, Homo sapien
gcagctggcatgtagtggttatttc

SEQ ID NO: 284487 - DNA, 25 bp, Homo sapien
tcataccgagacatcagacaaacgt

SEQ ID NO: 284488 - DNA, 25 bp, Homo sapien
gtgctcattacagatgctaccgcag

SEQ ID NO: 284489 - DNA, 25 bp, Homo sapien
caaacgtttattgaaatgtctcctc

SEQ ID NO: 284490 - DNA, 25 bp, Homo sapien
ggcgggcagaggaacggaaacagct

SEQ ID NO: 284491 - DNA, 25 bp, Homo sapien
agatggaggcagcgacggcgcacag

SEQ ID NO: 284492 - DNA, 25 bp, Homo sapien
gatggaggcagcgacggcgcacagc

SEQ ID NO: 284493 - DNA, 25 bp, Homo sapien
aagatggaggcagcgacggcgcaca

SEQ ID NO: 284494 - DNA, 25 bp, Homo sapien
caacttcccctcgcccagtgctgcc

SEQ ID NO: 284495 - DNA, 25 bp, Homo sapien
ccagtgctgcccggcccacgctcac

SEQ ID NO: 284496 - DNA, 25 bp, Homo sapien
cccagtgctgcccggcccacgctca

SEQ ID NO: 284497 - DNA, 25 bp, Homo sapien
cttcccctcgcccagtgctgcccgg

SEQ ID NO: 284498 - DNA, 25 bp, Homo sapien
gggtcgctgttgcggaggcagagca

SEQ ID NO: 284499 - DNA, 25 bp, Homo sapien
gatcccagtacaggccgaggtccct

SEQ ID NO: 284500 - DNA, 25 bp, Homo sapien
aagctggagccagtcgggctacgtc

SEQ ID NO: 284501 - DNA, 25 bp, Homo sapien
aagttttacccgaagctggagccag

SEQ ID NO: 284502 - DNA, 25 bp, Homo sapien
agggctcggtggacccgctcagcgc

SEQ ID NO: 284503 - DNA, 25 bp, Homo sapien
actacgccgatggaggagatggaca

SEQ ID NO: 284504 - DNA, 25 bp, Homo sapien
cagggctagctccttggtgagaaac

SEQ ID NO: 284505 - DNA, 25 bp, Homo sapien
tgcggttgtcctcggcggtgcccac

SEQ ID NO: 284506 - DNA, 25 bp, Homo sapien
gctttaaactgttagcaggaatgga

SEQ ID NO: 284507 - DNA, 25 bp, Homo sapien
tagaataatattccgggcctactac

SEQ ID NO: 284508 - DNA, 25 bp, Homo sapien
agcagctctcctggtcaagacccag

SEQ ID NO: 284509 - DNA, 25 bp, Homo sapien
taaatggcctgcctaggtgtttggc

SEQ ID NO: 284510 - DNA, 25 bp, Homo sapien
tactgttaatcactagttttgcatt

SEQ ID NO: 284511 - DNA, 25 bp, Homo sapien
actgttaatcactagttttgcattt

SEQ ID NO: 284512 - DNA, 25 bp, Homo sapien
ctgttaatcactagttttgcatttc

SEQ ID NO: 284513 - DNA, 25 bp, Homo sapien
cggctggtgtgcagtagcgcaattt

SEQ ID NO: 284514 - DNA, 25 bp, Homo sapien
cgccccggctggtgtgcagtagcgc

SEQ ID NO: 284515 - DNA, 25 bp, Homo sapien
ttgtcgccccggctggtgtgcagta

SEQ ID NO: 284516 - DNA, 25 bp, Homo sapien
aggcgcccaccacgtccggctagtt

SEQ ID NO: 284517 - DNA, 25 bp, Homo sapien
ccaggctagccctgcactcctgtgc

SEQ ID NO: 284518 - DNA, 25 bp, Homo sapien
gggattacgggtgccaagacaccac

SEQ ID NO: 284519 - DNA, 25 bp, Homo sapien
caagacaccacacgcaaccaaaaga

SEQ ID NO: 284520 - DNA, 25 bp, Homo sapien
caggctagccctgcactcctgtgct

SEQ ID NO: 284521 - DNA, 25 bp, Homo sapien
taagacttgcccaagtcccagagca

SEQ ID NO: 284522 - DNA, 25 bp, Homo sapien
attttggataataaacctgggctca

SEQ ID NO: 284523 - DNA, 25 bp, Homo sapien
tggtcatggtctctatgcaaaagac

SEQ ID NO: 284524 - DNA, 25 bp, Homo sapien
aatgagaatgatgcacactgaggcc

SEQ ID NO: 284525 - DNA, 25 bp, Homo sapien
tactatttgacaggctccatggcag

SEQ ID NO: 284526 - DNA, 25 bp, Homo sapien
caaggactctgcagtgttgagccaa

SEQ ID NO: 284527 - DNA, 25 bp, Homo sapien
aaacattatgcgttggctgacacac

SEQ ID NO: 284528 - DNA, 25 bp, Homo sapien
aaacactgaacgtaagccctgaggc

SEQ ID NO: 284529 - DNA, 25 bp, Homo sapien
gtctccacagcaacggccagtctgt

SEQ ID NO: 284530 - DNA, 25 bp, Homo sapien
gcctgacaacaaggcgtgctcccat

SEQ ID NO: 284531 - DNA, 25 bp, Homo sapien
cggctgcgcgcctgacaacaaggcg

SEQ ID NO: 284532 - DNA, 25 bp, Homo sapien
aggcgtctccacagcaacggccagt

SEQ ID NO: 284533 - DNA, 25 bp, Homo sapien
cccggcaccgccttcaaaccagcct

SEQ ID NO: 284534 - DNA, 25 bp, Homo sapien
ccggcaccgccttcaaaccagcctt

SEQ ID NO: 284535 - DNA, 25 bp, Homo sapien
caccccggcaccgccttcaaaccag

SEQ ID NO: 284536 - DNA, 25 bp, Homo sapien
tggggctctaaagctgcccgcgaaa

SEQ ID NO: 284537 - DNA, 25 bp, Homo sapien
agcttcctcacgtaacccagcctcg

SEQ ID NO: 284538 - DNA, 25 bp, Homo sapien
cctgactggggctctaaagctgccc

SEQ ID NO: 284539 - DNA, 25 bp, Homo sapien
gggctctaaagctgcccgcgaaacc

SEQ ID NO: 284540 - DNA, 25 bp, Homo sapien
cggaggccggaacccattctaggca

SEQ ID NO: 284541 - DNA, 25 bp, Homo sapien
cagcagacgccaaatcaatggtggc

SEQ ID NO: 284542 - DNA, 25 bp, Homo sapien
ctgtgaaggtgaagcgaaaggtcgc

SEQ ID NO: 284543 - DNA, 25 bp, Homo sapien
caatggtggctcctgcggttactgg

SEQ ID NO: 284544 - DNA, 25 bp, Homo sapien
ctgagtgggaggataacttcagcct

SEQ ID NO: 284545 - DNA, 25 bp, Homo sapien
gaggctgagtgggaggataacttca

SEQ ID NO: 284546 - DNA, 25 bp, Homo sapien
ggctgagtgggaggataacttcagc

SEQ ID NO: 284547 - DNA, 25 bp, Homo sapien
tgagtgggaggataacttcagcctg

SEQ ID NO: 284548 - DNA, 25 bp, Homo sapien
gctccctgagtaccatgatcagcag

SEQ ID NO: 284549 - DNA, 25 bp, Homo sapien
aagaaggcacctggattccctgaag

SEQ ID NO: 284550 - DNA, 25 bp, Homo sapien
cctggattccctgaagcaacagctc

SEQ ID NO: 284551 - DNA, 25 bp, Homo sapien
gagtaccatgatcagcagaacccaa

SEQ ID NO: 284552 - DNA, 25 bp, Homo sapien
gctctaagtcatggcaagtcttcct

SEQ ID NO: 284553 - DNA, 25 bp, Homo sapien
cttcctagatgccaactggatcctc

SEQ ID NO: 284554 - DNA, 25 bp, Homo sapien
caggacacgtgctagctctaagtca

SEQ ID NO: 284555 - DNA, 25 bp, Homo sapien
tttctgcaggacacgtgctagctct

SEQ ID NO: 284556 - DNA, 25 bp, Homo sapien
gacaaactgagacaaggcctatgaa

SEQ ID NO: 284557 - DNA, 25 bp, Homo sapien
agacaaggcctatgaagagccagga

SEQ ID NO: 284558 - DNA, 25 bp, Homo sapien
aggaaataggacaaactgagacaag

SEQ ID NO: 284559 - DNA, 25 bp, Homo sapien
caaactgagacaaggcctatgaaga

SEQ ID NO: 284560 - DNA, 25 bp, Homo sapien
attcagagagattcagcactgccac

SEQ ID NO: 284561 - DNA, 25 bp, Homo sapien
aaaggttgccccagtccacaactct

SEQ ID NO: 284562 - DNA, 25 bp, Homo sapien
atcactggcaaaggttgccccagtc

SEQ ID NO: 284563 - DNA, 25 bp, Homo sapien
ttcagcactgccacgagcatcactt

SEQ ID NO: 284564 - DNA, 25 bp, Homo sapien
tggcatttaaggctgcaattcgaat

SEQ ID NO: 284565 - DNA, 25 bp, Homo sapien
caaaccggtcatgtttctgcagatc

SEQ ID NO: 284566 - DNA, 25 bp, Homo sapien
tttggcagactcctcaaaccggtca

SEQ ID NO: 284567 - DNA, 25 bp, Homo sapien
gccttgtggtacaatgcaaaagcct

SEQ ID NO: 284568 - DNA, 25 bp, Homo sapien
gtttctgcagatcaagggccttgtg

SEQ ID NO: 284569 - DNA, 25 bp, Homo sapien
gggcaggtggcttccacacattgct

SEQ ID NO: 284570 - DNA, 25 bp, Homo sapien
gggcaccaagaagctctttcctggg

SEQ ID NO: 284571 - DNA, 25 bp, Homo sapien
caggtggcttccacacattgctctt

SEQ ID NO: 284572 - DNA, 25 bp, Homo sapien
gctcttcatgttctgaacaggtaag

SEQ ID NO: 284573 - DNA, 25 bp, Homo sapien
tcagtatcagcccagggtgtttcaa

SEQ ID NO: 284574 - DNA, 25 bp, Homo sapien
tctttctcatcaccggatgaaactg

SEQ ID NO: 284575 - DNA, 25 bp, Homo sapien
ggctgtctccagatcctcccgctgg

SEQ ID NO: 284576 - DNA, 25 bp, Homo sapien
tgccagctgggccaagttcttataa

SEQ ID NO: 284577 - DNA, 25 bp, Homo sapien
taatcactgagggtgtacaggacag

SEQ ID NO: 284578 - DNA, 25 bp, Homo sapien
cagaggttgacatctgtggagtcca

SEQ ID NO: 284579 - DNA, 25 bp, Homo sapien
tcctcaaaagcatggcgagccaggg

SEQ ID NO: 284580 - DNA, 25 bp, Homo sapien
cacatgtccaatcttataccagagg

SEQ ID NO: 284581 - DNA, 25 bp, Homo sapien
agccctttgctgtaccggcaatcct

SEQ ID NO: 284582 - DNA, 25 bp, Homo sapien
atccttctccaaagctttgcagatg

SEQ ID NO: 284583 - DNA, 25 bp, Homo sapien
caaggctgctcctcaaaaatcttct

SEQ ID NO: 284584 - DNA, 25 bp, Homo sapien
ggctgctcctcaaaaatcttctcct

SEQ ID NO: 284585 - DNA, 25 bp, Homo sapien
gaagaaaggaatgggctgcacaagt

SEQ ID NO: 284586 - DNA, 25 bp, Homo sapien
tgcctcttttttcgcagccccaagg

SEQ ID NO: 284587 - DNA, 25 bp, Homo sapien
tgcacaagtttcaggtccggctcct

SEQ ID NO: 284588 - DNA, 25 bp, Homo sapien
cagctgcactcaccgaaacatcgtg

SEQ ID NO: 284589 - DNA, 25 bp, Homo sapien
gggtcctggtagtccgacaaatcaa

SEQ ID NO: 284590 - DNA, 25 bp, Homo sapien
tggtgagatgattgtacatggccag

SEQ ID NO: 284591 - DNA, 25 bp, Homo sapien
tgtagccacagaggtgtaggagacc

SEQ ID NO: 284592 - DNA, 25 bp, Homo sapien
cagtgcttggctggatcacgttaac

SEQ ID NO: 284593 - DNA, 25 bp, Homo sapien
gggcagaccgccgctttgctgtttc

SEQ ID NO: 284594 - DNA, 25 bp, Homo sapien
gacacgggcagaccgccgctttgct

SEQ ID NO: 284595 - DNA, 25 bp, Homo sapien
tgcacttggtgtttcggacacgggc

SEQ ID NO: 284596 - DNA, 25 bp, Homo sapien
cttggtgtttcggacacgggcagac

SEQ ID NO: 284597 - DNA, 25 bp, Homo sapien
tgttattgatggtgtatgctggagc

SEQ ID NO: 284598 - DNA, 25 bp, Homo sapien
ggtgtatgctggagctttgtgggtt

SEQ ID NO: 284599 - DNA, 25 bp, Homo sapien
gagaaatgttattgatggtgtatgc

SEQ ID NO: 284600 - DNA, 25 bp, Homo sapien
tggaatgagaaatgttattgatggt

SEQ ID NO: 284601 - DNA, 25 bp, Homo sapien
tctgactggacttcatagttattaa

SEQ ID NO: 284602 - DNA, 25 bp, Homo sapien
gactggacttcatagttattaaagg

SEQ ID NO: 284603 - DNA, 25 bp, Homo sapien
tgcttgggaagctttccagtttggc

SEQ ID NO: 284604 - DNA, 25 bp, Homo sapien
gcctttgaggcccaatgcttgggaa

SEQ ID NO: 284605 - DNA, 25 bp, Homo sapien
aggaactcatgcacgtcctgctttt

SEQ ID NO: 284606 - DNA, 25 bp, Homo sapien
cagtccctcagcagcgggttgggca

SEQ ID NO: 284607 - DNA, 25 bp, Homo sapien
catggctttcaggtagcgcatcatc

SEQ ID NO: 284608 - DNA, 25 bp, Homo sapien
ctgtggtagacgctgagcacgacct

SEQ ID NO: 284609 - DNA, 25 bp, Homo sapien
aagaacagtatcacaaagcctcttc

SEQ ID NO: 284610 - DNA, 25 bp, Homo sapien
tggtccagctggagttccatgcagg

SEQ ID NO: 284611 - DNA, 25 bp, Homo sapien
actggtccagctggagttccatgca

SEQ ID NO: 284612 - DNA, 25 bp, Homo sapien
ctggtccagctggagttccatgcag

SEQ ID NO: 284613 - DNA, 25 bp, Homo sapien
tcgcgctgggacgaggcaaatgaca

SEQ ID NO: 284614 - DNA, 25 bp, Homo sapien
gaagcgagccttcagccagtaaaca

SEQ ID NO: 284615 - DNA, 25 bp, Homo sapien
tcaccataccagcaggacagttccg

SEQ ID NO: 284616 - DNA, 25 bp, Homo sapien
ccctgggaagtcaggtccaaatctg

SEQ ID NO: 284617 - DNA, 25 bp, Homo sapien
tggatggcggtggaactctggagca

SEQ ID NO: 284618 - DNA, 25 bp, Homo sapien
cggatgacaatgtctcttcgttcag

SEQ ID NO: 284619 - DNA, 25 bp, Homo sapien
gcagatgtcatagttctccagggcc

SEQ ID NO: 284620 - DNA, 25 bp, Homo sapien
cagagtcattatggaggttgggcag

SEQ ID NO: 284621 - DNA, 25 bp, Homo sapien
cattttgttctgtactaagaaaaat

SEQ ID NO: 284622 - DNA, 25 bp, Homo sapien
aagaagtagacatgggagacttttc

SEQ ID NO: 284623 - DNA, 25 bp, Homo sapien
attcttctgccttgggatcctgttg

SEQ ID NO: 284624 - DNA, 25 bp, Homo sapien
atctatgaccttacccccaaccctg

SEQ ID NO: 284625 - DNA, 25 bp, Homo sapien
tggacatgtcacagatgcagaactg

SEQ ID NO: 284626 - DNA, 25 bp, Homo sapien
gagctgcacaatgaataaagtggca

SEQ ID NO: 284627 - DNA, 25 bp, Homo sapien
catggccagcccaatactggtctgc

SEQ ID NO: 284628 - DNA, 25 bp, Homo sapien
aggccactttcagccagtgtggaca

SEQ ID NO: 284629 - DNA, 25 bp, Homo sapien
aacagccttgtagtcgcctgcttca

SEQ ID NO: 284630 - DNA, 25 bp, Homo sapien
gcctgcttcatacagccgctgaatc

SEQ ID NO: 284631 - DNA, 25 bp, Homo sapien
ggcaccgctccagcgacttcaggtt

SEQ ID NO: 284632 - DNA, 25 bp, Homo sapien
ggcggagcagatgcacaacagcctt

SEQ ID NO: 284633 - DNA, 25 bp, Homo sapien
gaataaacaagtggatggacagatg

SEQ ID NO: 284634 - DNA, 25 bp, Homo sapien
gggttcaccctgagccacgcagaac

SEQ ID NO: 284635 - DNA, 25 bp, Homo sapien
agaaccctagaacctgcactccttg

SEQ ID NO: 284636 - DNA, 25 bp, Homo sapien
tgatgacctgaccattcttccttcc

SEQ ID NO: 284637 - DNA, 25 bp, Homo sapien
gtgctgatgtgggagtccaaagcct

SEQ ID NO: 284638 - DNA, 25 bp, Homo sapien
aaagccagcagcctttaccaggagg

SEQ ID NO: 284639 - DNA, 25 bp, Homo sapien
tcctggtcaaaacacccaacatgtg

SEQ ID NO: 284640 - DNA, 25 bp, Homo sapien
gataaagactactaaatgcaaccag

SEQ ID NO: 284641 - DNA, 25 bp, Homo sapien
ccactctctgaggtgagaccaacag

SEQ ID NO: 284642 - DNA, 25 bp, Homo sapien
tcccaaccttgacatgtgcagctgc

SEQ ID NO: 284643 - DNA, 25 bp, Homo sapien
tgcccggtgacccattgggctctaa

SEQ ID NO: 284644 - DNA, 25 bp, Homo sapien
attgggctctaacctcgccacagcc

SEQ ID NO: 284645 - DNA, 25 bp, Homo sapien
cagatctggtgggacgcttgttaca

SEQ ID NO: 284646 - DNA, 25 bp, Homo sapien
ctggtgggacgcttgttacacctac

SEQ ID NO: 284647 - DNA, 25 bp, Homo sapien
gaatacaacccatttaaatgcctgg

SEQ ID NO: 284648 - DNA, 25 bp, Homo sapien
agaatacaacccatttaaatgcctg

SEQ ID NO: 284649 - DNA, 25 bp, Homo sapien
ggaacactcaaaacactgccgatag

SEQ ID NO: 284650 - DNA, 25 bp, Homo sapien
taccactgctgtccgcagagagggc

SEQ ID NO: 284651 - DNA, 25 bp, Homo sapien
tgctggacagcctcgttcagagcca

SEQ ID NO: 284652 - DNA, 25 bp, Homo sapien
cgatagtccttcagccggagcaagg

SEQ ID NO: 284653 - DNA, 25 bp, Homo sapien
tatgaactactgaagaagcaggatg

SEQ ID NO: 284654 - DNA, 25 bp, Homo sapien
tcccctttgggtgcctaattagcaa

SEQ ID NO: 284655 - DNA, 25 bp, Homo sapien
catcatgtcccctttgggtgcctaa

SEQ ID NO: 284656 - DNA, 25 bp, Homo sapien
taattagcaatgaaagctatgaact

SEQ ID NO: 284657 - DNA, 25 bp, Homo sapien
tgtcacagcagggtaagccttcagg

SEQ ID NO: 284658 - DNA, 25 bp, Homo sapien
tcacagcagggtaagccttcagggc

SEQ ID NO: 284659 - DNA, 25 bp, Homo sapien
gaagtgtcacagcagggtaagcctt

SEQ ID NO: 284660 - DNA, 25 bp, Homo sapien
acagcagggtaagccttcagggcag

SEQ ID NO: 284661 - DNA, 25 bp, Homo sapien
cacagagaatggaaggtgtcttcct

SEQ ID NO: 284662 - DNA, 25 bp, Homo sapien
cactgaagagacgtggggctccttg

SEQ ID NO: 284663 - DNA, 25 bp, Homo sapien
cctcctgccagatgatccggtgtag

SEQ ID NO: 284664 - DNA, 25 bp, Homo sapien
aatgatccagggtagcactgaagag

SEQ ID NO: 284665 - DNA, 25 bp, Homo sapien
caagagctctaaagatattcattcc

SEQ ID NO: 284666 - DNA, 25 bp, Homo sapien
tccttttggagaacaatgtggtacc

SEQ ID NO: 284667 - DNA, 25 bp, Homo sapien
gtatttgactattcctctatccgca

SEQ ID NO: 284668 - DNA, 25 bp, Homo sapien
tctatccgcatttacttgctggcag

SEQ ID NO: 284669 - DNA, 25 bp, Homo sapien
gctaggtctctaggtgccaccacca

SEQ ID NO: 284670 - DNA, 25 bp, Homo sapien
gtagctaggtctctaggtgccacca

SEQ ID NO: 284671 - DNA, 25 bp, Homo sapien
agctaggtctctaggtgccaccacc

SEQ ID NO: 284672 - DNA, 25 bp, Homo sapien
aagtagctaggtctctaggtgccac

SEQ ID NO: 284673 - DNA, 25 bp, Homo sapien
taatttgttacaatggaacccatac

SEQ ID NO: 284674 - DNA, 25 bp, Homo sapien
caaaacacaattcaagccatatagg

SEQ ID NO: 284675 - DNA, 25 bp, Homo sapien
caatgctgacatctggtgaacctca

SEQ ID NO: 284676 - DNA, 25 bp, Homo sapien
ggctttactaaagcaatacacgctt

SEQ ID NO: 284677 - DNA, 25 bp, Homo sapien
atactcgtgggctgtgttcagcagc

SEQ ID NO: 284678 - DNA, 25 bp, Homo sapien
gcagagccccatctgaattgcagca

SEQ ID NO: 284679 - DNA, 25 bp, Homo sapien
accttctgcccaaatactcgtgggc

SEQ ID NO: 284680 - DNA, 25 bp, Homo sapien
gggagcatgggcgtctctgacatcc

SEQ ID NO: 284681 - DNA, 25 bp, Homo sapien
ccaatcagcataaggaggatggcct

SEQ ID NO: 284682 - DNA, 25 bp, Homo sapien
gaaataggaccatcctgttgcccct

SEQ ID NO: 284683 - DNA, 25 bp, Homo sapien
gccttgtggaggtgaccttatggaa

SEQ ID NO: 284684 - DNA, 25 bp, Homo sapien
ccacccaagctagcctaaggtatta

SEQ ID NO: 284685 - DNA, 25 bp, Homo sapien
ccttgtaagggtgcgtgtcttcaga

SEQ ID NO: 284686 - DNA, 25 bp, Homo sapien
ggccgagtgttcctccaggtacctg

SEQ ID NO: 284687 - DNA, 25 bp, Homo sapien
tgtacaggcagtagaagcactgctc

SEQ ID NO: 284688 - DNA, 25 bp, Homo sapien
ggtacctggccttactcttcttgct

SEQ ID NO: 284689 - DNA, 25 bp, Homo sapien
gaacagtgcatcctcccatataaga

SEQ ID NO: 284690 - DNA, 25 bp, Homo sapien
tgaagttccctcaatgtaggcagag

SEQ ID NO: 284691 - DNA, 25 bp, Homo sapien
tcttcagtaggttggccaagtcagc

SEQ ID NO: 284692 - DNA, 25 bp, Homo sapien
cacggtgctggtcttatagctgtca

SEQ ID NO: 284693 - DNA, 25 bp, Homo sapien
gatgtcatgcatgtagaacttgatg

SEQ ID NO: 284694 - DNA, 25 bp, Homo sapien
tttgaaatgataatcagccaggagg

SEQ ID NO: 284695 - DNA, 25 bp, Homo sapien
gatgcagatgtcatgcatgtagaac

SEQ ID NO: 284696 - DNA, 25 bp, Homo sapien
gtaaagctcgttcaccactggaggg

SEQ ID NO: 284697 - DNA, 25 bp, Homo sapien
aatgggcccatcactcttcagctca

SEQ ID NO: 284698 - DNA, 25 bp, Homo sapien
agcttgtcctgaatgcggctggccc

SEQ ID NO: 284699 - DNA, 25 bp, Homo sapien
cactgcttcaattgacgtgaggcga

SEQ ID NO: 284700 - DNA, 25 bp, Homo sapien
ttcaagacgggcgtggcatgcttcc

SEQ ID NO: 284701 - DNA, 25 bp, Homo sapien
gccccagcagaggataatggtgctc

SEQ ID NO: 284702 - DNA, 25 bp, Homo sapien
gaggataatggtgctcctgctgtta

SEQ ID NO: 284703 - DNA, 25 bp, Homo sapien
tcaggctctgcatcctagggcagca

SEQ ID NO: 284704 - DNA, 25 bp, Homo sapien
taatggtgctcctgctgttacaagg

SEQ ID NO: 284705 - DNA, 25 bp, Homo sapien
cctgtagtgcagcaagtaaacggtg

SEQ ID NO: 284706 - DNA, 25 bp, Homo sapien
cgcagcgggctgctgatgtgaaaca

SEQ ID NO: 284707 - DNA, 25 bp, Homo sapien
tgtctctagcatgctgtcgcgccgg

SEQ ID NO: 284708 - DNA, 25 bp, Homo sapien
gaaacagtgcttggctgtctctagc

SEQ ID NO: 284709 - DNA, 25 bp, Homo sapien
tcaacacagataagtttgcggcagg

SEQ ID NO: 284710 - DNA, 25 bp, Homo sapien
gatgttttaattcaattgcacatga

SEQ ID NO: 284711 - DNA, 25 bp, Homo sapien
tgcacatgaagctgctcaacacaga

SEQ ID NO: 284712 - DNA, 25 bp, Homo sapien
caggttgaaggacggtcactggaac

SEQ ID NO: 284713 - DNA, 25 bp, Homo sapien
gattctgtccacactccaagaggct

SEQ ID NO: 284714 - DNA, 25 bp, Homo sapien
tgggcacatagcctcagaaagggca

SEQ ID NO: 284715 - DNA, 25 bp, Homo sapien
tcctgggctgaaccaaatgatggac

SEQ ID NO: 284716 - DNA, 25 bp, Homo sapien
aaaattgacaatcgtggctgcccag

SEQ ID NO: 284717 - DNA, 25 bp, Homo sapien
gaaatactcatgatgtgctccctgc

SEQ ID NO: 284718 - DNA, 25 bp, Homo sapien
tcaagggtccgtgcagataaacaaa

SEQ ID NO: 284719 - DNA, 25 bp, Homo sapien
gaaaaaattcggacatacagggaca

SEQ ID NO: 284720 - DNA, 25 bp, Homo sapien
tacagggacatagcaaactcttagg

SEQ ID NO: 284721 - DNA, 25 bp, Homo sapien
tgccatatgagaatgctgggctcag

SEQ ID NO: 284722 - DNA, 25 bp, Homo sapien
tatgagcactatgacagggaaggac

SEQ ID NO: 284723 - DNA, 25 bp, Homo sapien
tgagatagcgttcaacaggaagctg

SEQ ID NO: 284724 - DNA, 25 bp, Homo sapien
catgagcccagtgaatatggcccca

SEQ ID NO: 284725 - DNA, 25 bp, Homo sapien
ccttggttcctcatatggaagctgc

SEQ ID NO: 284726 - DNA, 25 bp, Homo sapien
caatggttgcatggaatgggttgcc

SEQ ID NO: 284727 - DNA, 25 bp, Homo sapien
tgggagagggtaggccacacatcta

SEQ ID NO: 284728 - DNA, 25 bp, Homo sapien
ggcagtagtagaggccaaatcttga

SEQ ID NO: 284729 - DNA, 25 bp, Homo sapien
taggagaacgacacctctagtgtga

SEQ ID NO: 284730 - DNA, 25 bp, Homo sapien
tctagtgtgagcagccttcccagtt

SEQ ID NO: 284731 - DNA, 25 bp, Homo sapien
gatttgttccacaggccagtcagcc

SEQ ID NO: 284732 - DNA, 25 bp, Homo sapien
cgcagtaactcaggcacatggtagt

SEQ ID NO: 284733 - DNA, 25 bp, Homo sapien
tcataaagttgaccaggacctctgc

SEQ ID NO: 284734 - DNA, 25 bp, Homo sapien
tggaagcatggagccgaaagtacac

SEQ ID NO: 284735 - DNA, 25 bp, Homo sapien
gggtgtgttcttctcctcgcccctg

SEQ ID NO: 284736 - DNA, 25 bp, Homo sapien
tgcaccaaccccagaatcgggcttc

SEQ ID NO: 284737 - DNA, 25 bp, Homo sapien
agctgaagagtgggagtcctcgtcc

SEQ ID NO: 284738 - DNA, 25 bp, Homo sapien
tgaagagtgggagtcctcgtccacc

SEQ ID NO: 284739 - DNA, 25 bp, Homo sapien
aagagtgggagtcctcgtccaccag

SEQ ID NO: 284740 - DNA, 25 bp, Homo sapien
gctgaagagtgggagtcctcgtcca

SEQ ID NO: 284741 - DNA, 25 bp, Homo sapien
ttttacatttgacgtaatcgtggtc

SEQ ID NO: 284742 - DNA, 25 bp, Homo sapien
tgacgtaatcgtggtcaatcggagt

SEQ ID NO: 284743 - DNA, 25 bp, Homo sapien
caatcggagtggctgtgtaaggtgg

SEQ ID NO: 284744 - DNA, 25 bp, Homo sapien
taatcgtggtcaatcggagtggctg

SEQ ID NO: 284745 - DNA, 25 bp, Homo sapien
gacaaaatgagtcgtccgagcaccc

SEQ ID NO: 284746 - DNA, 25 bp, Homo sapien
cgtgattgatgtgccgccctgggct

SEQ ID NO: 284747 - DNA, 25 bp, Homo sapien
gagcacccccccgtgattgatgtgc

SEQ ID NO: 284748 - DNA, 25 bp, Homo sapien
gctggcagtagggagaacagggact

SEQ ID NO: 284749 - DNA, 25 bp, Homo sapien
gcaacattgcccgtgtcaccccaga

SEQ ID NO: 284750 - DNA, 25 bp, Homo sapien
agccgcaacattgcccgtgtcaccc

SEQ ID NO: 284751 - DNA, 25 bp, Homo sapien
cagccgcaacattgcccgtgtcacc

SEQ ID NO: 284752 - DNA, 25 bp, Homo sapien
acattgcccgtgtcaccccagaccc

SEQ ID NO: 284753 - DNA, 25 bp, Homo sapien
ctcgttttcctggtcaggaagcttc

SEQ ID NO: 284754 - DNA, 25 bp, Homo sapien
ttttcctggtcaggaagcttcaaca

SEQ ID NO: 284755 - DNA, 25 bp, Homo sapien
tcgttttcctggtcaggaagcttca

SEQ ID NO: 284756 - DNA, 25 bp, Homo sapien
cgttttcctggtcaggaagcttcaa

SEQ ID NO: 284757 - DNA, 25 bp, Homo sapien
aagtgacatggagcacgacaggcag

SEQ ID NO: 284758 - DNA, 25 bp, Homo sapien
caggccaagtgacgaaccaagccat

SEQ ID NO: 284759 - DNA, 25 bp, Homo sapien
atggagcacgacaggcagagagcaa

SEQ ID NO: 284760 - DNA, 25 bp, Homo sapien
agaaaggcactatcaacacatccca

SEQ ID NO: 284761 - DNA, 25 bp, Homo sapien
caaggcctccgagctctgaggcctt

SEQ ID NO: 284762 - DNA, 25 bp, Homo sapien
acaaggcctccgagctctgaggcct

SEQ ID NO: 284763 - DNA, 25 bp, Homo sapien
cacagcacaaggcctccgagctctg

SEQ ID NO: 284764 - DNA, 25 bp, Homo sapien
agcacaaggcctccgagctctgagg

SEQ ID NO: 284765 - DNA, 25 bp, Homo sapien
gttctatgcacctggcacagcactg

SEQ ID NO: 284766 - DNA, 25 bp, Homo sapien
gcactgatggaaccacctggatggg

SEQ ID NO: 284767 - DNA, 25 bp, Homo sapien
tgttctatgcacctggcacagcact

SEQ ID NO: 284768 - DNA, 25 bp, Homo sapien
ctgatggaaccacctggatgggcat

SEQ ID NO: 284769 - DNA, 25 bp, Homo sapien
tcacagggcgagcagacatgaaggt

SEQ ID NO: 284770 - DNA, 25 bp, Homo sapien
ctgttccctgaagcgagccgtgaca

SEQ ID NO: 284771 - DNA, 25 bp, Homo sapien
tgagcatgcgggtctgcgctgttcc

SEQ ID NO: 284772 - DNA, 25 bp, Homo sapien
aagcgagccgtgacaggtgcaagca

SEQ ID NO: 284773 - DNA, 25 bp, Homo sapien
tcagcagaagccaagcgcatcaaac

SEQ ID NO: 284774 - DNA, 25 bp, Homo sapien
gccagaactgggaggataggccatc

SEQ ID NO: 284775 - DNA, 25 bp, Homo sapien
agaactgggaggataggccatcagc

SEQ ID NO: 284776 - DNA, 25 bp, Homo sapien
agcagaagccaagcgcatcaaacac

SEQ ID NO: 284777 - DNA, 25 bp, Homo sapien
caatggaaatataggactgggccac

SEQ ID NO: 284778 - DNA, 25 bp, Homo sapien
aagagcaaagcaatggaaatatagg

SEQ ID NO: 284779 - DNA, 25 bp, Homo sapien
ttaaagcaagaaagagcaaagcaat

SEQ ID NO: 284780 - DNA, 25 bp, Homo sapien
ggaaatataggactgggccacctgc

SEQ ID NO: 284781 - DNA, 25 bp, Homo sapien
accaactactgtcccatgataccat

SEQ ID NO: 284782 - DNA, 25 bp, Homo sapien
ttgctcccgtctgccagctcatggc

SEQ ID NO: 284783 - DNA, 25 bp, Homo sapien
tccttggcaccaactactgtcccat

SEQ ID NO: 284784 - DNA, 25 bp, Homo sapien
gataccatgggacatcagatccaac

SEQ ID NO: 284785 - DNA, 25 bp, Homo sapien
agaacacgtccaccagaagcaaggc

SEQ ID NO: 284786 - DNA, 25 bp, Homo sapien
tgcccattgtcaggctgagaagact

SEQ ID NO: 284787 - DNA, 25 bp, Homo sapien
agaagcaaggctggcccgggaaatc

SEQ ID NO: 284788 - DNA, 25 bp, Homo sapien
cgggaaatcggggtgcccattgtca

SEQ ID NO: 284789 - DNA, 25 bp, Homo sapien
cagcagtaagaccagaaacagctca

SEQ ID NO: 284790 - DNA, 25 bp, Homo sapien
agtaagaccagaaacagctcacggc

SEQ ID NO: 284791 - DNA, 25 bp, Homo sapien
ccagaaacagctcacggccatttgt

SEQ ID NO: 284792 - DNA, 25 bp, Homo sapien
agctcacggccatttgttccatcag

SEQ ID NO: 284793 - DNA, 25 bp, Homo sapien
tcccccaaacagtggtattctggta

SEQ ID NO: 284794 - DNA, 25 bp, Homo sapien
aaagaaagccctgattaatagcact

SEQ ID NO: 284795 - DNA, 25 bp, Homo sapien
aagaaagccctgattaatagcactt

SEQ ID NO: 284796 - DNA, 25 bp, Homo sapien
tggtgagtctccctgccggtggcct

SEQ ID NO: 284797 - DNA, 25 bp, Homo sapien
gggccttcctatggtgagtctccct

SEQ ID NO: 284798 - DNA, 25 bp, Homo sapien
agagagggcgagagcattaacctac

SEQ ID NO: 284799 - DNA, 25 bp, Homo sapien
agccattcgacactgctgggcccaa

SEQ ID NO: 284800 - DNA, 25 bp, Homo sapien
tgagctagagtctgagagtgctacg

SEQ ID NO: 284801 - DNA, 25 bp, Homo sapien
tgaagatctttacccgtcgctcctg

SEQ ID NO: 284802 - DNA, 25 bp, Homo sapien
taaagaagtcctgcgttgagctaga

SEQ ID NO: 284803 - DNA, 25 bp, Homo sapien
agtgctacggctgtgctgtcctggc

SEQ ID NO: 284804 - DNA, 25 bp, Homo sapien
aatgccaacaggactacaccacgtt

SEQ ID NO: 284805 - DNA, 25 bp, Homo sapien
cgtttcccggccaggatgtccaatt

SEQ ID NO: 284806 - DNA, 25 bp, Homo sapien
tcacaggtcactagagccctccatt

SEQ ID NO: 284807 - DNA, 25 bp, Homo sapien
ccctagctgcgtgaagatgagaaaa

SEQ ID NO: 284808 - DNA, 25 bp, Homo sapien
gtggtgctgcacggctggccccagg

SEQ ID NO: 284809 - DNA, 25 bp, Homo sapien
gttcacatcaggatagcccaggctg

SEQ ID NO: 284810 - DNA, 25 bp, Homo sapien
agcagttcacatcaggatagcccag

SEQ ID NO: 284811 - DNA, 25 bp, Homo sapien
cagttcacatcaggatagcccaggc

SEQ ID NO: 284812 - DNA, 25 bp, Homo sapien
ttgagaagaagggaaagaaagtcac

SEQ ID NO: 284813 - DNA, 25 bp, Homo sapien
tgagaagaagggaaagaaagtcacc

SEQ ID NO: 284814 - DNA, 25 bp, Homo sapien
cagttgagaagaagggaaagaaagt

SEQ ID NO: 284815 - DNA, 25 bp, Homo sapien
aggcacaggcggaaggaggcgatgc

SEQ ID NO: 284816 - DNA, 25 bp, Homo sapien
ggtcttgctgtaggtgtagaggaag

SEQ ID NO: 284817 - DNA, 25 bp, Homo sapien
tctgcagcccggaagccttctgtac

SEQ ID NO: 284818 - DNA, 25 bp, Homo sapien
acggtagagactcttatagtgctgg

SEQ ID NO: 284819 - DNA, 25 bp, Homo sapien
agcccccttggcccggcagccactc

SEQ ID NO: 284820 - DNA, 25 bp, Homo sapien
cccccttggcccggcagccactcac

SEQ ID NO: 284821 - DNA, 25 bp, Homo sapien
gcccccttggcccggcagccactca

SEQ ID NO: 284822 - DNA, 25 bp, Homo sapien
ccagatcctggtcagagctgaccac

SEQ ID NO: 284823 - DNA, 25 bp, Homo sapien
cagatcctggtcagagctgaccaca

SEQ ID NO: 284824 - DNA, 25 bp, Homo sapien
agatcctggtcagagctgaccacag

SEQ ID NO: 284825 - DNA, 25 bp, Homo sapien
tactagggaacaccagatcctggtc

SEQ ID NO: 284826 - DNA, 25 bp, Homo sapien
aggatgaggaagggtctgagctcac

SEQ ID NO: 284827 - DNA, 25 bp, Homo sapien
taacaggatgaggaagggtctgagc

SEQ ID NO: 284828 - DNA, 25 bp, Homo sapien
tgtaacaggatgaggaagggtctga

SEQ ID NO: 284829 - DNA, 25 bp, Homo sapien
cctgtaacaggatgaggaagggtct

SEQ ID NO: 284830 - DNA, 25 bp, Homo sapien
attccatctcgacatctgcctcttg

SEQ ID NO: 284831 - DNA, 25 bp, Homo sapien
gaaattccatctcgacatctgcctc

SEQ ID NO: 284832 - DNA, 25 bp, Homo sapien
aaattccatctcgacatctgcctct

SEQ ID NO: 284833 - DNA, 25 bp, Homo sapien
ccgaaattccatctcgacatctgcc

SEQ ID NO: 284834 - DNA, 25 bp, Homo sapien
gctgcttaaggggtctaagattcaa

SEQ ID NO: 284835 - DNA, 25 bp, Homo sapien
ggtagggagtgtctgctgcttaagg

SEQ ID NO: 284836 - DNA, 25 bp, Homo sapien
gctgtgggtagggagtgtctgctgc

SEQ ID NO: 284837 - DNA, 25 bp, Homo sapien
tctaagattcaagatagcattccat

SEQ ID NO: 284838 - DNA, 25 bp, Homo sapien
tgaaagacctgagggttcaggagtc

SEQ ID NO: 284839 - DNA, 25 bp, Homo sapien
tcggatgctccagtccaccagtgag

SEQ ID NO: 284840 - DNA, 25 bp, Homo sapien
gggttcaggagtcaaccacacagct

SEQ ID NO: 284841 - DNA, 25 bp, Homo sapien
agaggcagacatcggatgctccagt

SEQ ID NO: 284842 - DNA, 25 bp, Homo sapien
aatgagtgaacctgcagagatgcac

SEQ ID NO: 284843 - DNA, 25 bp, Homo sapien
gacagttgtgggtagtttcattctc

SEQ ID NO: 284844 - DNA, 25 bp, Homo sapien
taaatagtcacaatcacacctcgaa

SEQ ID NO: 284845 - DNA, 25 bp, Homo sapien
tcctgcgtgacaaccactcagtaga

SEQ ID NO: 284846 - DNA, 25 bp, Homo sapien
agcccttgcgacagctttaacctaa

SEQ ID NO: 284847 - DNA, 25 bp, Homo sapien
tgcccagcccttgcgacagctttaa

SEQ ID NO: 284848 - DNA, 25 bp, Homo sapien
ccagcccttgcgacagctttaacct

SEQ ID NO: 284849 - DNA, 25 bp, Homo sapien
catgcccagcccttgcgacagcttt

SEQ ID NO: 284850 - DNA, 25 bp, Homo sapien
ggggcttggcaaagcctgttgacag

SEQ ID NO: 284851 - DNA, 25 bp, Homo sapien
atgtagtgggggcttggcaaagcct

SEQ ID NO: 284852 - DNA, 25 bp, Homo sapien
ttccatgggccctgcatgtagtggg

SEQ ID NO: 284853 - DNA, 25 bp, Homo sapien
ctgtagccttccatgggccctgcat

SEQ ID NO: 284854 - DNA, 25 bp, Homo sapien
gcccatggagccacttgccagataa

SEQ ID NO: 284855 - DNA, 25 bp, Homo sapien
gccctgaggcttgtgcacatagacc

SEQ ID NO: 284856 - DNA, 25 bp, Homo sapien
ccttggctgcattggccctgaggct

SEQ ID NO: 284857 - DNA, 25 bp, Homo sapien
actgctggctcataggcacctctga

SEQ ID NO: 284858 - DNA, 25 bp, Homo sapien
ggactgagcctgtgtatacccttgc

SEQ ID NO: 284859 - DNA, 25 bp, Homo sapien
aagttacccaagagtcatgacccca

SEQ ID NO: 284860 - DNA, 25 bp, Homo sapien
gatgtggctgcccataaggccagtg

SEQ ID NO: 284861 - DNA, 25 bp, Homo sapien
gccatgggacgggaatggacattcc

SEQ ID NO: 284862 - DNA, 25 bp, Homo sapien
tcctgcagacatcgattccacagct

SEQ ID NO: 284863 - DNA, 25 bp, Homo sapien
tgctctggccatgggctttgatcat

SEQ ID NO: 284864 - DNA, 25 bp, Homo sapien
gcagttcctgcagacatcgattcca

SEQ ID NO: 284865 - DNA, 25 bp, Homo sapien
gcatggcaaaccacgatgagcagca

SEQ ID NO: 284866 - DNA, 25 bp, Homo sapien
aaacaagaagtaggttgaaagtgag

SEQ ID NO: 284867 - DNA, 25 bp, Homo sapien
caagaagtaggttgaaagtgagtgt

SEQ ID NO: 284868 - DNA, 25 bp, Homo sapien
gagtgtgtgggctgctcagggcgcc

SEQ ID NO: 284869 - DNA, 25 bp, Homo sapien
tgtgtgggctgctcagggcgcccac

SEQ ID NO: 284870 - DNA, 25 bp, Homo sapien
gaaattggtcttgttcctctcgcag

SEQ ID NO: 284871 - DNA, 25 bp, Homo sapien
ccctgtgccggcatgtgctgcagtt

SEQ ID NO: 284872 - DNA, 25 bp, Homo sapien
tgctgcctagcaacacgtcgcgggc

SEQ ID NO: 284873 - DNA, 25 bp, Homo sapien
gttgccacgggatactgctgcctag

SEQ ID NO: 284874 - DNA, 25 bp, Homo sapien
gtaatagaagcccactttcaaggtg

SEQ ID NO: 284875 - DNA, 25 bp, Homo sapien
aatgtcacagtcaaggcagtgcttc

SEQ ID NO: 284876 - DNA, 25 bp, Homo sapien
gaagacatggaggttggctccttcc

SEQ ID NO: 284877 - DNA, 25 bp, Homo sapien
ccaggacagggaaattaagcaactt

SEQ ID NO: 284878 - DNA, 25 bp, Homo sapien
tgttgcgtccatcctccactgagga

SEQ ID NO: 284879 - DNA, 25 bp, Homo sapien
tgcgcattaggagctgagactaccc

SEQ ID NO: 284880 - DNA, 25 bp, Homo sapien
agccagggtgggatgtctacagcca

SEQ ID NO: 284881 - DNA, 25 bp, Homo sapien
tcctaagggctgctgcatacctcag

SEQ ID NO: 284882 - DNA, 25 bp, Homo sapien
ggccgaggcctcatgtgcctgcctg

SEQ ID NO: 284883 - DNA, 25 bp, Homo sapien
tgtatggagtctgggcctaagccga

SEQ ID NO: 284884 - DNA, 25 bp, Homo sapien
tcctctgaatatagccaggtaggct

SEQ ID NO: 284885 - DNA, 25 bp, Homo sapien
gctcagagctggacctatggtggcc

SEQ ID NO: 284886 - DNA, 25 bp, Homo sapien
gaagtggtgctcataaccagcctca

SEQ ID NO: 284887 - DNA, 25 bp, Homo sapien
tcagggcacctgctaagagctggaa

SEQ ID NO: 284888 - DNA, 25 bp, Homo sapien
gggagccagccttccatgtcaaagg

SEQ ID NO: 284889 - DNA, 25 bp, Homo sapien
tgtttcccgaagcacagttatctcc

SEQ ID NO: 284890 - DNA, 25 bp, Homo sapien
tgtctgacaatctggccaactgcaa

SEQ ID NO: 284891 - DNA, 25 bp, Homo sapien
tcacgctgcaaactgcctctcttgg

SEQ ID NO: 284892 - DNA, 25 bp, Homo sapien
cacacttgctgaggactggcagcca

SEQ ID NO: 284893 - DNA, 25 bp, Homo sapien
gaatgccttctactgagtctgtctg

SEQ ID NO: 284894 - DNA, 25 bp, Homo sapien
tgggcagtgacccagccacagcctg

SEQ ID NO: 284895 - DNA, 25 bp, Homo sapien
gaggaaggatgggccactggaggaa

SEQ ID NO: 284896 - DNA, 25 bp, Homo sapien
cagggctcttgtggatgggcagtga

SEQ ID NO: 284897 - DNA, 25 bp, Homo sapien
ccacagcctggaggactgagtggag

SEQ ID NO: 284898 - DNA, 25 bp, Homo sapien
tactcagaaattgtccagcctgtgc

SEQ ID NO: 284899 - DNA, 25 bp, Homo sapien
tttccccaacggtcgagacagagtg

SEQ ID NO: 284900 - DNA, 25 bp, Homo sapien
tacagttccgagtcagccagtttcc

SEQ ID NO: 284901 - DNA, 25 bp, Homo sapien
tgaagtgcgtttctcctccctagac

SEQ ID NO: 284902 - DNA, 25 bp, Homo sapien
gcctggaagcgggtactgtaccctg

SEQ ID NO: 284903 - DNA, 25 bp, Homo sapien
gggtggccaggagtgcggcaggccg

SEQ ID NO: 284904 - DNA, 25 bp, Homo sapien
ccgggatggcattggccaactgtgt

SEQ ID NO: 284905 - DNA, 25 bp, Homo sapien
aggagtgcggcaggccgggatggca

SEQ ID NO: 284906 - DNA, 25 bp, Homo sapien
aactgtgtgtgagggttatatcccc

SEQ ID NO: 284907 - DNA, 25 bp, Homo sapien
ctggtggcgggctgtggaccgctgc

SEQ ID NO: 284908 - DNA, 25 bp, Homo sapien
aatcctctccggttccctggactgg

SEQ ID NO: 284909 - DNA, 25 bp, Homo sapien
tggactggccgctggtggcgggctg

SEQ ID NO: 284910 - DNA, 25 bp, Homo sapien
tttgccggccaatcctctccggttc

SEQ ID NO: 284911 - DNA, 25 bp, Homo sapien
cggctccgccgtggcatctgtgcag

SEQ ID NO: 284912 - DNA, 25 bp, Homo sapien
gcagtggagctagggcgagcgccgg

SEQ ID NO: 284913 - DNA, 25 bp, Homo sapien
ccatggccgcggaggctcgttcgct

SEQ ID NO: 284914 - DNA, 25 bp, Homo sapien
gggcgccggcactctactggaagcg

SEQ ID NO: 284915 - DNA, 25 bp, Homo sapien
cgccgccggccgatttcctccgcgg

SEQ ID NO: 284916 - DNA, 25 bp, Homo sapien
catgggggcgcagcaccccgccgcc

SEQ ID NO: 284917 - DNA, 25 bp, Homo sapien
acagcccacgggcttcctgctgcgc

SEQ ID NO: 284918 - DNA, 25 bp, Homo sapien
tgacgctgaaccgggtgccagcccg

SEQ ID NO: 284919 - DNA, 25 bp, Homo sapien
aagagcggcacggcacagctcctcg

SEQ ID NO: 284920 - DNA, 25 bp, Homo sapien
ttcgctttcgcgcagcgcacgcccc

SEQ ID NO: 284921 - DNA, 25 bp, Homo sapien
gtcggcgccttccgccgcaaagttg

SEQ ID NO: 284922 - DNA, 25 bp, Homo sapien
caaagttgctctggcgggcggcttt

SEQ ID NO: 284923 - DNA, 25 bp, Homo sapien
gggagagacttgttccagggcagcc

SEQ ID NO: 284924 - DNA, 25 bp, Homo sapien
cagggagccaagactacagctgaac

SEQ ID NO: 284925 - DNA, 25 bp, Homo sapien
atcatgctctttgcactctacccgg

SEQ ID NO: 284926 - DNA, 25 bp, Homo sapien
tacagctgaactaagcctatcatgc

SEQ ID NO: 284927 - DNA, 25 bp, Homo sapien
ccaggggtgagcttggataaagcta

SEQ ID NO: 284928 - DNA, 25 bp, Homo sapien
taggcagcagtgaccaagaggcctg

SEQ ID NO: 284929 - DNA, 25 bp, Homo sapien
cttggataaagctaagtcagggcca

SEQ ID NO: 284930 - DNA, 25 bp, Homo sapien
gccagaaaagaagggcataggcagc

SEQ ID NO: 284931 - DNA, 25 bp, Homo sapien
ttctgtgtttgcagcaagagaccca

SEQ ID NO: 284932 - DNA, 25 bp, Homo sapien
ccatgagaaggatgatactggcagc

SEQ ID NO: 284933 - DNA, 25 bp, Homo sapien
accaggcagagtcacgagccagcag

SEQ ID NO: 284934 - DNA, 25 bp, Homo sapien
tcacgagccagcagggtggtagcaa

SEQ ID NO: 284935 - DNA, 25 bp, Homo sapien
aggggacttcctatggccatgaggc

SEQ ID NO: 284936 - DNA, 25 bp, Homo sapien
cctggtctggggtccgctgaagcat

SEQ ID NO: 284937 - DNA, 25 bp, Homo sapien
gcagcagcacgatggagcggttcat

SEQ ID NO: 284938 - DNA, 25 bp, Homo sapien
atgtgccaggcaaagctgcccggcc

SEQ ID NO: 284939 - DNA, 25 bp, Homo sapien
gccggtcaatctcgtccacggggat

SEQ ID NO: 284940 - DNA, 25 bp, Homo sapien
cagcgtgtcttcgagcaccttcaca

SEQ ID NO: 284941 - DNA, 25 bp, Homo sapien
tgcgagctcgctcagcgtgtcttcg

SEQ ID NO: 284942 - DNA, 25 bp, Homo sapien
atgaaggcccgctgcgccaggacct

SEQ ID NO: 284943 - DNA, 25 bp, Homo sapien
cgagcaccttcacagtgaggatgaa

SEQ ID NO: 284944 - DNA, 25 bp, Homo sapien
gagacatcggtggtcatcctggctc

SEQ ID NO: 284945 - DNA, 25 bp, Homo sapien
gttgaggaggcccactttgcctcct

SEQ ID NO: 284946 - DNA, 25 bp, Homo sapien
cacaggccggtggttgaggaggccc

SEQ ID NO: 284947 - DNA, 25 bp, Homo sapien
tgcccgtgggctctctttatccttc

SEQ ID NO: 284948 - DNA, 25 bp, Homo sapien
ggtggtgtccgctccaagtctgagt

SEQ ID NO: 284949 - DNA, 25 bp, Homo sapien
aggggtggtgtccgctccaagtctg

SEQ ID NO: 284950 - DNA, 25 bp, Homo sapien
ggggtggtgtccgctccaagtctga

SEQ ID NO: 284951 - DNA, 25 bp, Homo sapien
gggtggtgtccgctccaagtctgag

SEQ ID NO: 284952 - DNA, 25 bp, Homo sapien
agggacagctcagtgggccggctct

SEQ ID NO: 284953 - DNA, 25 bp, Homo sapien
gggacagctcagtgggccggctctc

SEQ ID NO: 284954 - DNA, 25 bp, Homo sapien
ggtgagcggggtgggctgctgccgg

SEQ ID NO: 284955 - DNA, 25 bp, Homo sapien
gacagctcagtgggccggctctcgg

SEQ ID NO: 284956 - DNA, 25 bp, Homo sapien
taggtctccgacatgatcctctcca

SEQ ID NO: 284957 - DNA, 25 bp, Homo sapien
tgccacacacggtaggcatccaaca

SEQ ID NO: 284958 - DNA, 25 bp, Homo sapien
gcatccaacagaagtgtcttgcctg

SEQ ID NO: 284959 - DNA, 25 bp, Homo sapien
gatgagcatgtaggtctccgacatg

SEQ ID NO: 284960 - DNA, 25 bp, Homo sapien
cagccccaagatggacctggcagaa

SEQ ID NO: 284961 - DNA, 25 bp, Homo sapien
cccactatggccacgtgctggaggc

SEQ ID NO: 284962 - DNA, 25 bp, Homo sapien
cactatggccacgtgctggaggctc

SEQ ID NO: 284963 - DNA, 25 bp, Homo sapien
ccactatggccacgtgctggaggct

SEQ ID NO: 284964 - DNA, 25 bp, Homo sapien
agactggctctaacattgctgcttc

SEQ ID NO: 284965 - DNA, 25 bp, Homo sapien
tctacttctgttccaaacggaatga

SEQ ID NO: 284966 - DNA, 25 bp, Homo sapien
ccttgttacagaaaaggtggctgag

SEQ ID NO: 284967 - DNA, 25 bp, Homo sapien
tgaccttcccagttgaggtcagctg

SEQ ID NO: 284968 - DNA, 25 bp, Homo sapien
gcttccgcagacgtaatagcccagg

SEQ ID NO: 284969 - DNA, 25 bp, Homo sapien
tggtcaaagctgaacctcgagggct

SEQ ID NO: 284970 - DNA, 25 bp, Homo sapien
ggcctgaggctccattccactgaga

SEQ ID NO: 284971 - DNA, 25 bp, Homo sapien
ccactgagaaggaagcccgtctgga

SEQ ID NO: 284972 - DNA, 25 bp, Homo sapien
tgagggtcattagggcctcctccct

SEQ ID NO: 284973 - DNA, 25 bp, Homo sapien
caggtaggtctgagggtcattaggg

SEQ ID NO: 284974 - DNA, 25 bp, Homo sapien
caggcaggtaggtctgagggtcatt

SEQ ID NO: 284975 - DNA, 25 bp, Homo sapien
taggtctgagggtcattagggcctc

SEQ ID NO: 284976 - DNA, 25 bp, Homo sapien
ttcaggacgggcccctgtggactct

SEQ ID NO: 284977 - DNA, 25 bp, Homo sapien
ggacgggcccctgtggactctgcca

SEQ ID NO: 284978 - DNA, 25 bp, Homo sapien
cacatggttcaggacgggcccctgt

SEQ ID NO: 284979 - DNA, 25 bp, Homo sapien
ctgacattggttttgctaaaatgcc

SEQ ID NO: 284980 - DNA, 25 bp, Homo sapien
ctgtcacaggaaagaagttctctcg

SEQ ID NO: 284981 - DNA, 25 bp, Homo sapien
atcactgggccgctggacagagtca

SEQ ID NO: 284982 - DNA, 25 bp, Homo sapien
gataatagttgtggcggcagctagt

SEQ ID NO: 284983 - DNA, 25 bp, Homo sapien
tgacggagggcaggtgataatagtt

SEQ ID NO: 284984 - DNA, 25 bp, Homo sapien
tggcatcaggtgaaaacatcagcac

SEQ ID NO: 284985 - DNA, 25 bp, Homo sapien
cttctgctgggcacttctgcagagt

SEQ ID NO: 284986 - DNA, 25 bp, Homo sapien
ggctgtctcgtttttcagatgggta

SEQ ID NO: 284987 - DNA, 25 bp, Homo sapien
gcttgagccaccgtgggaaagagct

SEQ ID NO: 284988 - DNA, 25 bp, Homo sapien
tcagttgctgctgagattaggttat

SEQ ID NO: 284989 - DNA, 25 bp, Homo sapien
tggcctacagagatctcagttgctg

SEQ ID NO: 284990 - DNA, 25 bp, Homo sapien
cccagggaggtgtgtgtggcctaca

SEQ ID NO: 284991 - DNA, 25 bp, Homo sapien
aaggacatgaattacagctttggcc

SEQ ID NO: 284992 - DNA, 25 bp, Homo sapien
tcttcacctgcggactgtgccgtgg

SEQ ID NO: 284993 - DNA, 25 bp, Homo sapien
tctgccggggaacttgtgggggcca

SEQ ID NO: 284994 - DNA, 25 bp, Homo sapien
cgtggctcctgaggcgggaagctgg

SEQ ID NO: 284995 - DNA, 25 bp, Homo sapien
tgccactctcgccagctcttctccc

SEQ ID NO: 284996 - DNA, 25 bp, Homo sapien
gccttgctgggttctgtaagacctc

SEQ ID NO: 284997 - DNA, 25 bp, Homo sapien
ttctaccctgggcaaatacttggct

SEQ ID NO: 284998 - DNA, 25 bp, Homo sapien
gtaagacctccaggcatcatgcttg

SEQ ID NO: 284999 - DNA, 25 bp, Homo sapien
tattggtgtctatgccccagggagg

SEQ ID NO: 285000 - DNA, 25 bp, Homo sapien
ggctgagtctcactcgcagcctcct

SEQ ID NO: 285001 - DNA, 25 bp, Homo sapien
atcccttctcggctcaggcctcagt

SEQ ID NO: 285002 - DNA, 25 bp, Homo sapien
ctccccatcccttctcggctcaggc

SEQ ID NO: 285003 - DNA, 25 bp, Homo sapien
aggggctgagtctcactcgcagcct

SEQ ID NO: 285004 - DNA, 25 bp, Homo sapien
tctgcttggtctcctccgagatgct

SEQ ID NO: 285005 - DNA, 25 bp, Homo sapien
ctggtggctgggcactcccactgct

SEQ ID NO: 285006 - DNA, 25 bp, Homo sapien
tcaggcttgcctgggtgaccctctg

SEQ ID NO: 285007 - DNA, 25 bp, Homo sapien
gacttagcccggctgggctcaggct

SEQ ID NO: 285008 - DNA, 25 bp, Homo sapien
tctgtctcgctctccagcgaggact

SEQ ID NO: 285009 - DNA, 25 bp, Homo sapien
cttcctcacgttggcagcagactgg

SEQ ID NO: 285010 - DNA, 25 bp, Homo sapien
caaatgtccatgtagtcgtcgtcct

SEQ ID NO: 285011 - DNA, 25 bp, Homo sapien
tcgtcgtcctcgtctgtctcgctct

SEQ ID NO: 285012 - DNA, 25 bp, Homo sapien
agagccggctcatcccggcgtcgag

SEQ ID NO: 285013 - DNA, 25 bp, Homo sapien
tcaacacttcatagaaaaggatgcc

SEQ ID NO: 285014 - DNA, 25 bp, Homo sapien
tggcgaccaatccaccttcacatgg

SEQ ID NO: 285015 - DNA, 25 bp, Homo sapien
aaaggatgccgcctggcgtgcagat

SEQ ID NO: 285016 - DNA, 25 bp, Homo sapien
gctccgaggcgaggcggccagacaa

SEQ ID NO: 285017 - DNA, 25 bp, Homo sapien
cagtggctccgaggcgaggcggcca

SEQ ID NO: 285018 - DNA, 25 bp, Homo sapien
tgcagtggctccgaggcgaggcggc

SEQ ID NO: 285019 - DNA, 25 bp, Homo sapien
cgaggcgaggcggccagacaagctc

SEQ ID NO: 285020 - DNA, 25 bp, Homo sapien
ccgggccgagggctgtcgccagcag

SEQ ID NO: 285021 - DNA, 25 bp, Homo sapien
gggccgagggctgtcgccagcagca

SEQ ID NO: 285022 - DNA, 25 bp, Homo sapien
gggcccgggccgagggctgtcgcca

SEQ ID NO: 285023 - DNA, 25 bp, Homo sapien
gccgagggctgtcgccagcagcagc

SEQ ID NO: 285024 - DNA, 25 bp, Homo sapien
ggccaccaggtggacacagtagaaa

SEQ ID NO: 285025 - DNA, 25 bp, Homo sapien
tgactgacgggctagaatgcagcga

SEQ ID NO: 285026 - DNA, 25 bp, Homo sapien
tgtctgtggtcagcacgccttctgg

SEQ ID NO: 285027 - DNA, 25 bp, Homo sapien
gatgggatgaatcttagcacagacc

SEQ ID NO: 285028 - DNA, 25 bp, Homo sapien
agggcgccacagcgcatggagcagc

SEQ ID NO: 285029 - DNA, 25 bp, Homo sapien
ctgagtagggcaatatctccaggca

SEQ ID NO: 285030 - DNA, 25 bp, Homo sapien
gggcgccacagcgcatggagcagct

SEQ ID NO: 285031 - DNA, 25 bp, Homo sapien
ctgcagatcacactggcgtctgtgg

SEQ ID NO: 285032 - DNA, 25 bp, Homo sapien
tgcagatcacactggcgtctgtggg

SEQ ID NO: 285033 - DNA, 25 bp, Homo sapien
ggctggacatcttgaagtgccgcac

SEQ ID NO: 285034 - DNA, 25 bp, Homo sapien
cgtctgtggggctggacatcttgaa

SEQ ID NO: 285035 - DNA, 25 bp, Homo sapien
tcatagagcagaggtgacacacagt

SEQ ID NO: 285036 - DNA, 25 bp, Homo sapien
agtgaaggggatgcggccgctctca

SEQ ID NO: 285037 - DNA, 25 bp, Homo sapien
atagagcagaggtgacacacagtgc

SEQ ID NO: 285038 - DNA, 25 bp, Homo sapien
tctcatagagcagaggtgacacaca

SEQ ID NO: 285039 - DNA, 25 bp, Homo sapien
tctcggtgtgcatagattagcgctg

SEQ ID NO: 285040 - DNA, 25 bp, Homo sapien
ggcccgcacagcagaaaaggacgct

SEQ ID NO: 285041 - DNA, 25 bp, Homo sapien
ctgaaggaactctcgcaggcgggca

SEQ ID NO: 285042 - DNA, 25 bp, Homo sapien
cacggacaggccaagtctcggtgtg

SEQ ID NO: 285043 - DNA, 25 bp, Homo sapien
cacagttcgatggtgatggtctgcg

SEQ ID NO: 285044 - DNA, 25 bp, Homo sapien
tattgccaacgcgtctcgttcacca

SEQ ID NO: 285045 - DNA, 25 bp, Homo sapien
tctccatcattgacactttgttggg

SEQ ID NO: 285046 - DNA, 25 bp, Homo sapien
tgcgtgggcagcgacttgacatgcc

SEQ ID NO: 285047 - DNA, 25 bp, Homo sapien
gatgatccgaagtgcacccactcgc

SEQ ID NO: 285048 - DNA, 25 bp, Homo sapien
tgccctgcgtaatttttgctgtcga

SEQ ID NO: 285049 - DNA, 25 bp, Homo sapien
ttgctgtcgatgatccgaagtgcac

SEQ ID NO: 285050 - DNA, 25 bp, Homo sapien
ttctgccctgcgtaatttttgctgt

SEQ ID NO: 285051 - DNA, 25 bp, Homo sapien
caggccagtgcgtggtcgttggtcc

SEQ ID NO: 285052 - DNA, 25 bp, Homo sapien
tcgttggtccagagcgcctgcacgt

SEQ ID NO: 285053 - DNA, 25 bp, Homo sapien
tctcggaagtcatcgctcaggtgcc

SEQ ID NO: 285054 - DNA, 25 bp, Homo sapien
cctccaggaagttgggcagctgatc

SEQ ID NO: 285055 - DNA, 25 bp, Homo sapien
tgaggccaaccctgcaggggtcctg

SEQ ID NO: 285056 - DNA, 25 bp, Homo sapien
cacccagtggcctcgggttctgtca

SEQ ID NO: 285057 - DNA, 25 bp, Homo sapien
gtggcctcgggttctgtcatcccct

SEQ ID NO: 285058 - DNA, 25 bp, Homo sapien
ctcagtggggaggctaacccctcat

SEQ ID NO: 285059 - DNA, 25 bp, Homo sapien
ccggggtggtaggtgcacacgctgc

SEQ ID NO: 285060 - DNA, 25 bp, Homo sapien
acacagtgcacggccccggggtggt

SEQ ID NO: 285061 - DNA, 25 bp, Homo sapien
gctccatgtcacagccgtagtccgt

SEQ ID NO: 285062 - DNA, 25 bp, Homo sapien
ggcctgcacagaacgcacacagtgc

SEQ ID NO: 285063 - DNA, 25 bp, Homo sapien
ccaatccccataccggccccagcct

SEQ ID NO: 285064 - DNA, 25 bp, Homo sapien
aatccccataccggccccagcctgg

SEQ ID NO: 285065 - DNA, 25 bp, Homo sapien
ggccactgttgggagcccacccctg

SEQ ID NO: 285066 - DNA, 25 bp, Homo sapien
ccactgttgggagcccacccctgac

SEQ ID NO: 285067 - DNA, 25 bp, Homo sapien
tccgctgtgtagcagcactgctgac

SEQ ID NO: 285068 - DNA, 25 bp, Homo sapien
actgctgacctgagccgtaccggag

SEQ ID NO: 285069 - DNA, 25 bp, Homo sapien
cccagaggcagcagtaatagaagct

SEQ ID NO: 285070 - DNA, 25 bp, Homo sapien
tagaagctgaggacatcgtagagcc

SEQ ID NO: 285071 - DNA, 25 bp, Homo sapien
gttggacatcgtcccgggctgggcc

SEQ ID NO: 285072 - DNA, 25 bp, Homo sapien
actctccgcgcccattgaatgtgaa

SEQ ID NO: 285073 - DNA, 25 bp, Homo sapien
tgaatgtgaagttggtgccgtcgaa

SEQ ID NO: 285074 - DNA, 25 bp, Homo sapien
cacaaagtgtgggtctccgaaggcg

SEQ ID NO: 285075 - DNA, 25 bp, Homo sapien
tgagttgccctcctggacggccact

SEQ ID NO: 285076 - DNA, 25 bp, Homo sapien
tccagacctccggtcctgttggcca

SEQ ID NO: 285077 - DNA, 25 bp, Homo sapien
tgacttccaccacatctgagttgcc

SEQ ID NO: 285078 - DNA, 25 bp, Homo sapien
gctctgctcggtgaagctcagcacc

SEQ ID NO: 285079 - DNA, 25 bp, Homo sapien
cagcctcgcgtggctggactgctca

SEQ ID NO: 285080 - DNA, 25 bp, Homo sapien
gcagcctcgcgtggctggactgctc

SEQ ID NO: 285081 - DNA, 25 bp, Homo sapien
agcctcgcgtggctggactgctcac

SEQ ID NO: 285082 - DNA, 25 bp, Homo sapien
gggagaggcatgaaggcccagggct

SEQ ID NO: 285083 - DNA, 25 bp, Homo sapien
ggcatgaaggcccagggcttcccct

SEQ ID NO: 285084 - DNA, 25 bp, Homo sapien
aggactgggagaggcatgaaggccc

SEQ ID NO: 285085 - DNA, 25 bp, Homo sapien
aaggcccagggcttcccctcagtct

SEQ ID NO: 285086 - DNA, 25 bp, Homo sapien
accgtcacggcctctcggcttttga

SEQ ID NO: 285087 - DNA, 25 bp, Homo sapien
tcggcttttgaccaggtgggtacga

SEQ ID NO: 285088 - DNA, 25 bp, Homo sapien
tgtgaaggcctgaggtcggaccacc

SEQ ID NO: 285089 - DNA, 25 bp, Homo sapien
tagggaggacatgtcccaccgtcac

SEQ ID NO: 285090 - DNA, 25 bp, Homo sapien
catgttgagatgcacgtgtgggtcc

SEQ ID NO: 285091 - DNA, 25 bp, Homo sapien
cctgccatgcttgcggtggaactcc

SEQ ID NO: 285092 - DNA, 25 bp, Homo sapien
gcatccttaaccgtgcagggctgga

SEQ ID NO: 285093 - DNA, 25 bp, Homo sapien
tctgtgcaggccagcggtgaacgtt

SEQ ID NO: 285094 - DNA, 25 bp, Homo sapien
gggtcacccgctgtgagcatcttgt

SEQ ID NO: 285095 - DNA, 25 bp, Homo sapien
gtgagcatcttgtcccctcccgcag

SEQ ID NO: 285096 - DNA, 25 bp, Homo sapien
gatgcattagggtcacccgctgtga

SEQ ID NO: 285097 - DNA, 25 bp, Homo sapien
gcattagggtcacccgctgtgagca

SEQ ID NO: 285098 - DNA, 25 bp, Homo sapien
tgtgcagggtgaagtcgtcggtggg

SEQ ID NO: 285099 - DNA, 25 bp, Homo sapien
cgttgttgagtgtcccgaggaggcc

SEQ ID NO: 285100 - DNA, 25 bp, Homo sapien
caaacaggaacagctcctggggact

SEQ ID NO: 285101 - DNA, 25 bp, Homo sapien
aggaacgggccctgcacgctgacct

SEQ ID NO: 285102 - DNA, 25 bp, Homo sapien
caagccctgcccgtgccatgtttcc

SEQ ID NO: 285103 - DNA, 25 bp, Homo sapien
ccgtctgccccatatactccacggt

SEQ ID NO: 285104 - DNA, 25 bp, Homo sapien
tgccatgtttccagtaacccccacc

SEQ ID NO: 285105 - DNA, 25 bp, Homo sapien
ctggaagatacatgaccggggcctg

SEQ ID NO: 285106 - DNA, 25 bp, Homo sapien
caaagttgcagaaatgatcgtcccc

SEQ ID NO: 285107 - DNA, 25 bp, Homo sapien
ggtcgtgcttgggttggtacaggaa

SEQ ID NO: 285108 - DNA, 25 bp, Homo sapien
cagggaggacgcattgtgcacggtc

SEQ ID NO: 285109 - DNA, 25 bp, Homo sapien
ccaggaaccaggaatcgtaggtgag

SEQ ID NO: 285110 - DNA, 25 bp, Homo sapien
gtggaacccgccaggtacctgttgc

SEQ ID NO: 285111 - DNA, 25 bp, Homo sapien
tggaagtagatggtggaacccgcca

SEQ ID NO: 285112 - DNA, 25 bp, Homo sapien
caggtacctgttgccctccttttgt

SEQ ID NO: 285113 - DNA, 25 bp, Homo sapien
tgaggaccaggtgccgtcagcctgg

SEQ ID NO: 285114 - DNA, 25 bp, Homo sapien
caggcaggtgtatgagcagagtgtc

SEQ ID NO: 285115 - DNA, 25 bp, Homo sapien
aggtgtatgagcagagtgtcctcac

SEQ ID NO: 285116 - DNA, 25 bp, Homo sapien
gtgagggagcgagtgtcagtgaggg

SEQ ID NO: 285117 - DNA, 25 bp, Homo sapien
tggtgagggagcgagtgtcagtgag

SEQ ID NO: 285118 - DNA, 25 bp, Homo sapien
agcacatagacgagcgcaaccgccg

SEQ ID NO: 285119 - DNA, 25 bp, Homo sapien
gatgcccaacagcaccgcgtagctg

SEQ ID NO: 285120 - DNA, 25 bp, Homo sapien
ttcctgcggcgcagcagcacataga

SEQ ID NO: 285121 - DNA, 25 bp, Homo sapien
aaagatgatgcccaacagcaccgcg

SEQ ID NO: 285122 - DNA, 25 bp, Homo sapien
tcagggctgtgcaccccagacgtgc

SEQ ID NO: 285123 - DNA, 25 bp, Homo sapien
gggttaaatgcccaggtatcaagta

SEQ ID NO: 285124 - DNA, 25 bp, Homo sapien
gcccaggtatcaagtatccaggtcc

SEQ ID NO: 285125 - DNA, 25 bp, Homo sapien
tgcgggagtcgcaggactgggctgc

SEQ ID NO: 285126 - DNA, 25 bp, Homo sapien
ctcaggagtcttggcctggtgctca

SEQ ID NO: 285127 - DNA, 25 bp, Homo sapien
gagtgaccttccagaagagttcgaa

SEQ ID NO: 285128 - DNA, 25 bp, Homo sapien
aattataagcctggagtgccgaggg

SEQ ID NO: 285129 - DNA, 25 bp, Homo sapien
aggacataggtattagaatcccagg

SEQ ID NO: 285130 - DNA, 25 bp, Homo sapien
agggctcaggacataggtattagaa

SEQ ID NO: 285131 - DNA, 25 bp, Homo sapien
agaaccagggcgcagcatgaacacc

SEQ ID NO: 285132 - DNA, 25 bp, Homo sapien
ccccgggaggcggtcatggaactct

SEQ ID NO: 285133 - DNA, 25 bp, Homo sapien
tggatactgttggtggtgaccccgg

SEQ ID NO: 285134 - DNA, 25 bp, Homo sapien
aggaaacaaggcgcttgttttctct

SEQ ID NO: 285135 - DNA, 25 bp, Homo sapien
gtgggccaccgtggcctgaggcctg

SEQ ID NO: 285136 - DNA, 25 bp, Homo sapien
gctctgtgcccagattctggacatt

SEQ ID NO: 285137 - DNA, 25 bp, Homo sapien
tcaggtgggccaccgtggcctgagg

SEQ ID NO: 285138 - DNA, 25 bp, Homo sapien
ctgctcaggtgggccaccgtggcct

SEQ ID NO: 285139 - DNA, 25 bp, Homo sapien
caaaggttgatggaccctggtcatc

SEQ ID NO: 285140 - DNA, 25 bp, Homo sapien
aggccccacaggaagcgccgacaaa

SEQ ID NO: 285141 - DNA, 25 bp, Homo sapien
ctctccacaaaggttgatggaccct

SEQ ID NO: 285142 - DNA, 25 bp, Homo sapien
tgagtccccattcgggaccctctcc

SEQ ID NO: 285143 - DNA, 25 bp, Homo sapien
ggaacccctgtccaaccaatcagag

SEQ ID NO: 285144 - DNA, 25 bp, Homo sapien
ggccacactttgctcttaggatgaa

SEQ ID NO: 285145 - DNA, 25 bp, Homo sapien
caccctctagtggacctgatgagct

SEQ ID NO: 285146 - DNA, 25 bp, Homo sapien
atgtccaggccttgacccggaaact

SEQ ID NO: 285147 - DNA, 25 bp, Homo sapien
cagcttggcagaagaaggggtccct

SEQ ID NO: 285148 - DNA, 25 bp, Homo sapien
ggggcttgcagaaggaagcagcttg

SEQ ID NO: 285149 - DNA, 25 bp, Homo sapien
cttggcagaagaaggggtcccttgc

SEQ ID NO: 285150 - DNA, 25 bp, Homo sapien
cagaaggaagcagcttggcagaaga

SEQ ID NO: 285151 - DNA, 25 bp, Homo sapien
gtgcgctgcaccgacccccccgcct

SEQ ID NO: 285152 - DNA, 25 bp, Homo sapien
cttcccactcctacagtgcgctgca

SEQ ID NO: 285153 - DNA, 25 bp, Homo sapien
acaaagggagctggtgaaagcctga

SEQ ID NO: 285154 - DNA, 25 bp, Homo sapien
gggtgcctgtgggaagccgcactcc

SEQ ID NO: 285155 - DNA, 25 bp, Homo sapien
agggacttggttggcatgacttcca

SEQ ID NO: 285156 - DNA, 25 bp, Homo sapien
caggtcagcagggacttggttggca

SEQ ID NO: 285157 - DNA, 25 bp, Homo sapien
atttcctggtcctggaagagtagtg

SEQ ID NO: 285158 - DNA, 25 bp, Homo sapien
gtagtgggtgggtgatcaggtcagc

SEQ ID NO: 285159 - DNA, 25 bp, Homo sapien
tgagagctgttggtagcagccacct

SEQ ID NO: 285160 - DNA, 25 bp, Homo sapien
caccttgagagctgttggtagcagc

SEQ ID NO: 285161 - DNA, 25 bp, Homo sapien
ttgagagctgttggtagcagccacc

SEQ ID NO: 285162 - DNA, 25 bp, Homo sapien
ccttgagagctgttggtagcagcca

SEQ ID NO: 285163 - DNA, 25 bp, Homo sapien
tcgtgggccgctgtcagaattcagg

SEQ ID NO: 285164 - DNA, 25 bp, Homo sapien
gataggctcccaggccatgatctca

SEQ ID NO: 285165 - DNA, 25 bp, Homo sapien
taattcctaatctgggcttgactgc

SEQ ID NO: 285166 - DNA, 25 bp, Homo sapien
gaattcaggcagatgcgagaccacc

SEQ ID NO: 285167 - DNA, 25 bp, Homo sapien
ttaataaagacgtgatcttgctaca

SEQ ID NO: 285168 - DNA, 25 bp, Homo sapien
ttttaataaagacgtgatcttgcta

SEQ ID NO: 285169 - DNA, 25 bp, Homo sapien
tttaataaagacgtgatcttgctac

SEQ ID NO: 285170 - DNA, 25 bp, Homo sapien
taataaagacgtgatcttgctacat

SEQ ID NO: 285171 - DNA, 25 bp, Homo sapien
aattatttaaacaaatagagatggg

SEQ ID NO: 285172 - DNA, 25 bp, Homo sapien
gtctcactatgttgaccaggctgga

SEQ ID NO: 285173 - DNA, 25 bp, Homo sapien
tcctgacttcaagcagtccccccat

SEQ ID NO: 285174 - DNA, 25 bp, Homo sapien
ctgacttcaagcagtccccccatct

SEQ ID NO: 285175 - DNA, 25 bp, Homo sapien
ctgcctcggactccaggaaaggcgg

SEQ ID NO: 285176 - DNA, 25 bp, Homo sapien
aggaacgcagggcttgcaggatcac

SEQ ID NO: 285177 - DNA, 25 bp, Homo sapien
ggatcccaggaaggaacgcagggct

SEQ ID NO: 285178 - DNA, 25 bp, Homo sapien
cggcctgggcccgaacaggaaggag

SEQ ID NO: 285179 - DNA, 25 bp, Homo sapien
tgtgcaatcaaattgaaggcaggat

SEQ ID NO: 285180 - DNA, 25 bp, Homo sapien
tcggagcacacagcactggcttgct

SEQ ID NO: 285181 - DNA, 25 bp, Homo sapien
aggacgccctggaactcggagcaca

SEQ ID NO: 285182 - DNA, 25 bp, Homo sapien
gttctcagtgcagtggctgagctgg

SEQ ID NO: 285183 - DNA, 25 bp, Homo sapien
cagtggctgagctggaggacgccct

SEQ ID NO: 285184 - DNA, 25 bp, Homo sapien
cagccgggtgttgtggaccccaaag

SEQ ID NO: 285185 - DNA, 25 bp, Homo sapien
ttgagggccctcaacactatcttcc

SEQ ID NO: 285186 - DNA, 25 bp, Homo sapien
gctcctgggccccacagagagtcca

SEQ ID NO: 285187 - DNA, 25 bp, Homo sapien
caaaggggtgactcccggctcctgg

SEQ ID NO: 285188 - DNA, 25 bp, Homo sapien
gaaacttgtgtgtactgggcctaga

SEQ ID NO: 285189 - DNA, 25 bp, Homo sapien
tcattcctgagggtgagtgtctgcc

SEQ ID NO: 285190 - DNA, 25 bp, Homo sapien
ctcccggtccaggtcttcaacagtg

SEQ ID NO: 285191 - DNA, 25 bp, Homo sapien
cctcggatgtggaggagtcattcct

SEQ ID NO: 285192 - DNA, 25 bp, Homo sapien
gctgagtcctgggaatcagaagagg

SEQ ID NO: 285193 - DNA, 25 bp, Homo sapien
actccagtagtgaccccaacgtggg

SEQ ID NO: 285194 - DNA, 25 bp, Homo sapien
cctgcagcagatgctaaggggtcca

SEQ ID NO: 285195 - DNA, 25 bp, Homo sapien
tgcaggagcagaagtgccatgcctt

SEQ ID NO: 285196 - DNA, 25 bp, Homo sapien
gctggtccaggaggtctgggatctc

SEQ ID NO: 285197 - DNA, 25 bp, Homo sapien
tcatttggggcacgagctggtccag

SEQ ID NO: 285198 - DNA, 25 bp, Homo sapien
ccaggaggtctgggatctctggttc

SEQ ID NO: 285199 - DNA, 25 bp, Homo sapien
aggaggtctgggatctctggttctg

SEQ ID NO: 285200 - DNA, 25 bp, Homo sapien
gatgaggctggcccctcttccgctt

SEQ ID NO: 285201 - DNA, 25 bp, Homo sapien
cccgtagagctgtaggggctcgaga

SEQ ID NO: 285202 - DNA, 25 bp, Homo sapien
gctggcccctcttccgcttttgttc

SEQ ID NO: 285203 - DNA, 25 bp, Homo sapien
gaggcctcccgtagagctgtagggg

SEQ ID NO: 285204 - DNA, 25 bp, Homo sapien
aacttgcatatacggggcctagagg

SEQ ID NO: 285205 - DNA, 25 bp, Homo sapien
gcaggggaaacttgcatatacgggg

SEQ ID NO: 285206 - DNA, 25 bp, Homo sapien
agcaggggaaacttgcatatacggg

SEQ ID NO: 285207 - DNA, 25 bp, Homo sapien
gggaaacttgcatatacggggccta

SEQ ID NO: 285208 - DNA, 25 bp, Homo sapien
tgcgctggaatgcctcctccttctc

SEQ ID NO: 285209 - DNA, 25 bp, Homo sapien
gttgatgcgctggaatgcctcctcc

SEQ ID NO: 285210 - DNA, 25 bp, Homo sapien
tccttctcccggtccaggtcttcag

SEQ ID NO: 285211 - DNA, 25 bp, Homo sapien
ctagatggcctggtcctcaacctgc

SEQ ID NO: 285212 - DNA, 25 bp, Homo sapien
tgccgcggaagcgtgctggtcctat

SEQ ID NO: 285213 - DNA, 25 bp, Homo sapien
aaaatgtagtaagattgcagagtcg

SEQ ID NO: 285214 - DNA, 25 bp, Homo sapien
taagattgcagagtcgtgccgcgga

SEQ ID NO: 285215 - DNA, 25 bp, Homo sapien
ctggtcctatccatgtagtgaaggc

SEQ ID NO: 285216 - DNA, 25 bp, Homo sapien
ctcttactaggagcaagagctgact

SEQ ID NO: 285217 - DNA, 25 bp, Homo sapien
cactgctgccccaaatctgagatca

SEQ ID NO: 285218 - DNA, 25 bp, Homo sapien
ccaatccctttacttgacagctggg

SEQ ID NO: 285219 - DNA, 25 bp, Homo sapien
caggctattctcaaaattcccggcc

SEQ ID NO: 285220 - DNA, 25 bp, Homo sapien
aggagacccggccatatacactggg

SEQ ID NO: 285221 - DNA, 25 bp, Homo sapien
agacccggccatatacactgggcca

SEQ ID NO: 285222 - DNA, 25 bp, Homo sapien
agcttgaggagacccggccatatac

SEQ ID NO: 285223 - DNA, 25 bp, Homo sapien
aatgcagcttgaggagacccggcca

SEQ ID NO: 285224 - DNA, 25 bp, Homo sapien
cttggcttcagtagctcacccagct

SEQ ID NO: 285225 - DNA, 25 bp, Homo sapien
ttcagtagctcacccagcttacagg

SEQ ID NO: 285226 - DNA, 25 bp, Homo sapien
gcttcagtagctcacccagcttaca

SEQ ID NO: 285227 - DNA, 25 bp, Homo sapien
tggcttcagtagctcacccagctta

SEQ ID NO: 285228 - DNA, 25 bp, Homo sapien
tctggtctcatgatgtgcatctgtt

SEQ ID NO: 285229 - DNA, 25 bp, Homo sapien
ttccatctctgtctcagcgaccatt

SEQ ID NO: 285230 - DNA, 25 bp, Homo sapien
cggtgggctcccttgtcctggcttc

SEQ ID NO: 285231 - DNA, 25 bp, Homo sapien
tctgggcccggtgggctcccttgtc

SEQ ID NO: 285232 - DNA, 25 bp, Homo sapien
atctctgtctcagcgaccattcagc

SEQ ID NO: 285233 - DNA, 25 bp, Homo sapien
cctggacaatccgtgtcctggcagc

SEQ ID NO: 285234 - DNA, 25 bp, Homo sapien
tcgctcaacttttgtataagtctcc

SEQ ID NO: 285235 - DNA, 25 bp, Homo sapien
gctcaacttttgtataagtctccac

SEQ ID NO: 285236 - DNA, 25 bp, Homo sapien
aacttttgtataagtctccacttgg

SEQ ID NO: 285237 - DNA, 25 bp, Homo sapien
tcaacttttgtataagtctccactt

SEQ ID NO: 285238 - DNA, 25 bp, Homo sapien
ctggtggtggcgttgaaacagcacc

SEQ ID NO: 285239 - DNA, 25 bp, Homo sapien
gggaccagaaccgagcctgtcctgg

SEQ ID NO: 285240 - DNA, 25 bp, Homo sapien
gcaggggaccagaaccgagcctgtc

SEQ ID NO: 285241 - DNA, 25 bp, Homo sapien
aggggaccagaaccgagcctgtcct

SEQ ID NO: 285242 - DNA, 25 bp, Homo sapien
ggaccagaaccgagcctgtcctgga

SEQ ID NO: 285243 - DNA, 25 bp, Homo sapien
ccttcgatgtcagtgagtgttggcc

SEQ ID NO: 285244 - DNA, 25 bp, Homo sapien
atcctttgtcatgagtctgttgcca

SEQ ID NO: 285245 - DNA, 25 bp, Homo sapien
atctaccacgtgtccggccggtgtg

SEQ ID NO: 285246 - DNA, 25 bp, Homo sapien
tcgatgtcagtgagtgttggcctgc

SEQ ID NO: 285247 - DNA, 25 bp, Homo sapien
gtggaatctctaggaccgtgctggc

SEQ ID NO: 285248 - DNA, 25 bp, Homo sapien
aatgcccacttcctatgatgaaaag

SEQ ID NO: 285249 - DNA, 25 bp, Homo sapien
ggctcccgcgatctgcacaggtagg

SEQ ID NO: 285250 - DNA, 25 bp, Homo sapien
tccacctcttacagtggacctgata

SEQ ID NO: 285251 - DNA, 25 bp, Homo sapien
cctggtttgggctgggcggtgagct

SEQ ID NO: 285252 - DNA, 25 bp, Homo sapien
gctccctcgcaatctcctggtttgg

SEQ ID NO: 285253 - DNA, 25 bp, Homo sapien
gtggctcagccgagacccgttgagt

SEQ ID NO: 285254 - DNA, 25 bp, Homo sapien
gttgagtccggcctcaggaaagcag

SEQ ID NO: 285255 - DNA, 25 bp, Homo sapien
aacaccaacggacgaaggccagtgg

SEQ ID NO: 285256 - DNA, 25 bp, Homo sapien
tgtctgcacacagtcaagccgcaag

SEQ ID NO: 285257 - DNA, 25 bp, Homo sapien
ggccagtgggtctcggcggcgaagc

SEQ ID NO: 285258 - DNA, 25 bp, Homo sapien
cgaagcctgcgggttgttccagaag

SEQ ID NO: 285259 - DNA, 25 bp, Homo sapien
ggtccagcataatggctatttcttg

SEQ ID NO: 285260 - DNA, 25 bp, Homo sapien
gggtccagcataatggctatttctt

SEQ ID NO: 285261 - DNA, 25 bp, Homo sapien
tgggtccagcataatggctatttct

SEQ ID NO: 285262 - DNA, 25 bp, Homo sapien
ctgggtccagcataatggctatttc

SEQ ID NO: 285263 - DNA, 25 bp, Homo sapien
ggcttagtcgggatcttccccaaga

SEQ ID NO: 285264 - DNA, 25 bp, Homo sapien
gaaaatggcttagtcgggatcttcc

SEQ ID NO: 285265 - DNA, 25 bp, Homo sapien
ggaaaatggcttagtcgggatcttc

SEQ ID NO: 285266 - DNA, 25 bp, Homo sapien
tggaaaatggcttagtcgggatctt

SEQ ID NO: 285267 - DNA, 25 bp, Homo sapien
ataaagtagccccatcggactgcct

SEQ ID NO: 285268 - DNA, 25 bp, Homo sapien
gattgttctggaataaagtagcccc

SEQ ID NO: 285269 - DNA, 25 bp, Homo sapien
tggaataaagtagccccatcggact

SEQ ID NO: 285270 - DNA, 25 bp, Homo sapien
tagccccatcggactgcctcaggaa

SEQ ID NO: 285271 - DNA, 25 bp, Homo sapien
ccctctactctgcatgagtcactcc

SEQ ID NO: 285272 - DNA, 25 bp, Homo sapien
cctttgattgtccctggtgactatg

SEQ ID NO: 285273 - DNA, 25 bp, Homo sapien
tccctctactctgcatgagtcactc

SEQ ID NO: 285274 - DNA, 25 bp, Homo sapien
tttcctttgattgtccctggtgact

SEQ ID NO: 285275 - DNA, 25 bp, Homo sapien
ccaggccaaataccccagcgccgat

SEQ ID NO: 285276 - DNA, 25 bp, Homo sapien
taccccagcgccgatacctgcttct

SEQ ID NO: 285277 - DNA, 25 bp, Homo sapien
ccaaataccccagcgccgatacctg

SEQ ID NO: 285278 - DNA, 25 bp, Homo sapien
cagcgccgatacctgcttcttcaaa

SEQ ID NO: 285279 - DNA, 25 bp, Homo sapien
tatgtgacacaccaaaagaatctcc

SEQ ID NO: 285280 - DNA, 25 bp, Homo sapien
tccgggtctcccatacagtgagtag

SEQ ID NO: 285281 - DNA, 25 bp, Homo sapien
tgccatccaagttgtgtgactctgg

SEQ ID NO: 285282 - DNA, 25 bp, Homo sapien
gaagttggactctaaggcatctcta

SEQ ID NO: 285283 - DNA, 25 bp, Homo sapien
cttgagatcacttagaccggctggt

SEQ ID NO: 285284 - DNA, 25 bp, Homo sapien
ggttcttagccatatcagacccaaa

SEQ ID NO: 285285 - DNA, 25 bp, Homo sapien
tcaggcaggactatattaggactaa

SEQ ID NO: 285286 - DNA, 25 bp, Homo sapien
cattttggcaactcagatatcaccc

SEQ ID NO: 285287 - DNA, 25 bp, Homo sapien
cacagatgacccctgacttactatt

SEQ ID NO: 285288 - DNA, 25 bp, Homo sapien
gtgcctggctctgatatatattata

SEQ ID NO: 285289 - DNA, 25 bp, Homo sapien
gaaaccatacattagagtacccata

SEQ ID NO: 285290 - DNA, 25 bp, Homo sapien
acaatgatgtgaaagcaataaacct

SEQ ID NO: 285291 - DNA, 25 bp, Homo sapien
gggctgcctcttcgtgatgcattta

SEQ ID NO: 285292 - DNA, 25 bp, Homo sapien
gctgcctcttcgtgatgcatttaca

SEQ ID NO: 285293 - DNA, 25 bp, Homo sapien
ctgcctcttcgtgatgcatttacaa

SEQ ID NO: 285294 - DNA, 25 bp, Homo sapien
ctgggctgcctcttcgtgatgcatt

SEQ ID NO: 285295 - DNA, 25 bp, Homo sapien
ttacaagtttgcctcccgtagatgc

SEQ ID NO: 285296 - DNA, 25 bp, Homo sapien
tgtttgcgttttacttattgcagac

SEQ ID NO: 285297 - DNA, 25 bp, Homo sapien
tttgcctcccgtagatgctgaagag

SEQ ID NO: 285298 - DNA, 25 bp, Homo sapien
gttttacttattgcagacactttag

SEQ ID NO: 285299 - DNA, 25 bp, Homo sapien
ttcagcagtaaaggagcattatgtc

SEQ ID NO: 285300 - DNA, 25 bp, Homo sapien
catcctatcaatgttattactatgg

SEQ ID NO: 285301 - DNA, 25 bp, Homo sapien
gaaaggttatacattagatactagc

SEQ ID NO: 285302 - DNA, 25 bp, Homo sapien
tacatggtatatacagggaagtgat

SEQ ID NO: 285303 - DNA, 25 bp, Homo sapien
atattgaacttcaggccggttgcag

SEQ ID NO: 285304 - DNA, 25 bp, Homo sapien
tattgaacttcaggccggttgcagt

SEQ ID NO: 285305 - DNA, 25 bp, Homo sapien
aatattgaacttcaggccggttgca

SEQ ID NO: 285306 - DNA, 25 bp, Homo sapien
attgaacttcaggccggttgcagtg

SEQ ID NO: 285307 - DNA, 25 bp, Homo sapien
ttcaaatgaacaacacaacccaagt

SEQ ID NO: 285308 - DNA, 25 bp, Homo sapien
tcaccacggtagtattttgaccata

SEQ ID NO: 285309 - DNA, 25 bp, Homo sapien
tactggtacgccttaaatgcctata

SEQ ID NO: 285310 - DNA, 25 bp, Homo sapien
catatagttctgactcgtggagcca

SEQ ID NO: 285311 - DNA, 25 bp, Homo sapien
tccagctaaaaggtcatcactgctc

SEQ ID NO: 285312 - DNA, 25 bp, Homo sapien
ctaaaaggtcatcactgctcttggt

SEQ ID NO: 285313 - DNA, 25 bp, Homo sapien
cagctaaaaggtcatcactgctctt

SEQ ID NO: 285314 - DNA, 25 bp, Homo sapien
gctaaaaggtcatcactgctcttgg

SEQ ID NO: 285315 - DNA, 25 bp, Homo sapien
tgcagatgggcaggtgcttttcttt

SEQ ID NO: 285316 - DNA, 25 bp, Homo sapien
tctttctctagtagaactggattct

SEQ ID NO: 285317 - DNA, 25 bp, Homo sapien
gctctggtttaatcgggtacgttca

SEQ ID NO: 285318 - DNA, 25 bp, Homo sapien
tgctctggtttaatcgggtacgttc

SEQ ID NO: 285319 - DNA, 25 bp, Homo sapien
acgtaatctttctctagtagaactg

SEQ ID NO: 285320 - DNA, 25 bp, Homo sapien
tctgtagcagttcgactgcgggaac

SEQ ID NO: 285321 - DNA, 25 bp, Homo sapien
tcgactgcgggaacgtttggccaat

SEQ ID NO: 285322 - DNA, 25 bp, Homo sapien
catacgaacgtcacattctgtagca

SEQ ID NO: 285323 - DNA, 25 bp, Homo sapien
tttggccaatgccatgtcattagct

SEQ ID NO: 285324 - DNA, 25 bp, Homo sapien
catttcgggtatgagccagatcttc

SEQ ID NO: 285325 - DNA, 25 bp, Homo sapien
tcagcgaggtccatgtaacgttgct

SEQ ID NO: 285326 - DNA, 25 bp, Homo sapien
tcaaaacgggcattctcagcgaggt

SEQ ID NO: 285327 - DNA, 25 bp, Homo sapien
ggtgtatccgttcagtcaggcaagc

SEQ ID NO: 285328 - DNA, 25 bp, Homo sapien
tgtcatgaagtttcacagcacgatg

SEQ ID NO: 285329 - DNA, 25 bp, Homo sapien
ggaaggctcggtattcatcctctac

SEQ ID NO: 285330 - DNA, 25 bp, Homo sapien
ttttctaacgtcatattcaaatctt

SEQ ID NO: 285331 - DNA, 25 bp, Homo sapien
tcatccaggtctgatcttaattttt

SEQ ID NO: 285332 - DNA, 25 bp, Homo sapien
ccctaaagtatgagtatgctgatgt

SEQ ID NO: 285333 - DNA, 25 bp, Homo sapien
gtttctgggtaaataacattctctc

SEQ ID NO: 285334 - DNA, 25 bp, Homo sapien
tagcaggaattcaggcatagtgaac

SEQ ID NO: 285335 - DNA, 25 bp, Homo sapien
gaacacctgcttgcaatgacacatg

SEQ ID NO: 285336 - DNA, 25 bp, Homo sapien
cgaagtcttctgtggagtgtcttta

SEQ ID NO: 285337 - DNA, 25 bp, Homo sapien
ttccatgtcgtgcttttggtcctgg

SEQ ID NO: 285338 - DNA, 25 bp, Homo sapien
ccgaagtcttctgtggagtgtcttt

SEQ ID NO: 285339 - DNA, 25 bp, Homo sapien
ttctctttccatgtcgtgcttttgg

SEQ ID NO: 285340 - DNA, 25 bp, Homo sapien
gcgctttagatcaccaatctcctct

SEQ ID NO: 285341 - DNA, 25 bp, Homo sapien
tgagcctcatgtaaccggcgcttta

SEQ ID NO: 285342 - DNA, 25 bp, Homo sapien
tgaaactgccgccattccgcagatt

SEQ ID NO: 285343 - DNA, 25 bp, Homo sapien
tcatttgcaatgactactgcagtct

SEQ ID NO: 285344 - DNA, 25 bp, Homo sapien
tgcactgtcaaaggacttgatgagg

SEQ ID NO: 285345 - DNA, 25 bp, Homo sapien
tttactgtaggagttggctctgagg

SEQ ID NO: 285346 - DNA, 25 bp, Homo sapien
aatctctctcaacggcattcatgta

SEQ ID NO: 285347 - DNA, 25 bp, Homo sapien
gaagtcgaggaccttctactcagtc

SEQ ID NO: 285348 - DNA, 25 bp, Homo sapien
gggctcaggggcgttcgaggaattg

SEQ ID NO: 285349 - DNA, 25 bp, Homo sapien
ctgcataggggacacagctgctgca

SEQ ID NO: 285350 - DNA, 25 bp, Homo sapien
tcaggggcgttcgaggaattgcagc

SEQ ID NO: 285351 - DNA, 25 bp, Homo sapien
ggggcgttcgaggaattgcagctgc

SEQ ID NO: 285352 - DNA, 25 bp, Homo sapien
catttctatccgttctaggtctgca

SEQ ID NO: 285353 - DNA, 25 bp, Homo sapien
tcacatacttaagcagagatcatat

SEQ ID NO: 285354 - DNA, 25 bp, Homo sapien
acattgctgcatgctaatcctatca

SEQ ID NO: 285355 - DNA, 25 bp, Homo sapien
tattgcatgccagattatgatggag

SEQ ID NO: 285356 - DNA, 25 bp, Homo sapien
cagtctccagattaagtatgacgtt

SEQ ID NO: 285357 - DNA, 25 bp, Homo sapien
gacgttagctgtggagttcccacag

SEQ ID NO: 285358 - DNA, 25 bp, Homo sapien
tagctgtggagttcccacaggtctc

SEQ ID NO: 285359 - DNA, 25 bp, Homo sapien
ctccagattaagtatgacgttagct

SEQ ID NO: 285360 - DNA, 25 bp, Homo sapien
cacagggtaagagctccagcaaaat

SEQ ID NO: 285361 - DNA, 25 bp, Homo sapien
aattgcacagggtaagagctccagc

SEQ ID NO: 285362 - DNA, 25 bp, Homo sapien
tgcacagggtaagagctccagcaaa

SEQ ID NO: 285363 - DNA, 25 bp, Homo sapien
atgcaattgcacagggtaagagctc

SEQ ID NO: 285364 - DNA, 25 bp, Homo sapien
tagtttggtctcttatctgacaggg

SEQ ID NO: 285365 - DNA, 25 bp, Homo sapien
ttccccatagtttggtctcttatct

SEQ ID NO: 285366 - DNA, 25 bp, Homo sapien
ccatagtttggtctcttatctgaca

SEQ ID NO: 285367 - DNA, 25 bp, Homo sapien
ttggtctcttatctgacagggctgt

SEQ ID NO: 285368 - DNA, 25 bp, Homo sapien
aaggctgactattgacagaactagg

SEQ ID NO: 285369 - DNA, 25 bp, Homo sapien
ggctctgaccacacttaacgcagac

SEQ ID NO: 285370 - DNA, 25 bp, Homo sapien
gactattgacagaactagggcacac

SEQ ID NO: 285371 - DNA, 25 bp, Homo sapien
gaccacacttaacgcagactgaaga

SEQ ID NO: 285372 - DNA, 25 bp, Homo sapien
ggagtgagccatttcacccagcctc

SEQ ID NO: 285373 - DNA, 25 bp, Homo sapien
ccacaccaggcttgtttctgtattt

SEQ ID NO: 285374 - DNA, 25 bp, Homo sapien
gccatttcacccagcctctttttat

SEQ ID NO: 285375 - DNA, 25 bp, Homo sapien
caccacaccaggcttgtttctgtat

SEQ ID NO: 285376 - DNA, 25 bp, Homo sapien
gcactcttggcagggaagcaggccg

SEQ ID NO: 285377 - DNA, 25 bp, Homo sapien
cactttccatcgcaggcactcttgg

SEQ ID NO: 285378 - DNA, 25 bp, Homo sapien
gaagcaggccggctggctgaagatg

SEQ ID NO: 285379 - DNA, 25 bp, Homo sapien
ctgagagggtcttggcactttccat

SEQ ID NO: 285380 - DNA, 25 bp, Homo sapien
gaaatgtcccgtttcacttcttcac

SEQ ID NO: 285381 - DNA, 25 bp, Homo sapien
agaaatgtcccgtttcacttcttca

SEQ ID NO: 285382 - DNA, 25 bp, Homo sapien
atcagagaggctggcgacgctccct

SEQ ID NO: 285383 - DNA, 25 bp, Homo sapien
tgtggagacgtggttcccatagcca

SEQ ID NO: 285384 - DNA, 25 bp, Homo sapien
ctgtggagacgtggttcccatagcc

SEQ ID NO: 285385 - DNA, 25 bp, Homo sapien
tggagacgtggttcccatagccatc

SEQ ID NO: 285386 - DNA, 25 bp, Homo sapien
cacagatgccgttggagaagaggac

SEQ ID NO: 285387 - DNA, 25 bp, Homo sapien
gtcacagatgccgttggagaagagg

SEQ ID NO: 285388 - DNA, 25 bp, Homo sapien
ggagtcacagatgccgttggagaag

SEQ ID NO: 285389 - DNA, 25 bp, Homo sapien
gagtcacagatgccgttggagaaga

SEQ ID NO: 285390 - DNA, 25 bp, Homo sapien
caccgtatcttcccttttggtcaca

SEQ ID NO: 285391 - DNA, 25 bp, Homo sapien
tctgcaccgtatcttcccttttggt

SEQ ID NO: 285392 - DNA, 25 bp, Homo sapien
gcaccgtatcttcccttttggtcac

SEQ ID NO: 285393 - DNA, 25 bp, Homo sapien
tgcaccgtatcttcccttttggtca

SEQ ID NO: 285394 - DNA, 25 bp, Homo sapien
ccacttcagcaaggcgttcctcttt

SEQ ID NO: 285395 - DNA, 25 bp, Homo sapien
ggcgttcctctttgatcctccatat

SEQ ID NO: 285396 - DNA, 25 bp, Homo sapien
ttctgacaccacttcagcaaggcgt

SEQ ID NO: 285397 - DNA, 25 bp, Homo sapien
ttttcttctgacaccacttcagcaa

SEQ ID NO: 285398 - DNA, 25 bp, Homo sapien
tcacccaagtgatagtcaagttatg

SEQ ID NO: 285399 - DNA, 25 bp, Homo sapien
taagaaagtgctacaacagatgagt

SEQ ID NO: 285400 - DNA, 25 bp, Homo sapien
ctaacattttgtataggactcatca

SEQ ID NO: 285401 - DNA, 25 bp, Homo sapien
ggagaattagagtctgctctccaaa

SEQ ID NO: 285402 - DNA, 25 bp, Homo sapien
tcaggaacatagaactccattccct

SEQ ID NO: 285403 - DNA, 25 bp, Homo sapien
tgacttttctgtatgtccactgcaa

SEQ ID NO: 285404 - DNA, 25 bp, Homo sapien
cctgttaatggcagatcttcttttc

SEQ ID NO: 285405 - DNA, 25 bp, Homo sapien
ccactgcaatatgcttggctcttta

SEQ ID NO: 285406 - DNA, 25 bp, Homo sapien
tcttcagtgtgcatcgtgttgtagc

SEQ ID NO: 285407 - DNA, 25 bp, Homo sapien
ttcttctatcgacagacacttgggt

SEQ ID NO: 285408 - DNA, 25 bp, Homo sapien
tagtattagcccttttgtatatggc

SEQ ID NO: 285409 - DNA, 25 bp, Homo sapien
catatgattgtgctaccatcaccac

SEQ ID NO: 285410 - DNA, 25 bp, Homo sapien
tctatcattcttgggcatttggctt

SEQ ID NO: 285411 - DNA, 25 bp, Homo sapien
atcattcttgggcatttggcttggt

SEQ ID NO: 285412 - DNA, 25 bp, Homo sapien
agtctatcattcttgggcatttggc

SEQ ID NO: 285413 - DNA, 25 bp, Homo sapien
cattcttgggcatttggcttggttc

SEQ ID NO: 285414 - DNA, 25 bp, Homo sapien
tagaaatggtgataaacgacattct

SEQ ID NO: 285415 - DNA, 25 bp, Homo sapien
ggtgataaacgacattctttcttgt

SEQ ID NO: 285416 - DNA, 25 bp, Homo sapien
gaaatggtgataaacgacattcttt

SEQ ID NO: 285417 - DNA, 25 bp, Homo sapien
aatggtgataaacgacattctttct

SEQ ID NO: 285418 - DNA, 25 bp, Homo sapien
gggtttgtagccaagactgtcaagt

SEQ ID NO: 285419 - DNA, 25 bp, Homo sapien
tttcctaatgtatgattaaccatcc

SEQ ID NO: 285420 - DNA, 25 bp, Homo sapien
tccaagaggcatggaataactgact

SEQ ID NO: 285421 - DNA, 25 bp, Homo sapien
caaagaagtgtcgataggaaatgag

SEQ ID NO: 285422 - DNA, 25 bp, Homo sapien
ggtctcaaccgaaggcctcgaatat

SEQ ID NO: 285423 - DNA, 25 bp, Homo sapien
taaagctgataacttctggtcaacc

SEQ ID NO: 285424 - DNA, 25 bp, Homo sapien
tctggcaggtaactagaataagggc

SEQ ID NO: 285425 - DNA, 25 bp, Homo sapien
gacataattcttttgaggtctcaac

SEQ ID NO: 285426 - DNA, 25 bp, Homo sapien
catctattactatacctttagttct

SEQ ID NO: 285427 - DNA, 25 bp, Homo sapien
ttactttgctaatatgtgattttaa

SEQ ID NO: 285428 - DNA, 25 bp, Homo sapien
catatatggatttacatctattact

SEQ ID NO: 285429 - DNA, 25 bp, Homo sapien
acttatcttctattagccccttatt

SEQ ID NO: 285430 - DNA, 25 bp, Homo sapien
aatcttttgacagtgcatgtggcca

SEQ ID NO: 285431 - DNA, 25 bp, Homo sapien
ttatagctcagtcaggacaaagtag

SEQ ID NO: 285432 - DNA, 25 bp, Homo sapien
caattagaaggaatgtgcaatccac

SEQ ID NO: 285433 - DNA, 25 bp, Homo sapien
aattctgatgaatatactgtggcca

SEQ ID NO: 285434 - DNA, 25 bp, Homo sapien
tgaatataccatgtagtcgcctccc

SEQ ID NO: 285435 - DNA, 25 bp, Homo sapien
gcttctgctcaatattacatgtgtg

SEQ ID NO: 285436 - DNA, 25 bp, Homo sapien
gaatcatagtttagactcctgtgca

SEQ ID NO: 285437 - DNA, 25 bp, Homo sapien
tcagttcccctaaagataaccacta

SEQ ID NO: 285438 - DNA, 25 bp, Homo sapien
ctaatgttaaatgacgagttgatgg

SEQ ID NO: 285439 - DNA, 25 bp, Homo sapien
ttgtgcacatgtaccctaaaactta

SEQ ID NO: 285440 - DNA, 25 bp, Homo sapien
tatacgtatgtaactaacctgcacg

SEQ ID NO: 285441 - DNA, 25 bp, Homo sapien
gtgcagcacaccaacatggcacatg

SEQ ID NO: 285442 - DNA, 25 bp, Homo sapien
tgatgatgattatacaactctgtgc

SEQ ID NO: 285443 - DNA, 25 bp, Homo sapien
catgccacgtggaagaacctcaaaa

SEQ ID NO: 285444 - DNA, 25 bp, Homo sapien
tagaaaggagtgaagtactaacaca

SEQ ID NO: 285445 - DNA, 25 bp, Homo sapien
tgggacaggcaaacccatggtggct

SEQ ID NO: 285446 - DNA, 25 bp, Homo sapien
tgggcccaatctctttaggttagga

SEQ ID NO: 285447 - DNA, 25 bp, Homo sapien
cttcaaggctggacacataagggaa

SEQ ID NO: 285448 - DNA, 25 bp, Homo sapien
taagaatctactcaacccacaggct

SEQ ID NO: 285449 - DNA, 25 bp, Homo sapien
caagtgctaatctcatgcctgggtt

SEQ ID NO: 285450 - DNA, 25 bp, Homo sapien
tcccagctgctatgtttgacattaa

SEQ ID NO: 285451 - DNA, 25 bp, Homo sapien
taatagtagctatcaagatcatgtt

SEQ ID NO: 285452 - DNA, 25 bp, Homo sapien
taaacagaatgcagtaagtacactg

SEQ ID NO: 285453 - DNA, 25 bp, Homo sapien
tatggtaatggcactaagcaactga

SEQ ID NO: 285454 - DNA, 25 bp, Homo sapien
aacacagtagggtagggtacagcca

SEQ ID NO: 285455 - DNA, 25 bp, Homo sapien
tagggtacagccagataaagagtgt

SEQ ID NO: 285456 - DNA, 25 bp, Homo sapien
tcttgctgtttccttggtattaaaa

SEQ ID NO: 285457 - DNA, 25 bp, Homo sapien
tgctgtttccttggtattaaaacac

SEQ ID NO: 285458 - DNA, 25 bp, Homo sapien
gatgctcaatatagtgtgctcacct

SEQ ID NO: 285459 - DNA, 25 bp, Homo sapien
tatttcagaggaagatcacccaccc

SEQ ID NO: 285460 - DNA, 25 bp, Homo sapien
gacagaacgggagcctaaaaggaca

SEQ ID NO: 285461 - DNA, 25 bp, Homo sapien
gaaatgcaccatggtcttgcaggag

SEQ ID NO: 285462 - DNA, 25 bp, Homo sapien
tagctgctgatctaagggtgctgcc

SEQ ID NO: 285463 - DNA, 25 bp, Homo sapien
tgttaagctgcaacccagtgcactc

SEQ ID NO: 285464 - DNA, 25 bp, Homo sapien
ccctgggagtgatgaatgggcacct

SEQ ID NO: 285465 - DNA, 25 bp, Homo sapien
gagttactaacaaaaccctggctca

SEQ ID NO: 285466 - DNA, 25 bp, Homo sapien
ggccgtatgcctcgcaaatgaaatt

SEQ ID NO: 285467 - DNA, 25 bp, Homo sapien
catgaagcaacaggagcaatggcga

SEQ ID NO: 285468 - DNA, 25 bp, Homo sapien
gacagagtggtcaatgcagcagtga

SEQ ID NO: 285469 - DNA, 25 bp, Homo sapien
tgtggagaggccacaaggacttcca

SEQ ID NO: 285470 - DNA, 25 bp, Homo sapien
ccatgttggagagcaggagacacag

SEQ ID NO: 285471 - DNA, 25 bp, Homo sapien
tgacacacggacttgacatgggcca

SEQ ID NO: 285472 - DNA, 25 bp, Homo sapien
tgcagaggtccgtatcaagttgggc

SEQ ID NO: 285473 - DNA, 25 bp, Homo sapien
ggattcatttgcacactcagcgagt

SEQ ID NO: 285474 - DNA, 25 bp, Homo sapien
gggacgtggccgcaattctgctgac

SEQ ID NO: 285475 - DNA, 25 bp, Homo sapien
ggacgtggccgcaattctgctgacc

SEQ ID NO: 285476 - DNA, 25 bp, Homo sapien
cctgctcctggggacgtggccgcaa

SEQ ID NO: 285477 - DNA, 25 bp, Homo sapien
tcctggggacgtggccgcaattctg

SEQ ID NO: 285478 - DNA, 25 bp, Homo sapien
cagaatcaccgagaaagtccctagg

SEQ ID NO: 285479 - DNA, 25 bp, Homo sapien
aaaccaggacaccaacacgcaacag

SEQ ID NO: 285480 - DNA, 25 bp, Homo sapien
tttagtttgcttactgtagaggaga

SEQ ID NO: 285481 - DNA, 25 bp, Homo sapien
ttgcttactgtagaggagatggctg

SEQ ID NO: 285482 - DNA, 25 bp, Homo sapien
cacctggccggtaatcaatgacctt

SEQ ID NO: 285483 - DNA, 25 bp, Homo sapien
caaagatcctccaagtcagggtgta

SEQ ID NO: 285484 - DNA, 25 bp, Homo sapien
cagggtgtatctcaaagtgcgccca

SEQ ID NO: 285485 - DNA, 25 bp, Homo sapien
caatgacctttaaagcaccatgtat

SEQ ID NO: 285486 - DNA, 25 bp, Homo sapien
acaaagagaggaccctaggctgctg

SEQ ID NO: 285487 - DNA, 25 bp, Homo sapien
atacaaagagaggaccctaggctgc

SEQ ID NO: 285488 - DNA, 25 bp, Homo sapien
aaagagaggaccctaggctgctgaa

SEQ ID NO: 285489 - DNA, 25 bp, Homo sapien
agagaggaccctaggctgctgaagc

SEQ ID NO: 285490 - DNA, 25 bp, Homo sapien
gttcttgatatggaatgtgggcagg

SEQ ID NO: 285491 - DNA, 25 bp, Homo sapien
tctaaggcccacagtgcagaatggg

SEQ ID NO: 285492 - DNA, 25 bp, Homo sapien
tgccttcacggagcttcttgggccc

SEQ ID NO: 285493 - DNA, 25 bp, Homo sapien
aggcaatcgcaagccagcgctgtgg

SEQ ID NO: 285494 - DNA, 25 bp, Homo sapien
gctgctcccactaggaatgatatca

SEQ ID NO: 285495 - DNA, 25 bp, Homo sapien
atgccgacactttcagctgcctgga

SEQ ID NO: 285496 - DNA, 25 bp, Homo sapien
tgatgccgacactttcagctgcctg

SEQ ID NO: 285497 - DNA, 25 bp, Homo sapien
gtgtggatttgatgccgacactttc

SEQ ID NO: 285498 - DNA, 25 bp, Homo sapien
gatttgatgccgacactttcagctg

SEQ ID NO: 285499 - DNA, 25 bp, Homo sapien
tcgccgtcacatacagcatcacgtt

SEQ ID NO: 285500 - DNA, 25 bp, Homo sapien
cgttcagtccgtaccatttcattaa

SEQ ID NO: 285501 - DNA, 25 bp, Homo sapien
tcacgttctgccagtcgggtcgttc

SEQ ID NO: 285502 - DNA, 25 bp, Homo sapien
aaagtacttgtagatcgccgtcaca

SEQ ID NO: 285503 - DNA, 25 bp, Homo sapien
gagaaatagaaacgcgactggccct

SEQ ID NO: 285504 - DNA, 25 bp, Homo sapien
ggtgaacatgctcctccaaactagg

SEQ ID NO: 285505 - DNA, 25 bp, Homo sapien
tgctgagcccacatgacctgaatgg

SEQ ID NO: 285506 - DNA, 25 bp, Homo sapien
aatagctactgcgttaggcacacgg

SEQ ID NO: 285507 - DNA, 25 bp, Homo sapien
caagaatatttactagaacaacatt

SEQ ID NO: 285508 - DNA, 25 bp, Homo sapien
agaacaacatttaaacgtatcgtcg

SEQ ID NO: 285509 - DNA, 25 bp, Homo sapien
tcaagaatatttactagaacaacat

SEQ ID NO: 285510 - DNA, 25 bp, Homo sapien
agaatatttactagaacaacattta

SEQ ID NO: 285511 - DNA, 25 bp, Homo sapien
gaaccctagtggttacagggctcac

SEQ ID NO: 285512 - DNA, 25 bp, Homo sapien
tttatgcgacgtcagagggacggca

SEQ ID NO: 285513 - DNA, 25 bp, Homo sapien
gcccacatgaggaagtgcgccttgg

SEQ ID NO: 285514 - DNA, 25 bp, Homo sapien
tctggttgcctctgggtaggatacc

SEQ ID NO: 285515 - DNA, 25 bp, Homo sapien
acatggcgaaaagcccatttctacc

SEQ ID NO: 285516 - DNA, 25 bp, Homo sapien
gtggtgagccgtgatcgaccccgtc

SEQ ID NO: 285517 - DNA, 25 bp, Homo sapien
agccgtgatcgaccccgtctcgaaa

SEQ ID NO: 285518 - DNA, 25 bp, Homo sapien
tggcgaaaagcccatttctaccaaa

SEQ ID NO: 285519 - DNA, 25 bp, Homo sapien
ctgcgcggagaaaccgaggccggag

SEQ ID NO: 285520 - DNA, 25 bp, Homo sapien
gcaggcagctttgagacccgcgctg

SEQ ID NO: 285521 - DNA, 25 bp, Homo sapien
caggtgtccctgtcaggacgaggcc

SEQ ID NO: 285522 - DNA, 25 bp, Homo sapien
tggaaggacgatcccgcaggtgtcc

SEQ ID NO: 285523 - DNA, 25 bp, Homo sapien
agagcttcccctctgcacgcggctg

SEQ ID NO: 285524 - DNA, 25 bp, Homo sapien
caccaaggtgctgggggcccacgct

SEQ ID NO: 285525 - DNA, 25 bp, Homo sapien
cagagcttcccctctgcacgcggct

SEQ ID NO: 285526 - DNA, 25 bp, Homo sapien
gcccacgctgtgctgaaagcagctt

SEQ ID NO: 285527 - DNA, 25 bp, Homo sapien
cagctggaccccaaatgacctctag

SEQ ID NO: 285528 - DNA, 25 bp, Homo sapien
tcattgatacggtgaggcagctgga

SEQ ID NO: 285529 - DNA, 25 bp, Homo sapien
gtttcctcattgatacggtgaggca

SEQ ID NO: 285530 - DNA, 25 bp, Homo sapien
gctggaccccaaatgacctctaggg

SEQ ID NO: 285531 - DNA, 25 bp, Homo sapien
ctgcattccctgctctgcgcattgt

SEQ ID NO: 285532 - DNA, 25 bp, Homo sapien
tgctctgcgcattgttgtcacggtg

SEQ ID NO: 285533 - DNA, 25 bp, Homo sapien
gcattgttgtcacggtgcctcccac

SEQ ID NO: 285534 - DNA, 25 bp, Homo sapien
ccctgctctgcgcattgttgtcacg

SEQ ID NO: 285535 - DNA, 25 bp, Homo sapien
tcacagaggactctgagtctcctga

SEQ ID NO: 285536 - DNA, 25 bp, Homo sapien
gctggggcgctctccaagggctttt

SEQ ID NO: 285537 - DNA, 25 bp, Homo sapien
tgagtctcctgaaaccaggccctct

SEQ ID NO: 285538 - DNA, 25 bp, Homo sapien
gcacggacgcgggctgggccagctc

SEQ ID NO: 285539 - DNA, 25 bp, Homo sapien
ctgggccagctcacggtccattgct

SEQ ID NO: 285540 - DNA, 25 bp, Homo sapien
gccagctcacggtccattgctgcag

SEQ ID NO: 285541 - DNA, 25 bp, Homo sapien
cagcacggacgcgggctgggccagc

SEQ ID NO: 285542 - DNA, 25 bp, Homo sapien
cgcagaacccggtgctgatggtgat

SEQ ID NO: 285543 - DNA, 25 bp, Homo sapien
ccaggacgaagcaggcaatgaagag

SEQ ID NO: 285544 - DNA, 25 bp, Homo sapien
caatggccagctccaccgtgatgta

SEQ ID NO: 285545 - DNA, 25 bp, Homo sapien
cgccagtgacaccacaaagtagttg

SEQ ID NO: 285546 - DNA, 25 bp, Homo sapien
atggacacctccacatgcccagagg

SEQ ID NO: 285547 - DNA, 25 bp, Homo sapien
ctgaggaacaggaaagcgaagggac

SEQ ID NO: 285548 - DNA, 25 bp, Homo sapien
cctgaggaacaggaaagcgaaggga

SEQ ID NO: 285549 - DNA, 25 bp, Homo sapien
gcttgctctcgggagcccacatgga

SEQ ID NO: 285550 - DNA, 25 bp, Homo sapien
ggcctgttcctcaaaccagcgagaa

SEQ ID NO: 285551 - DNA, 25 bp, Homo sapien
gcctgttcctcaaaccagcgagaac

SEQ ID NO: 285552 - DNA, 25 bp, Homo sapien
tggcctgttcctcaaaccagcgaga

SEQ ID NO: 285553 - DNA, 25 bp, Homo sapien
agcagatccccaccacatctgggcc

SEQ ID NO: 285554 - DNA, 25 bp, Homo sapien
tcgggggcagggctttcctacatcc

SEQ ID NO: 285555 - DNA, 25 bp, Homo sapien
acatctgggcccctcgggggcaggg

SEQ ID NO: 285556 - DNA, 25 bp, Homo sapien
agtgcagcagatccccaccacatct

SEQ ID NO: 285557 - DNA, 25 bp, Homo sapien
tgagagaattacttgttaacattta

SEQ ID NO: 285558 - DNA, 25 bp, Homo sapien
agagaattacttgttaacatttaca

SEQ ID NO: 285559 - DNA, 25 bp, Homo sapien
gaggcagcatggagggtaaaagagg

SEQ ID NO: 285560 - DNA, 25 bp, Homo sapien
aatgagagaattacttgttaacatt

SEQ ID NO: 285561 - DNA, 25 bp, Homo sapien
gccatttgacttggggactccagaa

SEQ ID NO: 285562 - DNA, 25 bp, Homo sapien
atttgacttggggactccagaagcc

SEQ ID NO: 285563 - DNA, 25 bp, Homo sapien
ccatttgccatttgacttggggact

SEQ ID NO: 285564 - DNA, 25 bp, Homo sapien
tttgccatttgacttggggactcca

SEQ ID NO: 285565 - DNA, 25 bp, Homo sapien
ccagccagatcagacctatagagga

SEQ ID NO: 285566 - DNA, 25 bp, Homo sapien
tctctaaagggaaacgtgtcgtagc

SEQ ID NO: 285567 - DNA, 25 bp, Homo sapien
cattgagtagttttcggagtagtcc

SEQ ID NO: 285568 - DNA, 25 bp, Homo sapien
ggaaacccatgtacaaatgcccaga

SEQ ID NO: 285569 - DNA, 25 bp, Homo sapien
gaagggattcacaaccgaattggtg

SEQ ID NO: 285570 - DNA, 25 bp, Homo sapien
gaagatccgcaaatagacacccagc

SEQ ID NO: 285571 - DNA, 25 bp, Homo sapien
tcttgcggaaggtctggcggaactc

SEQ ID NO: 285572 - DNA, 25 bp, Homo sapien
gagtcaggccgatggcaaacgacag

SEQ ID NO: 285573 - DNA, 25 bp, Homo sapien
gctcatggctaaggagctccacgtc

SEQ ID NO: 285574 - DNA, 25 bp, Homo sapien
taaggagctccacgtctgggaggcc

SEQ ID NO: 285575 - DNA, 25 bp, Homo sapien
tccacgtctgggaggcccgtgttcc

SEQ ID NO: 285576 - DNA, 25 bp, Homo sapien
acactcccttgagctcatggctaag

SEQ ID NO: 285577 - DNA, 25 bp, Homo sapien
tctcagtccaaagtaggaaccggct

SEQ ID NO: 285578 - DNA, 25 bp, Homo sapien
agaacccaagcccttcttgctgggc

SEQ ID NO: 285579 - DNA, 25 bp, Homo sapien
tggtgcaaggcctcacagcatgaaa

SEQ ID NO: 285580 - DNA, 25 bp, Homo sapien
tcttctcccaacgtgactggtcaag

SEQ ID NO: 285581 - DNA, 25 bp, Homo sapien
aagtcaaatgtcacctctgggccca

SEQ ID NO: 285582 - DNA, 25 bp, Homo sapien
ttagcagcaggaccgacggcagacc

SEQ ID NO: 285583 - DNA, 25 bp, Homo sapien
gctcctgaaccctaggagagtctag

SEQ ID NO: 285584 - DNA, 25 bp, Homo sapien
caggttagcagcaggaccgacggca

SEQ ID NO: 285585 - DNA, 25 bp, Homo sapien
ggcactgctctgttacaactccctg

SEQ ID NO: 285586 - DNA, 25 bp, Homo sapien
aaaggcagttagacaaggcctctca

SEQ ID NO: 285587 - DNA, 25 bp, Homo sapien
taaaacacgatgtggctcgttttta

SEQ ID NO: 285588 - DNA, 25 bp, Homo sapien
tctcactgggtagctctgcgctact

SEQ ID NO: 285589 - DNA, 25 bp, Homo sapien
cttggtcttctcaggcataccccag

SEQ ID NO: 285590 - DNA, 25 bp, Homo sapien
ttggtcttctcaggcataccccagc

SEQ ID NO: 285591 - DNA, 25 bp, Homo sapien
aatgaagcatgttatccacccgtag

SEQ ID NO: 285592 - DNA, 25 bp, Homo sapien
cctgaatgaagcatgttatccaccc

SEQ ID NO: 285593 - DNA, 25 bp, Homo sapien
tgaagcatgttatccacccgtagcc

SEQ ID NO: 285594 - DNA, 25 bp, Homo sapien
tgaatgaagcatgttatccacccgt

SEQ ID NO: 285595 - DNA, 25 bp, Homo sapien
aatgatgagtgacagcagcaatgag

SEQ ID NO: 285596 - DNA, 25 bp, Homo sapien
ctaatgatgagtgacagcagcaatg

SEQ ID NO: 285597 - DNA, 25 bp, Homo sapien
tgagtgacagcagcaatgaggggca

SEQ ID NO: 285598 - DNA, 25 bp, Homo sapien
tgatgagtgacagcagcaatgaggg

SEQ ID NO: 285599 - DNA, 25 bp, Homo sapien
tatttgtcttttttagtagagacag

SEQ ID NO: 285600 - DNA, 25 bp, Homo sapien
atttgtcttttttagtagagacagg

SEQ ID NO: 285601 - DNA, 25 bp, Homo sapien
gctcaagagattctccttcctcatc

SEQ ID NO: 285602 - DNA, 25 bp, Homo sapien
ctcaagagattctccttcctcatcc

SEQ ID NO: 285603 - DNA, 25 bp, Homo sapien
cctgttcctgtaccacactattgta

SEQ ID NO: 285604 - DNA, 25 bp, Homo sapien
ttgtatgttaggacaattcttcacc

SEQ ID NO: 285605 - DNA, 25 bp, Homo sapien
gataattgccagttttatagtattg

SEQ ID NO: 285606 - DNA, 25 bp, Homo sapien
aaaaggaagaagattattgtggctc

SEQ ID NO: 285607 - DNA, 25 bp, Homo sapien
caggaggacctgcttaggacaaagc

SEQ ID NO: 285608 - DNA, 25 bp, Homo sapien
tgaaaatgcatagagcctaggaggg

SEQ ID NO: 285609 - DNA, 25 bp, Homo sapien
tgcagtggtccccagtagtctgtgg

SEQ ID NO: 285610 - DNA, 25 bp, Homo sapien
cacaggcagtccttttggctcagtt

SEQ ID NO: 285611 - DNA, 25 bp, Homo sapien
ctgactgttcaggtggaaagccttc

SEQ ID NO: 285612 - DNA, 25 bp, Homo sapien
gctccacctccctctacatcctttc

SEQ ID NO: 285613 - DNA, 25 bp, Homo sapien
ttcaggtggaaagccttcaccagct

SEQ ID NO: 285614 - DNA, 25 bp, Homo sapien
tccctctacatcctttctcttccac

SEQ ID NO: 285615 - DNA, 25 bp, Homo sapien
acagctcagaaagcttggacaccag

SEQ ID NO: 285616 - DNA, 25 bp, Homo sapien
tgtttcccaaatggaggcaccttcc

SEQ ID NO: 285617 - DNA, 25 bp, Homo sapien
tgggcgtgatctgtaacagctcaga

SEQ ID NO: 285618 - DNA, 25 bp, Homo sapien
tctgtaacagctcagaaagcttgga

SEQ ID NO: 285619 - DNA, 25 bp, Homo sapien
tgggcttcagcacagtcctgctgca

SEQ ID NO: 285620 - DNA, 25 bp, Homo sapien
ctacgtgtaggaaatgggcttcagc

SEQ ID NO: 285621 - DNA, 25 bp, Homo sapien
gaaatgggcttcagcacagtcctgc

SEQ ID NO: 285622 - DNA, 25 bp, Homo sapien
aatgggcttcagcacagtcctgctg

SEQ ID NO: 285623 - DNA, 25 bp, Homo sapien
cactggcaaagcaaagtctggtacc

SEQ ID NO: 285624 - DNA, 25 bp, Homo sapien
atcttggaacctagtcttaaacact

SEQ ID NO: 285625 - DNA, 25 bp, Homo sapien
gctgggacaagaaggcaagtctcct

SEQ ID NO: 285626 - DNA, 25 bp, Homo sapien
cctctcagcattagaattggaaaat

SEQ ID NO: 285627 - DNA, 25 bp, Homo sapien
caagcctgtgagagtttattgtcaa

SEQ ID NO: 285628 - DNA, 25 bp, Homo sapien
gcctgtgagagtttattgtcaaccc

SEQ ID NO: 285629 - DNA, 25 bp, Homo sapien
ctgtgagagtttattgtcaacccca

SEQ ID NO: 285630 - DNA, 25 bp, Homo sapien
gctcaagcctgtgagagtttattgt

SEQ ID NO: 285631 - DNA, 25 bp, Homo sapien
tactgtcattcctgtttgtgaactg

SEQ ID NO: 285632 - DNA, 25 bp, Homo sapien
ttgtgaactgtcttgcatcctgccc

SEQ ID NO: 285633 - DNA, 25 bp, Homo sapien
ttctccagtcttactgcatccacca

SEQ ID NO: 285634 - DNA, 25 bp, Homo sapien
gccccttctccagtcttactgcatc

SEQ ID NO: 285635 - DNA, 25 bp, Homo sapien
gagcaatttcaaattggaagtggtt

SEQ ID NO: 285636 - DNA, 25 bp, Homo sapien
gcaatttcaaattggaagtggttgt

SEQ ID NO: 285637 - DNA, 25 bp, Homo sapien
agcaatttcaaattggaagtggttg

SEQ ID NO: 285638 - DNA, 25 bp, Homo sapien
caatttcaaattggaagtggttgta

SEQ ID NO: 285639 - DNA, 25 bp, Homo sapien
ggtgccatcccttcaggagcaaaga

SEQ ID NO: 285640 - DNA, 25 bp, Homo sapien
cggtagggtgcgctttaaactgtca

SEQ ID NO: 285641 - DNA, 25 bp, Homo sapien
gaagagtttcagtgtcccacgggca

SEQ ID NO: 285642 - DNA, 25 bp, Homo sapien
catttgctgttaccgcgaatccaga

SEQ ID NO: 285643 - DNA, 25 bp, Homo sapien
tggagaggtcgtgagggagtcctgg

SEQ ID NO: 285644 - DNA, 25 bp, Homo sapien
gagaggtcgtgagggagtcctgggc

SEQ ID NO: 285645 - DNA, 25 bp, Homo sapien
cctggagaggtcgtgagggagtcct

SEQ ID NO: 285646 - DNA, 25 bp, Homo sapien
tggtgtcgggccgggaccctggaga

SEQ ID NO: 285647 - DNA, 25 bp, Homo sapien
tcccagacagctcaagtgaggacac

SEQ ID NO: 285648 - DNA, 25 bp, Homo sapien
tgcccttcgcctctcggttagcaag

SEQ ID NO: 285649 - DNA, 25 bp, Homo sapien
tggcctttagcgctccttcggcacg

SEQ ID NO: 285650 - DNA, 25 bp, Homo sapien
ggttagcaagcgatgaggcacgccc

SEQ ID NO: 285651 - DNA, 25 bp, Homo sapien
gtccgccagtgcttgtgtccgcgca

SEQ ID NO: 285652 - DNA, 25 bp, Homo sapien
gccacggtccgccagtgcttgtgtc

SEQ ID NO: 285653 - DNA, 25 bp, Homo sapien
ttgtgtccgcgcacgaactgcctgc

SEQ ID NO: 285654 - DNA, 25 bp, Homo sapien
cagtgcttgtgtccgcgcacgaact

SEQ ID NO: 285655 - DNA, 25 bp, Homo sapien
cgcgcttcacttcctgcaagtcggg

SEQ ID NO: 285656 - DNA, 25 bp, Homo sapien
tagagaacgcgcttcacttcctgca

SEQ ID NO: 285657 - DNA, 25 bp, Homo sapien
tcctccagcgacttccactcagcgc

SEQ ID NO: 285658 - DNA, 25 bp, Homo sapien
tgagttccttgccatagagaacgcg

SEQ ID NO: 285659 - DNA, 25 bp, Homo sapien
aggcagcttcgaaagcttccctggg

SEQ ID NO: 285660 - DNA, 25 bp, Homo sapien
aatgcggggtcgtctcagctgctcc

SEQ ID NO: 285661 - DNA, 25 bp, Homo sapien
tctggaggcagcttcgaaagcttcc

SEQ ID NO: 285662 - DNA, 25 bp, Homo sapien
gcacaatgcggggtcgtctcagctg

SEQ ID NO: 285663 - DNA, 25 bp, Homo sapien
ttgcggggagggggattctgttctg

SEQ ID NO: 285664 - DNA, 25 bp, Homo sapien
catttgcggggagggggattctgtt

SEQ ID NO: 285665 - DNA, 25 bp, Homo sapien
gcatttgcggggagggggattctgt

SEQ ID NO: 285666 - DNA, 25 bp, Homo sapien
cctggaaacagatgatgttgactcc

SEQ ID NO: 285667 - DNA, 25 bp, Homo sapien
tcctggaaacagatgatgttgactc

SEQ ID NO: 285668 - DNA, 25 bp, Homo sapien
ttgcagccacctctacgatagcctt

SEQ ID NO: 285669 - DNA, 25 bp, Homo sapien
cgatagcctttatgcgtctatgaag

SEQ ID NO: 285670 - DNA, 25 bp, Homo sapien
cttggcttgagccatctcggtgtgg

SEQ ID NO: 285671 - DNA, 25 bp, Homo sapien
gaaactgtgtccagcgtgaccgagc

SEQ ID NO: 285672 - DNA, 25 bp, Homo sapien
tctcggtgtggtgtagatctggaaa

SEQ ID NO: 285673 - DNA, 25 bp, Homo sapien
ggaaactgtgtccagcgtgaccgag

SEQ ID NO: 285674 - DNA, 25 bp, Homo sapien
tgtttcccatatccccggtgaggct

SEQ ID NO: 285675 - DNA, 25 bp, Homo sapien
gaaagtagaatagctgtcagaggcc

SEQ ID NO: 285676 - DNA, 25 bp, Homo sapien
gccccacctaggagctaattcagta

SEQ ID NO: 285677 - DNA, 25 bp, Homo sapien
cagtctgctggtgtgaacggtgcct

SEQ ID NO: 285678 - DNA, 25 bp, Homo sapien
gcttctctctcgtacagaaggcaaa

SEQ ID NO: 285679 - DNA, 25 bp, Homo sapien
tctctctcgtacagaaggcaaaggg

SEQ ID NO: 285680 - DNA, 25 bp, Homo sapien
aggaagcttctctctcgtacagaag

SEQ ID NO: 285681 - DNA, 25 bp, Homo sapien
gaagcttctctctcgtacagaaggc

SEQ ID NO: 285682 - DNA, 25 bp, Homo sapien
tctcgttccaggatgggagacacca

SEQ ID NO: 285683 - DNA, 25 bp, Homo sapien
caaaacatccccatgctcgctgtct

SEQ ID NO: 285684 - DNA, 25 bp, Homo sapien
tttcccaggactgctccggaattgg

SEQ ID NO: 285685 - DNA, 25 bp, Homo sapien
tcaccacggctgtattccacaaaac

SEQ ID NO: 285686 - DNA, 25 bp, Homo sapien
tggtgccgcccgtagcaaatgttca

SEQ ID NO: 285687 - DNA, 25 bp, Homo sapien
ttccgaactgcgtctggaacacggg

SEQ ID NO: 285688 - DNA, 25 bp, Homo sapien
gaagatgatctcagccccgttgatg

SEQ ID NO: 285689 - DNA, 25 bp, Homo sapien
ctgagtgctcctatcgtggccgagg

SEQ ID NO: 285690 - DNA, 25 bp, Homo sapien
gaaatttagtcaagaatgaggacaa

SEQ ID NO: 285691 - DNA, 25 bp, Homo sapien
tcaactgaaatttagtcaagaatga

SEQ ID NO: 285692 - DNA, 25 bp, Homo sapien
ggcaggacagggcacacccctgtcc

SEQ ID NO: 285693 - DNA, 25 bp, Homo sapien
gacagagactaaagctgcacaccca

SEQ ID NO: 285694 - DNA, 25 bp, Homo sapien
tcatcatgactctttatagtggctg

SEQ ID NO: 285695 - DNA, 25 bp, Homo sapien
agtggctgtacaataacctgtggaa

SEQ ID NO: 285696 - DNA, 25 bp, Homo sapien
tattgtaagtaagctgttgtgagca

SEQ ID NO: 285697 - DNA, 25 bp, Homo sapien
tgggctgtaatgtgcttagctcaga

SEQ ID NO: 285698 - DNA, 25 bp, Homo sapien
tgggcagaacctctcctggtgaatg

SEQ ID NO: 285699 - DNA, 25 bp, Homo sapien
ctgggctgggcagaacctctcctgg

SEQ ID NO: 285700 - DNA, 25 bp, Homo sapien
agaacctctcctggtgaatgccaga

SEQ ID NO: 285701 - DNA, 25 bp, Homo sapien
ggctgggcagaacctctcctggtga

SEQ ID NO: 285702 - DNA, 25 bp, Homo sapien
ctatgaagactgaatgaccatgcag

SEQ ID NO: 285703 - DNA, 25 bp, Homo sapien
gaggaaccaggttgccgactttcca

SEQ ID NO: 285704 - DNA, 25 bp, Homo sapien
cagaagaattagcagccctggatca

SEQ ID NO: 285705 - DNA, 25 bp, Homo sapien
catgcaggtgaagatccaagtggta

SEQ ID NO: 285706 - DNA, 25 bp, Homo sapien
caggtgaagcagtgattggcaatgg

SEQ ID NO: 285707 - DNA, 25 bp, Homo sapien
gcgtttctggcctcgatgggccaca

SEQ ID NO: 285708 - DNA, 25 bp, Homo sapien
cactcgattgatggcgcaggtgaag

SEQ ID NO: 285709 - DNA, 25 bp, Homo sapien
ggcaatggctgcgtttctggcctcg

SEQ ID NO: 285710 - DNA, 25 bp, Homo sapien
tccccagccagacctcgggacttac

SEQ ID NO: 285711 - DNA, 25 bp, Homo sapien
ctccccagccagacctcgggactta

SEQ ID NO: 285712 - DNA, 25 bp, Homo sapien
tatcttgaaaagtaacggaccaagc

SEQ ID NO: 285713 - DNA, 25 bp, Homo sapien
gatagggtgagaactgccatgtcaa

SEQ ID NO: 285714 - DNA, 25 bp, Homo sapien
tatgctgctagaagtcagatagact

SEQ ID NO: 285715 - DNA, 25 bp, Homo sapien
taagtgcattctgtttggcagtcaa

SEQ ID NO: 285716 - DNA, 25 bp, Homo sapien
aaactgtacatcaacctgtgatggg

SEQ ID NO: 285717 - DNA, 25 bp, Homo sapien
ggtctgtactcaccgggcaattaag

SEQ ID NO: 285718 - DNA, 25 bp, Homo sapien
caccgggcaattaagtgcttattaa

SEQ ID NO: 285719 - DNA, 25 bp, Homo sapien
ggctggcctgcttgaagtaattaaa

SEQ ID NO: 285720 - DNA, 25 bp, Homo sapien
catctcccgaggtaaactcgttcgg

SEQ ID NO: 285721 - DNA, 25 bp, Homo sapien
ctttccatctcccgaggtaaactcg

SEQ ID NO: 285722 - DNA, 25 bp, Homo sapien
tccatctcccgaggtaaactcgttc

SEQ ID NO: 285723 - DNA, 25 bp, Homo sapien
tctttccatctcccgaggtaaactc

SEQ ID NO: 285724 - DNA, 25 bp, Homo sapien
caagccatggactctagaaacccag

SEQ ID NO: 285725 - DNA, 25 bp, Homo sapien
tctgagctacctccaagtgtccaag

SEQ ID NO: 285726 - DNA, 25 bp, Homo sapien
tcattcttggccagagacatgggaa

SEQ ID NO: 285727 - DNA, 25 bp, Homo sapien
gaggtggtatatgcccttggatcaa

SEQ ID NO: 285728 - DNA, 25 bp, Homo sapien
tctgccaaatgctgaggcccaaaag

SEQ ID NO: 285729 - DNA, 25 bp, Homo sapien
cagggcctagcatggcccagatgca

SEQ ID NO: 285730 - DNA, 25 bp, Homo sapien
gcaaatggcccccttatgctgcttc

SEQ ID NO: 285731 - DNA, 25 bp, Homo sapien
cctgaaggcccagcaaattgctgca

SEQ ID NO: 285732 - DNA, 25 bp, Homo sapien
gcttagcaactagcagtccatcccg

SEQ ID NO: 285733 - DNA, 25 bp, Homo sapien
tacgggacagcccaggagtccggct

SEQ ID NO: 285734 - DNA, 25 bp, Homo sapien
gggctgccacatagctcgagccata

SEQ ID NO: 285735 - DNA, 25 bp, Homo sapien
cagaggtttaggtcgagcttagcaa

SEQ ID NO: 285736 - DNA, 25 bp, Homo sapien
cttcggcgagctcccgtgcgtacat

SEQ ID NO: 285737 - DNA, 25 bp, Homo sapien
gtgcgtacatctcatacctgcccgt

SEQ ID NO: 285738 - DNA, 25 bp, Homo sapien
gagctcccgtgcgtacatctcatac

SEQ ID NO: 285739 - DNA, 25 bp, Homo sapien
ggacttgacagcttcggcgagctcc

SEQ ID NO: 285740 - DNA, 25 bp, Homo sapien
tgactgtggcctagctaagctgaca

SEQ ID NO: 285741 - DNA, 25 bp, Homo sapien
aagggcagactgtcaggaactctcg

SEQ ID NO: 285742 - DNA, 25 bp, Homo sapien
tttccaataccccagaagtaagcag

SEQ ID NO: 285743 - DNA, 25 bp, Homo sapien
cccactggtgtacgggatggacagc

SEQ ID NO: 285744 - DNA, 25 bp, Homo sapien
actctgggcacaaactgatggctga

SEQ ID NO: 285745 - DNA, 25 bp, Homo sapien
taaagcaggaatatggtccccaccc

SEQ ID NO: 285746 - DNA, 25 bp, Homo sapien
gaagttaccgcagagctgtggccag

SEQ ID NO: 285747 - DNA, 25 bp, Homo sapien
gatggctgatggctagtctcgcaca

SEQ ID NO: 285748 - DNA, 25 bp, Homo sapien
ctgttagctctttcatttgctcttt

SEQ ID NO: 285749 - DNA, 25 bp, Homo sapien
tttttgtgccttaatgtgtaaataa

SEQ ID NO: 285750 - DNA, 25 bp, Homo sapien
tctgttcttattggcttccttctgt

SEQ ID NO: 285751 - DNA, 25 bp, Homo sapien
ttttgtgccttaatgtgtaaataat

SEQ ID NO: 285752 - DNA, 25 bp, Homo sapien
tgtgaaactactgcagtaggctaac

SEQ ID NO: 285753 - DNA, 25 bp, Homo sapien
aggctaacctagcttgcaaatagag

SEQ ID NO: 285754 - DNA, 25 bp, Homo sapien
aaatctctgactattcagtttttga

SEQ ID NO: 285755 - DNA, 25 bp, Homo sapien
ttgtgtctgacccaagagtgtcttg

SEQ ID NO: 285756 - DNA, 25 bp, Homo sapien
aaagtcactgggtcaacaggaacct

SEQ ID NO: 285757 - DNA, 25 bp, Homo sapien
tcactgatggtctgatgaagtggaa

SEQ ID NO: 285758 - DNA, 25 bp, Homo sapien
tggcagctaaccctttgggggacac

SEQ ID NO: 285759 - DNA, 25 bp, Homo sapien
gctagtctagccctgctgacatctc

SEQ ID NO: 285760 - DNA, 25 bp, Homo sapien
cattgccttaatgccaggtggccca

SEQ ID NO: 285761 - DNA, 25 bp, Homo sapien
tcaagactcatctgcctagggaggg

SEQ ID NO: 285762 - DNA, 25 bp, Homo sapien
tcagggcatgccacaagttaaaggt

SEQ ID NO: 285763 - DNA, 25 bp, Homo sapien
cacatgctgttagggctgtcactag

SEQ ID NO: 285764 - DNA, 25 bp, Homo sapien
ttcaaaggggcaacagtgataccat

SEQ ID NO: 285765 - DNA, 25 bp, Homo sapien
caaaggggcaacagtgataccatcc

SEQ ID NO: 285766 - DNA, 25 bp, Homo sapien
ttttcaaaggggcaacagtgatacc

SEQ ID NO: 285767 - DNA, 25 bp, Homo sapien
attttcaaaggggcaacagtgatac

SEQ ID NO: 285768 - DNA, 25 bp, Homo sapien
ccgccccagccgaagcggaagctgt

SEQ ID NO: 285769 - DNA, 25 bp, Homo sapien
cccagccgaagcggaagctgtagcc

SEQ ID NO: 285770 - DNA, 25 bp, Homo sapien
cgccccagccgaagcggaagctgta

SEQ ID NO: 285771 - DNA, 25 bp, Homo sapien
gccccagccgaagcggaagctgtag

SEQ ID NO: 285772 - DNA, 25 bp, Homo sapien
ggcggagaaggaactcgacacgcac

SEQ ID NO: 285773 - DNA, 25 bp, Homo sapien
cggtggcggagaaggaactcgacac

SEQ ID NO: 285774 - DNA, 25 bp, Homo sapien
cggcggtggcggagaaggaactcga

SEQ ID NO: 285775 - DNA, 25 bp, Homo sapien
gtggcggagaaggaactcgacacgc

SEQ ID NO: 285776 - DNA, 25 bp, Homo sapien
atttcatttgttgatcccggcaccg

SEQ ID NO: 285777 - DNA, 25 bp, Homo sapien
aagggccaggacttcccgtcacaat

SEQ ID NO: 285778 - DNA, 25 bp, Homo sapien
taggtatagagtagagcggctgccc

SEQ ID NO: 285779 - DNA, 25 bp, Homo sapien
ctgagtgaggctaggtatctggtac

SEQ ID NO: 285780 - DNA, 25 bp, Homo sapien
tcacacttccaagcaccccacacca

SEQ ID NO: 285781 - DNA, 25 bp, Homo sapien
ggccggcaaagagccagagagggtg

SEQ ID NO: 285782 - DNA, 25 bp, Homo sapien
tccaagcaccccacaccaaggacag

SEQ ID NO: 285783 - DNA, 25 bp, Homo sapien
tggggccggcaaagagccagagagg

SEQ ID NO: 285784 - DNA, 25 bp, Homo sapien
gcaccggaaaagagggctgatgact

SEQ ID NO: 285785 - DNA, 25 bp, Homo sapien
cagtacgatagttccggcaccggaa

SEQ ID NO: 285786 - DNA, 25 bp, Homo sapien
ttccggcaccggaaaagagggctga

SEQ ID NO: 285787 - DNA, 25 bp, Homo sapien
cgatagttccggcaccggaaaagag

SEQ ID NO: 285788 - DNA, 25 bp, Homo sapien
cgcctgccggctgggaaactagggc

SEQ ID NO: 285789 - DNA, 25 bp, Homo sapien
tccgcctgccggctgggaaactagg

SEQ ID NO: 285790 - DNA, 25 bp, Homo sapien
ccgcctgccggctgggaaactaggg

SEQ ID NO: 285791 - DNA, 25 bp, Homo sapien
cctgccggctgggaaactagggcac

SEQ ID NO: 285792 - DNA, 25 bp, Homo sapien
tacggcgaaggcgtgagtcaagcga

SEQ ID NO: 285793 - DNA, 25 bp, Homo sapien
ttccccagtgttgagcgcggtctcg

SEQ ID NO: 285794 - DNA, 25 bp, Homo sapien
tttcccaaaatgctgcgcgcagggc

SEQ ID NO: 285795 - DNA, 25 bp, Homo sapien
agtcaagcgaatggcgggcctaaca

SEQ ID NO: 285796 - DNA, 25 bp, Homo sapien
tcttctcttcggtccgctgcgaaag

SEQ ID NO: 285797 - DNA, 25 bp, Homo sapien
cttctcttcggtccgctgcgaaaga

SEQ ID NO: 285798 - DNA, 25 bp, Homo sapien
tctcttcggtccgctgcgaaagatg

SEQ ID NO: 285799 - DNA, 25 bp, Homo sapien
ttctcttcggtccgctgcgaaagat

SEQ ID NO: 285800 - DNA, 25 bp, Homo sapien
ctcacatgtcacaatgtggccctcg

SEQ ID NO: 285801 - DNA, 25 bp, Homo sapien
cgatatacctcaccggtgttcgtct

SEQ ID NO: 285802 - DNA, 25 bp, Homo sapien
catgttgtcctctgcttcaatgagc

SEQ ID NO: 285803 - DNA, 25 bp, Homo sapien
gcctcatgcagtactttaatcggca

SEQ ID NO: 285804 - DNA, 25 bp, Homo sapien
gacacagggccattcctcccacaca

SEQ ID NO: 285805 - DNA, 25 bp, Homo sapien
ttctgtccttcaagacacagggcca

SEQ ID NO: 285806 - DNA, 25 bp, Homo sapien
cagcctcacatgcaaagcagaatac

SEQ ID NO: 285807 - DNA, 25 bp, Homo sapien
cttcaagacacagggccattcctcc

SEQ ID NO: 285808 - DNA, 25 bp, Homo sapien
ttttgatagacccagtgaggcctct

SEQ ID NO: 285809 - DNA, 25 bp, Homo sapien
tgaggcctctacatcctgttacagg

SEQ ID NO: 285810 - DNA, 25 bp, Homo sapien
taaactgtgctcagagttcacccac

SEQ ID NO: 285811 - DNA, 25 bp, Homo sapien
cagctttagctacgccacagtctgc

SEQ ID NO: 285812 - DNA, 25 bp, Homo sapien
ggtgcgttcttcagcatgtcaggca

SEQ ID NO: 285813 - DNA, 25 bp, Homo sapien
gagaatagcagcttttcctcggcca

SEQ ID NO: 285814 - DNA, 25 bp, Homo sapien
cggccatctctgtatgtgactgtga

SEQ ID NO: 285815 - DNA, 25 bp, Homo sapien
cagaaagcggattttgctgccacgg

SEQ ID NO: 285816 - DNA, 25 bp, Homo sapien
tcagtgtggtcggtgaatgctcata

SEQ ID NO: 285817 - DNA, 25 bp, Homo sapien
ttctgaagggttacctggtccaaca

SEQ ID NO: 285818 - DNA, 25 bp, Homo sapien
tgaagggttacctggtccaacacca

SEQ ID NO: 285819 - DNA, 25 bp, Homo sapien
atgctcatagcacagagtagccagg

SEQ ID NO: 285820 - DNA, 25 bp, Homo sapien
tgaaagatgtttccacgtcccattc

SEQ ID NO: 285821 - DNA, 25 bp, Homo sapien
tccacgtcccattccacgtcctctt

SEQ ID NO: 285822 - DNA, 25 bp, Homo sapien
cacgtcccattccacgtcctcttcc

SEQ ID NO: 285823 - DNA, 25 bp, Homo sapien
tttgaaagatgtttccacgtcccat

SEQ ID NO: 285824 - DNA, 25 bp, Homo sapien
gcacccactccaatgaactcagata

SEQ ID NO: 285825 - DNA, 25 bp, Homo sapien
aagcacccactccaatgaactcaga

SEQ ID NO: 285826 - DNA, 25 bp, Homo sapien
caagcacccactccaatgaactcag

SEQ ID NO: 285827 - DNA, 25 bp, Homo sapien
acccactccaatgaactcagataac

SEQ ID NO: 285828 - DNA, 25 bp, Homo sapien
ccccagatttatttagcttaaacat

SEQ ID NO: 285829 - DNA, 25 bp, Homo sapien
aacatttcccctgatctaaagagaa

SEQ ID NO: 285830 - DNA, 25 bp, Homo sapien
gcttaaacatttcccctgatctaaa

SEQ ID NO: 285831 - DNA, 25 bp, Homo sapien
ttagcttaaacatttcccctgatct

SEQ ID NO: 285832 - DNA, 25 bp, Homo sapien
cccagagtgctggaagcaagccact

SEQ ID NO: 285833 - DNA, 25 bp, Homo sapien
agatgctctgatatgctcccaagaa

SEQ ID NO: 285834 - DNA, 25 bp, Homo sapien
gctggccactaggatcccctgaatt

SEQ ID NO: 285835 - DNA, 25 bp, Homo sapien
tagccagtatacgagccaaggaagc

SEQ ID NO: 285836 - DNA, 25 bp, Homo sapien
tgatgccaggttaactaatgtgctg

SEQ ID NO: 285837 - DNA, 25 bp, Homo sapien
cataatgaatacctggcaagacctc

SEQ ID NO: 285838 - DNA, 25 bp, Homo sapien
tcttgatggcttatgctgtagctca

SEQ ID NO: 285839 - DNA, 25 bp, Homo sapien
ctgaagccctattttaaacgtctat

SEQ ID NO: 285840 - DNA, 25 bp, Homo sapien
ccaggtgtgcggcttgcagtcttca

SEQ ID NO: 285841 - DNA, 25 bp, Homo sapien
gagatgcggtcttggttaacaaagc

SEQ ID NO: 285842 - DNA, 25 bp, Homo sapien
tacgggtccagagtgaactacatca

SEQ ID NO: 285843 - DNA, 25 bp, Homo sapien
gacagactactgtgaggcaaggaaa

SEQ ID NO: 285844 - DNA, 25 bp, Homo sapien
gtgcaccagtatttctagctactca

SEQ ID NO: 285845 - DNA, 25 bp, Homo sapien
tggtgtgcaccagtatttctagcta

SEQ ID NO: 285846 - DNA, 25 bp, Homo sapien
ggtggtgtgcaccagtatttctagc

SEQ ID NO: 285847 - DNA, 25 bp, Homo sapien
atggtggtgtgcaccagtatttcta

SEQ ID NO: 285848 - DNA, 25 bp, Homo sapien
cagaattacaatatcagggagatgg

SEQ ID NO: 285849 - DNA, 25 bp, Homo sapien
attacaatatcagggagatgggtga

SEQ ID NO: 285850 - DNA, 25 bp, Homo sapien
taatcacatcttaataatttgacac

SEQ ID NO: 285851 - DNA, 25 bp, Homo sapien
gatctaaccagaattacaatatcag

SEQ ID NO: 285852 - DNA, 25 bp, Homo sapien
tcagctgtgatcactatgacactgt

SEQ ID NO: 285853 - DNA, 25 bp, Homo sapien
tagtctattgtatgactcagctgtg

SEQ ID NO: 285854 - DNA, 25 bp, Homo sapien
ttagtgacaaatagaaaaccaagca

SEQ ID NO: 285855 - DNA, 25 bp, Homo sapien
tgcaagaggattactttcagggaaa

SEQ ID NO: 285856 - DNA, 25 bp, Homo sapien
aaagtcatataaaaaggatctggac

SEQ ID NO: 285857 - DNA, 25 bp, Homo sapien
gtcattctgaaattttggaacactg

SEQ ID NO: 285858 - DNA, 25 bp, Homo sapien
aaaaggatctggactctggccgggt

SEQ ID NO: 285859 - DNA, 25 bp, Homo sapien
cttcgccaaggcaggtattaatacg

SEQ ID NO: 285860 - DNA, 25 bp, Homo sapien
aattagccgggtgttggggcaggtg

SEQ ID NO: 285861 - DNA, 25 bp, Homo sapien
attgcttgaacaccggaggcaaagg

SEQ ID NO: 285862 - DNA, 25 bp, Homo sapien
cgggtgttggggcaggtgcctgtaa

SEQ ID NO: 285863 - DNA, 25 bp, Homo sapien
tagccgggtgttggggcaggtgcct

SEQ ID NO: 285864 - DNA, 25 bp, Homo sapien
tagaaggtttctggactaggagccc

SEQ ID NO: 285865 - DNA, 25 bp, Homo sapien
aagagaacctgtccagcctggagca

SEQ ID NO: 285866 - DNA, 25 bp, Homo sapien
gattaccaacgattgccaggcagct

SEQ ID NO: 285867 - DNA, 25 bp, Homo sapien
taaaccctcctgatgtgaaaccaaa

SEQ ID NO: 285868 - DNA, 25 bp, Homo sapien
tggaaagtgtctaccgcattgaggg

SEQ ID NO: 285869 - DNA, 25 bp, Homo sapien
gaatgaggtacaccaagcctcccat

SEQ ID NO: 285870 - DNA, 25 bp, Homo sapien
acttgctggcgatgtggtcctctca

SEQ ID NO: 285871 - DNA, 25 bp, Homo sapien
cctcactcaggcctagtctaggagg

SEQ ID NO: 285872 - DNA, 25 bp, Homo sapien
ttcacgaccaccagcaaggctgtcg

SEQ ID NO: 285873 - DNA, 25 bp, Homo sapien
ctgaaacggatcaagcggagaaggt

SEQ ID NO: 285874 - DNA, 25 bp, Homo sapien
tccacaagtggcagcttgtggctca

SEQ ID NO: 285875 - DNA, 25 bp, Homo sapien
cattgccatgcaggtgtttagagcc

SEQ ID NO: 285876 - DNA, 25 bp, Homo sapien
gaatccaggcggcagcagatagttt

SEQ ID NO: 285877 - DNA, 25 bp, Homo sapien
acacgatgcagtagcggagccagag

SEQ ID NO: 285878 - DNA, 25 bp, Homo sapien
tctgcctcttggacagaagcacacg

SEQ ID NO: 285879 - DNA, 25 bp, Homo sapien
aggatggtgtgcgaggacccgagct

SEQ ID NO: 285880 - DNA, 25 bp, Homo sapien
tcaaaacggtatgagagccggccct

SEQ ID NO: 285881 - DNA, 25 bp, Homo sapien
cctgggccaggcaagctgataaacc

SEQ ID NO: 285882 - DNA, 25 bp, Homo sapien
tcctgttggagaaatgccaagctct

SEQ ID NO: 285883 - DNA, 25 bp, Homo sapien
acataagcaggcctctgagctctcc

SEQ ID NO: 285884 - DNA, 25 bp, Homo sapien
ggcctcctgtgggttcggcgaccat

SEQ ID NO: 285885 - DNA, 25 bp, Homo sapien
aggccctcgggttctagcgccaaga

SEQ ID NO: 285886 - DNA, 25 bp, Homo sapien
caagactgacgcaagcagggcctcc

SEQ ID NO: 285887 - DNA, 25 bp, Homo sapien
cagggcctcctccagtgtgatcagg

SEQ ID NO: 285888 - DNA, 25 bp, Homo sapien
actggggccagagggtaaagaggtg

SEQ ID NO: 285889 - DNA, 25 bp, Homo sapien
gggccagagggtaaagaggtgccaa

SEQ ID NO: 285890 - DNA, 25 bp, Homo sapien
tattccccagtcagcactggggcca

SEQ ID NO: 285891 - DNA, 25 bp, Homo sapien
gagggtaaagaggtgccaaaagcca

SEQ ID NO: 285892 - DNA, 25 bp, Homo sapien
tcagttcagcaacagcgccttggcc

SEQ ID NO: 285893 - DNA, 25 bp, Homo sapien
aactcactgactcactagggatggc

SEQ ID NO: 285894 - DNA, 25 bp, Homo sapien
cctctgggaggatatggtcaggatc

SEQ ID NO: 285895 - DNA, 25 bp, Homo sapien
taggttgcccctttcatgcctccag

SEQ ID NO: 285896 - DNA, 25 bp, Homo sapien
gcagccctccgtgaagaacacatgt

SEQ ID NO: 285897 - DNA, 25 bp, Homo sapien
tcctcaaagggagtgtggcttggcc

SEQ ID NO: 285898 - DNA, 25 bp, Homo sapien
tggttacacatccaacaagtggcag

SEQ ID NO: 285899 - DNA, 25 bp, Homo sapien
ggtccttactctgcctatggttaca

SEQ ID NO: 285900 - DNA, 25 bp, Homo sapien
gcgttattacaaggaggccatgtga

SEQ ID NO: 285901 - DNA, 25 bp, Homo sapien
gctggaatgccgtggtgctatctcg

SEQ ID NO: 285902 - DNA, 25 bp, Homo sapien
ttttagtgaagatggggttttgcta

SEQ ID NO: 285903 - DNA, 25 bp, Homo sapien
ttagtgaagatggggttttgctatg

SEQ ID NO: 285904 - DNA, 25 bp, Homo sapien
ctcactgaaacctccgcctcctagg

SEQ ID NO: 285905 - DNA, 25 bp, Homo sapien
cccctcgggttcaaccgatgattct

SEQ ID NO: 285906 - DNA, 25 bp, Homo sapien
aatgtttcagatgcgccaggtggac

SEQ ID NO: 285907 - DNA, 25 bp, Homo sapien
aatgctctcactgacgagtctgcgc

SEQ ID NO: 285908 - DNA, 25 bp, Homo sapien
ctgggctcaggaatgctctcactga

SEQ ID NO: 285909 - DNA, 25 bp, Homo sapien
gctggctaatgtttcagatgcgcca

SEQ ID NO: 285910 - DNA, 25 bp, Homo sapien
ttcagaattgtcagcttgtgaatgc

SEQ ID NO: 285911 - DNA, 25 bp, Homo sapien
acctgagcctgaaggccaggaaatg

SEQ ID NO: 285912 - DNA, 25 bp, Homo sapien
gagcctgaaggccaggaaatggagc

SEQ ID NO: 285913 - DNA, 25 bp, Homo sapien
agcctgaaggccaggaaatggagcc

SEQ ID NO: 285914 - DNA, 25 bp, Homo sapien
ctgagcctgaaggccaggaaatgga

SEQ ID NO: 285915 - DNA, 25 bp, Homo sapien
tcacataatccaggagggtccttcc

SEQ ID NO: 285916 - DNA, 25 bp, Homo sapien
gcaggccgaagcctctaagccctca

SEQ ID NO: 285917 - DNA, 25 bp, Homo sapien
gagcaaacaggctgaccgaggaccc

SEQ ID NO: 285918 - DNA, 25 bp, Homo sapien
gctctgccccattcaatgagatggg

SEQ ID NO: 285919 - DNA, 25 bp, Homo sapien
gaggagcctagttcacctctacaac

SEQ ID NO: 285920 - DNA, 25 bp, Homo sapien
atctgaggccccacaaggtctgagg

SEQ ID NO: 285921 - DNA, 25 bp, Homo sapien
ggcaggggatgcctctcctaacagg

SEQ ID NO: 285922 - DNA, 25 bp, Homo sapien
gtttcagcgggaggcagattagacc

SEQ ID NO: 285923 - DNA, 25 bp, Homo sapien
gatctgggaccgctgcaggctgcag

SEQ ID NO: 285924 - DNA, 25 bp, Homo sapien
atctgggaccgctgcaggctgcagg

SEQ ID NO: 285925 - DNA, 25 bp, Homo sapien
tgatgtccaccagctcagagagggt

SEQ ID NO: 285926 - DNA, 25 bp, Homo sapien
gctctcacttctgggctcacccgac

SEQ ID NO: 285927 - DNA, 25 bp, Homo sapien
tggggcacagccaactgctctcact

SEQ ID NO: 285928 - DNA, 25 bp, Homo sapien
cagagagggtgagcggcgcctctgg

SEQ ID NO: 285929 - DNA, 25 bp, Homo sapien
cactcatgggagtgccctgacctga

SEQ ID NO: 285930 - DNA, 25 bp, Homo sapien
actgcacgggtacataaaccgaggc

SEQ ID NO: 285931 - DNA, 25 bp, Homo sapien
cctctagagcgcagcaagcatatgg

SEQ ID NO: 285932 - DNA, 25 bp, Homo sapien
cagagctgagaatgggactcaggcc

SEQ ID NO: 285933 - DNA, 25 bp, Homo sapien
tgaaggctgacccaatattgctgcc

SEQ ID NO: 285934 - DNA, 25 bp, Homo sapien
gcagcctccacctgaggtctattcc

SEQ ID NO: 285935 - DNA, 25 bp, Homo sapien
cccataacacctaccccacaatcat

SEQ ID NO: 285936 - DNA, 25 bp, Homo sapien
gaggtctattccgtgcccataacac

SEQ ID NO: 285937 - DNA, 25 bp, Homo sapien
ctgctgtcaatgctaaaggtgtgtt

SEQ ID NO: 285938 - DNA, 25 bp, Homo sapien
tgtcaatgctaaaggtgtgttccgg

SEQ ID NO: 285939 - DNA, 25 bp, Homo sapien
cacacgctgctgtcaatgctaaagg

SEQ ID NO: 285940 - DNA, 25 bp, Homo sapien
tgctaaaggtgtgttccgggaacat

SEQ ID NO: 285941 - DNA, 25 bp, Homo sapien
agccccggcggacagtgggaggcat

SEQ ID NO: 285942 - DNA, 25 bp, Homo sapien
aggcaggcctctcacggaggtccag

SEQ ID NO: 285943 - DNA, 25 bp, Homo sapien
gaggcatctgcacagggtgcaggac

SEQ ID NO: 285944 - DNA, 25 bp, Homo sapien
ctagtccaagagaccagccagggcg

SEQ ID NO: 285945 - DNA, 25 bp, Homo sapien
agcacctcttcctcagaagacagtt

SEQ ID NO: 285946 - DNA, 25 bp, Homo sapien
gagcacctcttcctcagaagacagt

SEQ ID NO: 285947 - DNA, 25 bp, Homo sapien
tggaggtccaaagagcctcaggagc

SEQ ID NO: 285948 - DNA, 25 bp, Homo sapien
tcttccagaaagcagctagagggct

SEQ ID NO: 285949 - DNA, 25 bp, Homo sapien
tctgtctgtccaactgcagaacagg

SEQ ID NO: 285950 - DNA, 25 bp, Homo sapien
tagagacaccgattcctggaggtcc

SEQ ID NO: 285951 - DNA, 25 bp, Homo sapien
tgtcccagtgcagagcgtctgacct

SEQ ID NO: 285952 - DNA, 25 bp, Homo sapien
agggaacatccaaatgccatcatgg

SEQ ID NO: 285953 - DNA, 25 bp, Homo sapien
tgattatcatcatggctgcactggg

SEQ ID NO: 285954 - DNA, 25 bp, Homo sapien
acaaagggcggtgtctgccagcaag

SEQ ID NO: 285955 - DNA, 25 bp, Homo sapien
gatgacggcagcacctcacttgcct

SEQ ID NO: 285956 - DNA, 25 bp, Homo sapien
tggatgacggcagcacctcacttgc

SEQ ID NO: 285957 - DNA, 25 bp, Homo sapien
ggatgacggcagcacctcacttgcc

SEQ ID NO: 285958 - DNA, 25 bp, Homo sapien
ctggatgacggcagcacctcacttg

SEQ ID NO: 285959 - DNA, 25 bp, Homo sapien
attctctcagcatgtctcccaggca

SEQ ID NO: 285960 - DNA, 25 bp, Homo sapien
gaattctctcagcatgtctcccagg

SEQ ID NO: 285961 - DNA, 25 bp, Homo sapien
ctggaggcaaagaggctgtcagtaa

SEQ ID NO: 285962 - DNA, 25 bp, Homo sapien
aggcaaagaggctgtcagtaacaca

SEQ ID NO: 285963 - DNA, 25 bp, Homo sapien
cctctgcctctagctggtttctctg

SEQ ID NO: 285964 - DNA, 25 bp, Homo sapien
ctccctctgcctctagctggtttct

SEQ ID NO: 285965 - DNA, 25 bp, Homo sapien
tccctctgcctctagctggtttctc

SEQ ID NO: 285966 - DNA, 25 bp, Homo sapien
tctgcctctagctggtttctctgtc

SEQ ID NO: 285967 - DNA, 25 bp, Homo sapien
ccagacctttctgggggactccgtg

SEQ ID NO: 285968 - DNA, 25 bp, Homo sapien
cagggactctctgatcaggcagcct

SEQ ID NO: 285969 - DNA, 25 bp, Homo sapien
gcctgtagccacagaatcttcttca

SEQ ID NO: 285970 - DNA, 25 bp, Homo sapien
tagccacagaatcttcttcagggac

SEQ ID NO: 285971 - DNA, 25 bp, Homo sapien
cttcagggactctctgatcaggcag

SEQ ID NO: 285972 - DNA, 25 bp, Homo sapien
gggtgttggccacgaaagacaggag

SEQ ID NO: 285973 - DNA, 25 bp, Homo sapien
ttggccacgaaagacaggaggattt

SEQ ID NO: 285974 - DNA, 25 bp, Homo sapien
ccacgaaagacaggaggatttggtg

SEQ ID NO: 285975 - DNA, 25 bp, Homo sapien
tgcctggggtgttggccacgaaaga

SEQ ID NO: 285976 - DNA, 25 bp, Homo sapien
gacagaggccgacaatgaccagcac

SEQ ID NO: 285977 - DNA, 25 bp, Homo sapien
gagacagaggccgacaatgaccagc

SEQ ID NO: 285978 - DNA, 25 bp, Homo sapien
cagccagagacagaggccgacaatg

SEQ ID NO: 285979 - DNA, 25 bp, Homo sapien
gccagagacagaggccgacaatgac

SEQ ID NO: 285980 - DNA, 25 bp, Homo sapien
tgtacacatggttgtcaggttcctt

SEQ ID NO: 285981 - DNA, 25 bp, Homo sapien
ctggtgtacacatggttgtcaggtt

SEQ ID NO: 285982 - DNA, 25 bp, Homo sapien
acatggttgtcaggttccttggagg

SEQ ID NO: 285983 - DNA, 25 bp, Homo sapien
tacacatggttgtcaggttccttgg

SEQ ID NO: 285984 - DNA, 25 bp, Homo sapien
cattcatgagccccacacacaacag

SEQ ID NO: 285985 - DNA, 25 bp, Homo sapien
gcattcatgagccccacacacaaca

SEQ ID NO: 285986 - DNA, 25 bp, Homo sapien
cgcgggcgttgatgacctcagcttt

SEQ ID NO: 285987 - DNA, 25 bp, Homo sapien
ctgttgaacatggtggcaaaggcca

SEQ ID NO: 285988 - DNA, 25 bp, Homo sapien
ttctgggactgctccgagctgttga

SEQ ID NO: 285989 - DNA, 25 bp, Homo sapien
ggccacctcgcgggcgttgatgacc

SEQ ID NO: 285990 - DNA, 25 bp, Homo sapien
aggcgtgagcctgtgaaaaaaaggc

SEQ ID NO: 285991 - DNA, 25 bp, Homo sapien
gcgtgagcctgtgaaaaaaaggccc

SEQ ID NO: 285992 - DNA, 25 bp, Homo sapien
ggcgtgagcctgtgaaaaaaaggcc

SEQ ID NO: 285993 - DNA, 25 bp, Homo sapien
tgtctaaaatcctgtgccaggccag

SEQ ID NO: 285994 - DNA, 25 bp, Homo sapien
gtgaacagcacacctagcagaaggg

SEQ ID NO: 285995 - DNA, 25 bp, Homo sapien
catgcggctgggttttgctgtccca

SEQ ID NO: 285996 - DNA, 25 bp, Homo sapien
tgtcccaggatgaggtgtctgtctg

SEQ ID NO: 285997 - DNA, 25 bp, Homo sapien
agctcatagcctcggatctccccag

SEQ ID NO: 285998 - DNA, 25 bp, Homo sapien
catagcctcggatctccccaggcac

SEQ ID NO: 285999 - DNA, 25 bp, Homo sapien
ctcatagcctcggatctccccaggc

SEQ ID NO: 286000 - DNA, 25 bp, Homo sapien
ccagctcatagcctcggatctcccc

SEQ ID NO: 286001 - DNA, 25 bp, Homo sapien
tgggcaccctcgatggccagcgtct

SEQ ID NO: 286002 - DNA, 25 bp, Homo sapien
tccttcacaatctgggccgtgaggc

SEQ ID NO: 286003 - DNA, 25 bp, Homo sapien
gccagctgcggcagggtcagtctct

SEQ ID NO: 286004 - DNA, 25 bp, Homo sapien
gtctcgtaggtgtcagccagctgcg

SEQ ID NO: 286005 - DNA, 25 bp, Homo sapien
ggatgagggccagcacgggcccgct

SEQ ID NO: 286006 - DNA, 25 bp, Homo sapien
gatgttcagcgggtgctcgatcagc

SEQ ID NO: 286007 - DNA, 25 bp, Homo sapien
agttgttcaggtcctcagctgtcac

SEQ ID NO: 286008 - DNA, 25 bp, Homo sapien
ttcagcgggtgctcgatcagctcag

SEQ ID NO: 286009 - DNA, 25 bp, Homo sapien
ggttgatcagagccaggtgcatgtt

SEQ ID NO: 286010 - DNA, 25 bp, Homo sapien
tggttgatcagagccaggtgcatgt

SEQ ID NO: 286011 - DNA, 25 bp, Homo sapien
ctggttgatcagagccaggtgcatg

SEQ ID NO: 286012 - DNA, 25 bp, Homo sapien
gttgatcagagccaggtgcatgttg

SEQ ID NO: 286013 - DNA, 25 bp, Homo sapien
aaagcctctacgatgcggtggtacg

SEQ ID NO: 286014 - DNA, 25 bp, Homo sapien
tctacgatgcggtggtacgtcaggc

SEQ ID NO: 286015 - DNA, 25 bp, Homo sapien
cggtggtacgtcaggcccttctgct

SEQ ID NO: 286016 - DNA, 25 bp, Homo sapien
ggtccccaagcagggtcctcttggc

SEQ ID NO: 286017 - DNA, 25 bp, Homo sapien
agtccatccgagcacacagtaggcc

SEQ ID NO: 286018 - DNA, 25 bp, Homo sapien
agttctgtgcggcagaagccaagac

SEQ ID NO: 286019 - DNA, 25 bp, Homo sapien
tgtcagttctgtgcggcagaagcca

SEQ ID NO: 286020 - DNA, 25 bp, Homo sapien
ttctgtgcggcagaagccaagactg

SEQ ID NO: 286021 - DNA, 25 bp, Homo sapien
actgtcagttctgtgcggcagaagc

SEQ ID NO: 286022 - DNA, 25 bp, Homo sapien
catctgggaagcgttagtttggagt

SEQ ID NO: 286023 - DNA, 25 bp, Homo sapien
taggagggtggccactaattcccca

SEQ ID NO: 286024 - DNA, 25 bp, Homo sapien
tgagcactcgagaaccacagcatgt

SEQ ID NO: 286025 - DNA, 25 bp, Homo sapien
tcaccatgcccgagggctgcaatgc

SEQ ID NO: 286026 - DNA, 25 bp, Homo sapien
ggcccttgactgtgactctgaccgc

SEQ ID NO: 286027 - DNA, 25 bp, Homo sapien
ggcacaggtctcagaaggcccttga

SEQ ID NO: 286028 - DNA, 25 bp, Homo sapien
ccttgactgtgactctgaccgcaac

SEQ ID NO: 286029 - DNA, 25 bp, Homo sapien
ttgactgtgactctgaccgcaaccc

SEQ ID NO: 286030 - DNA, 25 bp, Homo sapien
cccggagctgggcagcgaagaactc

SEQ ID NO: 286031 - DNA, 25 bp, Homo sapien
gagctgggcagcgaagaactcggag

SEQ ID NO: 286032 - DNA, 25 bp, Homo sapien
gggcagcgaagaactcggaggtcat

SEQ ID NO: 286033 - DNA, 25 bp, Homo sapien
gctgggcagcgaagaactcggaggt

SEQ ID NO: 286034 - DNA, 25 bp, Homo sapien
agtgcccccgtcatccggcgtgtag

SEQ ID NO: 286035 - DNA, 25 bp, Homo sapien
cctctgcgacgacagacaggtgagc

SEQ ID NO: 286036 - DNA, 25 bp, Homo sapien
aactcgggcttgtagtaggagatcg

SEQ ID NO: 286037 - DNA, 25 bp, Homo sapien
ccggcgtgtagaactcgggcttgta

SEQ ID NO: 286038 - DNA, 25 bp, Homo sapien
ccaaactcgttggtgatgctgggag

SEQ ID NO: 286039 - DNA, 25 bp, Homo sapien
gagctgaagtcgtccatttcattat

SEQ ID NO: 286040 - DNA, 25 bp, Homo sapien
ggtaccccaaactcgttggtgatgc

SEQ ID NO: 286041 - DNA, 25 bp, Homo sapien
tttcattattgaacaggatcccgct

SEQ ID NO: 286042 - DNA, 25 bp, Homo sapien
gtggccgtggtgatctgtgtgcccc

SEQ ID NO: 286043 - DNA, 25 bp, Homo sapien
gccgtggtgatctgtgtgcccccag

SEQ ID NO: 286044 - DNA, 25 bp, Homo sapien
cagtggccgtggtgatctgtgtgcc

SEQ ID NO: 286045 - DNA, 25 bp, Homo sapien
gcagtggccgtggtgatctgtgtgc

SEQ ID NO: 286046 - DNA, 25 bp, Homo sapien
tgggcacggccagggagaaaaggtg

SEQ ID NO: 286047 - DNA, 25 bp, Homo sapien
gtgcagggtgggcacggccagggag

SEQ ID NO: 286048 - DNA, 25 bp, Homo sapien
ccagggagaaaaggtgtgacacata

SEQ ID NO: 286049 - DNA, 25 bp, Homo sapien
acggccagggagaaaaggtgtgaca

SEQ ID NO: 286050 - DNA, 25 bp, Homo sapien
gcatgggagtgtgatcagcatggct

SEQ ID NO: 286051 - DNA, 25 bp, Homo sapien
catgggagtgtgatcagcatggctt

SEQ ID NO: 286052 - DNA, 25 bp, Homo sapien
gggcatgggagtgtgatcagcatgg

SEQ ID NO: 286053 - DNA, 25 bp, Homo sapien
ctggggcatgggagtgtgatcagca

SEQ ID NO: 286054 - DNA, 25 bp, Homo sapien
gtcatagccgaaccagaggttgtag

SEQ ID NO: 286055 - DNA, 25 bp, Homo sapien
tggcttgcaccacagcgatgaaggt

SEQ ID NO: 286056 - DNA, 25 bp, Homo sapien
gaaggtggacgcgatctgggtgtga

SEQ ID NO: 286057 - DNA, 25 bp, Homo sapien
cagccgtgcggacgatggcttgcac

SEQ ID NO: 286058 - DNA, 25 bp, Homo sapien
gtagccggcaggctccccgcctttc

SEQ ID NO: 286059 - DNA, 25 bp, Homo sapien
gagtccccttcctggtcctggtgag

SEQ ID NO: 286060 - DNA, 25 bp, Homo sapien
gggagacaggccagggaggccacct

SEQ ID NO: 286061 - DNA, 25 bp, Homo sapien
cccttcctggtcctggtgagtatct

SEQ ID NO: 286062 - DNA, 25 bp, Homo sapien
tggcacagtggcctcatttattgtg

SEQ ID NO: 286063 - DNA, 25 bp, Homo sapien
gctgctgtgttaactccctcactgc

SEQ ID NO: 286064 - DNA, 25 bp, Homo sapien
ttcccgggttctcagcagctctagg

SEQ ID NO: 286065 - DNA, 25 bp, Homo sapien
tcactgctggtaggtccaaaggccc

SEQ ID NO: 286066 - DNA, 25 bp, Homo sapien
cactgtcgcaatgtgcaggagaact

SEQ ID NO: 286067 - DNA, 25 bp, Homo sapien
tccaatatccgagcagaccttggag

SEQ ID NO: 286068 - DNA, 25 bp, Homo sapien
gtccaatatccgagcagaccttgga

SEQ ID NO: 286069 - DNA, 25 bp, Homo sapien
acagcagggcatgctatggagaccc

SEQ ID NO: 286070 - DNA, 25 bp, Homo sapien
agtgacccctgtttcgcagcagcag

SEQ ID NO: 286071 - DNA, 25 bp, Homo sapien
gatgacactgtagcaggcctcttcc

SEQ ID NO: 286072 - DNA, 25 bp, Homo sapien
cagagggagctttagagtagagacc

SEQ ID NO: 286073 - DNA, 25 bp, Homo sapien
ggccctgaaggtcgtcagaggccac

SEQ ID NO: 286074 - DNA, 25 bp, Homo sapien
cattcatggcgatgacggcgcgctg

SEQ ID NO: 286075 - DNA, 25 bp, Homo sapien
cccattcatggcgatgacggcgcgc

SEQ ID NO: 286076 - DNA, 25 bp, Homo sapien
attcatggcgatgacggcgcgctgc

SEQ ID NO: 286077 - DNA, 25 bp, Homo sapien
tcatggcgatgacggcgcgctgcca

SEQ ID NO: 286078 - DNA, 25 bp, Homo sapien
ggtgaccacagcaatcttgactccg

SEQ ID NO: 286079 - DNA, 25 bp, Homo sapien
gaacttgaccgagagctttacttcg

SEQ ID NO: 286080 - DNA, 25 bp, Homo sapien
tcttgactccgaagacccctgtctg

SEQ ID NO: 286081 - DNA, 25 bp, Homo sapien
gtctgttttcgggacggcatcctct

SEQ ID NO: 286082 - DNA, 25 bp, Homo sapien
ccgcttgggccataacacaggaggc

SEQ ID NO: 286083 - DNA, 25 bp, Homo sapien
tcagtgtcctaacagccccgcttgg

SEQ ID NO: 286084 - DNA, 25 bp, Homo sapien
taacagccccgcttgggccataaca

SEQ ID NO: 286085 - DNA, 25 bp, Homo sapien
agtgtcctaacagccccgcttgggc

SEQ ID NO: 286086 - DNA, 25 bp, Homo sapien
cacgcactggcgcatgatgtagggc

SEQ ID NO: 286087 - DNA, 25 bp, Homo sapien
gcactggcgcatgatgtagggcacc

SEQ ID NO: 286088 - DNA, 25 bp, Homo sapien
cctccacgcactggcgcatgatgta

SEQ ID NO: 286089 - DNA, 25 bp, Homo sapien
tcctccacgcactggcgcatgatgt

SEQ ID NO: 286090 - DNA, 25 bp, Homo sapien
tgacgttgaagcctgccttcagtgc

SEQ ID NO: 286091 - DNA, 25 bp, Homo sapien
ttcagtgcctggatgtccgtggcca

SEQ ID NO: 286092 - DNA, 25 bp, Homo sapien
acgttgaagcctgccttcagtgcct

SEQ ID NO: 286093 - DNA, 25 bp, Homo sapien
agtgcctggatgtccgtggccacac

SEQ ID NO: 286094 - DNA, 25 bp, Homo sapien
tcccgtcctgcgcaggccgacactc

SEQ ID NO: 286095 - DNA, 25 bp, Homo sapien
ccatcccgtcctgcgcaggccgaca

SEQ ID NO: 286096 - DNA, 25 bp, Homo sapien
ccgtcctgcgcaggccgacactcac

SEQ ID NO: 286097 - DNA, 25 bp, Homo sapien
ctccatcccgtcctgcgcaggccga

SEQ ID NO: 286098 - DNA, 25 bp, Homo sapien
aaggatgtgacatgcctgggccatg

SEQ ID NO: 286099 - DNA, 25 bp, Homo sapien
ttcagtgtttgaaccggtgtcttcc

SEQ ID NO: 286100 - DNA, 25 bp, Homo sapien
ttggccattggtgcttacatcctca

SEQ ID NO: 286101 - DNA, 25 bp, Homo sapien
gagggagctgaaactaccacagggc

SEQ ID NO: 286102 - DNA, 25 bp, Homo sapien
tgtcgtctgatagcaggaaggccgt

SEQ ID NO: 286103 - DNA, 25 bp, Homo sapien
aagagcacggaaatgcagcggcctc

SEQ ID NO: 286104 - DNA, 25 bp, Homo sapien
gaaagagcacggaaatgcagcggcc

SEQ ID NO: 286105 - DNA, 25 bp, Homo sapien
ctggaaagagcacggaaatgcagcg

SEQ ID NO: 286106 - DNA, 25 bp, Homo sapien
gcacggaaatgcagcggcctccttg

SEQ ID NO: 286107 - DNA, 25 bp, Homo sapien
acgtccatctcgctcatcatcaccg

SEQ ID NO: 286108 - DNA, 25 bp, Homo sapien
cgtgcctgcgatggcgttcacgtcc

SEQ ID NO: 286109 - DNA, 25 bp, Homo sapien
gcagctcacggaagtacagcttcag

SEQ ID NO: 286110 - DNA, 25 bp, Homo sapien
catcatcaccgacacgtccttgtta

SEQ ID NO: 286111 - DNA, 25 bp, Homo sapien
gggacacgagtccttgcgcagttta

SEQ ID NO: 286112 - DNA, 25 bp, Homo sapien
cactcccctgggttacgacaagccg

SEQ ID NO: 286113 - DNA, 25 bp, Homo sapien
tgggttacgacaagccggagacctc

SEQ ID NO: 286114 - DNA, 25 bp, Homo sapien
cttgcgcagtttaggcttgtcatca

SEQ ID NO: 286115 - DNA, 25 bp, Homo sapien
gagcaggttggcctccggcagggac

SEQ ID NO: 286116 - DNA, 25 bp, Homo sapien
ggtgagcaggttggcctccggcagg

SEQ ID NO: 286117 - DNA, 25 bp, Homo sapien
tgagcaggttggcctccggcaggga

SEQ ID NO: 286118 - DNA, 25 bp, Homo sapien
gtgagcaggttggcctccggcaggg

SEQ ID NO: 286119 - DNA, 25 bp, Homo sapien
ctgtagaggaccgaagcagagggtg

SEQ ID NO: 286120 - DNA, 25 bp, Homo sapien
agggacaccttattgaccgcctcct

SEQ ID NO: 286121 - DNA, 25 bp, Homo sapien
gtgcagggacaccttattgaccgcc

SEQ ID NO: 286122 - DNA, 25 bp, Homo sapien
gcgaggttgtgcagggacaccttat

SEQ ID NO: 286123 - DNA, 25 bp, Homo sapien
gcagggacaccttattgaccgcctc

SEQ ID NO: 286124 - DNA, 25 bp, Homo sapien
ctcggagggccggagcagcgtgggg

SEQ ID NO: 286125 - DNA, 25 bp, Homo sapien
tctcggagggccggagcagcgtggg

SEQ ID NO: 286126 - DNA, 25 bp, Homo sapien
ggcaagtccctctctctgaatctca

SEQ ID NO: 286127 - DNA, 25 bp, Homo sapien
tacaatgcaagtcggaagatgggca

SEQ ID NO: 286128 - DNA, 25 bp, Homo sapien
aaacacctgggttcagttgtcctgc

SEQ ID NO: 286129 - DNA, 25 bp, Homo sapien
gttttaagcccccagcaaggtgcac

SEQ ID NO: 286130 - DNA, 25 bp, Homo sapien
gacatcggtggagaacaggatgctc

SEQ ID NO: 286131 - DNA, 25 bp, Homo sapien
ttagacatcggtggagaacaggatg

SEQ ID NO: 286132 - DNA, 25 bp, Homo sapien
acatcggtggagaacaggatgctct

SEQ ID NO: 286133 - DNA, 25 bp, Homo sapien
tagacatcggtggagaacaggatgc

SEQ ID NO: 286134 - DNA, 25 bp, Homo sapien
cagacgcagacagaaagccttcaag

SEQ ID NO: 286135 - DNA, 25 bp, Homo sapien
caccgggcccagataggtacagaga

SEQ ID NO: 286136 - DNA, 25 bp, Homo sapien
tcttgaaaatacttggcggcctcca

SEQ ID NO: 286137 - DNA, 25 bp, Homo sapien
cgggcccagataggtacagagagca

SEQ ID NO: 286138 - DNA, 25 bp, Homo sapien
agtctggaagccacgccttgtggga

SEQ ID NO: 286139 - DNA, 25 bp, Homo sapien
gctaagacaccagccacttaccaag

SEQ ID NO: 286140 - DNA, 25 bp, Homo sapien
gtaagacgtagctgtagacccaaag

SEQ ID NO: 286141 - DNA, 25 bp, Homo sapien
gtcacactggcatctaggccttcgc

SEQ ID NO: 286142 - DNA, 25 bp, Homo sapien
acatccgaggcctctaggcccagta

SEQ ID NO: 286143 - DNA, 25 bp, Homo sapien
agtacacacaagtttcccctgctgc

SEQ ID NO: 286144 - DNA, 25 bp, Homo sapien
tcaggaatgactcctccacatccga

SEQ ID NO: 286145 - DNA, 25 bp, Homo sapien
tcactgttgaagacctggaccggga

SEQ ID NO: 286146 - DNA, 25 bp, Homo sapien
cagcgccgatacctgcttcttcaaa

SEQ ID NO: 286147 - DNA, 25 bp, Homo sapien
ccaggccaaataccccagcgccgat

SEQ ID NO: 286148 - DNA, 25 bp, Homo sapien
taccccagcgccgatacctgcttct

SEQ ID NO: 286149 - DNA, 25 bp, Homo sapien
ccaaataccccagcgccgatacctg

SEQ ID NO: 286150 - DNA, 25 bp, Homo sapien
tgtgtacagacaatctgctgagaaa

SEQ ID NO: 286151 - DNA, 25 bp, Homo sapien
tcatgtgtacagacaatctgctgag

SEQ ID NO: 286152 - DNA, 25 bp, Homo sapien
gtgtacagacaatctgctgagaaag

SEQ ID NO: 286153 - DNA, 25 bp, Homo sapien
catgtgtacagacaatctgctgaga

SEQ ID NO: 286154 - DNA, 25 bp, Homo sapien
ccaaagactaacctgcgctgctgta

SEQ ID NO: 286155 - DNA, 25 bp, Homo sapien
tcctataacctgacttgcagttccc

SEQ ID NO: 286156 - DNA, 25 bp, Homo sapien
tgacacaggacggtgaataaaagcc

SEQ ID NO: 286157 - DNA, 25 bp, Homo sapien
tgcagttcccaaagactaacctgcg

SEQ ID NO: 286158 - DNA, 25 bp, Homo sapien
cctcttgggcggctgcaccaaagta

SEQ ID NO: 286159 - DNA, 25 bp, Homo sapien
tgggcggctgcaccaaagtaattct

SEQ ID NO: 286160 - DNA, 25 bp, Homo sapien
ttctttttccaacacacaagatccc

SEQ ID NO: 286161 - DNA, 25 bp, Homo sapien
ggcggctgcaccaaagtaattcttt

SEQ ID NO: 286162 - DNA, 25 bp, Homo sapien
ccaggccgccctgccgcgcgaaagg

SEQ ID NO: 286163 - DNA, 25 bp, Homo sapien
gcgaaaggccccgacgctgccgccg

SEQ ID NO: 286164 - DNA, 25 bp, Homo sapien
tagccgcgggcccgcttccagggaa

SEQ ID NO: 286165 - DNA, 25 bp, Homo sapien
gccctgccgcgcgaaaggccccgac

SEQ ID NO: 286166 - DNA, 25 bp, Homo sapien
tgatcgaacagtctccacgttctgg

SEQ ID NO: 286167 - DNA, 25 bp, Homo sapien
gggaagaaaattctcattctcggac

SEQ ID NO: 286168 - DNA, 25 bp, Homo sapien
tggtgatcgaacagtctccacgttc

SEQ ID NO: 286169 - DNA, 25 bp, Homo sapien
aattctcattctcggacagcagacc

SEQ ID NO: 286170 - DNA, 25 bp, Homo sapien
ctgcattatccagcccaacaatgat

SEQ ID NO: 286171 - DNA, 25 bp, Homo sapien
tacaacctcattcatagaaaactgg

SEQ ID NO: 286172 - DNA, 25 bp, Homo sapien
tattataggagatgtatgtacaacc

SEQ ID NO: 286173 - DNA, 25 bp, Homo sapien
cccacattaggaaacgcgtattatt

SEQ ID NO: 286174 - DNA, 25 bp, Homo sapien
gaagagatcatgtaatctaaagtcg

SEQ ID NO: 286175 - DNA, 25 bp, Homo sapien
agaaatcatgtgtctgtactgtcca

SEQ ID NO: 286176 - DNA, 25 bp, Homo sapien
cctggatatgccactaactgttatc

SEQ ID NO: 286177 - DNA, 25 bp, Homo sapien
cagtcaggcattctttaacgtctcg

SEQ ID NO: 286178 - DNA, 25 bp, Homo sapien
tcacaagcccggtgctgttgttgta

SEQ ID NO: 286179 - DNA, 25 bp, Homo sapien
tgctgttgttgtacaccaccacctt

SEQ ID NO: 286180 - DNA, 25 bp, Homo sapien
acttcacaagcccggtgctgttgtt

SEQ ID NO: 286181 - DNA, 25 bp, Homo sapien
gctgttgttgtacaccaccaccttc

SEQ ID NO: 286182 - DNA, 25 bp, Homo sapien
ggtaattaacttccaacattgatcg

SEQ ID NO: 286183 - DNA, 25 bp, Homo sapien
tgccattttccatagggtaattaac

SEQ ID NO: 286184 - DNA, 25 bp, Homo sapien
tccatagggtaattaacttccaaca

SEQ ID NO: 286185 - DNA, 25 bp, Homo sapien
acttccaacattgatcgtaattcac

SEQ ID NO: 286186 - DNA, 25 bp, Homo sapien
caggtttttcacgtcatcctaattt

SEQ ID NO: 286187 - DNA, 25 bp, Homo sapien
ccacaggtttttcacgtcatcctaa

SEQ ID NO: 286188 - DNA, 25 bp, Homo sapien
tttttcacgtcatcctaatttctta

SEQ ID NO: 286189 - DNA, 25 bp, Homo sapien
tcccacaggtttttcacgtcatcct

SEQ ID NO: 286190 - DNA, 25 bp, Homo sapien
ggtatctagttacatccctctcagc

SEQ ID NO: 286191 - DNA, 25 bp, Homo sapien
ctggtatctagttacatccctctca

SEQ ID NO: 286192 - DNA, 25 bp, Homo sapien
aaatatgactcacactatctccaga

SEQ ID NO: 286193 - DNA, 25 bp, Homo sapien
gtatctagttacatccctctcagca

SEQ ID NO: 286194 - DNA, 25 bp, Homo sapien
aggcatatcctcgcaatagaagcaa

SEQ ID NO: 286195 - DNA, 25 bp, Homo sapien
gaaggcatatcctcgcaatagaagc

SEQ ID NO: 286196 - DNA, 25 bp, Homo sapien
ggcatatcctcgcaatagaagcaac

SEQ ID NO: 286197 - DNA, 25 bp, Homo sapien
tcccctccaactttgatgatatgtc

SEQ ID NO: 286198 - DNA, 25 bp, Homo sapien
cccctccaactttgatgatatgtcc

SEQ ID NO: 286199 - DNA, 25 bp, Homo sapien
gatgatatgtccatctgggaatgta

SEQ ID NO: 286200 - DNA, 25 bp, Homo sapien
gatatgtccatctgggaatgtataa

SEQ ID NO: 286201 - DNA, 25 bp, Homo sapien
tccagaaagcacaatgtgtttgtag

SEQ ID NO: 286202 - DNA, 25 bp, Homo sapien
ctccagaaagcacaatgtgtttgta

SEQ ID NO: 286203 - DNA, 25 bp, Homo sapien
taaagctgtttaagttctcgttcca

SEQ ID NO: 286204 - DNA, 25 bp, Homo sapien
gacaggccaggatacatagtagacc

SEQ ID NO: 286205 - DNA, 25 bp, Homo sapien
cacatcaccctttaaaactcgttct

SEQ ID NO: 286206 - DNA, 25 bp, Homo sapien
tctcgttccaaccttgatgacaggc

SEQ ID NO: 286207 - DNA, 25 bp, Homo sapien
tgtcgggtcatccaaaagttgtctt

SEQ ID NO: 286208 - DNA, 25 bp, Homo sapien
aactgcaccacccatgtgctttctg

SEQ ID NO: 286209 - DNA, 25 bp, Homo sapien
agcacacggacacccctttcttggt

SEQ ID NO: 286210 - DNA, 25 bp, Homo sapien
tcatggtatctgctagaactgcacc

SEQ ID NO: 286211 - DNA, 25 bp, Homo sapien
tacaactagcggcattagagcagca

SEQ ID NO: 286212 - DNA, 25 bp, Homo sapien
agtgccatactacagaggaaatgcc

SEQ ID NO: 286213 - DNA, 25 bp, Homo sapien
tagattgtagggagtctagtcccag

SEQ ID NO: 286214 - DNA, 25 bp, Homo sapien
cttaaagctacagatgaaagtgcca

SEQ ID NO: 286215 - DNA, 25 bp, Homo sapien
tgtaagaggagatggactctgcccc

SEQ ID NO: 286216 - DNA, 25 bp, Homo sapien
gtgtaagaggagatggactctgccc

SEQ ID NO: 286217 - DNA, 25 bp, Homo sapien
cgtgtaagaggagatggactctgcc

SEQ ID NO: 286218 - DNA, 25 bp, Homo sapien
cgggctcttcacagaagctaccacg

SEQ ID NO: 286219 - DNA, 25 bp, Homo sapien
tatgccctttattgggtgtgaactc

SEQ ID NO: 286220 - DNA, 25 bp, Homo sapien
ccttcagtcactgatagcctctggg

SEQ ID NO: 286221 - DNA, 25 bp, Homo sapien
tgggaactggcgtccacccgcagag

SEQ ID NO: 286222 - DNA, 25 bp, Homo sapien
acacctctcggcaaatcgatgacct

SEQ ID NO: 286223 - DNA, 25 bp, Homo sapien
cctctcggcaaatcgatgaccttca

SEQ ID NO: 286224 - DNA, 25 bp, Homo sapien
tctcggcaaatcgatgaccttcatg

SEQ ID NO: 286225 - DNA, 25 bp, Homo sapien
cacctctcggcaaatcgatgacctt

SEQ ID NO: 286226 - DNA, 25 bp, Homo sapien
cacattgacgcattcatggctcacc

SEQ ID NO: 286227 - DNA, 25 bp, Homo sapien
tccacacattgacgcattcatggct

SEQ ID NO: 286228 - DNA, 25 bp, Homo sapien
acagccttgcccacgggctttccag

SEQ ID NO: 286229 - DNA, 25 bp, Homo sapien
attgacgcattcatggctcaccaca

SEQ ID NO: 286230 - DNA, 25 bp, Homo sapien
gcctcatctacattctccaagggaa

SEQ ID NO: 286231 - DNA, 25 bp, Homo sapien
ggtgcctcatctacattctccaagg

SEQ ID NO: 286232 - DNA, 25 bp, Homo sapien
atctacattctccaagggaacccca

SEQ ID NO: 286233 - DNA, 25 bp, Homo sapien
caggtgcctcatctacattctccaa

SEQ ID NO: 286234 - DNA, 25 bp, Homo sapien
gggtgggtttttgtgcatggggctc

SEQ ID NO: 286235 - DNA, 25 bp, Homo sapien
taggtgggtgggtttttgtgcatgg

SEQ ID NO: 286236 - DNA, 25 bp, Homo sapien
gggtttttgtgcatggggctctggg

SEQ ID NO: 286237 - DNA, 25 bp, Homo sapien
ctaggtgggtgggtttttgtgcatg

SEQ ID NO: 286238 - DNA, 25 bp, Homo sapien
ggtggtggaaggagcggtttttgca

SEQ ID NO: 286239 - DNA, 25 bp, Homo sapien
ggtaaagaaccgtggcctcatcgta

SEQ ID NO: 286240 - DNA, 25 bp, Homo sapien
tgcaggtaaagaaccgtggcctcat

SEQ ID NO: 286241 - DNA, 25 bp, Homo sapien
agaaccgtggcctcatcgtacagtc

SEQ ID NO: 286242 - DNA, 25 bp, Homo sapien
tcagtctggagatctgactccagct

SEQ ID NO: 286243 - DNA, 25 bp, Homo sapien
agtctggagatctgactccagcttc

SEQ ID NO: 286244 - DNA, 25 bp, Homo sapien
cagtctggagatctgactccagctt

SEQ ID NO: 286245 - DNA, 25 bp, Homo sapien
attctgcaatcactgacttgctgct

SEQ ID NO: 286246 - DNA, 25 bp, Homo sapien
tctgtattctgcaatcactgacttg

SEQ ID NO: 286247 - DNA, 25 bp, Homo sapien
tgtattctgcaatcactgacttgct

SEQ ID NO: 286248 - DNA, 25 bp, Homo sapien
tattctgcaatcactgacttgctgc

SEQ ID NO: 286249 - DNA, 25 bp, Homo sapien
ctgggtccggtgcaggccgcagcgg

SEQ ID NO: 286250 - DNA, 25 bp, Homo sapien
cgaagtacaccttgtcgcacgcggg

SEQ ID NO: 286251 - DNA, 25 bp, Homo sapien
cggcgaagtacaccttgtcgcacgc

SEQ ID NO: 286252 - DNA, 25 bp, Homo sapien
tacaccttgtcgcacgcggggcact

SEQ ID NO: 286253 - DNA, 25 bp, Homo sapien
caccttgtcgcacgcggggcacttg

SEQ ID NO: 286254 - DNA, 25 bp, Homo sapien
tcagcgtggcccccggaagtcagcg

SEQ ID NO: 286255 - DNA, 25 bp, Homo sapien
gtggcccccggaagtcagcgtcttc

SEQ ID NO: 286256 - DNA, 25 bp, Homo sapien
agcgtggcccccggaagtcagcgtc

SEQ ID NO: 286257 - DNA, 25 bp, Homo sapien
gcccccggaagtcagcgtcttccca

SEQ ID NO: 286258 - DNA, 25 bp, Homo sapien
cggcgtagcaggggtggttgccgta

SEQ ID NO: 286259 - DNA, 25 bp, Homo sapien
atggcggcgtagcaggggtggttgc

SEQ ID NO: 286260 - DNA, 25 bp, Homo sapien
cgtagcaggggtggttgccgtaggg

SEQ ID NO: 286261 - DNA, 25 bp, Homo sapien
gtggttgccgtagggtttgccttca

SEQ ID NO: 286262 - DNA, 25 bp, Homo sapien
tgaaagtgtggctctcgggtccacc

SEQ ID NO: 286263 - DNA, 25 bp, Homo sapien
aagtgtggctctcgggtccaccccg

SEQ ID NO: 286264 - DNA, 25 bp, Homo sapien
ttacttgaaagtgtggctctcgggt

SEQ ID NO: 286265 - DNA, 25 bp, Homo sapien
acttgaaagtgtggctctcgggtcc

SEQ ID NO: 286266 - DNA, 25 bp, Homo sapien
gtgtctctgtgctgaaccgcctgga

SEQ ID NO: 286267 - DNA, 25 bp, Homo sapien
tgagttgtccgaaaggtcacatatc

SEQ ID NO: 286268 - DNA, 25 bp, Homo sapien
cattgttctcttcgccatctgggct

SEQ ID NO: 286269 - DNA, 25 bp, Homo sapien
tgctatggttctcacagattcatgg

SEQ ID NO: 286270 - DNA, 25 bp, Homo sapien
tgcttaggatagcttatggaattct

SEQ ID NO: 286271 - DNA, 25 bp, Homo sapien
aatgtatcgattcttctaattcatg

SEQ ID NO: 286272 - DNA, 25 bp, Homo sapien
ctataaagaatacccttggtattat

SEQ ID NO: 286273 - DNA, 25 bp, Homo sapien
ggtattatgatagggattgctttgg

SEQ ID NO: 286274 - DNA, 25 bp, Homo sapien
tcgttttgtaagagcacctggcagg

SEQ ID NO: 286275 - DNA, 25 bp, Homo sapien
ccctgggagacttcgcggcatctct

SEQ ID NO: 286276 - DNA, 25 bp, Homo sapien
ggctccaagtgcacatcgttttgta

SEQ ID NO: 286277 - DNA, 25 bp, Homo sapien
gggcgacgcctgctttcctgagtgt

SEQ ID NO: 286278 - DNA, 25 bp, Homo sapien
tagagtgacgactgtagcagatgcg

SEQ ID NO: 286279 - DNA, 25 bp, Homo sapien
cacacacggcaaggtcaaaaagaat

SEQ ID NO: 286280 - DNA, 25 bp, Homo sapien
aatcttctcaattaggacgcccgga

SEQ ID NO: 286281 - DNA, 25 bp, Homo sapien
ggaaagtttacccatgacagcggat

SEQ ID NO: 286282 - DNA, 25 bp, Homo sapien
aggccatggctccgagcgctgcgtt

SEQ ID NO: 286283 - DNA, 25 bp, Homo sapien
gccgaggccatggctccgagcgctg

SEQ ID NO: 286284 - DNA, 25 bp, Homo sapien
gaggccatggctccgagcgctgcgt

SEQ ID NO: 286285 - DNA, 25 bp, Homo sapien
cgaggccatggctccgagcgctgcg

SEQ ID NO: 286286 - DNA, 25 bp, Homo sapien
tccttcttgacggtgcgtagcagcc

SEQ ID NO: 286287 - DNA, 25 bp, Homo sapien
tgcgtagcagcctctgtcgggtctc

SEQ ID NO: 286288 - DNA, 25 bp, Homo sapien
gtagcagcctctgtcgggtctccgc

SEQ ID NO: 286289 - DNA, 25 bp, Homo sapien
tgacggtgcgtagcagcctctgtcg

SEQ ID NO: 286290 - DNA, 25 bp, Homo sapien
tcttttcccgtttggccgctgctgc

SEQ ID NO: 286291 - DNA, 25 bp, Homo sapien
actcttttcccgtttggccgctgct

SEQ ID NO: 286292 - DNA, 25 bp, Homo sapien
agactcttttcccgtttggccgctg

SEQ ID NO: 286293 - DNA, 25 bp, Homo sapien
ttttcccgtttggccgctgctgccg

SEQ ID NO: 286294 - DNA, 25 bp, Homo sapien
ggagcagcaacaggtccaagcctcg

SEQ ID NO: 286295 - DNA, 25 bp, Homo sapien
agcaacaggtccaagcctcgaggct

SEQ ID NO: 286296 - DNA, 25 bp, Homo sapien
caacaggtccaagcctcgaggctgc

SEQ ID NO: 286297 - DNA, 25 bp, Homo sapien
tcatgctcccggaggacggaggagc

SEQ ID NO: 286298 - DNA, 25 bp, Homo sapien
tgttggccccttcgtggctgcagtg

SEQ ID NO: 286299 - DNA, 25 bp, Homo sapien
caccgagttgttgccatgttcttag

SEQ ID NO: 286300 - DNA, 25 bp, Homo sapien
gatgtcgattgttaaggcactcctt

SEQ ID NO: 286301 - DNA, 25 bp, Homo sapien
gacactgagagagatgctccccaaa

SEQ ID NO: 286302 - DNA, 25 bp, Homo sapien
atcgaaccagggtgcctaagctgcc

SEQ ID NO: 286303 - DNA, 25 bp, Homo sapien
cacatcgaaccagggtgcctaagct

SEQ ID NO: 286304 - DNA, 25 bp, Homo sapien
agggtgcctaagctgccacagatgc

SEQ ID NO: 286305 - DNA, 25 bp, Homo sapien
ggtgcctaagctgccacagatgctc

SEQ ID NO: 286306 - DNA, 25 bp, Homo sapien
gggagacccagccatatggtacaag

SEQ ID NO: 286307 - DNA, 25 bp, Homo sapien
gccagcaacaaatgctaccaccagc

SEQ ID NO: 286308 - DNA, 25 bp, Homo sapien
ccagccatatggtacaagagacaca

SEQ ID NO: 286309 - DNA, 25 bp, Homo sapien
tatggtacaagagacacagccaggc

SEQ ID NO: 286310 - DNA, 25 bp, Homo sapien
taaatacttggcaaattcagagtgg

SEQ ID NO: 286311 - DNA, 25 bp, Homo sapien
cactggccaaattagatgagttgag

SEQ ID NO: 286312 - DNA, 25 bp, Homo sapien
acctcgtccacttagaaagcaggaa

SEQ ID NO: 286313 - DNA, 25 bp, Homo sapien
ggagctgtccaacctcgtccactta

SEQ ID NO: 286314 - DNA, 25 bp, Homo sapien
ctgggggctgtagcacctccaggtc

SEQ ID NO: 286315 - DNA, 25 bp, Homo sapien
ctaaattccacagcactgccctggg

SEQ ID NO: 286316 - DNA, 25 bp, Homo sapien
ggggctgtagcacctccaggtcagg

SEQ ID NO: 286317 - DNA, 25 bp, Homo sapien
gtagcacctccaggtcagggcttac

SEQ ID NO: 286318 - DNA, 25 bp, Homo sapien
caagatccctggaagacagccaaac

SEQ ID NO: 286319 - DNA, 25 bp, Homo sapien
gagcccacccaagatccctggaaga

SEQ ID NO: 286320 - DNA, 25 bp, Homo sapien
gaagatacacgaagacttggagccc

SEQ ID NO: 286321 - DNA, 25 bp, Homo sapien
catggatgaggaagatacacgaaga

SEQ ID NO: 286322 - DNA, 25 bp, Homo sapien
tctctgtattacaggacggcctggt

SEQ ID NO: 286323 - DNA, 25 bp, Homo sapien
tcatttcagtgcacgctaggttggg

SEQ ID NO: 286324 - DNA, 25 bp, Homo sapien
aaattaagacgcacaggccggctgt

SEQ ID NO: 286325 - DNA, 25 bp, Homo sapien
aagccataggcaggtgtctccgctg

SEQ ID NO: 286326 - DNA, 25 bp, Homo sapien
actgtcctgtggcccatccagactc

SEQ ID NO: 286327 - DNA, 25 bp, Homo sapien
ctgtcctgtggcccatccagactcc

SEQ ID NO: 286328 - DNA, 25 bp, Homo sapien
tgtcctgtggcccatccagactcca

SEQ ID NO: 286329 - DNA, 25 bp, Homo sapien
gatgaaagcacttacccagggaggc

SEQ ID NO: 286330 - DNA, 25 bp, Homo sapien
tgacctgggtataggtgccccaaaa

SEQ ID NO: 286331 - DNA, 25 bp, Homo sapien
tcagagacaggttccagctcgagac

SEQ ID NO: 286332 - DNA, 25 bp, Homo sapien
gattctgcccagagtcattgtagga

SEQ ID NO: 286333 - DNA, 25 bp, Homo sapien
gtcttcgtggacaaacttgcgtgtc

SEQ ID NO: 286334 - DNA, 25 bp, Homo sapien
aaacttgcgtgtcacagcctcctcc

SEQ ID NO: 286335 - DNA, 25 bp, Homo sapien
ctgctgtcttcgtggacaaacttgc

SEQ ID NO: 286336 - DNA, 25 bp, Homo sapien
ctgtcttcgtggacaaacttgcgtg

SEQ ID NO: 286337 - DNA, 25 bp, Homo sapien
gctgcaatcttattgctgcgtagga

SEQ ID NO: 286338 - DNA, 25 bp, Homo sapien
tattgctgcgtaggaagccagccgc

SEQ ID NO: 286339 - DNA, 25 bp, Homo sapien
tcagccggcgggaagttcttgccca

SEQ ID NO: 286340 - DNA, 25 bp, Homo sapien
gtcttgcaccttgcggctcagatcc

SEQ ID NO: 286341 - DNA, 25 bp, Homo sapien
ggcagcttccgcacattctcctgga

SEQ ID NO: 286342 - DNA, 25 bp, Homo sapien
tctcaaacaaggctgtgcgaatcca

SEQ ID NO: 286343 - DNA, 25 bp, Homo sapien
gctgttttccacaaggtaatgcaca

SEQ ID NO: 286344 - DNA, 25 bp, Homo sapien
gaatccacagatgcttgatggcaag

SEQ ID NO: 286345 - DNA, 25 bp, Homo sapien
ctagcaagaggagagaatatgcagg

SEQ ID NO: 286346 - DNA, 25 bp, Homo sapien
agaccagcagaggacgcacaatcca

SEQ ID NO: 286347 - DNA, 25 bp, Homo sapien
atatgcaggtttggatggagaccag

SEQ ID NO: 286348 - DNA, 25 bp, Homo sapien
gagaccagcagaggacgcacaatcc

SEQ ID NO: 286349 - DNA, 25 bp, Homo sapien
gggccgtccacagggtccatcagga

SEQ ID NO: 286350 - DNA, 25 bp, Homo sapien
cctcagactcaagaccacgggtcta

SEQ ID NO: 286351 - DNA, 25 bp, Homo sapien
tagatgaagctcagcacacaggaca

SEQ ID NO: 286352 - DNA, 25 bp, Homo sapien
gctagaacagtgctgcatttccatg

SEQ ID NO: 286353 - DNA, 25 bp, Homo sapien
ccacgggtctagatgaagctcagca

SEQ ID NO: 286354 - DNA, 25 bp, Homo sapien
ctgtggatgcggtgcctctggacaa

SEQ ID NO: 286355 - DNA, 25 bp, Homo sapien
cctgccgcacgtgggagctgtggat

SEQ ID NO: 286356 - DNA, 25 bp, Homo sapien
tcggtccagaagtgatctgcagtct

SEQ ID NO: 286357 - DNA, 25 bp, Homo sapien
cctctggacaagttcgtcagccgag

SEQ ID NO: 286358 - DNA, 25 bp, Homo sapien
agggactccacgtagtcgcgggcag

SEQ ID NO: 286359 - DNA, 25 bp, Homo sapien
cacgggagttctgatgcagggactc

SEQ ID NO: 286360 - DNA, 25 bp, Homo sapien
cggctgaacaagaacgttgtttttg

SEQ ID NO: 286361 - DNA, 25 bp, Homo sapien
ttttgccatagagaagggtggcacg

SEQ ID NO: 286362 - DNA, 25 bp, Homo sapien
tttcctctataacctggagtgagac

SEQ ID NO: 286363 - DNA, 25 bp, Homo sapien
gaacaagagcgaacagatggataga

SEQ ID NO: 286364 - DNA, 25 bp, Homo sapien
gatctaggcccaagataacctctca

SEQ ID NO: 286365 - DNA, 25 bp, Homo sapien
gagaccctcagtgcaagatctaggc

SEQ ID NO: 286366 - DNA, 25 bp, Homo sapien
catccccgagatgagagtggacatt

SEQ ID NO: 286367 - DNA, 25 bp, Homo sapien
tacaggacttaagaaccatcacagg

SEQ ID NO: 286368 - DNA, 25 bp, Homo sapien
tgccagcaaggcctgaaagcagtca

SEQ ID NO: 286369 - DNA, 25 bp, Homo sapien
cagtcataggctgtagctgtgtccc

SEQ ID NO: 286370 - DNA, 25 bp, Homo sapien
cttcaaggtcatgacgtcagccgtc

SEQ ID NO: 286371 - DNA, 25 bp, Homo sapien
gtcatgacgtcagccgtctggtgca

SEQ ID NO: 286372 - DNA, 25 bp, Homo sapien
ccacagacccgttcatcagctggtt

SEQ ID NO: 286373 - DNA, 25 bp, Homo sapien
aaggtcatgacgtcagccgtctggt

SEQ ID NO: 286374 - DNA, 25 bp, Homo sapien
tcctccaagcggatggtcatggcat

SEQ ID NO: 286375 - DNA, 25 bp, Homo sapien
ggcagtgcaggtagacaatctcctc

SEQ ID NO: 286376 - DNA, 25 bp, Homo sapien
ctggtggcagtgcaggtagacaatc

SEQ ID NO: 286377 - DNA, 25 bp, Homo sapien
aagcggatggtcatggcatagtccc

SEQ ID NO: 286378 - DNA, 25 bp, Homo sapien
tcccgtcctggctgaccaataccac

SEQ ID NO: 286379 - DNA, 25 bp, Homo sapien
tgcccatgtgggagcagcccattct

SEQ ID NO: 286380 - DNA, 25 bp, Homo sapien
agtggcgggtccaactgcccatgtg

SEQ ID NO: 286381 - DNA, 25 bp, Homo sapien
tgaccaataccactgtcccgccgct

SEQ ID NO: 286382 - DNA, 25 bp, Homo sapien
tagatgatcctgaacacataatccg

SEQ ID NO: 286383 - DNA, 25 bp, Homo sapien
accctgagggcttcgcttgcgcagt

SEQ ID NO: 286384 - DNA, 25 bp, Homo sapien
tgcgcagtttaggaaacactttgcc

SEQ ID NO: 286385 - DNA, 25 bp, Homo sapien
cacataatccgtggcctcatcatca

SEQ ID NO: 286386 - DNA, 25 bp, Homo sapien
cttggcgtggggagagtagtgtccc

SEQ ID NO: 286387 - DNA, 25 bp, Homo sapien
agcatggaccggcctgcaggaacca

SEQ ID NO: 286388 - DNA, 25 bp, Homo sapien
aggaagtgctgcccaagaagtcggg

SEQ ID NO: 286389 - DNA, 25 bp, Homo sapien
gggctgctccttcgggcttggcgtg

SEQ ID NO: 286390 - DNA, 25 bp, Homo sapien
ccagccagcacagagataggaaaag

SEQ ID NO: 286391 - DNA, 25 bp, Homo sapien
cgccccagccagcacagagatagga

SEQ ID NO: 286392 - DNA, 25 bp, Homo sapien
ccccagccagcacagagataggaaa

SEQ ID NO: 286393 - DNA, 25 bp, Homo sapien
gccagcacagagataggaaaagacc

SEQ ID NO: 286394 - DNA, 25 bp, Homo sapien
gcttacagagacgtccatcagatcc

SEQ ID NO: 286395 - DNA, 25 bp, Homo sapien
cattggtcgagctaccatcagccga

SEQ ID NO: 286396 - DNA, 25 bp, Homo sapien
cactctgtgaacaggatgaacagga

SEQ ID NO: 286397 - DNA, 25 bp, Homo sapien
tggttgcagccattggtcgagctac

SEQ ID NO: 286398 - DNA, 25 bp, Homo sapien
gaggatctggtacttcatattgtca

SEQ ID NO: 286399 - DNA, 25 bp, Homo sapien
ggatctggtacttcatattgtcaca

SEQ ID NO: 286400 - DNA, 25 bp, Homo sapien
aggatctggtacttcatattgtcac

SEQ ID NO: 286401 - DNA, 25 bp, Homo sapien
cggagacacactggcaatggagccc

SEQ ID NO: 286402 - DNA, 25 bp, Homo sapien
ggagacacactggcaatggagccct

SEQ ID NO: 286403 - DNA, 25 bp, Homo sapien
ggatctgaaaccaggtcacctcgct

SEQ ID NO: 286404 - DNA, 25 bp, Homo sapien
gtacaaaccggttatgtcacttgcc

SEQ ID NO: 286405 - DNA, 25 bp, Homo sapien
aggtacaaaccggttatgtcacttg

SEQ ID NO: 286406 - DNA, 25 bp, Homo sapien
tcacttgcccaagtcgcatcgctgg

SEQ ID NO: 286407 - DNA, 25 bp, Homo sapien
cgcagggcaagtctggagacacgat

SEQ ID NO: 286408 - DNA, 25 bp, Homo sapien
gtcagtccctgtccagcatcgcagg

SEQ ID NO: 286409 - DNA, 25 bp, Homo sapien
cgatcatgtgattgaccagggctga

SEQ ID NO: 286410 - DNA, 25 bp, Homo sapien
tgtcgtgaaggtactgctcccagat

SEQ ID NO: 286411 - DNA, 25 bp, Homo sapien
gccacacggccttgcggatctcagg

SEQ ID NO: 286412 - DNA, 25 bp, Homo sapien
gtcatcccgaactggtagtggccca

SEQ ID NO: 286413 - DNA, 25 bp, Homo sapien
ctggatgcccccgtagtagatgagg

SEQ ID NO: 286414 - DNA, 25 bp, Homo sapien
ttcctttctgtttccgtcatcccga

SEQ ID NO: 286415 - DNA, 25 bp, Homo sapien
tgttgccaaagatcccagtgcccat

SEQ ID NO: 286416 - DNA, 25 bp, Homo sapien
ttggtccagcgtggaaccagcactc

SEQ ID NO: 286417 - DNA, 25 bp, Homo sapien
cagccccacagtatctggctccttt

SEQ ID NO: 286418 - DNA, 25 bp, Homo sapien
ccttccttggtccagcgtggaacca

SEQ ID NO: 286419 - DNA, 25 bp, Homo sapien
tcattgctgatggttgagtccctgt

SEQ ID NO: 286420 - DNA, 25 bp, Homo sapien
aacatccggtgcaggtggctgtcca

SEQ ID NO: 286421 - DNA, 25 bp, Homo sapien
tcagccatggtctgtgcatagcagg

SEQ ID NO: 286422 - DNA, 25 bp, Homo sapien
agctggccccggatgagcatttggc

SEQ ID NO: 286423 - DNA, 25 bp, Homo sapien
cccccgcgctccccgaggccagccg

SEQ ID NO: 286424 - DNA, 25 bp, Homo sapien
ctgtgcaggcggatgttctggcggc

SEQ ID NO: 286425 - DNA, 25 bp, Homo sapien
gatgttctggcggcccgaactgcag

SEQ ID NO: 286426 - DNA, 25 bp, Homo sapien
aggcggatgttctggcggcccgaac

SEQ ID NO: 286427 - DNA, 25 bp, Homo sapien
tgcaggcggatgttctggcggcccg

SEQ ID NO: 286428 - DNA, 25 bp, Homo sapien
tcgtccatgctctcgttggccagga

SEQ ID NO: 286429 - DNA, 25 bp, Homo sapien
tgcccgtgatggacatgaactcgtc

SEQ ID NO: 286430 - DNA, 25 bp, Homo sapien
gctgggcgtccaagacactgtcttc

SEQ ID NO: 286431 - DNA, 25 bp, Homo sapien
tcatcctgagatgtggtggcctcgc

SEQ ID NO: 286432 - DNA, 25 bp, Homo sapien
cggggtcattctggataacaggctt

SEQ ID NO: 286433 - DNA, 25 bp, Homo sapien
gataacaggcttgtagtacatccca

SEQ ID NO: 286434 - DNA, 25 bp, Homo sapien
cagaggtctgactccggggtcattc

SEQ ID NO: 286435 - DNA, 25 bp, Homo sapien
acaggcttgtagtacatcccaccct

SEQ ID NO: 286436 - DNA, 25 bp, Homo sapien
cagtgaatcctccatgacggaaaaa

SEQ ID NO: 286437 - DNA, 25 bp, Homo sapien
tccatgacggaaaaaatgcaacgaa

SEQ ID NO: 286438 - DNA, 25 bp, Homo sapien
ccatgacggaaaaaatgcaacgaac

SEQ ID NO: 286439 - DNA, 25 bp, Homo sapien
tgaatcctccatgacggaaaaaatg

SEQ ID NO: 286440 - DNA, 25 bp, Homo sapien
atgcggtgcaggttcaccgtgtaca

SEQ ID NO: 286441 - DNA, 25 bp, Homo sapien
ccaagttggcgggcgtgaagtacca

SEQ ID NO: 286442 - DNA, 25 bp, Homo sapien
ttcaccgtgtacagatccagcagct

SEQ ID NO: 286443 - DNA, 25 bp, Homo sapien
ttctccaagttggcgggcgtgaagt

SEQ ID NO: 286444 - DNA, 25 bp, Homo sapien
cccctagatcccctcgctgtcccca

SEQ ID NO: 286445 - DNA, 25 bp, Homo sapien
ccctagatcccctcgctgtccccag

SEQ ID NO: 286446 - DNA, 25 bp, Homo sapien
gaaacatggactatcccatttcaca

SEQ ID NO: 286447 - DNA, 25 bp, Homo sapien
caaaatagtcatgtgaaacatggac

SEQ ID NO: 286448 - DNA, 25 bp, Homo sapien
tagtcatgtgaaacatggactatcc

SEQ ID NO: 286449 - DNA, 25 bp, Homo sapien
tgtgaaacatggactatcccatttc

SEQ ID NO: 286450 - DNA, 25 bp, Homo sapien
gccgatctcaatgtgctgccagatg

SEQ ID NO: 286451 - DNA, 25 bp, Homo sapien
catgccctggacatagccgatctca

SEQ ID NO: 286452 - DNA, 25 bp, Homo sapien
gccagaagatcacacatgccctgga

SEQ ID NO: 286453 - DNA, 25 bp, Homo sapien
gcagtggagccagaagatcacacat

SEQ ID NO: 286454 - DNA, 25 bp, Homo sapien
tttgcaaagtgcgtgtccatggcgc

SEQ ID NO: 286455 - DNA, 25 bp, Homo sapien
tcatgagctccgtgaagcagctgaa

SEQ ID NO: 286456 - DNA, 25 bp, Homo sapien
agtgcgtgtccatggcgcctccgtg

SEQ ID NO: 286457 - DNA, 25 bp, Homo sapien
ctcttcatgagctccgtgaagcagc

SEQ ID NO: 286458 - DNA, 25 bp, Homo sapien
cccaggcctatggttaatgtgttat

SEQ ID NO: 286459 - DNA, 25 bp, Homo sapien
accaccccaggcctatggttaatgt

SEQ ID NO: 286460 - DNA, 25 bp, Homo sapien
taatgtgttatttcttggggaggtg

SEQ ID NO: 286461 - DNA, 25 bp, Homo sapien
gaaacatgggtgttcattatattac

SEQ ID NO: 286462 - DNA, 25 bp, Homo sapien
agtagaagtgagtatagtccccgtt

SEQ ID NO: 286463 - DNA, 25 bp, Homo sapien
gaagtgagtatagtccccgttctga

SEQ ID NO: 286464 - DNA, 25 bp, Homo sapien
agtatagtccccgttctgatgcatc

SEQ ID NO: 286465 - DNA, 25 bp, Homo sapien
tatagtccccgttctgatgcatcag

SEQ ID NO: 286466 - DNA, 25 bp, Homo sapien
cattagcacccatagagccctttct

SEQ ID NO: 286467 - DNA, 25 bp, Homo sapien
ccattagcacccatagagccctttc

SEQ ID NO: 286468 - DNA, 25 bp, Homo sapien
attagcacccatagagccctttctt

SEQ ID NO: 286469 - DNA, 25 bp, Homo sapien
gatgtcacggtagacttccaccaga

SEQ ID NO: 286470 - DNA, 25 bp, Homo sapien
cagaggagacgtgtttggctgccca

SEQ ID NO: 286471 - DNA, 25 bp, Homo sapien
gatggtctcccagaccaagaagacg

SEQ ID NO: 286472 - DNA, 25 bp, Homo sapien
caatgaacaggacgtagtgcgcaga

SEQ ID NO: 286473 - DNA, 25 bp, Homo sapien
tcatgaggccccagtcatgtgggta

SEQ ID NO: 286474 - DNA, 25 bp, Homo sapien
catgaggccccagtcatgtgggtac

SEQ ID NO: 286475 - DNA, 25 bp, Homo sapien
tcagcgatagaaccagactttgccc

SEQ ID NO: 286476 - DNA, 25 bp, Homo sapien
gttactcaaattgctgccctgggcc

SEQ ID NO: 286477 - DNA, 25 bp, Homo sapien
tatgagccaggtaccacgtgctggg

SEQ ID NO: 286478 - DNA, 25 bp, Homo sapien
tccgaggcctagagacgtgaagtca

SEQ ID NO: 286479 - DNA, 25 bp, Homo sapien
tgtacacgaggtcccgcgccagctt

SEQ ID NO: 286480 - DNA, 25 bp, Homo sapien
tgcttggtgttgtgtcgctcagcca

SEQ ID NO: 286481 - DNA, 25 bp, Homo sapien
accttgtacacgaggtcccgcgcca

SEQ ID NO: 286482 - DNA, 25 bp, Homo sapien
ttggtgttgtgtcgctcagccattt

SEQ ID NO: 286483 - DNA, 25 bp, Homo sapien
gaggctgccggggtgaggtgcccct

SEQ ID NO: 286484 - DNA, 25 bp, Homo sapien
cgcttgtgaacagacaccaggaccc

SEQ ID NO: 286485 - DNA, 25 bp, Homo sapien
gcgcactgaactccacgcttgtgaa

SEQ ID NO: 286486 - DNA, 25 bp, Homo sapien
ccagacttgggcaatctttggtcaa

SEQ ID NO: 286487 - DNA, 25 bp, Homo sapien
cagggtagtttctttgcgcactgaa

SEQ ID NO: 286488 - DNA, 25 bp, Homo sapien
aaagaagaagaggagaccattccgg

SEQ ID NO: 286489 - DNA, 25 bp, Homo sapien
gaagaggagaccattccgggcacca

SEQ ID NO: 286490 - DNA, 25 bp, Homo sapien
aagaagaggagaccattccgggcac

SEQ ID NO: 286491 - DNA, 25 bp, Homo sapien
agaagaagaggagaccattccgggc

SEQ ID NO: 286492 - DNA, 25 bp, Homo sapien
cctgcagggaacatttcgcaatgtc

SEQ ID NO: 286493 - DNA, 25 bp, Homo sapien
caaaggccccttgcagaggagcata

SEQ ID NO: 286494 - DNA, 25 bp, Homo sapien
cccaaatgtcagtaatgtcgaggtg

SEQ ID NO: 286495 - DNA, 25 bp, Homo sapien
tgtcgaggtggagggtcaatctcta

SEQ ID NO: 286496 - DNA, 25 bp, Homo sapien
catttacaagatatgtgggccacac

SEQ ID NO: 286497 - DNA, 25 bp, Homo sapien
tcagaacagaagagcgggaaagact

SEQ ID NO: 286498 - DNA, 25 bp, Homo sapien
taatggcagccagaacgttgccgtc

SEQ ID NO: 286499 - DNA, 25 bp, Homo sapien
cattccgggtgcattctcagaacag

SEQ ID NO: 286500 - DNA, 25 bp, Homo sapien
gactttatgccagagaagctgagac

SEQ ID NO: 286501 - DNA, 25 bp, Homo sapien
cctgctggaggatgcaagatacgga

SEQ ID NO: 286502 - DNA, 25 bp, Homo sapien
taccctatgaagctgggctgagtca

SEQ ID NO: 286503 - DNA, 25 bp, Homo sapien
taaacaagcctaagctagcctgctg

SEQ ID NO: 286504 - DNA, 25 bp, Homo sapien
gcggggcctcgagcggggacgcgcc

SEQ ID NO: 286505 - DNA, 25 bp, Homo sapien
tcgagcggggacgcgcccccgtcac

SEQ ID NO: 286506 - DNA, 25 bp, Homo sapien
agcggggacgcgcccccgtcaccat

SEQ ID NO: 286507 - DNA, 25 bp, Homo sapien
ctcgagcggggacgcgcccccgtca

SEQ ID NO: 286508 - DNA, 25 bp, Homo sapien
caaattcctcgggaactgtccctgg

SEQ ID NO: 286509 - DNA, 25 bp, Homo sapien
ctgtacaaattcctcgggaactgtc

SEQ ID NO: 286510 - DNA, 25 bp, Homo sapien
cccctgccagaaccaccaagatctg

SEQ ID NO: 286511 - DNA, 25 bp, Homo sapien
ccaccaagatctgggcttgtgtctg

SEQ ID NO: 286512 - DNA, 25 bp, Homo sapien
ggatttgacaagaaggcacctaaca

SEQ ID NO: 286513 - DNA, 25 bp, Homo sapien
gacttcaggcctagaacccattcat

SEQ ID NO: 286514 - DNA, 25 bp, Homo sapien
gctggactaaaactcaggaggcctg

SEQ ID NO: 286515 - DNA, 25 bp, Homo sapien
taggccctgtcagcaaattgtgatt

SEQ ID NO: 286516 - DNA, 25 bp, Homo sapien
tcccggacatcgacatgtcagcttt

SEQ ID NO: 286517 - DNA, 25 bp, Homo sapien
cgacatgtcagctttgtcatgattg

SEQ ID NO: 286518 - DNA, 25 bp, Homo sapien
ttatcccggacatcgacatgtcagc

SEQ ID NO: 286519 - DNA, 25 bp, Homo sapien
ggacatcgacatgtcagctttgtca

SEQ ID NO: 286520 - DNA, 25 bp, Homo sapien
tatggtggtgtatgcttgtagttcc

SEQ ID NO: 286521 - DNA, 25 bp, Homo sapien
gctatgactgcaccatggcacgcca

SEQ ID NO: 286522 - DNA, 25 bp, Homo sapien
ggtgtatgcttgtagttccagcact

SEQ ID NO: 286523 - DNA, 25 bp, Homo sapien
tatgactgcaccatggcacgccagc

SEQ ID NO: 286524 - DNA, 25 bp, Homo sapien
cacaaaacacagtgtacgctttctc

SEQ ID NO: 286525 - DNA, 25 bp, Homo sapien
ttcagcacaatgaaccccagacagg

SEQ ID NO: 286526 - DNA, 25 bp, Homo sapien
cacagtgtacgctttctcgccttca

SEQ ID NO: 286527 - DNA, 25 bp, Homo sapien
cccagacaggccacaaaacacagtg

SEQ ID NO: 286528 - DNA, 25 bp, Homo sapien
tagtgtcacatgtcatcatgaatgg

SEQ ID NO: 286529 - DNA, 25 bp, Homo sapien
ctgccgggaaaagccagtagtgtca

SEQ ID NO: 286530 - DNA, 25 bp, Homo sapien
gggaaagaagactcgtcccagcagg

SEQ ID NO: 286531 - DNA, 25 bp, Homo sapien
actcgtcccagcaggctgagtttca

SEQ ID NO: 286532 - DNA, 25 bp, Homo sapien
ggttatggttgtggattcatggggg

SEQ ID NO: 286533 - DNA, 25 bp, Homo sapien
tggttgtggattcatgggggttagg

SEQ ID NO: 286534 - DNA, 25 bp, Homo sapien
ttgtggattcatgggggttaggaac

SEQ ID NO: 286535 - DNA, 25 bp, Homo sapien
tatggttgtggattcatgggggtta

SEQ ID NO: 286536 - DNA, 25 bp, Homo sapien
gaagtaggtcctcgtcagggtctcc

SEQ ID NO: 286537 - DNA, 25 bp, Homo sapien
gatttcacgtcctgctccttcgaga

SEQ ID NO: 286538 - DNA, 25 bp, Homo sapien
gaaggtccagtcgaactgggccgca

SEQ ID NO: 286539 - DNA, 25 bp, Homo sapien
gggctcttcgcttccaagatccggg

SEQ ID NO: 286540 - DNA, 25 bp, Homo sapien
tgggtggcactttgcccactgtggc

SEQ ID NO: 286541 - DNA, 25 bp, Homo sapien
tggactccgtgaaaatggcagacac

SEQ ID NO: 286542 - DNA, 25 bp, Homo sapien
tctttgttctcaaaccgggccgtga

SEQ ID NO: 286543 - DNA, 25 bp, Homo sapien
ccgtgaggtccatggacaagggcct

SEQ ID NO: 286544 - DNA, 25 bp, Homo sapien
agccatatcccctgctgtgggtcca

SEQ ID NO: 286545 - DNA, 25 bp, Homo sapien
tcaggatcatgaagaggagcctccg

SEQ ID NO: 286546 - DNA, 25 bp, Homo sapien
cgttcacggattttcttggccacct

SEQ ID NO: 286547 - DNA, 25 bp, Homo sapien
tgtccagcttggacgctgctctggg

SEQ ID NO: 286548 - DNA, 25 bp, Homo sapien
ctccccatccgccactctgctctta

SEQ ID NO: 286549 - DNA, 25 bp, Homo sapien
ctcttaacctcagcaagttctaggc

SEQ ID NO: 286550 - DNA, 25 bp, Homo sapien
tctggtcattgctgggggtgacccc

SEQ ID NO: 286551 - DNA, 25 bp, Homo sapien
ctgctcttaacctcagcaagttcta

SEQ ID NO: 286552 - DNA, 25 bp, Homo sapien
tgtcctcccgaaacaggctgatgca

SEQ ID NO: 286553 - DNA, 25 bp, Homo sapien
aatttggtcaaatccgccgacagcg

SEQ ID NO: 286554 - DNA, 25 bp, Homo sapien
agcctctgagctctcggcagtccag

SEQ ID NO: 286555 - DNA, 25 bp, Homo sapien
actgccaaggccaaggtgctgtcct

SEQ ID NO: 286556 - DNA, 25 bp, Homo sapien
gtattaaccaactgactagcccaag

SEQ ID NO: 286557 - DNA, 25 bp, Homo sapien
tttgggccactcataaaggcttagg

SEQ ID NO: 286558 - DNA, 25 bp, Homo sapien
gacttcagggaagaaaggcttagct

SEQ ID NO: 286559 - DNA, 25 bp, Homo sapien
gccatgaaaattgggctccgggccc

SEQ ID NO: 286560 - DNA, 25 bp, Homo sapien
actgattgacaacatcggtattaac

SEQ ID NO: 286561 - DNA, 25 bp, Homo sapien
ggtattaaccaactgacttagagta

SEQ ID NO: 286562 - DNA, 25 bp, Homo sapien
cggtattaaccaactgacttagagt

SEQ ID NO: 286563 - DNA, 25 bp, Homo sapien
ccaactgattgacaacatcggtatt

SEQ ID NO: 286564 - DNA, 25 bp, Homo sapien
gacttagaacatcggtattaaccag

SEQ ID NO: 286565 - DNA, 25 bp, Homo sapien
acttagaacatcggtattaaccagc

SEQ ID NO: 286566 - DNA, 25 bp, Homo sapien
ctgaagatgtagcacgtgtttagtt

SEQ ID NO: 286567 - DNA, 25 bp, Homo sapien
aagatgtagcacgtgtttagttcaa

SEQ ID NO: 286568 - DNA, 25 bp, Homo sapien
atgtagcacgtgtttagttcaaagc

SEQ ID NO: 286569 - DNA, 25 bp, Homo sapien
gatgtagcacgtgtttagttcaaag

SEQ ID NO: 286570 - DNA, 25 bp, Homo sapien
gaggccaggccaagtaaccttcaga

SEQ ID NO: 286571 - DNA, 25 bp, Homo sapien
taccaaaaggagaactgcccagtgg

SEQ ID NO: 286572 - DNA, 25 bp, Homo sapien
gaagacacccaggtgctagtcccag

SEQ ID NO: 286573 - DNA, 25 bp, Homo sapien
gagatctgagttaccttcatggagc

SEQ ID NO: 286574 - DNA, 25 bp, Homo sapien
tttgacttcgttgctggaagctgaa

SEQ ID NO: 286575 - DNA, 25 bp, Homo sapien
tctctcggttccttaggaaactcgc

SEQ ID NO: 286576 - DNA, 25 bp, Homo sapien
agcactcttctcatatttgacttcg

SEQ ID NO: 286577 - DNA, 25 bp, Homo sapien
cgttgctggaagctgaacttgaaaa

SEQ ID NO: 286578 - DNA, 25 bp, Homo sapien
atataagaaagccatgcccctctgc

SEQ ID NO: 286579 - DNA, 25 bp, Homo sapien
cacaactcttcatgccaaaagggac

SEQ ID NO: 286580 - DNA, 25 bp, Homo sapien
taacacctgggagtagggaatcaca

SEQ ID NO: 286581 - DNA, 25 bp, Homo sapien
caataagaaccactatgaaggacct

SEQ ID NO: 286582 - DNA, 25 bp, Homo sapien
agagattacaacgtcgtggccgggt

SEQ ID NO: 286583 - DNA, 25 bp, Homo sapien
ggaagggagagattacaacgtcgtg

SEQ ID NO: 286584 - DNA, 25 bp, Homo sapien
agattacaacgtcgtggccgggtgt

SEQ ID NO: 286585 - DNA, 25 bp, Homo sapien
agggagagattacaacgtcgtggcc

SEQ ID NO: 286586 - DNA, 25 bp, Homo sapien
ttctcgggatgcatgctccatccaa

SEQ ID NO: 286587 - DNA, 25 bp, Homo sapien
gggcttctcgggatgcatgctccat

SEQ ID NO: 286588 - DNA, 25 bp, Homo sapien
tctcgggatgcatgctccatccaaa

SEQ ID NO: 286589 - DNA, 25 bp, Homo sapien
gcttctcgggatgcatgctccatcc

SEQ ID NO: 286590 - DNA, 25 bp, Homo sapien
cacacagtctggaagctccggtcat

SEQ ID NO: 286591 - DNA, 25 bp, Homo sapien
actgagcttccaccgcgacagctgt

SEQ ID NO: 286592 - DNA, 25 bp, Homo sapien
ggtcttggttagagctaaccttctg

SEQ ID NO: 286593 - DNA, 25 bp, Homo sapien
tcctctggagtgacgtcagaagggc

SEQ ID NO: 286594 - DNA, 25 bp, Homo sapien
tttgtcccggagaggcgtgtgatac

SEQ ID NO: 286595 - DNA, 25 bp, Homo sapien
ggtctcagttcaccattcaaaaggg

SEQ ID NO: 286596 - DNA, 25 bp, Homo sapien
tggagagacaacgtcccgactggtc

SEQ ID NO: 286597 - DNA, 25 bp, Homo sapien
gggattgtcaaaccctctggagttc

SEQ ID NO: 286598 - DNA, 25 bp, Homo sapien
aggctgcggagcgtgaccgctttct

SEQ ID NO: 286599 - DNA, 25 bp, Homo sapien
gtgagatggcctcgctgtgcacacg

SEQ ID NO: 286600 - DNA, 25 bp, Homo sapien
tgcatgcacaatgtcatatctgggc

SEQ ID NO: 286601 - DNA, 25 bp, Homo sapien
ctttctcctccggtgccggtgagat

SEQ ID NO: 286602 - DNA, 25 bp, Homo sapien
caattgctttgaggacgagggccat

SEQ ID NO: 286603 - DNA, 25 bp, Homo sapien
tccatttgggaaacgggcaattgcc

SEQ ID NO: 286604 - DNA, 25 bp, Homo sapien
gaaggcccattcgtagccctggaaa

SEQ ID NO: 286605 - DNA, 25 bp, Homo sapien
aaaatgtcgccttgggttccacagg

SEQ ID NO: 286606 - DNA, 25 bp, Homo sapien
cgtcaatgtcaagaacgctggatct

SEQ ID NO: 286607 - DNA, 25 bp, Homo sapien
gaacgctggatctgtagccatctct

SEQ ID NO: 286608 - DNA, 25 bp, Homo sapien
tgccatcagggcgtcaatgtcaaga

SEQ ID NO: 286609 - DNA, 25 bp, Homo sapien
tgtcaagaacgctggatctgtagcc

SEQ ID NO: 286610 - DNA, 25 bp, Homo sapien
ggatccgcaggtataggagagcccc

SEQ ID NO: 286611 - DNA, 25 bp, Homo sapien
tctcccgaggcaacgtactgggctc

SEQ ID NO: 286612 - DNA, 25 bp, Homo sapien
tgtgatttatttcggcagaactggc

SEQ ID NO: 286613 - DNA, 25 bp, Homo sapien
cagaactggccggtttccagagacc

SEQ ID NO: 286614 - DNA, 25 bp, Homo sapien
ggcgatttgggtgacaccctgaccc

SEQ ID NO: 286615 - DNA, 25 bp, Homo sapien
ctcttgatatccagcggcacccgtc

SEQ ID NO: 286616 - DNA, 25 bp, Homo sapien
ggcacccgtccacagtcacgtgggt

SEQ ID NO: 286617 - DNA, 25 bp, Homo sapien
tctgagtaggccctcttgatatcca

SEQ ID NO: 286618 - DNA, 25 bp, Homo sapien
tctctccagtaaggctgggcctccc

SEQ ID NO: 286619 - DNA, 25 bp, Homo sapien
acaagagagaaacgggaagctggtc

SEQ ID NO: 286620 - DNA, 25 bp, Homo sapien
caatcccgtggtgagaaaacagatc

SEQ ID NO: 286621 - DNA, 25 bp, Homo sapien
aaaacagatcccctgacaaccagca

SEQ ID NO: 286622 - DNA, 25 bp, Homo sapien
cataagtgtcgcatttccttggcct

SEQ ID NO: 286623 - DNA, 25 bp, Homo sapien
tgctggagcggtcgctccttctcct

SEQ ID NO: 286624 - DNA, 25 bp, Homo sapien
ctgctggagcggtcgctccttctcc

SEQ ID NO: 286625 - DNA, 25 bp, Homo sapien
gctggagcggtcgctccttctcctg

SEQ ID NO: 286626 - DNA, 25 bp, Homo sapien
agaagctgtggcttctccagggaac

SEQ ID NO: 286627 - DNA, 25 bp, Homo sapien
cacaaagggcccactcctcctgtct

SEQ ID NO: 286628 - DNA, 25 bp, Homo sapien
tcctgtctttgcagaagctgtggct

SEQ ID NO: 286629 - DNA, 25 bp, Homo sapien
tgtggcttctccagggaaccgaggc

SEQ ID NO: 286630 - DNA, 25 bp, Homo sapien
cttaggagccctgtcttcgatgccc

SEQ ID NO: 286631 - DNA, 25 bp, Homo sapien
cagaagtgtcgctgccttaggagcc

SEQ ID NO: 286632 - DNA, 25 bp, Homo sapien
tgagaccaggcccaggtatccctga

SEQ ID NO: 286633 - DNA, 25 bp, Homo sapien
aggtatccctgaagcttgtggagct

SEQ ID NO: 286634 - DNA, 25 bp, Homo sapien
aatgatgcacaagaaaaccagtgcc

SEQ ID NO: 286635 - DNA, 25 bp, Homo sapien
tgatgcacaagaaaaccagtgcctt

SEQ ID NO: 286636 - DNA, 25 bp, Homo sapien
gaatgatgcacaagaaaaccagtgc

SEQ ID NO: 286637 - DNA, 25 bp, Homo sapien
gatgcacaagaaaaccagtgccttg

SEQ ID NO: 286638 - DNA, 25 bp, Homo sapien
caccgctggagggatgatgccagct

SEQ ID NO: 286639 - DNA, 25 bp, Homo sapien
cagctgacagtaccagtcagaggac

SEQ ID NO: 286640 - DNA, 25 bp, Homo sapien
agtgcagcaaaagggctggttcctc

SEQ ID NO: 286641 - DNA, 25 bp, Homo sapien
tcctgctgaccgacaaaagtgcagc

SEQ ID NO: 286642 - DNA, 25 bp, Homo sapien
ctgccagacagtacagctgaaaagc

SEQ ID NO: 286643 - DNA, 25 bp, Homo sapien
agacagtacagctgaaaagccagcc

SEQ ID NO: 286644 - DNA, 25 bp, Homo sapien
ccagacagtacagctgaaaagccag

SEQ ID NO: 286645 - DNA, 25 bp, Homo sapien
tgccagacagtacagctgaaaagcc

SEQ ID NO: 286646 - DNA, 25 bp, Homo sapien
ttccagctttcctctagcgggagcg

SEQ ID NO: 286647 - DNA, 25 bp, Homo sapien
aatcattcagaagccggctcacggc

SEQ ID NO: 286648 - DNA, 25 bp, Homo sapien
tgtcacgctggagtcaagttcaagg

SEQ ID NO: 286649 - DNA, 25 bp, Homo sapien
gttcaaggcggcataaatcattcag

SEQ ID NO: 286650 - DNA, 25 bp, Homo sapien
cagcaggctggggcagtagtaatac

SEQ ID NO: 286651 - DNA, 25 bp, Homo sapien
caggctggggcagtagtaatactcc

SEQ ID NO: 286652 - DNA, 25 bp, Homo sapien
cagaggtagcgcaagagcttcagca

SEQ ID NO: 286653 - DNA, 25 bp, Homo sapien
agaggtagcgcaagagcttcagcag

SEQ ID NO: 286654 - DNA, 25 bp, Homo sapien
tcttctatcactgtgtaggttcagg

SEQ ID NO: 286655 - DNA, 25 bp, Homo sapien
cagagacattgctaaccagacacag

SEQ ID NO: 286656 - DNA, 25 bp, Homo sapien
ggaaagcccacatcggatccaggat

SEQ ID NO: 286657 - DNA, 25 bp, Homo sapien
gagtctcagctcttcctacaaacct

SEQ ID NO: 286658 - DNA, 25 bp, Homo sapien
gttgcgaagtcaaagtgagacctga

SEQ ID NO: 286659 - DNA, 25 bp, Homo sapien
gaagtcaaagtgagacctgaaagca

SEQ ID NO: 286660 - DNA, 25 bp, Homo sapien
cagaccagttgcgaagtcaaagtga

SEQ ID NO: 286661 - DNA, 25 bp, Homo sapien
cagaaaacagaccagttgcgaagtc

SEQ ID NO: 286662 - DNA, 25 bp, Homo sapien
tggagaacgtatgctgacaccggta

SEQ ID NO: 286663 - DNA, 25 bp, Homo sapien
tcaaccaacaagtgcaaacctgggt

SEQ ID NO: 286664 - DNA, 25 bp, Homo sapien
ggcaaactctcagggtcatccatga

SEQ ID NO: 286665 - DNA, 25 bp, Homo sapien
caacaactcttaggcatgggcaggg

SEQ ID NO: 286666 - DNA, 25 bp, Homo sapien
tccacagccagacggcgctgggatt

SEQ ID NO: 286667 - DNA, 25 bp, Homo sapien
ctgctcagccggctctaaatttaga

SEQ ID NO: 286668 - DNA, 25 bp, Homo sapien
ttacttgcctggtgcaagctgctca

SEQ ID NO: 286669 - DNA, 25 bp, Homo sapien
tagaactgctaacatggtcaggaag

SEQ ID NO: 286670 - DNA, 25 bp, Homo sapien
tattttcttacaacgctgtctggag

SEQ ID NO: 286671 - DNA, 25 bp, Homo sapien
gctcagacggtaatggtgacacctc

SEQ ID NO: 286672 - DNA, 25 bp, Homo sapien
gagaatgcggatgtgtacctcctgg

SEQ ID NO: 286673 - DNA, 25 bp, Homo sapien
gaaaacacaaagtcgtgagaatgcg

SEQ ID NO: 286674 - DNA, 25 bp, Homo sapien
tgtccacccttgacactcaacatcc

SEQ ID NO: 286675 - DNA, 25 bp, Homo sapien
ggcagggacgtgtcctgtccaccct

SEQ ID NO: 286676 - DNA, 25 bp, Homo sapien
cctgtgggcggcagggacgtgtcct

SEQ ID NO: 286677 - DNA, 25 bp, Homo sapien
cccttgacactcaacatcctgaaga

SEQ ID NO: 286678 - DNA, 25 bp, Homo sapien
agaagtattactccaccatgcaggt

SEQ ID NO: 286679 - DNA, 25 bp, Homo sapien
gaagtattactccaccatgcaggtg

SEQ ID NO: 286680 - DNA, 25 bp, Homo sapien
cagaagtattactccaccatgcagg

SEQ ID NO: 286681 - DNA, 25 bp, Homo sapien
tccaggtgagacagcctctgaggtc

SEQ ID NO: 286682 - DNA, 25 bp, Homo sapien
tctaaggttacaggcagcgtcttgg

SEQ ID NO: 286683 - DNA, 25 bp, Homo sapien
cagccccgggaaggttagcactgct

SEQ ID NO: 286684 - DNA, 25 bp, Homo sapien
ggaaggcaacactgatccaggtgag

SEQ ID NO: 286685 - DNA, 25 bp, Homo sapien
attccaaacctgtcggccggcaggc

SEQ ID NO: 286686 - DNA, 25 bp, Homo sapien
cggcctttgggcaccctcgtcctca

SEQ ID NO: 286687 - DNA, 25 bp, Homo sapien
ccagaccccgctcacctgacccatg

SEQ ID NO: 286688 - DNA, 25 bp, Homo sapien
gttccggtgggcaagctgccgcacc

SEQ ID NO: 286689 - DNA, 25 bp, Homo sapien
taagaggcagctaagtgccaggctg

SEQ ID NO: 286690 - DNA, 25 bp, Homo sapien
cacgggtgccgctcagaattaagag

SEQ ID NO: 286691 - DNA, 25 bp, Homo sapien
aattaaaacgccagtgtcctcttgc

SEQ ID NO: 286692 - DNA, 25 bp, Homo sapien
caagggtaagtaaacatccctgagc

SEQ ID NO: 286693 - DNA, 25 bp, Homo sapien
gactctgcactcgtccgttcgtggc

SEQ ID NO: 286694 - DNA, 25 bp, Homo sapien
tggtcaccaaattgagggcttcctg

SEQ ID NO: 286695 - DNA, 25 bp, Homo sapien
tctggcggttccgaatctgtatgcc

SEQ ID NO: 286696 - DNA, 25 bp, Homo sapien
ttcctggaaggacctcctcacggtg

SEQ ID NO: 286697 - DNA, 25 bp, Homo sapien
aaattcagcccaactcacgtgctgg

SEQ ID NO: 286698 - DNA, 25 bp, Homo sapien
cagacgtcgactccagcaaaaatgt

SEQ ID NO: 286699 - DNA, 25 bp, Homo sapien
cctaaaaatagggagaaggatgagc

SEQ ID NO: 286700 - DNA, 25 bp, Homo sapien
ggctttgactgacaactattctgga

SEQ ID NO: 286701 - DNA, 25 bp, Homo sapien
agcgtgcacatgacaccgccacttg

SEQ ID NO: 286702 - DNA, 25 bp, Homo sapien
tcagcgtgcacatgacaccgccact

SEQ ID NO: 286703 - DNA, 25 bp, Homo sapien
gtgcacatgacaccgccacttgtgc

SEQ ID NO: 286704 - DNA, 25 bp, Homo sapien
cgtgcacatgacaccgccacttgtg

SEQ ID NO: 286705 - DNA, 25 bp, Homo sapien
tgagtaagaaatcaaggcctccctc

SEQ ID NO: 286706 - DNA, 25 bp, Homo sapien
tcggtggaacgacaaaagctacaac

SEQ ID NO: 286707 - DNA, 25 bp, Homo sapien
ttggcaatccaatgaaagctcggtg

SEQ ID NO: 286708 - DNA, 25 bp, Homo sapien
aggacacaggccaaggttttaatca

SEQ ID NO: 286709 - DNA, 25 bp, Homo sapien
tgagtaaatacaagccggaggcagg

SEQ ID NO: 286710 - DNA, 25 bp, Homo sapien
caactgtgggatgctactggcttct

SEQ ID NO: 286711 - DNA, 25 bp, Homo sapien
tttaatagtgaatccccagtgcagg

SEQ ID NO: 286712 - DNA, 25 bp, Homo sapien
catgggagtgcagcataaacgtgcc

SEQ ID NO: 286713 - DNA, 25 bp, Homo sapien
gccaagatgtctgcaacgtggctgc

SEQ ID NO: 286714 - DNA, 25 bp, Homo sapien
tgccaagatgtctgcaacgtggctg

SEQ ID NO: 286715 - DNA, 25 bp, Homo sapien
ttgtacgctcttcaaatgcagcacc

SEQ ID NO: 286716 - DNA, 25 bp, Homo sapien
ctttgtacgctcttcaaatgcagca

SEQ ID NO: 286717 - DNA, 25 bp, Homo sapien
tgagcacctaccagtgtgcccagca

SEQ ID NO: 286718 - DNA, 25 bp, Homo sapien
cactcgttactgtatggaattctca

SEQ ID NO: 286719 - DNA, 25 bp, Homo sapien
tactgcaaagatcttaagaggtcac

SEQ ID NO: 286720 - DNA, 25 bp, Homo sapien
tgagcagccctggtggtccaaaagg

SEQ ID NO: 286721 - DNA, 25 bp, Homo sapien
caacatacccagcccagaatctgtg

SEQ ID NO: 286722 - DNA, 25 bp, Homo sapien
gaatctgtgcttttagcactaacta

SEQ ID NO: 286723 - DNA, 25 bp, Homo sapien
gcccagaatctgtgcttttagcact

SEQ ID NO: 286724 - DNA, 25 bp, Homo sapien
tctgtgcttttagcactaactagtc

SEQ ID NO: 286725 - DNA, 25 bp, Homo sapien
tataacagcactcataaacatctcc

SEQ ID NO: 286726 - DNA, 25 bp, Homo sapien
ccaatgctgcgctaaagagtttcac

SEQ ID NO: 286727 - DNA, 25 bp, Homo sapien
ggaaacaatgcaagcccctgcttac

SEQ ID NO: 286728 - DNA, 25 bp, Homo sapien
aacatctcccagacaattaccacag

SEQ ID NO: 286729 - DNA, 25 bp, Homo sapien
gggatcttcagtagagagacaaggt

SEQ ID NO: 286730 - DNA, 25 bp, Homo sapien
cttccaagccctgatattctggaga

SEQ ID NO: 286731 - DNA, 25 bp, Homo sapien
tacaggcgttggtattctttatcca

SEQ ID NO: 286732 - DNA, 25 bp, Homo sapien
gaacactcattaaggtgcttccatg

SEQ ID NO: 286733 - DNA, 25 bp, Homo sapien
caacttgtgggcaagttgtgcagac

SEQ ID NO: 286734 - DNA, 25 bp, Homo sapien
caagttgtgcagactgctgattttc

SEQ ID NO: 286735 - DNA, 25 bp, Homo sapien
actctgagaagggatcggattcggc

SEQ ID NO: 286736 - DNA, 25 bp, Homo sapien
ccctctggcgaagatggcagctgga

SEQ ID NO: 286737 - DNA, 25 bp, Homo sapien
ttggccggtgcccaggacggggaga

SEQ ID NO: 286738 - DNA, 25 bp, Homo sapien
cggtgcccaggacggggagagcctg

SEQ ID NO: 286739 - DNA, 25 bp, Homo sapien
tctccttggcaccttggccggtgcc

SEQ ID NO: 286740 - DNA, 25 bp, Homo sapien
gccggtgcccaggacggggagagcc

SEQ ID NO: 286741 - DNA, 25 bp, Homo sapien
tcctcagacccctgagagtggaggc

SEQ ID NO: 286742 - DNA, 25 bp, Homo sapien
caaaaggcagttgctttctgacaca

SEQ ID NO: 286743 - DNA, 25 bp, Homo sapien
tgtgctggcgtagactcctcctcag

SEQ ID NO: 286744 - DNA, 25 bp, Homo sapien
cctttgggagttcttgtgtgtctgc

SEQ ID NO: 286745 - DNA, 25 bp, Homo sapien
gggcagaggacagttaggggcatgt

SEQ ID NO: 286746 - DNA, 25 bp, Homo sapien
tggggcagaggacagttaggggcat

SEQ ID NO: 286747 - DNA, 25 bp, Homo sapien
gacagttaggggcatgtgatggtgg

SEQ ID NO: 286748 - DNA, 25 bp, Homo sapien
cagaggacagttaggggcatgtgat

SEQ ID NO: 286749 - DNA, 25 bp, Homo sapien
gagggttggggagcctggtgcatgt

SEQ ID NO: 286750 - DNA, 25 bp, Homo sapien
ggttggggagcctggtgcatgtcat

SEQ ID NO: 286751 - DNA, 25 bp, Homo sapien
cagggcttgtggtgagggttgggga

SEQ ID NO: 286752 - DNA, 25 bp, Homo sapien
tcagggcttgtggtgagggttgggg

SEQ ID NO: 286753 - DNA, 25 bp, Homo sapien
gaaacaggatcaacttggtccagtc

SEQ ID NO: 286754 - DNA, 25 bp, Homo sapien
tctagactcctaggctatccagggc

SEQ ID NO: 286755 - DNA, 25 bp, Homo sapien
ggtccagtctaatcttaggcccagg

SEQ ID NO: 286756 - DNA, 25 bp, Homo sapien
cacacagcacataaatggcggaaac

SEQ ID NO: 286757 - DNA, 25 bp, Homo sapien
ctttgttcttgcatggaaacatcag

SEQ ID NO: 286758 - DNA, 25 bp, Homo sapien
gcagacataccccttacttctttgt

SEQ ID NO: 286759 - DNA, 25 bp, Homo sapien
tcttgcatggaaacatcagataata

SEQ ID NO: 286760 - DNA, 25 bp, Homo sapien
tccgatggcagacataccccttact

SEQ ID NO: 286761 - DNA, 25 bp, Homo sapien
aatgttcctacaccatgtccctggg

SEQ ID NO: 286762 - DNA, 25 bp, Homo sapien
gaagtaacctgcacaggtgacaaag

SEQ ID NO: 286763 - DNA, 25 bp, Homo sapien
tggcaaggaccttgttttagggaca

SEQ ID NO: 286764 - DNA, 25 bp, Homo sapien
ggcctctagcttgggttttccattg

SEQ ID NO: 286765 - DNA, 25 bp, Homo sapien
tcctttccattctctttctcttgcc

SEQ ID NO: 286766 - DNA, 25 bp, Homo sapien
tttctcttgccttttagagatactc

SEQ ID NO: 286767 - DNA, 25 bp, Homo sapien
tctcttgccttttagagatactcat

SEQ ID NO: 286768 - DNA, 25 bp, Homo sapien
tctttctcttgccttttagagatac

SEQ ID NO: 286769 - DNA, 25 bp, Homo sapien
ggagtataggtatacactaccacac

SEQ ID NO: 286770 - DNA, 25 bp, Homo sapien
tgggagtataggtatacactaccac

SEQ ID NO: 286771 - DNA, 25 bp, Homo sapien
agctgggagtataggtatacactac

SEQ ID NO: 286772 - DNA, 25 bp, Homo sapien
gctgggagtataggtatacactacc

SEQ ID NO: 286773 - DNA, 25 bp, Homo sapien
tgggctgccgggagaaacactgctt

SEQ ID NO: 286774 - DNA, 25 bp, Homo sapien
ctgctctgtccacgtcccatactgg

SEQ ID NO: 286775 - DNA, 25 bp, Homo sapien
tcgtgcacgagggtgtcagtgtcct

SEQ ID NO: 286776 - DNA, 25 bp, Homo sapien
ccttgggttcagtgggctgccggga

SEQ ID NO: 286777 - DNA, 25 bp, Homo sapien
tgtttccttgtcgatgtggcactgc

SEQ ID NO: 286778 - DNA, 25 bp, Homo sapien
gacagagaagacaaacggctgctgg

SEQ ID NO: 286779 - DNA, 25 bp, Homo sapien
ctcttttcagggcaggcgtccggtg

SEQ ID NO: 286780 - DNA, 25 bp, Homo sapien
catcccatcggtggattccaggtca

SEQ ID NO: 286781 - DNA, 25 bp, Homo sapien
tattcacacagagtccccgggttga

SEQ ID NO: 286782 - DNA, 25 bp, Homo sapien
gggttattaacatgtgcctgggcca

SEQ ID NO: 286783 - DNA, 25 bp, Homo sapien
ttagacctatgcttcgggacaccag

SEQ ID NO: 286784 - DNA, 25 bp, Homo sapien
cacagcaggtgtatggcaggtccaa

SEQ ID NO: 286785 - DNA, 25 bp, Homo sapien
ttgctgagctgcacccgggtcttga

SEQ ID NO: 286786 - DNA, 25 bp, Homo sapien
cctccaaaggtgatctgctctcgga

SEQ ID NO: 286787 - DNA, 25 bp, Homo sapien
catccacgtgttgtcagtctcatcc

SEQ ID NO: 286788 - DNA, 25 bp, Homo sapien
gactcactaaatcggctgcgccgga

SEQ ID NO: 286789 - DNA, 25 bp, Homo sapien
aatccttcctgctgttcaatgtgct

SEQ ID NO: 286790 - DNA, 25 bp, Homo sapien
atccttcctgctgttcaatgtgcta

SEQ ID NO: 286791 - DNA, 25 bp, Homo sapien
aaatccttcctgctgttcaatgtgc

SEQ ID NO: 286792 - DNA, 25 bp, Homo sapien
tccttcctgctgttcaatgtgctat

SEQ ID NO: 286793 - DNA, 25 bp, Homo sapien
acgcggccgaggtgcgcaggaacaa

SEQ ID NO: 286794 - DNA, 25 bp, Homo sapien
ccgaggtgcgcaggaacaaggagca

SEQ ID NO: 286795 - DNA, 25 bp, Homo sapien
ctgcacgcggccgaggtgcgcagga

SEQ ID NO: 286796 - DNA, 25 bp, Homo sapien
tgcgcgagcggctgcgcgaggagct

SEQ ID NO: 286797 - DNA, 25 bp, Homo sapien
ttagcactgccggatccatgcctgg

SEQ ID NO: 286798 - DNA, 25 bp, Homo sapien
gcactgccggatccatgcctggaaa

SEQ ID NO: 286799 - DNA, 25 bp, Homo sapien
aggatggctgacaggggtcctctca

SEQ ID NO: 286800 - DNA, 25 bp, Homo sapien
ccggatccatgcctggaaacgcagg

SEQ ID NO: 286801 - DNA, 25 bp, Homo sapien
cataagaaaaccggagggcaaatat

SEQ ID NO: 286802 - DNA, 25 bp, Homo sapien
ctattagagtcccataagaaaaccg

SEQ ID NO: 286803 - DNA, 25 bp, Homo sapien
cggagggcaaatatccacccatttt

SEQ ID NO: 286804 - DNA, 25 bp, Homo sapien
tttcgacagtctattagagtcccat

SEQ ID NO: 286805 - DNA, 25 bp, Homo sapien
tgctggaaggcagcacgcgactgcc

SEQ ID NO: 286806 - DNA, 25 bp, Homo sapien
atgctggaaggcagcacgcgactgc

SEQ ID NO: 286807 - DNA, 25 bp, Homo sapien
tggaaggcagcacgcgactgcccag

SEQ ID NO: 286808 - DNA, 25 bp, Homo sapien
ctgggggtctcgccaggactgtcca

SEQ ID NO: 286809 - DNA, 25 bp, Homo sapien
cccaggatcgggatagctgttccac

SEQ ID NO: 286810 - DNA, 25 bp, Homo sapien
tcaggcacagggctttagacacact

SEQ ID NO: 286811 - DNA, 25 bp, Homo sapien
agtacttctacatcccagggctcag

SEQ ID NO: 286812 - DNA, 25 bp, Homo sapien
ttccacgaagggagtgaaaccgatc

SEQ ID NO: 286813 - DNA, 25 bp, Homo sapien
tggaagaacacatacagaaaggtac

SEQ ID NO: 286814 - DNA, 25 bp, Homo sapien
gagtagccaccatctacatggtact

SEQ ID NO: 286815 - DNA, 25 bp, Homo sapien
gaaaggtactcaaatcaaaatgtgc

SEQ ID NO: 286816 - DNA, 25 bp, Homo sapien
tgcccagcctgttcaaacgttttta

SEQ ID NO: 286817 - DNA, 25 bp, Homo sapien
tctctatccaggtaagtgtctgtga

SEQ ID NO: 286818 - DNA, 25 bp, Homo sapien
gagtagcacagactaccctccgtga

SEQ ID NO: 286819 - DNA, 25 bp, Homo sapien
gggaccgctgaaataaatcacgata

SEQ ID NO: 286820 - DNA, 25 bp, Homo sapien
taaaagggcctcatctactcagttg

SEQ ID NO: 286821 - DNA, 25 bp, Homo sapien
ttcaattcctttagccactggggag

SEQ ID NO: 286822 - DNA, 25 bp, Homo sapien
gaattgtcaaggaagtgcccgtcca

SEQ ID NO: 286823 - DNA, 25 bp, Homo sapien
gcagcccacgtcatgttcaaagaag

SEQ ID NO: 286824 - DNA, 25 bp, Homo sapien
tccaactgggtgagtcctagcagcc

SEQ ID NO: 286825 - DNA, 25 bp, Homo sapien
caattacgactagttccaggagcca

SEQ ID NO: 286826 - DNA, 25 bp, Homo sapien
gaagaacagaggagccacggccgtc

SEQ ID NO: 286827 - DNA, 25 bp, Homo sapien
aagaaaatggttcactggatccacc

SEQ ID NO: 286828 - DNA, 25 bp, Homo sapien
cactggatccacccgggagaagcca

SEQ ID NO: 286829 - DNA, 25 bp, Homo sapien
gttcactggatccacccgggagaag

SEQ ID NO: 286830 - DNA, 25 bp, Homo sapien
agaaaatggttcactggatccaccc

SEQ ID NO: 286831 - DNA, 25 bp, Homo sapien
cgggtgctccgtgctgttccgccat

SEQ ID NO: 286832 - DNA, 25 bp, Homo sapien
cagctgcagcctgttcgggtgctcc

SEQ ID NO: 286833 - DNA, 25 bp, Homo sapien
tcgggtgctccgtgctgttccgcca

SEQ ID NO: 286834 - DNA, 25 bp, Homo sapien
ctgcagcctgttcgggtgctccgtg

SEQ ID NO: 286835 - DNA, 25 bp, Homo sapien
agttctctagttcgtacaagatcac

SEQ ID NO: 286836 - DNA, 25 bp, Homo sapien
cgagagctcgcagcgtttgccttgg

SEQ ID NO: 286837 - DNA, 25 bp, Homo sapien
agcgtttgccttggaagttctctag

SEQ ID NO: 286838 - DNA, 25 bp, Homo sapien
gcactcggccgagagctcgcagcgt

SEQ ID NO: 286839 - DNA, 25 bp, Homo sapien
agaacaaactgctccccgcggaagg

SEQ ID NO: 286840 - DNA, 25 bp, Homo sapien
gcatcccagcgaggataatccccct

SEQ ID NO: 286841 - DNA, 25 bp, Homo sapien
tatcacggctgttggaccaggcatc

SEQ ID NO: 286842 - DNA, 25 bp, Homo sapien
tcactatcacggctgttggaccagg

SEQ ID NO: 286843 - DNA, 25 bp, Homo sapien
gtcccgttgatggcacggacactcg

SEQ ID NO: 286844 - DNA, 25 bp, Homo sapien
actatctccatcttgcggccactga

SEQ ID NO: 286845 - DNA, 25 bp, Homo sapien
aggctgggcacgtcatcatccacta

SEQ ID NO: 286846 - DNA, 25 bp, Homo sapien
cggacactcgccacacggtcctgga

SEQ ID NO: 286847 - DNA, 25 bp, Homo sapien
gccccgctcaaacacgtactggcgc

SEQ ID NO: 286848 - DNA, 25 bp, Homo sapien
agtggcggtactcgccccgctcaaa

SEQ ID NO: 286849 - DNA, 25 bp, Homo sapien
acggtagccggggaactcatagcca

SEQ ID NO: 286850 - DNA, 25 bp, Homo sapien
caaacacgtactggcgcccacggta

SEQ ID NO: 286851 - DNA, 25 bp, Homo sapien
atgcggcgcacagactgcagctgcg

SEQ ID NO: 286852 - DNA, 25 bp, Homo sapien
tggtcacggatgcggcgcacagact

SEQ ID NO: 286853 - DNA, 25 bp, Homo sapien
gatgcggcgcacagactgcagctgc

SEQ ID NO: 286854 - DNA, 25 bp, Homo sapien
ttctggtcacggatgcggcgcacag

SEQ ID NO: 286855 - DNA, 25 bp, Homo sapien
ggggaagcggccccgcttgtgccac

SEQ ID NO: 286856 - DNA, 25 bp, Homo sapien
tcggccctcgccccaaccctggagc

SEQ ID NO: 286857 - DNA, 25 bp, Homo sapien
ggaccaaccccaggctttattgagc

SEQ ID NO: 286858 - DNA, 25 bp, Homo sapien
gaaggttgctcctagtaggtattca

SEQ ID NO: 286859 - DNA, 25 bp, Homo sapien
cagctcctgttagtcattggatgaa

SEQ ID NO: 286860 - DNA, 25 bp, Homo sapien
ggggaattgataccccagctcctgt

SEQ ID NO: 286861 - DNA, 25 bp, Homo sapien
cattggatgaaggttgctcctagta

SEQ ID NO: 286862 - DNA, 25 bp, Homo sapien
tgctcccacgaggagaataggtctt

SEQ ID NO: 286863 - DNA, 25 bp, Homo sapien
tgttactgcagcatagcctgacaga

SEQ ID NO: 286864 - DNA, 25 bp, Homo sapien
gaaatcatcttattacaggagccac

SEQ ID NO: 286865 - DNA, 25 bp, Homo sapien
tatttggaaagtgatcccagagggc

SEQ ID NO: 286866 - DNA, 25 bp, Homo sapien
ctgcgagtgccgtgaagctcggcca

SEQ ID NO: 286867 - DNA, 25 bp, Homo sapien
ttccccagaagtgccggtgccaaga

SEQ ID NO: 286868 - DNA, 25 bp, Homo sapien
ggtggcatttataccttccccagaa

SEQ ID NO: 286869 - DNA, 25 bp, Homo sapien
tgccaagatgagtgaccgctgtgct

SEQ ID NO: 286870 - DNA, 25 bp, Homo sapien
tgaaatcacctgttgctgggacctg

SEQ ID NO: 286871 - DNA, 25 bp, Homo sapien
tgctgcctgccagaattgagactct

SEQ ID NO: 286872 - DNA, 25 bp, Homo sapien
tcagcgactggcgaaacaaggatgc

SEQ ID NO: 286873 - DNA, 25 bp, Homo sapien
tgtataaaaccggaagcacttggcc

SEQ ID NO: 286874 - DNA, 25 bp, Homo sapien
ggtggactgtcctgtgcaggaatga

SEQ ID NO: 286875 - DNA, 25 bp, Homo sapien
gtggactgtcctgtgcaggaatgac

SEQ ID NO: 286876 - DNA, 25 bp, Homo sapien
gagggactgtggcttgcccgcctgg

SEQ ID NO: 286877 - DNA, 25 bp, Homo sapien
gggactgtggcttgcccgcctgggt

SEQ ID NO: 286878 - DNA, 25 bp, Homo sapien
gcttgcccgcctgggtctggtgatc

SEQ ID NO: 286879 - DNA, 25 bp, Homo sapien
actgtggcttgcccgcctgggtctg

SEQ ID NO: 286880 - DNA, 25 bp, Homo sapien
cagttcattcccacctcggagtctt

SEQ ID NO: 286881 - DNA, 25 bp, Homo sapien
ctcggagtctttgcgcctgctgttc

SEQ ID NO: 286882 - DNA, 25 bp, Homo sapien
tcattcccacctcggagtctttgcg

SEQ ID NO: 286883 - DNA, 25 bp, Homo sapien
tttgtctggatgctctcatcaaccc

SEQ ID NO: 286884 - DNA, 25 bp, Homo sapien
ggcccattgagctcatgcgagtggc

SEQ ID NO: 286885 - DNA, 25 bp, Homo sapien
cattgagctcatgcgagtggccttg

SEQ ID NO: 286886 - DNA, 25 bp, Homo sapien
gaacctgccttctccacgccagttt

SEQ ID NO: 286887 - DNA, 25 bp, Homo sapien
cctgcactaggacagaacctgcctt

SEQ ID NO: 286888 - DNA, 25 bp, Homo sapien
tgctggtccatgagtcccagcgggg

SEQ ID NO: 286889 - DNA, 25 bp, Homo sapien
tgagggagtccgtccttcggctgct

SEQ ID NO: 286890 - DNA, 25 bp, Homo sapien
agggagctgagggagtccgtccttc

SEQ ID NO: 286891 - DNA, 25 bp, Homo sapien
tccatgagtcccagcgggggtactc

SEQ ID NO: 286892 - DNA, 25 bp, Homo sapien
tagaggatgatcttgtgctcttggc

SEQ ID NO: 286893 - DNA, 25 bp, Homo sapien
ccatgggcgtggaagctgggtacat

SEQ ID NO: 286894 - DNA, 25 bp, Homo sapien
ccatcttcttcccggtgaagttggg

SEQ ID NO: 286895 - DNA, 25 bp, Homo sapien
gctgggtacatcgtcatctatgatt

SEQ ID NO: 286896 - DNA, 25 bp, Homo sapien
gggccccaaagtcgctgctgtcctt

SEQ ID NO: 286897 - DNA, 25 bp, Homo sapien
cccaaagtcgctgctgtccttgtag

SEQ ID NO: 286898 - DNA, 25 bp, Homo sapien
caaagtcgctgctgtccttgtagtc

SEQ ID NO: 286899 - DNA, 25 bp, Homo sapien
gccccaaagtcgctgctgtccttgt

SEQ ID NO: 286900 - DNA, 25 bp, Homo sapien
catgtcgcggatacggcgcacggac

SEQ ID NO: 286901 - DNA, 25 bp, Homo sapien
gttggtgccactgcatgtcgcggat

SEQ ID NO: 286902 - DNA, 25 bp, Homo sapien
ctgcatgtcgcggatacggcgcacg

SEQ ID NO: 286903 - DNA, 25 bp, Homo sapien
gccactgcatgtcgcggatacggcg

SEQ ID NO: 286904 - DNA, 25 bp, Homo sapien
ttcctgggcagcagacctgggtcct

SEQ ID NO: 286905 - DNA, 25 bp, Homo sapien
cactttattcactctctgggaggtc

SEQ ID NO: 286906 - DNA, 25 bp, Homo sapien
tattcactctctgggaggtctggag

SEQ ID NO: 286907 - DNA, 25 bp, Homo sapien
aagtcacactttattcactctctgg

SEQ ID NO: 286908 - DNA, 25 bp, Homo sapien
tggagaatttctttgtaaccaggga

SEQ ID NO: 286909 - DNA, 25 bp, Homo sapien
taagaacgcaaatgtgaagagcaaa

SEQ ID NO: 286910 - DNA, 25 bp, Homo sapien
gaaactgaatctctaccatacacta

SEQ ID NO: 286911 - DNA, 25 bp, Homo sapien
tgaatgattttaggacactggacgt

SEQ ID NO: 286912 - DNA, 25 bp, Homo sapien
tagaaaccaattccattgctgtagc

SEQ ID NO: 286913 - DNA, 25 bp, Homo sapien
tggagtggaaatccatattccaggg

SEQ ID NO: 286914 - DNA, 25 bp, Homo sapien
gattctgaggcaggcatcccatcct

SEQ ID NO: 286915 - DNA, 25 bp, Homo sapien
gcagaagatgggtggagtggaaatc

SEQ ID NO: 286916 - DNA, 25 bp, Homo sapien
gtgcacagggctgtgcagtgaccat

SEQ ID NO: 286917 - DNA, 25 bp, Homo sapien
cacagggctgtgcagtgaccatggg

SEQ ID NO: 286918 - DNA, 25 bp, Homo sapien
tgcacagggctgtgcagtgaccatg

SEQ ID NO: 286919 - DNA, 25 bp, Homo sapien
cagggctgtgcagtgaccatgggca

SEQ ID NO: 286920 - DNA, 25 bp, Homo sapien
gtactggaagcttcaaaaacttcac

SEQ ID NO: 286921 - DNA, 25 bp, Homo sapien
caaaatatatgctaattgactgtct

SEQ ID NO: 286922 - DNA, 25 bp, Homo sapien
gcatccaaaatatatgctaattgac

SEQ ID NO: 286923 - DNA, 25 bp, Homo sapien
tccaaaatatatgctaattgactgt

SEQ ID NO: 286924 - DNA, 25 bp, Homo sapien
aatatatgctaattgactgtctatg

SEQ ID NO: 286925 - DNA, 25 bp, Homo sapien
tgaaatggagcaatatttcccaacc

SEQ ID NO: 286926 - DNA, 25 bp, Homo sapien
gcagagaacgctggccacggtgcct

SEQ ID NO: 286927 - DNA, 25 bp, Homo sapien
gcaatatttcccaacctctcggagt

SEQ ID NO: 286928 - DNA, 25 bp, Homo sapien
gctggccacggtgccttgatttttc

SEQ ID NO: 286929 - DNA, 25 bp, Homo sapien
ccatggagatcatgggagagttgca

SEQ ID NO: 286930 - DNA, 25 bp, Homo sapien
ttctccctccttcttgttgttgatg

SEQ ID NO: 286931 - DNA, 25 bp, Homo sapien
gggccccagacataagcccatgtac

SEQ ID NO: 286932 - DNA, 25 bp, Homo sapien
ccccagacataagcccatgtactgg

SEQ ID NO: 286933 - DNA, 25 bp, Homo sapien
atgtgaattggattttcaaagcaca

SEQ ID NO: 286934 - DNA, 25 bp, Homo sapien
aatgtgaattggattttcaaagcac

SEQ ID NO: 286935 - DNA, 25 bp, Homo sapien
gagttccatgactcatatccacact

SEQ ID NO: 286936 - DNA, 25 bp, Homo sapien
atagccccagagttccatgactcat

SEQ ID NO: 286937 - DNA, 25 bp, Homo sapien
ccagagttccatgactcatatccac

SEQ ID NO: 286938 - DNA, 25 bp, Homo sapien
gccccagagttccatgactcatatc

SEQ ID NO: 286939 - DNA, 25 bp, Homo sapien
caaggcacaataggcataaagttat

SEQ ID NO: 286940 - DNA, 25 bp, Homo sapien
cacgtttttcaagatccaaggcaca

SEQ ID NO: 286941 - DNA, 25 bp, Homo sapien
tttttcaagatccaaggcacaatag

SEQ ID NO: 286942 - DNA, 25 bp, Homo sapien
taccacgtttttcaagatccaaggc

SEQ ID NO: 286943 - DNA, 25 bp, Homo sapien
gattccctgctatgcctgccgtcac

SEQ ID NO: 286944 - DNA, 25 bp, Homo sapien
tgattccctgctatgcctgccgtca

SEQ ID NO: 286945 - DNA, 25 bp, Homo sapien
gggcggccggagtcgccttgctctt

SEQ ID NO: 286946 - DNA, 25 bp, Homo sapien
cgcgggcggccggagtcgccttgct

SEQ ID NO: 286947 - DNA, 25 bp, Homo sapien
ctgggatcgggcaggacggtcctct

SEQ ID NO: 286948 - DNA, 25 bp, Homo sapien
gacggtcctcttgctggcgcgggcg

SEQ ID NO: 286949 - DNA, 25 bp, Homo sapien
accaaaaagattattgagtgggtca

SEQ ID NO: 286950 - DNA, 25 bp, Homo sapien
aagattattgagtgggtcaaaaatc

SEQ ID NO: 286951 - DNA, 25 bp, Homo sapien
gtggcaccaaaaagattattgagtg

SEQ ID NO: 286952 - DNA, 25 bp, Homo sapien
caaaaagattattgagtgggtcaaa

SEQ ID NO: 286953 - DNA, 25 bp, Homo sapien
atacagcctacatcgtgagtaagca

SEQ ID NO: 286954 - DNA, 25 bp, Homo sapien
aatacagcctacatcgtgagtaagc

SEQ ID NO: 286955 - DNA, 25 bp, Homo sapien
tacagcctacatcgtgagtaagcat

SEQ ID NO: 286956 - DNA, 25 bp, Homo sapien
atttcattggtctctgcaagatatt

SEQ ID NO: 286957 - DNA, 25 bp, Homo sapien
ttatttcattggtctctgcaagata

SEQ ID NO: 286958 - DNA, 25 bp, Homo sapien
tatttcattggtctctgcaagatat

SEQ ID NO: 286959 - DNA, 25 bp, Homo sapien
aagaccaatcgctttccacacagtg

SEQ ID NO: 286960 - DNA, 25 bp, Homo sapien
cactgtacttcatgcgtgatcaaag

SEQ ID NO: 286961 - DNA, 25 bp, Homo sapien
tagcttacagtaaccacacaccatg

SEQ ID NO: 286962 - DNA, 25 bp, Homo sapien
taatgagaagccgtgagaactaaca

SEQ ID NO: 286963 - DNA, 25 bp, Homo sapien
agcaccaggagctgatgccgacttg

SEQ ID NO: 286964 - DNA, 25 bp, Homo sapien
cagcaccaggagctgatgccgactt

SEQ ID NO: 286965 - DNA, 25 bp, Homo sapien
ccagcaccaggagctgatgccgact

SEQ ID NO: 286966 - DNA, 25 bp, Homo sapien
gcaccaggagctgatgccgacttgt

SEQ ID NO: 286967 - DNA, 25 bp, Homo sapien
tcttcacactctgtgacccccacta

SEQ ID NO: 286968 - DNA, 25 bp, Homo sapien
cacactctgtgacccccactattgc

SEQ ID NO: 286969 - DNA, 25 bp, Homo sapien
ctgtgacccccactattgcccacat

SEQ ID NO: 286970 - DNA, 25 bp, Homo sapien
tctgtgacccccactattgcccaca

SEQ ID NO: 286971 - DNA, 25 bp, Homo sapien
ggtgagctgggtcccgctgccaaac

SEQ ID NO: 286972 - DNA, 25 bp, Homo sapien
cggtgagctgggtcccgctgccaaa

SEQ ID NO: 286973 - DNA, 25 bp, Homo sapien
caggccccagaggtgatagggctcc

SEQ ID NO: 286974 - DNA, 25 bp, Homo sapien
ctgtgaatggagacaccaggcccca

SEQ ID NO: 286975 - DNA, 25 bp, Homo sapien
acaccaggccccagaggtgataggg

SEQ ID NO: 286976 - DNA, 25 bp, Homo sapien
ccagaggtgatagggctccagggac

SEQ ID NO: 286977 - DNA, 25 bp, Homo sapien
gatgggggtaccatctgccttccag

SEQ ID NO: 286978 - DNA, 25 bp, Homo sapien
gctctgtttggagggcgtggtcatc

SEQ ID NO: 286979 - DNA, 25 bp, Homo sapien
gccttccaggtcaccgtcaagattc

SEQ ID NO: 286980 - DNA, 25 bp, Homo sapien
tggtcatctccacgccctgggtgat

SEQ ID NO: 286981 - DNA, 25 bp, Homo sapien
tgagggtttactgggtacagggaga

SEQ ID NO: 286982 - DNA, 25 bp, Homo sapien
agggctggatggcttgggatgcaga

SEQ ID NO: 286983 - DNA, 25 bp, Homo sapien
gacaaagaggatatttactgagggt

SEQ ID NO: 286984 - DNA, 25 bp, Homo sapien
agagagacgcctcccctgggatcct

SEQ ID NO: 286985 - DNA, 25 bp, Homo sapien
tccaatggcgaagagtttcccaaaa

SEQ ID NO: 286986 - DNA, 25 bp, Homo sapien
ttcccaaaaatgatgcttcctgcaa

SEQ ID NO: 286987 - DNA, 25 bp, Homo sapien
gactgtctgtgccaagcatctgaga

SEQ ID NO: 286988 - DNA, 25 bp, Homo sapien
ccaggatccaatggcgaagagtttc

SEQ ID NO: 286989 - DNA, 25 bp, Homo sapien
gagacactatgttcatctgggagaa

SEQ ID NO: 286990 - DNA, 25 bp, Homo sapien
taaggctctagtttgaaggactggg

SEQ ID NO: 286991 - DNA, 25 bp, Homo sapien
cagacaatgtaggaagaggaatagg

SEQ ID NO: 286992 - DNA, 25 bp, Homo sapien
taagatagttttgggccagacacgg

SEQ ID NO: 286993 - DNA, 25 bp, Homo sapien
ttacaagtgttagttcttgtctgca

SEQ ID NO: 286994 - DNA, 25 bp, Homo sapien
tctctcctgtcttacaagtgttagt

SEQ ID NO: 286995 - DNA, 25 bp, Homo sapien
gcttctctcctgtcttacaagtgtt

SEQ ID NO: 286996 - DNA, 25 bp, Homo sapien
cctgtcttacaagtgttagttcttg

SEQ ID NO: 286997 - DNA, 25 bp, Homo sapien
tccagccccacagcccccccagtgc

SEQ ID NO: 286998 - DNA, 25 bp, Homo sapien
ccccccagtgcctcacaatgcccat

SEQ ID NO: 286999 - DNA, 25 bp, Homo sapien
agcccccccagtgcctcacaatgcc

SEQ ID NO: 287000 - DNA, 25 bp, Homo sapien
catgtccagccccacagccccccca

SEQ ID NO: 287001 - DNA, 25 bp, Homo sapien
ctttggggcacacacgacaggtcag

SEQ ID NO: 287002 - DNA, 25 bp, Homo sapien
ataaatatcagattcataactggat

SEQ ID NO: 287003 - DNA, 25 bp, Homo sapien
tcataaatatcagattcataactgg

SEQ ID NO: 287004 - DNA, 25 bp, Homo sapien
ctcataaatatcagattcataactg

SEQ ID NO: 287005 - DNA, 25 bp, Homo sapien
cataaatatcagattcataactgga

SEQ ID NO: 287006 - DNA, 25 bp, Homo sapien
tgtgccagagggtaaacggcacccg

SEQ ID NO: 287007 - DNA, 25 bp, Homo sapien
tgccagagggtaaacggcacccgtg

SEQ ID NO: 287008 - DNA, 25 bp, Homo sapien
aggtgtgccagagggtaaacggcac

SEQ ID NO: 287009 - DNA, 25 bp, Homo sapien
agaggtgtgccagagggtaaacggc

SEQ ID NO: 287010 - DNA, 25 bp, Homo sapien
tcagataacacctcctccgcaatat

SEQ ID NO: 287011 - DNA, 25 bp, Homo sapien
tcctccgcaatatcaagcgcaatat

SEQ ID NO: 287012 - DNA, 25 bp, Homo sapien
aatatcaagcgcaatatcttccagg

SEQ ID NO: 287013 - DNA, 25 bp, Homo sapien
atttcagataacacctcctccgcaa

SEQ ID NO: 287014 - DNA, 25 bp, Homo sapien
ttatgtcttcatttcattaataagg

SEQ ID NO: 287015 - DNA, 25 bp, Homo sapien
aattctcttccagatgaaggaatgc

SEQ ID NO: 287016 - DNA, 25 bp, Homo sapien
tcattaataagggaagaagccccag

SEQ ID NO: 287017 - DNA, 25 bp, Homo sapien
tctcttccagatgaaggaatgcatc

SEQ ID NO: 287018 - DNA, 25 bp, Homo sapien
taaactcaggcggtcctcaggggga

SEQ ID NO: 287019 - DNA, 25 bp, Homo sapien
tagttcaaagtacgtaccctggata

SEQ ID NO: 287020 - DNA, 25 bp, Homo sapien
agttcaaagtacgtaccctggatag

SEQ ID NO: 287021 - DNA, 25 bp, Homo sapien
ttgattaaatagcatggactgagtt

SEQ ID NO: 287022 - DNA, 25 bp, Homo sapien
actgagttgatgctgggctattccc

SEQ ID NO: 287023 - DNA, 25 bp, Homo sapien
catggactgagttgatgctgggcta

SEQ ID NO: 287024 - DNA, 25 bp, Homo sapien
agctttcctggatgtggtgtaagga

SEQ ID NO: 287025 - DNA, 25 bp, Homo sapien
cagtgaatatttgggtgtgacctcc

SEQ ID NO: 287026 - DNA, 25 bp, Homo sapien
taacagcaacgtaaactgggaacgc

SEQ ID NO: 287027 - DNA, 25 bp, Homo sapien
cacttggaagaacacgctctgggct

SEQ ID NO: 287028 - DNA, 25 bp, Homo sapien
catgttatccaggtgcctcaaggga

SEQ ID NO: 287029 - DNA, 25 bp, Homo sapien
gattcgttcccaagcagttgaagac

SEQ ID NO: 287030 - DNA, 25 bp, Homo sapien
gagtgtcattgaagccagaggcagc

SEQ ID NO: 287031 - DNA, 25 bp, Homo sapien
ttctccctatgctgggtgcagccct

SEQ ID NO: 287032 - DNA, 25 bp, Homo sapien
cattggcctgagtttgttgattcgt

SEQ ID NO: 287033 - DNA, 25 bp, Homo sapien
cagagatttccattgtagccaggca

SEQ ID NO: 287034 - DNA, 25 bp, Homo sapien
aatatgtgcgaatcttgaggtccgg

SEQ ID NO: 287035 - DNA, 25 bp, Homo sapien
ccttgaaatgctggacgccgggatc

SEQ ID NO: 287036 - DNA, 25 bp, Homo sapien
tatgacccaatggagggccacgtct

SEQ ID NO: 287037 - DNA, 25 bp, Homo sapien
tgcttggctcgtggaagggatgtgg

SEQ ID NO: 287038 - DNA, 25 bp, Homo sapien
cttggctcgtggaagggatgtggcc

SEQ ID NO: 287039 - DNA, 25 bp, Homo sapien
tgtgcttggctcgtggaagggatgt

SEQ ID NO: 287040 - DNA, 25 bp, Homo sapien
gcttggctcgtggaagggatgtggc

SEQ ID NO: 287041 - DNA, 25 bp, Homo sapien
cagccggatgtcagagcttgccgga

SEQ ID NO: 287042 - DNA, 25 bp, Homo sapien
atgtcagagcttgccggaaggcgca

SEQ ID NO: 287043 - DNA, 25 bp, Homo sapien
gagccttccgaggtgtcacgttggg

SEQ ID NO: 287044 - DNA, 25 bp, Homo sapien
gggagccttccgaggtgtcacgttg

SEQ ID NO: 287045 - DNA, 25 bp, Homo sapien
aaaccgtgtggagatagaagctgct

SEQ ID NO: 287046 - DNA, 25 bp, Homo sapien
tcacacaggggcaacatgaagaaaa

SEQ ID NO: 287047 - DNA, 25 bp, Homo sapien
ttgtagctgacagcacgactctgag

SEQ ID NO: 287048 - DNA, 25 bp, Homo sapien
cacctcgattcgactgaaaaccgtg

SEQ ID NO: 287049 - DNA, 25 bp, Homo sapien
cttccggttaattaagcgggcagtg

SEQ ID NO: 287050 - DNA, 25 bp, Homo sapien
ctgccctggacccttttgaagctga

SEQ ID NO: 287051 - DNA, 25 bp, Homo sapien
ccggttaattaagcgggcagtgctg

SEQ ID NO: 287052 - DNA, 25 bp, Homo sapien
tgccctggacccttttgaagctgaa

SEQ ID NO: 287053 - DNA, 25 bp, Homo sapien
gttaagggtccctgtgtggctcaga

SEQ ID NO: 287054 - DNA, 25 bp, Homo sapien
caggagaacatgttgcacagggagc

SEQ ID NO: 287055 - DNA, 25 bp, Homo sapien
cctggagaccctcaaataacttgcc

SEQ ID NO: 287056 - DNA, 25 bp, Homo sapien
taaaaccccagactcatggctcagt

SEQ ID NO: 287057 - DNA, 25 bp, Homo sapien
gaccctgcgttcagcagtgtgtcgg

SEQ ID NO: 287058 - DNA, 25 bp, Homo sapien
gttcagcagtgtgtcggtcaaagtc

SEQ ID NO: 287059 - DNA, 25 bp, Homo sapien
tgcgttcagcagtgtgtcggtcaaa

SEQ ID NO: 287060 - DNA, 25 bp, Homo sapien
ctggaccctgcgttcagcagtgtgt

SEQ ID NO: 287061 - DNA, 25 bp, Homo sapien
cttggccttctcagagtttgttttc

SEQ ID NO: 287062 - DNA, 25 bp, Homo sapien
cttcctgtctgtctgttggtgagaa

SEQ ID NO: 287063 - DNA, 25 bp, Homo sapien
tcctgtctgtctgttggtgagaaga

SEQ ID NO: 287064 - DNA, 25 bp, Homo sapien
tgtctgtctgttggtgagaagaggc

SEQ ID NO: 287065 - DNA, 25 bp, Homo sapien
acacactttcaggatgcagctcgcc

SEQ ID NO: 287066 - DNA, 25 bp, Homo sapien
tttcaggatgcagctcgccttcggg

SEQ ID NO: 287067 - DNA, 25 bp, Homo sapien
tgggcctttcgggaaatcacacact

SEQ ID NO: 287068 - DNA, 25 bp, Homo sapien
cctggggtagctggtttggcctctg

SEQ ID NO: 287069 - DNA, 25 bp, Homo sapien
cttgactctcttgatactgaacagc

SEQ ID NO: 287070 - DNA, 25 bp, Homo sapien
actctcttgatactgaacagctttt

SEQ ID NO: 287071 - DNA, 25 bp, Homo sapien
tctcttgatactgaacagctttttg

SEQ ID NO: 287072 - DNA, 25 bp, Homo sapien
tgactctcttgatactgaacagctt

SEQ ID NO: 287073 - DNA, 25 bp, Homo sapien
ctcacacgcacccacttagagttga

SEQ ID NO: 287074 - DNA, 25 bp, Homo sapien
gggagtcttgccgatgcccccggct

SEQ ID NO: 287075 - DNA, 25 bp, Homo sapien
gcacccacttagagttgaaggcaca

SEQ ID NO: 287076 - DNA, 25 bp, Homo sapien
agacgggagtcttgccgatgccccc

SEQ ID NO: 287077 - DNA, 25 bp, Homo sapien
cctcttgcaggcgtggtcggccggg

SEQ ID NO: 287078 - DNA, 25 bp, Homo sapien
ccatcaggtaactgacatcggccac

SEQ ID NO: 287079 - DNA, 25 bp, Homo sapien
tcaggtaactgacatcggccaccac

SEQ ID NO: 287080 - DNA, 25 bp, Homo sapien
tcgggcaggacggtcctcttgcagg

SEQ ID NO: 287081 - DNA, 25 bp, Homo sapien
ggtgacacacttggcaccaaaaaga

SEQ ID NO: 287082 - DNA, 25 bp, Homo sapien
aaaagaatactgagtgggtcgaaat

SEQ ID NO: 287083 - DNA, 25 bp, Homo sapien
aatactgagtgggtcgaaatcctgc

SEQ ID NO: 287084 - DNA, 25 bp, Homo sapien
agaatactgagtgggtcgaaatcct

SEQ ID NO: 287085 - DNA, 25 bp, Homo sapien
ggcattgtctatcaaagagtagcac

SEQ ID NO: 287086 - DNA, 25 bp, Homo sapien
ttggcattgtctatcaaagagtagc

SEQ ID NO: 287087 - DNA, 25 bp, Homo sapien
tggcattgtctatcaaagagtagca

SEQ ID NO: 287088 - DNA, 25 bp, Homo sapien
tcctcagtgtccctcctccgtgtgc

SEQ ID NO: 287089 - DNA, 25 bp, Homo sapien
ggtcctcagtgtccctcctccgtgt

SEQ ID NO: 287090 - DNA, 25 bp, Homo sapien
cctcagtgtccctcctccgtgtgcc

SEQ ID NO: 287091 - DNA, 25 bp, Homo sapien
gtcctcagtgtccctcctccgtgtg

SEQ ID NO: 287092 - DNA, 25 bp, Homo sapien
tcgattctgacgcttgccccagtgg

SEQ ID NO: 287093 - DNA, 25 bp, Homo sapien
gacttccatctcttgtcaaagcagg

SEQ ID NO: 287094 - DNA, 25 bp, Homo sapien
ccccagtggagttttacacaagaca

SEQ ID NO: 287095 - DNA, 25 bp, Homo sapien
gacaataagattcccactcccagaa

SEQ ID NO: 287096 - DNA, 25 bp, Homo sapien
gcagcctagaaggaattgtgtccag

SEQ ID NO: 287097 - DNA, 25 bp, Homo sapien
cagcctagaaggaattgtgtccagt

SEQ ID NO: 287098 - DNA, 25 bp, Homo sapien
agaggaatttctgctgctacattac

SEQ ID NO: 287099 - DNA, 25 bp, Homo sapien
acacaactatacacagacataatct

SEQ ID NO: 287100 - DNA, 25 bp, Homo sapien
cacttttcaaaccaacacaactata

SEQ ID NO: 287101 - DNA, 25 bp, Homo sapien
tttactaagtatgaagactcaaatg

SEQ ID NO: 287102 - DNA, 25 bp, Homo sapien
attcctgaggagttggcggagcctc

SEQ ID NO: 287103 - DNA, 25 bp, Homo sapien
tgagcatccgagaacttctggccca

SEQ ID NO: 287104 - DNA, 25 bp, Homo sapien
aagtaattcctgaggagttggcgga

SEQ ID NO: 287105 - DNA, 25 bp, Homo sapien
gcactcatcaggaatcagtgcagtc

SEQ ID NO: 287106 - DNA, 25 bp, Homo sapien
ggcaaagtcccacagcaggtcatct

SEQ ID NO: 287107 - DNA, 25 bp, Homo sapien
agaaaaagcagcagtagtgtggctc

SEQ ID NO: 287108 - DNA, 25 bp, Homo sapien
ggaaccagccatgtggatttgttta

SEQ ID NO: 287109 - DNA, 25 bp, Homo sapien
aagcagcagtagtgtggctcccagg

SEQ ID NO: 287110 - DNA, 25 bp, Homo sapien
gcagctcccgcctaagcagtcaggg

SEQ ID NO: 287111 - DNA, 25 bp, Homo sapien
tcagggccatagacgtgagctgttt

SEQ ID NO: 287112 - DNA, 25 bp, Homo sapien
catagacgtgagctgttttctcccc

SEQ ID NO: 287113 - DNA, 25 bp, Homo sapien
cctaagcagtcagggccatagacgt

SEQ ID NO: 287114 - DNA, 25 bp, Homo sapien
gccaagatcgcactgctgaactcca

SEQ ID NO: 287115 - DNA, 25 bp, Homo sapien
gagccaagatcgcactgctgaactc

SEQ ID NO: 287116 - DNA, 25 bp, Homo sapien
tccagcctgggtgacagagcaataa

SEQ ID NO: 287117 - DNA, 25 bp, Homo sapien
gcccgggaggttcaaggctgcaatg

SEQ ID NO: 287118 - DNA, 25 bp, Homo sapien
gtgcagaggcgaacatttcagcaat

SEQ ID NO: 287119 - DNA, 25 bp, Homo sapien
tgcagaggcgaacatttcagcaatg

SEQ ID NO: 287120 - DNA, 25 bp, Homo sapien
cagtgcagaggcgaacatttcagca

SEQ ID NO: 287121 - DNA, 25 bp, Homo sapien
agtgcagaggcgaacatttcagcaa

SEQ ID NO: 287122 - DNA, 25 bp, Homo sapien
tcaaacacaaactgctcgcccttgc

SEQ ID NO: 287123 - DNA, 25 bp, Homo sapien
ctcgcccttgcagttggcctgttca

SEQ ID NO: 287124 - DNA, 25 bp, Homo sapien
aaactgctcgcccttgcagttggcc

SEQ ID NO: 287125 - DNA, 25 bp, Homo sapien
aacacaaactgctcgcccttgcagt

SEQ ID NO: 287126 - DNA, 25 bp, Homo sapien
cctcaggctgctgagtctgtcctct

SEQ ID NO: 287127 - DNA, 25 bp, Homo sapien
aggctgctgagtctgtcctctggct

SEQ ID NO: 287128 - DNA, 25 bp, Homo sapien
tgctggtccaccagtcccagtgggc

SEQ ID NO: 287129 - DNA, 25 bp, Homo sapien
tggtccaccagtcccagtgggcgta

SEQ ID NO: 287130 - DNA, 25 bp, Homo sapien
cccatgctcatgccccagagttggg

SEQ ID NO: 287131 - DNA, 25 bp, Homo sapien
atgctcatgccccagagttgggatc

SEQ ID NO: 287132 - DNA, 25 bp, Homo sapien
catgccccagagttgggatcagcat

SEQ ID NO: 287133 - DNA, 25 bp, Homo sapien
gctcatgccccagagttgggatcag

SEQ ID NO: 287134 - DNA, 25 bp, Homo sapien
ccatgggcgtggaagctgggtacat

SEQ ID NO: 287135 - DNA, 25 bp, Homo sapien
catagaggatgatcttgtgctcttg

SEQ ID NO: 287136 - DNA, 25 bp, Homo sapien
ccatcttcttcccggtgaagttggg

SEQ ID NO: 287137 - DNA, 25 bp, Homo sapien
gctgggtacatcgtcatctatgatt

SEQ ID NO: 287138 - DNA, 25 bp, Homo sapien
ctctagaaagaaattcagcggctgt

SEQ ID NO: 287139 - DNA, 25 bp, Homo sapien
gaaagaaattcagcggctgtaagcc

SEQ ID NO: 287140 - DNA, 25 bp, Homo sapien
aaggcagctctagaaagaaattcag

SEQ ID NO: 287141 - DNA, 25 bp, Homo sapien
tttccccaaaggcagctctagaaag

SEQ ID NO: 287142 - DNA, 25 bp, Homo sapien
ggtactgcagcccacggtagccagg

SEQ ID NO: 287143 - DNA, 25 bp, Homo sapien
caggtactgcagcccacggtagcca

SEQ ID NO: 287144 - DNA, 25 bp, Homo sapien
tactgcagcccacggtagccagggt

SEQ ID NO: 287145 - DNA, 25 bp, Homo sapien
actgcagcccacggtagccagggta

SEQ ID NO: 287146 - DNA, 25 bp, Homo sapien
atgtcgtggatgcagcgcacggact

SEQ ID NO: 287147 - DNA, 25 bp, Homo sapien
cgtggatgcagcgcacggactgtac

SEQ ID NO: 287148 - DNA, 25 bp, Homo sapien
tcgtggatgcagcgcacggactgta

SEQ ID NO: 287149 - DNA, 25 bp, Homo sapien
tgcatgtcgtggatgcagcgcacgg

SEQ ID NO: 287150 - DNA, 25 bp, Homo sapien
aagtcacacttcattcactctctgg

SEQ ID NO: 287151 - DNA, 25 bp, Homo sapien
tcacacttcattcactctctgggag

SEQ ID NO: 287152 - DNA, 25 bp, Homo sapien
ttcctgggcagcagacctgggtcct

SEQ ID NO: 287153 - DNA, 25 bp, Homo sapien
caagttgcaagtcacacttcattca

SEQ ID NO: 287154 - DNA, 25 bp, Homo sapien
aattgcaagtcaggtgaagaaacaa

SEQ ID NO: 287155 - DNA, 25 bp, Homo sapien
tcatagcccagatacttgccaattc

SEQ ID NO: 287156 - DNA, 25 bp, Homo sapien
gagctaagaagctgcagaaccgtaa

SEQ ID NO: 287157 - DNA, 25 bp, Homo sapien
gactcagtaagggttctgttgccct

SEQ ID NO: 287158 - DNA, 25 bp, Homo sapien
gaagaatcatgttatagggccaaat

SEQ ID NO: 287159 - DNA, 25 bp, Homo sapien
gggacctcaacactgactacaaagc

SEQ ID NO: 287160 - DNA, 25 bp, Homo sapien
tatggagcacttactggtttctacc

SEQ ID NO: 287161 - DNA, 25 bp, Homo sapien
tctggcaagagtgcagggatacaca

SEQ ID NO: 287162 - DNA, 25 bp, Homo sapien
cccactccctgacaggcctcggtgt

SEQ ID NO: 287163 - DNA, 25 bp, Homo sapien
cctcttgtcccccactccctgacag

SEQ ID NO: 287164 - DNA, 25 bp, Homo sapien
ggttttaagccgtgcatgcatttgg

SEQ ID NO: 287165 - DNA, 25 bp, Homo sapien
tttggtatttgtcccaatgctctct

SEQ ID NO: 287166 - DNA, 25 bp, Homo sapien
cagctcgagtcttttcctcaaggaa

SEQ ID NO: 287167 - DNA, 25 bp, Homo sapien
ttctttggcctctttacccctgcaa

SEQ ID NO: 287168 - DNA, 25 bp, Homo sapien
gcacgtgccgctctcatctgagaca

SEQ ID NO: 287169 - DNA, 25 bp, Homo sapien
gagtttctcagagctaccaggctcc

SEQ ID NO: 287170 - DNA, 25 bp, Homo sapien
caaggatgatgctttgctgacacct

SEQ ID NO: 287171 - DNA, 25 bp, Homo sapien
gccccaaggatgatgctttgctgac

SEQ ID NO: 287172 - DNA, 25 bp, Homo sapien
ccaaggatgatgctttgctgacacc

SEQ ID NO: 287173 - DNA, 25 bp, Homo sapien
ccacccggccatgagccccaaggat

SEQ ID NO: 287174 - DNA, 25 bp, Homo sapien
agtaagactttagaggccaggcacg

SEQ ID NO: 287175 - DNA, 25 bp, Homo sapien
ccaatctgcgatgagataaacacag

SEQ ID NO: 287176 - DNA, 25 bp, Homo sapien
ctcaaagtctggtcggtggtaattg

SEQ ID NO: 287177 - DNA, 25 bp, Homo sapien
gaaaaagttcgccaacacctactca

SEQ ID NO: 287178 - DNA, 25 bp, Homo sapien
gcttctcccgagatcagtgactgca

SEQ ID NO: 287179 - DNA, 25 bp, Homo sapien
gcacccttcgaggactcatgatgat

SEQ ID NO: 287180 - DNA, 25 bp, Homo sapien
tcactgccagtcaggagtgagaggg

SEQ ID NO: 287181 - DNA, 25 bp, Homo sapien
acagaacacagcacccttcgaggac

SEQ ID NO: 287182 - DNA, 25 bp, Homo sapien
taatgcaattgtgaacaagatgtgc

SEQ ID NO: 287183 - DNA, 25 bp, Homo sapien
catggtacgcggtggtggtaatgca

SEQ ID NO: 287184 - DNA, 25 bp, Homo sapien
tcatggtacgcggtggtggtaatgc

SEQ ID NO: 287185 - DNA, 25 bp, Homo sapien
tggtggtaatgcaattgtgaacaag

SEQ ID NO: 287186 - DNA, 25 bp, Homo sapien
tactggaagcttcaaaaacttcaac

SEQ ID NO: 287187 - DNA, 25 bp, Homo sapien
gtactggaagcttcaaaaacttcaa

SEQ ID NO: 287188 - DNA, 25 bp, Homo sapien
tgtggtggttgttgctaacaactca

SEQ ID NO: 287189 - DNA, 25 bp, Homo sapien
cagttcccagacttattgtggtggt

SEQ ID NO: 287190 - DNA, 25 bp, Homo sapien
tgttgctaacaactcacatgtacaa

SEQ ID NO: 287191 - DNA, 25 bp, Homo sapien
gccccatcctactttcccgcagttc

SEQ ID NO: 287192 - DNA, 25 bp, Homo sapien
tgcacagtgcatcctaagagaagcc

SEQ ID NO: 287193 - DNA, 25 bp, Homo sapien
tcagccacctctggatgaaggaagg

SEQ ID NO: 287194 - DNA, 25 bp, Homo sapien
cagccttgtcggtctgatgcccgga

SEQ ID NO: 287195 - DNA, 25 bp, Homo sapien
ttgccaggagattggcatcagccac

SEQ ID NO: 287196 - DNA, 25 bp, Homo sapien
taattttgcatgtgtgaccccttgc

SEQ ID NO: 287197 - DNA, 25 bp, Homo sapien
tagaagccacagttgcatgcagagc

SEQ ID NO: 287198 - DNA, 25 bp, Homo sapien
gacagaaggaatgttccccagggcc

SEQ ID NO: 287199 - DNA, 25 bp, Homo sapien
ggtcaacatttacctccatagcctg

SEQ ID NO: 287200 - DNA, 25 bp, Homo sapien
agagagactggattaataacttgca

SEQ ID NO: 287201 - DNA, 25 bp, Homo sapien
cattatacatatgcagtgaaactgt

SEQ ID NO: 287202 - DNA, 25 bp, Homo sapien
gaatgatctaaatctactatatgtg

SEQ ID NO: 287203 - DNA, 25 bp, Homo sapien
tgtgcacaccagctaagatgaatga

SEQ ID NO: 287204 - DNA, 25 bp, Homo sapien
gagttcttgctctcggcacggtcac

SEQ ID NO: 287205 - DNA, 25 bp, Homo sapien
aagggctccggatgcacatggtcta

SEQ ID NO: 287206 - DNA, 25 bp, Homo sapien
gcaacgcaagtgtccatcaaaacgg

SEQ ID NO: 287207 - DNA, 25 bp, Homo sapien
catggtctaatcacggcagcaaggt

SEQ ID NO: 287208 - DNA, 25 bp, Homo sapien
tttggacactgacgttggaagcata

SEQ ID NO: 287209 - DNA, 25 bp, Homo sapien
aaatcattctcctatgccaggcacg

SEQ ID NO: 287210 - DNA, 25 bp, Homo sapien
gccaggcacgtttaaagtgtaagta

SEQ ID NO: 287211 - DNA, 25 bp, Homo sapien
tgtaagtactggtagttagctaaca

SEQ ID NO: 287212 - DNA, 25 bp, Homo sapien
tatgatgggccttgctatggcagca

SEQ ID NO: 287213 - DNA, 25 bp, Homo sapien
taagcttaagtactgcccctgcagc

SEQ ID NO: 287214 - DNA, 25 bp, Homo sapien
gattggccacgtacaagcctcagag

SEQ ID NO: 287215 - DNA, 25 bp, Homo sapien
taaaagggagtcagtaaggctagcc

SEQ ID NO: 287216 - DNA, 25 bp, Homo sapien
ggagtccaggagtcttacaaagcaa

SEQ ID NO: 287217 - DNA, 25 bp, Homo sapien
caaggatgtgatacaatggaagggc

SEQ ID NO: 287218 - DNA, 25 bp, Homo sapien
tagtacagatactcagccggaattc

SEQ ID NO: 287219 - DNA, 25 bp, Homo sapien
gttttattgaggtggcctgcaacca

SEQ ID NO: 287220 - DNA, 25 bp, Homo sapien
tagtgtaacttttacgtgcactggg

SEQ ID NO: 287221 - DNA, 25 bp, Homo sapien
acagtggtttttagatgtaatggta

SEQ ID NO: 287222 - DNA, 25 bp, Homo sapien
gtgtaacttttacgtgcactgggaa

SEQ ID NO: 287223 - DNA, 25 bp, Homo sapien
agtgtaacttttacgtgcactggga

SEQ ID NO: 287224 - DNA, 25 bp, Homo sapien
aaagattacaatttgcagaaggctc

SEQ ID NO: 287225 - DNA, 25 bp, Homo sapien
acaatttgcagaaggctcagatgat

SEQ ID NO: 287226 - DNA, 25 bp, Homo sapien
attacaatttgcagaaggctcagat

SEQ ID NO: 287227 - DNA, 25 bp, Homo sapien
aagattacaatttgcagaaggctca

SEQ ID NO: 287228 - DNA, 25 bp, Homo sapien
gtatagaggtctcctatggtttcaa

SEQ ID NO: 287229 - DNA, 25 bp, Homo sapien
cactttcccactctaagtatctggg

SEQ ID NO: 287230 - DNA, 25 bp, Homo sapien
ttcagtcccactttcccactctaag

SEQ ID NO: 287231 - DNA, 25 bp, Homo sapien
tccatgacctgccagtgtatagagg

SEQ ID NO: 287232 - DNA, 25 bp, Homo sapien
agggcagccacagagtttcagaaaa

SEQ ID NO: 287233 - DNA, 25 bp, Homo sapien
agtttcagaaaagatcttctggatg

SEQ ID NO: 287234 - DNA, 25 bp, Homo sapien
cagaaaagatcttctggatgtaaac

SEQ ID NO: 287235 - DNA, 25 bp, Homo sapien
ggcagccacagagtttcagaaaaga

SEQ ID NO: 287236 - DNA, 25 bp, Homo sapien
tggttaaagagtgccacaaggtcct

SEQ ID NO: 287237 - DNA, 25 bp, Homo sapien
ttactgcaccaagcctcgaggaaaa

SEQ ID NO: 287238 - DNA, 25 bp, Homo sapien
tatctgtcaaccaaccagagatggg

SEQ ID NO: 287239 - DNA, 25 bp, Homo sapien
tcagataggcccctgcatgtgacca

SEQ ID NO: 287240 - DNA, 25 bp, Homo sapien
tgtcaatacagtcagatagcttggg

SEQ ID NO: 287241 - DNA, 25 bp, Homo sapien
gatgcatcttttgtttgtcaataca

SEQ ID NO: 287242 - DNA, 25 bp, Homo sapien
gcttgggttcggatcccagctccac

SEQ ID NO: 287243 - DNA, 25 bp, Homo sapien
agtaatggccataatacctcgctcg

SEQ ID NO: 287244 - DNA, 25 bp, Homo sapien
aaaaatattatgccccagtctgggt

SEQ ID NO: 287245 - DNA, 25 bp, Homo sapien
taaaaatattatgccccagtctggg

SEQ ID NO: 287246 - DNA, 25 bp, Homo sapien
taaataaaagcaactcagtcactgt

SEQ ID NO: 287247 - DNA, 25 bp, Homo sapien
ataaaagcaactcagtcactgtttt

SEQ ID NO: 287248 - DNA, 25 bp, Homo sapien
ctccagtgaaaagaaatttctaact

SEQ ID NO: 287249 - DNA, 25 bp, Homo sapien
catttatctctccagtgaaaagaaa

SEQ ID NO: 287250 - DNA, 25 bp, Homo sapien
tatctctccagtgaaaagaaatttc

SEQ ID NO: 287251 - DNA, 25 bp, Homo sapien
ctctccagtgaaaagaaatttctaa

SEQ ID NO: 287252 - DNA, 25 bp, Homo sapien
catgtggaacagagttgaactgtcc

SEQ ID NO: 287253 - DNA, 25 bp, Homo sapien
gaactgtcccaaagcctagagccag

SEQ ID NO: 287254 - DNA, 25 bp, Homo sapien
catgggatccagaatcagacatgtg

SEQ ID NO: 287255 - DNA, 25 bp, Homo sapien
gatagaatcttgagccatgtttgca

SEQ ID NO: 287256 - DNA, 25 bp, Homo sapien
cagtatcagaataaccccagggagt

SEQ ID NO: 287257 - DNA, 25 bp, Homo sapien
gcaaagattccttgacctaccgata

SEQ ID NO: 287258 - DNA, 25 bp, Homo sapien
tggaccctggaccatcagtatcaga

SEQ ID NO: 287259 - DNA, 25 bp, Homo sapien
gagaatcaccatacgagactcaggc

SEQ ID NO: 287260 - DNA, 25 bp, Homo sapien
gcttcaggcagatgaccctttattg

SEQ ID NO: 287261 - DNA, 25 bp, Homo sapien
tgtcatatgaagacaacggcaatgg

SEQ ID NO: 287262 - DNA, 25 bp, Homo sapien
tagactactggagctagaagaaaca

SEQ ID NO: 287263 - DNA, 25 bp, Homo sapien
tcatgtgtcccaagcactattgctg

SEQ ID NO: 287264 - DNA, 25 bp, Homo sapien
gacctcgccataagcagaacattcc

SEQ ID NO: 287265 - DNA, 25 bp, Homo sapien
aattaaacttggacattggacctcg

SEQ ID NO: 287266 - DNA, 25 bp, Homo sapien
ggtgaaattaaacttggacattgga

SEQ ID NO: 287267 - DNA, 25 bp, Homo sapien
attggacctcgccataagcagaaca

SEQ ID NO: 287268 - DNA, 25 bp, Homo sapien
gacttgccacgcagcatccagaaca

SEQ ID NO: 287269 - DNA, 25 bp, Homo sapien
tctgacttgccacgcagcatccaga

SEQ ID NO: 287270 - DNA, 25 bp, Homo sapien
gggaaatacatctctgacttgccac

SEQ ID NO: 287271 - DNA, 25 bp, Homo sapien
tacatctctgacttgccacgcagca

SEQ ID NO: 287272 - DNA, 25 bp, Homo sapien
gctcttaaaccactctgaatcctta

SEQ ID NO: 287273 - DNA, 25 bp, Homo sapien
gatgggccatggtttactgctctta

SEQ ID NO: 287274 - DNA, 25 bp, Homo sapien
taagccttcagaaactgcggtctac

SEQ ID NO: 287275 - DNA, 25 bp, Homo sapien
gcaatgatgatgggccatggtttac

SEQ ID NO: 287276 - DNA, 25 bp, Homo sapien
tgttcggtcataggtaaagcctgca

SEQ ID NO: 287277 - DNA, 25 bp, Homo sapien
tatcatgcctgagtccatcagaggg

SEQ ID NO: 287278 - DNA, 25 bp, Homo sapien
gggcatttccatgcatgttcggtca

SEQ ID NO: 287279 - DNA, 25 bp, Homo sapien
taccaccgtgcaaggctgtttgatg

SEQ ID NO: 287280 - DNA, 25 bp, Homo sapien
caaaatatatgctaattgactgtct

SEQ ID NO: 287281 - DNA, 25 bp, Homo sapien
gcatccaaaatatatgctaattgac

SEQ ID NO: 287282 - DNA, 25 bp, Homo sapien
tccaaaatatatgctaattgactgt

SEQ ID NO: 287283 - DNA, 25 bp, Homo sapien
aatatatgctaattgactgtctatg

SEQ ID NO: 287284 - DNA, 25 bp, Homo sapien
tgcttttcccagaagacgtaggctc

SEQ ID NO: 287285 - DNA, 25 bp, Homo sapien
ctgcttttcccagaagacgtaggct

SEQ ID NO: 287286 - DNA, 25 bp, Homo sapien
ggtctgcgtggagcccattgtctgt

SEQ ID NO: 287287 - DNA, 25 bp, Homo sapien
gaggtctgcgtggagcccattgtct

SEQ ID NO: 287288 - DNA, 25 bp, Homo sapien
tgcagaggtctgcgtggagcccatt

SEQ ID NO: 287289 - DNA, 25 bp, Homo sapien
tccatggagatcatgggagagttgc

SEQ ID NO: 287290 - DNA, 25 bp, Homo sapien
ccgggtattcaagcccatctcaggg

SEQ ID NO: 287291 - DNA, 25 bp, Homo sapien
tcttataacttctccacagccgggt

SEQ ID NO: 287292 - DNA, 25 bp, Homo sapien
ggctccataggacctcagctcttat

SEQ ID NO: 287293 - DNA, 25 bp, Homo sapien
tgtgggcataaaaggtgccccatta

SEQ ID NO: 287294 - DNA, 25 bp, Homo sapien
cctcttatcaaactcttgtgctagc

SEQ ID NO: 287295 - DNA, 25 bp, Homo sapien
tagttgtcctcttatcaaactcttg

SEQ ID NO: 287296 - DNA, 25 bp, Homo sapien
ggttagttgtcctcttatcaaactc

SEQ ID NO: 287297 - DNA, 25 bp, Homo sapien
tgtcctcttatcaaactcttgtgct

SEQ ID NO: 287298 - DNA, 25 bp, Homo sapien
tctgactggactagctgagatctca

SEQ ID NO: 287299 - DNA, 25 bp, Homo sapien
tcatgcctatgattggccataccag

SEQ ID NO: 287300 - DNA, 25 bp, Homo sapien
catagcctttattgcgttgaactac

SEQ ID NO: 287301 - DNA, 25 bp, Homo sapien
taccagttggttcagggattatcac

SEQ ID NO: 287302 - DNA, 25 bp, Homo sapien
ccagagttccatgactcatatccac

SEQ ID NO: 287303 - DNA, 25 bp, Homo sapien
gagttccatgactcatatccacact

SEQ ID NO: 287304 - DNA, 25 bp, Homo sapien
atagccccagagttccatgactcat

SEQ ID NO: 287305 - DNA, 25 bp, Homo sapien
gccccagagttccatgactcatatc

SEQ ID NO: 287306 - DNA, 25 bp, Homo sapien
ccagaggtttactctatcagcaggg

SEQ ID NO: 287307 - DNA, 25 bp, Homo sapien
ggtttactctatcagcagggctcag

SEQ ID NO: 287308 - DNA, 25 bp, Homo sapien
ttactctatcagcagggctcagctc

SEQ ID NO: 287309 - DNA, 25 bp, Homo sapien
tatccttcctagaacagattcttac

SEQ ID NO: 287310 - DNA, 25 bp, Homo sapien
tcaagcctttgtactcaaagtggga

SEQ ID NO: 287311 - DNA, 25 bp, Homo sapien
acaccattggcacccctggttttgg

SEQ ID NO: 287312 - DNA, 25 bp, Homo sapien
tcagattgtcgaactacaccacccg

SEQ ID NO: 287313 - DNA, 25 bp, Homo sapien
tctgtcttcttctgccctcgaacat

SEQ ID NO: 287314 - DNA, 25 bp, Homo sapien
agaagatccaccttcaattatgcag

SEQ ID NO: 287315 - DNA, 25 bp, Homo sapien
accttcaattatgcaggtggacacc

SEQ ID NO: 287316 - DNA, 25 bp, Homo sapien
gatccaccttcaattatgcaggtgg

SEQ ID NO: 287317 - DNA, 25 bp, Homo sapien
ccaccttcaattatgcaggtggaca

SEQ ID NO: 287318 - DNA, 25 bp, Homo sapien
ggctcctgacaaaaggatgagttca

SEQ ID NO: 287319 - DNA, 25 bp, Homo sapien
cacaaaggtccttgccagatactgg

SEQ ID NO: 287320 - DNA, 25 bp, Homo sapien
ggtccatggtttcattcaggatacc

SEQ ID NO: 287321 - DNA, 25 bp, Homo sapien
caaaggtagtgcagagtgctccaac

SEQ ID NO: 287322 - DNA, 25 bp, Homo sapien
tacaatgttggctcagtgcccggta

SEQ ID NO: 287323 - DNA, 25 bp, Homo sapien
tgcccggtaaatagtgaatgctcca

SEQ ID NO: 287324 - DNA, 25 bp, Homo sapien
tatttagaaacaagcaaccctggtg

SEQ ID NO: 287325 - DNA, 25 bp, Homo sapien
taatgtgggcacaaacctcatagag

SEQ ID NO: 287326 - DNA, 25 bp, Homo sapien
tctggaacagttccgtacaccacat

SEQ ID NO: 287327 - DNA, 25 bp, Homo sapien
cagactcacttttatcatggtgaca

SEQ ID NO: 287328 - DNA, 25 bp, Homo sapien
atcatggtgacaaaatgtctggaac

SEQ ID NO: 287329 - DNA, 25 bp, Homo sapien
aatcctaggtttcactctaactgag

SEQ ID NO: 287330 - DNA, 25 bp, Homo sapien
aagattgatcccaagtgctgagtcc

SEQ ID NO: 287331 - DNA, 25 bp, Homo sapien
gaaaggcaaaagaggtgtcatcaca

SEQ ID NO: 287332 - DNA, 25 bp, Homo sapien
tgactaaggagacgctagaaggttc

SEQ ID NO: 287333 - DNA, 25 bp, Homo sapien
tttgcatgttgcagcacgcagaaca

SEQ ID NO: 287334 - DNA, 25 bp, Homo sapien
tcatggcctcagaacatgctagaaa

SEQ ID NO: 287335 - DNA, 25 bp, Homo sapien
gatgagtttgtatacccacttctta

SEQ ID NO: 287336 - DNA, 25 bp, Homo sapien
catcatttccctacatggaatgccc

SEQ ID NO: 287337 - DNA, 25 bp, Homo sapien
tttactcattctatggcacccaatg

SEQ ID NO: 287338 - DNA, 25 bp, Homo sapien
gtcaaattgctgtgcttaaagtcac

SEQ ID NO: 287339 - DNA, 25 bp, Homo sapien
gaagaaacttacatgattcccgagt

SEQ ID NO: 287340 - DNA, 25 bp, Homo sapien
gttaagtcactaagccaacacagtt

SEQ ID NO: 287341 - DNA, 25 bp, Homo sapien
taggttttacctaccaatgaagaga

SEQ ID NO: 287342 - DNA, 25 bp, Homo sapien
gagatcttaattgcatcacacagct

SEQ ID NO: 287343 - DNA, 25 bp, Homo sapien
ggaaacaaaggtccagagatcttaa

SEQ ID NO: 287344 - DNA, 25 bp, Homo sapien
gctcagatgtatgcctttggtttct

SEQ ID NO: 287345 - DNA, 25 bp, Homo sapien
ctggtaggtaagtaacagccttcag

SEQ ID NO: 287346 - DNA, 25 bp, Homo sapien
taattcccccaataggttgtgcatg

SEQ ID NO: 287347 - DNA, 25 bp, Homo sapien
ataattcccccaataggttgtgcat

SEQ ID NO: 287348 - DNA, 25 bp, Homo sapien
aataattcccccaataggttgtgca

SEQ ID NO: 287349 - DNA, 25 bp, Homo sapien
caataattcccccaataggttgtgc

SEQ ID NO: 287350 - DNA, 25 bp, Homo sapien
aataaaataggcaaatctcctgtgc

SEQ ID NO: 287351 - DNA, 25 bp, Homo sapien
tgatctttgtggtctccctcctaaa

SEQ ID NO: 287352 - DNA, 25 bp, Homo sapien
taacatcccactccctaagtgtggg

SEQ ID NO: 287353 - DNA, 25 bp, Homo sapien
tttaaccatgagcaaaacaccggac

SEQ ID NO: 287354 - DNA, 25 bp, Homo sapien
gagatgacacatgacccagaggtgg

SEQ ID NO: 287355 - DNA, 25 bp, Homo sapien
tccttcatgacgtgaatccagggct

SEQ ID NO: 287356 - DNA, 25 bp, Homo sapien
ggaaatactccagactctgctgaag

SEQ ID NO: 287357 - DNA, 25 bp, Homo sapien
caggcgcatgctgaaggaaatactc

SEQ ID NO: 287358 - DNA, 25 bp, Homo sapien
gaagcagcagccgttacactctgaa

SEQ ID NO: 287359 - DNA, 25 bp, Homo sapien
gacccttagcggcagattcacagag

SEQ ID NO: 287360 - DNA, 25 bp, Homo sapien
tgacaacttggttatgctgggaacc

SEQ ID NO: 287361 - DNA, 25 bp, Homo sapien
tcacagaggcagtcaccgtggagaa

SEQ ID NO: 287362 - DNA, 25 bp, Homo sapien
tgttcttccccgtgccaagttcaga

SEQ ID NO: 287363 - DNA, 25 bp, Homo sapien
tgtgtttggaccacctttgcaggcc

SEQ ID NO: 287364 - DNA, 25 bp, Homo sapien
tcaacattggaaacccatgtctcct

SEQ ID NO: 287365 - DNA, 25 bp, Homo sapien
cagacccaggacatctagaagggag

SEQ ID NO: 287366 - DNA, 25 bp, Homo sapien
agcagcagcagccatcgctggagca

SEQ ID NO: 287367 - DNA, 25 bp, Homo sapien
cagcagcagcagccatcgctggagc

SEQ ID NO: 287368 - DNA, 25 bp, Homo sapien
gcagcagcagccatcgctggagcat

SEQ ID NO: 287369 - DNA, 25 bp, Homo sapien
taatagacaaaactccagcgttccc

SEQ ID NO: 287370 - DNA, 25 bp, Homo sapien
ggccactgtcccgtttcacctgtaa

SEQ ID NO: 287371 - DNA, 25 bp, Homo sapien
gaatctctggactataaacgctggg

SEQ ID NO: 287372 - DNA, 25 bp, Homo sapien
aagctaactagagaactgactggtc

SEQ ID NO: 287373 - DNA, 25 bp, Homo sapien
ggatcctgttactaaacaccatccc

SEQ ID NO: 287374 - DNA, 25 bp, Homo sapien
gttgtcataactgacctgctggatc

SEQ ID NO: 287375 - DNA, 25 bp, Homo sapien
tgaagttgtcataactgacctgctg

SEQ ID NO: 287376 - DNA, 25 bp, Homo sapien
tgacctgctggatcctgttactaaa

SEQ ID NO: 287377 - DNA, 25 bp, Homo sapien
cttgactctcttgatactgaacagc

SEQ ID NO: 287378 - DNA, 25 bp, Homo sapien
cctttttcttgactctcttgatact

SEQ ID NO: 287379 - DNA, 25 bp, Homo sapien
tctcttgatactgaacagctttttg

SEQ ID NO: 287380 - DNA, 25 bp, Homo sapien
tgactctcttgatactgaacagctt

SEQ ID NO: 287381 - DNA, 25 bp, Homo sapien
gaatgtcttgtcaagggtcacccca

SEQ ID NO: 287382 - DNA, 25 bp, Homo sapien
tgctgggtgatcttagaggcagtct

SEQ ID NO: 287383 - DNA, 25 bp, Homo sapien
tgagcatccacatgatcagacctga

SEQ ID NO: 287384 - DNA, 25 bp, Homo sapien
cagcagcacagtatattaagtttgg

SEQ ID NO: 287385 - DNA, 25 bp, Homo sapien
atcaccactggccagttttaccaca

SEQ ID NO: 287386 - DNA, 25 bp, Homo sapien
taccacatgcttctcaagacccaag

SEQ ID NO: 287387 - DNA, 25 bp, Homo sapien
tgattccctgctatgcctgccatca

SEQ ID NO: 287388 - DNA, 25 bp, Homo sapien
caaggcacaataggcataaagttgt

SEQ ID NO: 287389 - DNA, 25 bp, Homo sapien
gccgcgcgccccactagcgctctgc

SEQ ID NO: 287390 - DNA, 25 bp, Homo sapien
cgccgcgcgccccactagcgctctg

SEQ ID NO: 287391 - DNA, 25 bp, Homo sapien
ccgcgcgccccactagcgctctgcg

SEQ ID NO: 287392 - DNA, 25 bp, Homo sapien
cgcgccgcgcgccccactagcgctc

SEQ ID NO: 287393 - DNA, 25 bp, Homo sapien
tccggacctggacgggacgcgcgcc

SEQ ID NO: 287394 - DNA, 25 bp, Homo sapien
actccggacctggacgggacgcgcg

SEQ ID NO: 287395 - DNA, 25 bp, Homo sapien
ggacctggacgggacgcgcgcccgc

SEQ ID NO: 287396 - DNA, 25 bp, Homo sapien
acctggacgggacgcgcgcccgccg

SEQ ID NO: 287397 - DNA, 25 bp, Homo sapien
ctgggctccggcaggacgatcctct

SEQ ID NO: 287398 - DNA, 25 bp, Homo sapien
atcaggtaactgacatcggccagca

SEQ ID NO: 287399 - DNA, 25 bp, Homo sapien
ccatcaggtaactgacatcggccag

SEQ ID NO: 287400 - DNA, 25 bp, Homo sapien
ctccggcaggacgatcctcttgctg

SEQ ID NO: 287401 - DNA, 25 bp, Homo sapien
ggcattgtctatcaaagagtagcac

SEQ ID NO: 287402 - DNA, 25 bp, Homo sapien
ttggcattgtctatcaaagagtagc

SEQ ID NO: 287403 - DNA, 25 bp, Homo sapien
tggcattgtctatcaaagagtagca

SEQ ID NO: 287404 - DNA, 25 bp, Homo sapien
tgtttggcaaagtccggtgtactgg

SEQ ID NO: 287405 - DNA, 25 bp, Homo sapien
cattgcgtgtaaaagctgggactgc

SEQ ID NO: 287406 - DNA, 25 bp, Homo sapien
tctatgaggctctcgattcgaagca

SEQ ID NO: 287407 - DNA, 25 bp, Homo sapien
tcagctttggcagattctaggtcca

SEQ ID NO: 287408 - DNA, 25 bp, Homo sapien
tgattttgcaataatagagtaaaag

SEQ ID NO: 287409 - DNA, 25 bp, Homo sapien
ttgcaataatagagtaaaagttgcc

SEQ ID NO: 287410 - DNA, 25 bp, Homo sapien
ttccccattgccaatgtccagagaa

SEQ ID NO: 287411 - DNA, 25 bp, Homo sapien
caatgtccagagaataagaagagac

SEQ ID NO: 287412 - DNA, 25 bp, Homo sapien
gatggtcgttttgcttcccacaagg

SEQ ID NO: 287413 - DNA, 25 bp, Homo sapien
gacttggtcccaagtaaccatctga

SEQ ID NO: 287414 - DNA, 25 bp, Homo sapien
tgactcatccgactgtgggtctgtg

SEQ ID NO: 287415 - DNA, 25 bp, Homo sapien
tgctcgctataccaccttctgatgg

SEQ ID NO: 287416 - DNA, 25 bp, Homo sapien
tagctggtgggtttcaatctggatc

SEQ ID NO: 287417 - DNA, 25 bp, Homo sapien
cagaccacatgtcgttttagcctat

SEQ ID NO: 287418 - DNA, 25 bp, Homo sapien
ttcctgaagatccaatgcccagtct

SEQ ID NO: 287419 - DNA, 25 bp, Homo sapien
taaccacatttccatgactcaagtg

SEQ ID NO: 287420 - DNA, 25 bp, Homo sapien
tagtcgggactcttaggttgcaaac

SEQ ID NO: 287421 - DNA, 25 bp, Homo sapien
tacacatgacattgggaaaactgag

SEQ ID NO: 287422 - DNA, 25 bp, Homo sapien
tgtaatcagtgtcacagagcctctt

SEQ ID NO: 287423 - DNA, 25 bp, Homo sapien
cactcaggaagtaaacagatcatcg

SEQ ID NO: 287424 - DNA, 25 bp, Homo sapien
tgtgactagttcaagcaaagacttt

SEQ ID NO: 287425 - DNA, 25 bp, Homo sapien
ggatactgtgctcactaactaggca

SEQ ID NO: 287426 - DNA, 25 bp, Homo sapien
gaatgcagcggtaggtgattatcct

SEQ ID NO: 287427 - DNA, 25 bp, Homo sapien
ctaggcaatgggatcagtcataccc

SEQ ID NO: 287428 - DNA, 25 bp, Homo sapien
tagaatcattatcatcggcaaagaa

SEQ ID NO: 287429 - DNA, 25 bp, Homo sapien
cctaagtattttgtgggtgtgcagc

SEQ ID NO: 287430 - DNA, 25 bp, Homo sapien
tcaattcctggagtctttggcagag

SEQ ID NO: 287431 - DNA, 25 bp, Homo sapien
gaatgagaatccttgtctgttccag

SEQ ID NO: 287432 - DNA, 25 bp, Homo sapien
tgtggagatccaaatgtcacctggt

SEQ ID NO: 287433 - DNA, 25 bp, Homo sapien
ggcttttacattactgcaggtactc

SEQ ID NO: 287434 - DNA, 25 bp, Homo sapien
tccatctcttgtagtgcaggttaac

SEQ ID NO: 287435 - DNA, 25 bp, Homo sapien
gttaactagcaatgaattttcccag

SEQ ID NO: 287436 - DNA, 25 bp, Homo sapien
ctgccatcttaataacactgaacct

SEQ ID NO: 287437 - DNA, 25 bp, Homo sapien
tattgttaggtaggcgaggtgcctc

SEQ ID NO: 287438 - DNA, 25 bp, Homo sapien
ttgttaggtaggcgaggtgcctcac

SEQ ID NO: 287439 - DNA, 25 bp, Homo sapien
gtatattgttaggtaggcgaggtgc

SEQ ID NO: 287440 - DNA, 25 bp, Homo sapien
tatattgttaggtaggcgaggtgcc

SEQ ID NO: 287441 - DNA, 25 bp, Homo sapien
tacagcctacatcgtgagtaaccat

SEQ ID NO: 287442 - DNA, 25 bp, Homo sapien
atacagcctacatcgtgagtaacca

SEQ ID NO: 287443 - DNA, 25 bp, Homo sapien
aatacagcctacatcgtgagtaacc

SEQ ID NO: 287444 - DNA, 25 bp, Homo sapien
ctctctgcaaggtacttctgcatca

SEQ ID NO: 287445 - DNA, 25 bp, Homo sapien
tttctctctgcaaggtacttctgca

SEQ ID NO: 287446 - DNA, 25 bp, Homo sapien
ttctctctgcaaggtacttctgcat

SEQ ID NO: 287447 - DNA, 25 bp, Homo sapien
tctctctgcaaggtacttctgcatc

SEQ ID NO: 287448 - DNA, 25 bp, Homo sapien
gtgaccatgaccttcccaagctcaa

SEQ ID NO: 287449 - DNA, 25 bp, Homo sapien
ttcctgtgaccatgaccttcccaag

SEQ ID NO: 287450 - DNA, 25 bp, Homo sapien
ccatgaccttcccaagctcaaactc

SEQ ID NO: 287451 - DNA, 25 bp, Homo sapien
atgaccttcccaagctcaaactcag

SEQ ID NO: 287452 - DNA, 25 bp, Homo sapien
tcagtgatggaaggcgcaaacggaa

SEQ ID NO: 287453 - DNA, 25 bp, Homo sapien
cagtgatggaaggcgcaaacggaac

SEQ ID NO: 287454 - DNA, 25 bp, Homo sapien
gcaccaggagctgatgcccagactt

SEQ ID NO: 287455 - DNA, 25 bp, Homo sapien
agcaccaggagctgatgcccagact

SEQ ID NO: 287456 - DNA, 25 bp, Homo sapien
cagcaccaggagctgatgcccagac

SEQ ID NO: 287457 - DNA, 25 bp, Homo sapien
accaggagctgatgcccagacttgt

SEQ ID NO: 287458 - DNA, 25 bp, Homo sapien
ttctaccagctgtttaaatggagct

SEQ ID NO: 287459 - DNA, 25 bp, Homo sapien
tctaccagctgtttaaatggagctg

SEQ ID NO: 287460 - DNA, 25 bp, Homo sapien
tttctaccagctgtttaaatggagc

SEQ ID NO: 287461 - DNA, 25 bp, Homo sapien
tcacctgaggtacagcttcattaat

SEQ ID NO: 287462 - DNA, 25 bp, Homo sapien
cacctgaggtacagcttcattaatt

SEQ ID NO: 287463 - DNA, 25 bp, Homo sapien
aacttcacctgaggtacagcttcat

SEQ ID NO: 287464 - DNA, 25 bp, Homo sapien
cttcacctgaggtacagcttcatta

SEQ ID NO: 287465 - DNA, 25 bp, Homo sapien
ctctgaagcctttaagaatgcgact

SEQ ID NO: 287466 - DNA, 25 bp, Homo sapien
tgcgacttttatggcatactcagct

SEQ ID NO: 287467 - DNA, 25 bp, Homo sapien
aacttgatactatattttgcactac

SEQ ID NO: 287468 - DNA, 25 bp, Homo sapien
gcactactaattactttcaatgaat

SEQ ID NO: 287469 - DNA, 25 bp, Homo sapien
tctgcttagggtttcctaagctttc

SEQ ID NO: 287470 - DNA, 25 bp, Homo sapien
ttcctaagctttcaactctgttagc

SEQ ID NO: 287471 - DNA, 25 bp, Homo sapien
ccatagtcttatattgacacccaaa

SEQ ID NO: 287472 - DNA, 25 bp, Homo sapien
taagatgtcagtcagtcaaattgct

SEQ ID NO: 287473 - DNA, 25 bp, Homo sapien
ttgtactgacaggctctggagtatt

SEQ ID NO: 287474 - DNA, 25 bp, Homo sapien
gtactgacaggctctggagtatttt

SEQ ID NO: 287475 - DNA, 25 bp, Homo sapien
cttgtactgacaggctctggagtat

SEQ ID NO: 287476 - DNA, 25 bp, Homo sapien
tgtactgacaggctctggagtattt

SEQ ID NO: 287477 - DNA, 25 bp, Homo sapien
ttcataatcatataaggccacaaat

SEQ ID NO: 287478 - DNA, 25 bp, Homo sapien
gaatggaatctgcaggcgctacata

SEQ ID NO: 287479 - DNA, 25 bp, Homo sapien
gcttcataatcatataaggccacaa

SEQ ID NO: 287480 - DNA, 25 bp, Homo sapien
caggatatgaacttggcaccactga

SEQ ID NO: 287481 - DNA, 25 bp, Homo sapien
tcttcctaagaaaatacctcattaa

SEQ ID NO: 287482 - DNA, 25 bp, Homo sapien
tacctcattaatttccaggattcag

SEQ ID NO: 287483 - DNA, 25 bp, Homo sapien
caggattcagaagtaatctttcagc

SEQ ID NO: 287484 - DNA, 25 bp, Homo sapien
tctctcttcctaagaaaatacctca

SEQ ID NO: 287485 - DNA, 25 bp, Homo sapien
tgttttgttctgtttgcttatttgt

SEQ ID NO: 287486 - DNA, 25 bp, Homo sapien
gagccactgcacccagccatttcac

SEQ ID NO: 287487 - DNA, 25 bp, Homo sapien
gagtttttgctcttgtcgccgaggc

SEQ ID NO: 287488 - DNA, 25 bp, Homo sapien
gtttttgctcttgtcgccgaggctg

SEQ ID NO: 287489 - DNA, 25 bp, Homo sapien
agagggaataagcacctttagtagt

SEQ ID NO: 287490 - DNA, 25 bp, Homo sapien
cttacctcatcccaatcacgaatag

SEQ ID NO: 287491 - DNA, 25 bp, Homo sapien
gaatagagagggaataagcaccttt

SEQ ID NO: 287492 - DNA, 25 bp, Homo sapien
tcatcccaatcacgaatagagaggg

SEQ ID NO: 287493 - DNA, 25 bp, Homo sapien
ttgtggcataaaccatcagcatgtt

SEQ ID NO: 287494 - DNA, 25 bp, Homo sapien
gtttcacagttggacacacagttgt

SEQ ID NO: 287495 - DNA, 25 bp, Homo sapien
aacttgtggcataaaccatcagcat

SEQ ID NO: 287496 - DNA, 25 bp, Homo sapien
tctgaggtttcacagttggacacac

SEQ ID NO: 287497 - DNA, 25 bp, Homo sapien
ctagtcgcaaagattatcaagggat

SEQ ID NO: 287498 - DNA, 25 bp, Homo sapien
tcgcaaagattatcaagggatttcc

SEQ ID NO: 287499 - DNA, 25 bp, Homo sapien
ttatcaagggatttcccaagcatct

SEQ ID NO: 287500 - DNA, 25 bp, Homo sapien
aaagattatcaagggatttcccaag

SEQ ID NO: 287501 - DNA, 25 bp, Homo sapien
tttgccaaaacatccttgtcctagt

SEQ ID NO: 287502 - DNA, 25 bp, Homo sapien
ccacactttgccaaaacatccttgt

SEQ ID NO: 287503 - DNA, 25 bp, Homo sapien
gccaaaacatccttgtcctagttta

SEQ ID NO: 287504 - DNA, 25 bp, Homo sapien
acactttgccaaaacatccttgtcc

SEQ ID NO: 287505 - DNA, 25 bp, Homo sapien
ttgattgctacttttgtggttccat

SEQ ID NO: 287506 - DNA, 25 bp, Homo sapien
tagtgttttgattgctacttttgtg

SEQ ID NO: 287507 - DNA, 25 bp, Homo sapien
tacctggttttagtgttttgattgc

SEQ ID NO: 287508 - DNA, 25 bp, Homo sapien
tttgtggttccattccatattccca

SEQ ID NO: 287509 - DNA, 25 bp, Homo sapien
ttctgtctgtagaattccaaatgag

SEQ ID NO: 287510 - DNA, 25 bp, Homo sapien
tgttaccagttctgtctgtagaatt

SEQ ID NO: 287511 - DNA, 25 bp, Homo sapien
gagcaggcatatcaaccatttgtgg

SEQ ID NO: 287512 - DNA, 25 bp, Homo sapien
ttccttttgacatcaattcagtgac

SEQ ID NO: 287513 - DNA, 25 bp, Homo sapien
tagaaattctatacaggttcttcac

SEQ ID NO: 287514 - DNA, 25 bp, Homo sapien
tgatttataagcagtagcctcactg

SEQ ID NO: 287515 - DNA, 25 bp, Homo sapien
tctttggaccctgaaatcggttgga

SEQ ID NO: 287516 - DNA, 25 bp, Homo sapien
taatatgaatgttaacgtactgcat

SEQ ID NO: 287517 - DNA, 25 bp, Homo sapien
tgcataaaagccgtatcccactgga

SEQ ID NO: 287518 - DNA, 25 bp, Homo sapien
gctgggtcttactccgcatgttatc

SEQ ID NO: 287519 - DNA, 25 bp, Homo sapien
tccccttggattggatagtacagtt

SEQ ID NO: 287520 - DNA, 25 bp, Homo sapien
tagcaatatctcacagtaccaagtc

SEQ ID NO: 287521 - DNA, 25 bp, Homo sapien
gcatgcttacaagagcctacatcgt

SEQ ID NO: 287522 - DNA, 25 bp, Homo sapien
gttggcctaatatcattatgcagtg

SEQ ID NO: 287523 - DNA, 25 bp, Homo sapien
ccctacgccgtatgatgtagcctat

SEQ ID NO: 287524 - DNA, 25 bp, Homo sapien
tctgggatcactgtcatatacgtgg

SEQ ID NO: 287525 - DNA, 25 bp, Homo sapien
tgttaggttgtatcttcctggaaac

SEQ ID NO: 287526 - DNA, 25 bp, Homo sapien
ccacttgcacatgagataaagcaaa

SEQ ID NO: 287527 - DNA, 25 bp, Homo sapien
ccaggcagaaaccacttgcacatga

SEQ ID NO: 287528 - DNA, 25 bp, Homo sapien
aaaatatattactggcccaggcaga

SEQ ID NO: 287529 - DNA, 25 bp, Homo sapien
gaagttccttcatgatgtaggcatc

SEQ ID NO: 287530 - DNA, 25 bp, Homo sapien
tgtaggcatcataaatttgtcgact

SEQ ID NO: 287531 - DNA, 25 bp, Homo sapien
ggcggtcttcctcattatcaagttt

SEQ ID NO: 287532 - DNA, 25 bp, Homo sapien
tttgtcgacttctgcaaaggcggtc

SEQ ID NO: 287533 - DNA, 25 bp, Homo sapien
ggataaatgactttgtacgtgttct

SEQ ID NO: 287534 - DNA, 25 bp, Homo sapien
taaatgactttgtacgtgttctaca

SEQ ID NO: 287535 - DNA, 25 bp, Homo sapien
aatgactttgtacgtgttctacagc

SEQ ID NO: 287536 - DNA, 25 bp, Homo sapien
gactttgtacgtgttctacagcttg

SEQ ID NO: 287537 - DNA, 25 bp, Homo sapien
aataggaagtctgcagaagccacag

SEQ ID NO: 287538 - DNA, 25 bp, Homo sapien
ggaaccaaacatgggctgggaggca

SEQ ID NO: 287539 - DNA, 25 bp, Homo sapien
cagctgcagtccttctgggagcctt

SEQ ID NO: 287540 - DNA, 25 bp, Homo sapien
caagtgatgagaataggaagtctgc

SEQ ID NO: 287541 - DNA, 25 bp, Homo sapien
aatgtcacctcgaaggctttcacaa

SEQ ID NO: 287542 - DNA, 25 bp, Homo sapien
aaaatgtcacctcgaaggctttcac

SEQ ID NO: 287543 - DNA, 25 bp, Homo sapien
gtcacctcgaaggctttcacaaatt

SEQ ID NO: 287544 - DNA, 25 bp, Homo sapien
tgtcacctcgaaggctttcacaaat

SEQ ID NO: 287545 - DNA, 25 bp, Homo sapien
cattttaaggtcagcatttacggca

SEQ ID NO: 287546 - DNA, 25 bp, Homo sapien
tcctgctttgggagacatgtttcca

SEQ ID NO: 287547 - DNA, 25 bp, Homo sapien
cggcataagatgaggtacacgtaca

SEQ ID NO: 287548 - DNA, 25 bp, Homo sapien
caaagcctggcacatcgtacatggt

SEQ ID NO: 287549 - DNA, 25 bp, Homo sapien
gagaagtgcctacatattttgccca

SEQ ID NO: 287550 - DNA, 25 bp, Homo sapien
caatgcctggttactgagtgggaca

SEQ ID NO: 287551 - DNA, 25 bp, Homo sapien
taaagacatggaaacgcctgggatg

SEQ ID NO: 287552 - DNA, 25 bp, Homo sapien
ttcgtgtgcccagtccctatgaggt

SEQ ID NO: 287553 - DNA, 25 bp, Homo sapien
ccactgacaaaatctagtgaacttg

SEQ ID NO: 287554 - DNA, 25 bp, Homo sapien
ttccactgacaaaatctagtgaact

SEQ ID NO: 287555 - DNA, 25 bp, Homo sapien
cactgacaaaatctagtgaacttgt

SEQ ID NO: 287556 - DNA, 25 bp, Homo sapien
ctgacaaaatctagtgaacttgtca

SEQ ID NO: 287557 - DNA, 25 bp, Homo sapien
tccccgaatcctcctcgtccaataa

SEQ ID NO: 287558 - DNA, 25 bp, Homo sapien
atcctcctcgtccaataatcctatg

SEQ ID NO: 287559 - DNA, 25 bp, Homo sapien
tcgtccaataatcctatgcacactg

SEQ ID NO: 287560 - DNA, 25 bp, Homo sapien
cctatgcacactgaactcattcatg

SEQ ID NO: 287561 - DNA, 25 bp, Homo sapien
tgatcctcttcttatctaagcattt

SEQ ID NO: 287562 - DNA, 25 bp, Homo sapien
tcctcttcttatctaagcatttcat

SEQ ID NO: 287563 - DNA, 25 bp, Homo sapien
tttgatcctcttcttatctaagcat

SEQ ID NO: 287564 - DNA, 25 bp, Homo sapien
gatcctcttcttatctaagcatttc

SEQ ID NO: 287565 - DNA, 25 bp, Homo sapien
cactgactccaacagagtatgcagg

SEQ ID NO: 287566 - DNA, 25 bp, Homo sapien
cagttaaaaacttggtcacacacac

SEQ ID NO: 287567 - DNA, 25 bp, Homo sapien
tgcccatacagtgggaggtcaaggc

SEQ ID NO: 287568 - DNA, 25 bp, Homo sapien
ccagtactcacatccacgtttgaaa

SEQ ID NO: 287569 - DNA, 25 bp, Homo sapien
catacatttccgtcatcatttgaat

SEQ ID NO: 287570 - DNA, 25 bp, Homo sapien
agctcttgccacaggtcccagttgt

SEQ ID NO: 287571 - DNA, 25 bp, Homo sapien
tgcgaaaggccttccgagcactgtg

SEQ ID NO: 287572 - DNA, 25 bp, Homo sapien
tgcctgtcttccatagctcttgcca

SEQ ID NO: 287573 - DNA, 25 bp, Homo sapien
tgcagccggagcaatctttgtgaac

SEQ ID NO: 287574 - DNA, 25 bp, Homo sapien
gtcgttgttgaagaaaatcctccac

SEQ ID NO: 287575 - DNA, 25 bp, Homo sapien
actgcaaggctgattatggtctctc

SEQ ID NO: 287576 - DNA, 25 bp, Homo sapien
tttaggctcctcaagatcggccggc

SEQ ID NO: 287577 - DNA, 25 bp, Homo sapien
ttttgcaggaactcgccataaaaaa

SEQ ID NO: 287578 - DNA, 25 bp, Homo sapien
attttgcaggaactcgccataaaaa

SEQ ID NO: 287579 - DNA, 25 bp, Homo sapien
tttgcaggaactcgccataaaaaaa

SEQ ID NO: 287580 - DNA, 25 bp, Homo sapien
gtttatctggggtatggaaggcata

SEQ ID NO: 287581 - DNA, 25 bp, Homo sapien
gaaggcataggtcatacatacaatg

SEQ ID NO: 287582 - DNA, 25 bp, Homo sapien
cagatccaggatgaagcagagttta

SEQ ID NO: 287583 - DNA, 25 bp, Homo sapien
gggtatggaaggcataggtcataca

SEQ ID NO: 287584 - DNA, 25 bp, Homo sapien
tctgtagacaacaaaccgattgtgc

SEQ ID NO: 287585 - DNA, 25 bp, Homo sapien
gagaacacaccgtgttgtgaaaggt

SEQ ID NO: 287586 - DNA, 25 bp, Homo sapien
catgtgttccagacccagaatgatt

SEQ ID NO: 287587 - DNA, 25 bp, Homo sapien
ttcagtggcataaaaccgcatctcc

SEQ ID NO: 287588 - DNA, 25 bp, Homo sapien
aggactgttgcgcagccacaacagc

SEQ ID NO: 287589 - DNA, 25 bp, Homo sapien
ctgttgcgcagccacaacagcatgc

SEQ ID NO: 287590 - DNA, 25 bp, Homo sapien
gttgcgcagccacaacagcatgcct

SEQ ID NO: 287591 - DNA, 25 bp, Homo sapien
gactgttgcgcagccacaacagcat

SEQ ID NO: 287592 - DNA, 25 bp, Homo sapien
ctttttggaaaaatcgcaggcaaga

SEQ ID NO: 287593 - DNA, 25 bp, Homo sapien
cgcaggcaagaccaagatctgatat

SEQ ID NO: 287594 - DNA, 25 bp, Homo sapien
gatctgatattcttgcgtgtccatg

SEQ ID NO: 287595 - DNA, 25 bp, Homo sapien
tattcttgcgtgtccatgttcatcc

SEQ ID NO: 287596 - DNA, 25 bp, Homo sapien
ggaatggaaagatatctacaataga

SEQ ID NO: 287597 - DNA, 25 bp, Homo sapien
tggaatggaaagatatctacaatag

SEQ ID NO: 287598 - DNA, 25 bp, Homo sapien
aatggaaagatatctacaatagata

SEQ ID NO: 287599 - DNA, 25 bp, Homo sapien
ctggaatggaaagatatctacaata

SEQ ID NO: 287600 - DNA, 25 bp, Homo sapien
taaagtttgacagggtaaggtcatc

SEQ ID NO: 287601 - DNA, 25 bp, Homo sapien
tgagggacatccaagccattttccg

SEQ ID NO: 287602 - DNA, 25 bp, Homo sapien
tacttatcaggatcaagtcacagtt

SEQ ID NO: 287603 - DNA, 25 bp, Homo sapien
cgctgtgagagcgttggagatttct

SEQ ID NO: 287604 - DNA, 25 bp, Homo sapien
gtcggcactgctgtcataggccgtc

SEQ ID NO: 287605 - DNA, 25 bp, Homo sapien
gcacctcgggagccatgtacccatg

SEQ ID NO: 287606 - DNA, 25 bp, Homo sapien
tgtcataggccgtccccttctgcag

SEQ ID NO: 287607 - DNA, 25 bp, Homo sapien
cacctcgggagccatgtacccatgg

SEQ ID NO: 287608 - DNA, 25 bp, Homo sapien
tgtgcagaacccgactccagagtca

SEQ ID NO: 287609 - DNA, 25 bp, Homo sapien
gttggtttagtgactgtcagccaca

SEQ ID NO: 287610 - DNA, 25 bp, Homo sapien
agattctccacagctctgagcgctt

SEQ ID NO: 287611 - DNA, 25 bp, Homo sapien
gtcagaaaagctgggttcaagttgt

SEQ ID NO: 287612 - DNA, 25 bp, Homo sapien
cacggtgagtgtcattcggtcaatt

SEQ ID NO: 287613 - DNA, 25 bp, Homo sapien
gagtgtcattcggtcaatttcatgc

SEQ ID NO: 287614 - DNA, 25 bp, Homo sapien
ggtgagtgtcattcggtcaatttca

SEQ ID NO: 287615 - DNA, 25 bp, Homo sapien
tgtcattcggtcaatttcatgcttg

SEQ ID NO: 287616 - DNA, 25 bp, Homo sapien
gcttgctaacgtctcgctgaagcaa

SEQ ID NO: 287617 - DNA, 25 bp, Homo sapien
cagccgcttgctaacgtctcgctga

SEQ ID NO: 287618 - DNA, 25 bp, Homo sapien
taacgtctcgctgaagcaagccctc

SEQ ID NO: 287619 - DNA, 25 bp, Homo sapien
gctaacgtctcgctgaagcaagccc

SEQ ID NO: 287620 - DNA, 25 bp, Homo sapien
cttttgtaagtagacatgctgccag

SEQ ID NO: 287621 - DNA, 25 bp, Homo sapien
caacacctttgaaaaagctgtgctc

SEQ ID NO: 287622 - DNA, 25 bp, Homo sapien
gacatgctgccagtcaacacctttg

SEQ ID NO: 287623 - DNA, 25 bp, Homo sapien
aagctgtgctcttttacttcctgtg

SEQ ID NO: 287624 - DNA, 25 bp, Homo sapien
aagacagcacagtgcgagatatccg

SEQ ID NO: 287625 - DNA, 25 bp, Homo sapien
cagcacagtgcgagatatccgcatg

SEQ ID NO: 287626 - DNA, 25 bp, Homo sapien
cagtgcgagatatccgcatgctcca

SEQ ID NO: 287627 - DNA, 25 bp, Homo sapien
gatatccgcatgctccactgcgcag

SEQ ID NO: 287628 - DNA, 25 bp, Homo sapien
caagcatggtacagttttcagatga

SEQ ID NO: 287629 - DNA, 25 bp, Homo sapien
cagttttcagatgatcgtatggccc

SEQ ID NO: 287630 - DNA, 25 bp, Homo sapien
ctggaagatccaaacaagcatggta

SEQ ID NO: 287631 - DNA, 25 bp, Homo sapien
gtatggccctgtcccaacctaacat

SEQ ID NO: 287632 - DNA, 25 bp, Homo sapien
tcatcaaatgagccaatatcaaagg

SEQ ID NO: 287633 - DNA, 25 bp, Homo sapien
taagagtccgcggcgccacatccat

SEQ ID NO: 287634 - DNA, 25 bp, Homo sapien
ggtaagagtccgcggcgccacatcc

SEQ ID NO: 287635 - DNA, 25 bp, Homo sapien
gtaagagtccgcggcgccacatcca

SEQ ID NO: 287636 - DNA, 25 bp, Homo sapien
ctgccagcgttcagagatgaccaaa

SEQ ID NO: 287637 - DNA, 25 bp, Homo sapien
agagttcttggtcgcaatcaagtag

SEQ ID NO: 287638 - DNA, 25 bp, Homo sapien
gtagagttcttggtcgcaatcaagt

SEQ ID NO: 287639 - DNA, 25 bp, Homo sapien
ccgttacttcttgctgccagcgttc

SEQ ID NO: 287640 - DNA, 25 bp, Homo sapien
tcttcgtggccaagttgcttatttt

SEQ ID NO: 287641 - DNA, 25 bp, Homo sapien
ctgtgtctgcatttactgcttcata

SEQ ID NO: 287642 - DNA, 25 bp, Homo sapien
cttcttcgtggccaagttgcttatt

SEQ ID NO: 287643 - DNA, 25 bp, Homo sapien
cctggcctcgattttatctgtgtct

SEQ ID NO: 287644 - DNA, 25 bp, Homo sapien
atacagtccttccccagagcgtaat

SEQ ID NO: 287645 - DNA, 25 bp, Homo sapien
ccagtttcagcatgtacccgtgcat

SEQ ID NO: 287646 - DNA, 25 bp, Homo sapien
aaatagcgacgctgccactgagtca

SEQ ID NO: 287647 - DNA, 25 bp, Homo sapien
tctccattcaagtctatttggaaag

SEQ ID NO: 287648 - DNA, 25 bp, Homo sapien
ctcacattgcaagacaaattgtttc

SEQ ID NO: 287649 - DNA, 25 bp, Homo sapien
ttcttccacagagagaatctgttcc

SEQ ID NO: 287650 - DNA, 25 bp, Homo sapien
gtctttaatttgagtttcttccaca

SEQ ID NO: 287651 - DNA, 25 bp, Homo sapien
ttgcaagacaaattgtttccctcct

SEQ ID NO: 287652 - DNA, 25 bp, Homo sapien
gcacgacgcaatagccgctgggcct

SEQ ID NO: 287653 - DNA, 25 bp, Homo sapien
tttgttgaggaacttcggggcacga

SEQ ID NO: 287654 - DNA, 25 bp, Homo sapien
ggaacttcggggcacgacgcaatag

SEQ ID NO: 287655 - DNA, 25 bp, Homo sapien
ctttcttccactgcacaaactctgg

SEQ ID NO: 287656 - DNA, 25 bp, Homo sapien
gatggctttgggagctccacagtac

SEQ ID NO: 287657 - DNA, 25 bp, Homo sapien
agggatggctttgggagctccacag

SEQ ID NO: 287658 - DNA, 25 bp, Homo sapien
ggatggctttgggagctccacagta

SEQ ID NO: 287659 - DNA, 25 bp, Homo sapien
agagggatggctttgggagctccac

SEQ ID NO: 287660 - DNA, 25 bp, Homo sapien
ctagaggccgttgctgtttctgtga

SEQ ID NO: 287661 - DNA, 25 bp, Homo sapien
tagaggccgttgctgtttctgtgac

SEQ ID NO: 287662 - DNA, 25 bp, Homo sapien
gatcagatgcctcatcctcgttcac

SEQ ID NO: 287663 - DNA, 25 bp, Homo sapien
gaggagtcccggtagcgaatagatc

SEQ ID NO: 287664 - DNA, 25 bp, Homo sapien
tggtgtgtcctcctcgaggaccctc

SEQ ID NO: 287665 - DNA, 25 bp, Homo sapien
actcctctcgggagcctggaggagt

SEQ ID NO: 287666 - DNA, 25 bp, Homo sapien
caatgatggacggatgaatgccttc

SEQ ID NO: 287667 - DNA, 25 bp, Homo sapien
taattgtcgagacctgagacggact

SEQ ID NO: 287668 - DNA, 25 bp, Homo sapien
gagatctagaacaggcatgaggccc

SEQ ID NO: 287669 - DNA, 25 bp, Homo sapien
tgaaaactgctcttgcccctgaaac

SEQ ID NO: 287670 - DNA, 25 bp, Homo sapien
tctggtcgcagaaacacctccatca

SEQ ID NO: 287671 - DNA, 25 bp, Homo sapien
ctctggccatgcaggcaaccgggtg

SEQ ID NO: 287672 - DNA, 25 bp, Homo sapien
ttggcagaaggcactcaaaccagac

SEQ ID NO: 287673 - DNA, 25 bp, Homo sapien
cagcggtatcctgtgtctggtcgca

SEQ ID NO: 287674 - DNA, 25 bp, Homo sapien
tgagattgttagatactggagcgct

SEQ ID NO: 287675 - DNA, 25 bp, Homo sapien
gacagttttaccaggacttcagtgg

SEQ ID NO: 287676 - DNA, 25 bp, Homo sapien
gaacgtaactgagacaacactgcat

SEQ ID NO: 287677 - DNA, 25 bp, Homo sapien
gaaagacagcccctttgggccagct

SEQ ID NO: 287678 - DNA, 25 bp, Homo sapien
tggtgagaagagatgtcggccacat

SEQ ID NO: 287679 - DNA, 25 bp, Homo sapien
tgagaagagatgtcggccacattac

SEQ ID NO: 287680 - DNA, 25 bp, Homo sapien
atggtggtgagaagagatgtcggcc

SEQ ID NO: 287681 - DNA, 25 bp, Homo sapien
ccatggtggtgagaagagatgtcgg

SEQ ID NO: 287682 - DNA, 25 bp, Homo sapien
tgtgctgcccgacgtgacgaaagac

SEQ ID NO: 287683 - DNA, 25 bp, Homo sapien
agaaatccttttatgagatagccag

SEQ ID NO: 287684 - DNA, 25 bp, Homo sapien
aagcctttgcggtacttgtcaacaa

SEQ ID NO: 287685 - DNA, 25 bp, Homo sapien
ttgtcaacaagcaagaagccttctg

SEQ ID NO: 287686 - DNA, 25 bp, Homo sapien
gaggaggcacgttctctcacagaga

SEQ ID NO: 287687 - DNA, 25 bp, Homo sapien
gggctcctggacaataccgtggctt

SEQ ID NO: 287688 - DNA, 25 bp, Homo sapien
tatgagggcgcttacctttaagacc

SEQ ID NO: 287689 - DNA, 25 bp, Homo sapien
tgacctcagacgtggagcagcatct

SEQ ID NO: 287690 - DNA, 25 bp, Homo sapien
gagatggggagcatctcagcacatt

SEQ ID NO: 287691 - DNA, 25 bp, Homo sapien
gacaggcaccatgccggtaggggtg

SEQ ID NO: 287692 - DNA, 25 bp, Homo sapien
gatttctggtttacagtgacaggca

SEQ ID NO: 287693 - DNA, 25 bp, Homo sapien
tacagtgacaggcaccatgccggta

SEQ ID NO: 287694 - DNA, 25 bp, Homo sapien
tagggcagcccttataagcaagatt

SEQ ID NO: 287695 - DNA, 25 bp, Homo sapien
tataagcaagattttgtcacccagc

SEQ ID NO: 287696 - DNA, 25 bp, Homo sapien
gctgagcatttactgtccagtctcc

SEQ ID NO: 287697 - DNA, 25 bp, Homo sapien
cttgagcacacggtgatttagggca

SEQ ID NO: 287698 - DNA, 25 bp, Homo sapien
ccttctgggccaatgtgatagcagc

SEQ ID NO: 287699 - DNA, 25 bp, Homo sapien
cagcagctgagtcgaccagtcattt

SEQ ID NO: 287700 - DNA, 25 bp, Homo sapien
gccaatgtgatagcagcagctgagt

SEQ ID NO: 287701 - DNA, 25 bp, Homo sapien
gctgagtcgaccagtcatttctaaa

SEQ ID NO: 287702 - DNA, 25 bp, Homo sapien
gcaaagaggacacagatcacaggaa

SEQ ID NO: 287703 - DNA, 25 bp, Homo sapien
gatcacaggaaccacgactgtctaa

SEQ ID NO: 287704 - DNA, 25 bp, Homo sapien
tgtctaagacgtctccccgggtggc

SEQ ID NO: 287705 - DNA, 25 bp, Homo sapien
gaaagcaggagcgaaggagcaccct

SEQ ID NO: 287706 - DNA, 25 bp, Homo sapien
cccagcagcgcattccggaaaatta

SEQ ID NO: 287707 - DNA, 25 bp, Homo sapien
gcaaggtgcccgtctaaaacccagc

SEQ ID NO: 287708 - DNA, 25 bp, Homo sapien
aatagaccaaaagaccggaggcctg

SEQ ID NO: 287709 - DNA, 25 bp, Homo sapien
aaaactcgccgatccgctcgcaagg

SEQ ID NO: 287710 - DNA, 25 bp, Homo sapien
ttgttttcaaagtgagcagcacggg

SEQ ID NO: 287711 - DNA, 25 bp, Homo sapien
tctcaaatccttccaccgaaacact

SEQ ID NO: 287712 - DNA, 25 bp, Homo sapien
cagcacgggcaacaggcaaaggaat

SEQ ID NO: 287713 - DNA, 25 bp, Homo sapien
gcaaaggaatcaggcctcggaagct

SEQ ID NO: 287714 - DNA, 25 bp, Homo sapien
ggggcctgaggagagtgattcttac

SEQ ID NO: 287715 - DNA, 25 bp, Homo sapien
agctggggcctgaggagagtgattc

SEQ ID NO: 287716 - DNA, 25 bp, Homo sapien
ctggggcctgaggagagtgattctt

SEQ ID NO: 287717 - DNA, 25 bp, Homo sapien
ttagcgaacagctggggcctgagga

SEQ ID NO: 287718 - DNA, 25 bp, Homo sapien
gaaaaatataaaccctgacgtctgc

SEQ ID NO: 287719 - DNA, 25 bp, Homo sapien
gacgtctgcgggcaaagattcacag

SEQ ID NO: 287720 - DNA, 25 bp, Homo sapien
taaaccctgacgtctgcgggcaaag

SEQ ID NO: 287721 - DNA, 25 bp, Homo sapien
gcgggcaaagattcacagtggagat

SEQ ID NO: 287722 - DNA, 25 bp, Homo sapien
agccgactgggagccgactgggctc

SEQ ID NO: 287723 - DNA, 25 bp, Homo sapien
agatccccacacttgcgggttgagg

SEQ ID NO: 287724 - DNA, 25 bp, Homo sapien
ccacacttgcgggttgaggccagac

SEQ ID NO: 287725 - DNA, 25 bp, Homo sapien
ggagccgactgggagccgactgggc

SEQ ID NO: 287726 - DNA, 25 bp, Homo sapien
caaggcttaggtcactatttggttc

SEQ ID NO: 287727 - DNA, 25 bp, Homo sapien
ttagaattctgtcttgcccatagtc

SEQ ID NO: 287728 - DNA, 25 bp, Homo sapien
ctggttggtgagtgtaagcatgtaa

SEQ ID NO: 287729 - DNA, 25 bp, Homo sapien
tccactggccacaaggcttaggtca

SEQ ID NO: 287730 - DNA, 25 bp, Homo sapien
cacggtataaaatcgcgagtctccc

SEQ ID NO: 287731 - DNA, 25 bp, Homo sapien
gacatttggaattcacggtataaaa

SEQ ID NO: 287732 - DNA, 25 bp, Homo sapien
tggccatagacatttggaattcacg

SEQ ID NO: 287733 - DNA, 25 bp, Homo sapien
aagcccatgaggtggccatagacat

SEQ ID NO: 287734 - DNA, 25 bp, Homo sapien
ctggccacgtcagcagccgcttccc

SEQ ID NO: 287735 - DNA, 25 bp, Homo sapien
ggctgtccttagccctgaggctgcc

SEQ ID NO: 287736 - DNA, 25 bp, Homo sapien
gcctggccacgtcagcagccgcttc

SEQ ID NO: 287737 - DNA, 25 bp, Homo sapien
gggaatcctggctgtcgtaggggct

SEQ ID NO: 287738 - DNA, 25 bp, Homo sapien
aggtggctgccttggccgccactac

SEQ ID NO: 287739 - DNA, 25 bp, Homo sapien
caggtggctgccttggccgccacta

SEQ ID NO: 287740 - DNA, 25 bp, Homo sapien
tcaggtggctgccttggccgccact

SEQ ID NO: 287741 - DNA, 25 bp, Homo sapien
ctgccagacagcacggaatgaggct

SEQ ID NO: 287742 - DNA, 25 bp, Homo sapien
aatgaggctttacagacacacgcag

SEQ ID NO: 287743 - DNA, 25 bp, Homo sapien
cttcctgccagacagcacggaatga

SEQ ID NO: 287744 - DNA, 25 bp, Homo sapien
cagacagcacggaatgaggctttac

SEQ ID NO: 287745 - DNA, 25 bp, Homo sapien
cagggcgaggcgtgatgagatggcc

SEQ ID NO: 287746 - DNA, 25 bp, Homo sapien
gggcgaggcgtgatgagatggccat

SEQ ID NO: 287747 - DNA, 25 bp, Homo sapien
agggcgaggcgtgatgagatggcca

SEQ ID NO: 287748 - DNA, 25 bp, Homo sapien
cattcaactgacacagtgctgtggc

SEQ ID NO: 287749 - DNA, 25 bp, Homo sapien
ttgtggctccaacccattcaactga

SEQ ID NO: 287750 - DNA, 25 bp, Homo sapien
gctgtggcttcctgacagtccttaa

SEQ ID NO: 287751 - DNA, 25 bp, Homo sapien
cagtccttaaaccaggacttggtca

SEQ ID NO: 287752 - DNA, 25 bp, Homo sapien
gggggcgaggatggtggagggctct

SEQ ID NO: 287753 - DNA, 25 bp, Homo sapien
gagaaaagaggagggggcgaggatg

SEQ ID NO: 287754 - DNA, 25 bp, Homo sapien
ggcgaggatggtggagggctcttgt

SEQ ID NO: 287755 - DNA, 25 bp, Homo sapien
gagggggcgaggatggtggagggct

SEQ ID NO: 287756 - DNA, 25 bp, Homo sapien
ctctcgttctggagaggcgacagct

SEQ ID NO: 287757 - DNA, 25 bp, Homo sapien
ttctggagaggcgacagctaactgc

SEQ ID NO: 287758 - DNA, 25 bp, Homo sapien
tcccccggaccagttgcttaatgaa

SEQ ID NO: 287759 - DNA, 25 bp, Homo sapien
ttcagtcccccggaccagttgctta

SEQ ID NO: 287760 - DNA, 25 bp, Homo sapien
catgtgggactagccgggcaaacca

SEQ ID NO: 287761 - DNA, 25 bp, Homo sapien
gcacatgtgggactagccgggcaaa

SEQ ID NO: 287762 - DNA, 25 bp, Homo sapien
tgtgggactagccgggcaaaccaaa

SEQ ID NO: 287763 - DNA, 25 bp, Homo sapien
cacatgtgggactagccgggcaaac

SEQ ID NO: 287764 - DNA, 25 bp, Homo sapien
tgctgacctgacagctttgtcattc

SEQ ID NO: 287765 - DNA, 25 bp, Homo sapien
cagctttgtcattcactcgtgttcg

SEQ ID NO: 287766 - DNA, 25 bp, Homo sapien
acctgacagctttgtcattcactcg

SEQ ID NO: 287767 - DNA, 25 bp, Homo sapien
ttgtcattcactcgtgttcgttcat

SEQ ID NO: 287768 - DNA, 25 bp, Homo sapien
ttttggttggtgtcgcactggagcc

SEQ ID NO: 287769 - DNA, 25 bp, Homo sapien
gcttccagatctggtgccactgctg

SEQ ID NO: 287770 - DNA, 25 bp, Homo sapien
gactggtcgtcctgagagatctgct

SEQ ID NO: 287771 - DNA, 25 bp, Homo sapien
gctcccaggagagcttgactggtcg

SEQ ID NO: 287772 - DNA, 25 bp, Homo sapien
agatcgtcccccaactcgccctgca

SEQ ID NO: 287773 - DNA, 25 bp, Homo sapien
gtcgtgctccgaagctcacctgctt

SEQ ID NO: 287774 - DNA, 25 bp, Homo sapien
gccttcccagtcgtgctccgaagct

SEQ ID NO: 287775 - DNA, 25 bp, Homo sapien
cccagtcgtgctccgaagctcacct

SEQ ID NO: 287776 - DNA, 25 bp, Homo sapien
gctggcgactccaccattgtgctca

SEQ ID NO: 287777 - DNA, 25 bp, Homo sapien
tctgtctgactccgagcttcacctg

SEQ ID NO: 287778 - DNA, 25 bp, Homo sapien
ctgctcttgagcagggctcctctgc

SEQ ID NO: 287779 - DNA, 25 bp, Homo sapien
agctgctggcgactccaccattgtg

SEQ ID NO: 287780 - DNA, 25 bp, Homo sapien
cgtcttggttctccttccgtatccg

SEQ ID NO: 287781 - DNA, 25 bp, Homo sapien
ttggttctccttccgtatccgaggc

SEQ ID NO: 287782 - DNA, 25 bp, Homo sapien
gctggcccgtcttggttctccttcc

SEQ ID NO: 287783 - DNA, 25 bp, Homo sapien
tcttggttctccttccgtatccgag

SEQ ID NO: 287784 - DNA, 25 bp, Homo sapien
accagcaaatggcaccgctgcccat

SEQ ID NO: 287785 - DNA, 25 bp, Homo sapien
acgtaaattaaaccagcaaatggca

SEQ ID NO: 287786 - DNA, 25 bp, Homo sapien
ctgagaaccaacatcacgtaaatta

SEQ ID NO: 287787 - DNA, 25 bp, Homo sapien
caacatcacgtaaattaaaccagca

SEQ ID NO: 287788 - DNA, 25 bp, Homo sapien
agagtaaatccatccttctgagcca

SEQ ID NO: 287789 - DNA, 25 bp, Homo sapien
caagagtaaatccatccttctgagc

SEQ ID NO: 287790 - DNA, 25 bp, Homo sapien
aagagtaaatccatccttctgagcc

SEQ ID NO: 287791 - DNA, 25 bp, Homo sapien
gtcagcatcaatccaaagtctcacc

SEQ ID NO: 287792 - DNA, 25 bp, Homo sapien
gatggttttgtcagcatcaatccaa

SEQ ID NO: 287793 - DNA, 25 bp, Homo sapien
acctcagtgatggttttgtcagcat

SEQ ID NO: 287794 - DNA, 25 bp, Homo sapien
ggttttgtcagcatcaatccaaagt

SEQ ID NO: 287795 - DNA, 25 bp, Homo sapien
ctgtgaaaccatcacacagagtctc

SEQ ID NO: 287796 - DNA, 25 bp, Homo sapien
gtgaaaccatcacacagagtctcct

SEQ ID NO: 287797 - DNA, 25 bp, Homo sapien
agagtctcctctggccttctggcct

SEQ ID NO: 287798 - DNA, 25 bp, Homo sapien
acagagtctcctctggccttctggc

SEQ ID NO: 287799 - DNA, 25 bp, Homo sapien
tcaggacactggattcgttgacact

SEQ ID NO: 287800 - DNA, 25 bp, Homo sapien
gctgcagaagcgtgttcaggacact

SEQ ID NO: 287801 - DNA, 25 bp, Homo sapien
gctgagctttgtagcgctgcagaag

SEQ ID NO: 287802 - DNA, 25 bp, Homo sapien
tggaggacaatcagatcaggccctg

SEQ ID NO: 287803 - DNA, 25 bp, Homo sapien
tttggggaatcagaggttgatccgg

SEQ ID NO: 287804 - DNA, 25 bp, Homo sapien
ttggggaatcagaggttgatccggc

SEQ ID NO: 287805 - DNA, 25 bp, Homo sapien
tgccatggagccaatgtgggcaggc

SEQ ID NO: 287806 - DNA, 25 bp, Homo sapien
aatgctctggtctctccgctggttc

SEQ ID NO: 287807 - DNA, 25 bp, Homo sapien
cagtatgcccgctgtgccatggagc

SEQ ID NO: 287808 - DNA, 25 bp, Homo sapien
gctggttcagcagcgcccagtatgc

SEQ ID NO: 287809 - DNA, 25 bp, Homo sapien
tgttgggggcagcatggggccacat

SEQ ID NO: 287810 - DNA, 25 bp, Homo sapien
ctgttgggggcagcatggggccaca

SEQ ID NO: 287811 - DNA, 25 bp, Homo sapien
gttgggggcagcatggggccacatg

SEQ ID NO: 287812 - DNA, 25 bp, Homo sapien
tagcgttgaagtccagcgacatcac

SEQ ID NO: 287813 - DNA, 25 bp, Homo sapien
gcgacatcaccatggagaaccgggt

SEQ ID NO: 287814 - DNA, 25 bp, Homo sapien
tgagcagctgtgatgcggcctgtag

SEQ ID NO: 287815 - DNA, 25 bp, Homo sapien
acacagagccgaaggcccggaggac

SEQ ID NO: 287816 - DNA, 25 bp, Homo sapien
ttccccttccggctgccgtgccacg

SEQ ID NO: 287817 - DNA, 25 bp, Homo sapien
ctgagatccaagtccaatccagcca

SEQ ID NO: 287818 - DNA, 25 bp, Homo sapien
ttccggctgccgtgccacgcggctc

SEQ ID NO: 287819 - DNA, 25 bp, Homo sapien
gagatccaagtccaatccagccagc

SEQ ID NO: 287820 - DNA, 25 bp, Homo sapien
gcccatgccaaaggagctgctatct

SEQ ID NO: 287821 - DNA, 25 bp, Homo sapien
gccaaaggagctgctatctgccatc

SEQ ID NO: 287822 - DNA, 25 bp, Homo sapien
ttggaccacacgcccatgccaaagg

SEQ ID NO: 287823 - DNA, 25 bp, Homo sapien
acacgcccatgccaaaggagctgct

SEQ ID NO: 287824 - DNA, 25 bp, Homo sapien
gccagcgccacactggggatctcca

SEQ ID NO: 287825 - DNA, 25 bp, Homo sapien
tggggatctccacacttttaccctg

SEQ ID NO: 287826 - DNA, 25 bp, Homo sapien
cagcgccacactggggatctccaca

SEQ ID NO: 287827 - DNA, 25 bp, Homo sapien
cactggggatctccacacttttacc

SEQ ID NO: 287828 - DNA, 25 bp, Homo sapien
gcaaaggcagctgccgccttctgtt

SEQ ID NO: 287829 - DNA, 25 bp, Homo sapien
aggcagctgccgccttctgtttatc

SEQ ID NO: 287830 - DNA, 25 bp, Homo sapien
ccccgccgcacccaggtggtagatg

SEQ ID NO: 287831 - DNA, 25 bp, Homo sapien
atggctgccaggacccgccaaacag

SEQ ID NO: 287832 - DNA, 25 bp, Homo sapien
caaagctaagtgcagagatcatttc

SEQ ID NO: 287833 - DNA, 25 bp, Homo sapien
ttaggagacaaggaaatcccaaagc

SEQ ID NO: 287834 - DNA, 25 bp, Homo sapien
caaggaaatcccaaagctaagtgca

SEQ ID NO: 287835 - DNA, 25 bp, Homo sapien
aagctaagtgcagagatcatttctg

SEQ ID NO: 287836 - DNA, 25 bp, Homo sapien
ggtagtgaccaaagtctcttcccag

SEQ ID NO: 287837 - DNA, 25 bp, Homo sapien
ctttgcttggacatgggtagtgacc

SEQ ID NO: 287838 - DNA, 25 bp, Homo sapien
ggctggccggtgcacaaaatccaat

SEQ ID NO: 287839 - DNA, 25 bp, Homo sapien
ttctactatcagctccccgaaggct

SEQ ID NO: 287840 - DNA, 25 bp, Homo sapien
ctggatgatctgtcgaaggtggtgc

SEQ ID NO: 287841 - DNA, 25 bp, Homo sapien
tcaaacctcatgaactgcttccgac

SEQ ID NO: 287842 - DNA, 25 bp, Homo sapien
cagctgcgtagtttgcccactcaaa

SEQ ID NO: 287843 - DNA, 25 bp, Homo sapien
ggcccaaacgtcatttgctggatga

SEQ ID NO: 287844 - DNA, 25 bp, Homo sapien
ctccacacagtccactcctgtcatc

SEQ ID NO: 287845 - DNA, 25 bp, Homo sapien
tgagaccacagccgcaaagagttcc

SEQ ID NO: 287846 - DNA, 25 bp, Homo sapien
gaccacagccgcaaagagttcctgg

SEQ ID NO: 287847 - DNA, 25 bp, Homo sapien
agtgagaccacagccgcaaagagtt

SEQ ID NO: 287848 - DNA, 25 bp, Homo sapien
tggtttcaaaaccaagctcacctct

SEQ ID NO: 287849 - DNA, 25 bp, Homo sapien
aaaaccaagctcacctcttacaggc

SEQ ID NO: 287850 - DNA, 25 bp, Homo sapien
tctaggagcacactgatccaagcct

SEQ ID NO: 287851 - DNA, 25 bp, Homo sapien
atggcatggaatctaggagcacact

SEQ ID NO: 287852 - DNA, 25 bp, Homo sapien
cgctcatgggcgtagttgtggcaca

SEQ ID NO: 287853 - DNA, 25 bp, Homo sapien
gtccgctggtagaacagcagctgca

SEQ ID NO: 287854 - DNA, 25 bp, Homo sapien
gtccaccaccatgatggaggccatg

SEQ ID NO: 287855 - DNA, 25 bp, Homo sapien
cttgatatcgctgtagcgtggagac

SEQ ID NO: 287856 - DNA, 25 bp, Homo sapien
ggaggtcaaactgcacaggaacacc

SEQ ID NO: 287857 - DNA, 25 bp, Homo sapien
gaggggtccgggaggtcaaactgca

SEQ ID NO: 287858 - DNA, 25 bp, Homo sapien
ggtcaaactgcacaggaacaccttc

SEQ ID NO: 287859 - DNA, 25 bp, Homo sapien
ggggtccgggaggtcaaactgcaca

SEQ ID NO: 287860 - DNA, 25 bp, Homo sapien
agggattttgatccacaacagccac

SEQ ID NO: 287861 - DNA, 25 bp, Homo sapien
agagggattttgatccacaacagcc

SEQ ID NO: 287862 - DNA, 25 bp, Homo sapien
gagagggattttgatccacaacagc

SEQ ID NO: 287863 - DNA, 25 bp, Homo sapien
gagggattttgatccacaacagcca

SEQ ID NO: 287864 - DNA, 25 bp, Homo sapien
agcacacagacgctcgagcaccaca

SEQ ID NO: 287865 - DNA, 25 bp, Homo sapien
tcactggagccctctacatggactt

SEQ ID NO: 287866 - DNA, 25 bp, Homo sapien
ctctacatggacttcctcatctaag

SEQ ID NO: 287867 - DNA, 25 bp, Homo sapien
ttcttctcgaaagcagcacacagac

SEQ ID NO: 287868 - DNA, 25 bp, Homo sapien
tccatgagagttgatcccagtccct

SEQ ID NO: 287869 - DNA, 25 bp, Homo sapien
ctccatgagagttgatcccagtccc

SEQ ID NO: 287870 - DNA, 25 bp, Homo sapien
ggctccatgagagttgatcccagtc

SEQ ID NO: 287871 - DNA, 25 bp, Homo sapien
gctccatgagagttgatcccagtcc

SEQ ID NO: 287872 - DNA, 25 bp, Homo sapien
aggtcgtaccgcacagggtcccatc

SEQ ID NO: 287873 - DNA, 25 bp, Homo sapien
gcttggctctgtggagccagcccgt

SEQ ID NO: 287874 - DNA, 25 bp, Homo sapien
ctttttgactggtgcaggacctggg

SEQ ID NO: 287875 - DNA, 25 bp, Homo sapien
catccagggccgagaggttgggctt

SEQ ID NO: 287876 - DNA, 25 bp, Homo sapien
cttgatctgggagcacggggctttc

SEQ ID NO: 287877 - DNA, 25 bp, Homo sapien
gggcctggaatagactccgcagctc

SEQ ID NO: 287878 - DNA, 25 bp, Homo sapien
ctcaccgcggcaaggctgctggcaa

SEQ ID NO: 287879 - DNA, 25 bp, Homo sapien
ttggcccgggcctggaatagactcc

SEQ ID NO: 287880 - DNA, 25 bp, Homo sapien
acactcgcccctctggccttgctgg

SEQ ID NO: 287881 - DNA, 25 bp, Homo sapien
gacaccatgagacagggtgcccact

SEQ ID NO: 287882 - DNA, 25 bp, Homo sapien
gaaggccaggacaccatgagacagg

SEQ ID NO: 287883 - DNA, 25 bp, Homo sapien
ctctgtggagcgtggggtgacactc

SEQ ID NO: 287884 - DNA, 25 bp, Homo sapien
cagtggataaagtgcagccgggacc

SEQ ID NO: 287885 - DNA, 25 bp, Homo sapien
tggataaagtgcagccgggaccttt

SEQ ID NO: 287886 - DNA, 25 bp, Homo sapien
ccttttgatcatgctggtcagcgca

SEQ ID NO: 287887 - DNA, 25 bp, Homo sapien
cagccgggaccttttgatcatgctg

SEQ ID NO: 287888 - DNA, 25 bp, Homo sapien
tgctttccaccacagggtttggtac

SEQ ID NO: 287889 - DNA, 25 bp, Homo sapien
ggcttgtctctaccaggctgcggtg

SEQ ID NO: 287890 - DNA, 25 bp, Homo sapien
tggtggagattcctgcccactcctg

SEQ ID NO: 287891 - DNA, 25 bp, Homo sapien
ctgggatatccagggccagaggtcc

SEQ ID NO: 287892 - DNA, 25 bp, Homo sapien
ctgtcctatgcagacgcagagcctc

SEQ ID NO: 287893 - DNA, 25 bp, Homo sapien
aggagtggagcgtccagcacctgga

SEQ ID NO: 287894 - DNA, 25 bp, Homo sapien
gaggtcgacatgagcttcttcagga

SEQ ID NO: 287895 - DNA, 25 bp, Homo sapien
aattgccggcggaagcgagtgagcc

SEQ ID NO: 287896 - DNA, 25 bp, Homo sapien
tcctttcatctattccctcggaggt

SEQ ID NO: 287897 - DNA, 25 bp, Homo sapien
ccttcttttccagatccagggtctc

SEQ ID NO: 287898 - DNA, 25 bp, Homo sapien
ccgccttcttttccagatccagggt

SEQ ID NO: 287899 - DNA, 25 bp, Homo sapien
gccaccgccttcttttccagatcca

SEQ ID NO: 287900 - DNA, 25 bp, Homo sapien
gtgccccacagccaccgccttcttt

SEQ ID NO: 287901 - DNA, 25 bp, Homo sapien
ccctgatgtgatgggcgaatgttgt

SEQ ID NO: 287902 - DNA, 25 bp, Homo sapien
gaatgttgtaagaaagcagctctac

SEQ ID NO: 287903 - DNA, 25 bp, Homo sapien
tctctgggtccctgatgtgatgggc

SEQ ID NO: 287904 - DNA, 25 bp, Homo sapien
ggtccctgatgtgatgggcgaatgt

SEQ ID NO: 287905 - DNA, 25 bp, Homo sapien
tctccaggaccttgtaagataggca

SEQ ID NO: 287906 - DNA, 25 bp, Homo sapien
tcttgaggaccagaatgctaattcc

SEQ ID NO: 287907 - DNA, 25 bp, Homo sapien
tagctctaccttcagtttgggaaaa

SEQ ID NO: 287908 - DNA, 25 bp, Homo sapien
tgggaaaaaggagacgtacagagat

SEQ ID NO: 287909 - DNA, 25 bp, Homo sapien
tgagataccagcttctctcgctgct

SEQ ID NO: 287910 - DNA, 25 bp, Homo sapien
tgcaagccgcctggaagagaacgat

SEQ ID NO: 287911 - DNA, 25 bp, Homo sapien
ttctcaagcctggagatcacacctg

SEQ ID NO: 287912 - DNA, 25 bp, Homo sapien
tcctggcgagacagaaagcccttgc

SEQ ID NO: 287913 - DNA, 25 bp, Homo sapien
ttgactgcgaggaacacagccacat

SEQ ID NO: 287914 - DNA, 25 bp, Homo sapien
ccaatggtggcactaagtagaggct

SEQ ID NO: 287915 - DNA, 25 bp, Homo sapien
ccagtccttgactgcgaggaacaca

SEQ ID NO: 287916 - DNA, 25 bp, Homo sapien
agctgctcagttccaatggtggcac

SEQ ID NO: 287917 - DNA, 25 bp, Homo sapien
cattccgcaacttctctgatttttc

SEQ ID NO: 287918 - DNA, 25 bp, Homo sapien
tccgtcttagcgttgtaagctcctc

SEQ ID NO: 287919 - DNA, 25 bp, Homo sapien
ttctagcttccgtcttagcgttgta

SEQ ID NO: 287920 - DNA, 25 bp, Homo sapien
gtgttctgccggagttcattccgca

SEQ ID NO: 287921 - DNA, 25 bp, Homo sapien
agcgctcatcggcaaggtcagaggt

SEQ ID NO: 287922 - DNA, 25 bp, Homo sapien
gccacatcacctttgaagcgctcat

SEQ ID NO: 287923 - DNA, 25 bp, Homo sapien
ctggcaggccacatcacctttgaag

SEQ ID NO: 287924 - DNA, 25 bp, Homo sapien
tcccggaaggcctgtagccgctctg

SEQ ID NO: 287925 - DNA, 25 bp, Homo sapien
gctgggcttcttccaactgtttatt

SEQ ID NO: 287926 - DNA, 25 bp, Homo sapien
ttttctggacttgttcatgcttgct

SEQ ID NO: 287927 - DNA, 25 bp, Homo sapien
gattcctttccaagtcattcaactg

SEQ ID NO: 287928 - DNA, 25 bp, Homo sapien
tccagtgggattcctttccaagtca

SEQ ID NO: 287929 - DNA, 25 bp, Homo sapien
tctcctcgcattgctgcagacgctt

SEQ ID NO: 287930 - DNA, 25 bp, Homo sapien
cagtcgaagcgcatctgccactcgt

SEQ ID NO: 287931 - DNA, 25 bp, Homo sapien
gctttctgaggaactcgttctccat

SEQ ID NO: 287932 - DNA, 25 bp, Homo sapien
tctgagcacagtcgaagcgcatctg

SEQ ID NO: 287933 - DNA, 25 bp, Homo sapien
caatctgcgtcagcaaagactttct

SEQ ID NO: 287934 - DNA, 25 bp, Homo sapien
ccgatatcgaatgggagagactatg

SEQ ID NO: 287935 - DNA, 25 bp, Homo sapien
taaaatcccatgtgatctcacccag

SEQ ID NO: 287936 - DNA, 25 bp, Homo sapien
cagcatagaggatatcaagagtcac

SEQ ID NO: 287937 - DNA, 25 bp, Homo sapien
tgttggttctctagcaggacgcagg

SEQ ID NO: 287938 - DNA, 25 bp, Homo sapien
gacgcaggtatcctcaaggtcacag

SEQ ID NO: 287939 - DNA, 25 bp, Homo sapien
tcttggccccgtcataagcactttg

SEQ ID NO: 287940 - DNA, 25 bp, Homo sapien
tcacaggtaagatggtggcacttcc

SEQ ID NO: 287941 - DNA, 25 bp, Homo sapien
tgccaagcctcagtaaggtgtgact

SEQ ID NO: 287942 - DNA, 25 bp, Homo sapien
gaggaaaccgatagagaaggctttg

SEQ ID NO: 287943 - DNA, 25 bp, Homo sapien
gatgaccactgggtgagaagcccct

SEQ ID NO: 287944 - DNA, 25 bp, Homo sapien
gaagcccctcctggatgttatgtca

SEQ ID NO: 287945 - DNA, 25 bp, Homo sapien
tcacggagacccttctcaaacactg

SEQ ID NO: 287946 - DNA, 25 bp, Homo sapien
aaacactgactcacctagggcctgg

SEQ ID NO: 287947 - DNA, 25 bp, Homo sapien
tagctcccaccggacactggtgttc

SEQ ID NO: 287948 - DNA, 25 bp, Homo sapien
tgggtcactttctcacggagaccct

SEQ ID NO: 287949 - DNA, 25 bp, Homo sapien
agctcccgtttatggtcctgtagca

SEQ ID NO: 287950 - DNA, 25 bp, Homo sapien
ggattttctgttgctcaagggcgct

SEQ ID NO: 287951 - DNA, 25 bp, Homo sapien
ttcaagccagcaacgcaattttccc

SEQ ID NO: 287952 - DNA, 25 bp, Homo sapien
tgctcaagggcgctggattccaact

SEQ ID NO: 287953 - DNA, 25 bp, Homo sapien
ttcactgattcatagctgtggttgg

SEQ ID NO: 287954 - DNA, 25 bp, Homo sapien
cactgattcatagctgtggttggca

SEQ ID NO: 287955 - DNA, 25 bp, Homo sapien
gattcatagctgtggttggcaggaa

SEQ ID NO: 287956 - DNA, 25 bp, Homo sapien
tgattcatagctgtggttggcagga

SEQ ID NO: 287957 - DNA, 25 bp, Homo sapien
gcaggactgacggacatcctccagt

SEQ ID NO: 287958 - DNA, 25 bp, Homo sapien
ggtgcatctgcttcatccgctcgat

SEQ ID NO: 287959 - DNA, 25 bp, Homo sapien
ggtcctcacggtccttctggtgcat

SEQ ID NO: 287960 - DNA, 25 bp, Homo sapien
gatctccagctcaaaccgctggcgg

SEQ ID NO: 287961 - DNA, 25 bp, Homo sapien
gtcacagagggttccgatcaagcct

SEQ ID NO: 287962 - DNA, 25 bp, Homo sapien
gatcaagccttccaaatcttgcttc

SEQ ID NO: 287963 - DNA, 25 bp, Homo sapien
tctcttcatactcttgctccagctg

SEQ ID NO: 287964 - DNA, 25 bp, Homo sapien
ccgatcaagccttccaaatcttgct

SEQ ID NO: 287965 - DNA, 25 bp, Homo sapien
tctgacaacagtgcatgtgtcctcc

SEQ ID NO: 287966 - DNA, 25 bp, Homo sapien
tccgaagtcgcttctccacatcaaa

SEQ ID NO: 287967 - DNA, 25 bp, Homo sapien
tccttgctgactgatgtcttgccat

SEQ ID NO: 287968 - DNA, 25 bp, Homo sapien
tgtgtcctcctgaggtctctccgaa

SEQ ID NO: 287969 - DNA, 25 bp, Homo sapien
tatcactctgcttgttatagcctgc

SEQ ID NO: 287970 - DNA, 25 bp, Homo sapien
tatagcctgcttctaggactaggag

SEQ ID NO: 287971 - DNA, 25 bp, Homo sapien
caaattcatcccagagtggagatca

SEQ ID NO: 287972 - DNA, 25 bp, Homo sapien
ttataagcctatacctccaggcacg

SEQ ID NO: 287973 - DNA, 25 bp, Homo sapien
caggctcttgttccgcgtcatgttc

SEQ ID NO: 287974 - DNA, 25 bp, Homo sapien
cctcctcacacttggcttcactctg

SEQ ID NO: 287975 - DNA, 25 bp, Homo sapien
accttctgcgtcttcaaggcctcct

SEQ ID NO: 287976 - DNA, 25 bp, Homo sapien
atgttctccagctcgctgtgcatgc

SEQ ID NO: 287977 - DNA, 25 bp, Homo sapien
gtgctgagcgcacactaggcccaca

SEQ ID NO: 287978 - DNA, 25 bp, Homo sapien
aatgtcctcatacttcctatagtgc

SEQ ID NO: 287979 - DNA, 25 bp, Homo sapien
gtcctcatacttcctatagtgctga

SEQ ID NO: 287980 - DNA, 25 bp, Homo sapien
cctatagtgctgagcgcacactagg

SEQ ID NO: 287981 - DNA, 25 bp, Homo sapien
tcaaatcttctcctggtaataagcc

SEQ ID NO: 287982 - DNA, 25 bp, Homo sapien
taagcgggccaagagatgcccttgt

SEQ ID NO: 287983 - DNA, 25 bp, Homo sapien
gacaatatatgtccatgtgtcccca

SEQ ID NO: 287984 - DNA, 25 bp, Homo sapien
gtgagcacagggtagttccataata

SEQ ID NO: 287985 - DNA, 25 bp, Homo sapien
tcatcctggtcctcatcgatgcgct

SEQ ID NO: 287986 - DNA, 25 bp, Homo sapien
ggaggtccgccttctcaaactgcag

SEQ ID NO: 287987 - DNA, 25 bp, Homo sapien
catcgatgcgcttcaggaggtccgc

SEQ ID NO: 287988 - DNA, 25 bp, Homo sapien
tctcaaactgcagcctgtacagctg

SEQ ID NO: 287989 - DNA, 25 bp, Homo sapien
cccaagtccctgagcttcttccacc

SEQ ID NO: 287990 - DNA, 25 bp, Homo sapien
ttcttccaccaaggtctcattcact

SEQ ID NO: 287991 - DNA, 25 bp, Homo sapien
gcttcttccaccaaggtctcattca

SEQ ID NO: 287992 - DNA, 25 bp, Homo sapien
tgagcttcttccaccaaggtctcat

SEQ ID NO: 287993 - DNA, 25 bp, Homo sapien
cttggatctgcccaatgtcagcagc

SEQ ID NO: 287994 - DNA, 25 bp, Homo sapien
gcagttcttggatctgcccaatgtc

SEQ ID NO: 287995 - DNA, 25 bp, Homo sapien
ggatctgcccaatgtcagcagcaga

SEQ ID NO: 287996 - DNA, 25 bp, Homo sapien
tgttcttgtagcttgtgcttctcct

SEQ ID NO: 287997 - DNA, 25 bp, Homo sapien
gagagaagtctattggacatctgtt

SEQ ID NO: 287998 - DNA, 25 bp, Homo sapien
gagaagtctattggacatctgttgt

SEQ ID NO: 287999 - DNA, 25 bp, Homo sapien
tgagagaagtctattggacatctgt

SEQ ID NO: 288000 - DNA, 25 bp, Homo sapien
gaagtctattggacatctgttgtcc

SEQ ID NO: 288001 - DNA, 25 bp, Homo sapien
gtactcgatgcgcatctgagccacc

SEQ ID NO: 288002 - DNA, 25 bp, Homo sapien
ctgcctgctgacgatggctcgatcc

SEQ ID NO: 288003 - DNA, 25 bp, Homo sapien
gatccacggtggactgttccaggta

SEQ ID NO: 288004 - DNA, 25 bp, Homo sapien
tcgatgcgcatctgagccacctgca

SEQ ID NO: 288005 - DNA, 25 bp, Homo sapien
aagccagctggctgcagagaaattg

SEQ ID NO: 288006 - DNA, 25 bp, Homo sapien
tgtggtgaagccagctggctgcaga

SEQ ID NO: 288007 - DNA, 25 bp, Homo sapien
gccagctggctgcagagaaattgga

SEQ ID NO: 288008 - DNA, 25 bp, Homo sapien
cagctggctgcagagaaattggaac

SEQ ID NO: 288009 - DNA, 25 bp, Homo sapien
tagttggccaacaagccgggaacca

SEQ ID NO: 288010 - DNA, 25 bp, Homo sapien
ggacacaatgaaacaatagagagaa

SEQ ID NO: 288011 - DNA, 25 bp, Homo sapien
aaacaaacccaaagactgttctgca

SEQ ID NO: 288012 - DNA, 25 bp, Homo sapien
aagtgctttggccatcacgagtgcc

SEQ ID NO: 288013 - DNA, 25 bp, Homo sapien
gcgccgctggtagtactggctgctc

SEQ ID NO: 288014 - DNA, 25 bp, Homo sapien
atgcaccgccggctggcctctgcct

SEQ ID NO: 288015 - DNA, 25 bp, Homo sapien
ggtagtactggctgctctcccgctg

SEQ ID NO: 288016 - DNA, 25 bp, Homo sapien
aggtggccgcctgtgaaagctcctc

SEQ ID NO: 288017 - DNA, 25 bp, Homo sapien
agagcccatgatggggacaggactc

SEQ ID NO: 288018 - DNA, 25 bp, Homo sapien
agcccatgatggggacaggactcac

SEQ ID NO: 288019 - DNA, 25 bp, Homo sapien
taagagcccatgatggggacaggac

SEQ ID NO: 288020 - DNA, 25 bp, Homo sapien
ctaagagcccatgatggggacagga

SEQ ID NO: 288021 - DNA, 25 bp, Homo sapien
tgttttgcctgtgaaggctctgagc

SEQ ID NO: 288022 - DNA, 25 bp, Homo sapien
tcaaatcacagtgcatgcccccttg

SEQ ID NO: 288023 - DNA, 25 bp, Homo sapien
gcccaaagaaatggacttgtggtgg

SEQ ID NO: 288024 - DNA, 25 bp, Homo sapien
gggagagagatttggtgccaactgg

SEQ ID NO: 288025 - DNA, 25 bp, Homo sapien
tccttcttgaaggatctcctgcagg

SEQ ID NO: 288026 - DNA, 25 bp, Homo sapien
gctccttcttgaaggatctcctgca

SEQ ID NO: 288027 - DNA, 25 bp, Homo sapien
ccttcttgaaggatctcctgcaggg

SEQ ID NO: 288028 - DNA, 25 bp, Homo sapien
ctccttcttgaaggatctcctgcag

SEQ ID NO: 288029 - DNA, 25 bp, Homo sapien
cagtgtcagggatcgctttggtcac

SEQ ID NO: 288030 - DNA, 25 bp, Homo sapien
tgcagaaaaagttgactggcccctg

SEQ ID NO: 288031 - DNA, 25 bp, Homo sapien
cctttggaaccataggagaggtcta

SEQ ID NO: 288032 - DNA, 25 bp, Homo sapien
cagacttcggaggttgagacagaga

SEQ ID NO: 288033 - DNA, 25 bp, Homo sapien
tccacatctcaaggttatggccagg

SEQ ID NO: 288034 - DNA, 25 bp, Homo sapien
gttgtgcacgcctcttggatgaaca

SEQ ID NO: 288035 - DNA, 25 bp, Homo sapien
gaacagcctcatcaaattcacttcg

SEQ ID NO: 288036 - DNA, 25 bp, Homo sapien
tcatcaaattcacttcgcagctggg

SEQ ID NO: 288037 - DNA, 25 bp, Homo sapien
cacttttgcgatcttccttttgacg

SEQ ID NO: 288038 - DNA, 25 bp, Homo sapien
aagctacctccgtacacttttgcga

SEQ ID NO: 288039 - DNA, 25 bp, Homo sapien
agcggcggaacataaagacgttgaa

SEQ ID NO: 288040 - DNA, 25 bp, Homo sapien
gacggagtctgaaattatatcagcc

SEQ ID NO: 288041 - DNA, 25 bp, Homo sapien
cagcaggtcttaccaacatgggcca

SEQ ID NO: 288042 - DNA, 25 bp, Homo sapien
tcataacttgggtagcatgcagcag

SEQ ID NO: 288043 - DNA, 25 bp, Homo sapien
gaactattgagtgacagcttgtgca

SEQ ID NO: 288044 - DNA, 25 bp, Homo sapien
catgggccatcgattcacacagaca

SEQ ID NO: 288045 - DNA, 25 bp, Homo sapien
ttcagtccgtacaaattcatcaaac

SEQ ID NO: 288046 - DNA, 25 bp, Homo sapien
ttccatgtccatattttgaggaaaa

SEQ ID NO: 288047 - DNA, 25 bp, Homo sapien
tgttcacttacgtgatttgcacact

SEQ ID NO: 288048 - DNA, 25 bp, Homo sapien
ttcagacagacaacagggttttcag

SEQ ID NO: 288049 - DNA, 25 bp, Homo sapien
agccaagtgtttcattccagtgctg

SEQ ID NO: 288050 - DNA, 25 bp, Homo sapien
caagtgtttcattccagtgctgtcc

SEQ ID NO: 288051 - DNA, 25 bp, Homo sapien
gctgtcctgtgcttcatctgccagc

SEQ ID NO: 288052 - DNA, 25 bp, Homo sapien
caagccaagtgtttcattccagtgc

SEQ ID NO: 288053 - DNA, 25 bp, Homo sapien
tatctcgaaacacttttgaaacttg

SEQ ID NO: 288054 - DNA, 25 bp, Homo sapien
ttacactatagatcagactatctcg

SEQ ID NO: 288055 - DNA, 25 bp, Homo sapien
aaacttgacgaaaattcatcttgtt

SEQ ID NO: 288056 - DNA, 25 bp, Homo sapien
tatagatcagactatctcgaaacac

SEQ ID NO: 288057 - DNA, 25 bp, Homo sapien
aagcatcagactcagtgggcgcacc

SEQ ID NO: 288058 - DNA, 25 bp, Homo sapien
ggaagcatcagactcagtgggcgca

SEQ ID NO: 288059 - DNA, 25 bp, Homo sapien
tagggaagcatcagactcagtgggc

SEQ ID NO: 288060 - DNA, 25 bp, Homo sapien
ctgctagggaagcatcagactcagt

SEQ ID NO: 288061 - DNA, 25 bp, Homo sapien
accattgcccccttgccgccctctg

SEQ ID NO: 288062 - DNA, 25 bp, Homo sapien
cttgccgccctctgcatcccatcct

SEQ ID NO: 288063 - DNA, 25 bp, Homo sapien
ccaccattgcccccttgccgccctc

SEQ ID NO: 288064 - DNA, 25 bp, Homo sapien
cccttgccgccctctgcatcccatc

SEQ ID NO: 288065 - DNA, 25 bp, Homo sapien
gcccatgtcagtgtcatgcaggagc

SEQ ID NO: 288066 - DNA, 25 bp, Homo sapien
cagcaaggtgtacagtccacatcct

SEQ ID NO: 288067 - DNA, 25 bp, Homo sapien
ggagcagcaaggtgtacagtccaca

SEQ ID NO: 288068 - DNA, 25 bp, Homo sapien
ttgcccatgtcagtgtcatgcagga

SEQ ID NO: 288069 - DNA, 25 bp, Homo sapien
caccaccacgcacagtggatactca

SEQ ID NO: 288070 - DNA, 25 bp, Homo sapien
accaccacgcacagtggatactcag

SEQ ID NO: 288071 - DNA, 25 bp, Homo sapien
ccaatgcatctgaccccagggccat

SEQ ID NO: 288072 - DNA, 25 bp, Homo sapien
ggggtgctgctcccaatgcatctga

SEQ ID NO: 288073 - DNA, 25 bp, Homo sapien
tcccaatgcatctgaccccagggcc

SEQ ID NO: 288074 - DNA, 25 bp, Homo sapien
ggtgctgctcccaatgcatctgacc

SEQ ID NO: 288075 - DNA, 25 bp, Homo sapien
caggtcggcaatccgccgaatggat

SEQ ID NO: 288076 - DNA, 25 bp, Homo sapien
cctgcaggtcggcaatccgccgaat

SEQ ID NO: 288077 - DNA, 25 bp, Homo sapien
ggtctgtctggagggtttgcctcac

SEQ ID NO: 288078 - DNA, 25 bp, Homo sapien
caatccgccgaatggatgtctccag

SEQ ID NO: 288079 - DNA, 25 bp, Homo sapien
aattaggagtgaagtgtagcgtgga

SEQ ID NO: 288080 - DNA, 25 bp, Homo sapien
aggaaattaggagtgaagtgtagcg

SEQ ID NO: 288081 - DNA, 25 bp, Homo sapien
attaggagtgaagtgtagcgtggag

SEQ ID NO: 288082 - DNA, 25 bp, Homo sapien
gaaattaggagtgaagtgtagcgtg

SEQ ID NO: 288083 - DNA, 25 bp, Homo sapien
gccacaatccactgccgtctggaca

SEQ ID NO: 288084 - DNA, 25 bp, Homo sapien
gctgccacaatccactgccgtctgg

SEQ ID NO: 288085 - DNA, 25 bp, Homo sapien
tgccacaatccactgccgtctggac

SEQ ID NO: 288086 - DNA, 25 bp, Homo sapien
tgctgccacaatccactgccgtctg

SEQ ID NO: 288087 - DNA, 25 bp, Homo sapien
catctttaaaacagggactctactt

SEQ ID NO: 288088 - DNA, 25 bp, Homo sapien
gactctacttttatgtcccctgatt

SEQ ID NO: 288089 - DNA, 25 bp, Homo sapien
cttatctggatcatctttaaaacag

SEQ ID NO: 288090 - DNA, 25 bp, Homo sapien
cagggactctacttttatgtcccct

SEQ ID NO: 288091 - DNA, 25 bp, Homo sapien
gagtacagctcaaccaggactgcag

SEQ ID NO: 288092 - DNA, 25 bp, Homo sapien
gggacagagtacagctcaaccagga

SEQ ID NO: 288093 - DNA, 25 bp, Homo sapien
tgtcgagaaggagtcctcatagtat

SEQ ID NO: 288094 - DNA, 25 bp, Homo sapien
tcatagtatctgtggccagggacag

SEQ ID NO: 288095 - DNA, 25 bp, Homo sapien
ggctgaggatgcggctgctggtggc

SEQ ID NO: 288096 - DNA, 25 bp, Homo sapien
ctgaggatgcggctgctggtggctg

SEQ ID NO: 288097 - DNA, 25 bp, Homo sapien
tggggctgaggatgcggctgctggt

SEQ ID NO: 288098 - DNA, 25 bp, Homo sapien
gaggatgcggctgctggtggctgac

SEQ ID NO: 288099 - DNA, 25 bp, Homo sapien
gcctttggtccatggttaatgtgtt

SEQ ID NO: 288100 - DNA, 25 bp, Homo sapien
ccactaatcttcctaatactgataa

SEQ ID NO: 288101 - DNA, 25 bp, Homo sapien
ttccactaatcttcctaatactgat

SEQ ID NO: 288102 - DNA, 25 bp, Homo sapien
cttgctcaggcctttggtccatggt

SEQ ID NO: 288103 - DNA, 25 bp, Homo sapien
gcaccagagctacttggaaagccag

SEQ ID NO: 288104 - DNA, 25 bp, Homo sapien
ttgcaccagagctacttggaaagcc

SEQ ID NO: 288105 - DNA, 25 bp, Homo sapien
tgcaccagagctacttggaaagcca

SEQ ID NO: 288106 - DNA, 25 bp, Homo sapien
tcagcttccagatgtaatagcttgc

SEQ ID NO: 288107 - DNA, 25 bp, Homo sapien
cacttttgaaggacacgatggagcc

SEQ ID NO: 288108 - DNA, 25 bp, Homo sapien
caaaatggtcttgatccccgagaga

SEQ ID NO: 288109 - DNA, 25 bp, Homo sapien
catcaggtgggcaaactggcggttc

SEQ ID NO: 288110 - DNA, 25 bp, Homo sapien
gactttctctggacggcaagcactt

SEQ ID NO: 288111 - DNA, 25 bp, Homo sapien
caaggtgaactctcattcccccaag

SEQ ID NO: 288112 - DNA, 25 bp, Homo sapien
aatagccccagcctgttgcttttac

SEQ ID NO: 288113 - DNA, 25 bp, Homo sapien
tgcaaggtgaactctcattccccca

SEQ ID NO: 288114 - DNA, 25 bp, Homo sapien
ccaagaatagccccagcctgttgct

SEQ ID NO: 288115 - DNA, 25 bp, Homo sapien
gcggtatcccacaggaacctcttac

SEQ ID NO: 288116 - DNA, 25 bp, Homo sapien
cagctaaaacctctaaaaatcttgg

SEQ ID NO: 288117 - DNA, 25 bp, Homo sapien
tctctagagaaatcggttgtggcat

SEQ ID NO: 288118 - DNA, 25 bp, Homo sapien
tacaaggaagtagaggtacccagca

SEQ ID NO: 288119 - DNA, 25 bp, Homo sapien
tcccaccacggatcttctgtcatta

SEQ ID NO: 288120 - DNA, 25 bp, Homo sapien
tctccatatgcaatgcaagtggact

SEQ ID NO: 288121 - DNA, 25 bp, Homo sapien
gggcagcaagtagttacttatcctg

SEQ ID NO: 288122 - DNA, 25 bp, Homo sapien
tatgtggacagaacgccatcacagc

SEQ ID NO: 288123 - DNA, 25 bp, Homo sapien
tgactccagatgagtggcaggatga

SEQ ID NO: 288124 - DNA, 25 bp, Homo sapien
actccagatgagtggcaggatgagt

SEQ ID NO: 288125 - DNA, 25 bp, Homo sapien
ctccagatgagtggcaggatgagtg

SEQ ID NO: 288126 - DNA, 25 bp, Homo sapien
cttgactccagatgagtggcaggat

SEQ ID NO: 288127 - DNA, 25 bp, Homo sapien
agtaacctggcatttactgcatcca

SEQ ID NO: 288128 - DNA, 25 bp, Homo sapien
tggaattctgtatacccaggtggcg

SEQ ID NO: 288129 - DNA, 25 bp, Homo sapien
tgtagcaactccacagaaagggatg

SEQ ID NO: 288130 - DNA, 25 bp, Homo sapien
gaaatccacagcgttactttaggta

SEQ ID NO: 288131 - DNA, 25 bp, Homo sapien
caagttattgtagagtcgggaagtc

SEQ ID NO: 288132 - DNA, 25 bp, Homo sapien
tgtgggctcatctcgcctcttgagg

SEQ ID NO: 288133 - DNA, 25 bp, Homo sapien
gcatccccgcaggatatgcctctgt

SEQ ID NO: 288134 - DNA, 25 bp, Homo sapien
ttttgttcaggccaaccacactggg

SEQ ID NO: 288135 - DNA, 25 bp, Homo sapien
gaggaaggtcatggcatgtagacat

SEQ ID NO: 288136 - DNA, 25 bp, Homo sapien
tggcaaaggaatataatcgacaagc

SEQ ID NO: 288137 - DNA, 25 bp, Homo sapien
cacaggatagagaaatgaattggca

SEQ ID NO: 288138 - DNA, 25 bp, Homo sapien
gaatcccaggtagcaaggccataga

SEQ ID NO: 288139 - DNA, 25 bp, Homo sapien
tttggttacatcagcagggacgcca

SEQ ID NO: 288140 - DNA, 25 bp, Homo sapien
gttacatcagcagggacgccatagc

SEQ ID NO: 288141 - DNA, 25 bp, Homo sapien
tggttacatcagcagggacgccata

SEQ ID NO: 288142 - DNA, 25 bp, Homo sapien
tacatcagcagggacgccatagcag

SEQ ID NO: 288143 - DNA, 25 bp, Homo sapien
tgcatccagacaggtgagtgctctc

SEQ ID NO: 288144 - DNA, 25 bp, Homo sapien
cctaggaagaacaggctttgaaatc

SEQ ID NO: 288145 - DNA, 25 bp, Homo sapien
gagtgctctctatgggtccctgaca

SEQ ID NO: 288146 - DNA, 25 bp, Homo sapien
tttggacaagcccagttgactggct

SEQ ID NO: 288147 - DNA, 25 bp, Homo sapien
acagctaaataagcaaccaggtcca

SEQ ID NO: 288148 - DNA, 25 bp, Homo sapien
gcttggccaggccattaatcacaac

SEQ ID NO: 288149 - DNA, 25 bp, Homo sapien
ggccaggccattaatcacaaccaga

SEQ ID NO: 288150 - DNA, 25 bp, Homo sapien
gaagggagctgcctatattgacagc

SEQ ID NO: 288151 - DNA, 25 bp, Homo sapien
tctctttattaggaaaggacacatt

SEQ ID NO: 288152 - DNA, 25 bp, Homo sapien
gaacaggctgggcacctatggaaca

SEQ ID NO: 288153 - DNA, 25 bp, Homo sapien
aactcttctagaggcctttgatgcc

SEQ ID NO: 288154 - DNA, 25 bp, Homo sapien
gaggcctttgatgccaaaaattggg

SEQ ID NO: 288155 - DNA, 25 bp, Homo sapien
agtgcatctgtgagtctgtatctgg

SEQ ID NO: 288156 - DNA, 25 bp, Homo sapien
actgccaactcatatttaggtagtg

SEQ ID NO: 288157 - DNA, 25 bp, Homo sapien
gccaactcatatttaggtagtgatt

SEQ ID NO: 288158 - DNA, 25 bp, Homo sapien
tgtatctggccacagataaatggct

SEQ ID NO: 288159 - DNA, 25 bp, Homo sapien
ggacggttgtcctctgaagctcttt

SEQ ID NO: 288160 - DNA, 25 bp, Homo sapien
tgtacagttcacgtcccctgtcggg

SEQ ID NO: 288161 - DNA, 25 bp, Homo sapien
tctctacagggcttggtacacggga

SEQ ID NO: 288162 - DNA, 25 bp, Homo sapien
tcctgatgggaggtgaagccattct

SEQ ID NO: 288163 - DNA, 25 bp, Homo sapien
ttctcggtggtagatgacctttctt

SEQ ID NO: 288164 - DNA, 25 bp, Homo sapien
gacgtttctcggcaatagggacaca

SEQ ID NO: 288165 - DNA, 25 bp, Homo sapien
gggacacaggaactgagagctatga

SEQ ID NO: 288166 - DNA, 25 bp, Homo sapien
tcggtggtagatgacctttctcggt

SEQ ID NO: 288167 - DNA, 25 bp, Homo sapien
cagagatagagatccaggccaaagt

SEQ ID NO: 288168 - DNA, 25 bp, Homo sapien
gcagagatagagatccaggccaaag

SEQ ID NO: 288169 - DNA, 25 bp, Homo sapien
ggcagagatagagatccaggccaaa

SEQ ID NO: 288170 - DNA, 25 bp, Homo sapien
gagatagagatccaggccaaagtgt

SEQ ID NO: 288171 - DNA, 25 bp, Homo sapien
acaggcagggcaccgaagagatcag

SEQ ID NO: 288172 - DNA, 25 bp, Homo sapien
caagcatgatctgtgggaatccaaa

SEQ ID NO: 288173 - DNA, 25 bp, Homo sapien
tctgtttcagtatccagcctctgtg

SEQ ID NO: 288174 - DNA, 25 bp, Homo sapien
gcaccaggggagtctgtttcagtat

SEQ ID NO: 288175 - DNA, 25 bp, Homo sapien
tatctcggtcagtaccttggacagt

SEQ ID NO: 288176 - DNA, 25 bp, Homo sapien
gcaatatctcggtcagtaccttgga

SEQ ID NO: 288177 - DNA, 25 bp, Homo sapien
actctgcaatatctcggtcagtacc

SEQ ID NO: 288178 - DNA, 25 bp, Homo sapien
tctgcaatatctcggtcagtacctt

SEQ ID NO: 288179 - DNA, 25 bp, Homo sapien
cttgaggcgagttgctaatatttga

SEQ ID NO: 288180 - DNA, 25 bp, Homo sapien
gaggcgagttgctaatatttgatag

SEQ ID NO: 288181 - DNA, 25 bp, Homo sapien
aggcgagttgctaatatttgatagg

SEQ ID NO: 288182 - DNA, 25 bp, Homo sapien
tgaggcgagttgctaatatttgata

SEQ ID NO: 288183 - DNA, 25 bp, Homo sapien
gctgccaagagcatctgtgaaaggt

SEQ ID NO: 288184 - DNA, 25 bp, Homo sapien
aaggttctgcatcaaataggctcat

SEQ ID NO: 288185 - DNA, 25 bp, Homo sapien
aagagcatctgtgaaaggttctgca

SEQ ID NO: 288186 - DNA, 25 bp, Homo sapien
tgccaagagcatctgtgaaaggttc

SEQ ID NO: 288187 - DNA, 25 bp, Homo sapien
gaaatacatgggcttccataccacg

SEQ ID NO: 288188 - DNA, 25 bp, Homo sapien
taccacggcttctgttatagattca

SEQ ID NO: 288189 - DNA, 25 bp, Homo sapien
caagggcattagcattagcattacc

SEQ ID NO: 288190 - DNA, 25 bp, Homo sapien
gactccctttcctgatggcgttctg

SEQ ID NO: 288191 - DNA, 25 bp, Homo sapien
gcttaggatttcagctttaatctca

SEQ ID NO: 288192 - DNA, 25 bp, Homo sapien
tgcattcattaaacttgcactgggt

SEQ ID NO: 288193 - DNA, 25 bp, Homo sapien
cactgggttcctgatatatgttgga

SEQ ID NO: 288194 - DNA, 25 bp, Homo sapien
cattcattaaacttgcactgggttc

SEQ ID NO: 288195 - DNA, 25 bp, Homo sapien
catggcagtgacgtttgttctcagg

SEQ ID NO: 288196 - DNA, 25 bp, Homo sapien
tgtttccatggcagtgacgtttgtt

SEQ ID NO: 288197 - DNA, 25 bp, Homo sapien
ttccatggcagtgacgtttgttctc

SEQ ID NO: 288198 - DNA, 25 bp, Homo sapien
tggcagtgacgtttgttctcaggat

SEQ ID NO: 288199 - DNA, 25 bp, Homo sapien
tgttggtcagacaggaaagaaaacc

SEQ ID NO: 288200 - DNA, 25 bp, Homo sapien
ccactctccagaggcttgttggtca

SEQ ID NO: 288201 - DNA, 25 bp, Homo sapien
cctgtaagatggtggccactctcca

SEQ ID NO: 288202 - DNA, 25 bp, Homo sapien
agtttacagaatacaaagtgagcct

SEQ ID NO: 288203 - DNA, 25 bp, Homo sapien
cggcggtgagcgagaaaggggaagc

SEQ ID NO: 288204 - DNA, 25 bp, Homo sapien
tcagccccgcggtcgctctggccga

SEQ ID NO: 288205 - DNA, 25 bp, Homo sapien
cccctgggcggacgcgcgctcagcc

SEQ ID NO: 288206 - DNA, 25 bp, Homo sapien
gccccgcggtcgctctggccgagct

SEQ ID NO: 288207 - DNA, 25 bp, Homo sapien
agatcccgcggagtcccgcggcggg

SEQ ID NO: 288208 - DNA, 25 bp, Homo sapien
agagcgaggaacagcgagatcccgc

SEQ ID NO: 288209 - DNA, 25 bp, Homo sapien
agcagagcgaggaacagcgagatcc

SEQ ID NO: 288210 - DNA, 25 bp, Homo sapien
gaacagcgagatcccgcggagtccc

SEQ ID NO: 288211 - DNA, 25 bp, Homo sapien
ctagccccgggtgcggttgcagaga

SEQ ID NO: 288212 - DNA, 25 bp, Homo sapien
gtgcggttgcagagaagcgccggga

SEQ ID NO: 288213 - DNA, 25 bp, Homo sapien
ggttgcagagaagcgccgggaattt

SEQ ID NO: 288214 - DNA, 25 bp, Homo sapien
ccgggtgcggttgcagagaagcgcc

SEQ ID NO: 288215 - DNA, 25 bp, Homo sapien
tctgcacagtaggtatattggataa

SEQ ID NO: 288216 - DNA, 25 bp, Homo sapien
cttggagcgcccctagtggaggtct

SEQ ID NO: 288217 - DNA, 25 bp, Homo sapien
tcttctgcccttagtcgccagctag

SEQ ID NO: 288218 - DNA, 25 bp, Homo sapien
tcgccagctagatcttggagcgccc

SEQ ID NO: 288219 - DNA, 25 bp, Homo sapien
tcagtcaaactccccagaacagcct

SEQ ID NO: 288220 - DNA, 25 bp, Homo sapien
cagtcaaactccccagaacagcctt

SEQ ID NO: 288221 - DNA, 25 bp, Homo sapien
ccacagcctcttggatgttttgcaa

SEQ ID NO: 288222 - DNA, 25 bp, Homo sapien
cacagcctcttggatgttttgcaat

SEQ ID NO: 288223 - DNA, 25 bp, Homo sapien
catccgctcgatctccagtaccatg

SEQ ID NO: 288224 - DNA, 25 bp, Homo sapien
tgctctcctgcatccgctcgatctc

SEQ ID NO: 288225 - DNA, 25 bp, Homo sapien
tccagtaccatgaactctgattcct

SEQ ID NO: 288226 - DNA, 25 bp, Homo sapien
cctgatggtaatatttaggttcaaa

SEQ ID NO: 288227 - DNA, 25 bp, Homo sapien
agaatcagctcggtccatcagtaac

SEQ ID NO: 288228 - DNA, 25 bp, Homo sapien
aatcagctcggtccatcagtaacaa

SEQ ID NO: 288229 - DNA, 25 bp, Homo sapien
agtaacaacagcaactcataattcc

SEQ ID NO: 288230 - DNA, 25 bp, Homo sapien
agcaactcataattcccctcttcat

SEQ ID NO: 288231 - DNA, 25 bp, Homo sapien
tggcaaaagggttgcagagccacat

SEQ ID NO: 288232 - DNA, 25 bp, Homo sapien
cagatgtgattatcagacaggccac

SEQ ID NO: 288233 - DNA, 25 bp, Homo sapien
tacaatgatgataggattcttccca

SEQ ID NO: 288234 - DNA, 25 bp, Homo sapien
gaatatgtgtcttaactggcaaaag

SEQ ID NO: 288235 - DNA, 25 bp, Homo sapien
ccagtaagaccaggctcgggctttc

SEQ ID NO: 288236 - DNA, 25 bp, Homo sapien
ggaagcctgtgttccatttagaaaa

SEQ ID NO: 288237 - DNA, 25 bp, Homo sapien
catttgtcactataccaggacccct

SEQ ID NO: 288238 - DNA, 25 bp, Homo sapien
gagttgcagttctctcctcctggga

SEQ ID NO: 288239 - DNA, 25 bp, Homo sapien
agcttgaaagcaacccaaaggccac

SEQ ID NO: 288240 - DNA, 25 bp, Homo sapien
ggatggcggcattctctttggtagc

SEQ ID NO: 288241 - DNA, 25 bp, Homo sapien
taaatccatcctttattggatggcg

SEQ ID NO: 288242 - DNA, 25 bp, Homo sapien
aaaggccactcgcatgtctaagtca

SEQ ID NO: 288243 - DNA, 25 bp, Homo sapien
caccatacccggcaaatttcctctt

SEQ ID NO: 288244 - DNA, 25 bp, Homo sapien
ccaccatacccggcaaatttcctct

SEQ ID NO: 288245 - DNA, 25 bp, Homo sapien
gccaccatacccggcaaatttcctc

SEQ ID NO: 288246 - DNA, 25 bp, Homo sapien
aagtattggcagcatatgggttaca

SEQ ID NO: 288247 - DNA, 25 bp, Homo sapien
catccatttgctagagcccaactaa

SEQ ID NO: 288248 - DNA, 25 bp, Homo sapien
taagacccactccatgatgatctag

SEQ ID NO: 288249 - DNA, 25 bp, Homo sapien
ccctgaataccttgacatatgaaga

SEQ ID NO: 288250 - DNA, 25 bp, Homo sapien
tctccatccatatatccatcttttt

SEQ ID NO: 288251 - DNA, 25 bp, Homo sapien
tgcatatatccatatttcctccttc

SEQ ID NO: 288252 - DNA, 25 bp, Homo sapien
ctctccatccatatatccatctttt

SEQ ID NO: 288253 - DNA, 25 bp, Homo sapien
tccatccatatatccatcttttttc

SEQ ID NO: 288254 - DNA, 25 bp, Homo sapien
gagtttggccaacaccattagcagc

SEQ ID NO: 288255 - DNA, 25 bp, Homo sapien
caggccaaacccgaaaatgcatgtg

SEQ ID NO: 288256 - DNA, 25 bp, Homo sapien
tccatcacaacagtacagacccggt

SEQ ID NO: 288257 - DNA, 25 bp, Homo sapien
tggtatatgaatgtccgcgcactca

SEQ ID NO: 288258 - DNA, 25 bp, Homo sapien
tctgaaaggccatgtgtggtctgaa

SEQ ID NO: 288259 - DNA, 25 bp, Homo sapien
aggccccgtgccatgatctgaaagg

SEQ ID NO: 288260 - DNA, 25 bp, Homo sapien
tgtcttgaagtattgcttggagcaa

SEQ ID NO: 288261 - DNA, 25 bp, Homo sapien
ttcctggctgaaacttcatgggact

SEQ ID NO: 288262 - DNA, 25 bp, Homo sapien
gaattttgcctagtccagctgtgtg

SEQ ID NO: 288263 - DNA, 25 bp, Homo sapien
tctgcacgtcggaaagcgaatgccc

SEQ ID NO: 288264 - DNA, 25 bp, Homo sapien
ttgttaacttgcagggatagccccg

SEQ ID NO: 288265 - DNA, 25 bp, Homo sapien
tagccccgggttagtgatctgtgaa

SEQ ID NO: 288266 - DNA, 25 bp, Homo sapien
acagctaggctctccagtgttctta

SEQ ID NO: 288267 - DNA, 25 bp, Homo sapien
ctaggctctccagtgttcttaggga

SEQ ID NO: 288268 - DNA, 25 bp, Homo sapien
tgttcttagggattgatatggattg

SEQ ID NO: 288269 - DNA, 25 bp, Homo sapien
tcttagggattgatatggattgagc

SEQ ID NO: 288270 - DNA, 25 bp, Homo sapien
ctcgttggagtaataggtttcctca

SEQ ID NO: 288271 - DNA, 25 bp, Homo sapien
tcgttggagtaataggtttcctcaa

SEQ ID NO: 288272 - DNA, 25 bp, Homo sapien
ctccctcttggttatagaacctctg

SEQ ID NO: 288273 - DNA, 25 bp, Homo sapien
tcttggttatagaacctctgagaga

SEQ ID NO: 288274 - DNA, 25 bp, Homo sapien
tggaatagctgcaggacctgacttg

SEQ ID NO: 288275 - DNA, 25 bp, Homo sapien
tagcaagagaatttgggccttccat

SEQ ID NO: 288276 - DNA, 25 bp, Homo sapien
catgatgccacatgcattaagaaca

SEQ ID NO: 288277 - DNA, 25 bp, Homo sapien
tacacagcagacgtcttcacagctg

SEQ ID NO: 288278 - DNA, 25 bp, Homo sapien
cagtgaacacgcaatatggtgagac

SEQ ID NO: 288279 - DNA, 25 bp, Homo sapien
atttcccattcccagtgaacacgca

SEQ ID NO: 288280 - DNA, 25 bp, Homo sapien
caaaggcatatttcccattcccagt

SEQ ID NO: 288281 - DNA, 25 bp, Homo sapien
gttttcactactgtaggggatggaa

SEQ ID NO: 288282 - DNA, 25 bp, Homo sapien
aatgcaccctgaactctttgtccag

SEQ ID NO: 288283 - DNA, 25 bp, Homo sapien
ttgtccctgccctgcaatcctccaa

SEQ ID NO: 288284 - DNA, 25 bp, Homo sapien
agggacttgtccaggtattgcagct

SEQ ID NO: 288285 - DNA, 25 bp, Homo sapien
gatgctgagctgtcatcagggactt

SEQ ID NO: 288286 - DNA, 25 bp, Homo sapien
aatgtgtgttgggatatagatgtcc

SEQ ID NO: 288287 - DNA, 25 bp, Homo sapien
ttccagggggatgagtggccacaca

SEQ ID NO: 288288 - DNA, 25 bp, Homo sapien
ctatcaggcaagacttgaatgtgtg

SEQ ID NO: 288289 - DNA, 25 bp, Homo sapien
gaccactcctttgctctatcaggca

SEQ ID NO: 288290 - DNA, 25 bp, Homo sapien
gaattggagatgacagactcattcc

SEQ ID NO: 288291 - DNA, 25 bp, Homo sapien
gacagactcattccggaagtcctct

SEQ ID NO: 288292 - DNA, 25 bp, Homo sapien
ttagaatgaattggagatgacagac

SEQ ID NO: 288293 - DNA, 25 bp, Homo sapien
tgacagactcattccggaagtcctc

SEQ ID NO: 288294 - DNA, 25 bp, Homo sapien
cctcttaccgatcatgttgaatttg

SEQ ID NO: 288295 - DNA, 25 bp, Homo sapien
aatatttgtactcagtttttgcctc

SEQ ID NO: 288296 - DNA, 25 bp, Homo sapien
cctgttgtttcaatatttgtactca

SEQ ID NO: 288297 - DNA, 25 bp, Homo sapien
tattctaccatgatctttcctgttg

SEQ ID NO: 288298 - DNA, 25 bp, Homo sapien
acttgcgtgcgggaggttctgttca

SEQ ID NO: 288299 - DNA, 25 bp, Homo sapien
tcagctcagaacttgcgtgcgggag

SEQ ID NO: 288300 - DNA, 25 bp, Homo sapien
aacttgcgtgcgggaggttctgttc

SEQ ID NO: 288301 - DNA, 25 bp, Homo sapien
tcagaacttgcgtgcgggaggttct

SEQ ID NO: 288302 - DNA, 25 bp, Homo sapien
gctaacaggcggtttgcagctctct

SEQ ID NO: 288303 - DNA, 25 bp, Homo sapien
taggaacgaaggcaggctaacaggc

SEQ ID NO: 288304 - DNA, 25 bp, Homo sapien
cagtgagttcttggaccatggaaga

SEQ ID NO: 288305 - DNA, 25 bp, Homo sapien
tatctgctcctaggacatcaaaggc

SEQ ID NO: 288306 - DNA, 25 bp, Homo sapien
ttgactagcttgacaggatgcacac

SEQ ID NO: 288307 - DNA, 25 bp, Homo sapien
ccagaaccttggtggccttgactag

SEQ ID NO: 288308 - DNA, 25 bp, Homo sapien
ccttggtggccttgactagcttgac

SEQ ID NO: 288309 - DNA, 25 bp, Homo sapien
ggtggccttgactagcttgacagga

SEQ ID NO: 288310 - DNA, 25 bp, Homo sapien
tgcactgtccttgtgagctggtcct

SEQ ID NO: 288311 - DNA, 25 bp, Homo sapien
cactgtccttgtgagctggtcctac

SEQ ID NO: 288312 - DNA, 25 bp, Homo sapien
ccgtgtgcactgtccttgtgagctg

SEQ ID NO: 288313 - DNA, 25 bp, Homo sapien
gtgtgcactgtccttgtgagctggt

SEQ ID NO: 288314 - DNA, 25 bp, Homo sapien
gactcagcaatcgagtgcagcacag

SEQ ID NO: 288315 - DNA, 25 bp, Homo sapien
tcagcaatcgagtgcagcacagcct

SEQ ID NO: 288316 - DNA, 25 bp, Homo sapien
aactctgccattgaggactcagcaa

SEQ ID NO: 288317 - DNA, 25 bp, Homo sapien
tgaggactcagcaatcgagtgcagc

SEQ ID NO: 288318 - DNA, 25 bp, Homo sapien
tgcatgcggtggcactaggccattg

SEQ ID NO: 288319 - DNA, 25 bp, Homo sapien
cctgcatgcggtggcactaggccat

SEQ ID NO: 288320 - DNA, 25 bp, Homo sapien
atgcctgcatgcggtggcactaggc

SEQ ID NO: 288321 - DNA, 25 bp, Homo sapien
catgcggtggcactaggccattgtc

SEQ ID NO: 288322 - DNA, 25 bp, Homo sapien
gcatcatctaatgccaagccccagg

SEQ ID NO: 288323 - DNA, 25 bp, Homo sapien
aacgagctctcgcagccaacaagaa

SEQ ID NO: 288324 - DNA, 25 bp, Homo sapien
gaggagtggactggcatcatctaat

SEQ ID NO: 288325 - DNA, 25 bp, Homo sapien
caagaacaatgcctcggatgtgtgt

SEQ ID NO: 288326 - DNA, 25 bp, Homo sapien
aaggttcctggtgatctgtcccagc

SEQ ID NO: 288327 - DNA, 25 bp, Homo sapien
gatctgtcccagcaaatttccccat

SEQ ID NO: 288328 - DNA, 25 bp, Homo sapien
ggtgatctgtcccagcaaatttccc

SEQ ID NO: 288329 - DNA, 25 bp, Homo sapien
tttccctggaaggttcctggtgatc

SEQ ID NO: 288330 - DNA, 25 bp, Homo sapien
ttcctcatctgttttgtcttccaag

SEQ ID NO: 288331 - DNA, 25 bp, Homo sapien
ctcatctgttttgtcttccaagtgc

SEQ ID NO: 288332 - DNA, 25 bp, Homo sapien
tatgtgttcctcatctgttttgtct

SEQ ID NO: 288333 - DNA, 25 bp, Homo sapien
atgtgttcctcatctgttttgtctt

SEQ ID NO: 288334 - DNA, 25 bp, Homo sapien
catttgttaaccctgctaaattgga

SEQ ID NO: 288335 - DNA, 25 bp, Homo sapien
cttagagccatttgttaaccctgct

SEQ ID NO: 288336 - DNA, 25 bp, Homo sapien
ttttgggttatctggccagccagct

SEQ ID NO: 288337 - DNA, 25 bp, Homo sapien
ttttttgggttatctggccagccag

SEQ ID NO: 288338 - DNA, 25 bp, Homo sapien
ttccaggccgccagtgatgctgggc

SEQ ID NO: 288339 - DNA, 25 bp, Homo sapien
tctatatagactgcaacagtttgca

SEQ ID NO: 288340 - DNA, 25 bp, Homo sapien
tggcggcggtggcttaatctatata

SEQ ID NO: 288341 - DNA, 25 bp, Homo sapien
taacattgattaccagccagtgttc

SEQ ID NO: 288342 - DNA, 25 bp, Homo sapien
accttcacctgctgtcagactctga

SEQ ID NO: 288343 - DNA, 25 bp, Homo sapien
acctgctgtcagactctgagggtgg

SEQ ID NO: 288344 - DNA, 25 bp, Homo sapien
aagctcgtccggctggcctctaaac

SEQ ID NO: 288345 - DNA, 25 bp, Homo sapien
cctaagggcggtgcccaaagctcgt

SEQ ID NO: 288346 - DNA, 25 bp, Homo sapien
ggacccaaagggctagcatctccct

SEQ ID NO: 288347 - DNA, 25 bp, Homo sapien
caaagggctagcatctccctcggga

SEQ ID NO: 288348 - DNA, 25 bp, Homo sapien
ctagcatctccctcgggaagagcat

SEQ ID NO: 288349 - DNA, 25 bp, Homo sapien
gaggtaaggacccaaagggctagca

SEQ ID NO: 288350 - DNA, 25 bp, Homo sapien
ggtgttgtagggaccgcactctcct

SEQ ID NO: 288351 - DNA, 25 bp, Homo sapien
cttcagggtgctctttgccaggact

SEQ ID NO: 288352 - DNA, 25 bp, Homo sapien
agcacttccgccgactgtgaggaac

SEQ ID NO: 288353 - DNA, 25 bp, Homo sapien
cagagttcacctgcttgagcgaagg

SEQ ID NO: 288354 - DNA, 25 bp, Homo sapien
ctgggggagtgtgtgggccacatag

SEQ ID NO: 288355 - DNA, 25 bp, Homo sapien
tctgggggagtgtgtgggccacata

SEQ ID NO: 288356 - DNA, 25 bp, Homo sapien
gggggagtgtgtgggccacataggg

SEQ ID NO: 288357 - DNA, 25 bp, Homo sapien
ctctgggggagtgtgtgggccacat

SEQ ID NO: 288358 - DNA, 25 bp, Homo sapien
ctggtgtcctcctggggggcctcct

SEQ ID NO: 288359 - DNA, 25 bp, Homo sapien
ctttgtccatcagggccatggggct

SEQ ID NO: 288360 - DNA, 25 bp, Homo sapien
caggcccaggctccccgggttctgg

SEQ ID NO: 288361 - DNA, 25 bp, Homo sapien
ggcctcctgggccatgtcaggccca

SEQ ID NO: 288362 - DNA, 25 bp, Homo sapien
gatgaccgtggtggtgataatggtg

SEQ ID NO: 288363 - DNA, 25 bp, Homo sapien
tgaccgtggtggtgataatggtgga

SEQ ID NO: 288364 - DNA, 25 bp, Homo sapien
gtgatgaccgtggtggtgataatgg

SEQ ID NO: 288365 - DNA, 25 bp, Homo sapien
accgtggtggtgataatggtggagg

SEQ ID NO: 288366 - DNA, 25 bp, Homo sapien
aagggtggccacattgcacttgtcc

SEQ ID NO: 288367 - DNA, 25 bp, Homo sapien
ccacattgcacttgtccaaaatcca

SEQ ID NO: 288368 - DNA, 25 bp, Homo sapien
tgaagggtggccacattgcacttgt

SEQ ID NO: 288369 - DNA, 25 bp, Homo sapien
ggtggccacattgcacttgtccaaa

SEQ ID NO: 288370 - DNA, 25 bp, Homo sapien
tgggtagtcgctggagtcaatgtac

SEQ ID NO: 288371 - DNA, 25 bp, Homo sapien
gtcaatgtacccctcaggattggag

SEQ ID NO: 288372 - DNA, 25 bp, Homo sapien
tatgtgcactccagaaagttgttga

SEQ ID NO: 288373 - DNA, 25 bp, Homo sapien
tagactgtcacgttgtatgtgcact

SEQ ID NO: 288374 - DNA, 25 bp, Homo sapien
ctggtagtgaagctggaaggtccca

SEQ ID NO: 288375 - DNA, 25 bp, Homo sapien
gggcttcggattacctgcccctcca

SEQ ID NO: 288376 - DNA, 25 bp, Homo sapien
gctggaaggtcccaaggccgtcgtc

SEQ ID NO: 288377 - DNA, 25 bp, Homo sapien
tccggaagtagacggagatggtgtt

SEQ ID NO: 288378 - DNA, 25 bp, Homo sapien
atgcatgtcagcatcttagcgccct

SEQ ID NO: 288379 - DNA, 25 bp, Homo sapien
gagtgcaggtccatcaccgtgacat

SEQ ID NO: 288380 - DNA, 25 bp, Homo sapien
acctgagtgcaggtccatcaccgtg

SEQ ID NO: 288381 - DNA, 25 bp, Homo sapien
catcttagcgccctggagctcatag

SEQ ID NO: 288382 - DNA, 25 bp, Homo sapien
tgcagaattggctcccatttgtgtt

SEQ ID NO: 288383 - DNA, 25 bp, Homo sapien
catttgtgttttcagggtaacttgg

SEQ ID NO: 288384 - DNA, 25 bp, Homo sapien
acgcggccgatggtggcattgtgca

SEQ ID NO: 288385 - DNA, 25 bp, Homo sapien
cctctggagcttcaatcgtccagat

SEQ ID NO: 288386 - DNA, 25 bp, Homo sapien
agagctgacttgttggtctgcccgc

SEQ ID NO: 288387 - DNA, 25 bp, Homo sapien
caaaagggacactctcggtttgaag

SEQ ID NO: 288388 - DNA, 25 bp, Homo sapien
cctggtcggacgtgaactcgatgcg

SEQ ID NO: 288389 - DNA, 25 bp, Homo sapien
actcgatgcggatggtgttgccttc

SEQ ID NO: 288390 - DNA, 25 bp, Homo sapien
tgtgtcattccagtatgggtcccgc

SEQ ID NO: 288391 - DNA, 25 bp, Homo sapien
ccaatgttataggtcgggtcggatg

SEQ ID NO: 288392 - DNA, 25 bp, Homo sapien
tgatgcattcgatgatggccgggcc

SEQ ID NO: 288393 - DNA, 25 bp, Homo sapien
gggtcgcaggtgaactccactatag

SEQ ID NO: 288394 - DNA, 25 bp, Homo sapien
ccacgtggatcttccagatacaatc

SEQ ID NO: 288395 - DNA, 25 bp, Homo sapien
cttcaccttccacgtagggctcggg

SEQ ID NO: 288396 - DNA, 25 bp, Homo sapien
aagaagatccgtttctcttctccca

SEQ ID NO: 288397 - DNA, 25 bp, Homo sapien
ggatatctaagaagatccgtttctc

SEQ ID NO: 288398 - DNA, 25 bp, Homo sapien
tcttggctgaagacaggtagttttc

SEQ ID NO: 288399 - DNA, 25 bp, Homo sapien
cataaacagggagcaatgttgggaa

SEQ ID NO: 288400 - DNA, 25 bp, Homo sapien
taaacagggagcaatgttgggaact

SEQ ID NO: 288401 - DNA, 25 bp, Homo sapien
tcataaacagggagcaatgttggga

SEQ ID NO: 288402 - DNA, 25 bp, Homo sapien
ataaacagggagcaatgttgggaac

SEQ ID NO: 288403 - DNA, 25 bp, Homo sapien
ctcgtagttcctcatgtaaagttgc

SEQ ID NO: 288404 - DNA, 25 bp, Homo sapien
cgtagttcctcatgtaaagttgctc

SEQ ID NO: 288405 - DNA, 25 bp, Homo sapien
gtagttcctcatgtaaagttgctcc

SEQ ID NO: 288406 - DNA, 25 bp, Homo sapien
tcgtagttcctcatgtaaagttgct

SEQ ID NO: 288407 - DNA, 25 bp, Homo sapien
cagcagggtccgaatggaactggat

SEQ ID NO: 288408 - DNA, 25 bp, Homo sapien
tgttcccaaggtactgccccaagat

SEQ ID NO: 288409 - DNA, 25 bp, Homo sapien
tgtagttcatgataaatccctggcc

SEQ ID NO: 288410 - DNA, 25 bp, Homo sapien
ggcatgacctcgtcgccatcgtaga

SEQ ID NO: 288411 - DNA, 25 bp, Homo sapien
gtgtctcccaggttctccgctgctg

SEQ ID NO: 288412 - DNA, 25 bp, Homo sapien
tgtctcccaggttctccgctgctgc

SEQ ID NO: 288413 - DNA, 25 bp, Homo sapien
cactggcaggtgagggtgtcactcc

SEQ ID NO: 288414 - DNA, 25 bp, Homo sapien
cagccattctggatctcgggtaaat

SEQ ID NO: 288415 - DNA, 25 bp, Homo sapien
cgcaccaactccgtgtgagaagtgg

SEQ ID NO: 288416 - DNA, 25 bp, Homo sapien
acactggtaggtgattctggctccc

SEQ ID NO: 288417 - DNA, 25 bp, Homo sapien
gatgggagtccctgtttcacggctg

SEQ ID NO: 288418 - DNA, 25 bp, Homo sapien
tcacggctgtagcaggtcagaagag

SEQ ID NO: 288419 - DNA, 25 bp, Homo sapien
aaattaagcgggtcgagtgatccac

SEQ ID NO: 288420 - DNA, 25 bp, Homo sapien
caggtgtattggatggtggtcccca

SEQ ID NO: 288421 - DNA, 25 bp, Homo sapien
gcccaattcattaaacaggactcac

SEQ ID NO: 288422 - DNA, 25 bp, Homo sapien
gggcccaattcattaaacaggactc

SEQ ID NO: 288423 - DNA, 25 bp, Homo sapien
tgggggcccaattcattaaacagga

SEQ ID NO: 288424 - DNA, 25 bp, Homo sapien
ggcccaattcattaaacaggactca

SEQ ID NO: 288425 - DNA, 25 bp, Homo sapien
taaaagcccctgtcgaaaagcagaa

SEQ ID NO: 288426 - DNA, 25 bp, Homo sapien
tccatcatgaacaagagaaagtgaa

SEQ ID NO: 288427 - DNA, 25 bp, Homo sapien
tatagtatgtgtgctcccaatcagt

SEQ ID NO: 288428 - DNA, 25 bp, Homo sapien
tgtgtgctcccaatcagtgttaggt

SEQ ID NO: 288429 - DNA, 25 bp, Homo sapien
tctcgctgtgccacccaagctaggg

SEQ ID NO: 288430 - DNA, 25 bp, Homo sapien
tgtgccacccaagctagggtacagt

SEQ ID NO: 288431 - DNA, 25 bp, Homo sapien
caagctagggtacagtgacataatc

SEQ ID NO: 288432 - DNA, 25 bp, Homo sapien
acccaagctagggtacagtgacata

SEQ ID NO: 288433 - DNA, 25 bp, Homo sapien
agcagaaacttcttggctgggaggc

SEQ ID NO: 288434 - DNA, 25 bp, Homo sapien
gaatgacactgacgtcctagggctg

SEQ ID NO: 288435 - DNA, 25 bp, Homo sapien
tgatcgctcttgcagtcactagaag

SEQ ID NO: 288436 - DNA, 25 bp, Homo sapien
ccacaaaccgggaggcttaggacag

SEQ ID NO: 288437 - DNA, 25 bp, Homo sapien
tctagggaatgtgattctacaaaca

SEQ ID NO: 288438 - DNA, 25 bp, Homo sapien
tccatgagaatgtgggtcatatctg

SEQ ID NO: 288439 - DNA, 25 bp, Homo sapien
acacaacccggcctaggaaatcagg

SEQ ID NO: 288440 - DNA, 25 bp, Homo sapien
tagtgccagggttcccaaactttca

SEQ ID NO: 288441 - DNA, 25 bp, Homo sapien
caggatgcagcggatggtcacttca

SEQ ID NO: 288442 - DNA, 25 bp, Homo sapien
ggtcacttcacccatgagctcaaag

SEQ ID NO: 288443 - DNA, 25 bp, Homo sapien
tcctggcaggtagagtcgcttgtac

SEQ ID NO: 288444 - DNA, 25 bp, Homo sapien
tcgtagcacatgaaggtgagggact

SEQ ID NO: 288445 - DNA, 25 bp, Homo sapien
cctgtgtggtgagtaggtttcttta

SEQ ID NO: 288446 - DNA, 25 bp, Homo sapien
caagttcagaactcctgtgagccag

SEQ ID NO: 288447 - DNA, 25 bp, Homo sapien
ttagagcaagttcagaactcctgtg

SEQ ID NO: 288448 - DNA, 25 bp, Homo sapien
ctccaggccccgtggaccctgtgtg

SEQ ID NO: 288449 - DNA, 25 bp, Homo sapien
tatggacgttcctacagaattctgc

SEQ ID NO: 288450 - DNA, 25 bp, Homo sapien
gcgagaagtgtacggagactctttt

SEQ ID NO: 288451 - DNA, 25 bp, Homo sapien
tgttctacgggacgcttggtcacct

SEQ ID NO: 288452 - DNA, 25 bp, Homo sapien
tcaatgtaactgcaagccccttgta

SEQ ID NO: 288453 - DNA, 25 bp, Homo sapien
gacactggaaattcaggtgattagc

SEQ ID NO: 288454 - DNA, 25 bp, Homo sapien
ctggaaattcaggtgattagcactg

SEQ ID NO: 288455 - DNA, 25 bp, Homo sapien
cactggaaattcaggtgattagcac

SEQ ID NO: 288456 - DNA, 25 bp, Homo sapien
gaaattcaggtgattagcactggct

SEQ ID NO: 288457 - DNA, 25 bp, Homo sapien
gaagatgagatagataagacccaag

SEQ ID NO: 288458 - DNA, 25 bp, Homo sapien
tcctaagttaccaagagaagatgag

SEQ ID NO: 288459 - DNA, 25 bp, Homo sapien
tataatcagtgaacgtgcctggact

SEQ ID NO: 288460 - DNA, 25 bp, Homo sapien
cccatgccatgctttggtgaagtta

SEQ ID NO: 288461 - DNA, 25 bp, Homo sapien
taaagcatgttcaaaactgtcttga

SEQ ID NO: 288462 - DNA, 25 bp, Homo sapien
aagcatgttcaaaactgtcttgatt

SEQ ID NO: 288463 - DNA, 25 bp, Homo sapien
cttctaaagcatgttcaaaactgtc

SEQ ID NO: 288464 - DNA, 25 bp, Homo sapien
gcatgttcaaaactgtcttgattaa

SEQ ID NO: 288465 - DNA, 25 bp, Homo sapien
tatatatgagccctagttccacctg

SEQ ID NO: 288466 - DNA, 25 bp, Homo sapien
gatactctgaatggagactaacacg

SEQ ID NO: 288467 - DNA, 25 bp, Homo sapien
gaagtgccctctgttttccaagtgg

SEQ ID NO: 288468 - DNA, 25 bp, Homo sapien
tcaagtgttgtctgttacaaggaac

SEQ ID NO: 288469 - DNA, 25 bp, Homo sapien
ttccccccttccagcgacgtctctg

SEQ ID NO: 288470 - DNA, 25 bp, Homo sapien
tccagcgacgtctctgctgccgctt

SEQ ID NO: 288471 - DNA, 25 bp, Homo sapien
ccccttccagcgacgtctctgctgc

SEQ ID NO: 288472 - DNA, 25 bp, Homo sapien
ccttccagcgacgtctctgctgccg

SEQ ID NO: 288473 - DNA, 25 bp, Homo sapien
tcctcccagcagtaaggagatgatg

SEQ ID NO: 288474 - DNA, 25 bp, Homo sapien
cctcccagcagtaaggagatgatga

SEQ ID NO: 288475 - DNA, 25 bp, Homo sapien
atgaggaccgggatgaagatagcca

SEQ ID NO: 288476 - DNA, 25 bp, Homo sapien
aggagatgatgaggaccgggatgaa

SEQ ID NO: 288477 - DNA, 25 bp, Homo sapien
taggggtgggagtacatcagaggca

SEQ ID NO: 288478 - DNA, 25 bp, Homo sapien
cctgtctcgtaaatggggttgtcaa

SEQ ID NO: 288479 - DNA, 25 bp, Homo sapien
caggcggaggttggaatagtagcga

SEQ ID NO: 288480 - DNA, 25 bp, Homo sapien
aaactcggtttccacggtgatctgg

SEQ ID NO: 288481 - DNA, 25 bp, Homo sapien
atagaaacctcatactctctggttt

SEQ ID NO: 288482 - DNA, 25 bp, Homo sapien
tagaaacctcatactctctggtttc

SEQ ID NO: 288483 - DNA, 25 bp, Homo sapien
gatagaaacctcatactctctggtt

SEQ ID NO: 288484 - DNA, 25 bp, Homo sapien
tgttttgtcactgtccagcgaggcc

SEQ ID NO: 288485 - DNA, 25 bp, Homo sapien
catgaatttggctgaggccgcgaaa

SEQ ID NO: 288486 - DNA, 25 bp, Homo sapien
gagcacagctctccaaatgggttta

SEQ ID NO: 288487 - DNA, 25 bp, Homo sapien
gggctgagatattccagaaccccag

SEQ ID NO: 288488 - DNA, 25 bp, Homo sapien
tcagatcagatgatacaggattcca

SEQ ID NO: 288489 - DNA, 25 bp, Homo sapien
tctctctgtcttcattgatgttcag

SEQ ID NO: 288490 - DNA, 25 bp, Homo sapien
gaggaatgcccgtgtgactagatgt

SEQ ID NO: 288491 - DNA, 25 bp, Homo sapien
taaaataagaggaatgcccgtgtga

SEQ ID NO: 288492 - DNA, 25 bp, Homo sapien
gattcactcgaagggcatttttgcc

SEQ ID NO: 288493 - DNA, 25 bp, Homo sapien
tcaaggacataggaagatcatgccc

SEQ ID NO: 288494 - DNA, 25 bp, Homo sapien
cacagggtggtagctgacagataca

SEQ ID NO: 288495 - DNA, 25 bp, Homo sapien
tattctccctatggccagaaaggtc

SEQ ID NO: 288496 - DNA, 25 bp, Homo sapien
gttgctttcccatgaactgtacttg

SEQ ID NO: 288497 - DNA, 25 bp, Homo sapien
tgacttgggcaataagtaggtgtaa

SEQ ID NO: 288498 - DNA, 25 bp, Homo sapien
gaattgattaacaattgacttgggc

SEQ ID NO: 288499 - DNA, 25 bp, Homo sapien
gctgtacgtactttgcccatattcc

SEQ ID NO: 288500 - DNA, 25 bp, Homo sapien
tctcctgactcttgtcactctctga

SEQ ID NO: 288501 - DNA, 25 bp, Homo sapien
gactcttgtcactctctgaagctcg

SEQ ID NO: 288502 - DNA, 25 bp, Homo sapien
gctctcccttctcctgactcttgtc

SEQ ID NO: 288503 - DNA, 25 bp, Homo sapien
tctcccttctcctgactcttgtcac

SEQ ID NO: 288504 - DNA, 25 bp, Homo sapien
gggagtaccaggaaccagcactccc

SEQ ID NO: 288505 - DNA, 25 bp, Homo sapien
ccaggtattgggccgaggaattgga

SEQ ID NO: 288506 - DNA, 25 bp, Homo sapien
ggtggttagggcactcagaggtgag

SEQ ID NO: 288507 - DNA, 25 bp, Homo sapien
ggttagggcactcagaggtgaggtg

SEQ ID NO: 288508 - DNA, 25 bp, Homo sapien
tgtaggactgcatggactccactcc

SEQ ID NO: 288509 - DNA, 25 bp, Homo sapien
gggccagcactaaaggcagttacac

SEQ ID NO: 288510 - DNA, 25 bp, Homo sapien
tctttgaatttgtaggactgcatgg

SEQ ID NO: 288511 - DNA, 25 bp, Homo sapien
tctggttctttgaatttgtaggact

SEQ ID NO: 288512 - DNA, 25 bp, Homo sapien
ggctttctacggcacacccaatttg

SEQ ID NO: 288513 - DNA, 25 bp, Homo sapien
atacccacagttctggggctttcta

SEQ ID NO: 288514 - DNA, 25 bp, Homo sapien
cagttaaagtcaatggcaaaatacc

SEQ ID NO: 288515 - DNA, 25 bp, Homo sapien
gctttctacggcacacccaatttga

SEQ ID NO: 288516 - DNA, 25 bp, Homo sapien
ttgatttgagaagtggtagattcag

SEQ ID NO: 288517 - DNA, 25 bp, Homo sapien
tccgctaggttgtgtcatatgaaga

SEQ ID NO: 288518 - DNA, 25 bp, Homo sapien
tgtagctcccttgacccgggcaaca

SEQ ID NO: 288519 - DNA, 25 bp, Homo sapien
tgaagagtgtgatgtttgatgcacg

SEQ ID NO: 288520 - DNA, 25 bp, Homo sapien
agggagaaagaagcctgtctgaaga

SEQ ID NO: 288521 - DNA, 25 bp, Homo sapien
aactctaggtagttggaattttctg

SEQ ID NO: 288522 - DNA, 25 bp, Homo sapien
tttgcaaactctaggtagttggaat

SEQ ID NO: 288523 - DNA, 25 bp, Homo sapien
tgaagagcccagacagtatgtctcc

SEQ ID NO: 288524 - DNA, 25 bp, Homo sapien
aatccgagaggcatttgttccctcc

SEQ ID NO: 288525 - DNA, 25 bp, Homo sapien
tctgcagctgcaatccgagaggcat

SEQ ID NO: 288526 - DNA, 25 bp, Homo sapien
cagctgcaatccgagaggcatttgt

SEQ ID NO: 288527 - DNA, 25 bp, Homo sapien
ttccattccccgattctcctctctc

SEQ ID NO: 288528 - DNA, 25 bp, Homo sapien
gagtcacccagtcgctgtccaaacc

SEQ ID NO: 288529 - DNA, 25 bp, Homo sapien
cttcgattggtagggtgtccctcga

SEQ ID NO: 288530 - DNA, 25 bp, Homo sapien
caactcctgtaaaaagctgcctggg

SEQ ID NO: 288531 - DNA, 25 bp, Homo sapien
cctcgagagatgttcctgatctgct

SEQ ID NO: 288532 - DNA, 25 bp, Homo sapien
tattcagatgcccattcagcgctgc

SEQ ID NO: 288533 - DNA, 25 bp, Homo sapien
caaggagaacctttgggatccggca

SEQ ID NO: 288534 - DNA, 25 bp, Homo sapien
tcagcgctgccaagatggtgcaaga

SEQ ID NO: 288535 - DNA, 25 bp, Homo sapien
gaatagataagctattcagatgccc

SEQ ID NO: 288536 - DNA, 25 bp, Homo sapien
tcttggtggtaacagactatgacca

SEQ ID NO: 288537 - DNA, 25 bp, Homo sapien
taataggtttccatttctgcaccca

SEQ ID NO: 288538 - DNA, 25 bp, Homo sapien
ggtgccaaccatcagaacggatgct

SEQ ID NO: 288539 - DNA, 25 bp, Homo sapien
taatctgtacaccatggtgccaacc

SEQ ID NO: 288540 - DNA, 25 bp, Homo sapien
atgcaacaatcaaatatggaagact

SEQ ID NO: 288541 - DNA, 25 bp, Homo sapien
ttcttatgcttagcatcaacaggtc

SEQ ID NO: 288542 - DNA, 25 bp, Homo sapien
tcaaatatggaagacttcttatgct

SEQ ID NO: 288543 - DNA, 25 bp, Homo sapien
atggcagacagtgatcgaagctcat

SEQ ID NO: 288544 - DNA, 25 bp, Homo sapien
agctgattattgaagatgttcaggg

SEQ ID NO: 288545 - DNA, 25 bp, Homo sapien
ctgattattgaagatgttcagggca

SEQ ID NO: 288546 - DNA, 25 bp, Homo sapien
tgattattgaagatgttcagggcaa

SEQ ID NO: 288547 - DNA, 25 bp, Homo sapien
taaagctgattattgaagatgttca

SEQ ID NO: 288548 - DNA, 25 bp, Homo sapien
accctgttccagaatgtacctcctc

SEQ ID NO: 288549 - DNA, 25 bp, Homo sapien
caccatgtcccagaacccacctctc

SEQ ID NO: 288550 - DNA, 25 bp, Homo sapien
cctgttccagaatgtacctcctccc

SEQ ID NO: 288551 - DNA, 25 bp, Homo sapien
tgttccagaatgtacctcctccctg

SEQ ID NO: 288552 - DNA, 25 bp, Homo sapien
cctccctcttccagaacgcacctcc

SEQ ID NO: 288553 - DNA, 25 bp, Homo sapien
tccctcttccagaacgcacctcctc

SEQ ID NO: 288554 - DNA, 25 bp, Homo sapien
cctcttccagaacgcacctcctccc

SEQ ID NO: 288555 - DNA, 25 bp, Homo sapien
ctccctcttccagaacgcacctcct

SEQ ID NO: 288556 - DNA, 25 bp, Homo sapien
cgccgcccgagggcgcggacccgcg

SEQ ID NO: 288557 - DNA, 25 bp, Homo sapien
cattgatgaacgacaaggttggccg

SEQ ID NO: 288558 - DNA, 25 bp, Homo sapien
actgctccactttccggcaaaagtc

SEQ ID NO: 288559 - DNA, 25 bp, Homo sapien
tgccgtcggtccctgtgaaaggatt

SEQ ID NO: 288560 - DNA, 25 bp, Homo sapien
tgtcacattatcaagtgccgtcggt

SEQ ID NO: 288561 - DNA, 25 bp, Homo sapien
catggctgccaccgatcctcagata

SEQ ID NO: 288562 - DNA, 25 bp, Homo sapien
gcatggctgccaccgatcctcagat

SEQ ID NO: 288563 - DNA, 25 bp, Homo sapien
gcagattagcgtgggggggaaggag

SEQ ID NO: 288564 - DNA, 25 bp, Homo sapien
aggcatggctgccaccgatcctcag

SEQ ID NO: 288565 - DNA, 25 bp, Homo sapien
ggcgtgtgaagcaaggtcagacaat

SEQ ID NO: 288566 - DNA, 25 bp, Homo sapien
cgtgtgaagcaaggtcagacaatca

SEQ ID NO: 288567 - DNA, 25 bp, Homo sapien
tgaagcaaggtcagacaatcagtcc

SEQ ID NO: 288568 - DNA, 25 bp, Homo sapien
caaggtcagacaatcagtcctcggg

SEQ ID NO: 288569 - DNA, 25 bp, Homo sapien
gatgcacgcgttcccaaaaacattg

SEQ ID NO: 288570 - DNA, 25 bp, Homo sapien
catcatgtttctgtgcgtcccggga

SEQ ID NO: 288571 - DNA, 25 bp, Homo sapien
tgttcccaatacaggtccgaaggct

SEQ ID NO: 288572 - DNA, 25 bp, Homo sapien
tgataacagtaccacacgaagagga

SEQ ID NO: 288573 - DNA, 25 bp, Homo sapien
gaactttgtaaagctggacgctgcc

SEQ ID NO: 288574 - DNA, 25 bp, Homo sapien
gctgaagcagcgttgtgaactttgt

SEQ ID NO: 288575 - DNA, 25 bp, Homo sapien
tctgagatactaaccggtgatgcca

SEQ ID NO: 288576 - DNA, 25 bp, Homo sapien
tcccagagacgagctttttatcgcc

SEQ ID NO: 288577 - DNA, 25 bp, Homo sapien
cttcatggaacgcagcatgcaggaa

SEQ ID NO: 288578 - DNA, 25 bp, Homo sapien
catggaacgcagcatgcaggaaaga

SEQ ID NO: 288579 - DNA, 25 bp, Homo sapien
agaaggcagcgcccttctgcccagc

SEQ ID NO: 288580 - DNA, 25 bp, Homo sapien
gagaaggcagcgcccttctgcccag

SEQ ID NO: 288581 - DNA, 25 bp, Homo sapien
tcgtcccggagcaaagatgaaatca

SEQ ID NO: 288582 - DNA, 25 bp, Homo sapien
cgctgcgacgtttggatgccacaaa

SEQ ID NO: 288583 - DNA, 25 bp, Homo sapien
gatgaaatcaagagcctgccgttcg

SEQ ID NO: 288584 - DNA, 25 bp, Homo sapien
accatgaaaaccacccgtgggccat

SEQ ID NO: 288585 - DNA, 25 bp, Homo sapien
tctgagcatggaaacaacaccggta

SEQ ID NO: 288586 - DNA, 25 bp, Homo sapien
aataagagctttccgctgaggcagg

SEQ ID NO: 288587 - DNA, 25 bp, Homo sapien
aaaaggcatctctagtgtggctggc

SEQ ID NO: 288588 - DNA, 25 bp, Homo sapien
caaaggaatgcgctgttaggccaga

SEQ ID NO: 288589 - DNA, 25 bp, Homo sapien
tctcatcactgacaaatatctgtgt

SEQ ID NO: 288590 - DNA, 25 bp, Homo sapien
tctttgcacacttgctagtacctgc

SEQ ID NO: 288591 - DNA, 25 bp, Homo sapien
agacttcaggtatgtttgaaatgtc

SEQ ID NO: 288592 - DNA, 25 bp, Homo sapien
gacattttactcaaatgtagacgtg

SEQ ID NO: 288593 - DNA, 25 bp, Homo sapien
gcgggctgttggttttgtaaacgca

SEQ ID NO: 288594 - DNA, 25 bp, Homo sapien
gacatgtcacatgaatgcaggtagc

SEQ ID NO: 288595 - DNA, 25 bp, Homo sapien
cagagcagagcagtcacgatgtgta

SEQ ID NO: 288596 - DNA, 25 bp, Homo sapien
tagctaggtacctgcgcgggctgtt

SEQ ID NO: 288597 - DNA, 25 bp, Homo sapien
ttgcaggtggaaacatgcggcagcc

SEQ ID NO: 288598 - DNA, 25 bp, Homo sapien
caagtttaatcgctgtcaccaagga

SEQ ID NO: 288599 - DNA, 25 bp, Homo sapien
gaaacatcgcgatcccaggtgagtg

SEQ ID NO: 288600 - DNA, 25 bp, Homo sapien
gatactgcacatacccacagaggag

SEQ ID NO: 288601 - DNA, 25 bp, Homo sapien
tggaccccactctcggaacaatgaa

SEQ ID NO: 288602 - DNA, 25 bp, Homo sapien
cccggtgttacacagggccatagct

SEQ ID NO: 288603 - DNA, 25 bp, Homo sapien
tcctctagagaccaagcttaggtgg

SEQ ID NO: 288604 - DNA, 25 bp, Homo sapien
gctacacgttagaatcatgaccgga

SEQ ID NO: 288605 - DNA, 25 bp, Homo sapien
cattatacggctaatacatgaatac

SEQ ID NO: 288606 - DNA, 25 bp, Homo sapien
gcctgtatttacattatacggctaa

SEQ ID NO: 288607 - DNA, 25 bp, Homo sapien
tagctggaacaacaagcacttgcta

SEQ ID NO: 288608 - DNA, 25 bp, Homo sapien
ctgtaaacaaatcaatcaatagagg

SEQ ID NO: 288609 - DNA, 25 bp, Homo sapien
gcgtgcggcgcactcggcacgtcat

SEQ ID NO: 288610 - DNA, 25 bp, Homo sapien
gtcagcggcgtgcggcgcactcggc

SEQ ID NO: 288611 - DNA, 25 bp, Homo sapien
tcagcggcgtgcggcgcactcggca

SEQ ID NO: 288612 - DNA, 25 bp, Homo sapien
gcggcgtgcggcgcactcggcacgt

SEQ ID NO: 288613 - DNA, 25 bp, Homo sapien
gccgcggccgtcgagccgcggagcg

SEQ ID NO: 288614 - DNA, 25 bp, Homo sapien
tccgccgcggccgtcgagccgcgga

SEQ ID NO: 288615 - DNA, 25 bp, Homo sapien
ctgccaggattccagcgccgcagct

SEQ ID NO: 288616 - DNA, 25 bp, Homo sapien
cgcggccgtcgagccgcggagcgcc

SEQ ID NO: 288617 - DNA, 25 bp, Homo sapien
gcgccgcctctctcccccggggcgc

SEQ ID NO: 288618 - DNA, 25 bp, Homo sapien
ccagatgcgacgaagcacgactccg

SEQ ID NO: 288619 - DNA, 25 bp, Homo sapien
gacgaagcacgactccgctgtcaga

SEQ ID NO: 288620 - DNA, 25 bp, Homo sapien
ctcccagatgcgacgaagcacgact

SEQ ID NO: 288621 - DNA, 25 bp, Homo sapien
atgcgacgaagcacgactccgctgt

SEQ ID NO: 288622 - DNA, 25 bp, Homo sapien
gctgaactccagaaatcagagataa

SEQ ID NO: 288623 - DNA, 25 bp, Homo sapien
ctagtgctgaactccagaaatcaga

SEQ ID NO: 288624 - DNA, 25 bp, Homo sapien
tccagaaatcagagataaacaggtc

SEQ ID NO: 288625 - DNA, 25 bp, Homo sapien
gaaatcagagataaacaggtccttc

SEQ ID NO: 288626 - DNA, 25 bp, Homo sapien
gcccccaaatgcagttagagggcat

SEQ ID NO: 288627 - DNA, 25 bp, Homo sapien
aaagagcaggcccccaaatgcagtt

SEQ ID NO: 288628 - DNA, 25 bp, Homo sapien
gagcaggcccccaaatgcagttaga

SEQ ID NO: 288629 - DNA, 25 bp, Homo sapien
caggcccccaaatgcagttagaggg

SEQ ID NO: 288630 - DNA, 25 bp, Homo sapien
cttgggatagaatcagtggccacat

SEQ ID NO: 288631 - DNA, 25 bp, Homo sapien
gactcctctggcaatgagtcaagat

SEQ ID NO: 288632 - DNA, 25 bp, Homo sapien
gatgtctgaaagagtccccacaggg

SEQ ID NO: 288633 - DNA, 25 bp, Homo sapien
gatagaatcagtggccacatctgac

SEQ ID NO: 288634 - DNA, 25 bp, Homo sapien
cttcaaatggcaggttcctgtgacc

SEQ ID NO: 288635 - DNA, 25 bp, Homo sapien
aaatggcaggttcctgtgaccaaga

SEQ ID NO: 288636 - DNA, 25 bp, Homo sapien
gcaggttcctgtgaccaagatctct

SEQ ID NO: 288637 - DNA, 25 bp, Homo sapien
tggcaggttcctgtgaccaagatct

SEQ ID NO: 288638 - DNA, 25 bp, Homo sapien
gctggtttctagctacgatgcaggt

SEQ ID NO: 288639 - DNA, 25 bp, Homo sapien
atgcaggtggcaaagttcccaatgc

SEQ ID NO: 288640 - DNA, 25 bp, Homo sapien
aaagttcccaatgccgtaacacaca

SEQ ID NO: 288641 - DNA, 25 bp, Homo sapien
gcagcaaaaacgttagctggtttct

SEQ ID NO: 288642 - DNA, 25 bp, Homo sapien
gagggtcatatacccaacagtgact

SEQ ID NO: 288643 - DNA, 25 bp, Homo sapien
gttctcactgagaacagtcacacca

SEQ ID NO: 288644 - DNA, 25 bp, Homo sapien
caccaagggtgttaaggacttcaat

SEQ ID NO: 288645 - DNA, 25 bp, Homo sapien
tttcaagttggctaaacagagggtc

SEQ ID NO: 288646 - DNA, 25 bp, Homo sapien
tgtcccactagcaaactcctggtag

SEQ ID NO: 288647 - DNA, 25 bp, Homo sapien
cactagcaaactcctggtagacctt

SEQ ID NO: 288648 - DNA, 25 bp, Homo sapien
tcctggtagaccttcaaagcccagc

SEQ ID NO: 288649 - DNA, 25 bp, Homo sapien
caaactcctggtagaccttcaaagc

SEQ ID NO: 288650 - DNA, 25 bp, Homo sapien
gattgttgtacaaggccgtcccaca

SEQ ID NO: 288651 - DNA, 25 bp, Homo sapien
tgaccagttactccataaaagattg

SEQ ID NO: 288652 - DNA, 25 bp, Homo sapien
aatgatgaccatcttagaaagggca

SEQ ID NO: 288653 - DNA, 25 bp, Homo sapien
atgtaaaagatggtaggctccccgc

SEQ ID NO: 288654 - DNA, 25 bp, Homo sapien
taagacacatagaagggcaagatga

SEQ ID NO: 288655 - DNA, 25 bp, Homo sapien
tggagtaaaccagttaaatagttga

SEQ ID NO: 288656 - DNA, 25 bp, Homo sapien
agaattcaggaaaaaactcaagatg

SEQ ID NO: 288657 - DNA, 25 bp, Homo sapien
caccatgattaggaggtatgaggat

SEQ ID NO: 288658 - DNA, 25 bp, Homo sapien
caatgtagggataatttttctgcag

SEQ ID NO: 288659 - DNA, 25 bp, Homo sapien
ctttgcaatgtagggataatttttc

SEQ ID NO: 288660 - DNA, 25 bp, Homo sapien
aatgtagggataatttttctgcaga

SEQ ID NO: 288661 - DNA, 25 bp, Homo sapien
tgcaatgtagggataatttttctgc

SEQ ID NO: 288662 - DNA, 25 bp, Homo sapien
cccagcccctttattcagatagata

SEQ ID NO: 288663 - DNA, 25 bp, Homo sapien
ccagcccctttattcagatagatac

SEQ ID NO: 288664 - DNA, 25 bp, Homo sapien
tgtccatgtattgtgaagtctgagg

SEQ ID NO: 288665 - DNA, 25 bp, Homo sapien
ggaaactcaagctcctccagtcctt

SEQ ID NO: 288666 - DNA, 25 bp, Homo sapien
tcccaaatatctatggagagctgtt

SEQ ID NO: 288667 - DNA, 25 bp, Homo sapien
gacagaggtatcattaaatatgtcc

SEQ ID NO: 288668 - DNA, 25 bp, Homo sapien
tcagtcagtagcagaaggatcttct

SEQ ID NO: 288669 - DNA, 25 bp, Homo sapien
cagtcagtagcagaaggatcttctc

SEQ ID NO: 288670 - DNA, 25 bp, Homo sapien
taggtgacgcatcttacagtgtgga

SEQ ID NO: 288671 - DNA, 25 bp, Homo sapien
cttgatatcatgaaccgggcggtgt

SEQ ID NO: 288672 - DNA, 25 bp, Homo sapien
tcttaggtgcctacatgcagccagg

SEQ ID NO: 288673 - DNA, 25 bp, Homo sapien
caacgttggtaagtgaggattccca

SEQ ID NO: 288674 - DNA, 25 bp, Homo sapien
gctcagagagtttacatgcaagggc

SEQ ID NO: 288675 - DNA, 25 bp, Homo sapien
cagcccaaattatgaggagatcacc

SEQ ID NO: 288676 - DNA, 25 bp, Homo sapien
aagggcactttagctaccaggctga

SEQ ID NO: 288677 - DNA, 25 bp, Homo sapien
gaagtcgatgttctcagaccaagtg

SEQ ID NO: 288678 - DNA, 25 bp, Homo sapien
agcactttatttgctttatctcagc

SEQ ID NO: 288679 - DNA, 25 bp, Homo sapien
gttccaagcactttatttgctttat

SEQ ID NO: 288680 - DNA, 25 bp, Homo sapien
agctgttccaagcactttatttgct

SEQ ID NO: 288681 - DNA, 25 bp, Homo sapien
tttatttgctttatctcagctcctc

SEQ ID NO: 288682 - DNA, 25 bp, Homo sapien
ttcatagtgggcaccatttattgga

SEQ ID NO: 288683 - DNA, 25 bp, Homo sapien
catagtgggcaccatttattggaca

SEQ ID NO: 288684 - DNA, 25 bp, Homo sapien
tagtgggcaccatttattggacatt

SEQ ID NO: 288685 - DNA, 25 bp, Homo sapien
agtgggcaccatttattggacattt

SEQ ID NO: 288686 - DNA, 25 bp, Homo sapien
tgtaatcaaatggatgggcatattt

SEQ ID NO: 288687 - DNA, 25 bp, Homo sapien
atgtaatcaaatggatgggcatatt

SEQ ID NO: 288688 - DNA, 25 bp, Homo sapien
ggcatatttgtttggcaatgtacaa

SEQ ID NO: 288689 - DNA, 25 bp, Homo sapien
gatgggcatatttgtttggcaatgt

SEQ ID NO: 288690 - DNA, 25 bp, Homo sapien
gtcatagacatgacaggccgggagc

SEQ ID NO: 288691 - DNA, 25 bp, Homo sapien
tatggttcccactttacaacactgc

SEQ ID NO: 288692 - DNA, 25 bp, Homo sapien
aacagggctgcagcggtgttaacct

SEQ ID NO: 288693 - DNA, 25 bp, Homo sapien
aacgttcccgatgatgggctgccgc

SEQ ID NO: 288694 - DNA, 25 bp, Homo sapien
tcaaagaacagtggtgacagttgcc

SEQ ID NO: 288695 - DNA, 25 bp, Homo sapien
taagagtgtctaggtgcctcccagg

SEQ ID NO: 288696 - DNA, 25 bp, Homo sapien
gctggtggttcatggatcacactct

SEQ ID NO: 288697 - DNA, 25 bp, Homo sapien
caaacgtgctgttatctggacgacc

SEQ ID NO: 288698 - DNA, 25 bp, Homo sapien
caaatttgtgttcgtaaacaggccg

SEQ ID NO: 288699 - DNA, 25 bp, Homo sapien
ctttgctttgagagttagggcctgc

SEQ ID NO: 288700 - DNA, 25 bp, Homo sapien
tgggctggactttactaccgtcaca

SEQ ID NO: 288701 - DNA, 25 bp, Homo sapien
ccctgattgtaagagacacctttgc

SEQ ID NO: 288702 - DNA, 25 bp, Homo sapien
tgagcgtcacagtacaaagcaggag

SEQ ID NO: 288703 - DNA, 25 bp, Homo sapien
tatttaccacaactaccgtatgggc

SEQ ID NO: 288704 - DNA, 25 bp, Homo sapien
taaagtctccttaggccaaggtggc

SEQ ID NO: 288705 - DNA, 25 bp, Homo sapien
taccgagagcgtcaaagatacagga

SEQ ID NO: 288706 - DNA, 25 bp, Homo sapien
cacattggcctagcacaggtgaggg

SEQ ID NO: 288707 - DNA, 25 bp, Homo sapien
cagggagggcccatgactgttctgc

SEQ ID NO: 288708 - DNA, 25 bp, Homo sapien
gctaaattgcactcaaggttggaac

SEQ ID NO: 288709 - DNA, 25 bp, Homo sapien
taccaggtacggttttcattgccta

SEQ ID NO: 288710 - DNA, 25 bp, Homo sapien
tagttgtcatgcctctttggtcccc

SEQ ID NO: 288711 - DNA, 25 bp, Homo sapien
tagctacagaaaagccaagcgtatg

SEQ ID NO: 288712 - DNA, 25 bp, Homo sapien
ccaggttatggatcttcagcaggaa

SEQ ID NO: 288713 - DNA, 25 bp, Homo sapien
taccacggcattgtaggccccattt

SEQ ID NO: 288714 - DNA, 25 bp, Homo sapien
ctctccgcatggctagactgggctt

SEQ ID NO: 288715 - DNA, 25 bp, Homo sapien
gggtacctcttatgcatgtagtctc

SEQ ID NO: 288716 - DNA, 25 bp, Homo sapien
tggttggagcatctagaggcttagt

SEQ ID NO: 288717 - DNA, 25 bp, Homo sapien
gacgtggccatctcagggtggttaa

SEQ ID NO: 288718 - DNA, 25 bp, Homo sapien
tatgagaagtccatctgtgaagacc

SEQ ID NO: 288719 - DNA, 25 bp, Homo sapien
gaatctggcgacagctatgtatccc

SEQ ID NO: 288720 - DNA, 25 bp, Homo sapien
gaagaccctggatgttcagagaact

SEQ ID NO: 288721 - DNA, 25 bp, Homo sapien
taatggatgacattggcggtggtcc

SEQ ID NO: 288722 - DNA, 25 bp, Homo sapien
tcaggtagatttgtgatgagcaaaa

SEQ ID NO: 288723 - DNA, 25 bp, Homo sapien
tcagaattcagaagagctattatcc

SEQ ID NO: 288724 - DNA, 25 bp, Homo sapien
tataggtgcatgtaaggcacagctg

SEQ ID NO: 288725 - DNA, 25 bp, Homo sapien
ccccaggatcgatgattggctagaa

SEQ ID NO: 288726 - DNA, 25 bp, Homo sapien
cgtgctctgcaacaaggacccattt

SEQ ID NO: 288727 - DNA, 25 bp, Homo sapien
catcctggaggtgattgccaagcac

SEQ ID NO: 288728 - DNA, 25 bp, Homo sapien
cgtggaataccgctatggcaaggcc

SEQ ID NO: 288729 - DNA, 25 bp, Homo sapien
gaggcgccaggcaagaaaatcagca

SEQ ID NO: 288730 - DNA, 25 bp, Homo sapien
ccgattctggcttaatctgattatt

SEQ ID NO: 288731 - DNA, 25 bp, Homo sapien
acctgctgaaatgaaaccccgctgt

SEQ ID NO: 288732 - DNA, 25 bp, Homo sapien
ccgctgtttccaacaaccgattctg

SEQ ID NO: 288733 - DNA, 25 bp, Homo sapien
tgctgaaatgaaaccccgctgtttc

SEQ ID NO: 288734 - DNA, 25 bp, Homo sapien
ctgtggagctcagtgtactgcaatg

SEQ ID NO: 288735 - DNA, 25 bp, Homo sapien
gtctctgtggagctcagtgtactgc

SEQ ID NO: 288736 - DNA, 25 bp, Homo sapien
ccggcgctgtctctgtggagctcag

SEQ ID NO: 288737 - DNA, 25 bp, Homo sapien
ctctgtggagctcagtgtactgcaa

SEQ ID NO: 288738 - DNA, 25 bp, Homo sapien
gcgcctcccgacaagtttgcccaaa

SEQ ID NO: 288739 - DNA, 25 bp, Homo sapien
gggtgcttcttcttatgcgcctccc

SEQ ID NO: 288740 - DNA, 25 bp, Homo sapien
ttatgcgcctcccgacaagtttgcc

SEQ ID NO: 288741 - DNA, 25 bp, Homo sapien
ggtgcttcttcttatgcgcctcccg

SEQ ID NO: 288742 - DNA, 25 bp, Homo sapien
agaacaggaagaaggccgaaggagt

SEQ ID NO: 288743 - DNA, 25 bp, Homo sapien
aggaagaaggccgaaggagtcctct

SEQ ID NO: 288744 - DNA, 25 bp, Homo sapien
gcgatacgcagagcagaacaggaag

SEQ ID NO: 288745 - DNA, 25 bp, Homo sapien
cgaaggagtcctcttgggtgcattc

SEQ ID NO: 288746 - DNA, 25 bp, Homo sapien
atctctcccagtttcttcgcaacat

SEQ ID NO: 288747 - DNA, 25 bp, Homo sapien
ctctcccagtttcttcgcaacatca

SEQ ID NO: 288748 - DNA, 25 bp, Homo sapien
catctctcccagtttcttcgcaaca

SEQ ID NO: 288749 - DNA, 25 bp, Homo sapien
cacatctctcccagtttcttcgcaa

SEQ ID NO: 288750 - DNA, 25 bp, Homo sapien
cttgacaactcccttttttgctgca

SEQ ID NO: 288751 - DNA, 25 bp, Homo sapien
ttcctttagctcgatatgcagcaat

SEQ ID NO: 288752 - DNA, 25 bp, Homo sapien
gcagcaatatccttttcgtattttt

SEQ ID NO: 288753 - DNA, 25 bp, Homo sapien
gctgcttgtcatctgcggcagtgtt

SEQ ID NO: 288754 - DNA, 25 bp, Homo sapien
cctcctcttccttctttttcttgct

SEQ ID NO: 288755 - DNA, 25 bp, Homo sapien
ttattcatcatcttcttcatcttca

SEQ ID NO: 288756 - DNA, 25 bp, Homo sapien
cctcatcctcttcatcttcctcatc

SEQ ID NO: 288757 - DNA, 25 bp, Homo sapien
tcttcttcatcttcctcctcctcat

SEQ ID NO: 288758 - DNA, 25 bp, Homo sapien
gttagcggctattgaaaataccatc

SEQ ID NO: 288759 - DNA, 25 bp, Homo sapien
gcggctattgaaaataccatcagga

SEQ ID NO: 288760 - DNA, 25 bp, Homo sapien
cggctattgaaaataccatcaggac

SEQ ID NO: 288761 - DNA, 25 bp, Homo sapien
tagcggctattgaaaataccatcag

SEQ ID NO: 288762 - DNA, 25 bp, Homo sapien
cctgtgggagttgtgctctggcttt

SEQ ID NO: 288763 - DNA, 25 bp, Homo sapien
ggtgtagcctgtgggagttgtgctc

SEQ ID NO: 288764 - DNA, 25 bp, Homo sapien
gggatttggagcctgcgaggaagga

SEQ ID NO: 288765 - DNA, 25 bp, Homo sapien
tttggagcctgcgaggaaggacctt

SEQ ID NO: 288766 - DNA, 25 bp, Homo sapien
tattcatgacggggcaaggcttgcg

SEQ ID NO: 288767 - DNA, 25 bp, Homo sapien
gttattcatgacggggcaaggcttg

SEQ ID NO: 288768 - DNA, 25 bp, Homo sapien
tgttattcatgacggggcaaggctt

SEQ ID NO: 288769 - DNA, 25 bp, Homo sapien
ttattcatgacggggcaaggcttgc

SEQ ID NO: 288770 - DNA, 25 bp, Homo sapien
tgacacccctctaagccacgtgaag

SEQ ID NO: 288771 - DNA, 25 bp, Homo sapien
tttgaaccaacactgcagtctggga

SEQ ID NO: 288772 - DNA, 25 bp, Homo sapien
gagcctcaggtatggctagatccaa

SEQ ID NO: 288773 - DNA, 25 bp, Homo sapien
cagctttgcaggtggtgactagaga

SEQ ID NO: 288774 - DNA, 25 bp, Homo sapien
gatttacctgaggtcacaaaactaa

SEQ ID NO: 288775 - DNA, 25 bp, Homo sapien
gtatttagctgctctcccgattcac

SEQ ID NO: 288776 - DNA, 25 bp, Homo sapien
gcccttatgtgtatttagctgctct

SEQ ID NO: 288777 - DNA, 25 bp, Homo sapien
gggaattcaaactcaggcgcatctt

SEQ ID NO: 288778 - DNA, 25 bp, Homo sapien
tagagcctggtgacttccggcactg

SEQ ID NO: 288779 - DNA, 25 bp, Homo sapien
gggtaccagtacctcctagagcctg

SEQ ID NO: 288780 - DNA, 25 bp, Homo sapien
agtatcctggctaccgcgggtacca

SEQ ID NO: 288781 - DNA, 25 bp, Homo sapien
aaacagatgtgtgccttgaggtccc

SEQ ID NO: 288782 - DNA, 25 bp, Homo sapien
agggcaacaccatagagatccaggg

SEQ ID NO: 288783 - DNA, 25 bp, Homo sapien
ggacgacgcacccagtctctgggtc

SEQ ID NO: 288784 - DNA, 25 bp, Homo sapien
tacggcttcagtgaccgcgtgggca

SEQ ID NO: 288785 - DNA, 25 bp, Homo sapien
cgtgggcagcgtgaaggtctccagt

SEQ ID NO: 288786 - DNA, 25 bp, Homo sapien
tttagagacctaaccccaggtgcgc

SEQ ID NO: 288787 - DNA, 25 bp, Homo sapien
tctatctcatctctgcagcgtcgac

SEQ ID NO: 288788 - DNA, 25 bp, Homo sapien
agtctatctcatctctgcagcgtcg

SEQ ID NO: 288789 - DNA, 25 bp, Homo sapien
ggagtctatctcatctctgcagcgt

SEQ ID NO: 288790 - DNA, 25 bp, Homo sapien
tctcgtgaacagcatggcttggacg

SEQ ID NO: 288791 - DNA, 25 bp, Homo sapien
gcctgatatttcagagcgtgaccat

SEQ ID NO: 288792 - DNA, 25 bp, Homo sapien
catattgttgcgcatgactgccggc

SEQ ID NO: 288793 - DNA, 25 bp, Homo sapien
tcctgctaagcacgatttcagtggt

SEQ ID NO: 288794 - DNA, 25 bp, Homo sapien
gctgactttgtgcattgcagggtca

SEQ ID NO: 288795 - DNA, 25 bp, Homo sapien
tcccgctgactttgtgcattgcagg

SEQ ID NO: 288796 - DNA, 25 bp, Homo sapien
agggtcccgctgactttgtgcattg

SEQ ID NO: 288797 - DNA, 25 bp, Homo sapien
ggtcccgctgactttgtgcattgca

SEQ ID NO: 288798 - DNA, 25 bp, Homo sapien
aagccgtcctcatcccacaccacca

SEQ ID NO: 288799 - DNA, 25 bp, Homo sapien
ggaagccgtcctcatcccacaccac

SEQ ID NO: 288800 - DNA, 25 bp, Homo sapien
agccgtcctcatcccacaccaccat

SEQ ID NO: 288801 - DNA, 25 bp, Homo sapien
ctggaagccgtcctcatcccacacc

SEQ ID NO: 288802 - DNA, 25 bp, Homo sapien
agcactttcaaagatcgcacagtct

SEQ ID NO: 288803 - DNA, 25 bp, Homo sapien
caaagatcgcacagtctcgaagcca

SEQ ID NO: 288804 - DNA, 25 bp, Homo sapien
gcacagtctcgaagccaagctccag

SEQ ID NO: 288805 - DNA, 25 bp, Homo sapien
ggcactcggccgtgaactcgtgccg

SEQ ID NO: 288806 - DNA, 25 bp, Homo sapien
tattcgcctcgttccagaatgtact

SEQ ID NO: 288807 - DNA, 25 bp, Homo sapien
cagcttggatattcgcctcgttcca

SEQ ID NO: 288808 - DNA, 25 bp, Homo sapien
gcaggccggaaggaggtgagcctct

SEQ ID NO: 288809 - DNA, 25 bp, Homo sapien
gtaggccgtgttgccgccccaggca

SEQ ID NO: 288810 - DNA, 25 bp, Homo sapien
ttgtcagcctcgagtcacggtggtt

SEQ ID NO: 288811 - DNA, 25 bp, Homo sapien
gagggaaggatagtcatcgctcagc

SEQ ID NO: 288812 - DNA, 25 bp, Homo sapien
tctcttgctcgaagattgtcagcct

SEQ ID NO: 288813 - DNA, 25 bp, Homo sapien
ttcttgcccaggaagttctcttgct

SEQ ID NO: 288814 - DNA, 25 bp, Homo sapien
gccccagagtggacgtggaaggacc

SEQ ID NO: 288815 - DNA, 25 bp, Homo sapien
cagagtggacgtggaaggaccctac

SEQ ID NO: 288816 - DNA, 25 bp, Homo sapien
cccagagtggacgtggaaggaccct

SEQ ID NO: 288817 - DNA, 25 bp, Homo sapien
ccagagtggacgtggaaggacccta

SEQ ID NO: 288818 - DNA, 25 bp, Homo sapien
ctggaaaagagaaaaggcagacagt

SEQ ID NO: 288819 - DNA, 25 bp, Homo sapien
tggaaaagagaaaaggcagacagtt

SEQ ID NO: 288820 - DNA, 25 bp, Homo sapien
gaaaagagaaaaggcagacagttac

SEQ ID NO: 288821 - DNA, 25 bp, Homo sapien
aaaagagaaaaggcagacagttact

SEQ ID NO: 288822 - DNA, 25 bp, Homo sapien
tactgaaatcctcggtagcccggaa

SEQ ID NO: 288823 - DNA, 25 bp, Homo sapien
gaatggtgatcgcattccagcacat

SEQ ID NO: 288824 - DNA, 25 bp, Homo sapien
ccactcccggaaatgtttgtagtca

SEQ ID NO: 288825 - DNA, 25 bp, Homo sapien
tccagcacatactgaaatcctcggt

SEQ ID NO: 288826 - DNA, 25 bp, Homo sapien
tcactgctggatcctgcggatgctc

SEQ ID NO: 288827 - DNA, 25 bp, Homo sapien
ctctgcacctggaaggtcggggcat

SEQ ID NO: 288828 - DNA, 25 bp, Homo sapien
tggatcctgcggatgctctgcacct

SEQ ID NO: 288829 - DNA, 25 bp, Homo sapien
tgcacctggaaggtcggggcatgag

SEQ ID NO: 288830 - DNA, 25 bp, Homo sapien
tattcgtttgagttttttgtgctga

SEQ ID NO: 288831 - DNA, 25 bp, Homo sapien
ccagagcgcctccattgcagataag

SEQ ID NO: 288832 - DNA, 25 bp, Homo sapien
ataagcacgcatgcgctcctccgtg

SEQ ID NO: 288833 - DNA, 25 bp, Homo sapien
gactgtgcacggaccagttcacatg

SEQ ID NO: 288834 - DNA, 25 bp, Homo sapien
cacgctaggtggttgtgttcctttt

SEQ ID NO: 288835 - DNA, 25 bp, Homo sapien
tgctcttggggatctcagtggagca

SEQ ID NO: 288836 - DNA, 25 bp, Homo sapien
aaccaggtcttgatgtcacttagca

SEQ ID NO: 288837 - DNA, 25 bp, Homo sapien
cccctttcacgctaggtggttgtgt

SEQ ID NO: 288838 - DNA, 25 bp, Homo sapien
taaacagacacaactagaagggatc

SEQ ID NO: 288839 - DNA, 25 bp, Homo sapien
gcatccagatcctggccgcatagag

SEQ ID NO: 288840 - DNA, 25 bp, Homo sapien
tatttatgagatgcatctgggctct

SEQ ID NO: 288841 - DNA, 25 bp, Homo sapien
gggctctctgcaaatcagctgtgaa

SEQ ID NO: 288842 - DNA, 25 bp, Homo sapien
tagcgccaagggcttaaccaggaag

SEQ ID NO: 288843 - DNA, 25 bp, Homo sapien
gacgcttgttctggcatagcgccaa

SEQ ID NO: 288844 - DNA, 25 bp, Homo sapien
cctcgggtgtatgcctctttatgca

SEQ ID NO: 288845 - DNA, 25 bp, Homo sapien
cctgaaccccggagtaagaggacag

SEQ ID NO: 288846 - DNA, 25 bp, Homo sapien
caggaaagcggggtgcaaccggtct

SEQ ID NO: 288847 - DNA, 25 bp, Homo sapien
aagcggggtgcaaccggtcttggag

SEQ ID NO: 288848 - DNA, 25 bp, Homo sapien
ggtgcaaccggtcttggagggagca

SEQ ID NO: 288849 - DNA, 25 bp, Homo sapien
cctggccaggaaagcggggtgcaac

SEQ ID NO: 288850 - DNA, 25 bp, Homo sapien
cctccttgcgcccctacaacctcac

SEQ ID NO: 288851 - DNA, 25 bp, Homo sapien
tgaaattttaatgcgggagcggctg

SEQ ID NO: 288852 - DNA, 25 bp, Homo sapien
ctgcagcgcccatgaaattttaatg

SEQ ID NO: 288853 - DNA, 25 bp, Homo sapien
cccatgaaattttaatgcgggagcg

SEQ ID NO: 288854 - DNA, 25 bp, Homo sapien
gcgcccatgaaattttaatgcggga

SEQ ID NO: 288855 - DNA, 25 bp, Homo sapien
ttgtgccccggctcacagcgcagaa

SEQ ID NO: 288856 - DNA, 25 bp, Homo sapien
cctccctctggtcccgcgagcgcag

SEQ ID NO: 288857 - DNA, 25 bp, Homo sapien
gggctctttgtgccccggctcacag

SEQ ID NO: 288858 - DNA, 25 bp, Homo sapien
cgcagccggcgtcgtctttgtagct

SEQ ID NO: 288859 - DNA, 25 bp, Homo sapien
tggaccgagaaggtccgcgggtcca

SEQ ID NO: 288860 - DNA, 25 bp, Homo sapien
tgtgtcttgtgtcgtcggaaggaaa

SEQ ID NO: 288861 - DNA, 25 bp, Homo sapien
ccacctcccaaattgtgtcttgtgt

SEQ ID NO: 288862 - DNA, 25 bp, Homo sapien
caaattgtgtcttgtgtcgtcggaa

SEQ ID NO: 288863 - DNA, 25 bp, Homo sapien
atggcaggctcggggggttgggtcg

SEQ ID NO: 288864 - DNA, 25 bp, Homo sapien
tggagccaaatttgacgccggacat

SEQ ID NO: 288865 - DNA, 25 bp, Homo sapien
ttggagccaaatttgacgccggaca

SEQ ID NO: 288866 - DNA, 25 bp, Homo sapien
gtagagtaacctctccataaactga

SEQ ID NO: 288867 - DNA, 25 bp, Homo sapien
ctcgtgggactgttgtgataacgct

SEQ ID NO: 288868 - DNA, 25 bp, Homo sapien
gtgataacgcttgcaaagcaccaag

SEQ ID NO: 288869 - DNA, 25 bp, Homo sapien
caagcacgtccctgcgtagagtaac

SEQ ID NO: 288870 - DNA, 25 bp, Homo sapien
ctaaagctggcggtaaggggttatg

SEQ ID NO: 288871 - DNA, 25 bp, Homo sapien
gttttgggggactgtgaagacttca

SEQ ID NO: 288872 - DNA, 25 bp, Homo sapien
gggactgtgaagacttcaccactct

SEQ ID NO: 288873 - DNA, 25 bp, Homo sapien
gactgtgaagacttcaccactcttc

SEQ ID NO: 288874 - DNA, 25 bp, Homo sapien
cttggttacccctgtgatgccgacg

SEQ ID NO: 288875 - DNA, 25 bp, Homo sapien
tggttacccctgtgatgccgacggg

SEQ ID NO: 288876 - DNA, 25 bp, Homo sapien
tggccacatgaacgtgtctggaacc

SEQ ID NO: 288877 - DNA, 25 bp, Homo sapien
tgtctggaaccacatgggtggacag

SEQ ID NO: 288878 - DNA, 25 bp, Homo sapien
agtgaccctttcccctcgttctgtg

SEQ ID NO: 288879 - DNA, 25 bp, Homo sapien
tgtaaatagaccctggactgctcag

SEQ ID NO: 288880 - DNA, 25 bp, Homo sapien
gaggagcctggcttgatccacagtg

SEQ ID NO: 288881 - DNA, 25 bp, Homo sapien
cctggcttgatccacagtgaccctt

SEQ ID NO: 288882 - DNA, 25 bp, Homo sapien
ttgtgaacgtcctgaagaacctgga

SEQ ID NO: 288883 - DNA, 25 bp, Homo sapien
tttcctgcacagaccagaagagggc

SEQ ID NO: 288884 - DNA, 25 bp, Homo sapien
tagccctaacgccaaatgtgaagtg

SEQ ID NO: 288885 - DNA, 25 bp, Homo sapien
tggttcacatcatcagggagtcccc

SEQ ID NO: 288886 - DNA, 25 bp, Homo sapien
gccagaggctggactaggactcttt

SEQ ID NO: 288887 - DNA, 25 bp, Homo sapien
tgatgccccatgcaccagaggaaat

SEQ ID NO: 288888 - DNA, 25 bp, Homo sapien
gacattcactcaaggtgcacggtaa

SEQ ID NO: 288889 - DNA, 25 bp, Homo sapien
tgaatagcagctgaacggagagtca

SEQ ID NO: 288890 - DNA, 25 bp, Homo sapien
cagcatccagccgacacacaggcag

SEQ ID NO: 288891 - DNA, 25 bp, Homo sapien
tccttccttccccacacagacccca

SEQ ID NO: 288892 - DNA, 25 bp, Homo sapien
ctggcagcatccagccgacacacag

SEQ ID NO: 288893 - DNA, 25 bp, Homo sapien
gcatccagccgacacacaggcagcc

SEQ ID NO: 288894 - DNA, 25 bp, Homo sapien
tgttctgacatgaagatctgagcag

SEQ ID NO: 288895 - DNA, 25 bp, Homo sapien
atctgagcagatgggatcatgtctc

SEQ ID NO: 288896 - DNA, 25 bp, Homo sapien
tgtctctgggttcacctctgcgtcc

SEQ ID NO: 288897 - DNA, 25 bp, Homo sapien
agagaagttgcttggtccatgccgg

SEQ ID NO: 288898 - DNA, 25 bp, Homo sapien
gaatccaaggtcacccgaggtccaa

SEQ ID NO: 288899 - DNA, 25 bp, Homo sapien
caggagtcctggagatgcggcccag

SEQ ID NO: 288900 - DNA, 25 bp, Homo sapien
gagtcctggagatgcggcccagatg

SEQ ID NO: 288901 - DNA, 25 bp, Homo sapien
gccagaatccaaggtcacccgaggt

SEQ ID NO: 288902 - DNA, 25 bp, Homo sapien
gaagagttcctatccatgggaggct

SEQ ID NO: 288903 - DNA, 25 bp, Homo sapien
tgctgagcatcaaccaggaagagtt

SEQ ID NO: 288904 - DNA, 25 bp, Homo sapien
aaaccaccggagtctgaccgctaag

SEQ ID NO: 288905 - DNA, 25 bp, Homo sapien
gagatcttcagggagtcacccagcg

SEQ ID NO: 288906 - DNA, 25 bp, Homo sapien
tgctctcttgcaaacgctgggactg

SEQ ID NO: 288907 - DNA, 25 bp, Homo sapien
taaacttgcctaagggaggccacaa

SEQ ID NO: 288908 - DNA, 25 bp, Homo sapien
cctgagactgggctaaggtgacccc

SEQ ID NO: 288909 - DNA, 25 bp, Homo sapien
gcagtgcaactagaagcagcgatct

SEQ ID NO: 288910 - DNA, 25 bp, Homo sapien
ccaaatggctagcacgggaaagggc

SEQ ID NO: 288911 - DNA, 25 bp, Homo sapien
tagagggtcgggtatcatctcagcc

SEQ ID NO: 288912 - DNA, 25 bp, Homo sapien
cccagagggctggatcctgttacac

SEQ ID NO: 288913 - DNA, 25 bp, Homo sapien
gattctacggccataaaagtcaagg

SEQ ID NO: 288914 - DNA, 25 bp, Homo sapien
gaactcgcattctaccactgaggaa

SEQ ID NO: 288915 - DNA, 25 bp, Homo sapien
catgagctgcacagttagtaggatc

SEQ ID NO: 288916 - DNA, 25 bp, Homo sapien
tgtgctgagacccttatattgacgg

SEQ ID NO: 288917 - DNA, 25 bp, Homo sapien
tctgcacaaagatcccagcccatag

SEQ ID NO: 288918 - DNA, 25 bp, Homo sapien
gattcaaagccaagtgtcttgcccc

SEQ ID NO: 288919 - DNA, 25 bp, Homo sapien
taatcgaacaaaagagctgcctaca

SEQ ID NO: 288920 - DNA, 25 bp, Homo sapien
gaaaaggaagaacgcacgcaggtcc

SEQ ID NO: 288921 - DNA, 25 bp, Homo sapien
cacacacaggagtcgctaagagaaa

SEQ ID NO: 288922 - DNA, 25 bp, Homo sapien
ccctcgtgacttcctgtgcaggaca

SEQ ID NO: 288923 - DNA, 25 bp, Homo sapien
gcacataggagagatgtcatactca

SEQ ID NO: 288924 - DNA, 25 bp, Homo sapien
gtgcaggacagcttctatccccgtc

SEQ ID NO: 288925 - DNA, 25 bp, Homo sapien
cagaggacacaaaagctcagagctc

SEQ ID NO: 288926 - DNA, 25 bp, Homo sapien
tctctagctgacttcctgtgtggga

SEQ ID NO: 288927 - DNA, 25 bp, Homo sapien
aaatgtttctctggccgacttcctg

SEQ ID NO: 288928 - DNA, 25 bp, Homo sapien
gacttccggtgtcagaaatgtccct

SEQ ID NO: 288929 - DNA, 25 bp, Homo sapien
tgtgggaaagagtcctctcactgac

SEQ ID NO: 288930 - DNA, 25 bp, Homo sapien
aaggacgttccctcagtctaaagag

SEQ ID NO: 288931 - DNA, 25 bp, Homo sapien
gactatgaggagtgaagatatgccc

SEQ ID NO: 288932 - DNA, 25 bp, Homo sapien
tgcccaatggccaaaaccttgcaag

SEQ ID NO: 288933 - DNA, 25 bp, Homo sapien
gactgacggagttataacccttctg

SEQ ID NO: 288934 - DNA, 25 bp, Homo sapien
taaaagcaccatgacgaaaaagccc

SEQ ID NO: 288935 - DNA, 25 bp, Homo sapien
ccacagggtggattaggtgtctctc

SEQ ID NO: 288936 - DNA, 25 bp, Homo sapien
ttgtctaaaatgtggccagaggcca

SEQ ID NO: 288937 - DNA, 25 bp, Homo sapien
gtcgctccccaaggcctaaggataa

SEQ ID NO: 288938 - DNA, 25 bp, Homo sapien
catgcatgacaaatgggctccctcc

SEQ ID NO: 288939 - DNA, 25 bp, Homo sapien
aacacctgttcggattgggaggcca

SEQ ID NO: 288940 - DNA, 25 bp, Homo sapien
gatgttcagtagactccaaagcaga

SEQ ID NO: 288941 - DNA, 25 bp, Homo sapien
caatgggtccctggatagactctca

SEQ ID NO: 288942 - DNA, 25 bp, Homo sapien
caaaaatccaagtgacgctcctttg

SEQ ID NO: 288943 - DNA, 25 bp, Homo sapien
agcaaaatggcattttacacagaag

SEQ ID NO: 288944 - DNA, 25 bp, Homo sapien
atccaagtgacgctcctttgttgaa

SEQ ID NO: 288945 - DNA, 25 bp, Homo sapien
cagctacattcatggatgaaaacaa

SEQ ID NO: 288946 - DNA, 25 bp, Homo sapien
ctgggtgtgccaaacaataagtgac

SEQ ID NO: 288947 - DNA, 25 bp, Homo sapien
cataaccagggtttgacgggagaag

SEQ ID NO: 288948 - DNA, 25 bp, Homo sapien
tgtccaatcaacagtgtccacaggt

SEQ ID NO: 288949 - DNA, 25 bp, Homo sapien
taatccaatcaaccacatccagagg

SEQ ID NO: 288950 - DNA, 25 bp, Homo sapien
caaaggtccatgttcttcactgcca

SEQ ID NO: 288951 - DNA, 25 bp, Homo sapien
acttttatccatcctgggtcagtgg

SEQ ID NO: 288952 - DNA, 25 bp, Homo sapien
ccaaaggtccatgttcttcactgcc

SEQ ID NO: 288953 - DNA, 25 bp, Homo sapien
tctatgaaaggggtacttttatcca

SEQ ID NO: 288954 - DNA, 25 bp, Homo sapien
tctccgtggaagatgttgggagaaa

SEQ ID NO: 288955 - DNA, 25 bp, Homo sapien
cttggtctgagcaccaatctccgtg

SEQ ID NO: 288956 - DNA, 25 bp, Homo sapien
tgagcaccaatctccgtggaagatg

SEQ ID NO: 288957 - DNA, 25 bp, Homo sapien
caccaatctccgtggaagatgttgg

SEQ ID NO: 288958 - DNA, 25 bp, Homo sapien
ttgcacccataaagcagggagacag

SEQ ID NO: 288959 - DNA, 25 bp, Homo sapien
tttgcacccataaagcagggagaca

SEQ ID NO: 288960 - DNA, 25 bp, Homo sapien
tgtgcatcctgcagctaaatctgtc

SEQ ID NO: 288961 - DNA, 25 bp, Homo sapien
gcactgtgcatcctgcagctaaatc

SEQ ID NO: 288962 - DNA, 25 bp, Homo sapien
cctgagagcatgagcatgagggaca

SEQ ID NO: 288963 - DNA, 25 bp, Homo sapien
ctgagagcatgagcatgagggacat

SEQ ID NO: 288964 - DNA, 25 bp, Homo sapien
ccctgagagcatgagcatgagggac

SEQ ID NO: 288965 - DNA, 25 bp, Homo sapien
gtgtggaacggtagagtcaaatcag

SEQ ID NO: 288966 - DNA, 25 bp, Homo sapien
aatcagaagaggagtcactgacact

SEQ ID NO: 288967 - DNA, 25 bp, Homo sapien
cattgcagtgagcatctctgtgtta

SEQ ID NO: 288968 - DNA, 25 bp, Homo sapien
ctgacaatgggctgcctggtaatca

SEQ ID NO: 288969 - DNA, 25 bp, Homo sapien
ctaggtagacttggtcatgtgggag

SEQ ID NO: 288970 - DNA, 25 bp, Homo sapien
tcaagtgattctgcatagctgtgat

SEQ ID NO: 288971 - DNA, 25 bp, Homo sapien
tgtgattgcaacatcctgggacaca

SEQ ID NO: 288972 - DNA, 25 bp, Homo sapien
tggagccctgaggtgtcaccatcag

SEQ ID NO: 288973 - DNA, 25 bp, Homo sapien
caccatcagccaacatggtgctagg

SEQ ID NO: 288974 - DNA, 25 bp, Homo sapien
agaattaaaacattcctccagccgg

SEQ ID NO: 288975 - DNA, 25 bp, Homo sapien
acagggtcatcagacagtgatctct

SEQ ID NO: 288976 - DNA, 25 bp, Homo sapien
gccgggtctcactcgcaagtacaat

SEQ ID NO: 288977 - DNA, 25 bp, Homo sapien
gtcagtgtaacttgcatggctccaa

SEQ ID NO: 288978 - DNA, 25 bp, Homo sapien
cagactatgatgtggaccagctgct

SEQ ID NO: 288979 - DNA, 25 bp, Homo sapien
cagatcaattcttgctgggatgcct

SEQ ID NO: 288980 - DNA, 25 bp, Homo sapien
taatgggtgcagaagaaagtggtcc

SEQ ID NO: 288981 - DNA, 25 bp, Homo sapien
tcatcagggttaaactggatcccag

SEQ ID NO: 288982 - DNA, 25 bp, Homo sapien
tataatcctaggacttaggaggcca

SEQ ID NO: 288983 - DNA, 25 bp, Homo sapien
ctataatcctaggacttaggaggcc

SEQ ID NO: 288984 - DNA, 25 bp, Homo sapien
ggagactagcctgggaaaaatagtg

SEQ ID NO: 288985 - DNA, 25 bp, Homo sapien
agaagttggagactagcctgggaaa

SEQ ID NO: 288986 - DNA, 25 bp, Homo sapien
taatctcggaggcaccatgatgtcc

SEQ ID NO: 288987 - DNA, 25 bp, Homo sapien
ccgagctcgagggaccaactttaag

SEQ ID NO: 288988 - DNA, 25 bp, Homo sapien
taaattacccagatgcagtgacaca

SEQ ID NO: 288989 - DNA, 25 bp, Homo sapien
cacaacagggcagtaaagagggcgt

SEQ ID NO: 288990 - DNA, 25 bp, Homo sapien
aatatcttcatcagcgtctcagcac

SEQ ID NO: 288991 - DNA, 25 bp, Homo sapien
atgtcaacctccgaaaagcatctga

SEQ ID NO: 288992 - DNA, 25 bp, Homo sapien
gctcaggatgcgcatgagaggccct

SEQ ID NO: 288993 - DNA, 25 bp, Homo sapien
ttcttggctggaatgaaaatggcac

SEQ ID NO: 288994 - DNA, 25 bp, Homo sapien
gacccttggctacatacatgtcaca

SEQ ID NO: 288995 - DNA, 25 bp, Homo sapien
gaagtgggaaggagtattatcccta

SEQ ID NO: 288996 - DNA, 25 bp, Homo sapien
ccttcttagtttggagtgatggcta

SEQ ID NO: 288997 - DNA, 25 bp, Homo sapien
taatccccgaatgactctctgaagt

SEQ ID NO: 288998 - DNA, 25 bp, Homo sapien
cagatagaacagatcggagcagagt

SEQ ID NO: 288999 - DNA, 25 bp, Homo sapien
tatatgtgccatgtgtttcctgctg

SEQ ID NO: 289000 - DNA, 25 bp, Homo sapien
gccctgactgatagataaaccacgt

SEQ ID NO: 289001 - DNA, 25 bp, Homo sapien
cccagttataccctcctgtgtgggt

SEQ ID NO: 289002 - DNA, 25 bp, Homo sapien
caggaggaatactcgggcacattta

SEQ ID NO: 289003 - DNA, 25 bp, Homo sapien
tgataactccgagctgccactagac

SEQ ID NO: 289004 - DNA, 25 bp, Homo sapien
ggagacccatgacccaaaaatacga

SEQ ID NO: 289005 - DNA, 25 bp, Homo sapien
aattgtgccattagttccagagcag

SEQ ID NO: 289006 - DNA, 25 bp, Homo sapien
gaccagcgttgacaatgcagggaga

SEQ ID NO: 289007 - DNA, 25 bp, Homo sapien
gcagacatccatggagaccagcgtt

SEQ ID NO: 289008 - DNA, 25 bp, Homo sapien
cagggagaagttttacacccctgcg

SEQ ID NO: 289009 - DNA, 25 bp, Homo sapien
cacccctgcggtaccttcttgggag

SEQ ID NO: 289010 - DNA, 25 bp, Homo sapien
gcctggcttcaaaacaggtggtgag

SEQ ID NO: 289011 - DNA, 25 bp, Homo sapien
tatccaagagtctgccgagggactt

SEQ ID NO: 289012 - DNA, 25 bp, Homo sapien
gatcaatgccccgtggatagtctcc

SEQ ID NO: 289013 - DNA, 25 bp, Homo sapien
atctcaagacatggccaaaggtccc

SEQ ID NO: 289014 - DNA, 25 bp, Homo sapien
gaaactgaagctcaaggtggtggat

SEQ ID NO: 289015 - DNA, 25 bp, Homo sapien
aagctcaaggtggtggatccactcc

SEQ ID NO: 289016 - DNA, 25 bp, Homo sapien
catttcatcctcacgcaatctgtga

SEQ ID NO: 289017 - DNA, 25 bp, Homo sapien
ggctgctgctaatcccatggcactg

SEQ ID NO: 289018 - DNA, 25 bp, Homo sapien
ttcacagcagggaacatttattgag

SEQ ID NO: 289019 - DNA, 25 bp, Homo sapien
atttattgagcactctctgtgtacc

SEQ ID NO: 289020 - DNA, 25 bp, Homo sapien
tcacagcagggaacatttattgagc

SEQ ID NO: 289021 - DNA, 25 bp, Homo sapien
aacatttattgagcactctctgtgt

SEQ ID NO: 289022 - DNA, 25 bp, Homo sapien
gcttgctaatccacgagtctctgcc

SEQ ID NO: 289023 - DNA, 25 bp, Homo sapien
acacatgcttgctaatccacgagtc

SEQ ID NO: 289024 - DNA, 25 bp, Homo sapien
ttccagacgtcaatcaacaccctga

SEQ ID NO: 289025 - DNA, 25 bp, Homo sapien
aacaccctgagagcagaatcttcag

SEQ ID NO: 289026 - DNA, 25 bp, Homo sapien
cacagagaccacctgacaagataaa

SEQ ID NO: 289027 - DNA, 25 bp, Homo sapien
ctgtttgaccttggggtcctccagc

SEQ ID NO: 289028 - DNA, 25 bp, Homo sapien
tcatgggtactggaaccacagagac

SEQ ID NO: 289029 - DNA, 25 bp, Homo sapien
gtaattctttcatgaagggggcagg

SEQ ID NO: 289030 - DNA, 25 bp, Homo sapien
agtgcaacctccatctcccgggttc

SEQ ID NO: 289031 - DNA, 25 bp, Homo sapien
caggctggagtctcggctcagtgca

SEQ ID NO: 289032 - DNA, 25 bp, Homo sapien
caccagggataatggccagtgctgc

SEQ ID NO: 289033 - DNA, 25 bp, Homo sapien
caaatggtccccaacttagcaatgg

SEQ ID NO: 289034 - DNA, 25 bp, Homo sapien
cattcaatgacgtcacactggtagc

SEQ ID NO: 289035 - DNA, 25 bp, Homo sapien
taaaggtattatgtgtctgtggcca

SEQ ID NO: 289036 - DNA, 25 bp, Homo sapien
gttgctgccaactgtgactatgtgc

SEQ ID NO: 289037 - DNA, 25 bp, Homo sapien
tgtctacatgtagcacgcatcggaa

SEQ ID NO: 289038 - DNA, 25 bp, Homo sapien
tctatgaccttgactgctctaggca

SEQ ID NO: 289039 - DNA, 25 bp, Homo sapien
taccatgatcagaaacaggcacttt

SEQ ID NO: 289040 - DNA, 25 bp, Homo sapien
ggccatccgtcaggctgggagcggg

SEQ ID NO: 289041 - DNA, 25 bp, Homo sapien
cgcccatgacataatgtagatggat

SEQ ID NO: 289042 - DNA, 25 bp, Homo sapien
atgtagatggatggctcgggccatc

SEQ ID NO: 289043 - DNA, 25 bp, Homo sapien
atggctcgggccatccgtcaggctg

SEQ ID NO: 289044 - DNA, 25 bp, Homo sapien
ttctccacagccgggcttcagcaga

SEQ ID NO: 289045 - DNA, 25 bp, Homo sapien
acccattctccacagccgggcttca

SEQ ID NO: 289046 - DNA, 25 bp, Homo sapien
aagacccattctccacagccgggct

SEQ ID NO: 289047 - DNA, 25 bp, Homo sapien
ccattctccacagccgggcttcagc

SEQ ID NO: 289048 - DNA, 25 bp, Homo sapien
acctgtgacttcccatttctaatct

SEQ ID NO: 289049 - DNA, 25 bp, Homo sapien
cttactttgctaaacacattcaacc

SEQ ID NO: 289050 - DNA, 25 bp, Homo sapien
cctccttactttgctaaacacattc

SEQ ID NO: 289051 - DNA, 25 bp, Homo sapien
tccttactttgctaaacacattcaa

SEQ ID NO: 289052 - DNA, 25 bp, Homo sapien
gcatcgaacctttgtcagccccaaa

SEQ ID NO: 289053 - DNA, 25 bp, Homo sapien
tgtcaggcatcgaacctttgtcagc

SEQ ID NO: 289054 - DNA, 25 bp, Homo sapien
tttgattgttatttgtcaggcatcg

SEQ ID NO: 289055 - DNA, 25 bp, Homo sapien
tgttatttgtcaggcatcgaacctt

SEQ ID NO: 289056 - DNA, 25 bp, Homo sapien
gtcagtagagttccagttcagtttc

SEQ ID NO: 289057 - DNA, 25 bp, Homo sapien
ccattgtgaagtactcatgtgagac

SEQ ID NO: 289058 - DNA, 25 bp, Homo sapien
tccccattgtgaagtactcatgtga

SEQ ID NO: 289059 - DNA, 25 bp, Homo sapien
ccaactgcgttgtcagtagagttcc

SEQ ID NO: 289060 - DNA, 25 bp, Homo sapien
gaacctctccaaggagcgtcagcgt

SEQ ID NO: 289061 - DNA, 25 bp, Homo sapien
cagcaaagaacctctccaaggagcg

SEQ ID NO: 289062 - DNA, 25 bp, Homo sapien
aaagaacctctccaaggagcgtcag

SEQ ID NO: 289063 - DNA, 25 bp, Homo sapien
ctgaatttgataccaactctggaag

SEQ ID NO: 289064 - DNA, 25 bp, Homo sapien
gaagtcatacatcacctcctctgta

SEQ ID NO: 289065 - DNA, 25 bp, Homo sapien
cactgatcacacaggtggtactgat

SEQ ID NO: 289066 - DNA, 25 bp, Homo sapien
aggatgagataaaagctgcaagtct

SEQ ID NO: 289067 - DNA, 25 bp, Homo sapien
tcacggcataacctcagaagtcata

SEQ ID NO: 289068 - DNA, 25 bp, Homo sapien
ggcttgaccaggggttgaggctcta

SEQ ID NO: 289069 - DNA, 25 bp, Homo sapien
ctcacatgcccagcaagttcatgct

SEQ ID NO: 289070 - DNA, 25 bp, Homo sapien
tgaccaggggttgaggctctacttt

SEQ ID NO: 289071 - DNA, 25 bp, Homo sapien
cttgaccaggggttgaggctctact

SEQ ID NO: 289072 - DNA, 25 bp, Homo sapien
tatgtcacatgatttttgtgggtga

SEQ ID NO: 289073 - DNA, 25 bp, Homo sapien
tcagatataagccagggctgcaatc

SEQ ID NO: 289074 - DNA, 25 bp, Homo sapien
tttgtgggtgaggaattcacaagca

SEQ ID NO: 289075 - DNA, 25 bp, Homo sapien
cacaagcagcttacatgggtggcct

SEQ ID NO: 289076 - DNA, 25 bp, Homo sapien
gacacttcacgtctgttgcatatgg

SEQ ID NO: 289077 - DNA, 25 bp, Homo sapien
cttcacgtctgttgcatatggcctg

SEQ ID NO: 289078 - DNA, 25 bp, Homo sapien
tcacgtctgttgcatatggcctgtc

SEQ ID NO: 289079 - DNA, 25 bp, Homo sapien
agctgggacacttcacgtctgttgc

SEQ ID NO: 289080 - DNA, 25 bp, Homo sapien
taaaatagaggtgtagctgttagct

SEQ ID NO: 289081 - DNA, 25 bp, Homo sapien
gggtcagctggatgttctgtctttc

SEQ ID NO: 289082 - DNA, 25 bp, Homo sapien
tgggaatgtctcagcagctattggc

SEQ ID NO: 289083 - DNA, 25 bp, Homo sapien
ccatttatccatgatcgcccatgag

SEQ ID NO: 289084 - DNA, 25 bp, Homo sapien
tggtgtctcagcacagatagcttga

SEQ ID NO: 289085 - DNA, 25 bp, Homo sapien
cacagattacaaagttcagacccca

SEQ ID NO: 289086 - DNA, 25 bp, Homo sapien
gagtgtgtggagcaccctggctaat

SEQ ID NO: 289087 - DNA, 25 bp, Homo sapien
tgtcaggagttccacgtgctgccag

SEQ ID NO: 289088 - DNA, 25 bp, Homo sapien
taagtttgcagaccgcaagccaagt

SEQ ID NO: 289089 - DNA, 25 bp, Homo sapien
tattgtcttggcaccccaatagcgc

SEQ ID NO: 289090 - DNA, 25 bp, Homo sapien
tttgcagggccagaataagtttgca

SEQ ID NO: 289091 - DNA, 25 bp, Homo sapien
cttaatgaaatgagggcgggatgac

SEQ ID NO: 289092 - DNA, 25 bp, Homo sapien
gaaacaatcgtcacccttgctgatg

SEQ ID NO: 289093 - DNA, 25 bp, Homo sapien
taggcaatctgggtgctggcatacc

SEQ ID NO: 289094 - DNA, 25 bp, Homo sapien
taggcgtagtgactttatccagggc

SEQ ID NO: 289095 - DNA, 25 bp, Homo sapien
caaagtcacattcaaggagagtcag

SEQ ID NO: 289096 - DNA, 25 bp, Homo sapien
cagaagaagctgcttgggccccatt

SEQ ID NO: 289097 - DNA, 25 bp, Homo sapien
cattttgagttaggtcttcagacac

SEQ ID NO: 289098 - DNA, 25 bp, Homo sapien
cagacactgacagcctaaggcatcc

SEQ ID NO: 289099 - DNA, 25 bp, Homo sapien
taaggcatcctaacggatagagccc

SEQ ID NO: 289100 - DNA, 25 bp, Homo sapien
ggcggctgcactaataaggctgctt

SEQ ID NO: 289101 - DNA, 25 bp, Homo sapien
tccagcactggggtaaataaggcct

SEQ ID NO: 289102 - DNA, 25 bp, Homo sapien
catgcaggcggctgcactaataagg

SEQ ID NO: 289103 - DNA, 25 bp, Homo sapien
cacccacggccatgcaggcggctgc

SEQ ID NO: 289104 - DNA, 25 bp, Homo sapien
gagatagatgagtccacacaccgtg

SEQ ID NO: 289105 - DNA, 25 bp, Homo sapien
ccggtgtgccgatgtcaatgattac

SEQ ID NO: 289106 - DNA, 25 bp, Homo sapien
gagatacataaagtctggcccaggg

SEQ ID NO: 289107 - DNA, 25 bp, Homo sapien
tttgggttcagcgacagtgccgtaa

SEQ ID NO: 289108 - DNA, 25 bp, Homo sapien
ctggacatcattctcccgcaaggat

SEQ ID NO: 289109 - DNA, 25 bp, Homo sapien
caaggatctccagcggaggaaagag

SEQ ID NO: 289110 - DNA, 25 bp, Homo sapien
tagacgggttgacttctacctccag

SEQ ID NO: 289111 - DNA, 25 bp, Homo sapien
tcctcttgaggaggctggttagacg

SEQ ID NO: 289112 - DNA, 25 bp, Homo sapien
agaacttccaaccatgaccagggaa

SEQ ID NO: 289113 - DNA, 25 bp, Homo sapien
atgaccagggaagtgtatccatcca

SEQ ID NO: 289114 - DNA, 25 bp, Homo sapien
cagggaagtgtatccatccacagat

SEQ ID NO: 289115 - DNA, 25 bp, Homo sapien
gaccagggaagtgtatccatccaca

SEQ ID NO: 289116 - DNA, 25 bp, Homo sapien
tgccgttcgggctgaatacctccct

SEQ ID NO: 289117 - DNA, 25 bp, Homo sapien
caacagctgccgttcgggctgaata

SEQ ID NO: 289118 - DNA, 25 bp, Homo sapien
gttcgggctgaatacctcccttgca

SEQ ID NO: 289119 - DNA, 25 bp, Homo sapien
acagctgccgttcgggctgaatacc

SEQ ID NO: 289120 - DNA, 25 bp, Homo sapien
taagacctcattagcagcccaaatt

SEQ ID NO: 289121 - DNA, 25 bp, Homo sapien
gggacagccgccatagcataagaat

SEQ ID NO: 289122 - DNA, 25 bp, Homo sapien
tgtgatagatcagcagaggacttgg

SEQ ID NO: 289123 - DNA, 25 bp, Homo sapien
gatggcaatttgctaagccgtctgc

SEQ ID NO: 289124 - DNA, 25 bp, Homo sapien
ttccttctaccattatgagctgttg

SEQ ID NO: 289125 - DNA, 25 bp, Homo sapien
tccgtgtgtctctctggacagcccc

SEQ ID NO: 289126 - DNA, 25 bp, Homo sapien
tgagctgttgacacctgcattgttc

SEQ ID NO: 289127 - DNA, 25 bp, Homo sapien
tgttctacctagatccgtgtgtctc

SEQ ID NO: 289128 - DNA, 25 bp, Homo sapien
catctgtggatgcataatccctaca

SEQ ID NO: 289129 - DNA, 25 bp, Homo sapien
cattcagggctggaaaacgcttgct

SEQ ID NO: 289130 - DNA, 25 bp, Homo sapien
aagcatctgtggatgcataatccct

SEQ ID NO: 289131 - DNA, 25 bp, Homo sapien
gcattcagggctggaaaacgcttgc

SEQ ID NO: 289132 - DNA, 25 bp, Homo sapien
gatctcttgggtaagctggccaacc

SEQ ID NO: 289133 - DNA, 25 bp, Homo sapien
catgaggtcatcgagtcagccagat

SEQ ID NO: 289134 - DNA, 25 bp, Homo sapien
tcagcatggctgaagagtaccctgg

SEQ ID NO: 289135 - DNA, 25 bp, Homo sapien
tgctttgagcgcaggacaggactga

SEQ ID NO: 289136 - DNA, 25 bp, Homo sapien
gaagacccctcaaagtatcaaacag

SEQ ID NO: 289137 - DNA, 25 bp, Homo sapien
tgtggtttcccatcgacttgtctgt

SEQ ID NO: 289138 - DNA, 25 bp, Homo sapien
gagtgaatcccgttaaattagagca

SEQ ID NO: 289139 - DNA, 25 bp, Homo sapien
tctagctgtgagatcaggagggccc

SEQ ID NO: 289140 - DNA, 25 bp, Homo sapien
agtcatgccaagcgaatgatggatg

SEQ ID NO: 289141 - DNA, 25 bp, Homo sapien
cagctgccggcttggaaaacgactc

SEQ ID NO: 289142 - DNA, 25 bp, Homo sapien
cgtgttaactggtttgctcaatccc

SEQ ID NO: 289143 - DNA, 25 bp, Homo sapien
agcctgcgtgttaactggtttgctc

SEQ ID NO: 289144 - DNA, 25 bp, Homo sapien
cctgcgtgttaactggtttgctcaa

SEQ ID NO: 289145 - DNA, 25 bp, Homo sapien
taactggtttgctcaatccctccat

SEQ ID NO: 289146 - DNA, 25 bp, Homo sapien
tcagatggagagtgcgtcaggcttc

SEQ ID NO: 289147 - DNA, 25 bp, Homo sapien
gagagtgcgtcaggcttcttcttga

SEQ ID NO: 289148 - DNA, 25 bp, Homo sapien
cttcttcttgattgggtcgttggag

SEQ ID NO: 289149 - DNA, 25 bp, Homo sapien
ttcttcttgattgggtcgttggagg

SEQ ID NO: 289150 - DNA, 25 bp, Homo sapien
caattcctgtgttgagactctgccc

SEQ ID NO: 289151 - DNA, 25 bp, Homo sapien
cagtcggcagatttgttatgttcca

SEQ ID NO: 289152 - DNA, 25 bp, Homo sapien
cctgcacagccgtgggttgaagaga

SEQ ID NO: 289153 - DNA, 25 bp, Homo sapien
aactccatccttgtgagatcaaagc

SEQ ID NO: 289154 - DNA, 25 bp, Homo sapien
tccttggactgagctaaacctacct

SEQ ID NO: 289155 - DNA, 25 bp, Homo sapien
agtgcctgaaagagagtaacctgtc

SEQ ID NO: 289156 - DNA, 25 bp, Homo sapien
tatggttctaaaggaggttgcaagc

SEQ ID NO: 289157 - DNA, 25 bp, Homo sapien
tggagactggtcagagagccctgtc

SEQ ID NO: 289158 - DNA, 25 bp, Homo sapien
gaccatacatatgttaacaaataga

SEQ ID NO: 289159 - DNA, 25 bp, Homo sapien
caagaagcttacatatagcagtgtg

SEQ ID NO: 289160 - DNA, 25 bp, Homo sapien
tagcagtgtgtctgtagttggttcc

SEQ ID NO: 289161 - DNA, 25 bp, Homo sapien
ggagcaaagtgatgatcacagctca

SEQ ID NO: 289162 - DNA, 25 bp, Homo sapien
catacatggtaaaagatgtacaagt

SEQ ID NO: 289163 - DNA, 25 bp, Homo sapien
tatacgtgcatagctcaacaaattc

SEQ ID NO: 289164 - DNA, 25 bp, Homo sapien
caagttatacgtgcatagctcaaca

SEQ ID NO: 289165 - DNA, 25 bp, Homo sapien
taaaagatgtacaagttatacgtgc

SEQ ID NO: 289166 - DNA, 25 bp, Homo sapien
tccgtgatgtcaagaactcactctc

SEQ ID NO: 289167 - DNA, 25 bp, Homo sapien
gaactagaatgtagaccgctccgtg

SEQ ID NO: 289168 - DNA, 25 bp, Homo sapien
gattcagtttgtacatagctggacc

SEQ ID NO: 289169 - DNA, 25 bp, Homo sapien
gatgtacatagaatcttgattcagt

SEQ ID NO: 289170 - DNA, 25 bp, Homo sapien
ctgaggccacccagcaggtccaccg

SEQ ID NO: 289171 - DNA, 25 bp, Homo sapien
tgaggccacccagcaggtccaccgc

SEQ ID NO: 289172 - DNA, 25 bp, Homo sapien
gaggccacccagcaggtccaccgca

SEQ ID NO: 289173 - DNA, 25 bp, Homo sapien
aggccacccagcaggtccaccgcat

SEQ ID NO: 289174 - DNA, 25 bp, Homo sapien
caaagacggcttgtctctttgaggg

SEQ ID NO: 289175 - DNA, 25 bp, Homo sapien
catatggcaaagacggcttgtctct

SEQ ID NO: 289176 - DNA, 25 bp, Homo sapien
taccagctgggtttgattaggggaa

SEQ ID NO: 289177 - DNA, 25 bp, Homo sapien
agaaagaggcatatggcaaagacgg

SEQ ID NO: 289178 - DNA, 25 bp, Homo sapien
tgataacaattaagccccggacagt

SEQ ID NO: 289179 - DNA, 25 bp, Homo sapien
gaaaagccattttgaggatctgccc

SEQ ID NO: 289180 - DNA, 25 bp, Homo sapien
ggcgccagtgccgacaaaggtatta

SEQ ID NO: 289181 - DNA, 25 bp, Homo sapien
gcagaagtaagatcccaaccgaagg

SEQ ID NO: 289182 - DNA, 25 bp, Homo sapien
tccttccatgaaacctaccaagaca

SEQ ID NO: 289183 - DNA, 25 bp, Homo sapien
ctagaaagatggcaacatagggacc

SEQ ID NO: 289184 - DNA, 25 bp, Homo sapien
gatagtggcacttcctcactcagca

SEQ ID NO: 289185 - DNA, 25 bp, Homo sapien
tttgccaaaatgttctcacctcctt

SEQ ID NO: 289186 - DNA, 25 bp, Homo sapien
caagttaaccacactaaaatctaca

SEQ ID NO: 289187 - DNA, 25 bp, Homo sapien
tccaagttaaccacactaaaatcta

SEQ ID NO: 289188 - DNA, 25 bp, Homo sapien
cagttgatgtactaaggtcacccag

SEQ ID NO: 289189 - DNA, 25 bp, Homo sapien
catgggggtgagcacagccacatct

SEQ ID NO: 289190 - DNA, 25 bp, Homo sapien
cccatcagctatggcctacagaaag

SEQ ID NO: 289191 - DNA, 25 bp, Homo sapien
cagggctttccccatcagctatggc

SEQ ID NO: 289192 - DNA, 25 bp, Homo sapien
aaaagaacgggactccatggagaag

SEQ ID NO: 289193 - DNA, 25 bp, Homo sapien
actccatggagaagcggatgaacag

SEQ ID NO: 289194 - DNA, 25 bp, Homo sapien
aagaacgggactccatggagaagcg

SEQ ID NO: 289195 - DNA, 25 bp, Homo sapien
ggactccatggagaagcggatgaac

SEQ ID NO: 289196 - DNA, 25 bp, Homo sapien
tagagaaggcgcaatactctccagc

SEQ ID NO: 289197 - DNA, 25 bp, Homo sapien
ctgaaggctgaaagagccctgggct

SEQ ID NO: 289198 - DNA, 25 bp, Homo sapien
tctcgccgggcagcttagagaaggc

SEQ ID NO: 289199 - DNA, 25 bp, Homo sapien
actgttggtggttctcgccgggcag

SEQ ID NO: 289200 - DNA, 25 bp, Homo sapien
acacccaatggatcatcaaaccact

SEQ ID NO: 289201 - DNA, 25 bp, Homo sapien
cacccaatggatcatcaaaccactc

SEQ ID NO: 289202 - DNA, 25 bp, Homo sapien
cccaatggatcatcaaaccactcca

SEQ ID NO: 289203 - DNA, 25 bp, Homo sapien
caatggatcatcaaaccactccaca

SEQ ID NO: 289204 - DNA, 25 bp, Homo sapien
ttgctcgaagccttcagtccgttgc

SEQ ID NO: 289205 - DNA, 25 bp, Homo sapien
tttgctcgaagccttcagtccgttg

SEQ ID NO: 289206 - DNA, 25 bp, Homo sapien
acagcaagcctgtccatcatggtgt

SEQ ID NO: 289207 - DNA, 25 bp, Homo sapien
aacttacagcaagcctgtccatcat

SEQ ID NO: 289208 - DNA, 25 bp, Homo sapien
cttacagcaagcctgtccatcatgg

SEQ ID NO: 289209 - DNA, 25 bp, Homo sapien
ccgtggtggctgaaaacgcccagtt

SEQ ID NO: 289210 - DNA, 25 bp, Homo sapien
caaacaaggccaagcaaggttacgt

SEQ ID NO: 289211 - DNA, 25 bp, Homo sapien
aaggttacgttatatataggattcg

SEQ ID NO: 289212 - DNA, 25 bp, Homo sapien
aggttacgttatatataggattcgt

SEQ ID NO: 289213 - DNA, 25 bp, Homo sapien
ctacaaacaaggccaagcaaggtta

SEQ ID NO: 289214 - DNA, 25 bp, Homo sapien
aagaattagactccggtctggcggc

SEQ ID NO: 289215 - DNA, 25 bp, Homo sapien
catttcaatgtggtctagaagaata

SEQ ID NO: 289216 - DNA, 25 bp, Homo sapien
gaaaccttctgatgtgagaggacat

SEQ ID NO: 289217 - DNA, 25 bp, Homo sapien
attagactccggtctggcggcagcc

SEQ ID NO: 289218 - DNA, 25 bp, Homo sapien
tccatgaagttagagactgtgtctc

SEQ ID NO: 289219 - DNA, 25 bp, Homo sapien
gaccaagatgggcagtcaccataca

SEQ ID NO: 289220 - DNA, 25 bp, Homo sapien
tcacctgtctaattggacctgaagc

SEQ ID NO: 289221 - DNA, 25 bp, Homo sapien
agccgtgagacactgtggccagcca

SEQ ID NO: 289222 - DNA, 25 bp, Homo sapien
gggataagtctgattggtccaggcc

SEQ ID NO: 289223 - DNA, 25 bp, Homo sapien
ctgggggataagtctgattggtcca

SEQ ID NO: 289224 - DNA, 25 bp, Homo sapien
gggggataagtctgattggtccagg

SEQ ID NO: 289225 - DNA, 25 bp, Homo sapien
gataagtctgattggtccaggccac

SEQ ID NO: 289226 - DNA, 25 bp, Homo sapien
tgctctggtcctcagctgacctgag

SEQ ID NO: 289227 - DNA, 25 bp, Homo sapien
ctctggtcctcagctgacctgagac

SEQ ID NO: 289228 - DNA, 25 bp, Homo sapien
gctctggtcctcagctgacctgaga

SEQ ID NO: 289229 - DNA, 25 bp, Homo sapien
tacattttcaccacgcaaaaggcca

SEQ ID NO: 289230 - DNA, 25 bp, Homo sapien
aaaaggccatgatgaccactccagc

SEQ ID NO: 289231 - DNA, 25 bp, Homo sapien
ttttcaccacgcaaaaggccatgat

SEQ ID NO: 289232 - DNA, 25 bp, Homo sapien
cacgcaaaaggccatgatgaccact

SEQ ID NO: 289233 - DNA, 25 bp, Homo sapien
ttctgagtcattgattcgtggtgtc

SEQ ID NO: 289234 - DNA, 25 bp, Homo sapien
gagtcattgattcgtggtgtctgtt

SEQ ID NO: 289235 - DNA, 25 bp, Homo sapien
tctgagtcattgattcgtggtgtct

SEQ ID NO: 289236 - DNA, 25 bp, Homo sapien
ctattctgagtcattgattcgtggt

SEQ ID NO: 289237 - DNA, 25 bp, Homo sapien
ccttatttgaatgtgcgagctgtcg

SEQ ID NO: 289238 - DNA, 25 bp, Homo sapien
ttgaatgtgcgagctgtcgcccaca

SEQ ID NO: 289239 - DNA, 25 bp, Homo sapien
tcttcagaagcaagcgccgtgtaat

SEQ ID NO: 289240 - DNA, 25 bp, Homo sapien
gccgtgtaatcgctcccttatttga

SEQ ID NO: 289241 - DNA, 25 bp, Homo sapien
catggcgtgatcagccgtgagcagc

SEQ ID NO: 289242 - DNA, 25 bp, Homo sapien
cgtgagcagcagtaattggacccca

SEQ ID NO: 289243 - DNA, 25 bp, Homo sapien
tgtgcatagccccatactaggtgcc

SEQ ID NO: 289244 - DNA, 25 bp, Homo sapien
ggtatccgcacacaagtgcatggcg

SEQ ID NO: 289245 - DNA, 25 bp, Homo sapien
cattagtagcttccaatttcaggcg

SEQ ID NO: 289246 - DNA, 25 bp, Homo sapien
tcaggcgaagggttaaggactccac

SEQ ID NO: 289247 - DNA, 25 bp, Homo sapien
gagcctagtccactcccagtttgga

SEQ ID NO: 289248 - DNA, 25 bp, Homo sapien
tgtaagccctgaagtcagaatccag

SEQ ID NO: 289249 - DNA, 25 bp, Homo sapien
tgaatgctcccttagttccagccaa

SEQ ID NO: 289250 - DNA, 25 bp, Homo sapien
caacaacgtggactggatgtcagca

SEQ ID NO: 289251 - DNA, 25 bp, Homo sapien
aggagctgatgtggccaacaacgtg

SEQ ID NO: 289252 - DNA, 25 bp, Homo sapien
gcatcatgagtttgaagaggagctg

SEQ ID NO: 289253 - DNA, 25 bp, Homo sapien
tcccagccaagacgtgagaaaatac

SEQ ID NO: 289254 - DNA, 25 bp, Homo sapien
aaccctaggtccaaagcaattatgc

SEQ ID NO: 289255 - DNA, 25 bp, Homo sapien
tcaatgcgttaggaggagttactgc

SEQ ID NO: 289256 - DNA, 25 bp, Homo sapien
tattatctgatcaacccatgaggta

SEQ ID NO: 289257 - DNA, 25 bp, Homo sapien
tggagagagtgtgaacaatgcagcc

SEQ ID NO: 289258 - DNA, 25 bp, Homo sapien
taatcccatctttggtgacagagct

SEQ ID NO: 289259 - DNA, 25 bp, Homo sapien
gataccaagagccagtaatcccatc

SEQ ID NO: 289260 - DNA, 25 bp, Homo sapien
gagaaaggcagtatcgtatcttgac

SEQ ID NO: 289261 - DNA, 25 bp, Homo sapien
agcacactgatcaggaggagctgca

SEQ ID NO: 289262 - DNA, 25 bp, Homo sapien
cagcacactgatcaggaggagctgc

SEQ ID NO: 289263 - DNA, 25 bp, Homo sapien
ggaggagctgcagaaatgccagctc

SEQ ID NO: 289264 - DNA, 25 bp, Homo sapien
ggagctgcagaaatgccagctccat

SEQ ID NO: 289265 - DNA, 25 bp, Homo sapien
cccacatttggcaggaggtactggt

SEQ ID NO: 289266 - DNA, 25 bp, Homo sapien
ctggtgccttcccacaatgatggct

SEQ ID NO: 289267 - DNA, 25 bp, Homo sapien
gccttcccacaatgatggctattta

SEQ ID NO: 289268 - DNA, 25 bp, Homo sapien
ccacatttggcaggaggtactggtg

SEQ ID NO: 289269 - DNA, 25 bp, Homo sapien
ctccaagctgtttcgtgctggcgtc

SEQ ID NO: 289270 - DNA, 25 bp, Homo sapien
ggcgtctctttgcaagttccctcca

SEQ ID NO: 289271 - DNA, 25 bp, Homo sapien
tttcgtgctggcgtctctttgcaag

SEQ ID NO: 289272 - DNA, 25 bp, Homo sapien
cctccatgccgtccctctgggagtc

SEQ ID NO: 289273 - DNA, 25 bp, Homo sapien
tgctgatacctggttccctggaact

SEQ ID NO: 289274 - DNA, 25 bp, Homo sapien
ggcagccacccccttgcctagactg

SEQ ID NO: 289275 - DNA, 25 bp, Homo sapien
tgatacctggttccctggaacttca

SEQ ID NO: 289276 - DNA, 25 bp, Homo sapien
cccccttgcctagactgagaatatg

SEQ ID NO: 289277 - DNA, 25 bp, Homo sapien
cagagactttcagagcctctgcatc

SEQ ID NO: 289278 - DNA, 25 bp, Homo sapien
tcagagcctctgcatctttgttggg

SEQ ID NO: 289279 - DNA, 25 bp, Homo sapien
tcaatcacccccagagactttcaga

SEQ ID NO: 289280 - DNA, 25 bp, Homo sapien
gcctctgcatctttgttggggctgg

SEQ ID NO: 289281 - DNA, 25 bp, Homo sapien
aagaagacccgatctccaagctcct

SEQ ID NO: 289282 - DNA, 25 bp, Homo sapien
cagtcataacactctgattctgtga

SEQ ID NO: 289283 - DNA, 25 bp, Homo sapien
tctgtccagctctaggagtaagaag

SEQ ID NO: 289284 - DNA, 25 bp, Homo sapien
cagaggcagtgtgactcaggacaga

SEQ ID NO: 289285 - DNA, 25 bp, Homo sapien
taaggccccgaagattctgcttctc

SEQ ID NO: 289286 - DNA, 25 bp, Homo sapien
ttctgtgccagaacattgctcagca

SEQ ID NO: 289287 - DNA, 25 bp, Homo sapien
gatacctaaggccccgaagattctg

SEQ ID NO: 289288 - DNA, 25 bp, Homo sapien
ctctggagggtgtgaaagggcctct

SEQ ID NO: 289289 - DNA, 25 bp, Homo sapien
tgtgccaggcaatatccccaatagt

SEQ ID NO: 289290 - DNA, 25 bp, Homo sapien
cacagcattcgtttcctagggccac

SEQ ID NO: 289291 - DNA, 25 bp, Homo sapien
tagggccaccatagcaaagtattag

SEQ ID NO: 289292 - DNA, 25 bp, Homo sapien
taaccaagttggctgaggtcacagc

SEQ ID NO: 289293 - DNA, 25 bp, Homo sapien
tgttaaatctttgaaggatagccat

SEQ ID NO: 289294 - DNA, 25 bp, Homo sapien
tacaaatctgttaaatctttgaagg

SEQ ID NO: 289295 - DNA, 25 bp, Homo sapien
ttttacaaatctgttaaatctttga

SEQ ID NO: 289296 - DNA, 25 bp, Homo sapien
atctgttaaatctttgaaggatagc

SEQ ID NO: 289297 - DNA, 25 bp, Homo sapien
tcctctgagtgctcctattaaatgg

SEQ ID NO: 289298 - DNA, 25 bp, Homo sapien
tttatggtgctgcttctcacccaca

SEQ ID NO: 289299 - DNA, 25 bp, Homo sapien
cgtgggctggcgatgttcaatttat

SEQ ID NO: 289300 - DNA, 25 bp, Homo sapien
tattaaatggtagccttttggaggc

SEQ ID NO: 289301 - DNA, 25 bp, Homo sapien
ttgtggctgaaggacccacgggtca

SEQ ID NO: 289302 - DNA, 25 bp, Homo sapien
tggattccagtcggcaccacctctg

SEQ ID NO: 289303 - DNA, 25 bp, Homo sapien
ctgaaggacccacgggtcaaggaag

SEQ ID NO: 289304 - DNA, 25 bp, Homo sapien
tcataatttcatgcctggattccag

SEQ ID NO: 289305 - DNA, 25 bp, Homo sapien
cagacgtttcttaagattcatccta

SEQ ID NO: 289306 - DNA, 25 bp, Homo sapien
attctgaggtttgaccactccttgg

SEQ ID NO: 289307 - DNA, 25 bp, Homo sapien
ggctttccacaatccagtcccagct

SEQ ID NO: 289308 - DNA, 25 bp, Homo sapien
tccttggcttgacattcaaggcttt

SEQ ID NO: 289309 - DNA, 25 bp, Homo sapien
cacagccgaagtgagtgttgtctgc

SEQ ID NO: 289310 - DNA, 25 bp, Homo sapien
cagaactggggcttggaaggagaaa

SEQ ID NO: 289311 - DNA, 25 bp, Homo sapien
ctgaggtgctgagggagacagtgtc

SEQ ID NO: 289312 - DNA, 25 bp, Homo sapien
tcagaatgagatggacagaactggg

SEQ ID NO: 289313 - DNA, 25 bp, Homo sapien
tctaacctcgccttgcagacagact

SEQ ID NO: 289314 - DNA, 25 bp, Homo sapien
tgctatgactaaccccagtgctgcc

SEQ ID NO: 289315 - DNA, 25 bp, Homo sapien
aattcccgtcgaaagattccacctg

SEQ ID NO: 289316 - DNA, 25 bp, Homo sapien
ccatttgcgcttagaggtagtaaca

SEQ ID NO: 289317 - DNA, 25 bp, Homo sapien
tctgcctgcaaacggcaagtgggaa

SEQ ID NO: 289318 - DNA, 25 bp, Homo sapien
gagcacatctgtggggaactctgcc

SEQ ID NO: 289319 - DNA, 25 bp, Homo sapien
gggaaggcgctgattgatggtgaca

SEQ ID NO: 289320 - DNA, 25 bp, Homo sapien
tgtatttgtgcatacatatgctggg

SEQ ID NO: 289321 - DNA, 25 bp, Homo sapien
ttcacttagcgtggtgtcttccagg

SEQ ID NO: 289322 - DNA, 25 bp, Homo sapien
gaacccatcatttcgaaggccacaa

SEQ ID NO: 289323 - DNA, 25 bp, Homo sapien
tgaaattgtgcagagaacagctacc

SEQ ID NO: 289324 - DNA, 25 bp, Homo sapien
tgcatgtgcctgctttttgacccac

SEQ ID NO: 289325 - DNA, 25 bp, Homo sapien
ttcaattatagtgtatgagcatgac

SEQ ID NO: 289326 - DNA, 25 bp, Homo sapien
tgtatatcatttcaattatagtgta

SEQ ID NO: 289327 - DNA, 25 bp, Homo sapien
caattatagtgtatgagcatgacaa

SEQ ID NO: 289328 - DNA, 25 bp, Homo sapien
tcatttcaattatagtgtatgagca

SEQ ID NO: 289329 - DNA, 25 bp, Homo sapien
ggcgaaatgatgaagcgtcctccga

SEQ ID NO: 289330 - DNA, 25 bp, Homo sapien
gaagcgtcctccgaaatcacggtgc

SEQ ID NO: 289331 - DNA, 25 bp, Homo sapien
gaaatcacggtgcttatctgcggcc

SEQ ID NO: 289332 - DNA, 25 bp, Homo sapien
cggtgcttatctgcggcccactcag

SEQ ID NO: 289333 - DNA, 25 bp, Homo sapien
tgaattgtgaactttgcaaatggaa

SEQ ID NO: 289334 - DNA, 25 bp, Homo sapien
ggtgaattgtgaactttgcaaatgg

SEQ ID NO: 289335 - DNA, 25 bp, Homo sapien
tggttaaaggcacagctcatggctg

SEQ ID NO: 289336 - DNA, 25 bp, Homo sapien
ggcacagctcatggctgggtgaatt

SEQ ID NO: 289337 - DNA, 25 bp, Homo sapien
ttccatctgttgaagcaatttcttc

SEQ ID NO: 289338 - DNA, 25 bp, Homo sapien
ttgcaaatgggccgtttccatctgt

SEQ ID NO: 289339 - DNA, 25 bp, Homo sapien
ggaatttgcattgatcactttttta

SEQ ID NO: 289340 - DNA, 25 bp, Homo sapien
gcacagccagaggcatttgttgcaa

SEQ ID NO: 289341 - DNA, 25 bp, Homo sapien
gcttgccagagcttgcatgtttaca

SEQ ID NO: 289342 - DNA, 25 bp, Homo sapien
tgccagagcttgcatgtttacatac

SEQ ID NO: 289343 - DNA, 25 bp, Homo sapien
taaatagaggttaataggtcctgga

SEQ ID NO: 289344 - DNA, 25 bp, Homo sapien
gaactcctggcctatgggccagtca

SEQ ID NO: 289345 - DNA, 25 bp, Homo sapien
taagtcatctctaggatgatgggcc

SEQ ID NO: 289346 - DNA, 25 bp, Homo sapien
catctctaggatgatgggccatcat

SEQ ID NO: 289347 - DNA, 25 bp, Homo sapien
agaagggctaagtcatctctaggat

SEQ ID NO: 289348 - DNA, 25 bp, Homo sapien
gctaagtcatctctaggatgatggg

SEQ ID NO: 289349 - DNA, 25 bp, Homo sapien
gggggagaaatctggcttccttgca

SEQ ID NO: 289350 - DNA, 25 bp, Homo sapien
gagaaatctggcttccttgcagtgt

SEQ ID NO: 289351 - DNA, 25 bp, Homo sapien
gggagaaatctggcttccttgcagt

SEQ ID NO: 289352 - DNA, 25 bp, Homo sapien
aaggcagcagggggagaaatctggc

SEQ ID NO: 289353 - DNA, 25 bp, Homo sapien
tcaccctcgtaaagctggagatcaa

SEQ ID NO: 289354 - DNA, 25 bp, Homo sapien
gcaattaaaaggtatggcccgtcac

SEQ ID NO: 289355 - DNA, 25 bp, Homo sapien
cccagctcaatgatcagaccataaa

SEQ ID NO: 289356 - DNA, 25 bp, Homo sapien
tcaatgatcagaccataaagatgta

SEQ ID NO: 289357 - DNA, 25 bp, Homo sapien
aatatgcctttatcaatatgattcc

SEQ ID NO: 289358 - DNA, 25 bp, Homo sapien
cacaggccttttcacaatatgcctt

SEQ ID NO: 289359 - DNA, 25 bp, Homo sapien
tttcagttccgcatataaattccag

SEQ ID NO: 289360 - DNA, 25 bp, Homo sapien
tgattccagtaaacgtttcagttcc

SEQ ID NO: 289361 - DNA, 25 bp, Homo sapien
catattctatatgccgccggaacgg

SEQ ID NO: 289362 - DNA, 25 bp, Homo sapien
gccctatttgcataatgctgctgga

SEQ ID NO: 289363 - DNA, 25 bp, Homo sapien
tccaccaccgccataaatttacata

SEQ ID NO: 289364 - DNA, 25 bp, Homo sapien
acggagtgggccctatttgcataat

SEQ ID NO: 289365 - DNA, 25 bp, Homo sapien
cccagccagactggagcactgcatg

SEQ ID NO: 289366 - DNA, 25 bp, Homo sapien
gcctttctgcactgggcccagatct

SEQ ID NO: 289367 - DNA, 25 bp, Homo sapien
cactgcatgagcagagaccatgccg

SEQ ID NO: 289368 - DNA, 25 bp, Homo sapien
atgccgcgatctcccacgcctccat

SEQ ID NO: 289369 - DNA, 25 bp, Homo sapien
aagagcactggattgatctgggctc

SEQ ID NO: 289370 - DNA, 25 bp, Homo sapien
tcttcctcttctaaagactggagga

SEQ ID NO: 289371 - DNA, 25 bp, Homo sapien
cttcctcttctaaagactggaggaa

SEQ ID NO: 289372 - DNA, 25 bp, Homo sapien
atgttggcaggtccgacgtggctcc

SEQ ID NO: 289373 - DNA, 25 bp, Homo sapien
tcccatgcagggatgttgccgggct

SEQ ID NO: 289374 - DNA, 25 bp, Homo sapien
aactgtctctgatgttgaggttctg

SEQ ID NO: 289375 - DNA, 25 bp, Homo sapien
tactcggtgtgtgggaactgtctct

SEQ ID NO: 289376 - DNA, 25 bp, Homo sapien
ttttaatttgccgtgaagagagtaa

SEQ ID NO: 289377 - DNA, 25 bp, Homo sapien
gctttttaatttgccgtgaagagag

SEQ ID NO: 289378 - DNA, 25 bp, Homo sapien
aatttgccgtgaagagagtaaagtc

SEQ ID NO: 289379 - DNA, 25 bp, Homo sapien
ttaatttgccgtgaagagagtaaag

SEQ ID NO: 289380 - DNA, 25 bp, Homo sapien
tggtcttgagtttgtcctctgccag

SEQ ID NO: 289381 - DNA, 25 bp, Homo sapien
ttccacagtggtcttgagtttgtcc

SEQ ID NO: 289382 - DNA, 25 bp, Homo sapien
tctgtgacaaattgaagtcttttct

SEQ ID NO: 289383 - DNA, 25 bp, Homo sapien
ctattctgtgacaaattgaagtctt

SEQ ID NO: 289384 - DNA, 25 bp, Homo sapien
tttccatctcaggcttcaatgtacc

SEQ ID NO: 289385 - DNA, 25 bp, Homo sapien
tgtaccagtccgcgcaatggagctc

SEQ ID NO: 289386 - DNA, 25 bp, Homo sapien
ttacccagctttgcatcggatttgc

SEQ ID NO: 289387 - DNA, 25 bp, Homo sapien
acacgcatgtaaggagacttatttt

SEQ ID NO: 289388 - DNA, 25 bp, Homo sapien
cagagtcctccaatccttgcatcta

SEQ ID NO: 289389 - DNA, 25 bp, Homo sapien
ctcagagtcctccaatccttgcatc

SEQ ID NO: 289390 - DNA, 25 bp, Homo sapien
agtcctccaatccttgcatctattg

SEQ ID NO: 289391 - DNA, 25 bp, Homo sapien
gagtcctccaatccttgcatctatt

SEQ ID NO: 289392 - DNA, 25 bp, Homo sapien
gcaggtgccatgatcagtgtgtgat

SEQ ID NO: 289393 - DNA, 25 bp, Homo sapien
ccctgcaggtgccatgatcagtgtg

SEQ ID NO: 289394 - DNA, 25 bp, Homo sapien
cctgcaggtgccatgatcagtgtgt

SEQ ID NO: 289395 - DNA, 25 bp, Homo sapien
tgcaggtgccatgatcagtgtgtga

SEQ ID NO: 289396 - DNA, 25 bp, Homo sapien
ccacctgtgagcttagtgaggccca

SEQ ID NO: 289397 - DNA, 25 bp, Homo sapien
cacagcccgggtgcttcctgtacat

SEQ ID NO: 289398 - DNA, 25 bp, Homo sapien
tccagtgtgattctcccagcaccag

SEQ ID NO: 289399 - DNA, 25 bp, Homo sapien
tgaacacgttgattgactgtgacac

SEQ ID NO: 289400 - DNA, 25 bp, Homo sapien
cctaactatgggagcattcagaaca

SEQ ID NO: 289401 - DNA, 25 bp, Homo sapien
caatcagctggttaagcggaaagct

SEQ ID NO: 289402 - DNA, 25 bp, Homo sapien
taaaaagtccaccatgatagctcat

SEQ ID NO: 289403 - DNA, 25 bp, Homo sapien
tgcaacctcctggaaactcagtctt

SEQ ID NO: 289404 - DNA, 25 bp, Homo sapien
cttccatcatggtgcaattgcccat

SEQ ID NO: 289405 - DNA, 25 bp, Homo sapien
caagctggctggatgaaccaatgtt

SEQ ID NO: 289406 - DNA, 25 bp, Homo sapien
ccttccatcatggtgcaattgccca

SEQ ID NO: 289407 - DNA, 25 bp, Homo sapien
ggctggatgaaccaatgttcctcat

SEQ ID NO: 289408 - DNA, 25 bp, Homo sapien
ttattgtctttcttagaactattaa

SEQ ID NO: 289409 - DNA, 25 bp, Homo sapien
cattattgtctttcttagaactatt

SEQ ID NO: 289410 - DNA, 25 bp, Homo sapien
tcattattgtctttcttagaactat

SEQ ID NO: 289411 - DNA, 25 bp, Homo sapien
ctcattattgtctttcttagaacta

SEQ ID NO: 289412 - DNA, 25 bp, Homo sapien
gtctgttccttagacagaggagaag

SEQ ID NO: 289413 - DNA, 25 bp, Homo sapien
ggcagccggacccagacctggctgg

SEQ ID NO: 289414 - DNA, 25 bp, Homo sapien
tctggcaaatagacagattttcaca

SEQ ID NO: 289415 - DNA, 25 bp, Homo sapien
ctcaccgtctggcaaatagacagat

SEQ ID NO: 289416 - DNA, 25 bp, Homo sapien
cagcagcatattgctcaccgtctgg

SEQ ID NO: 289417 - DNA, 25 bp, Homo sapien
gatcgggccacgatatctgcagaaa

SEQ ID NO: 289418 - DNA, 25 bp, Homo sapien
gggccacgatatctgcagaaagact

SEQ ID NO: 289419 - DNA, 25 bp, Homo sapien
tcgggccacgatatctgcagaaaga

SEQ ID NO: 289420 - DNA, 25 bp, Homo sapien
ttctgatcgggccacgatatctgca

SEQ ID NO: 289421 - DNA, 25 bp, Homo sapien
aatccacttgttgacggtggcctgg

SEQ ID NO: 289422 - DNA, 25 bp, Homo sapien
ggcgtaaccattgcgaatccacttg

SEQ ID NO: 289423 - DNA, 25 bp, Homo sapien
ccccttggcgtaaccattgcgaatc

SEQ ID NO: 289424 - DNA, 25 bp, Homo sapien
cattgcgaatccacttgttgacggt

SEQ ID NO: 289425 - DNA, 25 bp, Homo sapien
tccacatagctctgatggtctcctc

SEQ ID NO: 289426 - DNA, 25 bp, Homo sapien
ggaatccaatagctgccactgagcc

SEQ ID NO: 289427 - DNA, 25 bp, Homo sapien
acatagctctgatggtctcctctct

SEQ ID NO: 289428 - DNA, 25 bp, Homo sapien
caggaatccaatagctgccactgag

SEQ ID NO: 289429 - DNA, 25 bp, Homo sapien
tttgcatgcgaaacaagttcccggg

SEQ ID NO: 289430 - DNA, 25 bp, Homo sapien
tgggtttccaaaggcgcagagcaag

SEQ ID NO: 289431 - DNA, 25 bp, Homo sapien
aaagaagcattcaactgggtcccgg

SEQ ID NO: 289432 - DNA, 25 bp, Homo sapien
gaaccacgctgtgagatcctttgga

SEQ ID NO: 289433 - DNA, 25 bp, Homo sapien
cattgccagtgagtgattgcccatt

SEQ ID NO: 289434 - DNA, 25 bp, Homo sapien
cacatgagtacacaagaaggtagtc

SEQ ID NO: 289435 - DNA, 25 bp, Homo sapien
cattggcaactctatatctaaggga

SEQ ID NO: 289436 - DNA, 25 bp, Homo sapien
tgaacttaacgaggcatcacatgag

SEQ ID NO: 289437 - DNA, 25 bp, Homo sapien
tgtcagagtaatcaggaaatatccg

SEQ ID NO: 289438 - DNA, 25 bp, Homo sapien
gctaagagccttagcacgaggccag

SEQ ID NO: 289439 - DNA, 25 bp, Homo sapien
tgtggctccagctattgcatctgta

SEQ ID NO: 289440 - DNA, 25 bp, Homo sapien
gaaatatccggactcttctgcgcta

SEQ ID NO: 289441 - DNA, 25 bp, Homo sapien
caggaacctttcatgcttgttctgc

SEQ ID NO: 289442 - DNA, 25 bp, Homo sapien
atcttcctccaggaacctttcatgc

SEQ ID NO: 289443 - DNA, 25 bp, Homo sapien
ttcctccaggaacctttcatgcttg

SEQ ID NO: 289444 - DNA, 25 bp, Homo sapien
ggaacctttcatgcttgttctgcat

SEQ ID NO: 289445 - DNA, 25 bp, Homo sapien
aagatcccagagtcatcaaaagcca

SEQ ID NO: 289446 - DNA, 25 bp, Homo sapien
gctgcatgggaatccgggtgcttct

SEQ ID NO: 289447 - DNA, 25 bp, Homo sapien
tcccagagtcatcaaaagccagtgc

SEQ ID NO: 289448 - DNA, 25 bp, Homo sapien
gagtcatcaaaagccagtgccattg

SEQ ID NO: 289449 - DNA, 25 bp, Homo sapien
gagcagggatgacgacagaggagag

SEQ ID NO: 289450 - DNA, 25 bp, Homo sapien
ggagcagggatgacgacagaggaga

SEQ ID NO: 289451 - DNA, 25 bp, Homo sapien
ctggagcagggatgacgacagagga

SEQ ID NO: 289452 - DNA, 25 bp, Homo sapien
caggcacttggaaagagttggccaa

SEQ ID NO: 289453 - DNA, 25 bp, Homo sapien
gcacttggaaagagttggccaaggc

SEQ ID NO: 289454 - DNA, 25 bp, Homo sapien
aggcacttggaaagagttggccaag

SEQ ID NO: 289455 - DNA, 25 bp, Homo sapien
cacttggaaagagttggccaaggca

SEQ ID NO: 289456 - DNA, 25 bp, Homo sapien
tgccttgatcccagcccgaaactca

SEQ ID NO: 289457 - DNA, 25 bp, Homo sapien
tcctccttgtcagtgggcacaagct

SEQ ID NO: 289458 - DNA, 25 bp, Homo sapien
gatggaggcagacgtcctccttgtc

SEQ ID NO: 289459 - DNA, 25 bp, Homo sapien
ttgatcccagcccgaaactcagggc

SEQ ID NO: 289460 - DNA, 25 bp, Homo sapien
gggagatgttatggggcctgactca

SEQ ID NO: 289461 - DNA, 25 bp, Homo sapien
tggcttgtgtgccttggggccactt

SEQ ID NO: 289462 - DNA, 25 bp, Homo sapien
taccccacacaagactggcttgtgt

SEQ ID NO: 289463 - DNA, 25 bp, Homo sapien
taaccctaccccacacaagactggc

SEQ ID NO: 289464 - DNA, 25 bp, Homo sapien
gctgccacgtttgcccccctctttc

SEQ ID NO: 289465 - DNA, 25 bp, Homo sapien
tgctgccacgtttgcccccctcttt

SEQ ID NO: 289466 - DNA, 25 bp, Homo sapien
gtgctgccacgtttgcccccctctt

SEQ ID NO: 289467 - DNA, 25 bp, Homo sapien
ctgtgctgccacgtttgcccccctc

SEQ ID NO: 289468 - DNA, 25 bp, Homo sapien
tcaattccttttggaattacacaac

SEQ ID NO: 289469 - DNA, 25 bp, Homo sapien
tcttcaattccttttggaattacac

SEQ ID NO: 289470 - DNA, 25 bp, Homo sapien
attccttttggaattacacaacctg

SEQ ID NO: 289471 - DNA, 25 bp, Homo sapien
tttagtctcttcaattccttttgga

SEQ ID NO: 289472 - DNA, 25 bp, Homo sapien
tctttgggaaagctagtgccttctg

SEQ ID NO: 289473 - DNA, 25 bp, Homo sapien
ctctctttctttgggaaagctagtg

SEQ ID NO: 289474 - DNA, 25 bp, Homo sapien
tgggaaagctagtgccttctgagca

SEQ ID NO: 289475 - DNA, 25 bp, Homo sapien
ctgagcacattcttgttctgtgggt

SEQ ID NO: 289476 - DNA, 25 bp, Homo sapien
cccctcagagacagtgcagaaagca

SEQ ID NO: 289477 - DNA, 25 bp, Homo sapien
agccccctcagagacagtgcagaaa

SEQ ID NO: 289478 - DNA, 25 bp, Homo sapien
catgactcgtagcagccccctcaga

SEQ ID NO: 289479 - DNA, 25 bp, Homo sapien
ccctcagagacagtgcagaaagcat

SEQ ID NO: 289480 - DNA, 25 bp, Homo sapien
tggctgcctcccagataacagccat

SEQ ID NO: 289481 - DNA, 25 bp, Homo sapien
gggatgagggaaagacaatgatgac

SEQ ID NO: 289482 - DNA, 25 bp, Homo sapien
catggaagcaaggagtggctgcctc

SEQ ID NO: 289483 - DNA, 25 bp, Homo sapien
aatgatgacatggaagcaaggagtg

SEQ ID NO: 289484 - DNA, 25 bp, Homo sapien
agatccccatccagtcctcatggga

SEQ ID NO: 289485 - DNA, 25 bp, Homo sapien
cccaagatccccatccagtcctcat

SEQ ID NO: 289486 - DNA, 25 bp, Homo sapien
ctcaaaatggctggaagtactcccc

SEQ ID NO: 289487 - DNA, 25 bp, Homo sapien
tggctggaagtactcccccaagatc

SEQ ID NO: 289488 - DNA, 25 bp, Homo sapien
gctctgggaaggacgaaattgaaag

SEQ ID NO: 289489 - DNA, 25 bp, Homo sapien
ggggctctgggaaggacgaaattga

SEQ ID NO: 289490 - DNA, 25 bp, Homo sapien
gggctctgggaaggacgaaattgaa

SEQ ID NO: 289491 - DNA, 25 bp, Homo sapien
ggctctgggaaggacgaaattgaaa

SEQ ID NO: 289492 - DNA, 25 bp, Homo sapien
ctctgctcctccgtctgtgcctggg

SEQ ID NO: 289493 - DNA, 25 bp, Homo sapien
gtaactcggaactggctctcctggg

SEQ ID NO: 289494 - DNA, 25 bp, Homo sapien
tcctccgtctgtgcctggggggtaa

SEQ ID NO: 289495 - DNA, 25 bp, Homo sapien
gggtaactcggaactggctctcctg

SEQ ID NO: 289496 - DNA, 25 bp, Homo sapien
ccccttgacctcgaagccggctcat

SEQ ID NO: 289497 - DNA, 25 bp, Homo sapien
cttgacctcgaagccggctcattac

SEQ ID NO: 289498 - DNA, 25 bp, Homo sapien
ccttgacctcgaagccggctcatta

SEQ ID NO: 289499 - DNA, 25 bp, Homo sapien
gacctcgaagccggctcattacaca

SEQ ID NO: 289500 - DNA, 25 bp, Homo sapien
ccgggctcgctgtcaggagcagcat

SEQ ID NO: 289501 - DNA, 25 bp, Homo sapien
ctgcccgggagtgtgtctgcatcca

SEQ ID NO: 289502 - DNA, 25 bp, Homo sapien
gagtgtgtctgcatccagccgccca

SEQ ID NO: 289503 - DNA, 25 bp, Homo sapien
tgacaccgggctcgctgtcaggagc

SEQ ID NO: 289504 - DNA, 25 bp, Homo sapien
gcatggcactagcatctgtggctgg

SEQ ID NO: 289505 - DNA, 25 bp, Homo sapien
gaaggggaagggatgctggcaagcc

SEQ ID NO: 289506 - DNA, 25 bp, Homo sapien
tggcactagcatctgtggctggtga

SEQ ID NO: 289507 - DNA, 25 bp, Homo sapien
gaagcttccagtcatagcagaaggg

SEQ ID NO: 289508 - DNA, 25 bp, Homo sapien
tcagttggtctagaggtgagatgct

SEQ ID NO: 289509 - DNA, 25 bp, Homo sapien
tggtctagaggtgagatgctctgcc

SEQ ID NO: 289510 - DNA, 25 bp, Homo sapien
atgctgacgcaaaggtcagttggtc

SEQ ID NO: 289511 - DNA, 25 bp, Homo sapien
actgatggatgctgacgcaaaggtc

SEQ ID NO: 289512 - DNA, 25 bp, Homo sapien
gcttttcagaaggaatatttttgct

SEQ ID NO: 289513 - DNA, 25 bp, Homo sapien
agcttttcagaaggaatatttttgc

SEQ ID NO: 289514 - DNA, 25 bp, Homo sapien
ggcctcctccctgccgtcctcggct

SEQ ID NO: 289515 - DNA, 25 bp, Homo sapien
gcctggcctcctccctgccgtcctc

SEQ ID NO: 289516 - DNA, 25 bp, Homo sapien
tgcctggcctcctccctgccgtcct

SEQ ID NO: 289517 - DNA, 25 bp, Homo sapien
ctggcctcctccctgccgtcctcgg

SEQ ID NO: 289518 - DNA, 25 bp, Homo sapien
gctttgacaaactggtccagggcca

SEQ ID NO: 289519 - DNA, 25 bp, Homo sapien
ttgacaaactggtccagggccagcg

SEQ ID NO: 289520 - DNA, 25 bp, Homo sapien
acctgctgaacttgtcagcctggag

SEQ ID NO: 289521 - DNA, 25 bp, Homo sapien
cctttgatacctgctgaacttgtca

SEQ ID NO: 289522 - DNA, 25 bp, Homo sapien
ctactgaacaatcaacacgtgaatg

SEQ ID NO: 289523 - DNA, 25 bp, Homo sapien
acgtctctgagacccccggactggt

SEQ ID NO: 289524 - DNA, 25 bp, Homo sapien
tcaacacgtgaatgaagcccacaag

SEQ ID NO: 289525 - DNA, 25 bp, Homo sapien
cacaagcccagtaagacgtctctga

SEQ ID NO: 289526 - DNA, 25 bp, Homo sapien
caagctctgttggagcgctattagc

SEQ ID NO: 289527 - DNA, 25 bp, Homo sapien
gaacgctgaggcactgagacattga

SEQ ID NO: 289528 - DNA, 25 bp, Homo sapien
cattgagaaccttgtagcccagcgt

SEQ ID NO: 289529 - DNA, 25 bp, Homo sapien
gcgtaaagcactcaggagttggaag

SEQ ID NO: 289530 - DNA, 25 bp, Homo sapien
aactaacagccatttgatttagggc

SEQ ID NO: 289531 - DNA, 25 bp, Homo sapien
tcacacgctggttgttcctctttgt

SEQ ID NO: 289532 - DNA, 25 bp, Homo sapien
tccagtgtgacttcgtcttcactaa

SEQ ID NO: 289533 - DNA, 25 bp, Homo sapien
cgaagtctcgaatcaaggcactggc

SEQ ID NO: 289534 - DNA, 25 bp, Homo sapien
tcatcaaagccagcagaagtgactt

SEQ ID NO: 289535 - DNA, 25 bp, Homo sapien
gtgacttccagcacatcagcggtgg

SEQ ID NO: 289536 - DNA, 25 bp, Homo sapien
tcactcatatacaccctctttctca

SEQ ID NO: 289537 - DNA, 25 bp, Homo sapien
tcaaagccagcagaagtgacttcca

SEQ ID NO: 289538 - DNA, 25 bp, Homo sapien
gagggttgtattttacgcagccgac

SEQ ID NO: 289539 - DNA, 25 bp, Homo sapien
cgccttgcttgggtgctgattggaa

SEQ ID NO: 289540 - DNA, 25 bp, Homo sapien
cagccgaccatgacctggtgagtaa

SEQ ID NO: 289541 - DNA, 25 bp, Homo sapien
gactgagatgccgaaatccacacgg

SEQ ID NO: 289542 - DNA, 25 bp, Homo sapien
ttgagaacatggcaggagatcagga

SEQ ID NO: 289543 - DNA, 25 bp, Homo sapien
tctcctgtctgtctgttctcattct

SEQ ID NO: 289544 - DNA, 25 bp, Homo sapien
tctcctgctctatttcatttccatg

SEQ ID NO: 289545 - DNA, 25 bp, Homo sapien
actttcttgagaacatggcaggaga

SEQ ID NO: 289546 - DNA, 25 bp, Homo sapien
aaagccccaagtgttctttgctgct

SEQ ID NO: 289547 - DNA, 25 bp, Homo sapien
tacactacgtctgagaaccttccag

SEQ ID NO: 289548 - DNA, 25 bp, Homo sapien
tgcagaatctacactacgtctgaga

SEQ ID NO: 289549 - DNA, 25 bp, Homo sapien
ctcagccactgcagaatctacacta

SEQ ID NO: 289550 - DNA, 25 bp, Homo sapien
gcacatctgagatgcttaatttggg

SEQ ID NO: 289551 - DNA, 25 bp, Homo sapien
caggtccgaggaacgcgtgtttgta

SEQ ID NO: 289552 - DNA, 25 bp, Homo sapien
taatgtcacagggagcatcgttcct

SEQ ID NO: 289553 - DNA, 25 bp, Homo sapien
ttccatagaagctgggacacaggtc

SEQ ID NO: 289554 - DNA, 25 bp, Homo sapien
taaagagcttgaggtgtagcaccac

SEQ ID NO: 289555 - DNA, 25 bp, Homo sapien
gagtccgggatttgaggctgcggca

SEQ ID NO: 289556 - DNA, 25 bp, Homo sapien
cggcaagagacttccagcttggcca

SEQ ID NO: 289557 - DNA, 25 bp, Homo sapien
cacttagataggagtctgtgccttc

SEQ ID NO: 289558 - DNA, 25 bp, Homo sapien
ggctggccttgcaatggagccactt

SEQ ID NO: 289559 - DNA, 25 bp, Homo sapien
tcttgcctcggtgcccatcattccc

SEQ ID NO: 289560 - DNA, 25 bp, Homo sapien
gatcttgcctcggtgcccatcattc

SEQ ID NO: 289561 - DNA, 25 bp, Homo sapien
ctgatcttgcctcggtgcccatcat

SEQ ID NO: 289562 - DNA, 25 bp, Homo sapien
tgatcttgcctcggtgcccatcatt

SEQ ID NO: 289563 - DNA, 25 bp, Homo sapien
gatctcctgaaaaagggtgaatcca

SEQ ID NO: 289564 - DNA, 25 bp, Homo sapien
tccttggggctgatctcctgaaaaa

SEQ ID NO: 289565 - DNA, 25 bp, Homo sapien
cttggggctgatctcctgaaaaagg

SEQ ID NO: 289566 - DNA, 25 bp, Homo sapien
taatccttggggctgatctcctgaa

SEQ ID NO: 289567 - DNA, 25 bp, Homo sapien
gcactgcggctgagataattgaata

SEQ ID NO: 289568 - DNA, 25 bp, Homo sapien
tcttaacgtggttccgtgaggccag

SEQ ID NO: 289569 - DNA, 25 bp, Homo sapien
taattatctccgacaggacgtggcg

SEQ ID NO: 289570 - DNA, 25 bp, Homo sapien
ttcagctcatccgagcacgtgcgag

SEQ ID NO: 289571 - DNA, 25 bp, Homo sapien
gagaggcccgcccactggcccacag

SEQ ID NO: 289572 - DNA, 25 bp, Homo sapien
cactttacaggtgaaagaagcccca

SEQ ID NO: 289573 - DNA, 25 bp, Homo sapien
tttacaggtgaaagaagccccagag

SEQ ID NO: 289574 - DNA, 25 bp, Homo sapien
ccagagaggcccgcccactggccca

SEQ ID NO: 289575 - DNA, 25 bp, Homo sapien
gcctggccgtgctcgggaacacagt

SEQ ID NO: 289576 - DNA, 25 bp, Homo sapien
ctggctggcgatgcctggccgtgct

SEQ ID NO: 289577 - DNA, 25 bp, Homo sapien
ccgagtctaccgagccatccaagcc

SEQ ID NO: 289578 - DNA, 25 bp, Homo sapien
gaacacagtccccttcagaagtgcc

SEQ ID NO: 289579 - DNA, 25 bp, Homo sapien
gctccgcgtgccataagcagcttct

SEQ ID NO: 289580 - DNA, 25 bp, Homo sapien
caggacgacccgtgcagatgtggtt

SEQ ID NO: 289581 - DNA, 25 bp, Homo sapien
ttttttggccaacacgcacaggtcg

SEQ ID NO: 289582 - DNA, 25 bp, Homo sapien
gaggcggtcctttagagctgtcagc

SEQ ID NO: 289583 - DNA, 25 bp, Homo sapien
catgagcttctctcataatctcctt

SEQ ID NO: 289584 - DNA, 25 bp, Homo sapien
cctcctctatgaggcactcatggag

SEQ ID NO: 289585 - DNA, 25 bp, Homo sapien
tgacatcacctcctctatgaggcac

SEQ ID NO: 289586 - DNA, 25 bp, Homo sapien
tcacctcctctatgaggcactcatg

SEQ ID NO: 289587 - DNA, 25 bp, Homo sapien
gctatttcacggcaggcagacgtcc

SEQ ID NO: 289588 - DNA, 25 bp, Homo sapien
caaaggagaaggcatgtattgggca

SEQ ID NO: 289589 - DNA, 25 bp, Homo sapien
catgtattgggcatgagtgttggca

SEQ ID NO: 289590 - DNA, 25 bp, Homo sapien
ggtctttgctatttcacggcaggca

SEQ ID NO: 289591 - DNA, 25 bp, Homo sapien
gctgcatttcgtccttgggacagct

SEQ ID NO: 289592 - DNA, 25 bp, Homo sapien
catttcgtccttgggacagcttgca

SEQ ID NO: 289593 - DNA, 25 bp, Homo sapien
gggctgctgcatttcgtccttggga

SEQ ID NO: 289594 - DNA, 25 bp, Homo sapien
tcgtccttgggacagcttgcaattt

SEQ ID NO: 289595 - DNA, 25 bp, Homo sapien
taaagaagaaacacagcgacgagag

SEQ ID NO: 289596 - DNA, 25 bp, Homo sapien
gatagccaaagcctgacaatgctgt

SEQ ID NO: 289597 - DNA, 25 bp, Homo sapien
gctgccaccaaattgcaaggtgtct

SEQ ID NO: 289598 - DNA, 25 bp, Homo sapien
tcttggctctggtcgcccaaggtgg

SEQ ID NO: 289599 - DNA, 25 bp, Homo sapien
taattgccaaattatgcacgttgag

SEQ ID NO: 289600 - DNA, 25 bp, Homo sapien
ctggtagcaagattgttttatgcaa

SEQ ID NO: 289601 - DNA, 25 bp, Homo sapien
caatatctgtatgcagccacggccg

SEQ ID NO: 289602 - DNA, 25 bp, Homo sapien
tcttcccaggaagccgtgggactgg

SEQ ID NO: 289603 - DNA, 25 bp, Homo sapien
tttgccttcgaaggctcccagtgga

SEQ ID NO: 289604 - DNA, 25 bp, Homo sapien
gccaacttcaatcccataatggaag

SEQ ID NO: 289605 - DNA, 25 bp, Homo sapien
gccggattttgccttcgaaggctcc

SEQ ID NO: 289606 - DNA, 25 bp, Homo sapien
ccaagaaggaccggccaacttcaat

SEQ ID NO: 289607 - DNA, 25 bp, Homo sapien
atgtttggtgtccgaagagcaggct

SEQ ID NO: 289608 - DNA, 25 bp, Homo sapien
gctccggaaaccagcagccagatgt

SEQ ID NO: 289609 - DNA, 25 bp, Homo sapien
agctgtggtcccggacacccagggc

SEQ ID NO: 289610 - DNA, 25 bp, Homo sapien
agatgagacagaggcgttctcaagg

SEQ ID NO: 289611 - DNA, 25 bp, Homo sapien
aattatagcctagacagatcagcac

SEQ ID NO: 289612 - DNA, 25 bp, Homo sapien
attatagcctagacagatcagcact

SEQ ID NO: 289613 - DNA, 25 bp, Homo sapien
gcggtgacatctacgttcaggacct

SEQ ID NO: 289614 - DNA, 25 bp, Homo sapien
ggcacaggggatatcacaggaacat

SEQ ID NO: 289615 - DNA, 25 bp, Homo sapien
catctacgttcaggacctgtgtcct

SEQ ID NO: 289616 - DNA, 25 bp, Homo sapien
tactgggttttaagtggcggtgaca

SEQ ID NO: 289617 - DNA, 25 bp, Homo sapien
tgtctgcccagtgacactgtgcaaa

SEQ ID NO: 289618 - DNA, 25 bp, Homo sapien
tctgcccagtgacactgtgcaaact

SEQ ID NO: 289619 - DNA, 25 bp, Homo sapien
gtctgcccagtgacactgtgcaaac

SEQ ID NO: 289620 - DNA, 25 bp, Homo sapien
gggacgctggccacatgcaaggtca

SEQ ID NO: 289621 - DNA, 25 bp, Homo sapien
ggacgctggccacatgcaaggtcat

SEQ ID NO: 289622 - DNA, 25 bp, Homo sapien
agtgtgaactttctcttcaatgttc

SEQ ID NO: 289623 - DNA, 25 bp, Homo sapien
ttctaacactgagcacgggagatgg

SEQ ID NO: 289624 - DNA, 25 bp, Homo sapien
atctatgtcttcctcaaccaggaag

SEQ ID NO: 289625 - DNA, 25 bp, Homo sapien
ctaacactgagcacgggagatggag

SEQ ID NO: 289626 - DNA, 25 bp, Homo sapien
ccttttctaacactgagcacgggag

SEQ ID NO: 289627 - DNA, 25 bp, Homo sapien
tgttccagagaaaaagactgggctg

SEQ ID NO: 289628 - DNA, 25 bp, Homo sapien
tccagagaaaaagactgggctgaca

SEQ ID NO: 289629 - DNA, 25 bp, Homo sapien
ttgttccagagaaaaagactgggct

SEQ ID NO: 289630 - DNA, 25 bp, Homo sapien
ttccagagaaaaagactgggctgac

SEQ ID NO: 289631 - DNA, 25 bp, Homo sapien
aacccagaggcatcaggccttggct

SEQ ID NO: 289632 - DNA, 25 bp, Homo sapien
aaacccagaggcatcaggccttggc

SEQ ID NO: 289633 - DNA, 25 bp, Homo sapien
cccagaggcatcaggccttggctcc

SEQ ID NO: 289634 - DNA, 25 bp, Homo sapien
ccggagtctggccaccaaggtgtct

SEQ ID NO: 289635 - DNA, 25 bp, Homo sapien
gagtctggccaccaaggtgtctcct

SEQ ID NO: 289636 - DNA, 25 bp, Homo sapien
tctggccaccaaggtgtctccttgt

SEQ ID NO: 289637 - DNA, 25 bp, Homo sapien
gccaccaaggtgtctccttgtggaa

SEQ ID NO: 289638 - DNA, 25 bp, Homo sapien
ctgctccatccagggttgtctaagc

SEQ ID NO: 289639 - DNA, 25 bp, Homo sapien
cagccctggcgtggaccatgcagtt

SEQ ID NO: 289640 - DNA, 25 bp, Homo sapien
ctggcgtggaccatgcagtttgctc

SEQ ID NO: 289641 - DNA, 25 bp, Homo sapien
tgtctaagcacatgctccggctcct

SEQ ID NO: 289642 - DNA, 25 bp, Homo sapien
tggtggtctgcagagctgccccggg

SEQ ID NO: 289643 - DNA, 25 bp, Homo sapien
gctggtggtctgcagagctgccccg

SEQ ID NO: 289644 - DNA, 25 bp, Homo sapien
gtctgcagagctgccccgggggtgt

SEQ ID NO: 289645 - DNA, 25 bp, Homo sapien
gcagagctgccccgggggtgttttc

SEQ ID NO: 289646 - DNA, 25 bp, Homo sapien
ggcgctcgccaagccctgaacaatt

SEQ ID NO: 289647 - DNA, 25 bp, Homo sapien
gccagcaggcgctcgccaagccctg

SEQ ID NO: 289648 - DNA, 25 bp, Homo sapien
caattgctttggcaagagcctccgt

SEQ ID NO: 289649 - DNA, 25 bp, Homo sapien
agagcctccgtgagatcatgggctg

SEQ ID NO: 289650 - DNA, 25 bp, Homo sapien
catctaaagccgtctggaagcccag

SEQ ID NO: 289651 - DNA, 25 bp, Homo sapien
atcacgtgccggtgggccgactgcc

SEQ ID NO: 289652 - DNA, 25 bp, Homo sapien
atcggagtggaggagcgcatttcac

SEQ ID NO: 289653 - DNA, 25 bp, Homo sapien
gagcgcatttcacgcagtccctgtg

SEQ ID NO: 289654 - DNA, 25 bp, Homo sapien
tgtcccctccagacgctcagctgta

SEQ ID NO: 289655 - DNA, 25 bp, Homo sapien
agacgctcagctgtagccctccagc

SEQ ID NO: 289656 - DNA, 25 bp, Homo sapien
gccctccagccccgttgttcgtgac

SEQ ID NO: 289657 - DNA, 25 bp, Homo sapien
tcaggcggcaggctgcggctgtccc

SEQ ID NO: 289658 - DNA, 25 bp, Homo sapien
tgcagcaccaagcaattagccagtg

SEQ ID NO: 289659 - DNA, 25 bp, Homo sapien
cgtgcttcatggaacagtgtcggct

SEQ ID NO: 289660 - DNA, 25 bp, Homo sapien
tctgaactgcgggacaaggagcatg

SEQ ID NO: 289661 - DNA, 25 bp, Homo sapien
cccagtaatttgctaggcgaccgca

SEQ ID NO: 289662 - DNA, 25 bp, Homo sapien
tattgcaaacataaacacggccgtg

SEQ ID NO: 289663 - DNA, 25 bp, Homo sapien
ggccgtgcagacaatcgccagcgag

SEQ ID NO: 289664 - DNA, 25 bp, Homo sapien
tgcaaacataaacacggccgtgcag

SEQ ID NO: 289665 - DNA, 25 bp, Homo sapien
gcctaatgttttccgcgtttgccac

SEQ ID NO: 289666 - DNA, 25 bp, Homo sapien
aagtttctggccgtctggagcccaa

SEQ ID NO: 289667 - DNA, 25 bp, Homo sapien
aacatgtaagctatgggaacccata

SEQ ID NO: 289668 - DNA, 25 bp, Homo sapien
catagctggcatgcccgccagtgac

SEQ ID NO: 289669 - DNA, 25 bp, Homo sapien
ccgccagtgacactaacagggctgg

SEQ ID NO: 289670 - DNA, 25 bp, Homo sapien
tgtcctcgtggggtgctcagctgca

SEQ ID NO: 289671 - DNA, 25 bp, Homo sapien
gctatgagccaggtggtgcggtgcc

SEQ ID NO: 289672 - DNA, 25 bp, Homo sapien
tgcggtgcccgttgcacagaggagg

SEQ ID NO: 289673 - DNA, 25 bp, Homo sapien
tgaggtggccacgaactctggccag

SEQ ID NO: 289674 - DNA, 25 bp, Homo sapien
tgcctgaggacaatatccacgtctt

SEQ ID NO: 289675 - DNA, 25 bp, Homo sapien
ttggaggttgccgttctgtcccacc

SEQ ID NO: 289676 - DNA, 25 bp, Homo sapien
tgtggtgctccgattcttaacctgg

SEQ ID NO: 289677 - DNA, 25 bp, Homo sapien
gtcttctatatcctggttccccgca

SEQ ID NO: 289678 - DNA, 25 bp, Homo sapien
gggctggggatcacaggacccccac

SEQ ID NO: 289679 - DNA, 25 bp, Homo sapien
gaaacagccagaagagcctggagag

SEQ ID NO: 289680 - DNA, 25 bp, Homo sapien
cagaagagcctggagagggcctggg

SEQ ID NO: 289681 - DNA, 25 bp, Homo sapien
ctttatagtgaaacagccagaagag

SEQ ID NO: 289682 - DNA, 25 bp, Homo sapien
tgctacttccagtttctcggatttc

SEQ ID NO: 289683 - DNA, 25 bp, Homo sapien
tttccggtcctcatacactttggag

SEQ ID NO: 289684 - DNA, 25 bp, Homo sapien
cagtttctcggatttccggtcctca

SEQ ID NO: 289685 - DNA, 25 bp, Homo sapien
tcggatttccggtcctcatacactt

SEQ ID NO: 289686 - DNA, 25 bp, Homo sapien
ccctggcggaatttacaatcatttt

SEQ ID NO: 289687 - DNA, 25 bp, Homo sapien
ttgcactgtcctgggaattcccgcc

SEQ ID NO: 289688 - DNA, 25 bp, Homo sapien
gagagattttcttgcggccaggcag

SEQ ID NO: 289689 - DNA, 25 bp, Homo sapien
tttcccctgctctaacaccgttgga

SEQ ID NO: 289690 - DNA, 25 bp, Homo sapien
acactaaggaaatatagcaggacag

SEQ ID NO: 289691 - DNA, 25 bp, Homo sapien
ggcagaacgccgggaaaaatgtgtc

SEQ ID NO: 289692 - DNA, 25 bp, Homo sapien
caggacaggtagttggcagaacgcc

SEQ ID NO: 289693 - DNA, 25 bp, Homo sapien
aaatatagcaggacaggtagttggc

SEQ ID NO: 289694 - DNA, 25 bp, Homo sapien
ggcatggccaatgtgactccttggg

SEQ ID NO: 289695 - DNA, 25 bp, Homo sapien
cacctctgtgatgggttcaggagca

SEQ ID NO: 289696 - DNA, 25 bp, Homo sapien
acatcaccctatgctgtgcaagatc

SEQ ID NO: 289697 - DNA, 25 bp, Homo sapien
tatgctgtgcaagatccacctctgt

SEQ ID NO: 289698 - DNA, 25 bp, Homo sapien
ttgactatcactgatgcctccaggt

SEQ ID NO: 289699 - DNA, 25 bp, Homo sapien
gagagtttgactatcactgatgcct

SEQ ID NO: 289700 - DNA, 25 bp, Homo sapien
tctgagagtttgactatcactgatg

SEQ ID NO: 289701 - DNA, 25 bp, Homo sapien
acccagcttgaccagtggggccgtg

SEQ ID NO: 289702 - DNA, 25 bp, Homo sapien
gttttgactacattgttcacgttga

SEQ ID NO: 289703 - DNA, 25 bp, Homo sapien
agcgcgacgcctgccgacactgttt

SEQ ID NO: 289704 - DNA, 25 bp, Homo sapien
gggctgttggtctagggcactggct

SEQ ID NO: 289705 - DNA, 25 bp, Homo sapien
gaagtgccaagcaagttgggtgcct

SEQ ID NO: 289706 - DNA, 25 bp, Homo sapien
ggcggcggctgattgccgccgcgcg

SEQ ID NO: 289707 - DNA, 25 bp, Homo sapien
cgggcggcgagcgccagtaaatcag

SEQ ID NO: 289708 - DNA, 25 bp, Homo sapien
ggcggctgattgccgccgcgcggcg

SEQ ID NO: 289709 - DNA, 25 bp, Homo sapien
ggcggcgagcgccagtaaatcagcc

SEQ ID NO: 289710 - DNA, 25 bp, Homo sapien
ggccccaaaggtgtccgacagcagc

SEQ ID NO: 289711 - DNA, 25 bp, Homo sapien
tgggaggccccaaaggtgtccgaca

SEQ ID NO: 289712 - DNA, 25 bp, Homo sapien
aaaggtgtccgacagcagccagctg

SEQ ID NO: 289713 - DNA, 25 bp, Homo sapien
ggaggccccaaaggtgtccgacagc

SEQ ID NO: 289714 - DNA, 25 bp, Homo sapien
tcttaaacttgacagatgcaaccct

SEQ ID NO: 289715 - DNA, 25 bp, Homo sapien
ttaaacttgacagatgcaaccctca

SEQ ID NO: 289716 - DNA, 25 bp, Homo sapien
taaacttgacagatgcaaccctcat

SEQ ID NO: 289717 - DNA, 25 bp, Homo sapien
gctcttaaacttgacagatgcaacc

SEQ ID NO: 289718 - DNA, 25 bp, Homo sapien
gaggctccccactgcattcctccat

SEQ ID NO: 289719 - DNA, 25 bp, Homo sapien
tcttctctgctgtctctgaggctcc

SEQ ID NO: 289720 - DNA, 25 bp, Homo sapien
tctgaggctccccactgcattcctc

SEQ ID NO: 289721 - DNA, 25 bp, Homo sapien
cccttcttctctgctgtctctgagg

SEQ ID NO: 289722 - DNA, 25 bp, Homo sapien
tccggctcagggagttgaccggcaa

SEQ ID NO: 289723 - DNA, 25 bp, Homo sapien
aggctccacggaatgtcgccaggaa

SEQ ID NO: 289724 - DNA, 25 bp, Homo sapien
aggaacaaggtgcagccccgggcat

SEQ ID NO: 289725 - DNA, 25 bp, Homo sapien
ggcaattggatttcccatcgttggg

SEQ ID NO: 289726 - DNA, 25 bp, Homo sapien
taaacccagacgacaattgccaatg

SEQ ID NO: 289727 - DNA, 25 bp, Homo sapien
ttgccaatgtatggcaaacttgctg

SEQ ID NO: 289728 - DNA, 25 bp, Homo sapien
aacttgctggtattgacgagtgaca

SEQ ID NO: 289729 - DNA, 25 bp, Homo sapien
gctgttgtttgggaacatcgagcct

SEQ ID NO: 289730 - DNA, 25 bp, Homo sapien
tggggttgaggctacgacccctgat

SEQ ID NO: 289731 - DNA, 25 bp, Homo sapien
ggttgaggctacgacccctgatgtc

SEQ ID NO: 289732 - DNA, 25 bp, Homo sapien
gggttgaggctacgacccctgatgt

SEQ ID NO: 289733 - DNA, 25 bp, Homo sapien
ttgaggctacgacccctgatgtcct

SEQ ID NO: 289734 - DNA, 25 bp, Homo sapien
aagtgaggtaataggcaattgagtg

SEQ ID NO: 289735 - DNA, 25 bp, Homo sapien
ggttccgctttgccgagggccctca

SEQ ID NO: 289736 - DNA, 25 bp, Homo sapien
ccgctttgccgagggccctcataaa

SEQ ID NO: 289737 - DNA, 25 bp, Homo sapien
ttccgctttgccgagggccctcata

SEQ ID NO: 289738 - DNA, 25 bp, Homo sapien
tgtgccgactgccccttgggcagag

SEQ ID NO: 289739 - DNA, 25 bp, Homo sapien
tgggcagagtcaactgggccctcat

SEQ ID NO: 289740 - DNA, 25 bp, Homo sapien
tgccgactgccccttgggcagagtc

SEQ ID NO: 289741 - DNA, 25 bp, Homo sapien
ctgtgccgactgccccttgggcaga

SEQ ID NO: 289742 - DNA, 25 bp, Homo sapien
aaatgccagtcctgcggtttgcgat

SEQ ID NO: 289743 - DNA, 25 bp, Homo sapien
tgcgatgcccgtgcttcagggaacc

SEQ ID NO: 289744 - DNA, 25 bp, Homo sapien
cagtcctgcggtttgcgatgcccgt

SEQ ID NO: 289745 - DNA, 25 bp, Homo sapien
tgcggtttgcgatgcccgtgcttca

SEQ ID NO: 289746 - DNA, 25 bp, Homo sapien
gcaaatgatctccatgtgtcacgga

SEQ ID NO: 289747 - DNA, 25 bp, Homo sapien
cacggattgggtttcccctcgtctg

SEQ ID NO: 289748 - DNA, 25 bp, Homo sapien
tggagttggtcacggattttgttcc

SEQ ID NO: 289749 - DNA, 25 bp, Homo sapien
ctttgcatccgtttggagttggtca

SEQ ID NO: 289750 - DNA, 25 bp, Homo sapien
cttttgttctcgcagcaggagctgg

SEQ ID NO: 289751 - DNA, 25 bp, Homo sapien
tgccctcgacccctgctgtgttcct

SEQ ID NO: 289752 - DNA, 25 bp, Homo sapien
gggacagcttccagtcgccggccat

SEQ ID NO: 289753 - DNA, 25 bp, Homo sapien
ggcgccttgctttgaacgtccacaa

SEQ ID NO: 289754 - DNA, 25 bp, Homo sapien
agagtctgtgtcactgtatccaaat

SEQ ID NO: 289755 - DNA, 25 bp, Homo sapien
gtctctgtggtcatagggccttctc

SEQ ID NO: 289756 - DNA, 25 bp, Homo sapien
gagagtctgtgtcactgtatccaaa

SEQ ID NO: 289757 - DNA, 25 bp, Homo sapien
tgagagtctgtgtcactgtatccaa

SEQ ID NO: 289758 - DNA, 25 bp, Homo sapien
gggtcttgtgatctggtggccttct

SEQ ID NO: 289759 - DNA, 25 bp, Homo sapien
gccgggtcctggtcccactcattaa

SEQ ID NO: 289760 - DNA, 25 bp, Homo sapien
ggacttggggtcttgtgatctggtg

SEQ ID NO: 289761 - DNA, 25 bp, Homo sapien
cttgtgatctggtggccttctccct

SEQ ID NO: 289762 - DNA, 25 bp, Homo sapien
taggatcccgcctcttggagaggga

SEQ ID NO: 289763 - DNA, 25 bp, Homo sapien
gataagccaacagcctttgtcaggc

SEQ ID NO: 289764 - DNA, 25 bp, Homo sapien
agggagtctgggctctgtgcaacag

SEQ ID NO: 289765 - DNA, 25 bp, Homo sapien
tcagagccagttctggattgtggcc

SEQ ID NO: 289766 - DNA, 25 bp, Homo sapien
cttgggactgggcaacccgcgtcag

SEQ ID NO: 289767 - DNA, 25 bp, Homo sapien
ctgggcaacccgcgtcagctatcat

SEQ ID NO: 289768 - DNA, 25 bp, Homo sapien
agggtgccctccatcggcaaggcct

SEQ ID NO: 289769 - DNA, 25 bp, Homo sapien
gggcacttgacgcaggcctgggcag

SEQ ID NO: 289770 - DNA, 25 bp, Homo sapien
gaagaacagcttgataggaaaatgc

SEQ ID NO: 289771 - DNA, 25 bp, Homo sapien
tttcccatgccctgaacgtgcccca

SEQ ID NO: 289772 - DNA, 25 bp, Homo sapien
gctctgacagacattctaccattaa

SEQ ID NO: 289773 - DNA, 25 bp, Homo sapien
tgccccacaatccttctggaagcat

SEQ ID NO: 289774 - DNA, 25 bp, Homo sapien
ctgtctagtggacgtgggagattcc

SEQ ID NO: 289775 - DNA, 25 bp, Homo sapien
gtctagtggacgtgggagattccag

SEQ ID NO: 289776 - DNA, 25 bp, Homo sapien
tgtctagtggacgtgggagattcca

SEQ ID NO: 289777 - DNA, 25 bp, Homo sapien
tctagtggacgtgggagattccagc

SEQ ID NO: 289778 - DNA, 25 bp, Homo sapien
gagaggtgcagtttcctccatgggt

SEQ ID NO: 289779 - DNA, 25 bp, Homo sapien
tttggcccatggcagcgttctgcat

SEQ ID NO: 289780 - DNA, 25 bp, Homo sapien
gaggtgcagtttcctccatgggttt

SEQ ID NO: 289781 - DNA, 25 bp, Homo sapien
aggtgcagtttcctccatgggtttg

SEQ ID NO: 289782 - DNA, 25 bp, Homo sapien
atttttttaaggatccagccaaatg

SEQ ID NO: 289783 - DNA, 25 bp, Homo sapien
ccagccaaatgcactgtcacgcagg

SEQ ID NO: 289784 - DNA, 25 bp, Homo sapien
gatccagccaaatgcactgtcacgc

SEQ ID NO: 289785 - DNA, 25 bp, Homo sapien
tccagccaaatgcactgtcacgcag

SEQ ID NO: 289786 - DNA, 25 bp, Homo sapien
aggcaggcggcatatcccaggttga

SEQ ID NO: 289787 - DNA, 25 bp, Homo sapien
tatcccaggttgagagattccccga

SEQ ID NO: 289788 - DNA, 25 bp, Homo sapien
cgtcctggagcctgatgacctcttg

SEQ ID NO: 289789 - DNA, 25 bp, Homo sapien
gaccgctcaactgttccgtcctgga

SEQ ID NO: 289790 - DNA, 25 bp, Homo sapien
cactggatgtagactctggaattag

SEQ ID NO: 289791 - DNA, 25 bp, Homo sapien
gatgtagactctggaattaggtctt

SEQ ID NO: 289792 - DNA, 25 bp, Homo sapien
tggatgtagactctggaattaggtc

SEQ ID NO: 289793 - DNA, 25 bp, Homo sapien
cccactggatgtagactctggaatt

SEQ ID NO: 289794 - DNA, 25 bp, Homo sapien
caggtccaggccaactcttttcctg

SEQ ID NO: 289795 - DNA, 25 bp, Homo sapien
gcaggtccaggccaactcttttcct

SEQ ID NO: 289796 - DNA, 25 bp, Homo sapien
tgcaggtccaggccaactcttttcc

SEQ ID NO: 289797 - DNA, 25 bp, Homo sapien
aaatttcatgcgcggcaccaaattt

SEQ ID NO: 289798 - DNA, 25 bp, Homo sapien
caaatttcatgcgcggcaccaaatt

SEQ ID NO: 289799 - DNA, 25 bp, Homo sapien
cggcgtccgtgatggtctgggggct

SEQ ID NO: 289800 - DNA, 25 bp, Homo sapien
aagctcggcgtccgtgatggtctgg

SEQ ID NO: 289801 - DNA, 25 bp, Homo sapien
tcggcgtccgtgatggtctgggggc

SEQ ID NO: 289802 - DNA, 25 bp, Homo sapien
gctcggcgtccgtgatggtctgggg

SEQ ID NO: 289803 - DNA, 25 bp, Homo sapien
ccatctgggcctatatgtgcaagtc

SEQ ID NO: 289804 - DNA, 25 bp, Homo sapien
ggccatctgggcctatatgtgcaag

SEQ ID NO: 289805 - DNA, 25 bp, Homo sapien
atctgggcctatatgtgcaagtcac

SEQ ID NO: 289806 - DNA, 25 bp, Homo sapien
aaggtgctcagtgggcaggagtggg

SEQ ID NO: 289807 - DNA, 25 bp, Homo sapien
cttctgtattcctgcatattgtata

SEQ ID NO: 289808 - DNA, 25 bp, Homo sapien
cctgtatatgttttcctgagcagtt

SEQ ID NO: 289809 - DNA, 25 bp, Homo sapien
tgacaatagctcatgaaattgagtg

SEQ ID NO: 289810 - DNA, 25 bp, Homo sapien
gactgtgacaatagctcatgaaatt

SEQ ID NO: 289811 - DNA, 25 bp, Homo sapien
aatatgaaaacttaactctgctgtg

SEQ ID NO: 289812 - DNA, 25 bp, Homo sapien
atgaaaaacacaccctacacactag

SEQ ID NO: 289813 - DNA, 25 bp, Homo sapien
tacacactagactccgaacactggt

SEQ ID NO: 289814 - DNA, 25 bp, Homo sapien
tggtaatcagtactgcatagcaaac

SEQ ID NO: 289815 - DNA, 25 bp, Homo sapien
tcctggcaacctcagaaacccctga

SEQ ID NO: 289816 - DNA, 25 bp, Homo sapien
tcaacactttgccaattagctcatg

SEQ ID NO: 289817 - DNA, 25 bp, Homo sapien
tccccacgaccccagaatgaaacag

SEQ ID NO: 289818 - DNA, 25 bp, Homo sapien
cttaattgcttaaggccggggagca

SEQ ID NO: 289819 - DNA, 25 bp, Homo sapien
caggcaggagccaaacaatgaatgc

SEQ ID NO: 289820 - DNA, 25 bp, Homo sapien
gaaggagttggaatgttcgacagca

SEQ ID NO: 289821 - DNA, 25 bp, Homo sapien
ttgccgggtgaaagtccaattgtca

SEQ ID NO: 289822 - DNA, 25 bp, Homo sapien
acaccccagtgtcatcagtcaggca

SEQ ID NO: 289823 - DNA, 25 bp, Homo sapien
cattctgtagccatcgaaagggcgg

SEQ ID NO: 289824 - DNA, 25 bp, Homo sapien
attctgtagccatcgaaagggcggg

SEQ ID NO: 289825 - DNA, 25 bp, Homo sapien
ttctgtagccatcgaaagggcgggg

SEQ ID NO: 289826 - DNA, 25 bp, Homo sapien
cggggtcagggatcttcacccccat

SEQ ID NO: 289827 - DNA, 25 bp, Homo sapien
cctttggcccctgaggtgtaggagg

SEQ ID NO: 289828 - DNA, 25 bp, Homo sapien
cagatggggctggttcggggtcagg

SEQ ID NO: 289829 - DNA, 25 bp, Homo sapien
gtgatgaggatttcctgcagaggga

SEQ ID NO: 289830 - DNA, 25 bp, Homo sapien
aggtgctttgttgcaggagtgcatc

SEQ ID NO: 289831 - DNA, 25 bp, Homo sapien
ggagtgcatcctatcctggtcccag

SEQ ID NO: 289832 - DNA, 25 bp, Homo sapien
gcattcatcatggtcaccctggcac

SEQ ID NO: 289833 - DNA, 25 bp, Homo sapien
gacagcattcatcatggtcaccctg

SEQ ID NO: 289834 - DNA, 25 bp, Homo sapien
ttggctgtttaggtcttcccatttg

SEQ ID NO: 289835 - DNA, 25 bp, Homo sapien
catgccgttggctgtttaggtcttc

SEQ ID NO: 289836 - DNA, 25 bp, Homo sapien
atggccgtcaccaggtcatgccgtt

SEQ ID NO: 289837 - DNA, 25 bp, Homo sapien
caggtgacgggacagtggttcgaac

SEQ ID NO: 289838 - DNA, 25 bp, Homo sapien
ctcttgtggaggtggacatcgtgca

SEQ ID NO: 289839 - DNA, 25 bp, Homo sapien
gaccttggggaagccgcagtagcac

SEQ ID NO: 289840 - DNA, 25 bp, Homo sapien
tgcaggagagaattcttgaccttgg

SEQ ID NO: 289841 - DNA, 25 bp, Homo sapien
gtggacatcgtgcaggagagaattc

SEQ ID NO: 289842 - DNA, 25 bp, Homo sapien
gacttgacagtgatagaccctgtga

SEQ ID NO: 289843 - DNA, 25 bp, Homo sapien
agcctgcggcggcatcatcgtggaa

SEQ ID NO: 289844 - DNA, 25 bp, Homo sapien
gatattcggactcgccttggcagct

SEQ ID NO: 289845 - DNA, 25 bp, Homo sapien
ttgagagcttgttgcactggccgcc

SEQ ID NO: 289846 - DNA, 25 bp, Homo sapien
tggtaatggcggttgtgttttttga

SEQ ID NO: 289847 - DNA, 25 bp, Homo sapien
gttttttgacagtccatccacattg

SEQ ID NO: 289848 - DNA, 25 bp, Homo sapien
ttagattgtgtagcggatggtaatg

SEQ ID NO: 289849 - DNA, 25 bp, Homo sapien
ggcggttgtgttttttgacagtcca

SEQ ID NO: 289850 - DNA, 25 bp, Homo sapien
cgtcacaaaggacagaaggttcttg

SEQ ID NO: 289851 - DNA, 25 bp, Homo sapien
ggctggtgtcggccgtcacaaagga

SEQ ID NO: 289852 - DNA, 25 bp, Homo sapien
cacaaaggacagaaggttcttgccc

SEQ ID NO: 289853 - DNA, 25 bp, Homo sapien
gccgtcacaaaggacagaaggttct

SEQ ID NO: 289854 - DNA, 25 bp, Homo sapien
ttgagtgattggcagcgaccaccag

SEQ ID NO: 289855 - DNA, 25 bp, Homo sapien
acacaagcattgttgagtgattggc

SEQ ID NO: 289856 - DNA, 25 bp, Homo sapien
cagcgaccaccaggagtaaaatact

SEQ ID NO: 289857 - DNA, 25 bp, Homo sapien
cattgttgagtgattggcagcgacc

SEQ ID NO: 289858 - DNA, 25 bp, Homo sapien
tctcaatggccttagctgacaggtt

SEQ ID NO: 289859 - DNA, 25 bp, Homo sapien
ttcagtctcaatggccttagctgac

SEQ ID NO: 289860 - DNA, 25 bp, Homo sapien
ccttcagtctcaatggccttagctg

SEQ ID NO: 289861 - DNA, 25 bp, Homo sapien
agtctcaatggccttagctgacagg

SEQ ID NO: 289862 - DNA, 25 bp, Homo sapien
tcctccagtttacccttaatctgct

SEQ ID NO: 289863 - DNA, 25 bp, Homo sapien
cctccagtttacccttaatctgctt

SEQ ID NO: 289864 - DNA, 25 bp, Homo sapien
ctccagtttacccttaatctgcttt

SEQ ID NO: 289865 - DNA, 25 bp, Homo sapien
cgcggccactcggagttgcacgcag

SEQ ID NO: 289866 - DNA, 25 bp, Homo sapien
atcctgctatgagcgcgctgggcga

SEQ ID NO: 289867 - DNA, 25 bp, Homo sapien
tgcacggcttctttggcggccagca

SEQ ID NO: 289868 - DNA, 25 bp, Homo sapien
gaacatggagccctacggcttccac

SEQ ID NO: 289869 - DNA, 25 bp, Homo sapien
cggcgatgccgagcggagcctccag

SEQ ID NO: 289870 - DNA, 25 bp, Homo sapien
ggcgatgccgagcggagcctccagt

SEQ ID NO: 289871 - DNA, 25 bp, Homo sapien
cgatgccgagcggagcctccagtcc

SEQ ID NO: 289872 - DNA, 25 bp, Homo sapien
gcgatgccgagcggagcctccagtc

SEQ ID NO: 289873 - DNA, 25 bp, Homo sapien
taatttagcaaacgctagacagact

SEQ ID NO: 289874 - DNA, 25 bp, Homo sapien
caaacgctagacagactcgggcgat

SEQ ID NO: 289875 - DNA, 25 bp, Homo sapien
gatttcatgcgtaatttagcaaacg

SEQ ID NO: 289876 - DNA, 25 bp, Homo sapien
gctagacagactcgggcgataaaca

SEQ ID NO: 289877 - DNA, 25 bp, Homo sapien
aaattagattctgctgaacttcgag

SEQ ID NO: 289878 - DNA, 25 bp, Homo sapien
gctctagtcacctccagtgcaaaat

SEQ ID NO: 289879 - DNA, 25 bp, Homo sapien
tatgcgagtgtagaggtgaccccat

SEQ ID NO: 289880 - DNA, 25 bp, Homo sapien
tgaacttcgagtacttcttgggtag

SEQ ID NO: 289881 - DNA, 25 bp, Homo sapien
gcgacagtgttcctctgagttgcca

SEQ ID NO: 289882 - DNA, 25 bp, Homo sapien
aatgtcagcttgttccacaggcgcg

SEQ ID NO: 289883 - DNA, 25 bp, Homo sapien
aatatcctgcagctcacggaagcca

SEQ ID NO: 289884 - DNA, 25 bp, Homo sapien
tgatgtggaggcctctgaacgctgt

SEQ ID NO: 289885 - DNA, 25 bp, Homo sapien
tcaaccccacacagttgttgtgctg

SEQ ID NO: 289886 - DNA, 25 bp, Homo sapien
tgagctgtacggcaatctctgcgat

SEQ ID NO: 289887 - DNA, 25 bp, Homo sapien
tgcagagagattttttggcccgctg

SEQ ID NO: 289888 - DNA, 25 bp, Homo sapien
tggcccgctgagactgcataaccat

SEQ ID NO: 289889 - DNA, 25 bp, Homo sapien
tggaccttccgactcgaccagcctc

SEQ ID NO: 289890 - DNA, 25 bp, Homo sapien
cagatcccaggagtgcagggcactg

SEQ ID NO: 289891 - DNA, 25 bp, Homo sapien
ccagatcccaggagtgcagggcact

SEQ ID NO: 289892 - DNA, 25 bp, Homo sapien
ctccctggaccttccgactcgacca

SEQ ID NO: 289893 - DNA, 25 bp, Homo sapien
acgttggtctgctgtccccgcaggt

SEQ ID NO: 289894 - DNA, 25 bp, Homo sapien
gccctgcgattcactctccacgttg

SEQ ID NO: 289895 - DNA, 25 bp, Homo sapien
ggttatgccgcagggcatccagtat

SEQ ID NO: 289896 - DNA, 25 bp, Homo sapien
ccacttgtgcgattgaagtcagctc

SEQ ID NO: 289897 - DNA, 25 bp, Homo sapien
tttcggtttggcatctcatggccca

SEQ ID NO: 289898 - DNA, 25 bp, Homo sapien
tccagcggtgccttctaacactggg

SEQ ID NO: 289899 - DNA, 25 bp, Homo sapien
caagaaccctttctatatgtgactg

SEQ ID NO: 289900 - DNA, 25 bp, Homo sapien
cacacagtgcgtgccagaaagccca

SEQ ID NO: 289901 - DNA, 25 bp, Homo sapien
gagtcagtgacactccaccttgggt

SEQ ID NO: 289902 - DNA, 25 bp, Homo sapien
cctttgcttagaaaatgagcccaga

SEQ ID NO: 289903 - DNA, 25 bp, Homo sapien
gcccagagtttctgcgagtcagtga

SEQ ID NO: 289904 - DNA, 25 bp, Homo sapien
tctgatgggatgtgctaagtccagg

SEQ ID NO: 289905 - DNA, 25 bp, Homo sapien
caagggcaccgtgtgggatttcctg

SEQ ID NO: 289906 - DNA, 25 bp, Homo sapien
ccatagaatgttgcgaggtggagtt

SEQ ID NO: 289907 - DNA, 25 bp, Homo sapien
ttgacaagggcaccgtgtgggattt

SEQ ID NO: 289908 - DNA, 25 bp, Homo sapien
ccctcagctctcatgtgagagccat

SEQ ID NO: 289909 - DNA, 25 bp, Homo sapien
tgaacttaactctcgctggcatctg

SEQ ID NO: 289910 - DNA, 25 bp, Homo sapien
gagcccggcgcatggattttaatgt

SEQ ID NO: 289911 - DNA, 25 bp, Homo sapien
ttaggcgcacatggaaatgagagcc

SEQ ID NO: 289912 - DNA, 25 bp, Homo sapien
agtatcattgggagcttaggcgcac

SEQ ID NO: 289913 - DNA, 25 bp, Homo sapien
gagggagagagcgggcccagcctgc

SEQ ID NO: 289914 - DNA, 25 bp, Homo sapien
cagcctgctgaaggactcccctgcc

SEQ ID NO: 289915 - DNA, 25 bp, Homo sapien
agggagagagcgggcccagcctgct

SEQ ID NO: 289916 - DNA, 25 bp, Homo sapien
ccagcctgctgaaggactcccctgc

SEQ ID NO: 289917 - DNA, 25 bp, Homo sapien
atggtttgcccagcgcttctgtaga

SEQ ID NO: 289918 - DNA, 25 bp, Homo sapien
cttatggtttgcccagcgcttctgt

SEQ ID NO: 289919 - DNA, 25 bp, Homo sapien
tatggtttgcccagcgcttctgtag

SEQ ID NO: 289920 - DNA, 25 bp, Homo sapien
tggtttgcccagcgcttctgtagag

SEQ ID NO: 289921 - DNA, 25 bp, Homo sapien
tgactacactatttaaactgtgagg

SEQ ID NO: 289922 - DNA, 25 bp, Homo sapien
cagttaataaacagtgcagctccac

SEQ ID NO: 289923 - DNA, 25 bp, Homo sapien
gagaacccttatgtattaaagacac

SEQ ID NO: 289924 - DNA, 25 bp, Homo sapien
agccagtgtacccagcatctcttgg

SEQ ID NO: 289925 - DNA, 25 bp, Homo sapien
ggtgttacctcgttgatgtagccca

SEQ ID NO: 289926 - DNA, 25 bp, Homo sapien
gtgttacctcgttgatgtagcccat

SEQ ID NO: 289927 - DNA, 25 bp, Homo sapien
tggtgttacctcgttgatgtagccc

SEQ ID NO: 289928 - DNA, 25 bp, Homo sapien
ttggaaacatttcacaactagtgct

SEQ ID NO: 289929 - DNA, 25 bp, Homo sapien
tgaggttcttgttagcccatgacgt

SEQ ID NO: 289930 - DNA, 25 bp, Homo sapien
tttaaattacgtagcaatgagtcat

SEQ ID NO: 289931 - DNA, 25 bp, Homo sapien
tgttctctttgtaatcaaccattct

SEQ ID NO: 289932 - DNA, 25 bp, Homo sapien
ctggggaacgataatagttggaaat

SEQ ID NO: 289933 - DNA, 25 bp, Homo sapien
tctttgccaattactgtcctggtgg

SEQ ID NO: 289934 - DNA, 25 bp, Homo sapien
ctttgccaattactgtcctggtgga

SEQ ID NO: 289935 - DNA, 25 bp, Homo sapien
gaagatagctgataatatggcatac

SEQ ID NO: 289936 - DNA, 25 bp, Homo sapien
gagggaaataaagcgtaagaagata

SEQ ID NO: 289937 - DNA, 25 bp, Homo sapien
tgctgtggagggaaataaagcgtaa

SEQ ID NO: 289938 - DNA, 25 bp, Homo sapien
taaagcgtaagaagatagctgataa

SEQ ID NO: 289939 - DNA, 25 bp, Homo sapien
tgcttatgtcgtgcttgcttaaaca

SEQ ID NO: 289940 - DNA, 25 bp, Homo sapien
catggttggatagtgccctcttgtg

SEQ ID NO: 289941 - DNA, 25 bp, Homo sapien
gccttacatggtcacacactttcag

SEQ ID NO: 289942 - DNA, 25 bp, Homo sapien
cactatattcgaaggcatggttgga

SEQ ID NO: 289943 - DNA, 25 bp, Homo sapien
gtccactagtccagttctctgaaga

SEQ ID NO: 289944 - DNA, 25 bp, Homo sapien
ggcaggtctgtacatgcatgacttc

SEQ ID NO: 289945 - DNA, 25 bp, Homo sapien
catgacttccagttgtgggttgggt

SEQ ID NO: 289946 - DNA, 25 bp, Homo sapien
ggagaccatggtcattaggcaggtc

SEQ ID NO: 289947 - DNA, 25 bp, Homo sapien
acagatagacataataatttccagg

SEQ ID NO: 289948 - DNA, 25 bp, Homo sapien
gtgtggtttacagatagacataata

SEQ ID NO: 289949 - DNA, 25 bp, Homo sapien
ctagtgaagagaaggcatcacagtg

SEQ ID NO: 289950 - DNA, 25 bp, Homo sapien
agaaggcatcacagtgtatttaggg

SEQ ID NO: 289951 - DNA, 25 bp, Homo sapien
catgtgtctatatgccttaggttac

SEQ ID NO: 289952 - DNA, 25 bp, Homo sapien
tactgttcctaagagaagttataaa

SEQ ID NO: 289953 - DNA, 25 bp, Homo sapien
gaacatggttgtacatgtgtctata

SEQ ID NO: 289954 - DNA, 25 bp, Homo sapien
aaagaacaagatggacgctgtctca

SEQ ID NO: 289955 - DNA, 25 bp, Homo sapien
tggagtcccctggtaaccagcggga

SEQ ID NO: 289956 - DNA, 25 bp, Homo sapien
tgaaggcagccctcgtgtcaggact

SEQ ID NO: 289957 - DNA, 25 bp, Homo sapien
tggagccgggattccggaaagcctc

SEQ ID NO: 289958 - DNA, 25 bp, Homo sapien
tccgctgacttgacgggagagcctt

SEQ ID NO: 289959 - DNA, 25 bp, Homo sapien
aaggagccgcagtccgagggtggga

SEQ ID NO: 289960 - DNA, 25 bp, Homo sapien
ggagccgcagtccgagggtgggaga

SEQ ID NO: 289961 - DNA, 25 bp, Homo sapien
gaaggagccgcagtccgagggtggg

SEQ ID NO: 289962 - DNA, 25 bp, Homo sapien
gggaaggagccgcagtccgagggtg

SEQ ID NO: 289963 - DNA, 25 bp, Homo sapien
aagggtgtaagcacgcaggcgcgat

SEQ ID NO: 289964 - DNA, 25 bp, Homo sapien
ctgatcaaggaattgtgagtgggtc

SEQ ID NO: 289965 - DNA, 25 bp, Homo sapien
tcctaaatcggagtcagccctgtgt

SEQ ID NO: 289966 - DNA, 25 bp, Homo sapien
tgatggagaagtggtaggatattcc

SEQ ID NO: 289967 - DNA, 25 bp, Homo sapien
agtagaagccgcacgctcttcggca

SEQ ID NO: 289968 - DNA, 25 bp, Homo sapien
ggaaagcgtaggctgcccagacgcc

SEQ ID NO: 289969 - DNA, 25 bp, Homo sapien
tcgagcttgcgcagccgcagtagaa

SEQ ID NO: 289970 - DNA, 25 bp, Homo sapien
tcgtaagcagacaagagtgcgcgcg

SEQ ID NO: 289971 - DNA, 25 bp, Homo sapien
agcaggtgaacgtcctcccgcggaa

SEQ ID NO: 289972 - DNA, 25 bp, Homo sapien
gtttaggattctccgccgcggtgga

SEQ ID NO: 289973 - DNA, 25 bp, Homo sapien
gcggtggacctccacgagaccgcga

SEQ ID NO: 289974 - DNA, 25 bp, Homo sapien
aggtttaggattctccgccgcggtg

SEQ ID NO: 289975 - DNA, 25 bp, Homo sapien
tctctagttccactcataattcttt

SEQ ID NO: 289976 - DNA, 25 bp, Homo sapien
aaatgtcacacgacagggacgttaa

SEQ ID NO: 289977 - DNA, 25 bp, Homo sapien
cagggacgttaatccattagtctat

SEQ ID NO: 289978 - DNA, 25 bp, Homo sapien
ctcattttgggcgttggttcatgtc

SEQ ID NO: 289979 - DNA, 25 bp, Homo sapien
aaaggctacctttgagagttcgaag

SEQ ID NO: 289980 - DNA, 25 bp, Homo sapien
cagattccaggttaagaacagctac

SEQ ID NO: 289981 - DNA, 25 bp, Homo sapien
tgaccagagttatgctatcagctag

SEQ ID NO: 289982 - DNA, 25 bp, Homo sapien
gattggtagacatatgacactggta

SEQ ID NO: 289983 - DNA, 25 bp, Homo sapien
gatggccaatatgtatacacgcatg

SEQ ID NO: 289984 - DNA, 25 bp, Homo sapien
tcctcaacctgcaaggaatgcaaag

SEQ ID NO: 289985 - DNA, 25 bp, Homo sapien
gaaggaagaatgagactaagaccag

SEQ ID NO: 289986 - DNA, 25 bp, Homo sapien
ggtttaagagggtattccagtatca

SEQ ID NO: 289987 - DNA, 25 bp, Homo sapien
gctgttcatgtttcaagttatctct

SEQ ID NO: 289988 - DNA, 25 bp, Homo sapien
acagctgccctgtatgttcgttagt

SEQ ID NO: 289989 - DNA, 25 bp, Homo sapien
gggccaaatgcgctgttcatgtttc

SEQ ID NO: 289990 - DNA, 25 bp, Homo sapien
tcacagctgccctgtatgttcgtta

SEQ ID NO: 289991 - DNA, 25 bp, Homo sapien
cagcataaacatccatgcttctgga

SEQ ID NO: 289992 - DNA, 25 bp, Homo sapien
gcagcataaacatccatgcttctgg

SEQ ID NO: 289993 - DNA, 25 bp, Homo sapien
tgcagcataaacatccatgcttctg

SEQ ID NO: 289994 - DNA, 25 bp, Homo sapien
ctgcagcataaacatccatgcttct

SEQ ID NO: 289995 - DNA, 25 bp, Homo sapien
tccaagtgcatataatcaacatgga

SEQ ID NO: 289996 - DNA, 25 bp, Homo sapien
aatattccaagtgcatataatcaac

SEQ ID NO: 289997 - DNA, 25 bp, Homo sapien
aaataagtgacagaacaatccacag

SEQ ID NO: 289998 - DNA, 25 bp, Homo sapien
ataagtgacagaacaatccacagat

SEQ ID NO: 289999 - DNA, 25 bp, Homo sapien
tatatccacacaaaggaataccact

SEQ ID NO: 290000 - DNA, 25 bp, Homo sapien
actgagcaatgaaaaggtctgaatg

SEQ ID NO: 290001 - DNA, 25 bp, Homo sapien
tgtggagtaactggactctcatgca

SEQ ID NO: 290002 - DNA, 25 bp, Homo sapien
tctatacatctagtcatggcaactt

SEQ ID NO: 290003 - DNA, 25 bp, Homo sapien
ggctggagtgcaatgacatgatctt

SEQ ID NO: 290004 - DNA, 25 bp, Homo sapien
gcttcaccctgttggccaggttggt

SEQ ID NO: 290005 - DNA, 25 bp, Homo sapien
gagacagagtcttacttctttgccc

SEQ ID NO: 290006 - DNA, 25 bp, Homo sapien
caatgacatgatcttggctcactgc

SEQ ID NO: 290007 - DNA, 25 bp, Homo sapien
tctgaaaatccaaggatggctcaac

SEQ ID NO: 290008 - DNA, 25 bp, Homo sapien
tagattacacgaacagaacaaagca

SEQ ID NO: 290009 - DNA, 25 bp, Homo sapien
taacatcacagctgaccaatggaaa

SEQ ID NO: 290010 - DNA, 25 bp, Homo sapien
gaactattgagcaaacctatcctaa

SEQ ID NO: 290011 - DNA, 25 bp, Homo sapien
ttacataagactgtgctcttgaagt

SEQ ID NO: 290012 - DNA, 25 bp, Homo sapien
cttacataagactgtgctcttgaag

SEQ ID NO: 290013 - DNA, 25 bp, Homo sapien
tgaggtcttagacttcagttagaag

SEQ ID NO: 290014 - DNA, 25 bp, Homo sapien
tctttagaagggactaggattctca

SEQ ID NO: 290015 - DNA, 25 bp, Homo sapien
cagtataaagtcataaggtacttca

SEQ ID NO: 290016 - DNA, 25 bp, Homo sapien
gttgactcttagacaactctaggaa

SEQ ID NO: 290017 - DNA, 25 bp, Homo sapien
tggcggcagagcgtggcactcttct

SEQ ID NO: 290018 - DNA, 25 bp, Homo sapien
tatcagactgtgttccattatcaaa

SEQ ID NO: 290019 - DNA, 25 bp, Homo sapien
cccctgaggagggatgatgttggcg

SEQ ID NO: 290020 - DNA, 25 bp, Homo sapien
cttgctggcgagctctgagtccaca

SEQ ID NO: 290021 - DNA, 25 bp, Homo sapien
cccttgcctattgcagaacagtgct

SEQ ID NO: 290022 - DNA, 25 bp, Homo sapien
aataaatagagaagtcccatgtccc

SEQ ID NO: 290023 - DNA, 25 bp, Homo sapien
tacagtcttggacagtatgacatga

SEQ ID NO: 290024 - DNA, 25 bp, Homo sapien
tataatgaaggccactacagtactg

SEQ ID NO: 290025 - DNA, 25 bp, Homo sapien
gagacaaaggtgtcacccacgctgt

SEQ ID NO: 290026 - DNA, 25 bp, Homo sapien
tgactataagccgtacaactcccct

SEQ ID NO: 290027 - DNA, 25 bp, Homo sapien
gtcccagtgacgctccagcatatga

SEQ ID NO: 290028 - DNA, 25 bp, Homo sapien
cagcatatgatcactgcagccggtc

SEQ ID NO: 290029 - DNA, 25 bp, Homo sapien
cagcagcacatggagcagacctgag

SEQ ID NO: 290030 - DNA, 25 bp, Homo sapien
ttcctcatgaaggtgggcggccacc

SEQ ID NO: 290031 - DNA, 25 bp, Homo sapien
ctcactacagggttcctcatgaagg

SEQ ID NO: 290032 - DNA, 25 bp, Homo sapien
gcactgacctcaggatccccaggtg

SEQ ID NO: 290033 - DNA, 25 bp, Homo sapien
tgctgaagccacacgtacagatcct

SEQ ID NO: 290034 - DNA, 25 bp, Homo sapien
tatgcctggattatggccaaccggg

SEQ ID NO: 290035 - DNA, 25 bp, Homo sapien
ccttttgctgggacgtatgcctgga

SEQ ID NO: 290036 - DNA, 25 bp, Homo sapien
tacagatcctaagcaacagggcctt

SEQ ID NO: 290037 - DNA, 25 bp, Homo sapien
taattcacattgaaacagcgcttcc

SEQ ID NO: 290038 - DNA, 25 bp, Homo sapien
aaattatgtaactcttatccaggca

SEQ ID NO: 290039 - DNA, 25 bp, Homo sapien
cagcgcttccattctgaactctgct

SEQ ID NO: 290040 - DNA, 25 bp, Homo sapien
tgtcttttgggtcccgctgtcaacc

SEQ ID NO: 290041 - DNA, 25 bp, Homo sapien
ttccatctgggacacattcggtttg

SEQ ID NO: 290042 - DNA, 25 bp, Homo sapien
actgatgttcttaagggccaagctg

SEQ ID NO: 290043 - DNA, 25 bp, Homo sapien
tttgcaggtggaaccaacggagtct

SEQ ID NO: 290044 - DNA, 25 bp, Homo sapien
gaactgccaaaatgggattgccctc

SEQ ID NO: 290045 - DNA, 25 bp, Homo sapien
tatagcgctcatgttcaagatctgg

SEQ ID NO: 290046 - DNA, 25 bp, Homo sapien
gcaggcattccatgaagttgcacaa

SEQ ID NO: 290047 - DNA, 25 bp, Homo sapien
ccatagtgctttccgtgaagggaca

SEQ ID NO: 290048 - DNA, 25 bp, Homo sapien
gttgcacaaggagccctatagcgct

SEQ ID NO: 290049 - DNA, 25 bp, Homo sapien
gacatccagggattacaacttgaga

SEQ ID NO: 290050 - DNA, 25 bp, Homo sapien
gtctaagtaccacgtccacagtttg

SEQ ID NO: 290051 - DNA, 25 bp, Homo sapien
tgtgttacacctgctctgagtctca

SEQ ID NO: 290052 - DNA, 25 bp, Homo sapien
cagacactgaacatgcatgaaggca

SEQ ID NO: 290053 - DNA, 25 bp, Homo sapien
gctgtgaggctctaagatgtaaccg

SEQ ID NO: 290054 - DNA, 25 bp, Homo sapien
gatgtaaccgggttccacttcgcca

SEQ ID NO: 290055 - DNA, 25 bp, Homo sapien
tgcacgtgctgtcaaacggagccac

SEQ ID NO: 290056 - DNA, 25 bp, Homo sapien
tcccacgcctgagggaagacacaag

SEQ ID NO: 290057 - DNA, 25 bp, Homo sapien
gcctgaggcccatgctgatttggaa

SEQ ID NO: 290058 - DNA, 25 bp, Homo sapien
tcatcagccgggtaagtcgagcctg

SEQ ID NO: 290059 - DNA, 25 bp, Homo sapien
ggaaaggcagagcaacttggcccta

SEQ ID NO: 290060 - DNA, 25 bp, Homo sapien
gagcttctgaaaaatgccaccgatg

SEQ ID NO: 290061 - DNA, 25 bp, Homo sapien
gcatctgcgccccactggcgctgcc

SEQ ID NO: 290062 - DNA, 25 bp, Homo sapien
tggcgctgccccttcccgggatgat

SEQ ID NO: 290063 - DNA, 25 bp, Homo sapien
aggtcgtgccggcagacactggcca

SEQ ID NO: 290064 - DNA, 25 bp, Homo sapien
cactggccactactgccattgtcat

SEQ ID NO: 290065 - DNA, 25 bp, Homo sapien
aatgggcagcgcaatgccatgtaca

SEQ ID NO: 290066 - DNA, 25 bp, Homo sapien
caggtggagaaatccctgcagcgca

SEQ ID NO: 290067 - DNA, 25 bp, Homo sapien
cttgggccccgcattcatgaggatg

SEQ ID NO: 290068 - DNA, 25 bp, Homo sapien
aggatgctggatctcccagctagga

SEQ ID NO: 290069 - DNA, 25 bp, Homo sapien
ctgagctccggcatcccagtgttta

SEQ ID NO: 290070 - DNA, 25 bp, Homo sapien
gtgagtacacacttcctcctgtctg

SEQ ID NO: 290071 - DNA, 25 bp, Homo sapien
gacccagtgggcagtgtgccttgga

SEQ ID NO: 290072 - DNA, 25 bp, Homo sapien
ctggctggtgtgagtacacacttcc

SEQ ID NO: 290073 - DNA, 25 bp, Homo sapien
aagaagcatttagttggtccgacag

SEQ ID NO: 290074 - DNA, 25 bp, Homo sapien
ttctgccaggcgaagcatgcacaag

SEQ ID NO: 290075 - DNA, 25 bp, Homo sapien
catgcacaagcaggcacggagggct

SEQ ID NO: 290076 - DNA, 25 bp, Homo sapien
gacgcagaaagtagaggtgacccct

SEQ ID NO: 290077 - DNA, 25 bp, Homo sapien
caaagcaaaagtcccacccatgggt

SEQ ID NO: 290078 - DNA, 25 bp, Homo sapien
aaaggtgggtcagtccctctgccag

SEQ ID NO: 290079 - DNA, 25 bp, Homo sapien
tagcataaatccagttgacacatcc

SEQ ID NO: 290080 - DNA, 25 bp, Homo sapien
cggccacaaccgcaaagcagagtgt

SEQ ID NO: 290081 - DNA, 25 bp, Homo sapien
tgtatgaatgtgaaactcctcctga

SEQ ID NO: 290082 - DNA, 25 bp, Homo sapien
ccatgaaggtggtgcagagcagcaa

SEQ ID NO: 290083 - DNA, 25 bp, Homo sapien
ttaagatcatctttggaccagggag

SEQ ID NO: 290084 - DNA, 25 bp, Homo sapien
tacatgctcttagtggacctgccca

SEQ ID NO: 290085 - DNA, 25 bp, Homo sapien
tgcagtccaaggtaaggctcacaca

SEQ ID NO: 290086 - DNA, 25 bp, Homo sapien
tgaatcccagataggaagcgagctg

SEQ ID NO: 290087 - DNA, 25 bp, Homo sapien
caatagagtaacagtgggccaccct

SEQ ID NO: 290088 - DNA, 25 bp, Homo sapien
gactgtctttaccacaagggcctgc

SEQ ID NO: 290089 - DNA, 25 bp, Homo sapien
tctcagaggaggtcacggaagatcc

SEQ ID NO: 290090 - DNA, 25 bp, Homo sapien
tccacaagcgagcatgccagttggt

SEQ ID NO: 290091 - DNA, 25 bp, Homo sapien
ccatatgggtttacagagactgaac

SEQ ID NO: 290092 - DNA, 25 bp, Homo sapien
tcagacgggtcaagcgagcacattt

SEQ ID NO: 290093 - DNA, 25 bp, Homo sapien
catgaatgtttgtaaacgccagaga

SEQ ID NO: 290094 - DNA, 25 bp, Homo sapien
ttacccactgtgcagctaccttggc

SEQ ID NO: 290095 - DNA, 25 bp, Homo sapien
tatgtctggagtgcacaccagtgcc

SEQ ID NO: 290096 - DNA, 25 bp, Homo sapien
ggaaaaatgattatgggccaggaga

SEQ ID NO: 290097 - DNA, 25 bp, Homo sapien
tactgtgaatccctgagaggcctgc

SEQ ID NO: 290098 - DNA, 25 bp, Homo sapien
tacttcaggcaaaccagtgggcggt

SEQ ID NO: 290099 - DNA, 25 bp, Homo sapien
gataagtcggcctctcctagaacag

SEQ ID NO: 290100 - DNA, 25 bp, Homo sapien
tcatgactgtaatcactgccctggg

SEQ ID NO: 290101 - DNA, 25 bp, Homo sapien
tgaattgaatcagggcctatggtga

SEQ ID NO: 290102 - DNA, 25 bp, Homo sapien
gaagcaatgtgaattgaatcagggc

SEQ ID NO: 290103 - DNA, 25 bp, Homo sapien
gcaatgtgaattgaatcagggccta

SEQ ID NO: 290104 - DNA, 25 bp, Homo sapien
tgttgaagcaatgtgaattgaatca

SEQ ID NO: 290105 - DNA, 25 bp, Homo sapien
ggagaaatcgatcgtgtggccaagt

SEQ ID NO: 290106 - DNA, 25 bp, Homo sapien
gaaggagaaatcgatcgtgtggcca

SEQ ID NO: 290107 - DNA, 25 bp, Homo sapien
gatgtctgagccagaatcttcaggt

SEQ ID NO: 290108 - DNA, 25 bp, Homo sapien
aaagggcccatgaaggatgtctgag

SEQ ID NO: 290109 - DNA, 25 bp, Homo sapien
tctttggcaaataactggttatcag

SEQ ID NO: 290110 - DNA, 25 bp, Homo sapien
tcagggttgcaattggttggtcttt

SEQ ID NO: 290111 - DNA, 25 bp, Homo sapien
agtttctcgcctgtcgttttcagct

SEQ ID NO: 290112 - DNA, 25 bp, Homo sapien
aactggttatcagtgcacaagaagc

SEQ ID NO: 290113 - DNA, 25 bp, Homo sapien
tgtatggtggtaactctctccaaag

SEQ ID NO: 290114 - DNA, 25 bp, Homo sapien
gtatggtggtaactctctccaaaga

SEQ ID NO: 290115 - DNA, 25 bp, Homo sapien
gctggaagcctgctgagagtaatgg

SEQ ID NO: 290116 - DNA, 25 bp, Homo sapien
gaagcctgctgagagtaatgggaca

SEQ ID NO: 290117 - DNA, 25 bp, Homo sapien
gagtaatgggacaggcccacctcct

SEQ ID NO: 290118 - DNA, 25 bp, Homo sapien
cctgctgagagtaatgggacaggcc

SEQ ID NO: 290119 - DNA, 25 bp, Homo sapien
tttctgtacagtgctctatctcgag

SEQ ID NO: 290120 - DNA, 25 bp, Homo sapien
gaaaaagacaggaacgacatcagcc

SEQ ID NO: 290121 - DNA, 25 bp, Homo sapien
gcttttcaaaatctcgggctgttaa

SEQ ID NO: 290122 - DNA, 25 bp, Homo sapien
gggctttcatgacgtgacaacagct

SEQ ID NO: 290123 - DNA, 25 bp, Homo sapien
caacgtgccgatacatttgctgagc

SEQ ID NO: 290124 - DNA, 25 bp, Homo sapien
catttgctgagctatgtagacaggt

SEQ ID NO: 290125 - DNA, 25 bp, Homo sapien
tgcatttctttacggccaacgtgcc

SEQ ID NO: 290126 - DNA, 25 bp, Homo sapien
gacaggttctctagcaccaacagct

SEQ ID NO: 290127 - DNA, 25 bp, Homo sapien
ggaccatcctgggatcaccacagtc

SEQ ID NO: 290128 - DNA, 25 bp, Homo sapien
aatctgctgcatgcgggaccatcct

SEQ ID NO: 290129 - DNA, 25 bp, Homo sapien
catgaaggatagctgcaggaaacca

SEQ ID NO: 290130 - DNA, 25 bp, Homo sapien
ggatcaccacagtcttccctttggt

SEQ ID NO: 290131 - DNA, 25 bp, Homo sapien
cttttggtctctgagtactgggtat

SEQ ID NO: 290132 - DNA, 25 bp, Homo sapien
tgctgtctttttggaggttttggta

SEQ ID NO: 290133 - DNA, 25 bp, Homo sapien
tgagtactgggtattccccagtccc

SEQ ID NO: 290134 - DNA, 25 bp, Homo sapien
tgcctttccagacttttgctgtctt

SEQ ID NO: 290135 - DNA, 25 bp, Homo sapien
ttctaagaggtcactgtcatccaag

SEQ ID NO: 290136 - DNA, 25 bp, Homo sapien
tttctaagaggtcactgtcatccaa

SEQ ID NO: 290137 - DNA, 25 bp, Homo sapien
ccaggttttcctccaataatgccat

SEQ ID NO: 290138 - DNA, 25 bp, Homo sapien
cagtactgtccaggttttcctccaa

SEQ ID NO: 290139 - DNA, 25 bp, Homo sapien
acagtactgtccaggttttcctcca

SEQ ID NO: 290140 - DNA, 25 bp, Homo sapien
tgtccaggttttcctccaataatgc

SEQ ID NO: 290141 - DNA, 25 bp, Homo sapien
tctttgaactggttgaaataggctt

SEQ ID NO: 290142 - DNA, 25 bp, Homo sapien
tgaactggttgaaataggctttgtt

SEQ ID NO: 290143 - DNA, 25 bp, Homo sapien
tttgaactggttgaaataggctttg

SEQ ID NO: 290144 - DNA, 25 bp, Homo sapien
ttgaactggttgaaataggctttgt

SEQ ID NO: 290145 - DNA, 25 bp, Homo sapien
ggtcccaaagcttgggatggcattc

SEQ ID NO: 290146 - DNA, 25 bp, Homo sapien
agacttttatctcttgtcccaaatg

SEQ ID NO: 290147 - DNA, 25 bp, Homo sapien
acctggcagaggcactgttgaacac

SEQ ID NO: 290148 - DNA, 25 bp, Homo sapien
caatctgttagatgccctgaacacc

SEQ ID NO: 290149 - DNA, 25 bp, Homo sapien
gaacaccagacgaaacagactttta

SEQ ID NO: 290150 - DNA, 25 bp, Homo sapien
actcttgtggcagggcagatctcca

SEQ ID NO: 290151 - DNA, 25 bp, Homo sapien
cctaagtccagttaagtcaaagaga

SEQ ID NO: 290152 - DNA, 25 bp, Homo sapien
gagtcaggaccagcagagtggtccc

SEQ ID NO: 290153 - DNA, 25 bp, Homo sapien
gccttgatcatgcatactgtctgcc

SEQ ID NO: 290154 - DNA, 25 bp, Homo sapien
gcaacatattcccggattgttttct

SEQ ID NO: 290155 - DNA, 25 bp, Homo sapien
catattcccggattgttttctgttc

SEQ ID NO: 290156 - DNA, 25 bp, Homo sapien
aacatattcccggattgttttctgt

SEQ ID NO: 290157 - DNA, 25 bp, Homo sapien
cagcaacatattcccggattgtttt

SEQ ID NO: 290158 - DNA, 25 bp, Homo sapien
ccactattaagcctggtaaagccat

SEQ ID NO: 290159 - DNA, 25 bp, Homo sapien
ccatcttccactattaagcctggta

SEQ ID NO: 290160 - DNA, 25 bp, Homo sapien
tcttccactattaagcctggtaaag

SEQ ID NO: 290161 - DNA, 25 bp, Homo sapien
caaaccatcttccactattaagcct

SEQ ID NO: 290162 - DNA, 25 bp, Homo sapien
tctccagtttgtggcaccatccggc

SEQ ID NO: 290163 - DNA, 25 bp, Homo sapien
gacaactcctggtacttcttaaatg

SEQ ID NO: 290164 - DNA, 25 bp, Homo sapien
ggagatctggagtttaaccagaaat

SEQ ID NO: 290165 - DNA, 25 bp, Homo sapien
agctggcatgtctgccttgacaact

SEQ ID NO: 290166 - DNA, 25 bp, Homo sapien
tctgtaatcagatctttcacaaacc

SEQ ID NO: 290167 - DNA, 25 bp, Homo sapien
tcacaaacccaaattagaccacact

SEQ ID NO: 290168 - DNA, 25 bp, Homo sapien
tcatgcctcacctatactgaatttc

SEQ ID NO: 290169 - DNA, 25 bp, Homo sapien
tccttagtaacttgaaagttccata

SEQ ID NO: 290170 - DNA, 25 bp, Homo sapien
tactttctttgcactcccactcatt

SEQ ID NO: 290171 - DNA, 25 bp, Homo sapien
aagttgaattgaccactccttcctt

SEQ ID NO: 290172 - DNA, 25 bp, Homo sapien
gttgaattgaccactccttccttca

SEQ ID NO: 290173 - DNA, 25 bp, Homo sapien
ccactcattgaacatagtccaagtt

SEQ ID NO: 290174 - DNA, 25 bp, Homo sapien
gcaggatgcagactactgccacaat

SEQ ID NO: 290175 - DNA, 25 bp, Homo sapien
gatgccggtcagaatctgctcttgc

SEQ ID NO: 290176 - DNA, 25 bp, Homo sapien
gatgcagactactgccacaatggct

SEQ ID NO: 290177 - DNA, 25 bp, Homo sapien
ctttcactgcggaagtgatgccggt

SEQ ID NO: 290178 - DNA, 25 bp, Homo sapien
tccactccttttaccttttgcctgc

SEQ ID NO: 290179 - DNA, 25 bp, Homo sapien
cttttgcctgcttgttttttctgtg

SEQ ID NO: 290180 - DNA, 25 bp, Homo sapien
ttttctgtgtcagaggacattctca

SEQ ID NO: 290181 - DNA, 25 bp, Homo sapien
ctccttttaccttttgcctgcttgt

SEQ ID NO: 290182 - DNA, 25 bp, Homo sapien
tggcctaccttctgattagaaaatc

SEQ ID NO: 290183 - DNA, 25 bp, Homo sapien
tatttgaaaggagacgaagggtagc

SEQ ID NO: 290184 - DNA, 25 bp, Homo sapien
tccttctatatagttgaatcatcct

SEQ ID NO: 290185 - DNA, 25 bp, Homo sapien
atcaagatacattatttctcagtaa

SEQ ID NO: 290186 - DNA, 25 bp, Homo sapien
tcttgatcttgcagccattctctgc

SEQ ID NO: 290187 - DNA, 25 bp, Homo sapien
catcatctacctcttcccctccttt

SEQ ID NO: 290188 - DNA, 25 bp, Homo sapien
ttgatcttgcagccattctctgctg

SEQ ID NO: 290189 - DNA, 25 bp, Homo sapien
ctcctttcttgatcttgcagccatt

SEQ ID NO: 290190 - DNA, 25 bp, Homo sapien
tgtagcttcgcttccactctgttct

SEQ ID NO: 290191 - DNA, 25 bp, Homo sapien
tggtagtctcataaaggtctggctt

SEQ ID NO: 290192 - DNA, 25 bp, Homo sapien
cttgggccttgtgggatgacacatt

SEQ ID NO: 290193 - DNA, 25 bp, Homo sapien
tctggtagtcattctcatcgtagga

SEQ ID NO: 290194 - DNA, 25 bp, Homo sapien
cctgtcttgcatatctgagacctcc

SEQ ID NO: 290195 - DNA, 25 bp, Homo sapien
cctgattatgctcagcctgtcttgc

SEQ ID NO: 290196 - DNA, 25 bp, Homo sapien
ttgtctgtagtcagctgaagtcagt

SEQ ID NO: 290197 - DNA, 25 bp, Homo sapien
gcttggcaatttccctgattatgct

SEQ ID NO: 290198 - DNA, 25 bp, Homo sapien
tctggctagagtgggcaatgtacaa

SEQ ID NO: 290199 - DNA, 25 bp, Homo sapien
catcatgctgggtgtcaaaaactca

SEQ ID NO: 290200 - DNA, 25 bp, Homo sapien
aaataggtctggctagagtgggcaa

SEQ ID NO: 290201 - DNA, 25 bp, Homo sapien
tcagtactggtacatcatgctgggt

SEQ ID NO: 290202 - DNA, 25 bp, Homo sapien
gttagttgtaactactattgcactc

SEQ ID NO: 290203 - DNA, 25 bp, Homo sapien
tagttgtaactactattgcactcag

SEQ ID NO: 290204 - DNA, 25 bp, Homo sapien
cagttagttgtaactactattgcac

SEQ ID NO: 290205 - DNA, 25 bp, Homo sapien
atcagttagttgtaactactattgc

SEQ ID NO: 290206 - DNA, 25 bp, Homo sapien
aaatgtttcctagagattctggtac

SEQ ID NO: 290207 - DNA, 25 bp, Homo sapien
ttagggtatcgattttagatctctc

SEQ ID NO: 290208 - DNA, 25 bp, Homo sapien
aatgtttcctagagattctggtaca

SEQ ID NO: 290209 - DNA, 25 bp, Homo sapien
gggtatcgattttagatctctcctg

SEQ ID NO: 290210 - DNA, 25 bp, Homo sapien
taccagaatactgggttaatccaag

SEQ ID NO: 290211 - DNA, 25 bp, Homo sapien
cagcccttgaaagctgtagagcagc

SEQ ID NO: 290212 - DNA, 25 bp, Homo sapien
gacagaacaggctccagtagatgtt

SEQ ID NO: 290213 - DNA, 25 bp, Homo sapien
gtatctggtaggcagaacgtactca

SEQ ID NO: 290214 - DNA, 25 bp, Homo sapien
tggagtcaccctcagtttgtcaaag

SEQ ID NO: 290215 - DNA, 25 bp, Homo sapien
tgtcaaagtgttcacactgtgagag

SEQ ID NO: 290216 - DNA, 25 bp, Homo sapien
gctggagtcaccctcagtttgtcaa

SEQ ID NO: 290217 - DNA, 25 bp, Homo sapien
tgttcacactgtgagaggctcacag

SEQ ID NO: 290218 - DNA, 25 bp, Homo sapien
aaaaattggttgatgatggttatag

SEQ ID NO: 290219 - DNA, 25 bp, Homo sapien
gatgatggttataggtttggtataa

SEQ ID NO: 290220 - DNA, 25 bp, Homo sapien
taaatttgaacataccagctggagt

SEQ ID NO: 290221 - DNA, 25 bp, Homo sapien
ggagtccatcttgaataaccgaatt

SEQ ID NO: 290222 - DNA, 25 bp, Homo sapien
taagggtggtatctgtatagaggac

SEQ ID NO: 290223 - DNA, 25 bp, Homo sapien
tcaggctaagggtggtatctgtata

SEQ ID NO: 290224 - DNA, 25 bp, Homo sapien
aggctaagggtggtatctgtataga

SEQ ID NO: 290225 - DNA, 25 bp, Homo sapien
gctaagggtggtatctgtatagagg

SEQ ID NO: 290226 - DNA, 25 bp, Homo sapien
gcccttggtggtgatcattatcatc

SEQ ID NO: 290227 - DNA, 25 bp, Homo sapien
ttatcatcctcacttctccaaactt

SEQ ID NO: 290228 - DNA, 25 bp, Homo sapien
attatcatcctcacttctccaaact

SEQ ID NO: 290229 - DNA, 25 bp, Homo sapien
cttttctggcccttggtggtgatca

SEQ ID NO: 290230 - DNA, 25 bp, Homo sapien
aagggctgtacaaacactggtagca

SEQ ID NO: 290231 - DNA, 25 bp, Homo sapien
gggtgatgacaagggctgtacaaac

SEQ ID NO: 290232 - DNA, 25 bp, Homo sapien
gatgacaagggctgtacaaacactg

SEQ ID NO: 290233 - DNA, 25 bp, Homo sapien
acaagggctgtacaaacactggtag

SEQ ID NO: 290234 - DNA, 25 bp, Homo sapien
tctgaattcttggagcatttagagt

SEQ ID NO: 290235 - DNA, 25 bp, Homo sapien
catttagagtctgtgcctctgtaag

SEQ ID NO: 290236 - DNA, 25 bp, Homo sapien
ctgtaagtggattgtcttttattgg

SEQ ID NO: 290237 - DNA, 25 bp, Homo sapien
ctctgtaagtggattgtcttttatt

SEQ ID NO: 290238 - DNA, 25 bp, Homo sapien
gggcggcgggccgagaggcctcctg

SEQ ID NO: 290239 - DNA, 25 bp, Homo sapien
ggcggcgggccgagaggcctcctgc

SEQ ID NO: 290240 - DNA, 25 bp, Homo sapien
gcggcgggccgagaggcctcctgcc

SEQ ID NO: 290241 - DNA, 25 bp, Homo sapien
tgttggagcagatgtcgtggcacta

SEQ ID NO: 290242 - DNA, 25 bp, Homo sapien
gacccagaaaccgtttgctctgtgt

SEQ ID NO: 290243 - DNA, 25 bp, Homo sapien
gatgtcgtggcactaagacccagaa

SEQ ID NO: 290244 - DNA, 25 bp, Homo sapien
cccagaaaccgtttgctctgtgtgg

SEQ ID NO: 290245 - DNA, 25 bp, Homo sapien
cctacttgttgagagaatgctgtgc

SEQ ID NO: 290246 - DNA, 25 bp, Homo sapien
gatttggctcatgctgtgttcccta

SEQ ID NO: 290247 - DNA, 25 bp, Homo sapien
cacaggtcattacagcttggcttgc

SEQ ID NO: 290248 - DNA, 25 bp, Homo sapien
gcttcctctcctataacatgggcat

SEQ ID NO: 290249 - DNA, 25 bp, Homo sapien
ttggcctgggttgaggatattgaga

SEQ ID NO: 290250 - DNA, 25 bp, Homo sapien
ttttggcctgggttgaggatattga

SEQ ID NO: 290251 - DNA, 25 bp, Homo sapien
tttttggcctgggttgaggatattg

SEQ ID NO: 290252 - DNA, 25 bp, Homo sapien
tggcctgggttgaggatattgagaa

SEQ ID NO: 290253 - DNA, 25 bp, Homo sapien
cagacttcacagtcgttgaggaggt

SEQ ID NO: 290254 - DNA, 25 bp, Homo sapien
gacttcacagtcgttgaggaggtgc

SEQ ID NO: 290255 - DNA, 25 bp, Homo sapien
tcagacttcacagtcgttgaggagg

SEQ ID NO: 290256 - DNA, 25 bp, Homo sapien
agacttcacagtcgttgaggaggtg

SEQ ID NO: 290257 - DNA, 25 bp, Homo sapien
ttcagaaaggatcctgcacgattcc

SEQ ID NO: 290258 - DNA, 25 bp, Homo sapien
gagaatgcttttagtaccaatcagc

SEQ ID NO: 290259 - DNA, 25 bp, Homo sapien
caaggctttagttatagaccatcac

SEQ ID NO: 290260 - DNA, 25 bp, Homo sapien
gattcctactgtgttgctagccagc

SEQ ID NO: 290261 - DNA, 25 bp, Homo sapien
ctagtatcttcccagtgttacatgt

SEQ ID NO: 290262 - DNA, 25 bp, Homo sapien
ggcattcagtctttccgtccaagaa

SEQ ID NO: 290263 - DNA, 25 bp, Homo sapien
tcagagaattgacaccttcatggca

SEQ ID NO: 290264 - DNA, 25 bp, Homo sapien
tctgagttgggctagtactctacca

SEQ ID NO: 290265 - DNA, 25 bp, Homo sapien
ggagttcttgtgagaccaggtcatt

SEQ ID NO: 290266 - DNA, 25 bp, Homo sapien
aaggagttcttgtgagaccaggtca

SEQ ID NO: 290267 - DNA, 25 bp, Homo sapien
aggagttcttgtgagaccaggtcat

SEQ ID NO: 290268 - DNA, 25 bp, Homo sapien
tggactgcacacagccatggaatat

SEQ ID NO: 290269 - DNA, 25 bp, Homo sapien
tcattcagctgaagtataggaggat

SEQ ID NO: 290270 - DNA, 25 bp, Homo sapien
tgtgcagggaaaaactttggcagtc

SEQ ID NO: 290271 - DNA, 25 bp, Homo sapien
ggaggatgattcgtgcttaaatgaa

SEQ ID NO: 290272 - DNA, 25 bp, Homo sapien
caaagccaagcttaaatgacattta

SEQ ID NO: 290273 - DNA, 25 bp, Homo sapien
taaaggtaaattatagttcctgatg

SEQ ID NO: 290274 - DNA, 25 bp, Homo sapien
tccagtattccacatccgaagtgtt

SEQ ID NO: 290275 - DNA, 25 bp, Homo sapien
aagctttgttcctatcaaagccaag

SEQ ID NO: 290276 - DNA, 25 bp, Homo sapien
caaagtagtactcgagattctgatg

SEQ ID NO: 290277 - DNA, 25 bp, Homo sapien
gattctgatggtttggtttgactga

SEQ ID NO: 290278 - DNA, 25 bp, Homo sapien
aggtgtcctgtggataaccagcaaa

SEQ ID NO: 290279 - DNA, 25 bp, Homo sapien
gataaccagcaaagtagtactcgag

SEQ ID NO: 290280 - DNA, 25 bp, Homo sapien
gcagttacttctatacctttcatca

SEQ ID NO: 290281 - DNA, 25 bp, Homo sapien
tcatcaaaggactgtccttctgtgt

SEQ ID NO: 290282 - DNA, 25 bp, Homo sapien
taatatgagattagcccttgtttgg

SEQ ID NO: 290283 - DNA, 25 bp, Homo sapien
tagcccttgtttggtggttctagca

SEQ ID NO: 290284 - DNA, 25 bp, Homo sapien
caatatatctgtaactttatacaca

SEQ ID NO: 290285 - DNA, 25 bp, Homo sapien
cagacatacccctacatacttttta

SEQ ID NO: 290286 - DNA, 25 bp, Homo sapien
tcacagacatacccctacatacttt

SEQ ID NO: 290287 - DNA, 25 bp, Homo sapien
tacaatatatctgtaactttataca

SEQ ID NO: 290288 - DNA, 25 bp, Homo sapien
gaactgctttgaaatttgttccgta

SEQ ID NO: 290289 - DNA, 25 bp, Homo sapien
ggttagactagaactgcaaactctg

SEQ ID NO: 290290 - DNA, 25 bp, Homo sapien
gtgactcagtggttagccaaagatg

SEQ ID NO: 290291 - DNA, 25 bp, Homo sapien
taactttgcgtctaccattgtatta

SEQ ID NO: 290292 - DNA, 25 bp, Homo sapien
cagtgtgcaaaataagatctgtgag

SEQ ID NO: 290293 - DNA, 25 bp, Homo sapien
gaatctttctgcactagtactgact

SEQ ID NO: 290294 - DNA, 25 bp, Homo sapien
tacatcagtgtttcgagcaatttct

SEQ ID NO: 290295 - DNA, 25 bp, Homo sapien
gatccttcactataaaggtgatttg

SEQ ID NO: 290296 - DNA, 25 bp, Homo sapien
cagcatccctaggatgaaacccgct

SEQ ID NO: 290297 - DNA, 25 bp, Homo sapien
taattttgtttatgtcatgagtcac

SEQ ID NO: 290298 - DNA, 25 bp, Homo sapien
gagccgagatcacattcccttaatc

SEQ ID NO: 290299 - DNA, 25 bp, Homo sapien
aatcacaaaaggatgccgcatttta

SEQ ID NO: 290300 - DNA, 25 bp, Homo sapien
gcctggcccatttgcccgctttttg

SEQ ID NO: 290301 - DNA, 25 bp, Homo sapien
gattcttgacattagatgcatagtt

SEQ ID NO: 290302 - DNA, 25 bp, Homo sapien
tggcccatttgcccgctttttgatg

SEQ ID NO: 290303 - DNA, 25 bp, Homo sapien
ggattcttgacattagatgcatagt

SEQ ID NO: 290304 - DNA, 25 bp, Homo sapien
caaattgtaggacagaggaaactgc

SEQ ID NO: 290305 - DNA, 25 bp, Homo sapien
gattacttgatctggccatctatgg

SEQ ID NO: 290306 - DNA, 25 bp, Homo sapien
gaccagttctctactaggagcttag

SEQ ID NO: 290307 - DNA, 25 bp, Homo sapien
tcactaagcatgtatgtggaaaaca

SEQ ID NO: 290308 - DNA, 25 bp, Homo sapien
ctttgtgcttctgcttgataatcgg

SEQ ID NO: 290309 - DNA, 25 bp, Homo sapien
gcttctgcttgataatcggttcttt

SEQ ID NO: 290310 - DNA, 25 bp, Homo sapien
gatggaacctgggctttgtgcttct

SEQ ID NO: 290311 - DNA, 25 bp, Homo sapien
taatcggttctttagttgaatggct

SEQ ID NO: 290312 - DNA, 25 bp, Homo sapien
aaagcaaagagagcgtctaaccaga

SEQ ID NO: 290313 - DNA, 25 bp, Homo sapien
gccggcggcctatctagccgtggtc

SEQ ID NO: 290314 - DNA, 25 bp, Homo sapien
ctatctagccgtggtcactcgtggg

SEQ ID NO: 290315 - DNA, 25 bp, Homo sapien
gggaaaagcaaagagagcgtctaac

SEQ ID NO: 290316 - DNA, 25 bp, Homo sapien
ccacacccggagcaaagccccggct

SEQ ID NO: 290317 - DNA, 25 bp, Homo sapien
cacacccggagcaaagccccggctc

SEQ ID NO: 290318 - DNA, 25 bp, Homo sapien
gcagttccaacagcggggataattg

SEQ ID NO: 290319 - DNA, 25 bp, Homo sapien
cgcagttccaacagcggggataatt

SEQ ID NO: 290320 - DNA, 25 bp, Homo sapien
aacagcggggataattgcttcccgc

SEQ ID NO: 290321 - DNA, 25 bp, Homo sapien
tccaacagcggggataattgcttcc

SEQ ID NO: 290322 - DNA, 25 bp, Homo sapien
cagtccataaggctgaagtagtctc

SEQ ID NO: 290323 - DNA, 25 bp, Homo sapien
tctcgagtggggtcaggtgcctgca

SEQ ID NO: 290324 - DNA, 25 bp, Homo sapien
ataaggctgaagtagtctcgagtgg

SEQ ID NO: 290325 - DNA, 25 bp, Homo sapien
tccataaggctgaagtagtctcgag

SEQ ID NO: 290326 - DNA, 25 bp, Homo sapien
ctcgacgtgtctctcgcccgggccc

SEQ ID NO: 290327 - DNA, 25 bp, Homo sapien
tcgacgtgtctctcgcccgggcccg

SEQ ID NO: 290328 - DNA, 25 bp, Homo sapien
cgacgtgtctctcgcccgggcccgt

SEQ ID NO: 290329 - DNA, 25 bp, Homo sapien
agacacttctctcacgcctgctctc

SEQ ID NO: 290330 - DNA, 25 bp, Homo sapien
cccccatcagtcccgccttctcttc

SEQ ID NO: 290331 - DNA, 25 bp, Homo sapien
ttctcttccgccagccagatccgtc

SEQ ID NO: 290332 - DNA, 25 bp, Homo sapien
cgtcctcccctctcgcaggccagac

SEQ ID NO: 290333 - DNA, 25 bp, Homo sapien
ctgtgctggagcttcgctgtatcaa

SEQ ID NO: 290334 - DNA, 25 bp, Homo sapien
tgtgctggagcttcgctgtatcaac

SEQ ID NO: 290335 - DNA, 25 bp, Homo sapien
gtgctggagcttcgctgtatcaact

SEQ ID NO: 290336 - DNA, 25 bp, Homo sapien
ctgggtggacaagacgctgcagttg

SEQ ID NO: 290337 - DNA, 25 bp, Homo sapien
gggtggacaagacgctgcagttgct

SEQ ID NO: 290338 - DNA, 25 bp, Homo sapien
atctgggtggacaagacgctgcagt

SEQ ID NO: 290339 - DNA, 25 bp, Homo sapien
gtggacaagacgctgcagttgctgg

SEQ ID NO: 290340 - DNA, 25 bp, Homo sapien
tgaagatagtactattaccatccaa

SEQ ID NO: 290341 - DNA, 25 bp, Homo sapien
gatgaagatagtactattaccatcc

SEQ ID NO: 290342 - DNA, 25 bp, Homo sapien
agatgaagatagtactattaccatc

SEQ ID NO: 290343 - DNA, 25 bp, Homo sapien
atgaagatagtactattaccatcca

SEQ ID NO: 290344 - DNA, 25 bp, Homo sapien
aggcatcattcaccagggtcgaatg

SEQ ID NO: 290345 - DNA, 25 bp, Homo sapien
ggccaggagggtcttataggcatca

SEQ ID NO: 290346 - DNA, 25 bp, Homo sapien
cagggtcgaatgcttctctgagaag

SEQ ID NO: 290347 - DNA, 25 bp, Homo sapien
attcaccagggtcgaatgcttctct

SEQ ID NO: 290348 - DNA, 25 bp, Homo sapien
gccataatgggcatcaggacgtcat

SEQ ID NO: 290349 - DNA, 25 bp, Homo sapien
tcaggacgtcatacacagaagtgtt

SEQ ID NO: 290350 - DNA, 25 bp, Homo sapien
gggacgtggctgtcctacgccataa

SEQ ID NO: 290351 - DNA, 25 bp, Homo sapien
tgtcctacgccataatgggcatcag

SEQ ID NO: 290352 - DNA, 25 bp, Homo sapien
gaggaattgcctgtccatttcataa

SEQ ID NO: 290353 - DNA, 25 bp, Homo sapien
gacaatggattcaatctctttcatg

SEQ ID NO: 290354 - DNA, 25 bp, Homo sapien
gaatctctattccatggagctttag

SEQ ID NO: 290355 - DNA, 25 bp, Homo sapien
tctatgaggaattgcctgtccattt

SEQ ID NO: 290356 - DNA, 25 bp, Homo sapien
gcagaagcaacaggccctagggtag

SEQ ID NO: 290357 - DNA, 25 bp, Homo sapien
tccgggccctgtaagggatgctaaa

SEQ ID NO: 290358 - DNA, 25 bp, Homo sapien
gaaatagccactactaatagatagc

SEQ ID NO: 290359 - DNA, 25 bp, Homo sapien
gaagtgatgattgccttcagatctg

SEQ ID NO: 290360 - DNA, 25 bp, Homo sapien
tttttccattgaaatagactcataa

SEQ ID NO: 290361 - DNA, 25 bp, Homo sapien
ttttccattgaaatagactcataat

SEQ ID NO: 290362 - DNA, 25 bp, Homo sapien
cataatatgaagacaatacttaaac

SEQ ID NO: 290363 - DNA, 25 bp, Homo sapien
tagactcataatatgaagacaatac

SEQ ID NO: 290364 - DNA, 25 bp, Homo sapien
cactgctcacattgtcagtaaattc

SEQ ID NO: 290365 - DNA, 25 bp, Homo sapien
ttcaaaagcactgctcacattgtca

SEQ ID NO: 290366 - DNA, 25 bp, Homo sapien
aaagcactgctcacattgtcagtaa

SEQ ID NO: 290367 - DNA, 25 bp, Homo sapien
ttgttcaaaagcactgctcacattg

SEQ ID NO: 290368 - DNA, 25 bp, Homo sapien
tccctatatagctatcataggaagg

SEQ ID NO: 290369 - DNA, 25 bp, Homo sapien
ccagaaatgtagattcttaaaggca

SEQ ID NO: 290370 - DNA, 25 bp, Homo sapien
cataggaaggtatataatagctagt

SEQ ID NO: 290371 - DNA, 25 bp, Homo sapien
gaatggctatgcttcagtgcttgaa

SEQ ID NO: 290372 - DNA, 25 bp, Homo sapien
tatctggcttacaatatccgtagtg

SEQ ID NO: 290373 - DNA, 25 bp, Homo sapien
gcatcattccagatgactccaaaaa

SEQ ID NO: 290374 - DNA, 25 bp, Homo sapien
gtactgacatctggtgggtacaggc

SEQ ID NO: 290375 - DNA, 25 bp, Homo sapien
tcttatagtactcaggacagctccc

SEQ ID NO: 290376 - DNA, 25 bp, Homo sapien
aaagtatctcatctttgtcaaaatt

SEQ ID NO: 290377 - DNA, 25 bp, Homo sapien
atatttgaaaagtatctcatctttg

SEQ ID NO: 290378 - DNA, 25 bp, Homo sapien
tatttatttttcaagattaagtctc

SEQ ID NO: 290379 - DNA, 25 bp, Homo sapien
atttttcaagattaagtctcactct

SEQ ID NO: 290380 - DNA, 25 bp, Homo sapien
tatttttcaagattaagtctcactc

SEQ ID NO: 290381 - DNA, 25 bp, Homo sapien
tttatttttcaagattaagtctcac

SEQ ID NO: 290382 - DNA, 25 bp, Homo sapien
agccggcgagacgaggaggctgcga

SEQ ID NO: 290383 - DNA, 25 bp, Homo sapien
gaccccacgtcacgccttctagaac

SEQ ID NO: 290384 - DNA, 25 bp, Homo sapien
agctactgccaaaacccgccagcct

SEQ ID NO: 290385 - DNA, 25 bp, Homo sapien
ggatcccgctctcgaccccacgtca

SEQ ID NO: 290386 - DNA, 25 bp, Homo sapien
aggaagtccgagccgccgctcagag

SEQ ID NO: 290387 - DNA, 25 bp, Homo sapien
gccgctcagagggaggccgctgaag

SEQ ID NO: 290388 - DNA, 25 bp, Homo sapien
gccgcactcccagcgggactgctag

SEQ ID NO: 290389 - DNA, 25 bp, Homo sapien
actgctagggactgcgcgaggtccc

SEQ ID NO: 290390 - DNA, 25 bp, Homo sapien
aactgggctgcgaagctcccgcgga

SEQ ID NO: 290391 - DNA, 25 bp, Homo sapien
gccctgcgcccgacgggctcctcac

SEQ ID NO: 290392 - DNA, 25 bp, Homo sapien
tctgtaaactgggctgcgaagctcc

SEQ ID NO: 290393 - DNA, 25 bp, Homo sapien
gtaaactgggctgcgaagctcccgc

SEQ ID NO: 290394 - DNA, 25 bp, Homo sapien
tcctcctcctctcgcttgtgtttct

SEQ ID NO: 290395 - DNA, 25 bp, Homo sapien
ctcctcctctcgcttgtgtttcttt

SEQ ID NO: 290396 - DNA, 25 bp, Homo sapien
tttctttttacagtgaacagaaaca

SEQ ID NO: 290397 - DNA, 25 bp, Homo sapien
ctcctctcgcttgtgtttcttttta

SEQ ID NO: 290398 - DNA, 25 bp, Homo sapien
tgggcatcagcaagtacagtctcaa

SEQ ID NO: 290399 - DNA, 25 bp, Homo sapien
gagtttatcttgaggaccagacaca

SEQ ID NO: 290400 - DNA, 25 bp, Homo sapien
gcaagctgaatagtcaatcggccct

SEQ ID NO: 290401 - DNA, 25 bp, Homo sapien
tttgcaagcactacgatatacccag

SEQ ID NO: 290402 - DNA, 25 bp, Homo sapien
agagctctgcttcagttatcctttt

SEQ ID NO: 290403 - DNA, 25 bp, Homo sapien
gaatccagtcattaggaccagcaca

SEQ ID NO: 290404 - DNA, 25 bp, Homo sapien
gccactaacactgggatttactcca

SEQ ID NO: 290405 - DNA, 25 bp, Homo sapien
tatcccaggtatggaaaggccacta

SEQ ID NO: 290406 - DNA, 25 bp, Homo sapien
gaagcttccttcgggcaacttcaca

SEQ ID NO: 290407 - DNA, 25 bp, Homo sapien
tgaagcttccttcgggcaacttcac

SEQ ID NO: 290408 - DNA, 25 bp, Homo sapien
agcttccttcgggcaacttcacact

SEQ ID NO: 290409 - DNA, 25 bp, Homo sapien
cctgaagcttccttcgggcaacttc

SEQ ID NO: 290410 - DNA, 25 bp, Homo sapien
agttctatgagaagaattcacttta

SEQ ID NO: 290411 - DNA, 25 bp, Homo sapien
aaagcacatacttcggggccgggcg

SEQ ID NO: 290412 - DNA, 25 bp, Homo sapien
gtgaaaacgctcagtagttctatga

SEQ ID NO: 290413 - DNA, 25 bp, Homo sapien
atttcagagaattatcacataaacc

SEQ ID NO: 290414 - DNA, 25 bp, Homo sapien
ggggagatggttaacatttctgtca

SEQ ID NO: 290415 - DNA, 25 bp, Homo sapien
taacatttctgtcagcttcaacttc

SEQ ID NO: 290416 - DNA, 25 bp, Homo sapien
tcttcaaacctgttttcatggtatc

SEQ ID NO: 290417 - DNA, 25 bp, Homo sapien
ttttcatggtatcagaaaggacaag

SEQ ID NO: 290418 - DNA, 25 bp, Homo sapien
ctaatgaactaggaaaaagccaatc

SEQ ID NO: 290419 - DNA, 25 bp, Homo sapien
aatgaactaggaaaaagccaatctc

SEQ ID NO: 290420 - DNA, 25 bp, Homo sapien
tgaactaggaaaaagccaatctcca

SEQ ID NO: 290421 - DNA, 25 bp, Homo sapien
gaactaggaaaaagccaatctccaa

SEQ ID NO: 290422 - DNA, 25 bp, Homo sapien
tacatgtaggcagctagctcatact

SEQ ID NO: 290423 - DNA, 25 bp, Homo sapien
tccaatatgaaaacgcagagccctt

SEQ ID NO: 290424 - DNA, 25 bp, Homo sapien
caaagtataatgctttatgggccag

SEQ ID NO: 290425 - DNA, 25 bp, Homo sapien
caactgatctttagaaaggcccctc

SEQ ID NO: 290426 - DNA, 25 bp, Homo sapien
tataaagagacatccctgttggccg

SEQ ID NO: 290427 - DNA, 25 bp, Homo sapien
gcttagcttggctctctcctgtata

SEQ ID NO: 290428 - DNA, 25 bp, Homo sapien
tcttctgtgctagtagctgtctcca

SEQ ID NO: 290429 - DNA, 25 bp, Homo sapien
tagaggatggctttggcttatcaga

SEQ ID NO: 290430 - DNA, 25 bp, Homo sapien
gacttctacgccatctgtaacaagg

SEQ ID NO: 290431 - DNA, 25 bp, Homo sapien
gaagggcattataccattacactcg

SEQ ID NO: 290432 - DNA, 25 bp, Homo sapien
tacgcaagggaaaccaaggagcaac

SEQ ID NO: 290433 - DNA, 25 bp, Homo sapien
caaacctggctatcctcaaaggaca

SEQ ID NO: 290434 - DNA, 25 bp, Homo sapien
gagacctgcccagcaattcctgtag

SEQ ID NO: 290435 - DNA, 25 bp, Homo sapien
cctagggaactcttaaggcaaagca

SEQ ID NO: 290436 - DNA, 25 bp, Homo sapien
aaacactaactctacctctgggcag

SEQ ID NO: 290437 - DNA, 25 bp, Homo sapien
ttaccagtagtatcagagccttgtg

SEQ ID NO: 290438 - DNA, 25 bp, Homo sapien
acatggcctgcctattgtgggaaca

SEQ ID NO: 290439 - DNA, 25 bp, Homo sapien
gtgtgcaccatcgtacctagcccat

SEQ ID NO: 290440 - DNA, 25 bp, Homo sapien
cagtgaactgctctgagtggaaagc

SEQ ID NO: 290441 - DNA, 25 bp, Homo sapien
ttttagaatagcaacacatggcctg

SEQ ID NO: 290442 - DNA, 25 bp, Homo sapien
taagcaacgggaacacctgctgagg

SEQ ID NO: 290443 - DNA, 25 bp, Homo sapien
gacatccagcagtccaaggtattga

SEQ ID NO: 290444 - DNA, 25 bp, Homo sapien
tgcctggaggatagcagagaagcct

SEQ ID NO: 290445 - DNA, 25 bp, Homo sapien
tgggaggacacttttgccaatgaac

SEQ ID NO: 290446 - DNA, 25 bp, Homo sapien
tataccaagcccctagtcttagaga

SEQ ID NO: 290447 - DNA, 25 bp, Homo sapien
gctcccagaggtctacccagaagga

SEQ ID NO: 290448 - DNA, 25 bp, Homo sapien
tagtgaaaatcgaggaagcacctct

SEQ ID NO: 290449 - DNA, 25 bp, Homo sapien
gaagatgacctcgttccggagctgg

SEQ ID NO: 290450 - DNA, 25 bp, Homo sapien
gccgggtctgctgagtccgcagcac

SEQ ID NO: 290451 - DNA, 25 bp, Homo sapien
gagtccgcagcactcagactacgtg

SEQ ID NO: 290452 - DNA, 25 bp, Homo sapien
actcagactacgtgcacctctgcag

SEQ ID NO: 290453 - DNA, 25 bp, Homo sapien
cagttgtcacccctccagaacatct

SEQ ID NO: 290454 - DNA, 25 bp, Homo sapien
catggccttgtagttgagaaccagg

SEQ ID NO: 290455 - DNA, 25 bp, Homo sapien
cagcgattatgtttacagtctggac

SEQ ID NO: 290456 - DNA, 25 bp, Homo sapien
ggcggaagccaaggtaaatcatctc

SEQ ID NO: 290457 - DNA, 25 bp, Homo sapien
gttccaagtgacatgacccagcgat

SEQ ID NO: 290458 - DNA, 25 bp, Homo sapien
tcagactgccagagatcgaaagaag

SEQ ID NO: 290459 - DNA, 25 bp, Homo sapien
gatgaatagtgtgtgtgtccagccc

SEQ ID NO: 290460 - DNA, 25 bp, Homo sapien
ccaagttgtttcagcccctattaga

SEQ ID NO: 290461 - DNA, 25 bp, Homo sapien
gaataaagcaggtcttcgagctaga

SEQ ID NO: 290462 - DNA, 25 bp, Homo sapien
tggtggttcagcctcttaactcgga

SEQ ID NO: 290463 - DNA, 25 bp, Homo sapien
gctgggaattctgcgaggctcactg

SEQ ID NO: 290464 - DNA, 25 bp, Homo sapien
tctcgttagagatgaccagagctgg

SEQ ID NO: 290465 - DNA, 25 bp, Homo sapien
gacttggatataatgtgcctagcac

SEQ ID NO: 290466 - DNA, 25 bp, Homo sapien
gccagggattgccgctgccacgccg

SEQ ID NO: 290467 - DNA, 25 bp, Homo sapien
tggccagggattgccgctgccacgc

SEQ ID NO: 290468 - DNA, 25 bp, Homo sapien
ggccagggattgccgctgccacgcc

SEQ ID NO: 290469 - DNA, 25 bp, Homo sapien
ctttggccagggattgccgctgcca

SEQ ID NO: 290470 - DNA, 25 bp, Homo sapien
cccgaagtggcgcacgagataaaat

SEQ ID NO: 290471 - DNA, 25 bp, Homo sapien
gaaaatccgtttgtggaggacacgc

SEQ ID NO: 290472 - DNA, 25 bp, Homo sapien
gaattaaattctgtcactccggatg

SEQ ID NO: 290473 - DNA, 25 bp, Homo sapien
cagtctggaaagctctcggtttgga

SEQ ID NO: 290474 - DNA, 25 bp, Homo sapien
tattgctgtgcatttctggggaatt

SEQ ID NO: 290475 - DNA, 25 bp, Homo sapien
ttgttagagaaggtattgctgtgca

SEQ ID NO: 290476 - DNA, 25 bp, Homo sapien
taaaaaaagtggacaggcatattta

SEQ ID NO: 290477 - DNA, 25 bp, Homo sapien
tagagaaggtattgctgtgcatttc

SEQ ID NO: 290478 - DNA, 25 bp, Homo sapien
cgtttggcctcaaagaccgagaact

SEQ ID NO: 290479 - DNA, 25 bp, Homo sapien
cgcgtttggcctcaaagaccgagaa

SEQ ID NO: 290480 - DNA, 25 bp, Homo sapien
accgcgtttggcctcaaagaccgag

SEQ ID NO: 290481 - DNA, 25 bp, Homo sapien
gaccgagaactttgtaatttatata

SEQ ID NO: 290482 - DNA, 25 bp, Homo sapien
cctccgtcttccgagcagctgggac

SEQ ID NO: 290483 - DNA, 25 bp, Homo sapien
aggtgcaagtcaccacgcctggtta

SEQ ID NO: 290484 - DNA, 25 bp, Homo sapien
gtagagacaaggtcacaatatgttt

SEQ ID NO: 290485 - DNA, 25 bp, Homo sapien
caaggtcacaatatgtttcccagcc

SEQ ID NO: 290486 - DNA, 25 bp, Homo sapien
ctggtctcggcagataaggtttcac

SEQ ID NO: 290487 - DNA, 25 bp, Homo sapien
agctggtctcggcagataaggtttc

SEQ ID NO: 290488 - DNA, 25 bp, Homo sapien
gctggtctcggcagataaggtttca

SEQ ID NO: 290489 - DNA, 25 bp, Homo sapien
gggatactgttaaacatcctataag

SEQ ID NO: 290490 - DNA, 25 bp, Homo sapien
ccacatgtcaataacactgaggttg

SEQ ID NO: 290491 - DNA, 25 bp, Homo sapien
taaacatcctataagggacagagct

SEQ ID NO: 290492 - DNA, 25 bp, Homo sapien
gccccacatgtcaataacactgagg

SEQ ID NO: 290493 - DNA, 25 bp, Homo sapien
cgcctggctgtaacacaataattta

SEQ ID NO: 290494 - DNA, 25 bp, Homo sapien
cattcgaggaagttagaactgagaa

SEQ ID NO: 290495 - DNA, 25 bp, Homo sapien
actttgattccatcaaggaaacaaa

SEQ ID NO: 290496 - DNA, 25 bp, Homo sapien
cacagcattttctgcgagattgact

SEQ ID NO: 290497 - DNA, 25 bp, Homo sapien
agagtttgggaatgcctgttggtaa

SEQ ID NO: 290498 - DNA, 25 bp, Homo sapien
gcccttggctaccaaatatctaaag

SEQ ID NO: 290499 - DNA, 25 bp, Homo sapien
tagaagaaaggatgagattaatgat

SEQ ID NO: 290500 - DNA, 25 bp, Homo sapien
gattaatgatagactaagaagagtt

SEQ ID NO: 290501 - DNA, 25 bp, Homo sapien
tacagaaccccgctgagtcagtgtc

SEQ ID NO: 290502 - DNA, 25 bp, Homo sapien
caggttatctagcagaatcgagagc

SEQ ID NO: 290503 - DNA, 25 bp, Homo sapien
ggcactctgctaggtcgtcttcacg

SEQ ID NO: 290504 - DNA, 25 bp, Homo sapien
ttgtaaaggcacctggtcacctgga

SEQ ID NO: 290505 - DNA, 25 bp, Homo sapien
tttgtcccatctcaggagccctggg

SEQ ID NO: 290506 - DNA, 25 bp, Homo sapien
tgcacagagcatagctttgtcccat

SEQ ID NO: 290507 - DNA, 25 bp, Homo sapien
gactccaagggagagctgaaacact

SEQ ID NO: 290508 - DNA, 25 bp, Homo sapien
tgatcccaagagatacgtttcccgg

SEQ ID NO: 290509 - DNA, 25 bp, Homo sapien
ggattcatgtctcgaggtctcagga

SEQ ID NO: 290510 - DNA, 25 bp, Homo sapien
gggacattaagactcctgggcaggt

SEQ ID NO: 290511 - DNA, 25 bp, Homo sapien
ttacaggttacccaaggtggattca

SEQ ID NO: 290512 - DNA, 25 bp, Homo sapien
cagtaggtcagaggttcaggagcca

SEQ ID NO: 290513 - DNA, 25 bp, Homo sapien
ctcgttaccggcccacttaggatgt

SEQ ID NO: 290514 - DNA, 25 bp, Homo sapien
aacctcaggcccaaagcgctcaggg

SEQ ID NO: 290515 - DNA, 25 bp, Homo sapien
tcttagaatgccaagtcgaagcctt

SEQ ID NO: 290516 - DNA, 25 bp, Homo sapien
gggtcttgaactagtcgacagagct

SEQ ID NO: 290517 - DNA, 25 bp, Homo sapien
caaaatctgaggatagggttggacc

SEQ ID NO: 290518 - DNA, 25 bp, Homo sapien
gcccataaagaagtattctaagcaa

SEQ ID NO: 290519 - DNA, 25 bp, Homo sapien
cactgcagtggcctaatcgtagcct

SEQ ID NO: 290520 - DNA, 25 bp, Homo sapien
ttaagcgatctttccttcttgacct

SEQ ID NO: 290521 - DNA, 25 bp, Homo sapien
ggaggccctagggagaaacctgcaa

SEQ ID NO: 290522 - DNA, 25 bp, Homo sapien
ggccctagggagaaacctgcaagga

SEQ ID NO: 290523 - DNA, 25 bp, Homo sapien
aggccctagggagaaacctgcaagg

SEQ ID NO: 290524 - DNA, 25 bp, Homo sapien
gaggccctagggagaaacctgcaag

SEQ ID NO: 290525 - DNA, 25 bp, Homo sapien
tccaagctttagagtgagacagagg

SEQ ID NO: 290526 - DNA, 25 bp, Homo sapien
gacagaggtaacatcaaactttgct

SEQ ID NO: 290527 - DNA, 25 bp, Homo sapien
gattacgacggctcacagtgggaac

SEQ ID NO: 290528 - DNA, 25 bp, Homo sapien
ggactctattgatacccttcctgga

SEQ ID NO: 290529 - DNA, 25 bp, Homo sapien
ctcagtgaaggtcacagtgtgccca

SEQ ID NO: 290530 - DNA, 25 bp, Homo sapien
gatgtgatggagcaaaccattccta

SEQ ID NO: 290531 - DNA, 25 bp, Homo sapien
caaagtgggctgattcagcagactc

SEQ ID NO: 290532 - DNA, 25 bp, Homo sapien
cctgctattctgatatctgggctga

SEQ ID NO: 290533 - DNA, 25 bp, Homo sapien
gagggatgagacactcataagtgag

SEQ ID NO: 290534 - DNA, 25 bp, Homo sapien
taattccagctgagtccatctgcct

SEQ ID NO: 290535 - DNA, 25 bp, Homo sapien
gggtctggtctaccgcttagtctca

SEQ ID NO: 290536 - DNA, 25 bp, Homo sapien
tccaggtattggtggcatagataca

SEQ ID NO: 290537 - DNA, 25 bp, Homo sapien
tgtggatacagtctttgttatcatt

SEQ ID NO: 290538 - DNA, 25 bp, Homo sapien
gtgtggatacagtctttgttatcat

SEQ ID NO: 290539 - DNA, 25 bp, Homo sapien
gtggatacagtctttgttatcattc

SEQ ID NO: 290540 - DNA, 25 bp, Homo sapien
acttcatagtgatgtggtgggtggc

SEQ ID NO: 290541 - DNA, 25 bp, Homo sapien
catagtgatgtggtgggtggctgag

SEQ ID NO: 290542 - DNA, 25 bp, Homo sapien
tagtaaggaactccataaacagaga

SEQ ID NO: 290543 - DNA, 25 bp, Homo sapien
caggctcttccaagattatatagta

SEQ ID NO: 290544 - DNA, 25 bp, Homo sapien
tggtgtgatcagatcgtagcccact

SEQ ID NO: 290545 - DNA, 25 bp, Homo sapien
tgtgatcagatcgtagcccactgta

SEQ ID NO: 290546 - DNA, 25 bp, Homo sapien
gatcagatcgtagcccactgtagcc

SEQ ID NO: 290547 - DNA, 25 bp, Homo sapien
cttgcctcgctctcccaacatgctg

SEQ ID NO: 290548 - DNA, 25 bp, Homo sapien
tctttcatgtgattacttaccattt

SEQ ID NO: 290549 - DNA, 25 bp, Homo sapien
gtctttcatgtgattacttaccatt

SEQ ID NO: 290550 - DNA, 25 bp, Homo sapien
ctttcatgtgattacttaccatttg

SEQ ID NO: 290551 - DNA, 25 bp, Homo sapien
tgtctttcatgtgattacttaccat

SEQ ID NO: 290552 - DNA, 25 bp, Homo sapien
tacaagggttgttacaatgaataag

SEQ ID NO: 290553 - DNA, 25 bp, Homo sapien
tgaataagacaaacatggtccctcc

SEQ ID NO: 290554 - DNA, 25 bp, Homo sapien
tcactcaacatgtgtatcctgagca

SEQ ID NO: 290555 - DNA, 25 bp, Homo sapien
acttgtgctattacaatgatgcatc

SEQ ID NO: 290556 - DNA, 25 bp, Homo sapien
acctccaaacatatatatgcccaga

SEQ ID NO: 290557 - DNA, 25 bp, Homo sapien
caaacatatatatgcccagaataaa

SEQ ID NO: 290558 - DNA, 25 bp, Homo sapien
acacacctccaaacatatatatgcc

SEQ ID NO: 290559 - DNA, 25 bp, Homo sapien
ttcaaaggttccccaaacatacaca

SEQ ID NO: 290560 - DNA, 25 bp, Homo sapien
agagctgctcattctaagaaacaca

SEQ ID NO: 290561 - DNA, 25 bp, Homo sapien
aagagctgctcattctaagaaacac

SEQ ID NO: 290562 - DNA, 25 bp, Homo sapien
attgtcatgggcaataagaacagaa

SEQ ID NO: 290563 - DNA, 25 bp, Homo sapien
tgtcatgggcaataagaacagaaca

SEQ ID NO: 290564 - DNA, 25 bp, Homo sapien
agaacagaacacagtggggcccagt

SEQ ID NO: 290565 - DNA, 25 bp, Homo sapien
ctttaattgtcatgggcaataagaa

SEQ ID NO: 290566 - DNA, 25 bp, Homo sapien
cacttcacgtgtaaagggtgagacc

SEQ ID NO: 290567 - DNA, 25 bp, Homo sapien
gagggtacggcgcactatgatcatg

SEQ ID NO: 290568 - DNA, 25 bp, Homo sapien
gggtgagaccagattagaacctagg

SEQ ID NO: 290569 - DNA, 25 bp, Homo sapien
tcacaacctgagatagatagggcag

SEQ ID NO: 290570 - DNA, 25 bp, Homo sapien
aacttgcaatagttgcttcttctgg

SEQ ID NO: 290571 - DNA, 25 bp, Homo sapien
gctatagttggtatagttgctatac

SEQ ID NO: 290572 - DNA, 25 bp, Homo sapien
gttgctataccaacttgcaatagtt

SEQ ID NO: 290573 - DNA, 25 bp, Homo sapien
ccttgctatagttggtatagttgct

SEQ ID NO: 290574 - DNA, 25 bp, Homo sapien
tatgttgcttctttaaggtgatcca

SEQ ID NO: 290575 - DNA, 25 bp, Homo sapien
tttaagactttgagccttatgttgc

SEQ ID NO: 290576 - DNA, 25 bp, Homo sapien
taataaaatctaagtacacattaac

SEQ ID NO: 290577 - DNA, 25 bp, Homo sapien
cagatgtacgacatgctagcattct

SEQ ID NO: 290578 - DNA, 25 bp, Homo sapien
tttgagtctcgccacgtgcaggcca

SEQ ID NO: 290579 - DNA, 25 bp, Homo sapien
tggaaactttgagtctcgccacgtg

SEQ ID NO: 290580 - DNA, 25 bp, Homo sapien
gcagccccggagactgtaattcaga

SEQ ID NO: 290581 - DNA, 25 bp, Homo sapien
tgaggatcttctgatggagttcatc

SEQ ID NO: 290582 - DNA, 25 bp, Homo sapien
gcttgggtcgtgtccagttcttgca

SEQ ID NO: 290583 - DNA, 25 bp, Homo sapien
tgtccagttcttgcacaggtgtcgc

SEQ ID NO: 290584 - DNA, 25 bp, Homo sapien
gcagtttgcagcttgggtcgtgtcc

SEQ ID NO: 290585 - DNA, 25 bp, Homo sapien
cacaggtgtcgcctagacagtttct

SEQ ID NO: 290586 - DNA, 25 bp, Homo sapien
cgcgccgcgccgggccccgcggccg

SEQ ID NO: 290587 - DNA, 25 bp, Homo sapien
gcgccgcgccgggccccgcggccgc

SEQ ID NO: 290588 - DNA, 25 bp, Homo sapien
tggcccgcgccgcgccgggccccgc

SEQ ID NO: 290589 - DNA, 25 bp, Homo sapien
cttgggctcgactcgaacagcacca

SEQ ID NO: 290590 - DNA, 25 bp, Homo sapien
ggcccgcgagaagcggcccgtgagg

SEQ ID NO: 290591 - DNA, 25 bp, Homo sapien
ccgtgaggccggtggtgtaggtggt

SEQ ID NO: 290592 - DNA, 25 bp, Homo sapien
tgtaggtggtgtaatcgccgcttgg

SEQ ID NO: 290593 - DNA, 25 bp, Homo sapien
tcatttggtccaaggtggaggtcct

SEQ ID NO: 290594 - DNA, 25 bp, Homo sapien
tcctccaaagagtaggcacggctta

SEQ ID NO: 290595 - DNA, 25 bp, Homo sapien
taaaatcacggccaaggaagcggga

SEQ ID NO: 290596 - DNA, 25 bp, Homo sapien
ggtcctgtcagtgagatacgccatc

SEQ ID NO: 290597 - DNA, 25 bp, Homo sapien
cccatccgaggcgcgcatattaact

SEQ ID NO: 290598 - DNA, 25 bp, Homo sapien
gcgcgcatattaactgccattatta

SEQ ID NO: 290599 - DNA, 25 bp, Homo sapien
tccgaggcgcgcatattaactgcca

SEQ ID NO: 290600 - DNA, 25 bp, Homo sapien
gaggcgcgcatattaactgccatta

SEQ ID NO: 290601 - DNA, 25 bp, Homo sapien
gctgattaatcgcatgggcctgggt

SEQ ID NO: 290602 - DNA, 25 bp, Homo sapien
ttcaaaaagtcaagtgccacgctag

SEQ ID NO: 290603 - DNA, 25 bp, Homo sapien
aaaaggacaccacggaacaggctgt

SEQ ID NO: 290604 - DNA, 25 bp, Homo sapien
taagagcccggtaaggcaatgctgc

SEQ ID NO: 290605 - DNA, 25 bp, Homo sapien
ttcaatgagactgtgtcaccagggc

SEQ ID NO: 290606 - DNA, 25 bp, Homo sapien
gcatgctagcctttgtacacacaca

SEQ ID NO: 290607 - DNA, 25 bp, Homo sapien
tctgtccgcagaaacagggaggttc

SEQ ID NO: 290608 - DNA, 25 bp, Homo sapien
gttatattccctctcagcggcccta

SEQ ID NO: 290609 - DNA, 25 bp, Homo sapien
cctaggacccagaaaggctgaattt

SEQ ID NO: 290610 - DNA, 25 bp, Homo sapien
taacatcggatatttaaggaccttg

SEQ ID NO: 290611 - DNA, 25 bp, Homo sapien
aagtccattcagcatttaacctagg

SEQ ID NO: 290612 - DNA, 25 bp, Homo sapien
caagtcaatttttagaggcaggcct

SEQ ID NO: 290613 - DNA, 25 bp, Homo sapien
aatccaggtttgtcatctgctagcc

SEQ ID NO: 290614 - DNA, 25 bp, Homo sapien
gacatgcttggcagtgctctgtata

SEQ ID NO: 290615 - DNA, 25 bp, Homo sapien
gaattgtactagtaactcccatgag

SEQ ID NO: 290616 - DNA, 25 bp, Homo sapien
tgctaattgcatgttagtgtcagga

SEQ ID NO: 290617 - DNA, 25 bp, Homo sapien
taccagtgggtctatgggaaccaga

SEQ ID NO: 290618 - DNA, 25 bp, Homo sapien
cagatcactttcatacaacccagta

SEQ ID NO: 290619 - DNA, 25 bp, Homo sapien
gccaagccaaagcaagttgttctca

SEQ ID NO: 290620 - DNA, 25 bp, Homo sapien
tcccagaatttattagccaagccaa

SEQ ID NO: 290621 - DNA, 25 bp, Homo sapien
acagccattccagcttgcccaatag

SEQ ID NO: 290622 - DNA, 25 bp, Homo sapien
tacagccattccagcttgcccaata

SEQ ID NO: 290623 - DNA, 25 bp, Homo sapien
ctacagccattccagcttgcccaat

SEQ ID NO: 290624 - DNA, 25 bp, Homo sapien
ggtgtataaactagaccactcctgt

SEQ ID NO: 290625 - DNA, 25 bp, Homo sapien
tatactatctgttgcgagcagggct

SEQ ID NO: 290626 - DNA, 25 bp, Homo sapien
taactcagtgaacctaattctagaa

SEQ ID NO: 290627 - DNA, 25 bp, Homo sapien
ggatcacttgtgagcctgagatttc

SEQ ID NO: 290628 - DNA, 25 bp, Homo sapien
gaatacaagggcaacctgctgctcc

SEQ ID NO: 290629 - DNA, 25 bp, Homo sapien
aattcaaggacagattcattcggcc

SEQ ID NO: 290630 - DNA, 25 bp, Homo sapien
tgcttaaatgcacccctgagagtct

SEQ ID NO: 290631 - DNA, 25 bp, Homo sapien
catgctctgatacacctacaaggga

SEQ ID NO: 290632 - DNA, 25 bp, Homo sapien
gaatgctgtaaagtaagctccctcc

SEQ ID NO: 290633 - DNA, 25 bp, Homo sapien
tcaaagctgatcaatcccaccaggt

SEQ ID NO: 290634 - DNA, 25 bp, Homo sapien
taaatcagtctcgaagcctgcaacg

SEQ ID NO: 290635 - DNA, 25 bp, Homo sapien
catgtgagcctgtgatctgaggagc

SEQ ID NO: 290636 - DNA, 25 bp, Homo sapien
accaccatgcctggctaattttgta

SEQ ID NO: 290637 - DNA, 25 bp, Homo sapien
cctcccgagtagctgacaatatagg

SEQ ID NO: 290638 - DNA, 25 bp, Homo sapien
cgagtagctgacaatataggcatgc

SEQ ID NO: 290639 - DNA, 25 bp, Homo sapien
ccatgcctggctaattttgtatttt

SEQ ID NO: 290640 - DNA, 25 bp, Homo sapien
tagtaagattaagtggacaccacac

SEQ ID NO: 290641 - DNA, 25 bp, Homo sapien
ttgaaatgaggggatccttcctagt

SEQ ID NO: 290642 - DNA, 25 bp, Homo sapien
aatgaggggatccttcctagtaaga

SEQ ID NO: 290643 - DNA, 25 bp, Homo sapien
tcctagtaagattaagtggacacca

SEQ ID NO: 290644 - DNA, 25 bp, Homo sapien
gcttctcctaacacttcaaaggaag

SEQ ID NO: 290645 - DNA, 25 bp, Homo sapien
tccaaagcagagaagttaaccctaa

SEQ ID NO: 290646 - DNA, 25 bp, Homo sapien
ttccaaagcagagaagttaacccta

SEQ ID NO: 290647 - DNA, 25 bp, Homo sapien
ccttcaccgcttctcctaacacttc

SEQ ID NO: 290648 - DNA, 25 bp, Homo sapien
gcctggcctattttattgactttaa

SEQ ID NO: 290649 - DNA, 25 bp, Homo sapien
catgcctggcctattttattgactt

SEQ ID NO: 290650 - DNA, 25 bp, Homo sapien
atgcctggcctattttattgacttt

SEQ ID NO: 290651 - DNA, 25 bp, Homo sapien
tgcctggcctattttattgacttta

SEQ ID NO: 290652 - DNA, 25 bp, Homo sapien
gaaactgtggtagtagaattgtgag

SEQ ID NO: 290653 - DNA, 25 bp, Homo sapien
ttttgcctcttgttagcattatagg

SEQ ID NO: 290654 - DNA, 25 bp, Homo sapien
taaataccttatgggaaccttgcat

SEQ ID NO: 290655 - DNA, 25 bp, Homo sapien
ggacctgtgcatctattcagtataa

SEQ ID NO: 290656 - DNA, 25 bp, Homo sapien
tgatttcaatcccttggccagtgga

SEQ ID NO: 290657 - DNA, 25 bp, Homo sapien
tttaaacgatacatcaaggctgagg

SEQ ID NO: 290658 - DNA, 25 bp, Homo sapien
tgtaaggagtgcatatctgtggtcc

SEQ ID NO: 290659 - DNA, 25 bp, Homo sapien
gaaggaggttttgctactggcgtcc

SEQ ID NO: 290660 - DNA, 25 bp, Homo sapien
cagctaattttggtattattagtaa

SEQ ID NO: 290661 - DNA, 25 bp, Homo sapien
tattagtaaagacggagttttgcca

SEQ ID NO: 290662 - DNA, 25 bp, Homo sapien
cggagttttgccatgttggccaggc

SEQ ID NO: 290663 - DNA, 25 bp, Homo sapien
gcacataccactatcccagctaatt

SEQ ID NO: 290664 - DNA, 25 bp, Homo sapien
acatgtaagctccacctgacttggg

SEQ ID NO: 290665 - DNA, 25 bp, Homo sapien
taacatgtaaatgggagtgaggccc

SEQ ID NO: 290666 - DNA, 25 bp, Homo sapien
tctggtaagaattgccctggctaca

SEQ ID NO: 290667 - DNA, 25 bp, Homo sapien
gagacggcacaaacaggataacatg

SEQ ID NO: 290668 - DNA, 25 bp, Homo sapien
gtgtagaggcagcaagcatgtcccc

SEQ ID NO: 290669 - DNA, 25 bp, Homo sapien
catcgtcaaaggatcggttgctaag

SEQ ID NO: 290670 - DNA, 25 bp, Homo sapien
taatccaacatgagagacaacaggc

SEQ ID NO: 290671 - DNA, 25 bp, Homo sapien
caaacagcaagaggtcatcgtcaaa

SEQ ID NO: 290672 - DNA, 25 bp, Homo sapien
aatccaccgagctaaacagaaatgc

SEQ ID NO: 290673 - DNA, 25 bp, Homo sapien
gaaatgcacaaactagttacacacg

SEQ ID NO: 290674 - DNA, 25 bp, Homo sapien
ggaaacaagtttagtgccaacacac

SEQ ID NO: 290675 - DNA, 25 bp, Homo sapien
gttacacacggaacatcataagctg

SEQ ID NO: 290676 - DNA, 25 bp, Homo sapien
gaactgctaagttggagtctcatgc

SEQ ID NO: 290677 - DNA, 25 bp, Homo sapien
ggagtctcatgccattcagtaagga

SEQ ID NO: 290678 - DNA, 25 bp, Homo sapien
tccatgaactgctaagttggagtct

SEQ ID NO: 290679 - DNA, 25 bp, Homo sapien
gatttacatggcaagaatgaggtca

SEQ ID NO: 290680 - DNA, 25 bp, Homo sapien
gaatgcactcggagaaaagaaagcc

SEQ ID NO: 290681 - DNA, 25 bp, Homo sapien
gcaagaaccaaactatcacgaagag

SEQ ID NO: 290682 - DNA, 25 bp, Homo sapien
catgggacttagcaaggttaacagc

SEQ ID NO: 290683 - DNA, 25 bp, Homo sapien
tgtggtgcaaaccagcggtcagctg

SEQ ID NO: 290684 - DNA, 25 bp, Homo sapien
tgaatcagaagagtaaagttccctt

SEQ ID NO: 290685 - DNA, 25 bp, Homo sapien
ctgaatcagaagagtaaagttccct

SEQ ID NO: 290686 - DNA, 25 bp, Homo sapien
ggattccactcaaagccaatggcaa

SEQ ID NO: 290687 - DNA, 25 bp, Homo sapien
gaaagtcctattagtcaacaactgg

SEQ ID NO: 290688 - DNA, 25 bp, Homo sapien
cagtgaactcctgctaattgttgga

SEQ ID NO: 290689 - DNA, 25 bp, Homo sapien
aagaaacacgcatgggagcttccac

SEQ ID NO: 290690 - DNA, 25 bp, Homo sapien
attgttattacataggcccagtggg

SEQ ID NO: 290691 - DNA, 25 bp, Homo sapien
cagtgaggcatggtttcgggtccaa

SEQ ID NO: 290692 - DNA, 25 bp, Homo sapien
ttcatacaagtcctcttcgtcattg

SEQ ID NO: 290693 - DNA, 25 bp, Homo sapien
tcctacccagccatattcatacaag

SEQ ID NO: 290694 - DNA, 25 bp, Homo sapien
ctgtcatgggttctgtgacatagcc

SEQ ID NO: 290695 - DNA, 25 bp, Homo sapien
tctgctcaacagagctcaggctgag

SEQ ID NO: 290696 - DNA, 25 bp, Homo sapien
atcagcacccctgtcatgggttctg

SEQ ID NO: 290697 - DNA, 25 bp, Homo sapien
cagaatcctcagagcaaattcctct

SEQ ID NO: 290698 - DNA, 25 bp, Homo sapien
aggtaagccctgttctacgtcaagg

SEQ ID NO: 290699 - DNA, 25 bp, Homo sapien
taagctgaacttgggttaaagccga

SEQ ID NO: 290700 - DNA, 25 bp, Homo sapien
tgtctcaagtaaagacccatccagg

SEQ ID NO: 290701 - DNA, 25 bp, Homo sapien
taaagccgagggcactcaggtatcc

SEQ ID NO: 290702 - DNA, 25 bp, Homo sapien
gttactgaacagaacgatcacttgc

SEQ ID NO: 290703 - DNA, 25 bp, Homo sapien
gaaccatagcacaaaggctaccagg

SEQ ID NO: 290704 - DNA, 25 bp, Homo sapien
gatcacttgcacctcagctgttcag

SEQ ID NO: 290705 - DNA, 25 bp, Homo sapien
agagaggaatgtgccagagcaccaa

SEQ ID NO: 290706 - DNA, 25 bp, Homo sapien
catatgaccttagaagaaaacttgt

SEQ ID NO: 290707 - DNA, 25 bp, Homo sapien
tgcttggtagcagtatgtttagaaa

SEQ ID NO: 290708 - DNA, 25 bp, Homo sapien
tcctcaacaagaaacccatcttgct

SEQ ID NO: 290709 - DNA, 25 bp, Homo sapien
gcttgcatccggttttaatcaaatg

SEQ ID NO: 290710 - DNA, 25 bp, Homo sapien
tcatttgtgacccttgttgcatcaa

SEQ ID NO: 290711 - DNA, 25 bp, Homo sapien
tctctagttctctgatttagcctca

SEQ ID NO: 290712 - DNA, 25 bp, Homo sapien
actctcttaagcctcccagtggatc

SEQ ID NO: 290713 - DNA, 25 bp, Homo sapien
tccttggcttgacagacacattatt

SEQ ID NO: 290714 - DNA, 25 bp, Homo sapien
tggagtcagaccttccagacaggct

SEQ ID NO: 290715 - DNA, 25 bp, Homo sapien
tatttacagtctggtgcgcatcagc

SEQ ID NO: 290716 - DNA, 25 bp, Homo sapien
tgccaggcgctttcggaagtacatg

SEQ ID NO: 290717 - DNA, 25 bp, Homo sapien
gtctagttagtgtcaagccactgca

SEQ ID NO: 290718 - DNA, 25 bp, Homo sapien
acacctggattgcccaaaacaggca

SEQ ID NO: 290719 - DNA, 25 bp, Homo sapien
cacacctggattgcccaaaacaggc

SEQ ID NO: 290720 - DNA, 25 bp, Homo sapien
caattgcgagtggtacgagatgtcc

SEQ ID NO: 290721 - DNA, 25 bp, Homo sapien
ttcacagtggccctgcagtaccaag

SEQ ID NO: 290722 - DNA, 25 bp, Homo sapien
tgaagccgtccctgctgacagacta

SEQ ID NO: 290723 - DNA, 25 bp, Homo sapien
ttgctgaacatcaagggaccagggc

SEQ ID NO: 290724 - DNA, 25 bp, Homo sapien
tacaacaagagcgaaccttgaaggc

SEQ ID NO: 290725 - DNA, 25 bp, Homo sapien
tgaggagcctgggtttaataggtat

SEQ ID NO: 290726 - DNA, 25 bp, Homo sapien
tcacaaaagacctggagtggtcaaa

SEQ ID NO: 290727 - DNA, 25 bp, Homo sapien
aggcattatgccacgtgaaagaagc

SEQ ID NO: 290728 - DNA, 25 bp, Homo sapien
gcaccccatttgtaagaggttgacc

SEQ ID NO: 290729 - DNA, 25 bp, Homo sapien
gcagccagcctagggcaccttttgt

SEQ ID NO: 290730 - DNA, 25 bp, Homo sapien
tagccagggaagcaagaattctttt

SEQ ID NO: 290731 - DNA, 25 bp, Homo sapien
gctgcatcctggagttcggccagcc

SEQ ID NO: 290732 - DNA, 25 bp, Homo sapien
gcttagctgtgtgaacaatctccca

SEQ ID NO: 290733 - DNA, 25 bp, Homo sapien
caggctgttgcttggagttacttgg

SEQ ID NO: 290734 - DNA, 25 bp, Homo sapien
tctggttacttagaggagagctgcc

SEQ ID NO: 290735 - DNA, 25 bp, Homo sapien
caggttggttcctcggttcaggctc

SEQ ID NO: 290736 - DNA, 25 bp, Homo sapien
aagcctgcactacaactcctgcagg

SEQ ID NO: 290737 - DNA, 25 bp, Homo sapien
ggttcaggggtctcacctacatcag

SEQ ID NO: 290738 - DNA, 25 bp, Homo sapien
ggtctcacctacatcaggaatcaca

SEQ ID NO: 290739 - DNA, 25 bp, Homo sapien
tgctcttggttcaggggtctcacct

SEQ ID NO: 290740 - DNA, 25 bp, Homo sapien
aagtgtaccctgtgtggctaatgca

SEQ ID NO: 290741 - DNA, 25 bp, Homo sapien
tcataaaactgacagagctctgcct

SEQ ID NO: 290742 - DNA, 25 bp, Homo sapien
gatttgctcaactttccacagacag

SEQ ID NO: 290743 - DNA, 25 bp, Homo sapien
gactggacagtgtacacctgcctga

SEQ ID NO: 290744 - DNA, 25 bp, Homo sapien
tgtcctgtgttcacaatcccatcaa

SEQ ID NO: 290745 - DNA, 25 bp, Homo sapien
tccggggtgtaacaataatcattaa

SEQ ID NO: 290746 - DNA, 25 bp, Homo sapien
caatcccatcaatgcccctttcggg

SEQ ID NO: 290747 - DNA, 25 bp, Homo sapien
cacgcatccggggtgtaacaataat

SEQ ID NO: 290748 - DNA, 25 bp, Homo sapien
caagttccagatgggtcttctgcga

SEQ ID NO: 290749 - DNA, 25 bp, Homo sapien
gagacagcaatggaatgcaagttcc

SEQ ID NO: 290750 - DNA, 25 bp, Homo sapien
ctctgccttgagtaggagacagcaa

SEQ ID NO: 290751 - DNA, 25 bp, Homo sapien
gatgagaatctcaaggacaccattt

SEQ ID NO: 290752 - DNA, 25 bp, Homo sapien
tgggtccctcacaatcaaaagcctc

SEQ ID NO: 290753 - DNA, 25 bp, Homo sapien
agaagtctgggtccctcacaatcaa

SEQ ID NO: 290754 - DNA, 25 bp, Homo sapien
aacaatgatcacagacatcctctgg

SEQ ID NO: 290755 - DNA, 25 bp, Homo sapien
tgatcacagacatcctctggtcacc

SEQ ID NO: 290756 - DNA, 25 bp, Homo sapien
ctgcctatgcctggaagataagctt

SEQ ID NO: 290757 - DNA, 25 bp, Homo sapien
acctggaagtcgttatcttggttga

SEQ ID NO: 290758 - DNA, 25 bp, Homo sapien
tcttggttgagtttccagaagtccc

SEQ ID NO: 290759 - DNA, 25 bp, Homo sapien
cagaagtcccacttcaggccaaatc

SEQ ID NO: 290760 - DNA, 25 bp, Homo sapien
ggaaagcctgtccacaccctcctgc

SEQ ID NO: 290761 - DNA, 25 bp, Homo sapien
aggaaagcctgtccacaccctcctg

SEQ ID NO: 290762 - DNA, 25 bp, Homo sapien
agccacaaacacagctcagaactcc

SEQ ID NO: 290763 - DNA, 25 bp, Homo sapien
aaacacagctcagaactccgaggcc

SEQ ID NO: 290764 - DNA, 25 bp, Homo sapien
cacaaacacagctcagaactccgag

SEQ ID NO: 290765 - DNA, 25 bp, Homo sapien
ctgaagccacaaacacagctcagaa

SEQ ID NO: 290766 - DNA, 25 bp, Homo sapien
ttccaggtttccctggcaggagatc

SEQ ID NO: 290767 - DNA, 25 bp, Homo sapien
aggtttccctggcaggagatcaaag

SEQ ID NO: 290768 - DNA, 25 bp, Homo sapien
gtttccctggcaggagatcaaagcg

SEQ ID NO: 290769 - DNA, 25 bp, Homo sapien
ccaggtttccctggcaggagatcaa

SEQ ID NO: 290770 - DNA, 25 bp, Homo sapien
acaccaagagcacacgggtaaccgg

SEQ ID NO: 290771 - DNA, 25 bp, Homo sapien
tttccgacagaaacttttcattcca

SEQ ID NO: 290772 - DNA, 25 bp, Homo sapien
ggaaatgaggtcacacaccaagagc

SEQ ID NO: 290773 - DNA, 25 bp, Homo sapien
aagagcacacgggtaaccggtgaga

SEQ ID NO: 290774 - DNA, 25 bp, Homo sapien
ggtaacaagagacttaagcataggc

SEQ ID NO: 290775 - DNA, 25 bp, Homo sapien
gagacacagccatctaaagccggag

SEQ ID NO: 290776 - DNA, 25 bp, Homo sapien
gcttgaaggcttgagagacacagcc

SEQ ID NO: 290777 - DNA, 25 bp, Homo sapien
gcctggaacacgtcactgctgaaat

SEQ ID NO: 290778 - DNA, 25 bp, Homo sapien
gtttccagaggacataggtaggccc

SEQ ID NO: 290779 - DNA, 25 bp, Homo sapien
gatgatacttcacatgcagaaagac

SEQ ID NO: 290780 - DNA, 25 bp, Homo sapien
caagatagatagactggcacagaca

SEQ ID NO: 290781 - DNA, 25 bp, Homo sapien
aatttctgggttaggcggtctgttg

SEQ ID NO: 290782 - DNA, 25 bp, Homo sapien
ccacaagggtatcttcacatccttc

SEQ ID NO: 290783 - DNA, 25 bp, Homo sapien
tcagacacatcaaagatgactgcag

SEQ ID NO: 290784 - DNA, 25 bp, Homo sapien
atcaatagcttctgggttttcagac

SEQ ID NO: 290785 - DNA, 25 bp, Homo sapien
caatagcttctgggttttcagacac

SEQ ID NO: 290786 - DNA, 25 bp, Homo sapien
agacacatcaaagatgactgcagta

SEQ ID NO: 290787 - DNA, 25 bp, Homo sapien
gcggtgctggatccttgctcgagcc

SEQ ID NO: 290788 - DNA, 25 bp, Homo sapien
actttctgcttgttgacgatgttca

SEQ ID NO: 290789 - DNA, 25 bp, Homo sapien
atggcatctgcacccttcacataca

SEQ ID NO: 290790 - DNA, 25 bp, Homo sapien
cctcttgagcgggtcttcagagccc

SEQ ID NO: 290791 - DNA, 25 bp, Homo sapien
cacgacgaagaaagccaggaaaatc

SEQ ID NO: 290792 - DNA, 25 bp, Homo sapien
ccatgtcaaagtattcagtgggttg

SEQ ID NO: 290793 - DNA, 25 bp, Homo sapien
gaggcagaccaaggagaccacgacg

SEQ ID NO: 290794 - DNA, 25 bp, Homo sapien
caggaaaatccccatgtcaaagtat

SEQ ID NO: 290795 - DNA, 25 bp, Homo sapien
gcacagccagcctgttcatggaatt

SEQ ID NO: 290796 - DNA, 25 bp, Homo sapien
ccccttgctcttggagttgaacttt

SEQ ID NO: 290797 - DNA, 25 bp, Homo sapien
cagatggcacagtcggacgtggagc

SEQ ID NO: 290798 - DNA, 25 bp, Homo sapien
gctcttggagttgaactttctggtt

SEQ ID NO: 290799 - DNA, 25 bp, Homo sapien
caggacgggcctgcttctgccatta

SEQ ID NO: 290800 - DNA, 25 bp, Homo sapien
ccaggacgggcctgcttctgccatt

SEQ ID NO: 290801 - DNA, 25 bp, Homo sapien
aggacgggcctgcttctgccattac

SEQ ID NO: 290802 - DNA, 25 bp, Homo sapien
cttcctgtgaaaccggtgagtacag

SEQ ID NO: 290803 - DNA, 25 bp, Homo sapien
tgagtacaggggatgacccgcagct

SEQ ID NO: 290804 - DNA, 25 bp, Homo sapien
aggggtccacgcacttcctgtgaaa

SEQ ID NO: 290805 - DNA, 25 bp, Homo sapien
ctatgatgttgtgccgacagtgggg

SEQ ID NO: 290806 - DNA, 25 bp, Homo sapien
catggtctcatactgggagaagcaa

SEQ ID NO: 290807 - DNA, 25 bp, Homo sapien
tgccggtccatggtcagcaaggtga

SEQ ID NO: 290808 - DNA, 25 bp, Homo sapien
ctgaggccctggaagtagtagtgct

SEQ ID NO: 290809 - DNA, 25 bp, Homo sapien
agaagctgcggccactcaacttggg

SEQ ID NO: 290810 - DNA, 25 bp, Homo sapien
agtcggccaggtagccactgcacac

SEQ ID NO: 290811 - DNA, 25 bp, Homo sapien
tgcctgggcagtcggccaggtagcc

SEQ ID NO: 290812 - DNA, 25 bp, Homo sapien
ctgggcagtcggccaggtagccact

SEQ ID NO: 290813 - DNA, 25 bp, Homo sapien
ggcagtcggccaggtagccactgca

SEQ ID NO: 290814 - DNA, 25 bp, Homo sapien
ctaccacagagtcactggaggaaca

SEQ ID NO: 290815 - DNA, 25 bp, Homo sapien
cagagtcactggaggaacagtggca

SEQ ID NO: 290816 - DNA, 25 bp, Homo sapien
cacagagtcactggaggaacagtgg

SEQ ID NO: 290817 - DNA, 25 bp, Homo sapien
accacagagtcactggaggaacagt

SEQ ID NO: 290818 - DNA, 25 bp, Homo sapien
tcgagccccacttctgaggtagagc

SEQ ID NO: 290819 - DNA, 25 bp, Homo sapien
tcctcggtgagcgtgtactgcacac

SEQ ID NO: 290820 - DNA, 25 bp, Homo sapien
gagtagtcctcagtgtagcagccgc

SEQ ID NO: 290821 - DNA, 25 bp, Homo sapien
aaggccgtacaagccctgggagctt

SEQ ID NO: 290822 - DNA, 25 bp, Homo sapien
agagtgaaccaggagctcatcagat

SEQ ID NO: 290823 - DNA, 25 bp, Homo sapien
gcaaggagagtgaaccaggagctca

SEQ ID NO: 290824 - DNA, 25 bp, Homo sapien
ggaggagaaaagtagcggacaggtc

SEQ ID NO: 290825 - DNA, 25 bp, Homo sapien
ctggaatgagcttggcacatgggaa

SEQ ID NO: 290826 - DNA, 25 bp, Homo sapien
gaacagaaggtgtgtaggtgatctc

SEQ ID NO: 290827 - DNA, 25 bp, Homo sapien
tttagcaataggatgacagaagtga

SEQ ID NO: 290828 - DNA, 25 bp, Homo sapien
ggctggagtgttacctaacctaaga

SEQ ID NO: 290829 - DNA, 25 bp, Homo sapien
acagaagtgaacagaaggtgtgtag

SEQ ID NO: 290830 - DNA, 25 bp, Homo sapien
caccacacatgggaccaggcaaggg

SEQ ID NO: 290831 - DNA, 25 bp, Homo sapien
tgtgtatgctaaagggctgaagcag

SEQ ID NO: 290832 - DNA, 25 bp, Homo sapien
ggcctgtgtatgctaaagggctgaa

SEQ ID NO: 290833 - DNA, 25 bp, Homo sapien
acacatgggaccaggcaagggactc

SEQ ID NO: 290834 - DNA, 25 bp, Homo sapien
ctgtctgctgagtgagatctcggtc

SEQ ID NO: 290835 - DNA, 25 bp, Homo sapien
tgctgtctgctgagtgagatctcgg

SEQ ID NO: 290836 - DNA, 25 bp, Homo sapien
gctgctgtctgctgagtgagatctc

SEQ ID NO: 290837 - DNA, 25 bp, Homo sapien
gctgtctgctgagtgagatctcggt

SEQ ID NO: 290838 - DNA, 25 bp, Homo sapien
caatttccaggtaagagttcctcct

SEQ ID NO: 290839 - DNA, 25 bp, Homo sapien
aatttccaggtaagagttcctcctg

SEQ ID NO: 290840 - DNA, 25 bp, Homo sapien
tactcctggcccgagaaatgaaggc

SEQ ID NO: 290841 - DNA, 25 bp, Homo sapien
gggctgcatccataaagaggtacct

SEQ ID NO: 290842 - DNA, 25 bp, Homo sapien
gaacatgcccttactatgacctgga

SEQ ID NO: 290843 - DNA, 25 bp, Homo sapien
gatcacatgtcaccagcttaggcgc

SEQ ID NO: 290844 - DNA, 25 bp, Homo sapien
tgttggaaaaagagcccttagacca

SEQ ID NO: 290845 - DNA, 25 bp, Homo sapien
aacttcgagtagagactagcagcac

SEQ ID NO: 290846 - DNA, 25 bp, Homo sapien
aatagtgccttgttagaccaacaca

SEQ ID NO: 290847 - DNA, 25 bp, Homo sapien
gcattagtcctgcacgaacttcgag

SEQ ID NO: 290848 - DNA, 25 bp, Homo sapien
gtcacactctcaacataagacatgg

SEQ ID NO: 290849 - DNA, 25 bp, Homo sapien
gattattccaacaatgtcacactct

SEQ ID NO: 290850 - DNA, 25 bp, Homo sapien
caaaaccatagaagactacaacttg

SEQ ID NO: 290851 - DNA, 25 bp, Homo sapien
taaaatctgtgtgcaattatcatgt

SEQ ID NO: 290852 - DNA, 25 bp, Homo sapien
cgtcagtgcggggccccggggcgcg

SEQ ID NO: 290853 - DNA, 25 bp, Homo sapien
tcagtgcggggccccggggcgcggc

SEQ ID NO: 290854 - DNA, 25 bp, Homo sapien
cgggccgccagcgtgagcgccgcgg

SEQ ID NO: 290855 - DNA, 25 bp, Homo sapien
ggccgggccgccagcgtgagcgccg

SEQ ID NO: 290856 - DNA, 25 bp, Homo sapien
ccgggccgccagcgtgagcgccgcg

SEQ ID NO: 290857 - DNA, 25 bp, Homo sapien
gccgggccgccagcgtgagcgccgc

SEQ ID NO: 290858 - DNA, 25 bp, Homo sapien
cccttgtcgcccctcgagtgggctc

SEQ ID NO: 290859 - DNA, 25 bp, Homo sapien
ctctcaggccggccggcccttgtcg

SEQ ID NO: 290860 - DNA, 25 bp, Homo sapien
gggcggcggggggtcgctcacactc

SEQ ID NO: 290861 - DNA, 25 bp, Homo sapien
cgcccctcgagtgggctccgctcag

SEQ ID NO: 290862 - DNA, 25 bp, Homo sapien
cgggggcgtcgatgacgggcctggg

SEQ ID NO: 290863 - DNA, 25 bp, Homo sapien
caggaagggaccatcccggcctgag

SEQ ID NO: 290864 - DNA, 25 bp, Homo sapien
cgtcgatgacgggcctgggggtagc

SEQ ID NO: 290865 - DNA, 25 bp, Homo sapien
cccgggggcgtcgatgacgggcctg

SEQ ID NO: 290866 - DNA, 25 bp, Homo sapien
gtcccagatcccgagacagagaaga

SEQ ID NO: 290867 - DNA, 25 bp, Homo sapien
agggatgtcgctggaggtctcggag

SEQ ID NO: 290868 - DNA, 25 bp, Homo sapien
aagactcaaggcggagagggcctcc

SEQ ID NO: 290869 - DNA, 25 bp, Homo sapien
tcgtcccggtgcaaggtgcgtcgat

SEQ ID NO: 290870 - DNA, 25 bp, Homo sapien
tccaccggtgtaggcgggaggagag

SEQ ID NO: 290871 - DNA, 25 bp, Homo sapien
ctcgcgaggcagaagttataatgtc

SEQ ID NO: 290872 - DNA, 25 bp, Homo sapien
gcagggcgaacaagtccatcccgtt

SEQ ID NO: 290873 - DNA, 25 bp, Homo sapien
tataatgtccgccaagcgggtgcag

SEQ ID NO: 290874 - DNA, 25 bp, Homo sapien
gggttccagctggattctcaaggtc

SEQ ID NO: 290875 - DNA, 25 bp, Homo sapien
taagggttgagggaagcaccgccat

SEQ ID NO: 290876 - DNA, 25 bp, Homo sapien
ggttgagggaagcaccgccatcttg

SEQ ID NO: 290877 - DNA, 25 bp, Homo sapien
cagaaggtgaggtaagggttgaggg

SEQ ID NO: 290878 - DNA, 25 bp, Homo sapien
agggttgagggaagcaccgccatct

SEQ ID NO: 290879 - DNA, 25 bp, Homo sapien
gaaggcccttaactgatgccaaaac

SEQ ID NO: 290880 - DNA, 25 bp, Homo sapien
cagatgctacagtctctaatttgat

SEQ ID NO: 290881 - DNA, 25 bp, Homo sapien
ggattgaaggcccttaactgatgcc

SEQ ID NO: 290882 - DNA, 25 bp, Homo sapien
tacagtctctaatttgattgaaagg

SEQ ID NO: 290883 - DNA, 25 bp, Homo sapien
ttcttttccatttaaggagatggtg

SEQ ID NO: 290884 - DNA, 25 bp, Homo sapien
ttagatcttcttttccatttaagga

SEQ ID NO: 290885 - DNA, 25 bp, Homo sapien
cttttccatttaaggagatggtgcc

SEQ ID NO: 290886 - DNA, 25 bp, Homo sapien
tcttcttttccatttaaggagatgg

SEQ ID NO: 290887 - DNA, 25 bp, Homo sapien
cccgttggggtatttcagagtgttg

SEQ ID NO: 290888 - DNA, 25 bp, Homo sapien
tctcgttccaaaacagacatggctt

SEQ ID NO: 290889 - DNA, 25 bp, Homo sapien
tggatgctggaaagtctcgttccaa

SEQ ID NO: 290890 - DNA, 25 bp, Homo sapien
tgtgttcccctataatccgcaccat

SEQ ID NO: 290891 - DNA, 25 bp, Homo sapien
tctcagacatctctaatgtgatggg

SEQ ID NO: 290892 - DNA, 25 bp, Homo sapien
ctcagacatctctaatgtgatgggt

SEQ ID NO: 290893 - DNA, 25 bp, Homo sapien
caactctcagacatctctaatgtga

SEQ ID NO: 290894 - DNA, 25 bp, Homo sapien
actctcagacatctctaatgtgatg

SEQ ID NO: 290895 - DNA, 25 bp, Homo sapien
tgttggggaaaaggacacaattgat

SEQ ID NO: 290896 - DNA, 25 bp, Homo sapien
aaggacacaattgatgacttctgat

SEQ ID NO: 290897 - DNA, 25 bp, Homo sapien
gatgttttaattcaactggttcatt

SEQ ID NO: 290898 - DNA, 25 bp, Homo sapien
attcaactggttcattgcttttcag

SEQ ID NO: 290899 - DNA, 25 bp, Homo sapien
gtagacaccatcctcgtgctctgcc

SEQ ID NO: 290900 - DNA, 25 bp, Homo sapien
tctggcaagcaggtatctcacagta

SEQ ID NO: 290901 - DNA, 25 bp, Homo sapien
agcaggtatctcacagtacttccag

SEQ ID NO: 290902 - DNA, 25 bp, Homo sapien
accatcctcgtgctctgccacatag

SEQ ID NO: 290903 - DNA, 25 bp, Homo sapien
acagtcctgtaaaccatcacattgg

SEQ ID NO: 290904 - DNA, 25 bp, Homo sapien
aaccatcacattgggtattacagtc

SEQ ID NO: 290905 - DNA, 25 bp, Homo sapien
atcacattgggtattacagtcttac

SEQ ID NO: 290906 - DNA, 25 bp, Homo sapien
gttcacagtcctgtaaaccatcaca

SEQ ID NO: 290907 - DNA, 25 bp, Homo sapien
tccaagtaataagtagtgccataac

SEQ ID NO: 290908 - DNA, 25 bp, Homo sapien
gaactaccacatgagctttgtatgg

SEQ ID NO: 290909 - DNA, 25 bp, Homo sapien
cctaggctgcttctgagcggttgcc

SEQ ID NO: 290910 - DNA, 25 bp, Homo sapien
ggttgccctctctatacctgaaaga

SEQ ID NO: 290911 - DNA, 25 bp, Homo sapien
ggctaattatttgtgtatcttgtag

SEQ ID NO: 290912 - DNA, 25 bp, Homo sapien
gctaattatttgtgtatcttgtaga

SEQ ID NO: 290913 - DNA, 25 bp, Homo sapien
aatgatgtaactcctctgctaattt

SEQ ID NO: 290914 - DNA, 25 bp, Homo sapien
gaaatgatgtaactcctctgctaat

SEQ ID NO: 290915 - DNA, 25 bp, Homo sapien
gcaagcactgaaattgtagggattt

SEQ ID NO: 290916 - DNA, 25 bp, Homo sapien
tgtcaagtaggagttgaggcaacca

SEQ ID NO: 290917 - DNA, 25 bp, Homo sapien
ccacgtgagtggatgaatgagccaa

SEQ ID NO: 290918 - DNA, 25 bp, Homo sapien
tgagccaattctgctggtccacgaa

SEQ ID NO: 290919 - DNA, 25 bp, Homo sapien
tgagaaccacctattacccacagca

SEQ ID NO: 290920 - DNA, 25 bp, Homo sapien
ctttgagaaccacctattacccaca

SEQ ID NO: 290921 - DNA, 25 bp, Homo sapien
agagcatctgctcccataactactg

SEQ ID NO: 290922 - DNA, 25 bp, Homo sapien
gctcccataactactgctggctggg

SEQ ID NO: 290923 - DNA, 25 bp, Homo sapien
cactccttgtaattggcatctgaag

SEQ ID NO: 290924 - DNA, 25 bp, Homo sapien
ttagcaaaccagaggagagggttgt

SEQ ID NO: 290925 - DNA, 25 bp, Homo sapien
ttgtagccaagttgggacccactcc

SEQ ID NO: 290926 - DNA, 25 bp, Homo sapien
caaattagcaaaccagaggagaggg

SEQ ID NO: 290927 - DNA, 25 bp, Homo sapien
agtttgtatggtgagtttgttggac

SEQ ID NO: 290928 - DNA, 25 bp, Homo sapien
gggtttccatgatccttgtagcagc

SEQ ID NO: 290929 - DNA, 25 bp, Homo sapien
ttgttggacgttttactggtgccag

SEQ ID NO: 290930 - DNA, 25 bp, Homo sapien
ccagttagaggaggtgggtttccat

SEQ ID NO: 290931 - DNA, 25 bp, Homo sapien
tatcttgggtaactatccaggcgtg

SEQ ID NO: 290932 - DNA, 25 bp, Homo sapien
agacatcctgaagtggtgtgcagtg

SEQ ID NO: 290933 - DNA, 25 bp, Homo sapien
tatttccctgacaactggtgatgct

SEQ ID NO: 290934 - DNA, 25 bp, Homo sapien
ctactagcagtctatgagagttcag

SEQ ID NO: 290935 - DNA, 25 bp, Homo sapien
taattttacacattatggatacaag

SEQ ID NO: 290936 - DNA, 25 bp, Homo sapien
accacgcccagatgactatcttttc

SEQ ID NO: 290937 - DNA, 25 bp, Homo sapien
tttacacattatggatacaagtcct

SEQ ID NO: 290938 - DNA, 25 bp, Homo sapien
cacgcccagatgactatcttttcat

SEQ ID NO: 290939 - DNA, 25 bp, Homo sapien
tgtgatccccgaagcagacgctgtt

SEQ ID NO: 290940 - DNA, 25 bp, Homo sapien
ccgtacttccagtaatcaggattgt

SEQ ID NO: 290941 - DNA, 25 bp, Homo sapien
caccacagggttgggtgtgatcccc

SEQ ID NO: 290942 - DNA, 25 bp, Homo sapien
agacgctgttgcattcggtactggc

SEQ ID NO: 290943 - DNA, 25 bp, Homo sapien
atgctaatatactctgttttgttcc

SEQ ID NO: 290944 - DNA, 25 bp, Homo sapien
gggccatgctaatatactctgtttt

SEQ ID NO: 290945 - DNA, 25 bp, Homo sapien
gccatgctaatatactctgttttgt

SEQ ID NO: 290946 - DNA, 25 bp, Homo sapien
catgctaatatactctgttttgttc

SEQ ID NO: 290947 - DNA, 25 bp, Homo sapien
tccagagagacgttgaaggacagag

SEQ ID NO: 290948 - DNA, 25 bp, Homo sapien
tccctgggcctgattgatgcgatca

SEQ ID NO: 290949 - DNA, 25 bp, Homo sapien
gacacggtgggtgtagccatccaga

SEQ ID NO: 290950 - DNA, 25 bp, Homo sapien
gaatagaccacagaagacatggctg

SEQ ID NO: 290951 - DNA, 25 bp, Homo sapien
tggtgatgacatagaggactttgga

SEQ ID NO: 290952 - DNA, 25 bp, Homo sapien
acctcggccaccgtctggttgacag

SEQ ID NO: 290953 - DNA, 25 bp, Homo sapien
acagcgggcctctcctgtggcagtt

SEQ ID NO: 290954 - DNA, 25 bp, Homo sapien
tgacactgaggttggcctgctccgt

SEQ ID NO: 290955 - DNA, 25 bp, Homo sapien
catgggtggcgcccaggaattgcta

SEQ ID NO: 290956 - DNA, 25 bp, Homo sapien
atgggtggcgcccaggaattgctac

SEQ ID NO: 290957 - DNA, 25 bp, Homo sapien
ccatgggtggcgcccaggaattgct

SEQ ID NO: 290958 - DNA, 25 bp, Homo sapien
tcaaaagccaggacagactataggt

SEQ ID NO: 290959 - DNA, 25 bp, Homo sapien
tcacaatgtacaaaaggcacgcttg

SEQ ID NO: 290960 - DNA, 25 bp, Homo sapien
tcatttatacgccacagaagggcag

SEQ ID NO: 290961 - DNA, 25 bp, Homo sapien
tccctcaggactaaggaaccaagct

SEQ ID NO: 290962 - DNA, 25 bp, Homo sapien
gacgtgcagaagtatctttgctaca

SEQ ID NO: 290963 - DNA, 25 bp, Homo sapien
gcagaagtatctttgctacaatggc

SEQ ID NO: 290964 - DNA, 25 bp, Homo sapien
gaggagagttgccagaccatagact

SEQ ID NO: 290965 - DNA, 25 bp, Homo sapien
ttgaatgtgacgtgcagaagtatct

SEQ ID NO: 290966 - DNA, 25 bp, Homo sapien
tgacaatccctaaggtcccctgaag

SEQ ID NO: 290967 - DNA, 25 bp, Homo sapien
gtggaaggcttgtaaaaaatgctcc

SEQ ID NO: 290968 - DNA, 25 bp, Homo sapien
gaagtccctggttgatgacaatccc

SEQ ID NO: 290969 - DNA, 25 bp, Homo sapien
tcccctgaagcaggaacacgatggg

SEQ ID NO: 290970 - DNA, 25 bp, Homo sapien
gaagcccatgtgtaaggtatcaggt

SEQ ID NO: 290971 - DNA, 25 bp, Homo sapien
tcaaagagggacctcaagtcctagg

SEQ ID NO: 290972 - DNA, 25 bp, Homo sapien
catctagaatgtacctgagccctgt

SEQ ID NO: 290973 - DNA, 25 bp, Homo sapien
tcgctaatgtccaggagtccgcact

SEQ ID NO: 290974 - DNA, 25 bp, Homo sapien
taaagctttccctgcagctccatga

SEQ ID NO: 290975 - DNA, 25 bp, Homo sapien
aaagctttccctgcagctccatgag

SEQ ID NO: 290976 - DNA, 25 bp, Homo sapien
ttaaagctttccctgcagctccatg

SEQ ID NO: 290977 - DNA, 25 bp, Homo sapien
taagttgatcctagaggcgctgggc

SEQ ID NO: 290978 - DNA, 25 bp, Homo sapien
tacgctgtcctgagccagatttggg

SEQ ID NO: 290979 - DNA, 25 bp, Homo sapien
cgggagatctgaaacctaacggtgc

SEQ ID NO: 290980 - DNA, 25 bp, Homo sapien
caaagtgctgcaaagaggaaacgcc

SEQ ID NO: 290981 - DNA, 25 bp, Homo sapien
caagactggaagaaatttggaggca

SEQ ID NO: 290982 - DNA, 25 bp, Homo sapien
tcgtaccagctgaaggtcggctgtg

SEQ ID NO: 290983 - DNA, 25 bp, Homo sapien
ctaatctttcagatcgtaccagctg

SEQ ID NO: 290984 - DNA, 25 bp, Homo sapien
cacaagactggaagaaatttggagg

SEQ ID NO: 290985 - DNA, 25 bp, Homo sapien
acaattttgccaataggttctttgg

SEQ ID NO: 290986 - DNA, 25 bp, Homo sapien
tttgccaataggttctttggcttcc

SEQ ID NO: 290987 - DNA, 25 bp, Homo sapien
ttttgccaataggttctttggcttc

SEQ ID NO: 290988 - DNA, 25 bp, Homo sapien
aacaattttgccaataggttctttg

SEQ ID NO: 290989 - DNA, 25 bp, Homo sapien
tgttggtcacttggcacagcgtctg

SEQ ID NO: 290990 - DNA, 25 bp, Homo sapien
tgaggtctgaataccccttgagggc

SEQ ID NO: 290991 - DNA, 25 bp, Homo sapien
cagttcccttgttgggttgcggcaa

SEQ ID NO: 290992 - DNA, 25 bp, Homo sapien
ttttatgggaacacaagcgtgacca

SEQ ID NO: 290993 - DNA, 25 bp, Homo sapien
aagggtattttcacccaacagctag

SEQ ID NO: 290994 - DNA, 25 bp, Homo sapien
cctaagaaagtaaaggtcaatagat

SEQ ID NO: 290995 - DNA, 25 bp, Homo sapien
gggaactgcccctactttgtgcatt

SEQ ID NO: 290996 - DNA, 25 bp, Homo sapien
ggaaaccagctacttgaaggaacca

SEQ ID NO: 290997 - DNA, 25 bp, Homo sapien
ctgaagcaacagataaggaaatcca

SEQ ID NO: 290998 - DNA, 25 bp, Homo sapien
cattgggggaactatgaggacattc

SEQ ID NO: 290999 - DNA, 25 bp, Homo sapien
gggaactatgaggacattcaaattc

SEQ ID NO: 291000 - DNA, 25 bp, Homo sapien
aactatgaggacattcaaattctgc

SEQ ID NO: 291001 - DNA, 25 bp, Homo sapien
acctgcagcattgggggaactatga

SEQ ID NO: 291002 - DNA, 25 bp, Homo sapien
tgccgcagcgggagctgggcgggcg

SEQ ID NO: 291003 - DNA, 25 bp, Homo sapien
ctgcaggaaaggcgagggcggcagg

SEQ ID NO: 291004 - DNA, 25 bp, Homo sapien
cggcaggaggcggcggctgggggct

SEQ ID NO: 291005 - DNA, 25 bp, Homo sapien
caggaaaggcgagggcggcaggagg

SEQ ID NO: 291006 - DNA, 25 bp, Homo sapien
gcggcaggaggcggcggctgggggc

SEQ ID NO: 291007 - DNA, 25 bp, Homo sapien
cacggggcggcgctggtgagcaagc

SEQ ID NO: 291008 - DNA, 25 bp, Homo sapien
agcagttgcggttcagggctggcct

SEQ ID NO: 291009 - DNA, 25 bp, Homo sapien
gctgggcaaaaaatccgtgtaactg

SEQ ID NO: 291010 - DNA, 25 bp, Homo sapien
cgtgtaactgtaatggaagggcttg

SEQ ID NO: 291011 - DNA, 25 bp, Homo sapien
aagggcttgagagcagttgcggttc

SEQ ID NO: 291012 - DNA, 25 bp, Homo sapien
tgcttccactgagcagtgtgacagt

SEQ ID NO: 291013 - DNA, 25 bp, Homo sapien
acagtgagagagacttatgttgttc

SEQ ID NO: 291014 - DNA, 25 bp, Homo sapien
catgaatgtaagagattcaagccac

SEQ ID NO: 291015 - DNA, 25 bp, Homo sapien
tcctagtgcgtgctggaaacacatg

SEQ ID NO: 291016 - DNA, 25 bp, Homo sapien
gagactccctgcactgggaggtgtc

SEQ ID NO: 291017 - DNA, 25 bp, Homo sapien
gatgctggacagcagaatagatgtc

SEQ ID NO: 291018 - DNA, 25 bp, Homo sapien
gaatagatgtctagtccagggcatt

SEQ ID NO: 291019 - DNA, 25 bp, Homo sapien
cagcagaatagatgtctagtccagg

SEQ ID NO: 291020 - DNA, 25 bp, Homo sapien
gccaggttttgaggtcagggtgatg

SEQ ID NO: 291021 - DNA, 25 bp, Homo sapien
ggttttgaggtcagggtgatgctgg

SEQ ID NO: 291022 - DNA, 25 bp, Homo sapien
atgtcacttccgagtcctgaattgc

SEQ ID NO: 291023 - DNA, 25 bp, Homo sapien
agtgatgtcacttccgagtcctgaa

SEQ ID NO: 291024 - DNA, 25 bp, Homo sapien
tgagtgatgtcacttccgagtcctg

SEQ ID NO: 291025 - DNA, 25 bp, Homo sapien
gatgtcacttccgagtcctgaattg

SEQ ID NO: 291026 - DNA, 25 bp, Homo sapien
tgccatgtggcaaagtcaaaggcct

SEQ ID NO: 291027 - DNA, 25 bp, Homo sapien
tctcagaaaaaaccacagtaggcct

SEQ ID NO: 291028 - DNA, 25 bp, Homo sapien
gattatatggccagtcctgagggtc

SEQ ID NO: 291029 - DNA, 25 bp, Homo sapien
ttgagtcttcgtgcgtgggccatcc

SEQ ID NO: 291030 - DNA, 25 bp, Homo sapien
tgggctgactatgcccagccctggt

SEQ ID NO: 291031 - DNA, 25 bp, Homo sapien
tctggctgcagaaccctagggcagt

SEQ ID NO: 291032 - DNA, 25 bp, Homo sapien
tagggcagtcaccagcatagtgcag

SEQ ID NO: 291033 - DNA, 25 bp, Homo sapien
gcaaactgttgcacagctagcagca

SEQ ID NO: 291034 - DNA, 25 bp, Homo sapien
ctgagcgaatgatatccgggactca

SEQ ID NO: 291035 - DNA, 25 bp, Homo sapien
tgagcgaatgatatccgggactcat

SEQ ID NO: 291036 - DNA, 25 bp, Homo sapien
ccagccgccccggacgcgcggagcc

SEQ ID NO: 291037 - DNA, 25 bp, Homo sapien
cctcgcggtcgccgcccccagcctg

SEQ ID NO: 291038 - DNA, 25 bp, Homo sapien
cgcgcggcccctcgcggtcgccgcc

SEQ ID NO: 291039 - DNA, 25 bp, Homo sapien
gcaccaggcgccctccgcgcgcggc

SEQ ID NO: 291040 - DNA, 25 bp, Homo sapien
agaacggagctgccccgatgctcca

SEQ ID NO: 291041 - DNA, 25 bp, Homo sapien
agctgccccgatgctccacgcagcg

SEQ ID NO: 291042 - DNA, 25 bp, Homo sapien
cggagctgccccgatgctccacgca

SEQ ID NO: 291043 - DNA, 25 bp, Homo sapien
cgatgctccacgcagcgccgcctcc

SEQ ID NO: 291044 - DNA, 25 bp, Homo sapien
tgggcagaggacagtcggaagctct

SEQ ID NO: 291045 - DNA, 25 bp, Homo sapien
agaggacagtcggaagctctggaga

SEQ ID NO: 291046 - DNA, 25 bp, Homo sapien
gcagaggacagtcggaagctctgga

SEQ ID NO: 291047 - DNA, 25 bp, Homo sapien
ggcagaggacagtcggaagctctgg

SEQ ID NO: 291048 - DNA, 25 bp, Homo sapien
gggcagttctgcagcactcgctgaa

SEQ ID NO: 291049 - DNA, 25 bp, Homo sapien
atggtgcgggtcaccacataggagc

SEQ ID NO: 291050 - DNA, 25 bp, Homo sapien
ggtaggtgccattctgcacatggca

SEQ ID NO: 291051 - DNA, 25 bp, Homo sapien
cactcgctgaaggtaggtgccattc

SEQ ID NO: 291052 - DNA, 25 bp, Homo sapien
tggggacaaacctagagcttccagg

SEQ ID NO: 291053 - DNA, 25 bp, Homo sapien
ctgcctccaggtccctttggaggct

SEQ ID NO: 291054 - DNA, 25 bp, Homo sapien
acccatggggacaaacctagagctt

SEQ ID NO: 291055 - DNA, 25 bp, Homo sapien
cacagggattggagattggatacca

SEQ ID NO: 291056 - DNA, 25 bp, Homo sapien
gggcggtcactatcttgtacatcac

SEQ ID NO: 291057 - DNA, 25 bp, Homo sapien
tcttgtacatcaccttgtatgtggg

SEQ ID NO: 291058 - DNA, 25 bp, Homo sapien
catcaccttgtatgtgggtctcacc

SEQ ID NO: 291059 - DNA, 25 bp, Homo sapien
ccttgtatgtgggtctcaccacagt

SEQ ID NO: 291060 - DNA, 25 bp, Homo sapien
tcctcgcagctcactcctgagtgcc

SEQ ID NO: 291061 - DNA, 25 bp, Homo sapien
ttcctcgcagctcactcctgagtgc

SEQ ID NO: 291062 - DNA, 25 bp, Homo sapien
cttcctcgcagctcactcctgagtg

SEQ ID NO: 291063 - DNA, 25 bp, Homo sapien
gggtatatcctgagactgatgttca

SEQ ID NO: 291064 - DNA, 25 bp, Homo sapien
gaggctacattttcgcacatttgtg

SEQ ID NO: 291065 - DNA, 25 bp, Homo sapien
tgatgttcacgttcatgtgctgctg

SEQ ID NO: 291066 - DNA, 25 bp, Homo sapien
gctcttggtgtccaaaaatctgctg

SEQ ID NO: 291067 - DNA, 25 bp, Homo sapien
tcaccaactccttgaaggccccaga

SEQ ID NO: 291068 - DNA, 25 bp, Homo sapien
ctcaccaactccttgaaggccccag

SEQ ID NO: 291069 - DNA, 25 bp, Homo sapien
accaactccttgaaggccccagaga

SEQ ID NO: 291070 - DNA, 25 bp, Homo sapien
ccaactccttgaaggccccagagac

SEQ ID NO: 291071 - DNA, 25 bp, Homo sapien
caggtgacaagagtgggcaccagca

SEQ ID NO: 291072 - DNA, 25 bp, Homo sapien
gcagcttgggagcccagcctgaaac

SEQ ID NO: 291073 - DNA, 25 bp, Homo sapien
tggtgatgcagctctatggctcgag

SEQ ID NO: 291074 - DNA, 25 bp, Homo sapien
ctgttggccctggtgatgcagctct

SEQ ID NO: 291075 - DNA, 25 bp, Homo sapien
cctcccagtgtcaaagccccttcga

SEQ ID NO: 291076 - DNA, 25 bp, Homo sapien
ctcccagtgtcaaagccccttcgaa

SEQ ID NO: 291077 - DNA, 25 bp, Homo sapien
acctcccagtgtcaaagccccttcg

SEQ ID NO: 291078 - DNA, 25 bp, Homo sapien
tcccagtgtcaaagccccttcgaag

SEQ ID NO: 291079 - DNA, 25 bp, Homo sapien
tcatgggcctcatgtataaaacttc

SEQ ID NO: 291080 - DNA, 25 bp, Homo sapien
cacccagtaggacctcatgggcctc

SEQ ID NO: 291081 - DNA, 25 bp, Homo sapien
ccagtaggacctcatgggcctcatg

SEQ ID NO: 291082 - DNA, 25 bp, Homo sapien
catgggcctcatgtataaaacttct

SEQ ID NO: 291083 - DNA, 25 bp, Homo sapien
tcatgtgaaggaccttgtatagcct

SEQ ID NO: 291084 - DNA, 25 bp, Homo sapien
tgtgaaggaccttgtatagcctggc

SEQ ID NO: 291085 - DNA, 25 bp, Homo sapien
catgtgaaggaccttgtatagcctg

SEQ ID NO: 291086 - DNA, 25 bp, Homo sapien
tgaaggaccttgtatagcctggctc

SEQ ID NO: 291087 - DNA, 25 bp, Homo sapien
ggaggaaggtgggttgccagcccag

SEQ ID NO: 291088 - DNA, 25 bp, Homo sapien
aggtgggttgccagcccaggactgg

SEQ ID NO: 291089 - DNA, 25 bp, Homo sapien
ggatggaggaaggtgggttgccagc

SEQ ID NO: 291090 - DNA, 25 bp, Homo sapien
cagcccaggactggggccggcactg

SEQ ID NO: 291091 - DNA, 25 bp, Homo sapien
cccaggcacagggggctaatctcac

SEQ ID NO: 291092 - DNA, 25 bp, Homo sapien
cctcaagggcctgtgacttgcccag

SEQ ID NO: 291093 - DNA, 25 bp, Homo sapien
cctcctcaagggcctgtgacttgcc

SEQ ID NO: 291094 - DNA, 25 bp, Homo sapien
ttgcccaggcacagggggctaatct

SEQ ID NO: 291095 - DNA, 25 bp, Homo sapien
tgggctgagctagagcaaggctggc

SEQ ID NO: 291096 - DNA, 25 bp, Homo sapien
actgccctcagcgtaggacacagag

SEQ ID NO: 291097 - DNA, 25 bp, Homo sapien
gctgagctagagcaaggctggccac

SEQ ID NO: 291098 - DNA, 25 bp, Homo sapien
caatgtatctgggtcaaacagcatg

SEQ ID NO: 291099 - DNA, 25 bp, Homo sapien
ggtactgcccgaccacatgggctcc

SEQ ID NO: 291100 - DNA, 25 bp, Homo sapien
actgcccgaccacatgggctccaag

SEQ ID NO: 291101 - DNA, 25 bp, Homo sapien
ctgcccgaccacatgggctccaagg

SEQ ID NO: 291102 - DNA, 25 bp, Homo sapien
gtactgcccgaccacatgggctcca

SEQ ID NO: 291103 - DNA, 25 bp, Homo sapien
tgggccgaagcgccatccgccgcat

SEQ ID NO: 291104 - DNA, 25 bp, Homo sapien
tgagaaggctgtgggccgaagcgcc

SEQ ID NO: 291105 - DNA, 25 bp, Homo sapien
tccagcaccttcagccgctctgtca

SEQ ID NO: 291106 - DNA, 25 bp, Homo sapien
agccgctctgtcagctctgacactt

SEQ ID NO: 291107 - DNA, 25 bp, Homo sapien
agctctgacactttgctgcagttga

SEQ ID NO: 291108 - DNA, 25 bp, Homo sapien
gacactttgctgcagttgagacaac

SEQ ID NO: 291109 - DNA, 25 bp, Homo sapien
ctgctctatgacagtcagcatggtc

SEQ ID NO: 291110 - DNA, 25 bp, Homo sapien
gtgttggaggtactggctgctctat

SEQ ID NO: 291111 - DNA, 25 bp, Homo sapien
gctctatgacagtcagcatggtcat

SEQ ID NO: 291112 - DNA, 25 bp, Homo sapien
tggtgttggaggtactggctgctct

SEQ ID NO: 291113 - DNA, 25 bp, Homo sapien
ctggaggcctccatctccggggctg

SEQ ID NO: 291114 - DNA, 25 bp, Homo sapien
accccagagcggggcagggtcctca

SEQ ID NO: 291115 - DNA, 25 bp, Homo sapien
cctggaggcctccatctccggggct

SEQ ID NO: 291116 - DNA, 25 bp, Homo sapien
cctgggcaggagggggaccccagag

SEQ ID NO: 291117 - DNA, 25 bp, Homo sapien
catctaccatttcggggaagcagcg

SEQ ID NO: 291118 - DNA, 25 bp, Homo sapien
caaccagcatctaccatttcgggga

SEQ ID NO: 291119 - DNA, 25 bp, Homo sapien
gtaaagcatatcagactggcagctc

SEQ ID NO: 291120 - DNA, 25 bp, Homo sapien
agcgggaccctcacactctctatgg

SEQ ID NO: 291121 - DNA, 25 bp, Homo sapien
tcatccccattgggccccgactgcc

SEQ ID NO: 291122 - DNA, 25 bp, Homo sapien
ccattgggccccgactgccggcatc

SEQ ID NO: 291123 - DNA, 25 bp, Homo sapien
ttgggccccgactgccggcatctcc

SEQ ID NO: 291124 - DNA, 25 bp, Homo sapien
atccccattgggccccgactgccgg

SEQ ID NO: 291125 - DNA, 25 bp, Homo sapien
caagtagatgaaagggcccaggtca

SEQ ID NO: 291126 - DNA, 25 bp, Homo sapien
ctcatagaaaccctggtcacatggg

SEQ ID NO: 291127 - DNA, 25 bp, Homo sapien
tcagtgaacataagagaggacttca

SEQ ID NO: 291128 - DNA, 25 bp, Homo sapien
cagagcctgataagtgtaggtgccc

SEQ ID NO: 291129 - DNA, 25 bp, Homo sapien
ctgcaatggaatcacacggatttgt

SEQ ID NO: 291130 - DNA, 25 bp, Homo sapien
ccagggtggccttgagcgacaggac

SEQ ID NO: 291131 - DNA, 25 bp, Homo sapien
gccttgagcgacaggacaaggcagc

SEQ ID NO: 291132 - DNA, 25 bp, Homo sapien
atcacacggatttgtgggtatacag

SEQ ID NO: 291133 - DNA, 25 bp, Homo sapien
atgctgggagatccgggcatggggt

SEQ ID NO: 291134 - DNA, 25 bp, Homo sapien
tgggagatccgggcatggggtggcc

SEQ ID NO: 291135 - DNA, 25 bp, Homo sapien
tgctgggagatccgggcatggggtg

SEQ ID NO: 291136 - DNA, 25 bp, Homo sapien
catgctgggagatccgggcatgggg

SEQ ID NO: 291137 - DNA, 25 bp, Homo sapien
agaagaggctgaaacctggcgctcc

SEQ ID NO: 291138 - DNA, 25 bp, Homo sapien
tgcccggtggctctaagcacaggtt

SEQ ID NO: 291139 - DNA, 25 bp, Homo sapien
tgtactgtcacctgtcaaatgggaa

SEQ ID NO: 291140 - DNA, 25 bp, Homo sapien
cacatgtggcctatcgtgagcaggg

SEQ ID NO: 291141 - DNA, 25 bp, Homo sapien
agtgaaggtgttggacagcaatggg

SEQ ID NO: 291142 - DNA, 25 bp, Homo sapien
cagtgaaggtgttggacagcaatgg

SEQ ID NO: 291143 - DNA, 25 bp, Homo sapien
tcagtgaaggtgttggacagcaatg

SEQ ID NO: 291144 - DNA, 25 bp, Homo sapien
ggggccagtggttgttggtctcagt

SEQ ID NO: 291145 - DNA, 25 bp, Homo sapien
actcccagggacacctgtggggcca

SEQ ID NO: 291146 - DNA, 25 bp, Homo sapien
tatgtgaccaggactcccagggaca

SEQ ID NO: 291147 - DNA, 25 bp, Homo sapien
caggactcccagggacacctgtggg

SEQ ID NO: 291148 - DNA, 25 bp, Homo sapien
accaggactcccagggacacctgtg

SEQ ID NO: 291149 - DNA, 25 bp, Homo sapien
cagacacatgggtgagagtacaagg

SEQ ID NO: 291150 - DNA, 25 bp, Homo sapien
taagatttatggaaggtagtttgca

SEQ ID NO: 291151 - DNA, 25 bp, Homo sapien
gatggacagatgtatggatgtatgc

SEQ ID NO: 291152 - DNA, 25 bp, Homo sapien
atagatggatacaagggtggatgat

SEQ ID NO: 291153 - DNA, 25 bp, Homo sapien
ctgggtggccagagattcctttggg

SEQ ID NO: 291154 - DNA, 25 bp, Homo sapien
gagattcctttgggtccagtggggc

SEQ ID NO: 291155 - DNA, 25 bp, Homo sapien
ggtggccagagattcctttgggtcc

SEQ ID NO: 291156 - DNA, 25 bp, Homo sapien
cagagattcctttgggtccagtggg

SEQ ID NO: 291157 - DNA, 25 bp, Homo sapien
tcaggactccccagaattcccccac

SEQ ID NO: 291158 - DNA, 25 bp, Homo sapien
cacctggggccacctgggtactcac

SEQ ID NO: 291159 - DNA, 25 bp, Homo sapien
ccacctggggccacctgggtactca

SEQ ID NO: 291160 - DNA, 25 bp, Homo sapien
ctggggccctcaggactccccagaa

SEQ ID NO: 291161 - DNA, 25 bp, Homo sapien
gaggagacgaatggcgtcagctgtt

SEQ ID NO: 291162 - DNA, 25 bp, Homo sapien
tgtgtaagagggaggagacgaatgg

SEQ ID NO: 291163 - DNA, 25 bp, Homo sapien
taagagggaggagacgaatggcgtc

SEQ ID NO: 291164 - DNA, 25 bp, Homo sapien
gacgaatggcgtcagctgttgagga

SEQ ID NO: 291165 - DNA, 25 bp, Homo sapien
ccttgggggccaggctccccacgca

SEQ ID NO: 291166 - DNA, 25 bp, Homo sapien
ccgctgcccagcagagccttggggg

SEQ ID NO: 291167 - DNA, 25 bp, Homo sapien
ttgggggccaggctccccacgcagt

SEQ ID NO: 291168 - DNA, 25 bp, Homo sapien
agccttgggggccaggctccccacg

SEQ ID NO: 291169 - DNA, 25 bp, Homo sapien
cgtgcccggtccacactttcttaca

SEQ ID NO: 291170 - DNA, 25 bp, Homo sapien
tgcccggtccacactttcttacatt

SEQ ID NO: 291171 - DNA, 25 bp, Homo sapien
ggtccacactttcttacatttaata

SEQ ID NO: 291172 - DNA, 25 bp, Homo sapien
ttttatataaagacagagttttgtc

SEQ ID NO: 291173 - DNA, 25 bp, Homo sapien
gctcttctcaccagggtctccctta

SEQ ID NO: 291174 - DNA, 25 bp, Homo sapien
ttctcaccagggtctcccttagggc

SEQ ID NO: 291175 - DNA, 25 bp, Homo sapien
tcttctcaccagggtctcccttagg

SEQ ID NO: 291176 - DNA, 25 bp, Homo sapien
tggctcttctcaccagggtctccct

SEQ ID NO: 291177 - DNA, 25 bp, Homo sapien
tctatcccattctcctgtgtagata

SEQ ID NO: 291178 - DNA, 25 bp, Homo sapien
atcatttctaggcccctttcctagg

SEQ ID NO: 291179 - DNA, 25 bp, Homo sapien
ctttcctaggtcctctatcccattc

SEQ ID NO: 291180 - DNA, 25 bp, Homo sapien
ctcatcatttctaggcccctttcct

SEQ ID NO: 291181 - DNA, 25 bp, Homo sapien
gccttgactttcaggactcaaatga

SEQ ID NO: 291182 - DNA, 25 bp, Homo sapien
ttgactttcaggactcaaatgatcc

SEQ ID NO: 291183 - DNA, 25 bp, Homo sapien
ccttgactttcaggactcaaatgat

SEQ ID NO: 291184 - DNA, 25 bp, Homo sapien
cttgactttcaggactcaaatgatc

SEQ ID NO: 291185 - DNA, 25 bp, Homo sapien
gtcctctaatgtctgtcgcccagca

SEQ ID NO: 291186 - DNA, 25 bp, Homo sapien
cagaacggcagtcccagaagctgct

SEQ ID NO: 291187 - DNA, 25 bp, Homo sapien
tgggagccctcctgtcctctaatgt

SEQ ID NO: 291188 - DNA, 25 bp, Homo sapien
agggggagccaatcttcaggggcag

SEQ ID NO: 291189 - DNA, 25 bp, Homo sapien
tgctctctgacaaggccgcaaatcc

SEQ ID NO: 291190 - DNA, 25 bp, Homo sapien
tcccagaaggtcccgttggatccca

SEQ ID NO: 291191 - DNA, 25 bp, Homo sapien
agaaggtcccgttggatcccagctg

SEQ ID NO: 291192 - DNA, 25 bp, Homo sapien
ctgctctctgacaaggccgcaaatc

SEQ ID NO: 291193 - DNA, 25 bp, Homo sapien
acggaaggaagcaacccctgcagga

SEQ ID NO: 291194 - DNA, 25 bp, Homo sapien
ggacagccagaacaagaccaggtga

SEQ ID NO: 291195 - DNA, 25 bp, Homo sapien
acaggagggggacaacaaggcagac

SEQ ID NO: 291196 - DNA, 25 bp, Homo sapien
tccatggacagccagaacaagacca

SEQ ID NO: 291197 - DNA, 25 bp, Homo sapien
tggcccatgccccacccgggacatg

SEQ ID NO: 291198 - DNA, 25 bp, Homo sapien
ggaccctgcaaagcccgtcggtggc

SEQ ID NO: 291199 - DNA, 25 bp, Homo sapien
tgcaaagcccgtcggtggcccatgc

SEQ ID NO: 291200 - DNA, 25 bp, Homo sapien
gaaagagacagatgcagccgtgaag

SEQ ID NO: 291201 - DNA, 25 bp, Homo sapien
aaagcctcgcgtagctggtgcaacc

SEQ ID NO: 291202 - DNA, 25 bp, Homo sapien
gctaaaatcttcaaagcctcgcgta

SEQ ID NO: 291203 - DNA, 25 bp, Homo sapien
tagagcccaatcattgtttccaaga

SEQ ID NO: 291204 - DNA, 25 bp, Homo sapien
catagagcccaatcattgtttccaa

SEQ ID NO: 291205 - DNA, 25 bp, Homo sapien
ctacccataatgcttagaggcccag

SEQ ID NO: 291206 - DNA, 25 bp, Homo sapien
tggttgtggcctctcaggtccatgc

SEQ ID NO: 291207 - DNA, 25 bp, Homo sapien
cactgctggagtggagtttggttcc

SEQ ID NO: 291208 - DNA, 25 bp, Homo sapien
tgagctgtgattggattccccatgg

SEQ ID NO: 291209 - DNA, 25 bp, Homo sapien
cagacggtgcgagtctggcctccga

SEQ ID NO: 291210 - DNA, 25 bp, Homo sapien
agcagacggtgcgagtctggcctcc

SEQ ID NO: 291211 - DNA, 25 bp, Homo sapien
aagagcagacggtgcgagtctggcc

SEQ ID NO: 291212 - DNA, 25 bp, Homo sapien
tggagaagagcagacggtgcgagtc

SEQ ID NO: 291213 - DNA, 25 bp, Homo sapien
ctggccagatgatggcttccaggag

SEQ ID NO: 291214 - DNA, 25 bp, Homo sapien
atggcttccaggagggtgacccgtc

SEQ ID NO: 291215 - DNA, 25 bp, Homo sapien
ggtgacccgtctggccaggagctcc

SEQ ID NO: 291216 - DNA, 25 bp, Homo sapien
gctgagcctgctgctgcaggaagct

SEQ ID NO: 291217 - DNA, 25 bp, Homo sapien
ggaaggcgccttctgcatgcccagg

SEQ ID NO: 291218 - DNA, 25 bp, Homo sapien
agagcaggtgcgcattcactcaagt

SEQ ID NO: 291219 - DNA, 25 bp, Homo sapien
tgaagaatgagtgtccgctggcctg

SEQ ID NO: 291220 - DNA, 25 bp, Homo sapien
ctgggccaagcatcggaaggcgcct

SEQ ID NO: 291221 - DNA, 25 bp, Homo sapien
ggtagttggttgcatgtccgcccct

SEQ ID NO: 291222 - DNA, 25 bp, Homo sapien
agcctctctcgtcccggctcctggg

SEQ ID NO: 291223 - DNA, 25 bp, Homo sapien
ctcctgggggccacgatccggtagt

SEQ ID NO: 291224 - DNA, 25 bp, Homo sapien
ccctcttgccccgaaggaggctggg

SEQ ID NO: 291225 - DNA, 25 bp, Homo sapien
aataaatatggacgggcggtccctg

SEQ ID NO: 291226 - DNA, 25 bp, Homo sapien
tcagacatgtgcatggtgccaggac

SEQ ID NO: 291227 - DNA, 25 bp, Homo sapien
aagcatttgcaggagtaggcggccc

SEQ ID NO: 291228 - DNA, 25 bp, Homo sapien
cccaacctgagatgcgggagggcct

SEQ ID NO: 291229 - DNA, 25 bp, Homo sapien
tggctgagtagcttcaggcagatcc

SEQ ID NO: 291230 - DNA, 25 bp, Homo sapien
tgctggtccacagtgaggagacggg

SEQ ID NO: 291231 - DNA, 25 bp, Homo sapien
ctgctgaccagggtgacgctattcc

SEQ ID NO: 291232 - DNA, 25 bp, Homo sapien
ggtgacgctattccatgctggtcca

SEQ ID NO: 291233 - DNA, 25 bp, Homo sapien
agccgagatttcaccactgcatatc

SEQ ID NO: 291234 - DNA, 25 bp, Homo sapien
ccgagatttcaccactgcatatcag

SEQ ID NO: 291235 - DNA, 25 bp, Homo sapien
gagccgagatttcaccactgcatat

SEQ ID NO: 291236 - DNA, 25 bp, Homo sapien
gccgagatttcaccactgcatatca

SEQ ID NO: 291237 - DNA, 25 bp, Homo sapien
agagtgccaagtcgattcaatgagg

SEQ ID NO: 291238 - DNA, 25 bp, Homo sapien
tgaggtgggccgatttcttgaggcc

SEQ ID NO: 291239 - DNA, 25 bp, Homo sapien
gtgccaagtcgattcaatgaggaaa

SEQ ID NO: 291240 - DNA, 25 bp, Homo sapien
gacaagagtgccaagtcgattcaat

SEQ ID NO: 291241 - DNA, 25 bp, Homo sapien
cgacagggcaagaccccggtctcaa

SEQ ID NO: 291242 - DNA, 25 bp, Homo sapien
gcgacagggcaagaccccggtctca

SEQ ID NO: 291243 - DNA, 25 bp, Homo sapien
tgtctgggacatagtgagtgctctg

SEQ ID NO: 291244 - DNA, 25 bp, Homo sapien
ggccctggtgtagcgtaaccttcaa

SEQ ID NO: 291245 - DNA, 25 bp, Homo sapien
tgtttaataccacagaggcgtagcc

SEQ ID NO: 291246 - DNA, 25 bp, Homo sapien
cagtgtttggaagtccttggtccct

SEQ ID NO: 291247 - DNA, 25 bp, Homo sapien
gcaaatctcgcaaccccgggcgcga

SEQ ID NO: 291248 - DNA, 25 bp, Homo sapien
ggcgcaaatctcgcaaccccgggcg

SEQ ID NO: 291249 - DNA, 25 bp, Homo sapien
accccgggcgcgaccatcgggccag

SEQ ID NO: 291250 - DNA, 25 bp, Homo sapien
cgaccatcgggccaggccacggggg

SEQ ID NO: 291251 - DNA, 25 bp, Homo sapien
acaaatccacggtatctttatttgc

SEQ ID NO: 291252 - DNA, 25 bp, Homo sapien
ggcccacaaatccacggtatcttta

SEQ ID NO: 291253 - DNA, 25 bp, Homo sapien
ccctcggcccacaaatccacggtat

SEQ ID NO: 291254 - DNA, 25 bp, Homo sapien
aaatccacggtatctttatttgctt

SEQ ID NO: 291255 - DNA, 25 bp, Homo sapien
cccaggcgagcagaagttcggcttg

SEQ ID NO: 291256 - DNA, 25 bp, Homo sapien
tcttaaggatgacggggctcccgct

SEQ ID NO: 291257 - DNA, 25 bp, Homo sapien
gacgccccagccgactgggtcttaa

SEQ ID NO: 291258 - DNA, 25 bp, Homo sapien
tgtctaaagcccaggcgagcagaag

SEQ ID NO: 291259 - DNA, 25 bp, Homo sapien
gcggcctgagagagctttgctgaat

SEQ ID NO: 291260 - DNA, 25 bp, Homo sapien
atccctcggcggcctgagagagctt

SEQ ID NO: 291261 - DNA, 25 bp, Homo sapien
cctgagagagctttgctgaatccat

SEQ ID NO: 291262 - DNA, 25 bp, Homo sapien
aatccctcggcggcctgagagagct

SEQ ID NO: 291263 - DNA, 25 bp, Homo sapien
tgcgctgcagcttggctataggtac

SEQ ID NO: 291264 - DNA, 25 bp, Homo sapien
gctgcagcttggctataggtactgt

SEQ ID NO: 291265 - DNA, 25 bp, Homo sapien
tgctgcgctgcagcttggctatagg

SEQ ID NO: 291266 - DNA, 25 bp, Homo sapien
gcagcttggctataggtactgtaat

SEQ ID NO: 291267 - DNA, 25 bp, Homo sapien
tgggtggtctgtgcatatccttgag

SEQ ID NO: 291268 - DNA, 25 bp, Homo sapien
tggaacagggcacctaacttgagaa

SEQ ID NO: 291269 - DNA, 25 bp, Homo sapien
tctgcagaatggtcatatcatcctc

SEQ ID NO: 291270 - DNA, 25 bp, Homo sapien
gagtccttcgcactcccactgtgaa

SEQ ID NO: 291271 - DNA, 25 bp, Homo sapien
tatgatggcacaatggagtccttcg

SEQ ID NO: 291272 - DNA, 25 bp, Homo sapien
agaagttgcataggcggtctgccca

SEQ ID NO: 291273 - DNA, 25 bp, Homo sapien
aagaagttgcataggcggtctgccc

SEQ ID NO: 291274 - DNA, 25 bp, Homo sapien
taagaagttgcataggcggtctgcc

SEQ ID NO: 291275 - DNA, 25 bp, Homo sapien
gacttcggcgtggagcatgaccaaa

SEQ ID NO: 291276 - DNA, 25 bp, Homo sapien
tccgcaagagtagcaacaaactggt

SEQ ID NO: 291277 - DNA, 25 bp, Homo sapien
aaagtgtcctcatgtactggccaga

SEQ ID NO: 291278 - DNA, 25 bp, Homo sapien
caaaactttggtctaggtgctggca

SEQ ID NO: 291279 - DNA, 25 bp, Homo sapien
ggtggtatcataagcaccagtgcca

SEQ ID NO: 291280 - DNA, 25 bp, Homo sapien
agtggtggtatcataagcaccagtg

SEQ ID NO: 291281 - DNA, 25 bp, Homo sapien
tgggtggtggtgactgtagcagtgg

SEQ ID NO: 291282 - DNA, 25 bp, Homo sapien
gtgactgtagcagtggtggtatcat

SEQ ID NO: 291283 - DNA, 25 bp, Homo sapien
tgggagggactgctggggcatggga

SEQ ID NO: 291284 - DNA, 25 bp, Homo sapien
gaccccacctctacagaaatagaaa

SEQ ID NO: 291285 - DNA, 25 bp, Homo sapien
gcctggtaatatagggagaccccac

SEQ ID NO: 291286 - DNA, 25 bp, Homo sapien
gaggtgggagggactgctggggcat

SEQ ID NO: 291287 - DNA, 25 bp, Homo sapien
ctctgtccatatcctaggctgggct

SEQ ID NO: 291288 - DNA, 25 bp, Homo sapien
gggctggttgtaaccccctgtgcta

SEQ ID NO: 291289 - DNA, 25 bp, Homo sapien
tactctgtccatatcctaggctggg

SEQ ID NO: 291290 - DNA, 25 bp, Homo sapien
gctgggctggttgtaaccccctgtg

SEQ ID NO: 291291 - DNA, 25 bp, Homo sapien
caggtgtggtagtgagcacttgtaa

SEQ ID NO: 291292 - DNA, 25 bp, Homo sapien
tgaggcatgagaatccctaggaggc

SEQ ID NO: 291293 - DNA, 25 bp, Homo sapien
aggcatgagaatccctaggaggcag

SEQ ID NO: 291294 - DNA, 25 bp, Homo sapien
gcatgagaatccctaggaggcagag

SEQ ID NO: 291295 - DNA, 25 bp, Homo sapien
aaacaagggccagaagcagtggctc

SEQ ID NO: 291296 - DNA, 25 bp, Homo sapien
aaaaacaagggccagaagcagtggc

SEQ ID NO: 291297 - DNA, 25 bp, Homo sapien
gacgtaggagaatcactttaacctg

SEQ ID NO: 291298 - DNA, 25 bp, Homo sapien
aaaaaaacaagggccagaagcagtg

SEQ ID NO: 291299 - DNA, 25 bp, Homo sapien
gtgttctgctgagagtaactgctct

SEQ ID NO: 291300 - DNA, 25 bp, Homo sapien
gctgctttgttgaccatagctactc

SEQ ID NO: 291301 - DNA, 25 bp, Homo sapien
atagctgctttgttgaccatagcta

SEQ ID NO: 291302 - DNA, 25 bp, Homo sapien
gaccatagctactctgctgtccata

SEQ ID NO: 291303 - DNA, 25 bp, Homo sapien
tttgttgaccatagctactctgctg

SEQ ID NO: 291304 - DNA, 25 bp, Homo sapien
aaaaagcactgaaatcttcactggg

SEQ ID NO: 291305 - DNA, 25 bp, Homo sapien
tcaaaatcatagtggcctgcaatag

SEQ ID NO: 291306 - DNA, 25 bp, Homo sapien
tgccatgccctaaagatgtgtcctg

SEQ ID NO: 291307 - DNA, 25 bp, Homo sapien
caagatgttagctggaatgccatgc

SEQ ID NO: 291308 - DNA, 25 bp, Homo sapien
aatcacaaaatcctcaattccaagg

SEQ ID NO: 291309 - DNA, 25 bp, Homo sapien
tcacaaaatcctcaattccaaggca

SEQ ID NO: 291310 - DNA, 25 bp, Homo sapien
ggaatcacaaaatcctcaattccaa

SEQ ID NO: 291311 - DNA, 25 bp, Homo sapien
ctggaatcacaaaatcctcaattcc

SEQ ID NO: 291312 - DNA, 25 bp, Homo sapien
ctgtaagccatggaccagcatttac

SEQ ID NO: 291313 - DNA, 25 bp, Homo sapien
gccatggaccagcatttacaccact

SEQ ID NO: 291314 - DNA, 25 bp, Homo sapien
gcatttacaccactgcctgatgtac

SEQ ID NO: 291315 - DNA, 25 bp, Homo sapien
tggaccagcatttacaccactgcct

SEQ ID NO: 291316 - DNA, 25 bp, Homo sapien
taaacacccatgctactggggtggt

SEQ ID NO: 291317 - DNA, 25 bp, Homo sapien
gggccactcatgctccggttctctc

SEQ ID NO: 291318 - DNA, 25 bp, Homo sapien
tctgctcatgcctccacgatcaaat

SEQ ID NO: 291319 - DNA, 25 bp, Homo sapien
gcccataaacacccatgctactggg

SEQ ID NO: 291320 - DNA, 25 bp, Homo sapien
ccattccaccgcgtcctcctccccg

SEQ ID NO: 291321 - DNA, 25 bp, Homo sapien
tccaccgcgtcctcctccccgccca

SEQ ID NO: 291322 - DNA, 25 bp, Homo sapien
cattccaccgcgtcctcctccccgc

SEQ ID NO: 291323 - DNA, 25 bp, Homo sapien
catctccagtaggaagtgagcccat

SEQ ID NO: 291324 - DNA, 25 bp, Homo sapien
tgagctcaacagattgtccatggaa

SEQ ID NO: 291325 - DNA, 25 bp, Homo sapien
tagaagggttgtgtgtgttccatcc

SEQ ID NO: 291326 - DNA, 25 bp, Homo sapien
caaactctatgtaatcaggtgcacc

SEQ ID NO: 291327 - DNA, 25 bp, Homo sapien
ccagtttatatagggacagaacaca

SEQ ID NO: 291328 - DNA, 25 bp, Homo sapien
tatccccacaggatccgacagactg

SEQ ID NO: 291329 - DNA, 25 bp, Homo sapien
tttttccttgaatagtggcacaccg

SEQ ID NO: 291330 - DNA, 25 bp, Homo sapien
cattgagtgccttacctgtacaaga

SEQ ID NO: 291331 - DNA, 25 bp, Homo sapien
gcatataaatgcgacaaagcatgtt

SEQ ID NO: 291332 - DNA, 25 bp, Homo sapien
ctgtagcatataaatgcgacaaagc

SEQ ID NO: 291333 - DNA, 25 bp, Homo sapien
agtttccacgtttaacagccaatga

SEQ ID NO: 291334 - DNA, 25 bp, Homo sapien
aagtttccacgtttaacagccaatg

SEQ ID NO: 291335 - DNA, 25 bp, Homo sapien
acttttcattatgctgccggctgag

SEQ ID NO: 291336 - DNA, 25 bp, Homo sapien
gtgtatacaaggctctcactttgta

SEQ ID NO: 291337 - DNA, 25 bp, Homo sapien
tgctgccggctgagtactgagtacg

SEQ ID NO: 291338 - DNA, 25 bp, Homo sapien
gctgagtactgagtacgggtacttt

SEQ ID NO: 291339 - DNA, 25 bp, Homo sapien
ggttcattaccaaacaacaagtatg

SEQ ID NO: 291340 - DNA, 25 bp, Homo sapien
gttacacaattctagagtattatac

SEQ ID NO: 291341 - DNA, 25 bp, Homo sapien
tagagtattatacctcctctggttc

SEQ ID NO: 291342 - DNA, 25 bp, Homo sapien
tatacctcctctggttcattaccaa

SEQ ID NO: 291343 - DNA, 25 bp, Homo sapien
taaaagccagtaccgctctgagcct

SEQ ID NO: 291344 - DNA, 25 bp, Homo sapien
gcttgtctgattgtacacaccagtg

SEQ ID NO: 291345 - DNA, 25 bp, Homo sapien
tcagaggacgcatccagccaatctt

SEQ ID NO: 291346 - DNA, 25 bp, Homo sapien
cagggtttcctaacaagtcacagta

SEQ ID NO: 291347 - DNA, 25 bp, Homo sapien
ccaggcttattgaagccacctcgct

SEQ ID NO: 291348 - DNA, 25 bp, Homo sapien
caccaggcttattgaagccacctcg

SEQ ID NO: 291349 - DNA, 25 bp, Homo sapien
ttattgaagccacctcgctctccag

SEQ ID NO: 291350 - DNA, 25 bp, Homo sapien
aggcttattgaagccacctcgctct

SEQ ID NO: 291351 - DNA, 25 bp, Homo sapien
tctatggtaatactcaaaaacttac

SEQ ID NO: 291352 - DNA, 25 bp, Homo sapien
caatgccggcagtacccattagtct

SEQ ID NO: 291353 - DNA, 25 bp, Homo sapien
acactatctatggtaatactcaaaa

SEQ ID NO: 291354 - DNA, 25 bp, Homo sapien
agacaatgccggcagtacccattag

SEQ ID NO: 291355 - DNA, 25 bp, Homo sapien
gcagtgtctctttaacatttgtgaa

SEQ ID NO: 291356 - DNA, 25 bp, Homo sapien
aatgacccgcactgctaaaatggag

SEQ ID NO: 291357 - DNA, 25 bp, Homo sapien
aatacactctcaatgcttatgtgcc

SEQ ID NO: 291358 - DNA, 25 bp, Homo sapien
tattattagtgcacgtcttgcaagc

SEQ ID NO: 291359 - DNA, 25 bp, Homo sapien
ctagatcaagatctggtccttcatc

SEQ ID NO: 291360 - DNA, 25 bp, Homo sapien
agatctggtccttcatccatgggtc

SEQ ID NO: 291361 - DNA, 25 bp, Homo sapien
atcaagatctggtccttcatccatg

SEQ ID NO: 291362 - DNA, 25 bp, Homo sapien
tagatcaagatctggtccttcatcc

SEQ ID NO: 291363 - DNA, 25 bp, Homo sapien
tgcactgttgtcagagtcttcatct

SEQ ID NO: 291364 - DNA, 25 bp, Homo sapien
attgcactgttgtcagagtcttcat

SEQ ID NO: 291365 - DNA, 25 bp, Homo sapien
ttaatccttgtacataaattgcact

SEQ ID NO: 291366 - DNA, 25 bp, Homo sapien
cttgtacataaattgcactgttgtc

SEQ ID NO: 291367 - DNA, 25 bp, Homo sapien
tgacttgaattcaggagctaccttg

SEQ ID NO: 291368 - DNA, 25 bp, Homo sapien
tgtggaagtgaacaggataggcccc

SEQ ID NO: 291369 - DNA, 25 bp, Homo sapien
tcctccagttagaacagatgactag

SEQ ID NO: 291370 - DNA, 25 bp, Homo sapien
tatgcccagacaggtatccactgag

SEQ ID NO: 291371 - DNA, 25 bp, Homo sapien
gggtgggtcttcataggacactgtg

SEQ ID NO: 291372 - DNA, 25 bp, Homo sapien
gtgggtgggtcttcataggacactg

SEQ ID NO: 291373 - DNA, 25 bp, Homo sapien
tgggtgggtcttcataggacactgt

SEQ ID NO: 291374 - DNA, 25 bp, Homo sapien
tgccatattctatagccagggagat

SEQ ID NO: 291375 - DNA, 25 bp, Homo sapien
taagaatgccagtgagtacatctca

SEQ ID NO: 291376 - DNA, 25 bp, Homo sapien
gctcctatggttcacaagtttctcc

SEQ ID NO: 291377 - DNA, 25 bp, Homo sapien
tatagccagggagattaagaatgcc

SEQ ID NO: 291378 - DNA, 25 bp, Homo sapien
gctactactactgcagggagaccgg

SEQ ID NO: 291379 - DNA, 25 bp, Homo sapien
tctatatgcaaatgtacactggcta

SEQ ID NO: 291380 - DNA, 25 bp, Homo sapien
ccaaatccagggtcaatggctgggt

SEQ ID NO: 291381 - DNA, 25 bp, Homo sapien
gaaatcccaccattaatgtcaaggc

SEQ ID NO: 291382 - DNA, 25 bp, Homo sapien
ccccgcatactgttcattggaggct

SEQ ID NO: 291383 - DNA, 25 bp, Homo sapien
gaccaccccgcatactgttcattgg

SEQ ID NO: 291384 - DNA, 25 bp, Homo sapien
cagaccaccccgcatactgttcatt

SEQ ID NO: 291385 - DNA, 25 bp, Homo sapien
ccgcatactgttcattggaggcttc

SEQ ID NO: 291386 - DNA, 25 bp, Homo sapien
caacaagaacaacaagaaacagcaa

SEQ ID NO: 291387 - DNA, 25 bp, Homo sapien
ctacaacaagaacaacaagaaacag

SEQ ID NO: 291388 - DNA, 25 bp, Homo sapien
caagaacaacaagaaacagcaaatc

SEQ ID NO: 291389 - DNA, 25 bp, Homo sapien
tacaacaagaacaacaagaaacagc

SEQ ID NO: 291390 - DNA, 25 bp, Homo sapien
gacactgccagtctccagctcggtg

SEQ ID NO: 291391 - DNA, 25 bp, Homo sapien
tcttggagggaagcctcctctatct

SEQ ID NO: 291392 - DNA, 25 bp, Homo sapien
acggcctcccatgcgacccatgggt

SEQ ID NO: 291393 - DNA, 25 bp, Homo sapien
cagctcggtgctggacgtttcctcc

SEQ ID NO: 291394 - DNA, 25 bp, Homo sapien
gtatcaatttgccaagacaagtaca

SEQ ID NO: 291395 - DNA, 25 bp, Homo sapien
tcgtagggtatcaatttgccaagac

SEQ ID NO: 291396 - DNA, 25 bp, Homo sapien
cgtagggtatcaatttgccaagaca

SEQ ID NO: 291397 - DNA, 25 bp, Homo sapien
gtagggtatcaatttgccaagacaa

SEQ ID NO: 291398 - DNA, 25 bp, Homo sapien
tccagtgaatggctgactagtgtcc

SEQ ID NO: 291399 - DNA, 25 bp, Homo sapien
agaaggctctgaagcgtccagtgaa

SEQ ID NO: 291400 - DNA, 25 bp, Homo sapien
tatcaagaggatctatgtacaccca

SEQ ID NO: 291401 - DNA, 25 bp, Homo sapien
ctagtgtccctaaccagccatcagg

SEQ ID NO: 291402 - DNA, 25 bp, Homo sapien
catacaattacatcacagcagaaat

SEQ ID NO: 291403 - DNA, 25 bp, Homo sapien
atacaattacatcacagcagaaatc

SEQ ID NO: 291404 - DNA, 25 bp, Homo sapien
tgttctccaggcgaagttctggttt

SEQ ID NO: 291405 - DNA, 25 bp, Homo sapien
ttctccaggcgaagttctggtttcc

SEQ ID NO: 291406 - DNA, 25 bp, Homo sapien
gttctccaggcgaagttctggtttc

SEQ ID NO: 291407 - DNA, 25 bp, Homo sapien
ggcgggaggaagccttcaggctttg

SEQ ID NO: 291408 - DNA, 25 bp, Homo sapien
gaatagcagggcgaaagcagtcagt

SEQ ID NO: 291409 - DNA, 25 bp, Homo sapien
gaaaagaggtttagcaccaggaagc

SEQ ID NO: 291410 - DNA, 25 bp, Homo sapien
actcaatctcggcatcgggctgaca

SEQ ID NO: 291411 - DNA, 25 bp, Homo sapien
gggacactcatgaaacctgcaccta

SEQ ID NO: 291412 - DNA, 25 bp, Homo sapien
cggccaccacggaagccacctctgt

SEQ ID NO: 291413 - DNA, 25 bp, Homo sapien
ggccaccacggaagccacctctgtc

SEQ ID NO: 291414 - DNA, 25 bp, Homo sapien
tccatttttccaggtcctccacgtc

SEQ ID NO: 291415 - DNA, 25 bp, Homo sapien
cctcttcttcctcccatctgttcca

SEQ ID NO: 291416 - DNA, 25 bp, Homo sapien
catttttccaggtcctccacgtcct

SEQ ID NO: 291417 - DNA, 25 bp, Homo sapien
ttatccatttttccaggtcctccac

SEQ ID NO: 291418 - DNA, 25 bp, Homo sapien
gtagggccgatctctgcgctcctga

SEQ ID NO: 291419 - DNA, 25 bp, Homo sapien
ctagtagggccgatctctgcgctcc

SEQ ID NO: 291420 - DNA, 25 bp, Homo sapien
gggccgatctctgcgctcctgacgg

SEQ ID NO: 291421 - DNA, 25 bp, Homo sapien
atctctgcgctcctgacggtgctcg

SEQ ID NO: 291422 - DNA, 25 bp, Homo sapien
aataatcataatgttgtggccaaca

SEQ ID NO: 291423 - DNA, 25 bp, Homo sapien
ataaatctggtagtcaatgcagctc

SEQ ID NO: 291424 - DNA, 25 bp, Homo sapien
aaaaataaatctggtagtcaatgca

SEQ ID NO: 291425 - DNA, 25 bp, Homo sapien
gaataatcataatgttgtggccaac

SEQ ID NO: 291426 - DNA, 25 bp, Homo sapien
cttggttctccacaatgatactgag

SEQ ID NO: 291427 - DNA, 25 bp, Homo sapien
actgagcatgctcacaaggggttcc

SEQ ID NO: 291428 - DNA, 25 bp, Homo sapien
tcacaaccatgaacattgttacagt

SEQ ID NO: 291429 - DNA, 25 bp, Homo sapien
gctcacaaggggttcccattgttaa

SEQ ID NO: 291430 - DNA, 25 bp, Homo sapien
agcacggcctgttcccaagatgaag

SEQ ID NO: 291431 - DNA, 25 bp, Homo sapien
tcttcgagcgctctcgacgcagaga

SEQ ID NO: 291432 - DNA, 25 bp, Homo sapien
cctggaattcggatcctgcccggag

SEQ ID NO: 291433 - DNA, 25 bp, Homo sapien
tgcaaagtcacctcctcccgggtgg

SEQ ID NO: 291434 - DNA, 25 bp, Homo sapien
ggcagggagtgctgggggtctccgc

SEQ ID NO: 291435 - DNA, 25 bp, Homo sapien
gggagtgctgggggtctccgcgctc

SEQ ID NO: 291436 - DNA, 25 bp, Homo sapien
cagggagtgctgggggtctccgcgc

SEQ ID NO: 291437 - DNA, 25 bp, Homo sapien
gagtgctgggggtctccgcgctcac

SEQ ID NO: 291438 - DNA, 25 bp, Homo sapien
aagggctgtgccgtcattaacgaca

SEQ ID NO: 291439 - DNA, 25 bp, Homo sapien
gaagtgaagacaacggctaaggccc

SEQ ID NO: 291440 - DNA, 25 bp, Homo sapien
aatagtgtaacagcacgaccgcgct

SEQ ID NO: 291441 - DNA, 25 bp, Homo sapien
cagtggacacgaaaggaacccaggt

SEQ ID NO: 291442 - DNA, 25 bp, Homo sapien
gtgggcaggaacacagttcaggatc

SEQ ID NO: 291443 - DNA, 25 bp, Homo sapien
tgtgggcaggaacacagttcaggat

SEQ ID NO: 291444 - DNA, 25 bp, Homo sapien
ctgtgggcaggaacacagttcagga

SEQ ID NO: 291445 - DNA, 25 bp, Homo sapien
tgggcaggaacacagttcaggatcg

SEQ ID NO: 291446 - DNA, 25 bp, Homo sapien
cacgtaggcctcactggagcgaaat

SEQ ID NO: 291447 - DNA, 25 bp, Homo sapien
ggcactacactgtgcgcctggaagg

SEQ ID NO: 291448 - DNA, 25 bp, Homo sapien
gagacccaggccgtacaaggcattg

SEQ ID NO: 291449 - DNA, 25 bp, Homo sapien
tcacggcgttggcatgttggcacag

SEQ ID NO: 291450 - DNA, 25 bp, Homo sapien
ctcctggggcttaatgtcagccatt

SEQ ID NO: 291451 - DNA, 25 bp, Homo sapien
ctttccgggtaagtggatggaggca

SEQ ID NO: 291452 - DNA, 25 bp, Homo sapien
ggcagtgttgccccggatggggtac

SEQ ID NO: 291453 - DNA, 25 bp, Homo sapien
agtcaggctttccgggtaagtggat

SEQ ID NO: 291454 - DNA, 25 bp, Homo sapien
ggtacttcccctctgagaccttgat

SEQ ID NO: 291455 - DNA, 25 bp, Homo sapien
tgatcatgggaaactggtcagggca

SEQ ID NO: 291456 - DNA, 25 bp, Homo sapien
ccgcacaaagatgagcaggctcgag

SEQ ID NO: 291457 - DNA, 25 bp, Homo sapien
caaagatgagcaggctcgagtcccc

SEQ ID NO: 291458 - DNA, 25 bp, Homo sapien
gaggagcagcggcacgggtcgtgct

SEQ ID NO: 291459 - DNA, 25 bp, Homo sapien
actcgcaccatcacgtggctcctca

SEQ ID NO: 291460 - DNA, 25 bp, Homo sapien
aggtaatgctccagcgtgtcccagc

SEQ ID NO: 291461 - DNA, 25 bp, Homo sapien
cacgggtcgtgcttgtccaggtaat

SEQ ID NO: 291462 - DNA, 25 bp, Homo sapien
cttcgtaagctaacgggagtcatct

SEQ ID NO: 291463 - DNA, 25 bp, Homo sapien
cctctgtggagaaaaggtgcagacc

SEQ ID NO: 291464 - DNA, 25 bp, Homo sapien
ggagtcatctcaggccgggagcccc

SEQ ID NO: 291465 - DNA, 25 bp, Homo sapien
cctcctttgtgcttcgtaagctaac

SEQ ID NO: 291466 - DNA, 25 bp, Homo sapien
aagccacggaagaagaagtttcctg

SEQ ID NO: 291467 - DNA, 25 bp, Homo sapien
acagcagggtatgtggctggtggac

SEQ ID NO: 291468 - DNA, 25 bp, Homo sapien
gaacttttcccagggtgtgagtcac

SEQ ID NO: 291469 - DNA, 25 bp, Homo sapien
gtgagtcactctggcgcacaggcaa

SEQ ID NO: 291470 - DNA, 25 bp, Homo sapien
tcactgtccccggagtagcggcggg

SEQ ID NO: 291471 - DNA, 25 bp, Homo sapien
caagggggccgctctgggcggagga

SEQ ID NO: 291472 - DNA, 25 bp, Homo sapien
tgtccccggagtagcggcgggagcg

SEQ ID NO: 291473 - DNA, 25 bp, Homo sapien
actgtccccggagtagcggcgggag

SEQ ID NO: 291474 - DNA, 25 bp, Homo sapien
gccggggtgcctgtggtcagccgcc

SEQ ID NO: 291475 - DNA, 25 bp, Homo sapien
tgcgcaggcaggaggccgtctcgga

SEQ ID NO: 291476 - DNA, 25 bp, Homo sapien
gcgcaggcaggaggccgtctcggag

SEQ ID NO: 291477 - DNA, 25 bp, Homo sapien
ccgccggctgggtcgctccctccgg

SEQ ID NO: 291478 - DNA, 25 bp, Homo sapien
gccggccgcgatccagccggtctcg

SEQ ID NO: 291479 - DNA, 25 bp, Homo sapien
gggccggccgcgatccagccggtct

SEQ ID NO: 291480 - DNA, 25 bp, Homo sapien
ggccgcgatccagccggtctcggga

SEQ ID NO: 291481 - DNA, 25 bp, Homo sapien
ccggccgcgatccagccggtctcgg

SEQ ID NO: 291482 - DNA, 25 bp, Homo sapien
tcgatccctgcgcacaagcagcaca

SEQ ID NO: 291483 - DNA, 25 bp, Homo sapien
tgagtgctgcccgtctcgatccctg

SEQ ID NO: 291484 - DNA, 25 bp, Homo sapien
acccatgagtgctgcccgtctcgat

SEQ ID NO: 291485 - DNA, 25 bp, Homo sapien
cttggcacccatgagtgctgcccgt

SEQ ID NO: 291486 - DNA, 25 bp, Homo sapien
gacccgggaaagccggggtgctgca

SEQ ID NO: 291487 - DNA, 25 bp, Homo sapien
cccgggaaagccggggtgctgcagg

SEQ ID NO: 291488 - DNA, 25 bp, Homo sapien
acccgggaaagccggggtgctgcag

SEQ ID NO: 291489 - DNA, 25 bp, Homo sapien
ccgggaaagccggggtgctgcaggg

SEQ ID NO: 291490 - DNA, 25 bp, Homo sapien
tggaggaacaataggcagagtcagg

SEQ ID NO: 291491 - DNA, 25 bp, Homo sapien
cagtgggggtcacgctagcaacagc

SEQ ID NO: 291492 - DNA, 25 bp, Homo sapien
ttccaggcgccggaacagctgctgc

SEQ ID NO: 291493 - DNA, 25 bp, Homo sapien
cggtgtggtgcccaactctggactg

SEQ ID NO: 291494 - DNA, 25 bp, Homo sapien
atacgtgagggtttacggtctggct

SEQ ID NO: 291495 - DNA, 25 bp, Homo sapien
agcccattggccgtccggccagagt

SEQ ID NO: 291496 - DNA, 25 bp, Homo sapien
gtcctcgagggttcagtgcaagcca

SEQ ID NO: 291497 - DNA, 25 bp, Homo sapien
tcagccctcggggtgactgagtgca

SEQ ID NO: 291498 - DNA, 25 bp, Homo sapien
tcgaaagggtctgaatggccccaag

SEQ ID NO: 291499 - DNA, 25 bp, Homo sapien
gataacgccttaagcctagaggtca

SEQ ID NO: 291500 - DNA, 25 bp, Homo sapien
tcccatgaggtctggtactcaagag

SEQ ID NO: 291501 - DNA, 25 bp, Homo sapien
aacagaggtcccattgtgccatgtg

SEQ ID NO: 291502 - DNA, 25 bp, Homo sapien
gggcgggcggttacctcatcgccgc

SEQ ID NO: 291503 - DNA, 25 bp, Homo sapien
acctgtctgcccactcggctgtctg

SEQ ID NO: 291504 - DNA, 25 bp, Homo sapien
tctctctcgagcttcggcacccgcc

SEQ ID NO: 291505 - DNA, 25 bp, Homo sapien
ggccctctccgggatctctgtcccc

SEQ ID NO: 291506 - DNA, 25 bp, Homo sapien
gagtaaaatctagcgtcttgcttgg

SEQ ID NO: 291507 - DNA, 25 bp, Homo sapien
tctgtggccactgtgtgacctggca

SEQ ID NO: 291508 - DNA, 25 bp, Homo sapien
cccttctgggagttgaggattggca

SEQ ID NO: 291509 - DNA, 25 bp, Homo sapien
tcttgcttgggatggtcagatccct

SEQ ID NO: 291510 - DNA, 25 bp, Homo sapien
tgtttgccccgttggaatggacgga

SEQ ID NO: 291511 - DNA, 25 bp, Homo sapien
ttcctgtttgccccgttggaatgga

SEQ ID NO: 291512 - DNA, 25 bp, Homo sapien
cctgtttgccccgttggaatggacg

SEQ ID NO: 291513 - DNA, 25 bp, Homo sapien
ctttcctgtttgccccgttggaatg

SEQ ID NO: 291514 - DNA, 25 bp, Homo sapien
agaaaaggccttcccctgacattgg

SEQ ID NO: 291515 - DNA, 25 bp, Homo sapien
aaggccttcccctgacattggctgg

SEQ ID NO: 291516 - DNA, 25 bp, Homo sapien
tgcccggagactagaaaaggccttc

SEQ ID NO: 291517 - DNA, 25 bp, Homo sapien
aaaggccttcccctgacattggctg

SEQ ID NO: 291518 - DNA, 25 bp, Homo sapien
actgagtgccaagagtgtgcagtgc

SEQ ID NO: 291519 - DNA, 25 bp, Homo sapien
caagagtgtgcagtgccttgtgctg

SEQ ID NO: 291520 - DNA, 25 bp, Homo sapien
aacttcacacttctcatctgattga

SEQ ID NO: 291521 - DNA, 25 bp, Homo sapien
catgggctgctctgacatgaatcat

SEQ ID NO: 291522 - DNA, 25 bp, Homo sapien
cttctgcagctctgtcactctgagc

SEQ ID NO: 291523 - DNA, 25 bp, Homo sapien
ctgcagctctgtcactctgagctga

SEQ ID NO: 291524 - DNA, 25 bp, Homo sapien
cagctctgtcactctgagctgatac

SEQ ID NO: 291525 - DNA, 25 bp, Homo sapien
gcagctctgtcactctgagctgata

SEQ ID NO: 291526 - DNA, 25 bp, Homo sapien
attttggtgccaagccgaaccgagc

SEQ ID NO: 291527 - DNA, 25 bp, Homo sapien
gacgcaccgggagagcgagaggtgg

SEQ ID NO: 291528 - DNA, 25 bp, Homo sapien
gcggacattttggtgccaagccgaa

SEQ ID NO: 291529 - DNA, 25 bp, Homo sapien
gaggccgcggacattttggtgccaa

SEQ ID NO: 291530 - DNA, 25 bp, Homo sapien
cgtccaccggaagtacccgcgcgcg

SEQ ID NO: 291531 - DNA, 25 bp, Homo sapien
accggaagtacccgcgcgcgggcag

SEQ ID NO: 291532 - DNA, 25 bp, Homo sapien
tcaggccttgcgtccaccggaagta

SEQ ID NO: 291533 - DNA, 25 bp, Homo sapien
ttgcgtccaccggaagtacccgcgc

SEQ ID NO: 291534 - DNA, 25 bp, Homo sapien
cgtggggaatttgccctgctcgatg

SEQ ID NO: 291535 - DNA, 25 bp, Homo sapien
cagcactgagagctctgacaggtgc

SEQ ID NO: 291536 - DNA, 25 bp, Homo sapien
cagcttgctgctttgcgtggggaat

SEQ ID NO: 291537 - DNA, 25 bp, Homo sapien
ggtagagcggatgagccacagcact

SEQ ID NO: 291538 - DNA, 25 bp, Homo sapien
tcaaatcctgctgccccaatatttc

SEQ ID NO: 291539 - DNA, 25 bp, Homo sapien
gaactgagagctcttctcaaaagct

SEQ ID NO: 291540 - DNA, 25 bp, Homo sapien
gccgtgtgcagacgcctgcacatct

SEQ ID NO: 291541 - DNA, 25 bp, Homo sapien
ccacaccgccgtgtgcagacgcctg

SEQ ID NO: 291542 - DNA, 25 bp, Homo sapien
atgtcatattctcctccacaccgcc

SEQ ID NO: 291543 - DNA, 25 bp, Homo sapien
ttctcctccacaccgccgtgtgcag

SEQ ID NO: 291544 - DNA, 25 bp, Homo sapien
tgaggtcttcaagatggacagatgg

SEQ ID NO: 291545 - DNA, 25 bp, Homo sapien
atgaggtcttcaagatggacagatg

SEQ ID NO: 291546 - DNA, 25 bp, Homo sapien
acagatgggtattcactgagatctt

SEQ ID NO: 291547 - DNA, 25 bp, Homo sapien
ccttaacccaatcagattttgattt

SEQ ID NO: 291548 - DNA, 25 bp, Homo sapien
cctcccctctcatttacatcctgct

SEQ ID NO: 291549 - DNA, 25 bp, Homo sapien
taacccaatcagattttgatttaat

SEQ ID NO: 291550 - DNA, 25 bp, Homo sapien
ctcctcccctctcatttacatcctg

SEQ ID NO: 291551 - DNA, 25 bp, Homo sapien
ggcatactctgtgcggttctaagaa

SEQ ID NO: 291552 - DNA, 25 bp, Homo sapien
cacaatggacactccacaggtcttc

SEQ ID NO: 291553 - DNA, 25 bp, Homo sapien
gacttgtttgaatctcggcatactc

SEQ ID NO: 291554 - DNA, 25 bp, Homo sapien
gatgagtcgattgttggctgtgtca

SEQ ID NO: 291555 - DNA, 25 bp, Homo sapien
caggctgagactcaggtcttgacca

SEQ ID NO: 291556 - DNA, 25 bp, Homo sapien
tagtgattaacttgtacttaattca

SEQ ID NO: 291557 - DNA, 25 bp, Homo sapien
tataatctatttcccgctcctaaaa

SEQ ID NO: 291558 - DNA, 25 bp, Homo sapien
gaaaactgatgaatctgcatgtatc

SEQ ID NO: 291559 - DNA, 25 bp, Homo sapien
tggaccttgagtacttcacacagtg

SEQ ID NO: 291560 - DNA, 25 bp, Homo sapien
ggcatgcattccattgaggaaattc

SEQ ID NO: 291561 - DNA, 25 bp, Homo sapien
tacatcagactcaaaggtaataggg

SEQ ID NO: 291562 - DNA, 25 bp, Homo sapien
gaccattaagcttcttggaccttga

SEQ ID NO: 291563 - DNA, 25 bp, Homo sapien
ttgtgacaagtgacaaccttttcat

SEQ ID NO: 291564 - DNA, 25 bp, Homo sapien
gaggtgaaagcctgttagttgtgac

SEQ ID NO: 291565 - DNA, 25 bp, Homo sapien
gagtacaaacactcaagcacatccc

SEQ ID NO: 291566 - DNA, 25 bp, Homo sapien
cagagatttgaagttctattgggaa

SEQ ID NO: 291567 - DNA, 25 bp, Homo sapien
atccacactccagggacattggttt

SEQ ID NO: 291568 - DNA, 25 bp, Homo sapien
agcagacgggacagctgcttgcttc

SEQ ID NO: 291569 - DNA, 25 bp, Homo sapien
agatagtctgagcagacgggacagc

SEQ ID NO: 291570 - DNA, 25 bp, Homo sapien
ctgagcagacgggacagctgcttgc

SEQ ID NO: 291571 - DNA, 25 bp, Homo sapien
gaacttccgcatccttgggttcatc

SEQ ID NO: 291572 - DNA, 25 bp, Homo sapien
aacttccgcatccttgggttcatct

SEQ ID NO: 291573 - DNA, 25 bp, Homo sapien
gtggcggccacaggtaaagcgaggg

SEQ ID NO: 291574 - DNA, 25 bp, Homo sapien
cacgtcaaatctctcggcaaggtct

SEQ ID NO: 291575 - DNA, 25 bp, Homo sapien
ggacacgtcaaatctctcggcaagg

SEQ ID NO: 291576 - DNA, 25 bp, Homo sapien
caaatctctcggcaaggtcttgccg

SEQ ID NO: 291577 - DNA, 25 bp, Homo sapien
cgctctgtggtcagatggatcctcc

SEQ ID NO: 291578 - DNA, 25 bp, Homo sapien
agtccagaatccacgctctgtggtc

SEQ ID NO: 291579 - DNA, 25 bp, Homo sapien
ccacgctctgtggtcagatggatcc

SEQ ID NO: 291580 - DNA, 25 bp, Homo sapien
atggatcctccctttgcggtgaaca

SEQ ID NO: 291581 - DNA, 25 bp, Homo sapien
aaaaaggaaacgttctgcatgccca

SEQ ID NO: 291582 - DNA, 25 bp, Homo sapien
ccactcgctgtaacttgcggtctac

SEQ ID NO: 291583 - DNA, 25 bp, Homo sapien
aaaaatccccactcgctgtaacttg

SEQ ID NO: 291584 - DNA, 25 bp, Homo sapien
gaaacgttctgcatgcccatatcca

SEQ ID NO: 291585 - DNA, 25 bp, Homo sapien
gacttggaggagcaaaaaacaagtg

SEQ ID NO: 291586 - DNA, 25 bp, Homo sapien
ggacagatactcaagacactcttat

SEQ ID NO: 291587 - DNA, 25 bp, Homo sapien
caggacagatactcaagacactctt

SEQ ID NO: 291588 - DNA, 25 bp, Homo sapien
agacactcttatcaccattaggtgg

SEQ ID NO: 291589 - DNA, 25 bp, Homo sapien
atacttaggactcaatttataaact

SEQ ID NO: 291590 - DNA, 25 bp, Homo sapien
tataacgcttttaccgagtagagcg

SEQ ID NO: 291591 - DNA, 25 bp, Homo sapien
ttgtataacgcttttaccgagtaga

SEQ ID NO: 291592 - DNA, 25 bp, Homo sapien
agtataatcatgaattgtcccatat

SEQ ID NO: 291593 - DNA, 25 bp, Homo sapien
ggctctactggaaggctcattgctt

SEQ ID NO: 291594 - DNA, 25 bp, Homo sapien
tggaaggctcattgctttggccagg

SEQ ID NO: 291595 - DNA, 25 bp, Homo sapien
tccagggatttcagcgggtcgtaag

SEQ ID NO: 291596 - DNA, 25 bp, Homo sapien
ccagggatttcagcgggtcgtaagc

SEQ ID NO: 291597 - DNA, 25 bp, Homo sapien
tgtcctggcaaagatatcgggccac

SEQ ID NO: 291598 - DNA, 25 bp, Homo sapien
tggcaaagatatcgggccaccagag

SEQ ID NO: 291599 - DNA, 25 bp, Homo sapien
tcctggcaaagatatcgggccacca

SEQ ID NO: 291600 - DNA, 25 bp, Homo sapien
catgtcctggcaaagatatcgggcc

SEQ ID NO: 291601 - DNA, 25 bp, Homo sapien
cgggtgacaataaatatgggtctct

SEQ ID NO: 291602 - DNA, 25 bp, Homo sapien
acacagcttgagcgggtgacaataa

SEQ ID NO: 291603 - DNA, 25 bp, Homo sapien
gagctattgcaggtggatccctgtg

SEQ ID NO: 291604 - DNA, 25 bp, Homo sapien
tattgcaggtggatccctgtgctag

SEQ ID NO: 291605 - DNA, 25 bp, Homo sapien
tgtggtgggcgaagggcccagatgg

SEQ ID NO: 291606 - DNA, 25 bp, Homo sapien
ctgcagcatccctgtcactgtggtg

SEQ ID NO: 291607 - DNA, 25 bp, Homo sapien
cctgtcactgtggtgggcgaagggc

SEQ ID NO: 291608 - DNA, 25 bp, Homo sapien
ctctgcagcatccctgtcactgtgg

SEQ ID NO: 291609 - DNA, 25 bp, Homo sapien
gccgcggcgtcgcatcagtggcatc

SEQ ID NO: 291610 - DNA, 25 bp, Homo sapien
gaaggtagccgtagccttggctgtc

SEQ ID NO: 291611 - DNA, 25 bp, Homo sapien
tcgtggcttccctcatcgtaacggc

SEQ ID NO: 291612 - DNA, 25 bp, Homo sapien
ttggccgccgcggcgtcgcatcagt

SEQ ID NO: 291613 - DNA, 25 bp, Homo sapien
gcgccggcccttttatagccgccgc

SEQ ID NO: 291614 - DNA, 25 bp, Homo sapien
cagggcgccggcccttttatagccg

SEQ ID NO: 291615 - DNA, 25 bp, Homo sapien
cgccggcccttttatagccgccgcg

SEQ ID NO: 291616 - DNA, 25 bp, Homo sapien
ggcctgagcaggtgcgcgaggccgg

SEQ ID NO: 291617 - DNA, 25 bp, Homo sapien
ctgagcaggtgcgcgaggccgggac

SEQ ID NO: 291618 - DNA, 25 bp, Homo sapien
gcctgagcaggtgcgcgaggccggg

SEQ ID NO: 291619 - DNA, 25 bp, Homo sapien
cctgagcaggtgcgcgaggccggga

SEQ ID NO: 291620 - DNA, 25 bp, Homo sapien
ttctcactgcgtgaggtggccaccg

SEQ ID NO: 291621 - DNA, 25 bp, Homo sapien
gtacagctcgcccatagcggagcgg

SEQ ID NO: 291622 - DNA, 25 bp, Homo sapien
gacgtcacgtcgcacttcagggcgt

SEQ ID NO: 291623 - DNA, 25 bp, Homo sapien
ccctttcgggctagcgcgtagtgga

SEQ ID NO: 291624 - DNA, 25 bp, Homo sapien
gcaaacccaaaagaggtttgcgcag

SEQ ID NO: 291625 - DNA, 25 bp, Homo sapien
gtacaatcctgggacgtctgcccct

SEQ ID NO: 291626 - DNA, 25 bp, Homo sapien
agctgagtgggccagtacaatcctg

SEQ ID NO: 291627 - DNA, 25 bp, Homo sapien
tgcccctacgactggcaaacccaaa

SEQ ID NO: 291628 - DNA, 25 bp, Homo sapien
gaggtctggagactggtctttagct

SEQ ID NO: 291629 - DNA, 25 bp, Homo sapien
tcctgaatccccagatagtggcact

SEQ ID NO: 291630 - DNA, 25 bp, Homo sapien
agatagtggcactcagggcacaagt

SEQ ID NO: 291631 - DNA, 25 bp, Homo sapien
ttagctcgtaaaagtgaacatcctg

SEQ ID NO: 291632 - DNA, 25 bp, Homo sapien
taaaggcaagtgactactccccaag

SEQ ID NO: 291633 - DNA, 25 bp, Homo sapien
ggattgacctactgcgtgtgccaga

SEQ ID NO: 291634 - DNA, 25 bp, Homo sapien
ggtttctgcgcacagtccaaggtca

SEQ ID NO: 291635 - DNA, 25 bp, Homo sapien
tcagatgtgatacctggcccatggg

SEQ ID NO: 291636 - DNA, 25 bp, Homo sapien
gagcgcatagcgtctgtgttcacct

SEQ ID NO: 291637 - DNA, 25 bp, Homo sapien
tgcgctgagcgcatagcgtctgtgt

SEQ ID NO: 291638 - DNA, 25 bp, Homo sapien
gcgtctgtgttcaccttggctgcct

SEQ ID NO: 291639 - DNA, 25 bp, Homo sapien
tcctcctgcgctgagcgcatagcgt

SEQ ID NO: 291640 - DNA, 25 bp, Homo sapien
tgtaagcggctatctctatatccag

SEQ ID NO: 291641 - DNA, 25 bp, Homo sapien
gagcaggtcctggtattctcgcagc

SEQ ID NO: 291642 - DNA, 25 bp, Homo sapien
tatccagagccatcttgacattgag

SEQ ID NO: 291643 - DNA, 25 bp, Homo sapien
tgttcctcagctcagcgtccagctg

SEQ ID NO: 291644 - DNA, 25 bp, Homo sapien
ccaaagccaatccgacactcttcac

SEQ ID NO: 291645 - DNA, 25 bp, Homo sapien
caaagccaatccgacactcttcacc

SEQ ID NO: 291646 - DNA, 25 bp, Homo sapien
ggccaaagccaatccgacactcttc

SEQ ID NO: 291647 - DNA, 25 bp, Homo sapien
gccaaagccaatccgacactcttca

SEQ ID NO: 291648 - DNA, 25 bp, Homo sapien
ctttgatcttctcttcgcttttcac

SEQ ID NO: 291649 - DNA, 25 bp, Homo sapien
cactttgatcttctcttcgcttttc

SEQ ID NO: 291650 - DNA, 25 bp, Homo sapien
actttgatcttctcttcgcttttca

SEQ ID NO: 291651 - DNA, 25 bp, Homo sapien
acaatcacagtttctttctcagact

SEQ ID NO: 291652 - DNA, 25 bp, Homo sapien
cttcagtcacttgggtctcctctgt

SEQ ID NO: 291653 - DNA, 25 bp, Homo sapien
gttcctccacaatcacagtttcttt

SEQ ID NO: 291654 - DNA, 25 bp, Homo sapien
ttgggtctcctctgtctgttcctcc

SEQ ID NO: 291655 - DNA, 25 bp, Homo sapien
ttctgcctcctcttcttcaccccct

SEQ ID NO: 291656 - DNA, 25 bp, Homo sapien
tcctctttggcctctttctcctctt

SEQ ID NO: 291657 - DNA, 25 bp, Homo sapien
tgtttcttcttctcccccttctgcc

SEQ ID NO: 291658 - DNA, 25 bp, Homo sapien
ctgcctcctcttcttcacccccttc

SEQ ID NO: 291659 - DNA, 25 bp, Homo sapien
ttgctggagacttggccttctcagg

SEQ ID NO: 291660 - DNA, 25 bp, Homo sapien
cttctcaggggacttgacttcggct

SEQ ID NO: 291661 - DNA, 25 bp, Homo sapien
acttgacttcggctggggattttgc

SEQ ID NO: 291662 - DNA, 25 bp, Homo sapien
cctttactggtgacttggcttcctt

SEQ ID NO: 291663 - DNA, 25 bp, Homo sapien
cagctggagattttgcttcctcctt

SEQ ID NO: 291664 - DNA, 25 bp, Homo sapien
gattttgcttcctccttctctgggg

SEQ ID NO: 291665 - DNA, 25 bp, Homo sapien
ctcagctggagattttgcttcctcc

SEQ ID NO: 291666 - DNA, 25 bp, Homo sapien
ttttgcttcctccttctctggggac

SEQ ID NO: 291667 - DNA, 25 bp, Homo sapien
gcctcagccggtgactttgcctctt

SEQ ID NO: 291668 - DNA, 25 bp, Homo sapien
gacttggccttctcgggggacttga

SEQ ID NO: 291669 - DNA, 25 bp, Homo sapien
tggagacttggcctcagccggtgac

SEQ ID NO: 291670 - DNA, 25 bp, Homo sapien
tggcctcagccggtgactttgcttc

SEQ ID NO: 291671 - DNA, 25 bp, Homo sapien
tttccggggacttgacctcagctgg

SEQ ID NO: 291672 - DNA, 25 bp, Homo sapien
cttttccggggacttgacctcagct

SEQ ID NO: 291673 - DNA, 25 bp, Homo sapien
gacctcagctggagattttgcttct

SEQ ID NO: 291674 - DNA, 25 bp, Homo sapien
ttgacctcagctggagattttgctt

SEQ ID NO: 291675 - DNA, 25 bp, Homo sapien
tttgcttcctccttcgttggagact

SEQ ID NO: 291676 - DNA, 25 bp, Homo sapien
ggactttgcttcctccttcgttgga

SEQ ID NO: 291677 - DNA, 25 bp, Homo sapien
ttctcaggggactttgcttcctcct

SEQ ID NO: 291678 - DNA, 25 bp, Homo sapien
actttgcttcctccttcgttggaga

SEQ ID NO: 291679 - DNA, 25 bp, Homo sapien
ggactttgcttctgccttcactggg

SEQ ID NO: 291680 - DNA, 25 bp, Homo sapien
gggactttgcttctgccttcactgg

SEQ ID NO: 291681 - DNA, 25 bp, Homo sapien
ttctcaggggactttgcttctgcct

SEQ ID NO: 291682 - DNA, 25 bp, Homo sapien
gacttggccttctcaggggactttg

SEQ ID NO: 291683 - DNA, 25 bp, Homo sapien
tggccttctcgggggtctttgcttc

SEQ ID NO: 291684 - DNA, 25 bp, Homo sapien
gacttggccttctcaggggactttg

SEQ ID NO: 291685 - DNA, 25 bp, Homo sapien
tcttccttcactggggacttggcct

SEQ ID NO: 291686 - DNA, 25 bp, Homo sapien
cttctcaggggactttgcttcttcc

SEQ ID NO: 291687 - DNA, 25 bp, Homo sapien
ttttcagggaatttgtctgcagggg

SEQ ID NO: 291688 - DNA, 25 bp, Homo sapien
cttttcagggaatttgtctgcaggg

SEQ ID NO: 291689 - DNA, 25 bp, Homo sapien
ggacttgacctcctccttgacaggg

SEQ ID NO: 291690 - DNA, 25 bp, Homo sapien
ttctctggggacttgacctcctcct

SEQ ID NO: 291691 - DNA, 25 bp, Homo sapien
ctccttcaggggagatttcgccttc

SEQ ID NO: 291692 - DNA, 25 bp, Homo sapien
ccttcaggggagatttcgccttctc

SEQ ID NO: 291693 - DNA, 25 bp, Homo sapien
ccttcttgggtgcctcctctttctt

SEQ ID NO: 291694 - DNA, 25 bp, Homo sapien
ccttaggcttgctaggctcttttga

SEQ ID NO: 291695 - DNA, 25 bp, Homo sapien
ctttgggcttttcgacagcaggttc

SEQ ID NO: 291696 - DNA, 25 bp, Homo sapien
cttttctgccttaggcttgctaggc

SEQ ID NO: 291697 - DNA, 25 bp, Homo sapien
aagtgtttacgtgtggcattcggca

SEQ ID NO: 291698 - DNA, 25 bp, Homo sapien
gctatcataattgtccatcgcctgg

SEQ ID NO: 291699 - DNA, 25 bp, Homo sapien
tctttggctgttccggatgttcctt

SEQ ID NO: 291700 - DNA, 25 bp, Homo sapien
tgatccttgagctccgggactcttc

SEQ ID NO: 291701 - DNA, 25 bp, Homo sapien
actgatgcttgctcagtcccatgca

SEQ ID NO: 291702 - DNA, 25 bp, Homo sapien
cccagggaaagagaataacagcagc

SEQ ID NO: 291703 - DNA, 25 bp, Homo sapien
cttgctcagtcccatgcagtctggg

SEQ ID NO: 291704 - DNA, 25 bp, Homo sapien
gtcccatgcagtctggggtgtcaca

SEQ ID NO: 291705 - DNA, 25 bp, Homo sapien
tatagacttctaagcagtgtccatc

SEQ ID NO: 291706 - DNA, 25 bp, Homo sapien
tttgtcatcaacctaaggagtccct

SEQ ID NO: 291707 - DNA, 25 bp, Homo sapien
tccaatctggatggaggctacacag

SEQ ID NO: 291708 - DNA, 25 bp, Homo sapien
tgagacttcgtaagcctgaaattgt

SEQ ID NO: 291709 - DNA, 25 bp, Homo sapien
tatggtgcaatgtacactgcttggg

SEQ ID NO: 291710 - DNA, 25 bp, Homo sapien
aatatggtgcaatgtacactgcttg

SEQ ID NO: 291711 - DNA, 25 bp, Homo sapien
ccaaatatggtgcaatgtacactgc

SEQ ID NO: 291712 - DNA, 25 bp, Homo sapien
actccaaatatggtgcaatgtacac

SEQ ID NO: 291713 - DNA, 25 bp, Homo sapien
ctgtgcccagccctaattaaggctt

SEQ ID NO: 291714 - DNA, 25 bp, Homo sapien
tgtgcccagccctaattaaggcttt

SEQ ID NO: 291715 - DNA, 25 bp, Homo sapien
actgtgcccagccctaattaaggct

SEQ ID NO: 291716 - DNA, 25 bp, Homo sapien
gattttaaaacaagcgagaagccca

SEQ ID NO: 291717 - DNA, 25 bp, Homo sapien
gaagcagactgaacaaaagaatccc

SEQ ID NO: 291718 - DNA, 25 bp, Homo sapien
gaattgtccacggacttttggcaga

SEQ ID NO: 291719 - DNA, 25 bp, Homo sapien
gcttgggaggacctagaagcttcct

SEQ ID NO: 291720 - DNA, 25 bp, Homo sapien
ccagtagtatgctattagtagttac

SEQ ID NO: 291721 - DNA, 25 bp, Homo sapien
gctgttgaccagtagtatgctatta

SEQ ID NO: 291722 - DNA, 25 bp, Homo sapien
tattagtagttacttactgctaaca

SEQ ID NO: 291723 - DNA, 25 bp, Homo sapien
tatgctattagtagttacttactgc

SEQ ID NO: 291724 - DNA, 25 bp, Homo sapien
tagactgcccttagagtccacatcc

SEQ ID NO: 291725 - DNA, 25 bp, Homo sapien
cagttacactgtccagggctctcag

SEQ ID NO: 291726 - DNA, 25 bp, Homo sapien
tgcctgagagtgttgttggacaccc

SEQ ID NO: 291727 - DNA, 25 bp, Homo sapien
ttagggaggtacagctctggtgcct

SEQ ID NO: 291728 - DNA, 25 bp, Homo sapien
tcctgcaggcaaatatacaagctag

SEQ ID NO: 291729 - DNA, 25 bp, Homo sapien
ccacttgctggacagtctgagccaa

SEQ ID NO: 291730 - DNA, 25 bp, Homo sapien
tgacaaaagaccacttgaagagagg

SEQ ID NO: 291731 - DNA, 25 bp, Homo sapien
caggagacagacacgtaacaggaac

SEQ ID NO: 291732 - DNA, 25 bp, Homo sapien
ctaggaattagattagtttcctggg

SEQ ID NO: 291733 - DNA, 25 bp, Homo sapien
gggtggccagcataccgcaaactgg

SEQ ID NO: 291734 - DNA, 25 bp, Homo sapien
tctcctccacaattaattaggtttc

SEQ ID NO: 291735 - DNA, 25 bp, Homo sapien
cagaggtttatcctgtcacagttct

SEQ ID NO: 291736 - DNA, 25 bp, Homo sapien
taaacttgtaagaaccattgatcca

SEQ ID NO: 291737 - DNA, 25 bp, Homo sapien
tgaatcatgttgagctgtacgctgg

SEQ ID NO: 291738 - DNA, 25 bp, Homo sapien
ccacagttgttagacaattccttct

SEQ ID NO: 291739 - DNA, 25 bp, Homo sapien
tctcctatggagagcaccacagttg

SEQ ID NO: 291740 - DNA, 25 bp, Homo sapien
ggcactccgggattcgggccggaga

SEQ ID NO: 291741 - DNA, 25 bp, Homo sapien
accggaggctgacgcatagatgctg

SEQ ID NO: 291742 - DNA, 25 bp, Homo sapien
tctcagcggccgactagggtcacgg

SEQ ID NO: 291743 - DNA, 25 bp, Homo sapien
aggagccgggaccttcggtgcaggc

SEQ ID NO: 291744 - DNA, 25 bp, Homo sapien
ggcccgggaacggtctgggctgcgc

SEQ ID NO: 291745 - DNA, 25 bp, Homo sapien
cgggaacggtctgggctgcgcgggt

SEQ ID NO: 291746 - DNA, 25 bp, Homo sapien
acggtctgggctgcgcgggtcccca

SEQ ID NO: 291747 - DNA, 25 bp, Homo sapien
gaacggtctgggctgcgcgggtccc

SEQ ID NO: 291748 - DNA, 25 bp, Homo sapien
tagcccccctggagttgctgcacag

SEQ ID NO: 291749 - DNA, 25 bp, Homo sapien
cccccctggagttgctgcacaggcc

SEQ ID NO: 291750 - DNA, 25 bp, Homo sapien
ttagcccccctggagttgctgcaca

SEQ ID NO: 291751 - DNA, 25 bp, Homo sapien
agcccccctggagttgctgcacagg

SEQ ID NO: 291752 - DNA, 25 bp, Homo sapien
ggctcaggcccgggaccctcgcgcc

SEQ ID NO: 291753 - DNA, 25 bp, Homo sapien
gctcaggcccgggaccctcgcgccc

SEQ ID NO: 291754 - DNA, 25 bp, Homo sapien
gggctcaggcccgggaccctcgcgc

SEQ ID NO: 291755 - DNA, 25 bp, Homo sapien
catctcggcgtccatggtgacgatc

SEQ ID NO: 291756 - DNA, 25 bp, Homo sapien
gcaattgaactccatctcggcgtcc

SEQ ID NO: 291757 - DNA, 25 bp, Homo sapien
agctgaagctcatgcgggaagcgat

SEQ ID NO: 291758 - DNA, 25 bp, Homo sapien
cgatcctcacggtgaacgtcttggg

SEQ ID NO: 291759 - DNA, 25 bp, Homo sapien
cagcagtcggggctgccggccggtt

SEQ ID NO: 291760 - DNA, 25 bp, Homo sapien
cgcagcagtcggggctgccggccgg

SEQ ID NO: 291761 - DNA, 25 bp, Homo sapien
gcagtcggggctgccggccggttac

SEQ ID NO: 291762 - DNA, 25 bp, Homo sapien
tcaccgcagcagtcggggctgccgg

SEQ ID NO: 291763 - DNA, 25 bp, Homo sapien
aaatctgttattgagtcctgagtcc

SEQ ID NO: 291764 - DNA, 25 bp, Homo sapien
gcgcccagctgttattgtactttca

SEQ ID NO: 291765 - DNA, 25 bp, Homo sapien
taatttggccccttgtctcacaggc

SEQ ID NO: 291766 - DNA, 25 bp, Homo sapien
taattgatgcaacagtgtcatacca

SEQ ID NO: 291767 - DNA, 25 bp, Homo sapien
tcagtttcctcgagatgaaagatgt

SEQ ID NO: 291768 - DNA, 25 bp, Homo sapien
cagtttcctcgagatgaaagatgta

SEQ ID NO: 291769 - DNA, 25 bp, Homo sapien
gatctattccaccagcgacctctat

SEQ ID NO: 291770 - DNA, 25 bp, Homo sapien
tcatacctagttgattagcccatgg

SEQ ID NO: 291771 - DNA, 25 bp, Homo sapien
cagtgtcaggatctattccaccagc

SEQ ID NO: 291772 - DNA, 25 bp, Homo sapien
cataaccaaggtcatacctagttga

SEQ ID NO: 291773 - DNA, 25 bp, Homo sapien
tcatgttagcttcgcctctgcacac

SEQ ID NO: 291774 - DNA, 25 bp, Homo sapien
tgtttgtacccttaatgcagccata

SEQ ID NO: 291775 - DNA, 25 bp, Homo sapien
caggctgatcacagatctagggtct

SEQ ID NO: 291776 - DNA, 25 bp, Homo sapien
tggcttcaactacactatgatttgg

SEQ ID NO: 291777 - DNA, 25 bp, Homo sapien
gctcaaaaacgcagaatggcttcaa

SEQ ID NO: 291778 - DNA, 25 bp, Homo sapien
aattctatgccactgatctacacat

SEQ ID NO: 291779 - DNA, 25 bp, Homo sapien
cttctgagcagaacagtcttccaat

SEQ ID NO: 291780 - DNA, 25 bp, Homo sapien
tctgagcagaacagtcttccaatta

SEQ ID NO: 291781 - DNA, 25 bp, Homo sapien
ctgagcagaacagtcttccaattaa

SEQ ID NO: 291782 - DNA, 25 bp, Homo sapien
ggcttctgagcagaacagtcttcca

SEQ ID NO: 291783 - DNA, 25 bp, Homo sapien
tgatgcttgtggttggttgacgatg

SEQ ID NO: 291784 - DNA, 25 bp, Homo sapien
gatgcttgtggttggttgacgatgt

SEQ ID NO: 291785 - DNA, 25 bp, Homo sapien
ttggttgacgatgttgatgataatc

SEQ ID NO: 291786 - DNA, 25 bp, Homo sapien
ggttgacgatgttgatgataatcat

SEQ ID NO: 291787 - DNA, 25 bp, Homo sapien
ggcacaccaaatcaaagaggtcctt

SEQ ID NO: 291788 - DNA, 25 bp, Homo sapien
cagagtccggcacaccaaatcaaag

SEQ ID NO: 291789 - DNA, 25 bp, Homo sapien
tccaaagaaccaggtttctcggagc

SEQ ID NO: 291790 - DNA, 25 bp, Homo sapien
tgtccttgattgtgtactgcagtcc

SEQ ID NO: 291791 - DNA, 25 bp, Homo sapien
aaaagcatatggtcctgctccccgc

SEQ ID NO: 291792 - DNA, 25 bp, Homo sapien
aaaatggacattctttcaccctggg

SEQ ID NO: 291793 - DNA, 25 bp, Homo sapien
tattatgctcaggtaggcaactgga

SEQ ID NO: 291794 - DNA, 25 bp, Homo sapien
gtgaacatatgaacccatgcagagg

SEQ ID NO: 291795 - DNA, 25 bp, Homo sapien
tgaaaggtgactggttcttcctttg

SEQ ID NO: 291796 - DNA, 25 bp, Homo sapien
gaataaatgttgtgtgatctcctga

SEQ ID NO: 291797 - DNA, 25 bp, Homo sapien
aagtgaaaggtgactggttcttcct

SEQ ID NO: 291798 - DNA, 25 bp, Homo sapien
gttgtgtgatctcctgaaccagctc

SEQ ID NO: 291799 - DNA, 25 bp, Homo sapien
gacagagcgctatgaactcaagaag

SEQ ID NO: 291800 - DNA, 25 bp, Homo sapien
acttttaagtacacgtgaggtccag

SEQ ID NO: 291801 - DNA, 25 bp, Homo sapien
aagttactggtatgacggctatgca

SEQ ID NO: 291802 - DNA, 25 bp, Homo sapien
tctcaacgtgctgctctaagggaaa

SEQ ID NO: 291803 - DNA, 25 bp, Homo sapien
gcctcaggagggcagtagatctttt

SEQ ID NO: 291804 - DNA, 25 bp, Homo sapien
cttggcctggacggcgtaagaagcc

SEQ ID NO: 291805 - DNA, 25 bp, Homo sapien
gagggcagtagatcttttcatctaa

SEQ ID NO: 291806 - DNA, 25 bp, Homo sapien
gacggcgtaagaagccaggagcaca

SEQ ID NO: 291807 - DNA, 25 bp, Homo sapien
tctgatcactaggagtctgcacaca

SEQ ID NO: 291808 - DNA, 25 bp, Homo sapien
aaatataaacccttcactgcatcgc

SEQ ID NO: 291809 - DNA, 25 bp, Homo sapien
tatcacagccttctaataggtctcc

SEQ ID NO: 291810 - DNA, 25 bp, Homo sapien
ggcactctgtccctgatttgcatta

SEQ ID NO: 291811 - DNA, 25 bp, Homo sapien
tctatgaaacatagttcggcagtta

SEQ ID NO: 291812 - DNA, 25 bp, Homo sapien
gacatttcatctacaggtaagtgga

SEQ ID NO: 291813 - DNA, 25 bp, Homo sapien
ggtatagagtttgtgccctggagtt

SEQ ID NO: 291814 - DNA, 25 bp, Homo sapien
taacccagttataccatgtcttgat

SEQ ID NO: 291815 - DNA, 25 bp, Homo sapien
gtgcctggccagtatcagtcactcc

SEQ ID NO: 291816 - DNA, 25 bp, Homo sapien
gcacccggccaagtagagacagggt

SEQ ID NO: 291817 - DNA, 25 bp, Homo sapien
cgcacccggccaagtagagacaggg

SEQ ID NO: 291818 - DNA, 25 bp, Homo sapien
accgtgcctggccagtatcagtcac

SEQ ID NO: 291819 - DNA, 25 bp, Homo sapien
ttttctggagaaaggggtctcgcta

SEQ ID NO: 291820 - DNA, 25 bp, Homo sapien
tttctggagaaaggggtctcgctat

SEQ ID NO: 291821 - DNA, 25 bp, Homo sapien
tcccacctcttgcctccctgagagt

SEQ ID NO: 291822 - DNA, 25 bp, Homo sapien
cacctcttgcctccctgagagttgg

SEQ ID NO: 291823 - DNA, 25 bp, Homo sapien
gaagtaccccttctgaggccttgag

SEQ ID NO: 291824 - DNA, 25 bp, Homo sapien
gatgtccaaaagatctcaggtctct

SEQ ID NO: 291825 - DNA, 25 bp, Homo sapien
aatacaggtaagcatttcgcacagc

SEQ ID NO: 291826 - DNA, 25 bp, Homo sapien
gcactggccttagaggatcctgaag

SEQ ID NO: 291827 - DNA, 25 bp, Homo sapien
cttgggccaaaaatccccgcttgtg

SEQ ID NO: 291828 - DNA, 25 bp, Homo sapien
cgcttgtgaacactggggtcgtagt

SEQ ID NO: 291829 - DNA, 25 bp, Homo sapien
ctcttgggccaaaaatccccgcttg

SEQ ID NO: 291830 - DNA, 25 bp, Homo sapien
tccccgcttgtgaacactggggtcg

SEQ ID NO: 291831 - DNA, 25 bp, Homo sapien
catttccggagtcatctgatacaga

SEQ ID NO: 291832 - DNA, 25 bp, Homo sapien
cggtgctctgcgtaccaagcagtaa

SEQ ID NO: 291833 - DNA, 25 bp, Homo sapien
ctctgcgtaccaagcagtaattctc

SEQ ID NO: 291834 - DNA, 25 bp, Homo sapien
cccacatttccggagtcatctgata

SEQ ID NO: 291835 - DNA, 25 bp, Homo sapien
acaccgtacatctccaggtcctgag

SEQ ID NO: 291836 - DNA, 25 bp, Homo sapien
gtagttcacaccgtacatctccagg

SEQ ID NO: 291837 - DNA, 25 bp, Homo sapien
ccggattgcaaagtagttcacaccg

SEQ ID NO: 291838 - DNA, 25 bp, Homo sapien
cagatattccatttcagcttcatcc

SEQ ID NO: 291839 - DNA, 25 bp, Homo sapien
cagggtcataaatgtgaagccccag

SEQ ID NO: 291840 - DNA, 25 bp, Homo sapien
tcagggtcataaatgtgaagcccca

SEQ ID NO: 291841 - DNA, 25 bp, Homo sapien
ctcagggtcataaatgtgaagcccc

SEQ ID NO: 291842 - DNA, 25 bp, Homo sapien
gagatcttgggggtcagtctgttct

SEQ ID NO: 291843 - DNA, 25 bp, Homo sapien
gagatgtttcggatttcattccacg

SEQ ID NO: 291844 - DNA, 25 bp, Homo sapien
actgtacgagatgtttcggatttca

SEQ ID NO: 291845 - DNA, 25 bp, Homo sapien
tacgagatgtttcggatttcattcc

SEQ ID NO: 291846 - DNA, 25 bp, Homo sapien
tgtttcggatttcattccacgggaa

SEQ ID NO: 291847 - DNA, 25 bp, Homo sapien
cagaacacagtttcagtccgacagc

SEQ ID NO: 291848 - DNA, 25 bp, Homo sapien
agcagaacacagtttcagtccgaca

SEQ ID NO: 291849 - DNA, 25 bp, Homo sapien
gcagaacacagtttcagtccgacag

SEQ ID NO: 291850 - DNA, 25 bp, Homo sapien
gaggagttaaacttgaagacatcaa

SEQ ID NO: 291851 - DNA, 25 bp, Homo sapien
taacacgaagctttgaggagttaaa

SEQ ID NO: 291852 - DNA, 25 bp, Homo sapien
cagcttattaacacgaagctttgag

SEQ ID NO: 291853 - DNA, 25 bp, Homo sapien
ttgaggagttaaacttgaagacatc

SEQ ID NO: 291854 - DNA, 25 bp, Homo sapien
ctggcctgggctttcatctgctgaa

SEQ ID NO: 291855 - DNA, 25 bp, Homo sapien
tggcctgggctttcatctgctgaac

SEQ ID NO: 291856 - DNA, 25 bp, Homo sapien
ggcctgggctttcatctgctgaact

SEQ ID NO: 291857 - DNA, 25 bp, Homo sapien
tgcttctctcgagcgaggcgctgcc

SEQ ID NO: 291858 - DNA, 25 bp, Homo sapien
aactcatccctcgtgcgttcagcct

SEQ ID NO: 291859 - DNA, 25 bp, Homo sapien
tccaactcatccctcgtgcgttcag

SEQ ID NO: 291860 - DNA, 25 bp, Homo sapien
tcatctgcttctctcgagcgaggcg

SEQ ID NO: 291861 - DNA, 25 bp, Homo sapien
tcgttggccattgttgcttcttctt

SEQ ID NO: 291862 - DNA, 25 bp, Homo sapien
gttggccattgttgcttcttctttc

SEQ ID NO: 291863 - DNA, 25 bp, Homo sapien
cagtgcttcgttggccattgttgct

SEQ ID NO: 291864 - DNA, 25 bp, Homo sapien
tggccattgttgcttcttctttcat

SEQ ID NO: 291865 - DNA, 25 bp, Homo sapien
ggccttgatgcgctgcatttcctgc

SEQ ID NO: 291866 - DNA, 25 bp, Homo sapien
cctcggtgatctgggccttttcagc

SEQ ID NO: 291867 - DNA, 25 bp, Homo sapien
tctgggccagaagttttgcctcctc

SEQ ID NO: 291868 - DNA, 25 bp, Homo sapien
cgtgcgaatcgctgtggccttgatg

SEQ ID NO: 291869 - DNA, 25 bp, Homo sapien
gctcttcgctccgcctcgcgtgctt

SEQ ID NO: 291870 - DNA, 25 bp, Homo sapien
ggctcttcgctccgcctcgcgtgct

SEQ ID NO: 291871 - DNA, 25 bp, Homo sapien
tcttcgctccgcctcgcgtgcttcc

SEQ ID NO: 291872 - DNA, 25 bp, Homo sapien
ttcgctccgcctcgcgtgcttcctg

SEQ ID NO: 291873 - DNA, 25 bp, Homo sapien
gcaacggtgctggaattgggttcat

SEQ ID NO: 291874 - DNA, 25 bp, Homo sapien
aggcaacggtgctggaattgggttc

SEQ ID NO: 291875 - DNA, 25 bp, Homo sapien
ggaggcaacggtgctggaattgggt

SEQ ID NO: 291876 - DNA, 25 bp, Homo sapien
caacggtgctggaattgggttcatg

SEQ ID NO: 291877 - DNA, 25 bp, Homo sapien
acaggctgtcaccaatgaggttgaa

SEQ ID NO: 291878 - DNA, 25 bp, Homo sapien
caggctgtcaccaatgaggttgaag

SEQ ID NO: 291879 - DNA, 25 bp, Homo sapien
aggctgtcaccaatgaggttgaagc

SEQ ID NO: 291880 - DNA, 25 bp, Homo sapien
gtcagtatctttgaagtcgaaagac

SEQ ID NO: 291881 - DNA, 25 bp, Homo sapien
cacgtgatctcttttgataggccac

SEQ ID NO: 291882 - DNA, 25 bp, Homo sapien
aaaacactccatagggattgccatg

SEQ ID NO: 291883 - DNA, 25 bp, Homo sapien
gatgacagaagctcactcagaagct

SEQ ID NO: 291884 - DNA, 25 bp, Homo sapien
aaagtgtccaactacaaggcatggc

SEQ ID NO: 291885 - DNA, 25 bp, Homo sapien
gagttctcattgtgcagaatatcca

SEQ ID NO: 291886 - DNA, 25 bp, Homo sapien
cagtttcaaggcctcgatttctgtc

SEQ ID NO: 291887 - DNA, 25 bp, Homo sapien
taatggtattgtgcttgctgctgcc

SEQ ID NO: 291888 - DNA, 25 bp, Homo sapien
tgccacccctgtcggagttctcatt

SEQ ID NO: 291889 - DNA, 25 bp, Homo sapien
taatgatggtcctgatcagcaaaat

SEQ ID NO: 291890 - DNA, 25 bp, Homo sapien
ttaatgatggtcctgatcagcaaaa

SEQ ID NO: 291891 - DNA, 25 bp, Homo sapien
aatgatggtcctgatcagcaaaata

SEQ ID NO: 291892 - DNA, 25 bp, Homo sapien
aaccagatgccaaccgcacatttca

SEQ ID NO: 291893 - DNA, 25 bp, Homo sapien
aaaccagatgccaaccgcacatttc

SEQ ID NO: 291894 - DNA, 25 bp, Homo sapien
gcagataggtcttctgccttgggct

SEQ ID NO: 291895 - DNA, 25 bp, Homo sapien
tgcagataggtcttctgccttgggc

SEQ ID NO: 291896 - DNA, 25 bp, Homo sapien
tcaaatgcagataggtcttctgcct

SEQ ID NO: 291897 - DNA, 25 bp, Homo sapien
caaatgcagataggtcttctgcctt

SEQ ID NO: 291898 - DNA, 25 bp, Homo sapien
cacgggttagtatcacagagggcag

SEQ ID NO: 291899 - DNA, 25 bp, Homo sapien
tccatgctaggagtatgccaccaag

SEQ ID NO: 291900 - DNA, 25 bp, Homo sapien
catgacatgctcttcggaacgaggc

SEQ ID NO: 291901 - DNA, 25 bp, Homo sapien
tagacacacctgactggacaagaag

SEQ ID NO: 291902 - DNA, 25 bp, Homo sapien
gcagcaaacattcggttaattcact

SEQ ID NO: 291903 - DNA, 25 bp, Homo sapien
agtgtactgttccaatgtgagttca

SEQ ID NO: 291904 - DNA, 25 bp, Homo sapien
aaccagtgaccgctcctctccaggg

SEQ ID NO: 291905 - DNA, 25 bp, Homo sapien
cctctccagggtgccgtgagtgtac

SEQ ID NO: 291906 - DNA, 25 bp, Homo sapien
ttattgggcaaaatacattctctcc

SEQ ID NO: 291907 - DNA, 25 bp, Homo sapien
gtcattttattattgggcaaaatac

SEQ ID NO: 291908 - DNA, 25 bp, Homo sapien
ttattattgggcaaaatacattctc

SEQ ID NO: 291909 - DNA, 25 bp, Homo sapien
tagaggcaggatgtcattttattat

SEQ ID NO: 291910 - DNA, 25 bp, Homo sapien
gatgggataacgaccacaagtagga

SEQ ID NO: 291911 - DNA, 25 bp, Homo sapien
caagtaggatctatcttatgccaga

SEQ ID NO: 291912 - DNA, 25 bp, Homo sapien
ggacacatcctatgctgctgtcagg

SEQ ID NO: 291913 - DNA, 25 bp, Homo sapien
taacagctgacctctcttgatggga

SEQ ID NO: 291914 - DNA, 25 bp, Homo sapien
ggaagagttcagatcgccactgcaa

SEQ ID NO: 291915 - DNA, 25 bp, Homo sapien
tatgtcaaggccaagatgctctacc

SEQ ID NO: 291916 - DNA, 25 bp, Homo sapien
gctgctggcgcttgagataaatgtc

SEQ ID NO: 291917 - DNA, 25 bp, Homo sapien
taattgtgggagacacctttcccgc

SEQ ID NO: 291918 - DNA, 25 bp, Homo sapien
ttttagaagaggccgatacagtctt

SEQ ID NO: 291919 - DNA, 25 bp, Homo sapien
acttttagaagaggccgatacagtc

SEQ ID NO: 291920 - DNA, 25 bp, Homo sapien
gacttttagaagaggccgatacagt

SEQ ID NO: 291921 - DNA, 25 bp, Homo sapien
cttttagaagaggccgatacagtct

SEQ ID NO: 291922 - DNA, 25 bp, Homo sapien
tacacagaggtggaacgaaaggcca

SEQ ID NO: 291923 - DNA, 25 bp, Homo sapien
tactgagtggtctgagcaagagcct

SEQ ID NO: 291924 - DNA, 25 bp, Homo sapien
gaaatctgccactgaatacccaagg

SEQ ID NO: 291925 - DNA, 25 bp, Homo sapien
gcaaaagctgcctgaaaacctgtct

SEQ ID NO: 291926 - DNA, 25 bp, Homo sapien
tctcagtgtggcttgtgcaggcagg

SEQ ID NO: 291927 - DNA, 25 bp, Homo sapien
aaggtgtttctctccatgagctgga

SEQ ID NO: 291928 - DNA, 25 bp, Homo sapien
tggtttcccaggtggtcccgaagca

SEQ ID NO: 291929 - DNA, 25 bp, Homo sapien
agcaaacttgctcatgacgtggcag

SEQ ID NO: 291930 - DNA, 25 bp, Homo sapien
aaggccactcgggacttggcgctct

SEQ ID NO: 291931 - DNA, 25 bp, Homo sapien
cactcgggacttggcgctctgcaag

SEQ ID NO: 291932 - DNA, 25 bp, Homo sapien
gccactcgggacttggcgctctgca

SEQ ID NO: 291933 - DNA, 25 bp, Homo sapien
aggccactcgggacttggcgctctg

SEQ ID NO: 291934 - DNA, 25 bp, Homo sapien
actggaaggatctcaagggccctgg

SEQ ID NO: 291935 - DNA, 25 bp, Homo sapien
gacttcagaagtagacacggcagct

SEQ ID NO: 291936 - DNA, 25 bp, Homo sapien
tcaggtcagagaactagaacgccat

SEQ ID NO: 291937 - DNA, 25 bp, Homo sapien
gaaagttctggagctcccacggaaa

SEQ ID NO: 291938 - DNA, 25 bp, Homo sapien
gcagaagggctcgtaatgaaaccac

SEQ ID NO: 291939 - DNA, 25 bp, Homo sapien
gacctcatgaatggtcccggtgctg

SEQ ID NO: 291940 - DNA, 25 bp, Homo sapien
tactggccaaaaggacagcctcacg

SEQ ID NO: 291941 - DNA, 25 bp, Homo sapien
gccttgatcaggatgaacgaagcca

SEQ ID NO: 291942 - DNA, 25 bp, Homo sapien
aggactcgggccctacaggaagaag

SEQ ID NO: 291943 - DNA, 25 bp, Homo sapien
tgcagctggttgtcagtctctgggc

SEQ ID NO: 291944 - DNA, 25 bp, Homo sapien
aaatggatggcgcttccctgaaagc

SEQ ID NO: 291945 - DNA, 25 bp, Homo sapien
catgaagtgttatgtaatgccacgg

SEQ ID NO: 291946 - DNA, 25 bp, Homo sapien
tggctgtagccatagccactcctgc

SEQ ID NO: 291947 - DNA, 25 bp, Homo sapien
gctgtagccatagccactcctgcgg

SEQ ID NO: 291948 - DNA, 25 bp, Homo sapien
tgtagccatagccactcctgcggta

SEQ ID NO: 291949 - DNA, 25 bp, Homo sapien
tagccatagccactcctgcggtatc

SEQ ID NO: 291950 - DNA, 25 bp, Homo sapien
aactgctgctcgctggtgcacaagg

SEQ ID NO: 291951 - DNA, 25 bp, Homo sapien
tgctcgctggtgcacaagggaaact

SEQ ID NO: 291952 - DNA, 25 bp, Homo sapien
ccccgcgggatcctcatccatcatg

SEQ ID NO: 291953 - DNA, 25 bp, Homo sapien
gctgctcgctggtgcacaagggaaa

SEQ ID NO: 291954 - DNA, 25 bp, Homo sapien
catcagcctggcactgcgcctgacc

SEQ ID NO: 291955 - DNA, 25 bp, Homo sapien
gcctcggcgagggtggcccagtgag

SEQ ID NO: 291956 - DNA, 25 bp, Homo sapien
cctggtgtgcagtatccagagtgca

SEQ ID NO: 291957 - DNA, 25 bp, Homo sapien
cagtgagtggcccatccatcagcct

SEQ ID NO: 291958 - DNA, 25 bp, Homo sapien
ccccatgtgggctctcagtgtctgt

SEQ ID NO: 291959 - DNA, 25 bp, Homo sapien
tgtgcacgaacaggtctgggtggat

SEQ ID NO: 291960 - DNA, 25 bp, Homo sapien
acagggaccccatgtgggctctcag

SEQ ID NO: 291961 - DNA, 25 bp, Homo sapien
gctgttggtgcagatgtgtgcatct

SEQ ID NO: 291962 - DNA, 25 bp, Homo sapien
gccaagtcaggatgcgccagacgct

SEQ ID NO: 291963 - DNA, 25 bp, Homo sapien
catggtagcgtgtggcggctgcttc

SEQ ID NO: 291964 - DNA, 25 bp, Homo sapien
acactgggcggacggacggtgtgtc

SEQ ID NO: 291965 - DNA, 25 bp, Homo sapien
tccaaggagaccaggacactgggcg

SEQ ID NO: 291966 - DNA, 25 bp, Homo sapien
ggatggatgaagagctagggactgc

SEQ ID NO: 291967 - DNA, 25 bp, Homo sapien
gggtacacagaggatgctcgtactt

SEQ ID NO: 291968 - DNA, 25 bp, Homo sapien
tcgtacttagttgtgggatggatga

SEQ ID NO: 291969 - DNA, 25 bp, Homo sapien
ttctcctagtgacaccgcagactcc

SEQ ID NO: 291970 - DNA, 25 bp, Homo sapien
agagtagcccgacactgaaagtcta

SEQ ID NO: 291971 - DNA, 25 bp, Homo sapien
cagactggaggcattgccagggaga

SEQ ID NO: 291972 - DNA, 25 bp, Homo sapien
actggaggcattgccagggagaggc

SEQ ID NO: 291973 - DNA, 25 bp, Homo sapien
agctgctgagagtagcccgacactg

SEQ ID NO: 291974 - DNA, 25 bp, Homo sapien
tgtgataccgcatcagagtggaacc

SEQ ID NO: 291975 - DNA, 25 bp, Homo sapien
ggacaccctgtgaggttggcaccct

SEQ ID NO: 291976 - DNA, 25 bp, Homo sapien
gtgggggacaccctgtgaggttggc

SEQ ID NO: 291977 - DNA, 25 bp, Homo sapien
ctgtgataccgcatcagagtggaac

SEQ ID NO: 291978 - DNA, 25 bp, Homo sapien
caactgggagagggacaatactaac

SEQ ID NO: 291979 - DNA, 25 bp, Homo sapien
cacctgctcatcaactgggagaggg

SEQ ID NO: 291980 - DNA, 25 bp, Homo sapien
tgtcatggaccaggagcctttagca

SEQ ID NO: 291981 - DNA, 25 bp, Homo sapien
gtattcatcaagtccctgggctcag

SEQ ID NO: 291982 - DNA, 25 bp, Homo sapien
acagcacaaatattccggcgtcggc

SEQ ID NO: 291983 - DNA, 25 bp, Homo sapien
ggagctcacccctctgaaggaaatg

SEQ ID NO: 291984 - DNA, 25 bp, Homo sapien
cctgcctcagtctgttgcctctgat

SEQ ID NO: 291985 - DNA, 25 bp, Homo sapien
caaccaacttgcctgaggcggctgc

SEQ ID NO: 291986 - DNA, 25 bp, Homo sapien
cagctggcgggagacgaggcgcgag

SEQ ID NO: 291987 - DNA, 25 bp, Homo sapien
tgttgcctctgatgagacgctcaac

SEQ ID NO: 291988 - DNA, 25 bp, Homo sapien
atccacgcaccaggagcggagagcc

SEQ ID NO: 291989 - DNA, 25 bp, Homo sapien
ggagagcccggaactaagaactgta

SEQ ID NO: 291990 - DNA, 25 bp, Homo sapien
cctgggtcctcaagaagagtcaccg

SEQ ID NO: 291991 - DNA, 25 bp, Homo sapien
tcaccgtttccgtgccaggaggatc

SEQ ID NO: 291992 - DNA, 25 bp, Homo sapien
cgcaaactttgaggccggggctcat

SEQ ID NO: 291993 - DNA, 25 bp, Homo sapien
cgcccgccgcaaactttgaggccgg

SEQ ID NO: 291994 - DNA, 25 bp, Homo sapien
gaggccggggctcatgggccggtgg

SEQ ID NO: 291995 - DNA, 25 bp, Homo sapien
gcccgcccgccgcaaactttgaggc

SEQ ID NO: 291996 - DNA, 25 bp, Homo sapien
cgctgctccgacagcaggttgggca

SEQ ID NO: 291997 - DNA, 25 bp, Homo sapien
ggcacggtgtagatgccccggtaca

SEQ ID NO: 291998 - DNA, 25 bp, Homo sapien
tccgggatgtccaccgggcgctgct

SEQ ID NO: 291999 - DNA, 25 bp, Homo sapien
atcaacgccgccgtcaccgggtgga

SEQ ID NO: 292000 - DNA, 25 bp, Homo sapien
gcgcacaggtaggagggccgccggg

SEQ ID NO: 292001 - DNA, 25 bp, Homo sapien
ggcgcacaggtaggagggccgccgg

SEQ ID NO: 292002 - DNA, 25 bp, Homo sapien
gggcgcacaggtaggagggccgccg

SEQ ID NO: 292003 - DNA, 25 bp, Homo sapien
cccggggtgcggacaggtcttgccg

SEQ ID NO: 292004 - DNA, 25 bp, Homo sapien
gggtgcggacaggtcttgccgcggg

SEQ ID NO: 292005 - DNA, 25 bp, Homo sapien
gccgctctccgcctgagcgaccccc

SEQ ID NO: 292006 - DNA, 25 bp, Homo sapien
ttgccgcggggcacagctgctagct

SEQ ID NO: 292007 - DNA, 25 bp, Homo sapien
gcggggcccggcaagtttccgcagc

SEQ ID NO: 292008 - DNA, 25 bp, Homo sapien
ctgcggggcccggcaagtttccgca

SEQ ID NO: 292009 - DNA, 25 bp, Homo sapien
tgcggggcccggcaagtttccgcag

SEQ ID NO: 292010 - DNA, 25 bp, Homo sapien
cggggcccggcaagtttccgcagcg

SEQ ID NO: 292011 - DNA, 25 bp, Homo sapien
cgccgactgcgcggccccgtgaccc

SEQ ID NO: 292012 - DNA, 25 bp, Homo sapien
cacgagcggaatgtcaatgcgagca

SEQ ID NO: 292013 - DNA, 25 bp, Homo sapien
tttttaaagcgacacgagcggaatg

SEQ ID NO: 292014 - DNA, 25 bp, Homo sapien
atgtcaatgcgagcagagagccgcg

SEQ ID NO: 292015 - DNA, 25 bp, Homo sapien
ctgctgcccgagcagattgaatttt

SEQ ID NO: 292016 - DNA, 25 bp, Homo sapien
gggtgaatggtgaggtcatgtcggg

SEQ ID NO: 292017 - DNA, 25 bp, Homo sapien
tcctgcttggatggtcaggaggagg

SEQ ID NO: 292018 - DNA, 25 bp, Homo sapien
agggaaaaatctgcaggaggtttga

SEQ ID NO: 292019 - DNA, 25 bp, Homo sapien
gaggagaaggcctatgctccatctc

SEQ ID NO: 292020 - DNA, 25 bp, Homo sapien
cagagggcctgggtctcgcccagac

SEQ ID NO: 292021 - DNA, 25 bp, Homo sapien
gtctgcagcattccatcccgggctg

SEQ ID NO: 292022 - DNA, 25 bp, Homo sapien
tggcacatgtggctcctccgcgaat

SEQ ID NO: 292023 - DNA, 25 bp, Homo sapien
cgcgaatggcgtcctcccggcagag

SEQ ID NO: 292024 - DNA, 25 bp, Homo sapien
tggtgagagcatggcccgagggtgc

SEQ ID NO: 292025 - DNA, 25 bp, Homo sapien
gtgcacaagggtgccgtattctggg

SEQ ID NO: 292026 - DNA, 25 bp, Homo sapien
agagcctgcagatctggtgagagca

SEQ ID NO: 292027 - DNA, 25 bp, Homo sapien
caagggtgccgtattctgggacctc

SEQ ID NO: 292028 - DNA, 25 bp, Homo sapien
aggagagaatggagtaggctgggac

SEQ ID NO: 292029 - DNA, 25 bp, Homo sapien
gagagaatggagtaggctgggactt

SEQ ID NO: 292030 - DNA, 25 bp, Homo sapien
ggagagaatggagtaggctgggact

SEQ ID NO: 292031 - DNA, 25 bp, Homo sapien
agagaatggagtaggctgggacttc

SEQ ID NO: 292032 - DNA, 25 bp, Homo sapien
gcatgtaacccagtgagcgcatggc

SEQ ID NO: 292033 - DNA, 25 bp, Homo sapien
gctccacctcgttgggcatgtaacc

SEQ ID NO: 292034 - DNA, 25 bp, Homo sapien
gatgaagccattgccgtcacggtca

SEQ ID NO: 292035 - DNA, 25 bp, Homo sapien
acccagtgagcgcatggctgtgccc

SEQ ID NO: 292036 - DNA, 25 bp, Homo sapien
gtcccagaagggtcacaaactcctc

SEQ ID NO: 292037 - DNA, 25 bp, Homo sapien
tcggtgccatggaacttctctggga

SEQ ID NO: 292038 - DNA, 25 bp, Homo sapien
gacagtatcaaagtcggtgccatgg

SEQ ID NO: 292039 - DNA, 25 bp, Homo sapien
tatcaaagtcggtgccatggaactt

SEQ ID NO: 292040 - DNA, 25 bp, Homo sapien
tcctcctccgtcatgatgatgttct

SEQ ID NO: 292041 - DNA, 25 bp, Homo sapien
aggtgtcgtagagcagccgcttcag

SEQ ID NO: 292042 - DNA, 25 bp, Homo sapien
tggacaggtgctcgcagaaggtgtc

SEQ ID NO: 292043 - DNA, 25 bp, Homo sapien
gatgttctctatgtccttcatggac

SEQ ID NO: 292044 - DNA, 25 bp, Homo sapien
tggcgaaggcgcagatgagactctt

SEQ ID NO: 292045 - DNA, 25 bp, Homo sapien
gcacgcaagtctggcggatctgctg

SEQ ID NO: 292046 - DNA, 25 bp, Homo sapien
cctggttggccgcaatgagcatgac

SEQ ID NO: 292047 - DNA, 25 bp, Homo sapien
catgccactgcgcagcacctggttg

SEQ ID NO: 292048 - DNA, 25 bp, Homo sapien
taattcttacacaggccgcatggca

SEQ ID NO: 292049 - DNA, 25 bp, Homo sapien
taagaagtggctctaggcccaagga

SEQ ID NO: 292050 - DNA, 25 bp, Homo sapien
tgagtgctccttacaggccagggtg

SEQ ID NO: 292051 - DNA, 25 bp, Homo sapien
cagtcacaataggaagccaagcccg

SEQ ID NO: 292052 - DNA, 25 bp, Homo sapien
gtgatcagttagtcaccaacactgc

SEQ ID NO: 292053 - DNA, 25 bp, Homo sapien
tgtgatcagttagtcaccaacactg

SEQ ID NO: 292054 - DNA, 25 bp, Homo sapien
ttgtgatcagttagtcaccaacact

SEQ ID NO: 292055 - DNA, 25 bp, Homo sapien
tggttcatccgagtgaaccaggtct

SEQ ID NO: 292056 - DNA, 25 bp, Homo sapien
ctggctggttcatccgagtgaacca

SEQ ID NO: 292057 - DNA, 25 bp, Homo sapien
ggttcatccgagtgaaccaggtctc

SEQ ID NO: 292058 - DNA, 25 bp, Homo sapien
gctggttcatccgagtgaaccaggt

SEQ ID NO: 292059 - DNA, 25 bp, Homo sapien
acagaggagtctgtctctgtcactc

SEQ ID NO: 292060 - DNA, 25 bp, Homo sapien
ctacaggctcgtgccgccattccca

SEQ ID NO: 292061 - DNA, 25 bp, Homo sapien
gactacaggctcgtgccgccattcc

SEQ ID NO: 292062 - DNA, 25 bp, Homo sapien
ttgagacagaggagtctgtctctgt

SEQ ID NO: 292063 - DNA, 25 bp, Homo sapien
gggctgtgtctacccagaataactg

SEQ ID NO: 292064 - DNA, 25 bp, Homo sapien
catttggaactcaagggaaagttca

SEQ ID NO: 292065 - DNA, 25 bp, Homo sapien
taattctaaactttccaggagtgtg

SEQ ID NO: 292066 - DNA, 25 bp, Homo sapien
gcttagcatcaagttggattaccac

SEQ ID NO: 292067 - DNA, 25 bp, Homo sapien
tcctggctgttagaatatgtcaaac

SEQ ID NO: 292068 - DNA, 25 bp, Homo sapien
cagccttcgtgttttgaaccacaga

SEQ ID NO: 292069 - DNA, 25 bp, Homo sapien
aaaggttcatatcaggacagcccag

SEQ ID NO: 292070 - DNA, 25 bp, Homo sapien
caaaggccctagacgtgcaacactt

SEQ ID NO: 292071 - DNA, 25 bp, Homo sapien
gaacatgacgcccacgatgatggtg

SEQ ID NO: 292072 - DNA, 25 bp, Homo sapien
tgatgtggtcgtagatagcgtccgc

SEQ ID NO: 292073 - DNA, 25 bp, Homo sapien
cgaaggcgcgctcgaagaacatgac

SEQ ID NO: 292074 - DNA, 25 bp, Homo sapien
aatttcgaagtcaacgtcgcggccg

SEQ ID NO: 292075 - DNA, 25 bp, Homo sapien
gcgggtccaaggtcagggatggcac

SEQ ID NO: 292076 - DNA, 25 bp, Homo sapien
ggcgggtccaaggtcagggatggca

SEQ ID NO: 292077 - DNA, 25 bp, Homo sapien
ggtaccacctaccaggcatgtggca

SEQ ID NO: 292078 - DNA, 25 bp, Homo sapien
ttcagtggtaccacctaccaggcat

SEQ ID NO: 292079 - DNA, 25 bp, Homo sapien
tgtaatcctcacaatcgtgctcagg

SEQ ID NO: 292080 - DNA, 25 bp, Homo sapien
tcgtgctcaggttactattaatatc

SEQ ID NO: 292081 - DNA, 25 bp, Homo sapien
tggtcacaggcagcatagcactagt

SEQ ID NO: 292082 - DNA, 25 bp, Homo sapien
caagagatgggacagtagcaatgct

SEQ ID NO: 292083 - DNA, 25 bp, Homo sapien
taacagaaccacttgcaagagatgg

SEQ ID NO: 292084 - DNA, 25 bp, Homo sapien
tgtataaggcctactccagcacagt

SEQ ID NO: 292085 - DNA, 25 bp, Homo sapien
acttgtgcttgatgtgtttccacag

SEQ ID NO: 292086 - DNA, 25 bp, Homo sapien
tttcttgccaacagcgaatggtggt

SEQ ID NO: 292087 - DNA, 25 bp, Homo sapien
cgaatggtggtccatgaagagtacc

SEQ ID NO: 292088 - DNA, 25 bp, Homo sapien
catgaagagtaccttgagcatcatc

SEQ ID NO: 292089 - DNA, 25 bp, Homo sapien
caacagcgaatggtggtccatgaag

SEQ ID NO: 292090 - DNA, 25 bp, Homo sapien
gaagatcaggtagagttaacaaagc

SEQ ID NO: 292091 - DNA, 25 bp, Homo sapien
ccccatggccaagacagtgaggtat

SEQ ID NO: 292092 - DNA, 25 bp, Homo sapien
ttgcagagggctttgaagtggtctc

SEQ ID NO: 292093 - DNA, 25 bp, Homo sapien
gagtggctaagacccctaggccagg

SEQ ID NO: 292094 - DNA, 25 bp, Homo sapien
aactcatcagagtggaactgtggca

SEQ ID NO: 292095 - DNA, 25 bp, Homo sapien
cccagagaggtatgactgcttacca

SEQ ID NO: 292096 - DNA, 25 bp, Homo sapien
ggttcccatagctagaatcagtgga

SEQ ID NO: 292097 - DNA, 25 bp, Homo sapien
taataggcagaatacaccaagcttg

SEQ ID NO: 292098 - DNA, 25 bp, Homo sapien
tctggataatccagctctggctgaa

SEQ ID NO: 292099 - DNA, 25 bp, Homo sapien
agattctggataatccagctctggc

SEQ ID NO: 292100 - DNA, 25 bp, Homo sapien
gataatccagctctggctgaatcac

SEQ ID NO: 292101 - DNA, 25 bp, Homo sapien
tggataatccagctctggctgaatc

SEQ ID NO: 292102 - DNA, 25 bp, Homo sapien
acaaagatacacctcaggtaggaaa

SEQ ID NO: 292103 - DNA, 25 bp, Homo sapien
tcgtcttcacaaagatacacctcag

SEQ ID NO: 292104 - DNA, 25 bp, Homo sapien
taggcttcaacttcgtcttcacaaa

SEQ ID NO: 292105 - DNA, 25 bp, Homo sapien
gcttcaacttcgtcttcacaaagat

SEQ ID NO: 292106 - DNA, 25 bp, Homo sapien
agtgacagatgaggaccagcttgat

SEQ ID NO: 292107 - DNA, 25 bp, Homo sapien
gaggccttgccacaggacagtgaca

SEQ ID NO: 292108 - DNA, 25 bp, Homo sapien
gacagatgaggaccagcttgatgac

SEQ ID NO: 292109 - DNA, 25 bp, Homo sapien
caggtgccccatgacagagccaatg

SEQ ID NO: 292110 - DNA, 25 bp, Homo sapien
gctctcagtgtttgcagcttgttct

SEQ ID NO: 292111 - DNA, 25 bp, Homo sapien
gcagctctcagtgtttgcagcttgt

SEQ ID NO: 292112 - DNA, 25 bp, Homo sapien
ctcagaaatcagggactgggcggtc

SEQ ID NO: 292113 - DNA, 25 bp, Homo sapien
aaatcagggactgggcggtcagccc

SEQ ID NO: 292114 - DNA, 25 bp, Homo sapien
cagaaaagatagcaagaggagagcc

SEQ ID NO: 292115 - DNA, 25 bp, Homo sapien
aatcttaacatcctccacaagtgag

SEQ ID NO: 292116 - DNA, 25 bp, Homo sapien
ggaaaggcccatggcttcaaccctc

SEQ ID NO: 292117 - DNA, 25 bp, Homo sapien
gacaggagaccttggatctgccact

SEQ ID NO: 292118 - DNA, 25 bp, Homo sapien
taacagggcaagtaagttaatgctg

SEQ ID NO: 292119 - DNA, 25 bp, Homo sapien
gactctcctctagaagtgctttgac

SEQ ID NO: 292120 - DNA, 25 bp, Homo sapien
tctctattatcaagactactcagac

SEQ ID NO: 292121 - DNA, 25 bp, Homo sapien
aatagttaagaaccagcctgcttca

SEQ ID NO: 292122 - DNA, 25 bp, Homo sapien
atggcgaggccctccacggcacagt

SEQ ID NO: 292123 - DNA, 25 bp, Homo sapien
ctgagccgctgggacgtctcgtccg

SEQ ID NO: 292124 - DNA, 25 bp, Homo sapien
ggcagcgcctgagccgctgggacgt

SEQ ID NO: 292125 - DNA, 25 bp, Homo sapien
gggacgtctcgtccggctgctactc

SEQ ID NO: 292126 - DNA, 25 bp, Homo sapien
acccagagccgcacgggcccatccc

SEQ ID NO: 292127 - DNA, 25 bp, Homo sapien
gcccatccccgccaggtctgggaag

SEQ ID NO: 292128 - DNA, 25 bp, Homo sapien
gggcgctccgagggtacgtcccaca

SEQ ID NO: 292129 - DNA, 25 bp, Homo sapien
ccgcatctagggtccgggccgagct

SEQ ID NO: 292130 - DNA, 25 bp, Homo sapien
tccaaacttgtaagaaccttcacca

SEQ ID NO: 292131 - DNA, 25 bp, Homo sapien
tccacctcttccaaacttgtaagaa

SEQ ID NO: 292132 - DNA, 25 bp, Homo sapien
tcttccaaacttgtaagaaccttca

SEQ ID NO: 292133 - DNA, 25 bp, Homo sapien
caaacttgtaagaaccttcaccaca

SEQ ID NO: 292134 - DNA, 25 bp, Homo sapien
cacacgtaccgtttgacctaataat

SEQ ID NO: 292135 - DNA, 25 bp, Homo sapien
tagatgggaccacagaaccatgtac

SEQ ID NO: 292136 - DNA, 25 bp, Homo sapien
tccctccgaagagttaagctatgga

SEQ ID NO: 292137 - DNA, 25 bp, Homo sapien
tacagcggctatattcataagcaca

SEQ ID NO: 292138 - DNA, 25 bp, Homo sapien
gacctaactatgtgctaatcacaag

SEQ ID NO: 292139 - DNA, 25 bp, Homo sapien
gaatttactgagaagacataacaat

SEQ ID NO: 292140 - DNA, 25 bp, Homo sapien
ccgtcagcctaaataaaaaagcgag

SEQ ID NO: 292141 - DNA, 25 bp, Homo sapien
tactgtggtaataaagctacaagag

SEQ ID NO: 292142 - DNA, 25 bp, Homo sapien
caggagtgtgagaccgatctgacta

SEQ ID NO: 292143 - DNA, 25 bp, Homo sapien
tatatccagacagaacatagcacac

SEQ ID NO: 292144 - DNA, 25 bp, Homo sapien
tcaacttatctccaagggttaggct

SEQ ID NO: 292145 - DNA, 25 bp, Homo sapien
caagctaccagtccaatatatccag

SEQ ID NO: 292146 - DNA, 25 bp, Homo sapien
atcctactgtctcagcctcccaagt

SEQ ID NO: 292147 - DNA, 25 bp, Homo sapien
ccaagtagctgggaccacagacata

SEQ ID NO: 292148 - DNA, 25 bp, Homo sapien
agcctcaggatcccagactcaagca

SEQ ID NO: 292149 - DNA, 25 bp, Homo sapien
cttactgcagcctcaggatcccaga

SEQ ID NO: 292150 - DNA, 25 bp, Homo sapien
tctactaggaggtttcacaaggaag

SEQ ID NO: 292151 - DNA, 25 bp, Homo sapien
tttctactaggaggtttcacaagga

SEQ ID NO: 292152 - DNA, 25 bp, Homo sapien
caaatgaagtttgtcccaagaactt

SEQ ID NO: 292153 - DNA, 25 bp, Homo sapien
ctactaggaggtttcacaaggaagt

SEQ ID NO: 292154 - DNA, 25 bp, Homo sapien
tatgttactacgtttctggccagca

SEQ ID NO: 292155 - DNA, 25 bp, Homo sapien
ttcttcagataagaacgtggccagg

SEQ ID NO: 292156 - DNA, 25 bp, Homo sapien
acaaattagcctagcaaggtggtac

SEQ ID NO: 292157 - DNA, 25 bp, Homo sapien
gtaagaccaacactatgagaggctg

SEQ ID NO: 292158 - DNA, 25 bp, Homo sapien
gagacagctcaacggacaaggaaca

SEQ ID NO: 292159 - DNA, 25 bp, Homo sapien
tgtcagcaaccggaagcaaggattt

SEQ ID NO: 292160 - DNA, 25 bp, Homo sapien
taaaagcagtagcaaggcccagatt

SEQ ID NO: 292161 - DNA, 25 bp, Homo sapien
taatcggccatatcctcacaaaggt

SEQ ID NO: 292162 - DNA, 25 bp, Homo sapien
tctcttctttcccttatggtgaagt

SEQ ID NO: 292163 - DNA, 25 bp, Homo sapien
ccttcttcagtgtccaacaaggctc

SEQ ID NO: 292164 - DNA, 25 bp, Homo sapien
tcagtgtccaacaaggctctcttct

SEQ ID NO: 292165 - DNA, 25 bp, Homo sapien
agaaatccccgtcccttcttcagtg

SEQ ID NO: 292166 - DNA, 25 bp, Homo sapien
cgtgtttgcaaagcgtagaagtgaa

SEQ ID NO: 292167 - DNA, 25 bp, Homo sapien
tgttcgtgtttgcaaagcgtagaag

SEQ ID NO: 292168 - DNA, 25 bp, Homo sapien
tttgcaaagcgtagaagtgaaaata

SEQ ID NO: 292169 - DNA, 25 bp, Homo sapien
ctagtgttcgtgtttgcaaagcgta

SEQ ID NO: 292170 - DNA, 25 bp, Homo sapien
ggtaccttagcacaattgagacagt

SEQ ID NO: 292171 - DNA, 25 bp, Homo sapien
gattctcaaaatgaagtccacagac

SEQ ID NO: 292172 - DNA, 25 bp, Homo sapien
cacagactctgagatgcttacaggg

SEQ ID NO: 292173 - DNA, 25 bp, Homo sapien
taaactggtaatactctacactagc

SEQ ID NO: 292174 - DNA, 25 bp, Homo sapien
gaagaagcgggacataagtgaaaca

SEQ ID NO: 292175 - DNA, 25 bp, Homo sapien
ttacatctagtctgaaaacacattg

SEQ ID NO: 292176 - DNA, 25 bp, Homo sapien
cactggtagtgtagtgcacaggtag

SEQ ID NO: 292177 - DNA, 25 bp, Homo sapien
gagagaaatgtcatctatcacaaag

SEQ ID NO: 292178 - DNA, 25 bp, Homo sapien
gaagattctcatcctcccggatcag

SEQ ID NO: 292179 - DNA, 25 bp, Homo sapien
ctgaagattctcatcctcccggatc

SEQ ID NO: 292180 - DNA, 25 bp, Homo sapien
tctgattggcctggatgcactcaag

SEQ ID NO: 292181 - DNA, 25 bp, Homo sapien
gcactcaaggctgtgccgagtctct

SEQ ID NO: 292182 - DNA, 25 bp, Homo sapien
cggcacggcccacaaactctgtgct

SEQ ID NO: 292183 - DNA, 25 bp, Homo sapien
ccttgaacttgatgtgaagtctgta

SEQ ID NO: 292184 - DNA, 25 bp, Homo sapien
tgtaattggaaagggcaatgatggc

SEQ ID NO: 292185 - DNA, 25 bp, Homo sapien
gcaatgatggcatcctcggcacggc

SEQ ID NO: 292186 - DNA, 25 bp, Homo sapien
tccaggacccgatgcaggaagaatc

SEQ ID NO: 292187 - DNA, 25 bp, Homo sapien
gggcaacaccactaccaactgtctg

SEQ ID NO: 292188 - DNA, 25 bp, Homo sapien
gggcatgccacaacatatgctggta

SEQ ID NO: 292189 - DNA, 25 bp, Homo sapien
ggagttctagtctctctcaatctga

SEQ ID NO: 292190 - DNA, 25 bp, Homo sapien
atgctacacataaactctactacag

SEQ ID NO: 292191 - DNA, 25 bp, Homo sapien
ggaactggaacttgatattcagtga

SEQ ID NO: 292192 - DNA, 25 bp, Homo sapien
cagaataggagcaatgtatacctta

SEQ ID NO: 292193 - DNA, 25 bp, Homo sapien
tctactacagagattctttaccaca

SEQ ID NO: 292194 - DNA, 25 bp, Homo sapien
aaagccaagttacattatagacact

SEQ ID NO: 292195 - DNA, 25 bp, Homo sapien
taaatttcaccaaactcatgctcaa

SEQ ID NO: 292196 - DNA, 25 bp, Homo sapien
cagtgctacaaccaattcctcaaaa

SEQ ID NO: 292197 - DNA, 25 bp, Homo sapien
aaactcatgctcaaacaatgcatca

SEQ ID NO: 292198 - DNA, 25 bp, Homo sapien
atgaagctgaaatatatctcggcat

SEQ ID NO: 292199 - DNA, 25 bp, Homo sapien
ggcattcaacactttctataagctg

SEQ ID NO: 292200 - DNA, 25 bp, Homo sapien
tatatctcggcattcaacactttct

SEQ ID NO: 292201 - DNA, 25 bp, Homo sapien
gctgaaatatatctcggcattcaac

SEQ ID NO: 292202 - DNA, 25 bp, Homo sapien
caaacaagtatggatgtaatcagaa

SEQ ID NO: 292203 - DNA, 25 bp, Homo sapien
caagtatggatgtaatcagaagaca

SEQ ID NO: 292204 - DNA, 25 bp, Homo sapien
aacaagtatggatgtaatcagaaga

SEQ ID NO: 292205 - DNA, 25 bp, Homo sapien
gccaaacaagtatggatgtaatcag

SEQ ID NO: 292206 - DNA, 25 bp, Homo sapien
gacactgctcaaaggttgaaaactg

SEQ ID NO: 292207 - DNA, 25 bp, Homo sapien
gcaccaagcatggtatgcaaatgag

SEQ ID NO: 292208 - DNA, 25 bp, Homo sapien
gattgcgttgttcagtctcttcagc

SEQ ID NO: 292209 - DNA, 25 bp, Homo sapien
tttcactggcatagacctccatgca

SEQ ID NO: 292210 - DNA, 25 bp, Homo sapien
tctctcgtaggtgacaggattctgc

SEQ ID NO: 292211 - DNA, 25 bp, Homo sapien
tcagtgactagcactgggacttgac

SEQ ID NO: 292212 - DNA, 25 bp, Homo sapien
ctagcctggacacgcctgtgagaag

SEQ ID NO: 292213 - DNA, 25 bp, Homo sapien
ttaagtcctagttctgtcgtcagtg

SEQ ID NO: 292214 - DNA, 25 bp, Homo sapien
cagagaacactgtagatatctttat

SEQ ID NO: 292215 - DNA, 25 bp, Homo sapien
agaacactgtagatatctttatgtc

SEQ ID NO: 292216 - DNA, 25 bp, Homo sapien
gacagagaacactgtagatatcttt

SEQ ID NO: 292217 - DNA, 25 bp, Homo sapien
aagacagagaacactgtagatatct

SEQ ID NO: 292218 - DNA, 25 bp, Homo sapien
tccacagcgaatatacataaaaggc

SEQ ID NO: 292219 - DNA, 25 bp, Homo sapien
gccaaacagttatgattgcattacc

SEQ ID NO: 292220 - DNA, 25 bp, Homo sapien
gaaacaaaatgcaacccttactcat

SEQ ID NO: 292221 - DNA, 25 bp, Homo sapien
gagtggtggcaggttaacatcaatg

SEQ ID NO: 292222 - DNA, 25 bp, Homo sapien
ccagcaattttcactttagtggaaa

SEQ ID NO: 292223 - DNA, 25 bp, Homo sapien
aataatacagtccagcaattttcac

SEQ ID NO: 292224 - DNA, 25 bp, Homo sapien
cagtgtcaatcagcaatctaaaaaa

SEQ ID NO: 292225 - DNA, 25 bp, Homo sapien
taaaagcaatgaagttccctaactc

SEQ ID NO: 292226 - DNA, 25 bp, Homo sapien
ctcattgatgttggaaatcctccag

SEQ ID NO: 292227 - DNA, 25 bp, Homo sapien
ccaggcgttgttcatatcaaaaccc

SEQ ID NO: 292228 - DNA, 25 bp, Homo sapien
gagaattgcggtttctgcaaaggca

SEQ ID NO: 292229 - DNA, 25 bp, Homo sapien
gtctaagttcaaatgttctgccaca

SEQ ID NO: 292230 - DNA, 25 bp, Homo sapien
aaggcactggctgtgaaacagtcca

SEQ ID NO: 292231 - DNA, 25 bp, Homo sapien
actggctgtgaaacagtccacaggg

SEQ ID NO: 292232 - DNA, 25 bp, Homo sapien
tacactcaggaaagcctaatgcagc

SEQ ID NO: 292233 - DNA, 25 bp, Homo sapien
tttgagacagctaagaggaccgcag

SEQ ID NO: 292234 - DNA, 25 bp, Homo sapien
tgaaaactctgacggctagccacaa

SEQ ID NO: 292235 - DNA, 25 bp, Homo sapien
gcgcctggccaagaaggatatagtt

SEQ ID NO: 292236 - DNA, 25 bp, Homo sapien
tgtctctctctggataatccaatct

SEQ ID NO: 292237 - DNA, 25 bp, Homo sapien
tgaaggcaataaggcctttaatcca

SEQ ID NO: 292238 - DNA, 25 bp, Homo sapien
tcttcttttttcaatagtgaaggca

SEQ ID NO: 292239 - DNA, 25 bp, Homo sapien
tttcaatagtgaaggcaataaggcc

SEQ ID NO: 292240 - DNA, 25 bp, Homo sapien
tccaggcaggcactatgagctcttg

SEQ ID NO: 292241 - DNA, 25 bp, Homo sapien
gaaacttgatacactttccagttct

SEQ ID NO: 292242 - DNA, 25 bp, Homo sapien
gggatgcgcttccaggacctgaaac

SEQ ID NO: 292243 - DNA, 25 bp, Homo sapien
tgagctcttgaggatagctaccaca

SEQ ID NO: 292244 - DNA, 25 bp, Homo sapien
ctcacagaatgtaagaaggatattg

SEQ ID NO: 292245 - DNA, 25 bp, Homo sapien
aaagccctgctaacagctgaagcta

SEQ ID NO: 292246 - DNA, 25 bp, Homo sapien
acaaagacaatcagagccaactcga

SEQ ID NO: 292247 - DNA, 25 bp, Homo sapien
tattgaaatagcaagtccagccact

SEQ ID NO: 292248 - DNA, 25 bp, Homo sapien
cagtggaatgaagtttctaactgta

SEQ ID NO: 292249 - DNA, 25 bp, Homo sapien
actggattggcccaactcagggaga

SEQ ID NO: 292250 - DNA, 25 bp, Homo sapien
gacaaatcccttcctacaatctcaa

SEQ ID NO: 292251 - DNA, 25 bp, Homo sapien
tgtaggaattccacaaggagacaaa

SEQ ID NO: 292252 - DNA, 25 bp, Homo sapien
cattgggaaagtctcgagaagtgtt

SEQ ID NO: 292253 - DNA, 25 bp, Homo sapien
gttcctagttgacagcttgctgcca

SEQ ID NO: 292254 - DNA, 25 bp, Homo sapien
tgctgccactcgatcgggagtcaga

SEQ ID NO: 292255 - DNA, 25 bp, Homo sapien
gaactccacgtcagaaaggtctccc

SEQ ID NO: 292256 - DNA, 25 bp, Homo sapien
caagatcaaaagcttctgcggttgg

SEQ ID NO: 292257 - DNA, 25 bp, Homo sapien
cctttggctcggtttgccacagcag

SEQ ID NO: 292258 - DNA, 25 bp, Homo sapien
cagcagctgcataggagcgtgcatc

SEQ ID NO: 292259 - DNA, 25 bp, Homo sapien
ggttggatggctaaactctctgctc

SEQ ID NO: 292260 - DNA, 25 bp, Homo sapien
gactgaaaactcctccgaatagaat

SEQ ID NO: 292261 - DNA, 25 bp, Homo sapien
tctgagtgcacagcaaccgcagaga

SEQ ID NO: 292262 - DNA, 25 bp, Homo sapien
gcacagcaaccgcagagactgaaaa

SEQ ID NO: 292263 - DNA, 25 bp, Homo sapien
tttgccatccccataaacacaactt

SEQ ID NO: 292264 - DNA, 25 bp, Homo sapien
gattccccgggcaaaatatttgaca

SEQ ID NO: 292265 - DNA, 25 bp, Homo sapien
tccaaaatctgtatggatgattccc

SEQ ID NO: 292266 - DNA, 25 bp, Homo sapien
tgtatggatgattccccgggcaaaa

SEQ ID NO: 292267 - DNA, 25 bp, Homo sapien
catggtataaggaaagtggctcttt

SEQ ID NO: 292268 - DNA, 25 bp, Homo sapien
ttgtgctttcaagagctgatagcca

SEQ ID NO: 292269 - DNA, 25 bp, Homo sapien
caagtgatggagccattttgtgctt

SEQ ID NO: 292270 - DNA, 25 bp, Homo sapien
tgtgctttcaagagctgatagccaa

SEQ ID NO: 292271 - DNA, 25 bp, Homo sapien
tctatggttcggtaataagggtcca

SEQ ID NO: 292272 - DNA, 25 bp, Homo sapien
cggtaataagggtccagcaagagct

SEQ ID NO: 292273 - DNA, 25 bp, Homo sapien
agtgtactagcaccggccgctgatc

SEQ ID NO: 292274 - DNA, 25 bp, Homo sapien
cagcaagagcttagccaatgccaca

SEQ ID NO: 292275 - DNA, 25 bp, Homo sapien
gatgaacacagtcaagccactgcag

SEQ ID NO: 292276 - DNA, 25 bp, Homo sapien
tgggcaacgttcattcagatcatcc

SEQ ID NO: 292277 - DNA, 25 bp, Homo sapien
cagatcatccgagttctccccatga

SEQ ID NO: 292278 - DNA, 25 bp, Homo sapien
cacaccggtcagcaaatttatggcc

SEQ ID NO: 292279 - DNA, 25 bp, Homo sapien
tgaaagccttgttgcctgcccgaag

SEQ ID NO: 292280 - DNA, 25 bp, Homo sapien
gaagtgaccacacggaacatgtccg

SEQ ID NO: 292281 - DNA, 25 bp, Homo sapien
gcgttgttgcacaggaatgttccaa

SEQ ID NO: 292282 - DNA, 25 bp, Homo sapien
tccaaacaggcaggaataggtatgc

SEQ ID NO: 292283 - DNA, 25 bp, Homo sapien
acagtggaaaggctgaaggatacat

SEQ ID NO: 292284 - DNA, 25 bp, Homo sapien
cccaaattccttctgctgaccacag

SEQ ID NO: 292285 - DNA, 25 bp, Homo sapien
tgctgaccacagtggaaaggctgaa

SEQ ID NO: 292286 - DNA, 25 bp, Homo sapien
ccaaattccttctgctgaccacagt

SEQ ID NO: 292287 - DNA, 25 bp, Homo sapien
ttaagtgcctctcccgtaagacaga

SEQ ID NO: 292288 - DNA, 25 bp, Homo sapien
catgtgagcagagaatcagacagac

SEQ ID NO: 292289 - DNA, 25 bp, Homo sapien
tcctgctggcacaaaagcttggctt

SEQ ID NO: 292290 - DNA, 25 bp, Homo sapien
cattgcttattgacactgggagggt

SEQ ID NO: 292291 - DNA, 25 bp, Homo sapien
gatacaggtctatcccaagaggacc

SEQ ID NO: 292292 - DNA, 25 bp, Homo sapien
aatatgccccaataagtcttctagg

SEQ ID NO: 292293 - DNA, 25 bp, Homo sapien
ttttcacctaagagccacttgagag

SEQ ID NO: 292294 - DNA, 25 bp, Homo sapien
gaagcagcaccaatggatacaggtc

SEQ ID NO: 292295 - DNA, 25 bp, Homo sapien
ccacagcatcaggttacgcacatgg

SEQ ID NO: 292296 - DNA, 25 bp, Homo sapien
ctgggtatggtgcacagctgtcgtc

SEQ ID NO: 292297 - DNA, 25 bp, Homo sapien
atcaggttacgcacatggcacacag

SEQ ID NO: 292298 - DNA, 25 bp, Homo sapien
tggtgcacagctgtcgtccacaggg

SEQ ID NO: 292299 - DNA, 25 bp, Homo sapien
catctgccttttaagcctcagaaga

SEQ ID NO: 292300 - DNA, 25 bp, Homo sapien
tcatggcaaataggcaggagcacag

SEQ ID NO: 292301 - DNA, 25 bp, Homo sapien
gcatctgccttttaagcctcagaag

SEQ ID NO: 292302 - DNA, 25 bp, Homo sapien
caaatcatggcaaataggcaggagc

SEQ ID NO: 292303 - DNA, 25 bp, Homo sapien
caggctgtggtcagattgtcgtatg

SEQ ID NO: 292304 - DNA, 25 bp, Homo sapien
tgggcttccctaggctgtcggcaga

SEQ ID NO: 292305 - DNA, 25 bp, Homo sapien
tgtcggcagaaaggggatcctctcc

SEQ ID NO: 292306 - DNA, 25 bp, Homo sapien
tcagctctagtgagcgccggtgctc

SEQ ID NO: 292307 - DNA, 25 bp, Homo sapien
tcctgtatctcaatgcctgccctgt

SEQ ID NO: 292308 - DNA, 25 bp, Homo sapien
cctgtatctcaatgcctgccctgtg

SEQ ID NO: 292309 - DNA, 25 bp, Homo sapien
agctcatatccagatggctcctcag

SEQ ID NO: 292310 - DNA, 25 bp, Homo sapien
actgaggagaacactgagcccactc

SEQ ID NO: 292311 - DNA, 25 bp, Homo sapien
ctccttttctaagagagggtcctct

SEQ ID NO: 292312 - DNA, 25 bp, Homo sapien
tctgctgttcagaaatgccctgtga

SEQ ID NO: 292313 - DNA, 25 bp, Homo sapien
gaactgtccacgtttggtcctctgg

SEQ ID NO: 292314 - DNA, 25 bp, Homo sapien
gactgtgaggtaccatagccaactt

SEQ ID NO: 292315 - DNA, 25 bp, Homo sapien
tagccaacttttgcatctactggga

SEQ ID NO: 292316 - DNA, 25 bp, Homo sapien
tgagagtgctgccaagggaagtcct

SEQ ID NO: 292317 - DNA, 25 bp, Homo sapien
tgactcaatctgacgcaggcgctgt

SEQ ID NO: 292318 - DNA, 25 bp, Homo sapien
atcatcgtccaggtggctgcgggaa

SEQ ID NO: 292319 - DNA, 25 bp, Homo sapien
tcatagcagacagctgacggctcag

SEQ ID NO: 292320 - DNA, 25 bp, Homo sapien
tgcagatggccttcctgagtggcta

SEQ ID NO: 292321 - DNA, 25 bp, Homo sapien
ccttgggcagctatggaggaatacc

SEQ ID NO: 292322 - DNA, 25 bp, Homo sapien
catcgctgtcgtggaggctcatctc

SEQ ID NO: 292323 - DNA, 25 bp, Homo sapien
tgtgcccgcctttaatgtacgctga

SEQ ID NO: 292324 - DNA, 25 bp, Homo sapien
tacgctgaccacttgagagccaggc

SEQ ID NO: 292325 - DNA, 25 bp, Homo sapien
agaatgaacctggtctcctcccaaa

SEQ ID NO: 292326 - DNA, 25 bp, Homo sapien
acagaatgaacctggtctcctccca

SEQ ID NO: 292327 - DNA, 25 bp, Homo sapien
aacagaatgaacctggtctcctccc

SEQ ID NO: 292328 - DNA, 25 bp, Homo sapien
cagaatgaacctggtctcctcccaa

SEQ ID NO: 292329 - DNA, 25 bp, Homo sapien
gatccagattgctttccgagtcggg

SEQ ID NO: 292330 - DNA, 25 bp, Homo sapien
tctgatccagattgctttccgagtc

SEQ ID NO: 292331 - DNA, 25 bp, Homo sapien
acaaacagttctgatccagattgct

SEQ ID NO: 292332 - DNA, 25 bp, Homo sapien
cagttctgatccagattgctttccg

SEQ ID NO: 292333 - DNA, 25 bp, Homo sapien
ggaccaggttactgacaggagatgg

SEQ ID NO: 292334 - DNA, 25 bp, Homo sapien
agatgggaccaggttactgacagga

SEQ ID NO: 292335 - DNA, 25 bp, Homo sapien
tgggaccaggttactgacaggagat

SEQ ID NO: 292336 - DNA, 25 bp, Homo sapien
atgggaccaggttactgacaggaga

SEQ ID NO: 292337 - DNA, 25 bp, Homo sapien
aaggcactgtcgcacgcatagcagt

SEQ ID NO: 292338 - DNA, 25 bp, Homo sapien
tgggcggccaggtggtcaggaagcc

SEQ ID NO: 292339 - DNA, 25 bp, Homo sapien
tcgcacgcatagcagtgggcggcca

SEQ ID NO: 292340 - DNA, 25 bp, Homo sapien
agccagaaggcactgtcgcacgcat

SEQ ID NO: 292341 - DNA, 25 bp, Homo sapien
cgtttgatcaacacggtcagtgtcc

SEQ ID NO: 292342 - DNA, 25 bp, Homo sapien
acgtttgatcaacacggtcagtgtc

SEQ ID NO: 292343 - DNA, 25 bp, Homo sapien
cacgtttgatcaacacggtcagtgt

SEQ ID NO: 292344 - DNA, 25 bp, Homo sapien
tgctgccattttggactgctctgct

SEQ ID NO: 292345 - DNA, 25 bp, Homo sapien
caacatggcagatagactgctgcca

SEQ ID NO: 292346 - DNA, 25 bp, Homo sapien
gcatgcaaagccagggacaagtagc

SEQ ID NO: 292347 - DNA, 25 bp, Homo sapien
ggagtaaggagccttgcccaacggc

SEQ ID NO: 292348 - DNA, 25 bp, Homo sapien
aaagacaaactttgccgtgtgtaat

SEQ ID NO: 292349 - DNA, 25 bp, Homo sapien
acaatgttagttttggccagcaggt

SEQ ID NO: 292350 - DNA, 25 bp, Homo sapien
ccgtgtgtaatttgcatgtgctgga

SEQ ID NO: 292351 - DNA, 25 bp, Homo sapien
gcaggtatgcggagggaaaccaact

SEQ ID NO: 292352 - DNA, 25 bp, Homo sapien
ggagcagaatacgttcccacaattc

SEQ ID NO: 292353 - DNA, 25 bp, Homo sapien
tggagcagaatacgttcccacaatt

SEQ ID NO: 292354 - DNA, 25 bp, Homo sapien
ctggagcagaatacgttcccacaat

SEQ ID NO: 292355 - DNA, 25 bp, Homo sapien
gcaagacttgcatactcgactgggt

SEQ ID NO: 292356 - DNA, 25 bp, Homo sapien
aatgggcttatccagttcaaggtca

SEQ ID NO: 292357 - DNA, 25 bp, Homo sapien
gaactggaaccttctggttacaaca

SEQ ID NO: 292358 - DNA, 25 bp, Homo sapien
cttgtgggatgtaggctgctatagc

SEQ ID NO: 292359 - DNA, 25 bp, Homo sapien
gaaaggtgccctgaatctcctcaag

SEQ ID NO: 292360 - DNA, 25 bp, Homo sapien
tacagctatggagagttacggttcc

SEQ ID NO: 292361 - DNA, 25 bp, Homo sapien
gaaccctacgaagtcaccaagtggc

SEQ ID NO: 292362 - DNA, 25 bp, Homo sapien
ccactggaagtcagagacgtgctca

SEQ ID NO: 292363 - DNA, 25 bp, Homo sapien
caacttaaatggtcaccgaggctac

SEQ ID NO: 292364 - DNA, 25 bp, Homo sapien
aaagtgaccctagagagactgcccc

SEQ ID NO: 292365 - DNA, 25 bp, Homo sapien
acttcaacaggcatgggatctccca

SEQ ID NO: 292366 - DNA, 25 bp, Homo sapien
tgccaaaggtcagtttcccagcagg

SEQ ID NO: 292367 - DNA, 25 bp, Homo sapien
tgagctgattcataccctgcaccta

SEQ ID NO: 292368 - DNA, 25 bp, Homo sapien
cctacgacactggattatagcactg

SEQ ID NO: 292369 - DNA, 25 bp, Homo sapien
gcctctggaagataaatagtgaccc

SEQ ID NO: 292370 - DNA, 25 bp, Homo sapien
caggaatccatgaaccctgcctctg

SEQ ID NO: 292371 - DNA, 25 bp, Homo sapien
taactcattggtaatctggatgtct

SEQ ID NO: 292372 - DNA, 25 bp, Homo sapien
ttaactcattggtaatctggatgtc

SEQ ID NO: 292373 - DNA, 25 bp, Homo sapien
ttctggaggcccaagagcacaagaa

SEQ ID NO: 292374 - DNA, 25 bp, Homo sapien
ttgcctaagctcctcgctgagattt

SEQ ID NO: 292375 - DNA, 25 bp, Homo sapien
gatttcaacgagaaccaatacagct

SEQ ID NO: 292376 - DNA, 25 bp, Homo sapien
gagagaagggctcataattcaagcc

SEQ ID NO: 292377 - DNA, 25 bp, Homo sapien
ataggagggcaaacttggcatcggc

SEQ ID NO: 292378 - DNA, 25 bp, Homo sapien
tcacccctgcactaggtgctgactg

SEQ ID NO: 292379 - DNA, 25 bp, Homo sapien
ggcaaacttggcatcggcgttcacc

SEQ ID NO: 292380 - DNA, 25 bp, Homo sapien
ttcacccctgcactaggtgctgact

SEQ ID NO: 292381 - DNA, 25 bp, Homo sapien
gattcttgcattggtgattgcttca

SEQ ID NO: 292382 - DNA, 25 bp, Homo sapien
gattgcttcatgcatgacttactga

SEQ ID NO: 292383 - DNA, 25 bp, Homo sapien
cctgattgattcttgcattggtgat

SEQ ID NO: 292384 - DNA, 25 bp, Homo sapien
tggtgattgcttcatgcatgactta

SEQ ID NO: 292385 - DNA, 25 bp, Homo sapien
gggatgccgaacctgcaataaattg

SEQ ID NO: 292386 - DNA, 25 bp, Homo sapien
tatattgtatttaagctgccctccc

SEQ ID NO: 292387 - DNA, 25 bp, Homo sapien
tgagtgccaaagcaactcagatgtg

SEQ ID NO: 292388 - DNA, 25 bp, Homo sapien
gatgtgcctccactctaagctataa

SEQ ID NO: 292389 - DNA, 25 bp, Homo sapien
caacaagggcccctcatatgggctg

SEQ ID NO: 292390 - DNA, 25 bp, Homo sapien
tgaggtcaagaaccagcttctgtcc

SEQ ID NO: 292391 - DNA, 25 bp, Homo sapien
cagataagaatgaaaaattcacggg

SEQ ID NO: 292392 - DNA, 25 bp, Homo sapien
aattcacgggtactgtcccgtcctg

SEQ ID NO: 292393 - DNA, 25 bp, Homo sapien
aataaggtgcaagggtccttccagg

SEQ ID NO: 292394 - DNA, 25 bp, Homo sapien
tcaaaaactttatgctgagattaaa

SEQ ID NO: 292395 - DNA, 25 bp, Homo sapien
ccggaggactaggtattgattcaat

SEQ ID NO: 292396 - DNA, 25 bp, Homo sapien
ggtgaaggtttcatggtgtatacat

SEQ ID NO: 292397 - DNA, 25 bp, Homo sapien
gtttcttataaagccaactatagga

SEQ ID NO: 292398 - DNA, 25 bp, Homo sapien
aattagtttatatgtccaccaaaag

SEQ ID NO: 292399 - DNA, 25 bp, Homo sapien
ccaaaagtcttatacaagaatattc

SEQ ID NO: 292400 - DNA, 25 bp, Homo sapien
ccacatccaggaatatgctcaagaa

SEQ ID NO: 292401 - DNA, 25 bp, Homo sapien
tagtgttgcaatctcagcttaatgc

SEQ ID NO: 292402 - DNA, 25 bp, Homo sapien
tgtagtgttgcaatctcagcttaat

SEQ ID NO: 292403 - DNA, 25 bp, Homo sapien
tccacctcctgggttcaagtgattc

SEQ ID NO: 292404 - DNA, 25 bp, Homo sapien
gttgcaatctcagcttaatgcaaac

SEQ ID NO: 292405 - DNA, 25 bp, Homo sapien
tgattattatagaggcatccaaacc

SEQ ID NO: 292406 - DNA, 25 bp, Homo sapien
tatagaggcatccaaaccaagcaac

SEQ ID NO: 292407 - DNA, 25 bp, Homo sapien
aagcaactgacttctagctatcccc

SEQ ID NO: 292408 - DNA, 25 bp, Homo sapien
ctgtatatcactacttttttctaag

SEQ ID NO: 292409 - DNA, 25 bp, Homo sapien
gaccggcctcgctagacttcatgaa

SEQ ID NO: 292410 - DNA, 25 bp, Homo sapien
gaataattcatgacccgtccacggc

SEQ ID NO: 292411 - DNA, 25 bp, Homo sapien
tcaacgaggcctttctgggcgggac

SEQ ID NO: 292412 - DNA, 25 bp, Homo sapien
tcctcggctcatgaatagtcaacga

SEQ ID NO: 292413 - DNA, 25 bp, Homo sapien
gagacctcgcgtctcaacagccctc

SEQ ID NO: 292414 - DNA, 25 bp, Homo sapien
cgagacctcgcgtctcaacagccct

SEQ ID NO: 292415 - DNA, 25 bp, Homo sapien
gacctcgcgtctcaacagccctcac

SEQ ID NO: 292416 - DNA, 25 bp, Homo sapien
ccgagacctcgcgtctcaacagccc

SEQ ID NO: 292417 - DNA, 25 bp, Homo sapien
acacattttggcgattggctaatcc

SEQ ID NO: 292418 - DNA, 25 bp, Homo sapien
tacacgatgtactgcacagcctgtc

SEQ ID NO: 292419 - DNA, 25 bp, Homo sapien
gccctgcgtactcggacacattttg

SEQ ID NO: 292420 - DNA, 25 bp, Homo sapien
taatcctgaggttcaagactctctc

SEQ ID NO: 292421 - DNA, 25 bp, Homo sapien
aatgtatcaggattatttcaacaag

SEQ ID NO: 292422 - DNA, 25 bp, Homo sapien
tgtaggaatgtatcaggattatttc

SEQ ID NO: 292423 - DNA, 25 bp, Homo sapien
ggaatgtatcaggattatttcaaca

SEQ ID NO: 292424 - DNA, 25 bp, Homo sapien
gtatcaggattatttcaacaagtcc

SEQ ID NO: 292425 - DNA, 25 bp, Homo sapien
gaagccttgtgtattgtgatgcagt

SEQ ID NO: 292426 - DNA, 25 bp, Homo sapien
tattgtgatgcagtgagaaagctga

SEQ ID NO: 292427 - DNA, 25 bp, Homo sapien
cttagaagccttgtgtattgtgatg

SEQ ID NO: 292428 - DNA, 25 bp, Homo sapien
ccttgtgtattgtgatgcagtgaga

SEQ ID NO: 292429 - DNA, 25 bp, Homo sapien
acaggccccttaggtatgttataca

SEQ ID NO: 292430 - DNA, 25 bp, Homo sapien
caccattttcaatgactcatgctca

SEQ ID NO: 292431 - DNA, 25 bp, Homo sapien
cataagagctctctggaaacaggcc

SEQ ID NO: 292432 - DNA, 25 bp, Homo sapien
catccaaatggcgttctccataaga

SEQ ID NO: 292433 - DNA, 25 bp, Homo sapien
catctgataatatgcagtgacccgg

SEQ ID NO: 292434 - DNA, 25 bp, Homo sapien
tctgataatatgcagtgacccggga

SEQ ID NO: 292435 - DNA, 25 bp, Homo sapien
atctgataatatgcagtgacccggg

SEQ ID NO: 292436 - DNA, 25 bp, Homo sapien
cttttccaaagcatcaaaacaacct

SEQ ID NO: 292437 - DNA, 25 bp, Homo sapien
tccaaagcatcaaaacaaccttgaa

SEQ ID NO: 292438 - DNA, 25 bp, Homo sapien
tttccaaagcatcaaaacaaccttg

SEQ ID NO: 292439 - DNA, 25 bp, Homo sapien
caaagcatcaaaacaaccttgaatc

SEQ ID NO: 292440 - DNA, 25 bp, Homo sapien
gattccagtgtaagtgtaaaaacat

SEQ ID NO: 292441 - DNA, 25 bp, Homo sapien
ctttgattccagtgtaagtgtaaaa

SEQ ID NO: 292442 - DNA, 25 bp, Homo sapien
tgattccagtgtaagtgtaaaaaca

SEQ ID NO: 292443 - DNA, 25 bp, Homo sapien
ttgattccagtgtaagtgtaaaaac

SEQ ID NO: 292444 - DNA, 25 bp, Homo sapien
gacacttatactgttaaacacaaaa

SEQ ID NO: 292445 - DNA, 25 bp, Homo sapien
tagacacttatactgttaaacacaa

SEQ ID NO: 292446 - DNA, 25 bp, Homo sapien
gtagacacttatactgttaaacaca

SEQ ID NO: 292447 - DNA, 25 bp, Homo sapien
cgtagacacttatactgttaaacac

SEQ ID NO: 292448 - DNA, 25 bp, Homo sapien
aggccttggctgtcactggagagca

SEQ ID NO: 292449 - DNA, 25 bp, Homo sapien
catccgcaccaagaggaagtaggag

SEQ ID NO: 292450 - DNA, 25 bp, Homo sapien
tgctttatcctacagccatgggcct

SEQ ID NO: 292451 - DNA, 25 bp, Homo sapien
cacaccaagttcatgcgggatatga

SEQ ID NO: 292452 - DNA, 25 bp, Homo sapien
ctcagatcccatgggatctgtgtaa

SEQ ID NO: 292453 - DNA, 25 bp, Homo sapien
tcagatcccatgggatctgtgtaaa

SEQ ID NO: 292454 - DNA, 25 bp, Homo sapien
cagatcccatgggatctgtgtaaag

SEQ ID NO: 292455 - DNA, 25 bp, Homo sapien
gctccttctttcgtgtatttgaatt

SEQ ID NO: 292456 - DNA, 25 bp, Homo sapien
agtggctccttctttcgtgtatttg

SEQ ID NO: 292457 - DNA, 25 bp, Homo sapien
ttgaatttgaactggtacatctcag

SEQ ID NO: 292458 - DNA, 25 bp, Homo sapien
tgaactggtacatctcagtcacctt

SEQ ID NO: 292459 - DNA, 25 bp, Homo sapien
agtggagtttcatagtaagtacaac

SEQ ID NO: 292460 - DNA, 25 bp, Homo sapien
cagtatatacaatttacggatcagt

SEQ ID NO: 292461 - DNA, 25 bp, Homo sapien
cattattaggaagtggctcaaggtc

SEQ ID NO: 292462 - DNA, 25 bp, Homo sapien
ctgcattatagtagtggagtttcat

SEQ ID NO: 292463 - DNA, 25 bp, Homo sapien
accgaggggttggtaatcatgtggg

SEQ ID NO: 292464 - DNA, 25 bp, Homo sapien
aaccgaggggttggtaatcatgtgg

SEQ ID NO: 292465 - DNA, 25 bp, Homo sapien
aaaccgaggggttggtaatcatgtg

SEQ ID NO: 292466 - DNA, 25 bp, Homo sapien
ccgaggggttggtaatcatgtgggg

SEQ ID NO: 292467 - DNA, 25 bp, Homo sapien
tcagtagtgctgttctcccgaaaca

SEQ ID NO: 292468 - DNA, 25 bp, Homo sapien
atcacagtctagaccctgatgggcg

SEQ ID NO: 292469 - DNA, 25 bp, Homo sapien
tcccacttgcacgttgataggctcc

SEQ ID NO: 292470 - DNA, 25 bp, Homo sapien
gataggctccttgtcaaacagcagg

SEQ ID NO: 292471 - DNA, 25 bp, Homo sapien
ttatagctggcacactccacgtgca

SEQ ID NO: 292472 - DNA, 25 bp, Homo sapien
ttttatagctggcacactccacgtg

SEQ ID NO: 292473 - DNA, 25 bp, Homo sapien
tagctggcacactccacgtgcatgc

SEQ ID NO: 292474 - DNA, 25 bp, Homo sapien
agtttttatagctggcacactccac

SEQ ID NO: 292475 - DNA, 25 bp, Homo sapien
tttcaaccattagtagaaactctgt

SEQ ID NO: 292476 - DNA, 25 bp, Homo sapien
ctgaataatttcaaccattagtaga

SEQ ID NO: 292477 - DNA, 25 bp, Homo sapien
caaccattagtagaaactctgttat

SEQ ID NO: 292478 - DNA, 25 bp, Homo sapien
taatttcaaccattagtagaaactc

SEQ ID NO: 292479 - DNA, 25 bp, Homo sapien
tgtctactgctatctgcccagttgt

SEQ ID NO: 292480 - DNA, 25 bp, Homo sapien
tatgtctactgctatctgcccagtt

SEQ ID NO: 292481 - DNA, 25 bp, Homo sapien
cagtgtgtatgtctactgctatctg

SEQ ID NO: 292482 - DNA, 25 bp, Homo sapien
gtgtatgtctactgctatctgccca

SEQ ID NO: 292483 - DNA, 25 bp, Homo sapien
aatttgtagttaagtttatgtctag

SEQ ID NO: 292484 - DNA, 25 bp, Homo sapien
agaatctttggatttggcagtttcc

SEQ ID NO: 292485 - DNA, 25 bp, Homo sapien
taagtttatgtctagaatctttgga

SEQ ID NO: 292486 - DNA, 25 bp, Homo sapien
gaatctttggatttggcagtttcca

SEQ ID NO: 292487 - DNA, 25 bp, Homo sapien
agatatgttgtgacacaggaaaggc

SEQ ID NO: 292488 - DNA, 25 bp, Homo sapien
gaaaggcagttcagggcacggtact

SEQ ID NO: 292489 - DNA, 25 bp, Homo sapien
cacggtacttgttttgcatgaggag

SEQ ID NO: 292490 - DNA, 25 bp, Homo sapien
agacagatatgttgtgacacaggaa

SEQ ID NO: 292491 - DNA, 25 bp, Homo sapien
ttctgttagggatgaagaccttcac

SEQ ID NO: 292492 - DNA, 25 bp, Homo sapien
actttgctgactgcacacaaaattc

SEQ ID NO: 292493 - DNA, 25 bp, Homo sapien
agaactttgctgactgcacacaaaa

SEQ ID NO: 292494 - DNA, 25 bp, Homo sapien
tcactggttcactgaccttcctctt

SEQ ID NO: 292495 - DNA, 25 bp, Homo sapien
aaaaggtgcctcatctctaacccag

SEQ ID NO: 292496 - DNA, 25 bp, Homo sapien
actcgcgtcctacctggccagtaat

SEQ ID NO: 292497 - DNA, 25 bp, Homo sapien
tgtactttcctgctaagacagttta

SEQ ID NO: 292498 - DNA, 25 bp, Homo sapien
cttatggcaaagtggactcgcgtcc

SEQ ID NO: 292499 - DNA, 25 bp, Homo sapien
ttagctgatcaacctcgtgactgag

SEQ ID NO: 292500 - DNA, 25 bp, Homo sapien
aattgcagcatgttccgtgtttcgg

SEQ ID NO: 292501 - DNA, 25 bp, Homo sapien
taatacagctagagagggattccag

SEQ ID NO: 292502 - DNA, 25 bp, Homo sapien
tcggattggataacagaacagggcc

SEQ ID NO: 292503 - DNA, 25 bp, Homo sapien
cagccctgtcgcttgtttagcttta

SEQ ID NO: 292504 - DNA, 25 bp, Homo sapien
acgtcaccagccctgtcgcttgttt

SEQ ID NO: 292505 - DNA, 25 bp, Homo sapien
tagaaagtccactggttaatcacag

SEQ ID NO: 292506 - DNA, 25 bp, Homo sapien
gatagaaagtccactggttaatcac

SEQ ID NO: 292507 - DNA, 25 bp, Homo sapien
taggggctcaagttagtgagttttg

SEQ ID NO: 292508 - DNA, 25 bp, Homo sapien
gcaatggttacaaggggacctaaga

SEQ ID NO: 292509 - DNA, 25 bp, Homo sapien
tgagtttaggggctcaagttagtga

SEQ ID NO: 292510 - DNA, 25 bp, Homo sapien
gggacctaagactagtgactgtagg

SEQ ID NO: 292511 - DNA, 25 bp, Homo sapien
tccacatttcccgacgagctgtctg

SEQ ID NO: 292512 - DNA, 25 bp, Homo sapien
tttcccgacgagctgtctggagttg

SEQ ID NO: 292513 - DNA, 25 bp, Homo sapien
tggattagtatgaaaaccacccagg

SEQ ID NO: 292514 - DNA, 25 bp, Homo sapien
taaatcctggattagtatgaaaacc

SEQ ID NO: 292515 - DNA, 25 bp, Homo sapien
cattcggtgagtttacagaaagggc

SEQ ID NO: 292516 - DNA, 25 bp, Homo sapien
gccatgcgagtgaacaatatttgac

SEQ ID NO: 292517 - DNA, 25 bp, Homo sapien
tttgtaagtacaaggctcaaacagt

SEQ ID NO: 292518 - DNA, 25 bp, Homo sapien
ttagtaagccaatgccatgcgagtg

SEQ ID NO: 292519 - DNA, 25 bp, Homo sapien
tgtgaatcagccgtaggtctcctct

SEQ ID NO: 292520 - DNA, 25 bp, Homo sapien
ggcatgcctgcaactccgtggattt

SEQ ID NO: 292521 - DNA, 25 bp, Homo sapien
gaatgactgtgcgaatgactgaagg

SEQ ID NO: 292522 - DNA, 25 bp, Homo sapien
cagtgagcggcacagaattcccggt

SEQ ID NO: 292523 - DNA, 25 bp, Homo sapien
ccgggttgcaatgccttctagaagc

SEQ ID NO: 292524 - DNA, 25 bp, Homo sapien
tggcttgttcctgaatatttgtaag

SEQ ID NO: 292525 - DNA, 25 bp, Homo sapien
gttcctgaatatttgtaagtgtcag

SEQ ID NO: 292526 - DNA, 25 bp, Homo sapien
agctcctgtgccgggttgcaatgcc

SEQ ID NO: 292527 - DNA, 25 bp, Homo sapien
aatcgaggctcagagccatgaaacc

SEQ ID NO: 292528 - DNA, 25 bp, Homo sapien
gatctttcccctacatgagacttcg

SEQ ID NO: 292529 - DNA, 25 bp, Homo sapien
tgtttagggccagttagggccactc

SEQ ID NO: 292530 - DNA, 25 bp, Homo sapien
ggctcagagccatgaaaccacgtgc

SEQ ID NO: 292531 - DNA, 25 bp, Homo sapien
gctggctctccggagtgtactgatg

SEQ ID NO: 292532 - DNA, 25 bp, Homo sapien
gagagatggattgctcagaggtaaa

SEQ ID NO: 292533 - DNA, 25 bp, Homo sapien
cagttaggtggtattttggccaagg

SEQ ID NO: 292534 - DNA, 25 bp, Homo sapien
ccagccaagtgggactcagcgaagg

SEQ ID NO: 292535 - DNA, 25 bp, Homo sapien
tcttggcggcaggtaaatacacccg

SEQ ID NO: 292536 - DNA, 25 bp, Homo sapien
tgccggcatctgaggtttcctccaa

SEQ ID NO: 292537 - DNA, 25 bp, Homo sapien
agcttgcaaactccggcctgggacg

SEQ ID NO: 292538 - DNA, 25 bp, Homo sapien
tgaagtgcagcccataatgaaggtc

SEQ ID NO: 292539 - DNA, 25 bp, Homo sapien
gcttcattataattttatcaatcaa

SEQ ID NO: 292540 - DNA, 25 bp, Homo sapien
caatcaaattcttagaagagggaaa

SEQ ID NO: 292541 - DNA, 25 bp, Homo sapien
attcttagaagagggaaaaagtctg

SEQ ID NO: 292542 - DNA, 25 bp, Homo sapien
tttatcaatcaaattcttagaagag

SEQ ID NO: 292543 - DNA, 25 bp, Homo sapien
cttggattccctgacgtaaggtgga

SEQ ID NO: 292544 - DNA, 25 bp, Homo sapien
tggaattttctcacgcaggagccat

SEQ ID NO: 292545 - DNA, 25 bp, Homo sapien
cacggaggtctctgtaaaagcagac

SEQ ID NO: 292546 - DNA, 25 bp, Homo sapien
taaatcaggacaggtggtgcaaatg

SEQ ID NO: 292547 - DNA, 25 bp, Homo sapien
ggctaagcctgttccagtccaggag

SEQ ID NO: 292548 - DNA, 25 bp, Homo sapien
ccttggaccatgacgtggcacagca

SEQ ID NO: 292549 - DNA, 25 bp, Homo sapien
caaatggcagattgccctggccggg

SEQ ID NO: 292550 - DNA, 25 bp, Homo sapien
caagatctgtgattaggtgccacct

SEQ ID NO: 292551 - DNA, 25 bp, Homo sapien
cctgcctagccagaggtgctgagat

SEQ ID NO: 292552 - DNA, 25 bp, Homo sapien
gatggcagaactggagtacctagct

SEQ ID NO: 292553 - DNA, 25 bp, Homo sapien
catggtctcccagttagtagatggc

SEQ ID NO: 292554 - DNA, 25 bp, Homo sapien
gatttatctcccacgacaggctagg

SEQ ID NO: 292555 - DNA, 25 bp, Homo sapien
ggtagagaaatactcagcagaccca

SEQ ID NO: 292556 - DNA, 25 bp, Homo sapien
agagaaatactcagcagacccagca

SEQ ID NO: 292557 - DNA, 25 bp, Homo sapien
tagagaaatactcagcagacccagc

SEQ ID NO: 292558 - DNA, 25 bp, Homo sapien
tcaggtagagaaatactcagcagac

SEQ ID NO: 292559 - DNA, 25 bp, Homo sapien
tgtcctgtgtatgtatgcgcctcct

SEQ ID NO: 292560 - DNA, 25 bp, Homo sapien
cactggcaacaggtgggcaggtact

SEQ ID NO: 292561 - DNA, 25 bp, Homo sapien
tctcctcatggaagggtcggagaag

SEQ ID NO: 292562 - DNA, 25 bp, Homo sapien
gatgggctctgtgtatgtcctgtgt

SEQ ID NO: 292563 - DNA, 25 bp, Homo sapien
aatatagctctactcatgggtacac

SEQ ID NO: 292564 - DNA, 25 bp, Homo sapien
catttatccctgtaattagacaaga

SEQ ID NO: 292565 - DNA, 25 bp, Homo sapien
tagacaagaaagcataatatagctc

SEQ ID NO: 292566 - DNA, 25 bp, Homo sapien
atggaaatacatgtactattagcaa

SEQ ID NO: 292567 - DNA, 25 bp, Homo sapien
caaggatggatggtgcagtccctgt

SEQ ID NO: 292568 - DNA, 25 bp, Homo sapien
taaaacattgggatcctccaaaggc

SEQ ID NO: 292569 - DNA, 25 bp, Homo sapien
caggtgcctcataggtgtgtggata

SEQ ID NO: 292570 - DNA, 25 bp, Homo sapien
tgctggcctggaatcactcatcacc

SEQ ID NO: 292571 - DNA, 25 bp, Homo sapien
gcccattagcaactgagagcccagg

SEQ ID NO: 292572 - DNA, 25 bp, Homo sapien
tgggttttctaagccactctctgga

SEQ ID NO: 292573 - DNA, 25 bp, Homo sapien
gatagtttcatagtgacaggtggca

SEQ ID NO: 292574 - DNA, 25 bp, Homo sapien
taatcattttgtaccttgacatggg

SEQ ID NO: 292575 - DNA, 25 bp, Homo sapien
gaagtgcgccagtcgtaccttcgcg

SEQ ID NO: 292576 - DNA, 25 bp, Homo sapien
tcttgcgagctcgtcgtactgaccg

SEQ ID NO: 292577 - DNA, 25 bp, Homo sapien
gcttcagccttcgtgtctggtcggc

SEQ ID NO: 292578 - DNA, 25 bp, Homo sapien
tactcgcacaggaataagcggccgg

SEQ ID NO: 292579 - DNA, 25 bp, Homo sapien
cagacgagcctatgggctccagggc

SEQ ID NO: 292580 - DNA, 25 bp, Homo sapien
tagttctcagacgagcctatgggct

SEQ ID NO: 292581 - DNA, 25 bp, Homo sapien
caggtgcccggcttcctgtctccag

SEQ ID NO: 292582 - DNA, 25 bp, Homo sapien
agtgactgagtgtgtctagttctca

SEQ ID NO: 292583 - DNA, 25 bp, Homo sapien
agagccctgccagccagagccacgt

SEQ ID NO: 292584 - DNA, 25 bp, Homo sapien
ccctgccagccagagccacgtggct

SEQ ID NO: 292585 - DNA, 25 bp, Homo sapien
cagagaagagccctgccagccagag

SEQ ID NO: 292586 - DNA, 25 bp, Homo sapien
tggggtgagcagagaagagccctgc

SEQ ID NO: 292587 - DNA, 25 bp, Homo sapien
ccatgtcgaggtcacaggccatgcg

SEQ ID NO: 292588 - DNA, 25 bp, Homo sapien
aggccatgcggtcagggaacttcca

SEQ ID NO: 292589 - DNA, 25 bp, Homo sapien
acatggtcatagtgctccagcaggg

SEQ ID NO: 292590 - DNA, 25 bp, Homo sapien
ccagcagcacggcatgggacagctg

SEQ ID NO: 292591 - DNA, 25 bp, Homo sapien
tggccccgacaggtactcaatggtg

SEQ ID NO: 292592 - DNA, 25 bp, Homo sapien
tgcaggagaatcagcaaggctcttc

SEQ ID NO: 292593 - DNA, 25 bp, Homo sapien
gaaagtcttactccattaccgaggc

SEQ ID NO: 292594 - DNA, 25 bp, Homo sapien
cccgtgtccggccttgtgatatgca

SEQ ID NO: 292595 - DNA, 25 bp, Homo sapien
gagccaaggttctccaagtagctca

SEQ ID NO: 292596 - DNA, 25 bp, Homo sapien
cagcaggctgtcccagaagcgccgc

SEQ ID NO: 292597 - DNA, 25 bp, Homo sapien
tgtcccagaagcgccgcaccgtgag

SEQ ID NO: 292598 - DNA, 25 bp, Homo sapien
gccaaggttctccaagtagctcata

SEQ ID NO: 292599 - DNA, 25 bp, Homo sapien
cttggaggtgggagtctccctttgg

SEQ ID NO: 292600 - DNA, 25 bp, Homo sapien
caccagggccgtctcaatggtctgg

SEQ ID NO: 292601 - DNA, 25 bp, Homo sapien
gttgctggaactggcctaaggacga

SEQ ID NO: 292602 - DNA, 25 bp, Homo sapien
ttcttgaaggtcgtggctgggaact

SEQ ID NO: 292603 - DNA, 25 bp, Homo sapien
cacatgcttactgaggcgcgtcagg

SEQ ID NO: 292604 - DNA, 25 bp, Homo sapien
gaaagggcaaatccctcaggcctcc

SEQ ID NO: 292605 - DNA, 25 bp, Homo sapien
cactgaccgatggacgagtctgggc

SEQ ID NO: 292606 - DNA, 25 bp, Homo sapien
tgtctcacaaacatccatgcaaagg

SEQ ID NO: 292607 - DNA, 25 bp, Homo sapien
cagtgcaagtggatacatacctcgg

SEQ ID NO: 292608 - DNA, 25 bp, Homo sapien
ttctcatgggctggctgccatgtgt

SEQ ID NO: 292609 - DNA, 25 bp, Homo sapien
tgggccttggtgtcgtccatggagg

SEQ ID NO: 292610 - DNA, 25 bp, Homo sapien
gccttggtgtcgtccatggaggcaa

SEQ ID NO: 292611 - DNA, 25 bp, Homo sapien
tgccatgtgtctacacctctctggg

SEQ ID NO: 292612 - DNA, 25 bp, Homo sapien
cagtgtgccccgtggagtggaggca

SEQ ID NO: 292613 - DNA, 25 bp, Homo sapien
gagggtcccatggacctggccggcg

SEQ ID NO: 292614 - DNA, 25 bp, Homo sapien
tggaggcagcccatcgcctgcagag

SEQ ID NO: 292615 - DNA, 25 bp, Homo sapien
gctctagggaggctggtggaagcgg

SEQ ID NO: 292616 - DNA, 25 bp, Homo sapien
ccacagcctgtgtggactcccgctg

SEQ ID NO: 292617 - DNA, 25 bp, Homo sapien
tgtggactcccgctgctgtttcagt

SEQ ID NO: 292618 - DNA, 25 bp, Homo sapien
cctgtgtggactcccgctgctgttt

SEQ ID NO: 292619 - DNA, 25 bp, Homo sapien
agcctgtgtggactcccgctgctgt

SEQ ID NO: 292620 - DNA, 25 bp, Homo sapien
atggacgatgctcatccagccacac

SEQ ID NO: 292621 - DNA, 25 bp, Homo sapien
catgggggcctatgatggggctcct

SEQ ID NO: 292622 - DNA, 25 bp, Homo sapien
gacagagatggacgatgctcatcca

SEQ ID NO: 292623 - DNA, 25 bp, Homo sapien
gggacagagatggacgatgctcatc

SEQ ID NO: 292624 - DNA, 25 bp, Homo sapien
ttctccttatccagctccgtgctgg

SEQ ID NO: 292625 - DNA, 25 bp, Homo sapien
cggaccatgctgtcgacacgggcct

SEQ ID NO: 292626 - DNA, 25 bp, Homo sapien
agccgacccaccaacagctgcacct

SEQ ID NO: 292627 - DNA, 25 bp, Homo sapien
atgctgtcgacacgggccttctcct

SEQ ID NO: 292628 - DNA, 25 bp, Homo sapien
gctgctttagcagggctcgctgctt

SEQ ID NO: 292629 - DNA, 25 bp, Homo sapien
tgtccagctgctttagcagggctcg

SEQ ID NO: 292630 - DNA, 25 bp, Homo sapien
cgcagctcctcacgttcctggtcca

SEQ ID NO: 292631 - DNA, 25 bp, Homo sapien
agctcctcacgttcctggtccaggc

SEQ ID NO: 292632 - DNA, 25 bp, Homo sapien
gatggttagccgcaggtccgtagtc

SEQ ID NO: 292633 - DNA, 25 bp, Homo sapien
gcaggtccgtagtcgcctgctccag

SEQ ID NO: 292634 - DNA, 25 bp, Homo sapien
ccgttctagctccaggatggttagc

SEQ ID NO: 292635 - DNA, 25 bp, Homo sapien
catggatctgggtctcggtgggcct

SEQ ID NO: 292636 - DNA, 25 bp, Homo sapien
tgttatctgggattccacgctgctg

SEQ ID NO: 292637 - DNA, 25 bp, Homo sapien
ctgtgggacatgttatctgggattc

SEQ ID NO: 292638 - DNA, 25 bp, Homo sapien
tctgggattccacgctgctggatct

SEQ ID NO: 292639 - DNA, 25 bp, Homo sapien
gacatgttatctgggattccacgct

SEQ ID NO: 292640 - DNA, 25 bp, Homo sapien
tggacagcattgattggagccgccc

SEQ ID NO: 292641 - DNA, 25 bp, Homo sapien
cctcctgtaggacccggatgcggat

SEQ ID NO: 292642 - DNA, 25 bp, Homo sapien
gccacttcccggattttggacagca

SEQ ID NO: 292643 - DNA, 25 bp, Homo sapien
gatgcggatgtcgttggactgcact

SEQ ID NO: 292644 - DNA, 25 bp, Homo sapien
tcttgctgcacttaaaggaatgaca

SEQ ID NO: 292645 - DNA, 25 bp, Homo sapien
taaaggaatgacagctatagagggc

SEQ ID NO: 292646 - DNA, 25 bp, Homo sapien
ctgacgaggcttcttgctgcactta

SEQ ID NO: 292647 - DNA, 25 bp, Homo sapien
gacagctatagagggcatatgggac

SEQ ID NO: 292648 - DNA, 25 bp, Homo sapien
ggaccagagccggtcctgcgggatc

SEQ ID NO: 292649 - DNA, 25 bp, Homo sapien
accagagccggtcctgcgggatcag

SEQ ID NO: 292650 - DNA, 25 bp, Homo sapien
gggaccagagccggtcctgcgggat

SEQ ID NO: 292651 - DNA, 25 bp, Homo sapien
gaccagagccggtcctgcgggatca

SEQ ID NO: 292652 - DNA, 25 bp, Homo sapien
tggtggtgttgctccctgggttccc

SEQ ID NO: 292653 - DNA, 25 bp, Homo sapien
ggcctggactggtggtgttgctccc

SEQ ID NO: 292654 - DNA, 25 bp, Homo sapien
cctggactggtggtgttgctccctg

SEQ ID NO: 292655 - DNA, 25 bp, Homo sapien
actggtggtgttgctccctgggttc

SEQ ID NO: 292656 - DNA, 25 bp, Homo sapien
cccacctccagtaaagcctcactca

SEQ ID NO: 292657 - DNA, 25 bp, Homo sapien
ctaggaaggtgctgtctgcccagag

SEQ ID NO: 292658 - DNA, 25 bp, Homo sapien
taggaaggtgctgtctgcccagagg

SEQ ID NO: 292659 - DNA, 25 bp, Homo sapien
aggaaggtgctgtctgcccagaggc

SEQ ID NO: 292660 - DNA, 25 bp, Homo sapien
tgcagggctgccgaggtggggatgt

SEQ ID NO: 292661 - DNA, 25 bp, Homo sapien
tgtgcagggctgccgaggtggggat

SEQ ID NO: 292662 - DNA, 25 bp, Homo sapien
agggctgccgaggtggggatgtgca

SEQ ID NO: 292663 - DNA, 25 bp, Homo sapien
ggatgtgcagggctgccgaggtggg

SEQ ID NO: 292664 - DNA, 25 bp, Homo sapien
gtgtccaagtgggtcacaccctcca

SEQ ID NO: 292665 - DNA, 25 bp, Homo sapien
gtgcaggtgtccaagtgggtcacac

SEQ ID NO: 292666 - DNA, 25 bp, Homo sapien
tggggttctgggtgcaggtgtccaa

SEQ ID NO: 292667 - DNA, 25 bp, Homo sapien
caagtgggtcacaccctccagcaag

SEQ ID NO: 292668 - DNA, 25 bp, Homo sapien
ccggccaggtgacagtctctttctc

SEQ ID NO: 292669 - DNA, 25 bp, Homo sapien
gggccacaggctacatgggccgctc

SEQ ID NO: 292670 - DNA, 25 bp, Homo sapien
ccctgggccacaggctacatgggcc

SEQ ID NO: 292671 - DNA, 25 bp, Homo sapien
gctggggctttattacagtgggtgg

SEQ ID NO: 292672 - DNA, 25 bp, Homo sapien
aatagtaaaataaacgtggctatat

SEQ ID NO: 292673 - DNA, 25 bp, Homo sapien
aataaacgtggctatattttaacat

SEQ ID NO: 292674 - DNA, 25 bp, Homo sapien
acctgccgtgaacatgccttgcatt

SEQ ID NO: 292675 - DNA, 25 bp, Homo sapien
cccactaccacctgccgtgaacatg

SEQ ID NO: 292676 - DNA, 25 bp, Homo sapien
agctatctggccttggggtaccctg

SEQ ID NO: 292677 - DNA, 25 bp, Homo sapien
tttcaggatacttcttgtcaaggct

SEQ ID NO: 292678 - DNA, 25 bp, Homo sapien
ggtaccctggcctgaccgtctttca

SEQ ID NO: 292679 - DNA, 25 bp, Homo sapien
atgggtcccactgcctgtccagcct

SEQ ID NO: 292680 - DNA, 25 bp, Homo sapien
tcacaacaaggcgtggtcaggccgt

SEQ ID NO: 292681 - DNA, 25 bp, Homo sapien
gcattcaagggtattctgtccacaa

SEQ ID NO: 292682 - DNA, 25 bp, Homo sapien
gcttggaaaccttagctggctggtc

SEQ ID NO: 292683 - DNA, 25 bp, Homo sapien
cagcgcttggcatcagggcattcaa

SEQ ID NO: 292684 - DNA, 25 bp, Homo sapien
taaaggatcccgagaggcggagtag

SEQ ID NO: 292685 - DNA, 25 bp, Homo sapien
gccaagccccgcctcttaaaggatc

SEQ ID NO: 292686 - DNA, 25 bp, Homo sapien
aaggatcccgagaggcggagtaggg

SEQ ID NO: 292687 - DNA, 25 bp, Homo sapien
ccagccttttgcccgggccgcggag

SEQ ID NO: 292688 - DNA, 25 bp, Homo sapien
tggggctcagatcgccgactctgcc

SEQ ID NO: 292689 - DNA, 25 bp, Homo sapien
tcagatcgccgactctgccgctcat

SEQ ID NO: 292690 - DNA, 25 bp, Homo sapien
gctcagatcgccgactctgccgctc

SEQ ID NO: 292691 - DNA, 25 bp, Homo sapien
gcctggggctcagatcgccgactct

SEQ ID NO: 292692 - DNA, 25 bp, Homo sapien
gatgtgttcccagctaatcgtgata

SEQ ID NO: 292693 - DNA, 25 bp, Homo sapien
ctgatacggactgcagtaaaagctg

SEQ ID NO: 292694 - DNA, 25 bp, Homo sapien
tgcgggcaggcagatgtgttcccag

SEQ ID NO: 292695 - DNA, 25 bp, Homo sapien
gatagtaggcactctgatacggact

SEQ ID NO: 292696 - DNA, 25 bp, Homo sapien
tcagggggtgccaggttgcagggca

SEQ ID NO: 292697 - DNA, 25 bp, Homo sapien
taacatagttcaactctgcagacac

SEQ ID NO: 292698 - DNA, 25 bp, Homo sapien
tagtcatctggattcggcagggccg

SEQ ID NO: 292699 - DNA, 25 bp, Homo sapien
tcggagccaacgcaggagaaaatag

SEQ ID NO: 292700 - DNA, 25 bp, Homo sapien
gagccaacgcaggagaaaatagtca

SEQ ID NO: 292701 - DNA, 25 bp, Homo sapien
caacgcaggagaaaatagtcatctg

SEQ ID NO: 292702 - DNA, 25 bp, Homo sapien
gacttctgcaggtcgaagcttctgg

SEQ ID NO: 292703 - DNA, 25 bp, Homo sapien
cgacttctgcaggtcgaagcttctg

SEQ ID NO: 292704 - DNA, 25 bp, Homo sapien
cttccggagcatggcctccgacttc

SEQ ID NO: 292705 - DNA, 25 bp, Homo sapien
gctgccagctaatgatgttgtcaat

SEQ ID NO: 292706 - DNA, 25 bp, Homo sapien
atgtccttttgctttcggaactcca

SEQ ID NO: 292707 - DNA, 25 bp, Homo sapien
gtccttttgctttcggaactccaca

SEQ ID NO: 292708 - DNA, 25 bp, Homo sapien
tggaggctgccagctaatgatgttg

SEQ ID NO: 292709 - DNA, 25 bp, Homo sapien
caattatgtcgtaccagactgggca

SEQ ID NO: 292710 - DNA, 25 bp, Homo sapien
ctgagaacagcagacccttggcatc

SEQ ID NO: 292711 - DNA, 25 bp, Homo sapien
catccagaggtccaattatgtcgta

SEQ ID NO: 292712 - DNA, 25 bp, Homo sapien
gccatccaggtcatagccacacata

SEQ ID NO: 292713 - DNA, 25 bp, Homo sapien
tggtctggtgggcacactcttgcag

SEQ ID NO: 292714 - DNA, 25 bp, Homo sapien
gtctggtgggcacactcttgcagaa

SEQ ID NO: 292715 - DNA, 25 bp, Homo sapien
ttgtggtctggtgggcacactcttg

SEQ ID NO: 292716 - DNA, 25 bp, Homo sapien
ctttgtggtctggtgggcacactct

SEQ ID NO: 292717 - DNA, 25 bp, Homo sapien
agagcaggaagtcttgtcaggctgt

SEQ ID NO: 292718 - DNA, 25 bp, Homo sapien
gtcctacttcagaagcccgttccag

SEQ ID NO: 292719 - DNA, 25 bp, Homo sapien
agaagcccgttccagtccaggccaa

SEQ ID NO: 292720 - DNA, 25 bp, Homo sapien
tgtcaggctgtcctacttcagaagc

SEQ ID NO: 292721 - DNA, 25 bp, Homo sapien
ccctcgcagtcataaattatggtga

SEQ ID NO: 292722 - DNA, 25 bp, Homo sapien
agcccctcgcagtcataaattatgg

SEQ ID NO: 292723 - DNA, 25 bp, Homo sapien
gtcataaattatggtgatggtctcc

SEQ ID NO: 292724 - DNA, 25 bp, Homo sapien
caagcccctcgcagtcataaattat

SEQ ID NO: 292725 - DNA, 25 bp, Homo sapien
acgcttcagtgtttcgggataattt

SEQ ID NO: 292726 - DNA, 25 bp, Homo sapien
cgcttcagtgtttcgggataatttt

SEQ ID NO: 292727 - DNA, 25 bp, Homo sapien
gcttcagtgtttcgggataattttc

SEQ ID NO: 292728 - DNA, 25 bp, Homo sapien
tcagtgtttcgggataattttcctc

SEQ ID NO: 292729 - DNA, 25 bp, Homo sapien
aagggtttgatgaggttataggcca

SEQ ID NO: 292730 - DNA, 25 bp, Homo sapien
gtcctcactcaggaagggtttgatg

SEQ ID NO: 292731 - DNA, 25 bp, Homo sapien
gaccatgatcttcttacgagtgtcc

SEQ ID NO: 292732 - DNA, 25 bp, Homo sapien
gatcttcttacgagtgtcctcactc

SEQ ID NO: 292733 - DNA, 25 bp, Homo sapien
tgtgcttgtcaaatgaagctgctcc

SEQ ID NO: 292734 - DNA, 25 bp, Homo sapien
tatggcaccctctctatgactagtc

SEQ ID NO: 292735 - DNA, 25 bp, Homo sapien
agctgctcctagttttccccaactg

SEQ ID NO: 292736 - DNA, 25 bp, Homo sapien
aaccttgctcctgcaacttctatgg

SEQ ID NO: 292737 - DNA, 25 bp, Homo sapien
tgggataaggccaggaggattcttc

SEQ ID NO: 292738 - DNA, 25 bp, Homo sapien
agtgaccagcccgagtgaatctccc

SEQ ID NO: 292739 - DNA, 25 bp, Homo sapien
ggagacccgcagaaactgtccagag

SEQ ID NO: 292740 - DNA, 25 bp, Homo sapien
gatttttagggaccaaagaccatgc

SEQ ID NO: 292741 - DNA, 25 bp, Homo sapien
cagggctgatatgtttcagtaaaac

SEQ ID NO: 292742 - DNA, 25 bp, Homo sapien
tatgtttcagtaaaacctccttcca

SEQ ID NO: 292743 - DNA, 25 bp, Homo sapien
cagggtcagtcatggtgcccccata

SEQ ID NO: 292744 - DNA, 25 bp, Homo sapien
caggcacctggtcagggctgatatg

SEQ ID NO: 292745 - DNA, 25 bp, Homo sapien
actggaatgtgcatttgagccaggc

SEQ ID NO: 292746 - DNA, 25 bp, Homo sapien
tgaactggaatgtgcatttgagcca

SEQ ID NO: 292747 - DNA, 25 bp, Homo sapien
gcatggagtgaactggaatgtgcat

SEQ ID NO: 292748 - DNA, 25 bp, Homo sapien
ggagtgaactggaatgtgcatttga

SEQ ID NO: 292749 - DNA, 25 bp, Homo sapien
aggagccacgggaaatctgcacgct

SEQ ID NO: 292750 - DNA, 25 bp, Homo sapien
gccagggaagaggatctcatactcc

SEQ ID NO: 292751 - DNA, 25 bp, Homo sapien
tctgcacgctgtgttcatactgctg

SEQ ID NO: 292752 - DNA, 25 bp, Homo sapien
catactgctgtttcacctggtctcg

SEQ ID NO: 292753 - DNA, 25 bp, Homo sapien
aaccaacatccgctccatctgacat

SEQ ID NO: 292754 - DNA, 25 bp, Homo sapien
gggagttgtacctctggttgggcag

SEQ ID NO: 292755 - DNA, 25 bp, Homo sapien
ttgtacctctggttgggcagcacct

SEQ ID NO: 292756 - DNA, 25 bp, Homo sapien
actgcaggtgagggtcccatcttca

SEQ ID NO: 292757 - DNA, 25 bp, Homo sapien
gcttcaaggcattgccaaggcagag

SEQ ID NO: 292758 - DNA, 25 bp, Homo sapien
gggcttcaaggcattgccaaggcag

SEQ ID NO: 292759 - DNA, 25 bp, Homo sapien
gacatggggcttcaaggcattgcca

SEQ ID NO: 292760 - DNA, 25 bp, Homo sapien
gcattgccaaggcagagatacttac

SEQ ID NO: 292761 - DNA, 25 bp, Homo sapien
gtatgagatcaaagtcccaccctgc

SEQ ID NO: 292762 - DNA, 25 bp, Homo sapien
cagaaagcagacgtgttgaacccct

SEQ ID NO: 292763 - DNA, 25 bp, Homo sapien
gttgggtcaccataaacaagtctcc

SEQ ID NO: 292764 - DNA, 25 bp, Homo sapien
gaacccctgtgatcgcctaggactg

SEQ ID NO: 292765 - DNA, 25 bp, Homo sapien
tgatgaaagcacacaatttggctgg

SEQ ID NO: 292766 - DNA, 25 bp, Homo sapien
caagtactaggtcgataatggccct

SEQ ID NO: 292767 - DNA, 25 bp, Homo sapien
gaaagcttccacactttggcagagg

SEQ ID NO: 292768 - DNA, 25 bp, Homo sapien
gccaaacaccgcttcaggagaactg

SEQ ID NO: 292769 - DNA, 25 bp, Homo sapien
aacctgattgtcatcctcgcgcagg

SEQ ID NO: 292770 - DNA, 25 bp, Homo sapien
ctgattgtcatcctcgcgcaggggc

SEQ ID NO: 292771 - DNA, 25 bp, Homo sapien
tgtatgtgctgacaaagcgagcact

SEQ ID NO: 292772 - DNA, 25 bp, Homo sapien
tagtgtatgtgctgacaaagcgagc

SEQ ID NO: 292773 - DNA, 25 bp, Homo sapien
cactctggtgcttgtcctaatggga

SEQ ID NO: 292774 - DNA, 25 bp, Homo sapien
tgtcctgaggccaaaacaagttgca

SEQ ID NO: 292775 - DNA, 25 bp, Homo sapien
taaaaaagaggttagctccacagaa

SEQ ID NO: 292776 - DNA, 25 bp, Homo sapien
gaaatcctgcgatgagtttgacagt

SEQ ID NO: 292777 - DNA, 25 bp, Homo sapien
tgttctgcctgacttggaccctgga

SEQ ID NO: 292778 - DNA, 25 bp, Homo sapien
gaccttctgaaacttaatctagcgg

SEQ ID NO: 292779 - DNA, 25 bp, Homo sapien
catgccaagtgccagatgagtgaca

SEQ ID NO: 292780 - DNA, 25 bp, Homo sapien
gagggcctggtagactgaaatcatg

SEQ ID NO: 292781 - DNA, 25 bp, Homo sapien
cacagtgaaattgaccttcttggca

SEQ ID NO: 292782 - DNA, 25 bp, Homo sapien
cctccacagtgaaattgaccttctt

SEQ ID NO: 292783 - DNA, 25 bp, Homo sapien
ctgaggctttgtctggaagcaggac

SEQ ID NO: 292784 - DNA, 25 bp, Homo sapien
tctcttctgaggctttgtctggaag

SEQ ID NO: 292785 - DNA, 25 bp, Homo sapien
tcagggttgtgcgaaaatgactgct

SEQ ID NO: 292786 - DNA, 25 bp, Homo sapien
tatttgatagacacggagacccact

SEQ ID NO: 292787 - DNA, 25 bp, Homo sapien
ccagcctgtctaccgagtgggaaga

SEQ ID NO: 292788 - DNA, 25 bp, Homo sapien
tagtaatcaaagaggcaggccgtgt

SEQ ID NO: 292789 - DNA, 25 bp, Homo sapien
tccctggcgctttgtttgcatggag

SEQ ID NO: 292790 - DNA, 25 bp, Homo sapien
tgcagctgcgatccctgtgggtcat

SEQ ID NO: 292791 - DNA, 25 bp, Homo sapien
cactgaaaagggcactggacgatct

SEQ ID NO: 292792 - DNA, 25 bp, Homo sapien
tgctcacatggaggactgcttggtg

SEQ ID NO: 292793 - DNA, 25 bp, Homo sapien
gagatgggactgcttagtaagacct

SEQ ID NO: 292794 - DNA, 25 bp, Homo sapien
tgaactccctgcacgcgttgcatgc

SEQ ID NO: 292795 - DNA, 25 bp, Homo sapien
cagcttcgcaagatgagcttcccag

SEQ ID NO: 292796 - DNA, 25 bp, Homo sapien
ctaacagcgttgtaaacccaggccg

SEQ ID NO: 292797 - DNA, 25 bp, Homo sapien
gaaagctcacgctagagagccgagg

SEQ ID NO: 292798 - DNA, 25 bp, Homo sapien
cctagcggtgggcattgaatttcac

SEQ ID NO: 292799 - DNA, 25 bp, Homo sapien
tcaaagatggcggaagacaacccac

SEQ ID NO: 292800 - DNA, 25 bp, Homo sapien
tatctattggcgtgaaacggctgct

SEQ ID NO: 292801 - DNA, 25 bp, Homo sapien
gcagttacctcaagctgagctgggc

SEQ ID NO: 292802 - DNA, 25 bp, Homo sapien
gacagtccctaaaaccacgtgatcg

SEQ ID NO: 292803 - DNA, 25 bp, Homo sapien
gaaacaccggcaatgctggcgtgga

SEQ ID NO: 292804 - DNA, 25 bp, Homo sapien
taggacagtccggtcagcagttacc

SEQ ID NO: 292805 - DNA, 25 bp, Homo sapien
ttagtgattacaacaggaggaagcc

SEQ ID NO: 292806 - DNA, 25 bp, Homo sapien
tgagagtagccaacattgacgagca

SEQ ID NO: 292807 - DNA, 25 bp, Homo sapien
catgtataactaggaagcactcgca

SEQ ID NO: 292808 - DNA, 25 bp, Homo sapien
tccttggcgggtataattgagcggc

SEQ ID NO: 292809 - DNA, 25 bp, Homo sapien
ggacaggtcaggaaatctccgccag

SEQ ID NO: 292810 - DNA, 25 bp, Homo sapien
aagtcccgcgccgaaggacaggtca

SEQ ID NO: 292811 - DNA, 25 bp, Homo sapien
tcccaggctcgggttttacagactg

SEQ ID NO: 292812 - DNA, 25 bp, Homo sapien
ggttttcgtcacgttttctctgagc

SEQ ID NO: 292813 - DNA, 25 bp, Homo sapien
ccggccactacagccggtactggct

SEQ ID NO: 292814 - DNA, 25 bp, Homo sapien
actacagccggtactggctccactg

SEQ ID NO: 292815 - DNA, 25 bp, Homo sapien
cacggccccggccactacagccggt

SEQ ID NO: 292816 - DNA, 25 bp, Homo sapien
cagtctccgccgccggcacttgggt

SEQ ID NO: 292817 - DNA, 25 bp, Homo sapien
aggtatcgcacccacgtgtcccggt

SEQ ID NO: 292818 - DNA, 25 bp, Homo sapien
acgtgtcccggtagagatcgcgctc

SEQ ID NO: 292819 - DNA, 25 bp, Homo sapien
tcccggtagagatcgcgctctgcgc

SEQ ID NO: 292820 - DNA, 25 bp, Homo sapien
tgtcccggtagagatcgcgctctgc

SEQ ID NO: 292821 - DNA, 25 bp, Homo sapien
acagccagccagagcgcatgccaga

SEQ ID NO: 292822 - DNA, 25 bp, Homo sapien
ggcaagtccctagccctgtctgagc

SEQ ID NO: 292823 - DNA, 25 bp, Homo sapien
tcagacagagccagtgcgtgtcagg

SEQ ID NO: 292824 - DNA, 25 bp, Homo sapien
gaaatgggagtggagatcccgactc

SEQ ID NO: 292825 - DNA, 25 bp, Homo sapien
tgagcctccctttccgagatgtaaa

SEQ ID NO: 292826 - DNA, 25 bp, Homo sapien
taggctcgcaactgttccacgaggg

SEQ ID NO: 292827 - DNA, 25 bp, Homo sapien
ggttctcatcctagccagctaagca

SEQ ID NO: 292828 - DNA, 25 bp, Homo sapien
aacatttaattcctaggctcgcaac

SEQ ID NO: 292829 - DNA, 25 bp, Homo sapien
tggcacaagagagcggaaagcctcg

SEQ ID NO: 292830 - DNA, 25 bp, Homo sapien
ttcttgcctttgtcaatggcatccg

SEQ ID NO: 292831 - DNA, 25 bp, Homo sapien
tccgccagcacgtaggagctggcca

SEQ ID NO: 292832 - DNA, 25 bp, Homo sapien
ggagctggccacgccatagctcagc

SEQ ID NO: 292833 - DNA, 25 bp, Homo sapien
gaaccacacaagaagagagctaggg

SEQ ID NO: 292834 - DNA, 25 bp, Homo sapien
gggcgcagagacacttaatccagct

SEQ ID NO: 292835 - DNA, 25 bp, Homo sapien
ctttatcacatgcaaggctgtggac

SEQ ID NO: 292836 - DNA, 25 bp, Homo sapien
caaacaggactgtctatggactgca

SEQ ID NO: 292837 - DNA, 25 bp, Homo sapien
ccctggcgctgcggcctgcttcagg

SEQ ID NO: 292838 - DNA, 25 bp, Homo sapien
tggcgctgcggcctgcttcagggct

SEQ ID NO: 292839 - DNA, 25 bp, Homo sapien
tcaccctggcgctgcggcctgcttc

SEQ ID NO: 292840 - DNA, 25 bp, Homo sapien
caccctggcgctgcggcctgcttca

SEQ ID NO: 292841 - DNA, 25 bp, Homo sapien
gccatacaaaggtgtccaccacagc

SEQ ID NO: 292842 - DNA, 25 bp, Homo sapien
tgccatacaaaggtgtccaccacag

SEQ ID NO: 292843 - DNA, 25 bp, Homo sapien
ctgccatacaaaggtgtccaccaca

SEQ ID NO: 292844 - DNA, 25 bp, Homo sapien
ccatacaaaggtgtccaccacagcc

SEQ ID NO: 292845 - DNA, 25 bp, Homo sapien
tcaacagcccaagcgcggtggtggt

SEQ ID NO: 292846 - DNA, 25 bp, Homo sapien
ccaggacatagagagaggcagcaca

SEQ ID NO: 292847 - DNA, 25 bp, Homo sapien
tggtggtccacttgcggacagccag

SEQ ID NO: 292848 - DNA, 25 bp, Homo sapien
aggcagcacacacgcggttgatggt

SEQ ID NO: 292849 - DNA, 25 bp, Homo sapien
agactggatgatccactctcatcac

SEQ ID NO: 292850 - DNA, 25 bp, Homo sapien
ctctcatcactggagagtggatgat

SEQ ID NO: 292851 - DNA, 25 bp, Homo sapien
cccacacttcacagagtctagctct

SEQ ID NO: 292852 - DNA, 25 bp, Homo sapien
cacacttcacagagtctagctctac

SEQ ID NO: 292853 - DNA, 25 bp, Homo sapien
ccacacttcacagagtctagctcta

SEQ ID NO: 292854 - DNA, 25 bp, Homo sapien
tgttgggtagagcttgcgcaggctg

SEQ ID NO: 292855 - DNA, 25 bp, Homo sapien
ggctggagtccaggaggaaatccac

SEQ ID NO: 292856 - DNA, 25 bp, Homo sapien
tggagtccaggaggaaatccaccga

SEQ ID NO: 292857 - DNA, 25 bp, Homo sapien
ggagtccaggaggaaatccaccgac

SEQ ID NO: 292858 - DNA, 25 bp, Homo sapien
aagcaggaggccgatgcacaggcca

SEQ ID NO: 292859 - DNA, 25 bp, Homo sapien
ctggcaggagtaggaggttgacatg

SEQ ID NO: 292860 - DNA, 25 bp, Homo sapien
gaggccgatgcacaggccaggtacc

SEQ ID NO: 292861 - DNA, 25 bp, Homo sapien
gcacaggccaggtaccagagtatga

SEQ ID NO: 292862 - DNA, 25 bp, Homo sapien
gccagggtctttggacaccagggag

SEQ ID NO: 292863 - DNA, 25 bp, Homo sapien
ccagggtctttggacaccagggagc

SEQ ID NO: 292864 - DNA, 25 bp, Homo sapien
tgccagggtctttggacaccaggga

SEQ ID NO: 292865 - DNA, 25 bp, Homo sapien
agcatcttggattccagggaagcag

SEQ ID NO: 292866 - DNA, 25 bp, Homo sapien
agggaagcagacagcgttcaggtcc

SEQ ID NO: 292867 - DNA, 25 bp, Homo sapien
gtgatcttgggcctattccttgccc

SEQ ID NO: 292868 - DNA, 25 bp, Homo sapien
agcagacagcgttcaggtcctgccc

SEQ ID NO: 292869 - DNA, 25 bp, Homo sapien
gtccctggtactgcactcctgagtt

SEQ ID NO: 292870 - DNA, 25 bp, Homo sapien
ctggtactgcactcctgagtttctc

SEQ ID NO: 292871 - DNA, 25 bp, Homo sapien
gtctgccgctccttgttcagccata

SEQ ID NO: 292872 - DNA, 25 bp, Homo sapien
ccctggtactgcactcctgagtttc

SEQ ID NO: 292873 - DNA, 25 bp, Homo sapien
cttcaggatttattgggtcagggaa

SEQ ID NO: 292874 - DNA, 25 bp, Homo sapien
gtcttggtgggagctgatttggtgc

SEQ ID NO: 292875 - DNA, 25 bp, Homo sapien
tggtgggagctgatttggtgcttgg

SEQ ID NO: 292876 - DNA, 25 bp, Homo sapien
cttggtgggagctgatttggtgctt

SEQ ID NO: 292877 - DNA, 25 bp, Homo sapien
cagggtcttggtgggagctgatttg

SEQ ID NO: 292878 - DNA, 25 bp, Homo sapien
aggcacaggtggcaagcatccacct

SEQ ID NO: 292879 - DNA, 25 bp, Homo sapien
caaggcacaggtggcaagcatccac

SEQ ID NO: 292880 - DNA, 25 bp, Homo sapien
cacaggtggcaagcatccacctggg

SEQ ID NO: 292881 - DNA, 25 bp, Homo sapien
gtgccaaggcacaggtggcaagcat

SEQ ID NO: 292882 - DNA, 25 bp, Homo sapien
cagttggatgaagccataagctttg

SEQ ID NO: 292883 - DNA, 25 bp, Homo sapien
agacctcatagccaggtatggcagg

SEQ ID NO: 292884 - DNA, 25 bp, Homo sapien
aatggggcagtgaagacctcatagc

SEQ ID NO: 292885 - DNA, 25 bp, Homo sapien
cagtgaagacctcatagccaggtat

SEQ ID NO: 292886 - DNA, 25 bp, Homo sapien
cgaatctcccgggtactccctggct

SEQ ID NO: 292887 - DNA, 25 bp, Homo sapien
gccttgtcctcgtgagcctccaaca

SEQ ID NO: 292888 - DNA, 25 bp, Homo sapien
atctcccgggtactccctggctctt

SEQ ID NO: 292889 - DNA, 25 bp, Homo sapien
ttgtcctcgtgagcctccaacagcc

SEQ ID NO: 292890 - DNA, 25 bp, Homo sapien
gaccttcctcttgggacattacttc

SEQ ID NO: 292891 - DNA, 25 bp, Homo sapien
ggagtccctgagctagaagaccttc

SEQ ID NO: 292892 - DNA, 25 bp, Homo sapien
agaactggaggcacaggagtccctg

SEQ ID NO: 292893 - DNA, 25 bp, Homo sapien
ggacattacttcagcccagccaatg

SEQ ID NO: 292894 - DNA, 25 bp, Homo sapien
gacctcttggggcacgaagtgggag

SEQ ID NO: 292895 - DNA, 25 bp, Homo sapien
tgggagtggaagttcttgccgttca

SEQ ID NO: 292896 - DNA, 25 bp, Homo sapien
ggagtaccagtaaagctgaaggcct

SEQ ID NO: 292897 - DNA, 25 bp, Homo sapien
gaagttcttgccgttcaccaggcac

SEQ ID NO: 292898 - DNA, 25 bp, Homo sapien
catgagtgcccctgtggaaggaaca

SEQ ID NO: 292899 - DNA, 25 bp, Homo sapien
ccctgtggaaggaacaggccttctt

SEQ ID NO: 292900 - DNA, 25 bp, Homo sapien
ggaacaggccttcttggtagcatca

SEQ ID NO: 292901 - DNA, 25 bp, Homo sapien
ccttcttggtagcatcagatgggac

SEQ ID NO: 292902 - DNA, 25 bp, Homo sapien
cctgatgggaagccttctcagaggc

SEQ ID NO: 292903 - DNA, 25 bp, Homo sapien
ggcctgatgggaagccttctcagag

SEQ ID NO: 292904 - DNA, 25 bp, Homo sapien
gcctgatgggaagccttctcagagg

SEQ ID NO: 292905 - DNA, 25 bp, Homo sapien
ggtataccagccttgaacgacgcct

SEQ ID NO: 292906 - DNA, 25 bp, Homo sapien
tgcaggtataccagccttgaacgac

SEQ ID NO: 292907 - DNA, 25 bp, Homo sapien
cagccttgaacgacgcctatgtgac

SEQ ID NO: 292908 - DNA, 25 bp, Homo sapien
tgaacgacgcctatgtgacctcaag

SEQ ID NO: 292909 - DNA, 25 bp, Homo sapien
ccagcagtagtaaaggaagacacag

SEQ ID NO: 292910 - DNA, 25 bp, Homo sapien
catgcttcaaagctctgggtcctga

SEQ ID NO: 292911 - DNA, 25 bp, Homo sapien
cagaggcagcaaatataccagtagg

SEQ ID NO: 292912 - DNA, 25 bp, Homo sapien
ggacctgcatctggacatgcttcaa

SEQ ID NO: 292913 - DNA, 25 bp, Homo sapien
actgagtatagagccagggagaaga

SEQ ID NO: 292914 - DNA, 25 bp, Homo sapien
ctgtaaccctacgtggctctgcagc

SEQ ID NO: 292915 - DNA, 25 bp, Homo sapien
acctgtaaccctacgtggctctgca

SEQ ID NO: 292916 - DNA, 25 bp, Homo sapien
cagtacatgggcacgcagagctgag

SEQ ID NO: 292917 - DNA, 25 bp, Homo sapien
tagctcctagagaaagctttcgtcc

SEQ ID NO: 292918 - DNA, 25 bp, Homo sapien
cagaagtcgccagctcctggaaaga

SEQ ID NO: 292919 - DNA, 25 bp, Homo sapien
gaacagcggcctctatttcaaagcc

SEQ ID NO: 292920 - DNA, 25 bp, Homo sapien
tcagatagtgccaaaggctccatcc

SEQ ID NO: 292921 - DNA, 25 bp, Homo sapien
gaccaccagggtaggagaacagaga

SEQ ID NO: 292922 - DNA, 25 bp, Homo sapien
atttggcactcgtcccctgggagaa

SEQ ID NO: 292923 - DNA, 25 bp, Homo sapien
gcttccccaagtactcctgcaggta

SEQ ID NO: 292924 - DNA, 25 bp, Homo sapien
tctggaggtcagaagatatgcagct

SEQ ID NO: 292925 - DNA, 25 bp, Homo sapien
agtagcaagactagagcaaccagca

SEQ ID NO: 292926 - DNA, 25 bp, Homo sapien
gcagaagacccttgggggcagccat

SEQ ID NO: 292927 - DNA, 25 bp, Homo sapien
gagcaaccagcagaagacccttggg

SEQ ID NO: 292928 - DNA, 25 bp, Homo sapien
agactagagcaaccagcagaagacc

SEQ ID NO: 292929 - DNA, 25 bp, Homo sapien
aagactgaaaggctccccagatgca

SEQ ID NO: 292930 - DNA, 25 bp, Homo sapien
ccagatgcactgtgacggtcaaggg

SEQ ID NO: 292931 - DNA, 25 bp, Homo sapien
cctggtggcttcagatctcattggg

SEQ ID NO: 292932 - DNA, 25 bp, Homo sapien
tgctcaacctgcgacaagactgaaa

SEQ ID NO: 292933 - DNA, 25 bp, Homo sapien
gcccgtgattatatgcagccatgag

SEQ ID NO: 292934 - DNA, 25 bp, Homo sapien
ggttatctatactcagagggcctag

SEQ ID NO: 292935 - DNA, 25 bp, Homo sapien
gcatatgccttagtattggtgaccc

SEQ ID NO: 292936 - DNA, 25 bp, Homo sapien
taccaaatggtacgaaaatgcaagc

SEQ ID NO: 292937 - DNA, 25 bp, Homo sapien
gccaacagcccaggcagaaagacct

SEQ ID NO: 292938 - DNA, 25 bp, Homo sapien
aaagacctgcccagtcaggagggtt

SEQ ID NO: 292939 - DNA, 25 bp, Homo sapien
gcccaggcagaaagacctgcccagt

SEQ ID NO: 292940 - DNA, 25 bp, Homo sapien
gcagaaagacctgcccagtcaggag

SEQ ID NO: 292941 - DNA, 25 bp, Homo sapien
ggtgccacatttctctgtgtgggaa

SEQ ID NO: 292942 - DNA, 25 bp, Homo sapien
tgtgggaatagccaaagtcacagca

SEQ ID NO: 292943 - DNA, 25 bp, Homo sapien
gagctttcccactaatcacctgcaa

SEQ ID NO: 292944 - DNA, 25 bp, Homo sapien
acagcagtcacacactgagctttcc

SEQ ID NO: 292945 - DNA, 25 bp, Homo sapien
ctgccacttgtgcatcctccccaaa

SEQ ID NO: 292946 - DNA, 25 bp, Homo sapien
gccacttgtgcatcctccccaaagc

SEQ ID NO: 292947 - DNA, 25 bp, Homo sapien
ccacttgtgcatcctccccaaagca

SEQ ID NO: 292948 - DNA, 25 bp, Homo sapien
tgccacttgtgcatcctccccaaag

SEQ ID NO: 292949 - DNA, 25 bp, Homo sapien
tgcaaccagcaaaaagtccttcagc

SEQ ID NO: 292950 - DNA, 25 bp, Homo sapien
cagagtgacaccagtgaaggccagt

SEQ ID NO: 292951 - DNA, 25 bp, Homo sapien
cagtgaaggccagtgcaaccagcaa

SEQ ID NO: 292952 - DNA, 25 bp, Homo sapien
aacagagtgacaccagtgaaggcca

SEQ ID NO: 292953 - DNA, 25 bp, Homo sapien
taggccatagagacccacaatactg

SEQ ID NO: 292954 - DNA, 25 bp, Homo sapien
tgacgctcaccatgaccctgggtga

SEQ ID NO: 292955 - DNA, 25 bp, Homo sapien
tgtccgctgctcacatggcatctgt

SEQ ID NO: 292956 - DNA, 25 bp, Homo sapien
cagtagaagtgtcctgcatgtcacc

SEQ ID NO: 292957 - DNA, 25 bp, Homo sapien
ggctggctagagaacacagttagtt

SEQ ID NO: 292958 - DNA, 25 bp, Homo sapien
tgaccagggttagtcatgactcctc

SEQ ID NO: 292959 - DNA, 25 bp, Homo sapien
gtttgttgggtgcaggacagacact

SEQ ID NO: 292960 - DNA, 25 bp, Homo sapien
gactcctctgtatcattggctataa

SEQ ID NO: 292961 - DNA, 25 bp, Homo sapien
cccaacaggagattgcacaggagat

SEQ ID NO: 292962 - DNA, 25 bp, Homo sapien
tgaagagaattacccagagaccctg

SEQ ID NO: 292963 - DNA, 25 bp, Homo sapien
ggtgatggcatgaagggaaaccctc

SEQ ID NO: 292964 - DNA, 25 bp, Homo sapien
tttgttgtagccctcacaggcctgg

SEQ ID NO: 292965 - DNA, 25 bp, Homo sapien
tgaagtctcgctgtcaagccatccc

SEQ ID NO: 292966 - DNA, 25 bp, Homo sapien
aaatgaattgaagggtggtgaatat

SEQ ID NO: 292967 - DNA, 25 bp, Homo sapien
ttctcccagagttcagctgtccctg

SEQ ID NO: 292968 - DNA, 25 bp, Homo sapien
ggaagattcagatcacacaaatgaa

SEQ ID NO: 292969 - DNA, 25 bp, Homo sapien
gcccatccataaatctatattcagt

SEQ ID NO: 292970 - DNA, 25 bp, Homo sapien
cagagtgtctctgcctgagcaagac

SEQ ID NO: 292971 - DNA, 25 bp, Homo sapien
caacacgcccatccataaatctata

SEQ ID NO: 292972 - DNA, 25 bp, Homo sapien
cacgcccatccataaatctatattc

SEQ ID NO: 292973 - DNA, 25 bp, Homo sapien
tccaggccggttgaagccaagttca

SEQ ID NO: 292974 - DNA, 25 bp, Homo sapien
aaaggcagcctgacctcgttttaga

SEQ ID NO: 292975 - DNA, 25 bp, Homo sapien
ctgtccaccaggagcgtgaactggg

SEQ ID NO: 292976 - DNA, 25 bp, Homo sapien
gggtggcccttagcatgggctcatt

SEQ ID NO: 292977 - DNA, 25 bp, Homo sapien
cttgaactccggcaaaaaccatcct

SEQ ID NO: 292978 - DNA, 25 bp, Homo sapien
cagccgcttcacattaagtcctgaa

SEQ ID NO: 292979 - DNA, 25 bp, Homo sapien
taagaaagtctaggcaggtgctcag

SEQ ID NO: 292980 - DNA, 25 bp, Homo sapien
ccagggttgcgggtgtttcaatggc

SEQ ID NO: 292981 - DNA, 25 bp, Homo sapien
gcctggcatgggtaaccatcagagg

SEQ ID NO: 292982 - DNA, 25 bp, Homo sapien
gcatgggtaaccatcagaggaaaaa

SEQ ID NO: 292983 - DNA, 25 bp, Homo sapien
cagttgagtgggtaacgactgagtc

SEQ ID NO: 292984 - DNA, 25 bp, Homo sapien
gggtaacgactgagtctccagggaa

SEQ ID NO: 292985 - DNA, 25 bp, Homo sapien
cctgttcccagagaatgcggctgag

SEQ ID NO: 292986 - DNA, 25 bp, Homo sapien
gttctctgcatgtaggaggtcagca

SEQ ID NO: 292987 - DNA, 25 bp, Homo sapien
tgcgtggttcctaggtcctgtggac

SEQ ID NO: 292988 - DNA, 25 bp, Homo sapien
gaatgagaacgctgaagatgatcca

SEQ ID NO: 292989 - DNA, 25 bp, Homo sapien
ggttccagggatgcaggacgttcca

SEQ ID NO: 292990 - DNA, 25 bp, Homo sapien
gcttcgacaacacctacagccggat

SEQ ID NO: 292991 - DNA, 25 bp, Homo sapien
gattccttcatgtagcgcaagccac

SEQ ID NO: 292992 - DNA, 25 bp, Homo sapien
ggatgcatgccaagaagctcagcta

SEQ ID NO: 292993 - DNA, 25 bp, Homo sapien
gacggaaagcggcttatgtagccca

SEQ ID NO: 292994 - DNA, 25 bp, Homo sapien
cggaaagcggcttatgtagcccagc

SEQ ID NO: 292995 - DNA, 25 bp, Homo sapien
ctgtgagacggaaagcggcttatgt

SEQ ID NO: 292996 - DNA, 25 bp, Homo sapien
cttctgtgagacggaaagcggctta

SEQ ID NO: 292997 - DNA, 25 bp, Homo sapien
tgctcaggtagggatggcagccact

SEQ ID NO: 292998 - DNA, 25 bp, Homo sapien
tgcagtatgagcacacgaggtccgt

SEQ ID NO: 292999 - DNA, 25 bp, Homo sapien
atggcagccactctacacctgggca

SEQ ID NO: 293000 - DNA, 25 bp, Homo sapien
gagaacgagatcctgttcccgggct

SEQ ID NO: 293001 - DNA, 25 bp, Homo sapien
tccccgtggccttcaacttggtcaa

SEQ ID NO: 293002 - DNA, 25 bp, Homo sapien
tcaagtcgttcatgagtgaggagac

SEQ ID NO: 293003 - DNA, 25 bp, Homo sapien
cagttaactgcactaagacttggag

SEQ ID NO: 293004 - DNA, 25 bp, Homo sapien
gatttacatgtgtttcagccccaaa

SEQ ID NO: 293005 - DNA, 25 bp, Homo sapien
cagcccatacgtgtaattttaaatc

SEQ ID NO: 293006 - DNA, 25 bp, Homo sapien
agcccatacgtgtaattttaaatct

SEQ ID NO: 293007 - DNA, 25 bp, Homo sapien
cccagccccagtggctacatttttt

SEQ ID NO: 293008 - DNA, 25 bp, Homo sapien
tccactttgcgcaaacttgtttttc

SEQ ID NO: 293009 - DNA, 25 bp, Homo sapien
ccccgctccactttgcgcaaacttg

SEQ ID NO: 293010 - DNA, 25 bp, Homo sapien
ccgctccactttgcgcaaacttgtt

SEQ ID NO: 293011 - DNA, 25 bp, Homo sapien
cgggtccccgctccactttgcgcaa

SEQ ID NO: 293012 - DNA, 25 bp, Homo sapien
aagagtccccccgcaaggtgacgtg

SEQ ID NO: 293013 - DNA, 25 bp, Homo sapien
tgggtggaacttggatagtctcaga

SEQ ID NO: 293014 - DNA, 25 bp, Homo sapien
tggaacttggatagtctcagacaag

SEQ ID NO: 293015 - DNA, 25 bp, Homo sapien
aacttggatagtctcagacaagttg

SEQ ID NO: 293016 - DNA, 25 bp, Homo sapien
cagatacattcaccaggagccagct

SEQ ID NO: 293017 - DNA, 25 bp, Homo sapien
gggcagatacattcaccaggagcca

SEQ ID NO: 293018 - DNA, 25 bp, Homo sapien
ggcagatacattcaccaggagccag

SEQ ID NO: 293019 - DNA, 25 bp, Homo sapien
gcagatacattcaccaggagccagc

SEQ ID NO: 293020 - DNA, 25 bp, Homo sapien
catcagtagggccaccagcaaggtg

SEQ ID NO: 293021 - DNA, 25 bp, Homo sapien
gtagggccaccagcaaggtgcacac

SEQ ID NO: 293022 - DNA, 25 bp, Homo sapien
ttctgtctgattcggacgaggtaga

SEQ ID NO: 293023 - DNA, 25 bp, Homo sapien
ctttcttctgtctgattcggacgag

SEQ ID NO: 293024 - DNA, 25 bp, Homo sapien
tcagcataggtgagggtgtcctccg

SEQ ID NO: 293025 - DNA, 25 bp, Homo sapien
gctgcttgggggtccggttgaggtg

SEQ ID NO: 293026 - DNA, 25 bp, Homo sapien
ggtcagcataggtgagggtgtcctc

SEQ ID NO: 293027 - DNA, 25 bp, Homo sapien
ggctggtctgaatgctggcatactc

SEQ ID NO: 293028 - DNA, 25 bp, Homo sapien
tcaaaacccacatggtgatggacgg

SEQ ID NO: 293029 - DNA, 25 bp, Homo sapien
gatggacggaggcacaagagttctt

SEQ ID NO: 293030 - DNA, 25 bp, Homo sapien
ggtttggcaacgtcagcctccaggt

SEQ ID NO: 293031 - DNA, 25 bp, Homo sapien
tgggtgctagagcaaaccacggtcc

SEQ ID NO: 293032 - DNA, 25 bp, Homo sapien
gatttcctgcggtggtgacgtccca

SEQ ID NO: 293033 - DNA, 25 bp, Homo sapien
gagagggcctaaccgagatcagtat

SEQ ID NO: 293034 - DNA, 25 bp, Homo sapien
tccctccccgataaagaatgttcta

SEQ ID NO: 293035 - DNA, 25 bp, Homo sapien
tccagtacctgatggacctcggcgc

SEQ ID NO: 293036 - DNA, 25 bp, Homo sapien
ttctggcgcaaggtggaggccttcg

SEQ ID NO: 293037 - DNA, 25 bp, Homo sapien
cttcaacgccagcttctggcgcaag

SEQ ID NO: 293038 - DNA, 25 bp, Homo sapien
gcgggagcgcatggcccgcgaggtg

SEQ ID NO: 293039 - DNA, 25 bp, Homo sapien
gccttcgggcgggagcgcatggccc

SEQ ID NO: 293040 - DNA, 25 bp, Homo sapien
tcatcatcaggtagggaggctcaag

SEQ ID NO: 293041 - DNA, 25 bp, Homo sapien
tgtgtggaaagtgctcggcaccgca

SEQ ID NO: 293042 - DNA, 25 bp, Homo sapien
gagtggacgttatctccagccctgg

SEQ ID NO: 293043 - DNA, 25 bp, Homo sapien
gccctggtgcccatcggtaacattg

SEQ ID NO: 293044 - DNA, 25 bp, Homo sapien
cattagttggttagtgttgtcttgg

SEQ ID NO: 293045 - DNA, 25 bp, Homo sapien
cgaaagggtgataaacattacgtag

SEQ ID NO: 293046 - DNA, 25 bp, Homo sapien
gagccgtgggaccactatttaccga

SEQ ID NO: 293047 - DNA, 25 bp, Homo sapien
tagagctcaccgttactgcaccgtt

SEQ ID NO: 293048 - DNA, 25 bp, Homo sapien
gaatgaagctgccaaccttcaaggt

SEQ ID NO: 293049 - DNA, 25 bp, Homo sapien
gaagctgccaaccttcaaggtgagt

SEQ ID NO: 293050 - DNA, 25 bp, Homo sapien
aagaatgaagctgccaaccttcaag

SEQ ID NO: 293051 - DNA, 25 bp, Homo sapien
tgaagctgccaaccttcaaggtgag

SEQ ID NO: 293052 - DNA, 25 bp, Homo sapien
gctgagattgggccactgcactcca

SEQ ID NO: 293053 - DNA, 25 bp, Homo sapien
agctgagattgggccactgcactcc

SEQ ID NO: 293054 - DNA, 25 bp, Homo sapien
gagctgagattgggccactgcactc

SEQ ID NO: 293055 - DNA, 25 bp, Homo sapien
tgggaagcagagattgtagtgagct

SEQ ID NO: 293056 - DNA, 25 bp, Homo sapien
ttctcaaccaatccgaaagggctgg

SEQ ID NO: 293057 - DNA, 25 bp, Homo sapien
agccaggccacttttctcaaccaat

SEQ ID NO: 293058 - DNA, 25 bp, Homo sapien
cccagaccagccaggccacttttct

SEQ ID NO: 293059 - DNA, 25 bp, Homo sapien
gtgggtgccgctggccccagaccag

SEQ ID NO: 293060 - DNA, 25 bp, Homo sapien
gcaagaatcgggaaagactcctggg

SEQ ID NO: 293061 - DNA, 25 bp, Homo sapien
ctccgagagacgcagcttcctgtca

SEQ ID NO: 293062 - DNA, 25 bp, Homo sapien
gcaatgcacggctaagtctgcagag

SEQ ID NO: 293063 - DNA, 25 bp, Homo sapien
gtcactgattaatcctccatgcctg

SEQ ID NO: 293064 - DNA, 25 bp, Homo sapien
cacatctcagtgagggcccccagga

SEQ ID NO: 293065 - DNA, 25 bp, Homo sapien
acacatctcagtgagggcccccagg

SEQ ID NO: 293066 - DNA, 25 bp, Homo sapien
cacacatctcagtgagggcccccag

SEQ ID NO: 293067 - DNA, 25 bp, Homo sapien
aaccattttttggtgcctatctcca

SEQ ID NO: 293068 - DNA, 25 bp, Homo sapien
tgagaaccattttttggtgcctatc

SEQ ID NO: 293069 - DNA, 25 bp, Homo sapien
gaaccattttttggtgcctatctcc

SEQ ID NO: 293070 - DNA, 25 bp, Homo sapien
cactgagaaccattttttggtgcct

SEQ ID NO: 293071 - DNA, 25 bp, Homo sapien
catcaaatttccaaacaacgcaaac

SEQ ID NO: 293072 - DNA, 25 bp, Homo sapien
tccagctggtgaattgaggctgcct

SEQ ID NO: 293073 - DNA, 25 bp, Homo sapien
gcagatctcaaaataacgcctttcc

SEQ ID NO: 293074 - DNA, 25 bp, Homo sapien
caaaataacgcctttcctgccatct

SEQ ID NO: 293075 - DNA, 25 bp, Homo sapien
ccagatggctgtccatctctggtat

SEQ ID NO: 293076 - DNA, 25 bp, Homo sapien
ctaccagatggctgtccatctctgg

SEQ ID NO: 293077 - DNA, 25 bp, Homo sapien
agatggctgtccatctctggtattt

SEQ ID NO: 293078 - DNA, 25 bp, Homo sapien
taccagatggctgtccatctctggt

SEQ ID NO: 293079 - DNA, 25 bp, Homo sapien
tggagaggcgtaggcccacatagat

SEQ ID NO: 293080 - DNA, 25 bp, Homo sapien
gctccagggaaagccggtccatcca

SEQ ID NO: 293081 - DNA, 25 bp, Homo sapien
agccggtccatccaaggtaagaggt

SEQ ID NO: 293082 - DNA, 25 bp, Homo sapien
tgctggtaaccaagcttgaggctgt

SEQ ID NO: 293083 - DNA, 25 bp, Homo sapien
gcttgccctggcagtcaccgtcatc

SEQ ID NO: 293084 - DNA, 25 bp, Homo sapien
gccctggcagtcaccgtcatcctcg

SEQ ID NO: 293085 - DNA, 25 bp, Homo sapien
ttgccctggcagtcaccgtcatcct

SEQ ID NO: 293086 - DNA, 25 bp, Homo sapien
cttgccctggcagtcaccgtcatcc

SEQ ID NO: 293087 - DNA, 25 bp, Homo sapien
gcctgtcccccttgtggcccctgac

SEQ ID NO: 293088 - DNA, 25 bp, Homo sapien
catcctccaggaaccatttgagctg

SEQ ID NO: 293089 - DNA, 25 bp, Homo sapien
ttctcatcctccaggaaccatttga

SEQ ID NO: 293090 - DNA, 25 bp, Homo sapien
cccttgtggcccctgacaaactcac

SEQ ID NO: 293091 - DNA, 25 bp, Homo sapien
ccatactggtagtagctagtgtggg

SEQ ID NO: 293092 - DNA, 25 bp, Homo sapien
atgcccaggccatactggtagtagc

SEQ ID NO: 293093 - DNA, 25 bp, Homo sapien
acgctgtcatggacccgcttctggt

SEQ ID NO: 293094 - DNA, 25 bp, Homo sapien
catggacccgcttctggtggagaca

SEQ ID NO: 293095 - DNA, 25 bp, Homo sapien
gccctggtggaaaggttccacagca

SEQ ID NO: 293096 - DNA, 25 bp, Homo sapien
tgaagtgggggacagaacatgcaat

SEQ ID NO: 293097 - DNA, 25 bp, Homo sapien
agtgggggacagaacatgcaatgag

SEQ ID NO: 293098 - DNA, 25 bp, Homo sapien
cttgaagtgggggacagaacatgca

SEQ ID NO: 293099 - DNA, 25 bp, Homo sapien
aagtgggggacagaacatgcaatga

SEQ ID NO: 293100 - DNA, 25 bp, Homo sapien
tgctgtagacattcccaaagtggcc

SEQ ID NO: 293101 - DNA, 25 bp, Homo sapien
tccgaccagggttgaagtttgagcg

SEQ ID NO: 293102 - DNA, 25 bp, Homo sapien
ggccatggtgatccgttgtctccga

SEQ ID NO: 293103 - DNA, 25 bp, Homo sapien
gggtctgggccttcaagatctcctc

SEQ ID NO: 293104 - DNA, 25 bp, Homo sapien
agcaaagcaaccctcgccttgagac

SEQ ID NO: 293105 - DNA, 25 bp, Homo sapien
cagttctgccccacgcatgggggaa

SEQ ID NO: 293106 - DNA, 25 bp, Homo sapien
accctcgccttgagacatgctgttc

SEQ ID NO: 293107 - DNA, 25 bp, Homo sapien
gactggccagcaaagcaaccctcgc

SEQ ID NO: 293108 - DNA, 25 bp, Homo sapien
cagatcaatgtaggtcttgtggttc

SEQ ID NO: 293109 - DNA, 25 bp, Homo sapien
aaatcatgagagcattctggaaggc

SEQ ID NO: 293110 - DNA, 25 bp, Homo sapien
tcttgtggttcagaacgggcagcag

SEQ ID NO: 293111 - DNA, 25 bp, Homo sapien
agcagctgggaaatcatgagagcat

SEQ ID NO: 293112 - DNA, 25 bp, Homo sapien
cctgcagcgtgacactgatgatctc

SEQ ID NO: 293113 - DNA, 25 bp, Homo sapien
tctgtacggcggcaagagactaagc

SEQ ID NO: 293114 - DNA, 25 bp, Homo sapien
ttccacggtggacccggccagaaca

SEQ ID NO: 293115 - DNA, 25 bp, Homo sapien
cttgggtctgaggaatggtctcagc

SEQ ID NO: 293116 - DNA, 25 bp, Homo sapien
tctctccacatctgtctatctgtgt

SEQ ID NO: 293117 - DNA, 25 bp, Homo sapien
ctctctccacatctgtctatctgtg

SEQ ID NO: 293118 - DNA, 25 bp, Homo sapien
tcaggggcctcaaacatagtcttca

SEQ ID NO: 293119 - DNA, 25 bp, Homo sapien
caggggcctcaaacatagtcttcat

SEQ ID NO: 293120 - DNA, 25 bp, Homo sapien
tccaagctctttgggccgacactcg

SEQ ID NO: 293121 - DNA, 25 bp, Homo sapien
ggtggctgttgtccctaaggggaga

SEQ ID NO: 293122 - DNA, 25 bp, Homo sapien
ccacaggtctgtgatctcaacttcc

SEQ ID NO: 293123 - DNA, 25 bp, Homo sapien
tctttgggccgacactcgtcaaacc

SEQ ID NO: 293124 - DNA, 25 bp, Homo sapien
aagtaggggcctgacaaggaggcct

SEQ ID NO: 293125 - DNA, 25 bp, Homo sapien
ggcctgacaaggaggcctgtgtttc

SEQ ID NO: 293126 - DNA, 25 bp, Homo sapien
tgacaaggaggcctgtgtttcatat

SEQ ID NO: 293127 - DNA, 25 bp, Homo sapien
ttaagtaggggcctgacaaggaggc

SEQ ID NO: 293128 - DNA, 25 bp, Homo sapien
tggggtgttggggtctcggagaagc

SEQ ID NO: 293129 - DNA, 25 bp, Homo sapien
cacatccagagtgtcaggccatgac

SEQ ID NO: 293130 - DNA, 25 bp, Homo sapien
ggtgagttgatgaagcctcttggct

SEQ ID NO: 293131 - DNA, 25 bp, Homo sapien
cagtgattttgtgaaggtgtggccc

SEQ ID NO: 293132 - DNA, 25 bp, Homo sapien
gaatttccacagtaacttgcataaa

SEQ ID NO: 293133 - DNA, 25 bp, Homo sapien
tttctccatccttgggtctgtagtc

SEQ ID NO: 293134 - DNA, 25 bp, Homo sapien
gtttctccatccttgggtctgtagt

SEQ ID NO: 293135 - DNA, 25 bp, Homo sapien
tgcggcctgcggactccgttttttg

SEQ ID NO: 293136 - DNA, 25 bp, Homo sapien
tgggccatggtatagggccctcgaa

SEQ ID NO: 293137 - DNA, 25 bp, Homo sapien
cagggtcaggcgagttcctgttcca

SEQ ID NO: 293138 - DNA, 25 bp, Homo sapien
gccagaaagacttcccagggaagat

SEQ ID NO: 293139 - DNA, 25 bp, Homo sapien
caatgcccacatggcggctcaggca

SEQ ID NO: 293140 - DNA, 25 bp, Homo sapien
agtgctcagtcatagtagtgggtgc

SEQ ID NO: 293141 - DNA, 25 bp, Homo sapien
tcacagagcagttcaagatagtatc

SEQ ID NO: 293142 - DNA, 25 bp, Homo sapien
ggtgctcagtcagtagtcaatgtca

SEQ ID NO: 293143 - DNA, 25 bp, Homo sapien
gattataaccatcatcgaagcccct

SEQ ID NO: 293144 - DNA, 25 bp, Homo sapien
ttccaaggcatgtggacgcagacct

SEQ ID NO: 293145 - DNA, 25 bp, Homo sapien
tgatgggctgttcatcagagggccc

SEQ ID NO: 293146 - DNA, 25 bp, Homo sapien
gatgccctaatggtgccttgtggaa

SEQ ID NO: 293147 - DNA, 25 bp, Homo sapien
ttgtgccagactagacaactgaccc

SEQ ID NO: 293148 - DNA, 25 bp, Homo sapien
cagagactcagtggcgtgggacaca

SEQ ID NO: 293149 - DNA, 25 bp, Homo sapien
tgggattcctgccaattgtgccaga

SEQ ID NO: 293150 - DNA, 25 bp, Homo sapien
gggacacaatctaagagggagcttg

SEQ ID NO: 293151 - DNA, 25 bp, Homo sapien
aaaagcccatagtagtctgcccttg

SEQ ID NO: 293152 - DNA, 25 bp, Homo sapien
tgctgcaaggctgagatgggcctct

SEQ ID NO: 293153 - DNA, 25 bp, Homo sapien
aacagccagcaggactctcaagagg

SEQ ID NO: 293154 - DNA, 25 bp, Homo sapien
tagagatctaaatgcaggcctgaca

SEQ ID NO: 293155 - DNA, 25 bp, Homo sapien
gaggcaggcgctgtattatcccagt

SEQ ID NO: 293156 - DNA, 25 bp, Homo sapien
gactatggattaagcaagcgaggcc

SEQ ID NO: 293157 - DNA, 25 bp, Homo sapien
tctccaagatcaccatgaagcggct

SEQ ID NO: 293158 - DNA, 25 bp, Homo sapien
tacaatggcaagtgtcggcactggg

SEQ ID NO: 293159 - DNA, 25 bp, Homo sapien
tgcctgttgtctaaccagcaaatcc

SEQ ID NO: 293160 - DNA, 25 bp, Homo sapien
cccttgcctgttgtctaaccagcaa

SEQ ID NO: 293161 - DNA, 25 bp, Homo sapien
gcctgttgtctaaccagcaaatcct

SEQ ID NO: 293162 - DNA, 25 bp, Homo sapien
tgttgtctaaccagcaaatccttga

SEQ ID NO: 293163 - DNA, 25 bp, Homo sapien
tgtcggtcttcctactaggctcctg

SEQ ID NO: 293164 - DNA, 25 bp, Homo sapien
tgttgtcggtcttcctactaggctc

SEQ ID NO: 293165 - DNA, 25 bp, Homo sapien
ctctttcctgttgtcggtcttccta

SEQ ID NO: 293166 - DNA, 25 bp, Homo sapien
ttcctactaggctcctgcccaagag

SEQ ID NO: 293167 - DNA, 25 bp, Homo sapien
tctgaagtccgggagcacgaggacc

SEQ ID NO: 293168 - DNA, 25 bp, Homo sapien
tccgggagcacgaggaccaaggccc

SEQ ID NO: 293169 - DNA, 25 bp, Homo sapien
tctgagctctgaagtccgggagcac

SEQ ID NO: 293170 - DNA, 25 bp, Homo sapien
tggcccctctgagctctgaagtccg

SEQ ID NO: 293171 - DNA, 25 bp, Homo sapien
cagaacgacagacgctctctgaggt

SEQ ID NO: 293172 - DNA, 25 bp, Homo sapien
tttcccaccagaacgacagacgctc

SEQ ID NO: 293173 - DNA, 25 bp, Homo sapien
tctctgaggtcaggattgggtaaac

SEQ ID NO: 293174 - DNA, 25 bp, Homo sapien
tcaggattgggtaaacggcgcgccc

SEQ ID NO: 293175 - DNA, 25 bp, Homo sapien
cacctgatctctggccacaattatc

SEQ ID NO: 293176 - DNA, 25 bp, Homo sapien
cagcagagctggattacggggtccc

SEQ ID NO: 293177 - DNA, 25 bp, Homo sapien
ccacaattatctcgtgggacctcag

SEQ ID NO: 293178 - DNA, 25 bp, Homo sapien
gatacccacagctgcggaagtaggt

SEQ ID NO: 293179 - DNA, 25 bp, Homo sapien
gggtagtgaggaggggcccacagcc

SEQ ID NO: 293180 - DNA, 25 bp, Homo sapien
cttcaagaagcagggtagtgaggag

SEQ ID NO: 293181 - DNA, 25 bp, Homo sapien
gtagtgaggaggggcccacagcccc

SEQ ID NO: 293182 - DNA, 25 bp, Homo sapien
gtgaggaggggcccacagcccccat

SEQ ID NO: 293183 - DNA, 25 bp, Homo sapien
ggagacactggggtatcccgcacag

SEQ ID NO: 293184 - DNA, 25 bp, Homo sapien
agccctccatggagatgaacgcgca

SEQ ID NO: 293185 - DNA, 25 bp, Homo sapien
gaacgcgcattgctggagacactgg

SEQ ID NO: 293186 - DNA, 25 bp, Homo sapien
tccatggagatgaacgcgcattgct

SEQ ID NO: 293187 - DNA, 25 bp, Homo sapien
gtggtcagcctctcttcgccgccag

SEQ ID NO: 293188 - DNA, 25 bp, Homo sapien
agcctctcttcgccgccagggggga

SEQ ID NO: 293189 - DNA, 25 bp, Homo sapien
tctgcccagtagacccccccacgag

SEQ ID NO: 293190 - DNA, 25 bp, Homo sapien
atctgcccagtagacccccccacga

SEQ ID NO: 293191 - DNA, 25 bp, Homo sapien
tacacggaaaattgggctgagcacc

SEQ ID NO: 293192 - DNA, 25 bp, Homo sapien
tgggccaccagagagttccgcttgg

SEQ ID NO: 293193 - DNA, 25 bp, Homo sapien
gaggacactgcttacttgtgccagg

SEQ ID NO: 293194 - DNA, 25 bp, Homo sapien
ggtcattagggtgcgcgcagatcca

SEQ ID NO: 293195 - DNA, 25 bp, Homo sapien
cctgccatcatggtgctccggcggg

SEQ ID NO: 293196 - DNA, 25 bp, Homo sapien
gggccgcccaaagccgtgcactgtg

SEQ ID NO: 293197 - DNA, 25 bp, Homo sapien
gccaccagcatgtgcagggccgaca

SEQ ID NO: 293198 - DNA, 25 bp, Homo sapien
tgttgaggcttgacatgctggctcc

SEQ ID NO: 293199 - DNA, 25 bp, Homo sapien
gccgtgcactgtgaagatccacttg

SEQ ID NO: 293200 - DNA, 25 bp, Homo sapien
tgaaccgacttgagtccgcggaggc

SEQ ID NO: 293201 - DNA, 25 bp, Homo sapien
cgcaggccatggacgtgccaaaggt

SEQ ID NO: 293202 - DNA, 25 bp, Homo sapien
cccatggcggccaactgaagtgggt

SEQ ID NO: 293203 - DNA, 25 bp, Homo sapien
tagtaaccagttgtgccaggtccag

SEQ ID NO: 293204 - DNA, 25 bp, Homo sapien
tgtttataactgataatcagcatct

SEQ ID NO: 293205 - DNA, 25 bp, Homo sapien
caggaggccacgaactcgcagttgt

SEQ ID NO: 293206 - DNA, 25 bp, Homo sapien
tcctgaaagagtgagtgcgatgccc

SEQ ID NO: 293207 - DNA, 25 bp, Homo sapien
tggcgtaaagcagggtcaccgcgtc

SEQ ID NO: 293208 - DNA, 25 bp, Homo sapien
gaagctggccaggttatagagaaca

SEQ ID NO: 293209 - DNA, 25 bp, Homo sapien
cattccttctatggccacagcggag

SEQ ID NO: 293210 - DNA, 25 bp, Homo sapien
ggcttggacccaccatccagtggtg

SEQ ID NO: 293211 - DNA, 25 bp, Homo sapien
caggaggaaggattgtgtaaccgcc

SEQ ID NO: 293212 - DNA, 25 bp, Homo sapien
cataataatgactctgacaagcaca

SEQ ID NO: 293213 - DNA, 25 bp, Homo sapien
accctctccatagggatcatcagtt

SEQ ID NO: 293214 - DNA, 25 bp, Homo sapien
atagggatcatcagttccattttgc

SEQ ID NO: 293215 - DNA, 25 bp, Homo sapien
tgcccagcgctcctcattcgaaccc

SEQ ID NO: 293216 - DNA, 25 bp, Homo sapien
ccctgcccagcgctcctcattcgaa

SEQ ID NO: 293217 - DNA, 25 bp, Homo sapien
tccctctgcacaaggtcgtcttggt

SEQ ID NO: 293218 - DNA, 25 bp, Homo sapien
tgtaacttcacaccgtggctctgtt

SEQ ID NO: 293219 - DNA, 25 bp, Homo sapien
aggtcccggtgctcaatggtcaaag

SEQ ID NO: 293220 - DNA, 25 bp, Homo sapien
gagggtgaagtcctaatcctactgc

SEQ ID NO: 293221 - DNA, 25 bp, Homo sapien
cttcatgtgatgtggacccctggga

SEQ ID NO: 293222 - DNA, 25 bp, Homo sapien
aggtctcagcggttcctctcacagg

SEQ ID NO: 293223 - DNA, 25 bp, Homo sapien
tggcaaaagatggtgttagtcccct

SEQ ID NO: 293224 - DNA, 25 bp, Homo sapien
tgtgcttagcgcaaatggcagctct

SEQ ID NO: 293225 - DNA, 25 bp, Homo sapien
ttaagttgatatcttaaggctcctc

SEQ ID NO: 293226 - DNA, 25 bp, Homo sapien
tttaagttgatatcttaaggctcct

SEQ ID NO: 293227 - DNA, 25 bp, Homo sapien
ctttaagttgatatcttaaggctcc

SEQ ID NO: 293228 - DNA, 25 bp, Homo sapien
tggcggcttccctgttcgagaaaca

SEQ ID NO: 293229 - DNA, 25 bp, Homo sapien
cctatcgagagggtggttcgagccc

SEQ ID NO: 293230 - DNA, 25 bp, Homo sapien
tcccgtaaatcgtggaggatctcag

SEQ ID NO: 293231 - DNA, 25 bp, Homo sapien
tacggaagcggtgagactgtctctc

SEQ ID NO: 293232 - DNA, 25 bp, Homo sapien
cgggtccgagagtctaacgaaggct

SEQ ID NO: 293233 - DNA, 25 bp, Homo sapien
tctgaaagagttcgggctcccttgc

SEQ ID NO: 293234 - DNA, 25 bp, Homo sapien
cacacgatgtcatgcctgggagact

SEQ ID NO: 293235 - DNA, 25 bp, Homo sapien
ggctggcaacgactggaaatattcc

SEQ ID NO: 293236 - DNA, 25 bp, Homo sapien
ctgcacctcatggagtcgttgtgct

SEQ ID NO: 293237 - DNA, 25 bp, Homo sapien
gagtcgttgtgctatgagcttgtca

SEQ ID NO: 293238 - DNA, 25 bp, Homo sapien
aaacccacccaagataaactgctct

SEQ ID NO: 293239 - DNA, 25 bp, Homo sapien
catggagtcgttgtgctatgagctt

SEQ ID NO: 293240 - DNA, 25 bp, Homo sapien
ggtggtctgatcttcattagtggct

SEQ ID NO: 293241 - DNA, 25 bp, Homo sapien
tccaagtactggtggatgttcatgg

SEQ ID NO: 293242 - DNA, 25 bp, Homo sapien
tgttcatggattcccgtctccagtg

SEQ ID NO: 293243 - DNA, 25 bp, Homo sapien
cattagtggctgatctccttattgc

SEQ ID NO: 293244 - DNA, 25 bp, Homo sapien
atccctttgccagtactagagtggc

SEQ ID NO: 293245 - DNA, 25 bp, Homo sapien
gtcatgtagcctggctattttctag

SEQ ID NO: 293246 - DNA, 25 bp, Homo sapien
gatcacactagtgtcatcgtggccc

SEQ ID NO: 293247 - DNA, 25 bp, Homo sapien
tgttttacagtcatgtagcctggct

SEQ ID NO: 293248 - DNA, 25 bp, Homo sapien
tgctgtgagctctggagtgcagaga

SEQ ID NO: 293249 - DNA, 25 bp, Homo sapien
ctgtgagctctggagtgcagagagc

SEQ ID NO: 293250 - DNA, 25 bp, Homo sapien
ctgcaattttgctgtgagctctgga

SEQ ID NO: 293251 - DNA, 25 bp, Homo sapien
gcaattttgctgtgagctctggagt

SEQ ID NO: 293252 - DNA, 25 bp, Homo sapien
tacgtgaagtggtccccagaaggaa

SEQ ID NO: 293253 - DNA, 25 bp, Homo sapien
ctacgtgaagtggtccccagaagga

SEQ ID NO: 293254 - DNA, 25 bp, Homo sapien
ggggcgcagtcacgtgcgcgcggcg

SEQ ID NO: 293255 - DNA, 25 bp, Homo sapien
gggcgcagtcacgtgcgcgcggcgc

SEQ ID NO: 293256 - DNA, 25 bp, Homo sapien
ggccgggggcgcagtcacgtgcgcg

SEQ ID NO: 293257 - DNA, 25 bp, Homo sapien
gccgccgtgtggcacgacaggcagg

SEQ ID NO: 293258 - DNA, 25 bp, Homo sapien
gacaggcaggggacaaccgtgaaca

SEQ ID NO: 293259 - DNA, 25 bp, Homo sapien
accgtgaacagcgacgagagcccgc

SEQ ID NO: 293260 - DNA, 25 bp, Homo sapien
gggacaaccgtgaacagcgacgaga

SEQ ID NO: 293261 - DNA, 25 bp, Homo sapien
tccgacacctgttctgacagcggtc

SEQ ID NO: 293262 - DNA, 25 bp, Homo sapien
gtcgtctcggacacaggttccgatc

SEQ ID NO: 293263 - DNA, 25 bp, Homo sapien
cggagccggacgtggaagcgctcat

SEQ ID NO: 293264 - DNA, 25 bp, Homo sapien
caggttccgatcttggcactgcctc

SEQ ID NO: 293265 - DNA, 25 bp, Homo sapien
gccgcgacccctgcagcagttccga

SEQ ID NO: 293266 - DNA, 25 bp, Homo sapien
gcgacccctgcagcagttccgatgg

SEQ ID NO: 293267 - DNA, 25 bp, Homo sapien
gcagcagttccgatggctgcccagc

SEQ ID NO: 293268 - DNA, 25 bp, Homo sapien
acccctgcagcagttccgatggctg

SEQ ID NO: 293269 - DNA, 25 bp, Homo sapien
tcgggtctgagaaaggtcgcgctcc

SEQ ID NO: 293270 - DNA, 25 bp, Homo sapien
agagcggctccgatgcggccttagt

SEQ ID NO: 293271 - DNA, 25 bp, Homo sapien
gggctttaacgctggcagcgatcct

SEQ ID NO: 293272 - DNA, 25 bp, Homo sapien
tccgatgcggccttagtgaagggcc

SEQ ID NO: 293273 - DNA, 25 bp, Homo sapien
ggcactggaggtcgtgccagtcccc

SEQ ID NO: 293274 - DNA, 25 bp, Homo sapien
acattggaaccccaagaggagtctt

SEQ ID NO: 293275 - DNA, 25 bp, Homo sapien
ggtcgtgccagtccccgacattgga

SEQ ID NO: 293276 - DNA, 25 bp, Homo sapien
gtccagaggcagtaaggccagtggg

SEQ ID NO: 293277 - DNA, 25 bp, Homo sapien
agagcaaaccattgcccagcacgaa

SEQ ID NO: 293278 - DNA, 25 bp, Homo sapien
tggtagcccttcagatagttggtcc

SEQ ID NO: 293279 - DNA, 25 bp, Homo sapien
ccagcacgaaccagcggcgctggta

SEQ ID NO: 293280 - DNA, 25 bp, Homo sapien
tagttggtccacttgagaagccagc

SEQ ID NO: 293281 - DNA, 25 bp, Homo sapien
tggaggatgctcagtccttgatccc

SEQ ID NO: 293282 - DNA, 25 bp, Homo sapien
aggatgctcagtccttgatcccagc

SEQ ID NO: 293283 - DNA, 25 bp, Homo sapien
ctgtcagggttacgtgacagacctg

SEQ ID NO: 293284 - DNA, 25 bp, Homo sapien
tcagggttacgtgacagacctggag

SEQ ID NO: 293285 - DNA, 25 bp, Homo sapien
ccttgggcaaggtctagatcagaca

SEQ ID NO: 293286 - DNA, 25 bp, Homo sapien
tgcaaaaaccaagccgccagatgac

SEQ ID NO: 293287 - DNA, 25 bp, Homo sapien
tctgatcagagacaagaggccactc

SEQ ID NO: 293288 - DNA, 25 bp, Homo sapien
catgtggcaagtgtaccccagtcac

SEQ ID NO: 293289 - DNA, 25 bp, Homo sapien
tgccattgatctccgtttgggtcac

SEQ ID NO: 293290 - DNA, 25 bp, Homo sapien
tgtgtattacaccagtgttggcctg

SEQ ID NO: 293291 - DNA, 25 bp, Homo sapien
tggcctgcacctttcgtgtcacgtg

SEQ ID NO: 293292 - DNA, 25 bp, Homo sapien
tccgtttgggtcacttgcattatcc

SEQ ID NO: 293293 - DNA, 25 bp, Homo sapien
ccccagggctcaggagcaagggccc

SEQ ID NO: 293294 - DNA, 25 bp, Homo sapien
cctgttcccatgctgccccagggct

SEQ ID NO: 293295 - DNA, 25 bp, Homo sapien
catcagccctgttcccatgctgccc

SEQ ID NO: 293296 - DNA, 25 bp, Homo sapien
gctcaggagcaagggcccaggccat

SEQ ID NO: 293297 - DNA, 25 bp, Homo sapien
caagagtcctccgtgtcaatgtgcg

SEQ ID NO: 293298 - DNA, 25 bp, Homo sapien
tccgtgtcaatgtgcgcggtggaca

SEQ ID NO: 293299 - DNA, 25 bp, Homo sapien
caggttgatggttccacggcacgtg

SEQ ID NO: 293300 - DNA, 25 bp, Homo sapien
gtcagcaagataccacaagagtcct

SEQ ID NO: 293301 - DNA, 25 bp, Homo sapien
ctgaatgagtgttcatcacgcggac

SEQ ID NO: 293302 - DNA, 25 bp, Homo sapien
gagtgttcatcacgcggacagcctt

SEQ ID NO: 293303 - DNA, 25 bp, Homo sapien
aatgagtgttcatcacgcggacagc

SEQ ID NO: 293304 - DNA, 25 bp, Homo sapien
tgagtgttcatcacgcggacagcct

SEQ ID NO: 293305 - DNA, 25 bp, Homo sapien
cttgaccttccagattgatccacgc

SEQ ID NO: 293306 - DNA, 25 bp, Homo sapien
gaccttccagattgatccacgctgg

SEQ ID NO: 293307 - DNA, 25 bp, Homo sapien
cttccagattgatccacgctggcct

SEQ ID NO: 293308 - DNA, 25 bp, Homo sapien
agactcatgacaccaccatatacac

SEQ ID NO: 293309 - DNA, 25 bp, Homo sapien
taaatggtttcactctccacgatgg

SEQ ID NO: 293310 - DNA, 25 bp, Homo sapien
aaatggtttcactctccacgatggg

SEQ ID NO: 293311 - DNA, 25 bp, Homo sapien
ctggctgtcgtaggaaaactgttgc

SEQ ID NO: 293312 - DNA, 25 bp, Homo sapien
aaaagaaacccctcgcactggctgt

SEQ ID NO: 293313 - DNA, 25 bp, Homo sapien
tccgcaccctgccaactgcaaaaga

SEQ ID NO: 293314 - DNA, 25 bp, Homo sapien
aaactgttgccggatgactaatccc

SEQ ID NO: 293315 - DNA, 25 bp, Homo sapien
ccacctggaggagtcagatctggaa

SEQ ID NO: 293316 - DNA, 25 bp, Homo sapien
agaaaaacgcaactgccacctggag

SEQ ID NO: 293317 - DNA, 25 bp, Homo sapien
gtggccagaacagggcttctgattt

SEQ ID NO: 293318 - DNA, 25 bp, Homo sapien
gcagggatgaaccacagggcgaggc

SEQ ID NO: 293319 - DNA, 25 bp, Homo sapien
catgtgtacgtgtgctcagcaaagg

SEQ ID NO: 293320 - DNA, 25 bp, Homo sapien
tgcagaacgtggctgcatagcatgt

SEQ ID NO: 293321 - DNA, 25 bp, Homo sapien
gtcaccacacagcagataccctggg

SEQ ID NO: 293322 - DNA, 25 bp, Homo sapien
tctgcatggttggaaggggtcacca

SEQ ID NO: 293323 - DNA, 25 bp, Homo sapien
aaactgctgggagtattatagttgt

SEQ ID NO: 293324 - DNA, 25 bp, Homo sapien
aactgctgggagtattatagttgta

SEQ ID NO: 293325 - DNA, 25 bp, Homo sapien
actgctgggagtattatagttgtat

SEQ ID NO: 293326 - DNA, 25 bp, Homo sapien
tgctgggagtattatagttgtatgg

SEQ ID NO: 293327 - DNA, 25 bp, Homo sapien
gaggtacagcattcacgctggctgg

SEQ ID NO: 293328 - DNA, 25 bp, Homo sapien
aggtacagcattcacgctggctggc

SEQ ID NO: 293329 - DNA, 25 bp, Homo sapien
aagaggtacagcattcacgctggct

SEQ ID NO: 293330 - DNA, 25 bp, Homo sapien
agaggtacagcattcacgctggctg

SEQ ID NO: 293331 - DNA, 25 bp, Homo sapien
gaatctgccaatcccactcaaggag

SEQ ID NO: 293332 - DNA, 25 bp, Homo sapien
tgaatctgccaatcccactcaagga

SEQ ID NO: 293333 - DNA, 25 bp, Homo sapien
tttgaatctgccaatcccactcaag

SEQ ID NO: 293334 - DNA, 25 bp, Homo sapien
attttgaatctgccaatcccactca

SEQ ID NO: 293335 - DNA, 25 bp, Homo sapien
tttcattttggagcaatagggtggc

SEQ ID NO: 293336 - DNA, 25 bp, Homo sapien
attttcattttggagcaatagggtg

SEQ ID NO: 293337 - DNA, 25 bp, Homo sapien
ttttcattttggagcaatagggtgg

SEQ ID NO: 293338 - DNA, 25 bp, Homo sapien
ttcattttggagcaatagggtggca

SEQ ID NO: 293339 - DNA, 25 bp, Homo sapien
tcaggtttaggtcaggcatccggtc

SEQ ID NO: 293340 - DNA, 25 bp, Homo sapien
gccttgcctgcatcagagtccggtg

SEQ ID NO: 293341 - DNA, 25 bp, Homo sapien
cagctttctagttccgtagcccaga

SEQ ID NO: 293342 - DNA, 25 bp, Homo sapien
tcatgcctacagatccacgtgaagg

SEQ ID NO: 293343 - DNA, 25 bp, Homo sapien
tttcagccagtctcagcggggtttt

SEQ ID NO: 293344 - DNA, 25 bp, Homo sapien
gtgtttcagccagtctcagcggggt

SEQ ID NO: 293345 - DNA, 25 bp, Homo sapien
cagccagtctcagcggggttttgtt

SEQ ID NO: 293346 - DNA, 25 bp, Homo sapien
tgtttcagccagtctcagcggggtt

SEQ ID NO: 293347 - DNA, 25 bp, Homo sapien
tggagccagagatggcagccacaaa

SEQ ID NO: 293348 - DNA, 25 bp, Homo sapien
gccacaaagccaggcaagagccagg

SEQ ID NO: 293349 - DNA, 25 bp, Homo sapien
gccagagatggcagccacaaagcca

SEQ ID NO: 293350 - DNA, 25 bp, Homo sapien
ctaagaatttgaagctggagccaga

SEQ ID NO: 293351 - DNA, 25 bp, Homo sapien
catcttctgaagaaaaatgtaaggt

SEQ ID NO: 293352 - DNA, 25 bp, Homo sapien
cttctgaagaaaaatgtaaggtggc

SEQ ID NO: 293353 - DNA, 25 bp, Homo sapien
tcttctgaagaaaaatgtaaggtgg

SEQ ID NO: 293354 - DNA, 25 bp, Homo sapien
tctgaagaaaaatgtaaggtggctg

SEQ ID NO: 293355 - DNA, 25 bp, Homo sapien
tcccacactcggtgatatcctttgg

SEQ ID NO: 293356 - DNA, 25 bp, Homo sapien
agatggctctgtgaggaccccgaga

SEQ ID NO: 293357 - DNA, 25 bp, Homo sapien
gaccccgagactgcttatccatgtg

SEQ ID NO: 293358 - DNA, 25 bp, Homo sapien
actcggtgatatcctttggaaggac

SEQ ID NO: 293359 - DNA, 25 bp, Homo sapien
caaaccactggctagcttgaggcct

SEQ ID NO: 293360 - DNA, 25 bp, Homo sapien
ccccaaggtggtggcgcattcataa

SEQ ID NO: 293361 - DNA, 25 bp, Homo sapien
gattgtccggaattcttgcagtgaa

SEQ ID NO: 293362 - DNA, 25 bp, Homo sapien
gaggcctgggcacttaactccaatg

SEQ ID NO: 293363 - DNA, 25 bp, Homo sapien
aatcgtaaagatgccatccctgctt

SEQ ID NO: 293364 - DNA, 25 bp, Homo sapien
gccatccctgcttctgaagcctctt

SEQ ID NO: 293365 - DNA, 25 bp, Homo sapien
gtcaatcgtaaagatgccatccctg

SEQ ID NO: 293366 - DNA, 25 bp, Homo sapien
ccatccctgcttctgaagcctcttc

SEQ ID NO: 293367 - DNA, 25 bp, Homo sapien
ccgaccctcaaaactgggctaggtg

SEQ ID NO: 293368 - DNA, 25 bp, Homo sapien
agctctctgaacagccaggatctcc

SEQ ID NO: 293369 - DNA, 25 bp, Homo sapien
caccaatgaggtgtctttagctctc

SEQ ID NO: 293370 - DNA, 25 bp, Homo sapien
ttcaccatggtgaagcattgggcca

SEQ ID NO: 293371 - DNA, 25 bp, Homo sapien
ctggtctggaactcctgaccccaaa

SEQ ID NO: 293372 - DNA, 25 bp, Homo sapien
ggtctggaactcctgaccccaaatg

SEQ ID NO: 293373 - DNA, 25 bp, Homo sapien
gacagagtatccttctgttacccag

SEQ ID NO: 293374 - DNA, 25 bp, Homo sapien
cagagtatccttctgttacccaggc

SEQ ID NO: 293375 - DNA, 25 bp, Homo sapien
cattcacttgtgttagctgcaggct

SEQ ID NO: 293376 - DNA, 25 bp, Homo sapien
ggagcccacttctaaaagacagcag

SEQ ID NO: 293377 - DNA, 25 bp, Homo sapien
tgtgtagagaaagcagaccggagcc

SEQ ID NO: 293378 - DNA, 25 bp, Homo sapien
caaagaatctcaagggcagaccctc

SEQ ID NO: 293379 - DNA, 25 bp, Homo sapien
gtcttgctgaaaaactgcctggaag

SEQ ID NO: 293380 - DNA, 25 bp, Homo sapien
tgaacccggaatccctgtaggccag

SEQ ID NO: 293381 - DNA, 25 bp, Homo sapien
ttcccaagactaatgaggagcctct

SEQ ID NO: 293382 - DNA, 25 bp, Homo sapien
caagtgcagctaccaaactgaagtc

SEQ ID NO: 293383 - DNA, 25 bp, Homo sapien
gcattgctcacaatagctaaaacat

SEQ ID NO: 293384 - DNA, 25 bp, Homo sapien
gaagacacaaaatgtagtctatcca

SEQ ID NO: 293385 - DNA, 25 bp, Homo sapien
aaataaataaacatagcagcattgc

SEQ ID NO: 293386 - DNA, 25 bp, Homo sapien
ataaataaacatagcagcattgctc

SEQ ID NO: 293387 - DNA, 25 bp, Homo sapien
agggaggggctctcgggtgtggacg

SEQ ID NO: 293388 - DNA, 25 bp, Homo sapien
gaggggctctcgggtgtggacgtgg

SEQ ID NO: 293389 - DNA, 25 bp, Homo sapien
ggaggggctctcgggtgtggacgtg

SEQ ID NO: 293390 - DNA, 25 bp, Homo sapien
aggggctctcgggtgtggacgtggg

SEQ ID NO: 293391 - DNA, 25 bp, Homo sapien
cctctggctgggtagttgcccagcg

SEQ ID NO: 293392 - DNA, 25 bp, Homo sapien
ccagcgtgaccctgaactgcttact

SEQ ID NO: 293393 - DNA, 25 bp, Homo sapien
cctgaactgcttactcagaggcaca

SEQ ID NO: 293394 - DNA, 25 bp, Homo sapien
ttcagtagatggctcaaggcagaag

SEQ ID NO: 293395 - DNA, 25 bp, Homo sapien
tggtagggtcgaaggcagaggtgac

SEQ ID NO: 293396 - DNA, 25 bp, Homo sapien
ccgaatgctggtagggtcgaaggca

SEQ ID NO: 293397 - DNA, 25 bp, Homo sapien
gatggagatgggaaccgaatgctgg

SEQ ID NO: 293398 - DNA, 25 bp, Homo sapien
tgggaaccgaatgctggtagggtcg

SEQ ID NO: 293399 - DNA, 25 bp, Homo sapien
cctgtgcggttgtccaggcatgcat

SEQ ID NO: 293400 - DNA, 25 bp, Homo sapien
ctgcccaggagaggctacctgtgcg

SEQ ID NO: 293401 - DNA, 25 bp, Homo sapien
ccgtggacaccagtgaccttgagat

SEQ ID NO: 293402 - DNA, 25 bp, Homo sapien
gcttccggctgaagctcatggccgt

SEQ ID NO: 293403 - DNA, 25 bp, Homo sapien
atcatttggcgcacccgtggcacaa

SEQ ID NO: 293404 - DNA, 25 bp, Homo sapien
agtgcacacagaccaacctggcagg

SEQ ID NO: 293405 - DNA, 25 bp, Homo sapien
acacagaccaacctggcaggcagca

SEQ ID NO: 293406 - DNA, 25 bp, Homo sapien
gggctggatcatttggcgcacccgt

SEQ ID NO: 293407 - DNA, 25 bp, Homo sapien
aatcacttgaatccgagaggttgca

SEQ ID NO: 293408 - DNA, 25 bp, Homo sapien
atgcaacattgtggctgggcgcagt

SEQ ID NO: 293409 - DNA, 25 bp, Homo sapien
ggctcacgcctataatcccagcact

SEQ ID NO: 293410 - DNA, 25 bp, Homo sapien
ttgcggggcagaggcaggtggatca

SEQ ID NO: 293411 - DNA, 25 bp, Homo sapien
catctggtcacaaggtatttgccca

SEQ ID NO: 293412 - DNA, 25 bp, Homo sapien
ggcctttgaacacaactccactgtc

SEQ ID NO: 293413 - DNA, 25 bp, Homo sapien
cctgcaggcatctggtcacaaggta

SEQ ID NO: 293414 - DNA, 25 bp, Homo sapien
gggagctgggctcccttagttctgc

SEQ ID NO: 293415 - DNA, 25 bp, Homo sapien
gtggatcgatcacgcagcaaagcca

SEQ ID NO: 293416 - DNA, 25 bp, Homo sapien
ccttgtgggcaaatcagcgactcta

SEQ ID NO: 293417 - DNA, 25 bp, Homo sapien
taattagacggacaagtctctagcc

SEQ ID NO: 293418 - DNA, 25 bp, Homo sapien
taaatttattcaggcagccggagct

SEQ ID NO: 293419 - DNA, 25 bp, Homo sapien
tgctgaaatgggcaccgcctggacc

SEQ ID NO: 293420 - DNA, 25 bp, Homo sapien
cacaaagatgggcttaggtgcatga

SEQ ID NO: 293421 - DNA, 25 bp, Homo sapien
cttcaacttgcacaaagatgggctt

SEQ ID NO: 293422 - DNA, 25 bp, Homo sapien
taggtgcatgatgcaatttcattgg

SEQ ID NO: 293423 - DNA, 25 bp, Homo sapien
tatggaaacgccatgctcttgaaca

SEQ ID NO: 293424 - DNA, 25 bp, Homo sapien
gctgaatctcagaaagtctggccaa

SEQ ID NO: 293425 - DNA, 25 bp, Homo sapien
taaaaacagtggcaaagggataatg

SEQ ID NO: 293426 - DNA, 25 bp, Homo sapien
taatgaatgcctagggcacagaaga

SEQ ID NO: 293427 - DNA, 25 bp, Homo sapien
ttcagggggttacaatgaaaatgtg

SEQ ID NO: 293428 - DNA, 25 bp, Homo sapien
tatattcagggggttacaatgaaaa

SEQ ID NO: 293429 - DNA, 25 bp, Homo sapien
cagggggttacaatgaaaatgtgtc

SEQ ID NO: 293430 - DNA, 25 bp, Homo sapien
tattcagggggttacaatgaaaatg

SEQ ID NO: 293431 - DNA, 25 bp, Homo sapien
tcccgaaatatctccggtttggcag

SEQ ID NO: 293432 - DNA, 25 bp, Homo sapien
ttcccgaaatatctccggtttggca

SEQ ID NO: 293433 - DNA, 25 bp, Homo sapien
cacagctgcatgctcgggatgtgca

SEQ ID NO: 293434 - DNA, 25 bp, Homo sapien
ttgctgccacacgaggaatcctgac

SEQ ID NO: 293435 - DNA, 25 bp, Homo sapien
accctctaaattggacagcttgctg

SEQ ID NO: 293436 - DNA, 25 bp, Homo sapien
gaggaatcctgacaaggtctagatc

SEQ ID NO: 293437 - DNA, 25 bp, Homo sapien
atgagtcacctcgcctagcccacgt

SEQ ID NO: 293438 - DNA, 25 bp, Homo sapien
gtcacctcgcctagcccacgttgta

SEQ ID NO: 293439 - DNA, 25 bp, Homo sapien
cctcgcctagcccacgttgtacact

SEQ ID NO: 293440 - DNA, 25 bp, Homo sapien
ctcgcctagcccacgttgtacactt

SEQ ID NO: 293441 - DNA, 25 bp, Homo sapien
ttgagatgaaatctaatcctggtga

SEQ ID NO: 293442 - DNA, 25 bp, Homo sapien
ggtttcttgagatgaaatctaatcc

SEQ ID NO: 293443 - DNA, 25 bp, Homo sapien
ttcttgagatgaaatctaatcctgg

SEQ ID NO: 293444 - DNA, 25 bp, Homo sapien
ggatgagcagagtggtttcttgaga

SEQ ID NO: 293445 - DNA, 25 bp, Homo sapien
gaggatcaaaccagccatgacattc

SEQ ID NO: 293446 - DNA, 25 bp, Homo sapien
tagaggatcaaaccagccatgacat

SEQ ID NO: 293447 - DNA, 25 bp, Homo sapien
ttcagttgtatggaggctgacagag

SEQ ID NO: 293448 - DNA, 25 bp, Homo sapien
ggatagaggatcaaaccagccatga

SEQ ID NO: 293449 - DNA, 25 bp, Homo sapien
cataagagatgttaaaggaagttct

SEQ ID NO: 293450 - DNA, 25 bp, Homo sapien
gagatgttaaaggaagttcttcaag

SEQ ID NO: 293451 - DNA, 25 bp, Homo sapien
taagagatgttaaaggaagttcttc

SEQ ID NO: 293452 - DNA, 25 bp, Homo sapien
tccataagagatgttaaaggaagtt

SEQ ID NO: 293453 - DNA, 25 bp, Homo sapien
accactgggttagatgctacctcag

SEQ ID NO: 293454 - DNA, 25 bp, Homo sapien
cagggtcctgacatctcgggaaatt

SEQ ID NO: 293455 - DNA, 25 bp, Homo sapien
ggtcctgccagctttaacgtcccat

SEQ ID NO: 293456 - DNA, 25 bp, Homo sapien
acgtcccataatagcaagttccagc

SEQ ID NO: 293457 - DNA, 25 bp, Homo sapien
ggagaaggcgttgctttgccttttc

SEQ ID NO: 293458 - DNA, 25 bp, Homo sapien
gaggcatcttctactctctctgatc

SEQ ID NO: 293459 - DNA, 25 bp, Homo sapien
tacagctctggaagtcaggagtcct

SEQ ID NO: 293460 - DNA, 25 bp, Homo sapien
tgatccagtgattgtgctgggccca

SEQ ID NO: 293461 - DNA, 25 bp, Homo sapien
caggggcttgggtcagcatccagcc

SEQ ID NO: 293462 - DNA, 25 bp, Homo sapien
acaggggcttgggtcagcatccagc

SEQ ID NO: 293463 - DNA, 25 bp, Homo sapien
aaagattcttcagggtgtggtgcag

SEQ ID NO: 293464 - DNA, 25 bp, Homo sapien
tcagatgggatcttgaggccgtcca

SEQ ID NO: 293465 - DNA, 25 bp, Homo sapien
tgtggtgcagctcgctcttgtcggc

SEQ ID NO: 293466 - DNA, 25 bp, Homo sapien
tgaggtcatctaacttcagggaaag

SEQ ID NO: 293467 - DNA, 25 bp, Homo sapien
tgatggcttcgtaaacacagatgag

SEQ ID NO: 293468 - DNA, 25 bp, Homo sapien
aaagactgtgcaagacggcagccag

SEQ ID NO: 293469 - DNA, 25 bp, Homo sapien
gcagccagctgagacgctcattatc

SEQ ID NO: 293470 - DNA, 25 bp, Homo sapien
tggagctgcagaaaggaatcgtgac

SEQ ID NO: 293471 - DNA, 25 bp, Homo sapien
atggtgaccagaggataccttgaag

SEQ ID NO: 293472 - DNA, 25 bp, Homo sapien
tgcggtgcgtggcttccatatccaa

SEQ ID NO: 293473 - DNA, 25 bp, Homo sapien
ggcttccatatccaagtccctggct

SEQ ID NO: 293474 - DNA, 25 bp, Homo sapien
ggtgcgtggcttccatatccaagtc

SEQ ID NO: 293475 - DNA, 25 bp, Homo sapien
ggactgcggtgcgtggcttccatat

SEQ ID NO: 293476 - DNA, 25 bp, Homo sapien
gagatttccctaatgcaggcacggg

SEQ ID NO: 293477 - DNA, 25 bp, Homo sapien
catttcacgaggaagagggtctgcc

SEQ ID NO: 293478 - DNA, 25 bp, Homo sapien
gagccagtggcagtagagatttccc

SEQ ID NO: 293479 - DNA, 25 bp, Homo sapien
tccctgtaggaagagagctgcctgc

SEQ ID NO: 293480 - DNA, 25 bp, Homo sapien
cacagctcaaggttcccaagtgcca

SEQ ID NO: 293481 - DNA, 25 bp, Homo sapien
gacattggcattgagtcacttggca

SEQ ID NO: 293482 - DNA, 25 bp, Homo sapien
aacactgtcagcacaaggtcccttg

SEQ ID NO: 293483 - DNA, 25 bp, Homo sapien
tatcacctatgtggttacagctccc

SEQ ID NO: 293484 - DNA, 25 bp, Homo sapien
ccttgcagctggagtgtccccaagt

SEQ ID NO: 293485 - DNA, 25 bp, Homo sapien
ggagtgtccccaagtggagtgtccc

SEQ ID NO: 293486 - DNA, 25 bp, Homo sapien
cttgccatcaggatgtcgcaggcac

SEQ ID NO: 293487 - DNA, 25 bp, Homo sapien
actccatcgagtgctggctgtgccg

SEQ ID NO: 293488 - DNA, 25 bp, Homo sapien
atctggtgcccccaatgtctcctac

SEQ ID NO: 293489 - DNA, 25 bp, Homo sapien
ctatctggtgcccccaatgtctcct

SEQ ID NO: 293490 - DNA, 25 bp, Homo sapien
tatctggtgcccccaatgtctccta

SEQ ID NO: 293491 - DNA, 25 bp, Homo sapien
gagactcgtgctcagctgtgagcag

SEQ ID NO: 293492 - DNA, 25 bp, Homo sapien
gaggctgtgtgacaactctacctgg

SEQ ID NO: 293493 - DNA, 25 bp, Homo sapien
tgttctcagaatgctgagctgggct

SEQ ID NO: 293494 - DNA, 25 bp, Homo sapien
gcccaggcctgaacgtggtctcatt

SEQ ID NO: 293495 - DNA, 25 bp, Homo sapien
gctgccggccttctccaggccccat

SEQ ID NO: 293496 - DNA, 25 bp, Homo sapien
ggtgtccatccctgactcccagggt

SEQ ID NO: 293497 - DNA, 25 bp, Homo sapien
tcctctgctgctgccggccttctcc

SEQ ID NO: 293498 - DNA, 25 bp, Homo sapien
ctggtgtccatccctgactcccagg

SEQ ID NO: 293499 - DNA, 25 bp, Homo sapien
ccacctcccccagcccggatgcacc

SEQ ID NO: 293500 - DNA, 25 bp, Homo sapien
gtccacctcccccagcccggatgca

SEQ ID NO: 293501 - DNA, 25 bp, Homo sapien
cctcccccagcccggatgcacccac

SEQ ID NO: 293502 - DNA, 25 bp, Homo sapien
acctcccccagcccggatgcaccca

SEQ ID NO: 293503 - DNA, 25 bp, Homo sapien
ctgttcatgggctctctgacactgc

SEQ ID NO: 293504 - DNA, 25 bp, Homo sapien
tctcaaggctcagagtgcaagtgag

SEQ ID NO: 293505 - DNA, 25 bp, Homo sapien
tgggctctctgacactgctgctctg

SEQ ID NO: 293506 - DNA, 25 bp, Homo sapien
tgagctggtctcaaggctcagagtg

SEQ ID NO: 293507 - DNA, 25 bp, Homo sapien
gaggaagatgggcacaccagtcctc

SEQ ID NO: 293508 - DNA, 25 bp, Homo sapien
actgagctccatgcacatcacaggc

SEQ ID NO: 293509 - DNA, 25 bp, Homo sapien
cactgagctccatgcacatcacagg

SEQ ID NO: 293510 - DNA, 25 bp, Homo sapien
tgccagttggggaacagcaaacctg

SEQ ID NO: 293511 - DNA, 25 bp, Homo sapien
ggtgccacgggtctgcacgctgcct

SEQ ID NO: 293512 - DNA, 25 bp, Homo sapien
gtggctgctgttgctcattatggta

SEQ ID NO: 293513 - DNA, 25 bp, Homo sapien
gtagggcccgagcattctgcggcca

SEQ ID NO: 293514 - DNA, 25 bp, Homo sapien
ctcgaggctgttgtgctgcttcgcc

SEQ ID NO: 293515 - DNA, 25 bp, Homo sapien
tggtttcctccaagtgcacgcgctg

SEQ ID NO: 293516 - DNA, 25 bp, Homo sapien
tgccatttccgactgtgtatctctg

SEQ ID NO: 293517 - DNA, 25 bp, Homo sapien
tatctctgctagttccaagaagtcc

SEQ ID NO: 293518 - DNA, 25 bp, Homo sapien
agaatgtgaacctaggtgcagacaa

SEQ ID NO: 293519 - DNA, 25 bp, Homo sapien
ctgtcctctcctttgggagtcaaga

SEQ ID NO: 293520 - DNA, 25 bp, Homo sapien
gtcctctcctttgggagtcaagagg

SEQ ID NO: 293521 - DNA, 25 bp, Homo sapien
tctcctttgggagtcaagaggcttc

SEQ ID NO: 293522 - DNA, 25 bp, Homo sapien
cctctcctttgggagtcaagaggct

SEQ ID NO: 293523 - DNA, 25 bp, Homo sapien
cctcggtgatcacggtgatgaagga

SEQ ID NO: 293524 - DNA, 25 bp, Homo sapien
tgtggagtcttccatggcatcaaag

SEQ ID NO: 293525 - DNA, 25 bp, Homo sapien
agtactcggtatcttcatcttcctc

SEQ ID NO: 293526 - DNA, 25 bp, Homo sapien
ttggcctcggtgatcacggtgatga

SEQ ID NO: 293527 - DNA, 25 bp, Homo sapien
ccagtccacggaacttgtcccggtg

SEQ ID NO: 293528 - DNA, 25 bp, Homo sapien
agctccagtccacggaacttgtccc

SEQ ID NO: 293529 - DNA, 25 bp, Homo sapien
cagtccacggaacttgtcccggtgc

SEQ ID NO: 293530 - DNA, 25 bp, Homo sapien
tccacggaacttgtcccggtgctac

SEQ ID NO: 293531 - DNA, 25 bp, Homo sapien
cccttacagtgctccccctcactta

SEQ ID NO: 293532 - DNA, 25 bp, Homo sapien
gccaggatggtgctcctggactggg

SEQ ID NO: 293533 - DNA, 25 bp, Homo sapien
ctggcccttacagtgctccccctca

SEQ ID NO: 293534 - DNA, 25 bp, Homo sapien
ggcccttacagtgctccccctcact

SEQ ID NO: 293535 - DNA, 25 bp, Homo sapien
cagagcgcccccttggcttccaagt

SEQ ID NO: 293536 - DNA, 25 bp, Homo sapien
gccagagcgcccccttggcttccaa

SEQ ID NO: 293537 - DNA, 25 bp, Homo sapien
agagcgcccccttggcttccaagtt

SEQ ID NO: 293538 - DNA, 25 bp, Homo sapien
ctgaggactggcaccaagccggcca

SEQ ID NO: 293539 - DNA, 25 bp, Homo sapien
tgccacataagtggggaccccctca

SEQ ID NO: 293540 - DNA, 25 bp, Homo sapien
gccacataagtggggaccccctcac

SEQ ID NO: 293541 - DNA, 25 bp, Homo sapien
ctgccacataagtggggaccccctc

SEQ ID NO: 293542 - DNA, 25 bp, Homo sapien
tcgcctcttgactttggatgaaccc

SEQ ID NO: 293543 - DNA, 25 bp, Homo sapien
gagctcccggccgatgcagttcttc

SEQ ID NO: 293544 - DNA, 25 bp, Homo sapien
gcttgttgggaatgcggactcgcct

SEQ ID NO: 293545 - DNA, 25 bp, Homo sapien
tgaacccttgggcacgagcgaggca

SEQ ID NO: 293546 - DNA, 25 bp, Homo sapien
cgatgcggtgcactgtggtggagta

SEQ ID NO: 293547 - DNA, 25 bp, Homo sapien
ccatgtcgtcgaggcggtccagctc

SEQ ID NO: 293548 - DNA, 25 bp, Homo sapien
tcagccgctggagcatggacagggg

SEQ ID NO: 293549 - DNA, 25 bp, Homo sapien
gttgaagggcttggcgatgcggtgc

SEQ ID NO: 293550 - DNA, 25 bp, Homo sapien
tttccaaccaggacgcccaggttca

SEQ ID NO: 293551 - DNA, 25 bp, Homo sapien
ttccaaccaggacgcccaggttcag

SEQ ID NO: 293552 - DNA, 25 bp, Homo sapien
ggagccagggcaacgccagcaccaa

SEQ ID NO: 293553 - DNA, 25 bp, Homo sapien
caggagccagggcaacgccagcacc

SEQ ID NO: 293554 - DNA, 25 bp, Homo sapien
cagggcaacgccagcaccaacagaa

SEQ ID NO: 293555 - DNA, 25 bp, Homo sapien
gccaggagccagggcaacgccagca

SEQ ID NO: 293556 - DNA, 25 bp, Homo sapien
ctagcggcatgatggagatgtattt

SEQ ID NO: 293557 - DNA, 25 bp, Homo sapien
tccagccatgcttggagaacacgta

SEQ ID NO: 293558 - DNA, 25 bp, Homo sapien
gagatgtattttccccggaacttgc

SEQ ID NO: 293559 - DNA, 25 bp, Homo sapien
catgcttggagaacacgtagtgcgc

SEQ ID NO: 293560 - DNA, 25 bp, Homo sapien
tgtgaacagttgaggtgctcttcct

SEQ ID NO: 293561 - DNA, 25 bp, Homo sapien
gatccagagcttgcccacgatgatg

SEQ ID NO: 293562 - DNA, 25 bp, Homo sapien
ctggcctggaattctaagtggatgg

SEQ ID NO: 293563 - DNA, 25 bp, Homo sapien
cacgtagtgattcccactggcctgg

SEQ ID NO: 293564 - DNA, 25 bp, Homo sapien
ccggtcattggtcttatggttcaca

SEQ ID NO: 293565 - DNA, 25 bp, Homo sapien
ggaacttcagctggcaccggtcatt

SEQ ID NO: 293566 - DNA, 25 bp, Homo sapien
ggttcacaatctcgatgtcccctga

SEQ ID NO: 293567 - DNA, 25 bp, Homo sapien
aagtagctgtagggcaggaacttca

SEQ ID NO: 293568 - DNA, 25 bp, Homo sapien
ggcaggaccagcgtaggtgcagact

SEQ ID NO: 293569 - DNA, 25 bp, Homo sapien
caggaccagcgtaggtgcagactct

SEQ ID NO: 293570 - DNA, 25 bp, Homo sapien
ggaccagcgtaggtgcagactctgc

SEQ ID NO: 293571 - DNA, 25 bp, Homo sapien
cccctggggtgcttagaggtggctg

SEQ ID NO: 293572 - DNA, 25 bp, Homo sapien
gacagcacgtaatgggccttgccct

SEQ ID NO: 293573 - DNA, 25 bp, Homo sapien
gcagcgggtacttcttccacagcag

SEQ ID NO: 293574 - DNA, 25 bp, Homo sapien
tccatttgttcatcccacgagccgg

SEQ ID NO: 293575 - DNA, 25 bp, Homo sapien
gactgctatgcatgaccttggagca

SEQ ID NO: 293576 - DNA, 25 bp, Homo sapien
tcacactgggatgtcggctgcataa

SEQ ID NO: 293577 - DNA, 25 bp, Homo sapien
tatcacctcgcttaaagtctgtgca

SEQ ID NO: 293578 - DNA, 25 bp, Homo sapien
tagctactaaaccattccacagggt

SEQ ID NO: 293579 - DNA, 25 bp, Homo sapien
atttactgttcggtgtctgccttca

SEQ ID NO: 293580 - DNA, 25 bp, Homo sapien
gggactctcgctagaaatgccaaac

SEQ ID NO: 293581 - DNA, 25 bp, Homo sapien
tgacgggagactgcactcaaactcg

SEQ ID NO: 293582 - DNA, 25 bp, Homo sapien
ttcagcacgctataggccctttcag

SEQ ID NO: 293583 - DNA, 25 bp, Homo sapien
cattcctcttcgtactgtgcagcca

SEQ ID NO: 293584 - DNA, 25 bp, Homo sapien
gagtcaccatcccggccaaatatct

SEQ ID NO: 293585 - DNA, 25 bp, Homo sapien
gttgagtcaccatcccggccaaata

SEQ ID NO: 293586 - DNA, 25 bp, Homo sapien
ttgagtcaccatcccggccaaatat

SEQ ID NO: 293587 - DNA, 25 bp, Homo sapien
tgagtcaccatcccggccaaatatc

SEQ ID NO: 293588 - DNA, 25 bp, Homo sapien
atgttgcgcaggcttttgctcttgc

SEQ ID NO: 293589 - DNA, 25 bp, Homo sapien
tctctaatattagaattgaaactca

SEQ ID NO: 293590 - DNA, 25 bp, Homo sapien
ggagaaagcctcaacattaaatgat

SEQ ID NO: 293591 - DNA, 25 bp, Homo sapien
aatgatttaaggcaatatatttcct

SEQ ID NO: 293592 - DNA, 25 bp, Homo sapien
agcagctgtttcccctactctctgc

SEQ ID NO: 293593 - DNA, 25 bp, Homo sapien
tattaatataaagatgatatcttgc

SEQ ID NO: 293594 - DNA, 25 bp, Homo sapien
tgctgggataatagggtttggctgt

SEQ ID NO: 293595 - DNA, 25 bp, Homo sapien
ataaagatgatatcttgccatattg

SEQ ID NO: 293596 - DNA, 25 bp, Homo sapien
gcgccgccacgcctaatgtcgtatt

SEQ ID NO: 293597 - DNA, 25 bp, Homo sapien
tgcgccgccacgcctaatgtcgtat

SEQ ID NO: 293598 - DNA, 25 bp, Homo sapien
tttgtttatgcatcgtcttttcact

SEQ ID NO: 293599 - DNA, 25 bp, Homo sapien
tcctctgtcaagtgtaggtagatat

SEQ ID NO: 293600 - DNA, 25 bp, Homo sapien
gatattatgattaccttctccaagt

SEQ ID NO: 293601 - DNA, 25 bp, Homo sapien
tattcttgataataatcctctgtca

SEQ ID NO: 293602 - DNA, 25 bp, Homo sapien
ccttcatgcgaatgtaccacagtta

SEQ ID NO: 293603 - DNA, 25 bp, Homo sapien
gaatagtctcatgcataagtcctgt

SEQ ID NO: 293604 - DNA, 25 bp, Homo sapien
gaattactgggttatgactatgtga

SEQ ID NO: 293605 - DNA, 25 bp, Homo sapien
acctacgttgcttcatgttactggg

SEQ ID NO: 293606 - DNA, 25 bp, Homo sapien
gatcgtggaagggaggaccatctct

SEQ ID NO: 293607 - DNA, 25 bp, Homo sapien
tacgatcatctgaaggtcctgacag

SEQ ID NO: 293608 - DNA, 25 bp, Homo sapien
ttgggacacagcctcgaaaaagcag

SEQ ID NO: 293609 - DNA, 25 bp, Homo sapien
ttactaagcacactacactgggcgc

SEQ ID NO: 293610 - DNA, 25 bp, Homo sapien
tacgccctcctcgtgctcgttgagg

SEQ ID NO: 293611 - DNA, 25 bp, Homo sapien
tcggtattggcctcgtcccaacggc

SEQ ID NO: 293612 - DNA, 25 bp, Homo sapien
cggctgtcggttggcgctacgccct

SEQ ID NO: 293613 - DNA, 25 bp, Homo sapien
gaagtagtacatgttctccgcgttc

SEQ ID NO: 293614 - DNA, 25 bp, Homo sapien
ggcgtgtaggcatccgcctccttct

SEQ ID NO: 293615 - DNA, 25 bp, Homo sapien
ggcacatatgccagtcttgcttctc

SEQ ID NO: 293616 - DNA, 25 bp, Homo sapien
ctcaaaccacagtggcgtgtaggca

SEQ ID NO: 293617 - DNA, 25 bp, Homo sapien
agtagccgcccttgtacacacaggc

SEQ ID NO: 293618 - DNA, 25 bp, Homo sapien
ggtagggcccaggtccataatgaag

SEQ ID NO: 293619 - DNA, 25 bp, Homo sapien
ggtgctcgctaacaaaacagtgttg

SEQ ID NO: 293620 - DNA, 25 bp, Homo sapien
tattactggtcaaaaggtgctcgct

SEQ ID NO: 293621 - DNA, 25 bp, Homo sapien
aattctcccaactcaaagcggtctg

SEQ ID NO: 293622 - DNA, 25 bp, Homo sapien
gcttagacgccagtggagacatctg

SEQ ID NO: 293623 - DNA, 25 bp, Homo sapien
tgagtttgagatcccgcttagacgc

SEQ ID NO: 293624 - DNA, 25 bp, Homo sapien
taaatgagccaacaggtgtggacct

SEQ ID NO: 293625 - DNA, 25 bp, Homo sapien
tgtaaggcaagagtcaagcgtctcc

SEQ ID NO: 293626 - DNA, 25 bp, Homo sapien
cgcgggtggaccatgcttagtctaa

SEQ ID NO: 293627 - DNA, 25 bp, Homo sapien
tctaacagggtatggttattaacgc

SEQ ID NO: 293628 - DNA, 25 bp, Homo sapien
ccagccaacggttatgaactgtgga

SEQ ID NO: 293629 - DNA, 25 bp, Homo sapien
taacgcccgttatgaacggttcata

SEQ ID NO: 293630 - DNA, 25 bp, Homo sapien
ggattatgggcttactcagcagcca

SEQ ID NO: 293631 - DNA, 25 bp, Homo sapien
gggttctggacatgtcaacagctgc

SEQ ID NO: 293632 - DNA, 25 bp, Homo sapien
ttggccaatttcagtgtccccgaag

SEQ ID NO: 293633 - DNA, 25 bp, Homo sapien
tgaactgcaggtaccttcagcactt

SEQ ID NO: 293634 - DNA, 25 bp, Homo sapien
gagatcctgccactctggatgggaa

SEQ ID NO: 293635 - DNA, 25 bp, Homo sapien
ggtttcctgggaacatcaagggaca

SEQ ID NO: 293636 - DNA, 25 bp, Homo sapien
tgttaatgctaccacagctgtgctg

SEQ ID NO: 293637 - DNA, 25 bp, Homo sapien
ggtgaccagcttggaactctttgat

SEQ ID NO: 293638 - DNA, 25 bp, Homo sapien
cactaacctgtggttcaaacctggg

SEQ ID NO: 293639 - DNA, 25 bp, Homo sapien
aacctgggtgtgtttctggcatctc

SEQ ID NO: 293640 - DNA, 25 bp, Homo sapien
cagactacatctctaggagaggcct

SEQ ID NO: 293641 - DNA, 25 bp, Homo sapien
tttctgaaggcacaaggactgtgac

SEQ ID NO: 293642 - DNA, 25 bp, Homo sapien
aagacaaaggcaagcgttgctgaat

SEQ ID NO: 293643 - DNA, 25 bp, Homo sapien
acaaaggcaagcgttgctgaatttt

SEQ ID NO: 293644 - DNA, 25 bp, Homo sapien
tttctctttaatggccattggaaga

SEQ ID NO: 293645 - DNA, 25 bp, Homo sapien
ttttctctttaatggccattggaag

SEQ ID NO: 293646 - DNA, 25 bp, Homo sapien
tgagccccatcaaggtgcctgaaga

SEQ ID NO: 293647 - DNA, 25 bp, Homo sapien
tgtggaaccccacaggactccttag

SEQ ID NO: 293648 - DNA, 25 bp, Homo sapien
catactgggttgctaagccggagcc

SEQ ID NO: 293649 - DNA, 25 bp, Homo sapien
caagataacggcgagtccagtgcca

SEQ ID NO: 293650 - DNA, 25 bp, Homo sapien
ttgtagtaagctgaaattgtgccac

SEQ ID NO: 293651 - DNA, 25 bp, Homo sapien
tggactccagcctgggtgacagagc

SEQ ID NO: 293652 - DNA, 25 bp, Homo sapien
gcagaggttgtagtaagctgaaatt

SEQ ID NO: 293653 - DNA, 25 bp, Homo sapien
ctccagcctgggtgacagagcgaga

SEQ ID NO: 293654 - DNA, 25 bp, Homo sapien
cccaggaggaacaagcagctaatag

SEQ ID NO: 293655 - DNA, 25 bp, Homo sapien
tgcctgggcccaaacaaagtgcatg

SEQ ID NO: 293656 - DNA, 25 bp, Homo sapien
ctggcatcttgtcagatttgttgat

SEQ ID NO: 293657 - DNA, 25 bp, Homo sapien
ggtggctaggttggcctggcatctt

SEQ ID NO: 293658 - DNA, 25 bp, Homo sapien
tccttgtttaggctgcaggtgctct

SEQ ID NO: 293659 - DNA, 25 bp, Homo sapien
gctgctgcacagaaagatccatgct

SEQ ID NO: 293660 - DNA, 25 bp, Homo sapien
ttaggacttgctctgctcacgatgc

SEQ ID NO: 293661 - DNA, 25 bp, Homo sapien
tgctctgccagcaagatatgaggga

SEQ ID NO: 293662 - DNA, 25 bp, Homo sapien
cacacagacgtacatcagtgaggct

SEQ ID NO: 293663 - DNA, 25 bp, Homo sapien
gcttgaaacacatgtcccttgcctg

SEQ ID NO: 293664 - DNA, 25 bp, Homo sapien
ccttgcctgctgtcttgttcgtaaa

SEQ ID NO: 293665 - DNA, 25 bp, Homo sapien
attttggagtgtggctctcaacggg

SEQ ID NO: 293666 - DNA, 25 bp, Homo sapien
gtggagacctcacgcgggactccag

SEQ ID NO: 293667 - DNA, 25 bp, Homo sapien
tagaagtacgcctaggtggagacct

SEQ ID NO: 293668 - DNA, 25 bp, Homo sapien
gagagcaaagctcggacattagaag

SEQ ID NO: 293669 - DNA, 25 bp, Homo sapien
agctgaagagaaggcgcgggaggca

SEQ ID NO: 293670 - DNA, 25 bp, Homo sapien
gagacaagatggctcctccggtccg

SEQ ID NO: 293671 - DNA, 25 bp, Homo sapien
gtccgcaccgcagctaccgtcccgg

SEQ ID NO: 293672 - DNA, 25 bp, Homo sapien
taccgtcccggctgcgtcgctcggc

SEQ ID NO: 293673 - DNA, 25 bp, Homo sapien
gacgagacaagatggctcctccggt

SEQ ID NO: 293674 - DNA, 25 bp, Homo sapien
tctgcgtacgagaagaaagacgcgg

SEQ ID NO: 293675 - DNA, 25 bp, Homo sapien
tcgtcgaatcgcaaacgcataggcc

SEQ ID NO: 293676 - DNA, 25 bp, Homo sapien
gcaaagtagaaatcccacaaccaac

SEQ ID NO: 293677 - DNA, 25 bp, Homo sapien
tgcgccccaagagctggatgccaga

SEQ ID NO: 293678 - DNA, 25 bp, Homo sapien
cgactccggagctcgtctccccacc

SEQ ID NO: 293679 - DNA, 25 bp, Homo sapien
tccgccaactggtggctaggcccgg

SEQ ID NO: 293680 - DNA, 25 bp, Homo sapien
gccaactggtggctaggcccggaag

SEQ ID NO: 293681 - DNA, 25 bp, Homo sapien
caactggtggctaggcccggaagaa

SEQ ID NO: 293682 - DNA, 25 bp, Homo sapien
gataacagagttgacgggccaaagg

SEQ ID NO: 293683 - DNA, 25 bp, Homo sapien
gaagggtcccaaatgacatctaggc

SEQ ID NO: 293684 - DNA, 25 bp, Homo sapien
cagacaaattacagagtgactcgcc

SEQ ID NO: 293685 - DNA, 25 bp, Homo sapien
tgagcccgcttgctaaaagtccacg

SEQ ID NO: 293686 - DNA, 25 bp, Homo sapien
taagtcttttgaggtacatccggat

SEQ ID NO: 293687 - DNA, 25 bp, Homo sapien
tgtgttcacttgcttagggctgtac

SEQ ID NO: 293688 - DNA, 25 bp, Homo sapien
gaagtgagattatctgtctctgccc

SEQ ID NO: 293689 - DNA, 25 bp, Homo sapien
catccggatttaattacaaaagagc

SEQ ID NO: 293690 - DNA, 25 bp, Homo sapien
ggctgtggctacactgaaagttatc

SEQ ID NO: 293691 - DNA, 25 bp, Homo sapien
tggctacactgaaagttatctgctc

SEQ ID NO: 293692 - DNA, 25 bp, Homo sapien
tgtggctacactgaaagttatctgc

SEQ ID NO: 293693 - DNA, 25 bp, Homo sapien
gctacactgaaagttatctgctcca

SEQ ID NO: 293694 - DNA, 25 bp, Homo sapien
tgttcctgccgcatcgtgacaagct

SEQ ID NO: 293695 - DNA, 25 bp, Homo sapien
tgccgcatcgtgacaagctctttcg

SEQ ID NO: 293696 - DNA, 25 bp, Homo sapien
cgtgacaagctctttcgggttccag

SEQ ID NO: 293697 - DNA, 25 bp, Homo sapien
tccagtgttcctgccgcatcgtgac

SEQ ID NO: 293698 - DNA, 25 bp, Homo sapien
cagtaacagtgctggtggtagtgct

SEQ ID NO: 293699 - DNA, 25 bp, Homo sapien
gcaaggtcaacagtcccaaaattca

SEQ ID NO: 293700 - DNA, 25 bp, Homo sapien
gatggagcatcctcagtttgcactg

SEQ ID NO: 293701 - DNA, 25 bp, Homo sapien
gtagtgcttgctcagtcgttgtctc

SEQ ID NO: 293702 - DNA, 25 bp, Homo sapien
tctattctggctagttaggagactc

SEQ ID NO: 293703 - DNA, 25 bp, Homo sapien
tgcaaagacagtaaatgcaggcaag

SEQ ID NO: 293704 - DNA, 25 bp, Homo sapien
tatacagatagaggatacataacga

SEQ ID NO: 293705 - DNA, 25 bp, Homo sapien
gcagagatggtaaaggataaggcat

SEQ ID NO: 293706 - DNA, 25 bp, Homo sapien
tgagtggttattctgatagcctgct

SEQ ID NO: 293707 - DNA, 25 bp, Homo sapien
tgatagcctgctctctaaactcctc

SEQ ID NO: 293708 - DNA, 25 bp, Homo sapien
tcttgatatgttgtggtgtatgtgg

SEQ ID NO: 293709 - DNA, 25 bp, Homo sapien
tattctgatagcctgctctctaaac

SEQ ID NO: 293710 - DNA, 25 bp, Homo sapien
tgtgggaactgtctcgcgaagcagc

SEQ ID NO: 293711 - DNA, 25 bp, Homo sapien
gagggctccctagatcaaaatttag

SEQ ID NO: 293712 - DNA, 25 bp, Homo sapien
actctaagtgggtctgctgtcagca

SEQ ID NO: 293713 - DNA, 25 bp, Homo sapien
tgatcggattcagggtactgggcat

SEQ ID NO: 293714 - DNA, 25 bp, Homo sapien
gcacagggaaggtagtcagaaggtc

SEQ ID NO: 293715 - DNA, 25 bp, Homo sapien
cagggaaggtagtcagaaggtccag

SEQ ID NO: 293716 - DNA, 25 bp, Homo sapien
tagcacagggaaggtagtcagaagg

SEQ ID NO: 293717 - DNA, 25 bp, Homo sapien
cacagggaaggtagtcagaaggtcc

SEQ ID NO: 293718 - DNA, 25 bp, Homo sapien
cagtagtaaggtggtaggaatcatc

SEQ ID NO: 293719 - DNA, 25 bp, Homo sapien
gaatgggtgtcttcgtcagtagtaa

SEQ ID NO: 293720 - DNA, 25 bp, Homo sapien
ggtaggaatcatctcgggcaaaaat

SEQ ID NO: 293721 - DNA, 25 bp, Homo sapien
tctcgggcaaaaatccaggtaccag

SEQ ID NO: 293722 - DNA, 25 bp, Homo sapien
tcatgatggctgaatgcctcctggg

SEQ ID NO: 293723 - DNA, 25 bp, Homo sapien
ctgggtagaacaagacaggagtgga

SEQ ID NO: 293724 - DNA, 25 bp, Homo sapien
acaagacaggagtggaggtaaaggc

SEQ ID NO: 293725 - DNA, 25 bp, Homo sapien
tagaacaagacaggagtggaggtaa

SEQ ID NO: 293726 - DNA, 25 bp, Homo sapien
gacaggagtggaggtaaaggccaca

SEQ ID NO: 293727 - DNA, 25 bp, Homo sapien
gacttcactataaagggctgtgctg

SEQ ID NO: 293728 - DNA, 25 bp, Homo sapien
tgcacactcatggaacaaactaggc

SEQ ID NO: 293729 - DNA, 25 bp, Homo sapien
tgaccttcacgggatcctagatgtt

SEQ ID NO: 293730 - DNA, 25 bp, Homo sapien
ttctggaatctggtgcagccttgtg

SEQ ID NO: 293731 - DNA, 25 bp, Homo sapien
gatattatgcccttaaaccgtggga

SEQ ID NO: 293732 - DNA, 25 bp, Homo sapien
gctcttagggcccaggaatatcagt

SEQ ID NO: 293733 - DNA, 25 bp, Homo sapien
gacttgacaatctaccaccacggag

SEQ ID NO: 293734 - DNA, 25 bp, Homo sapien
cagggcaatctgctggcaatcagga

SEQ ID NO: 293735 - DNA, 25 bp, Homo sapien
ccaatgatctaagaataagtcggtc

SEQ ID NO: 293736 - DNA, 25 bp, Homo sapien
ctaagaataagtcggtcacaaaatg

SEQ ID NO: 293737 - DNA, 25 bp, Homo sapien
gatctaagaataagtcggtcacaaa

SEQ ID NO: 293738 - DNA, 25 bp, Homo sapien
aaaccaatgatctaagaataagtcg

SEQ ID NO: 293739 - DNA, 25 bp, Homo sapien
tcaggtattcatggagggtcaagac

SEQ ID NO: 293740 - DNA, 25 bp, Homo sapien
catctggtgttgcttaagggagtct

SEQ ID NO: 293741 - DNA, 25 bp, Homo sapien
gatagttgtagcaggattcaggccc

SEQ ID NO: 293742 - DNA, 25 bp, Homo sapien
tcttgcacacgaagtagagtaccat

SEQ ID NO: 293743 - DNA, 25 bp, Homo sapien
gtcgcttgaagttcaactgttaaag

SEQ ID NO: 293744 - DNA, 25 bp, Homo sapien
ctgttaaagtgagctgaatagtcat

SEQ ID NO: 293745 - DNA, 25 bp, Homo sapien
gggtgttcaaagattgtcgcttgaa

SEQ ID NO: 293746 - DNA, 25 bp, Homo sapien
gaatagtcataataattctggagaa

SEQ ID NO: 293747 - DNA, 25 bp, Homo sapien
aagaacatctctcggcacaaggcag

SEQ ID NO: 293748 - DNA, 25 bp, Homo sapien
taagctatcggaaatgcccagcaag

SEQ ID NO: 293749 - DNA, 25 bp, Homo sapien
gacctaggccttgtttgacgagatg

SEQ ID NO: 293750 - DNA, 25 bp, Homo sapien
tgttgagggcgagcagtctacagca

SEQ ID NO: 293751 - DNA, 25 bp, Homo sapien
ttacaagatggaacggatgctgggc

SEQ ID NO: 293752 - DNA, 25 bp, Homo sapien
tacagagccagtcaggtacatcagc

SEQ ID NO: 293753 - DNA, 25 bp, Homo sapien
aaatggacgcggctttcgaactgct

SEQ ID NO: 293754 - DNA, 25 bp, Homo sapien
tcacggtgagtctaattgcagcaac

SEQ ID NO: 293755 - DNA, 25 bp, Homo sapien
tcaggattcaagtctctccatattt

SEQ ID NO: 293756 - DNA, 25 bp, Homo sapien
gctgtcatcaggattcaagtctctc

SEQ ID NO: 293757 - DNA, 25 bp, Homo sapien
ggcacaaacgctgtcatcaggattc

SEQ ID NO: 293758 - DNA, 25 bp, Homo sapien
tattctagcttcaggcacggttgga

SEQ ID NO: 293759 - DNA, 25 bp, Homo sapien
tcagtgaccatgacctctagcttaa

SEQ ID NO: 293760 - DNA, 25 bp, Homo sapien
tgatctacactgttcaaagaaagct

SEQ ID NO: 293761 - DNA, 25 bp, Homo sapien
cgagatattcctatatggctgaacc

SEQ ID NO: 293762 - DNA, 25 bp, Homo sapien
tgtttcacctaatgtatcatggcca

SEQ ID NO: 293763 - DNA, 25 bp, Homo sapien
gtggctttaaggaacttatctctga

SEQ ID NO: 293764 - DNA, 25 bp, Homo sapien
aagcccaaatgctcaaagttctgaa

SEQ ID NO: 293765 - DNA, 25 bp, Homo sapien
gatctcagagggttctagcttcttc

SEQ ID NO: 293766 - DNA, 25 bp, Homo sapien
ggaccagggaagaattgggcctcat

SEQ ID NO: 293767 - DNA, 25 bp, Homo sapien
cactgataagctcatgtgggtagaa

SEQ ID NO: 293768 - DNA, 25 bp, Homo sapien
tactcaatgtgaagtggactgtgtg

SEQ ID NO: 293769 - DNA, 25 bp, Homo sapien
tcaagtatgggtagacttagtggcc

SEQ ID NO: 293770 - DNA, 25 bp, Homo sapien
taactggcaccaaaattcgtcgaag

SEQ ID NO: 293771 - DNA, 25 bp, Homo sapien
ttccagtaacatcagctactcggga

SEQ ID NO: 293772 - DNA, 25 bp, Homo sapien
ctttccagtaacatcagctactcgg

SEQ ID NO: 293773 - DNA, 25 bp, Homo sapien
attttactttatggattcacctcaa

SEQ ID NO: 293774 - DNA, 25 bp, Homo sapien
acttacttaatagacttgctttcat

SEQ ID NO: 293775 - DNA, 25 bp, Homo sapien
cttccgaggagcgcgaaccacaggg

SEQ ID NO: 293776 - DNA, 25 bp, Homo sapien
gccttccgaggagcgcgaaccacag

SEQ ID NO: 293777 - DNA, 25 bp, Homo sapien
tccgaggagcgcgaaccacagggac

SEQ ID NO: 293778 - DNA, 25 bp, Homo sapien
cgaggagcgcgaaccacagggacac

SEQ ID NO: 293779 - DNA, 25 bp, Homo sapien
caaccatgccgttctcatgggagct

SEQ ID NO: 293780 - DNA, 25 bp, Homo sapien
tgactccaaccatgccgttctcatg

SEQ ID NO: 293781 - DNA, 25 bp, Homo sapien
catgccgttctcatgggagctgcca

SEQ ID NO: 293782 - DNA, 25 bp, Homo sapien
tcttctgactccaaccatgccgttc

SEQ ID NO: 293783 - DNA, 25 bp, Homo sapien
gtctctgcacaggtggcctgcttca

SEQ ID NO: 293784 - DNA, 25 bp, Homo sapien
caggtggcctgcttcactttcctct

SEQ ID NO: 293785 - DNA, 25 bp, Homo sapien
tgtgtctctgcacaggtggcctgct

SEQ ID NO: 293786 - DNA, 25 bp, Homo sapien
tgcacaggtggcctgcttcactttc

SEQ ID NO: 293787 - DNA, 25 bp, Homo sapien
ctgaggctgcagaagggctctgcat

SEQ ID NO: 293788 - DNA, 25 bp, Homo sapien
gggcagggagaaaagtgctgaggct

SEQ ID NO: 293789 - DNA, 25 bp, Homo sapien
aagtgctgaggctgcagaagggctc

SEQ ID NO: 293790 - DNA, 25 bp, Homo sapien
gtgctgaggctgcagaagggctctg

SEQ ID NO: 293791 - DNA, 25 bp, Homo sapien
tggaggcatgaagacctgtagacag

SEQ ID NO: 293792 - DNA, 25 bp, Homo sapien
gtgtccaattcagagtttccacgca

SEQ ID NO: 293793 - DNA, 25 bp, Homo sapien
cagtgtccaattcagagtttccacg

SEQ ID NO: 293794 - DNA, 25 bp, Homo sapien
ggaggcatgaagacctgtagacagc

SEQ ID NO: 293795 - DNA, 25 bp, Homo sapien
aggatgtcatccagccgctgtgttc

SEQ ID NO: 293796 - DNA, 25 bp, Homo sapien
gggcaacagtgccaggcaaacttct

SEQ ID NO: 293797 - DNA, 25 bp, Homo sapien
gctgggaaaccagtttggcaaggcc

SEQ ID NO: 293798 - DNA, 25 bp, Homo sapien
ggccatcatctccaggatgtcatcc

SEQ ID NO: 293799 - DNA, 25 bp, Homo sapien
agcagccctcggagtgggactgagg

SEQ ID NO: 293800 - DNA, 25 bp, Homo sapien
ccagcagccctcggagtgggactga

SEQ ID NO: 293801 - DNA, 25 bp, Homo sapien
ctaggtcatggccagcagccctcgg

SEQ ID NO: 293802 - DNA, 25 bp, Homo sapien
ggccagcagccctcggagtgggact

SEQ ID NO: 293803 - DNA, 25 bp, Homo sapien
tgccagaggccctaaagccgccctt

SEQ ID NO: 293804 - DNA, 25 bp, Homo sapien
gaggtcagatccacaaggcaaagct

SEQ ID NO: 293805 - DNA, 25 bp, Homo sapien
cagaggccctaaagccgcccttggg

SEQ ID NO: 293806 - DNA, 25 bp, Homo sapien
tggagactaaagtgggtggagttgg

SEQ ID NO: 293807 - DNA, 25 bp, Homo sapien
tgccttcttgtagcatgcttctacc

SEQ ID NO: 293808 - DNA, 25 bp, Homo sapien
gtctgcctttaggagcgctggagtc

SEQ ID NO: 293809 - DNA, 25 bp, Homo sapien
ttgaacagacattgccttcttgtag

SEQ ID NO: 293810 - DNA, 25 bp, Homo sapien
ttctaccttccaagccctgagagtc

SEQ ID NO: 293811 - DNA, 25 bp, Homo sapien
cagggaggtcggaaattgggagtct

SEQ ID NO: 293812 - DNA, 25 bp, Homo sapien
tctcgtgccccattgggaaaattca

SEQ ID NO: 293813 - DNA, 25 bp, Homo sapien
ggtcgtctgcctcggtggctttagc

SEQ ID NO: 293814 - DNA, 25 bp, Homo sapien
atttgacggccacgccccgagagga

SEQ ID NO: 293815 - DNA, 25 bp, Homo sapien
acggattagacacgcgcaggccgga

SEQ ID NO: 293816 - DNA, 25 bp, Homo sapien
tggattctgcggagagctgcccgtc

SEQ ID NO: 293817 - DNA, 25 bp, Homo sapien
ccggcgcaggctcggcttagctctt

SEQ ID NO: 293818 - DNA, 25 bp, Homo sapien
tcgggacccgacagacggattagac

SEQ ID NO: 293819 - DNA, 25 bp, Homo sapien
ctgtctgggttaaacctcttcaaga

SEQ ID NO: 293820 - DNA, 25 bp, Homo sapien
tcaccagccttaggttctgcggaca

SEQ ID NO: 293821 - DNA, 25 bp, Homo sapien
taggttctgcggacattctgattcc

SEQ ID NO: 293822 - DNA, 25 bp, Homo sapien
cctcttcaagactgtccagtggtca

SEQ ID NO: 293823 - DNA, 25 bp, Homo sapien
gggctgaacccgtagttcttgctgc

SEQ ID NO: 293824 - DNA, 25 bp, Homo sapien
ggctgaacccgtagttcttgctgcc

SEQ ID NO: 293825 - DNA, 25 bp, Homo sapien
tgaacccgtagttcttgctgccacc

SEQ ID NO: 293826 - DNA, 25 bp, Homo sapien
gctgaacccgtagttcttgctgcca

SEQ ID NO: 293827 - DNA, 25 bp, Homo sapien
tggcctgggatggactctcatcctg

SEQ ID NO: 293828 - DNA, 25 bp, Homo sapien
tgtggcctgggatggactctcatcc

SEQ ID NO: 293829 - DNA, 25 bp, Homo sapien
gtgtggcctgggatggactctcatc

SEQ ID NO: 293830 - DNA, 25 bp, Homo sapien
gcctgggatggactctcatcctgtc

SEQ ID NO: 293831 - DNA, 25 bp, Homo sapien
caggggacagacatgaatcaggcat

SEQ ID NO: 293832 - DNA, 25 bp, Homo sapien
tgcaggggacagacatgaatcaggc

SEQ ID NO: 293833 - DNA, 25 bp, Homo sapien
ctgcaggggacagacatgaatcagg

SEQ ID NO: 293834 - DNA, 25 bp, Homo sapien
gcaggggacagacatgaatcaggca

SEQ ID NO: 293835 - DNA, 25 bp, Homo sapien
tcgctggcccctagctccgtcggtt

SEQ ID NO: 293836 - DNA, 25 bp, Homo sapien
tagctccgtcggttcctttctggtg

SEQ ID NO: 293837 - DNA, 25 bp, Homo sapien
cctttctggtgagatccccagtgcc

SEQ ID NO: 293838 - DNA, 25 bp, Homo sapien
ggttcctttctggtgagatccccag

SEQ ID NO: 293839 - DNA, 25 bp, Homo sapien
ctccctcatccagcccagctaaggc

SEQ ID NO: 293840 - DNA, 25 bp, Homo sapien
tccctcatccagcccagctaaggcc

SEQ ID NO: 293841 - DNA, 25 bp, Homo sapien
cagcccagctaaggcctcgtccgcc

SEQ ID NO: 293842 - DNA, 25 bp, Homo sapien
gcccagctaaggcctcgtccgccat

SEQ ID NO: 293843 - DNA, 25 bp, Homo sapien
ccccggcccaatcctcaagaatgtg

SEQ ID NO: 293844 - DNA, 25 bp, Homo sapien
actcgaactcgggaccgaggcagag

SEQ ID NO: 293845 - DNA, 25 bp, Homo sapien
acccagctgagtggcggaggtcgaa

SEQ ID NO: 293846 - DNA, 25 bp, Homo sapien
acgcggcgtgcaagtccccaggcgt

SEQ ID NO: 293847 - DNA, 25 bp, Homo sapien
caggtaggaagacacccgctaccgc

SEQ ID NO: 293848 - DNA, 25 bp, Homo sapien
ctaggcgccgaaggggtagccaggt

SEQ ID NO: 293849 - DNA, 25 bp, Homo sapien
tagccaggtaggaagacacccgcta

SEQ ID NO: 293850 - DNA, 25 bp, Homo sapien
ggtagccaggtaggaagacacccgc

SEQ ID NO: 293851 - DNA, 25 bp, Homo sapien
gcccgcaggttctgcgaccgccctc

SEQ ID NO: 293852 - DNA, 25 bp, Homo sapien
caggttctgcgaccgccctccctcg

SEQ ID NO: 293853 - DNA, 25 bp, Homo sapien
gggggcgctgaaggcccgcaggttc

SEQ ID NO: 293854 - DNA, 25 bp, Homo sapien
gggcgctgaaggcccgcaggttctg

SEQ ID NO: 293855 - DNA, 25 bp, Homo sapien
tcctggctgggtgatcaagagcata

SEQ ID NO: 293856 - DNA, 25 bp, Homo sapien
tctgataaccagacgggagccagta

SEQ ID NO: 293857 - DNA, 25 bp, Homo sapien
tacttggttctagccagtcaggagg

SEQ ID NO: 293858 - DNA, 25 bp, Homo sapien
gagccagcttgtcctagtctgaaga

SEQ ID NO: 293859 - DNA, 25 bp, Homo sapien
gatcctccgtggctcaagggagaga

SEQ ID NO: 293860 - DNA, 25 bp, Homo sapien
gagtgagtcagccaatcctgttgcc

SEQ ID NO: 293861 - DNA, 25 bp, Homo sapien
tccaccatgtagagccacctgctac

SEQ ID NO: 293862 - DNA, 25 bp, Homo sapien
cctgctacatacagatcctccgtgg

SEQ ID NO: 293863 - DNA, 25 bp, Homo sapien
cctggacctagccaccatggaagaa

SEQ ID NO: 293864 - DNA, 25 bp, Homo sapien
cacacaactgtgagtggacagccag

SEQ ID NO: 293865 - DNA, 25 bp, Homo sapien
gacagctgcttctaccggttctcaa

SEQ ID NO: 293866 - DNA, 25 bp, Homo sapien
tgtgggtcactaacagggtccctag

SEQ ID NO: 293867 - DNA, 25 bp, Homo sapien
tgcagtgggtgcgagaggcaggtca

SEQ ID NO: 293868 - DNA, 25 bp, Homo sapien
gcagtgggtgcgagaggcaggtcat

SEQ ID NO: 293869 - DNA, 25 bp, Homo sapien
ctgcagtgggtgcgagaggcaggtc

SEQ ID NO: 293870 - DNA, 25 bp, Homo sapien
ggctgagcggatgcgccgccgctct

SEQ ID NO: 293871 - DNA, 25 bp, Homo sapien
tggctgagcggatgcgccgccgctc

SEQ ID NO: 293872 - DNA, 25 bp, Homo sapien
ctgccgctgcagttcccggatggct

SEQ ID NO: 293873 - DNA, 25 bp, Homo sapien
ctcctgccgctgcagttcccggatg

SEQ ID NO: 293874 - DNA, 25 bp, Homo sapien
tgcagccagttctccttgttgtcct

SEQ ID NO: 293875 - DNA, 25 bp, Homo sapien
tgccgctcggcacggaaacgcttgg

SEQ ID NO: 293876 - DNA, 25 bp, Homo sapien
aaacgcttggatgccagggcctcct

SEQ ID NO: 293877 - DNA, 25 bp, Homo sapien
gccagttctccttgttgtcctgccg

SEQ ID NO: 293878 - DNA, 25 bp, Homo sapien
gtaggagccagaacagagtacccag

SEQ ID NO: 293879 - DNA, 25 bp, Homo sapien
tgatacacatatgcccatggacgtg

SEQ ID NO: 293880 - DNA, 25 bp, Homo sapien
cagaagcgtgtgtggacgtactgcc

SEQ ID NO: 293881 - DNA, 25 bp, Homo sapien
catggacgtgggcactaataccaca

SEQ ID NO: 293882 - DNA, 25 bp, Homo sapien
tgccatggccaggtcgtggaggatg

SEQ ID NO: 293883 - DNA, 25 bp, Homo sapien
gccatggccaggtcgtggaggatgt

SEQ ID NO: 293884 - DNA, 25 bp, Homo sapien
ccatggccaggtcgtggaggatgtg

SEQ ID NO: 293885 - DNA, 25 bp, Homo sapien
ctgccatggccaggtcgtggaggat

SEQ ID NO: 293886 - DNA, 25 bp, Homo sapien
cctgccagccgtgccagggcagccc

SEQ ID NO: 293887 - DNA, 25 bp, Homo sapien
agggcagcccgctgctcagcttccc

SEQ ID NO: 293888 - DNA, 25 bp, Homo sapien
gccgtgccagggcagcccgctgctc

SEQ ID NO: 293889 - DNA, 25 bp, Homo sapien
cgctgctcagcttcccgctgctgag

SEQ ID NO: 293890 - DNA, 25 bp, Homo sapien
tcaattcctccacatcgttcatgga

SEQ ID NO: 293891 - DNA, 25 bp, Homo sapien
aattcctccacatcgttcatggact

SEQ ID NO: 293892 - DNA, 25 bp, Homo sapien
gtcaattcctccacatcgttcatgg

SEQ ID NO: 293893 - DNA, 25 bp, Homo sapien
cagtcaattcctccacatcgttcat

SEQ ID NO: 293894 - DNA, 25 bp, Homo sapien
gatcagcttgcgctcctcatactca

SEQ ID NO: 293895 - DNA, 25 bp, Homo sapien
tctcctgagcccgtacacggcggat

SEQ ID NO: 293896 - DNA, 25 bp, Homo sapien
cggatggcagctcggatcagcttgc

SEQ ID NO: 293897 - DNA, 25 bp, Homo sapien
ctgagcccgtacacggcggatggca

SEQ ID NO: 293898 - DNA, 25 bp, Homo sapien
gctgtacaacctcccagccaaggtg

SEQ ID NO: 293899 - DNA, 25 bp, Homo sapien
ccactgttgggacgcccgctgtaca

SEQ ID NO: 293900 - DNA, 25 bp, Homo sapien
ctgtgtgccgctagccccttgctgt

SEQ ID NO: 293901 - DNA, 25 bp, Homo sapien
tcttgagccactgttgggacgcccg

SEQ ID NO: 293902 - DNA, 25 bp, Homo sapien
ttgcatttctgggagatccctctga

SEQ ID NO: 293903 - DNA, 25 bp, Homo sapien
atttctgggagatccctctgactgc

SEQ ID NO: 293904 - DNA, 25 bp, Homo sapien
tctgggagatccctctgactgctaa

SEQ ID NO: 293905 - DNA, 25 bp, Homo sapien
gcatttctgggagatccctctgact

SEQ ID NO: 293906 - DNA, 25 bp, Homo sapien
ctggcatgctaagggcagtctctga

SEQ ID NO: 293907 - DNA, 25 bp, Homo sapien
gcagtctctgatccccacttcccaa

SEQ ID NO: 293908 - DNA, 25 bp, Homo sapien
tggcactggcatgctaagggcagtc

SEQ ID NO: 293909 - DNA, 25 bp, Homo sapien
cactggcatgctaagggcagtctct

SEQ ID NO: 293910 - DNA, 25 bp, Homo sapien
tcggcaggctccaatggaggctcag

SEQ ID NO: 293911 - DNA, 25 bp, Homo sapien
gcctcggcaggctccaatggaggct

SEQ ID NO: 293912 - DNA, 25 bp, Homo sapien
ctggggagcgttggagactcctgag

SEQ ID NO: 293913 - DNA, 25 bp, Homo sapien
tcccaggtggggctcgcagcaggag

SEQ ID NO: 293914 - DNA, 25 bp, Homo sapien
cttgttgaccacctggccctcagtg

SEQ ID NO: 293915 - DNA, 25 bp, Homo sapien
ctctcttggtgtcagaggggcctct

SEQ ID NO: 293916 - DNA, 25 bp, Homo sapien
ggctctgggcagcaggggtctcttt

SEQ ID NO: 293917 - DNA, 25 bp, Homo sapien
gctctgggcagcaggggtctctttg

SEQ ID NO: 293918 - DNA, 25 bp, Homo sapien
ctgctctcttggtgtcagaggggcc

SEQ ID NO: 293919 - DNA, 25 bp, Homo sapien
ttctgggctggttggcgggggctga

SEQ ID NO: 293920 - DNA, 25 bp, Homo sapien
gctgagcaccgacagggagcgttgg

SEQ ID NO: 293921 - DNA, 25 bp, Homo sapien
gacagggagcgttggcagggtcggg

SEQ ID NO: 293922 - DNA, 25 bp, Homo sapien
caccgacagggagcgttggcagggt

SEQ ID NO: 293923 - DNA, 25 bp, Homo sapien
agagccagcccgctggaatgaggaa

SEQ ID NO: 293924 - DNA, 25 bp, Homo sapien
aatgaggaaggtccgctggcaaggg

SEQ ID NO: 293925 - DNA, 25 bp, Homo sapien
ttgtggacacgatcccgcacagagc

SEQ ID NO: 293926 - DNA, 25 bp, Homo sapien
taggagaatcagatgtgaacttgtg

SEQ ID NO: 293927 - DNA, 25 bp, Homo sapien
tggctcggcagtgccgacggccacg

SEQ ID NO: 293928 - DNA, 25 bp, Homo sapien
aggctcctctgaacgtgccacaggc

SEQ ID NO: 293929 - DNA, 25 bp, Homo sapien
gggctgggctactcctcgttgctcc

SEQ ID NO: 293930 - DNA, 25 bp, Homo sapien
tttcaaggggcctagcagccaagcc

SEQ ID NO: 293931 - DNA, 25 bp, Homo sapien
tgctgcagcctcctcggctactggg

SEQ ID NO: 293932 - DNA, 25 bp, Homo sapien
agggctgttgacacgggtgatggtg

SEQ ID NO: 293933 - DNA, 25 bp, Homo sapien
catggctgaagctggtgacatgagt

SEQ ID NO: 293934 - DNA, 25 bp, Homo sapien
ccactactggtgctgagtagggtcg

SEQ ID NO: 293935 - DNA, 25 bp, Homo sapien
tgtgggtgggcgcaggggcactggg

SEQ ID NO: 293936 - DNA, 25 bp, Homo sapien
gatgtccagtgtgggtgggcgcagg

SEQ ID NO: 293937 - DNA, 25 bp, Homo sapien
ctcggggctgatgtccagtgtgggt

SEQ ID NO: 293938 - DNA, 25 bp, Homo sapien
gggctgatgtccagtgtgggtgggc

SEQ ID NO: 293939 - DNA, 25 bp, Homo sapien
cccggctgagctcccggctagtgga

SEQ ID NO: 293940 - DNA, 25 bp, Homo sapien
tttcccggctgagctcccggctagt

SEQ ID NO: 293941 - DNA, 25 bp, Homo sapien
gcttggggatccctttcccggctga

SEQ ID NO: 293942 - DNA, 25 bp, Homo sapien
tggggatccctttcccggctgagct

SEQ ID NO: 293943 - DNA, 25 bp, Homo sapien
tggggggtaatggtggggcagtggc

SEQ ID NO: 293944 - DNA, 25 bp, Homo sapien
tggctgagtgtctgagtctttgcag

SEQ ID NO: 293945 - DNA, 25 bp, Homo sapien
tatggggggtaatggtggggcagtg

SEQ ID NO: 293946 - DNA, 25 bp, Homo sapien
ctggctgagtgtctgagtctttgca

SEQ ID NO: 293947 - DNA, 25 bp, Homo sapien
ccgggccaccggctccacggtggct

SEQ ID NO: 293948 - DNA, 25 bp, Homo sapien
ctcaagggctgcggccagctcaggc

SEQ ID NO: 293949 - DNA, 25 bp, Homo sapien
tgggtcactgccacccggcctgctt

SEQ ID NO: 293950 - DNA, 25 bp, Homo sapien
agctacctcggctgcctgggtcact

SEQ ID NO: 293951 - DNA, 25 bp, Homo sapien
tgcctgctcagtgcatccagccgcc

SEQ ID NO: 293952 - DNA, 25 bp, Homo sapien
tgctcagtgcatccagccgccggct

SEQ ID NO: 293953 - DNA, 25 bp, Homo sapien
cctgctcagtgcatccagccgccgg

SEQ ID NO: 293954 - DNA, 25 bp, Homo sapien
tcagtgcatccagccgccggctcag

SEQ ID NO: 293955 - DNA, 25 bp, Homo sapien
gctcaaggccggacacaagtgggac

SEQ ID NO: 293956 - DNA, 25 bp, Homo sapien
agctcaggctcaaggccggacacaa

SEQ ID NO: 293957 - DNA, 25 bp, Homo sapien
gtgggacccccagccgtaggctcag

SEQ ID NO: 293958 - DNA, 25 bp, Homo sapien
tcaaggccggacacaagtgggaccc

SEQ ID NO: 293959 - DNA, 25 bp, Homo sapien
tgctgaaggcaggtgggtgggccac

SEQ ID NO: 293960 - DNA, 25 bp, Homo sapien
ggcgggtgctgaaggcaggtgggtg

SEQ ID NO: 293961 - DNA, 25 bp, Homo sapien
tgaaggcaggtgggtgggccacggg

SEQ ID NO: 293962 - DNA, 25 bp, Homo sapien
cacgggggtcccggcatcctcggca

SEQ ID NO: 293963 - DNA, 25 bp, Homo sapien
ctgcgggtggtgccggtggaggagc

SEQ ID NO: 293964 - DNA, 25 bp, Homo sapien
gagactagtgctgcgggtggtgccg

SEQ ID NO: 293965 - DNA, 25 bp, Homo sapien
actagtgctgcgggtggtgccggtg

SEQ ID NO: 293966 - DNA, 25 bp, Homo sapien
cgggtggtgccggtggaggagcggc

SEQ ID NO: 293967 - DNA, 25 bp, Homo sapien
tggtgctttgttcactcgggtctgc

SEQ ID NO: 293968 - DNA, 25 bp, Homo sapien
catcagctcctcagcgctcagaggg

SEQ ID NO: 293969 - DNA, 25 bp, Homo sapien
tcagagggctccgcccttctggtgc

SEQ ID NO: 293970 - DNA, 25 bp, Homo sapien
ccattggccgcttccactgctgcag

SEQ ID NO: 293971 - DNA, 25 bp, Homo sapien
cccagcccaccggatctggctatac

SEQ ID NO: 293972 - DNA, 25 bp, Homo sapien
cattgcctacctggtgcctgctggc

SEQ ID NO: 293973 - DNA, 25 bp, Homo sapien
catatagagcccatcattgcctacc

SEQ ID NO: 293974 - DNA, 25 bp, Homo sapien
ctgcatatagagcccatcattgcct

SEQ ID NO: 293975 - DNA, 25 bp, Homo sapien
cttcctttgtcggagctcacgaagt

SEQ ID NO: 293976 - DNA, 25 bp, Homo sapien
gagcttccgctcttcaaagtccgtg

SEQ ID NO: 293977 - DNA, 25 bp, Homo sapien
agctcacgaagtgcagcccggatga

SEQ ID NO: 293978 - DNA, 25 bp, Homo sapien
aagtgcagcccggatgagcttccgc

SEQ ID NO: 293979 - DNA, 25 bp, Homo sapien
gctggatccagcagggaatagccaa

SEQ ID NO: 293980 - DNA, 25 bp, Homo sapien
ggtgtccacaaatggaccccagagt

SEQ ID NO: 293981 - DNA, 25 bp, Homo sapien
agaagctgggtagggcagttattaa

SEQ ID NO: 293982 - DNA, 25 bp, Homo sapien
tctagggtagggcaactggctctct

SEQ ID NO: 293983 - DNA, 25 bp, Homo sapien
gggacagccataacttgacagggaa

SEQ ID NO: 293984 - DNA, 25 bp, Homo sapien
gatgccccatgcatgcgcaaaaggg

SEQ ID NO: 293985 - DNA, 25 bp, Homo sapien
tttgagaggagaagcaattgaaccc

SEQ ID NO: 293986 - DNA, 25 bp, Homo sapien
tgacacaggtaacaagggcctctct

SEQ ID NO: 293987 - DNA, 25 bp, Homo sapien
tggagtggacgagccgctcagtctt

SEQ ID NO: 293988 - DNA, 25 bp, Homo sapien
cagtggctgtgttgccgcgcccctc

SEQ ID NO: 293989 - DNA, 25 bp, Homo sapien
ctggctgtgcctcgtggtggtctca

SEQ ID NO: 293990 - DNA, 25 bp, Homo sapien
cagtcttggtaacagtgctgacagc

SEQ ID NO: 293991 - DNA, 25 bp, Homo sapien
gtgcgggccgtccgtgtgccatcat

SEQ ID NO: 293992 - DNA, 25 bp, Homo sapien
tctccgagcgcctcacgaaactcga

SEQ ID NO: 293993 - DNA, 25 bp, Homo sapien
cacgaaactcgactccactgtggtg

SEQ ID NO: 293994 - DNA, 25 bp, Homo sapien
gtggtgcgggccgtccgtgtgccat

SEQ ID NO: 293995 - DNA, 25 bp, Homo sapien
caggcacagggcgacaccaggtggc

SEQ ID NO: 293996 - DNA, 25 bp, Homo sapien
gacggcacagttgaagacacggaga

SEQ ID NO: 293997 - DNA, 25 bp, Homo sapien
gacacggagagagagctcaaggaag

SEQ ID NO: 293998 - DNA, 25 bp, Homo sapien
gagagctcaaggaagagccggagga

SEQ ID NO: 293999 - DNA, 25 bp, Homo sapien
aggtcttggtttgcatcatggtgct

SEQ ID NO: 294000 - DNA, 25 bp, Homo sapien
gaaggtcttggtttgcatcatggtg

SEQ ID NO: 294001 - DNA, 25 bp, Homo sapien
gagaaggtcttggtttgcatcatgg

SEQ ID NO: 294002 - DNA, 25 bp, Homo sapien
ggagaaggtcttggtttgcatcatg

SEQ ID NO: 294003 - DNA, 25 bp, Homo sapien
ctcaatcatggccttgcgcgcctgg

SEQ ID NO: 294004 - DNA, 25 bp, Homo sapien
tcggcctgccgtttctcgagcgccg

SEQ ID NO: 294005 - DNA, 25 bp, Homo sapien
gaggtcttgggcagactctgcgcct

SEQ ID NO: 294006 - DNA, 25 bp, Homo sapien
tggcctggtcctcgcggtcgaagat

SEQ ID NO: 294007 - DNA, 25 bp, Homo sapien
tagccgcgagtcttggctcgacacc

SEQ ID NO: 294008 - DNA, 25 bp, Homo sapien
ctcgtagccgcgagtcttggctcga

SEQ ID NO: 294009 - DNA, 25 bp, Homo sapien
cgcgagtcttggctcgacaccagtc

SEQ ID NO: 294010 - DNA, 25 bp, Homo sapien
tcttggctcgacaccagtccagcag

SEQ ID NO: 294011 - DNA, 25 bp, Homo sapien
gagcaacaaggaggggactccaaga

SEQ ID NO: 294012 - DNA, 25 bp, Homo sapien
aatctagggcttgccttgtgtcctc

SEQ ID NO: 294013 - DNA, 25 bp, Homo sapien
gactccaagagtgggatccggcctt

SEQ ID NO: 294014 - DNA, 25 bp, Homo sapien
tgtactgggtaataggagctctgct

SEQ ID NO: 294015 - DNA, 25 bp, Homo sapien
ctataagccgtaggaggactggtca

SEQ ID NO: 294016 - DNA, 25 bp, Homo sapien
tataagccgtaggaggactggtcag

SEQ ID NO: 294017 - DNA, 25 bp, Homo sapien
atagtcgaaggcctcagggaagaag

SEQ ID NO: 294018 - DNA, 25 bp, Homo sapien
gaagaagttgtgcaccagggcacag

SEQ ID NO: 294019 - DNA, 25 bp, Homo sapien
tctgagggctaagctgcccatagtc

SEQ ID NO: 294020 - DNA, 25 bp, Homo sapien
ggccacctcgaagttctggcgtcgg

SEQ ID NO: 294021 - DNA, 25 bp, Homo sapien
taatggtgtgcaatgcagacaaggg

SEQ ID NO: 294022 - DNA, 25 bp, Homo sapien
tgtggacgtgccgctcactacccat

SEQ ID NO: 294023 - DNA, 25 bp, Homo sapien
ctccccactgtggacgtgccgctca

SEQ ID NO: 294024 - DNA, 25 bp, Homo sapien
tacccatcactaatggtgtgcaatg

SEQ ID NO: 294025 - DNA, 25 bp, Homo sapien
ttccagtcaggctctcgaagccgca

SEQ ID NO: 294026 - DNA, 25 bp, Homo sapien
tccagtcaggctctcgaagccgcac

SEQ ID NO: 294027 - DNA, 25 bp, Homo sapien
agtcaggctctcgaagccgcaccat

SEQ ID NO: 294028 - DNA, 25 bp, Homo sapien
cagtcaggctctcgaagccgcacca

SEQ ID NO: 294029 - DNA, 25 bp, Homo sapien
gaattcctggatgtacgtgtacacg

SEQ ID NO: 294030 - DNA, 25 bp, Homo sapien
gtagaattcctggatgtacgtgtac

SEQ ID NO: 294031 - DNA, 25 bp, Homo sapien
ctggaccagacagcggtagaattcc

SEQ ID NO: 294032 - DNA, 25 bp, Homo sapien
ccccttctggaccagacagcggtag

SEQ ID NO: 294033 - DNA, 25 bp, Homo sapien
caaaccagatctattgggaagcctg

SEQ ID NO: 294034 - DNA, 25 bp, Homo sapien
tccaagcctcatccgaggaaggtcc

SEQ ID NO: 294035 - DNA, 25 bp, Homo sapien
gctctcttgccctgctaagcctagg

SEQ ID NO: 294036 - DNA, 25 bp, Homo sapien
cgtgctcggccagaaggtcaaactt

SEQ ID NO: 294037 - DNA, 25 bp, Homo sapien
tctttactttggtactgaggtgagg

SEQ ID NO: 294038 - DNA, 25 bp, Homo sapien
tggcttaggatccagagtccccagc

SEQ ID NO: 294039 - DNA, 25 bp, Homo sapien
caggacagtcttagcccacgtctct

SEQ ID NO: 294040 - DNA, 25 bp, Homo sapien
tccccactttggagtatggcaccac

SEQ ID NO: 294041 - DNA, 25 bp, Homo sapien
aaatgggcgggaacacagtgatggg

SEQ ID NO: 294042 - DNA, 25 bp, Homo sapien
aaaatgggcgggaacacagtgatgg

SEQ ID NO: 294043 - DNA, 25 bp, Homo sapien
cacattccttcagccaatccccttg

SEQ ID NO: 294044 - DNA, 25 bp, Homo sapien
agccaatccccttgctccttctggg

SEQ ID NO: 294045 - DNA, 25 bp, Homo sapien
ccttcagccaatccccttgctcctt

SEQ ID NO: 294046 - DNA, 25 bp, Homo sapien
cattccttcagccaatccccttgct

SEQ ID NO: 294047 - DNA, 25 bp, Homo sapien
tgtaccatgatgcaaaggcagcctc

SEQ ID NO: 294048 - DNA, 25 bp, Homo sapien
cttagtaagtgcaggctaggccgca

SEQ ID NO: 294049 - DNA, 25 bp, Homo sapien
ccagttgtgggtgctagataaggcc

SEQ ID NO: 294050 - DNA, 25 bp, Homo sapien
gcaacttgagcaacagcacggctga

SEQ ID NO: 294051 - DNA, 25 bp, Homo sapien
agatgaggatcccagccaataccaa

SEQ ID NO: 294052 - DNA, 25 bp, Homo sapien
atctatgccatgctcggggggacca

SEQ ID NO: 294053 - DNA, 25 bp, Homo sapien
ataccaatggaccatctatgccatg

SEQ ID NO: 294054 - DNA, 25 bp, Homo sapien
gaccacccttctggccatccttcag

SEQ ID NO: 294055 - DNA, 25 bp, Homo sapien
gcagaggggttctctaacccttatc

SEQ ID NO: 294056 - DNA, 25 bp, Homo sapien
cagaggggttctctaacccttatca

SEQ ID NO: 294057 - DNA, 25 bp, Homo sapien
tccaccgatgattgtctgctagctg

SEQ ID NO: 294058 - DNA, 25 bp, Homo sapien
ttgagaggcccagggacccctattc

SEQ ID NO: 294059 - DNA, 25 bp, Homo sapien
tgttgagaggcccagggacccctat

SEQ ID NO: 294060 - DNA, 25 bp, Homo sapien
tctagtggccctgtggtccaccgat

SEQ ID NO: 294061 - DNA, 25 bp, Homo sapien
tttgcacccagatgggcttcatcac

SEQ ID NO: 294062 - DNA, 25 bp, Homo sapien
atctttatctatggataggtctcac

SEQ ID NO: 294063 - DNA, 25 bp, Homo sapien
cctcactggcacactccagttggta

SEQ ID NO: 294064 - DNA, 25 bp, Homo sapien
ggtagaagcctctcagctcggcctt

SEQ ID NO: 294065 - DNA, 25 bp, Homo sapien
atctacccaagcctggaggcatctc

SEQ ID NO: 294066 - DNA, 25 bp, Homo sapien
ggttggatgtcagcgccagacccgc

SEQ ID NO: 294067 - DNA, 25 bp, Homo sapien
tgcctgctggtctttcataaactcc

SEQ ID NO: 294068 - DNA, 25 bp, Homo sapien
gagctaggcaggtggaggcggagat

SEQ ID NO: 294069 - DNA, 25 bp, Homo sapien
acacttggggtcaggcttcttgccc

SEQ ID NO: 294070 - DNA, 25 bp, Homo sapien
gcacataggtgaagacacacttggg

SEQ ID NO: 294071 - DNA, 25 bp, Homo sapien
aggtggttgtagagcgactgcacat

SEQ ID NO: 294072 - DNA, 25 bp, Homo sapien
ggcgcagttcgtggcgtcgcaggtg

SEQ ID NO: 294073 - DNA, 25 bp, Homo sapien
aggcaggagacggtgcccggagagt

SEQ ID NO: 294074 - DNA, 25 bp, Homo sapien
tgtcgcaacagacagggcagcggtg

SEQ ID NO: 294075 - DNA, 25 bp, Homo sapien
tcaaaacgctgcgtgtgtatgtggg

SEQ ID NO: 294076 - DNA, 25 bp, Homo sapien
gcggcagcttgccactggctggcca

SEQ ID NO: 294077 - DNA, 25 bp, Homo sapien
tgcggagctgccttcggttcaaacc

SEQ ID NO: 294078 - DNA, 25 bp, Homo sapien
gagaccttgcggagctgccttcggt

SEQ ID NO: 294079 - DNA, 25 bp, Homo sapien
ccttgcggagctgccttcggttcaa

SEQ ID NO: 294080 - DNA, 25 bp, Homo sapien
agttggagaccttgcggagctgcct

SEQ ID NO: 294081 - DNA, 25 bp, Homo sapien
atcagccgggacattcatgcacacc

SEQ ID NO: 294082 - DNA, 25 bp, Homo sapien
agcatcagccgggacattcatgcac

SEQ ID NO: 294083 - DNA, 25 bp, Homo sapien
ccgggacattcatgcacaccattat

SEQ ID NO: 294084 - DNA, 25 bp, Homo sapien
agccgggacattcatgcacaccatt

SEQ ID NO: 294085 - DNA, 25 bp, Homo sapien
accagacgacgacattataagaacc

SEQ ID NO: 294086 - DNA, 25 bp, Homo sapien
gtgatcatcaatgacttcaacttca

SEQ ID NO: 294087 - DNA, 25 bp, Homo sapien
cagttagaaaccagacgacgacatt

SEQ ID NO: 294088 - DNA, 25 bp, Homo sapien
tcaatgacttcaacttcaccagtgt

SEQ ID NO: 294089 - DNA, 25 bp, Homo sapien
tcaaatcaggggctgattactccac

SEQ ID NO: 294090 - DNA, 25 bp, Homo sapien
tcgtcttgcttctttgtgatccatg

SEQ ID NO: 294091 - DNA, 25 bp, Homo sapien
gagtacaatgaaacccaactggcag

SEQ ID NO: 294092 - DNA, 25 bp, Homo sapien
ttgcttctttgtgatccatgatgcc

SEQ ID NO: 294093 - DNA, 25 bp, Homo sapien
ccatgagggaggtcatgctatggct

SEQ ID NO: 294094 - DNA, 25 bp, Homo sapien
ccatctgcaaaggtgtagagggtga

SEQ ID NO: 294095 - DNA, 25 bp, Homo sapien
gaggtcatgctatggctaccatctg

SEQ ID NO: 294096 - DNA, 25 bp, Homo sapien
atggcaacggtaccgagggtctgtc

SEQ ID NO: 294097 - DNA, 25 bp, Homo sapien
aaggaggctgtctgtctaccttcac

SEQ ID NO: 294098 - DNA, 25 bp, Homo sapien
cccaggtcccaactggcagcaggaa

SEQ ID NO: 294099 - DNA, 25 bp, Homo sapien
gcccaggtcccaactggcagcagga

SEQ ID NO: 294100 - DNA, 25 bp, Homo sapien
ctggcccaggtcccaactggcagca

SEQ ID NO: 294101 - DNA, 25 bp, Homo sapien
ctgagaatttaaaggcacaggctcc

SEQ ID NO: 294102 - DNA, 25 bp, Homo sapien
atttaaaggcacaggctcccacttc

SEQ ID NO: 294103 - DNA, 25 bp, Homo sapien
aaggcacaggctcccacttcccagc

SEQ ID NO: 294104 - DNA, 25 bp, Homo sapien
taaaggcacaggctcccacttccca

SEQ ID NO: 294105 - DNA, 25 bp, Homo sapien
tcccgggaaccagtgatgtcatcag

SEQ ID NO: 294106 - DNA, 25 bp, Homo sapien
cgctcccgggaaccagtgatgtcat

SEQ ID NO: 294107 - DNA, 25 bp, Homo sapien
gctcccgggaaccagtgatgtcatc

SEQ ID NO: 294108 - DNA, 25 bp, Homo sapien
cgggaaccagtgatgtcatcagcca

SEQ ID NO: 294109 - DNA, 25 bp, Homo sapien
tggactcccttggctccggctccag

SEQ ID NO: 294110 - DNA, 25 bp, Homo sapien
ctggactcccttggctccggctcca

SEQ ID NO: 294111 - DNA, 25 bp, Homo sapien
gtgccccagtttgggcaacaccctg

SEQ ID NO: 294112 - DNA, 25 bp, Homo sapien
tggagggtgccccagtttgggcaac

SEQ ID NO: 294113 - DNA, 25 bp, Homo sapien
gagggtgccccagtttgggcaacac

SEQ ID NO: 294114 - DNA, 25 bp, Homo sapien
tgccccagtttgggcaacaccctgg

SEQ ID NO: 294115 - DNA, 25 bp, Homo sapien
caggattctaagttgatcctggtgt

SEQ ID NO: 294116 - DNA, 25 bp, Homo sapien
caagtccaggattctaagttgatcc

SEQ ID NO: 294117 - DNA, 25 bp, Homo sapien
aggttgtgccctcttacatcctcca

SEQ ID NO: 294118 - DNA, 25 bp, Homo sapien
cagagcaagtccaggattctaagtt

SEQ ID NO: 294119 - DNA, 25 bp, Homo sapien
agctgagactggctgtgtagattca

SEQ ID NO: 294120 - DNA, 25 bp, Homo sapien
gagactggctgtgtagattcaaagc

SEQ ID NO: 294121 - DNA, 25 bp, Homo sapien
tggctgtgtagattcaaagcccagc

SEQ ID NO: 294122 - DNA, 25 bp, Homo sapien
ggagctgagactggctgtgtagatt

SEQ ID NO: 294123 - DNA, 25 bp, Homo sapien
ttggttccgagggtcctagggctgc

SEQ ID NO: 294124 - DNA, 25 bp, Homo sapien
ccgagggtcctagggctgcgttctt

SEQ ID NO: 294125 - DNA, 25 bp, Homo sapien
ggtcctagggctgcgttcttctttg

SEQ ID NO: 294126 - DNA, 25 bp, Homo sapien
tagggctgcgttcttctttgctggg

SEQ ID NO: 294127 - DNA, 25 bp, Homo sapien
gagccagaactgagcctgtggtcgc

SEQ ID NO: 294128 - DNA, 25 bp, Homo sapien
ctgcggtgggcagtagctgttttct

SEQ ID NO: 294129 - DNA, 25 bp, Homo sapien
gagccagcctcggtccttccgagga

SEQ ID NO: 294130 - DNA, 25 bp, Homo sapien
gaagctgacatagctgcccgtggcc

SEQ ID NO: 294131 - DNA, 25 bp, Homo sapien
cacagaggctgcgcctgatgccgtg

SEQ ID NO: 294132 - DNA, 25 bp, Homo sapien
gggcatccctctttctagctgatgt

SEQ ID NO: 294133 - DNA, 25 bp, Homo sapien
tctttctagctgatgtctgtcccac

SEQ ID NO: 294134 - DNA, 25 bp, Homo sapien
cgtggatgctggagccagggcctgt

SEQ ID NO: 294135 - DNA, 25 bp, Homo sapien
gagtgccaggctctgaaggaccctg

SEQ ID NO: 294136 - DNA, 25 bp, Homo sapien
tggcccacatccaagggcaaggtct

SEQ ID NO: 294137 - DNA, 25 bp, Homo sapien
gcaaaacaggatcctcagggctgct

SEQ ID NO: 294138 - DNA, 25 bp, Homo sapien
gggaacacagggagagcgattcggg

SEQ ID NO: 294139 - DNA, 25 bp, Homo sapien
aggatgacagggtggatgtagaaga

SEQ ID NO: 294140 - DNA, 25 bp, Homo sapien
ggatgacagggtggatgtagaagag

SEQ ID NO: 294141 - DNA, 25 bp, Homo sapien
aagccggggtcgctcttccaggtag

SEQ ID NO: 294142 - DNA, 25 bp, Homo sapien
gaagccggggtcgctcttccaggta

SEQ ID NO: 294143 - DNA, 25 bp, Homo sapien
gcgatcatgtctgcgccgtcgctgt

SEQ ID NO: 294144 - DNA, 25 bp, Homo sapien
cctatggcgatcatgtctgcgccgt

SEQ ID NO: 294145 - DNA, 25 bp, Homo sapien
agtgcccacgttccatgtgaccaca

SEQ ID NO: 294146 - DNA, 25 bp, Homo sapien
tcgctgtcgtcaccaccgcccaggt

SEQ ID NO: 294147 - DNA, 25 bp, Homo sapien
tgaacagctcactccactggtccgt

SEQ ID NO: 294148 - DNA, 25 bp, Homo sapien
ggccctagcgcatccatgaacagct

SEQ ID NO: 294149 - DNA, 25 bp, Homo sapien
cagcacgaagttgaagggccctagc

SEQ ID NO: 294150 - DNA, 25 bp, Homo sapien
tgaagagggcgtccttgagtcgctt

SEQ ID NO: 294151 - DNA, 25 bp, Homo sapien
caggaattcagcagggtctctggct

SEQ ID NO: 294152 - DNA, 25 bp, Homo sapien
agccagggtacagctggagccagga

SEQ ID NO: 294153 - DNA, 25 bp, Homo sapien
gccaggaattcagcagggtctctgg

SEQ ID NO: 294154 - DNA, 25 bp, Homo sapien
cccacagtgagccagggtacagctg

SEQ ID NO: 294155 - DNA, 25 bp, Homo sapien
cagaacacaactcccccgccctcgc

SEQ ID NO: 294156 - DNA, 25 bp, Homo sapien
gacagaacacaactcccccgccctc

SEQ ID NO: 294157 - DNA, 25 bp, Homo sapien
tcctccacccacccatgtcacggac

SEQ ID NO: 294158 - DNA, 25 bp, Homo sapien
gaacacaactcccccgccctcgcgc

SEQ ID NO: 294159 - DNA, 25 bp, Homo sapien
gtggtagtacttggcgaacagcagc

SEQ ID NO: 294160 - DNA, 25 bp, Homo sapien
ccagtgcgcgtgcagtcggtctgca

SEQ ID NO: 294161 - DNA, 25 bp, Homo sapien
tgcagtcggtctgcacgtctcgcag

SEQ ID NO: 294162 - DNA, 25 bp, Homo sapien
gtctgcacgtctcgcaggaagggca

SEQ ID NO: 294163 - DNA, 25 bp, Homo sapien
ggactaatctaaagcccccttcatg

SEQ ID NO: 294164 - DNA, 25 bp, Homo sapien
cccttcatgtcccatcctcttctgg

SEQ ID NO: 294165 - DNA, 25 bp, Homo sapien
aaatgaggaacaacgctgggacaca

SEQ ID NO: 294166 - DNA, 25 bp, Homo sapien
gcagggtcggatggctcatgggcgg

SEQ ID NO: 294167 - DNA, 25 bp, Homo sapien
tgctccgccttgtccatatgcgcag

SEQ ID NO: 294168 - DNA, 25 bp, Homo sapien
atggtctggaagttgtctttgcgct

SEQ ID NO: 294169 - DNA, 25 bp, Homo sapien
tgtgcgcccggcccttggaactgct

SEQ ID NO: 294170 - DNA, 25 bp, Homo sapien
caggcaagtggcagttcaggaagca

SEQ ID NO: 294171 - DNA, 25 bp, Homo sapien
gtcaacaggtccatggaggataagg

SEQ ID NO: 294172 - DNA, 25 bp, Homo sapien
tgtagtgagtgggtgagtggtgcca

SEQ ID NO: 294173 - DNA, 25 bp, Homo sapien
catccaacccgaggggatgtagtga

SEQ ID NO: 294174 - DNA, 25 bp, Homo sapien
ggaggataagggctcagcccagatc

SEQ ID NO: 294175 - DNA, 25 bp, Homo sapien
cactgtcgatggcaaacttgacaaa

SEQ ID NO: 294176 - DNA, 25 bp, Homo sapien
tcaatgcggaagttcaggtccccga

SEQ ID NO: 294177 - DNA, 25 bp, Homo sapien
gacaaagtgcaggtcatagctctca

SEQ ID NO: 294178 - DNA, 25 bp, Homo sapien
caggtccccgaaccagaacacgagg

SEQ ID NO: 294179 - DNA, 25 bp, Homo sapien
agagcagattggacaacagcttggg

SEQ ID NO: 294180 - DNA, 25 bp, Homo sapien
gtgaggacagggaccatagtctaag

SEQ ID NO: 294181 - DNA, 25 bp, Homo sapien
aggagagcagattggacaacagctt

SEQ ID NO: 294182 - DNA, 25 bp, Homo sapien
catagtctaaggtacaggcgtgtcc

SEQ ID NO: 294183 - DNA, 25 bp, Homo sapien
ctggtatcgtatttgttggtaccca

SEQ ID NO: 294184 - DNA, 25 bp, Homo sapien
tcctgaaagcccttcagaatgggcc

SEQ ID NO: 294185 - DNA, 25 bp, Homo sapien
gcccttcagaatgggccaggtgttc

SEQ ID NO: 294186 - DNA, 25 bp, Homo sapien
ttgttggtacccacatcaaacttga

SEQ ID NO: 294187 - DNA, 25 bp, Homo sapien
gagtcggtggctcttccgtcctgag

SEQ ID NO: 294188 - DNA, 25 bp, Homo sapien
taggatacggtctgtccaagctggc

SEQ ID NO: 294189 - DNA, 25 bp, Homo sapien
gcttgtggtcgctgactgtgtattc

SEQ ID NO: 294190 - DNA, 25 bp, Homo sapien
ctgtgctgcgtcacctggagtcggt

SEQ ID NO: 294191 - DNA, 25 bp, Homo sapien
acaggagttagagattagcagaaaa

SEQ ID NO: 294192 - DNA, 25 bp, Homo sapien
ctgcgccagcctataaatgaatttt

SEQ ID NO: 294193 - DNA, 25 bp, Homo sapien
ttagagattagcagaaaaggcacgg

SEQ ID NO: 294194 - DNA, 25 bp, Homo sapien
agattagcagaaaaggcacgggctc

SEQ ID NO: 294195 - DNA, 25 bp, Homo sapien
acactgtttccatgcggtacctcac

SEQ ID NO: 294196 - DNA, 25 bp, Homo sapien
ggtataagccgatccagtcccagga

SEQ ID NO: 294197 - DNA, 25 bp, Homo sapien
ggagctgcgggcgaacactgtttcc

SEQ ID NO: 294198 - DNA, 25 bp, Homo sapien
tccagccgcaccagtggcatgtcgt

SEQ ID NO: 294199 - DNA, 25 bp, Homo sapien
tggcccagacataagccacatagtc

SEQ ID NO: 294200 - DNA, 25 bp, Homo sapien
agtccttgcaatggcggaaacccac

SEQ ID NO: 294201 - DNA, 25 bp, Homo sapien
gccacatagtccttgcaatggcgga

SEQ ID NO: 294202 - DNA, 25 bp, Homo sapien
tttggcccagacataagccacatag

SEQ ID NO: 294203 - DNA, 25 bp, Homo sapien
tgaggtcccaaaggcaacaaggact

SEQ ID NO: 294204 - DNA, 25 bp, Homo sapien
tcccaaaggcaacaaggacttgccc

SEQ ID NO: 294205 - DNA, 25 bp, Homo sapien
ggtcccaaaggcaacaaggacttgc

SEQ ID NO: 294206 - DNA, 25 bp, Homo sapien
caaaggcaacaaggacttgccctga

SEQ ID NO: 294207 - DNA, 25 bp, Homo sapien
ctggtaggcccaggggtataagcct

SEQ ID NO: 294208 - DNA, 25 bp, Homo sapien
tggtaggcccaggggtataagccta

SEQ ID NO: 294209 - DNA, 25 bp, Homo sapien
gatgctgtggttgtgactatagtag

SEQ ID NO: 294210 - DNA, 25 bp, Homo sapien
tgatgccgatgaggatgctgtggtt

SEQ ID NO: 294211 - DNA, 25 bp, Homo sapien
tgtgactatagtagcccaggatgaa

SEQ ID NO: 294212 - DNA, 25 bp, Homo sapien
aagggttcagtgatgccgatgagga

SEQ ID NO: 294213 - DNA, 25 bp, Homo sapien
gcctctctcgttggcagatcttggg

SEQ ID NO: 294214 - DNA, 25 bp, Homo sapien
cactgaggcctgacctcccgaggtc

SEQ ID NO: 294215 - DNA, 25 bp, Homo sapien
gcagatcttgggaggtcaggttatt

SEQ ID NO: 294216 - DNA, 25 bp, Homo sapien
gtctgaactcaaggagcagaatgta

SEQ ID NO: 294217 - DNA, 25 bp, Homo sapien
cagggtctacagtctctaggcgcaa

SEQ ID NO: 294218 - DNA, 25 bp, Homo sapien
tgctggccaactccgaggaaggcag

SEQ ID NO: 294219 - DNA, 25 bp, Homo sapien
gctgcggtgtcgcttggacttgcca

SEQ ID NO: 294220 - DNA, 25 bp, Homo sapien
acttgggtgcaaggagctccagtgt

SEQ ID NO: 294221 - DNA, 25 bp, Homo sapien
gtggtcaccttggcccatctgccta

SEQ ID NO: 294222 - DNA, 25 bp, Homo sapien
gtcaccttggcccatctgcctaccc

SEQ ID NO: 294223 - DNA, 25 bp, Homo sapien
aatggtggtcaccttggcccatctg

SEQ ID NO: 294224 - DNA, 25 bp, Homo sapien
ggtggtcaccttggcccatctgcct

SEQ ID NO: 294225 - DNA, 25 bp, Homo sapien
gaggcaggtgggcttgcaaaagatt

SEQ ID NO: 294226 - DNA, 25 bp, Homo sapien
agagaggcaggtgggcttgcaaaag

SEQ ID NO: 294227 - DNA, 25 bp, Homo sapien
gtgggcttgcaaaagattgaggcag

SEQ ID NO: 294228 - DNA, 25 bp, Homo sapien
caggtgggcttgcaaaagattgagg

SEQ ID NO: 294229 - DNA, 25 bp, Homo sapien
gctgattgtcacagttgaggtgcca

SEQ ID NO: 294230 - DNA, 25 bp, Homo sapien
gctggagaatttaattcctaatgga

SEQ ID NO: 294231 - DNA, 25 bp, Homo sapien
aatggatgacctccaggattgggac

SEQ ID NO: 294232 - DNA, 25 bp, Homo sapien
gctttgctgattgtcacagttgagg

SEQ ID NO: 294233 - DNA, 25 bp, Homo sapien
tccagagaccctagggccatcaggg

SEQ ID NO: 294234 - DNA, 25 bp, Homo sapien
ggtgtcagcccggcacttgcggagg

SEQ ID NO: 294235 - DNA, 25 bp, Homo sapien
atcagggtgtcagcccggcacttgc

SEQ ID NO: 294236 - DNA, 25 bp, Homo sapien
ccagagaccctagggccatcagggt

SEQ ID NO: 294237 - DNA, 25 bp, Homo sapien
tcaatcagtttttcgggtacacggc

SEQ ID NO: 294238 - DNA, 25 bp, Homo sapien
ttaacgccagcccagtcaatcagtt

SEQ ID NO: 294239 - DNA, 25 bp, Homo sapien
ggtacacggccaatactaacgccgc

SEQ ID NO: 294240 - DNA, 25 bp, Homo sapien
caatctgttgggtaagacctccgac

SEQ ID NO: 294241 - DNA, 25 bp, Homo sapien
aaaactacatttctatcccactaag

SEQ ID NO: 294242 - DNA, 25 bp, Homo sapien
tatgtaggccatcagaagtaacgct

SEQ ID NO: 294243 - DNA, 25 bp, Homo sapien
tcccactaagaacacaccaagtact

SEQ ID NO: 294244 - DNA, 25 bp, Homo sapien
ctgcagtgagttgccactacacttc

SEQ ID NO: 294245 - DNA, 25 bp, Homo sapien
tctggctcaatgaacatagaagtgc

SEQ ID NO: 294246 - DNA, 25 bp, Homo sapien
cagcagatgcagagtagagaagtac

SEQ ID NO: 294247 - DNA, 25 bp, Homo sapien
gaagacaaggatccaacactcggga

SEQ ID NO: 294248 - DNA, 25 bp, Homo sapien
tggacccaggacagaatggccagtg

SEQ ID NO: 294249 - DNA, 25 bp, Homo sapien
cagctgggagtctgacacaggagaa

SEQ ID NO: 294250 - DNA, 25 bp, Homo sapien
caggatttggagcagctgggagtct

SEQ ID NO: 294251 - DNA, 25 bp, Homo sapien
aggctgcagcgagcccactgcactc

SEQ ID NO: 294252 - DNA, 25 bp, Homo sapien
ttgagcccaggatttggagcagctg

SEQ ID NO: 294253 - DNA, 25 bp, Homo sapien
gcataattcatggtaaggcagcaag

SEQ ID NO: 294254 - DNA, 25 bp, Homo sapien
aacaagtgcataattcatggtaagg

SEQ ID NO: 294255 - DNA, 25 bp, Homo sapien
gacagaagtgtgtacatagtacctg

SEQ ID NO: 294256 - DNA, 25 bp, Homo sapien
gggaactgacagaagtgtgtacata

SEQ ID NO: 294257 - DNA, 25 bp, Homo sapien
tggaggataggtgcaagtattaaac

SEQ ID NO: 294258 - DNA, 25 bp, Homo sapien
ggtgcaagtattaaacgactccatg

SEQ ID NO: 294259 - DNA, 25 bp, Homo sapien
gaaaatatggaggataggtgcaagt

SEQ ID NO: 294260 - DNA, 25 bp, Homo sapien
tattaaacgactccatgaagatgtc

SEQ ID NO: 294261 - DNA, 25 bp, Homo sapien
cagtgaactgagattgtgtcatcgc

SEQ ID NO: 294262 - DNA, 25 bp, Homo sapien
aactgagattgtgtcatcgcactcc

SEQ ID NO: 294263 - DNA, 25 bp, Homo sapien
agtgaactgagattgtgtcatcgca

SEQ ID NO: 294264 - DNA, 25 bp, Homo sapien
tgaactgagattgtgtcatcgcact

SEQ ID NO: 294265 - DNA, 25 bp, Homo sapien
taccttggctagctgactaatgtgg

SEQ ID NO: 294266 - DNA, 25 bp, Homo sapien
ttccaagtaggaaatgttcgctggc

SEQ ID NO: 294267 - DNA, 25 bp, Homo sapien
catggacaccctgtttgcaccgtac

SEQ ID NO: 294268 - DNA, 25 bp, Homo sapien
aatctgtcaggagccttatctggcc

SEQ ID NO: 294269 - DNA, 25 bp, Homo sapien
tcagcgaagctctgagtgaagactt

SEQ ID NO: 294270 - DNA, 25 bp, Homo sapien
ttggctgtcagcgaagctctgagtg

SEQ ID NO: 294271 - DNA, 25 bp, Homo sapien
gctgtcagcgaagctctgagtgaag

SEQ ID NO: 294272 - DNA, 25 bp, Homo sapien
tgtcagcgaagctctgagtgaagac

SEQ ID NO: 294273 - DNA, 25 bp, Homo sapien
gatgacggcatccttggctgtgtcc

SEQ ID NO: 294274 - DNA, 25 bp, Homo sapien
gcactcgaaagtgctgtcctgccct

SEQ ID NO: 294275 - DNA, 25 bp, Homo sapien
cccctgcactggagttctcaggaga

SEQ ID NO: 294276 - DNA, 25 bp, Homo sapien
tcaggagatgcagaggccgagggcc

SEQ ID NO: 294277 - DNA, 25 bp, Homo sapien
tcccttgagcctgagtgtattccca

SEQ ID NO: 294278 - DNA, 25 bp, Homo sapien
tgcctctaggctcagcacagcaagt

SEQ ID NO: 294279 - DNA, 25 bp, Homo sapien
caaacttggcaatgtgctctctggg

SEQ ID NO: 294280 - DNA, 25 bp, Homo sapien
tgtattcccaaagtgagcaggaagc

SEQ ID NO: 294281 - DNA, 25 bp, Homo sapien
acaaaagctctttgttgacaccaaa

SEQ ID NO: 294282 - DNA, 25 bp, Homo sapien
ctgggggactgttgatatgatagga

SEQ ID NO: 294283 - DNA, 25 bp, Homo sapien
caagtaggtgctaaagctaggaaaa

SEQ ID NO: 294284 - DNA, 25 bp, Homo sapien
tgctaaagctaggaaaatagacttt

SEQ ID NO: 294285 - DNA, 25 bp, Homo sapien
tgtctgttaggtctggtctccaacc

SEQ ID NO: 294286 - DNA, 25 bp, Homo sapien
gtctgttaggtctggtctccaacca

SEQ ID NO: 294287 - DNA, 25 bp, Homo sapien
ctgtctgttaggtctggtctccaac

SEQ ID NO: 294288 - DNA, 25 bp, Homo sapien
atgaccttgtctcggctgatgccag

SEQ ID NO: 294289 - DNA, 25 bp, Homo sapien
agtgctgccccttccatagaggggg

SEQ ID NO: 294290 - DNA, 25 bp, Homo sapien
ccttgtctcggctgatgccagcttt

SEQ ID NO: 294291 - DNA, 25 bp, Homo sapien
gggatgaccttgtctcggctgatgc

SEQ ID NO: 294292 - DNA, 25 bp, Homo sapien
gggtagaggggtagcttgagcagga

SEQ ID NO: 294293 - DNA, 25 bp, Homo sapien
ggggtagaggggtagcttgagcagg

SEQ ID NO: 294294 - DNA, 25 bp, Homo sapien
cttgaggacgaggaggggtcttctc

SEQ ID NO: 294295 - DNA, 25 bp, Homo sapien
ctctggattggtgtggttataagtg

SEQ ID NO: 294296 - DNA, 25 bp, Homo sapien
gaaggaaacttctaaagccatcagc

SEQ ID NO: 294297 - DNA, 25 bp, Homo sapien
gaagcttctcctagaatgttcctca

SEQ ID NO: 294298 - DNA, 25 bp, Homo sapien
ctaaagccatcagctcatttgtaga

SEQ ID NO: 294299 - DNA, 25 bp, Homo sapien
cagctgacttaatgagagggcaaac

SEQ ID NO: 294300 - DNA, 25 bp, Homo sapien
ctataaagcctaacagctgacttaa

SEQ ID NO: 294301 - DNA, 25 bp, Homo sapien
aaagcctaacagctgacttaatgag

SEQ ID NO: 294302 - DNA, 25 bp, Homo sapien
ctaacagctgacttaatgagagggc

SEQ ID NO: 294303 - DNA, 25 bp, Homo sapien
gtgggggacagcttttcctcccata

SEQ ID NO: 294304 - DNA, 25 bp, Homo sapien
gggacagcttttcctcccatatata

SEQ ID NO: 294305 - DNA, 25 bp, Homo sapien
gggggacagcttttcctcccatata

SEQ ID NO: 294306 - DNA, 25 bp, Homo sapien
gacagcttttcctcccatatatacc

SEQ ID NO: 294307 - DNA, 25 bp, Homo sapien
attaaatgctgtggcaaatatccca

SEQ ID NO: 294308 - DNA, 25 bp, Homo sapien
acaggaactgctcgtccacatactg

SEQ ID NO: 294309 - DNA, 25 bp, Homo sapien
cgtccacatactggggtgtcccagg

SEQ ID NO: 294310 - DNA, 25 bp, Homo sapien
ctcgtccacatactggggtgtccca

SEQ ID NO: 294311 - DNA, 25 bp, Homo sapien
aggaactgctcgtccacatactggg

SEQ ID NO: 294312 - DNA, 25 bp, Homo sapien
caatcaggagccagaacatgatcac

SEQ ID NO: 294313 - DNA, 25 bp, Homo sapien
gcaatcaggagccagaacatgatca

SEQ ID NO: 294314 - DNA, 25 bp, Homo sapien
ggagtcaagattagccaggaagcca

SEQ ID NO: 294315 - DNA, 25 bp, Homo sapien
cagagccctgccacggatgtaggca

SEQ ID NO: 294316 - DNA, 25 bp, Homo sapien
ccactgattccaggagtcaagatta

SEQ ID NO: 294317 - DNA, 25 bp, Homo sapien
caagactccttgatgtgttactgat

SEQ ID NO: 294318 - DNA, 25 bp, Homo sapien
gaagttatagagtgtttacagcggt

SEQ ID NO: 294319 - DNA, 25 bp, Homo sapien
agagtgtttacagcggtggcgatat

SEQ ID NO: 294320 - DNA, 25 bp, Homo sapien
ctgaagttatagagtgtttacagcg

SEQ ID NO: 294321 - DNA, 25 bp, Homo sapien
agttatagagtgtttacagcggtgg

SEQ ID NO: 294322 - DNA, 25 bp, Homo sapien
tgaaattatactctgacagtttctc

SEQ ID NO: 294323 - DNA, 25 bp, Homo sapien
ttggtgcatccctttgtttctgtaa

SEQ ID NO: 294324 - DNA, 25 bp, Homo sapien
gaacagagcggcactgggatttgaa

SEQ ID NO: 294325 - DNA, 25 bp, Homo sapien
tattaaactcaggtgaaattatact

SEQ ID NO: 294326 - DNA, 25 bp, Homo sapien
accaggaagtcattcaagttgttct

SEQ ID NO: 294327 - DNA, 25 bp, Homo sapien
ggaaaccaggaagtcattcaagttg

SEQ ID NO: 294328 - DNA, 25 bp, Homo sapien
ctctggtgaattcacgaagtgaccc

SEQ ID NO: 294329 - DNA, 25 bp, Homo sapien
gtgaattcacgaagtgaccccagct

SEQ ID NO: 294330 - DNA, 25 bp, Homo sapien
tcctaatgcacagtagtcagtctca

SEQ ID NO: 294331 - DNA, 25 bp, Homo sapien
gttattactgcctcggagctccaaa

SEQ ID NO: 294332 - DNA, 25 bp, Homo sapien
ggatgcattcaagcttctgcagcct

SEQ ID NO: 294333 - DNA, 25 bp, Homo sapien
aggtctttcctaatgcacagtagtc

SEQ ID NO: 294334 - DNA, 25 bp, Homo sapien
cctaccaagtggattcggcatatga

SEQ ID NO: 294335 - DNA, 25 bp, Homo sapien
tctatcaggcacactataaagctgg

SEQ ID NO: 294336 - DNA, 25 bp, Homo sapien
aaagagcactcttgagtgggtgccc

SEQ ID NO: 294337 - DNA, 25 bp, Homo sapien
aagctggtggtttcttcctaccaag

SEQ ID NO: 294338 - DNA, 25 bp, Homo sapien
cgcctcaggcgcgggaagaccacag

SEQ ID NO: 294339 - DNA, 25 bp, Homo sapien
gggaagaccacagccccaggcgcga

SEQ ID NO: 294340 - DNA, 25 bp, Homo sapien
aggcgcgaacgggatgcaccgccta

SEQ ID NO: 294341 - DNA, 25 bp, Homo sapien
agcagctcccctcagttccctacaa

SEQ ID NO: 294342 - DNA, 25 bp, Homo sapien
gagtgcggtggcttttcacaggcgc

SEQ ID NO: 294343 - DNA, 25 bp, Homo sapien
tgcggtggcttttcacaggcgcaat

SEQ ID NO: 294344 - DNA, 25 bp, Homo sapien
agatggggatcttgctatgtagccc

SEQ ID NO: 294345 - DNA, 25 bp, Homo sapien
gcggtggcttttcacaggcgcaatc

SEQ ID NO: 294346 - DNA, 25 bp, Homo sapien
ttggagcaatgtggtccccacagcc

SEQ ID NO: 294347 - DNA, 25 bp, Homo sapien
gagccgtgccaggtttcgttgacag

SEQ ID NO: 294348 - DNA, 25 bp, Homo sapien
aggtttcgttgacagtcctgtacca

SEQ ID NO: 294349 - DNA, 25 bp, Homo sapien
acagtcctgtaccatatctggcttg

SEQ ID NO: 294350 - DNA, 25 bp, Homo sapien
ccttaatgatctacgggctggctgt

SEQ ID NO: 294351 - DNA, 25 bp, Homo sapien
cagatggcagggttgctccactgac

SEQ ID NO: 294352 - DNA, 25 bp, Homo sapien
aaagagcaggattaaggcacattca

SEQ ID NO: 294353 - DNA, 25 bp, Homo sapien
gctacatcctaggagtaccactctg

SEQ ID NO: 294354 - DNA, 25 bp, Homo sapien
ggttgcagggttattatgaagattg

SEQ ID NO: 294355 - DNA, 25 bp, Homo sapien
actatgattgtaccagtgcactgta

SEQ ID NO: 294356 - DNA, 25 bp, Homo sapien
gaactatgattgtaccagtgcactg

SEQ ID NO: 294357 - DNA, 25 bp, Homo sapien
tattatgaagattgaatcagataat

SEQ ID NO: 294358 - DNA, 25 bp, Homo sapien
ctgggcaacatagtattaataagac

SEQ ID NO: 294359 - DNA, 25 bp, Homo sapien
tgggcaacatagtattaataagacc

SEQ ID NO: 294360 - DNA, 25 bp, Homo sapien
tgggagtcctagtggaaagcagact

SEQ ID NO: 294361 - DNA, 25 bp, Homo sapien
tggcttacttccgtaatcccaagca

SEQ ID NO: 294362 - DNA, 25 bp, Homo sapien
ttagtataaaatgggggttgcactg

SEQ ID NO: 294363 - DNA, 25 bp, Homo sapien
gacctgagttcaaatatcatctgtg

SEQ ID NO: 294364 - DNA, 25 bp, Homo sapien
tttaagctcaagcagcctgactccg

SEQ ID NO: 294365 - DNA, 25 bp, Homo sapien
cctgaagagtggtcggtagacagac

SEQ ID NO: 294366 - DNA, 25 bp, Homo sapien
caacccttagtgcagtttgggaggt

SEQ ID NO: 294367 - DNA, 25 bp, Homo sapien
caaagaatggttaagcagctgactc

SEQ ID NO: 294368 - DNA, 25 bp, Homo sapien
gctagagtagctgaactcattcttc

SEQ ID NO: 294369 - DNA, 25 bp, Homo sapien
gagtgtgctcttaactacaacacaa

SEQ ID NO: 294370 - DNA, 25 bp, Homo sapien
cctctccggaggtacctagggcttg

SEQ ID NO: 294371 - DNA, 25 bp, Homo sapien
tcagggcaattcataatcagtttgg

SEQ ID NO: 294372 - DNA, 25 bp, Homo sapien
cacacatattattcagccctggcag

SEQ ID NO: 294373 - DNA, 25 bp, Homo sapien
cggaatctcactctactggagggca

SEQ ID NO: 294374 - DNA, 25 bp, Homo sapien
gagtgctctgtgaatagtgttccca

SEQ ID NO: 294375 - DNA, 25 bp, Homo sapien
tatgtgcgacaatcaccaattcaca

SEQ ID NO: 294376 - DNA, 25 bp, Homo sapien
ttacagggacctgccatcatgcctg

SEQ ID NO: 294377 - DNA, 25 bp, Homo sapien
atgcctggctaatttttgtactttt

SEQ ID NO: 294378 - DNA, 25 bp, Homo sapien
cctttgaaggattgatcaccagatg

SEQ ID NO: 294379 - DNA, 25 bp, Homo sapien
caggaggaacctttgaaggattgat

SEQ ID NO: 294380 - DNA, 25 bp, Homo sapien
gagaggacatctcaatgccatgaaa

SEQ ID NO: 294381 - DNA, 25 bp, Homo sapien
ccccatgtcctgagttgaagcagaa

SEQ ID NO: 294382 - DNA, 25 bp, Homo sapien
catacgggatactgaaagggctgcc

SEQ ID NO: 294383 - DNA, 25 bp, Homo sapien
ttttcacccctatgaggttgcagag

SEQ ID NO: 294384 - DNA, 25 bp, Homo sapien
caagttgagtttaaactcttgagca

SEQ ID NO: 294385 - DNA, 25 bp, Homo sapien
taaatagctcccagcatcaacattt

SEQ ID NO: 294386 - DNA, 25 bp, Homo sapien
tctggactccgagaaaacgacctct

SEQ ID NO: 294387 - DNA, 25 bp, Homo sapien
gactagctaagaaagaagcgctgct

SEQ ID NO: 294388 - DNA, 25 bp, Homo sapien
gatggctcctccctagttctcagaa

SEQ ID NO: 294389 - DNA, 25 bp, Homo sapien
gggccggtgactagctaagaaagaa

SEQ ID NO: 294390 - DNA, 25 bp, Homo sapien
ccccagcagattcccacaggggctc

SEQ ID NO: 294391 - DNA, 25 bp, Homo sapien
cccccagcagattcccacaggggct

SEQ ID NO: 294392 - DNA, 25 bp, Homo sapien
ccagcagattcccacaggggctcat

SEQ ID NO: 294393 - DNA, 25 bp, Homo sapien
cccagcagattcccacaggggctca

SEQ ID NO: 294394 - DNA, 25 bp, Homo sapien
gggctcccggcacctctggctgcag

SEQ ID NO: 294395 - DNA, 25 bp, Homo sapien
cccggggctcccggcacctctggct

SEQ ID NO: 294396 - DNA, 25 bp, Homo sapien
tgcaggcaggctgccctgagctcac

SEQ ID NO: 294397 - DNA, 25 bp, Homo sapien
aggcccggggctcccggcacctctg

SEQ ID NO: 294398 - DNA, 25 bp, Homo sapien
tcccacaccagatagacaggctcag

SEQ ID NO: 294399 - DNA, 25 bp, Homo sapien
cacaccagatagacaggctcagctg

SEQ ID NO: 294400 - DNA, 25 bp, Homo sapien
tcttcccacaccagatagacaggct

SEQ ID NO: 294401 - DNA, 25 bp, Homo sapien
ttcccacaccagatagacaggctca

SEQ ID NO: 294402 - DNA, 25 bp, Homo sapien
gtgaagtaagccgggactgacaagt

SEQ ID NO: 294403 - DNA, 25 bp, Homo sapien
ccgggactgacaagtaactccccat

SEQ ID NO: 294404 - DNA, 25 bp, Homo sapien
ctctggaggtgaagtaagccgggac

SEQ ID NO: 294405 - DNA, 25 bp, Homo sapien
aacaggtctctggaggtgaagtaag

SEQ ID NO: 294406 - DNA, 25 bp, Homo sapien
aatttcctctccactaggagaagaa

SEQ ID NO: 294407 - DNA, 25 bp, Homo sapien
tggctgtaggtagaagagtacccag

SEQ ID NO: 294408 - DNA, 25 bp, Homo sapien
gaagtttcaagtgaaagtcaaaatc

SEQ ID NO: 294409 - DNA, 25 bp, Homo sapien
gccctggctgtaggtagaagagtac

SEQ ID NO: 294410 - DNA, 25 bp, Homo sapien
aagtcaaaatctgccctggctgtag

SEQ ID NO: 294411 - DNA, 25 bp, Homo sapien
ggttctcagaccacttaagaagttg

SEQ ID NO: 294412 - DNA, 25 bp, Homo sapien
gttttgccacagaacacaactgggt

SEQ ID NO: 294413 - DNA, 25 bp, Homo sapien
tggagagcaacgtcaccagtccaca

SEQ ID NO: 294414 - DNA, 25 bp, Homo sapien
gttgccatggtagacttcagagttc

SEQ ID NO: 294415 - DNA, 25 bp, Homo sapien
acagctaagagctccctggcctgct

SEQ ID NO: 294416 - DNA, 25 bp, Homo sapien
ttctgagcttcccaacacacacagc

SEQ ID NO: 294417 - DNA, 25 bp, Homo sapien
acacacagctaagagctccctggcc

SEQ ID NO: 294418 - DNA, 25 bp, Homo sapien
cccttctgagcttcccaacacacac

SEQ ID NO: 294419 - DNA, 25 bp, Homo sapien
gtcatcagcagggagcacccatgac

SEQ ID NO: 294420 - DNA, 25 bp, Homo sapien
tgagggaatcctggcattctgaaca

SEQ ID NO: 294421 - DNA, 25 bp, Homo sapien
ccttctcatagtaccagttggtgag

SEQ ID NO: 294422 - DNA, 25 bp, Homo sapien
atcagcagggagcacccatgacaga

SEQ ID NO: 294423 - DNA, 25 bp, Homo sapien
gaagcactgtcaatggactctgaag

SEQ ID NO: 294424 - DNA, 25 bp, Homo sapien
aagtgtcagattggtacctcctgtc

SEQ ID NO: 294425 - DNA, 25 bp, Homo sapien
taaaagattaacaggccacagggaa

SEQ ID NO: 294426 - DNA, 25 bp, Homo sapien
taaagtcgtttgtccagagcaggta

SEQ ID NO: 294427 - DNA, 25 bp, Homo sapien
agcaaggcccccgtcaaaatccact

SEQ ID NO: 294428 - DNA, 25 bp, Homo sapien
gggtgggtgaatgacctccaagcaa

SEQ ID NO: 294429 - DNA, 25 bp, Homo sapien
gggtgaatgacctccaagcaaggcc

SEQ ID NO: 294430 - DNA, 25 bp, Homo sapien
acaggggtgggtgaatgacctccaa

SEQ ID NO: 294431 - DNA, 25 bp, Homo sapien
aatgatcaccttgcagctcatacag

SEQ ID NO: 294432 - DNA, 25 bp, Homo sapien
catcctcaatgatcaccttgcagct

SEQ ID NO: 294433 - DNA, 25 bp, Homo sapien
catgctgcaccagtgcatatgcatc

SEQ ID NO: 294434 - DNA, 25 bp, Homo sapien
tggcatgctgcaccagtgcatatgc

SEQ ID NO: 294435 - DNA, 25 bp, Homo sapien
tctttcacttgcacagtggtggcgt

SEQ ID NO: 294436 - DNA, 25 bp, Homo sapien
ggtggcgtagttggagcaggcactc

SEQ ID NO: 294437 - DNA, 25 bp, Homo sapien
cctgccttcagtggtggccggcatg

SEQ ID NO: 294438 - DNA, 25 bp, Homo sapien
ccggcatggagatgagcgtgacaga

SEQ ID NO: 294439 - DNA, 25 bp, Homo sapien
gactttggaggtctaagccctctga

SEQ ID NO: 294440 - DNA, 25 bp, Homo sapien
taagtatcgggtaggaagtagcctg

SEQ ID NO: 294441 - DNA, 25 bp, Homo sapien
gagcaaacatgacctgaaacctgac

SEQ ID NO: 294442 - DNA, 25 bp, Homo sapien
ggcccaggtacggttacagcatagt

SEQ ID NO: 294443 - DNA, 25 bp, Homo sapien
gcgcctggcctaatcccaaactctt

SEQ ID NO: 294444 - DNA, 25 bp, Homo sapien
tgcgcctggcctaatcccaaactct

SEQ ID NO: 294445 - DNA, 25 bp, Homo sapien
gtgaagggaattgccactcaccctg

SEQ ID NO: 294446 - DNA, 25 bp, Homo sapien
gaaacttgaacatcatcttcccaat

SEQ ID NO: 294447 - DNA, 25 bp, Homo sapien
aagggaattgccactcaccctgtgg

SEQ ID NO: 294448 - DNA, 25 bp, Homo sapien
agccagaaacttgaacatcatcttc

SEQ ID NO: 294449 - DNA, 25 bp, Homo sapien
gggtcccattgatctccaggatgcg

SEQ ID NO: 294450 - DNA, 25 bp, Homo sapien
ggacgggggtcccattgatctccag

SEQ ID NO: 294451 - DNA, 25 bp, Homo sapien
cctccactcgaagtgtgcggacggg

SEQ ID NO: 294452 - DNA, 25 bp, Homo sapien
atggcgtttcgattgttgggactga

SEQ ID NO: 294453 - DNA, 25 bp, Homo sapien
gctggtccaggcgttgggagacggg

SEQ ID NO: 294454 - DNA, 25 bp, Homo sapien
ttgggagacggggtcatgttcaatc

SEQ ID NO: 294455 - DNA, 25 bp, Homo sapien
cattctgcatgtgaggagcgagccg

SEQ ID NO: 294456 - DNA, 25 bp, Homo sapien
gtgtccggcattctgcatgtgagga

SEQ ID NO: 294457 - DNA, 25 bp, Homo sapien
gcctcccactaatttcatcatactg

SEQ ID NO: 294458 - DNA, 25 bp, Homo sapien
tttggtgaggagagtggataaaaaa

SEQ ID NO: 294459 - DNA, 25 bp, Homo sapien
ggcagcactttaatgagagggcact

SEQ ID NO: 294460 - DNA, 25 bp, Homo sapien
taacttactcagtttgtttggtgag

SEQ ID NO: 294461 - DNA, 25 bp, Homo sapien
cctccccatggattaggtcacaggg

SEQ ID NO: 294462 - DNA, 25 bp, Homo sapien
gtcacagggccggaagatctgctgt

SEQ ID NO: 294463 - DNA, 25 bp, Homo sapien
gaatagctgctggaacaacgaaggg

SEQ ID NO: 294464 - DNA, 25 bp, Homo sapien
gattctgagcggctgatgtcacggc

SEQ ID NO: 294465 - DNA, 25 bp, Homo sapien
tttcatgaccatcactttgcccgtg

SEQ ID NO: 294466 - DNA, 25 bp, Homo sapien
ctcctcatcacatcgaattaactct

SEQ ID NO: 294467 - DNA, 25 bp, Homo sapien
tcctcatcacatcgaattaactctt

SEQ ID NO: 294468 - DNA, 25 bp, Homo sapien
ctcatcacatcgaattaactctttc

SEQ ID NO: 294469 - DNA, 25 bp, Homo sapien
ccccctcaatgtactctgtcaggag

SEQ ID NO: 294470 - DNA, 25 bp, Homo sapien
agaaagtccttcagtgtgcccccct

SEQ ID NO: 294471 - DNA, 25 bp, Homo sapien
ggtccaggctgcgcatcactttcac

SEQ ID NO: 294472 - DNA, 25 bp, Homo sapien
ttcagtgtgcccccctcaatgtact

SEQ ID NO: 294473 - DNA, 25 bp, Homo sapien
cctttggcaaacctgaccttctgct

SEQ ID NO: 294474 - DNA, 25 bp, Homo sapien
cattccggaggcgattcctttggca

SEQ ID NO: 294475 - DNA, 25 bp, Homo sapien
tccggaggcgattcctttggcaaac

SEQ ID NO: 294476 - DNA, 25 bp, Homo sapien
ctttggcaaacctgaccttctgctg

SEQ ID NO: 294477 - DNA, 25 bp, Homo sapien
acttgatgaggcagttgtgcgagtt

SEQ ID NO: 294478 - DNA, 25 bp, Homo sapien
tgatgcacatagagtgcaaataggc

SEQ ID NO: 294479 - DNA, 25 bp, Homo sapien
tgtgcgagttcagatcccggtggat

SEQ ID NO: 294480 - DNA, 25 bp, Homo sapien
gatcccggtggatgatgcacataga

SEQ ID NO: 294481 - DNA, 25 bp, Homo sapien
aaagacaggtcaggacttcatgggg

SEQ ID NO: 294482 - DNA, 25 bp, Homo sapien
agacaggtcaggacttcatggggat

SEQ ID NO: 294483 - DNA, 25 bp, Homo sapien
taggataaaagacaggtcaggactt

SEQ ID NO: 294484 - DNA, 25 bp, Homo sapien
ggataaaagacaggtcaggacttca

SEQ ID NO: 294485 - DNA, 25 bp, Homo sapien
ccactatgagccgtgacagcccaaa

SEQ ID NO: 294486 - DNA, 25 bp, Homo sapien
cgcttcttgcggtcgttcttgcgca

SEQ ID NO: 294487 - DNA, 25 bp, Homo sapien
tcttgcgcaaggtgcgtttcttggt

SEQ ID NO: 294488 - DNA, 25 bp, Homo sapien
tctcttccactatgagccgtgacag

SEQ ID NO: 294489 - DNA, 25 bp, Homo sapien
gagaagatatccaccgtctcatcat

SEQ ID NO: 294490 - DNA, 25 bp, Homo sapien
gatatccaccgtctcatcatagctc

SEQ ID NO: 294491 - DNA, 25 bp, Homo sapien
ctcacagagaacgatcccaaaggag

SEQ ID NO: 294492 - DNA, 25 bp, Homo sapien
aagatatccaccgtctcatcatagc

SEQ ID NO: 294493 - DNA, 25 bp, Homo sapien
gggtaagaagacagctgtttacaaa

SEQ ID NO: 294494 - DNA, 25 bp, Homo sapien
tgtagggtaagaagacagctgttta

SEQ ID NO: 294495 - DNA, 25 bp, Homo sapien
ctgtagggtaagaagacagctgttt

SEQ ID NO: 294496 - DNA, 25 bp, Homo sapien
taagaagacagctgtttacaaagga

SEQ ID NO: 294497 - DNA, 25 bp, Homo sapien
gaaggcagtcaggatctgcatacac

SEQ ID NO: 294498 - DNA, 25 bp, Homo sapien
gaaggccgggggacaatctgtggga

SEQ ID NO: 294499 - DNA, 25 bp, Homo sapien
ggtggccttagacagaggcaaacgt

SEQ ID NO: 294500 - DNA, 25 bp, Homo sapien
aggcaaacgtcccaggaccctgtga

SEQ ID NO: 294501 - DNA, 25 bp, Homo sapien
catatgtgttgtcagatggctcagg

SEQ ID NO: 294502 - DNA, 25 bp, Homo sapien
tggctcaggggttgacagccacatt

SEQ ID NO: 294503 - DNA, 25 bp, Homo sapien
tacacttactgtattcaaatggttt

SEQ ID NO: 294504 - DNA, 25 bp, Homo sapien
tttctgtgtcctatccagattactt

SEQ ID NO: 294505 - DNA, 25 bp, Homo sapien
tatccagattacttgctgctatgtc

SEQ ID NO: 294506 - DNA, 25 bp, Homo sapien
gggaatatcgaaagatgaatacact

SEQ ID NO: 294507 - DNA, 25 bp, Homo sapien
gagattacagaagacgtatttcctg

SEQ ID NO: 294508 - DNA, 25 bp, Homo sapien
gtatttcctgtgctataaactttgg

SEQ ID NO: 294509 - DNA, 25 bp, Homo sapien
tgtcccaactggttatcctgggagg

SEQ ID NO: 294510 - DNA, 25 bp, Homo sapien
gaagcgctttctctatccggaaacc

SEQ ID NO: 294511 - DNA, 25 bp, Homo sapien
ctcgccggctccgcggcgagggcgg

SEQ ID NO: 294512 - DNA, 25 bp, Homo sapien
agctcgccggctccgcggcgagggc

SEQ ID NO: 294513 - DNA, 25 bp, Homo sapien
tagctcgccggctccgcggcgaggg

SEQ ID NO: 294514 - DNA, 25 bp, Homo sapien
ttagctcgccggctccgcggcgagg

SEQ ID NO: 294515 - DNA, 25 bp, Homo sapien
ctccggggccacgtgcgcgcgtggg

SEQ ID NO: 294516 - DNA, 25 bp, Homo sapien
ttgtgccgccgcctccgtgacgccc

SEQ ID NO: 294517 - DNA, 25 bp, Homo sapien
ctccttgtgccgccgcctccgtgac

SEQ ID NO: 294518 - DNA, 25 bp, Homo sapien
gcctccggggccacgtgcgcgcgtg

SEQ ID NO: 294519 - DNA, 25 bp, Homo sapien
tgggccctcatcatccgcgcagccc

SEQ ID NO: 294520 - DNA, 25 bp, Homo sapien
actgggccctcatcatccgcgcagc

SEQ ID NO: 294521 - DNA, 25 bp, Homo sapien
ggccctcatcatccgcgcagcccgg

SEQ ID NO: 294522 - DNA, 25 bp, Homo sapien
cactgggccctcatcatccgcgcag

SEQ ID NO: 294523 - DNA, 25 bp, Homo sapien
ggttgaggtgcttccgtagctcctt

SEQ ID NO: 294524 - DNA, 25 bp, Homo sapien
atccacgtcaatctctagttctgag

SEQ ID NO: 294525 - DNA, 25 bp, Homo sapien
ctggaagcccaggcatcgtcactct

SEQ ID NO: 294526 - DNA, 25 bp, Homo sapien
agctccttgaccctggaagcccagg

SEQ ID NO: 294527 - DNA, 25 bp, Homo sapien
tgcatggcccggatcttgtccagca

SEQ ID NO: 294528 - DNA, 25 bp, Homo sapien
cagcttctgcatggcccggatcttg

SEQ ID NO: 294529 - DNA, 25 bp, Homo sapien
gcaggccagagatgaaggcctctgt

SEQ ID NO: 294530 - DNA, 25 bp, Homo sapien
tgtccagcaggccagagatgaaggc

SEQ ID NO: 294531 - DNA, 25 bp, Homo sapien
ggaacaaggtatagattctcccacc

SEQ ID NO: 294532 - DNA, 25 bp, Homo sapien
ttgagctgcaccaaaggcgtaccct

SEQ ID NO: 294533 - DNA, 25 bp, Homo sapien
tggtgttactgaaggactgcggtcc

SEQ ID NO: 294534 - DNA, 25 bp, Homo sapien
tcaactctaatgtggaccgctggaa

SEQ ID NO: 294535 - DNA, 25 bp, Homo sapien
tggaagggatctaggctcagctact

SEQ ID NO: 294536 - DNA, 25 bp, Homo sapien
taggtaacactataacaaggctgga

SEQ ID NO: 294537 - DNA, 25 bp, Homo sapien
ggttgtataacgtcaggcaaactcc

SEQ ID NO: 294538 - DNA, 25 bp, Homo sapien
gcaactggtaccctgaacaatcgtc

SEQ ID NO: 294539 - DNA, 25 bp, Homo sapien
gtcctccaatttcgagaatgctggt

SEQ ID NO: 294540 - DNA, 25 bp, Homo sapien
cccaggtacagggagagggcctcaa

SEQ ID NO: 294541 - DNA, 25 bp, Homo sapien
cctcaaaggagtcctccaatttcga

SEQ ID NO: 294542 - DNA, 25 bp, Homo sapien
ccaggtacagggagagggcctcaaa

SEQ ID NO: 294543 - DNA, 25 bp, Homo sapien
gaggtaataggaatggcttgttctg

SEQ ID NO: 294544 - DNA, 25 bp, Homo sapien
gccaatccacaggaagcccggacgg

SEQ ID NO: 294545 - DNA, 25 bp, Homo sapien
cctgtggagatacatttccctggtg

SEQ ID NO: 294546 - DNA, 25 bp, Homo sapien
atttccctggtgctgcgcccacttg

SEQ ID NO: 294547 - DNA, 25 bp, Homo sapien
ggcaagtattggatttacagacagt

SEQ ID NO: 294548 - DNA, 25 bp, Homo sapien
cagctttcaggcaagtattggattt

SEQ ID NO: 294549 - DNA, 25 bp, Homo sapien
caggcaagtattggatttacagaca

SEQ ID NO: 294550 - DNA, 25 bp, Homo sapien
tttcaggcaagtattggatttacag

SEQ ID NO: 294551 - DNA, 25 bp, Homo sapien
ggtagaagtcagatggcccagctca

SEQ ID NO: 294552 - DNA, 25 bp, Homo sapien
gatgttgtccgtaagttctcagcca

SEQ ID NO: 294553 - DNA, 25 bp, Homo sapien
gcccacccgagtatgagtaacagaa

SEQ ID NO: 294554 - DNA, 25 bp, Homo sapien
gattagtgtaagcaagagcctccca

SEQ ID NO: 294555 - DNA, 25 bp, Homo sapien
acacaatgctgaactgtgctgctgc

SEQ ID NO: 294556 - DNA, 25 bp, Homo sapien
tgatcaatggcccagttcaggccca

SEQ ID NO: 294557 - DNA, 25 bp, Homo sapien
gagatgacatctggtcccacaactc

SEQ ID NO: 294558 - DNA, 25 bp, Homo sapien
gggctcagccctaaagcaagcttgc

SEQ ID NO: 294559 - DNA, 25 bp, Homo sapien
ggttggtcattgcaaatcctctccc

SEQ ID NO: 294560 - DNA, 25 bp, Homo sapien
tgaagcaggaaagacaggtgtgcag

SEQ ID NO: 294561 - DNA, 25 bp, Homo sapien
ccgtgcccggcttgtgtgtccagat

SEQ ID NO: 294562 - DNA, 25 bp, Homo sapien
aggtgtgcaggcgtcccaacaaggt

SEQ ID NO: 294563 - DNA, 25 bp, Homo sapien
tcaaagaaccattagaaagggctca

SEQ ID NO: 294564 - DNA, 25 bp, Homo sapien
taagccttttggacacaggacccca

SEQ ID NO: 294565 - DNA, 25 bp, Homo sapien
caagctactggcatggcaagagccc

SEQ ID NO: 294566 - DNA, 25 bp, Homo sapien
tgcccaaggtcgtaagcaagctact

SEQ ID NO: 294567 - DNA, 25 bp, Homo sapien
tactgtctgcactagcttcagaggg

SEQ ID NO: 294568 - DNA, 25 bp, Homo sapien
gagcagccactgcatctctaggact

SEQ ID NO: 294569 - DNA, 25 bp, Homo sapien
catgggattgagtgtgcttccaggc

SEQ ID NO: 294570 - DNA, 25 bp, Homo sapien
ggtagtctaggccacgaggttcaaa

SEQ ID NO: 294571 - DNA, 25 bp, Homo sapien
ttgaacttctaacctcaggcaatcc

SEQ ID NO: 294572 - DNA, 25 bp, Homo sapien
tgaacttctaacctcaggcaatcca

SEQ ID NO: 294573 - DNA, 25 bp, Homo sapien
cttgaacttctaacctcaggcaatc

SEQ ID NO: 294574 - DNA, 25 bp, Homo sapien
tattgaccgtttgcggagcgtctgc

SEQ ID NO: 294575 - DNA, 25 bp, Homo sapien
cacacaccgcgggaagaagtcgttt

SEQ ID NO: 294576 - DNA, 25 bp, Homo sapien
taagcgatttaccaaaggcaatggc

SEQ ID NO: 294577 - DNA, 25 bp, Homo sapien
tggcccctcagcgtttattgaccgt

SEQ ID NO: 294578 - DNA, 25 bp, Homo sapien
tgcctcaactggctggacgcgcaga

SEQ ID NO: 294579 - DNA, 25 bp, Homo sapien
gttcgctgcccgctattctgtgtcc

SEQ ID NO: 294580 - DNA, 25 bp, Homo sapien
cagttactgccgaaacccggacgag

SEQ ID NO: 294581 - DNA, 25 bp, Homo sapien
ctgagaaacggccttgcgaggacct

SEQ ID NO: 294582 - DNA, 25 bp, Homo sapien
tccagtcagcgatgaggccggtttc

SEQ ID NO: 294583 - DNA, 25 bp, Homo sapien
taagccctttgcatggtgtggtcct

SEQ ID NO: 294584 - DNA, 25 bp, Homo sapien
tctcaaactgatcggctgctaagca

SEQ ID NO: 294585 - DNA, 25 bp, Homo sapien
ccaggatgacaggaaacgaagcgtt

SEQ ID NO: 294586 - DNA, 25 bp, Homo sapien
catctgagtactaaccagactcaac

SEQ ID NO: 294587 - DNA, 25 bp, Homo sapien
acaagattgcacatgttcagggtgg

SEQ ID NO: 294588 - DNA, 25 bp, Homo sapien
cccatctgagtactaaccagactca

SEQ ID NO: 294589 - DNA, 25 bp, Homo sapien
gatcagacaagattgcacatgttca

SEQ ID NO: 294590 - DNA, 25 bp, Homo sapien
ggtaatattcatgccctggggttct

SEQ ID NO: 294591 - DNA, 25 bp, Homo sapien
ctaatggtaatattcatgccctggg

SEQ ID NO: 294592 - DNA, 25 bp, Homo sapien
ctaagtctaatggtaatattcatgc

SEQ ID NO: 294593 - DNA, 25 bp, Homo sapien
gtctaatggtaatattcatgccctg

SEQ ID NO: 294594 - DNA, 25 bp, Homo sapien
aaaatggctctaccatcaattttgc

SEQ ID NO: 294595 - DNA, 25 bp, Homo sapien
tgtaaacctgtgtgtggaggttgtt

SEQ ID NO: 294596 - DNA, 25 bp, Homo sapien
tttcaactcgtttgtgaaaatatca

SEQ ID NO: 294597 - DNA, 25 bp, Homo sapien
tggaggttgttgtgtggacttaagt

SEQ ID NO: 294598 - DNA, 25 bp, Homo sapien
agccatcggactgtgaagagccccg

SEQ ID NO: 294599 - DNA, 25 bp, Homo sapien
aggccagtttggtgggaagcatact

SEQ ID NO: 294600 - DNA, 25 bp, Homo sapien
gctgacatttgaagtgacaaacctc

SEQ ID NO: 294601 - DNA, 25 bp, Homo sapien
tcatgtcaccaagggagacaaaggg

SEQ ID NO: 294602 - DNA, 25 bp, Homo sapien
ttttcactgctaggacaagctcagc

SEQ ID NO: 294603 - DNA, 25 bp, Homo sapien
cagagctctttgtaaaccgcagtca

SEQ ID NO: 294604 - DNA, 25 bp, Homo sapien
gttgtgtcacatgtgagcaagccca

SEQ ID NO: 294605 - DNA, 25 bp, Homo sapien
gctatcccaggtgatacagagctct

SEQ ID NO: 294606 - DNA, 25 bp, Homo sapien
tcaatgagacttggtatgggacagg

SEQ ID NO: 294607 - DNA, 25 bp, Homo sapien
gaaaacactacataggcctccaagg

SEQ ID NO: 294608 - DNA, 25 bp, Homo sapien
tacaatgcggatgcccaactgtttt

SEQ ID NO: 294609 - DNA, 25 bp, Homo sapien
ggtctccacctacttatacaatgcg

SEQ ID NO: 294610 - DNA, 25 bp, Homo sapien
cctgaatgtgggagcttcttccgct

SEQ ID NO: 294611 - DNA, 25 bp, Homo sapien
ggagaagaagtacccatgccctgaa

SEQ ID NO: 294612 - DNA, 25 bp, Homo sapien
tggtgacctctcagatgccagcgac

SEQ ID NO: 294613 - DNA, 25 bp, Homo sapien
atccagaaggtgcatgtccgggctc

SEQ ID NO: 294614 - DNA, 25 bp, Homo sapien
agctatctgactcctctgacttggg

SEQ ID NO: 294615 - DNA, 25 bp, Homo sapien
gaggcgaggctactattacactggc

SEQ ID NO: 294616 - DNA, 25 bp, Homo sapien
tctacccaggttgaggacctaatgg

SEQ ID NO: 294617 - DNA, 25 bp, Homo sapien
cacccagccgactgagtagtacaga

SEQ ID NO: 294618 - DNA, 25 bp, Homo sapien
acagtgggtatctcactccagggca

SEQ ID NO: 294619 - DNA, 25 bp, Homo sapien
tgatgagtcactatgggcctgtcac

SEQ ID NO: 294620 - DNA, 25 bp, Homo sapien
gcagtggcctccaggacaaaagtca

SEQ ID NO: 294621 - DNA, 25 bp, Homo sapien
gctttagggcactgccgagatccag

SEQ ID NO: 294622 - DNA, 25 bp, Homo sapien
tgggctgggcgtggggaggcgggaa

SEQ ID NO: 294623 - DNA, 25 bp, Homo sapien
ctgggctgggcgtggggaggcggga

SEQ ID NO: 294624 - DNA, 25 bp, Homo sapien
cctatggcaacaaaggcaagcgacc

SEQ ID NO: 294625 - DNA, 25 bp, Homo sapien
aagcgaccccttgctctgcactttg

SEQ ID NO: 294626 - DNA, 25 bp, Homo sapien
gcaccaggagcccatcctgaatggg

SEQ ID NO: 294627 - DNA, 25 bp, Homo sapien
ggagcagcgttccactgcgccagga

SEQ ID NO: 294628 - DNA, 25 bp, Homo sapien
gagaagccgatttgtggacagtgcc

SEQ ID NO: 294629 - DNA, 25 bp, Homo sapien
cacatggctcatgtggttgcagcca

SEQ ID NO: 294630 - DNA, 25 bp, Homo sapien
cctgggaatgctagccagagcggcc

SEQ ID NO: 294631 - DNA, 25 bp, Homo sapien
agagaggtatctcttgctggccgcg

SEQ ID NO: 294632 - DNA, 25 bp, Homo sapien
aattcttgtctaaccacatttctag

SEQ ID NO: 294633 - DNA, 25 bp, Homo sapien
gcatcctgctggctagaatcctgtg

SEQ ID NO: 294634 - DNA, 25 bp, Homo sapien
tacgaggattaagcaggcatcctgc

SEQ ID NO: 294635 - DNA, 25 bp, Homo sapien
tacctccatctcgtttgttgtccag

SEQ ID NO: 294636 - DNA, 25 bp, Homo sapien
tcctgacaggtagaagacgggatcc

SEQ ID NO: 294637 - DNA, 25 bp, Homo sapien
tggaacagtcccaagaaggccggat

SEQ ID NO: 294638 - DNA, 25 bp, Homo sapien
gatatctcgtggatcagactgaccg

SEQ ID NO: 294639 - DNA, 25 bp, Homo sapien
tatccttggacgcatggctgctgtg

SEQ ID NO: 294640 - DNA, 25 bp, Homo sapien
tagaatagtgcatgcggtgtgctgg

SEQ ID NO: 294641 - DNA, 25 bp, Homo sapien
ctatagaatagtgcatgcggtgtgc

SEQ ID NO: 294642 - DNA, 25 bp, Homo sapien
tctgtagcacaaagggtgttgggca

SEQ ID NO: 294643 - DNA, 25 bp, Homo sapien
tatagaatagtgcatgcggtgtgct

SEQ ID NO: 294644 - DNA, 25 bp, Homo sapien
caaggtaggtgaaaggagccgcaca

SEQ ID NO: 294645 - DNA, 25 bp, Homo sapien
gagccgcacacttgggagactctat

SEQ ID NO: 294646 - DNA, 25 bp, Homo sapien
gaaagacatgcttgttgacactctg

SEQ ID NO: 294647 - DNA, 25 bp, Homo sapien
tcatgtgccgaggtccacggtggaa

SEQ ID NO: 294648 - DNA, 25 bp, Homo sapien
ctcagatggcaggatggatgcattt

SEQ ID NO: 294649 - DNA, 25 bp, Homo sapien
ctgctactcagatggcaggatggat

SEQ ID NO: 294650 - DNA, 25 bp, Homo sapien
ctactcagatggcaggatggatgca

SEQ ID NO: 294651 - DNA, 25 bp, Homo sapien
gatggcaggatggatgcattttgca

SEQ ID NO: 294652 - DNA, 25 bp, Homo sapien
ggcagttccgttctagcacaaggta

SEQ ID NO: 294653 - DNA, 25 bp, Homo sapien
ctaggtaggctgtgctaacgtacac

SEQ ID NO: 294654 - DNA, 25 bp, Homo sapien
ttctaccttgacagcattgcatgcg

SEQ ID NO: 294655 - DNA, 25 bp, Homo sapien
cagtgttcagccacttaccttgagc

SEQ ID NO: 294656 - DNA, 25 bp, Homo sapien
tacagcaggctgtctaactaagcac

SEQ ID NO: 294657 - DNA, 25 bp, Homo sapien
aaagctgcttgagactacccctgag

SEQ ID NO: 294658 - DNA, 25 bp, Homo sapien
caagctgctcaatccttaggaagaa

SEQ ID NO: 294659 - DNA, 25 bp, Homo sapien
caggcatggcccttaattacagcag

SEQ ID NO: 294660 - DNA, 25 bp, Homo sapien
gcctgagacccctgcttttgggaga

SEQ ID NO: 294661 - DNA, 25 bp, Homo sapien
tcctccctgggtgactcggagtctt

SEQ ID NO: 294662 - DNA, 25 bp, Homo sapien
tggcctgttggctagcctgggcctc

SEQ ID NO: 294663 - DNA, 25 bp, Homo sapien
agggcctttacccagtggcctgttg

SEQ ID NO: 294664 - DNA, 25 bp, Homo sapien
gcccgctcgacctgcgagtgcgctt

SEQ ID NO: 294665 - DNA, 25 bp, Homo sapien
tccgaagggtggacgacgcccgctc

SEQ ID NO: 294666 - DNA, 25 bp, Homo sapien
ggcccggatccgcacccctcagttc

SEQ ID NO: 294667 - DNA, 25 bp, Homo sapien
tagccgccactctcagcgggcaggg

SEQ ID NO: 294668 - DNA, 25 bp, Homo sapien
ccctctctggtgtttgaagcaggga

SEQ ID NO: 294669 - DNA, 25 bp, Homo sapien
aatgtaccgggtgcagaagcagctc

SEQ ID NO: 294670 - DNA, 25 bp, Homo sapien
gtcgcaggcgacttctgggaatttc

SEQ ID NO: 294671 - DNA, 25 bp, Homo sapien
aagcagctccggaggttcggcctgt

SEQ ID NO: 294672 - DNA, 25 bp, Homo sapien
tgtacaactctagcgtggtagcatc

SEQ ID NO: 294673 - DNA, 25 bp, Homo sapien
ccgggcccgttcatttgcatgctaa

SEQ ID NO: 294674 - DNA, 25 bp, Homo sapien
gaagcgctcagtttggaaccgtgga

SEQ ID NO: 294675 - DNA, 25 bp, Homo sapien
ccgtggaaagtttggaacacatact

SEQ ID NO: 294676 - DNA, 25 bp, Homo sapien
accaggacacgaaaccagaaggcag

SEQ ID NO: 294677 - DNA, 25 bp, Homo sapien
gaggccaagtgactaagcaccagga

SEQ ID NO: 294678 - DNA, 25 bp, Homo sapien
gacagtgagtctgggcttagaacac

SEQ ID NO: 294679 - DNA, 25 bp, Homo sapien
tgtactatgccctagagcggaggtg

SEQ ID NO: 294680 - DNA, 25 bp, Homo sapien
tctagactacgggttccttgagggc

SEQ ID NO: 294681 - DNA, 25 bp, Homo sapien
caaggtgtggcctagaaatccggaa

SEQ ID NO: 294682 - DNA, 25 bp, Homo sapien
ttttgcaactggacagacgtgctgg

SEQ ID NO: 294683 - DNA, 25 bp, Homo sapien
aagtgacttcttaacgtgtacggag

SEQ ID NO: 294684 - DNA, 25 bp, Homo sapien
tcccagtgttaatctgcaacatatt

SEQ ID NO: 294685 - DNA, 25 bp, Homo sapien
aaaacacacttacctacagtcccag

SEQ ID NO: 294686 - DNA, 25 bp, Homo sapien
agtgaaagtggccccaaaacacact

SEQ ID NO: 294687 - DNA, 25 bp, Homo sapien
ggttgcaatgagttatgaactcatc

SEQ ID NO: 294688 - DNA, 25 bp, Homo sapien
cacctccagtagaaaacgcctcata

SEQ ID NO: 294689 - DNA, 25 bp, Homo sapien
gaaaacgcctcataaaagcagcact

SEQ ID NO: 294690 - DNA, 25 bp, Homo sapien
gcctcataaaagcagcactcgtcgc

SEQ ID NO: 294691 - DNA, 25 bp, Homo sapien
actcgtcgccccacaagctgtcttt

SEQ ID NO: 294692 - DNA, 25 bp, Homo sapien
tcacatgaatcttgcaaagtcaggt

SEQ ID NO: 294693 - DNA, 25 bp, Homo sapien
cctccccgagcgcgccgagggtcgc

SEQ ID NO: 294694 - DNA, 25 bp, Homo sapien
ctgggcctccccgagcgcgccgagg

SEQ ID NO: 294695 - DNA, 25 bp, Homo sapien
cccgagcgcgccgagggtcgcgcgc

SEQ ID NO: 294696 - DNA, 25 bp, Homo sapien
agcgcgccgagggtcgcgcgcagct

SEQ ID NO: 294697 - DNA, 25 bp, Homo sapien
gctactgcagcacgcaggcgcggta

SEQ ID NO: 294698 - DNA, 25 bp, Homo sapien
ggtcaccgcgagtcgcaaagcgtgg

SEQ ID NO: 294699 - DNA, 25 bp, Homo sapien
ggtacttcgaattaccgcgagagag

SEQ ID NO: 294700 - DNA, 25 bp, Homo sapien
ttaccgcgagagagttccgcgtagg

SEQ ID NO: 294701 - DNA, 25 bp, Homo sapien
ctctgcttctatctccgcgatctta

SEQ ID NO: 294702 - DNA, 25 bp, Homo sapien
tctgcttctatctccgcgatcttag

SEQ ID NO: 294703 - DNA, 25 bp, Homo sapien
tcgacgaagcttagcaagacgagcc

SEQ ID NO: 294704 - DNA, 25 bp, Homo sapien
tgagttctcgacgaagcttagcaag

SEQ ID NO: 294705 - DNA, 25 bp, Homo sapien
ttagcaagacgagccttaagcagcc

SEQ ID NO: 294706 - DNA, 25 bp, Homo sapien
gaagcttagcaagacgagccttaag

SEQ ID NO: 294707 - DNA, 25 bp, Homo sapien
atacccctgccaggttactaagcag

SEQ ID NO: 294708 - DNA, 25 bp, Homo sapien
cctcagaatatacccctgccaggtt

SEQ ID NO: 294709 - DNA, 25 bp, Homo sapien
gtagtgaattcataggctgccacct

SEQ ID NO: 294710 - DNA, 25 bp, Homo sapien
ttggcacctttgtatctgatgacac

SEQ ID NO: 294711 - DNA, 25 bp, Homo sapien
gcaatgacttgacgacctctacctt

SEQ ID NO: 294712 - DNA, 25 bp, Homo sapien
gagtcacagtatctggcctttttct

SEQ ID NO: 294713 - DNA, 25 bp, Homo sapien
ggtctcccaaactgccgagactgca

SEQ ID NO: 294714 - DNA, 25 bp, Homo sapien
aatagaaaaactggccggcgcagtg

SEQ ID NO: 294715 - DNA, 25 bp, Homo sapien
ccaaactgccgagactgcaggcatg

SEQ ID NO: 294716 - DNA, 25 bp, Homo sapien
ggtttcaggacatccagaacaatca

SEQ ID NO: 294717 - DNA, 25 bp, Homo sapien
gtcccaaaggtttcaggacatccag

SEQ ID NO: 294718 - DNA, 25 bp, Homo sapien
cccaaaggtttcaggacatccagaa

SEQ ID NO: 294719 - DNA, 25 bp, Homo sapien
caaaggtttcaggacatccagaaca

SEQ ID NO: 294720 - DNA, 25 bp, Homo sapien
gagaccgaagcaggagacagcttga

SEQ ID NO: 294721 - DNA, 25 bp, Homo sapien
acagcttgaggccaaaagttcaaga

SEQ ID NO: 294722 - DNA, 25 bp, Homo sapien
ccagcctgggcaacatggcaaatct

SEQ ID NO: 294723 - DNA, 25 bp, Homo sapien
tgggcaacatggcaaatctccgttt

SEQ ID NO: 294724 - DNA, 25 bp, Homo sapien
acctccacctcttgggttcgattct

SEQ ID NO: 294725 - DNA, 25 bp, Homo sapien
agctgagattacaagtgcgtgccac

SEQ ID NO: 294726 - DNA, 25 bp, Homo sapien
tgagattacaagtgcgtgccaccat

SEQ ID NO: 294727 - DNA, 25 bp, Homo sapien
cctccacctcttgggttcgattctc

SEQ ID NO: 294728 - DNA, 25 bp, Homo sapien
gcatcactacgtagagtcacatcgg

SEQ ID NO: 294729 - DNA, 25 bp, Homo sapien
cgtagagtcacatcggcattatgaa

SEQ ID NO: 294730 - DNA, 25 bp, Homo sapien
tcagctgtagcatcactacgtagag

SEQ ID NO: 294731 - DNA, 25 bp, Homo sapien
catcggcattatgaatcttgtattc

SEQ ID NO: 294732 - DNA, 25 bp, Homo sapien
ggtattagtctggagttgttgacag

SEQ ID NO: 294733 - DNA, 25 bp, Homo sapien
aaaacagggtattagtctggagttg

SEQ ID NO: 294734 - DNA, 25 bp, Homo sapien
tgacagaactgtcagactgttgaac

SEQ ID NO: 294735 - DNA, 25 bp, Homo sapien
agactgttgaacagcacaccctcac

SEQ ID NO: 294736 - DNA, 25 bp, Homo sapien
ttatagatgatatccaattcctcaa

SEQ ID NO: 294737 - DNA, 25 bp, Homo sapien
caccttatagatgatatccaattcc

SEQ ID NO: 294738 - DNA, 25 bp, Homo sapien
tgaggcaccttatagatgatatcca

SEQ ID NO: 294739 - DNA, 25 bp, Homo sapien
caatcttatttaacacatagataca

SEQ ID NO: 294740 - DNA, 25 bp, Homo sapien
tgtaatctggtaactggcctttggg

SEQ ID NO: 294741 - DNA, 25 bp, Homo sapien
gggatgtgtaatctggtaactggcc

SEQ ID NO: 294742 - DNA, 25 bp, Homo sapien
ggaagcaccactggggatgtgtaat

SEQ ID NO: 294743 - DNA, 25 bp, Homo sapien
cactggggatgtgtaatctggtaac

SEQ ID NO: 294744 - DNA, 25 bp, Homo sapien
tgggcaacaaaagcgagactgtctc

SEQ ID NO: 294745 - DNA, 25 bp, Homo sapien
aaaattagccgggtataatggtgtg

SEQ ID NO: 294746 - DNA, 25 bp, Homo sapien
gactgtctcaaaaaatgaaaaatta

SEQ ID NO: 294747 - DNA, 25 bp, Homo sapien
gccgggtataatggtgtgcacctgt

SEQ ID NO: 294748 - DNA, 25 bp, Homo sapien
gggcatgatcattatcttggctcgc

SEQ ID NO: 294749 - DNA, 25 bp, Homo sapien
ggcatgatcattatcttggctcgct

SEQ ID NO: 294750 - DNA, 25 bp, Homo sapien
gcatgatcattatcttggctcgctg

SEQ ID NO: 294751 - DNA, 25 bp, Homo sapien
gtgaataagacaccgagacctgcct

SEQ ID NO: 294752 - DNA, 25 bp, Homo sapien
tgggcctccaaacttaagaatatgt

SEQ ID NO: 294753 - DNA, 25 bp, Homo sapien
ttgatatgtcctcccgatttactgg

SEQ ID NO: 294754 - DNA, 25 bp, Homo sapien
ggtaatttatatccatgggcctcca

SEQ ID NO: 294755 - DNA, 25 bp, Homo sapien
agcttctgccctatttgcctggatg

SEQ ID NO: 294756 - DNA, 25 bp, Homo sapien
taacctagcttctgccctatttgcc

SEQ ID NO: 294757 - DNA, 25 bp, Homo sapien
tctgccctatttgcctggatgccac

SEQ ID NO: 294758 - DNA, 25 bp, Homo sapien
cagtgtaaataataacctagcttct

SEQ ID NO: 294759 - DNA, 25 bp, Homo sapien
ctccaacgtatggtctttacccact

SEQ ID NO: 294760 - DNA, 25 bp, Homo sapien
tcctccaacgtatggtctttaccca

SEQ ID NO: 294761 - DNA, 25 bp, Homo sapien
aaaaagcattttagtggcccaggtg

SEQ ID NO: 294762 - DNA, 25 bp, Homo sapien
cacaggtggaagctggaacgcagtc

SEQ ID NO: 294763 - DNA, 25 bp, Homo sapien
tcttgcaggcacgagatgagttcac

SEQ ID NO: 294764 - DNA, 25 bp, Homo sapien
caaaccctgatctgcctggtcggag

SEQ ID NO: 294765 - DNA, 25 bp, Homo sapien
gccttgtggctaataccaggatatc

SEQ ID NO: 294766 - DNA, 25 bp, Homo sapien
tcagagttctgagcttagacccact

SEQ ID NO: 294767 - DNA, 25 bp, Homo sapien
cttgagctttaaagaccccaacagg

SEQ ID NO: 294768 - DNA, 25 bp, Homo sapien
cctatagatagcatagccttgtggc

SEQ ID NO: 294769 - DNA, 25 bp, Homo sapien
atccaacagaggttcagcatccggc

SEQ ID NO: 294770 - DNA, 25 bp, Homo sapien
catccagggtgggttttcaatactg

SEQ ID NO: 294771 - DNA, 25 bp, Homo sapien
gaagtagcggtcatgtcatccaggg

SEQ ID NO: 294772 - DNA, 25 bp, Homo sapien
tactgttcctgcaaagtcagtggga

SEQ ID NO: 294773 - DNA, 25 bp, Homo sapien
ctcctaagtttaggcagtccaccca

SEQ ID NO: 294774 - DNA, 25 bp, Homo sapien
aagtctcactctgtctgcctggctg

SEQ ID NO: 294775 - DNA, 25 bp, Homo sapien
cagaagtctcactctgtctgcctgg

SEQ ID NO: 294776 - DNA, 25 bp, Homo sapien
gacagaagtctcactctgtctgcct

SEQ ID NO: 294777 - DNA, 25 bp, Homo sapien
gagacagaagtctcactctgtctgc

SEQ ID NO: 294778 - DNA, 25 bp, Homo sapien
ggagttcacaaattcggattcacca

SEQ ID NO: 294779 - DNA, 25 bp, Homo sapien
aaatatgttccagcagagatgatca

SEQ ID NO: 294780 - DNA, 25 bp, Homo sapien
ccagggcacacgaggtgatatagta

SEQ ID NO: 294781 - DNA, 25 bp, Homo sapien
gattttaatgaagcccctatattgg

SEQ ID NO: 294782 - DNA, 25 bp, Homo sapien
gactgagagctcttacaagactggg

SEQ ID NO: 294783 - DNA, 25 bp, Homo sapien
tgttcacaggcaacagcgagtgacc

SEQ ID NO: 294784 - DNA, 25 bp, Homo sapien
ggtgcctaatatctacatgccttgg

SEQ ID NO: 294785 - DNA, 25 bp, Homo sapien
tgatcgcacccaatggaatgcagct

SEQ ID NO: 294786 - DNA, 25 bp, Homo sapien
catctagtggaagggaaactacacc

SEQ ID NO: 294787 - DNA, 25 bp, Homo sapien
cattcaagtggctaggcaaaggcta

SEQ ID NO: 294788 - DNA, 25 bp, Homo sapien
tcacacagagctaaatgggcatagg

SEQ ID NO: 294789 - DNA, 25 bp, Homo sapien
gacactgctttggactttgacagct

SEQ ID NO: 294790 - DNA, 25 bp, Homo sapien
tcttcatcatggtattaggccttcc

SEQ ID NO: 294791 - DNA, 25 bp, Homo sapien
ttagtttcaggatgagtacggtggc

SEQ ID NO: 294792 - DNA, 25 bp, Homo sapien
gtttcaggatgagtacggtggctca

SEQ ID NO: 294793 - DNA, 25 bp, Homo sapien
ttgtttgtgatttgccttctctcaa

SEQ ID NO: 294794 - DNA, 25 bp, Homo sapien
aggacaagcgtttcagggtttgtct

SEQ ID NO: 294795 - DNA, 25 bp, Homo sapien
cttcaaggacaagcgtttcagggtt

SEQ ID NO: 294796 - DNA, 25 bp, Homo sapien
tcaaggacaagcgtttcagggtttg

SEQ ID NO: 294797 - DNA, 25 bp, Homo sapien
gggacttcaaggacaagcgtttcag

SEQ ID NO: 294798 - DNA, 25 bp, Homo sapien
ggaggataatctctgcccggacctt

SEQ ID NO: 294799 - DNA, 25 bp, Homo sapien
gtccttccagatccacgagagcgtg

SEQ ID NO: 294800 - DNA, 25 bp, Homo sapien
tcagccctcagagacggagctttgg

SEQ ID NO: 294801 - DNA, 25 bp, Homo sapien
cgtcttagcgataaggacctgcggg

SEQ ID NO: 294802 - DNA, 25 bp, Homo sapien
cgcctgctgtagtttattagttgac

SEQ ID NO: 294803 - DNA, 25 bp, Homo sapien
accattttgttgaagagacacttta

SEQ ID NO: 294804 - DNA, 25 bp, Homo sapien
ggccccaaatatagatttaagttca

SEQ ID NO: 294805 - DNA, 25 bp, Homo sapien
tatctaaccgttcaacaccattttg

SEQ ID NO: 294806 - DNA, 25 bp, Homo sapien
cactgggttggtttattaagagatt

SEQ ID NO: 294807 - DNA, 25 bp, Homo sapien
tgagccactgggttggtttattaag

SEQ ID NO: 294808 - DNA, 25 bp, Homo sapien
gccactgggttggtttattaagaga

SEQ ID NO: 294809 - DNA, 25 bp, Homo sapien
gagccactgggttggtttattaaga

SEQ ID NO: 294810 - DNA, 25 bp, Homo sapien
cactctgtgattagagcaataactc

SEQ ID NO: 294811 - DNA, 25 bp, Homo sapien
tgtaaagtcaacaacgaaaactgga

SEQ ID NO: 294812 - DNA, 25 bp, Homo sapien
tcagtgtgtaactagcttgctactc

SEQ ID NO: 294813 - DNA, 25 bp, Homo sapien
tgttcacttaagcatcacacctatg

SEQ ID NO: 294814 - DNA, 25 bp, Homo sapien
tttaatgcagcaaccagtactcgcg

SEQ ID NO: 294815 - DNA, 25 bp, Homo sapien
ccatgcaaatacagcggtcgtcgcg

SEQ ID NO: 294816 - DNA, 25 bp, Homo sapien
caaaacagctgaggttcgaacccgc

SEQ ID NO: 294817 - DNA, 25 bp, Homo sapien
gaggccattttagaaacacgaccga

SEQ ID NO: 294818 - DNA, 25 bp, Homo sapien
tatgtatcgcttcacaccaacgctg

SEQ ID NO: 294819 - DNA, 25 bp, Homo sapien
ggaaaattgcgttctcgggacttca

SEQ ID NO: 294820 - DNA, 25 bp, Homo sapien
taaggacagattcaggttaccggag

SEQ ID NO: 294821 - DNA, 25 bp, Homo sapien
tgaagttccaacaaagtaggcctct

SEQ ID NO: 294822 - DNA, 25 bp, Homo sapien
aagttttctgttgccaagattcaca

SEQ ID NO: 294823 - DNA, 25 bp, Homo sapien
acgaaaagttttctgttgccaagat

SEQ ID NO: 294824 - DNA, 25 bp, Homo sapien
taagaaacacactttattcagtaat

SEQ ID NO: 294825 - DNA, 25 bp, Homo sapien
ttttctgttgccaagattcacaaga

SEQ ID NO: 294826 - DNA, 25 bp, Homo sapien
gtatacggcgatccgggacctgctt

SEQ ID NO: 294827 - DNA, 25 bp, Homo sapien
cactaaagatgaggttccagctggg

SEQ ID NO: 294828 - DNA, 25 bp, Homo sapien
ggttgctacaacttgcacttggagg

SEQ ID NO: 294829 - DNA, 25 bp, Homo sapien
cctcagtcgggtaggtggcgcactt

SEQ ID NO: 294830 - DNA, 25 bp, Homo sapien
actgaggtccttgccgggctcactg

SEQ ID NO: 294831 - DNA, 25 bp, Homo sapien
ggctcactgccggaaaggccgagcc

SEQ ID NO: 294832 - DNA, 25 bp, Homo sapien
cggacagatttcaccgggctcggag

SEQ ID NO: 294833 - DNA, 25 bp, Homo sapien
ggaggaagcggaggctcggacagat

SEQ ID NO: 294834 - DNA, 25 bp, Homo sapien
cagacccgcaggtagacaacatcac

SEQ ID NO: 294835 - DNA, 25 bp, Homo sapien
cacagacccgcaggtagacaacatc

SEQ ID NO: 294836 - DNA, 25 bp, Homo sapien
acagacccgcaggtagacaacatca

SEQ ID NO: 294837 - DNA, 25 bp, Homo sapien
aagccgagaagacgcggcgggagag

SEQ ID NO: 294838 - DNA, 25 bp, Homo sapien
atgcggtgcccccagggcggaagac

SEQ ID NO: 294839 - DNA, 25 bp, Homo sapien
ggaagacaagaagccgagaagacgc

SEQ ID NO: 294840 - DNA, 25 bp, Homo sapien
gcgccctcttgtcgcacttcctcca

SEQ ID NO: 294841 - DNA, 25 bp, Homo sapien
tccaggtttgtttactgcgttactc

SEQ ID NO: 294842 - DNA, 25 bp, Homo sapien
gcgttactccctgcgggctcagtgg

SEQ ID NO: 294843 - DNA, 25 bp, Homo sapien
gaaacccctgatttggatccgcgca

SEQ ID NO: 294844 - DNA, 25 bp, Homo sapien
gtaaggtcgcccatataccagccct

SEQ ID NO: 294845 - DNA, 25 bp, Homo sapien
gcttaatcactttttgatggaaatt

SEQ ID NO: 294846 - DNA, 25 bp, Homo sapien
ttgtggcttgatatacacttctcag

SEQ ID NO: 294847 - DNA, 25 bp, Homo sapien
cattctctgcttaatcactttttga

SEQ ID NO: 294848 - DNA, 25 bp, Homo sapien
aaattgtggcttgatatacacttct

SEQ ID NO: 294849 - DNA, 25 bp, Homo sapien
tcttaaacgatacattttcccatac

SEQ ID NO: 294850 - DNA, 25 bp, Homo sapien
gtgttatggttacattgtttgtttc

SEQ ID NO: 294851 - DNA, 25 bp, Homo sapien
tcaaaatgatatcttaaacgataca

SEQ ID NO: 294852 - DNA, 25 bp, Homo sapien
tgatatcttaaacgatacattttcc

SEQ ID NO: 294853 - DNA, 25 bp, Homo sapien
cactgcagagatacttgaagtgaca

SEQ ID NO: 294854 - DNA, 25 bp, Homo sapien
caacctgctattagtgaagaagaag

SEQ ID NO: 294855 - DNA, 25 bp, Homo sapien
agatacttgaagtgacatcaaaggc

SEQ ID NO: 294856 - DNA, 25 bp, Homo sapien
tgtcattccacacattcgcaagtct

SEQ ID NO: 294857 - DNA, 25 bp, Homo sapien
gatgactggtactaggtaactccct

SEQ ID NO: 294858 - DNA, 25 bp, Homo sapien
cctgtcgggtacaagtatgtgtgcc

SEQ ID NO: 294859 - DNA, 25 bp, Homo sapien
cacgatactgcactagatgactggt

SEQ ID NO: 294860 - DNA, 25 bp, Homo sapien
gatgcgcagttctcttaaccggccc

SEQ ID NO: 294861 - DNA, 25 bp, Homo sapien
caaaagtcattcgaatccataaata

SEQ ID NO: 294862 - DNA, 25 bp, Homo sapien
ttccaaaagtcattcgaatccataa

SEQ ID NO: 294863 - DNA, 25 bp, Homo sapien
cattcgaatccataaatataagaac

SEQ ID NO: 294864 - DNA, 25 bp, Homo sapien
atataagaactttctggccacgcat

SEQ ID NO: 294865 - DNA, 25 bp, Homo sapien
tccattcttcgaagaccttccgtag

SEQ ID NO: 294866 - DNA, 25 bp, Homo sapien
ttccactcgtgctggaaaacccacc

SEQ ID NO: 294867 - DNA, 25 bp, Homo sapien
cgtagtaatcgctgctcatagtaaa

SEQ ID NO: 294868 - DNA, 25 bp, Homo sapien
cagtcagctcgaacacagagtttcc

SEQ ID NO: 294869 - DNA, 25 bp, Homo sapien
gctgctgacgcacataggtcttcca

SEQ ID NO: 294870 - DNA, 25 bp, Homo sapien
catgaacctcggctctaatgtactt

SEQ ID NO: 294871 - DNA, 25 bp, Homo sapien
gacgcacataggtcttccacgtctg

SEQ ID NO: 294872 - DNA, 25 bp, Homo sapien
acctcggctctaatgtacttgttcc

SEQ ID NO: 294873 - DNA, 25 bp, Homo sapien
ttctgcaaagtaaatgtgggcatct

SEQ ID NO: 294874 - DNA, 25 bp, Homo sapien
tctgcaaagtaaatgtgggcatctt

SEQ ID NO: 294875 - DNA, 25 bp, Homo sapien
gagttttaagggctcaaaccatgcc

SEQ ID NO: 294876 - DNA, 25 bp, Homo sapien
ggctcaaaccatgccatatggagaa

SEQ ID NO: 294877 - DNA, 25 bp, Homo sapien
gaaaaccatagggatcaatcataca

SEQ ID NO: 294878 - DNA, 25 bp, Homo sapien
ttcctttggcctagagttcctctct

SEQ ID NO: 294879 - DNA, 25 bp, Homo sapien
ccacgtagatcaaccaggacttcca

SEQ ID NO: 294880 - DNA, 25 bp, Homo sapien
tgcatctgaagtttggtcctacgaa

SEQ ID NO: 294881 - DNA, 25 bp, Homo sapien
ggacttccaggcctgtcgcatcttt

SEQ ID NO: 294882 - DNA, 25 bp, Homo sapien
cgttgcctaaactccagagctgtag

SEQ ID NO: 294883 - DNA, 25 bp, Homo sapien
acatagcaggaacacaactggcggt

SEQ ID NO: 294884 - DNA, 25 bp, Homo sapien
catagcaggaacacaactggcggtg

SEQ ID NO: 294885 - DNA, 25 bp, Homo sapien
tagcaggaacacaactggcggtgtg

SEQ ID NO: 294886 - DNA, 25 bp, Homo sapien
caggaacacaactggcggtgtgtag

SEQ ID NO: 294887 - DNA, 25 bp, Homo sapien
caacactatgagtgtactgtcaacc

SEQ ID NO: 294888 - DNA, 25 bp, Homo sapien
acactatgagtgtactgtcaaccca

SEQ ID NO: 294889 - DNA, 25 bp, Homo sapien
cactatgagtgtactgtcaacccac

SEQ ID NO: 294890 - DNA, 25 bp, Homo sapien
ctcaacactatgagtgtactgtcaa

SEQ ID NO: 294891 - DNA, 25 bp, Homo sapien
cttggtgaggtcaacgtcagctttc

SEQ ID NO: 294892 - DNA, 25 bp, Homo sapien
tccacatctgcacggagcttcttgt

SEQ ID NO: 294893 - DNA, 25 bp, Homo sapien
gtggtgcggtcctctatgggcctga

SEQ ID NO: 294894 - DNA, 25 bp, Homo sapien
acatctgcacggagcttcttgtcca

SEQ ID NO: 294895 - DNA, 25 bp, Homo sapien
agaagtggtgcggtcctctatgggc

SEQ ID NO: 294896 - DNA, 25 bp, Homo sapien
ctgtgaaacagcaaatcaaagatgg

SEQ ID NO: 294897 - DNA, 25 bp, Homo sapien
tgtgaaacagcaaatcaaagatgga

SEQ ID NO: 294898 - DNA, 25 bp, Homo sapien
gaaacagcaaatcaaagatggaatc

SEQ ID NO: 294899 - DNA, 25 bp, Homo sapien
acagcaaatcaaagatggaatccat

SEQ ID NO: 294900 - DNA, 25 bp, Homo sapien
gtcctagtcgctgcctccacgtgct

SEQ ID NO: 294901 - DNA, 25 bp, Homo sapien
agggccctgtgcttcaaagcagagg

SEQ ID NO: 294902 - DNA, 25 bp, Homo sapien
tcacacggacctgtcctagtcgctg

SEQ ID NO: 294903 - DNA, 25 bp, Homo sapien
gagggcacggctcacacggacctgt

SEQ ID NO: 294904 - DNA, 25 bp, Homo sapien
gaaatctccgtttttgccagtgctg

SEQ ID NO: 294905 - DNA, 25 bp, Homo sapien
gtctcttcactctgcggacttgcag

SEQ ID NO: 294906 - DNA, 25 bp, Homo sapien
tgcaggtattcaagccaggccttta

SEQ ID NO: 294907 - DNA, 25 bp, Homo sapien
acatacaggagctgttcccgccact

SEQ ID NO: 294908 - DNA, 25 bp, Homo sapien
cagaagtatatctggagcacagtga

SEQ ID NO: 294909 - DNA, 25 bp, Homo sapien
cagtgacatgatggaatcgctcagc

SEQ ID NO: 294910 - DNA, 25 bp, Homo sapien
ggcctgctgccagtcacagaagtat

SEQ ID NO: 294911 - DNA, 25 bp, Homo sapien
tgggcatggtgagcgtacaagctct

SEQ ID NO: 294912 - DNA, 25 bp, Homo sapien
gcgccgcagggccatcttcctggcc

SEQ ID NO: 294913 - DNA, 25 bp, Homo sapien
cagggccatcttcctggccagtttc

SEQ ID NO: 294914 - DNA, 25 bp, Homo sapien
tccagtgagtaaaggcgcgccgcag

SEQ ID NO: 294915 - DNA, 25 bp, Homo sapien
tttccagtgagtaaaggcgcgccgc

SEQ ID NO: 294916 - DNA, 25 bp, Homo sapien
taaggctgttttgaatcgtttggca

SEQ ID NO: 294917 - DNA, 25 bp, Homo sapien
gactgtcaacagagataaggctgtt

SEQ ID NO: 294918 - DNA, 25 bp, Homo sapien
tatataagcactctttttatacaca

SEQ ID NO: 294919 - DNA, 25 bp, Homo sapien
catgactttcgtttcacatgctgct

SEQ ID NO: 294920 - DNA, 25 bp, Homo sapien
gctcttctgccatctcaaactgggc

SEQ ID NO: 294921 - DNA, 25 bp, Homo sapien
gccatctcaaactgggcagcttctt

SEQ ID NO: 294922 - DNA, 25 bp, Homo sapien
tcttctgccatctcaaactgggcag

SEQ ID NO: 294923 - DNA, 25 bp, Homo sapien
tctgccatctcaaactgggcagctt

SEQ ID NO: 294924 - DNA, 25 bp, Homo sapien
aataatactaatgcctcaacactgg

SEQ ID NO: 294925 - DNA, 25 bp, Homo sapien
aatgcctcaacactgggcctggtgg

SEQ ID NO: 294926 - DNA, 25 bp, Homo sapien
atgataataatactaatgcctcaac

SEQ ID NO: 294927 - DNA, 25 bp, Homo sapien
atactaatgcctcaacactgggcct

SEQ ID NO: 294928 - DNA, 25 bp, Homo sapien
ttgtcttttagggctctaaagcaaa

SEQ ID NO: 294929 - DNA, 25 bp, Homo sapien
gatgagcgtgggtcacattgtcttt

SEQ ID NO: 294930 - DNA, 25 bp, Homo sapien
gagatgagcgtgggtcacattgtct

SEQ ID NO: 294931 - DNA, 25 bp, Homo sapien
ttcttatttgctggagatgagcgtg

SEQ ID NO: 294932 - DNA, 25 bp, Homo sapien
ctcaatctgagaccgccagaggttc

SEQ ID NO: 294933 - DNA, 25 bp, Homo sapien
agaccgccagaggttccagaacctg

SEQ ID NO: 294934 - DNA, 25 bp, Homo sapien
ccgccagaggttccagaacctgtgc

SEQ ID NO: 294935 - DNA, 25 bp, Homo sapien
ttctgctcaatctgagaccgccaga

SEQ ID NO: 294936 - DNA, 25 bp, Homo sapien
gccacaattcgatacatttgcacag

SEQ ID NO: 294937 - DNA, 25 bp, Homo sapien
tatactgtagccacaattcgataca

SEQ ID NO: 294938 - DNA, 25 bp, Homo sapien
tctgagtatactgtagccacaattc

SEQ ID NO: 294939 - DNA, 25 bp, Homo sapien
tgcttgtaccgcctcttctgagtat

SEQ ID NO: 294940 - DNA, 25 bp, Homo sapien
tgggtaacatggtggcaccccacct

SEQ ID NO: 294941 - DNA, 25 bp, Homo sapien
gaatacccatgaccctaccatcaag

SEQ ID NO: 294942 - DNA, 25 bp, Homo sapien
gaagccgacagtataatgaataccc

SEQ ID NO: 294943 - DNA, 25 bp, Homo sapien
gcaaacattcgccattctgcaaaga

SEQ ID NO: 294944 - DNA, 25 bp, Homo sapien
tggaacactcattttgaagctctga

SEQ ID NO: 294945 - DNA, 25 bp, Homo sapien
ggttaacattcccagttgagcccag

SEQ ID NO: 294946 - DNA, 25 bp, Homo sapien
ctttgagtcattctaatccaggatc

SEQ ID NO: 294947 - DNA, 25 bp, Homo sapien
tgaggctgatcttggagcagaaacc

SEQ ID NO: 294948 - DNA, 25 bp, Homo sapien
tctggctgggatagtgactgctctg

SEQ ID NO: 294949 - DNA, 25 bp, Homo sapien
ctggctgggatagtgactgctctga

SEQ ID NO: 294950 - DNA, 25 bp, Homo sapien
ctctgaccaatagcacatggtaaaa

SEQ ID NO: 294951 - DNA, 25 bp, Homo sapien
ctgctctgaccaatagcacatggta

SEQ ID NO: 294952 - DNA, 25 bp, Homo sapien
atgaccatccgctctggcctgtagc

SEQ ID NO: 294953 - DNA, 25 bp, Homo sapien
aatgaccatccgctctggcctgtag

SEQ ID NO: 294954 - DNA, 25 bp, Homo sapien
gaccatccgctctggcctgtagcag

SEQ ID NO: 294955 - DNA, 25 bp, Homo sapien
tgaccatccgctctggcctgtagca

SEQ ID NO: 294956 - DNA, 25 bp, Homo sapien
ctgtggaaacgtgttgctcttgcac

SEQ ID NO: 294957 - DNA, 25 bp, Homo sapien
actgaggacattttcctggtggcgc

SEQ ID NO: 294958 - DNA, 25 bp, Homo sapien
tggaaacgtgttgctcttgcactga

SEQ ID NO: 294959 - DNA, 25 bp, Homo sapien
gaggacattttcctggtggcgccat

SEQ ID NO: 294960 - DNA, 25 bp, Homo sapien
tcaactgggatttacacctcgaggc

SEQ ID NO: 294961 - DNA, 25 bp, Homo sapien
aattgcactacccactctcctgagt

SEQ ID NO: 294962 - DNA, 25 bp, Homo sapien
acagactggaattgcactacccact

SEQ ID NO: 294963 - DNA, 25 bp, Homo sapien
ctgcccttcaactgggatttacacc

SEQ ID NO: 294964 - DNA, 25 bp, Homo sapien
tgcgtgtcttcagtactgaagccat

SEQ ID NO: 294965 - DNA, 25 bp, Homo sapien
gtgcgtgtcttcagtactgaagcca

SEQ ID NO: 294966 - DNA, 25 bp, Homo sapien
gcgtgtcttcagtactgaagccatt

SEQ ID NO: 294967 - DNA, 25 bp, Homo sapien
ctgaagccatttagaaacgggtact

SEQ ID NO: 294968 - DNA, 25 bp, Homo sapien
ttctctctgccaggcggttttctcg

SEQ ID NO: 294969 - DNA, 25 bp, Homo sapien
ctgccaggcggttttctcgatgctg

SEQ ID NO: 294970 - DNA, 25 bp, Homo sapien
tctctgccaggcggttttctcgatg

SEQ ID NO: 294971 - DNA, 25 bp, Homo sapien
attctctctgccaggcggttttctc

SEQ ID NO: 294972 - DNA, 25 bp, Homo sapien
cctatacagaagctgtcgctctgcg

SEQ ID NO: 294973 - DNA, 25 bp, Homo sapien
agaaagctttcttgagccgcccgtg

SEQ ID NO: 294974 - DNA, 25 bp, Homo sapien
gtgccacatgaaccaagacctatac

SEQ ID NO: 294975 - DNA, 25 bp, Homo sapien
gaagctgtcgctctgcgtgaaggat

SEQ ID NO: 294976 - DNA, 25 bp, Homo sapien
ctggggtaatgcagtcctccagaca

SEQ ID NO: 294977 - DNA, 25 bp, Homo sapien
tctggggtaatgcagtcctccagac

SEQ ID NO: 294978 - DNA, 25 bp, Homo sapien
gccatgtggaattctgctgcccgca

SEQ ID NO: 294979 - DNA, 25 bp, Homo sapien
ctggctccaggcccaacgcaggagc

SEQ ID NO: 294980 - DNA, 25 bp, Homo sapien
gtggaattctgctgcccgcaccctg

SEQ ID NO: 294981 - DNA, 25 bp, Homo sapien
gggccatgtggaattctgctgcccg

SEQ ID NO: 294982 - DNA, 25 bp, Homo sapien
ggtctgctcgcatcagcttctgccg

SEQ ID NO: 294983 - DNA, 25 bp, Homo sapien
tggtgcaggtctgctcgcatcagct

SEQ ID NO: 294984 - DNA, 25 bp, Homo sapien
agcgccctgtgcagcacgctgtgct

SEQ ID NO: 294985 - DNA, 25 bp, Homo sapien
acccatgcctgcagcgccctgtgca

SEQ ID NO: 294986 - DNA, 25 bp, Homo sapien
gcagctgcctgttgtgctggctctc

SEQ ID NO: 294987 - DNA, 25 bp, Homo sapien
tggctgccacctcccggaggatgct

SEQ ID NO: 294988 - DNA, 25 bp, Homo sapien
cgcagcagctgcctgttgtgctggc

SEQ ID NO: 294989 - DNA, 25 bp, Homo sapien
cccggaggatgcttcgcaccctgcc

SEQ ID NO: 294990 - DNA, 25 bp, Homo sapien
tattccaccctgtctgaagagcggg

SEQ ID NO: 294991 - DNA, 25 bp, Homo sapien
ttaagacatgaaggcgaacccgtga

SEQ ID NO: 294992 - DNA, 25 bp, Homo sapien
taacagggcataaccaggcagtggc

SEQ ID NO: 294993 - DNA, 25 bp, Homo sapien
tattagcgactaggaacccgggatc

SEQ ID NO: 294994 - DNA, 25 bp, Homo sapien
taatgagtacttgcttgaaaggttt

SEQ ID NO: 294995 - DNA, 25 bp, Homo sapien
ggtccttctgtaatgagtacttgct

SEQ ID NO: 294996 - DNA, 25 bp, Homo sapien
cttggaacatatggtccttctgtaa

SEQ ID NO: 294997 - DNA, 25 bp, Homo sapien
tctctttccagcgacgtaatgcccc

SEQ ID NO: 294998 - DNA, 25 bp, Homo sapien
actagttcacttatgatgtgttatg

SEQ ID NO: 294999 - DNA, 25 bp, Homo sapien
ctaggttccttattcagttcaaatc

SEQ ID NO: 295000 - DNA, 25 bp, Homo sapien
ctggttctgataagaactagttcac

SEQ ID NO: 295001 - DNA, 25 bp, Homo sapien
catgtgcccacatggatgtttgtgt

SEQ ID NO: 295002 - DNA, 25 bp, Homo sapien
agtcctcctgctgtcggtaatacat

SEQ ID NO: 295003 - DNA, 25 bp, Homo sapien
taatacatctgcactgacacagctt

SEQ ID NO: 295004 - DNA, 25 bp, Homo sapien
tcctgctgtcggtaatacatctgca

SEQ ID NO: 295005 - DNA, 25 bp, Homo sapien
gctgtcggtaatacatctgcactga

SEQ ID NO: 295006 - DNA, 25 bp, Homo sapien
agatggtgcgtcttccaccgggcca

SEQ ID NO: 295007 - DNA, 25 bp, Homo sapien
gcagatggtgcgtcttccaccgggc

SEQ ID NO: 295008 - DNA, 25 bp, Homo sapien
atggtgcgtcttccaccgggccagc

SEQ ID NO: 295009 - DNA, 25 bp, Homo sapien
tgcagatggtgcgtcttccaccggg

SEQ ID NO: 295010 - DNA, 25 bp, Homo sapien
tgtgccagcagttgggtgctctgcc

SEQ ID NO: 295011 - DNA, 25 bp, Homo sapien
gttgtctccactggcggaagcaggt

SEQ ID NO: 295012 - DNA, 25 bp, Homo sapien
caggtccggctgagtctctgtgcca

SEQ ID NO: 295013 - DNA, 25 bp, Homo sapien
ctctgtgccagcagttgggtgctct

SEQ ID NO: 295014 - DNA, 25 bp, Homo sapien
gaaactggccttgaagtaactgttc

SEQ ID NO: 295015 - DNA, 25 bp, Homo sapien
tgaagtaactgttcttatgcagact

SEQ ID NO: 295016 - DNA, 25 bp, Homo sapien
aagtaactgttcttatgcagactgc

SEQ ID NO: 295017 - DNA, 25 bp, Homo sapien
taactgttcttatgcagactgcaga

SEQ ID NO: 295018 - DNA, 25 bp, Homo sapien
ggtgagatgctcaacacacgctcca

SEQ ID NO: 295019 - DNA, 25 bp, Homo sapien
tctgtggcctgaggaatgaccttca

SEQ ID NO: 295020 - DNA, 25 bp, Homo sapien
ctagggccagaaagaccagatcatt

SEQ ID NO: 295021 - DNA, 25 bp, Homo sapien
cacttcctccactaggaagggccag

SEQ ID NO: 295022 - DNA, 25 bp, Homo sapien
ggcccgcactgtcgcccgctgctcc

SEQ ID NO: 295023 - DNA, 25 bp, Homo sapien
cacagggcccgcactgtcgcccgct

SEQ ID NO: 295024 - DNA, 25 bp, Homo sapien
acagggcccgcactgtcgcccgctg

SEQ ID NO: 295025 - DNA, 25 bp, Homo sapien
agggcccgcactgtcgcccgctgct

SEQ ID NO: 295026 - DNA, 25 bp, Homo sapien
aggtctccctgcttagagctccccc

SEQ ID NO: 295027 - DNA, 25 bp, Homo sapien
ccaggtctccctgcttagagctccc

SEQ ID NO: 295028 - DNA, 25 bp, Homo sapien
gtctccctgcttagagctcccccac

SEQ ID NO: 295029 - DNA, 25 bp, Homo sapien
ccctgcttagagctcccccacagac

SEQ ID NO: 295030 - DNA, 25 bp, Homo sapien
ggaggccttcatgctggctgcaaag

SEQ ID NO: 295031 - DNA, 25 bp, Homo sapien
caaagcgcaggagccgcgtggcacc

SEQ ID NO: 295032 - DNA, 25 bp, Homo sapien
ctgctgccgggaggccttcatgctg

SEQ ID NO: 295033 - DNA, 25 bp, Homo sapien
tggtaggcctggagcgcccactgca

SEQ ID NO: 295034 - DNA, 25 bp, Homo sapien
ctctggtcagctcatgccacaccct

SEQ ID NO: 295035 - DNA, 25 bp, Homo sapien
tggtcagctcatgccacaccctgcc

SEQ ID NO: 295036 - DNA, 25 bp, Homo sapien
agcctctggtcagctcatgccacac

SEQ ID NO: 295037 - DNA, 25 bp, Homo sapien
tctggtcagctcatgccacaccctg

SEQ ID NO: 295038 - DNA, 25 bp, Homo sapien
tgtttccagagcgtggcacagcggc

SEQ ID NO: 295039 - DNA, 25 bp, Homo sapien
gacggcacgatggagactgtgagcc

SEQ ID NO: 295040 - DNA, 25 bp, Homo sapien
gcacagcggcggacggcacgatgga

SEQ ID NO: 295041 - DNA, 25 bp, Homo sapien
ctgtttccagagcgtggcacagcgg

SEQ ID NO: 295042 - DNA, 25 bp, Homo sapien
ggctgaggcttcccgccccggccca

SEQ ID NO: 295043 - DNA, 25 bp, Homo sapien
gccaggggctgaggcttcccgcccc

SEQ ID NO: 295044 - DNA, 25 bp, Homo sapien
ctgggtgcgatggctgccaggggct

SEQ ID NO: 295045 - DNA, 25 bp, Homo sapien
tttcctgctgggtgcgatggctgcc

SEQ ID NO: 295046 - DNA, 25 bp, Homo sapien
ttggtctcaagggtgccatccccag

SEQ ID NO: 295047 - DNA, 25 bp, Homo sapien
cccagcagcaatgcggttgagaagg

SEQ ID NO: 295048 - DNA, 25 bp, Homo sapien
gaagcctgtggcctcttggtctcaa

SEQ ID NO: 295049 - DNA, 25 bp, Homo sapien
cagccccagcagcaatgcggttgag

SEQ ID NO: 295050 - DNA, 25 bp, Homo sapien
cagctcagctgtgacaaggccgtga

SEQ ID NO: 295051 - DNA, 25 bp, Homo sapien
ggtgccagctcacacaagaaagagg

SEQ ID NO: 295052 - DNA, 25 bp, Homo sapien
caactacgtgtatgactccggaaaa

SEQ ID NO: 295053 - DNA, 25 bp, Homo sapien
ccggaaaagatcgtgtcagcaggac

SEQ ID NO: 295054 - DNA, 25 bp, Homo sapien
caaggctctcgggtagtgctggttg

SEQ ID NO: 295055 - DNA, 25 bp, Homo sapien
aggcccaaggctctcgggtagtgct

SEQ ID NO: 295056 - DNA, 25 bp, Homo sapien
cccgaggcccaaggctctcgggtag

SEQ ID NO: 295057 - DNA, 25 bp, Homo sapien
gacatctcccccgaggcccaaggct

SEQ ID NO: 295058 - DNA, 25 bp, Homo sapien
cgacaaaaggtacctgacgccaggg

SEQ ID NO: 295059 - DNA, 25 bp, Homo sapien
ggtcagtcaaacagtgaggagcaca

SEQ ID NO: 295060 - DNA, 25 bp, Homo sapien
gagacgttcaggatcccatcaaggt

SEQ ID NO: 295061 - DNA, 25 bp, Homo sapien
aacaaccctggtgacgctggtgtac

SEQ ID NO: 295062 - DNA, 25 bp, Homo sapien
tgaaagtcaggaaaggcgaggccaa

SEQ ID NO: 295063 - DNA, 25 bp, Homo sapien
ctgaaagtcaggaaaggcgaggcca

SEQ ID NO: 295064 - DNA, 25 bp, Homo sapien
aggcgaggccaaggtcagcaagtaa

SEQ ID NO: 295065 - DNA, 25 bp, Homo sapien
tcagcaagtaagctggggtgggcct

SEQ ID NO: 295066 - DNA, 25 bp, Homo sapien
tgagatctctgtgggatctccaatt

SEQ ID NO: 295067 - DNA, 25 bp, Homo sapien
tctgagatctctgtgggatctccaa

SEQ ID NO: 295068 - DNA, 25 bp, Homo sapien
aacatggggtctgttcccctgggct

SEQ ID NO: 295069 - DNA, 25 bp, Homo sapien
gggtctgagatctctgtgggatctc

SEQ ID NO: 295070 - DNA, 25 bp, Homo sapien
ctccaacaggaagtgtgggcgtcgc

SEQ ID NO: 295071 - DNA, 25 bp, Homo sapien
gcgcaggctccaacaggaagtgtgg

SEQ ID NO: 295072 - DNA, 25 bp, Homo sapien
cggctgcttcctcgctgagtgggca

SEQ ID NO: 295073 - DNA, 25 bp, Homo sapien
cttcctcgctgagtgggcagtgttg

SEQ ID NO: 295074 - DNA, 25 bp, Homo sapien
acatggaggtgcccgctgcctttgg

SEQ ID NO: 295075 - DNA, 25 bp, Homo sapien
tgccaaaacacaggccccacatgga

SEQ ID NO: 295076 - DNA, 25 bp, Homo sapien
ctgccaaaacacaggccccacatgg

SEQ ID NO: 295077 - DNA, 25 bp, Homo sapien
ggctgccaaaacacaggccccacat

SEQ ID NO: 295078 - DNA, 25 bp, Homo sapien
gcctaggccatgttcctgtggcttc

SEQ ID NO: 295079 - DNA, 25 bp, Homo sapien
taggccatgttcctgtggcttctga

SEQ ID NO: 295080 - DNA, 25 bp, Homo sapien
ggccatgttcctgtggcttctgagg

SEQ ID NO: 295081 - DNA, 25 bp, Homo sapien
gccatgttcctgtggcttctgaggc

SEQ ID NO: 295082 - DNA, 25 bp, Homo sapien
ctgccaggaagggccgcgtcaggga

SEQ ID NO: 295083 - DNA, 25 bp, Homo sapien
gggagggggctgctggctgagccat

SEQ ID NO: 295084 - DNA, 25 bp, Homo sapien
tgccaggaagggccgcgtcagggag

SEQ ID NO: 295085 - DNA, 25 bp, Homo sapien
caggaagggccgcgtcagggagggg

SEQ ID NO: 295086 - DNA, 25 bp, Homo sapien
ggccaggggcgcttgacagggcccc

SEQ ID NO: 295087 - DNA, 25 bp, Homo sapien
aggggcgcttgacagggccccaggc

SEQ ID NO: 295088 - DNA, 25 bp, Homo sapien
caggggcgcttgacagggccccagg

SEQ ID NO: 295089 - DNA, 25 bp, Homo sapien
cttcgggccaggggcgcttgacagg

SEQ ID NO: 295090 - DNA, 25 bp, Homo sapien
gggcctgtgcttgccgtcgggggct

SEQ ID NO: 295091 - DNA, 25 bp, Homo sapien
cagccgccccgcagggcatgaagga

SEQ ID NO: 295092 - DNA, 25 bp, Homo sapien
tgcagccgccccgcagggcatgaag

SEQ ID NO: 295093 - DNA, 25 bp, Homo sapien
ctccgggcctgtgcttgccgtcggg

SEQ ID NO: 295094 - DNA, 25 bp, Homo sapien
tgtcaaatggatgagtggcctccct

SEQ ID NO: 295095 - DNA, 25 bp, Homo sapien
agtactacttgcctggaccacgtgg

SEQ ID NO: 295096 - DNA, 25 bp, Homo sapien
ctttggtggccttagagcagctgtc

SEQ ID NO: 295097 - DNA, 25 bp, Homo sapien
cagaagtcagaccagagtgagagcc

SEQ ID NO: 295098 - DNA, 25 bp, Homo sapien
tccctaggagtagcccgctgtgctg

SEQ ID NO: 295099 - DNA, 25 bp, Homo sapien
ttatccctaggagtagcccgctgtg

SEQ ID NO: 295100 - DNA, 25 bp, Homo sapien
gcttatccctaggagtagcccgctg

SEQ ID NO: 295101 - DNA, 25 bp, Homo sapien
gggcttatccctaggagtagcccgc

SEQ ID NO: 295102 - DNA, 25 bp, Homo sapien
ttggtggtctggtagtgcagtagtt

SEQ ID NO: 295103 - DNA, 25 bp, Homo sapien
ctcaagttcagcctcaaggtccagg

SEQ ID NO: 295104 - DNA, 25 bp, Homo sapien
ggttctgcttggtggtctggtagtg

SEQ ID NO: 295105 - DNA, 25 bp, Homo sapien
gtctggtagtgcagtagttgctgct

SEQ ID NO: 295106 - DNA, 25 bp, Homo sapien
ggagaggcacctcagctaattctga

SEQ ID NO: 295107 - DNA, 25 bp, Homo sapien
gttgctgcatgttgaatggtcccca

SEQ ID NO: 295108 - DNA, 25 bp, Homo sapien
gcttgggagccaaacacttgttctt

SEQ ID NO: 295109 - DNA, 25 bp, Homo sapien
ctaagcagcactgagccgggtagag

SEQ ID NO: 295110 - DNA, 25 bp, Homo sapien
agccacctgcgcaggctgctcgctt

SEQ ID NO: 295111 - DNA, 25 bp, Homo sapien
tgcgcaggctgctcgcttgccgccg

SEQ ID NO: 295112 - DNA, 25 bp, Homo sapien
ggctgctcgcttgccgccgacagga

SEQ ID NO: 295113 - DNA, 25 bp, Homo sapien
tgcacctgctgctctacttcctggt

SEQ ID NO: 295114 - DNA, 25 bp, Homo sapien
agcacagcccggggcgtccccaggg

SEQ ID NO: 295115 - DNA, 25 bp, Homo sapien
ccccagggacacctggggatggcct

SEQ ID NO: 295116 - DNA, 25 bp, Homo sapien
ctggggccatggagggacaggcagg

SEQ ID NO: 295117 - DNA, 25 bp, Homo sapien
gggctgagagggagcacagcccggg

SEQ ID NO: 295118 - DNA, 25 bp, Homo sapien
gctggcgctgagcctggagctcctc

SEQ ID NO: 295119 - DNA, 25 bp, Homo sapien
ctggatgcgggcaacgcaggcgcca

SEQ ID NO: 295120 - DNA, 25 bp, Homo sapien
cgcagggcctggatgcgggcaacgc

SEQ ID NO: 295121 - DNA, 25 bp, Homo sapien
gcaggcgccaatgggctggcgctga

SEQ ID NO: 295122 - DNA, 25 bp, Homo sapien
agcacctgcgttcctggtgcgaaca

SEQ ID NO: 295123 - DNA, 25 bp, Homo sapien
gacagcccagcacctgcgttcctgg

SEQ ID NO: 295124 - DNA, 25 bp, Homo sapien
cacctgcgttcctggtgcgaacacg

SEQ ID NO: 295125 - DNA, 25 bp, Homo sapien
ccagcacctgcgttcctggtgcgaa

SEQ ID NO: 295126 - DNA, 25 bp, Homo sapien
gcttgtggctgaacgcatcaccctg

SEQ ID NO: 295127 - DNA, 25 bp, Homo sapien
tgctgcacagggtgaggtgcctcct

SEQ ID NO: 295128 - DNA, 25 bp, Homo sapien
cagagccacacagccttcgtgacaa

SEQ ID NO: 295129 - DNA, 25 bp, Homo sapien
tcccagtttatcaggaacgcaggcc

SEQ ID NO: 295130 - DNA, 25 bp, Homo sapien
gtcttgctgtgctaaggctggagag

SEQ ID NO: 295131 - DNA, 25 bp, Homo sapien
cttgctgtgctaaggctggagagta

SEQ ID NO: 295132 - DNA, 25 bp, Homo sapien
agccaccatgcacagccactaattt

SEQ ID NO: 295133 - DNA, 25 bp, Homo sapien
cactgtgccgggccagttttaggtt

SEQ ID NO: 295134 - DNA, 25 bp, Homo sapien
cagtgataataacaaagctagcagc

SEQ ID NO: 295135 - DNA, 25 bp, Homo sapien
ggcagcagccctaaaattaaacagt

SEQ ID NO: 295136 - DNA, 25 bp, Homo sapien
tataacactataaattgggtgcatc

SEQ ID NO: 295137 - DNA, 25 bp, Homo sapien
cctagagcagactcccataaataca

SEQ ID NO: 295138 - DNA, 25 bp, Homo sapien
taaaggcatggatgcccacggtcat

SEQ ID NO: 295139 - DNA, 25 bp, Homo sapien
ataaaggcatggatgcccacggtca

SEQ ID NO: 295140 - DNA, 25 bp, Homo sapien
tgtcaccacgcattgcaataattgg

SEQ ID NO: 295141 - DNA, 25 bp, Homo sapien
aacgcagatttcgaaggaggactcc

SEQ ID NO: 295142 - DNA, 25 bp, Homo sapien
caagtagctaggatcctgtgggcgt

SEQ ID NO: 295143 - DNA, 25 bp, Homo sapien
tacagttttcgataataattatccc

SEQ ID NO: 295144 - DNA, 25 bp, Homo sapien
tctgtttcaggaaggcaaaggccat

SEQ ID NO: 295145 - DNA, 25 bp, Homo sapien
ctctgtttcaggaaggcaaaggcca

SEQ ID NO: 295146 - DNA, 25 bp, Homo sapien
agcgaaaccgggcacttcctggtat

SEQ ID NO: 295147 - DNA, 25 bp, Homo sapien
gtattcggatatgcgcagcgccaag

SEQ ID NO: 295148 - DNA, 25 bp, Homo sapien
ccatattggaggaggctgctagtcc

SEQ ID NO: 295149 - DNA, 25 bp, Homo sapien
gggccatccgagaagctatccatat

SEQ ID NO: 295150 - DNA, 25 bp, Homo sapien
tggccagaagtgcagagtatccttt

SEQ ID NO: 295151 - DNA, 25 bp, Homo sapien
tccccgttgagctggccatctagtg

SEQ ID NO: 295152 - DNA, 25 bp, Homo sapien
tactgtataaaaacctggctaggga

SEQ ID NO: 295153 - DNA, 25 bp, Homo sapien
tcctggattcgtgtcagaaaagggc

SEQ ID NO: 295154 - DNA, 25 bp, Homo sapien
tctaccggaactgtcaaatgctgga

SEQ ID NO: 295155 - DNA, 25 bp, Homo sapien
caaaattgagtacaacggcttgggc

SEQ ID NO: 295156 - DNA, 25 bp, Homo sapien
tcattgtactctgggctcctacgtc

SEQ ID NO: 295157 - DNA, 25 bp, Homo sapien
tgacccagttgatcgctgcatggaa

SEQ ID NO: 295158 - DNA, 25 bp, Homo sapien
tcctggaaatggacctgaacgacat

SEQ ID NO: 295159 - DNA, 25 bp, Homo sapien
tgcacgtccatatgaaagttccgct

SEQ ID NO: 295160 - DNA, 25 bp, Homo sapien
gagggtcctctacttttactgctga

SEQ ID NO: 295161 - DNA, 25 bp, Homo sapien
gattattagaaacgtggcctaggga

SEQ ID NO: 295162 - DNA, 25 bp, Homo sapien
tcagacgaggtaagcacatgagact

SEQ ID NO: 295163 - DNA, 25 bp, Homo sapien
tccaggcatggaagctacatataac

SEQ ID NO: 295164 - DNA, 25 bp, Homo sapien
gatcgtctgtggcatgactttgacc

SEQ ID NO: 295165 - DNA, 25 bp, Homo sapien
tacatataacaccagcggcagtcag

SEQ ID NO: 295166 - DNA, 25 bp, Homo sapien
ccccaataggacaccatgaggagaa

SEQ ID NO: 295167 - DNA, 25 bp, Homo sapien
catagtctcgaagtatttccctaca

SEQ ID NO: 295168 - DNA, 25 bp, Homo sapien
tacaaaggtggaatagtaacttcac

SEQ ID NO: 295169 - DNA, 25 bp, Homo sapien
taacaccgtgataggacagtgcctc

SEQ ID NO: 295170 - DNA, 25 bp, Homo sapien
cgcccagcctaatcttttggattta

SEQ ID NO: 295171 - DNA, 25 bp, Homo sapien
gcccagcctaatcttttggatttaa

SEQ ID NO: 295172 - DNA, 25 bp, Homo sapien
accatgccccgccttggatttcacc

SEQ ID NO: 295173 - DNA, 25 bp, Homo sapien
gccccgccttggatttcaccatatt

SEQ ID NO: 295174 - DNA, 25 bp, Homo sapien
catatgaggggaattgctgaatcct

SEQ ID NO: 295175 - DNA, 25 bp, Homo sapien
tgagtagtgctgctaaagacatttg

SEQ ID NO: 295176 - DNA, 25 bp, Homo sapien
tgaatcctatggtaactctgtgctt

SEQ ID NO: 295177 - DNA, 25 bp, Homo sapien
ctatggtaactctgtgcttaaagga

SEQ ID NO: 295178 - DNA, 25 bp, Homo sapien
tctcgtctcggtggccgcaccactt

SEQ ID NO: 295179 - DNA, 25 bp, Homo sapien
ctcggtggccgcaccacttcctcat

SEQ ID NO: 295180 - DNA, 25 bp, Homo sapien
tctcgccgggcctccgtctcgtctc

SEQ ID NO: 295181 - DNA, 25 bp, Homo sapien
cgggcctccgtctcgtctcggtggc

SEQ ID NO: 295182 - DNA, 25 bp, Homo sapien
gcggcccgcgctgttccgcccctaa

SEQ ID NO: 295183 - DNA, 25 bp, Homo sapien
cctaagcctgaagcgcctactaggc

SEQ ID NO: 295184 - DNA, 25 bp, Homo sapien
taggcccgccccgaccgtgtagcgc

SEQ ID NO: 295185 - DNA, 25 bp, Homo sapien
ctgttccgcccctaagcctgaagcg

SEQ ID NO: 295186 - DNA, 25 bp, Homo sapien
gagggctggaccctctccaggttcc

SEQ ID NO: 295187 - DNA, 25 bp, Homo sapien
cgaagctctagagccccttcccgcc

SEQ ID NO: 295188 - DNA, 25 bp, Homo sapien
actgagggctggaccctctccaggt

SEQ ID NO: 295189 - DNA, 25 bp, Homo sapien
cttcccgcctctggccggggcactg

SEQ ID NO: 295190 - DNA, 25 bp, Homo sapien
ggggcagagaagtcatcttgcctcc

SEQ ID NO: 295191 - DNA, 25 bp, Homo sapien
ttggggcagagaagtcatcttgcct

SEQ ID NO: 295192 - DNA, 25 bp, Homo sapien
ccaaagcccttcttgtggatgacga

SEQ ID NO: 295193 - DNA, 25 bp, Homo sapien
agtttgtagacctttgttgttctca

SEQ ID NO: 295194 - DNA, 25 bp, Homo sapien
ggatgacgagtttgtagacctttgt

SEQ ID NO: 295195 - DNA, 25 bp, Homo sapien
ccttcttgtggatgacgagtttgta

SEQ ID NO: 295196 - DNA, 25 bp, Homo sapien
acctctaaagaccaatcgatactga

SEQ ID NO: 295197 - DNA, 25 bp, Homo sapien
aacctctaaagaccaatcgatactg

SEQ ID NO: 295198 - DNA, 25 bp, Homo sapien
aaacctctaaagaccaatcgatact

SEQ ID NO: 295199 - DNA, 25 bp, Homo sapien
cctctaaagaccaatcgatactgac

SEQ ID NO: 295200 - DNA, 25 bp, Homo sapien
ggttcacacttcctaaggcaagctg

SEQ ID NO: 295201 - DNA, 25 bp, Homo sapien
caatcagcataatgtactatagtct

SEQ ID NO: 295202 - DNA, 25 bp, Homo sapien
taatgtactatagtctggaactcct

SEQ ID NO: 295203 - DNA, 25 bp, Homo sapien
gctctgttcccaacctgaggtggtt

SEQ ID NO: 295204 - DNA, 25 bp, Homo sapien
gggtgtgcaatctctacaatgtctc

SEQ ID NO: 295205 - DNA, 25 bp, Homo sapien
ctttggggttcacaactagctcatc

SEQ ID NO: 295206 - DNA, 25 bp, Homo sapien
caatgtctccaagcttgatgtgagg

SEQ ID NO: 295207 - DNA, 25 bp, Homo sapien
agcttgatgtgagggaacactttgg

SEQ ID NO: 295208 - DNA, 25 bp, Homo sapien
ctgtaaatcttccttaagagacttg

SEQ ID NO: 295209 - DNA, 25 bp, Homo sapien
gtaaatcttccttaagagacttgac

SEQ ID NO: 295210 - DNA, 25 bp, Homo sapien
ccttctgtaaatcttccttaagaga

SEQ ID NO: 295211 - DNA, 25 bp, Homo sapien
ttctgtaaatcttccttaagagact

SEQ ID NO: 295212 - DNA, 25 bp, Homo sapien
cacttgagtcacagtctggtccaca

SEQ ID NO: 295213 - DNA, 25 bp, Homo sapien
cttagggtctacgacattaacatag

SEQ ID NO: 295214 - DNA, 25 bp, Homo sapien
cgacattaacatagacatcctgata

SEQ ID NO: 295215 - DNA, 25 bp, Homo sapien
catcctgataaggtctcagccggaa

SEQ ID NO: 295216 - DNA, 25 bp, Homo sapien
tatccccacggccaatatactgatc

SEQ ID NO: 295217 - DNA, 25 bp, Homo sapien
cttttctttagtcgccacatatccc

SEQ ID NO: 295218 - DNA, 25 bp, Homo sapien
cggccaatatactgatccttaaaag

SEQ ID NO: 295219 - DNA, 25 bp, Homo sapien
taattccactaggtcaagggtcaca

SEQ ID NO: 295220 - DNA, 25 bp, Homo sapien
tccaccttctgggtgatataggcac

SEQ ID NO: 295221 - DNA, 25 bp, Homo sapien
ccttctgggtgatataggcacatgt

SEQ ID NO: 295222 - DNA, 25 bp, Homo sapien
gggtgatataggcacatgtgctgac

SEQ ID NO: 295223 - DNA, 25 bp, Homo sapien
tctgggtgatataggcacatgtgct

SEQ ID NO: 295224 - DNA, 25 bp, Homo sapien
tatgattcaatacgtgcatctaggg

SEQ ID NO: 295225 - DNA, 25 bp, Homo sapien
taataagcctcaaactactatagtg

SEQ ID NO: 295226 - DNA, 25 bp, Homo sapien
ggtaacaaatcaggagccaatgtgc

SEQ ID NO: 295227 - DNA, 25 bp, Homo sapien
tgtaaaattacgagtctctatctcc

SEQ ID NO: 295228 - DNA, 25 bp, Homo sapien
ctttgatccagtgtagaaatactgt

SEQ ID NO: 295229 - DNA, 25 bp, Homo sapien
tccagtgtagaaatactgtaagtct

SEQ ID NO: 295230 - DNA, 25 bp, Homo sapien
gatccagtgtagaaatactgtaagt

SEQ ID NO: 295231 - DNA, 25 bp, Homo sapien
ttgatccagtgtagaaatactgtaa

SEQ ID NO: 295232 - DNA, 25 bp, Homo sapien
tcacgaagtcagcaaaagaaagtaa

SEQ ID NO: 295233 - DNA, 25 bp, Homo sapien
ggcattcacgaagtcagcaaaagaa

SEQ ID NO: 295234 - DNA, 25 bp, Homo sapien
tcaggcattcacgaagtcagcaaaa

SEQ ID NO: 295235 - DNA, 25 bp, Homo sapien
cacgaagtcagcaaaagaaagtaac

SEQ ID NO: 295236 - DNA, 25 bp, Homo sapien
gccatagtaaattcatgaggttcag

SEQ ID NO: 295237 - DNA, 25 bp, Homo sapien
gaatggccatagtaaattcatgagg

SEQ ID NO: 295238 - DNA, 25 bp, Homo sapien
gtaaattcatgaggttcagtggcat

SEQ ID NO: 295239 - DNA, 25 bp, Homo sapien
tacgtgaatggccatagtaaattca

SEQ ID NO: 295240 - DNA, 25 bp, Homo sapien
gaccttctcattcttaacccacagt

SEQ ID NO: 295241 - DNA, 25 bp, Homo sapien
tcttcactgatgtagccacacatga

SEQ ID NO: 295242 - DNA, 25 bp, Homo sapien
cactgatgtagccacacatgacctt

SEQ ID NO: 295243 - DNA, 25 bp, Homo sapien
gatgtagccacacatgaccttctca

SEQ ID NO: 295244 - DNA, 25 bp, Homo sapien
tagccgacgtagaacgaaacaccac

SEQ ID NO: 295245 - DNA, 25 bp, Homo sapien
aaatatgtaaaccatagccgacgta

SEQ ID NO: 295246 - DNA, 25 bp, Homo sapien
taaaccatagccgacgtagaacgaa

SEQ ID NO: 295247 - DNA, 25 bp, Homo sapien
tatgtaaaccatagccgacgtagaa

SEQ ID NO: 295248 - DNA, 25 bp, Homo sapien
cttctctaagcaattccctaagtaa

SEQ ID NO: 295249 - DNA, 25 bp, Homo sapien
cctaagtaaactgcttgcaacttct

SEQ ID NO: 295250 - DNA, 25 bp, Homo sapien
taagcaattccctaagtaaactgct

SEQ ID NO: 295251 - DNA, 25 bp, Homo sapien
caattccctaagtaaactgcttgca

SEQ ID NO: 295252 - DNA, 25 bp, Homo sapien
acttggtaaatagatcagcaaggaa

SEQ ID NO: 295253 - DNA, 25 bp, Homo sapien
cacttggtaaatagatcagcaagga

SEQ ID NO: 295254 - DNA, 25 bp, Homo sapien
ccacttggtaaatagatcagcaagg

SEQ ID NO: 295255 - DNA, 25 bp, Homo sapien
tgtttacataatgagacttagtgtg

SEQ ID NO: 295256 - DNA, 25 bp, Homo sapien
gcaaaagcaagcatacttaccttgt

SEQ ID NO: 295257 - DNA, 25 bp, Homo sapien
ctcataaattgagattattagggta

SEQ ID NO: 295258 - DNA, 25 bp, Homo sapien
taaaatagctcaatttagggcaatt

SEQ ID NO: 295259 - DNA, 25 bp, Homo sapien
gatatacaggaaaacacaacgggct

SEQ ID NO: 295260 - DNA, 25 bp, Homo sapien
aaatcagcacccttatctaatttta

SEQ ID NO: 295261 - DNA, 25 bp, Homo sapien
ttaattcacgggagtccaagagctc

SEQ ID NO: 295262 - DNA, 25 bp, Homo sapien
aattttagtgcaagtgatatacagg

SEQ ID NO: 295263 - DNA, 25 bp, Homo sapien
tcacttcatgactacagttcttctc

SEQ ID NO: 295264 - DNA, 25 bp, Homo sapien
caacagattttgcatcatagaaagt

SEQ ID NO: 295265 - DNA, 25 bp, Homo sapien
gaccactgtcacttcatgactacag

SEQ ID NO: 295266 - DNA, 25 bp, Homo sapien
agttctagaaaacaggaccactgtc

SEQ ID NO: 295267 - DNA, 25 bp, Homo sapien
tagagaaaacggagtatgtagttca

SEQ ID NO: 295268 - DNA, 25 bp, Homo sapien
tgaaatagagaaaacggagtatgta

SEQ ID NO: 295269 - DNA, 25 bp, Homo sapien
gaaaacggagtatgtagttcaggct

SEQ ID NO: 295270 - DNA, 25 bp, Homo sapien
aacggagtatgtagttcaggctgag

SEQ ID NO: 295271 - DNA, 25 bp, Homo sapien
aattgaggctcggtttatttcagga

SEQ ID NO: 295272 - DNA, 25 bp, Homo sapien
atagaatctccccttgtgatcctgt

SEQ ID NO: 295273 - DNA, 25 bp, Homo sapien
gatcctgtcgaattgaggctcggtt

SEQ ID NO: 295274 - DNA, 25 bp, Homo sapien
ccccttgtgatcctgtcgaattgag

SEQ ID NO: 295275 - DNA, 25 bp, Homo sapien
ctgttccagtcgcaccaacactgga

SEQ ID NO: 295276 - DNA, 25 bp, Homo sapien
tggttacgagaagtgaagtccattc

SEQ ID NO: 295277 - DNA, 25 bp, Homo sapien
tttaatggttacgagaagtgaagtc

SEQ ID NO: 295278 - DNA, 25 bp, Homo sapien
ccagtcgcaccaacactggatactg

SEQ ID NO: 295279 - DNA, 25 bp, Homo sapien
tgacagattgatggcctccaggtag

SEQ ID NO: 295280 - DNA, 25 bp, Homo sapien
tgtgctgaggtagaattatctcctt

SEQ ID NO: 295281 - DNA, 25 bp, Homo sapien
ccaggtagtttccttgtgctgaggt

SEQ ID NO: 295282 - DNA, 25 bp, Homo sapien
cattgaatgacagattgatggcctc

SEQ ID NO: 295283 - DNA, 25 bp, Homo sapien
tgcccagttcggtcaaagttgcggt

SEQ ID NO: 295284 - DNA, 25 bp, Homo sapien
gagtaggcggtccacttcaaagaca

SEQ ID NO: 295285 - DNA, 25 bp, Homo sapien
tccgctgcttggtcaggatcatgag

SEQ ID NO: 295286 - DNA, 25 bp, Homo sapien
caaagttgcggttgatgtagtgctt

SEQ ID NO: 295287 - DNA, 25 bp, Homo sapien
catgtaacggttgctctcccatgca

SEQ ID NO: 295288 - DNA, 25 bp, Homo sapien
ttgaacaatgggacagcatgtaacg

SEQ ID NO: 295289 - DNA, 25 bp, Homo sapien
caatgggacagcatgtaacggttgc

SEQ ID NO: 295290 - DNA, 25 bp, Homo sapien
catgcacaccaaatccacaccaatt

SEQ ID NO: 295291 - DNA, 25 bp, Homo sapien
tcatcgcccagacgagaatcacggg

SEQ ID NO: 295292 - DNA, 25 bp, Homo sapien
tggtttatccagtgagggatattat

SEQ ID NO: 295293 - DNA, 25 bp, Homo sapien
cacggggagcactccgattatggag

SEQ ID NO: 295294 - DNA, 25 bp, Homo sapien
atagtcatcgcccagacgagaatca

SEQ ID NO: 295295 - DNA, 25 bp, Homo sapien
ttctttcctgccagttttattcgtg

SEQ ID NO: 295296 - DNA, 25 bp, Homo sapien
tattcgtggggtgaaactattacaa

SEQ ID NO: 295297 - DNA, 25 bp, Homo sapien
tcctgccagttttattcgtggggtg

SEQ ID NO: 295298 - DNA, 25 bp, Homo sapien
ttattcgtggggtgaaactattaca

SEQ ID NO: 295299 - DNA, 25 bp, Homo sapien
cattttttgctttctcagaggcggg

SEQ ID NO: 295300 - DNA, 25 bp, Homo sapien
cggccattttttgctttctcagagg

SEQ ID NO: 295301 - DNA, 25 bp, Homo sapien
gccattttttgctttctcagaggcg

SEQ ID NO: 295302 - DNA, 25 bp, Homo sapien
atgtatcacggccattttttgcttt

SEQ ID NO: 295303 - DNA, 25 bp, Homo sapien
gatgggaagggcgttctcagattct

SEQ ID NO: 295304 - DNA, 25 bp, Homo sapien
gcagcctgaacacttgagcgtcata

SEQ ID NO: 295305 - DNA, 25 bp, Homo sapien
cataggcgtcataatctacttggat

SEQ ID NO: 295306 - DNA, 25 bp, Homo sapien
aagggcgttctcagattcttttgga

SEQ ID NO: 295307 - DNA, 25 bp, Homo sapien
taaacggagcctgaaaacagattcc

SEQ ID NO: 295308 - DNA, 25 bp, Homo sapien
tatttgagcacgtctgaacatttcc

SEQ ID NO: 295309 - DNA, 25 bp, Homo sapien
catccaaaatttaaacgtgggagag

SEQ ID NO: 295310 - DNA, 25 bp, Homo sapien
gaaagaagccctatagagaagcaaa

SEQ ID NO: 295311 - DNA, 25 bp, Homo sapien
acattatgcagccaaagtcctagga

SEQ ID NO: 295312 - DNA, 25 bp, Homo sapien
ggtacttcacccttaacagcttgag

SEQ ID NO: 295313 - DNA, 25 bp, Homo sapien
tgtgatctacaagtgggaaacctgt

SEQ ID NO: 295314 - DNA, 25 bp, Homo sapien
taccatcaagcgagggatgctgtcc

SEQ ID NO: 295315 - DNA, 25 bp, Homo sapien
cgagtgctggtgtatcccaaggagc

SEQ ID NO: 295316 - DNA, 25 bp, Homo sapien
ggagctggcactctttcgactgtga

SEQ ID NO: 295317 - DNA, 25 bp, Homo sapien
tcttgcctagggagctgtcgtcaga

SEQ ID NO: 295318 - DNA, 25 bp, Homo sapien
ttcctcagtgggcagtgtgcggctt

SEQ ID NO: 295319 - DNA, 25 bp, Homo sapien
tgcggtaacattggttcatgcctgt

SEQ ID NO: 295320 - DNA, 25 bp, Homo sapien
tccattaacatatggaaaggcatac

SEQ ID NO: 295321 - DNA, 25 bp, Homo sapien
taacatatggaaaggcatacagtta

SEQ ID NO: 295322 - DNA, 25 bp, Homo sapien
ataatagaggcagggtgcggtaaca

SEQ ID NO: 295323 - DNA, 25 bp, Homo sapien
ggtgcagatcctctggtcattgagc

SEQ ID NO: 295324 - DNA, 25 bp, Homo sapien
tgctgcctgatgtaaagagctcatg

SEQ ID NO: 295325 - DNA, 25 bp, Homo sapien
aggtgcagatcctctggtcattgag

SEQ ID NO: 295326 - DNA, 25 bp, Homo sapien
cctgatgtaaagagctcatggtcag

SEQ ID NO: 295327 - DNA, 25 bp, Homo sapien
tctgttggacgtaagcttcatgggc

SEQ ID NO: 295328 - DNA, 25 bp, Homo sapien
catggattctgcactgccaacgtga

SEQ ID NO: 295329 - DNA, 25 bp, Homo sapien
caccaggtcgaacatgcagcatgga

SEQ ID NO: 295330 - DNA, 25 bp, Homo sapien
caggaaaagtgtgcatccagcgcct

SEQ ID NO: 295331 - DNA, 25 bp, Homo sapien
agtgagttggatccctctgcccgct

SEQ ID NO: 295332 - DNA, 25 bp, Homo sapien
gccatattctgtcgggtctggtggt

SEQ ID NO: 295333 - DNA, 25 bp, Homo sapien
atgatatgctaactccagcagctct

SEQ ID NO: 295334 - DNA, 25 bp, Homo sapien
cgctgccttgtagctccgccatatt

SEQ ID NO: 295335 - DNA, 25 bp, Homo sapien
caccactgttgctaagcaggccgac

SEQ ID NO: 295336 - DNA, 25 bp, Homo sapien
agcaggccgacagaaagctcctctg

SEQ ID NO: 295337 - DNA, 25 bp, Homo sapien
cgtcaccaggctggcgggaattgct

SEQ ID NO: 295338 - DNA, 25 bp, Homo sapien
tcaagaaggacatgccgtcaccagg

SEQ ID NO: 295339 - DNA, 25 bp, Homo sapien
gagaatccttattctgggtcctagg

SEQ ID NO: 295340 - DNA, 25 bp, Homo sapien
agagaatccttattctgggtcctag

SEQ ID NO: 295341 - DNA, 25 bp, Homo sapien
tagagaatccttattctgggtccta

SEQ ID NO: 295342 - DNA, 25 bp, Homo sapien
tctagagaatccttattctgggtcc

SEQ ID NO: 295343 - DNA, 25 bp, Homo sapien
tgaaggccagctctggaccagcatg

SEQ ID NO: 295344 - DNA, 25 bp, Homo sapien
ggagatatcattaggcagttaaggg

SEQ ID NO: 295345 - DNA, 25 bp, Homo sapien
taaatgattccagttaacagcctat

SEQ ID NO: 295346 - DNA, 25 bp, Homo sapien
caaatatttcaactacaggcaggta

SEQ ID NO: 295347 - DNA, 25 bp, Homo sapien
tacgaagccgaaaaactctgagcgt

SEQ ID NO: 295348 - DNA, 25 bp, Homo sapien
cagtggcatcccctagctgtgaaaa

SEQ ID NO: 295349 - DNA, 25 bp, Homo sapien
caaagaagggagcaatacgaagccg

SEQ ID NO: 295350 - DNA, 25 bp, Homo sapien
ccctggttgagcttcactgagttaa

SEQ ID NO: 295351 - DNA, 25 bp, Homo sapien
cagggggaaaaggtacatgtggtca

SEQ ID NO: 295352 - DNA, 25 bp, Homo sapien
tggtcaccatggcaagtgtgggatg

SEQ ID NO: 295353 - DNA, 25 bp, Homo sapien
ggtcaccatggcaagtgtgggatgg

SEQ ID NO: 295354 - DNA, 25 bp, Homo sapien
tacagggggagcagacagtgtcaga

SEQ ID NO: 295355 - DNA, 25 bp, Homo sapien
ctacagggggagcagacagtgtcag

SEQ ID NO: 295356 - DNA, 25 bp, Homo sapien
acagggggagcagacagtgtcagaa

SEQ ID NO: 295357 - DNA, 25 bp, Homo sapien
ggagatcataacagccctctgtgta

SEQ ID NO: 295358 - DNA, 25 bp, Homo sapien
tccaactgtgcaacagaagcctggc

SEQ ID NO: 295359 - DNA, 25 bp, Homo sapien
ctggcggtcagggaagtagtcggtg

SEQ ID NO: 295360 - DNA, 25 bp, Homo sapien
tgagagacttccagtccactccaac

SEQ ID NO: 295361 - DNA, 25 bp, Homo sapien
tgtgggatatatccgaaaccctcac

SEQ ID NO: 295362 - DNA, 25 bp, Homo sapien
ggatatatccgaaaccctcaccaac

SEQ ID NO: 295363 - DNA, 25 bp, Homo sapien
ccagtgttctgatgcatgtgtggga

SEQ ID NO: 295364 - DNA, 25 bp, Homo sapien
tgcatgtgtgggatatatccgaaac

SEQ ID NO: 295365 - DNA, 25 bp, Homo sapien
aatatatgtgttgctgaagccagca

SEQ ID NO: 295366 - DNA, 25 bp, Homo sapien
ttttaatatatgtgttgctgaagcc

SEQ ID NO: 295367 - DNA, 25 bp, Homo sapien
ttaatatatgtgttgctgaagccag

SEQ ID NO: 295368 - DNA, 25 bp, Homo sapien
aattttaatatatgtgttgctgaag

SEQ ID NO: 295369 - DNA, 25 bp, Homo sapien
tatagagtgggctactgctcagcgg

SEQ ID NO: 295370 - DNA, 25 bp, Homo sapien
tgagacgttggcaaataaactcttc

SEQ ID NO: 295371 - DNA, 25 bp, Homo sapien
tatgatttggtagccctgcatgaga

SEQ ID NO: 295372 - DNA, 25 bp, Homo sapien
tgtcttgggctgcactatgatttgg

SEQ ID NO: 295373 - DNA, 25 bp, Homo sapien
aaccaaccaggagcagattagagcc

SEQ ID NO: 295374 - DNA, 25 bp, Homo sapien
ggcacactcaaagctgaacaacctg

SEQ ID NO: 295375 - DNA, 25 bp, Homo sapien
tcgaggttctcactccaaggtggca

SEQ ID NO: 295376 - DNA, 25 bp, Homo sapien
caaaaaactcctgaggttggcagat

SEQ ID NO: 295377 - DNA, 25 bp, Homo sapien
taatttcctccatctgtttgaagct

SEQ ID NO: 295378 - DNA, 25 bp, Homo sapien
tcctccatctgtttgaagctcattc

SEQ ID NO: 295379 - DNA, 25 bp, Homo sapien
atttcctccatctgtttgaagctca

SEQ ID NO: 295380 - DNA, 25 bp, Homo sapien
aataataatttcctccatctgtttg

SEQ ID NO: 295381 - DNA, 25 bp, Homo sapien
tcctcagggcggtttcgggacacaa

SEQ ID NO: 295382 - DNA, 25 bp, Homo sapien
ggaaggtatcgcgtcactgtgatca

SEQ ID NO: 295383 - DNA, 25 bp, Homo sapien
actgtgatcatcttatccttcagcg

SEQ ID NO: 295384 - DNA, 25 bp, Homo sapien
cactttgtggaacgttctgcccata

SEQ ID NO: 295385 - DNA, 25 bp, Homo sapien
gacgaactctgagtctgagtgggaa

SEQ ID NO: 295386 - DNA, 25 bp, Homo sapien
gccggcagaacagatatactgatct

SEQ ID NO: 295387 - DNA, 25 bp, Homo sapien
tactgatctaagtaattccacttgt

SEQ ID NO: 295388 - DNA, 25 bp, Homo sapien
tccagccgttcgtgggagaattcca

SEQ ID NO: 295389 - DNA, 25 bp, Homo sapien
ggagttgccactcgtcctcgtctgc

SEQ ID NO: 295390 - DNA, 25 bp, Homo sapien
gcaggaagcgggtcctccagaactt

SEQ ID NO: 295391 - DNA, 25 bp, Homo sapien
gcatcatgcgatccgagcgatgccg

SEQ ID NO: 295392 - DNA, 25 bp, Homo sapien
gatgccgcctgcgaatgcgattcaa

SEQ ID NO: 295393 - DNA, 25 bp, Homo sapien
ggaaatgggcccagtcatctgcaag

SEQ ID NO: 295394 - DNA, 25 bp, Homo sapien
agttgactccagagaatgcgtggaa

SEQ ID NO: 295395 - DNA, 25 bp, Homo sapien
cagagaatgcgtggaaatgggccca

SEQ ID NO: 295396 - DNA, 25 bp, Homo sapien
agagagctgaggttcccttcttccc

SEQ ID NO: 295397 - DNA, 25 bp, Homo sapien
catatacaatctatacaatccagat

SEQ ID NO: 295398 - DNA, 25 bp, Homo sapien
tacaatccagatttttatatggaat

SEQ ID NO: 295399 - DNA, 25 bp, Homo sapien
accatgcccagtgatacggtttggc

SEQ ID NO: 295400 - DNA, 25 bp, Homo sapien
aattcatatacaatctatacaatcc

SEQ ID NO: 295401 - DNA, 25 bp, Homo sapien
tgctctcggctgactgggcggagct

SEQ ID NO: 295402 - DNA, 25 bp, Homo sapien
ggagtcatggcaacgctgctgctct

SEQ ID NO: 295403 - DNA, 25 bp, Homo sapien
gggagtcatggcaacgctgctgctc

SEQ ID NO: 295404 - DNA, 25 bp, Homo sapien
ctgctgctctcggctgactgggcgg

SEQ ID NO: 295405 - DNA, 25 bp, Homo sapien
cagacggccaaatacaaagctcagg

SEQ ID NO: 295406 - DNA, 25 bp, Homo sapien
tgaaggaaaaccagacggccaaata

SEQ ID NO: 295407 - DNA, 25 bp, Homo sapien
aagagcgagctctggtggaagctac

SEQ ID NO: 295408 - DNA, 25 bp, Homo sapien
cagtagctttctattcccctctggg

SEQ ID NO: 295409 - DNA, 25 bp, Homo sapien
ggacgatgctgtgcgtgggctgcgg

SEQ ID NO: 295410 - DNA, 25 bp, Homo sapien
ctgagggtagaaggcggacgatgct

SEQ ID NO: 295411 - DNA, 25 bp, Homo sapien
gctgtgcgtgggctgcggacaaact

SEQ ID NO: 295412 - DNA, 25 bp, Homo sapien
gaaggcggacgatgctgtgcgtggg

SEQ ID NO: 295413 - DNA, 25 bp, Homo sapien
gacagagtctagctatgttgcctcg

SEQ ID NO: 295414 - DNA, 25 bp, Homo sapien
tctagctatgttgcctcggctgatc

SEQ ID NO: 295415 - DNA, 25 bp, Homo sapien
caccatacctgacttttttttgtgt

SEQ ID NO: 295416 - DNA, 25 bp, Homo sapien
cagagtctagctatgttgcctcggc

SEQ ID NO: 295417 - DNA, 25 bp, Homo sapien
taggagtggctgtttggtccacaga

SEQ ID NO: 295418 - DNA, 25 bp, Homo sapien
tgcatatgcccaaactggtgccgtc

SEQ ID NO: 295419 - DNA, 25 bp, Homo sapien
ggctgttgcctctgtccatggattg

SEQ ID NO: 295420 - DNA, 25 bp, Homo sapien
tggtgccgtccaacataggagtggc

SEQ ID NO: 295421 - DNA, 25 bp, Homo sapien
cacttcctatggagccagaaaccag

SEQ ID NO: 295422 - DNA, 25 bp, Homo sapien
gcaaagcaagatggcacgtatgcag

SEQ ID NO: 295423 - DNA, 25 bp, Homo sapien
caagagcacgaatattaggaacagt

SEQ ID NO: 295424 - DNA, 25 bp, Homo sapien
atatacacatttagggccgggtttg

SEQ ID NO: 295425 - DNA, 25 bp, Homo sapien
gatgaggtcaaggagcttgccacca

SEQ ID NO: 295426 - DNA, 25 bp, Homo sapien
caggatctctgtcagggtagaggat

SEQ ID NO: 295427 - DNA, 25 bp, Homo sapien
ggtgcttcatggcttccaggatctc

SEQ ID NO: 295428 - DNA, 25 bp, Homo sapien
ttccaggatctctgtcagggtagag

SEQ ID NO: 295429 - DNA, 25 bp, Homo sapien
tggatcccctccacgtggttcacca

SEQ ID NO: 295430 - DNA, 25 bp, Homo sapien
aagcagtacggtgagaggcccttct

SEQ ID NO: 295431 - DNA, 25 bp, Homo sapien
tgaagcagtacggtgagaggccctt

SEQ ID NO: 295432 - DNA, 25 bp, Homo sapien
ccagtgtaccacctccgcgctgatg

SEQ ID NO: 295433 - DNA, 25 bp, Homo sapien
gtcgggctctttgtccgttactatc

SEQ ID NO: 295434 - DNA, 25 bp, Homo sapien
gcttcgccagatgcatgtgtgatga

SEQ ID NO: 295435 - DNA, 25 bp, Homo sapien
tactatcttgtagaaatagaagccg

SEQ ID NO: 295436 - DNA, 25 bp, Homo sapien
atgaaggtccgccaggcttcgccag

SEQ ID NO: 295437 - DNA, 25 bp, Homo sapien
tggtctgaatctggggtgcctccag

SEQ ID NO: 295438 - DNA, 25 bp, Homo sapien
agtcagctctgaccacgctaaaaaa

SEQ ID NO: 295439 - DNA, 25 bp, Homo sapien
atgctggtctgaatctggggtgcct

SEQ ID NO: 295440 - DNA, 25 bp, Homo sapien
cagctctgaccacgctaaaaaagtt

SEQ ID NO: 295441 - DNA, 25 bp, Homo sapien
tcagtttcatacctcaaatttcaga

SEQ ID NO: 295442 - DNA, 25 bp, Homo sapien
gaatatataacagtaacctggtatg

SEQ ID NO: 295443 - DNA, 25 bp, Homo sapien
gccatattcttggacaagagagcat

SEQ ID NO: 295444 - DNA, 25 bp, Homo sapien
gataggtatctactggtcaaatgta

SEQ ID NO: 295445 - DNA, 25 bp, Homo sapien
aagctggcgaagtcgtccactcctg

SEQ ID NO: 295446 - DNA, 25 bp, Homo sapien
tcagagtgcacgagctcttctgcca

SEQ ID NO: 295447 - DNA, 25 bp, Homo sapien
ttgcataggaggctggccggctagg

SEQ ID NO: 295448 - DNA, 25 bp, Homo sapien
aaaccacttgcgctggaagctggcg

SEQ ID NO: 295449 - DNA, 25 bp, Homo sapien
cttcggctaaaggagctgtgcctac

SEQ ID NO: 295450 - DNA, 25 bp, Homo sapien
ccaaaacttcggctaaaggagctgt

SEQ ID NO: 295451 - DNA, 25 bp, Homo sapien
tggctccgtcctccaaaacttcggc

SEQ ID NO: 295452 - DNA, 25 bp, Homo sapien
aaaacttcggctaaaggagctgtgc

SEQ ID NO: 295453 - DNA, 25 bp, Homo sapien
cttgacagtttaaagaaggagctcc

SEQ ID NO: 295454 - DNA, 25 bp, Homo sapien
cagaaaccggagtaagagaacgcct

SEQ ID NO: 295455 - DNA, 25 bp, Homo sapien
aaattcattttttagccgggcatgg

SEQ ID NO: 295456 - DNA, 25 bp, Homo sapien
ggcagagccctagtacttgacagtt

SEQ ID NO: 295457 - DNA, 25 bp, Homo sapien
ggtaataacagctgcaccactccag

SEQ ID NO: 295458 - DNA, 25 bp, Homo sapien
cagccggtctgtgcggttgttcacg

SEQ ID NO: 295459 - DNA, 25 bp, Homo sapien
catctcgaagagtactgctgcggtc

SEQ ID NO: 295460 - DNA, 25 bp, Homo sapien
tccagtgcagcttgatctcaaaggc

SEQ ID NO: 295461 - DNA, 25 bp, Homo sapien
aatgatcccgggtggcaaaatccgc

SEQ ID NO: 295462 - DNA, 25 bp, Homo sapien
aatccgcccaggtaaagaaccactg

SEQ ID NO: 295463 - DNA, 25 bp, Homo sapien
ctcccaaggcgtgaacctccgtgcc

SEQ ID NO: 295464 - DNA, 25 bp, Homo sapien
tccagcccttaaaaacaacgaggca

SEQ ID NO: 295465 - DNA, 25 bp, Homo sapien
taactgggcagtgcaaaaggcccct

SEQ ID NO: 295466 - DNA, 25 bp, Homo sapien
caaaactgggactaacaagaagcca

SEQ ID NO: 295467 - DNA, 25 bp, Homo sapien
gtggctttccgatgccaaccttgga

SEQ ID NO: 295468 - DNA, 25 bp, Homo sapien
gggtcgccatacaggtaactgggca

SEQ ID NO: 295469 - DNA, 25 bp, Homo sapien
agacaacctccagaagggaatattt

SEQ ID NO: 295470 - DNA, 25 bp, Homo sapien
caacctccagaagggaatatttctt

SEQ ID NO: 295471 - DNA, 25 bp, Homo sapien
tggttgagacaacctccagaaggga

SEQ ID NO: 295472 - DNA, 25 bp, Homo sapien
ttgagacaacctccagaagggaata

SEQ ID NO: 295473 - DNA, 25 bp, Homo sapien
cattccagaggctgacatgccacag

SEQ ID NO: 295474 - DNA, 25 bp, Homo sapien
tagcatatgcaagtctcccgtgagg

SEQ ID NO: 295475 - DNA, 25 bp, Homo sapien
tgtgatttatagagtttagcgccct

SEQ ID NO: 295476 - DNA, 25 bp, Homo sapien
gcgtgggagaacaccagtgctgcct

SEQ ID NO: 295477 - DNA, 25 bp, Homo sapien
ctttctgattgaaaacctttcccag

SEQ ID NO: 295478 - DNA, 25 bp, Homo sapien
tgaccctgggtactctctttctgat

SEQ ID NO: 295479 - DNA, 25 bp, Homo sapien
ccaggctgaccctgggtactctctt

SEQ ID NO: 295480 - DNA, 25 bp, Homo sapien
tctttctgattgaaaacctttccca

SEQ ID NO: 295481 - DNA, 25 bp, Homo sapien
tcagggctcctgacgtatcagcatc

SEQ ID NO: 295482 - DNA, 25 bp, Homo sapien
tatcagcatcaaccctagctttgcg

SEQ ID NO: 295483 - DNA, 25 bp, Homo sapien
tgtgcatccacaacgagcacttggt

SEQ ID NO: 295484 - DNA, 25 bp, Homo sapien
gcagcctgtcacatggaaattgcag

SEQ ID NO: 295485 - DNA, 25 bp, Homo sapien
atcttccaaactgcaaacaaaaaat

SEQ ID NO: 295486 - DNA, 25 bp, Homo sapien
ttccaaactgcaaacaaaaaataca

SEQ ID NO: 295487 - DNA, 25 bp, Homo sapien
tcttccaaactgcaaacaaaaaata

SEQ ID NO: 295488 - DNA, 25 bp, Homo sapien
acagtctatagcccccagcaggtag

SEQ ID NO: 295489 - DNA, 25 bp, Homo sapien
tgtgtgtcccacagtctatagcccc

SEQ ID NO: 295490 - DNA, 25 bp, Homo sapien
ctgtgtgtcccacagtctatagccc

SEQ ID NO: 295491 - DNA, 25 bp, Homo sapien
cccacagtctatagcccccagcagg

SEQ ID NO: 295492 - DNA, 25 bp, Homo sapien
ttggcttaaaactgccccatatgaa

SEQ ID NO: 295493 - DNA, 25 bp, Homo sapien
catttcaggactgcataaatggtcc

SEQ ID NO: 295494 - DNA, 25 bp, Homo sapien
gtttcgggggaagatctctctgttc

SEQ ID NO: 295495 - DNA, 25 bp, Homo sapien
tatgaacacaatcatctggcatttc

SEQ ID NO: 295496 - DNA, 25 bp, Homo sapien
tataggaaatggcaagaacaaaaag

SEQ ID NO: 295497 - DNA, 25 bp, Homo sapien
tgaagactgagttacaactggcagg

SEQ ID NO: 295498 - DNA, 25 bp, Homo sapien
acacagcacactcttgtcagatttt

SEQ ID NO: 295499 - DNA, 25 bp, Homo sapien
tgtaaccatggcaaccaacagaggc

SEQ ID NO: 295500 - DNA, 25 bp, Homo sapien
gaggtgcattcgatcccagtacgtt

SEQ ID NO: 295501 - DNA, 25 bp, Homo sapien
tcgatcccagtacgtttcgggttca

SEQ ID NO: 295502 - DNA, 25 bp, Homo sapien
cctggaagaggtgcattcgatccca

SEQ ID NO: 295503 - DNA, 25 bp, Homo sapien
gcattcgatcccagtacgtttcggg

SEQ ID NO: 295504 - DNA, 25 bp, Homo sapien
atctgcaccacccactgttagtgga

SEQ ID NO: 295505 - DNA, 25 bp, Homo sapien
tgtgaaggggtagaccttagacgaa

SEQ ID NO: 295506 - DNA, 25 bp, Homo sapien
tgcaccacccactgttagtggaagg

SEQ ID NO: 295507 - DNA, 25 bp, Homo sapien
cacccactgttagtggaaggaggaa

SEQ ID NO: 295508 - DNA, 25 bp, Homo sapien
agatgaaggaggagcggtaggtcac

SEQ ID NO: 295509 - DNA, 25 bp, Homo sapien
gatgaaggaggagcggtaggtcaca

SEQ ID NO: 295510 - DNA, 25 bp, Homo sapien
atgaaggaggagcggtaggtcacag

SEQ ID NO: 295511 - DNA, 25 bp, Homo sapien
tgaaggaggagcggtaggtcacagc

SEQ ID NO: 295512 - DNA, 25 bp, Homo sapien
gtcactaccaccatagtgaaagaaa

SEQ ID NO: 295513 - DNA, 25 bp, Homo sapien
caccatagtgaaagaaagccttccc

SEQ ID NO: 295514 - DNA, 25 bp, Homo sapien
tgaaagaaagccttcccaccggctg

SEQ ID NO: 295515 - DNA, 25 bp, Homo sapien
cccaccggctgcactcttcatccag

SEQ ID NO: 295516 - DNA, 25 bp, Homo sapien
acacccagcagcccgtcatctccgt

SEQ ID NO: 295517 - DNA, 25 bp, Homo sapien
cctcacacccagcagcccgtcatct

SEQ ID NO: 295518 - DNA, 25 bp, Homo sapien
agcccgtcatctccgtggtccacca

SEQ ID NO: 295519 - DNA, 25 bp, Homo sapien
cagcagcccgtcatctccgtggtcc

SEQ ID NO: 295520 - DNA, 25 bp, Homo sapien
gttaaaagcagaggcagaatattta

SEQ ID NO: 295521 - DNA, 25 bp, Homo sapien
taacgtggatatactgaggcttgtt

SEQ ID NO: 295522 - DNA, 25 bp, Homo sapien
ctgtaacgtggatatactgaggctt

SEQ ID NO: 295523 - DNA, 25 bp, Homo sapien
aaagcagaggcagaatatttatctt

SEQ ID NO: 295524 - DNA, 25 bp, Homo sapien
cccaactctgcccgtagctcctcac

SEQ ID NO: 295525 - DNA, 25 bp, Homo sapien
tgcccaactctgcccgtagctcctc

SEQ ID NO: 295526 - DNA, 25 bp, Homo sapien
gcccaactctgcccgtagctcctca

SEQ ID NO: 295527 - DNA, 25 bp, Homo sapien
ctgcccaactctgcccgtagctcct

SEQ ID NO: 295528 - DNA, 25 bp, Homo sapien
ttgtccagaacgtgaccagccggtt

SEQ ID NO: 295529 - DNA, 25 bp, Homo sapien
tcagcagccgatcagcaaacttttc

SEQ ID NO: 295530 - DNA, 25 bp, Homo sapien
ttgatgcagaagtccgtgaagtcct

SEQ ID NO: 295531 - DNA, 25 bp, Homo sapien
tgttgtaggcccagttgtagccgac

SEQ ID NO: 295532 - DNA, 25 bp, Homo sapien
tgatagcagcaaacggacacctgac

SEQ ID NO: 295533 - DNA, 25 bp, Homo sapien
tgctctgagcacttgctgacaggag

SEQ ID NO: 295534 - DNA, 25 bp, Homo sapien
gattctgcccctaatatcccataga

SEQ ID NO: 295535 - DNA, 25 bp, Homo sapien
actcctgggcaagaagtggcagatt

SEQ ID NO: 295536 - DNA, 25 bp, Homo sapien
gcctagctaggaaggtggagactca

SEQ ID NO: 295537 - DNA, 25 bp, Homo sapien
accacccaaggagatagcttcccat

SEQ ID NO: 295538 - DNA, 25 bp, Homo sapien
gtgcccagctacatgtgtcttctga

SEQ ID NO: 295539 - DNA, 25 bp, Homo sapien
tctgtgaagtaactaaggagcctag

SEQ ID NO: 295540 - DNA, 25 bp, Homo sapien
tcttctagagggctatggtggctgc

SEQ ID NO: 295541 - DNA, 25 bp, Homo sapien
cattctaatctggtgctgcccgtaa

SEQ ID NO: 295542 - DNA, 25 bp, Homo sapien
tgagcactcaatatggccagcattc

SEQ ID NO: 295543 - DNA, 25 bp, Homo sapien
gcttacattcgatgggagaggcaag

SEQ ID NO: 295544 - DNA, 25 bp, Homo sapien
accaacagtgcagtgaccaggagca

SEQ ID NO: 295545 - DNA, 25 bp, Homo sapien
tcgagaccagggacatggctgtcat

SEQ ID NO: 295546 - DNA, 25 bp, Homo sapien
gggagtcgagaccagggacatggct

SEQ ID NO: 295547 - DNA, 25 bp, Homo sapien
ggagaccctggggagtcgagaccag

SEQ ID NO: 295548 - DNA, 25 bp, Homo sapien
gtgctcctgttctcccagcgccaac

SEQ ID NO: 295549 - DNA, 25 bp, Homo sapien
gggagtgctcctgttctcccagcgc

SEQ ID NO: 295550 - DNA, 25 bp, Homo sapien
ccagggagtgctcctgttctcccag

SEQ ID NO: 295551 - DNA, 25 bp, Homo sapien
agtgctcctgttctcccagcgccaa

SEQ ID NO: 295552 - DNA, 25 bp, Homo sapien
tgtcctccaatctggcttccagtgg

SEQ ID NO: 295553 - DNA, 25 bp, Homo sapien
tcctccaatctggcttccagtggtg

SEQ ID NO: 295554 - DNA, 25 bp, Homo sapien
tgttgtcctccaatctggcttccag

SEQ ID NO: 295555 - DNA, 25 bp, Homo sapien
gtcctccaatctggcttccagtggt

SEQ ID NO: 295556 - DNA, 25 bp, Homo sapien
gcaaccccaggaggatattcaggag

SEQ ID NO: 295557 - DNA, 25 bp, Homo sapien
tggacaaatacgactcaggctgctt

SEQ ID NO: 295558 - DNA, 25 bp, Homo sapien
gattgccctgtgatggactctccta

SEQ ID NO: 295559 - DNA, 25 bp, Homo sapien
tattcaggagtcacgactgggtgca

SEQ ID NO: 295560 - DNA, 25 bp, Homo sapien
tcacaccattgttcaaggctcaggt

SEQ ID NO: 295561 - DNA, 25 bp, Homo sapien
cagtcccagtttcaaaactgaggaa

SEQ ID NO: 295562 - DNA, 25 bp, Homo sapien
attgttcaaggctcaggtctctgga

SEQ ID NO: 295563 - DNA, 25 bp, Homo sapien
aagagccagtcccagtttcaaaact

SEQ ID NO: 295564 - DNA, 25 bp, Homo sapien
gcccttcataacctgcccgtggccc

SEQ ID NO: 295565 - DNA, 25 bp, Homo sapien
tggcccttcataacctgcccgtggc

SEQ ID NO: 295566 - DNA, 25 bp, Homo sapien
ccttcataacctgcccgtggcccat

SEQ ID NO: 295567 - DNA, 25 bp, Homo sapien
ggcccttcataacctgcccgtggcc

SEQ ID NO: 295568 - DNA, 25 bp, Homo sapien
caagcagattgttatagccttctgt

SEQ ID NO: 295569 - DNA, 25 bp, Homo sapien
gcagattgttatagccttctgtctt

SEQ ID NO: 295570 - DNA, 25 bp, Homo sapien
tcttgtagataatggtggcaggctg

SEQ ID NO: 295571 - DNA, 25 bp, Homo sapien
taggaggcaagcagattgttatagc

SEQ ID NO: 295572 - DNA, 25 bp, Homo sapien
cattcttgtagctgttgagctatga

SEQ ID NO: 295573 - DNA, 25 bp, Homo sapien
gtagctgttgagctatgagcataac

SEQ ID NO: 295574 - DNA, 25 bp, Homo sapien
ttcttgtagctgttgagctatgagc

SEQ ID NO: 295575 - DNA, 25 bp, Homo sapien
cttgtagctgttgagctatgagcat

SEQ ID NO: 295576 - DNA, 25 bp, Homo sapien
acagggcctttgaacaacgtcaaag

SEQ ID NO: 295577 - DNA, 25 bp, Homo sapien
cagggcctttgaacaacgtcaaaga

SEQ ID NO: 295578 - DNA, 25 bp, Homo sapien
ggcctttgaacaacgtcaaagacag

SEQ ID NO: 295579 - DNA, 25 bp, Homo sapien
ctttgaacaacgtcaaagacagcac

SEQ ID NO: 295580 - DNA, 25 bp, Homo sapien
ctaacgcccaagagcctcatcaata

SEQ ID NO: 295581 - DNA, 25 bp, Homo sapien
tcacctactcccaaggctctacgtc

SEQ ID NO: 295582 - DNA, 25 bp, Homo sapien
cgcccaagagcctcatcaataaaaa

SEQ ID NO: 295583 - DNA, 25 bp, Homo sapien
caccacctgcgacaggtcacctact

SEQ ID NO: 295584 - DNA, 25 bp, Homo sapien
ggacaacgccgagggaggagacgcg

SEQ ID NO: 295585 - DNA, 25 bp, Homo sapien
ctctcgctggctcgccccgcgcgct

SEQ ID NO: 295586 - DNA, 25 bp, Homo sapien
cggtcagtccgctccccggtcgctg

SEQ ID NO: 295587 - DNA, 25 bp, Homo sapien
gcgcacgcgcactggctcgccggcc

SEQ ID NO: 295588 - DNA, 25 bp, Homo sapien
cgccttcatagcggaggccatgtcg

SEQ ID NO: 295589 - DNA, 25 bp, Homo sapien
tgctcggccagccgcgcccgctgca

SEQ ID NO: 295590 - DNA, 25 bp, Homo sapien
gtcgtcgtagcgctccgcctgctcg

SEQ ID NO: 295591 - DNA, 25 bp, Homo sapien
cttcatagcggaggccatgtcgtcg

SEQ ID NO: 295592 - DNA, 25 bp, Homo sapien
cggccagccgcccgggctcccggcg

SEQ ID NO: 295593 - DNA, 25 bp, Homo sapien
ccagccgcccgggctcccggcgcgc

SEQ ID NO: 295594 - DNA, 25 bp, Homo sapien
ccgcccgggctcccggcgcgctcac

SEQ ID NO: 295595 - DNA, 25 bp, Homo sapien
agccgcccgggctcccggcgcgctc

SEQ ID NO: 295596 - DNA, 25 bp, Homo sapien
gttccgaactaagatgtggcgaccc

SEQ ID NO: 295597 - DNA, 25 bp, Homo sapien
ggtccggtgaaacgctctaggagaa

SEQ ID NO: 295598 - DNA, 25 bp, Homo sapien
ggagaaatgcggctccttcgcgtcc

SEQ ID NO: 295599 - DNA, 25 bp, Homo sapien
gggctgccttcgcgatcccgaactg

SEQ ID NO: 295600 - DNA, 25 bp, Homo sapien
ccagctgagacagggcgccacttac

SEQ ID NO: 295601 - DNA, 25 bp, Homo sapien
aaccagctgagacagggcgccactt

SEQ ID NO: 295602 - DNA, 25 bp, Homo sapien
accagctgagacagggcgccactta

SEQ ID NO: 295603 - DNA, 25 bp, Homo sapien
aaaccagctgagacagggcgccact

SEQ ID NO: 295604 - DNA, 25 bp, Homo sapien
caccggagaagctgcagaatcgatt

SEQ ID NO: 295605 - DNA, 25 bp, Homo sapien
gaaatgcaggtggtgtgtgacccac

SEQ ID NO: 295606 - DNA, 25 bp, Homo sapien
caacaaatcaacatacgggcaacgg

SEQ ID NO: 295607 - DNA, 25 bp, Homo sapien
tggtaaccggaactcagaaatgcag

SEQ ID NO: 295608 - DNA, 25 bp, Homo sapien
cacttagagggtgagcaaccacttc

SEQ ID NO: 295609 - DNA, 25 bp, Homo sapien
tgaagaaagcccaggtaaacccaga

SEQ ID NO: 295610 - DNA, 25 bp, Homo sapien
taagtgtgacctgctgtggacagag

SEQ ID NO: 295611 - DNA, 25 bp, Homo sapien
caccaagttagcagggaaagtgacc

SEQ ID NO: 295612 - DNA, 25 bp, Homo sapien
atgctgggacagaagacaagctgcc

SEQ ID NO: 295613 - DNA, 25 bp, Homo sapien
aagctgcctccacttggacactagg

SEQ ID NO: 295614 - DNA, 25 bp, Homo sapien
gacaagctgcctccacttggacact

SEQ ID NO: 295615 - DNA, 25 bp, Homo sapien
aagacaagctgcctccacttggaca

SEQ ID NO: 295616 - DNA, 25 bp, Homo sapien
tcacatgtctatgttgtaacaaggt

SEQ ID NO: 295617 - DNA, 25 bp, Homo sapien
ggtcacatgtctatgttgtaacaag

SEQ ID NO: 295618 - DNA, 25 bp, Homo sapien
gtcacatgtctatgttgtaacaagg

SEQ ID NO: 295619 - DNA, 25 bp, Homo sapien
tccttctcaagaacggaattacgaa

SEQ ID NO: 295620 - DNA, 25 bp, Homo sapien
ggagaataaaaaccacccatggata

SEQ ID NO: 295621 - DNA, 25 bp, Homo sapien
tacgaacaggtcagtcactctggag

SEQ ID NO: 295622 - DNA, 25 bp, Homo sapien
tcaacataatcaacaatccttctca

SEQ ID NO: 295623 - DNA, 25 bp, Homo sapien
tcaagcagagacaggacatcattgc

SEQ ID NO: 295624 - DNA, 25 bp, Homo sapien
gaagcgacctctgctaagtagcggt

SEQ ID NO: 295625 - DNA, 25 bp, Homo sapien
aaaacaccttgctctcatactggaa

SEQ ID NO: 295626 - DNA, 25 bp, Homo sapien
ttgtttggctaagaggcaggcttgc

SEQ ID NO: 295627 - DNA, 25 bp, Homo sapien
aaggaagaatcggtgatgatggggg

SEQ ID NO: 295628 - DNA, 25 bp, Homo sapien
aggaagaatcggtgatgatgggggt

SEQ ID NO: 295629 - DNA, 25 bp, Homo sapien
gcaaggaagaatcggtgatgatggg

SEQ ID NO: 295630 - DNA, 25 bp, Homo sapien
acacaattcaaaaagggagctcctg

SEQ ID NO: 295631 - DNA, 25 bp, Homo sapien
tagatttcccatagatcaacaggca

SEQ ID NO: 295632 - DNA, 25 bp, Homo sapien
tcccaagagacaggagtgcagatct

SEQ ID NO: 295633 - DNA, 25 bp, Homo sapien
gggctcaaagcaaccatcagtccag

SEQ ID NO: 295634 - DNA, 25 bp, Homo sapien
gaaaggagcaagttgtctctctgta

SEQ ID NO: 295635 - DNA, 25 bp, Homo sapien
aaggagcaagttgtctctctgtatc

SEQ ID NO: 295636 - DNA, 25 bp, Homo sapien
aggagcaagttgtctctctgtatca

SEQ ID NO: 295637 - DNA, 25 bp, Homo sapien
ggagcaagttgtctctctgtatcag

SEQ ID NO: 295638 - DNA, 25 bp, Homo sapien
ggagctactgaaacctcacgttaaa

SEQ ID NO: 295639 - DNA, 25 bp, Homo sapien
gaaaagaaggtttgtgcacgtcata

SEQ ID NO: 295640 - DNA, 25 bp, Homo sapien
cacacatggcgctgtcaggatacac

SEQ ID NO: 295641 - DNA, 25 bp, Homo sapien
caggatacacaaggacaatagccaa

SEQ ID NO: 295642 - DNA, 25 bp, Homo sapien
ctggagaggaccgtgagtgacattt

SEQ ID NO: 295643 - DNA, 25 bp, Homo sapien
ttcattactgtgagtttgtgtgctg

SEQ ID NO: 295644 - DNA, 25 bp, Homo sapien
gaggaccgtgagtgacattttccta

SEQ ID NO: 295645 - DNA, 25 bp, Homo sapien
attcattactgtgagtttgtgtgct

SEQ ID NO: 295646 - DNA, 25 bp, Homo sapien
gaaaactaatgtccagagtggcaga

SEQ ID NO: 295647 - DNA, 25 bp, Homo sapien
gaaacatcctcacatcccgaagggt

SEQ ID NO: 295648 - DNA, 25 bp, Homo sapien
cagcacaggcctaagaaaagtcgta

SEQ ID NO: 295649 - DNA, 25 bp, Homo sapien
tcaggccgggagagatagagccact

SEQ ID NO: 295650 - DNA, 25 bp, Homo sapien
tttatttgttactgggcttgctccc

SEQ ID NO: 295651 - DNA, 25 bp, Homo sapien
gctttatttgttactgggcttgctc

SEQ ID NO: 295652 - DNA, 25 bp, Homo sapien
tcccgctgctcttcacacttgcaag

SEQ ID NO: 295653 - DNA, 25 bp, Homo sapien
atttgctttatttgttactgggctt

SEQ ID NO: 295654 - DNA, 25 bp, Homo sapien
cgccaggctggcagtagacgtgata

SEQ ID NO: 295655 - DNA, 25 bp, Homo sapien
gcagacctatcctgtgacctgaaag

SEQ ID NO: 295656 - DNA, 25 bp, Homo sapien
atgacggccgaacctttgggcgcca

SEQ ID NO: 295657 - DNA, 25 bp, Homo sapien
agcctgagtcgcactgcagacctat

SEQ ID NO: 295658 - DNA, 25 bp, Homo sapien
tctcctgcctccgtagaccaagggc

SEQ ID NO: 295659 - DNA, 25 bp, Homo sapien
tggcgggtccttggtaaaagagctc

SEQ ID NO: 295660 - DNA, 25 bp, Homo sapien
aatccatttcatcagatgcgtgaca

SEQ ID NO: 295661 - DNA, 25 bp, Homo sapien
tcacggttttggtgcaaacgcggca

SEQ ID NO: 295662 - DNA, 25 bp, Homo sapien
agtcgttgcccaggcgtgtgtagta

SEQ ID NO: 295663 - DNA, 25 bp, Homo sapien
gggcctctctgaatccatttcatca

SEQ ID NO: 295664 - DNA, 25 bp, Homo sapien
gcattttgaagttcatcccaactgt

SEQ ID NO: 295665 - DNA, 25 bp, Homo sapien
tcaaacaggtccccgaggcattttg

SEQ ID NO: 295666 - DNA, 25 bp, Homo sapien
acaggtccccgaggcattttgaagt

SEQ ID NO: 295667 - DNA, 25 bp, Homo sapien
ggcattttgaagttcatcccaactg

SEQ ID NO: 295668 - DNA, 25 bp, Homo sapien
gttgtgccagatttattgaaaataa

SEQ ID NO: 295669 - DNA, 25 bp, Homo sapien
aataatacagcactgcagaaaaaat

SEQ ID NO: 295670 - DNA, 25 bp, Homo sapien
aaaataatacagcactgcagaaaaa

SEQ ID NO: 295671 - DNA, 25 bp, Homo sapien
attgaaaataatacagcactgcaga

SEQ ID NO: 295672 - DNA, 25 bp, Homo sapien
cttgttagcagaacacccgagaaag

SEQ ID NO: 295673 - DNA, 25 bp, Homo sapien
tgttagcagaacacccgagaaagaa

SEQ ID NO: 295674 - DNA, 25 bp, Homo sapien
cactcaggccgcaggaaagatgagg

SEQ ID NO: 295675 - DNA, 25 bp, Homo sapien
cagccagacactcaggccgcaggaa

SEQ ID NO: 295676 - DNA, 25 bp, Homo sapien
ctgctcactggtaggatcctgttgg

SEQ ID NO: 295677 - DNA, 25 bp, Homo sapien
ccaggatctggtcactaaaggggcc

SEQ ID NO: 295678 - DNA, 25 bp, Homo sapien
cttgccgtcattggtgccaatcaaa

SEQ ID NO: 295679 - DNA, 25 bp, Homo sapien
ggactctctcttgccgtcattggtg

SEQ ID NO: 295680 - DNA, 25 bp, Homo sapien
taggagaacacagtgtgatgcccac

SEQ ID NO: 295681 - DNA, 25 bp, Homo sapien
ctaggagaacacagtgtgatgccca

SEQ ID NO: 295682 - DNA, 25 bp, Homo sapien
cttgcggctgcaccgtcaggaagca

SEQ ID NO: 295683 - DNA, 25 bp, Homo sapien
cttatacggcctcctggttaatgat

SEQ ID NO: 295684 - DNA, 25 bp, Homo sapien
gggacctgggactttgagggagcag

SEQ ID NO: 295685 - DNA, 25 bp, Homo sapien
tcctggttaatgatcagcaccaggg

SEQ ID NO: 295686 - DNA, 25 bp, Homo sapien
ttccctctcgccagggccgctagct

SEQ ID NO: 295687 - DNA, 25 bp, Homo sapien
ggtggcagcgttgcgtccttccctc

SEQ ID NO: 295688 - DNA, 25 bp, Homo sapien
tccctctcgccagggccgctagctc

SEQ ID NO: 295689 - DNA, 25 bp, Homo sapien
cagcgttgcgtccttccctctcgcc

SEQ ID NO: 295690 - DNA, 25 bp, Homo sapien
gataacgatgatggagatatcggct

SEQ ID NO: 295691 - DNA, 25 bp, Homo sapien
cgaatgagctcgtgggtctcaacag

SEQ ID NO: 295692 - DNA, 25 bp, Homo sapien
gacggccatcactaccacgaagtag

SEQ ID NO: 295693 - DNA, 25 bp, Homo sapien
gagatatcggctgcattgcgaatga

SEQ ID NO: 295694 - DNA, 25 bp, Homo sapien
cacaccatacttcggcctgccagga

SEQ ID NO: 295695 - DNA, 25 bp, Homo sapien
ggccaccacaccatacttcggcctg

SEQ ID NO: 295696 - DNA, 25 bp, Homo sapien
tccaacagtcccacgattggtggaa

SEQ ID NO: 295697 - DNA, 25 bp, Homo sapien
cagtcccacgattggtggaaaacat

SEQ ID NO: 295698 - DNA, 25 bp, Homo sapien
aggtcaatacaagttgttccttctt

SEQ ID NO: 295699 - DNA, 25 bp, Homo sapien
caacccaggtcaatacaagttgttc

SEQ ID NO: 295700 - DNA, 25 bp, Homo sapien
ccaggtcaatacaagttgttccttc

SEQ ID NO: 295701 - DNA, 25 bp, Homo sapien
acccaggtcaatacaagttgttcct

SEQ ID NO: 295702 - DNA, 25 bp, Homo sapien
tgttcccctctcctggtgcgtgtca

SEQ ID NO: 295703 - DNA, 25 bp, Homo sapien
taccttctagccttcaaagagccca

SEQ ID NO: 295704 - DNA, 25 bp, Homo sapien
actttgataactgcttccacacaag

SEQ ID NO: 295705 - DNA, 25 bp, Homo sapien
taactgcttccacacaagtctgctg

SEQ ID NO: 295706 - DNA, 25 bp, Homo sapien
gccacttccaatgttactagcaaag

SEQ ID NO: 295707 - DNA, 25 bp, Homo sapien
gcctccaatggcgatgcctgaagct

SEQ ID NO: 295708 - DNA, 25 bp, Homo sapien
gttactagcaaagagggaggctcca

SEQ ID NO: 295709 - DNA, 25 bp, Homo sapien
attcaaagcctccaatggcgatgcc

SEQ ID NO: 295710 - DNA, 25 bp, Homo sapien
cccagccttaatatagatggggaca

SEQ ID NO: 295711 - DNA, 25 bp, Homo sapien
cagccttaatatagatggggacaaa

SEQ ID NO: 295712 - DNA, 25 bp, Homo sapien
gccttaatatagatggggacaaaca

SEQ ID NO: 295713 - DNA, 25 bp, Homo sapien
ccagccttaatatagatggggacaa

SEQ ID NO: 295714 - DNA, 25 bp, Homo sapien
gaaaggtagacctggatccgctggc

SEQ ID NO: 295715 - DNA, 25 bp, Homo sapien
cagaagggaaaggtagacctggatc

SEQ ID NO: 295716 - DNA, 25 bp, Homo sapien
gtagacctggatccgctggcctcca

SEQ ID NO: 295717 - DNA, 25 bp, Homo sapien
caaaccgcttcctcaggtactctgg

SEQ ID NO: 295718 - DNA, 25 bp, Homo sapien
tagtctagaagaatccacaccaagt

SEQ ID NO: 295719 - DNA, 25 bp, Homo sapien
gagttaaagtgtgcatctcccaccc

SEQ ID NO: 295720 - DNA, 25 bp, Homo sapien
tattctttatggctatacgggtacc

SEQ ID NO: 295721 - DNA, 25 bp, Homo sapien
gaatacacacaatttgagcaaggcc

SEQ ID NO: 295722 - DNA, 25 bp, Homo sapien
cagtgattgccaataagagaaagat

SEQ ID NO: 295723 - DNA, 25 bp, Homo sapien
ctgtaattgtgtaaagggcagtgat

SEQ ID NO: 295724 - DNA, 25 bp, Homo sapien
gattgatgaatatggcccccgagaa

SEQ ID NO: 295725 - DNA, 25 bp, Homo sapien
taaatacagattcaggcctaaggcc

SEQ ID NO: 295726 - DNA, 25 bp, Homo sapien
gtccgtgtaaatcaccgccgccagg

SEQ ID NO: 295727 - DNA, 25 bp, Homo sapien
caccgtctgcaaggtgtccgtgtaa

SEQ ID NO: 295728 - DNA, 25 bp, Homo sapien
tgatcaccgtctgcaaggtgtccgt

SEQ ID NO: 295729 - DNA, 25 bp, Homo sapien
cgtctgcaaggtgtccgtgtaaatc

SEQ ID NO: 295730 - DNA, 25 bp, Homo sapien
aactcgtcatagcagcttctttcca

SEQ ID NO: 295731 - DNA, 25 bp, Homo sapien
acattctgaaaccttcaactcgtca

SEQ ID NO: 295732 - DNA, 25 bp, Homo sapien
gaaaacatcggtacagaaatgaaca

SEQ ID NO: 295733 - DNA, 25 bp, Homo sapien
tggaaaacatcggtacagaaatgaa

SEQ ID NO: 295734 - DNA, 25 bp, Homo sapien
gagtcggcccttggagtgtagcatt

SEQ ID NO: 295735 - DNA, 25 bp, Homo sapien
gcgtcatagcctcccacttcgtgaa

SEQ ID NO: 295736 - DNA, 25 bp, Homo sapien
gacactatggttggaatggctttca

SEQ ID NO: 295737 - DNA, 25 bp, Homo sapien
tcccaaagatgaacccaggccatgg

SEQ ID NO: 295738 - DNA, 25 bp, Homo sapien
cagaaaaagcccagtaagggaggtg

SEQ ID NO: 295739 - DNA, 25 bp, Homo sapien
tgccagaaaaagcccagtaagggag

SEQ ID NO: 295740 - DNA, 25 bp, Homo sapien
ctgccagaaaaagcccagtaaggga

SEQ ID NO: 295741 - DNA, 25 bp, Homo sapien
cttcacgtgagacatattcttggct

SEQ ID NO: 295742 - DNA, 25 bp, Homo sapien
atgggcatcagctttagatacccac

SEQ ID NO: 295743 - DNA, 25 bp, Homo sapien
gggcatcagctttagatacccacac

SEQ ID NO: 295744 - DNA, 25 bp, Homo sapien
ggcatcagctttagatacccacaca

SEQ ID NO: 295745 - DNA, 25 bp, Homo sapien
ctgaagggacgacacaggcaatttt

SEQ ID NO: 295746 - DNA, 25 bp, Homo sapien
tgaagggacgacacaggcaattttt

SEQ ID NO: 295747 - DNA, 25 bp, Homo sapien
cattgggcatgagctccaccactaa

SEQ ID NO: 295748 - DNA, 25 bp, Homo sapien
ccaccactaaggttggataggcgat

SEQ ID NO: 295749 - DNA, 25 bp, Homo sapien
tgttggtacagccaaccttggtacc

SEQ ID NO: 295750 - DNA, 25 bp, Homo sapien
ccttggtaccgcaatatttctcaca

SEQ ID NO: 295751 - DNA, 25 bp, Homo sapien
tccggcaatcatgagctctttctca

SEQ ID NO: 295752 - DNA, 25 bp, Homo sapien
cttccggcaatcatgagctctttct

SEQ ID NO: 295753 - DNA, 25 bp, Homo sapien
ttccggcaatcatgagctctttctc

SEQ ID NO: 295754 - DNA, 25 bp, Homo sapien
aagcaggaagacagccgcaatgggt

SEQ ID NO: 295755 - DNA, 25 bp, Homo sapien
cagccgcaatgggtggtcccaagta

SEQ ID NO: 295756 - DNA, 25 bp, Homo sapien
cccaagtaactggtgatggactgga

SEQ ID NO: 295757 - DNA, 25 bp, Homo sapien
tgtaatcgaagagttgcccactttg

SEQ ID NO: 295758 - DNA, 25 bp, Homo sapien
tcgtgggacagttgctgggctccat

SEQ ID NO: 295759 - DNA, 25 bp, Homo sapien
taatcatacgtgaaatcccaatcag

SEQ ID NO: 295760 - DNA, 25 bp, Homo sapien
gaggataatggcaaagtacaagtag

SEQ ID NO: 295761 - DNA, 25 bp, Homo sapien
tacaagtagtgcaccccacagataa

SEQ ID NO: 295762 - DNA, 25 bp, Homo sapien
gcatccaggtcaatacgctcctctt

SEQ ID NO: 295763 - DNA, 25 bp, Homo sapien
tcctcttccgcatccaggtcaatac

SEQ ID NO: 295764 - DNA, 25 bp, Homo sapien
aggtcaatacgctcctctttgctgt

SEQ ID NO: 295765 - DNA, 25 bp, Homo sapien
tcttccgcatccaggtcaatacgct

SEQ ID NO: 295766 - DNA, 25 bp, Homo sapien
ccacaaaataggtcataggctctcc

SEQ ID NO: 295767 - DNA, 25 bp, Homo sapien
tctagcccacaaaataggtcatagg

SEQ ID NO: 295768 - DNA, 25 bp, Homo sapien
aaataggtcataggctctcctgaag

SEQ ID NO: 295769 - DNA, 25 bp, Homo sapien
gctctagcccacaaaataggtcata

SEQ ID NO: 295770 - DNA, 25 bp, Homo sapien
ttctcagaggtgtccgtcatcttca

SEQ ID NO: 295771 - DNA, 25 bp, Homo sapien
ggcttctcagaggtgtccgtcatct

SEQ ID NO: 295772 - DNA, 25 bp, Homo sapien
aggatgatgccattgacgttcaaca

SEQ ID NO: 295773 - DNA, 25 bp, Homo sapien
cattgacgttcaacactgtcctcca

SEQ ID NO: 295774 - DNA, 25 bp, Homo sapien
catggcaaaagacagccacggtcac

SEQ ID NO: 295775 - DNA, 25 bp, Homo sapien
tgcatggcaaaagacagccacggtc

SEQ ID NO: 295776 - DNA, 25 bp, Homo sapien
tcaggcaaaatatgcatggcaaaag

SEQ ID NO: 295777 - DNA, 25 bp, Homo sapien
aatatgcatggcaaaagacagccac

SEQ ID NO: 295778 - DNA, 25 bp, Homo sapien
tcaacaccacaggacgagactaaag

SEQ ID NO: 295779 - DNA, 25 bp, Homo sapien
ggtgagtaagagtccagccatggta

SEQ ID NO: 295780 - DNA, 25 bp, Homo sapien
gacacccggaatctacctgagacag

SEQ ID NO: 295781 - DNA, 25 bp, Homo sapien
tgtacacatttatccacctgggcaa

SEQ ID NO: 295782 - DNA, 25 bp, Homo sapien
ctatgtcattcatttattcaacacg

SEQ ID NO: 295783 - DNA, 25 bp, Homo sapien
gcctatgtcattcatttattcaaca

SEQ ID NO: 295784 - DNA, 25 bp, Homo sapien
atgtcattcatttattcaacacgca

SEQ ID NO: 295785 - DNA, 25 bp, Homo sapien
tgcctatgtcattcatttattcaac

SEQ ID NO: 295786 - DNA, 25 bp, Homo sapien
aaggttaactaagggccaggctcat

SEQ ID NO: 295787 - DNA, 25 bp, Homo sapien
ccagtgagcatactttgtgtagcca

SEQ ID NO: 295788 - DNA, 25 bp, Homo sapien
ctaatataatcagtttgacaaatgc

SEQ ID NO: 295789 - DNA, 25 bp, Homo sapien
gatatgaccatctgcaaccaaggag

SEQ ID NO: 295790 - DNA, 25 bp, Homo sapien
gggcaaggcctgatattttacaagc

SEQ ID NO: 295791 - DNA, 25 bp, Homo sapien
tctgcattatgcttggaggaacctg

SEQ ID NO: 295792 - DNA, 25 bp, Homo sapien
caaagcagccttctaacagtgatac

SEQ ID NO: 295793 - DNA, 25 bp, Homo sapien
cagagagttttagggactcagccaa

SEQ ID NO: 295794 - DNA, 25 bp, Homo sapien
gctggcgttccctagaggactggat

SEQ ID NO: 295795 - DNA, 25 bp, Homo sapien
ctttgaaaacgggatgggagctaca

SEQ ID NO: 295796 - DNA, 25 bp, Homo sapien
tacctacctcctgtcgttgtgatga

SEQ ID NO: 295797 - DNA, 25 bp, Homo sapien
tcagtctcctgaagcgaggcagagg

SEQ ID NO: 295798 - DNA, 25 bp, Homo sapien
tgttaccctcaatgcaccagcccat

SEQ ID NO: 295799 - DNA, 25 bp, Homo sapien
tgatgttaccctcaatgcaccagcc

SEQ ID NO: 295800 - DNA, 25 bp, Homo sapien
atgttaccctcaatgcaccagccca

SEQ ID NO: 295801 - DNA, 25 bp, Homo sapien
actgatgttaccctcaatgcaccag

SEQ ID NO: 295802 - DNA, 25 bp, Homo sapien
cttcactcctcacaaagcacccagt

SEQ ID NO: 295803 - DNA, 25 bp, Homo sapien
aatgtccagtccctcggactccgtg

SEQ ID NO: 295804 - DNA, 25 bp, Homo sapien
tctgctgcatggtccccttacagat

SEQ ID NO: 295805 - DNA, 25 bp, Homo sapien
gctgaatgtccatgcgtgctgctct

SEQ ID NO: 295806 - DNA, 25 bp, Homo sapien
gctatcccatagtcgccatttgcac

SEQ ID NO: 295807 - DNA, 25 bp, Homo sapien
tatcccatagtcgccatttgcacac

SEQ ID NO: 295808 - DNA, 25 bp, Homo sapien
tcccatagtcgccatttgcacaccg

SEQ ID NO: 295809 - DNA, 25 bp, Homo sapien
tgctatcccatagtcgccatttgca

SEQ ID NO: 295810 - DNA, 25 bp, Homo sapien
aggtcagcgccaagacctctgtaga

SEQ ID NO: 295811 - DNA, 25 bp, Homo sapien
ggtgtttccatcatgtcttgcgctc

SEQ ID NO: 295812 - DNA, 25 bp, Homo sapien
ctgtagacttgtggccaatggtgtt

SEQ ID NO: 295813 - DNA, 25 bp, Homo sapien
gtttccatcatgtcttgcgctctct

SEQ ID NO: 295814 - DNA, 25 bp, Homo sapien
gttgttgctcgggtgagactcggcg

SEQ ID NO: 295815 - DNA, 25 bp, Homo sapien
tgttgctcgggtgagactcggcgat

SEQ ID NO: 295816 - DNA, 25 bp, Homo sapien
ttgttgctcgggtgagactcggcga

SEQ ID NO: 295817 - DNA, 25 bp, Homo sapien
ttgctcgggtgagactcggcgattt

SEQ ID NO: 295818 - DNA, 25 bp, Homo sapien
ctggctctggagaggtgggaagcag

SEQ ID NO: 295819 - DNA, 25 bp, Homo sapien
ctggagaggtgggaagcaggcaggc

SEQ ID NO: 295820 - DNA, 25 bp, Homo sapien
gagaggtgggaagcaggcaggcctc

SEQ ID NO: 295821 - DNA, 25 bp, Homo sapien
ggctctggagaggtgggaagcaggc

SEQ ID NO: 295822 - DNA, 25 bp, Homo sapien
ccacggtcattgatgcaatcacttt

SEQ ID NO: 295823 - DNA, 25 bp, Homo sapien
tttgcccacggtcattgatgcaatc

SEQ ID NO: 295824 - DNA, 25 bp, Homo sapien
ttgtcactattgagctctgccttca

SEQ ID NO: 295825 - DNA, 25 bp, Homo sapien
gacatctttgcccacggtcattgat

SEQ ID NO: 295826 - DNA, 25 bp, Homo sapien
atggaagaacaaagatgtttctcct

SEQ ID NO: 295827 - DNA, 25 bp, Homo sapien
gatggaagaacaaagatgtttctcc

SEQ ID NO: 295828 - DNA, 25 bp, Homo sapien
cttttgagatggaagaacaaagatg

SEQ ID NO: 295829 - DNA, 25 bp, Homo sapien
gcctgtcatatcagcaaagccagct

SEQ ID NO: 295830 - DNA, 25 bp, Homo sapien
aaaactgctgatgaggctgacttgc

SEQ ID NO: 295831 - DNA, 25 bp, Homo sapien
ctgctgatgaggctgacttgctctt

SEQ ID NO: 295832 - DNA, 25 bp, Homo sapien
ggggcctgtcatatcagcaaagcca

SEQ ID NO: 295833 - DNA, 25 bp, Homo sapien
ctcatttgttcttatcccagagctc

SEQ ID NO: 295834 - DNA, 25 bp, Homo sapien
ctggccatgggtgtttgctgccagg

SEQ ID NO: 295835 - DNA, 25 bp, Homo sapien
atttgttcttatcccagagctcagt

SEQ ID NO: 295836 - DNA, 25 bp, Homo sapien
tggccatgggtgtttgctgccaggg

SEQ ID NO: 295837 - DNA, 25 bp, Homo sapien
aggtcatcgaatccgcaacacctca

SEQ ID NO: 295838 - DNA, 25 bp, Homo sapien
catcgaatccgcaacacctcagttt

SEQ ID NO: 295839 - DNA, 25 bp, Homo sapien
cctagggtccaggtcatcgaatccg

SEQ ID NO: 295840 - DNA, 25 bp, Homo sapien
gtccaggtcatcgaatccgcaacac

SEQ ID NO: 295841 - DNA, 25 bp, Homo sapien
acaccagcagaaattggtgagaggg

SEQ ID NO: 295842 - DNA, 25 bp, Homo sapien
tgacaccagcagaaattggtgagag

SEQ ID NO: 295843 - DNA, 25 bp, Homo sapien
ggggcagaacaggaatcaggtcccc

SEQ ID NO: 295844 - DNA, 25 bp, Homo sapien
aatgacaccagcagaaattggtgag

SEQ ID NO: 295845 - DNA, 25 bp, Homo sapien
tcaggctgagctcttggcttccttc

SEQ ID NO: 295846 - DNA, 25 bp, Homo sapien
ggaaagaaatgatgaccgagccttg

SEQ ID NO: 295847 - DNA, 25 bp, Homo sapien
aatgatgaccgagccttggctttcc

SEQ ID NO: 295848 - DNA, 25 bp, Homo sapien
aaagaaatgatgaccgagccttggc

SEQ ID NO: 295849 - DNA, 25 bp, Homo sapien
gaaatgatgaccgagccttggcttt

SEQ ID NO: 295850 - DNA, 25 bp, Homo sapien
tatggaggtcggtggttgacaagca

SEQ ID NO: 295851 - DNA, 25 bp, Homo sapien
tggttgacaagcagggactgagctg

SEQ ID NO: 295852 - DNA, 25 bp, Homo sapien
tgtggaccggggctggagtgtatgg

SEQ ID NO: 295853 - DNA, 25 bp, Homo sapien
ctggagtgtatggaggtcggtggtt

SEQ ID NO: 295854 - DNA, 25 bp, Homo sapien
tcagcaccaaggagaatggtccagc

SEQ ID NO: 295855 - DNA, 25 bp, Homo sapien
tgaggttgccctagctggaaagcca

SEQ ID NO: 295856 - DNA, 25 bp, Homo sapien
tgtcatggactctagcgaccggtca

SEQ ID NO: 295857 - DNA, 25 bp, Homo sapien
tctaggcagccacgaatgtacttcc

SEQ ID NO: 295858 - DNA, 25 bp, Homo sapien
gagtcagggcggtgctcctcctgca

SEQ ID NO: 295859 - DNA, 25 bp, Homo sapien
gcaactgagtcagggcggtgctcct

SEQ ID NO: 295860 - DNA, 25 bp, Homo sapien
ccgatgaccagagcaactgagtcag

SEQ ID NO: 295861 - DNA, 25 bp, Homo sapien
catatgccggaggaaaccgatgacc

SEQ ID NO: 295862 - DNA, 25 bp, Homo sapien
tggcagggctgaccttggggtcaca

SEQ ID NO: 295863 - DNA, 25 bp, Homo sapien
acaggggcagggacatcttcagctc

SEQ ID NO: 295864 - DNA, 25 bp, Homo sapien
acttgctgcccctcatactgcggat

SEQ ID NO: 295865 - DNA, 25 bp, Homo sapien
tgcccctcatactgcggatgctaat

SEQ ID NO: 295866 - DNA, 25 bp, Homo sapien
gctgcccctcatactgcggatgcta

SEQ ID NO: 295867 - DNA, 25 bp, Homo sapien
agcatcctgttgtgtacctgggagc

SEQ ID NO: 295868 - DNA, 25 bp, Homo sapien
gcgagcggcaggaggtcagcatcct

SEQ ID NO: 295869 - DNA, 25 bp, Homo sapien
atcctgttgtgtacctgggagcccc

SEQ ID NO: 295870 - DNA, 25 bp, Homo sapien
ggcgagcggcaggaggtcagcatcc

SEQ ID NO: 295871 - DNA, 25 bp, Homo sapien
ctctttgtgtgtgacccggcagctg

SEQ ID NO: 295872 - DNA, 25 bp, Homo sapien
ctgctgcgggacctccattgatggg

SEQ ID NO: 295873 - DNA, 25 bp, Homo sapien
ccacagcgctctctttgtgtgtgac

SEQ ID NO: 295874 - DNA, 25 bp, Homo sapien
acctccattgatggggtgtcaggct

SEQ ID NO: 295875 - DNA, 25 bp, Homo sapien
ggatccctgttctgggatcctgcag

SEQ ID NO: 295876 - DNA, 25 bp, Homo sapien
agaacccagggtgagtgtcaaatta

SEQ ID NO: 295877 - DNA, 25 bp, Homo sapien
gggatccctgttctgggatcctgca

SEQ ID NO: 295878 - DNA, 25 bp, Homo sapien
cccagggtgagtgtcaaattatatg

SEQ ID NO: 295879 - DNA, 25 bp, Homo sapien
ggctgcgctgtagtcaccctcgcgg

SEQ ID NO: 295880 - DNA, 25 bp, Homo sapien
accattctggctgcgctgtagtcac

SEQ ID NO: 295881 - DNA, 25 bp, Homo sapien
tcaccattctggctgcgctgtagtc

SEQ ID NO: 295882 - DNA, 25 bp, Homo sapien
ttctggctgcgctgtagtcaccctc

SEQ ID NO: 295883 - DNA, 25 bp, Homo sapien
caaccacagcaaggtgagctgcggt

SEQ ID NO: 295884 - DNA, 25 bp, Homo sapien
tcctggcacggagcaactgggcagg

SEQ ID NO: 295885 - DNA, 25 bp, Homo sapien
tgctctgtagtctccatcgccacca

SEQ ID NO: 295886 - DNA, 25 bp, Homo sapien
ccagcatggaataagtggctcctcc

SEQ ID NO: 295887 - DNA, 25 bp, Homo sapien
cctgggcccagtgattcagtaaggc

SEQ ID NO: 295888 - DNA, 25 bp, Homo sapien
ttcctgggcccagtgattcagtaag

SEQ ID NO: 295889 - DNA, 25 bp, Homo sapien
gggcccagtgattcagtaaggccag

SEQ ID NO: 295890 - DNA, 25 bp, Homo sapien
aattcctgggcccagtgattcagta

SEQ ID NO: 295891 - DNA, 25 bp, Homo sapien
tatgactggcctatcattttctggt

SEQ ID NO: 295892 - DNA, 25 bp, Homo sapien
gaatcagaaattagcccatttttcc

SEQ ID NO: 295893 - DNA, 25 bp, Homo sapien
gatcatagagttatcatagcatgaa

SEQ ID NO: 295894 - DNA, 25 bp, Homo sapien
tggttttggtattcagatcatagag

SEQ ID NO: 295895 - DNA, 25 bp, Homo sapien
tcccggcaggtcattgtgcagcgct

SEQ ID NO: 295896 - DNA, 25 bp, Homo sapien
tagtttattccgtccttcagggcaa

SEQ ID NO: 295897 - DNA, 25 bp, Homo sapien
tgagtgtgtcacgttctcccggcag

SEQ ID NO: 295898 - DNA, 25 bp, Homo sapien
gacatgtctcacgtgaaggccgctt

SEQ ID NO: 295899 - DNA, 25 bp, Homo sapien
tgggactttggaatccacgaaaggc

SEQ ID NO: 295900 - DNA, 25 bp, Homo sapien
gcataattcacttcactgtcaaggg

SEQ ID NO: 295901 - DNA, 25 bp, Homo sapien
tcttggctgtagtccaggagtcttg

SEQ ID NO: 295902 - DNA, 25 bp, Homo sapien
caagggatatagctcattggtcaga

SEQ ID NO: 295903 - DNA, 25 bp, Homo sapien
tgatctgcattttcccgacgattag

SEQ ID NO: 295904 - DNA, 25 bp, Homo sapien
tatttcatactggttttgatctgca

SEQ ID NO: 295905 - DNA, 25 bp, Homo sapien
tatattttggaatcaaccatacttc

SEQ ID NO: 295906 - DNA, 25 bp, Homo sapien
acctcttggctattggtttgtgttt

SEQ ID NO: 295907 - DNA, 25 bp, Homo sapien
tcaagcgtttctcgttcctctccct

SEQ ID NO: 295908 - DNA, 25 bp, Homo sapien
tctccctcccgcaaagctggaatta

SEQ ID NO: 295909 - DNA, 25 bp, Homo sapien
cctccgaaagtgtgtggcctacatt

SEQ ID NO: 295910 - DNA, 25 bp, Homo sapien
agcctccgaaagtgtgtggcctaca

SEQ ID NO: 295911 - DNA, 25 bp, Homo sapien
tcttgaaattgttcagccgtgacca

SEQ ID NO: 295912 - DNA, 25 bp, Homo sapien
cacatccacgacttaggtacacggg

SEQ ID NO: 295913 - DNA, 25 bp, Homo sapien
tagccacagagcgaaaggagcacat

SEQ ID NO: 295914 - DNA, 25 bp, Homo sapien
tcccagctggaaatcgggcctgatg

SEQ ID NO: 295915 - DNA, 25 bp, Homo sapien
tggaacttcagcgtctttgggttct

SEQ ID NO: 295916 - DNA, 25 bp, Homo sapien
cttggaacttcagcgtctttgggtt

SEQ ID NO: 295917 - DNA, 25 bp, Homo sapien
ggaacttcagcgtctttgggttctg

SEQ ID NO: 295918 - DNA, 25 bp, Homo sapien
ttggaacttcagcgtctttgggttc

SEQ ID NO: 295919 - DNA, 25 bp, Homo sapien
agggccattgatgggctgagagcaa

SEQ ID NO: 295920 - DNA, 25 bp, Homo sapien
cagggccattgatgggctgagagca

SEQ ID NO: 295921 - DNA, 25 bp, Homo sapien
aatctctagtcatctctagtctata

SEQ ID NO: 295922 - DNA, 25 bp, Homo sapien
atctctagtcatctctagtctatat

SEQ ID NO: 295923 - DNA, 25 bp, Homo sapien
tctctagtcatctctagtctatatt

SEQ ID NO: 295924 - DNA, 25 bp, Homo sapien
cagggcctgcacatcgatgaggtag

SEQ ID NO: 295925 - DNA, 25 bp, Homo sapien
tccagggcctgcacatcgatgaggt

SEQ ID NO: 295926 - DNA, 25 bp, Homo sapien
gggcttgtagtagccgtgcaggaac

SEQ ID NO: 295927 - DNA, 25 bp, Homo sapien
tggttgggctcgaacaggatgggct

SEQ ID NO: 295928 - DNA, 25 bp, Homo sapien
tagcaagatggccacgatggagcac

SEQ ID NO: 295929 - DNA, 25 bp, Homo sapien
ttagcaagatggccacgatggagca

SEQ ID NO: 295930 - DNA, 25 bp, Homo sapien
gcaagatggccacgatggagcacgt

SEQ ID NO: 295931 - DNA, 25 bp, Homo sapien
tgttagcaagatggccacgatggag

SEQ ID NO: 295932 - DNA, 25 bp, Homo sapien
ctggtgagagatcagatgacggggt

SEQ ID NO: 295933 - DNA, 25 bp, Homo sapien
ggtgagagatcagatgacggggtgc

SEQ ID NO: 295934 - DNA, 25 bp, Homo sapien
tgagagatcagatgacggggtgcac

SEQ ID NO: 295935 - DNA, 25 bp, Homo sapien
gtgagagatcagatgacggggtgca

SEQ ID NO: 295936 - DNA, 25 bp, Homo sapien
ctgacgacaaagaccaccaccccac

SEQ ID NO: 295937 - DNA, 25 bp, Homo sapien
caccccacctatgggcttgggtacg

SEQ ID NO: 295938 - DNA, 25 bp, Homo sapien
acctatgggcttgggtacggccaga

SEQ ID NO: 295939 - DNA, 25 bp, Homo sapien
acaaagaccaccaccccacctatgg

SEQ ID NO: 295940 - DNA, 25 bp, Homo sapien
acagcgggaaagctgcggtgcctgt

SEQ ID NO: 295941 - DNA, 25 bp, Homo sapien
cagctgggtgcacagcgggaaagct

SEQ ID NO: 295942 - DNA, 25 bp, Homo sapien
caccgtacgggggaatgctctggtt

SEQ ID NO: 295943 - DNA, 25 bp, Homo sapien
ctgagagccacaccgtacgggggaa

SEQ ID NO: 295944 - DNA, 25 bp, Homo sapien
ggcgcagtccagggggattcacaca

SEQ ID NO: 295945 - DNA, 25 bp, Homo sapien
gggcgcagtccagggggattcacac

SEQ ID NO: 295946 - DNA, 25 bp, Homo sapien
gcgcagtccagggggattcacacac

SEQ ID NO: 295947 - DNA, 25 bp, Homo sapien
tgaccatcttgtcatgggagatgaa

SEQ ID NO: 295948 - DNA, 25 bp, Homo sapien
ccttgagggagatgaccatcttgtc

SEQ ID NO: 295949 - DNA, 25 bp, Homo sapien
tgcccttgagggagatgaccatctt

SEQ ID NO: 295950 - DNA, 25 bp, Homo sapien
gagggagatgaccatcttgtcatgg

SEQ ID NO: 295951 - DNA, 25 bp, Homo sapien
cgcatgccatcggtgatgagggtca

SEQ ID NO: 295952 - DNA, 25 bp, Homo sapien
atgagggtcagcatgtagatctgac

SEQ ID NO: 295953 - DNA, 25 bp, Homo sapien
ctacgcatgccatcggtgatgaggg

SEQ ID NO: 295954 - DNA, 25 bp, Homo sapien
tgatgagggtcagcatgtagatctg

SEQ ID NO: 295955 - DNA, 25 bp, Homo sapien
gctggtggccgccttgtcaaaagtg

SEQ ID NO: 295956 - DNA, 25 bp, Homo sapien
ctggtggccgccttgtcaaaagtgg

SEQ ID NO: 295957 - DNA, 25 bp, Homo sapien
agagttgcccaggcaagaactcagg

SEQ ID NO: 295958 - DNA, 25 bp, Homo sapien
gagagttgcccaggcaagaactcag

SEQ ID NO: 295959 - DNA, 25 bp, Homo sapien
agttgcccaggcaagaactcaggaa

SEQ ID NO: 295960 - DNA, 25 bp, Homo sapien
gagttgcccaggcaagaactcagga

SEQ ID NO: 295961 - DNA, 25 bp, Homo sapien
ctgtgacacggatttgtccctggct

SEQ ID NO: 295962 - DNA, 25 bp, Homo sapien
tcgctgccgtacacttcaatctcgt

SEQ ID NO: 295963 - DNA, 25 bp, Homo sapien
gtgcagggtccaatgttaaggatgc

SEQ ID NO: 295964 - DNA, 25 bp, Homo sapien
agcattggtgcagggtccaatgtta

SEQ ID NO: 295965 - DNA, 25 bp, Homo sapien
tggtgcagggtccaatgttaaggat

SEQ ID NO: 295966 - DNA, 25 bp, Homo sapien
cacacacctcaaaggtaggtggcca

SEQ ID NO: 295967 - DNA, 25 bp, Homo sapien
ctgtggctggagcaaaccacaatct

SEQ ID NO: 295968 - DNA, 25 bp, Homo sapien
ctccaggtccggctcagggttgttc

SEQ ID NO: 295969 - DNA, 25 bp, Homo sapien
tggagcaaaccacaatctccaggtc

SEQ ID NO: 295970 - DNA, 25 bp, Homo sapien
atgctcttctgcagcaccgacagag

SEQ ID NO: 295971 - DNA, 25 bp, Homo sapien
cgggaagctcaaaggttgtcaccac

SEQ ID NO: 295972 - DNA, 25 bp, Homo sapien
cagccgggaagctcaaaggttgtca

SEQ ID NO: 295973 - DNA, 25 bp, Homo sapien
gccgggaagctcaaaggttgtcacc

SEQ ID NO: 295974 - DNA, 25 bp, Homo sapien
ccgggaagctcaaaggttgtcacca

SEQ ID NO: 295975 - DNA, 25 bp, Homo sapien
ccgcttcgggggtgctgggttcctg

SEQ ID NO: 295976 - DNA, 25 bp, Homo sapien
ggaatatggttgagtcttcctggct

SEQ ID NO: 295977 - DNA, 25 bp, Homo sapien
caggaatcactgtctgcggtggtca

SEQ ID NO: 295978 - DNA, 25 bp, Homo sapien
ctgcgggaatatggttgagtcttcc

SEQ ID NO: 295979 - DNA, 25 bp, Homo sapien
ggttgcctacagtgcactgcatgtt

SEQ ID NO: 295980 - DNA, 25 bp, Homo sapien
tcatgatgaccacgcaggggttgcc

SEQ ID NO: 295981 - DNA, 25 bp, Homo sapien
cactgcatgttgcgggtgaccaggc

SEQ ID NO: 295982 - DNA, 25 bp, Homo sapien
gtggcagccactataggagtgtgct

SEQ ID NO: 295983 - DNA, 25 bp, Homo sapien
ctgaggtctcggtacaggcacagcg

SEQ ID NO: 295984 - DNA, 25 bp, Homo sapien
tgaggtctcggtacaggcacagcgt

SEQ ID NO: 295985 - DNA, 25 bp, Homo sapien
agcatttcctcatcaccgactgtgg

SEQ ID NO: 295986 - DNA, 25 bp, Homo sapien
agagggatcccaaatccccacacag

SEQ ID NO: 295987 - DNA, 25 bp, Homo sapien
ggactgaagagggatcccaaatccc

SEQ ID NO: 295988 - DNA, 25 bp, Homo sapien
gcatttcctcatcaccgactgtggg

SEQ ID NO: 295989 - DNA, 25 bp, Homo sapien
aagggtacagagtcccagtcggcag

SEQ ID NO: 295990 - DNA, 25 bp, Homo sapien
gtacagagtcccagtcggcaggggc

SEQ ID NO: 295991 - DNA, 25 bp, Homo sapien
tacagagtcccagtcggcaggggct

SEQ ID NO: 295992 - DNA, 25 bp, Homo sapien
tggaagggtacagagtcccagtcgg

SEQ ID NO: 295993 - DNA, 25 bp, Homo sapien
aaaggagctgtccatgaggacccgc

SEQ ID NO: 295994 - DNA, 25 bp, Homo sapien
tccttgacgagagaggcagctcctc

SEQ ID NO: 295995 - DNA, 25 bp, Homo sapien
ccacagggaagttcttcaccaagaa

SEQ ID NO: 295996 - DNA, 25 bp, Homo sapien
gagctggcaggtcaccatggtgcca

SEQ ID NO: 295997 - DNA, 25 bp, Homo sapien
gaagctgatgttgtgaaggaccttc

SEQ ID NO: 295998 - DNA, 25 bp, Homo sapien
gctgatgttgtgaaggaccttctta

SEQ ID NO: 295999 - DNA, 25 bp, Homo sapien
ggaagctgatgttgtgaaggacctt

SEQ ID NO: 296000 - DNA, 25 bp, Homo sapien
aagctgatgttgtgaaggaccttct

SEQ ID NO: 296001 - DNA, 25 bp, Homo sapien
tcagtctgtcgccaggagccagtga

SEQ ID NO: 296002 - DNA, 25 bp, Homo sapien
tgacagggccattgatgcccacggg

SEQ ID NO: 296003 - DNA, 25 bp, Homo sapien
gggccgcagatgaacactcctgagt

SEQ ID NO: 296004 - DNA, 25 bp, Homo sapien
gtggaacagagcgaaagagttgaca

SEQ ID NO: 296005 - DNA, 25 bp, Homo sapien
aatcataggacaggtaggcaggaag

SEQ ID NO: 296006 - DNA, 25 bp, Homo sapien
acaggccacggggaatcataggaca

SEQ ID NO: 296007 - DNA, 25 bp, Homo sapien
gaatcataggacaggtaggcaggaa

SEQ ID NO: 296008 - DNA, 25 bp, Homo sapien
ccacggggaatcataggacaggtag

SEQ ID NO: 296009 - DNA, 25 bp, Homo sapien
cacagtggaccgtgcagcacagcgg

SEQ ID NO: 296010 - DNA, 25 bp, Homo sapien
atggtaagccacacagtggaccgtg

SEQ ID NO: 296011 - DNA, 25 bp, Homo sapien
aagccacacagtggaccgtgcagca

SEQ ID NO: 296012 - DNA, 25 bp, Homo sapien
ccacacagtggaccgtgcagcacag

SEQ ID NO: 296013 - DNA, 25 bp, Homo sapien
tggccacagcgtacatcttggactc

SEQ ID NO: 296014 - DNA, 25 bp, Homo sapien
ctggtggccacagcgtacatcttgg

SEQ ID NO: 296015 - DNA, 25 bp, Homo sapien
ggtggccacagcgtacatcttggac

SEQ ID NO: 296016 - DNA, 25 bp, Homo sapien
gccacagcgtacatcttggactcca

SEQ ID NO: 296017 - DNA, 25 bp, Homo sapien
gatgcactgctcatctctctcaatg

SEQ ID NO: 296018 - DNA, 25 bp, Homo sapien
tgaactggatagataaggccgcctc

SEQ ID NO: 296019 - DNA, 25 bp, Homo sapien
tgcagcgacactgtcttcgtgctgg

SEQ ID NO: 296020 - DNA, 25 bp, Homo sapien
gaatagcctcccagcagactaggga

SEQ ID NO: 296021 - DNA, 25 bp, Homo sapien
ccacgcgtagcctttgaagcctgac

SEQ ID NO: 296022 - DNA, 25 bp, Homo sapien
gccacgcgtagcctttgaagcctga

SEQ ID NO: 296023 - DNA, 25 bp, Homo sapien
ggccacgcgtagcctttgaagcctg

SEQ ID NO: 296024 - DNA, 25 bp, Homo sapien
tcaagatccgccctcaggacatgac

SEQ ID NO: 296025 - DNA, 25 bp, Homo sapien
tggcatcacatgacgaggctcagcg

SEQ ID NO: 296026 - DNA, 25 bp, Homo sapien
tcctggtaacagcagccagatgctc

SEQ ID NO: 296027 - DNA, 25 bp, Homo sapien
tagagctgcctgtcgaccatgaagg

SEQ ID NO: 296028 - DNA, 25 bp, Homo sapien
ctgcagtcgtggtcagacaccagaa

SEQ ID NO: 296029 - DNA, 25 bp, Homo sapien
aggctgcagtcgtggtcagacacca

SEQ ID NO: 296030 - DNA, 25 bp, Homo sapien
aaacccagctgggtgttgtctacca

SEQ ID NO: 296031 - DNA, 25 bp, Homo sapien
aacccagctgggtgttgtctaccat

SEQ ID NO: 296032 - DNA, 25 bp, Homo sapien
ggcacatgcccccaaaactctcctt

SEQ ID NO: 296033 - DNA, 25 bp, Homo sapien
atggaagtctgcccagcgcagcagg

SEQ ID NO: 296034 - DNA, 25 bp, Homo sapien
cacatgcccccaaaactctccttgg

SEQ ID NO: 296035 - DNA, 25 bp, Homo sapien
gaagtctgcccagcgcagcaggcac

SEQ ID NO: 296036 - DNA, 25 bp, Homo sapien
cacagggtcctatagaatgcgttca

SEQ ID NO: 296037 - DNA, 25 bp, Homo sapien
gcacagggtcctatagaatgcgttc

SEQ ID NO: 296038 - DNA, 25 bp, Homo sapien
ggcgaaccacgcgatatgcttattc

SEQ ID NO: 296039 - DNA, 25 bp, Homo sapien
gaaccacgcgatatgcttattctcc

SEQ ID NO: 296040 - DNA, 25 bp, Homo sapien
ggtggcgaaccacgcgatatgctta

SEQ ID NO: 296041 - DNA, 25 bp, Homo sapien
ctgggtggcgaaccacgcgatatgc

SEQ ID NO: 296042 - DNA, 25 bp, Homo sapien
cagcagcctccagtaggttttctcc

SEQ ID NO: 296043 - DNA, 25 bp, Homo sapien
catcagcagcctccagtaggttttc

SEQ ID NO: 296044 - DNA, 25 bp, Homo sapien
cagcctccagtaggttttctcctgc

SEQ ID NO: 296045 - DNA, 25 bp, Homo sapien
agcatcagcagcctccagtaggttt

SEQ ID NO: 296046 - DNA, 25 bp, Homo sapien
tccacacgcagcatccggaaggtgc

SEQ ID NO: 296047 - DNA, 25 bp, Homo sapien
ggtgcggaggtccacacgcagcatc

SEQ ID NO: 296048 - DNA, 25 bp, Homo sapien
gaggtccacacgcagcatccggaag

SEQ ID NO: 296049 - DNA, 25 bp, Homo sapien
tggagggtgcggaggtccacacgca

SEQ ID NO: 296050 - DNA, 25 bp, Homo sapien
ccaggatgatgtcggatatggtgct

SEQ ID NO: 296051 - DNA, 25 bp, Homo sapien
tgtcggatatggtgctgatcttctt

SEQ ID NO: 296052 - DNA, 25 bp, Homo sapien
gatgtcggatatggtgctgatcttc

SEQ ID NO: 296053 - DNA, 25 bp, Homo sapien
gatgatgtcggatatggtgctgatc

SEQ ID NO: 296054 - DNA, 25 bp, Homo sapien
tacatagtatcagatggtcttccag

SEQ ID NO: 296055 - DNA, 25 bp, Homo sapien
gacatccatggagctagaagtgggc

SEQ ID NO: 296056 - DNA, 25 bp, Homo sapien
gcacaggtctggattatcttctcag

SEQ ID NO: 296057 - DNA, 25 bp, Homo sapien
actccagcctgtaggtgtaccacat

SEQ ID NO: 296058 - DNA, 25 bp, Homo sapien
caaaagtggcactgttttgtacagt

SEQ ID NO: 296059 - DNA, 25 bp, Homo sapien
gggccttctaccaaatgacttgtgt

SEQ ID NO: 296060 - DNA, 25 bp, Homo sapien
gtaatagcatttaaagtatttggag

SEQ ID NO: 296061 - DNA, 25 bp, Homo sapien
catgatattttctcatgcgtgtagt

SEQ ID NO: 296062 - DNA, 25 bp, Homo sapien
tcagggatctaaactagaaaatcca

SEQ ID NO: 296063 - DNA, 25 bp, Homo sapien
tctaaactagaaaatccatttgacc

SEQ ID NO: 296064 - DNA, 25 bp, Homo sapien
ggatctaaactagaaaatccatttg

SEQ ID NO: 296065 - DNA, 25 bp, Homo sapien
agggatctaaactagaaaatccatt

SEQ ID NO: 296066 - DNA, 25 bp, Homo sapien
cagtttgatagtcataagagatgcc

SEQ ID NO: 296067 - DNA, 25 bp, Homo sapien
cagtcatttcaatcagtaagttttc

SEQ ID NO: 296068 - DNA, 25 bp, Homo sapien
tacaaaacgtagtccacctgttatg

SEQ ID NO: 296069 - DNA, 25 bp, Homo sapien
tcatgtcacttacattgggaataag

SEQ ID NO: 296070 - DNA, 25 bp, Homo sapien
tacagtttcttaataggcccttctc

SEQ ID NO: 296071 - DNA, 25 bp, Homo sapien
aatacatgtttgaaagtgtccagaa

SEQ ID NO: 296072 - DNA, 25 bp, Homo sapien
gaaatatgtactaacttctgtacag

SEQ ID NO: 296073 - DNA, 25 bp, Homo sapien
tctgtacagtttcttaataggccct

SEQ ID NO: 296074 - DNA, 25 bp, Homo sapien
tctggaactcagtaaagacagggat

SEQ ID NO: 296075 - DNA, 25 bp, Homo sapien
tgaattttgtccttgcttacatctt

SEQ ID NO: 296076 - DNA, 25 bp, Homo sapien
tgatcgaagttagactaaacctagg

SEQ ID NO: 296077 - DNA, 25 bp, Homo sapien
ctcataaacagtttgaattttggcc

SEQ ID NO: 296078 - DNA, 25 bp, Homo sapien
gacaacttagtcaacctggaagaaa

SEQ ID NO: 296079 - DNA, 25 bp, Homo sapien
gcagccaattgatagttgcaaccaa

SEQ ID NO: 296080 - DNA, 25 bp, Homo sapien
aaaatgttacccacagacaacttag

SEQ ID NO: 296081 - DNA, 25 bp, Homo sapien
aatatttcccttaccacatgcactg

SEQ ID NO: 296082 - DNA, 25 bp, Homo sapien
cattcaaagctataagtgcccagca

SEQ ID NO: 296083 - DNA, 25 bp, Homo sapien
tattaagcccctacagtatgccagt

SEQ ID NO: 296084 - DNA, 25 bp, Homo sapien
ttcttggcgtatctctcactctggg

SEQ ID NO: 296085 - DNA, 25 bp, Homo sapien
tgtcctaggccctggcaatgcagca

SEQ ID NO: 296086 - DNA, 25 bp, Homo sapien
tagtcagtgtgctccagaggaacag

SEQ ID NO: 296087 - DNA, 25 bp, Homo sapien
caaaagagccgatgatgtgagttcc

SEQ ID NO: 296088 - DNA, 25 bp, Homo sapien
tctgtagagttgagcaggcagtcgc

SEQ ID NO: 296089 - DNA, 25 bp, Homo sapien
gaacgatgtccccacttaaaggcag

SEQ ID NO: 296090 - DNA, 25 bp, Homo sapien
gtcgctcctgcgatgtcccttgctt

SEQ ID NO: 296091 - DNA, 25 bp, Homo sapien
caggtacaatccgtgggctccagca

SEQ ID NO: 296092 - DNA, 25 bp, Homo sapien
tctggaagccgcgagaggatcaggg

SEQ ID NO: 296093 - DNA, 25 bp, Homo sapien
gatctggcctcggatgtgggctgcg

SEQ ID NO: 296094 - DNA, 25 bp, Homo sapien
ttgttaccaccatgggacgccagca

SEQ ID NO: 296095 - DNA, 25 bp, Homo sapien
gggcacagggtcgtgcattgttacc

SEQ ID NO: 296096 - DNA, 25 bp, Homo sapien
ggtcgtgcattgttaccaccatggg

SEQ ID NO: 296097 - DNA, 25 bp, Homo sapien
tgcattgttaccaccatgggacgcc

SEQ ID NO: 296098 - DNA, 25 bp, Homo sapien
acactgaggacgaggacaactcgag

SEQ ID NO: 296099 - DNA, 25 bp, Homo sapien
caactcgagggtctgaaccaagaga

SEQ ID NO: 296100 - DNA, 25 bp, Homo sapien
tgaaccaagagacacgtggtgttgc

SEQ ID NO: 296101 - DNA, 25 bp, Homo sapien
ccaagagacacgtggtgttgctgct

SEQ ID NO: 296102 - DNA, 25 bp, Homo sapien
gggaaacatggagccagcgaagcac

SEQ ID NO: 296103 - DNA, 25 bp, Homo sapien
gcttcgggactccagtctgcagggt

SEQ ID NO: 296104 - DNA, 25 bp, Homo sapien
aatccctgggacatctcaccgttga

SEQ ID NO: 296105 - DNA, 25 bp, Homo sapien
ttggtgagaggccactaccacacag

SEQ ID NO: 296106 - DNA, 25 bp, Homo sapien
gacgtctcccaacacgggcatttcg

SEQ ID NO: 296107 - DNA, 25 bp, Homo sapien
cttgttggaactgcagacgtctccc

SEQ ID NO: 296108 - DNA, 25 bp, Homo sapien
tttcggctcccgtgacaatgatgga

SEQ ID NO: 296109 - DNA, 25 bp, Homo sapien
caatgatggaaaccgaggcttgccc

SEQ ID NO: 296110 - DNA, 25 bp, Homo sapien
aaaagacgcttccacaaaggcccag

SEQ ID NO: 296111 - DNA, 25 bp, Homo sapien
gccagcttgcgtgagtaattaacaa

SEQ ID NO: 296112 - DNA, 25 bp, Homo sapien
aatctgggggctcgtgaatacgcct

SEQ ID NO: 296113 - DNA, 25 bp, Homo sapien
ctactgtgcaaacaaagatgccagc

SEQ ID NO: 296114 - DNA, 25 bp, Homo sapien
gacagcagtagtagttgtattagca

SEQ ID NO: 296115 - DNA, 25 bp, Homo sapien
cagagcggtaggatggcggctggct

SEQ ID NO: 296116 - DNA, 25 bp, Homo sapien
gccgggaaggcaggtcggagcgttg

SEQ ID NO: 296117 - DNA, 25 bp, Homo sapien
tagtagttgtattagcatcggtgct

SEQ ID NO: 296118 - DNA, 25 bp, Homo sapien
cctgcttcccgaggaacgcagccag

SEQ ID NO: 296119 - DNA, 25 bp, Homo sapien
tatgtgttgcggaaactgcctggga

SEQ ID NO: 296120 - DNA, 25 bp, Homo sapien
cccgggcacgcagtagctgacacta

SEQ ID NO: 296121 - DNA, 25 bp, Homo sapien
ctatgtgttgcggaaactgcctggg

SEQ ID NO: 296122 - DNA, 25 bp, Homo sapien
tgacactacggggtgatagggcccc

SEQ ID NO: 296123 - DNA, 25 bp, Homo sapien
ttccgcggggatcctgagcacaatc

SEQ ID NO: 296124 - DNA, 25 bp, Homo sapien
gatcctgagcacaatccgtcaccta

SEQ ID NO: 296125 - DNA, 25 bp, Homo sapien
agcgcggcggatgcacagcgtttcc

SEQ ID NO: 296126 - DNA, 25 bp, Homo sapien
tccgtcacctagaccagccgtggtt

SEQ ID NO: 296127 - DNA, 25 bp, Homo sapien
aggtcccacatcaggactttctctg

SEQ ID NO: 296128 - DNA, 25 bp, Homo sapien
tggaactgagacttccccttaccga

SEQ ID NO: 296129 - DNA, 25 bp, Homo sapien
gaaacacttctttattggatcctgg

SEQ ID NO: 296130 - DNA, 25 bp, Homo sapien
gagaacatagcctagaagagcctgg

SEQ ID NO: 296131 - DNA, 25 bp, Homo sapien
tgagtggcttctacccgggagctgt

SEQ ID NO: 296132 - DNA, 25 bp, Homo sapien
ggagctccaagccaaaaggccacac

SEQ ID NO: 296133 - DNA, 25 bp, Homo sapien
ccacactgctgtgtctcatgagtgg

SEQ ID NO: 296134 - DNA, 25 bp, Homo sapien
gccacccccttggtcactctgttcc

SEQ ID NO: 296135 - DNA, 25 bp, Homo sapien
gcctgagccagtgacgtggcagcac

SEQ ID NO: 296136 - DNA, 25 bp, Homo sapien
cataagaattaggagctgagaggct

SEQ ID NO: 296137 - DNA, 25 bp, Homo sapien
atctgaggtcatcaaaagttcgaga

SEQ ID NO: 296138 - DNA, 25 bp, Homo sapien
cagcacccatgtgaggaacagcgag

SEQ ID NO: 296139 - DNA, 25 bp, Homo sapien
ttgtgacaagtgacaaccttttcat

SEQ ID NO: 296140 - DNA, 25 bp, Homo sapien
tgaggtgaaagcctgttagttgtga

SEQ ID NO: 296141 - DNA, 25 bp, Homo sapien
gaaagcctgttagttgtgacaagtg

SEQ ID NO: 296142 - DNA, 25 bp, Homo sapien
tgttagttgtgacaagtgacaacct

SEQ ID NO: 296143 - DNA, 25 bp, Homo sapien
atccacactccagggacattggttt

SEQ ID NO: 296144 - DNA, 25 bp, Homo sapien
agcagacgggacagctgcttgcttc

SEQ ID NO: 296145 - DNA, 25 bp, Homo sapien
agatagtctgagcagacgggacagc

SEQ ID NO: 296146 - DNA, 25 bp, Homo sapien
ctgagcagacgggacagctgcttgc

SEQ ID NO: 296147 - DNA, 25 bp, Homo sapien
gtggcggccacaggtaaagcgaggg

SEQ ID NO: 296148 - DNA, 25 bp, Homo sapien
cacgtcaaatctctcggcaaggtct

SEQ ID NO: 296149 - DNA, 25 bp, Homo sapien
ggacacgtcaaatctctcggcaagg

SEQ ID NO: 296150 - DNA, 25 bp, Homo sapien
caaatctctcggcaaggtcttgccg

SEQ ID NO: 296151 - DNA, 25 bp, Homo sapien
aaaaaggaaacgttctgcatgccca

SEQ ID NO: 296152 - DNA, 25 bp, Homo sapien
ccactcgctgtaacttgcggtctac

SEQ ID NO: 296153 - DNA, 25 bp, Homo sapien
ctgaatgtatagacatgggaaccac

SEQ ID NO: 296154 - DNA, 25 bp, Homo sapien
aaaaatccccactcgctgtaacttg

SEQ ID NO: 296155 - DNA, 25 bp, Homo sapien
gacggactggagcatcagtagtgcc

SEQ ID NO: 296156 - DNA, 25 bp, Homo sapien
gtagtgcctgagttcatcaaaggac

SEQ ID NO: 296157 - DNA, 25 bp, Homo sapien
catcaaaggacagatgctcaagaca

SEQ ID NO: 296158 - DNA, 25 bp, Homo sapien
atttggcctccccaggacggactgg

SEQ ID NO: 296159 - DNA, 25 bp, Homo sapien
cccatatctttctcctatgactgta

SEQ ID NO: 296160 - DNA, 25 bp, Homo sapien
tataatgcttttaccaagtagaaaa

SEQ ID NO: 296161 - DNA, 25 bp, Homo sapien
ttaatacttacgactcaataatcga

SEQ ID NO: 296162 - DNA, 25 bp, Homo sapien
tatagattatagaaatgtcccatat

SEQ ID NO: 296163 - DNA, 25 bp, Homo sapien
ctgggaagtgagagaggagcagcag

SEQ ID NO: 296164 - DNA, 25 bp, Homo sapien
agaggagcagcaggaggacaggagc

SEQ ID NO: 296165 - DNA, 25 bp, Homo sapien
tgggaagtgagagaggagcagcagg

SEQ ID NO: 296166 - DNA, 25 bp, Homo sapien
ggagcagcaggaggacaggagccat

SEQ ID NO: 296167 - DNA, 25 bp, Homo sapien
cctggacgtgggaggcctgtcctta

SEQ ID NO: 296168 - DNA, 25 bp, Homo sapien
ccctggacgtgggaggcctgtcctt

SEQ ID NO: 296169 - DNA, 25 bp, Homo sapien
agcatgaagttgctggaagatctga

SEQ ID NO: 296170 - DNA, 25 bp, Homo sapien
catcaatccagaggagcagctcggg

SEQ ID NO: 296171 - DNA, 25 bp, Homo sapien
aagtgcggctggtgcttccagagat

SEQ ID NO: 296172 - DNA, 25 bp, Homo sapien
gtcctcagactggagcttagatatg

SEQ ID NO: 296173 - DNA, 25 bp, Homo sapien
tagaaatcagcatggacgccagtgc

SEQ ID NO: 296174 - DNA, 25 bp, Homo sapien
gatccctcaaagacagtagtccatg

SEQ ID NO: 296175 - DNA, 25 bp, Homo sapien
gacaaggaggtttctgctctgatcc

SEQ ID NO: 296176 - DNA, 25 bp, Homo sapien
tcatctagataaccgggcaacaccg

SEQ ID NO: 296177 - DNA, 25 bp, Homo sapien
tgcttgaatggtctccggcctctgg

SEQ ID NO: 296178 - DNA, 25 bp, Homo sapien
ttttccatgcgcaccagtagaggct

SEQ ID NO: 296179 - DNA, 25 bp, Homo sapien
tcatctcagcctatggtgggcagcg

SEQ ID NO: 296180 - DNA, 25 bp, Homo sapien
tccacagtgtgatctcgagaaaggc

SEQ ID NO: 296181 - DNA, 25 bp, Homo sapien
gaaaatgccggaagactccagggtg

SEQ ID NO: 296182 - DNA, 25 bp, Homo sapien
ccctgtacctatctggaatgttcgc

SEQ ID NO: 296183 - DNA, 25 bp, Homo sapien
tggaatgttcgcaccctgtaagtct

SEQ ID NO: 296184 - DNA, 25 bp, Homo sapien
tacctatctggaatgttcgcaccct

SEQ ID NO: 296185 - DNA, 25 bp, Homo sapien
caccctgtaagtctcctcattttca

SEQ ID NO: 296186 - DNA, 25 bp, Homo sapien
ctggtaaacagttcctccatgaagt

SEQ ID NO: 296187 - DNA, 25 bp, Homo sapien
ggtaaacagttcctccatgaagtct

SEQ ID NO: 296188 - DNA, 25 bp, Homo sapien
aggagatggttctacccagaaaggc

SEQ ID NO: 296189 - DNA, 25 bp, Homo sapien
ataggaggagatggttctacccaga

SEQ ID NO: 296190 - DNA, 25 bp, Homo sapien
tcatcctagtcccagaacctgggaa

SEQ ID NO: 296191 - DNA, 25 bp, Homo sapien
ggccatgaggctgtcacatctaaca

SEQ ID NO: 296192 - DNA, 25 bp, Homo sapien
tgccaccatacctagaggaggccat

SEQ ID NO: 296193 - DNA, 25 bp, Homo sapien
ggaagatgccaccatacctagagga

SEQ ID NO: 296194 - DNA, 25 bp, Homo sapien
ttattttacaagcacgggcccctga

SEQ ID NO: 296195 - DNA, 25 bp, Homo sapien
taaggcagtttgacatctacccatc

SEQ ID NO: 296196 - DNA, 25 bp, Homo sapien
gcctgattacaactccctgggtgct

SEQ ID NO: 296197 - DNA, 25 bp, Homo sapien
aacttgtcccgccttgagtctgatg

SEQ ID NO: 296198 - DNA, 25 bp, Homo sapien
ccattttggcgtgagcagttacagc

SEQ ID NO: 296199 - DNA, 25 bp, Homo sapien
catggatacaaaaactctgccgtgt

SEQ ID NO: 296200 - DNA, 25 bp, Homo sapien
taaatacccctcttacttggagagc

SEQ ID NO: 296201 - DNA, 25 bp, Homo sapien
catcagactcaaggcgggacaagtt

SEQ ID NO: 296202 - DNA, 25 bp, Homo sapien
tggtaaatacctgccatgatgctgg

SEQ ID NO: 296203 - DNA, 25 bp, Homo sapien
tgtaactgctcacgccaaaatggct

SEQ ID NO: 296204 - DNA, 25 bp, Homo sapien
gcacccagggagttgtaatcaggct

SEQ ID NO: 296205 - DNA, 25 bp, Homo sapien
gatgggtagatgtcaaactgcctta

SEQ ID NO: 296206 - DNA, 25 bp, Homo sapien
gatgaattatctgtgctcctagcaa

SEQ ID NO: 296207 - DNA, 25 bp, Homo sapien
aacagtacctaactatagcggatgg

SEQ ID NO: 296208 - DNA, 25 bp, Homo sapien
gaatcaaataatcacgtgttgcagg

SEQ ID NO: 296209 - DNA, 25 bp, Homo sapien
gaagtcttctccgaccacctgctta

SEQ ID NO: 296210 - DNA, 25 bp, Homo sapien
tattctgctcaaaatcctccaaggt

SEQ ID NO: 296211 - DNA, 25 bp, Homo sapien
aaaagtccaaatgctctggcgcccc

SEQ ID NO: 296212 - DNA, 25 bp, Homo sapien
taagcaggtggtcggagaagacttc

SEQ ID NO: 296213 - DNA, 25 bp, Homo sapien
tgctaggagcacagataattcatcc

SEQ ID NO: 296214 - DNA, 25 bp, Homo sapien
tagtgacgtgatctgacaaatgtgt

SEQ ID NO: 296215 - DNA, 25 bp, Homo sapien
gccaggcatgacaagagcaagccag

SEQ ID NO: 296216 - DNA, 25 bp, Homo sapien
gtgagctttcgaggcagagagaaca

SEQ ID NO: 296217 - DNA, 25 bp, Homo sapien
catacagtgtgttaatgaccatgca

SEQ ID NO: 296218 - DNA, 25 bp, Homo sapien
gaaacccataagcatggagtcacgc

SEQ ID NO: 296219 - DNA, 25 bp, Homo sapien
ctggaagaggaaacccataagcatg

SEQ ID NO: 296220 - DNA, 25 bp, Homo sapien
cacgctaagttgaaacaggcagcat

SEQ ID NO: 296221 - DNA, 25 bp, Homo sapien
tggagtcacgctaagttgaaacagg

SEQ ID NO: 296222 - DNA, 25 bp, Homo sapien
tctgatgccttagctgggtctgagc

SEQ ID NO: 296223 - DNA, 25 bp, Homo sapien
catcatcccggaaatgtgtgaattc

SEQ ID NO: 296224 - DNA, 25 bp, Homo sapien
cagtctcctggaaattctccgctgg

SEQ ID NO: 296225 - DNA, 25 bp, Homo sapien
tgacctcatgaacatgaaccctgaa

SEQ ID NO: 296226 - DNA, 25 bp, Homo sapien
ctgtcgatttagacttcttatgtac

SEQ ID NO: 296227 - DNA, 25 bp, Homo sapien
gtcgatttagacttcttatgtacgg

SEQ ID NO: 296228 - DNA, 25 bp, Homo sapien
cgatttagacttcttatgtacggtc

SEQ ID NO: 296229 - DNA, 25 bp, Homo sapien
gatttagacttcttatgtacggtca

SEQ ID NO: 296230 - DNA, 25 bp, Homo sapien
caatcaccccaaagtttaacgcaat

SEQ ID NO: 296231 - DNA, 25 bp, Homo sapien
aactctgtggctgcataacaatcac

SEQ ID NO: 296232 - DNA, 25 bp, Homo sapien
agttattgactagggctggaggatc

SEQ ID NO: 296233 - DNA, 25 bp, Homo sapien
ggcacagtcatgactgttggccaga

SEQ ID NO: 296234 - DNA, 25 bp, Homo sapien
ccggactggcgactaccggagctga

SEQ ID NO: 296235 - DNA, 25 bp, Homo sapien
ggtcggccgatcgatgactccgcgc

SEQ ID NO: 296236 - DNA, 25 bp, Homo sapien
tcggtctctggaatagagcgcccgc

SEQ ID NO: 296237 - DNA, 25 bp, Homo sapien
tcctggagccgaccccgagagctgg

SEQ ID NO: 296238 - DNA, 25 bp, Homo sapien
aggtccgcttcagaagccgcacccg

SEQ ID NO: 296239 - DNA, 25 bp, Homo sapien
gcagggactgcctcaggtgcgagcg

SEQ ID NO: 296240 - DNA, 25 bp, Homo sapien
tgcgagcgcaaatgccccagcgtcg

SEQ ID NO: 296241 - DNA, 25 bp, Homo sapien
gtctcgggcacctccagcggccagg

SEQ ID NO: 296242 - DNA, 25 bp, Homo sapien
gaccacccgcgcttcccgtcgcctg

SEQ ID NO: 296243 - DNA, 25 bp, Homo sapien
agccgaccacccgcgcttcccgtcg

SEQ ID NO: 296244 - DNA, 25 bp, Homo sapien
tccaggagccggaccccagccgacc

SEQ ID NO: 296245 - DNA, 25 bp, Homo sapien
ccggctccgcgacgcccggaagagc

SEQ ID NO: 296246 - DNA, 25 bp, Homo sapien
cagcgatacaagctaccggtggcct

SEQ ID NO: 296247 - DNA, 25 bp, Homo sapien
ttttcggcggcgaagtccaagcgct

SEQ ID NO: 296248 - DNA, 25 bp, Homo sapien
gtgctcggcgcatgaacacaacaga

SEQ ID NO: 296249 - DNA, 25 bp, Homo sapien
caagctctcaagatcaacgtttgcc

SEQ ID NO: 296250 - DNA, 25 bp, Homo sapien
gaatcaaacatatcaagtccccaga

SEQ ID NO: 296251 - DNA, 25 bp, Homo sapien
ggatccttgtagttcaatgtaattg

SEQ ID NO: 296252 - DNA, 25 bp, Homo sapien
tatattaggcgctggaatgtcatct

SEQ ID NO: 296253 - DNA, 25 bp, Homo sapien
aatcccatatgaagccaaggtctct

SEQ ID NO: 296254 - DNA, 25 bp, Homo sapien
tactgtcgtcattccaaacaccaga

SEQ ID NO: 296255 - DNA, 25 bp, Homo sapien
tcatcctgcatgctagtctgattgg

SEQ ID NO: 296256 - DNA, 25 bp, Homo sapien
agggttgctcattattctggagtga

SEQ ID NO: 296257 - DNA, 25 bp, Homo sapien
ggccaaagagggttgctcattattc

SEQ ID NO: 296258 - DNA, 25 bp, Homo sapien
ggttctgagggatagaaacctgtgc

SEQ ID NO: 296259 - DNA, 25 bp, Homo sapien
tgtgccctctgccatatgcgcatta

SEQ ID NO: 296260 - DNA, 25 bp, Homo sapien
gttctgagggatagaaacctgtgcc

SEQ ID NO: 296261 - DNA, 25 bp, Homo sapien
tcttgaattgactcagcttcaaaat

SEQ ID NO: 296262 - DNA, 25 bp, Homo sapien
tgaggtatgtaacctgactccaaca

SEQ ID NO: 296263 - DNA, 25 bp, Homo sapien
cagtcagctgattgatacaaggtct

SEQ ID NO: 296264 - DNA, 25 bp, Homo sapien
gaagatgtatcaacactatcaaggc

SEQ ID NO: 296265 - DNA, 25 bp, Homo sapien
tcaaggcatcattggcatcagaaca

SEQ ID NO: 296266 - DNA, 25 bp, Homo sapien
ccaaaggcacacaggtgagagtagc

SEQ ID NO: 296267 - DNA, 25 bp, Homo sapien
tgtactgcagcttatacaccccgct

SEQ ID NO: 296268 - DNA, 25 bp, Homo sapien
cacttctccggcatggacagtgctt

SEQ ID NO: 296269 - DNA, 25 bp, Homo sapien
gagctgccctcgcagagaggatgca

SEQ ID NO: 296270 - DNA, 25 bp, Homo sapien
tcattaaaataatcttgctagtttt

SEQ ID NO: 296271 - DNA, 25 bp, Homo sapien
tgttcattaaaataatcttgctagt

SEQ ID NO: 296272 - DNA, 25 bp, Homo sapien
ttcattaaaataatcttgctagttt

SEQ ID NO: 296273 - DNA, 25 bp, Homo sapien
gttcattaaaataatcttgctagtt

SEQ ID NO: 296274 - DNA, 25 bp, Homo sapien
tcacacttctaatctcattgttgat

SEQ ID NO: 296275 - DNA, 25 bp, Homo sapien
ttgcaaataaaagattctggtagca

SEQ ID NO: 296276 - DNA, 25 bp, Homo sapien
ttctggtagcagctgcaatcttttc

SEQ ID NO: 296277 - DNA, 25 bp, Homo sapien
taaaagattctggtagcagctgcaa

SEQ ID NO: 296278 - DNA, 25 bp, Homo sapien
caacatgtgggcgacagatcaccag

SEQ ID NO: 296279 - DNA, 25 bp, Homo sapien
aaatgttcaactcggtcgggcgcag

SEQ ID NO: 296280 - DNA, 25 bp, Homo sapien
caaggccccatggttagtggcagaa

SEQ ID NO: 296281 - DNA, 25 bp, Homo sapien
tacggacgcactagcaaactgcagc

SEQ ID NO: 296282 - DNA, 25 bp, Homo sapien
ctttgtatatgttggctacattttc

SEQ ID NO: 296283 - DNA, 25 bp, Homo sapien
atctttgtatatgttggctacattt

SEQ ID NO: 296284 - DNA, 25 bp, Homo sapien
tctttaaagaggcgagagagtttct

SEQ ID NO: 296285 - DNA, 25 bp, Homo sapien
tttaaagaggcgagagagtttctga

SEQ ID NO: 296286 - DNA, 25 bp, Homo sapien
cagaaaagagggcagtcagatgtca

SEQ ID NO: 296287 - DNA, 25 bp, Homo sapien
gaagaggaacatttcgccaggagca

SEQ ID NO: 296288 - DNA, 25 bp, Homo sapien
tgacctcatgctagaccacaagaat

SEQ ID NO: 296289 - DNA, 25 bp, Homo sapien
ccaaccttaggtggaaagaaatcat

SEQ ID NO: 296290 - DNA, 25 bp, Homo sapien
tatatctaaatatatgtctatatag

SEQ ID NO: 296291 - DNA, 25 bp, Homo sapien
tctatatagacatatatatctaaat

SEQ ID NO: 296292 - DNA, 25 bp, Homo sapien
atgtctatatagacatatatatcta

SEQ ID NO: 296293 - DNA, 25 bp, Homo sapien
tatctaaatatatgtctatatagac

SEQ ID NO: 296294 - DNA, 25 bp, Homo sapien
tgtgaaatatccaactaagtgcctg

SEQ ID NO: 296295 - DNA, 25 bp, Homo sapien
tagaacaatgtttggcacaccaagc

SEQ ID NO: 296296 - DNA, 25 bp, Homo sapien
cacacacaacatgtacacgagtgag

SEQ ID NO: 296297 - DNA, 25 bp, Homo sapien
ttctgggcaaaagcgttgaaccaac

SEQ ID NO: 296298 - DNA, 25 bp, Homo sapien
gcagatataaaaacctccacaggag

SEQ ID NO: 296299 - DNA, 25 bp, Homo sapien
ttccaatgggaggacgaccaaccca

SEQ ID NO: 296300 - DNA, 25 bp, Homo sapien
taaagaggtcacgacaaaccgcaga

SEQ ID NO: 296301 - DNA, 25 bp, Homo sapien
gatccgtagtttcagttccaatggg

SEQ ID NO: 296302 - DNA, 25 bp, Homo sapien
tacagcccacgttcattactggagg

SEQ ID NO: 296303 - DNA, 25 bp, Homo sapien
tactggaggtcaagctgacttaggc

SEQ ID NO: 296304 - DNA, 25 bp, Homo sapien
gactcggctatcagaagcatgacca

SEQ ID NO: 296305 - DNA, 25 bp, Homo sapien
caacgatgtcctgaatgactcggct

SEQ ID NO: 296306 - DNA, 25 bp, Homo sapien
ttccaatctgtgtcttgaactctga

SEQ ID NO: 296307 - DNA, 25 bp, Homo sapien
aatctgtgtcttgaactctgacagt

SEQ ID NO: 296308 - DNA, 25 bp, Homo sapien
ttctttccaatctgtgtcttgaact

SEQ ID NO: 296309 - DNA, 25 bp, Homo sapien
gtgtcttgaactctgacagtattgt

SEQ ID NO: 296310 - DNA, 25 bp, Homo sapien
gaaagctgtctcacctacactgaaa

SEQ ID NO: 296311 - DNA, 25 bp, Homo sapien
taagcagtaggcctcaatagtggac

SEQ ID NO: 296312 - DNA, 25 bp, Homo sapien
caagtttgactgtgagactgcagca

SEQ ID NO: 296313 - DNA, 25 bp, Homo sapien
tgatgactactccagcacagacaac

SEQ ID NO: 296314 - DNA, 25 bp, Homo sapien
aggagcatcacaaaccgccctttcg

SEQ ID NO: 296315 - DNA, 25 bp, Homo sapien
taggaaatggcctagggtgcaaggg

SEQ ID NO: 296316 - DNA, 25 bp, Homo sapien
ttttctttgtatgtgcctcttcctg

SEQ ID NO: 296317 - DNA, 25 bp, Homo sapien
gaggaaggcgggagctaggaaatgg

SEQ ID NO: 296318 - DNA, 25 bp, Homo sapien
tcacatgaatgacagccggccatca

SEQ ID NO: 296319 - DNA, 25 bp, Homo sapien
tgagtgaactgattgggtctccaac

SEQ ID NO: 296320 - DNA, 25 bp, Homo sapien
tgggtctccaacatagggaagtgtt

SEQ ID NO: 296321 - DNA, 25 bp, Homo sapien
tgggccaactggatcaaagcgtggt

SEQ ID NO: 296322 - DNA, 25 bp, Homo sapien
tcgagatcagcaccccaaggagttg

SEQ ID NO: 296323 - DNA, 25 bp, Homo sapien
gattggcagccaactattcccaagg

SEQ ID NO: 296324 - DNA, 25 bp, Homo sapien
cagaggaacctttgggtcataccac

SEQ ID NO: 296325 - DNA, 25 bp, Homo sapien
ccacccctagggctataaatgtatc

SEQ ID NO: 296326 - DNA, 25 bp, Homo sapien
ttagaagacagagcgctgctaaaaa

SEQ ID NO: 296327 - DNA, 25 bp, Homo sapien
tcattcatttcataaatcaggcctt

SEQ ID NO: 296328 - DNA, 25 bp, Homo sapien
atcaggcctttattagaagacagag

SEQ ID NO: 296329 - DNA, 25 bp, Homo sapien
acaaaaattatctgcctatgctatg

SEQ ID NO: 296330 - DNA, 25 bp, Homo sapien
gcttcacacaacaaacacagcagag

SEQ ID NO: 296331 - DNA, 25 bp, Homo sapien
gagatgccattgtcagcatcggtca

SEQ ID NO: 296332 - DNA, 25 bp, Homo sapien
tgagggcagactaatctcttatgct

SEQ ID NO: 296333 - DNA, 25 bp, Homo sapien
cacagcttaagcagcaaaggtctgg

SEQ ID NO: 296334 - DNA, 25 bp, Homo sapien
aggcagggcagggtcttttcacttc

SEQ ID NO: 296335 - DNA, 25 bp, Homo sapien
gttaaggcagggcagggtcttttca

SEQ ID NO: 296336 - DNA, 25 bp, Homo sapien
taaggcagggcagggtcttttcact

SEQ ID NO: 296337 - DNA, 25 bp, Homo sapien
tcagttaaggcagggcagggtcttt

SEQ ID NO: 296338 - DNA, 25 bp, Homo sapien
aagccggatcaggtgtgaggggagg

SEQ ID NO: 296339 - DNA, 25 bp, Homo sapien
gtaagccggatcaggtgtgagggga

SEQ ID NO: 296340 - DNA, 25 bp, Homo sapien
taagccggatcaggtgtgaggggag

SEQ ID NO: 296341 - DNA, 25 bp, Homo sapien
cagaaaggctgcaggacgcagtcct

SEQ ID NO: 296342 - DNA, 25 bp, Homo sapien
ggacagaaaggctgcaggacgcagt

SEQ ID NO: 296343 - DNA, 25 bp, Homo sapien
gctgcaggacgcagtcctggctctt

SEQ ID NO: 296344 - DNA, 25 bp, Homo sapien
ggctgcaggacgcagtcctggctct

SEQ ID NO: 296345 - DNA, 25 bp, Homo sapien
gctgtaccttgtagcattctgagga

SEQ ID NO: 296346 - DNA, 25 bp, Homo sapien
tgagaagcgaaagtggtaaaagtat

SEQ ID NO: 296347 - DNA, 25 bp, Homo sapien
tgggctgtaccttgtagcattctga

SEQ ID NO: 296348 - DNA, 25 bp, Homo sapien
acaggcctgaattctgagaagcgaa

SEQ ID NO: 296349 - DNA, 25 bp, Homo sapien
tgcttcgagtgggattaggggcggc

SEQ ID NO: 296350 - DNA, 25 bp, Homo sapien
agtcagcaaagggagtagggatggg

SEQ ID NO: 296351 - DNA, 25 bp, Homo sapien
ttctgagccagaagaaggaaattta

SEQ ID NO: 296352 - DNA, 25 bp, Homo sapien
agccagaagaaggaaatttacaggg

SEQ ID NO: 296353 - DNA, 25 bp, Homo sapien
cttggaattgacaaatgcacatcct

SEQ ID NO: 296354 - DNA, 25 bp, Homo sapien
cctgtcacctcgctatgagttcata

SEQ ID NO: 296355 - DNA, 25 bp, Homo sapien
taagagcagcctgttacaagattca

SEQ ID NO: 296356 - DNA, 25 bp, Homo sapien
tctgataaccggcttcaagaggaga

SEQ ID NO: 296357 - DNA, 25 bp, Homo sapien
tccacaggtcatggaggttatacag

SEQ ID NO: 296358 - DNA, 25 bp, Homo sapien
tagtccttgcccctttggcatctgg

SEQ ID NO: 296359 - DNA, 25 bp, Homo sapien
agctgacgtgacatctggtaaggga

SEQ ID NO: 296360 - DNA, 25 bp, Homo sapien
ggaagccgccttttcttaattagca

SEQ ID NO: 296361 - DNA, 25 bp, Homo sapien
cccttgtcctggttgatcctgtgtc

SEQ ID NO: 296362 - DNA, 25 bp, Homo sapien
cagctggaactggagttcaggcccc

SEQ ID NO: 296363 - DNA, 25 bp, Homo sapien
tctttcccttgtcctggttgatcct

SEQ ID NO: 296364 - DNA, 25 bp, Homo sapien
gtcacccagtgaggtctcttcccag

SEQ ID NO: 296365 - DNA, 25 bp, Homo sapien
cccaggagcactgtttgggtgcagt

SEQ ID NO: 296366 - DNA, 25 bp, Homo sapien
tgcagcccaggagcactgtttgggt

SEQ ID NO: 296367 - DNA, 25 bp, Homo sapien
tttgggtgcagtccgggagcactgt

SEQ ID NO: 296368 - DNA, 25 bp, Homo sapien
ggtgcagcccaggagcactgtttgg

SEQ ID NO: 296369 - DNA, 25 bp, Homo sapien
ggagcactgtttgggtgcagcccag

SEQ ID NO: 296370 - DNA, 25 bp, Homo sapien
ctgtttgggtacaatgcgggagcac

SEQ ID NO: 296371 - DNA, 25 bp, Homo sapien
cgggagcactgtttgggtgcagccc

SEQ ID NO: 296372 - DNA, 25 bp, Homo sapien
tttgggtacaatgcgggagcactgt

SEQ ID NO: 296373 - DNA, 25 bp, Homo sapien
actgtttgtgtacagtcagggagca

SEQ ID NO: 296374 - DNA, 25 bp, Homo sapien
gtaatccgggagcactgttagggtg

SEQ ID NO: 296375 - DNA, 25 bp, Homo sapien
gtcctgcaggacagtcagcaggctt

SEQ ID NO: 296376 - DNA, 25 bp, Homo sapien
tcctgcaggacagtcagcaggcttt

SEQ ID NO: 296377 - DNA, 25 bp, Homo sapien
tggactctttacaggaaacgtttgc

SEQ ID NO: 296378 - DNA, 25 bp, Homo sapien
gccacctgattgctagatactgtat

SEQ ID NO: 296379 - DNA, 25 bp, Homo sapien
tacttgcccttactatgttcaagga

SEQ ID NO: 296380 - DNA, 25 bp, Homo sapien
acatggccctgcttatttgtgcaca

SEQ ID NO: 296381 - DNA, 25 bp, Homo sapien
tacaaaaacgggtggtgcgctggct

SEQ ID NO: 296382 - DNA, 25 bp, Homo sapien
accacagaaggtgaaaccatggata

SEQ ID NO: 296383 - DNA, 25 bp, Homo sapien
aaaactcttcttaacccatgggctg

SEQ ID NO: 296384 - DNA, 25 bp, Homo sapien
gtgcgctggctttggccctcaggcc

SEQ ID NO: 296385 - DNA, 25 bp, Homo sapien
gcacagggcagtcttccagcaagct

SEQ ID NO: 296386 - DNA, 25 bp, Homo sapien
aggccccctgccctactgaggcgtg

SEQ ID NO: 296387 - DNA, 25 bp, Homo sapien
acagggcagtcttccagcaagcttc

SEQ ID NO: 296388 - DNA, 25 bp, Homo sapien
agggcagtcttccagcaagcttcct

SEQ ID NO: 296389 - DNA, 25 bp, Homo sapien
ccagggagttggagctagagatttc

SEQ ID NO: 296390 - DNA, 25 bp, Homo sapien
gccttatgagtccatggtcactgat

SEQ ID NO: 296391 - DNA, 25 bp, Homo sapien
tgctgattcgattcctctgtggttg

SEQ ID NO: 296392 - DNA, 25 bp, Homo sapien
gaagtgggccaaggtccaggattat

SEQ ID NO: 296393 - DNA, 25 bp, Homo sapien
ttagaaggccagagagctcgaggct

SEQ ID NO: 296394 - DNA, 25 bp, Homo sapien
ccaagacagacttaaggtggaagga

SEQ ID NO: 296395 - DNA, 25 bp, Homo sapien
ttgactattccgtttctcagggaaa

SEQ ID NO: 296396 - DNA, 25 bp, Homo sapien
gctaccggtattttcccaagacaga

SEQ ID NO: 296397 - DNA, 25 bp, Homo sapien
tctctcctcgcagcttgcagggaac

SEQ ID NO: 296398 - DNA, 25 bp, Homo sapien
tgtctaggaaggctccgtctgccag

SEQ ID NO: 296399 - DNA, 25 bp, Homo sapien
cagggaactcctggcatcctgcatt

SEQ ID NO: 296400 - DNA, 25 bp, Homo sapien
gccagttgtgacctagggaggatct

SEQ ID NO: 296401 - DNA, 25 bp, Homo sapien
cttcctggatgcacgggaatcttcc

SEQ ID NO: 296402 - DNA, 25 bp, Homo sapien
ttcctggatgcacgggaatcttcct

SEQ ID NO: 296403 - DNA, 25 bp, Homo sapien
tcttcctggatgcacgggaatcttc

SEQ ID NO: 296404 - DNA, 25 bp, Homo sapien
tcctggatgcacgggaatcttcctg

SEQ ID NO: 296405 - DNA, 25 bp, Homo sapien
ggagatgtccatcactaggtgctca

SEQ ID NO: 296406 - DNA, 25 bp, Homo sapien
taggtgctcagctgatggtccacac

SEQ ID NO: 296407 - DNA, 25 bp, Homo sapien
ccaagacagtgggaggaaacaccaa

SEQ ID NO: 296408 - DNA, 25 bp, Homo sapien
tgctgttgagccagggatccattcc

SEQ ID NO: 296409 - DNA, 25 bp, Homo sapien
cttctgactggaagctggctgccat

SEQ ID NO: 296410 - DNA, 25 bp, Homo sapien
tcacctcctgcatcttctgactgga

SEQ ID NO: 296411 - DNA, 25 bp, Homo sapien
ctgacccccaacttttcacctcctg

SEQ ID NO: 296412 - DNA, 25 bp, Homo sapien
acctcctgcatcttctgactggaag

SEQ ID NO: 296413 - DNA, 25 bp, Homo sapien
tcagccagagttcagacttcaaaag

SEQ ID NO: 296414 - DNA, 25 bp, Homo sapien
gttctgtcagccagagttcagactt

SEQ ID NO: 296415 - DNA, 25 bp, Homo sapien
ctgtcagccagagttcagacttcaa

SEQ ID NO: 296416 - DNA, 25 bp, Homo sapien
cagccagagttcagacttcaaaagg

SEQ ID NO: 296417 - DNA, 25 bp, Homo sapien
aatgccgccatctggtgggcacacg

SEQ ID NO: 296418 - DNA, 25 bp, Homo sapien
accccagctgttagggaatatgcta

SEQ ID NO: 296419 - DNA, 25 bp, Homo sapien
cacggagccgtgtccatttcgcaac

SEQ ID NO: 296420 - DNA, 25 bp, Homo sapien
tccagaagatcagtatgaatgggcc

SEQ ID NO: 296421 - DNA, 25 bp, Homo sapien
gagatagcaaaggatggcggggcca

SEQ ID NO: 296422 - DNA, 25 bp, Homo sapien
gagagatagcaaaggatggcggggc

SEQ ID NO: 296423 - DNA, 25 bp, Homo sapien
agatagcaaaggatggcggggccat

SEQ ID NO: 296424 - DNA, 25 bp, Homo sapien
cagagagatagcaaaggatggcggg

SEQ ID NO: 296425 - DNA, 25 bp, Homo sapien
ggcaacccttgactcctgttgctgg

SEQ ID NO: 296426 - DNA, 25 bp, Homo sapien
ctgtgttgggggcaacccttgactc

SEQ ID NO: 296427 - DNA, 25 bp, Homo sapien
tgggggcaacccttgactcctgttg

SEQ ID NO: 296428 - DNA, 25 bp, Homo sapien
gctcagctgtgttgggggcaaccct

SEQ ID NO: 296429 - DNA, 25 bp, Homo sapien
catgagcaatgaccgaacggcccat

SEQ ID NO: 296430 - DNA, 25 bp, Homo sapien
tcatccatgagcaatgaccgaacgg

SEQ ID NO: 296431 - DNA, 25 bp, Homo sapien
atccatgagcaatgaccgaacggcc

SEQ ID NO: 296432 - DNA, 25 bp, Homo sapien
gagcaatgaccgaacggcccatgct

SEQ ID NO: 296433 - DNA, 25 bp, Homo sapien
accacctcctgatatcgcctgcctg

SEQ ID NO: 296434 - DNA, 25 bp, Homo sapien
ggtggagaattcccaccactaccac

SEQ ID NO: 296435 - DNA, 25 bp, Homo sapien
cactaccacctcctgatatcgcctg

SEQ ID NO: 296436 - DNA, 25 bp, Homo sapien
ggatgcagggaaggtggagaattcc

SEQ ID NO: 296437 - DNA, 25 bp, Homo sapien
caagctgtgttgatgttccacagag

SEQ ID NO: 296438 - DNA, 25 bp, Homo sapien
cagtcttcatgggtggcatcctgtt

SEQ ID NO: 296439 - DNA, 25 bp, Homo sapien
catcctgttggccaatatgacaagc

SEQ ID NO: 296440 - DNA, 25 bp, Homo sapien
tatgacaagcacagcgctgtcctgg

SEQ ID NO: 296441 - DNA, 25 bp, Homo sapien
ggcaaaagtccttccgcacggagtc

SEQ ID NO: 296442 - DNA, 25 bp, Homo sapien
tcatgcatcccacgccaggaaatgg

SEQ ID NO: 296443 - DNA, 25 bp, Homo sapien
gggtaactgagctgctcaccaacag

SEQ ID NO: 296444 - DNA, 25 bp, Homo sapien
agctcctctgtgctcttagcctctg

SEQ ID NO: 296445 - DNA, 25 bp, Homo sapien
gatctgggatgactacagtgggcat

SEQ ID NO: 296446 - DNA, 25 bp, Homo sapien
gaaaacagataagagattgcctggg

SEQ ID NO: 296447 - DNA, 25 bp, Homo sapien
cactatgcagtaacaaaagaggaca

SEQ ID NO: 296448 - DNA, 25 bp, Homo sapien
tgatacaagcagcaacatagatgag

SEQ ID NO: 296449 - DNA, 25 bp, Homo sapien
gaagatgtcacaatgtgagatctga

SEQ ID NO: 296450 - DNA, 25 bp, Homo sapien
acaagaagatgtcacaatgtgagat

SEQ ID NO: 296451 - DNA, 25 bp, Homo sapien
cacaatgtgagatctgatacgggtc

SEQ ID NO: 296452 - DNA, 25 bp, Homo sapien
tgtgagatctgatacgggtcaggca

SEQ ID NO: 296453 - DNA, 25 bp, Homo sapien
tgctcattgatgaagtaagtctgca

SEQ ID NO: 296454 - DNA, 25 bp, Homo sapien
gctcattgatgaagtaagtctgcat

SEQ ID NO: 296455 - DNA, 25 bp, Homo sapien
acagtgagctgcttctccgggttga

SEQ ID NO: 296456 - DNA, 25 bp, Homo sapien
tgagctgcttctccgggttgacaga

SEQ ID NO: 296457 - DNA, 25 bp, Homo sapien
agtgagctgcttctccgggttgaca

SEQ ID NO: 296458 - DNA, 25 bp, Homo sapien
gctgcttctccgggttgacagagtc

SEQ ID NO: 296459 - DNA, 25 bp, Homo sapien
tcaccagttcccggagcagtgggag

SEQ ID NO: 296460 - DNA, 25 bp, Homo sapien
gagggaatctgacaaggcccctgcc

SEQ ID NO: 296461 - DNA, 25 bp, Homo sapien
cgtgcagtggctgcgtcttgcagac

SEQ ID NO: 296462 - DNA, 25 bp, Homo sapien
ctctccgagtttccagtcaccagtt

SEQ ID NO: 296463 - DNA, 25 bp, Homo sapien
ttccaagtcaatggagtagtcgtcc

SEQ ID NO: 296464 - DNA, 25 bp, Homo sapien
agtagtcgtccaaaggcccagaggt

SEQ ID NO: 296465 - DNA, 25 bp, Homo sapien
aagagatgaggagcacattccaagt

SEQ ID NO: 296466 - DNA, 25 bp, Homo sapien
gaggagcacattccaagtcaatgga

SEQ ID NO: 296467 - DNA, 25 bp, Homo sapien
aggcatcaaggtgtaggactgtatg

SEQ ID NO: 296468 - DNA, 25 bp, Homo sapien
actgtatggtatgctcagggaacgt

SEQ ID NO: 296469 - DNA, 25 bp, Homo sapien
gactgtatggtatgctcagggaacg

SEQ ID NO: 296470 - DNA, 25 bp, Homo sapien
aggactgtatggtatgctcagggaa

SEQ ID NO: 296471 - DNA, 25 bp, Homo sapien
cagcagctgctgtcctctagattga

SEQ ID NO: 296472 - DNA, 25 bp, Homo sapien
gctgctgtcctctagattgaagagc

SEQ ID NO: 296473 - DNA, 25 bp, Homo sapien
gcagctgctgtcctctagattgaag

SEQ ID NO: 296474 - DNA, 25 bp, Homo sapien
tgctgtcctctagattgaagagctg

SEQ ID NO: 296475 - DNA, 25 bp, Homo sapien
tgtaccatgaacttccaagtcaggc

SEQ ID NO: 296476 - DNA, 25 bp, Homo sapien
taccatgaacttccaagtcaggcat

SEQ ID NO: 296477 - DNA, 25 bp, Homo sapien
gaactgtaccatgaacttccaagtc

SEQ ID NO: 296478 - DNA, 25 bp, Homo sapien
atgaacttccaagtcaggcatccag

SEQ ID NO: 296479 - DNA, 25 bp, Homo sapien
cctgtattaataacattgattccag

SEQ ID NO: 296480 - DNA, 25 bp, Homo sapien
tatctatcatgtttcaggtcctgta

SEQ ID NO: 296481 - DNA, 25 bp, Homo sapien
ggactttcacaggtgctcaaatcct

SEQ ID NO: 296482 - DNA, 25 bp, Homo sapien
cataatctaaacatatcctcccaca

SEQ ID NO: 296483 - DNA, 25 bp, Homo sapien
tctgcgatagtaagggaagggctcc

SEQ ID NO: 296484 - DNA, 25 bp, Homo sapien
tatagggaataatgccgccgtgggc

SEQ ID NO: 296485 - DNA, 25 bp, Homo sapien
tactctctgggatatgggaagccat

SEQ ID NO: 296486 - DNA, 25 bp, Homo sapien
aacaaacacggttcaggatgctggg

SEQ ID NO: 296487 - DNA, 25 bp, Homo sapien
ctctccaaagttgccgtgcgcgccg

SEQ ID NO: 296488 - DNA, 25 bp, Homo sapien
ctgccctccgagtgcccggcgggac

SEQ ID NO: 296489 - DNA, 25 bp, Homo sapien
ctcgcctctccaaagttgccgtgcg

SEQ ID NO: 296490 - DNA, 25 bp, Homo sapien
gcaaccttggcctccggcgcgctgc

SEQ ID NO: 296491 - DNA, 25 bp, Homo sapien
aggagcacgatgagcccgagccaag

SEQ ID NO: 296492 - DNA, 25 bp, Homo sapien
agctgcccaggagcacgatgagccc

SEQ ID NO: 296493 - DNA, 25 bp, Homo sapien
cgatgagcccgagccaaggggtcat

SEQ ID NO: 296494 - DNA, 25 bp, Homo sapien
tgcccaggagcacgatgagcccgag

SEQ ID NO: 296495 - DNA, 25 bp, Homo sapien
gggggtggctgggcgagcatgtgca

SEQ ID NO: 296496 - DNA, 25 bp, Homo sapien
ggtggctgggcgagcatgtgcacgc

SEQ ID NO: 296497 - DNA, 25 bp, Homo sapien
gggtggctgggcgagcatgtgcacg

SEQ ID NO: 296498 - DNA, 25 bp, Homo sapien
ggggtggctgggcgagcatgtgcac

SEQ ID NO: 296499 - DNA, 25 bp, Homo sapien
tccagatgtcaaaaggaccggtagg

SEQ ID NO: 296500 - DNA, 25 bp, Homo sapien
caatttcccagcactttagttagca

SEQ ID NO: 296501 - DNA, 25 bp, Homo sapien
ccttcctccgttagtagtgaatggg

SEQ ID NO: 296502 - DNA, 25 bp, Homo sapien
cctcacgacctaagttaggaaagca

SEQ ID NO: 296503 - DNA, 25 bp, Homo sapien
ccagggagcctcttacaagggtgac

SEQ ID NO: 296504 - DNA, 25 bp, Homo sapien
cactaatcaggtgggaatgttacca

SEQ ID NO: 296505 - DNA, 25 bp, Homo sapien
cattggaagcaggatctactcatgc

SEQ ID NO: 296506 - DNA, 25 bp, Homo sapien
taagcagtaagcagacgggaaggcc

SEQ ID NO: 296507 - DNA, 25 bp, Homo sapien
gttttgttcagagcccgcatccact

SEQ ID NO: 296508 - DNA, 25 bp, Homo sapien
cccagggaggtcagtatcaccaagg

SEQ ID NO: 296509 - DNA, 25 bp, Homo sapien
tacagataagagaccaaacccaggg

SEQ ID NO: 296510 - DNA, 25 bp, Homo sapien
gaactaggactagaccttaggcctc

SEQ ID NO: 296511 - DNA, 25 bp, Homo sapien
gctgtagtattaacatggcggccac

SEQ ID NO: 296512 - DNA, 25 bp, Homo sapien
tggcggccactaaccacaggtagct

SEQ ID NO: 296513 - DNA, 25 bp, Homo sapien
cacacacgagtattgcctggaaagg

SEQ ID NO: 296514 - DNA, 25 bp, Homo sapien
cagatgttaactatccaggtggagc

SEQ ID NO: 296515 - DNA, 25 bp, Homo sapien
gagtcaggaggtccggctcaaatct

SEQ ID NO: 296516 - DNA, 25 bp, Homo sapien
tgagattgctcggactctggagtca

SEQ ID NO: 296517 - DNA, 25 bp, Homo sapien
caaatctggcttcactatgtaggta

SEQ ID NO: 296518 - DNA, 25 bp, Homo sapien
taggagtgcctacctcaatgagtgg

SEQ ID NO: 296519 - DNA, 25 bp, Homo sapien
taaacagagctaaacaggtcaccat

SEQ ID NO: 296520 - DNA, 25 bp, Homo sapien
gatttttactggctaagtgctcacc

SEQ ID NO: 296521 - DNA, 25 bp, Homo sapien
aagtaaaggtaacagaggtctccag

SEQ ID NO: 296522 - DNA, 25 bp, Homo sapien
tgatagggcaaaagggagtgattcc

SEQ ID NO: 296523 - DNA, 25 bp, Homo sapien
cttcacactcaccacaatgtccttc

SEQ ID NO: 296524 - DNA, 25 bp, Homo sapien
taaatactctgaaagcgagagtctg

SEQ ID NO: 296525 - DNA, 25 bp, Homo sapien
acacacggccttttaagtccaccag

SEQ ID NO: 296526 - DNA, 25 bp, Homo sapien
gaatagtgactacttgagaacccaa

SEQ ID NO: 296527 - DNA, 25 bp, Homo sapien
ttctaaatgtgagtgcccctgatgg

SEQ ID NO: 296528 - DNA, 25 bp, Homo sapien
ctgcgaatctcttgccagtcacttc

SEQ ID NO: 296529 - DNA, 25 bp, Homo sapien
gcgaatctcttgccagtcacttccc

SEQ ID NO: 296530 - DNA, 25 bp, Homo sapien
gccacagtgacatcagcttttctga

SEQ ID NO: 296531 - DNA, 25 bp, Homo sapien
tgcgaatctcttgccagtcacttcc

SEQ ID NO: 296532 - DNA, 25 bp, Homo sapien
tatggttgcgagaacttcccttggg

SEQ ID NO: 296533 - DNA, 25 bp, Homo sapien
catatggtgacaagaggagctacgt

SEQ ID NO: 296534 - DNA, 25 bp, Homo sapien
gaaatgccctgtgatcatgccctga

SEQ ID NO: 296535 - DNA, 25 bp, Homo sapien
gatgccacgacttgttttctccggg

SEQ ID NO: 296536 - DNA, 25 bp, Homo sapien
cttggagagagaggatttccagcgt

SEQ ID NO: 296537 - DNA, 25 bp, Homo sapien
ttggagagagaggatttccagcgtc

SEQ ID NO: 296538 - DNA, 25 bp, Homo sapien
acagaaacatcccttgcggcattct

SEQ ID NO: 296539 - DNA, 25 bp, Homo sapien
ggatgtaccatcttataggagtgga

SEQ ID NO: 296540 - DNA, 25 bp, Homo sapien
tagctcatctatttaagagaggcag

SEQ ID NO: 296541 - DNA, 25 bp, Homo sapien
taagatgtcactccatgacccttag

SEQ ID NO: 296542 - DNA, 25 bp, Homo sapien
cctggtcggctctgtgctaatccac

SEQ ID NO: 296543 - DNA, 25 bp, Homo sapien
tgaatccaagtcagcagatcttccg

SEQ ID NO: 296544 - DNA, 25 bp, Homo sapien
gcagacctctacatgcagcattcag

SEQ ID NO: 296545 - DNA, 25 bp, Homo sapien
agatcttccgccagccatcagctgg

SEQ ID NO: 296546 - DNA, 25 bp, Homo sapien
ctaaggaagccctagacacagtttc

SEQ ID NO: 296547 - DNA, 25 bp, Homo sapien
tatgataaacatccttgtgtgttta

SEQ ID NO: 296548 - DNA, 25 bp, Homo sapien
gaaatgttagttggatgcttttata

SEQ ID NO: 296549 - DNA, 25 bp, Homo sapien
gcttttataaacaactctatgataa

SEQ ID NO: 296550 - DNA, 25 bp, Homo sapien
gtgtttatatctgtacatgcacata

SEQ ID NO: 296551 - DNA, 25 bp, Homo sapien
aacaaaataggaccgaggttatctg

SEQ ID NO: 296552 - DNA, 25 bp, Homo sapien
catctgtacaatgcagatactgaaa

SEQ ID NO: 296553 - DNA, 25 bp, Homo sapien
tgcctgtcatctgtacaatgcagat

SEQ ID NO: 296554 - DNA, 25 bp, Homo sapien
gtacaatgcagatactgaaatttcc

SEQ ID NO: 296555 - DNA, 25 bp, Homo sapien
tttgagccaccaggcgtgatcacga

SEQ ID NO: 296556 - DNA, 25 bp, Homo sapien
tttttcacgaaacaggaggcgggca

SEQ ID NO: 296557 - DNA, 25 bp, Homo sapien
gatcaattcccaggccaagaagtga

SEQ ID NO: 296558 - DNA, 25 bp, Homo sapien
gagcattctttcagcaccaacagga

SEQ ID NO: 296559 - DNA, 25 bp, Homo sapien
taactcgcatatctattcccagctg

SEQ ID NO: 296560 - DNA, 25 bp, Homo sapien
tccaacgagaattcctttaactcgc

SEQ ID NO: 296561 - DNA, 25 bp, Homo sapien
tcctttaactcgcatatctattccc

SEQ ID NO: 296562 - DNA, 25 bp, Homo sapien
cgagaattcctttaactcgcatatc

SEQ ID NO: 296563 - DNA, 25 bp, Homo sapien
tgggtacaggaaacaactgtgggat

SEQ ID NO: 296564 - DNA, 25 bp, Homo sapien
gaaacaactgtgggattccagggcc

SEQ ID NO: 296565 - DNA, 25 bp, Homo sapien
caggaaacaactgtgggattccagg

SEQ ID NO: 296566 - DNA, 25 bp, Homo sapien
ctgggtacaggaaacaactgtggga

SEQ ID NO: 296567 - DNA, 25 bp, Homo sapien
cagagaagcgtgaggcggatacact

SEQ ID NO: 296568 - DNA, 25 bp, Homo sapien
ccacagagaagcgtgaggcggatac

SEQ ID NO: 296569 - DNA, 25 bp, Homo sapien
tacactcacggtccatgtgactggc

SEQ ID NO: 296570 - DNA, 25 bp, Homo sapien
tgaggcggatacactcacggtccat

SEQ ID NO: 296571 - DNA, 25 bp, Homo sapien
ccagcgaagaccatcagcaggattt

SEQ ID NO: 296572 - DNA, 25 bp, Homo sapien
aggatttgcaggaaacaccttgcgg

SEQ ID NO: 296573 - DNA, 25 bp, Homo sapien
tgcaggaaacaccttgcggaatcca

SEQ ID NO: 296574 - DNA, 25 bp, Homo sapien
aagaccatcagcaggatttgcagga

SEQ ID NO: 296575 - DNA, 25 bp, Homo sapien
tctcctcttcccccacccctgtgcc

SEQ ID NO: 296576 - DNA, 25 bp, Homo sapien
tcatgtttctcctcttcccccaccc

SEQ ID NO: 296577 - DNA, 25 bp, Homo sapien
ttctcctcttcccccacccctgtgc

SEQ ID NO: 296578 - DNA, 25 bp, Homo sapien
cttcatgtttctcctcttcccccac

SEQ ID NO: 296579 - DNA, 25 bp, Homo sapien
tcatctaatgcggaagtggtggaca

SEQ ID NO: 296580 - DNA, 25 bp, Homo sapien
taaagaagaagtgactctccccaga

SEQ ID NO: 296581 - DNA, 25 bp, Homo sapien
agtgtgcaaccatctctgacctagg

SEQ ID NO: 296582 - DNA, 25 bp, Homo sapien
taaactacggcacagtggcatgggc

SEQ ID NO: 296583 - DNA, 25 bp, Homo sapien
catgggaggctcctatcaaaaggtg

SEQ ID NO: 296584 - DNA, 25 bp, Homo sapien
gagcaattgccacaccacagagtat

SEQ ID NO: 296585 - DNA, 25 bp, Homo sapien
tgtaatgataaactgcacatgcctg

SEQ ID NO: 296586 - DNA, 25 bp, Homo sapien
tgcctaagtgaccagtggctgcatg

SEQ ID NO: 296587 - DNA, 25 bp, Homo sapien
ttctgggtctcatgcagacccctct

SEQ ID NO: 296588 - DNA, 25 bp, Homo sapien
agacccctctccaggtgccaggatg

SEQ ID NO: 296589 - DNA, 25 bp, Homo sapien
ccagtcatttctgggtctcatgcag

SEQ ID NO: 296590 - DNA, 25 bp, Homo sapien
tggatccagtcatttctgggtctca

SEQ ID NO: 296591 - DNA, 25 bp, Homo sapien
caggtacgagaaaaacgagcccata

SEQ ID NO: 296592 - DNA, 25 bp, Homo sapien
tgggcactcaggtaggaacaggtac

SEQ ID NO: 296593 - DNA, 25 bp, Homo sapien
catagtttggaaggcccacctgctg

SEQ ID NO: 296594 - DNA, 25 bp, Homo sapien
tctgtaaggttgtggacacccaggg

SEQ ID NO: 296595 - DNA, 25 bp, Homo sapien
tttgcagacagcaaatctgttccca

SEQ ID NO: 296596 - DNA, 25 bp, Homo sapien
gccagacccgcagatgcagcctttg

SEQ ID NO: 296597 - DNA, 25 bp, Homo sapien
gactctgggataggcctaggagcaa

SEQ ID NO: 296598 - DNA, 25 bp, Homo sapien
aagtccaccattagccaaagaacca

SEQ ID NO: 296599 - DNA, 25 bp, Homo sapien
gtgacaacaagaaatagaagtccta

SEQ ID NO: 296600 - DNA, 25 bp, Homo sapien
tttcccgcttccactgatggctagt

SEQ ID NO: 296601 - DNA, 25 bp, Homo sapien
caatcaaaccaacataggcatgaac

SEQ ID NO: 296602 - DNA, 25 bp, Homo sapien
catgaactaggttggtgtctggaac

SEQ ID NO: 296603 - DNA, 25 bp, Homo sapien
cccaaatagcctgagcttggaacct

SEQ ID NO: 296604 - DNA, 25 bp, Homo sapien
caactggaatagatgattgtgttta

SEQ ID NO: 296605 - DNA, 25 bp, Homo sapien
gaatagatgattgtgtttacaagag

SEQ ID NO: 296606 - DNA, 25 bp, Homo sapien
ctggaatagatgattgtgtttacaa

SEQ ID NO: 296607 - DNA, 25 bp, Homo sapien
gccaactggaatagatgattgtgtt

SEQ ID NO: 296608 - DNA, 25 bp, Homo sapien
ttcatctgcttgatggtgtagacca

SEQ ID NO: 296609 - DNA, 25 bp, Homo sapien
tcatctgcttgatggtgtagaccag

SEQ ID NO: 296610 - DNA, 25 bp, Homo sapien
atggtgtagaccagcgtgccgaagg

SEQ ID NO: 296611 - DNA, 25 bp, Homo sapien
gtagaccagcgtgccgaagggcccc

SEQ ID NO: 296612 - DNA, 25 bp, Homo sapien
ccttctacctggacattgcggcttg

SEQ ID NO: 296613 - DNA, 25 bp, Homo sapien
aattgaatccaaagcaacaggttcc

SEQ ID NO: 296614 - DNA, 25 bp, Homo sapien
tcatgcccgtattagacagataagc

SEQ ID NO: 296615 - DNA, 25 bp, Homo sapien
catgaccaagcttaggcagccaagg

SEQ ID NO: 296616 - DNA, 25 bp, Homo sapien
gctgacattggatctgagggaatct

SEQ ID NO: 296617 - DNA, 25 bp, Homo sapien
cactccttcggctacacatgtctga

SEQ ID NO: 296618 - DNA, 25 bp, Homo sapien
tgtcaaccttaggacctgagtcccg

SEQ ID NO: 296619 - DNA, 25 bp, Homo sapien
gactagccaggttggtgccttccca

SEQ ID NO: 296620 - DNA, 25 bp, Homo sapien
ccagtttggacacccgtatgatccc

SEQ ID NO: 296621 - DNA, 25 bp, Homo sapien
gaactggaggtcgttttgctaagcg

SEQ ID NO: 296622 - DNA, 25 bp, Homo sapien
ggtatctatacccaatggaatatga

SEQ ID NO: 296623 - DNA, 25 bp, Homo sapien
aaaggaaatcggaatatggaagagg

SEQ ID NO: 296624 - DNA, 25 bp, Homo sapien
gcaggtactggtacttgttgacctc

SEQ ID NO: 296625 - DNA, 25 bp, Homo sapien
tgacctccagcttaaggccacagag

SEQ ID NO: 296626 - DNA, 25 bp, Homo sapien
ggaagcttccgtatggatgtactgc

SEQ ID NO: 296627 - DNA, 25 bp, Homo sapien
gatgtactgcacatggggcatcttg

SEQ ID NO: 296628 - DNA, 25 bp, Homo sapien
gttacaacccaggtgataccgatag

SEQ ID NO: 296629 - DNA, 25 bp, Homo sapien
ttgcacagccccgtgtacatcttgc

SEQ ID NO: 296630 - DNA, 25 bp, Homo sapien
taccgatagttcagccccttgcgct

SEQ ID NO: 296631 - DNA, 25 bp, Homo sapien
tacatcttgccatcatagacgcgac

SEQ ID NO: 296632 - DNA, 25 bp, Homo sapien
gaggcagccgattacagcagaaagg

SEQ ID NO: 296633 - DNA, 25 bp, Homo sapien
ccacctggggcaacaatccttacta

SEQ ID NO: 296634 - DNA, 25 bp, Homo sapien
tccttactatatctgctcagacctg

SEQ ID NO: 296635 - DNA, 25 bp, Homo sapien
cctccagccttgaactgccaggtgg

SEQ ID NO: 296636 - DNA, 25 bp, Homo sapien
gagacactcgttcttggaagtcaca

SEQ ID NO: 296637 - DNA, 25 bp, Homo sapien
ggtaaccgaaattggagagcatgtc

SEQ ID NO: 296638 - DNA, 25 bp, Homo sapien
gagcatgtcggtccagagacactcg

SEQ ID NO: 296639 - DNA, 25 bp, Homo sapien
tcctcggtaccagctgcagtagccg

SEQ ID NO: 296640 - DNA, 25 bp, Homo sapien
tctggtcaacacaagcatcactggg

SEQ ID NO: 296641 - DNA, 25 bp, Homo sapien
aaattagcttatgtccccatgtggg

SEQ ID NO: 296642 - DNA, 25 bp, Homo sapien
tggcagctcctggtgtataacatct

SEQ ID NO: 296643 - DNA, 25 bp, Homo sapien
gactgatcctgaaatggttggcctt

SEQ ID NO: 296644 - DNA, 25 bp, Homo sapien
tcagatgacccatgatagggaagag

SEQ ID NO: 296645 - DNA, 25 bp, Homo sapien
catctgccatctgagctaagccagg

SEQ ID NO: 296646 - DNA, 25 bp, Homo sapien
gaggatctcaggaggtggcattcac

SEQ ID NO: 296647 - DNA, 25 bp, Homo sapien
tagggaaagggaaccaagctgtctc

SEQ ID NO: 296648 - DNA, 25 bp, Homo sapien
gctaatttatcgactccgcagggaa

SEQ ID NO: 296649 - DNA, 25 bp, Homo sapien
cattccttctagacagggttcgaga

SEQ ID NO: 296650 - DNA, 25 bp, Homo sapien
ttgatcccaaggaaacccgatgccg

SEQ ID NO: 296651 - DNA, 25 bp, Homo sapien
tgctgggagaatctaagaagcctct

SEQ ID NO: 296652 - DNA, 25 bp, Homo sapien
gaaggctggatccacatctaacacc

SEQ ID NO: 296653 - DNA, 25 bp, Homo sapien
gaattgacttcccaggttatacagc

SEQ ID NO: 296654 - DNA, 25 bp, Homo sapien
tctccagtttacgagtgaagaaacg

SEQ ID NO: 296655 - DNA, 25 bp, Homo sapien
cattaaatatggttgggctgaaccc

SEQ ID NO: 296656 - DNA, 25 bp, Homo sapien
cactgccttagatacctggaacaag

SEQ ID NO: 296657 - DNA, 25 bp, Homo sapien
aaaacgcttagaatgtggctggcac

SEQ ID NO: 296658 - DNA, 25 bp, Homo sapien
tgtgctatcctgagcccttaacgtg

SEQ ID NO: 296659 - DNA, 25 bp, Homo sapien
gaaagggtcctagatggtgttagcc

SEQ ID NO: 296660 - DNA, 25 bp, Homo sapien
aaggctgcccattgcacctcacatt

SEQ ID NO: 296661 - DNA, 25 bp, Homo sapien
attctttacagcctggaggccgatg

SEQ ID NO: 296662 - DNA, 25 bp, Homo sapien
ttacagcctggaggccgatggtaac

SEQ ID NO: 296663 - DNA, 25 bp, Homo sapien
gaaggctgcccattgcacctcacat

SEQ ID NO: 296664 - DNA, 25 bp, Homo sapien
cccaagactctatatgcataaggag

SEQ ID NO: 296665 - DNA, 25 bp, Homo sapien
tggaaggaagaaactgtcccattac

SEQ ID NO: 296666 - DNA, 25 bp, Homo sapien
agagtccacagtccaagtgttgcgt

SEQ ID NO: 296667 - DNA, 25 bp, Homo sapien
gaaactgtcccattacttgttcaaa

SEQ ID NO: 296668 - DNA, 25 bp, Homo sapien
gggagagccgtgcagccatctttta

SEQ ID NO: 296669 - DNA, 25 bp, Homo sapien
gcagttgagcgatcacagcatttgt

SEQ ID NO: 296670 - DNA, 25 bp, Homo sapien
cacatgatggtttggctcccgttca

SEQ ID NO: 296671 - DNA, 25 bp, Homo sapien
ccatcttttattaccaccctcggag

SEQ ID NO: 296672 - DNA, 25 bp, Homo sapien
caagttgctttcatatttgcagcca

SEQ ID NO: 296673 - DNA, 25 bp, Homo sapien
tcaagttgctttcatatttgcagcc

SEQ ID NO: 296674 - DNA, 25 bp, Homo sapien
gttgctttcatatttgcagccacca

SEQ ID NO: 296675 - DNA, 25 bp, Homo sapien
tgctttcatatttgcagccaccagc

SEQ ID NO: 296676 - DNA, 25 bp, Homo sapien
ggtgcttaagcgcaacccagacatc

SEQ ID NO: 296677 - DNA, 25 bp, Homo sapien
tcgaggtgcttaagcgcaacccaga

SEQ ID NO: 296678 - DNA, 25 bp, Homo sapien
gccagctcgaggtgcttaagcgcaa

SEQ ID NO: 296679 - DNA, 25 bp, Homo sapien
gcttaagcgcaacccagacatccag

SEQ ID NO: 296680 - DNA, 25 bp, Homo sapien
gagagcacgagtctgcttcctgcat

SEQ ID NO: 296681 - DNA, 25 bp, Homo sapien
tcccagagagcacgagtctgcttcc

SEQ ID NO: 296682 - DNA, 25 bp, Homo sapien
ccagagagcacgagtctgcttcctg

SEQ ID NO: 296683 - DNA, 25 bp, Homo sapien
agagagcacgagtctgcttcctgca

SEQ ID NO: 296684 - DNA, 25 bp, Homo sapien
tttcttgtggaagcacaagtccggc

SEQ ID NO: 296685 - DNA, 25 bp, Homo sapien
gccatcctgcatcccggcgatgttc

SEQ ID NO: 296686 - DNA, 25 bp, Homo sapien
tggaagcacaagtccggccaggcct

SEQ ID NO: 296687 - DNA, 25 bp, Homo sapien
gcatcccggcgatgttcattttctt

SEQ ID NO: 296688 - DNA, 25 bp, Homo sapien
tgcagtccccgttttggagattagg

SEQ ID NO: 296689 - DNA, 25 bp, Homo sapien
ttaggtttgggttagcgcgaagctc

SEQ ID NO: 296690 - DNA, 25 bp, Homo sapien
gatgcggaatgcatttgccacaggt

SEQ ID NO: 296691 - DNA, 25 bp, Homo sapien
ttttccctgacactgtcccttgcag

SEQ ID NO: 296692 - DNA, 25 bp, Homo sapien
taaaagcgtgcaggtctccatggag

SEQ ID NO: 296693 - DNA, 25 bp, Homo sapien
ttaaaagcgtgcaggtctccatgga

SEQ ID NO: 296694 - DNA, 25 bp, Homo sapien
tttaaaagcgtgcaggtctccatgg

SEQ ID NO: 296695 - DNA, 25 bp, Homo sapien
catgtaaattatccacttttatgca

SEQ ID NO: 296696 - DNA, 25 bp, Homo sapien
tcacttcaacgtaggaggtggtggt

SEQ ID NO: 296697 - DNA, 25 bp, Homo sapien
tatgtatgtaatgcctgtcaccaga

SEQ ID NO: 296698 - DNA, 25 bp, Homo sapien
ttacaatagctggtgtacagaaaca

SEQ ID NO: 296699 - DNA, 25 bp, Homo sapien
gataaatctctcagtatgaacagaa

SEQ ID NO: 296700 - DNA, 25 bp, Homo sapien
catggcctctctaggtatccaggca

SEQ ID NO: 296701 - DNA, 25 bp, Homo sapien
taagatgcagtattccgggcagagg

SEQ ID NO: 296702 - DNA, 25 bp, Homo sapien
tacagtgtgtcctttatcctaggga

SEQ ID NO: 296703 - DNA, 25 bp, Homo sapien
gagctagtacatgtagtgcctgaca

SEQ ID NO: 296704 - DNA, 25 bp, Homo sapien
tgatgctacccacaggagatcaagg

SEQ ID NO: 296705 - DNA, 25 bp, Homo sapien
atgatgctacccacaggagatcaag

SEQ ID NO: 296706 - DNA, 25 bp, Homo sapien
cctctggaaccaatgaactgtcttt

SEQ ID NO: 296707 - DNA, 25 bp, Homo sapien
gatcaagaccagctgcagtgaatca

SEQ ID NO: 296708 - DNA, 25 bp, Homo sapien
ggacaaacccaacatagctagagag

SEQ ID NO: 296709 - DNA, 25 bp, Homo sapien
caacgaactaacaacagcctctgga

SEQ ID NO: 296710 - DNA, 25 bp, Homo sapien
gccaggctgatgttgaactcccaac

SEQ ID NO: 296711 - DNA, 25 bp, Homo sapien
tcctgagaacttgtcttttaattgt

SEQ ID NO: 296712 - DNA, 25 bp, Homo sapien
gagatgggggtttcattgtgttggc

SEQ ID NO: 296713 - DNA, 25 bp, Homo sapien
tgtgtgtgtgtttttttttaacaca

SEQ ID NO: 296714 - DNA, 25 bp, Homo sapien
caggatcgtcggatttctccttcca

SEQ ID NO: 296715 - DNA, 25 bp, Homo sapien
gggctccaggatcgtcggatttctc

SEQ ID NO: 296716 - DNA, 25 bp, Homo sapien
gactcttctgttacataggatgact

SEQ ID NO: 296717 - DNA, 25 bp, Homo sapien
tcttctgttacataggatgactggc

SEQ ID NO: 296718 - DNA, 25 bp, Homo sapien
cacatcttctttttgtacatcatcc

SEQ ID NO: 296719 - DNA, 25 bp, Homo sapien
ttttcgagcatgctgcagccacatc

SEQ ID NO: 296720 - DNA, 25 bp, Homo sapien
tagtaccgctttgggcctgcgttga

SEQ ID NO: 296721 - DNA, 25 bp, Homo sapien
gcgttgaagctcacagactccacat

SEQ ID NO: 296722 - DNA, 25 bp, Homo sapien
caaaagattggagtaggcttatgga

SEQ ID NO: 296723 - DNA, 25 bp, Homo sapien
gagtaggcttatggaaaacctcctc

SEQ ID NO: 296724 - DNA, 25 bp, Homo sapien
gccaaaagattggagtaggcttatg

SEQ ID NO: 296725 - DNA, 25 bp, Homo sapien
gattggagtaggcttatggaaaacc

SEQ ID NO: 296726 - DNA, 25 bp, Homo sapien
tactccctgaagatacacgctttct

SEQ ID NO: 296727 - DNA, 25 bp, Homo sapien
caaggaagcgtgttcttggtgtagc

SEQ ID NO: 296728 - DNA, 25 bp, Homo sapien
tgtagctttctgtcagatactccct

SEQ ID NO: 296729 - DNA, 25 bp, Homo sapien
gaagatacacgctttcttttgggaa

SEQ ID NO: 296730 - DNA, 25 bp, Homo sapien
ccgatgatgtaatgtctttggctgg

SEQ ID NO: 296731 - DNA, 25 bp, Homo sapien
ctccattggttaagtgtattgtttc

SEQ ID NO: 296732 - DNA, 25 bp, Homo sapien
tagccaatgacggtgctgaccgatg

SEQ ID NO: 296733 - DNA, 25 bp, Homo sapien
ctggtgctccattggttaagtgtat

SEQ ID NO: 296734 - DNA, 25 bp, Homo sapien
ctcgagcgggggctgctggtgcgtt

SEQ ID NO: 296735 - DNA, 25 bp, Homo sapien
tgtaatctagctctactgcactctg

SEQ ID NO: 296736 - DNA, 25 bp, Homo sapien
tgacactgggcaaagtaattcacat

SEQ ID NO: 296737 - DNA, 25 bp, Homo sapien
tggcccaaaattacaacaagtgaaa

SEQ ID NO: 296738 - DNA, 25 bp, Homo sapien
cctagaaaattatggcagcctagca

SEQ ID NO: 296739 - DNA, 25 bp, Homo sapien
tgccctgggccacaaggtcccctcc

SEQ ID NO: 296740 - DNA, 25 bp, Homo sapien
cccctccataggcctctatcagcat

SEQ ID NO: 296741 - DNA, 25 bp, Homo sapien
tgggccacaaggtcccctccatagg

SEQ ID NO: 296742 - DNA, 25 bp, Homo sapien
ctctccaatgcagcatttcttgctg

SEQ ID NO: 296743 - DNA, 25 bp, Homo sapien
actcttcccattgtcactcgcatgt

SEQ ID NO: 296744 - DNA, 25 bp, Homo sapien
tcttcccattgtcactcgcatgtac

SEQ ID NO: 296745 - DNA, 25 bp, Homo sapien
cccattgtcactcgcatgtacccca

SEQ ID NO: 296746 - DNA, 25 bp, Homo sapien
ttcccattgtcactcgcatgtaccc

SEQ ID NO: 296747 - DNA, 25 bp, Homo sapien
tggactcttgtgaaccgttcctcat

SEQ ID NO: 296748 - DNA, 25 bp, Homo sapien
ctggactcttgtgaaccgttcctca

SEQ ID NO: 296749 - DNA, 25 bp, Homo sapien
tgtgtggctataatcatagaagctg

SEQ ID NO: 296750 - DNA, 25 bp, Homo sapien
ctttgtgtggctataatcatagaag

SEQ ID NO: 296751 - DNA, 25 bp, Homo sapien
tggtaaagcccagcaagatgataca

SEQ ID NO: 296752 - DNA, 25 bp, Homo sapien
ttaacgcccttggtaaagcccagca

SEQ ID NO: 296753 - DNA, 25 bp, Homo sapien
ctggaggtccagcaacttctacatg

SEQ ID NO: 296754 - DNA, 25 bp, Homo sapien
tctacatgctcaatgactgccgtta

SEQ ID NO: 296755 - DNA, 25 bp, Homo sapien
tattaagacaggtatgaccactatc

SEQ ID NO: 296756 - DNA, 25 bp, Homo sapien
tgtgctggaggtccagcaacttcta

SEQ ID NO: 296757 - DNA, 25 bp, Homo sapien
ctatatcaggacaggggcattttgt

SEQ ID NO: 296758 - DNA, 25 bp, Homo sapien
tgagcttcacagtaaaggctgacct

SEQ ID NO: 296759 - DNA, 25 bp, Homo sapien
tctgggcattgtacaggacccctgt

SEQ ID NO: 296760 - DNA, 25 bp, Homo sapien
accctgcaagcaaagactcccatgg

SEQ ID NO: 296761 - DNA, 25 bp, Homo sapien
ggagtagtaattcccaggcaccctg

SEQ ID NO: 296762 - DNA, 25 bp, Homo sapien
actgggatggtcctggtaatggccc

SEQ ID NO: 296763 - DNA, 25 bp, Homo sapien
tgaagaacacactccagtggccagg

SEQ ID NO: 296764 - DNA, 25 bp, Homo sapien
ccaaagtggtatacacgagggtggt

SEQ ID NO: 296765 - DNA, 25 bp, Homo sapien
cagtggccaggtcagaatgattctg

SEQ ID NO: 296766 - DNA, 25 bp, Homo sapien
gaaacagtgcaatgtcagaaccaaa

SEQ ID NO: 296767 - DNA, 25 bp, Homo sapien
tcctgaaacttgctcatggctgtcc

SEQ ID NO: 296768 - DNA, 25 bp, Homo sapien
ggctgagagcagtagaaagcatcct

SEQ ID NO: 296769 - DNA, 25 bp, Homo sapien
tctcagctgtgtgatggaacttcct

SEQ ID NO: 296770 - DNA, 25 bp, Homo sapien
gaaaaggcccatgctgttagttcca

SEQ ID NO: 296771 - DNA, 25 bp, Homo sapien
tggaaaggatggtgctttttatggc

SEQ ID NO: 296772 - DNA, 25 bp, Homo sapien
tcattggaaaggatggtgcttttta

SEQ ID NO: 296773 - DNA, 25 bp, Homo sapien
ggaaaggatggtgctttttatggcc

SEQ ID NO: 296774 - DNA, 25 bp, Homo sapien
acgtcattggaaaggatggtgcttt

SEQ ID NO: 296775 - DNA, 25 bp, Homo sapien
agatgattgttgcagccaccagaac

SEQ ID NO: 296776 - DNA, 25 bp, Homo sapien
gtctgcaaggattgggggcacttct

SEQ ID NO: 296777 - DNA, 25 bp, Homo sapien
ctgcctgcaagatgattgttgcagc

SEQ ID NO: 296778 - DNA, 25 bp, Homo sapien
gaatatgtggctttggtttgctgcc

SEQ ID NO: 296779 - DNA, 25 bp, Homo sapien
tggagccaaagaccttcacttcatt

SEQ ID NO: 296780 - DNA, 25 bp, Homo sapien
aatgaacaagttcatgccaaacagt

SEQ ID NO: 296781 - DNA, 25 bp, Homo sapien
catgccaaacagtggagtagctttc

SEQ ID NO: 296782 - DNA, 25 bp, Homo sapien
ctgtaatgaacaagttcatgccaaa

SEQ ID NO: 296783 - DNA, 25 bp, Homo sapien
tgccatcgtctgtattaagtcttat

SEQ ID NO: 296784 - DNA, 25 bp, Homo sapien
gggcaatgagctgtttaagggtaaa

SEQ ID NO: 296785 - DNA, 25 bp, Homo sapien
tgtatttctacaagggtggaaagag

SEQ ID NO: 296786 - DNA, 25 bp, Homo sapien
ggtagttactaagcccatgccatcg

SEQ ID NO: 296787 - DNA, 25 bp, Homo sapien
gataaaaccgtacactgtacttagc

SEQ ID NO: 296788 - DNA, 25 bp, Homo sapien
tccatctgcttttcacgatgcattt

SEQ ID NO: 296789 - DNA, 25 bp, Homo sapien
cacgatgcatttcttacactggaat

SEQ ID NO: 296790 - DNA, 25 bp, Homo sapien
cttacactggaatgtgataaaaccg

SEQ ID NO: 296791 - DNA, 25 bp, Homo sapien
tcaccagtttaagaaatcctacaag

SEQ ID NO: 296792 - DNA, 25 bp, Homo sapien
cctacaagactttttccatgagagc

SEQ ID NO: 296793 - DNA, 25 bp, Homo sapien
tattcttacagaatagctagagatc

SEQ ID NO: 296794 - DNA, 25 bp, Homo sapien
tccatgagagctatgcactctctct

SEQ ID NO: 296795 - DNA, 25 bp, Homo sapien
cttcgagctcctgggaatctatgag

SEQ ID NO: 296796 - DNA, 25 bp, Homo sapien
ctatgagaattgcagaaccttgaca

SEQ ID NO: 296797 - DNA, 25 bp, Homo sapien
gaagacgtacttgggaacttcgagc

SEQ ID NO: 296798 - DNA, 25 bp, Homo sapien
tgccgctcatccctggaagacgtac

SEQ ID NO: 296799 - DNA, 25 bp, Homo sapien
tagtacatggcaggtgaacatccct

SEQ ID NO: 296800 - DNA, 25 bp, Homo sapien
tgaagtggcctgatgattacgcaac

SEQ ID NO: 296801 - DNA, 25 bp, Homo sapien
taggtgcagatgaacatccccgtgg

SEQ ID NO: 296802 - DNA, 25 bp, Homo sapien
acttccttgaagacaacgggctggg

SEQ ID NO: 296803 - DNA, 25 bp, Homo sapien
acatgcctataattgtcctcggcgt

SEQ ID NO: 296804 - DNA, 25 bp, Homo sapien
ggacttgggtactgttcttcatgag

SEQ ID NO: 296805 - DNA, 25 bp, Homo sapien
tcggcgttggcttccttctcgagga

SEQ ID NO: 296806 - DNA, 25 bp, Homo sapien
tcagctgcaagacgacagttccaaa

SEQ ID NO: 296807 - DNA, 25 bp, Homo sapien
tcattctcttttgcttctagctttg

SEQ ID NO: 296808 - DNA, 25 bp, Homo sapien
tgaatcaaccctttctcattctctt

SEQ ID NO: 296809 - DNA, 25 bp, Homo sapien
tttgaatcaaccctttctcattctc

SEQ ID NO: 296810 - DNA, 25 bp, Homo sapien
cttctagctttgattttagccagac

SEQ ID NO: 296811 - DNA, 25 bp, Homo sapien
aaggccttgatagggtgatcagaga

SEQ ID NO: 296812 - DNA, 25 bp, Homo sapien
gatcagagacgggtccaagccttag

SEQ ID NO: 296813 - DNA, 25 bp, Homo sapien
ggtgatcagagacgggtccaagcct

SEQ ID NO: 296814 - DNA, 25 bp, Homo sapien
ttaaggccttgatagggtgatcaga

SEQ ID NO: 296815 - DNA, 25 bp, Homo sapien
aatattaatcttgttgctggcagct

SEQ ID NO: 296816 - DNA, 25 bp, Homo sapien
gttaaatattaatcttgttgctggc

SEQ ID NO: 296817 - DNA, 25 bp, Homo sapien
tattaatcttgttgctggcagctgg

SEQ ID NO: 296818 - DNA, 25 bp, Homo sapien
gtggttaaatattaatcttgttgct

SEQ ID NO: 296819 - DNA, 25 bp, Homo sapien
gatccagagccagtaagaatgggtg

SEQ ID NO: 296820 - DNA, 25 bp, Homo sapien
ctatccacgctgagatccagagcca

SEQ ID NO: 296821 - DNA, 25 bp, Homo sapien
cagagccagtaagaatgggtgaatc

SEQ ID NO: 296822 - DNA, 25 bp, Homo sapien
agccagtaagaatgggtgaatctac

SEQ ID NO: 296823 - DNA, 25 bp, Homo sapien
gaaaatggtttgtgataactcctaa

SEQ ID NO: 296824 - DNA, 25 bp, Homo sapien
gcacttaatcttagtttcttcctgc

SEQ ID NO: 296825 - DNA, 25 bp, Homo sapien
gacttctggtactgaaaatggtttg

SEQ ID NO: 296826 - DNA, 25 bp, Homo sapien
ttagaccgttttgaatatgtagcac

SEQ ID NO: 296827 - DNA, 25 bp, Homo sapien
gacaatcatcagtgtgctatttggc

SEQ ID NO: 296828 - DNA, 25 bp, Homo sapien
gctatttggccttgcactgtaggcc

SEQ ID NO: 296829 - DNA, 25 bp, Homo sapien
atcagtgtgctatttggccttgcac

SEQ ID NO: 296830 - DNA, 25 bp, Homo sapien
ttggccttgcactgtaggccaagtg

SEQ ID NO: 296831 - DNA, 25 bp, Homo sapien
tcatcagctctaagacagcagtccc

SEQ ID NO: 296832 - DNA, 25 bp, Homo sapien
ggattccaggaacagcataaagact

SEQ ID NO: 296833 - DNA, 25 bp, Homo sapien
ggtgatcctagtgatgcaggccttc

SEQ ID NO: 296834 - DNA, 25 bp, Homo sapien
cagtgttcagatcaaagtggcctta

SEQ ID NO: 296835 - DNA, 25 bp, Homo sapien
cattgggtggacaatgttggcgacc

SEQ ID NO: 296836 - DNA, 25 bp, Homo sapien
gttggcgaccaccttgacatagccc

SEQ ID NO: 296837 - DNA, 25 bp, Homo sapien
actgaagcccattgggtggacaatg

SEQ ID NO: 296838 - DNA, 25 bp, Homo sapien
tggcgaccaccttgacatagcccat

SEQ ID NO: 296839 - DNA, 25 bp, Homo sapien
caaggatggctatgagcaggaaccg

SEQ ID NO: 296840 - DNA, 25 bp, Homo sapien
tgtttcagagctgtgcaaatgtggg

SEQ ID NO: 296841 - DNA, 25 bp, Homo sapien
tgggtattatgaggaatggcatcca

SEQ ID NO: 296842 - DNA, 25 bp, Homo sapien
gcaggaaccgccatattgcagctgg

SEQ ID NO: 296843 - DNA, 25 bp, Homo sapien
ttcacaccataaccaacacatattg

SEQ ID NO: 296844 - DNA, 25 bp, Homo sapien
cacatattgatattgtgggcacacc

SEQ ID NO: 296845 - DNA, 25 bp, Homo sapien
ggcacacctgggaatcgactaagca

SEQ ID NO: 296846 - DNA, 25 bp, Homo sapien
acagctgtggaagccttcacaccat

SEQ ID NO: 296847 - DNA, 25 bp, Homo sapien
ggaggagtaccatagcaataaggta

SEQ ID NO: 296848 - DNA, 25 bp, Homo sapien
cagcaggggaggagtaccatagcaa

SEQ ID NO: 296849 - DNA, 25 bp, Homo sapien
ccagcaggggaggagtaccatagca

SEQ ID NO: 296850 - DNA, 25 bp, Homo sapien
caggggaggagtaccatagcaataa

SEQ ID NO: 296851 - DNA, 25 bp, Homo sapien
cagctttgaagacgacttggattgc

SEQ ID NO: 296852 - DNA, 25 bp, Homo sapien
gcctatacgattttcatagatctca

SEQ ID NO: 296853 - DNA, 25 bp, Homo sapien
cagcctgttctatgtggcctatacg

SEQ ID NO: 296854 - DNA, 25 bp, Homo sapien
tgcttgaaacctaaaacatccatgc

SEQ ID NO: 296855 - DNA, 25 bp, Homo sapien
agagccaatgaatgcaaggccccgg

SEQ ID NO: 296856 - DNA, 25 bp, Homo sapien
ggcaatgactcacccacattttggg

SEQ ID NO: 296857 - DNA, 25 bp, Homo sapien
gggagccgcagaggcatccgtggtg

SEQ ID NO: 296858 - DNA, 25 bp, Homo sapien
tccgtggtgtgaggcccagagcata

SEQ ID NO: 296859 - DNA, 25 bp, Homo sapien
gagggctttacccagcagatgggat

SEQ ID NO: 296860 - DNA, 25 bp, Homo sapien
tgccaaccctaagtactgtccgacg

SEQ ID NO: 296861 - DNA, 25 bp, Homo sapien
gatgggatagctcctctgtgggaca

SEQ ID NO: 296862 - DNA, 25 bp, Homo sapien
ctattaatgagactgagcacctgca

SEQ ID NO: 296863 - DNA, 25 bp, Homo sapien
ggcagcttcaaagtgaggcttcagc

SEQ ID NO: 296864 - DNA, 25 bp, Homo sapien
tcacttctggcaatggttgaacacc

SEQ ID NO: 296865 - DNA, 25 bp, Homo sapien
catgaatagtagagggtcacttctg

SEQ ID NO: 296866 - DNA, 25 bp, Homo sapien
caataaatccaccaggcatggcgtc

SEQ ID NO: 296867 - DNA, 25 bp, Homo sapien
cagcggaattcaggattgaatcaaa

SEQ ID NO: 296868 - DNA, 25 bp, Homo sapien
ccctctgcagcggaattcaggattg

SEQ ID NO: 296869 - DNA, 25 bp, Homo sapien
cagcagttatcagcccttgtagaat

SEQ ID NO: 296870 - DNA, 25 bp, Homo sapien
tcaaattcaccatccgttgtattat

SEQ ID NO: 296871 - DNA, 25 bp, Homo sapien
gccaggatgggccttattttcagca

SEQ ID NO: 296872 - DNA, 25 bp, Homo sapien
agccaggatgggccttattttcagc

SEQ ID NO: 296873 - DNA, 25 bp, Homo sapien
aagccaggatgggccttattttcag

SEQ ID NO: 296874 - DNA, 25 bp, Homo sapien
gaagccaggatgggccttattttca

SEQ ID NO: 296875 - DNA, 25 bp, Homo sapien
cgatatttaaacatgggcagcttcc

SEQ ID NO: 296876 - DNA, 25 bp, Homo sapien
tacgagggctggctgttttacaccg

SEQ ID NO: 296877 - DNA, 25 bp, Homo sapien
ggacctgtccaagggtaggcaacca

SEQ ID NO: 296878 - DNA, 25 bp, Homo sapien
cctctatcagcagtggcccaggaag

SEQ ID NO: 296879 - DNA, 25 bp, Homo sapien
caaatgctacaaatccggccgtttt

SEQ ID NO: 296880 - DNA, 25 bp, Homo sapien
gacttacatcactatattctcttgg

SEQ ID NO: 296881 - DNA, 25 bp, Homo sapien
gtgtttacaccttggcaattggcaa

SEQ ID NO: 296882 - DNA, 25 bp, Homo sapien
catttatggcgaacaatttccactg

SEQ ID NO: 296883 - DNA, 25 bp, Homo sapien
agcttcctgccctttcggctgttta

SEQ ID NO: 296884 - DNA, 25 bp, Homo sapien
ctgccctttcggctgtttaggagct

SEQ ID NO: 296885 - DNA, 25 bp, Homo sapien
cctttcggctgtttaggagctccac

SEQ ID NO: 296886 - DNA, 25 bp, Homo sapien
ttcctgccctttcggctgtttagga

SEQ ID NO: 296887 - DNA, 25 bp, Homo sapien
agttgtgcccttccatgcagactca

SEQ ID NO: 296888 - DNA, 25 bp, Homo sapien
gaatgtgttttcagcgtctgctttt

SEQ ID NO: 296889 - DNA, 25 bp, Homo sapien
taatgaaggcatactcagttgtgcc

SEQ ID NO: 296890 - DNA, 25 bp, Homo sapien
ttttctgagcatgcgaatgagtgaa

SEQ ID NO: 296891 - DNA, 25 bp, Homo sapien
tcaagactggaacatggagcattcc

SEQ ID NO: 296892 - DNA, 25 bp, Homo sapien
tcctgcccctgtagtgccttaagta

SEQ ID NO: 296893 - DNA, 25 bp, Homo sapien
ggagcattccgtattgaaagcagaa

SEQ ID NO: 296894 - DNA, 25 bp, Homo sapien
cttaagtatgtggtctgttgaaatc

SEQ ID NO: 296895 - DNA, 25 bp, Homo sapien
gatgtgtttgcaccatcaaggttac

SEQ ID NO: 296896 - DNA, 25 bp, Homo sapien
ctcttcacacgatggcaagctgaag

SEQ ID NO: 296897 - DNA, 25 bp, Homo sapien
caccatcaaggttacagctgtagac

SEQ ID NO: 296898 - DNA, 25 bp, Homo sapien
cacgatggcaagctgaagatgtgtt

SEQ ID NO: 296899 - DNA, 25 bp, Homo sapien
agcaggagccgggccttgagccaaa

SEQ ID NO: 296900 - DNA, 25 bp, Homo sapien
caggagccgggccttgagccaaaac

SEQ ID NO: 296901 - DNA, 25 bp, Homo sapien
gcagcaggagccgggccttgagcca

SEQ ID NO: 296902 - DNA, 25 bp, Homo sapien
tcccgagcagcaggagccgggcctt

SEQ ID NO: 296903 - DNA, 25 bp, Homo sapien
taacacaagccaaagtgttgccttt

SEQ ID NO: 296904 - DNA, 25 bp, Homo sapien
ctaacacaagccaaagtgttgcctt

SEQ ID NO: 296905 - DNA, 25 bp, Homo sapien
gacatacaccatagtaatttcttga

SEQ ID NO: 296906 - DNA, 25 bp, Homo sapien
ccaagacatacaccatagtaatttc

SEQ ID NO: 296907 - DNA, 25 bp, Homo sapien
tccccaagacatacaccatagtaat

SEQ ID NO: 296908 - DNA, 25 bp, Homo sapien
ttcatccccaagacatacaccatag

SEQ ID NO: 296909 - DNA, 25 bp, Homo sapien
tgtttccttggcaaaagactggcaa

SEQ ID NO: 296910 - DNA, 25 bp, Homo sapien
tttataaacatgagggacgcagtct

SEQ ID NO: 296911 - DNA, 25 bp, Homo sapien
gacgcagtcttcttgatgggcatct

SEQ ID NO: 296912 - DNA, 25 bp, Homo sapien
tcatcctcgatgcaagagtcccctt

SEQ ID NO: 296913 - DNA, 25 bp, Homo sapien
taactctcagaaggttggataccat

SEQ ID NO: 296914 - DNA, 25 bp, Homo sapien
cagggaggattctatagaggcgata

SEQ ID NO: 296915 - DNA, 25 bp, Homo sapien
ggctggcagtgcaatgtaaatatca

SEQ ID NO: 296916 - DNA, 25 bp, Homo sapien
tgcattgttcttgggtgctattggg

SEQ ID NO: 296917 - DNA, 25 bp, Homo sapien
ccctgcaaagcctattgtttcctca

SEQ ID NO: 296918 - DNA, 25 bp, Homo sapien
gaggttttctgcagaacgccctgca

SEQ ID NO: 296919 - DNA, 25 bp, Homo sapien
ttttctgcagaacgccctgcaaagc

SEQ ID NO: 296920 - DNA, 25 bp, Homo sapien
gcaaagcctattgtttcctcatcca

SEQ ID NO: 296921 - DNA, 25 bp, Homo sapien
cgagctgagggtcacaatttgtaca

SEQ ID NO: 296922 - DNA, 25 bp, Homo sapien
tctttcctgttgagaaatgtctcag

SEQ ID NO: 296923 - DNA, 25 bp, Homo sapien
taatcactgggtcccttatcagcca

SEQ ID NO: 296924 - DNA, 25 bp, Homo sapien
ttggaggacttttgccaataatcac

SEQ ID NO: 296925 - DNA, 25 bp, Homo sapien
cagctgctaagagtaagtaggttat

SEQ ID NO: 296926 - DNA, 25 bp, Homo sapien
taaaatgtggagtgtcgacatgagg

SEQ ID NO: 296927 - DNA, 25 bp, Homo sapien
cataggcaacttccaaaaacagata

SEQ ID NO: 296928 - DNA, 25 bp, Homo sapien
tggcccacagacatgaatgttctcc

SEQ ID NO: 296929 - DNA, 25 bp, Homo sapien
ggatggtgttgaccgcctctgctgc

SEQ ID NO: 296930 - DNA, 25 bp, Homo sapien
aaaggatggtgttgaccgcctctgc

SEQ ID NO: 296931 - DNA, 25 bp, Homo sapien
cttccaaaggatggtgttgaccgcc

SEQ ID NO: 296932 - DNA, 25 bp, Homo sapien
ggtgttgaccgcctctgctgccagg

SEQ ID NO: 296933 - DNA, 25 bp, Homo sapien
aaggaccttaggctgctgtcaagaa

SEQ ID NO: 296934 - DNA, 25 bp, Homo sapien
tctctgattacccagcttggcagct

SEQ ID NO: 296935 - DNA, 25 bp, Homo sapien
aagaaacccgttagactgatgccaa

SEQ ID NO: 296936 - DNA, 25 bp, Homo sapien
cctgcgagatggataggcactttct

SEQ ID NO: 296937 - DNA, 25 bp, Homo sapien
ccacatcaaggggtcggcctttcat

SEQ ID NO: 296938 - DNA, 25 bp, Homo sapien
taaggccacatcaaggggtcggcct

SEQ ID NO: 296939 - DNA, 25 bp, Homo sapien
gagccataaggccacatcaaggggt

SEQ ID NO: 296940 - DNA, 25 bp, Homo sapien
cataaggccacatcaaggggtcggc

SEQ ID NO: 296941 - DNA, 25 bp, Homo sapien
taatttctcgtatttgtccttggac

SEQ ID NO: 296942 - DNA, 25 bp, Homo sapien
tctcatccgtgtcctcgggctggct

SEQ ID NO: 296943 - DNA, 25 bp, Homo sapien
caaggttctctcatccgtgtcctcg

SEQ ID NO: 296944 - DNA, 25 bp, Homo sapien
ctggctccccttttggtagtggatg

SEQ ID NO: 296945 - DNA, 25 bp, Homo sapien
tccccttttggtagtggatgatttc

SEQ ID NO: 296946 - DNA, 25 bp, Homo sapien
aatcgtggtcctgtcctgagcacag

SEQ ID NO: 296947 - DNA, 25 bp, Homo sapien
ccactaatcgtggtcctgtcctgag

SEQ ID NO: 296948 - DNA, 25 bp, Homo sapien
actaatcgtggtcctgtcctgagca

SEQ ID NO: 296949 - DNA, 25 bp, Homo sapien
ctattccactaatcgtggtcctgtc

SEQ ID NO: 296950 - DNA, 25 bp, Homo sapien
gagcttaggtcactatctttgggcc

SEQ ID NO: 296951 - DNA, 25 bp, Homo sapien
tacgtgcctgcgaggagatccttta

SEQ ID NO: 296952 - DNA, 25 bp, Homo sapien
taaagataggaacattacgtgcctg

SEQ ID NO: 296953 - DNA, 25 bp, Homo sapien
tgattgtctctcctccacgtgtaga

SEQ ID NO: 296954 - DNA, 25 bp, Homo sapien
cagggcgctgaccagggaactttcc

SEQ ID NO: 296955 - DNA, 25 bp, Homo sapien
ccagggcgctgaccagggaactttc

SEQ ID NO: 296956 - DNA, 25 bp, Homo sapien
gggcgctgaccagggaactttccat

SEQ ID NO: 296957 - DNA, 25 bp, Homo sapien
agggcgctgaccagggaactttcca

SEQ ID NO: 296958 - DNA, 25 bp, Homo sapien
tcatcctgatcttgtcaggcaggag

SEQ ID NO: 296959 - DNA, 25 bp, Homo sapien
tcctgatcttgtcaggcaggagcac

SEQ ID NO: 296960 - DNA, 25 bp, Homo sapien
ctctcatcctgatcttgtcaggcag

SEQ ID NO: 296961 - DNA, 25 bp, Homo sapien
catcctgatcttgtcaggcaggagc

SEQ ID NO: 296962 - DNA, 25 bp, Homo sapien
caggctcttagagggcctggacacg

SEQ ID NO: 296963 - DNA, 25 bp, Homo sapien
gctcactcccggactctgtgaagct

SEQ ID NO: 296964 - DNA, 25 bp, Homo sapien
cacaggtgggagtgttctttgctaa

SEQ ID NO: 296965 - DNA, 25 bp, Homo sapien
cctggacacggtggcgttgctcact

SEQ ID NO: 296966 - DNA, 25 bp, Homo sapien
ccttcttctttaaggtatattgtat

SEQ ID NO: 296967 - DNA, 25 bp, Homo sapien
gctgctcttgttgacccaggtctcc

SEQ ID NO: 296968 - DNA, 25 bp, Homo sapien
gaagctgctcttgttgacccaggtc

SEQ ID NO: 296969 - DNA, 25 bp, Homo sapien
gatttttccagatgaagctgctctt

SEQ ID NO: 296970 - DNA, 25 bp, Homo sapien
ctccttataatcttcaggccagtcc

SEQ ID NO: 296971 - DNA, 25 bp, Homo sapien
tccttataatcttcaggccagtcct

SEQ ID NO: 296972 - DNA, 25 bp, Homo sapien
tctccttataatcttcaggccagtc

SEQ ID NO: 296973 - DNA, 25 bp, Homo sapien
ccttataatcttcaggccagtcctg

SEQ ID NO: 296974 - DNA, 25 bp, Homo sapien
aacgacagcaaggagagtgaatttg

SEQ ID NO: 296975 - DNA, 25 bp, Homo sapien
caaggagagtgaatttggggcatca

SEQ ID NO: 296976 - DNA, 25 bp, Homo sapien
aaggagagtgaatttggggcatcac

SEQ ID NO: 296977 - DNA, 25 bp, Homo sapien
ctaacgacagcaaggagagtgaatt

SEQ ID NO: 296978 - DNA, 25 bp, Homo sapien
aacagtatcattaggagacttatct

SEQ ID NO: 296979 - DNA, 25 bp, Homo sapien
tatcattaggagacttatctgatgg

SEQ ID NO: 296980 - DNA, 25 bp, Homo sapien
aaaacagtatcattaggagacttat

SEQ ID NO: 296981 - DNA, 25 bp, Homo sapien
cagtatcattaggagacttatctga

SEQ ID NO: 296982 - DNA, 25 bp, Homo sapien
tgttctgagaattccgaagggcagt

SEQ ID NO: 296983 - DNA, 25 bp, Homo sapien
gttctgagaattccgaagggcagtc

SEQ ID NO: 296984 - DNA, 25 bp, Homo sapien
tgagaattccgaagggcagtcaaag

SEQ ID NO: 296985 - DNA, 25 bp, Homo sapien
tctgagaattccgaagggcagtcaa

SEQ ID NO: 296986 - DNA, 25 bp, Homo sapien
cctgggtccctagctctgtgctgct

SEQ ID NO: 296987 - DNA, 25 bp, Homo sapien
ccctgggtccctagctctgtgctgc

SEQ ID NO: 296988 - DNA, 25 bp, Homo sapien
tccagctgccgctgcgttgaaaagt

SEQ ID NO: 296989 - DNA, 25 bp, Homo sapien
gtacagcccacacccagtgaatgat

SEQ ID NO: 296990 - DNA, 25 bp, Homo sapien
ctgccgctgcgttgaaaagtcagcc

SEQ ID NO: 296991 - DNA, 25 bp, Homo sapien
cttgtacagcccacacccagtgaat

SEQ ID NO: 296992 - DNA, 25 bp, Homo sapien
ggtattctcaccagattgttacagt

SEQ ID NO: 296993 - DNA, 25 bp, Homo sapien
ccaggtgagccccagtgtagaatcc

SEQ ID NO: 296994 - DNA, 25 bp, Homo sapien
aatagcactggacggcgagttcggt

SEQ ID NO: 296995 - DNA, 25 bp, Homo sapien
cgagttcggttttggacatgcagag

SEQ ID NO: 296996 - DNA, 25 bp, Homo sapien
aatgacattttgatccccgggactc

SEQ ID NO: 296997 - DNA, 25 bp, Homo sapien
caactggcgtttatcgaatccctac

SEQ ID NO: 296998 - DNA, 25 bp, Homo sapien
ccagagttgagatcagagtgcccgt

SEQ ID NO: 296999 - DNA, 25 bp, Homo sapien
tctgggctaattgaggaaagtcttc

SEQ ID NO: 297000 - DNA, 25 bp, Homo sapien
tgtctttgggaccactcactttggg

SEQ ID NO: 297001 - DNA, 25 bp, Homo sapien
gaattagatcttacatcccagagca

SEQ ID NO: 297002 - DNA, 25 bp, Homo sapien
tgatagctggcatcaactgccgggc

SEQ ID NO: 297003 - DNA, 25 bp, Homo sapien
tggagtggcaaaaacgtgagccttc

SEQ ID NO: 297004 - DNA, 25 bp, Homo sapien
tatacgtatctcaaacaaccaaggg

SEQ ID NO: 297005 - DNA, 25 bp, Homo sapien
caagatggcacccagtaattcccac

SEQ ID NO: 297006 - DNA, 25 bp, Homo sapien
caaccaagggctgaaaacacttgaa

SEQ ID NO: 297007 - DNA, 25 bp, Homo sapien
ggaatttatcacagtccagttcata

SEQ ID NO: 297008 - DNA, 25 bp, Homo sapien
atgcttcttgctgggcgatgagaga

SEQ ID NO: 297009 - DNA, 25 bp, Homo sapien
gtaacagtccagttcacaaatcaga

SEQ ID NO: 297010 - DNA, 25 bp, Homo sapien
ggaaattaagccactgtaacagtcc

SEQ ID NO: 297011 - DNA, 25 bp, Homo sapien
ttcgcaaagctaaatagaggatgct

SEQ ID NO: 297012 - DNA, 25 bp, Homo sapien
gaaccaatcctccacagatagagag

SEQ ID NO: 297013 - DNA, 25 bp, Homo sapien
gaaaagaatagatgggttacacctg

SEQ ID NO: 297014 - DNA, 25 bp, Homo sapien
tgggttcaacccaccaagacttgac

SEQ ID NO: 297015 - DNA, 25 bp, Homo sapien
tgtttatccatgtgctttcgcggtg

SEQ ID NO: 297016 - DNA, 25 bp, Homo sapien
cacactccagcttgtattgaagaca

SEQ ID NO: 297017 - DNA, 25 bp, Homo sapien
ggccgccttgtgtctgctttacaga

SEQ ID NO: 297018 - DNA, 25 bp, Homo sapien
gacagtgctcgtgccatcattccat

SEQ ID NO: 297019 - DNA, 25 bp, Homo sapien
caaggacgcttaaatattcccaggg

SEQ ID NO: 297020 - DNA, 25 bp, Homo sapien
ccgctgtgcgtgtggacttctacaa

SEQ ID NO: 297021 - DNA, 25 bp, Homo sapien
tctacaatgcagacgagctcaaggt

SEQ ID NO: 297022 - DNA, 25 bp, Homo sapien
gactccattgcggagcagatcctgg

SEQ ID NO: 297023 - DNA, 25 bp, Homo sapien
gatctcctctagctggaagcgttat

SEQ ID NO: 297024 - DNA, 25 bp, Homo sapien
tcaccctggtcaaatccgtcctgtt

SEQ ID NO: 297025 - DNA, 25 bp, Homo sapien
caccctggtcaaatccgtcctgttc

SEQ ID NO: 297026 - DNA, 25 bp, Homo sapien
gtcaccctggtcaaatccgtcctgt

SEQ ID NO: 297027 - DNA, 25 bp, Homo sapien
tcagcatgaaccacctagcgtggtg

SEQ ID NO: 297028 - DNA, 25 bp, Homo sapien
tccatgatagacactacagaaggtg

SEQ ID NO: 297029 - DNA, 25 bp, Homo sapien
tgtactgatagcaacctaaggcatt

SEQ ID NO: 297030 - DNA, 25 bp, Homo sapien
gaaggtgtaactcccgaggaagcca

SEQ ID NO: 297031 - DNA, 25 bp, Homo sapien
gatgccaagcgcctcccaataaggg

SEQ ID NO: 297032 - DNA, 25 bp, Homo sapien
tgccaagcgcctcccaataagggac

SEQ ID NO: 297033 - DNA, 25 bp, Homo sapien
aggaactcactgatgccaagcgcct

SEQ ID NO: 297034 - DNA, 25 bp, Homo sapien
gtcacaggaactcactgatgccaag

SEQ ID NO: 297035 - DNA, 25 bp, Homo sapien
cttgaggagcgttcctgggagggac

SEQ ID NO: 297036 - DNA, 25 bp, Homo sapien
ttgaggagcgttcctgggagggacc

SEQ ID NO: 297037 - DNA, 25 bp, Homo sapien
gcttgaggagcgttcctgggaggga

SEQ ID NO: 297038 - DNA, 25 bp, Homo sapien
tgaggagcgttcctgggagggacca

SEQ ID NO: 297039 - DNA, 25 bp, Homo sapien
caccactggtagtttgagaaatatc

SEQ ID NO: 297040 - DNA, 25 bp, Homo sapien
gagaaatatcagtgtgggcacagtt

SEQ ID NO: 297041 - DNA, 25 bp, Homo sapien
tttacatagccataaaatcgtatgt

SEQ ID NO: 297042 - DNA, 25 bp, Homo sapien
tatgtaatgggctgtataactacga

SEQ ID NO: 297043 - DNA, 25 bp, Homo sapien
gttcttcacccaagctccttgtgct

SEQ ID NO: 297044 - DNA, 25 bp, Homo sapien
caaatttttatccaggatggactgg

SEQ ID NO: 297045 - DNA, 25 bp, Homo sapien
tgagtgttaggggcaaatttttatc

SEQ ID NO: 297046 - DNA, 25 bp, Homo sapien
aaactggttcttcacccaagctcct

SEQ ID NO: 297047 - DNA, 25 bp, Homo sapien
gaagaatgttatccgtggcacctgc

SEQ ID NO: 297048 - DNA, 25 bp, Homo sapien
gaaataggattgaagaatgttatcc

SEQ ID NO: 297049 - DNA, 25 bp, Homo sapien
gattgaagaatgttatccgtggcac

SEQ ID NO: 297050 - DNA, 25 bp, Homo sapien
tgttatccgtggcacctgcgagtga

SEQ ID NO: 297051 - DNA, 25 bp, Homo sapien
tcttgcaagagggtatccccagctt

SEQ ID NO: 297052 - DNA, 25 bp, Homo sapien
gcaagagggtatccccagcttgttg

SEQ ID NO: 297053 - DNA, 25 bp, Homo sapien
catcttgcaagagggtatccccagc

SEQ ID NO: 297054 - DNA, 25 bp, Homo sapien
ggcatcttgcaagagggtatcccca

SEQ ID NO: 297055 - DNA, 25 bp, Homo sapien
tcatctttctgcaccaagttcctta

SEQ ID NO: 297056 - DNA, 25 bp, Homo sapien
catctttctgcaccaagttccttac

SEQ ID NO: 297057 - DNA, 25 bp, Homo sapien
aaatgagcccactggtactggtgca

SEQ ID NO: 297058 - DNA, 25 bp, Homo sapien
gcatctgatcctctgccgtgcttat

SEQ ID NO: 297059 - DNA, 25 bp, Homo sapien
caatatttgctggtgagaaatgagc

SEQ ID NO: 297060 - DNA, 25 bp, Homo sapien
ctctctgtgatcaatgtcgtgtgca

SEQ ID NO: 297061 - DNA, 25 bp, Homo sapien
aatcaggctcagttgcgagaggctc

SEQ ID NO: 297062 - DNA, 25 bp, Homo sapien
cagtagtgctcagggaatcaggctc

SEQ ID NO: 297063 - DNA, 25 bp, Homo sapien
tgtcgtgccttgcaacagtagtgct

SEQ ID NO: 297064 - DNA, 25 bp, Homo sapien
tggaatgttcacaaagcttctggcc

SEQ ID NO: 297065 - DNA, 25 bp, Homo sapien
cagtaaggaggtcggcctcattcct

SEQ ID NO: 297066 - DNA, 25 bp, Homo sapien
aacttctctccagtaaggaggtcgg

SEQ ID NO: 297067 - DNA, 25 bp, Homo sapien
gtttccagggtatccttcagaccca

SEQ ID NO: 297068 - DNA, 25 bp, Homo sapien
tcctggtttccagggtatccttcag

SEQ ID NO: 297069 - DNA, 25 bp, Homo sapien
tttgacgcttcctctttcaagctgt

SEQ ID NO: 297070 - DNA, 25 bp, Homo sapien
ggtgggcactagctccaagtttgcc

SEQ ID NO: 297071 - DNA, 25 bp, Homo sapien
gggcactagctccaagtttgccttt

SEQ ID NO: 297072 - DNA, 25 bp, Homo sapien
caagcttcctttgacgcttcctctt

SEQ ID NO: 297073 - DNA, 25 bp, Homo sapien
cctcactgtgcgcactgccctggcc

SEQ ID NO: 297074 - DNA, 25 bp, Homo sapien
ctcactgtgcgcactgccctggccc

SEQ ID NO: 297075 - DNA, 25 bp, Homo sapien
ctcctcactgtgcgcactgccctgg

SEQ ID NO: 297076 - DNA, 25 bp, Homo sapien
tctcctcactgtgcgcactgccctg

SEQ ID NO: 297077 - DNA, 25 bp, Homo sapien
ctctgagccgtgagaggcaagtgga

SEQ ID NO: 297078 - DNA, 25 bp, Homo sapien
cacacctgtggatgggcttccgagg

SEQ ID NO: 297079 - DNA, 25 bp, Homo sapien
tcttgctttctaggagattacgatg

SEQ ID NO: 297080 - DNA, 25 bp, Homo sapien
gattacgatgcggttcacagtcaca

SEQ ID NO: 297081 - DNA, 25 bp, Homo sapien
aagttaatgtctcagggcccagttt

SEQ ID NO: 297082 - DNA, 25 bp, Homo sapien
tgctctagaatgttgcccactgtga

SEQ ID NO: 297083 - DNA, 25 bp, Homo sapien
gctctagaatgttgcccactgtgat

SEQ ID NO: 297084 - DNA, 25 bp, Homo sapien
ccatgtgtcatttcttggcagagct

SEQ ID NO: 297085 - DNA, 25 bp, Homo sapien
agcttggcttaggactacttttcat

SEQ ID NO: 297086 - DNA, 25 bp, Homo sapien
gagcttggcttaggactacttttca

SEQ ID NO: 297087 - DNA, 25 bp, Homo sapien
caatttggagcccatccataactgt

SEQ ID NO: 297088 - DNA, 25 bp, Homo sapien
gatgtcatcccttggcacagtctga

SEQ ID NO: 297089 - DNA, 25 bp, Homo sapien
ggagccttgtttctgctgccggcat

SEQ ID NO: 297090 - DNA, 25 bp, Homo sapien
tcttgattcttgttaacagccctat

SEQ ID NO: 297091 - DNA, 25 bp, Homo sapien
ggctctagtaagctacatctctctc

SEQ ID NO: 297092 - DNA, 25 bp, Homo sapien
cctcttaaacgacattcctggtggg

SEQ ID NO: 297093 - DNA, 25 bp, Homo sapien
aagccacagggctctagtaagctac

SEQ ID NO: 297094 - DNA, 25 bp, Homo sapien
tctctctccacgttctgttttccat

SEQ ID NO: 297095 - DNA, 25 bp, Homo sapien
tcctcaagcaaatgtgaatttgtgc

SEQ ID NO: 297096 - DNA, 25 bp, Homo sapien
caaatgtgaatttgtgctagatcac

SEQ ID NO: 297097 - DNA, 25 bp, Homo sapien
atttgtattcttcctcaagcaaatg

SEQ ID NO: 297098 - DNA, 25 bp, Homo sapien
caagcaaatgtgaatttgtgctaga

SEQ ID NO: 297099 - DNA, 25 bp, Homo sapien
ggacattatcataggcggccatgga

SEQ ID NO: 297100 - DNA, 25 bp, Homo sapien
gctaaaatctgagagccggccttct

SEQ ID NO: 297101 - DNA, 25 bp, Homo sapien
tcagtgactcaaccaagcgtcctgg

SEQ ID NO: 297102 - DNA, 25 bp, Homo sapien
gagatgacatgaacacaggaggtgc

SEQ ID NO: 297103 - DNA, 25 bp, Homo sapien
tcccattctctgttcctttgaccac

SEQ ID NO: 297104 - DNA, 25 bp, Homo sapien
ctgccgtccttgtaggcaagctcat

SEQ ID NO: 297105 - DNA, 25 bp, Homo sapien
ttgaccacatcagtaccctcttctg

SEQ ID NO: 297106 - DNA, 25 bp, Homo sapien
cttctgccgtccttgtaggcaagct

SEQ ID NO: 297107 - DNA, 25 bp, Homo sapien
aaaaggcttcgagtccctaggtgca

SEQ ID NO: 297108 - DNA, 25 bp, Homo sapien
gaagtttattaaggtgtgcatttca

SEQ ID NO: 297109 - DNA, 25 bp, Homo sapien
atttgttaagcagattcctccagtg

SEQ ID NO: 297110 - DNA, 25 bp, Homo sapien
ggtttagaaatccagcttatattgc

SEQ ID NO: 297111 - DNA, 25 bp, Homo sapien
taagaagcaaatgacgcagggtcat

SEQ ID NO: 297112 - DNA, 25 bp, Homo sapien
acagttatgggacaaataagaagca

SEQ ID NO: 297113 - DNA, 25 bp, Homo sapien
aatgtagggcctgagattcatcaga

SEQ ID NO: 297114 - DNA, 25 bp, Homo sapien
caggctgctgcacatctgaatctga

SEQ ID NO: 297115 - DNA, 25 bp, Homo sapien
gatctttaggtagagtgctttgcac

SEQ ID NO: 297116 - DNA, 25 bp, Homo sapien
tctgcttattcctctgttagcgctg

SEQ ID NO: 297117 - DNA, 25 bp, Homo sapien
gattctacggtgaaagctccaccca

SEQ ID NO: 297118 - DNA, 25 bp, Homo sapien
gctttgcacacggttggtgtgtgat

SEQ ID NO: 297119 - DNA, 25 bp, Homo sapien
aggttgcaggacttcaaggtctcca

SEQ ID NO: 297120 - DNA, 25 bp, Homo sapien
ggttgcaggacttcaaggtctccat

SEQ ID NO: 297121 - DNA, 25 bp, Homo sapien
ggttgtgtaggctatacaggcatgg

SEQ ID NO: 297122 - DNA, 25 bp, Homo sapien
ttgtgtaggctatacaggcatggca

SEQ ID NO: 297123 - DNA, 25 bp, Homo sapien
gttgtgtaggctatacaggcatggc

SEQ ID NO: 297124 - DNA, 25 bp, Homo sapien
tcttgccttctcatgtgtaagtgga

SEQ ID NO: 297125 - DNA, 25 bp, Homo sapien
tgtaagtggaaacaacaataccgtc

SEQ ID NO: 297126 - DNA, 25 bp, Homo sapien
ttttgcaggcaactgacacatatta

SEQ ID NO: 297127 - DNA, 25 bp, Homo sapien
catattaagttctcagcaaattgca

SEQ ID NO: 297128 - DNA, 25 bp, Homo sapien
agggcatcacggcagcaggcatgct

SEQ ID NO: 297129 - DNA, 25 bp, Homo sapien
aagactagcagctcccaggtacgcc

SEQ ID NO: 297130 - DNA, 25 bp, Homo sapien
acagaggagccacatagcctgggca

SEQ ID NO: 297131 - DNA, 25 bp, Homo sapien
cccatgggaaagcacgttgtcattt

SEQ ID NO: 297132 - DNA, 25 bp, Homo sapien
ctttccgtagtcatctccgaatcct

SEQ ID NO: 297133 - DNA, 25 bp, Homo sapien
atctccgaatccttagtctttggca

SEQ ID NO: 297134 - DNA, 25 bp, Homo sapien
gtcatctccgaatccttagtctttg

SEQ ID NO: 297135 - DNA, 25 bp, Homo sapien
tccgtagtcatctccgaatccttag

SEQ ID NO: 297136 - DNA, 25 bp, Homo sapien
gtggatcaccaaggttattcattca

SEQ ID NO: 297137 - DNA, 25 bp, Homo sapien
gtcactgagcgccagtgccattggg

SEQ ID NO: 297138 - DNA, 25 bp, Homo sapien
tagggcactgggcatagagccctga

SEQ ID NO: 297139 - DNA, 25 bp, Homo sapien
gcgccagtgccattgggtggatcac

SEQ ID NO: 297140 - DNA, 25 bp, Homo sapien
taaaaaccctaatctgtatgagtgt

SEQ ID NO: 297141 - DNA, 25 bp, Homo sapien
cagctcttgcaatgacacggctcta

SEQ ID NO: 297142 - DNA, 25 bp, Homo sapien
tcagttggaaacaagaccagtattc

SEQ ID NO: 297143 - DNA, 25 bp, Homo sapien
gaccagtattcttaccagctcttgc

SEQ ID NO: 297144 - DNA, 25 bp, Homo sapien
tatctggcatattgggcaatacttg

SEQ ID NO: 297145 - DNA, 25 bp, Homo sapien
ctatctggcatattgggcaatactt

SEQ ID NO: 297146 - DNA, 25 bp, Homo sapien
tattgggcaatacttgtttgttgga

SEQ ID NO: 297147 - DNA, 25 bp, Homo sapien
tggcatattgggcaatacttgtttg

SEQ ID NO: 297148 - DNA, 25 bp, Homo sapien
tcagactgttgaggcctgtggcagc

SEQ ID NO: 297149 - DNA, 25 bp, Homo sapien
tggcagctgtcaagaccgtgctgtc

SEQ ID NO: 297150 - DNA, 25 bp, Homo sapien
cattcagactgttgaggcctgtggc

SEQ ID NO: 297151 - DNA, 25 bp, Homo sapien
cagctgtcaagaccgtgctgtccat

SEQ ID NO: 297152 - DNA, 25 bp, Homo sapien
catttagcttgacttctaaggcggg

SEQ ID NO: 297153 - DNA, 25 bp, Homo sapien
cctgctctcttcaagtgacgtggga

SEQ ID NO: 297154 - DNA, 25 bp, Homo sapien
ttcatcagggtcatagtcagttgct

SEQ ID NO: 297155 - DNA, 25 bp, Homo sapien
gagaagagcaatttaccgtaccctg

SEQ ID NO: 297156 - DNA, 25 bp, Homo sapien
ctgcagcagtgattgtcagaatcat

SEQ ID NO: 297157 - DNA, 25 bp, Homo sapien
tacttccactacttccagtagagcc

SEQ ID NO: 297158 - DNA, 25 bp, Homo sapien
ccactacttccagtagagcctggtg

SEQ ID NO: 297159 - DNA, 25 bp, Homo sapien
tagagcctggtggtcaataaccacc

SEQ ID NO: 297160 - DNA, 25 bp, Homo sapien
cttccactacttccagtagagcctg

SEQ ID NO: 297161 - DNA, 25 bp, Homo sapien
gcccattgaggaaagaccactctaa

SEQ ID NO: 297162 - DNA, 25 bp, Homo sapien
gaaagaccactctaatctccctcta

SEQ ID NO: 297163 - DNA, 25 bp, Homo sapien
ttgaggaaagaccactctaatctcc

SEQ ID NO: 297164 - DNA, 25 bp, Homo sapien
ttagagcccattgaggaaagaccac

SEQ ID NO: 297165 - DNA, 25 bp, Homo sapien
gattggaggtaatcttggatctgcc

SEQ ID NO: 297166 - DNA, 25 bp, Homo sapien
ctgagttggttttaccaaagaggag

SEQ ID NO: 297167 - DNA, 25 bp, Homo sapien
agctcagaggagtctgagttggttt

SEQ ID NO: 297168 - DNA, 25 bp, Homo sapien
taagcagagtctagtgagagctcag

SEQ ID NO: 297169 - DNA, 25 bp, Homo sapien
gagcagcagtgccagcgtggaacac

SEQ ID NO: 297170 - DNA, 25 bp, Homo sapien
gcagcagtgccagcgtggaacactc

SEQ ID NO: 297171 - DNA, 25 bp, Homo sapien
cctatgtccggggtttggagcagca

SEQ ID NO: 297172 - DNA, 25 bp, Homo sapien
ggtcctatgtccggggtttggagca

SEQ ID NO: 297173 - DNA, 25 bp, Homo sapien
tatgaggaaactagtcactggggaa

SEQ ID NO: 297174 - DNA, 25 bp, Homo sapien
ggtgtcagacagtgttttaagtgcg

SEQ ID NO: 297175 - DNA, 25 bp, Homo sapien
tatcttccctgtgttacatatgagg

SEQ ID NO: 297176 - DNA, 25 bp, Homo sapien
gcgtatatagctttactcttttgat

SEQ ID NO: 297177 - DNA, 25 bp, Homo sapien
aagtgactgtcacaagttctgggca

SEQ ID NO: 297178 - DNA, 25 bp, Homo sapien
catacctggagcttagcatagccct

SEQ ID NO: 297179 - DNA, 25 bp, Homo sapien
gcatagccctaacttcatggtccag

SEQ ID NO: 297180 - DNA, 25 bp, Homo sapien
ggcatgtgctcctggaaccttagct

SEQ ID NO: 297181 - DNA, 25 bp, Homo sapien
caatttggtaccacctaataggaga

SEQ ID NO: 297182 - DNA, 25 bp, Homo sapien
tctccttgaggaggctatggacttc

SEQ ID NO: 297183 - DNA, 25 bp, Homo sapien
gcccggcctagagtggcacttctta

SEQ ID NO: 297184 - DNA, 25 bp, Homo sapien
cctggcgtgttgtcagggcatagta

SEQ ID NO: 297185 - DNA, 25 bp, Homo sapien
tagtcagacaaacatttgtcagacg

SEQ ID NO: 297186 - DNA, 25 bp, Homo sapien
tctcattagtcagacaaacatttgt

SEQ ID NO: 297187 - DNA, 25 bp, Homo sapien
catttgtcagacgtggtttatatct

SEQ ID NO: 297188 - DNA, 25 bp, Homo sapien
gacgtggtttatatctgtaaggcat

SEQ ID NO: 297189 - DNA, 25 bp, Homo sapien
ggtccttgaacagccagatggtggc

SEQ ID NO: 297190 - DNA, 25 bp, Homo sapien
cttcattatcttgaatggcaatgct

SEQ ID NO: 297191 - DNA, 25 bp, Homo sapien
tcattatcttgaatggcaatgctgt

SEQ ID NO: 297192 - DNA, 25 bp, Homo sapien
cacccaggaggggtccttgaacagc

SEQ ID NO: 297193 - DNA, 25 bp, Homo sapien
aggaaggaagaactcgacagcagcc

SEQ ID NO: 297194 - DNA, 25 bp, Homo sapien
ggaaggaagaactcgacagcagcca

SEQ ID NO: 297195 - DNA, 25 bp, Homo sapien
aggccctggcttcctgtcttcagag

SEQ ID NO: 297196 - DNA, 25 bp, Homo sapien
ctccaggccctggcttcctgtcttc

SEQ ID NO: 297197 - DNA, 25 bp, Homo sapien
ctgacatcttccagctctccaggcc

SEQ ID NO: 297198 - DNA, 25 bp, Homo sapien
ccaggccctggcttcctgtcttcag

SEQ ID NO: 297199 - DNA, 25 bp, Homo sapien
tgtgagtggcttgagagtgctcctc

SEQ ID NO: 297200 - DNA, 25 bp, Homo sapien
aatccaatcgctggttttgggaagc

SEQ ID NO: 297201 - DNA, 25 bp, Homo sapien
aagccactgtgagtggcttgagagt

SEQ ID NO: 297202 - DNA, 25 bp, Homo sapien
tttccaatccaatcgctggttttgg

SEQ ID NO: 297203 - DNA, 25 bp, Homo sapien
tatcctgaatgccatccgatgcatt

SEQ ID NO: 297204 - DNA, 25 bp, Homo sapien
tgccatccgatgcattaattaacat

SEQ ID NO: 297205 - DNA, 25 bp, Homo sapien
ctgtctctgttaggcagctcagatc

SEQ ID NO: 297206 - DNA, 25 bp, Homo sapien
gaatttcggtttttatcctgaatgc

SEQ ID NO: 297207 - DNA, 25 bp, Homo sapien
gggtcagctcttcttccgaggcatc

SEQ ID NO: 297208 - DNA, 25 bp, Homo sapien
cttcttccgaggcatcctgaagatg

SEQ ID NO: 297209 - DNA, 25 bp, Homo sapien
tccgaggcatcctgaagatgcctca

SEQ ID NO: 297210 - DNA, 25 bp, Homo sapien
gctcttcttccgaggcatcctgaag

SEQ ID NO: 297211 - DNA, 25 bp, Homo sapien
ccgcttatccaccacctcgttttca

SEQ ID NO: 297212 - DNA, 25 bp, Homo sapien
ccatgagcctggtttaaaaaccgct

SEQ ID NO: 297213 - DNA, 25 bp, Homo sapien
catgagcctggtttaaaaaccgctt

SEQ ID NO: 297214 - DNA, 25 bp, Homo sapien
cacactgagtcctttagacgtaagc

SEQ ID NO: 297215 - DNA, 25 bp, Homo sapien
tttggcacaacgcggcttcaggaag

SEQ ID NO: 297216 - DNA, 25 bp, Homo sapien
ctttggcacaacgcggcttcaggaa

SEQ ID NO: 297217 - DNA, 25 bp, Homo sapien
tctggcagtgtgcaaggagcgtggg

SEQ ID NO: 297218 - DNA, 25 bp, Homo sapien
ggagtttttgggcccagtgtctggc

SEQ ID NO: 297219 - DNA, 25 bp, Homo sapien
ccactggagtttttgggcccagtgt

SEQ ID NO: 297220 - DNA, 25 bp, Homo sapien
cccagtgtctggcagtgtgcaagga

SEQ ID NO: 297221 - DNA, 25 bp, Homo sapien
tcagttgggacctgctgagagcagt

SEQ ID NO: 297222 - DNA, 25 bp, Homo sapien
cctcttgtccacagctgaactgaga

SEQ ID NO: 297223 - DNA, 25 bp, Homo sapien
cagtttcactttcgcatttgcttcc

SEQ ID NO: 297224 - DNA, 25 bp, Homo sapien
ccacagctgaactgagaggtgttct

SEQ ID NO: 297225 - DNA, 25 bp, Homo sapien
taggcaatttatcttgttcagcctc

SEQ ID NO: 297226 - DNA, 25 bp, Homo sapien
cagcctctacaaggactgtctggta

SEQ ID NO: 297227 - DNA, 25 bp, Homo sapien
tggccacgagcctgcccagtaggga

SEQ ID NO: 297228 - DNA, 25 bp, Homo sapien
tatggccggtctgggcatctggctg

SEQ ID NO: 297229 - DNA, 25 bp, Homo sapien
gtgggccgaacagagtcttcctttg

SEQ ID NO: 297230 - DNA, 25 bp, Homo sapien
gggccgaacagagtcttcctttgct

SEQ ID NO: 297231 - DNA, 25 bp, Homo sapien
tcccaggtgggccgaacagagtctt

SEQ ID NO: 297232 - DNA, 25 bp, Homo sapien
ccaggtgggccgaacagagtcttcc

SEQ ID NO: 297233 - DNA, 25 bp, Homo sapien
tggagttggaacttctgtgatgctt

SEQ ID NO: 297234 - DNA, 25 bp, Homo sapien
ctgcctggtaggttctgtacaaacc

SEQ ID NO: 297235 - DNA, 25 bp, Homo sapien
tctgtacaaaccattgccaggcaat

SEQ ID NO: 297236 - DNA, 25 bp, Homo sapien
tgtacaaaccattgccaggcaatgg

SEQ ID NO: 297237 - DNA, 25 bp, Homo sapien
cctggtaggttctgtacaaaccatt

SEQ ID NO: 297238 - DNA, 25 bp, Homo sapien
ctaattttagccttgccacacttaa

SEQ ID NO: 297239 - DNA, 25 bp, Homo sapien
acacttaatgccaactctgagagtg

SEQ ID NO: 297240 - DNA, 25 bp, Homo sapien
cttaatgccaactctgagagtgttg

SEQ ID NO: 297241 - DNA, 25 bp, Homo sapien
gatatctatggaaacagtcctaatt

SEQ ID NO: 297242 - DNA, 25 bp, Homo sapien
cagggagccctacacttagcgtttg

SEQ ID NO: 297243 - DNA, 25 bp, Homo sapien
tgccagtgtgctccataagaccagc

SEQ ID NO: 297244 - DNA, 25 bp, Homo sapien
ttcaagggcgtaaaggatgtgtcca

SEQ ID NO: 297245 - DNA, 25 bp, Homo sapien
tgatgacgatggatagcagctgctg

SEQ ID NO: 297246 - DNA, 25 bp, Homo sapien
gagcaccacccgggagctgagctgc

SEQ ID NO: 297247 - DNA, 25 bp, Homo sapien
gctgggcttgcaagggggagcacca

SEQ ID NO: 297248 - DNA, 25 bp, Homo sapien
ctgtgtgtttggtggaaacgtagag

SEQ ID NO: 297249 - DNA, 25 bp, Homo sapien
tggtggaaacgtagagtgagccggg

SEQ ID NO: 297250 - DNA, 25 bp, Homo sapien
tctggattcaccttaaaagtgaagc

SEQ ID NO: 297251 - DNA, 25 bp, Homo sapien
gagattacggtacacacttttcagc

SEQ ID NO: 297252 - DNA, 25 bp, Homo sapien
caccttaaaagtgaagccaatttct

SEQ ID NO: 297253 - DNA, 25 bp, Homo sapien
tgaggaggagcttgctttgagatta

SEQ ID NO: 297254 - DNA, 25 bp, Homo sapien
tgccctgaagggacgaatcggcttg

SEQ ID NO: 297255 - DNA, 25 bp, Homo sapien
gcagtcacggccaaggtaagagccc

SEQ ID NO: 297256 - DNA, 25 bp, Homo sapien
gcagtcccgaactctgtgcttggca

SEQ ID NO: 297257 - DNA, 25 bp, Homo sapien
ttggcaccgccgctccgagtagggc

SEQ ID NO: 297258 - DNA, 25 bp, Homo sapien
agccgctgagattaggtaaacagcg

SEQ ID NO: 297259 - DNA, 25 bp, Homo sapien
attaggtaaacagcgctccggagcc

SEQ ID NO: 297260 - DNA, 25 bp, Homo sapien
agattaggtaaacagcgctccggag

SEQ ID NO: 297261 - DNA, 25 bp, Homo sapien
gctgagattaggtaaacagcgctcc

SEQ ID NO: 297262 - DNA, 25 bp, Homo sapien
gcagttaacttatcccgaagctcca

SEQ ID NO: 297263 - DNA, 25 bp, Homo sapien
tctccgacacggtaatggcatcaga

SEQ ID NO: 297264 - DNA, 25 bp, Homo sapien
gaaacagaatctgctatgcctgcca

SEQ ID NO: 297265 - DNA, 25 bp, Homo sapien
tcatcgccgcagaggtaagacagca

SEQ ID NO: 297266 - DNA, 25 bp, Homo sapien
taaagtccagcaagggcctcttcct

SEQ ID NO: 297267 - DNA, 25 bp, Homo sapien
tttctcaaagctcgaaacttcttcc

SEQ ID NO: 297268 - DNA, 25 bp, Homo sapien
tacagacggccaaatcttgacaaat

SEQ ID NO: 297269 - DNA, 25 bp, Homo sapien
gtcttccaaagacaagatggaccat

SEQ ID NO: 297270 - DNA, 25 bp, Homo sapien
ctgccgatggacctttgtggaagca

SEQ ID NO: 297271 - DNA, 25 bp, Homo sapien
cctacttgtatatctagacgtctct

SEQ ID NO: 297272 - DNA, 25 bp, Homo sapien
tgtggaagcagtaacctacttgtat

SEQ ID NO: 297273 - DNA, 25 bp, Homo sapien
tatatctagacgtctctgtgtatga

SEQ ID NO: 297274 - DNA, 25 bp, Homo sapien
cctagagttagctcggaaggtgctt

SEQ ID NO: 297275 - DNA, 25 bp, Homo sapien
gaaggtgcttgtcacctccaaagtc

SEQ ID NO: 297276 - DNA, 25 bp, Homo sapien
gtaaacttgagttattcacccttgc

SEQ ID NO: 297277 - DNA, 25 bp, Homo sapien
ttcctgatccgagcccctagagtta

SEQ ID NO: 297278 - DNA, 25 bp, Homo sapien
gataaaagaggcctcttcagtctcc

SEQ ID NO: 297279 - DNA, 25 bp, Homo sapien
gccaggataaaagaggcctcttcag

SEQ ID NO: 297280 - DNA, 25 bp, Homo sapien
caggataaaagaggcctcttcagtc

SEQ ID NO: 297281 - DNA, 25 bp, Homo sapien
ctgccaggataaaagaggcctcttc

SEQ ID NO: 297282 - DNA, 25 bp, Homo sapien
tgttattgtacatggagtgttacca

SEQ ID NO: 297283 - DNA, 25 bp, Homo sapien
gaaattaatagtatcggtgtatcat

SEQ ID NO: 297284 - DNA, 25 bp, Homo sapien
gaattctatgatatacagtggttgt

SEQ ID NO: 297285 - DNA, 25 bp, Homo sapien
aatagtatcggtgtatcattattac

SEQ ID NO: 297286 - DNA, 25 bp, Homo sapien
ttcattttctctgaggttgacatcg

SEQ ID NO: 297287 - DNA, 25 bp, Homo sapien
tcaggtgatagggaaaaaagactct

SEQ ID NO: 297288 - DNA, 25 bp, Homo sapien
tggactagttgcactttagaaagcc

SEQ ID NO: 297289 - DNA, 25 bp, Homo sapien
tcgctgacaacttccctggactagt

SEQ ID NO: 297290 - DNA, 25 bp, Homo sapien
tttatcccactcagagccagaactg

SEQ ID NO: 297291 - DNA, 25 bp, Homo sapien
gatgtctggggggagagctaggtgc

SEQ ID NO: 297292 - DNA, 25 bp, Homo sapien
tcagagccagaactgaagatgtctg

SEQ ID NO: 297293 - DNA, 25 bp, Homo sapien
ctgaagatgtctggggggagagcta

SEQ ID NO: 297294 - DNA, 25 bp, Homo sapien
ttacccttcacatttgatgctaggc

SEQ ID NO: 297295 - DNA, 25 bp, Homo sapien
cacatgactctatggaggtagcttc

SEQ ID NO: 297296 - DNA, 25 bp, Homo sapien
tgatgctaggcacatgactctatgg

SEQ ID NO: 297297 - DNA, 25 bp, Homo sapien
ctatggaggtagcttcctttctctc

SEQ ID NO: 297298 - DNA, 25 bp, Homo sapien
aaatagaggccctcctcaccaaagg

SEQ ID NO: 297299 - DNA, 25 bp, Homo sapien
tgaaatagaggccctcctcaccaaa

SEQ ID NO: 297300 - DNA, 25 bp, Homo sapien
gaaatagaggccctcctcaccaaag

SEQ ID NO: 297301 - DNA, 25 bp, Homo sapien
gatcaatgaaatagaggccctcctc

SEQ ID NO: 297302 - DNA, 25 bp, Homo sapien
atccaacaagcatggaatgcctgct

SEQ ID NO: 297303 - DNA, 25 bp, Homo sapien
gatgccgaagtgagttcaattgaat

SEQ ID NO: 297304 - DNA, 25 bp, Homo sapien
ggcggcttccaacctaacagctgat

SEQ ID NO: 297305 - DNA, 25 bp, Homo sapien
acatatgtttcttgggcggcttcca

SEQ ID NO: 297306 - DNA, 25 bp, Homo sapien
tcttgggcggcttccaacctaacag

SEQ ID NO: 297307 - DNA, 25 bp, Homo sapien
cagggaggttgtatgcactggtgac

SEQ ID NO: 297308 - DNA, 25 bp, Homo sapien
tgtggcagggaggttgtatgcactg

SEQ ID NO: 297309 - DNA, 25 bp, Homo sapien
tggcagggaggttgtatgcactggt

SEQ ID NO: 297310 - DNA, 25 bp, Homo sapien
tctgtggcagggaggttgtatgcac

SEQ ID NO: 297311 - DNA, 25 bp, Homo sapien
tattaactggaaaagcttggggtca

SEQ ID NO: 297312 - DNA, 25 bp, Homo sapien
actggaaaagcttggggtcatttgt

SEQ ID NO: 297313 - DNA, 25 bp, Homo sapien
gtgagaacactttgtcttgccacat

SEQ ID NO: 297314 - DNA, 25 bp, Homo sapien
tgagaacactttgtcttgccacatt

SEQ ID NO: 297315 - DNA, 25 bp, Homo sapien
gtcacagtgaccttgattttgcaga

SEQ ID NO: 297316 - DNA, 25 bp, Homo sapien
tgtggtcacagtgaccttgattttg

SEQ ID NO: 297317 - DNA, 25 bp, Homo sapien
tggtcacagtgaccttgattttgca

SEQ ID NO: 297318 - DNA, 25 bp, Homo sapien
tcacagtgaccttgattttgcagaa

SEQ ID NO: 297319 - DNA, 25 bp, Homo sapien
cagtctcttggataagggtgtgtag

SEQ ID NO: 297320 - DNA, 25 bp, Homo sapien
cccacacagtctcttggataagggt

SEQ ID NO: 297321 - DNA, 25 bp, Homo sapien
tctcttggataagggtgtgtagatg

SEQ ID NO: 297322 - DNA, 25 bp, Homo sapien
cacacagtctcttggataagggtgt

SEQ ID NO: 297323 - DNA, 25 bp, Homo sapien
caaaacagatgagatgggacttata

SEQ ID NO: 297324 - DNA, 25 bp, Homo sapien
gatgggacttataggagttgccacc

SEQ ID NO: 297325 - DNA, 25 bp, Homo sapien
acaccctgggctaaaggagagccag

SEQ ID NO: 297326 - DNA, 25 bp, Homo sapien
tctcagttccccaaaacagatgaga

SEQ ID NO: 297327 - DNA, 25 bp, Homo sapien
gataatctactttccgtgacttcac

SEQ ID NO: 297328 - DNA, 25 bp, Homo sapien
ttcccatggcaaccatcaatgccat

SEQ ID NO: 297329 - DNA, 25 bp, Homo sapien
ggatggctgcttcgtttgtttcaaa

SEQ ID NO: 297330 - DNA, 25 bp, Homo sapien
tctgacactgggtaatgcattatga

SEQ ID NO: 297331 - DNA, 25 bp, Homo sapien
tttcgtaaggcgatcaccaaagtac

SEQ ID NO: 297332 - DNA, 25 bp, Homo sapien
ttttattttcgtaaggcgatcacca

SEQ ID NO: 297333 - DNA, 25 bp, Homo sapien
gcgatcaccaaagtacttttggagg

SEQ ID NO: 297334 - DNA, 25 bp, Homo sapien
taaggcgatcaccaaagtacttttg

SEQ ID NO: 297335 - DNA, 25 bp, Homo sapien
atttggtgtctttagtgttctctat

SEQ ID NO: 297336 - DNA, 25 bp, Homo sapien
ctctatgtctgacactaggattttc

SEQ ID NO: 297337 - DNA, 25 bp, Homo sapien
cagcccttagggacctggagaaaca

SEQ ID NO: 297338 - DNA, 25 bp, Homo sapien
ggattttcttcatacgagcccagcc

SEQ ID NO: 297339 - DNA, 25 bp, Homo sapien
ctggaaggcggtgataggagcctgg

SEQ ID NO: 297340 - DNA, 25 bp, Homo sapien
ggaaggcggtgataggagcctggaa

SEQ ID NO: 297341 - DNA, 25 bp, Homo sapien
aggcggtgataggagcctggaaccc

SEQ ID NO: 297342 - DNA, 25 bp, Homo sapien
aaggcggtgataggagcctggaacc

SEQ ID NO: 297343 - DNA, 25 bp, Homo sapien
ccaggaccactgactttaacaatat

SEQ ID NO: 297344 - DNA, 25 bp, Homo sapien
caatatgccattgtcattgtgaccc

SEQ ID NO: 297345 - DNA, 25 bp, Homo sapien
caagaatcgagaagccactcttgct

SEQ ID NO: 297346 - DNA, 25 bp, Homo sapien
ggaccactgactttaacaatatgcc

SEQ ID NO: 297347 - DNA, 25 bp, Homo sapien
agcctcagccacactagattcaggg

SEQ ID NO: 297348 - DNA, 25 bp, Homo sapien
gacaaatggcccaggtcaatccaat

SEQ ID NO: 297349 - DNA, 25 bp, Homo sapien
tgagtctttaggatctgggtctggc

SEQ ID NO: 297350 - DNA, 25 bp, Homo sapien
catagtcataggctcacaggtggac

SEQ ID NO: 297351 - DNA, 25 bp, Homo sapien
ggatggttgcccttcagctggtgac

SEQ ID NO: 297352 - DNA, 25 bp, Homo sapien
taatgtgccacccaatggatacggc

SEQ ID NO: 297353 - DNA, 25 bp, Homo sapien
gaaaggctgccttgacccataagca

SEQ ID NO: 297354 - DNA, 25 bp, Homo sapien
gatacggccatgtctccgaaaagga

SEQ ID NO: 297355 - DNA, 25 bp, Homo sapien
gggtgcatttgccaaggataagcaa

SEQ ID NO: 297356 - DNA, 25 bp, Homo sapien
caaggtaaaggtgtttttcatagag

SEQ ID NO: 297357 - DNA, 25 bp, Homo sapien
catttgccaaggataagcaaggtaa

SEQ ID NO: 297358 - DNA, 25 bp, Homo sapien
agcaaggtaaaggtgtttttcatag

SEQ ID NO: 297359 - DNA, 25 bp, Homo sapien
ggcagagaaattcacggtccttggg

SEQ ID NO: 297360 - DNA, 25 bp, Homo sapien
tggcagcaccgcaaaacaaaagaag

SEQ ID NO: 297361 - DNA, 25 bp, Homo sapien
tctcctattcgccaactggaggcag

SEQ ID NO: 297362 - DNA, 25 bp, Homo sapien
aaggtctcctctgagccaaggtggg

SEQ ID NO: 297363 - DNA, 25 bp, Homo sapien
acagaggatggtattgctgatcttg

SEQ ID NO: 297364 - DNA, 25 bp, Homo sapien
tagagcttgccacaaagtatgtgaa

SEQ ID NO: 297365 - DNA, 25 bp, Homo sapien
cagaggatggtattgctgatcttgc

SEQ ID NO: 297366 - DNA, 25 bp, Homo sapien
gaaggtttcattttaggcagccacc

SEQ ID NO: 297367 - DNA, 25 bp, Homo sapien
tactgagcagctattggcaagtggc

SEQ ID NO: 297368 - DNA, 25 bp, Homo sapien
tgatggttacaagatggtccccagc

SEQ ID NO: 297369 - DNA, 25 bp, Homo sapien
gagagaatgagtggtcccctgaaga

SEQ ID NO: 297370 - DNA, 25 bp, Homo sapien
gcttctatggtcaatgttaactgtg

SEQ ID NO: 297371 - DNA, 25 bp, Homo sapien
ggcttctatggtcaatgttaactgt

SEQ ID NO: 297372 - DNA, 25 bp, Homo sapien
tatggtcaatgttaactgtgtgata

SEQ ID NO: 297373 - DNA, 25 bp, Homo sapien
tctatggtcaatgttaactgtgtga

SEQ ID NO: 297374 - DNA, 25 bp, Homo sapien
gcatctgcactgttattgacatgca

SEQ ID NO: 297375 - DNA, 25 bp, Homo sapien
aagcatctgcactgttattgacatg

SEQ ID NO: 297376 - DNA, 25 bp, Homo sapien
cagaagcatctgcactgttattgac

SEQ ID NO: 297377 - DNA, 25 bp, Homo sapien
gaagcatctgcactgttattgacat

SEQ ID NO: 297378 - DNA, 25 bp, Homo sapien
gtggtgactgccgaactccttccat

SEQ ID NO: 297379 - DNA, 25 bp, Homo sapien
tgtgctcaatcatcagtggtgactg

SEQ ID NO: 297380 - DNA, 25 bp, Homo sapien
tcatcctgcacaggaccatgcatgc

SEQ ID NO: 297381 - DNA, 25 bp, Homo sapien
catgcatgcagggtgtgctcaatca

SEQ ID NO: 297382 - DNA, 25 bp, Homo sapien
gacagtctggcgtgcattcctgctt

SEQ ID NO: 297383 - DNA, 25 bp, Homo sapien
acagtctggcgtgcattcctgcttc

SEQ ID NO: 297384 - DNA, 25 bp, Homo sapien
tgacagtctggcgtgcattcctgct

SEQ ID NO: 297385 - DNA, 25 bp, Homo sapien
agtctggcgtgcattcctgcttctt

SEQ ID NO: 297386 - DNA, 25 bp, Homo sapien
ttccaacacagcgggctctccaggg

SEQ ID NO: 297387 - DNA, 25 bp, Homo sapien
ttctacatcttccaacacagcgggc

SEQ ID NO: 297388 - DNA, 25 bp, Homo sapien
atattctacatcttccaacacagcg

SEQ ID NO: 297389 - DNA, 25 bp, Homo sapien
tacatcttccaacacagcgggctct

SEQ ID NO: 297390 - DNA, 25 bp, Homo sapien
gagatggctcctgatttaagtgccc

SEQ ID NO: 297391 - DNA, 25 bp, Homo sapien
cagggtttcgattgactgggcctca

SEQ ID NO: 297392 - DNA, 25 bp, Homo sapien
gcctcagagcatttgagttccgtaa

SEQ ID NO: 297393 - DNA, 25 bp, Homo sapien
gcagatccatccataactggctcat

SEQ ID NO: 297394 - DNA, 25 bp, Homo sapien
tagatcctgtccactagagggcttc

SEQ ID NO: 297395 - DNA, 25 bp, Homo sapien
cagcagactctggataaacttaatg

SEQ ID NO: 297396 - DNA, 25 bp, Homo sapien
aggtgagcttactgagaaatgccag

SEQ ID NO: 297397 - DNA, 25 bp, Homo sapien
cagcggagaagaggcaccttacaca

SEQ ID NO: 297398 - DNA, 25 bp, Homo sapien
tccaacaactggccaaagccctcca

SEQ ID NO: 297399 - DNA, 25 bp, Homo sapien
ctccaacaactggccaaagccctcc

SEQ ID NO: 297400 - DNA, 25 bp, Homo sapien
ctgctttgaggatggatgaggcatc

SEQ ID NO: 297401 - DNA, 25 bp, Homo sapien
tggatgaggcatcaacacaccccat

SEQ ID NO: 297402 - DNA, 25 bp, Homo sapien
gaggatggatgaggcatcaacacac

SEQ ID NO: 297403 - DNA, 25 bp, Homo sapien
ctttgaggatggatgaggcatcaac

SEQ ID NO: 297404 - DNA, 25 bp, Homo sapien
ttgagggtcgcagctggatttcttc

SEQ ID NO: 297405 - DNA, 25 bp, Homo sapien
agggtcgcagctggatttcttctct

SEQ ID NO: 297406 - DNA, 25 bp, Homo sapien
attcattctcaaaaatttaggaggt

SEQ ID NO: 297407 - DNA, 25 bp, Homo sapien
aatttaggaggttgagggtcgcagc

SEQ ID NO: 297408 - DNA, 25 bp, Homo sapien
aatgcttgcccaagccgggttgctg

SEQ ID NO: 297409 - DNA, 25 bp, Homo sapien
gagacccacaccgtacattgcaaag

SEQ ID NO: 297410 - DNA, 25 bp, Homo sapien
taccattagggaataaagcacagag

SEQ ID NO: 297411 - DNA, 25 bp, Homo sapien
tcaacattccggaggtagggtttca

SEQ ID NO: 297412 - DNA, 25 bp, Homo sapien
catcttagggtatttttccgtcata

SEQ ID NO: 297413 - DNA, 25 bp, Homo sapien
acagtagttgtgttcagcgaccggc

SEQ ID NO: 297414 - DNA, 25 bp, Homo sapien
catagtggatacacttggctgcttc

SEQ ID NO: 297415 - DNA, 25 bp, Homo sapien
gtaagtatcttcgtggactgatgca

SEQ ID NO: 297416 - DNA, 25 bp, Homo sapien
gaccatgctgtagccataaatgttc

SEQ ID NO: 297417 - DNA, 25 bp, Homo sapien
cctcttgaccatgctgtagccataa

SEQ ID NO: 297418 - DNA, 25 bp, Homo sapien
ggacaggatgctctgagaggccagc

SEQ ID NO: 297419 - DNA, 25 bp, Homo sapien
tcattcattggatagagtgccgcag

SEQ ID NO: 297420 - DNA, 25 bp, Homo sapien
cctgtgaaatcgaagaatataatct

SEQ ID NO: 297421 - DNA, 25 bp, Homo sapien
cttcatcacaatcagagccccttgg

SEQ ID NO: 297422 - DNA, 25 bp, Homo sapien
tcttcatcacaatcagagccccttg

SEQ ID NO: 297423 - DNA, 25 bp, Homo sapien
taatcttcatcacaatcagagcccc

SEQ ID NO: 297424 - DNA, 25 bp, Homo sapien
gcctaccacacaaagggcatctctg

SEQ ID NO: 297425 - DNA, 25 bp, Homo sapien
tctctgggaatcagtgatggacact

SEQ ID NO: 297426 - DNA, 25 bp, Homo sapien
gcatctctgggaatcagtgatggac

SEQ ID NO: 297427 - DNA, 25 bp, Homo sapien
catggaagtgcctaccacacaaagg

SEQ ID NO: 297428 - DNA, 25 bp, Homo sapien
cttagattctctgtgcaatagttct

SEQ ID NO: 297429 - DNA, 25 bp, Homo sapien
tctggttatagggtagggccctctg

SEQ ID NO: 297430 - DNA, 25 bp, Homo sapien
gtggagaaatccagcaagggctgtc

SEQ ID NO: 297431 - DNA, 25 bp, Homo sapien
gacaaaaggcaaatgatcgaatgct

SEQ ID NO: 297432 - DNA, 25 bp, Homo sapien
ccttacatggatgtaatggctgaaa

SEQ ID NO: 297433 - DNA, 25 bp, Homo sapien
aatggctgaaattctaacaaattcc

SEQ ID NO: 297434 - DNA, 25 bp, Homo sapien
gctgaaattctaacaaattccgttc

SEQ ID NO: 297435 - DNA, 25 bp, Homo sapien
ttttccttacatggatgtaatggct

SEQ ID NO: 297436 - DNA, 25 bp, Homo sapien
taaattgtttgttgagggtcacgtg

SEQ ID NO: 297437 - DNA, 25 bp, Homo sapien
catttatagaaggtggctctatctc

SEQ ID NO: 297438 - DNA, 25 bp, Homo sapien
gaaatttcagcacgaagaagttaaa

SEQ ID NO: 297439 - DNA, 25 bp, Homo sapien
gggtcacgtggctaataagtcaaag

SEQ ID NO: 297440 - DNA, 25 bp, Homo sapien
gcttcttccccgagtatcctctggt

SEQ ID NO: 297441 - DNA, 25 bp, Homo sapien
tccccgagtatcctctggtgttaag

SEQ ID NO: 297442 - DNA, 25 bp, Homo sapien
tgcttcttccccgagtatcctctgg

SEQ ID NO: 297443 - DNA, 25 bp, Homo sapien
tcttccccgagtatcctctggtgtt

SEQ ID NO: 297444 - DNA, 25 bp, Homo sapien
tggcaaggtaggtttccatgaagtt

SEQ ID NO: 297445 - DNA, 25 bp, Homo sapien
tgtgtggcaaggtaggtttccatga

SEQ ID NO: 297446 - DNA, 25 bp, Homo sapien
ctttgtgtggcaaggtaggtttcca

SEQ ID NO: 297447 - DNA, 25 bp, Homo sapien
tgtggcaaggtaggtttccatgaag

SEQ ID NO: 297448 - DNA, 25 bp, Homo sapien
gatacatttctagggcctctgcccc

SEQ ID NO: 297449 - DNA, 25 bp, Homo sapien
agcagatacatttctagggcctctg

SEQ ID NO: 297450 - DNA, 25 bp, Homo sapien
atacatttctagggcctctgcccca

SEQ ID NO: 297451 - DNA, 25 bp, Homo sapien
cagatacatttctagggcctctgcc

SEQ ID NO: 297452 - DNA, 25 bp, Homo sapien
caccagaagactttgctgctcacgg

SEQ ID NO: 297453 - DNA, 25 bp, Homo sapien
tgccaggaaacaacaccagaagact

SEQ ID NO: 297454 - DNA, 25 bp, Homo sapien
tccatttgccaggaaacaacaccag

SEQ ID NO: 297455 - DNA, 25 bp, Homo sapien
gaagactttgctgctcacggctttc

SEQ ID NO: 297456 - DNA, 25 bp, Homo sapien
ccaaccccgtaacaccatgcagcag

SEQ ID NO: 297457 - DNA, 25 bp, Homo sapien
atacagtccgttcatgattattaat

SEQ ID NO: 297458 - DNA, 25 bp, Homo sapien
cagtccgttcatgattattaatttt

SEQ ID NO: 297459 - DNA, 25 bp, Homo sapien
tacagtccgttcatgattattaatt

SEQ ID NO: 297460 - DNA, 25 bp, Homo sapien
acagtccgttcatgattattaattt

SEQ ID NO: 297461 - DNA, 25 bp, Homo sapien
ctgcagcctcttagagtccttttgc

SEQ ID NO: 297462 - DNA, 25 bp, Homo sapien
tctgcagcctcttagagtccttttg

SEQ ID NO: 297463 - DNA, 25 bp, Homo sapien
tgcagcctcttagagtccttttgct

SEQ ID NO: 297464 - DNA, 25 bp, Homo sapien
tagggattagcttcccaacacagga

SEQ ID NO: 297465 - DNA, 25 bp, Homo sapien
gctgctaggatgcatttggctacaa

SEQ ID NO: 297466 - DNA, 25 bp, Homo sapien
aacatatacttagttgctgctagga

SEQ ID NO: 297467 - DNA, 25 bp, Homo sapien
cagactgtaacacctatggattcaa

SEQ ID NO: 297468 - DNA, 25 bp, Homo sapien
ttcaccaccaactgctcacatggtg

SEQ ID NO: 297469 - DNA, 25 bp, Homo sapien
tgaaggttccttatcttaccagtct

SEQ ID NO: 297470 - DNA, 25 bp, Homo sapien
cacatggtgttaggttagcaggccc

SEQ ID NO: 297471 - DNA, 25 bp, Homo sapien
tatcatctacaaggcctttcccagg

SEQ ID NO: 297472 - DNA, 25 bp, Homo sapien
tatcagcttagctgttttgttgctg

SEQ ID NO: 297473 - DNA, 25 bp, Homo sapien
gtattctgagccacaagttgatggc

SEQ ID NO: 297474 - DNA, 25 bp, Homo sapien
tgttgctggagccaatagtttccag

SEQ ID NO: 297475 - DNA, 25 bp, Homo sapien
caagttggttctgcagtgttgttct

SEQ ID NO: 297476 - DNA, 25 bp, Homo sapien
tgtgtggaggtggataactgtctca

SEQ ID NO: 297477 - DNA, 25 bp, Homo sapien
aggaagcccatggtcgcaactcatc

SEQ ID NO: 297478 - DNA, 25 bp, Homo sapien
cccacatttcctgatctagctttaa

SEQ ID NO: 297479 - DNA, 25 bp, Homo sapien
tctcattctgacattcagtatcagg

SEQ ID NO: 297480 - DNA, 25 bp, Homo sapien
gctctcaaccatatgctaagtttat

SEQ ID NO: 297481 - DNA, 25 bp, Homo sapien
ctagcctgctctcaaccatatgcta

SEQ ID NO: 297482 - DNA, 25 bp, Homo sapien
caaccatatgctaagtttatctgta

SEQ ID NO: 297483 - DNA, 25 bp, Homo sapien
tttatctgtaaagccccctgttctg

SEQ ID NO: 297484 - DNA, 25 bp, Homo sapien
catactagctcagtcctcctgtgtt

SEQ ID NO: 297485 - DNA, 25 bp, Homo sapien
ttatatctgtaaccaccatgcttgt

SEQ ID NO: 297486 - DNA, 25 bp, Homo sapien
tttccatccagaaagatatgtgcct

SEQ ID NO: 297487 - DNA, 25 bp, Homo sapien
tctgcctaagttggtggtatcacca

SEQ ID NO: 297488 - DNA, 25 bp, Homo sapien
tcctctttgtgataccccagattca

SEQ ID NO: 297489 - DNA, 25 bp, Homo sapien
gtcctctttgtgataccccagattc

SEQ ID NO: 297490 - DNA, 25 bp, Homo sapien
cctctttgtgataccccagattcat

SEQ ID NO: 297491 - DNA, 25 bp, Homo sapien
tagcagtgaaagcctcttggagatt

SEQ ID NO: 297492 - DNA, 25 bp, Homo sapien
ctagcagtgaaagcctcttggagat

SEQ ID NO: 297493 - DNA, 25 bp, Homo sapien
agcagtgaaagcctcttggagattt

SEQ ID NO: 297494 - DNA, 25 bp, Homo sapien
gcagtgaaagcctcttggagatttt

SEQ ID NO: 297495 - DNA, 25 bp, Homo sapien
ctgggaagcagatccgtagacagca

SEQ ID NO: 297496 - DNA, 25 bp, Homo sapien
cttggctgctaaagtcgctgaagag

SEQ ID NO: 297497 - DNA, 25 bp, Homo sapien
cagcaacttggctgctaaagtcgct

SEQ ID NO: 297498 - DNA, 25 bp, Homo sapien
gaatgaactgcctgatcaatgggtt

SEQ ID NO: 297499 - DNA, 25 bp, Homo sapien
cagcagttcacaccagcataattca

SEQ ID NO: 297500 - DNA, 25 bp, Homo sapien
cttgtgtcttctcgagtgcttcctt

SEQ ID NO: 297501 - DNA, 25 bp, Homo sapien
tgtgtcttctcgagtgcttccttct

SEQ ID NO: 297502 - DNA, 25 bp, Homo sapien
agcagcagttcacaccagcataatt

SEQ ID NO: 297503 - DNA, 25 bp, Homo sapien
gaacagcagggactcctcattgtct

SEQ ID NO: 297504 - DNA, 25 bp, Homo sapien
agcagggactcctcattgtctgttt

SEQ ID NO: 297505 - DNA, 25 bp, Homo sapien
agcagaacagcagggactcctcatt

SEQ ID NO: 297506 - DNA, 25 bp, Homo sapien
cagggactcctcattgtctgttttt

SEQ ID NO: 297507 - DNA, 25 bp, Homo sapien
tctgggaatgtgtgtgcggtataac

SEQ ID NO: 297508 - DNA, 25 bp, Homo sapien
tggagttatgcagcctcatcctggg

SEQ ID NO: 297509 - DNA, 25 bp, Homo sapien
gacaaagagaggtacgaattacaca

SEQ ID NO: 297510 - DNA, 25 bp, Homo sapien
cacagaactggtctccgcggaagac

SEQ ID NO: 297511 - DNA, 25 bp, Homo sapien
ttgactattaacacatacatccttg

SEQ ID NO: 297512 - DNA, 25 bp, Homo sapien
catacatccttgagcaaaattttgc

SEQ ID NO: 297513 - DNA, 25 bp, Homo sapien
cagatccactgatagtcagaggatc

SEQ ID NO: 297514 - DNA, 25 bp, Homo sapien
tccactgatagtcagaggatccatg

SEQ ID NO: 297515 - DNA, 25 bp, Homo sapien
tgttcatgaaggacaatctatggag

SEQ ID NO: 297516 - DNA, 25 bp, Homo sapien
aatctatggagggtgtggaggccta

SEQ ID NO: 297517 - DNA, 25 bp, Homo sapien
tagggagcttgccaagcatggacag

SEQ ID NO: 297518 - DNA, 25 bp, Homo sapien
atttatgtctatgtgggtggtaggg

SEQ ID NO: 297519 - DNA, 25 bp, Homo sapien
agcagcaaagctgaactctggagct

SEQ ID NO: 297520 - DNA, 25 bp, Homo sapien
caaagctgaactctggagctaagtc

SEQ ID NO: 297521 - DNA, 25 bp, Homo sapien
gctgaactctggagctaagtcatcc

SEQ ID NO: 297522 - DNA, 25 bp, Homo sapien
ctctggagctaagtcatccagaaac

SEQ ID NO: 297523 - DNA, 25 bp, Homo sapien
gcattggatgatatctgacccattt

SEQ ID NO: 297524 - DNA, 25 bp, Homo sapien
ggaaggcattggatgatatctgacc

SEQ ID NO: 297525 - DNA, 25 bp, Homo sapien
cctgtgaagcctggtcaggaaggca

SEQ ID NO: 297526 - DNA, 25 bp, Homo sapien
gacaggtggagtacacatctggtat

SEQ ID NO: 297527 - DNA, 25 bp, Homo sapien
cttctcaccctctcatttgtcaggt

SEQ ID NO: 297528 - DNA, 25 bp, Homo sapien
accctctcatttgtcaggtgatcct

SEQ ID NO: 297529 - DNA, 25 bp, Homo sapien
gtctgcccaaatgctggtgagcctt

SEQ ID NO: 297530 - DNA, 25 bp, Homo sapien
ggtgagccttcttcaatgccccttc

SEQ ID NO: 297531 - DNA, 25 bp, Homo sapien
tcattcctgtcaaaatgaacgtcat

SEQ ID NO: 297532 - DNA, 25 bp, Homo sapien
cattcattcctgtcaaaatgaacgt

SEQ ID NO: 297533 - DNA, 25 bp, Homo sapien
ttcattcctgtcaaaatgaacgtca

SEQ ID NO: 297534 - DNA, 25 bp, Homo sapien
tctcattcattcctgtcaaaatgaa

SEQ ID NO: 297535 - DNA, 25 bp, Homo sapien
caaaaggacaccaaggagaggactc

SEQ ID NO: 297536 - DNA, 25 bp, Homo sapien
tcaaaaggacaccaaggagaggact

SEQ ID NO: 297537 - DNA, 25 bp, Homo sapien
aaaaggacaccaaggagaggactct

SEQ ID NO: 297538 - DNA, 25 bp, Homo sapien
tggaaagtctaaaacgcagagcgcc

SEQ ID NO: 297539 - DNA, 25 bp, Homo sapien
actggaaagtctaaaacgcagagcg

SEQ ID NO: 297540 - DNA, 25 bp, Homo sapien
gtctaaaacgcagagcgcctttcct

SEQ ID NO: 297541 - DNA, 25 bp, Homo sapien
gaaagtctaaaacgcagagcgcctt

SEQ ID NO: 297542 - DNA, 25 bp, Homo sapien
ttggcacggccttgatgagaatgca

SEQ ID NO: 297543 - DNA, 25 bp, Homo sapien
cgggaagcagtaagggcaggtgagg

SEQ ID NO: 297544 - DNA, 25 bp, Homo sapien
caggtgagggtttcgaattgccaga

SEQ ID NO: 297545 - DNA, 25 bp, Homo sapien
gtttcgaattgccagagctcttggg

SEQ ID NO: 297546 - DNA, 25 bp, Homo sapien
gacatttcctcatagaggtctcccc

SEQ ID NO: 297547 - DNA, 25 bp, Homo sapien
ccttgttgccaaccgacatgctata

SEQ ID NO: 297548 - DNA, 25 bp, Homo sapien
tattgtctagctgcttctactggca

SEQ ID NO: 297549 - DNA, 25 bp, Homo sapien
tcgctgtttcctcgactggaatgct

SEQ ID NO: 297550 - DNA, 25 bp, Homo sapien
ctgaaaggcatgtggaggcaggtgc

SEQ ID NO: 297551 - DNA, 25 bp, Homo sapien
gtggaggcaggtgcctgtgtctatc

SEQ ID NO: 297552 - DNA, 25 bp, Homo sapien
atgtggaggcaggtgcctgtgtcta

SEQ ID NO: 297553 - DNA, 25 bp, Homo sapien
gaaaggcatgtggaggcaggtgcct

SEQ ID NO: 297554 - DNA, 25 bp, Homo sapien
tcagctcaaattctttctgggcttt

SEQ ID NO: 297555 - DNA, 25 bp, Homo sapien
cctctcctgccatgtcacttgtttt

SEQ ID NO: 297556 - DNA, 25 bp, Homo sapien
tgggctttggtctgtttcctctcct

SEQ ID NO: 297557 - DNA, 25 bp, Homo sapien
ctccactgtcagctcaaattctttc

SEQ ID NO: 297558 - DNA, 25 bp, Homo sapien
acaacagattaatgtggtcagaagc

SEQ ID NO: 297559 - DNA, 25 bp, Homo sapien
aaacaacagattaatgtggtcagaa

SEQ ID NO: 297560 - DNA, 25 bp, Homo sapien
aacagattaatgtggtcagaagcag

SEQ ID NO: 297561 - DNA, 25 bp, Homo sapien
caacagattaatgtggtcagaagca

SEQ ID NO: 297562 - DNA, 25 bp, Homo sapien
tcataattctcctgagggtctctgt

SEQ ID NO: 297563 - DNA, 25 bp, Homo sapien
cttgcacgtggacatagccccttgt

SEQ ID NO: 297564 - DNA, 25 bp, Homo sapien
gcttggattttgcatctactctttt

SEQ ID NO: 297565 - DNA, 25 bp, Homo sapien
tcttacactcccagcatttacttgc

SEQ ID NO: 297566 - DNA, 25 bp, Homo sapien
ttatcctagtgtgtctatgcctcgt

SEQ ID NO: 297567 - DNA, 25 bp, Homo sapien
ccgggtgccttgagaagatctattt

SEQ ID NO: 297568 - DNA, 25 bp, Homo sapien
tgtctatgcctcgtttgcctccggg

SEQ ID NO: 297569 - DNA, 25 bp, Homo sapien
gtttgcctccgggtgccttgagaag

SEQ ID NO: 297570 - DNA, 25 bp, Homo sapien
ttcccttgggtcctcgacaaagcag

SEQ ID NO: 297571 - DNA, 25 bp, Homo sapien
acagccacggctcggttttcccttg

SEQ ID NO: 297572 - DNA, 25 bp, Homo sapien
gacaaagcagttgtatctctccacc

SEQ ID NO: 297573 - DNA, 25 bp, Homo sapien
gccacagaccactcggagatcaagg

SEQ ID NO: 297574 - DNA, 25 bp, Homo sapien
caggtcgtcctacaatcaatgctga

SEQ ID NO: 297575 - DNA, 25 bp, Homo sapien
gatattgccaacaaagcaccttgct

SEQ ID NO: 297576 - DNA, 25 bp, Homo sapien
gactggcatggccatcttgaggaag

SEQ ID NO: 297577 - DNA, 25 bp, Homo sapien
ccaagtgcaattggcagagccctgc

SEQ ID NO: 297578 - DNA, 25 bp, Homo sapien
cagccaggatggaggctgtgctcat

SEQ ID NO: 297579 - DNA, 25 bp, Homo sapien
ctttcccagccaggatggaggctgt

SEQ ID NO: 297580 - DNA, 25 bp, Homo sapien
ccagccaggatggaggctgtgctca

SEQ ID NO: 297581 - DNA, 25 bp, Homo sapien
tcccagccaggatggaggctgtgct

SEQ ID NO: 297582 - DNA, 25 bp, Homo sapien
tgcaggcctaggtttcaatgtcaac

SEQ ID NO: 297583 - DNA, 25 bp, Homo sapien
caatgcaggcctaggtttcaatgtc

SEQ ID NO: 297584 - DNA, 25 bp, Homo sapien
gccaatgcaggcctaggtttcaatg

SEQ ID NO: 297585 - DNA, 25 bp, Homo sapien
gcaggcctaggtttcaatgtcaacc

SEQ ID NO: 297586 - DNA, 25 bp, Homo sapien
ttttacatcctggaaaaactgctga

SEQ ID NO: 297587 - DNA, 25 bp, Homo sapien
ttgccgtcgggatgaagaatgcctt

SEQ ID NO: 297588 - DNA, 25 bp, Homo sapien
cactacagacgtatgttgccgtcgg

SEQ ID NO: 297589 - DNA, 25 bp, Homo sapien
aaactgctgaactagcactgccatc

SEQ ID NO: 297590 - DNA, 25 bp, Homo sapien
ctttgttggggtctggtaccgacat

SEQ ID NO: 297591 - DNA, 25 bp, Homo sapien
aggctgttttctgagacttggtacc

SEQ ID NO: 297592 - DNA, 25 bp, Homo sapien
gagacttggtaccaaaatgacagat

SEQ ID NO: 297593 - DNA, 25 bp, Homo sapien
tggatttctcctttgaggctgtttt

SEQ ID NO: 297594 - DNA, 25 bp, Homo sapien
ttctgagacttggtaccaaaatgac

SEQ ID NO: 297595 - DNA, 25 bp, Homo sapien
tcggagaaactctctgagtggcctt

SEQ ID NO: 297596 - DNA, 25 bp, Homo sapien
tgaaggaacgcatgaatggtgcaat

SEQ ID NO: 297597 - DNA, 25 bp, Homo sapien
gccttcgtatcatcaaatgcttaga

SEQ ID NO: 297598 - DNA, 25 bp, Homo sapien
caaaacaggcttgttgaaggaacgc

SEQ ID NO: 297599 - DNA, 25 bp, Homo sapien
tgaatcctttctagtaggcatactg

SEQ ID NO: 297600 - DNA, 25 bp, Homo sapien
ggcatactgtatacctactctcatg

SEQ ID NO: 297601 - DNA, 25 bp, Homo sapien
tgcttagttgtttcgtacctcttcc

SEQ ID NO: 297602 - DNA, 25 bp, Homo sapien
tgtactcagaccaattctccttcca

SEQ ID NO: 297603 - DNA, 25 bp, Homo sapien
tcctccatgtatgttccaggagcag

SEQ ID NO: 297604 - DNA, 25 bp, Homo sapien
tcctccagggatccggtggaatgac

SEQ ID NO: 297605 - DNA, 25 bp, Homo sapien
tgtggaatgaactacaactgcatca

SEQ ID NO: 297606 - DNA, 25 bp, Homo sapien
tgcatcactacgacagctcgcagga

SEQ ID NO: 297607 - DNA, 25 bp, Homo sapien
cagttgttctcccagtatgcagctg

SEQ ID NO: 297608 - DNA, 25 bp, Homo sapien
agagagcagttgttctcccagtatg

SEQ ID NO: 297609 - DNA, 25 bp, Homo sapien
ttgttctcccagtatgcagctggag

SEQ ID NO: 297610 - DNA, 25 bp, Homo sapien
gagcagttgttctcccagtatgcag

SEQ ID NO: 297611 - DNA, 25 bp, Homo sapien
tgagttatgcagaacatcatgtctc

SEQ ID NO: 297612 - DNA, 25 bp, Homo sapien
gagttatgcagaacatcatgtctca

SEQ ID NO: 297613 - DNA, 25 bp, Homo sapien
tatgcagaacatcatgtctcaattg

SEQ ID NO: 297614 - DNA, 25 bp, Homo sapien
gttcctgaaggacctagacttgatc

SEQ ID NO: 297615 - DNA, 25 bp, Homo sapien
cctgaaggacctagacttgatcttg

SEQ ID NO: 297616 - DNA, 25 bp, Homo sapien
caggatgggccatggaaagttcagg

SEQ ID NO: 297617 - DNA, 25 bp, Homo sapien
tggaaagttcaggacgagcttgaaa

SEQ ID NO: 297618 - DNA, 25 bp, Homo sapien
cagggacaactgtgtctgcagatga

SEQ ID NO: 297619 - DNA, 25 bp, Homo sapien
tctgcagatgagggtcaagtgatac

SEQ ID NO: 297620 - DNA, 25 bp, Homo sapien
gggcagggacaactgtgtctgcaga

SEQ ID NO: 297621 - DNA, 25 bp, Homo sapien
ctgggcagggacaactgtgtctgca

SEQ ID NO: 297622 - DNA, 25 bp, Homo sapien
atggttaagaatggcaaagggcatt

SEQ ID NO: 297623 - DNA, 25 bp, Homo sapien
catggttaagaatggcaaagggcat

SEQ ID NO: 297624 - DNA, 25 bp, Homo sapien
tatggctggaatcaggctcgtcgaa

SEQ ID NO: 297625 - DNA, 25 bp, Homo sapien
gaatcaggctcgtcgaaagtcaaca

SEQ ID NO: 297626 - DNA, 25 bp, Homo sapien
caggctcgtcgaaagtcaacaggat

SEQ ID NO: 297627 - DNA, 25 bp, Homo sapien
cttctatggctggaatcaggctcgt

SEQ ID NO: 297628 - DNA, 25 bp, Homo sapien
atcccagcccagttggttggaacct

SEQ ID NO: 297629 - DNA, 25 bp, Homo sapien
cagcccagttggttggaacctggga

SEQ ID NO: 297630 - DNA, 25 bp, Homo sapien
cctcctcattcctagcaaaatccca

SEQ ID NO: 297631 - DNA, 25 bp, Homo sapien
atgctaagtctggcaaactgccttc

SEQ ID NO: 297632 - DNA, 25 bp, Homo sapien
ctggctaattctatgaggtcgaaga

SEQ ID NO: 297633 - DNA, 25 bp, Homo sapien
tatgaggtcgaagaaggaattgttt

SEQ ID NO: 297634 - DNA, 25 bp, Homo sapien
ctaattctatgaggtcgaagaagga

SEQ ID NO: 297635 - DNA, 25 bp, Homo sapien
tcagctactggctaattctatgagg

SEQ ID NO: 297636 - DNA, 25 bp, Homo sapien
gatccaggctatgggaaacacacca

SEQ ID NO: 297637 - DNA, 25 bp, Homo sapien
taggtactatgagggaagaagccac

SEQ ID NO: 297638 - DNA, 25 bp, Homo sapien
gtaatgagtcatcccaaagcatggt

SEQ ID NO: 297639 - DNA, 25 bp, Homo sapien
aagacctctagaccaaagttgcaag

SEQ ID NO: 297640 - DNA, 25 bp, Homo sapien
ctcttcagcttggagagcagatgga

SEQ ID NO: 297641 - DNA, 25 bp, Homo sapien
tctctttagcagtagtgggcacatc

SEQ ID NO: 297642 - DNA, 25 bp, Homo sapien
ctagagctcaattgtgcagctcttc

SEQ ID NO: 297643 - DNA, 25 bp, Homo sapien
tttagcagtagtgggcacatcacct

SEQ ID NO: 297644 - DNA, 25 bp, Homo sapien
accatcaatgctaggaagaaagtgc

SEQ ID NO: 297645 - DNA, 25 bp, Homo sapien
catcaatgctaggaagaaagtgcat

SEQ ID NO: 297646 - DNA, 25 bp, Homo sapien
gcaaaaatacaccaaattgtaaaga

SEQ ID NO: 297647 - DNA, 25 bp, Homo sapien
cagccactgcaaaaatacaccaaat

SEQ ID NO: 297648 - DNA, 25 bp, Homo sapien
tatggttgacaaccgggtttgcctc

SEQ ID NO: 297649 - DNA, 25 bp, Homo sapien
tctgtcacctgatagagcacatgct

SEQ ID NO: 297650 - DNA, 25 bp, Homo sapien
ggatgtccatcacaagtctgccatg

SEQ ID NO: 297651 - DNA, 25 bp, Homo sapien
tattcggatacctacatgcaacgtg

SEQ ID NO: 297652 - DNA, 25 bp, Homo sapien
gaggaactatagctgctggcctgga

SEQ ID NO: 297653 - DNA, 25 bp, Homo sapien
tcttcacatagactttaaatgccag

SEQ ID NO: 297654 - DNA, 25 bp, Homo sapien
ttaaatgccagttgctggttgggca

SEQ ID NO: 297655 - DNA, 25 bp, Homo sapien
ctggttgggcattggaggatgagga

SEQ ID NO: 297656 - DNA, 25 bp, Homo sapien
ttagctctttctctttctgggatgg

SEQ ID NO: 297657 - DNA, 25 bp, Homo sapien
tagctctttctctttctgggatggg

SEQ ID NO: 297658 - DNA, 25 bp, Homo sapien
agctctttctctttctgggatgggg

SEQ ID NO: 297659 - DNA, 25 bp, Homo sapien
ctttttcctgtgtccactgagatgc

SEQ ID NO: 297660 - DNA, 25 bp, Homo sapien
gtccactgagatgcccataagttag

SEQ ID NO: 297661 - DNA, 25 bp, Homo sapien
cactgagatgcccataagttagcat

SEQ ID NO: 297662 - DNA, 25 bp, Homo sapien
gtgtccactgagatgcccataagtt

SEQ ID NO: 297663 - DNA, 25 bp, Homo sapien
tatggtctggcatgataggcactta

SEQ ID NO: 297664 - DNA, 25 bp, Homo sapien
aacacaatatgcatacaactgattt

SEQ ID NO: 297665 - DNA, 25 bp, Homo sapien
tatatggtctggcatgataggcact

SEQ ID NO: 297666 - DNA, 25 bp, Homo sapien
aagtcttcccatggtgttggtaaca

SEQ ID NO: 297667 - DNA, 25 bp, Homo sapien
catgtatagctatgtaacctacatg

SEQ ID NO: 297668 - DNA, 25 bp, Homo sapien
cacatgtatagctatgtaacctaca

SEQ ID NO: 297669 - DNA, 25 bp, Homo sapien
ctgctattgattaggagtttccaca

SEQ ID NO: 297670 - DNA, 25 bp, Homo sapien
ataaacaataatggctgctattgat

SEQ ID NO: 297671 - DNA, 25 bp, Homo sapien
ttcctagctgctgtcaagcccactg

SEQ ID NO: 297672 - DNA, 25 bp, Homo sapien
aaggtgtgaggcatggagtgcagcc

SEQ ID NO: 297673 - DNA, 25 bp, Homo sapien
ccttgtgattggcaacctcaccaaa

SEQ ID NO: 297674 - DNA, 25 bp, Homo sapien
atgctgattttcctagctgctgtca

SEQ ID NO: 297675 - DNA, 25 bp, Homo sapien
tttatccatgtacgtcgaatgcctg

SEQ ID NO: 297676 - DNA, 25 bp, Homo sapien
tatccatgtacgtcgaatgcctgtt

SEQ ID NO: 297677 - DNA, 25 bp, Homo sapien
ccatgtacgtcgaatgcctgttcat

SEQ ID NO: 297678 - DNA, 25 bp, Homo sapien
tctttatccatgtacgtcgaatgcc

SEQ ID NO: 297679 - DNA, 25 bp, Homo sapien
cttggaaaggataggcaacttgccc

SEQ ID NO: 297680 - DNA, 25 bp, Homo sapien
catgatgctgtttaatgggctcaac

SEQ ID NO: 297681 - DNA, 25 bp, Homo sapien
tgcccaggttacatggtgcagcctt

SEQ ID NO: 297682 - DNA, 25 bp, Homo sapien
tagggccttcaacaactacgttgtc

SEQ ID NO: 297683 - DNA, 25 bp, Homo sapien
gcccactgcccgctagctgctgtgc

SEQ ID NO: 297684 - DNA, 25 bp, Homo sapien
ggcctagggccctggcttgttccca

SEQ ID NO: 297685 - DNA, 25 bp, Homo sapien
cacaaagatactaggggccgggatt

SEQ ID NO: 297686 - DNA, 25 bp, Homo sapien
tcctccacactttctaccacaaaga

SEQ ID NO: 297687 - DNA, 25 bp, Homo sapien
ccttgacacctggttggtccccagt

SEQ ID NO: 297688 - DNA, 25 bp, Homo sapien
gacacctggttggtccccagtcacc

SEQ ID NO: 297689 - DNA, 25 bp, Homo sapien
tgacacctggttggtccccagtcac

SEQ ID NO: 297690 - DNA, 25 bp, Homo sapien
ttgacacctggttggtccccagtca

SEQ ID NO: 297691 - DNA, 25 bp, Homo sapien
gcatttttgttgacaagtaatatct

SEQ ID NO: 297692 - DNA, 25 bp, Homo sapien
aatatctagatctattgcccgctac

SEQ ID NO: 297693 - DNA, 25 bp, Homo sapien
tctattgcccgctacctttaggaga

SEQ ID NO: 297694 - DNA, 25 bp, Homo sapien
tcttccacagtcgtcttcacactca

SEQ ID NO: 297695 - DNA, 25 bp, Homo sapien
taagtccgctcttgcactgttggct

SEQ ID NO: 297696 - DNA, 25 bp, Homo sapien
ggcttcagctgtgcgcaggcaagca

SEQ ID NO: 297697 - DNA, 25 bp, Homo sapien
caagcacttgatgtgtggacaagta

SEQ ID NO: 297698 - DNA, 25 bp, Homo sapien
cacagccaggtgtaggcatagaggc

SEQ ID NO: 297699 - DNA, 25 bp, Homo sapien
aagaagccaggtcaccggaggtgta

SEQ ID NO: 297700 - DNA, 25 bp, Homo sapien
tcaccggaggtgtagattctagtct

SEQ ID NO: 297701 - DNA, 25 bp, Homo sapien
gccaggtcaccggaggtgtagattc

SEQ ID NO: 297702 - DNA, 25 bp, Homo sapien
gaggtgtagattctagtctgagtgc

SEQ ID NO: 297703 - DNA, 25 bp, Homo sapien
ctgtgtttgtaaaggtgtagtaggg

SEQ ID NO: 297704 - DNA, 25 bp, Homo sapien
cagcaaggagtgctactaaggatga

SEQ ID NO: 297705 - DNA, 25 bp, Homo sapien
ctactaaggatgatggatctgtgac

SEQ ID NO: 297706 - DNA, 25 bp, Homo sapien
gagtgctactaaggatgatggatct

SEQ ID NO: 297707 - DNA, 25 bp, Homo sapien
caaggagtgctactaaggatgatgg

SEQ ID NO: 297708 - DNA, 25 bp, Homo sapien
tgctgcagtaaccacctctgagttg

SEQ ID NO: 297709 - DNA, 25 bp, Homo sapien
cagtagacccctgcctcttgatcat

SEQ ID NO: 297710 - DNA, 25 bp, Homo sapien
tgggcttgctgcagtaaccacctct

SEQ ID NO: 297711 - DNA, 25 bp, Homo sapien
cacctctgagttgcctgccagtaga

SEQ ID NO: 297712 - DNA, 25 bp, Homo sapien
ctgaataccagagctaaaggaagca

SEQ ID NO: 297713 - DNA, 25 bp, Homo sapien
tgaataccagagctaaaggaagcat

SEQ ID NO: 297714 - DNA, 25 bp, Homo sapien
ctgtgccattgtagataaaggagcc

SEQ ID NO: 297715 - DNA, 25 bp, Homo sapien
tcaagcaacccaatctggttcattc

SEQ ID NO: 297716 - DNA, 25 bp, Homo sapien
ttgtagataaaggagcctgcctgac

SEQ ID NO: 297717 - DNA, 25 bp, Homo sapien
aagggctgattcatccaagggagta

SEQ ID NO: 297718 - DNA, 25 bp, Homo sapien
tgcagaagttttacatcgtagtcgt

SEQ ID NO: 297719 - DNA, 25 bp, Homo sapien
gttgctctcagctaagctcccaagt

SEQ ID NO: 297720 - DNA, 25 bp, Homo sapien
cagctaagctcccaagtgtgtgagc

SEQ ID NO: 297721 - DNA, 25 bp, Homo sapien
gaagaaccggccagtcaaactcagt

SEQ ID NO: 297722 - DNA, 25 bp, Homo sapien
tgggcatctgtgtctcacgtcaccc

SEQ ID NO: 297723 - DNA, 25 bp, Homo sapien
cttgctgcacttccatggcaccaac

SEQ ID NO: 297724 - DNA, 25 bp, Homo sapien
gctgcacttccatggcaccaaccat

SEQ ID NO: 297725 - DNA, 25 bp, Homo sapien
atctgtgtctcacgtcaccctcttg

SEQ ID NO: 297726 - DNA, 25 bp, Homo sapien
tctcttatagacagttgtgacacca

SEQ ID NO: 297727 - DNA, 25 bp, Homo sapien
caggtggtcgacttcagtcttattt

SEQ ID NO: 297728 - DNA, 25 bp, Homo sapien
acatcacaaaattgtgacgaccaaa

SEQ ID NO: 297729 - DNA, 25 bp, Homo sapien
aaaattgtgacgaccaaacaggtgg

SEQ ID NO: 297730 - DNA, 25 bp, Homo sapien
agtctgtaactctccagaatgaaga

SEQ ID NO: 297731 - DNA, 25 bp, Homo sapien
tcagtctgtaactctccagaatgaa

SEQ ID NO: 297732 - DNA, 25 bp, Homo sapien
cagtctgtaactctccagaatgaag

SEQ ID NO: 297733 - DNA, 25 bp, Homo sapien
ttggcaaagcagtcaagctcagcca

SEQ ID NO: 297734 - DNA, 25 bp, Homo sapien
tttccttttccttggcaaagcagtc

SEQ ID NO: 297735 - DNA, 25 bp, Homo sapien
tttccttggcaaagcagtcaagctc

SEQ ID NO: 297736 - DNA, 25 bp, Homo sapien
tccttttccttggcaaagcagtcaa

SEQ ID NO: 297737 - DNA, 25 bp, Homo sapien
ctcagacccagctttgaccgcaaag

SEQ ID NO: 297738 - DNA, 25 bp, Homo sapien
tccagacgatggcactgcaagggct

SEQ ID NO: 297739 - DNA, 25 bp, Homo sapien
ttgaccgcaaagcctcccttctttg

SEQ ID NO: 297740 - DNA, 25 bp, Homo sapien
ggatcactgatctctgcactccaca

SEQ ID NO: 297741 - DNA, 25 bp, Homo sapien
aatgagaacaaggatgtgtaagttt

SEQ ID NO: 297742 - DNA, 25 bp, Homo sapien
atgagaacaaggatgtgtaagtttg

SEQ ID NO: 297743 - DNA, 25 bp, Homo sapien
tgctctagggccccgccgtttcctg

SEQ ID NO: 297744 - DNA, 25 bp, Homo sapien
ctcatgctctagggccccgccgttt

SEQ ID NO: 297745 - DNA, 25 bp, Homo sapien
atgctctagggccccgccgtttcct

SEQ ID NO: 297746 - DNA, 25 bp, Homo sapien
tcatgctctagggccccgccgtttc

SEQ ID NO: 297747 - DNA, 25 bp, Homo sapien
cttgcaggaggggaaacacaggcac

SEQ ID NO: 297748 - DNA, 25 bp, Homo sapien
ataaaaaatgtcagggaagcaaact

SEQ ID NO: 297749 - DNA, 25 bp, Homo sapien
tgcctgaggtcagccccaggatatt

SEQ ID NO: 297750 - DNA, 25 bp, Homo sapien
aaaatgtcagggaagcaaactcctt

SEQ ID NO: 297751 - DNA, 25 bp, Homo sapien
cctgcctgaggtcagccccaggata

SEQ ID NO: 297752 - DNA, 25 bp, Homo sapien
tgggattctaccgtgtccgtgccct

SEQ ID NO: 297753 - DNA, 25 bp, Homo sapien
caggtttgactggaagcttggcgtc

SEQ ID NO: 297754 - DNA, 25 bp, Homo sapien
gccgcgcagggctgcgtgagcacag

SEQ ID NO: 297755 - DNA, 25 bp, Homo sapien
gtgagcacaggagagccgcggtgcg

SEQ ID NO: 297756 - DNA, 25 bp, Homo sapien
gtgctgacgctaaattcatttccag

SEQ ID NO: 297757 - DNA, 25 bp, Homo sapien
taactgtgctgacgctaaattcatt

SEQ ID NO: 297758 - DNA, 25 bp, Homo sapien
aataactgtgctgacgctaaattca

SEQ ID NO: 297759 - DNA, 25 bp, Homo sapien
actgtgctgacgctaaattcatttc

SEQ ID NO: 297760 - DNA, 25 bp, Homo sapien
cataggcattggcaaagactttgtg

SEQ ID NO: 297761 - DNA, 25 bp, Homo sapien
ggcattggcaaagactttgtgacta

SEQ ID NO: 297762 - DNA, 25 bp, Homo sapien
gacataggcattggcaaagactttg

SEQ ID NO: 297763 - DNA, 25 bp, Homo sapien
taggcattggcaaagactttgtgac

SEQ ID NO: 297764 - DNA, 25 bp, Homo sapien
agagaccaccaggatgaaccccaca

SEQ ID NO: 297765 - DNA, 25 bp, Homo sapien
tgggctttcacagcccgagagacca

SEQ ID NO: 297766 - DNA, 25 bp, Homo sapien
agcccgagagaccaccaggatgaac

SEQ ID NO: 297767 - DNA, 25 bp, Homo sapien
tttcacagcccgagagaccaccagg

SEQ ID NO: 297768 - DNA, 25 bp, Homo sapien
gacaaggtggacaccaagttctgcc

SEQ ID NO: 297769 - DNA, 25 bp, Homo sapien
gccacgtgaccttggctaggacaag

SEQ ID NO: 297770 - DNA, 25 bp, Homo sapien
gccagcacaactgggctgaatccag

SEQ ID NO: 297771 - DNA, 25 bp, Homo sapien
tgaatccaggtgtgacactccctgc

SEQ ID NO: 297772 - DNA, 25 bp, Homo sapien
ctggagaagagctgccatgaatttg

SEQ ID NO: 297773 - DNA, 25 bp, Homo sapien
tgtgcattggctctggggaagtccc

SEQ ID NO: 297774 - DNA, 25 bp, Homo sapien
tgagatgtgtgcattggctctgggg

SEQ ID NO: 297775 - DNA, 25 bp, Homo sapien
tcccaggtggcaagtttttcttctc

SEQ ID NO: 297776 - DNA, 25 bp, Homo sapien
tctctagagttggaagaaatggctg

SEQ ID NO: 297777 - DNA, 25 bp, Homo sapien
gactgggagctgacagttgttgatc

SEQ ID NO: 297778 - DNA, 25 bp, Homo sapien
tcctgagacagactgaagaggccct

SEQ ID NO: 297779 - DNA, 25 bp, Homo sapien
ggtctgattcttctcaggtgcctct

SEQ ID NO: 297780 - DNA, 25 bp, Homo sapien
gacgtcactttacatgcgaagccct

SEQ ID NO: 297781 - DNA, 25 bp, Homo sapien
tcagcgcatcagtgctcctgctgtc

SEQ ID NO: 297782 - DNA, 25 bp, Homo sapien
cttcagcgcatcagtgctcctgctg

SEQ ID NO: 297783 - DNA, 25 bp, Homo sapien
ttcagcgcatcagtgctcctgctgt

SEQ ID NO: 297784 - DNA, 25 bp, Homo sapien
tcaccgcccagtggcgaacaaagag

SEQ ID NO: 297785 - DNA, 25 bp, Homo sapien
cctgggctttactgcagcttgaggg

SEQ ID NO: 297786 - DNA, 25 bp, Homo sapien
ggttggagtgccacccttggcctca

SEQ ID NO: 297787 - DNA, 25 bp, Homo sapien
gcctcaggtggccaattcagtcctg

SEQ ID NO: 297788 - DNA, 25 bp, Homo sapien
tctcggacacagttgcctgcacaat

SEQ ID NO: 297789 - DNA, 25 bp, Homo sapien
caatcaccaggttaggccaggatcc

SEQ ID NO: 297790 - DNA, 25 bp, Homo sapien
tgcacaatcaccaggttaggccagg

SEQ ID NO: 297791 - DNA, 25 bp, Homo sapien
cagagaagggtcttctcggacacag

SEQ ID NO: 297792 - DNA, 25 bp, Homo sapien
agtttgacatcaaaggagtcaccat

SEQ ID NO: 297793 - DNA, 25 bp, Homo sapien
cagtttgacatcaaaggagtcacca

SEQ ID NO: 297794 - DNA, 25 bp, Homo sapien
gaaggagtggtatcctgtgcccacg

SEQ ID NO: 297795 - DNA, 25 bp, Homo sapien
ggaaggagtggtatcctgtgcccac

SEQ ID NO: 297796 - DNA, 25 bp, Homo sapien
ctggaaggagtggtatcctgtgccc

SEQ ID NO: 297797 - DNA, 25 bp, Homo sapien
aggagtggtatcctgtgcccacggc

SEQ ID NO: 297798 - DNA, 25 bp, Homo sapien
caaacaggatttcgtgtccacaggg

SEQ ID NO: 297799 - DNA, 25 bp, Homo sapien
tccagttagatgatccaaacaggat

SEQ ID NO: 297800 - DNA, 25 bp, Homo sapien
agagagcctccagttagatgatcca

SEQ ID NO: 297801 - DNA, 25 bp, Homo sapien
tcaagagggcgcgtggaggtgaaga

SEQ ID NO: 297802 - DNA, 25 bp, Homo sapien
gactctgtgtaggccaaggagggtg

SEQ ID NO: 297803 - DNA, 25 bp, Homo sapien
ggagagtggcgtacttcctcccctg

SEQ ID NO: 297804 - DNA, 25 bp, Homo sapien
tgccagtggagagtggcgtacttcc

SEQ ID NO: 297805 - DNA, 25 bp, Homo sapien
ccagtggagagtggcgtacttcctc

SEQ ID NO: 297806 - DNA, 25 bp, Homo sapien
agagagcagggcccacctcagcaca

SEQ ID NO: 297807 - DNA, 25 bp, Homo sapien
ctgcagagagcagggcccacctcag

SEQ ID NO: 297808 - DNA, 25 bp, Homo sapien
gcagagagcagggcccacctcagca

SEQ ID NO: 297809 - DNA, 25 bp, Homo sapien
gagcagggcccacctcagcacacat

SEQ ID NO: 297810 - DNA, 25 bp, Homo sapien
ttaggatcgcctcaatggagaagga

SEQ ID NO: 297811 - DNA, 25 bp, Homo sapien
tcacagcaccccaagctatttctct

SEQ ID NO: 297812 - DNA, 25 bp, Homo sapien
gcaccccaagctatttctctccata

SEQ ID NO: 297813 - DNA, 25 bp, Homo sapien
agcctgaggccgcagcttctccggg

SEQ ID NO: 297814 - DNA, 25 bp, Homo sapien
caggagagggtgttgctgtttctgc

SEQ ID NO: 297815 - DNA, 25 bp, Homo sapien
gtttctgctcctgttgctctctgct

SEQ ID NO: 297816 - DNA, 25 bp, Homo sapien
tcctgttgctctctgctgaggggtc

SEQ ID NO: 297817 - DNA, 25 bp, Homo sapien
ttattcttggggcaggagagggtgt

SEQ ID NO: 297818 - DNA, 25 bp, Homo sapien
gctgggcagtctctggaaatgggcc

SEQ ID NO: 297819 - DNA, 25 bp, Homo sapien
gccgctgggcagtctctggaaatgg

SEQ ID NO: 297820 - DNA, 25 bp, Homo sapien
ctgggcagtctctggaaatgggcct

SEQ ID NO: 297821 - DNA, 25 bp, Homo sapien
cgctgggcagtctctggaaatgggc

SEQ ID NO: 297822 - DNA, 25 bp, Homo sapien
tatccataacacatcacgtgtgtgc

SEQ ID NO: 297823 - DNA, 25 bp, Homo sapien
tcggtctgggatcacctcttctctc

SEQ ID NO: 297824 - DNA, 25 bp, Homo sapien
tgcaattctaacatctgctgattct

SEQ ID NO: 297825 - DNA, 25 bp, Homo sapien
tctaagacaatcacctcggtctggg

SEQ ID NO: 297826 - DNA, 25 bp, Homo sapien
tgctcattcaagttgggctgcttac

SEQ ID NO: 297827 - DNA, 25 bp, Homo sapien
ttgctcattcaagttgggctgctta

SEQ ID NO: 297828 - DNA, 25 bp, Homo sapien
cttgctcattcaagttgggctgctt

SEQ ID NO: 297829 - DNA, 25 bp, Homo sapien
ggtccaagttgtgtcagtggccttg

SEQ ID NO: 297830 - DNA, 25 bp, Homo sapien
tccaagttgtgtcagtggccttggt

SEQ ID NO: 297831 - DNA, 25 bp, Homo sapien
agggtccaagttgtgtcagtggcct

SEQ ID NO: 297832 - DNA, 25 bp, Homo sapien
gggtccaagttgtgtcagtggcctt

SEQ ID NO: 297833 - DNA, 25 bp, Homo sapien
agctggctgcggatgtgaacgtctg

SEQ ID NO: 297834 - DNA, 25 bp, Homo sapien
ccagctggctgcggatgtgaacgtc

SEQ ID NO: 297835 - DNA, 25 bp, Homo sapien
tgggtagtgggtaaagtggaagatc

SEQ ID NO: 297836 - DNA, 25 bp, Homo sapien
gtagtgggtaaagtggaagatcttc

SEQ ID NO: 297837 - DNA, 25 bp, Homo sapien
acatggtcccaagggcatggaggct

SEQ ID NO: 297838 - DNA, 25 bp, Homo sapien
gctgggggctgaggtagggatggct

SEQ ID NO: 297839 - DNA, 25 bp, Homo sapien
ggggctgaggtagggatggctgtac

SEQ ID NO: 297840 - DNA, 25 bp, Homo sapien
tgggggctgaggtagggatggctgt

SEQ ID NO: 297841 - DNA, 25 bp, Homo sapien
acttggctcgctgattctggaacca

SEQ ID NO: 297842 - DNA, 25 bp, Homo sapien
ccgccacttggctcgctgattctgg

SEQ ID NO: 297843 - DNA, 25 bp, Homo sapien
cgccacttggctcgctgattctgga

SEQ ID NO: 297844 - DNA, 25 bp, Homo sapien
tccgccacttggctcgctgattctg

SEQ ID NO: 297845 - DNA, 25 bp, Homo sapien
tgcaagtttgatggatgggaagacc

SEQ ID NO: 297846 - DNA, 25 bp, Homo sapien
gatcttgagccgatggacaacagct

SEQ ID NO: 297847 - DNA, 25 bp, Homo sapien
acaacagctcgtgggaggagccagc

SEQ ID NO: 297848 - DNA, 25 bp, Homo sapien
tgttgaagtagcacagatgctgccc

SEQ ID NO: 297849 - DNA, 25 bp, Homo sapien
gaaagtggctcatttggggagagca

SEQ ID NO: 297850 - DNA, 25 bp, Homo sapien
ggagaggaaagtggctcatttgggg

SEQ ID NO: 297851 - DNA, 25 bp, Homo sapien
gaggaaagtggctcatttggggaga

SEQ ID NO: 297852 - DNA, 25 bp, Homo sapien
ctggagaggaaagtggctcatttgg

SEQ ID NO: 297853 - DNA, 25 bp, Homo sapien
tctggtgcagccttccaactggcat

SEQ ID NO: 297854 - DNA, 25 bp, Homo sapien
agccttccaactggcatgttcaggg

SEQ ID NO: 297855 - DNA, 25 bp, Homo sapien
ggtgcagccttccaactggcatgtt

SEQ ID NO: 297856 - DNA, 25 bp, Homo sapien
gcagccttccaactggcatgttcag

SEQ ID NO: 297857 - DNA, 25 bp, Homo sapien
aaagctcaggctttcgaggacagag

SEQ ID NO: 297858 - DNA, 25 bp, Homo sapien
gaaatcatcttatccagctggctcc

SEQ ID NO: 297859 - DNA, 25 bp, Homo sapien
tgtgcaagaggtcattccaggcttc

SEQ ID NO: 297860 - DNA, 25 bp, Homo sapien
cagtaggtactcatgtgtcacggat

SEQ ID NO: 297861 - DNA, 25 bp, Homo sapien
taagcactcgtgttatatgcaaagg

SEQ ID NO: 297862 - DNA, 25 bp, Homo sapien
ggacctcagtatatgggacctctat

SEQ ID NO: 297863 - DNA, 25 bp, Homo sapien
tatacacagtgtatactcgcacgga

SEQ ID NO: 297864 - DNA, 25 bp, Homo sapien
aattcaaatgagacccctgccgtgt

SEQ ID NO: 297865 - DNA, 25 bp, Homo sapien
tagagagcagccggccatagaactt

SEQ ID NO: 297866 - DNA, 25 bp, Homo sapien
tgtagagagcagccggccatagaac

SEQ ID NO: 297867 - DNA, 25 bp, Homo sapien
gagagcagccggccatagaacttta

SEQ ID NO: 297868 - DNA, 25 bp, Homo sapien
agagagcagccggccatagaacttt

SEQ ID NO: 297869 - DNA, 25 bp, Homo sapien
tccacaggtatgagggcagcagcgc

SEQ ID NO: 297870 - DNA, 25 bp, Homo sapien
tcagtccacaggtatgagggcagca

SEQ ID NO: 297871 - DNA, 25 bp, Homo sapien
agggcaggcagaggatgcttcagaa

SEQ ID NO: 297872 - DNA, 25 bp, Homo sapien
caggcagaggatgcttcagaaacac

SEQ ID NO: 297873 - DNA, 25 bp, Homo sapien
tagcacttgccacctttcagctttg

SEQ ID NO: 297874 - DNA, 25 bp, Homo sapien
gagagagagggcttcgcttccattg

SEQ ID NO: 297875 - DNA, 25 bp, Homo sapien
tctggccagccttgattatatcaca

SEQ ID NO: 297876 - DNA, 25 bp, Homo sapien
tccaaacaccgcaggaccaaggaat

SEQ ID NO: 297877 - DNA, 25 bp, Homo sapien
accaacatagctggcatcctgggac

SEQ ID NO: 297878 - DNA, 25 bp, Homo sapien
caggtgcttcctggactggaggatc

SEQ ID NO: 297879 - DNA, 25 bp, Homo sapien
tggaggatccttgtcaccaacatag

SEQ ID NO: 297880 - DNA, 25 bp, Homo sapien
tggactggaggatccttgtcaccaa

SEQ ID NO: 297881 - DNA, 25 bp, Homo sapien
tctttcagccttaggttttaccatc

SEQ ID NO: 297882 - DNA, 25 bp, Homo sapien
gccttaggttttaccatctgtgaaa

SEQ ID NO: 297883 - DNA, 25 bp, Homo sapien
cagccttaggttttaccatctgtga

SEQ ID NO: 297884 - DNA, 25 bp, Homo sapien
gggatgatacaaagattcccaaatg

SEQ ID NO: 297885 - DNA, 25 bp, Homo sapien
cgtacatagggtagacagaggatgc

SEQ ID NO: 297886 - DNA, 25 bp, Homo sapien
gattctgcccttataacaggtgaca

SEQ ID NO: 297887 - DNA, 25 bp, Homo sapien
gaatcccatggtgacgaaggccagg

SEQ ID NO: 297888 - DNA, 25 bp, Homo sapien
ccacttaggcgacctctcagagttt

SEQ ID NO: 297889 - DNA, 25 bp, Homo sapien
tatgtcattaggtgctttatcttgt

SEQ ID NO: 297890 - DNA, 25 bp, Homo sapien
cgtatatcttggtacactaccttaa

SEQ ID NO: 297891 - DNA, 25 bp, Homo sapien
cttgtgtctcacgtatatcttggta

SEQ ID NO: 297892 - DNA, 25 bp, Homo sapien
ggtgctttatcttgtgtctcacgta

SEQ ID NO: 297893 - DNA, 25 bp, Homo sapien
gccaaactccaaagactgacatctg

SEQ ID NO: 297894 - DNA, 25 bp, Homo sapien
tccatcagccaaactccaaagactg

SEQ ID NO: 297895 - DNA, 25 bp, Homo sapien
gaatataccggcattccctccatca

SEQ ID NO: 297896 - DNA, 25 bp, Homo sapien
ttctcaggaatataccggcattccc

SEQ ID NO: 297897 - DNA, 25 bp, Homo sapien
tacaagggccaattgctgtggcagt

SEQ ID NO: 297898 - DNA, 25 bp, Homo sapien
aatgagacaaatggccttacaaggg

SEQ ID NO: 297899 - DNA, 25 bp, Homo sapien
gcaactccggcattggtgatcacca

SEQ ID NO: 297900 - DNA, 25 bp, Homo sapien
gagtgttgattacccagaattcctg

SEQ ID NO: 297901 - DNA, 25 bp, Homo sapien
ctctcttgaggggatgtcccttcac

SEQ ID NO: 297902 - DNA, 25 bp, Homo sapien
tggcggagacacaaagatgtgtttc

SEQ ID NO: 297903 - DNA, 25 bp, Homo sapien
gatgaaggtgatggcggagacacaa

SEQ ID NO: 297904 - DNA, 25 bp, Homo sapien
agttggcctctcttgaggggatgtc

SEQ ID NO: 297905 - DNA, 25 bp, Homo sapien
tcttcctcagacagttgtgttaggg

SEQ ID NO: 297906 - DNA, 25 bp, Homo sapien
tgtgttaggggacctggagcatcct

SEQ ID NO: 297907 - DNA, 25 bp, Homo sapien
tcagacagttgtgttaggggacctg

SEQ ID NO: 297908 - DNA, 25 bp, Homo sapien
ttgtgttaggggacctggagcatcc

SEQ ID NO: 297909 - DNA, 25 bp, Homo sapien
ggtcgcatcacctagggtcagggca

SEQ ID NO: 297910 - DNA, 25 bp, Homo sapien
aaccaccaggtgagtgcaggcggaa

SEQ ID NO: 297911 - DNA, 25 bp, Homo sapien
aggagtaaccaccaggtgagtgcag

SEQ ID NO: 297912 - DNA, 25 bp, Homo sapien
tgctgggctgagaaggtcgcatcac

SEQ ID NO: 297913 - DNA, 25 bp, Homo sapien
aggagtaacccaaagtgtcctggca

SEQ ID NO: 297914 - DNA, 25 bp, Homo sapien
ggagtaacccaaagtgtcctggcac

SEQ ID NO: 297915 - DNA, 25 bp, Homo sapien
tccaggagtaacccaaagtgtcctg

SEQ ID NO: 297916 - DNA, 25 bp, Homo sapien
caggagtaacccaaagtgtcctggc

SEQ ID NO: 297917 - DNA, 25 bp, Homo sapien
gttgctgcaacgcttgaggatctct

SEQ ID NO: 297918 - DNA, 25 bp, Homo sapien
caaaatccagggacattgacacggc

SEQ ID NO: 297919 - DNA, 25 bp, Homo sapien
gaacctgggcctgaagtattgaagc

SEQ ID NO: 297920 - DNA, 25 bp, Homo sapien
gaggttagaggagctgctgccaaaa

SEQ ID NO: 297921 - DNA, 25 bp, Homo sapien
agcccctccacaattgcttccccgc

SEQ ID NO: 297922 - DNA, 25 bp, Homo sapien
tgcagcccctccacaattgcttccc

SEQ ID NO: 297923 - DNA, 25 bp, Homo sapien
tccacaattgcttccccgcagttcc

SEQ ID NO: 297924 - DNA, 25 bp, Homo sapien
ccctccacaattgcttccccgcagt

SEQ ID NO: 297925 - DNA, 25 bp, Homo sapien
gaatggctgaatgaacacatctacc

SEQ ID NO: 297926 - DNA, 25 bp, Homo sapien
ggaacacctagaccctttgcacaga

SEQ ID NO: 297927 - DNA, 25 bp, Homo sapien
ccctaaggcctagaacgagcaatgc

SEQ ID NO: 297928 - DNA, 25 bp, Homo sapien
cacagataggatacctgtagccact

SEQ ID NO: 297929 - DNA, 25 bp, Homo sapien
catacttcacaaagtgaggactgag

SEQ ID NO: 297930 - DNA, 25 bp, Homo sapien
atgaagccatacttcacaaagtgag

SEQ ID NO: 297931 - DNA, 25 bp, Homo sapien
gaagccatacttcacaaagtgagga

SEQ ID NO: 297932 - DNA, 25 bp, Homo sapien
cacaaagtgaggactgaggaaatag

SEQ ID NO: 297933 - DNA, 25 bp, Homo sapien
taggggcaagttggcgagcctgttt

SEQ ID NO: 297934 - DNA, 25 bp, Homo sapien
tctattctgaataggcttccctgtt

SEQ ID NO: 297935 - DNA, 25 bp, Homo sapien
tcctgtaggaggcggtcttttcctc

SEQ ID NO: 297936 - DNA, 25 bp, Homo sapien
ctttgttttcctggtggatgttggc

SEQ ID NO: 297937 - DNA, 25 bp, Homo sapien
agctggaagcacaagactcacctga

SEQ ID NO: 297938 - DNA, 25 bp, Homo sapien
caatgggaatcacaatattaacctc

SEQ ID NO: 297939 - DNA, 25 bp, Homo sapien
taaggttcacagcaaatgagtaaag

SEQ ID NO: 297940 - DNA, 25 bp, Homo sapien
tacacagcttcccataaggatacac

SEQ ID NO: 297941 - DNA, 25 bp, Homo sapien
tgagcaaagttctactgatgacaga

SEQ ID NO: 297942 - DNA, 25 bp, Homo sapien
gcaaatgagcaaagttctactgatg

SEQ ID NO: 297943 - DNA, 25 bp, Homo sapien
aatgagcaaagttctactgatgaca

SEQ ID NO: 297944 - DNA, 25 bp, Homo sapien
gcaaagttctactgatgacagaaac

SEQ ID NO: 297945 - DNA, 25 bp, Homo sapien
atgatgggttcagctcacaggtgtg

SEQ ID NO: 297946 - DNA, 25 bp, Homo sapien
tgtctgcagactttcctgaggattg

SEQ ID NO: 297947 - DNA, 25 bp, Homo sapien
tctgcagactttcctgaggattgca

SEQ ID NO: 297948 - DNA, 25 bp, Homo sapien
tgcagactttcctgaggattgcatg

SEQ ID NO: 297949 - DNA, 25 bp, Homo sapien
tcatggtgttagtcaacctctggtc

SEQ ID NO: 297950 - DNA, 25 bp, Homo sapien
tggtgttagtcaacctctggtcatg

SEQ ID NO: 297951 - DNA, 25 bp, Homo sapien
ccgcagaggttgaatcatggtgtta

SEQ ID NO: 297952 - DNA, 25 bp, Homo sapien
gaagagctggttgccgcagaggttg

SEQ ID NO: 297953 - DNA, 25 bp, Homo sapien
tgtgaaactgcatagctttgctgcc

SEQ ID NO: 297954 - DNA, 25 bp, Homo sapien
ccatgtgaaactgcatagctttgct

SEQ ID NO: 297955 - DNA, 25 bp, Homo sapien
agctgctgaggacattttatctttg

SEQ ID NO: 297956 - DNA, 25 bp, Homo sapien
tctttgttaggtggattccttggcc

SEQ ID NO: 297957 - DNA, 25 bp, Homo sapien
agacgctctgggaacttctgactca

SEQ ID NO: 297958 - DNA, 25 bp, Homo sapien
ggagacgctctgggaacttctgact

SEQ ID NO: 297959 - DNA, 25 bp, Homo sapien
caggtgttcctagaggcagctttgg

SEQ ID NO: 297960 - DNA, 25 bp, Homo sapien
aggcagctttggcaggagacgctct

SEQ ID NO: 297961 - DNA, 25 bp, Homo sapien
ggagaaatagctttcccagaagcac

SEQ ID NO: 297962 - DNA, 25 bp, Homo sapien
tctcagcacgctaggtgatgtcttc

SEQ ID NO: 297963 - DNA, 25 bp, Homo sapien
tcagtgatgttgtcctagacccaga

SEQ ID NO: 297964 - DNA, 25 bp, Homo sapien
taacagagaacctgctagcagtggc

SEQ ID NO: 297965 - DNA, 25 bp, Homo sapien
gctgcccatagagcattgagaatat

SEQ ID NO: 297966 - DNA, 25 bp, Homo sapien
tgtcagctgcccatagagcattgag

SEQ ID NO: 297967 - DNA, 25 bp, Homo sapien
tttccataatgttgtcagctgccca

SEQ ID NO: 297968 - DNA, 25 bp, Homo sapien
taatgttgtcagctgcccatagagc

SEQ ID NO: 297969 - DNA, 25 bp, Homo sapien
tcctgtttgtctgaccctaactttc

SEQ ID NO: 297970 - DNA, 25 bp, Homo sapien
ctcctgtttgtctgaccctaacttt

SEQ ID NO: 297971 - DNA, 25 bp, Homo sapien
ggctgtttatcttattgtccaaact

SEQ ID NO: 297972 - DNA, 25 bp, Homo sapien
ctctgggggctgtttatcttattgt

SEQ ID NO: 297973 - DNA, 25 bp, Homo sapien
tacagtgtccccagcatcatgctta

SEQ ID NO: 297974 - DNA, 25 bp, Homo sapien
ctacagtgtccccagcatcatgctt

SEQ ID NO: 297975 - DNA, 25 bp, Homo sapien
acagtgtccccagcatcatgcttac

SEQ ID NO: 297976 - DNA, 25 bp, Homo sapien
catgacaaacatggtccccaagtgt

SEQ ID NO: 297977 - DNA, 25 bp, Homo sapien
cagtgatgagttccttgaggatgga

SEQ ID NO: 297978 - DNA, 25 bp, Homo sapien
tcacatgacaaacatggtccccaag

SEQ ID NO: 297979 - DNA, 25 bp, Homo sapien
tgacaaacatggtccccaagtgtcc

SEQ ID NO: 297980 - DNA, 25 bp, Homo sapien
ccggatcccgcctcaacgccgccga

SEQ ID NO: 297981 - DNA, 25 bp, Homo sapien
cttcactcggctcgcccggatcccg

SEQ ID NO: 297982 - DNA, 25 bp, Homo sapien
gatcccgcctcaacgccgccgatcg

SEQ ID NO: 297983 - DNA, 25 bp, Homo sapien
tcaacgccgccgatcgccgccatct

SEQ ID NO: 297984 - DNA, 25 bp, Homo sapien
caagccgggttgcacgcaagaaaca

SEQ ID NO: 297985 - DNA, 25 bp, Homo sapien
caccatttttgtggtccccaaggca

SEQ ID NO: 297986 - DNA, 25 bp, Homo sapien
gaggaaatataatcagccaccagct

SEQ ID NO: 297987 - DNA, 25 bp, Homo sapien
gatgtttctccgcttttgcacgcta

SEQ ID NO: 297988 - DNA, 25 bp, Homo sapien
cgcgcccagccaaggtaaagttctt

SEQ ID NO: 297989 - DNA, 25 bp, Homo sapien
taattccttcaggtagctgtggaca

SEQ ID NO: 297990 - DNA, 25 bp, Homo sapien
gagaactgcctgttcgaagggcctt

SEQ ID NO: 297991 - DNA, 25 bp, Homo sapien
tgtggacaatactgaagcatggaac

SEQ ID NO: 297992 - DNA, 25 bp, Homo sapien
tccaggctccttcccgtctacagga

SEQ ID NO: 297993 - DNA, 25 bp, Homo sapien
aggctccttcccgtctacaggacca

SEQ ID NO: 297994 - DNA, 25 bp, Homo sapien
ggtcctgcagggcctttgagaatgt

SEQ ID NO: 297995 - DNA, 25 bp, Homo sapien
ctccttcccgtctacaggaccaggt

SEQ ID NO: 297996 - DNA, 25 bp, Homo sapien
tttcttcacggagtcatcataagcc

SEQ ID NO: 297997 - DNA, 25 bp, Homo sapien
tcttcacggagtcatcataagccat

SEQ ID NO: 297998 - DNA, 25 bp, Homo sapien
ttcttcacggagtcatcataagcca

SEQ ID NO: 297999 - DNA, 25 bp, Homo sapien
tctttcttcacggagtcatcataag

SEQ ID NO: 298000 - DNA, 25 bp, Homo sapien
gctgcaagtcctatgtcctcaaagg

SEQ ID NO: 298001 - DNA, 25 bp, Homo sapien
gcttcggccagctgcaagtcctatg

SEQ ID NO: 298002 - DNA, 25 bp, Homo sapien
cctcaaaggtatgatcaccatcaaa

SEQ ID NO: 298003 - DNA, 25 bp, Homo sapien
ttttctctcgttggcttcggccagc

SEQ ID NO: 298004 - DNA, 25 bp, Homo sapien
tagtagtaatcatcagaggagtgct

SEQ ID NO: 298005 - DNA, 25 bp, Homo sapien
ctccatagtagtaatcatcagagga

SEQ ID NO: 298006 - DNA, 25 bp, Homo sapien
gtagtaatcatcagaggagtgcttc

SEQ ID NO: 298007 - DNA, 25 bp, Homo sapien
tgtgtgtccgtccccaagaagtaaa

SEQ ID NO: 298008 - DNA, 25 bp, Homo sapien
tggtttatcggcactcagaacaaga

SEQ ID NO: 298009 - DNA, 25 bp, Homo sapien
tttatcggcactcagaacaagaacc

SEQ ID NO: 298010 - DNA, 25 bp, Homo sapien
tcacactggtttatcggcactcaga

SEQ ID NO: 298011 - DNA, 25 bp, Homo sapien
gttcttctatgctgaatcctccaaa

SEQ ID NO: 298012 - DNA, 25 bp, Homo sapien
tgtgacgattccaaagacgaaatat

SEQ ID NO: 298013 - DNA, 25 bp, Homo sapien
ctgtgacgattccaaagacgaaata

SEQ ID NO: 298014 - DNA, 25 bp, Homo sapien
gctgtatcagtagactgtgggctgg

SEQ ID NO: 298015 - DNA, 25 bp, Homo sapien
gaaagctctgtaactcatgtcctag

SEQ ID NO: 298016 - DNA, 25 bp, Homo sapien
catgtcctaggagtaaagcaccctg

SEQ ID NO: 298017 - DNA, 25 bp, Homo sapien
gaagagccagaggatttctccccag

SEQ ID NO: 298018 - DNA, 25 bp, Homo sapien
gaagtgatagctttcaacaggtcca

SEQ ID NO: 298019 - DNA, 25 bp, Homo sapien
tgcgaactgggaggcgtcagaccca

SEQ ID NO: 298020 - DNA, 25 bp, Homo sapien
agcactgtgggactctgcgaactgg

SEQ ID NO: 298021 - DNA, 25 bp, Homo sapien
cagaataggttcaagccctgaaaga

SEQ ID NO: 298022 - DNA, 25 bp, Homo sapien
ggttcaagccctgaaagatcaaggt

SEQ ID NO: 298023 - DNA, 25 bp, Homo sapien
gaatcatctatcactaactccccag

SEQ ID NO: 298024 - DNA, 25 bp, Homo sapien
tcttcttgatttctcggtaagaatc

SEQ ID NO: 298025 - DNA, 25 bp, Homo sapien
ctcttggacttggagtgtcgcttct

SEQ ID NO: 298026 - DNA, 25 bp, Homo sapien
agtgtcgcttctctttatgcttctc

SEQ ID NO: 298027 - DNA, 25 bp, Homo sapien
tgctgctccagcgtatgggatgctg

SEQ ID NO: 298028 - DNA, 25 bp, Homo sapien
gctgctccagcgtatgggatgctgg

SEQ ID NO: 298029 - DNA, 25 bp, Homo sapien
tgctccagcgtatgggatgctggga

SEQ ID NO: 298030 - DNA, 25 bp, Homo sapien
ctgctccagcgtatgggatgctggg

SEQ ID NO: 298031 - DNA, 25 bp, Homo sapien
tccagattttatctgacattgcatt

SEQ ID NO: 298032 - DNA, 25 bp, Homo sapien
attttatctgacattgcattttgca

SEQ ID NO: 298033 - DNA, 25 bp, Homo sapien
ttagtcgcttttcttccagatttta

SEQ ID NO: 298034 - DNA, 25 bp, Homo sapien
cttccagattttatctgacattgca

SEQ ID NO: 298035 - DNA, 25 bp, Homo sapien
cagagcttcaatatgtaagaagagg

SEQ ID NO: 298036 - DNA, 25 bp, Homo sapien
tttgattaggtcttgcaaagagggc

SEQ ID NO: 298037 - DNA, 25 bp, Homo sapien
ggcagagcttcaatatgtaagaaga

SEQ ID NO: 298038 - DNA, 25 bp, Homo sapien
gagggcagagcttcaatatgtaaga

SEQ ID NO: 298039 - DNA, 25 bp, Homo sapien
gattttcattactaaccttctggac

SEQ ID NO: 298040 - DNA, 25 bp, Homo sapien
cattcgacatatacttacaaagtgc

SEQ ID NO: 298041 - DNA, 25 bp, Homo sapien
ggttattcgtctctccctactctaa

SEQ ID NO: 298042 - DNA, 25 bp, Homo sapien
tctggactatagtaactcccttggt

SEQ ID NO: 298043 - DNA, 25 bp, Homo sapien
ttcagattttttggacagccacaat

SEQ ID NO: 298044 - DNA, 25 bp, Homo sapien
tagcaactgctagccacatgggcaa

SEQ ID NO: 298045 - DNA, 25 bp, Homo sapien
gatacaagcccactaggtcagcggt

SEQ ID NO: 298046 - DNA, 25 bp, Homo sapien
taaattcagattatgactacttcag

SEQ ID NO: 298047 - DNA, 25 bp, Homo sapien
ttagtattcttctggtgaagccagt

SEQ ID NO: 298048 - DNA, 25 bp, Homo sapien
tagtattcttctggtgaagccagtc

SEQ ID NO: 298049 - DNA, 25 bp, Homo sapien
gaagacaattctttggtagtcactg

SEQ ID NO: 298050 - DNA, 25 bp, Homo sapien
taagagaatctttaccactcctggg

SEQ ID NO: 298051 - DNA, 25 bp, Homo sapien
gatgcaacgccttcacttcaacaaa

SEQ ID NO: 298052 - DNA, 25 bp, Homo sapien
cattctttgggttcaaggtgagaag

SEQ ID NO: 298053 - DNA, 25 bp, Homo sapien
taatgccgcatagaagatacaacag

SEQ ID NO: 298054 - DNA, 25 bp, Homo sapien
cagggtaagacttgattagaaccca

SEQ ID NO: 298055 - DNA, 25 bp, Homo sapien
tactaaccagctttcctaaacagga

SEQ ID NO: 298056 - DNA, 25 bp, Homo sapien
gtttagtaaccctgaatccatagta

SEQ ID NO: 298057 - DNA, 25 bp, Homo sapien
ccacaatggtcacgcgatactcttt

SEQ ID NO: 298058 - DNA, 25 bp, Homo sapien
caatggtcacgcgatactctttaca

SEQ ID NO: 298059 - DNA, 25 bp, Homo sapien
cagccacaatggtcacgcgatactc

SEQ ID NO: 298060 - DNA, 25 bp, Homo sapien
atggtcacgcgatactctttacaga

SEQ ID NO: 298061 - DNA, 25 bp, Homo sapien
tacagtaaagggttagctattaaca

SEQ ID NO: 298062 - DNA, 25 bp, Homo sapien
ctcgtaacccatctactccctaggg

SEQ ID NO: 298063 - DNA, 25 bp, Homo sapien
agtctcaactcgtaacccatctact

SEQ ID NO: 298064 - DNA, 25 bp, Homo sapien
actcaatacagtaaagggttagcta

SEQ ID NO: 298065 - DNA, 25 bp, Homo sapien
ccacacctcagccagttttttacta

SEQ ID NO: 298066 - DNA, 25 bp, Homo sapien
cacacctcagccagttttttactaa

SEQ ID NO: 298067 - DNA, 25 bp, Homo sapien
gtctttttctggtaattgcttccac

SEQ ID NO: 298068 - DNA, 25 bp, Homo sapien
ctttttctggtaattgcttccacac

SEQ ID NO: 298069 - DNA, 25 bp, Homo sapien
agaattacatattttggaaggcgag

SEQ ID NO: 298070 - DNA, 25 bp, Homo sapien
gaattacatattttggaaggcgaga

SEQ ID NO: 298071 - DNA, 25 bp, Homo sapien
aattacatattttggaaggcgagaa

SEQ ID NO: 298072 - DNA, 25 bp, Homo sapien
agtgttaatgtcctctgctaaacca

SEQ ID NO: 298073 - DNA, 25 bp, Homo sapien
gtgttaatgtcctctgctaaaccat

SEQ ID NO: 298074 - DNA, 25 bp, Homo sapien
tgttaatgtcctctgctaaaccatt

SEQ ID NO: 298075 - DNA, 25 bp, Homo sapien
ttaatgtcctctgctaaaccatttt

SEQ ID NO: 298076 - DNA, 25 bp, Homo sapien
tcaatgctaatggtcaaatctcggc

SEQ ID NO: 298077 - DNA, 25 bp, Homo sapien
ggttctactaacctgctagttggca

SEQ ID NO: 298078 - DNA, 25 bp, Homo sapien
gggtcaccgaactgacttcagacag

SEQ ID NO: 298079 - DNA, 25 bp, Homo sapien
gcagacagagggttaatgctaactt

SEQ ID NO: 298080 - DNA, 25 bp, Homo sapien
tttcacagttgtggcttctgctttg

SEQ ID NO: 298081 - DNA, 25 bp, Homo sapien
ttcacagttgtggcttctgctttgt

SEQ ID NO: 298082 - DNA, 25 bp, Homo sapien
tcacagttgtggcttctgctttgtt

SEQ ID NO: 298083 - DNA, 25 bp, Homo sapien
cccagtttcttagcaaggaagcaaa

SEQ ID NO: 298084 - DNA, 25 bp, Homo sapien
tcaaggtccacttctaatactgcaa

SEQ ID NO: 298085 - DNA, 25 bp, Homo sapien
ggtccacttctaatactgcaagctt

SEQ ID NO: 298086 - DNA, 25 bp, Homo sapien
aagcaggggcgggatgtggtcacta

SEQ ID NO: 298087 - DNA, 25 bp, Homo sapien
gaggcttagggactctcccaacagc

SEQ ID NO: 298088 - DNA, 25 bp, Homo sapien
gagcagcaacatcaatgggctctgt

SEQ ID NO: 298089 - DNA, 25 bp, Homo sapien
gcagcaacatcaatgggctctgtct

SEQ ID NO: 298090 - DNA, 25 bp, Homo sapien
cagtttcctgcagacggtgtccaat

SEQ ID NO: 298091 - DNA, 25 bp, Homo sapien
tatgagaatcctacaaccctgcatg

SEQ ID NO: 298092 - DNA, 25 bp, Homo sapien
tataaactcgacaaatatagctcag

SEQ ID NO: 298093 - DNA, 25 bp, Homo sapien
catgttccctttccgtaatcctagc

SEQ ID NO: 298094 - DNA, 25 bp, Homo sapien
gcccatcttcttaccttctgagtga

SEQ ID NO: 298095 - DNA, 25 bp, Homo sapien
cagataatggaatccagaagcactg

SEQ ID NO: 298096 - DNA, 25 bp, Homo sapien
ggaatccagaagcactgacaaactg

SEQ ID NO: 298097 - DNA, 25 bp, Homo sapien
tagttgtgtggtgagacatgccaag

SEQ ID NO: 298098 - DNA, 25 bp, Homo sapien
taatggaatccagaagcactgacaa

SEQ ID NO: 298099 - DNA, 25 bp, Homo sapien
acagtcccggcatgatgtaagcaat

SEQ ID NO: 298100 - DNA, 25 bp, Homo sapien
cacagtcccggcatgatgtaagcaa

SEQ ID NO: 298101 - DNA, 25 bp, Homo sapien
tcacagtcccggcatgatgtaagca

SEQ ID NO: 298102 - DNA, 25 bp, Homo sapien
cagtcccggcatgatgtaagcaatg

SEQ ID NO: 298103 - DNA, 25 bp, Homo sapien
aaagaatcccaagcctgtattcatg

SEQ ID NO: 298104 - DNA, 25 bp, Homo sapien
cagcaatggtgtaggataaggtttc

SEQ ID NO: 298105 - DNA, 25 bp, Homo sapien
tccataaagagatgcgcttggcacc

SEQ ID NO: 298106 - DNA, 25 bp, Homo sapien
tctgcaacagtcatatatacacaaa

SEQ ID NO: 298107 - DNA, 25 bp, Homo sapien
catttcagactaagacaggtaaggc

SEQ ID NO: 298108 - DNA, 25 bp, Homo sapien
caactggtggcattgacagcttcac

SEQ ID NO: 298109 - DNA, 25 bp, Homo sapien
aattctgccgactaaagattctggg

SEQ ID NO: 298110 - DNA, 25 bp, Homo sapien
tctgttgaggccaccaatggtacca

SEQ ID NO: 298111 - DNA, 25 bp, Homo sapien
gaaacaaacgtctggttctctggaa

SEQ ID NO: 298112 - DNA, 25 bp, Homo sapien
gatttactttgatgctgtagtgctc

SEQ ID NO: 298113 - DNA, 25 bp, Homo sapien
gatgggctacactgtccccaaagat

SEQ ID NO: 298114 - DNA, 25 bp, Homo sapien
gcacagttaactcagagcttggtgt

SEQ ID NO: 298115 - DNA, 25 bp, Homo sapien
tctaatagtaccaaataccacaagg

SEQ ID NO: 298116 - DNA, 25 bp, Homo sapien
tacctttaagcaacatagccctgtg

SEQ ID NO: 298117 - DNA, 25 bp, Homo sapien
tgagaaagggattcagcagccagac

SEQ ID NO: 298118 - DNA, 25 bp, Homo sapien
tacaaatacaatagggctgggtttc

SEQ ID NO: 298119 - DNA, 25 bp, Homo sapien
ggaatcagctgacagcaaccgccag

SEQ ID NO: 298120 - DNA, 25 bp, Homo sapien
cagcgccaccgacccgtcacgtgac

SEQ ID NO: 298121 - DNA, 25 bp, Homo sapien
aatcagctgacagcaaccgccagcg

SEQ ID NO: 298122 - DNA, 25 bp, Homo sapien
cccgggaatcagctgacagcaaccg

SEQ ID NO: 298123 - DNA, 25 bp, Homo sapien
cgatgcgctgtcccactggagagct

SEQ ID NO: 298124 - DNA, 25 bp, Homo sapien
actggagagctgaacgggttcccca

SEQ ID NO: 298125 - DNA, 25 bp, Homo sapien
tgtcccactggagagctgaacgggt

SEQ ID NO: 298126 - DNA, 25 bp, Homo sapien
gagctgaacgggttccccaggagaa

SEQ ID NO: 298127 - DNA, 25 bp, Homo sapien
tatacatctatcacaagccaaggct

SEQ ID NO: 298128 - DNA, 25 bp, Homo sapien
tgaccaggagggtttgtccgaccac

SEQ ID NO: 298129 - DNA, 25 bp, Homo sapien
tagcccttctcaggtgtctgtgtcc

SEQ ID NO: 298130 - DNA, 25 bp, Homo sapien
gccaaggcttcctaatggcccaagt

SEQ ID NO: 298131 - DNA, 25 bp, Homo sapien
tattgcccgccaactacaggtgagg

SEQ ID NO: 298132 - DNA, 25 bp, Homo sapien
agaactgtgagtatcctgtcaccag

SEQ ID NO: 298133 - DNA, 25 bp, Homo sapien
agagaaccacggaccagcagacagg

SEQ ID NO: 298134 - DNA, 25 bp, Homo sapien
ctgtcaccagggtgcagagaaccac

SEQ ID NO: 298135 - DNA, 25 bp, Homo sapien
tgaccgctcatttgccagggacaca

SEQ ID NO: 298136 - DNA, 25 bp, Homo sapien
tgttgaggactgaaccaggactcag

SEQ ID NO: 298137 - DNA, 25 bp, Homo sapien
caagctaattaggagacactgaggg

SEQ ID NO: 298138 - DNA, 25 bp, Homo sapien
gctactaacttagactgggtcccag

SEQ ID NO: 298139 - DNA, 25 bp, Homo sapien
gacaactacggcatggacctgaagg

SEQ ID NO: 298140 - DNA, 25 bp, Homo sapien
tacctgcagctcaaagtattcgtga

SEQ ID NO: 298141 - DNA, 25 bp, Homo sapien
aagccctcgggagccggcactgaga

SEQ ID NO: 298142 - DNA, 25 bp, Homo sapien
ttcagactctgctggttgcgtttcc

SEQ ID NO: 298143 - DNA, 25 bp, Homo sapien
gcaatgccagcacctttgtaaacgg

SEQ ID NO: 298144 - DNA, 25 bp, Homo sapien
tgtgataagacaggctttgctccgc

SEQ ID NO: 298145 - DNA, 25 bp, Homo sapien
catgaatgatgaacgcaggaactcg

SEQ ID NO: 298146 - DNA, 25 bp, Homo sapien
cactttgtggcagttcctagggtaa

SEQ ID NO: 298147 - DNA, 25 bp, Homo sapien
catgttgagggcccagtcctcgctc

SEQ ID NO: 298148 - DNA, 25 bp, Homo sapien
ccatgttgagggcccagtcctcgct

SEQ ID NO: 298149 - DNA, 25 bp, Homo sapien
tccatgttgagggcccagtcctcgc

SEQ ID NO: 298150 - DNA, 25 bp, Homo sapien
gttgatgatgtcgcagatctccatg

SEQ ID NO: 298151 - DNA, 25 bp, Homo sapien
ccaggttctgatcacatcagaatct

SEQ ID NO: 298152 - DNA, 25 bp, Homo sapien
acatcagaatcttcctagcccattg

SEQ ID NO: 298153 - DNA, 25 bp, Homo sapien
ttgcttagcagggactcacaacctg

SEQ ID NO: 298154 - DNA, 25 bp, Homo sapien
tgttttgtgtatccagccaggttct

SEQ ID NO: 298155 - DNA, 25 bp, Homo sapien
ctcttctttactgctcggagggcat

SEQ ID NO: 298156 - DNA, 25 bp, Homo sapien
ttccccacgattctcttctttactg

SEQ ID NO: 298157 - DNA, 25 bp, Homo sapien
ttactgctcggagggcatctttggg

SEQ ID NO: 298158 - DNA, 25 bp, Homo sapien
gttcttattccccacgattctcttc

SEQ ID NO: 298159 - DNA, 25 bp, Homo sapien
gccacaggacagacagatggggcac

SEQ ID NO: 298160 - DNA, 25 bp, Homo sapien
ctgccacaggacagacagatggggc

SEQ ID NO: 298161 - DNA, 25 bp, Homo sapien
cacaggacagacagatggggcactc

SEQ ID NO: 298162 - DNA, 25 bp, Homo sapien
acaggacagacagatggggcactca

SEQ ID NO: 298163 - DNA, 25 bp, Homo sapien
ctttccagctctcaaatgaggagct

SEQ ID NO: 298164 - DNA, 25 bp, Homo sapien
gctctcaaatgaggagctcagagga

SEQ ID NO: 298165 - DNA, 25 bp, Homo sapien
ctctcaaatgaggagctcagaggag

SEQ ID NO: 298166 - DNA, 25 bp, Homo sapien
ccagctctcaaatgaggagctcaga

SEQ ID NO: 298167 - DNA, 25 bp, Homo sapien
agaggaggtgctcagaacccccacc

SEQ ID NO: 298168 - DNA, 25 bp, Homo sapien
ggagaggaggtgctcagaaccccca

SEQ ID NO: 298169 - DNA, 25 bp, Homo sapien
aggaggtgctcagaacccccaccct

SEQ ID NO: 298170 - DNA, 25 bp, Homo sapien
gaggagaggaggtgctcagaacccc

SEQ ID NO: 298171 - DNA, 25 bp, Homo sapien
gagggccgagaggtgccgtcgagca

SEQ ID NO: 298172 - DNA, 25 bp, Homo sapien
tggagggccgagaggtgccgtcgag

SEQ ID NO: 298173 - DNA, 25 bp, Homo sapien
agggccgagaggtgccgtcgagcac

SEQ ID NO: 298174 - DNA, 25 bp, Homo sapien
ctggagggccgagaggtgccgtcga

SEQ ID NO: 298175 - DNA, 25 bp, Homo sapien
ccgcagttcttgacacaggtttcta

SEQ ID NO: 298176 - DNA, 25 bp, Homo sapien
ctggccaccagcacgtggaagcggt

SEQ ID NO: 298177 - DNA, 25 bp, Homo sapien
ttgggcaggatggtcctcaccagca

SEQ ID NO: 298178 - DNA, 25 bp, Homo sapien
aagcggtgcccgcagttcttgacac

SEQ ID NO: 298179 - DNA, 25 bp, Homo sapien
actttgtcatgcacgatggtgggtg

SEQ ID NO: 298180 - DNA, 25 bp, Homo sapien
gagcactttgtcatgcacgatggtg

SEQ ID NO: 298181 - DNA, 25 bp, Homo sapien
ttgagcactttgtcatgcacgatgg

SEQ ID NO: 298182 - DNA, 25 bp, Homo sapien
gcactttgtcatgcacgatggtggg

SEQ ID NO: 298183 - DNA, 25 bp, Homo sapien
ggacaaacacgatggcctcgactct

SEQ ID NO: 298184 - DNA, 25 bp, Homo sapien
caggaagctcctgcactgacagctc

SEQ ID NO: 298185 - DNA, 25 bp, Homo sapien
gcaaagcacgcagttggcaagcctc

SEQ ID NO: 298186 - DNA, 25 bp, Homo sapien
aaatgagaagcggagcctgggacaa

SEQ ID NO: 298187 - DNA, 25 bp, Homo sapien
gacacagccggtaaccacagctcac

SEQ ID NO: 298188 - DNA, 25 bp, Homo sapien
ggacacagccggtaaccacagctca

SEQ ID NO: 298189 - DNA, 25 bp, Homo sapien
caaggggacacagccggtaaccaca

SEQ ID NO: 298190 - DNA, 25 bp, Homo sapien
ggggacacagccggtaaccacagct

SEQ ID NO: 298191 - DNA, 25 bp, Homo sapien
tcagtcatggggaactccaggcctt

SEQ ID NO: 298192 - DNA, 25 bp, Homo sapien
tggtgaccacacctgtcagatcggg

SEQ ID NO: 298193 - DNA, 25 bp, Homo sapien
cgagctgcggaacgcgtcagcccag

SEQ ID NO: 298194 - DNA, 25 bp, Homo sapien
acacctgtcagatcgggcgagctgc

SEQ ID NO: 298195 - DNA, 25 bp, Homo sapien
ctgtcctgattgtgtctctgagttg

SEQ ID NO: 298196 - DNA, 25 bp, Homo sapien
gaatcctgtcctgattgtgtctctg

SEQ ID NO: 298197 - DNA, 25 bp, Homo sapien
tcctgtcctgattgtgtctctgagt

SEQ ID NO: 298198 - DNA, 25 bp, Homo sapien
ggcgtgtcaccggagagtatgggcg

SEQ ID NO: 298199 - DNA, 25 bp, Homo sapien
agggccccgcagaaaacacaggttg

SEQ ID NO: 298200 - DNA, 25 bp, Homo sapien
tttgagaagctaagatcacagacgc

SEQ ID NO: 298201 - DNA, 25 bp, Homo sapien
caaatgaaagctgtgagtgtgtaag

SEQ ID NO: 298202 - DNA, 25 bp, Homo sapien
acagacgtgagcttggatcccaact

SEQ ID NO: 298203 - DNA, 25 bp, Homo sapien
tacgctccgcggatgtgatgggcct

SEQ ID NO: 298204 - DNA, 25 bp, Homo sapien
cacctttaacgtgggtgtctccaca

SEQ ID NO: 298205 - DNA, 25 bp, Homo sapien
tccacctttacgctccgcggatgtg

SEQ ID NO: 298206 - DNA, 25 bp, Homo sapien
tgatgggcctgatgtgtgtacaaca

SEQ ID NO: 298207 - DNA, 25 bp, Homo sapien
caaagaggttagcttgtgaaaggcc

SEQ ID NO: 298208 - DNA, 25 bp, Homo sapien
tataaggatcttatgctgtgggacc

SEQ ID NO: 298209 - DNA, 25 bp, Homo sapien
gccctgtaccccaccttgaatatga

SEQ ID NO: 298210 - DNA, 25 bp, Homo sapien
caataaagctgcagtctcctcaaag

SEQ ID NO: 298211 - DNA, 25 bp, Homo sapien
atctccgacatcaccctcacgttcc

SEQ ID NO: 298212 - DNA, 25 bp, Homo sapien
tccgtcagcatctccgacatcaccc

SEQ ID NO: 298213 - DNA, 25 bp, Homo sapien
ccgacatcaccctcacgttcccact

SEQ ID NO: 298214 - DNA, 25 bp, Homo sapien
gtcagcatctccgacatcaccctca

SEQ ID NO: 298215 - DNA, 25 bp, Homo sapien
ccaggtctgcgggctcggcctgggt

SEQ ID NO: 298216 - DNA, 25 bp, Homo sapien
agggagctgcccggcattgccgact

SEQ ID NO: 298217 - DNA, 25 bp, Homo sapien
gaaggttcctgggtcacggcaggtg

SEQ ID NO: 298218 - DNA, 25 bp, Homo sapien
gctgcccggcattgccgactgtggc

SEQ ID NO: 298219 - DNA, 25 bp, Homo sapien
gtgaaggttcctgggtcacggcagg

SEQ ID NO: 298220 - DNA, 25 bp, Homo sapien
ccgctgctgcatggctcggcacgtg

SEQ ID NO: 298221 - DNA, 25 bp, Homo sapien
aggacccgctgctgcatggctcggc

SEQ ID NO: 298222 - DNA, 25 bp, Homo sapien
tgcatggctcggcacgtgcggttga

SEQ ID NO: 298223 - DNA, 25 bp, Homo sapien
tggctcggcacgtgcggttgagctc

SEQ ID NO: 298224 - DNA, 25 bp, Homo sapien
tgtcattgacgatgagcagctcctc

SEQ ID NO: 298225 - DNA, 25 bp, Homo sapien
cattggcgatctgagggatgagctc

SEQ ID NO: 298226 - DNA, 25 bp, Homo sapien
cacattgttgagattgtcattgacg

SEQ ID NO: 298227 - DNA, 25 bp, Homo sapien
cgttcatggcgcaggaacacattgt

SEQ ID NO: 298228 - DNA, 25 bp, Homo sapien
gaatgatacaaggtgggcaggtggg

SEQ ID NO: 298229 - DNA, 25 bp, Homo sapien
tgaagctcagccaatccaagtctct

SEQ ID NO: 298230 - DNA, 25 bp, Homo sapien
taggcacaatgaagctcagccaatc

SEQ ID NO: 298231 - DNA, 25 bp, Homo sapien
ccagctggtaggcacaatgaagctc

SEQ ID NO: 298232 - DNA, 25 bp, Homo sapien
ggtctggcctgttcggaaccgttca

SEQ ID NO: 298233 - DNA, 25 bp, Homo sapien
tggtctggcctgttcggaaccgttc

SEQ ID NO: 298234 - DNA, 25 bp, Homo sapien
tctggcctgttcggaaccgttcaaa

SEQ ID NO: 298235 - DNA, 25 bp, Homo sapien
gtctggcctgttcggaaccgttcaa

SEQ ID NO: 298236 - DNA, 25 bp, Homo sapien
ggcccatgtcgatcaggtcagctgc

SEQ ID NO: 298237 - DNA, 25 bp, Homo sapien
catgtcgatcaggtcagctgccggc

SEQ ID NO: 298238 - DNA, 25 bp, Homo sapien
ctgggatgagaggttgccggtggct

SEQ ID NO: 298239 - DNA, 25 bp, Homo sapien
gtcagggcccatgtcgatcaggtca

SEQ ID NO: 298240 - DNA, 25 bp, Homo sapien
tcatcttccagtcgaccagaggcct

SEQ ID NO: 298241 - DNA, 25 bp, Homo sapien
aaactcatcttccagtcgaccagag

SEQ ID NO: 298242 - DNA, 25 bp, Homo sapien
ttggtcagccagtgagctgccccgt

SEQ ID NO: 298243 - DNA, 25 bp, Homo sapien
cagcgcaaacatgtcaaactcatct

SEQ ID NO: 298244 - DNA, 25 bp, Homo sapien
gggggcacagattgacggctcccat

SEQ ID NO: 298245 - DNA, 25 bp, Homo sapien
cgatggctgatgcaagaacggagcg

SEQ ID NO: 298246 - DNA, 25 bp, Homo sapien
ggcacagattgacggctcccatcct

SEQ ID NO: 298247 - DNA, 25 bp, Homo sapien
ctgatgcaagaacggagcgggctgg

SEQ ID NO: 298248 - DNA, 25 bp, Homo sapien
gagagaccaccaagccattggatgc

SEQ ID NO: 298249 - DNA, 25 bp, Homo sapien
ccaagccattggatgctgcccttac

SEQ ID NO: 298250 - DNA, 25 bp, Homo sapien
tgaaagagagaccaccaagccattg

SEQ ID NO: 298251 - DNA, 25 bp, Homo sapien
caccaagccattggatgctgccctt

SEQ ID NO: 298252 - DNA, 25 bp, Homo sapien
ctgttgcttggggggcttcgtattt

SEQ ID NO: 298253 - DNA, 25 bp, Homo sapien
tccagccaggccgtctgttgcttgg

SEQ ID NO: 298254 - DNA, 25 bp, Homo sapien
gctctgctgccgggcgtccagggct

SEQ ID NO: 298255 - DNA, 25 bp, Homo sapien
ctctgctgccgggcgtccagggctc

SEQ ID NO: 298256 - DNA, 25 bp, Homo sapien
cactgggtggtagagtcaacctctg

SEQ ID NO: 298257 - DNA, 25 bp, Homo sapien
cacacatgggaggtactggattctc

SEQ ID NO: 298258 - DNA, 25 bp, Homo sapien
agtctctgactggtgtgtgcggtgg

SEQ ID NO: 298259 - DNA, 25 bp, Homo sapien
tgatggcttacacccgaaaaaggac

SEQ ID NO: 298260 - DNA, 25 bp, Homo sapien
gcaaacctgggctgcgcacaattgg

SEQ ID NO: 298261 - DNA, 25 bp, Homo sapien
tcataccctgatttggcagaagtgg

SEQ ID NO: 298262 - DNA, 25 bp, Homo sapien
gtgaaggaactaaaacctggcacac

SEQ ID NO: 298263 - DNA, 25 bp, Homo sapien
ggaatcatgttctcacggtttagtg

SEQ ID NO: 298264 - DNA, 25 bp, Homo sapien
ccagtcactgaggcttttcccgcag

SEQ ID NO: 298265 - DNA, 25 bp, Homo sapien
cagtcactgaggcttttcccgcagc

SEQ ID NO: 298266 - DNA, 25 bp, Homo sapien
tccagtcactgaggcttttcccgca

SEQ ID NO: 298267 - DNA, 25 bp, Homo sapien
atccagtcactgaggcttttcccgc

SEQ ID NO: 298268 - DNA, 25 bp, Homo sapien
cacccttcgggtaggattctaggct

SEQ ID NO: 298269 - DNA, 25 bp, Homo sapien
caaagacatgggctgtgccacgatg

SEQ ID NO: 298270 - DNA, 25 bp, Homo sapien
gagcagaggcgcgaagttaaccaga

SEQ ID NO: 298271 - DNA, 25 bp, Homo sapien
tagcagcagtacttaccgtccaggt

SEQ ID NO: 298272 - DNA, 25 bp, Homo sapien
tggacagccactgctcgatgtcctc

SEQ ID NO: 298273 - DNA, 25 bp, Homo sapien
actgctcgatgtcctccatgaggca

SEQ ID NO: 298274 - DNA, 25 bp, Homo sapien
cacgtcagtggacagccactgctcg

SEQ ID NO: 298275 - DNA, 25 bp, Homo sapien
agccactgctcgatgtcctccatga

SEQ ID NO: 298276 - DNA, 25 bp, Homo sapien
ttcgctggtgacccccttaggctct

SEQ ID NO: 298277 - DNA, 25 bp, Homo sapien
ccttaggctcttccgcatcattacc

SEQ ID NO: 298278 - DNA, 25 bp, Homo sapien
gtgacccccttaggctcttccgcat

SEQ ID NO: 298279 - DNA, 25 bp, Homo sapien
cttcgctggtgacccccttaggctc

SEQ ID NO: 298280 - DNA, 25 bp, Homo sapien
gaggttgggcaatcggtccgcggct

SEQ ID NO: 298281 - DNA, 25 bp, Homo sapien
gctggagaggttgggcaatcggtcc

SEQ ID NO: 298282 - DNA, 25 bp, Homo sapien
agaggttgggcaatcggtccgcggc

SEQ ID NO: 298283 - DNA, 25 bp, Homo sapien
ggagaggttgggcaatcggtccgcg

SEQ ID NO: 298284 - DNA, 25 bp, Homo sapien
acttctcagcaaagtctcatggtca

SEQ ID NO: 298285 - DNA, 25 bp, Homo sapien
agggaggtcccagcctaagggtgtg

SEQ ID NO: 298286 - DNA, 25 bp, Homo sapien
tggggcagctccgtcttcaaagagg

SEQ ID NO: 298287 - DNA, 25 bp, Homo sapien
agatcccactgcagcgcagacctgt

SEQ ID NO: 298288 - DNA, 25 bp, Homo sapien
gaggctcggcagaatttccactgtg

SEQ ID NO: 298289 - DNA, 25 bp, Homo sapien
gagttgcagcttcgtacctgggccg

SEQ ID NO: 298290 - DNA, 25 bp, Homo sapien
ctgatgagatctcgcccactgcgcg

SEQ ID NO: 298291 - DNA, 25 bp, Homo sapien
gatcaaccaagaggtgagccccagt

SEQ ID NO: 298292 - DNA, 25 bp, Homo sapien
cagccttaggccgtcctcacagaga

SEQ ID NO: 298293 - DNA, 25 bp, Homo sapien
ttaggccgtcctcacagagagcctc

SEQ ID NO: 298294 - DNA, 25 bp, Homo sapien
tcagcagccttaggccgtcctcaca

SEQ ID NO: 298295 - DNA, 25 bp, Homo sapien
gccttaggccgtcctcacagagagc

SEQ ID NO: 298296 - DNA, 25 bp, Homo sapien
tacagagcattgtctacatggcagg

SEQ ID NO: 298297 - DNA, 25 bp, Homo sapien
tgttgccaggatcaagacagccctg

SEQ ID NO: 298298 - DNA, 25 bp, Homo sapien
gaccctcttagggttagcagcccag

SEQ ID NO: 298299 - DNA, 25 bp, Homo sapien
aaggcaataccagaggcagagcagg

SEQ ID NO: 298300 - DNA, 25 bp, Homo sapien
ggtccacggtgcacagagggtgcag

SEQ ID NO: 298301 - DNA, 25 bp, Homo sapien
ccacggtgcacagagggtgcagggc

SEQ ID NO: 298302 - DNA, 25 bp, Homo sapien
gcttgggttccttccctctgctggc

SEQ ID NO: 298303 - DNA, 25 bp, Homo sapien
ggatttggggccctggtcagcttgg

SEQ ID NO: 298304 - DNA, 25 bp, Homo sapien
gagatgcccaatgcgtgtgaaggcc

SEQ ID NO: 298305 - DNA, 25 bp, Homo sapien
gtggccgtcgatggagatgcccaat

SEQ ID NO: 298306 - DNA, 25 bp, Homo sapien
tgagcatggctatcttcagctcctg

SEQ ID NO: 298307 - DNA, 25 bp, Homo sapien
ctggccagcagtgagcatggctatc

SEQ ID NO: 298308 - DNA, 25 bp, Homo sapien
caatttgtttgggatccagatggaa

SEQ ID NO: 298309 - DNA, 25 bp, Homo sapien
tcttgtcaggccagtctgagaccag

SEQ ID NO: 298310 - DNA, 25 bp, Homo sapien
caaactgtccaatagtgaggcttca

SEQ ID NO: 298311 - DNA, 25 bp, Homo sapien
catagatttagggagggtgtgccca

SEQ ID NO: 298312 - DNA, 25 bp, Homo sapien
gacacttcgctcctaagagcaagga

SEQ ID NO: 298313 - DNA, 25 bp, Homo sapien
tctcagtccagtcacaattcctcag

SEQ ID NO: 298314 - DNA, 25 bp, Homo sapien
acaatattcgttactctcagtccag

SEQ ID NO: 298315 - DNA, 25 bp, Homo sapien
ggttgtggacatcatgacacttcgc

SEQ ID NO: 298316 - DNA, 25 bp, Homo sapien
ggagagctggcaggacggggcccct

SEQ ID NO: 298317 - DNA, 25 bp, Homo sapien
tccaggaagaagcctgttccttgga

SEQ ID NO: 298318 - DNA, 25 bp, Homo sapien
ccaggaagaagcctgttccttggag

SEQ ID NO: 298319 - DNA, 25 bp, Homo sapien
ggtgcagtggtgtcacacataaagc

SEQ ID NO: 298320 - DNA, 25 bp, Homo sapien
ccagtgtccaaacccagggaggaga

SEQ ID NO: 298321 - DNA, 25 bp, Homo sapien
tggtgtcacacataaagcaggatgc

SEQ ID NO: 298322 - DNA, 25 bp, Homo sapien
gggtagatcgcttctattttacaga

SEQ ID NO: 298323 - DNA, 25 bp, Homo sapien
ttctggccgggcgttgcaacacccg

SEQ ID NO: 298324 - DNA, 25 bp, Homo sapien
tcacatttatgctcggcgggtcacg

SEQ ID NO: 298325 - DNA, 25 bp, Homo sapien
gagccgcggccggtcacatttatgc

SEQ ID NO: 298326 - DNA, 25 bp, Homo sapien
acagctgatgcccactttctggccg

SEQ ID NO: 298327 - DNA, 25 bp, Homo sapien
cgagaggaggcaggcgttgactgcc

SEQ ID NO: 298328 - DNA, 25 bp, Homo sapien
ctgggctcgttcgtgctggctccgc

SEQ ID NO: 298329 - DNA, 25 bp, Homo sapien
gcggcggctgcgctgaggacgctcg

SEQ ID NO: 298330 - DNA, 25 bp, Homo sapien
ccggtgctgggctcgttcgtgctgg

SEQ ID NO: 298331 - DNA, 25 bp, Homo sapien
ttgaagccgtctcgggtcacctggc

SEQ ID NO: 298332 - DNA, 25 bp, Homo sapien
gaaagttcctcatgaactcagcatt

SEQ ID NO: 298333 - DNA, 25 bp, Homo sapien
cttgaagccgtctcgggtcacctgg

SEQ ID NO: 298334 - DNA, 25 bp, Homo sapien
tctgaaagttcctcatgaactcagc

SEQ ID NO: 298335 - DNA, 25 bp, Homo sapien
tggagccgcttcacatagcgctgca

SEQ ID NO: 298336 - DNA, 25 bp, Homo sapien
cacatagatgtggtacagggaggcc

SEQ ID NO: 298337 - DNA, 25 bp, Homo sapien
tgttgagcaggaacgcagtcttggc

SEQ ID NO: 298338 - DNA, 25 bp, Homo sapien
tgactgcgggagtcatctccaggga

SEQ ID NO: 298339 - DNA, 25 bp, Homo sapien
ttgttgctggcccgctggcgaagcc

SEQ ID NO: 298340 - DNA, 25 bp, Homo sapien
gctctggtccttggtgtcatgggtc

SEQ ID NO: 298341 - DNA, 25 bp, Homo sapien
gtccttggtgtcatgggtcagcagc

SEQ ID NO: 298342 - DNA, 25 bp, Homo sapien
ttgctggcccgctggcgaagccctg

SEQ ID NO: 298343 - DNA, 25 bp, Homo sapien
tcataggaaagcaaagcagagcggc

SEQ ID NO: 298344 - DNA, 25 bp, Homo sapien
gaaaacattcttgggcccaggcgtg

SEQ ID NO: 298345 - DNA, 25 bp, Homo sapien
ttattaaaatgtgatagggccgggc

SEQ ID NO: 298346 - DNA, 25 bp, Homo sapien
tcattaacaggtgggcgtgcatcag

SEQ ID NO: 298347 - DNA, 25 bp, Homo sapien
caactgtcgccaccagaaagctgag

SEQ ID NO: 298348 - DNA, 25 bp, Homo sapien
gcataaagccctacagcaactgtcg

SEQ ID NO: 298349 - DNA, 25 bp, Homo sapien
ccctctgggagtctccacgggggca

SEQ ID NO: 298350 - DNA, 25 bp, Homo sapien
ggacccatcggagaagcggagcctg

SEQ ID NO: 298351 - DNA, 25 bp, Homo sapien
tggtcatggccgtgtcaacaaggat

SEQ ID NO: 298352 - DNA, 25 bp, Homo sapien
gccttccaccggacaaagttcatgg

SEQ ID NO: 298353 - DNA, 25 bp, Homo sapien
aaatactgcatttgaggctgagcca

SEQ ID NO: 298354 - DNA, 25 bp, Homo sapien
caggaacagagtggctccaacaaaa

SEQ ID NO: 298355 - DNA, 25 bp, Homo sapien
cagacaatgttgtttattatttcac

SEQ ID NO: 298356 - DNA, 25 bp, Homo sapien
aagttagaccaaggccacagtgccg

SEQ ID NO: 298357 - DNA, 25 bp, Homo sapien
tttcacacaaaagttagaccaaggc

SEQ ID NO: 298358 - DNA, 25 bp, Homo sapien
caaaagttagaccaaggccacagtg

SEQ ID NO: 298359 - DNA, 25 bp, Homo sapien
cggccagcgattggaccgttctgag

SEQ ID NO: 298360 - DNA, 25 bp, Homo sapien
gctcagccgccgagtttcgcgggaa

SEQ ID NO: 298361 - DNA, 25 bp, Homo sapien
gctgcgctcccattggttcgccgga

SEQ ID NO: 298362 - DNA, 25 bp, Homo sapien
cgcccggactgtctgccgaagatga

SEQ ID NO: 298363 - DNA, 25 bp, Homo sapien
ctctggttttccgcacttcacaaac

SEQ ID NO: 298364 - DNA, 25 bp, Homo sapien
gtgggaacaaacggccagaacaggc

SEQ ID NO: 298365 - DNA, 25 bp, Homo sapien
aacggccagaacaggctgggggcag

SEQ ID NO: 298366 - DNA, 25 bp, Homo sapien
gaacaaacggccagaacaggctggg

SEQ ID NO: 298367 - DNA, 25 bp, Homo sapien
ggaacaaacggccagaacaggctgg

SEQ ID NO: 298368 - DNA, 25 bp, Homo sapien
gaaaatgccaggatcgtcgaatccc

SEQ ID NO: 298369 - DNA, 25 bp, Homo sapien
tatttgaaggtgaagcccgtgcggt

SEQ ID NO: 298370 - DNA, 25 bp, Homo sapien
gcaggaactccttgaagcgcctctg

SEQ ID NO: 298371 - DNA, 25 bp, Homo sapien
gaagctgtcgctgtagaaaatgcca

SEQ ID NO: 298372 - DNA, 25 bp, Homo sapien
agcccagcacccagaacagtatctg

SEQ ID NO: 298373 - DNA, 25 bp, Homo sapien
caggtgctcaatcaatgaaggtgca

SEQ ID NO: 298374 - DNA, 25 bp, Homo sapien
aggagccaggtccagcttcagtgct

SEQ ID NO: 298375 - DNA, 25 bp, Homo sapien
aacagtatctggcaggcagcaggtg

SEQ ID NO: 298376 - DNA, 25 bp, Homo sapien
aggttgtaatgccgcttgagttcat

SEQ ID NO: 298377 - DNA, 25 bp, Homo sapien
gttgtaatgccgcttgagttcatcc

SEQ ID NO: 298378 - DNA, 25 bp, Homo sapien
ggttgtaatgccgcttgagttcatc

SEQ ID NO: 298379 - DNA, 25 bp, Homo sapien
ctccacctcaatccagtactccccc

SEQ ID NO: 298380 - DNA, 25 bp, Homo sapien
tctccacctcaatccagtactcccc

SEQ ID NO: 298381 - DNA, 25 bp, Homo sapien
atctccacctcaatccagtactccc

SEQ ID NO: 298382 - DNA, 25 bp, Homo sapien
gcttgtacaagtagtcggccaggtc

SEQ ID NO: 298383 - DNA, 25 bp, Homo sapien
cctcatcaaagctggccagatcctc

SEQ ID NO: 298384 - DNA, 25 bp, Homo sapien
caggtgctcggctggctgcttgtac

SEQ ID NO: 298385 - DNA, 25 bp, Homo sapien
gctcggctggctgcttgtacaagta

SEQ ID NO: 298386 - DNA, 25 bp, Homo sapien
gcacaggctattagtaactggggca

SEQ ID NO: 298387 - DNA, 25 bp, Homo sapien
aagggcacaggctattagtaactgg

SEQ ID NO: 298388 - DNA, 25 bp, Homo sapien
ggcacaggctattagtaactggggc

SEQ ID NO: 298389 - DNA, 25 bp, Homo sapien
agggcacaggctattagtaactggg

SEQ ID NO: 298390 - DNA, 25 bp, Homo sapien
gtccgacttgagcatgacctggatg

SEQ ID NO: 298391 - DNA, 25 bp, Homo sapien
tggcgtccgacttgagcatgacctg

SEQ ID NO: 298392 - DNA, 25 bp, Homo sapien
caggctacgaatgctggaagggctg

SEQ ID NO: 298393 - DNA, 25 bp, Homo sapien
ggctggcgtccgacttgagcatgac

SEQ ID NO: 298394 - DNA, 25 bp, Homo sapien
tttgggtgtgtaatttttcataaca

SEQ ID NO: 298395 - DNA, 25 bp, Homo sapien
caacaaacgatccttttgtctccag

SEQ ID NO: 298396 - DNA, 25 bp, Homo sapien
aaaggtcaagtgcctcactcaaggc

SEQ ID NO: 298397 - DNA, 25 bp, Homo sapien
ggattcattatactactctctgctt

SEQ ID NO: 298398 - DNA, 25 bp, Homo sapien
gaggccagggcgcatggcaatgttg

SEQ ID NO: 298399 - DNA, 25 bp, Homo sapien
agagatgcgggtggccttggcacgg

SEQ ID NO: 298400 - DNA, 25 bp, Homo sapien
cagctgcggcactggatagagatgc

SEQ ID NO: 298401 - DNA, 25 bp, Homo sapien
cacggaccgcagaggccgcgatgat

SEQ ID NO: 298402 - DNA, 25 bp, Homo sapien
tccaatgggcatttggggcgcccag

SEQ ID NO: 298403 - DNA, 25 bp, Homo sapien
gtcgggcatgatgaagtacgggtcc

SEQ ID NO: 298404 - DNA, 25 bp, Homo sapien
tgggggactgcatcaggcagctcct

SEQ ID NO: 298405 - DNA, 25 bp, Homo sapien
aagtccacgcatttgcatttgtcgg

SEQ ID NO: 298406 - DNA, 25 bp, Homo sapien
gcctgactctcgctgaactcgctaa

SEQ ID NO: 298407 - DNA, 25 bp, Homo sapien
ggtccactgcagcatttttgccaca

SEQ ID NO: 298408 - DNA, 25 bp, Homo sapien
tgcttggaggatggtgttgcccaca

SEQ ID NO: 298409 - DNA, 25 bp, Homo sapien
acggagcccagagaacggcctctct

SEQ ID NO: 298410 - DNA, 25 bp, Homo sapien
tagatgcccatgatggtaaccctgt

SEQ ID NO: 298411 - DNA, 25 bp, Homo sapien
ccagggacgaccttgtcacacaggt

SEQ ID NO: 298412 - DNA, 25 bp, Homo sapien
cacggatgtaggagcttcggatgcc

SEQ ID NO: 298413 - DNA, 25 bp, Homo sapien
aacttcttgatggagtagatgccca

SEQ ID NO: 298414 - DNA, 25 bp, Homo sapien
tgggggctcacggccccagcaaagc

SEQ ID NO: 298415 - DNA, 25 bp, Homo sapien
ctcacggccccagcaaagctgcggc

SEQ ID NO: 298416 - DNA, 25 bp, Homo sapien
ctcctgggggctcacggccccagca

SEQ ID NO: 298417 - DNA, 25 bp, Homo sapien
ggctcacggccccagcaaagctgcg

SEQ ID NO: 298418 - DNA, 25 bp, Homo sapien
agatgacctcatagacatttgggag

SEQ ID NO: 298419 - DNA, 25 bp, Homo sapien
ggggcgatgctcttggagatgacct

SEQ ID NO: 298420 - DNA, 25 bp, Homo sapien
atggagggggcgatgctcttggaga

SEQ ID NO: 298421 - DNA, 25 bp, Homo sapien
tctttcgggagcccccaaagagcag

SEQ ID NO: 298422 - DNA, 25 bp, Homo sapien
ctccacaaacttcagaagctgggac

SEQ ID NO: 298423 - DNA, 25 bp, Homo sapien
tgtctcctcggcgagtaagtccatc

SEQ ID NO: 298424 - DNA, 25 bp, Homo sapien
gcatcagcaggttgatgtctcctcg

SEQ ID NO: 298425 - DNA, 25 bp, Homo sapien
tcggcgagtaagtccatcagggagc

SEQ ID NO: 298426 - DNA, 25 bp, Homo sapien
gcaaatggataaactgacgctcagg

SEQ ID NO: 298427 - DNA, 25 bp, Homo sapien
cctgactctcagtacagtgtactcg

SEQ ID NO: 298428 - DNA, 25 bp, Homo sapien
caatttctggccagggtgagaccca

SEQ ID NO: 298429 - DNA, 25 bp, Homo sapien
catcctgaccgcagccaagagaaag

SEQ ID NO: 298430 - DNA, 25 bp, Homo sapien
tggctccgccctccatgatgaaatt

SEQ ID NO: 298431 - DNA, 25 bp, Homo sapien
ggtccctcatcaccgaggctgtcag

SEQ ID NO: 298432 - DNA, 25 bp, Homo sapien
cttgtcaaactcgtcaatacagacg

SEQ ID NO: 298433 - DNA, 25 bp, Homo sapien
ttccgggacgaagggtccctcatca

SEQ ID NO: 298434 - DNA, 25 bp, Homo sapien
ccatggcttcgtggattgccacacg

SEQ ID NO: 298435 - DNA, 25 bp, Homo sapien
ctgctccatggcttcgtggattgcc

SEQ ID NO: 298436 - DNA, 25 bp, Homo sapien
gctccatggcttcgtggattgccac

SEQ ID NO: 298437 - DNA, 25 bp, Homo sapien
tccatggcttcgtggattgccacac

SEQ ID NO: 298438 - DNA, 25 bp, Homo sapien
gatgaagatcatgtcgaagcgcgac

SEQ ID NO: 298439 - DNA, 25 bp, Homo sapien
ggtgggcatgaagtcaatgttgtcc

SEQ ID NO: 298440 - DNA, 25 bp, Homo sapien
atcccagcggccgaacactgagttg

SEQ ID NO: 298441 - DNA, 25 bp, Homo sapien
tcctcattgtgctcatccttgacga

SEQ ID NO: 298442 - DNA, 25 bp, Homo sapien
taggcaataaacttcttcagcttgg

SEQ ID NO: 298443 - DNA, 25 bp, Homo sapien
ggccaggtcaatctcgccctccaca

SEQ ID NO: 298444 - DNA, 25 bp, Homo sapien
cacgtgcagagtgatgacatgcttg

SEQ ID NO: 298445 - DNA, 25 bp, Homo sapien
gtctgtgtcagtgcgctcacgtgca

SEQ ID NO: 298446 - DNA, 25 bp, Homo sapien
tgacgggccccgctccgcatgatga

SEQ ID NO: 298447 - DNA, 25 bp, Homo sapien
cgcatgatgatgtagcggttcttca

SEQ ID NO: 298448 - DNA, 25 bp, Homo sapien
tgtagcggttcttcagtttctctgc

SEQ ID NO: 298449 - DNA, 25 bp, Homo sapien
ggccccgctccgcatgatgatgtag

SEQ ID NO: 298450 - DNA, 25 bp, Homo sapien
agggcttccgcgatgcgcacaatgg

SEQ ID NO: 298451 - DNA, 25 bp, Homo sapien
catctgcctctgtggcgaagggctg

SEQ ID NO: 298452 - DNA, 25 bp, Homo sapien
ctgacagggtaccggacaaggcagc

SEQ ID NO: 298453 - DNA, 25 bp, Homo sapien
aacgtggacacttggaagagccgca

SEQ ID NO: 298454 - DNA, 25 bp, Homo sapien
gccaggccccgaagagtaagtcaga

SEQ ID NO: 298455 - DNA, 25 bp, Homo sapien
ctgggacaatgggagttcttggaca

SEQ ID NO: 298456 - DNA, 25 bp, Homo sapien
gaaaagggcaccgagtgtgccaggg

SEQ ID NO: 298457 - DNA, 25 bp, Homo sapien
ggagaagtgaggcagccggggagct

SEQ ID NO: 298458 - DNA, 25 bp, Homo sapien
ttctcgatgcggctcagcatctcct

SEQ ID NO: 298459 - DNA, 25 bp, Homo sapien
cttgagctgcttctcgatgcggctc

SEQ ID NO: 298460 - DNA, 25 bp, Homo sapien
ctgggagccaatggcaaagcggcgc

SEQ ID NO: 298461 - DNA, 25 bp, Homo sapien
gagccaatggcaaagcggcgcttga

SEQ ID NO: 298462 - DNA, 25 bp, Homo sapien
gtccttgatgatgctgtgctcagac

SEQ ID NO: 298463 - DNA, 25 bp, Homo sapien
ggtgaagtccttgatgatgctgtgc

SEQ ID NO: 298464 - DNA, 25 bp, Homo sapien
ccttgatgatgctgtgctcagacac

SEQ ID NO: 298465 - DNA, 25 bp, Homo sapien
ttggtgaagtccttgatgatgctgt

SEQ ID NO: 298466 - DNA, 25 bp, Homo sapien
ggaatgatggctagaaaaggtctga

SEQ ID NO: 298467 - DNA, 25 bp, Homo sapien
tgtctgctgagtaagatgccagtgc

SEQ ID NO: 298468 - DNA, 25 bp, Homo sapien
tacccccgttcagggcctgtctgct

SEQ ID NO: 298469 - DNA, 25 bp, Homo sapien
ggtgggaaccagcagaagacctgca

SEQ ID NO: 298470 - DNA, 25 bp, Homo sapien
gtttcaccagaatccaaccacctct

SEQ ID NO: 298471 - DNA, 25 bp, Homo sapien
catccctgctcctgatgaagatgtc

SEQ ID NO: 298472 - DNA, 25 bp, Homo sapien
tctcccctccccttcgtgggacaga

SEQ ID NO: 298473 - DNA, 25 bp, Homo sapien
ctcctgatgaagatgtccctaggga

SEQ ID NO: 298474 - DNA, 25 bp, Homo sapien
ggccaacagtaccctcctcagtgag

SEQ ID NO: 298475 - DNA, 25 bp, Homo sapien
gccaacagtaccctcctcagtgagc

SEQ ID NO: 298476 - DNA, 25 bp, Homo sapien
gtcccatctgactctagaaccgaag

SEQ ID NO: 298477 - DNA, 25 bp, Homo sapien
caaggtcacagcaattaagaggtag

SEQ ID NO: 298478 - DNA, 25 bp, Homo sapien
taagcctcagtctgcgcacctatag

SEQ ID NO: 298479 - DNA, 25 bp, Homo sapien
atggctggctaacggcacgtgctgc

SEQ ID NO: 298480 - DNA, 25 bp, Homo sapien
gcatgcgatgctggatctcgccgcg

SEQ ID NO: 298481 - DNA, 25 bp, Homo sapien
ctgcagcaccttgtggatggcgtgc

SEQ ID NO: 298482 - DNA, 25 bp, Homo sapien
ttgaggcggtagagaaccttgcgct

SEQ ID NO: 298483 - DNA, 25 bp, Homo sapien
agcaccttgtggatggcgtgctccg

SEQ ID NO: 298484 - DNA, 25 bp, Homo sapien
cgaggcgtgggcgagtccatgagtc

SEQ ID NO: 298485 - DNA, 25 bp, Homo sapien
agtccatgagtccagtgaggcggcg

SEQ ID NO: 298486 - DNA, 25 bp, Homo sapien
ggcagcaggacactacagctccttc

SEQ ID NO: 298487 - DNA, 25 bp, Homo sapien
cagaggtcccagcaacattgtcaat

SEQ ID NO: 298488 - DNA, 25 bp, Homo sapien
acacaccgtggctttattattaacg

SEQ ID NO: 298489 - DNA, 25 bp, Homo sapien
ttcccagaaccgcgctagaggcggg

SEQ ID NO: 298490 - DNA, 25 bp, Homo sapien
tattattaacggatgccaaaagcac

SEQ ID NO: 298491 - DNA, 25 bp, Homo sapien
acggatgccaaaagcacacttccca

SEQ ID NO: 298492 - DNA, 25 bp, Homo sapien
tgacaggtcaccgagtgcacaaacc

SEQ ID NO: 298493 - DNA, 25 bp, Homo sapien
tgagccccgctaaacagatgaagaa

SEQ ID NO: 298494 - DNA, 25 bp, Homo sapien
gaaaccggagcactcaagtcacgtg

SEQ ID NO: 298495 - DNA, 25 bp, Homo sapien
tcacaactcagggtgaggaatcccc

SEQ ID NO: 298496 - DNA, 25 bp, Homo sapien
ctctattataccaccagaagcaggc

SEQ ID NO: 298497 - DNA, 25 bp, Homo sapien
ttatctccatgacacaaacggatga

SEQ ID NO: 298498 - DNA, 25 bp, Homo sapien
gaaaggcactgacccgacagatcag

SEQ ID NO: 298499 - DNA, 25 bp, Homo sapien
catcaccaggcataaagtgagaggg

SEQ ID NO: 298500 - DNA, 25 bp, Homo sapien
tggtgacttgatactgcctggatcc

SEQ ID NO: 298501 - DNA, 25 bp, Homo sapien
cactttgagccctcaagcttgaggc

SEQ ID NO: 298502 - DNA, 25 bp, Homo sapien
tctatcatgcaaagggaatcaaggg

SEQ ID NO: 298503 - DNA, 25 bp, Homo sapien
gctccaagggttgaagttctatcat

SEQ ID NO: 298504 - DNA, 25 bp, Homo sapien
gaagagcgacttacatacaccaaca

SEQ ID NO: 298505 - DNA, 25 bp, Homo sapien
cattcccaatgaaatgagagacccc

SEQ ID NO: 298506 - DNA, 25 bp, Homo sapien
tacaccaacaatggcaacacgtggc

SEQ ID NO: 298507 - DNA, 25 bp, Homo sapien
ttccagcctgttgcaccaaatgtgc

SEQ ID NO: 298508 - DNA, 25 bp, Homo sapien
acaggctccagtccccggcccagtg

SEQ ID NO: 298509 - DNA, 25 bp, Homo sapien
cacaggctccagtccccggcccagt

SEQ ID NO: 298510 - DNA, 25 bp, Homo sapien
ggctccagtccccggcccagtgcct

SEQ ID NO: 298511 - DNA, 25 bp, Homo sapien
aggctccagtccccggcccagtgcc

SEQ ID NO: 298512 - DNA, 25 bp, Homo sapien
tgcctaaaacgctgctgaactgggc

SEQ ID NO: 298513 - DNA, 25 bp, Homo sapien
tgaactgggctaagatgccagggct

SEQ ID NO: 298514 - DNA, 25 bp, Homo sapien
cattcaatggcaggatttccatgcc

SEQ ID NO: 298515 - DNA, 25 bp, Homo sapien
tcaagaagctgtggaattcagaagc

SEQ ID NO: 298516 - DNA, 25 bp, Homo sapien
gctcccctgggaccgataaatggat

SEQ ID NO: 298517 - DNA, 25 bp, Homo sapien
tgatcacccatgagcaggaactgtg

SEQ ID NO: 298518 - DNA, 25 bp, Homo sapien
tcaggttactgacttgggacttcca

SEQ ID NO: 298519 - DNA, 25 bp, Homo sapien
cattacagcagtgtcccgtgtggca

SEQ ID NO: 298520 - DNA, 25 bp, Homo sapien
caatggagaagaggtgatacgcgac

SEQ ID NO: 298521 - DNA, 25 bp, Homo sapien
ctcagaaaaaatcggcaggaccctg

SEQ ID NO: 298522 - DNA, 25 bp, Homo sapien
cagaaaaaatcggcaggaccctggc

SEQ ID NO: 298523 - DNA, 25 bp, Homo sapien
gcaatggagaagaggtgatacgcga

SEQ ID NO: 298524 - DNA, 25 bp, Homo sapien
atccgtgtactcattccctctgaca

SEQ ID NO: 298525 - DNA, 25 bp, Homo sapien
ccgtgtactcattccctctgacaat

SEQ ID NO: 298526 - DNA, 25 bp, Homo sapien
agggggaatagaacacccatccgtg

SEQ ID NO: 298527 - DNA, 25 bp, Homo sapien
tagaacacccatccgtgtactcatt

SEQ ID NO: 298528 - DNA, 25 bp, Homo sapien
gcacactaggacaaggagcacactt

SEQ ID NO: 298529 - DNA, 25 bp, Homo sapien
agggagcacactaggacaaggagca

SEQ ID NO: 298530 - DNA, 25 bp, Homo sapien
caaggagcacacttgagacagggag

SEQ ID NO: 298531 - DNA, 25 bp, Homo sapien
taggacaaggagcacacttgagaca

SEQ ID NO: 298532 - DNA, 25 bp, Homo sapien
gtatttctaacagccgcatctgacc

SEQ ID NO: 298533 - DNA, 25 bp, Homo sapien
atcttcacatggcccgtaaagccag

SEQ ID NO: 298534 - DNA, 25 bp, Homo sapien
ctggaactggtatttctaacagccg

SEQ ID NO: 298535 - DNA, 25 bp, Homo sapien
gaaactgcaaagagttataacatct

SEQ ID NO: 298536 - DNA, 25 bp, Homo sapien
tctccgcataagcagagagaaagaa

SEQ ID NO: 298537 - DNA, 25 bp, Homo sapien
caaagaggtggtacagattctccgc

SEQ ID NO: 298538 - DNA, 25 bp, Homo sapien
ggtacagattctccgcataagcaga

SEQ ID NO: 298539 - DNA, 25 bp, Homo sapien
cattaagtccccctggcaaagaggt

SEQ ID NO: 298540 - DNA, 25 bp, Homo sapien
aaaagcacaagacagggaaagccca

SEQ ID NO: 298541 - DNA, 25 bp, Homo sapien
ggcagcccacgatggctggtgtgtg

SEQ ID NO: 298542 - DNA, 25 bp, Homo sapien
cggaagagttcccttcgagctgagc

SEQ ID NO: 298543 - DNA, 25 bp, Homo sapien
gaagagttcccttcgagctgagctt

SEQ ID NO: 298544 - DNA, 25 bp, Homo sapien
ctacggaagagttcccttcgagctg

SEQ ID NO: 298545 - DNA, 25 bp, Homo sapien
gagttcccttcgagctgagctttga

SEQ ID NO: 298546 - DNA, 25 bp, Homo sapien
ctagaagtcttcttgggaggaagag

SEQ ID NO: 298547 - DNA, 25 bp, Homo sapien
tagaagtcttcttgggaggaagagc

SEQ ID NO: 298548 - DNA, 25 bp, Homo sapien
gaggtggaataggagggacctcatt

SEQ ID NO: 298549 - DNA, 25 bp, Homo sapien
aggtggaataggagggacctcattt

SEQ ID NO: 298550 - DNA, 25 bp, Homo sapien
taagacatccagttcagaagtcaca

SEQ ID NO: 298551 - DNA, 25 bp, Homo sapien
taccgaaggtcagatgcagtaagac

SEQ ID NO: 298552 - DNA, 25 bp, Homo sapien
aatggaggcttggagcgttgactac

SEQ ID NO: 298553 - DNA, 25 bp, Homo sapien
tgaacagttctcgagctaccgaagg

SEQ ID NO: 298554 - DNA, 25 bp, Homo sapien
ggaggagcaagacccaaggccagca

SEQ ID NO: 298555 - DNA, 25 bp, Homo sapien
aaatctgctgggaggagcaagaccc

SEQ ID NO: 298556 - DNA, 25 bp, Homo sapien
acccaaggccagcaaagagtgggta

SEQ ID NO: 298557 - DNA, 25 bp, Homo sapien
ctgtggagggaacacccaaatctgc

SEQ ID NO: 298558 - DNA, 25 bp, Homo sapien
tccggagacatgacacgaggtccct

SEQ ID NO: 298559 - DNA, 25 bp, Homo sapien
gattctggtacatgctttcacagcg

SEQ ID NO: 298560 - DNA, 25 bp, Homo sapien
acagcggtctgtgcaaggcccttgg

SEQ ID NO: 298561 - DNA, 25 bp, Homo sapien
agaagaagccgtaggtccggagaca

SEQ ID NO: 298562 - DNA, 25 bp, Homo sapien
actcggctgtaatgacaggctgtct

SEQ ID NO: 298563 - DNA, 25 bp, Homo sapien
agtcaaccaggtcacagttccttct

SEQ ID NO: 298564 - DNA, 25 bp, Homo sapien
aaagccgtattcagacacctcctgc

SEQ ID NO: 298565 - DNA, 25 bp, Homo sapien
gtgaactctatattaccatgattgt

SEQ ID NO: 298566 - DNA, 25 bp, Homo sapien
taaggaagttcaggctgtcctgcca

SEQ ID NO: 298567 - DNA, 25 bp, Homo sapien
gccatgtggagaagaactgaccgcc

SEQ ID NO: 298568 - DNA, 25 bp, Homo sapien
ccagccatgatcacgtggagcagga

SEQ ID NO: 298569 - DNA, 25 bp, Homo sapien
gaccatgtggcaagaaaggccatgt

SEQ ID NO: 298570 - DNA, 25 bp, Homo sapien
gcaccgaagaacctgggaattagca

SEQ ID NO: 298571 - DNA, 25 bp, Homo sapien
ctgggaattagcacgaccctccgga

SEQ ID NO: 298572 - DNA, 25 bp, Homo sapien
gaattagcacgaccctccggattct

SEQ ID NO: 298573 - DNA, 25 bp, Homo sapien
taactggagggcaccgaagaacctg

SEQ ID NO: 298574 - DNA, 25 bp, Homo sapien
gacggggacacaccaggtgccttga

SEQ ID NO: 298575 - DNA, 25 bp, Homo sapien
tagtagccagaggtcttcgaggcat

SEQ ID NO: 298576 - DNA, 25 bp, Homo sapien
catgcgagtctcagagaccacggcc

SEQ ID NO: 298577 - DNA, 25 bp, Homo sapien
ctaggcttagtagccagaggtcttc

SEQ ID NO: 298578 - DNA, 25 bp, Homo sapien
gctgatccctccgaaaggtggcaga

SEQ ID NO: 298579 - DNA, 25 bp, Homo sapien
ggtcgctgatccctccgaaaggtgg

SEQ ID NO: 298580 - DNA, 25 bp, Homo sapien
gatccctccgaaaggtggcagaacc

SEQ ID NO: 298581 - DNA, 25 bp, Homo sapien
cgaaaggtggcagaaccccaggctc

SEQ ID NO: 298582 - DNA, 25 bp, Homo sapien
aaggtttcgcagctccaagttagca

SEQ ID NO: 298583 - DNA, 25 bp, Homo sapien
tgaacgccgccccaaggtttcgcag

SEQ ID NO: 298584 - DNA, 25 bp, Homo sapien
gctccaagttagcatcaacccggct

SEQ ID NO: 298585 - DNA, 25 bp, Homo sapien
tccccagatgaggagaactttgtgt

SEQ ID NO: 298586 - DNA, 25 bp, Homo sapien
gggcgaaccctcctggtcgcctatg

SEQ ID NO: 298587 - DNA, 25 bp, Homo sapien
gggcgactccagtgatgaaggagca

SEQ ID NO: 298588 - DNA, 25 bp, Homo sapien
aaggagcagctcctagagacttggg

SEQ ID NO: 298589 - DNA, 25 bp, Homo sapien
tgcgtgtcccaggtgggcgaaccct

SEQ ID NO: 298590 - DNA, 25 bp, Homo sapien
ggtggctcccgggtcactgcgcggg

SEQ ID NO: 298591 - DNA, 25 bp, Homo sapien
ctgcgcggggatcctcccctgcgct

SEQ ID NO: 298592 - DNA, 25 bp, Homo sapien
ctgggaatggcgggccgggcctctg

SEQ ID NO: 298593 - DNA, 25 bp, Homo sapien
tcccctgcgctgctcgggacgccgg

SEQ ID NO: 298594 - DNA, 25 bp, Homo sapien
tgaggtcttggacaacatcccctgt

SEQ ID NO: 298595 - DNA, 25 bp, Homo sapien
catgaggtcttggacaacatcccct

SEQ ID NO: 298596 - DNA, 25 bp, Homo sapien
ggtcttggacaacatcccctgtcat

SEQ ID NO: 298597 - DNA, 25 bp, Homo sapien
cttccatgaggtcttggacaacatc

SEQ ID NO: 298598 - DNA, 25 bp, Homo sapien
tgctccctcccagcctggcttccca

SEQ ID NO: 298599 - DNA, 25 bp, Homo sapien
tggctgctccctcccagcctggctt

SEQ ID NO: 298600 - DNA, 25 bp, Homo sapien
gctgctccctcccagcctggcttcc

SEQ ID NO: 298601 - DNA, 25 bp, Homo sapien
ctggctgctccctcccagcctggct

SEQ ID NO: 298602 - DNA, 25 bp, Homo sapien
tctcccttgagcctctctcccaggg

SEQ ID NO: 298603 - DNA, 25 bp, Homo sapien
gattcaccacttctcccttgagcct

SEQ ID NO: 298604 - DNA, 25 bp, Homo sapien
tggattcaccacttctcccttgagc

SEQ ID NO: 298605 - DNA, 25 bp, Homo sapien
accacttctcccttgagcctctctc

SEQ ID NO: 298606 - DNA, 25 bp, Homo sapien
agcagacagggatgagtttgaagag

SEQ ID NO: 298607 - DNA, 25 bp, Homo sapien
ctcatacagcgaggagcagacaggg

SEQ ID NO: 298608 - DNA, 25 bp, Homo sapien
catacagcgaggagcagacagggat

SEQ ID NO: 298609 - DNA, 25 bp, Homo sapien
cagacagggatgagtttgaagagcc

SEQ ID NO: 298610 - DNA, 25 bp, Homo sapien
tggcaccatgggcaccctcgtaggc

SEQ ID NO: 298611 - DNA, 25 bp, Homo sapien
catgggcaccctcgtaggcacatct

SEQ ID NO: 298612 - DNA, 25 bp, Homo sapien
accatgggcaccctcgtaggcacat

SEQ ID NO: 298613 - DNA, 25 bp, Homo sapien
tgggcaccctcgtaggcacatctct

SEQ ID NO: 298614 - DNA, 25 bp, Homo sapien
tcacatggcctgagccacgtggggc

SEQ ID NO: 298615 - DNA, 25 bp, Homo sapien
gccacgtggggctgtgtgagacatc

SEQ ID NO: 298616 - DNA, 25 bp, Homo sapien
gcctgagccacgtggggctgtgtga

SEQ ID NO: 298617 - DNA, 25 bp, Homo sapien
cacatggcctgagccacgtggggct

SEQ ID NO: 298618 - DNA, 25 bp, Homo sapien
ctgcaacaaagcgagagaagcaggc

SEQ ID NO: 298619 - DNA, 25 bp, Homo sapien
catgtcgccgcggatgttgtatacc

SEQ ID NO: 298620 - DNA, 25 bp, Homo sapien
cggtatgagtttttggcgggcacac

SEQ ID NO: 298621 - DNA, 25 bp, Homo sapien
tgtgtactggtcctcaaagcggcca

SEQ ID NO: 298622 - DNA, 25 bp, Homo sapien
gagacacgatggagctcttgcccac

SEQ ID NO: 298623 - DNA, 25 bp, Homo sapien
gaaggactcccggttatccaggctg

SEQ ID NO: 298624 - DNA, 25 bp, Homo sapien
gaagagcacgtagaacatctcgtcc

SEQ ID NO: 298625 - DNA, 25 bp, Homo sapien
tgaaggcgcttgacctcatcgaagg

SEQ ID NO: 298626 - DNA, 25 bp, Homo sapien
ggaccttggccttgatgtacttgag

SEQ ID NO: 298627 - DNA, 25 bp, Homo sapien
caagcatcaagagagggagcacatc

SEQ ID NO: 298628 - DNA, 25 bp, Homo sapien
caggaggctccatatgacgcagcaa

SEQ ID NO: 298629 - DNA, 25 bp, Homo sapien
tcaatggcggaggtcaatgtctagc

SEQ ID NO: 298630 - DNA, 25 bp, Homo sapien
caattgtctgtaaaccgtggagctc

SEQ ID NO: 298631 - DNA, 25 bp, Homo sapien
atggagaagagaggaaccagaagta

SEQ ID NO: 298632 - DNA, 25 bp, Homo sapien
tggagaagagaggaaccagaagtag

SEQ ID NO: 298633 - DNA, 25 bp, Homo sapien
ctcccaagaatggagaagagaggaa

SEQ ID NO: 298634 - DNA, 25 bp, Homo sapien
ccaagaatggagaagagaggaacca

SEQ ID NO: 298635 - DNA, 25 bp, Homo sapien
ttggagccccagttgagtgggcggc

SEQ ID NO: 298636 - DNA, 25 bp, Homo sapien
cgcaggaggccttccgatgtgcact

SEQ ID NO: 298637 - DNA, 25 bp, Homo sapien
ggagccccagttgagtgggcggcat

SEQ ID NO: 298638 - DNA, 25 bp, Homo sapien
tggagccccagttgagtgggcggca

SEQ ID NO: 298639 - DNA, 25 bp, Homo sapien
gggatttggtttccatcccatgtct

SEQ ID NO: 298640 - DNA, 25 bp, Homo sapien
agggatttggtttccatcccatgtc

SEQ ID NO: 298641 - DNA, 25 bp, Homo sapien
ctaagtagatgcgttgttagaaacc

SEQ ID NO: 298642 - DNA, 25 bp, Homo sapien
ggatttggtttccatcccatgtctt

SEQ ID NO: 298643 - DNA, 25 bp, Homo sapien
tatcctgccaagtttggcttggaaa

SEQ ID NO: 298644 - DNA, 25 bp, Homo sapien
gagtgatccctaaagaatgaagact

SEQ ID NO: 298645 - DNA, 25 bp, Homo sapien
ggatgatcgtattgtctcacaggga

SEQ ID NO: 298646 - DNA, 25 bp, Homo sapien
gctgtcatccaatgtggatgatcgt

SEQ ID NO: 298647 - DNA, 25 bp, Homo sapien
gaggcagggtaatgccacttccagg

SEQ ID NO: 298648 - DNA, 25 bp, Homo sapien
caatggatagcggaacggtgcagtc

SEQ ID NO: 298649 - DNA, 25 bp, Homo sapien
ttggctagaatcctgaccctggctg

SEQ ID NO: 298650 - DNA, 25 bp, Homo sapien
aacactgggatgacgggccgctgac

SEQ ID NO: 298651 - DNA, 25 bp, Homo sapien
tgcagccagggaagcagcagcaagg

SEQ ID NO: 298652 - DNA, 25 bp, Homo sapien
atgcagccagggaagcagcagcaag

SEQ ID NO: 298653 - DNA, 25 bp, Homo sapien
gatgcagccagggaagcagcagcaa

SEQ ID NO: 298654 - DNA, 25 bp, Homo sapien
ctgatgcagccagggaagcagcagc

SEQ ID NO: 298655 - DNA, 25 bp, Homo sapien
cagactctcggaggggccgaacaca

SEQ ID NO: 298656 - DNA, 25 bp, Homo sapien
cggcctgttgctgttccacttgcat

SEQ ID NO: 298657 - DNA, 25 bp, Homo sapien
tccactccacagagggcagactctc

SEQ ID NO: 298658 - DNA, 25 bp, Homo sapien
gggtgccggcctgttgctgttccac

SEQ ID NO: 298659 - DNA, 25 bp, Homo sapien
tctgaacacccaccgagtggccacc

SEQ ID NO: 298660 - DNA, 25 bp, Homo sapien
gtcttcaggattcaccctcaccttg

SEQ ID NO: 298661 - DNA, 25 bp, Homo sapien
tgtcttcaggattcaccctcacctt

SEQ ID NO: 298662 - DNA, 25 bp, Homo sapien
gctccctggctctgaacacccaccg

SEQ ID NO: 298663 - DNA, 25 bp, Homo sapien
tgcagggagcaccaaggaccagaga

SEQ ID NO: 298664 - DNA, 25 bp, Homo sapien
acagtcacggtaatgggacaactat

SEQ ID NO: 298665 - DNA, 25 bp, Homo sapien
tgtgcagggagcaccaaggaccaga

SEQ ID NO: 298666 - DNA, 25 bp, Homo sapien
agtcacggtaatgggacaactatgg

SEQ ID NO: 298667 - DNA, 25 bp, Homo sapien
ggcctcatgggaaggacacgtgctc

SEQ ID NO: 298668 - DNA, 25 bp, Homo sapien
tcatgggaaggacacgtgctcggct

SEQ ID NO: 298669 - DNA, 25 bp, Homo sapien
cacgtgctcggctggatcacctctg

SEQ ID NO: 298670 - DNA, 25 bp, Homo sapien
gaaggacacgtgctcggctggatca

SEQ ID NO: 298671 - DNA, 25 bp, Homo sapien
accagcgtggcatgcctcatcagct

SEQ ID NO: 298672 - DNA, 25 bp, Homo sapien
acttccagattagcagcaagtctga

SEQ ID NO: 298673 - DNA, 25 bp, Homo sapien
catcagctttgggacaaatattctc

SEQ ID NO: 298674 - DNA, 25 bp, Homo sapien
gacaaatattctcccgattttcaca

SEQ ID NO: 298675 - DNA, 25 bp, Homo sapien
tccaaactggctgtaaccccaaatc

SEQ ID NO: 298676 - DNA, 25 bp, Homo sapien
tatctggaacttgtgtgtgcctcct

SEQ ID NO: 298677 - DNA, 25 bp, Homo sapien
aagacagcagaatgtccctttgcaa

SEQ ID NO: 298678 - DNA, 25 bp, Homo sapien
ggtatggcagtgactcacctggttt

SEQ ID NO: 298679 - DNA, 25 bp, Homo sapien
agcggggtctgatctcgtgtagcca

SEQ ID NO: 298680 - DNA, 25 bp, Homo sapien
catatagagtttgcttctgagtgtc

SEQ ID NO: 298681 - DNA, 25 bp, Homo sapien
tgatctcgtgtagccatatagagtt

SEQ ID NO: 298682 - DNA, 25 bp, Homo sapien
gagtgtctgctttgtttagtagagg

SEQ ID NO: 298683 - DNA, 25 bp, Homo sapien
ctggagctgttccggaaggacatgg

SEQ ID NO: 298684 - DNA, 25 bp, Homo sapien
cctggagctgttccggaaggacatg

SEQ ID NO: 298685 - DNA, 25 bp, Homo sapien
tggagctgttccggaaggacatggc

SEQ ID NO: 298686 - DNA, 25 bp, Homo sapien
aagagctccccaaactgtgtcgtat

SEQ ID NO: 298687 - DNA, 25 bp, Homo sapien
cattattagccttcagaagagctcc

SEQ ID NO: 298688 - DNA, 25 bp, Homo sapien
tattagccttcagaagagctcccca

SEQ ID NO: 298689 - DNA, 25 bp, Homo sapien
gtgtcgtatccagttctgtcccagg

SEQ ID NO: 298690 - DNA, 25 bp, Homo sapien
ggtcaagaggcagggcgagccaaat

SEQ ID NO: 298691 - DNA, 25 bp, Homo sapien
tttgtctggcttgaccatgtgtcca

SEQ ID NO: 298692 - DNA, 25 bp, Homo sapien
gaggcagggcgagccaaatgcagca

SEQ ID NO: 298693 - DNA, 25 bp, Homo sapien
tctcagggaagattcggctttgtct

SEQ ID NO: 298694 - DNA, 25 bp, Homo sapien
actgaggagcagcagacctagttct

SEQ ID NO: 298695 - DNA, 25 bp, Homo sapien
gtccacaggccatctgaatctgtgg

SEQ ID NO: 298696 - DNA, 25 bp, Homo sapien
gtggccagggatgaaagtccaccag

SEQ ID NO: 298697 - DNA, 25 bp, Homo sapien
ggatgaaagtccaccaggccactga

SEQ ID NO: 298698 - DNA, 25 bp, Homo sapien
agcgttttgtgaagtggcatgttcc

SEQ ID NO: 298699 - DNA, 25 bp, Homo sapien
tctgggtgccctgagtaccctggct

SEQ ID NO: 298700 - DNA, 25 bp, Homo sapien
gtaccctggcttagcagccactctg

SEQ ID NO: 298701 - DNA, 25 bp, Homo sapien
ccagagacccccgatagcgttttgt

SEQ ID NO: 298702 - DNA, 25 bp, Homo sapien
taacaaaagcagtattctagtatcc

SEQ ID NO: 298703 - DNA, 25 bp, Homo sapien
ggggtgctcttctgtaggagtcagc

SEQ ID NO: 298704 - DNA, 25 bp, Homo sapien
cagtattctagtatccagaaagtcc

SEQ ID NO: 298705 - DNA, 25 bp, Homo sapien
caaaagcagtattctagtatccaga

SEQ ID NO: 298706 - DNA, 25 bp, Homo sapien
aagcaaagctctagggctcttccag

SEQ ID NO: 298707 - DNA, 25 bp, Homo sapien
gcaaagctctagggctcttccagga

SEQ ID NO: 298708 - DNA, 25 bp, Homo sapien
aaaagcaaagctctagggctcttcc

SEQ ID NO: 298709 - DNA, 25 bp, Homo sapien
agcaaagctctagggctcttccagg

SEQ ID NO: 298710 - DNA, 25 bp, Homo sapien
gaacaggaattgattgcaaaactgg

SEQ ID NO: 298711 - DNA, 25 bp, Homo sapien
gcctttgaacaggaattgattgcaa

SEQ ID NO: 298712 - DNA, 25 bp, Homo sapien
agaaagacggataggaagagtaggg

SEQ ID NO: 298713 - DNA, 25 bp, Homo sapien
gaagagtagggtggcctttgaacag

SEQ ID NO: 298714 - DNA, 25 bp, Homo sapien
aagatcctgaacctctgtccttgcc

SEQ ID NO: 298715 - DNA, 25 bp, Homo sapien
tgtccttgcctctccgaggtcccct

SEQ ID NO: 298716 - DNA, 25 bp, Homo sapien
ctcctttgtggccttgggtcccgag

SEQ ID NO: 298717 - DNA, 25 bp, Homo sapien
tcccgagggagaggaagatcctgaa

SEQ ID NO: 298718 - DNA, 25 bp, Homo sapien
gcctctgtggcagcaaatctgtgtc

SEQ ID NO: 298719 - DNA, 25 bp, Homo sapien
tgtgtccccaggagtcaaatgattt

SEQ ID NO: 298720 - DNA, 25 bp, Homo sapien
tggcagcaaatctgtgtccccagga

SEQ ID NO: 298721 - DNA, 25 bp, Homo sapien
gtgtccccaggagtcaaatgatttt

SEQ ID NO: 298722 - DNA, 25 bp, Homo sapien
caaaccaacaccagcctcactttct

SEQ ID NO: 298723 - DNA, 25 bp, Homo sapien
tttctctctccgcctggttgtccat

SEQ ID NO: 298724 - DNA, 25 bp, Homo sapien
cgtaggtgggcagtatgtcttccgc

SEQ ID NO: 298725 - DNA, 25 bp, Homo sapien
tgttgccaaaccttgaccagcggtg

SEQ ID NO: 298726 - DNA, 25 bp, Homo sapien
ggtcatcgccagtgttgttcccgca

SEQ ID NO: 298727 - DNA, 25 bp, Homo sapien
cttggccagtggtcagaagacgctt

SEQ ID NO: 298728 - DNA, 25 bp, Homo sapien
cttccagtaagcctcggtttcgcag

SEQ ID NO: 298729 - DNA, 25 bp, Homo sapien
gtaagcctcggtttcgcaggtccca

SEQ ID NO: 298730 - DNA, 25 bp, Homo sapien
tcgcaggtcccagttaaatccttcc

SEQ ID NO: 298731 - DNA, 25 bp, Homo sapien
ttcgcaggtcccagttaaatccttc

SEQ ID NO: 298732 - DNA, 25 bp, Homo sapien
gacctccaaggccattgtatgccat

SEQ ID NO: 298733 - DNA, 25 bp, Homo sapien
agaaacagaaggcatgccgaggtct

SEQ ID NO: 298734 - DNA, 25 bp, Homo sapien
tttcccagcacataggccttaagga

SEQ ID NO: 298735 - DNA, 25 bp, Homo sapien
acataggccttaaggagcattgaag

SEQ ID NO: 298736 - DNA, 25 bp, Homo sapien
gattgagttgcttacaccacagaaa

SEQ ID NO: 298737 - DNA, 25 bp, Homo sapien
cacttggcgagtgacataacctgtc

SEQ ID NO: 298738 - DNA, 25 bp, Homo sapien
gcaaatagccttccttcagtgtagg

SEQ ID NO: 298739 - DNA, 25 bp, Homo sapien
caattccatcgggttaggacctcac

SEQ ID NO: 298740 - DNA, 25 bp, Homo sapien
cactgcaacctttacagcctgggtt

SEQ ID NO: 298741 - DNA, 25 bp, Homo sapien
tcactgcaacctttacagcctgggt

SEQ ID NO: 298742 - DNA, 25 bp, Homo sapien
ctgcaacctttacagcctgggttca

SEQ ID NO: 298743 - DNA, 25 bp, Homo sapien
actgcaacctttacagcctgggttc

SEQ ID NO: 298744 - DNA, 25 bp, Homo sapien
tcaagacagcacacctagatagact

SEQ ID NO: 298745 - DNA, 25 bp, Homo sapien
tatcagaatgcgtccctgtcaccaa

SEQ ID NO: 298746 - DNA, 25 bp, Homo sapien
taaaggagactgaagggcctcagaa

SEQ ID NO: 298747 - DNA, 25 bp, Homo sapien
cctaagaagtttccctaagcttgag

SEQ ID NO: 298748 - DNA, 25 bp, Homo sapien
taccaaatctcagctaggacaaagt

SEQ ID NO: 298749 - DNA, 25 bp, Homo sapien
caccgatagatttgtcaagggtcag

SEQ ID NO: 298750 - DNA, 25 bp, Homo sapien
tccccttcagatttgactaagacag

SEQ ID NO: 298751 - DNA, 25 bp, Homo sapien
ggctgttttcctaccacttcagagt

SEQ ID NO: 298752 - DNA, 25 bp, Homo sapien
gaacctagtttaagttcagcttcga

SEQ ID NO: 298753 - DNA, 25 bp, Homo sapien
ccttattgtctgtggactaaactgc

SEQ ID NO: 298754 - DNA, 25 bp, Homo sapien
gcactaaaacatcgtgtacacaaca

SEQ ID NO: 298755 - DNA, 25 bp, Homo sapien
atttacatgataaggtacagagagg

SEQ ID NO: 298756 - DNA, 25 bp, Homo sapien
tgagagaggtgacttaactttctaa

SEQ ID NO: 298757 - DNA, 25 bp, Homo sapien
gccttaagatgaggctttgattgtc

SEQ ID NO: 298758 - DNA, 25 bp, Homo sapien
taatttcttgcctagtgcctcagga

SEQ ID NO: 298759 - DNA, 25 bp, Homo sapien
catacacaggaagatacatggatgt

SEQ ID NO: 298760 - DNA, 25 bp, Homo sapien
ctgataatgtacactaagttatatt

SEQ ID NO: 298761 - DNA, 25 bp, Homo sapien
tggaaagcttgtcaaatacaaaagg

SEQ ID NO: 298762 - DNA, 25 bp, Homo sapien
attttggaaagcttgtcaaatacaa

SEQ ID NO: 298763 - DNA, 25 bp, Homo sapien
tgtacactaagttatattagaatta

SEQ ID NO: 298764 - DNA, 25 bp, Homo sapien
cagaaatcttgtacggagactgtgt

SEQ ID NO: 298765 - DNA, 25 bp, Homo sapien
aatcttgtacggagactgtgtacac

SEQ ID NO: 298766 - DNA, 25 bp, Homo sapien
ggtcagaaatcttgtacggagactg

SEQ ID NO: 298767 - DNA, 25 bp, Homo sapien
cttgtacggagactgtgtacacaaa

SEQ ID NO: 298768 - DNA, 25 bp, Homo sapien
tctaccaatgaactgacagcaactc

SEQ ID NO: 298769 - DNA, 25 bp, Homo sapien
tgctagatccctagatgttctccag

SEQ ID NO: 298770 - DNA, 25 bp, Homo sapien
caaagctttaggtgcaacatggtgg

SEQ ID NO: 298771 - DNA, 25 bp, Homo sapien
gctgaccctggtctacaactatgta

SEQ ID NO: 298772 - DNA, 25 bp, Homo sapien
cccatggctccctctaaagttgaac

SEQ ID NO: 298773 - DNA, 25 bp, Homo sapien
taattttcgagtgtcctggcccaga

SEQ ID NO: 298774 - DNA, 25 bp, Homo sapien
cagaattttgtttagtccccatggc

SEQ ID NO: 298775 - DNA, 25 bp, Homo sapien
tatgatgaggcatgttcgactccca

SEQ ID NO: 298776 - DNA, 25 bp, Homo sapien
agctctcagggtcatgaatcggcat

SEQ ID NO: 298777 - DNA, 25 bp, Homo sapien
cccctcaggatggagctctcagggt

SEQ ID NO: 298778 - DNA, 25 bp, Homo sapien
ggatggagctctcagggtcatgaat

SEQ ID NO: 298779 - DNA, 25 bp, Homo sapien
tcaggatggagctctcagggtcatg

SEQ ID NO: 298780 - DNA, 25 bp, Homo sapien
tactgatagacatgagaatctggca

SEQ ID NO: 298781 - DNA, 25 bp, Homo sapien
ggcctgtccacacgttactgataga

SEQ ID NO: 298782 - DNA, 25 bp, Homo sapien
tctcagacggcaaaaatgcaaatga

SEQ ID NO: 298783 - DNA, 25 bp, Homo sapien
gattgagcacctcgaattttgatga

SEQ ID NO: 298784 - DNA, 25 bp, Homo sapien
tagatcagtcgacggtatttcccac

SEQ ID NO: 298785 - DNA, 25 bp, Homo sapien
tatttcccacgtctggtggagcacc

SEQ ID NO: 298786 - DNA, 25 bp, Homo sapien
tcacagggctgtaaggctaagaaca

SEQ ID NO: 298787 - DNA, 25 bp, Homo sapien
tttcaatccgatgggtgttcccggc

SEQ ID NO: 298788 - DNA, 25 bp, Homo sapien
tgaaaggtaggttatgacagcccca

SEQ ID NO: 298789 - DNA, 25 bp, Homo sapien
tctgcagaagcattttgagaagccc

SEQ ID NO: 298790 - DNA, 25 bp, Homo sapien
tgtaaattcgtccaagagacccagg

SEQ ID NO: 298791 - DNA, 25 bp, Homo sapien
tggatgggccatgaacagtctgact

SEQ ID NO: 298792 - DNA, 25 bp, Homo sapien
caaatttccttgtttgccacatggc

SEQ ID NO: 298793 - DNA, 25 bp, Homo sapien
aatttccttgtttgccacatggcat

SEQ ID NO: 298794 - DNA, 25 bp, Homo sapien
ggaacttgcaaatttccttgtttgc

SEQ ID NO: 298795 - DNA, 25 bp, Homo sapien
ttgcaaatttccttgtttgccacat

SEQ ID NO: 298796 - DNA, 25 bp, Homo sapien
acagtgctccgggaaagttggctgt

SEQ ID NO: 298797 - DNA, 25 bp, Homo sapien
gacataacagtgctccgggaaagtt

SEQ ID NO: 298798 - DNA, 25 bp, Homo sapien
gaaaagacataacagtgctccggga

SEQ ID NO: 298799 - DNA, 25 bp, Homo sapien
ctcagcccgaaaagacataacagtg

SEQ ID NO: 298800 - DNA, 25 bp, Homo sapien
agatggacaaggatcagggacattt

SEQ ID NO: 298801 - DNA, 25 bp, Homo sapien
gagatggacaaggatcagggacatt

SEQ ID NO: 298802 - DNA, 25 bp, Homo sapien
ggagatggacaaggatcagggacat

SEQ ID NO: 298803 - DNA, 25 bp, Homo sapien
catttctttacaaccttctcccaag

SEQ ID NO: 298804 - DNA, 25 bp, Homo sapien
agccacatttctttacaaccttctc

SEQ ID NO: 298805 - DNA, 25 bp, Homo sapien
ctttcgaagccacatttctttacaa

SEQ ID NO: 298806 - DNA, 25 bp, Homo sapien
gaagccacatttctttacaaccttc

SEQ ID NO: 298807 - DNA, 25 bp, Homo sapien
cccccagacctcacctccgtagatt

SEQ ID NO: 298808 - DNA, 25 bp, Homo sapien
cccagacctcacctccgtagattac

SEQ ID NO: 298809 - DNA, 25 bp, Homo sapien
ccccagacctcacctccgtagatta

SEQ ID NO: 298810 - DNA, 25 bp, Homo sapien
ctctggcacaggttcacgagtgagg

SEQ ID NO: 298811 - DNA, 25 bp, Homo sapien
ctgtggacagttgacatcaaattgt

SEQ ID NO: 298812 - DNA, 25 bp, Homo sapien
ttttccaactctggcacaggttcac

SEQ ID NO: 298813 - DNA, 25 bp, Homo sapien
ggacagttgacatcaaattgttaat

SEQ ID NO: 298814 - DNA, 25 bp, Homo sapien
cttcaaacagaaagtaggacagcat

SEQ ID NO: 298815 - DNA, 25 bp, Homo sapien
cctctagccgtccagaaagggatgt

SEQ ID NO: 298816 - DNA, 25 bp, Homo sapien
gctgtcacaggtgctagggccaaac

SEQ ID NO: 298817 - DNA, 25 bp, Homo sapien
tcttggtaagcaactcgtgagtggt

SEQ ID NO: 298818 - DNA, 25 bp, Homo sapien
gaccatagccatgaagccagagttg

SEQ ID NO: 298819 - DNA, 25 bp, Homo sapien
ggtgtcctcagtgccacgccagggc

SEQ ID NO: 298820 - DNA, 25 bp, Homo sapien
ggccaggggagaggtgagcgagacc

SEQ ID NO: 298821 - DNA, 25 bp, Homo sapien
tggtggccaagcatccttggggcag

SEQ ID NO: 298822 - DNA, 25 bp, Homo sapien
tcattgtcggtgtcttcccggggcc

SEQ ID NO: 298823 - DNA, 25 bp, Homo sapien
ttgctgctggttttatcattgccac

SEQ ID NO: 298824 - DNA, 25 bp, Homo sapien
gctgctggttttatcattgccacta

SEQ ID NO: 298825 - DNA, 25 bp, Homo sapien
cattgccactagaagtttccctacc

SEQ ID NO: 298826 - DNA, 25 bp, Homo sapien
ttgcctctgttaaatcaaggttcag

SEQ ID NO: 298827 - DNA, 25 bp, Homo sapien
taaacagctgcattgtgaccttgct

SEQ ID NO: 298828 - DNA, 25 bp, Homo sapien
taacccagtcattgagtgagcatca

SEQ ID NO: 298829 - DNA, 25 bp, Homo sapien
tatgtaaccagttccctagtgttag

SEQ ID NO: 298830 - DNA, 25 bp, Homo sapien
tgttttcctacacacaagtttgaga

SEQ ID NO: 298831 - DNA, 25 bp, Homo sapien
taagccgatgagtagtgcagagaga

SEQ ID NO: 298832 - DNA, 25 bp, Homo sapien
ccgatgagtagtgcagagagaactg

SEQ ID NO: 298833 - DNA, 25 bp, Homo sapien
gatccacgggtaagccgatgagtag

SEQ ID NO: 298834 - DNA, 25 bp, Homo sapien
tgagcctggatccacgggtaagccg

SEQ ID NO: 298835 - DNA, 25 bp, Homo sapien
agcctttgcacatggtaatgaagca

SEQ ID NO: 298836 - DNA, 25 bp, Homo sapien
gcgaaggaggagcactgcctcagcc

SEQ ID NO: 298837 - DNA, 25 bp, Homo sapien
aagcgaaggaggagcactgcctcag

SEQ ID NO: 298838 - DNA, 25 bp, Homo sapien
ctaagcgaaggaggagcactgcctc

SEQ ID NO: 298839 - DNA, 25 bp, Homo sapien
gacacgcgtaagctagggctgcaaa

SEQ ID NO: 298840 - DNA, 25 bp, Homo sapien
taagcaatgtccataccccgtcaag

SEQ ID NO: 298841 - DNA, 25 bp, Homo sapien
agaatcacttcctaggacacccgag

SEQ ID NO: 298842 - DNA, 25 bp, Homo sapien
catgggatgcttgtgtaatcgacca

SEQ ID NO: 298843 - DNA, 25 bp, Homo sapien
tctgggtgtcctaagccagcgtgtg

SEQ ID NO: 298844 - DNA, 25 bp, Homo sapien
cagcgtgtgccctctggtttagtga

SEQ ID NO: 298845 - DNA, 25 bp, Homo sapien
tgaggctaacagaccagactgcagc

SEQ ID NO: 298846 - DNA, 25 bp, Homo sapien
tacttgctttactgatcagccaggc

SEQ ID NO: 298847 - DNA, 25 bp, Homo sapien
tgaggcctccaaaggcaagctctgt

SEQ ID NO: 298848 - DNA, 25 bp, Homo sapien
tcttgagcttgaggcaccttgagtg

SEQ ID NO: 298849 - DNA, 25 bp, Homo sapien
tgagtgcatctcagttcagctggtt

SEQ ID NO: 298850 - DNA, 25 bp, Homo sapien
cgtattcagtggagactaggccaaa

SEQ ID NO: 298851 - DNA, 25 bp, Homo sapien
gatgtcaaggaagctagaggcctcg

SEQ ID NO: 298852 - DNA, 25 bp, Homo sapien
tgtctcgcctcgtaactgggagaga

SEQ ID NO: 298853 - DNA, 25 bp, Homo sapien
gaggcctcgatgcaattattactga

SEQ ID NO: 298854 - DNA, 25 bp, Homo sapien
tgatatatctgagagggcgttgacc

SEQ ID NO: 298855 - DNA, 25 bp, Homo sapien
cacccggaccactttgtacacatta

SEQ ID NO: 298856 - DNA, 25 bp, Homo sapien
gcctgtggctatcccgctgagcttc

SEQ ID NO: 298857 - DNA, 25 bp, Homo sapien
tatccacagtcttgagcctgtggct

SEQ ID NO: 298858 - DNA, 25 bp, Homo sapien
gctgagcacccggaccactttgtac

SEQ ID NO: 298859 - DNA, 25 bp, Homo sapien
ggagccgataaatgcatctgatcag

SEQ ID NO: 298860 - DNA, 25 bp, Homo sapien
tatttccaaacgtgctctcagacag

SEQ ID NO: 298861 - DNA, 25 bp, Homo sapien
tatcaatcacggaagaggcagtcaa

SEQ ID NO: 298862 - DNA, 25 bp, Homo sapien
aatcatcttacacgcacagcctgag

SEQ ID NO: 298863 - DNA, 25 bp, Homo sapien
tgacttatcaaagaaggaaaccgct

SEQ ID NO: 298864 - DNA, 25 bp, Homo sapien
ttcttagtgctgatattcttgagcc

SEQ ID NO: 298865 - DNA, 25 bp, Homo sapien
gagaggaatacatccatgatacaca

SEQ ID NO: 298866 - DNA, 25 bp, Homo sapien
gagtagtcattagtgaattaccaag

SEQ ID NO: 298867 - DNA, 25 bp, Homo sapien
gaatcggagcttgaagagaagacac

SEQ ID NO: 298868 - DNA, 25 bp, Homo sapien
tctgtattccacatgtgagggagca

SEQ ID NO: 298869 - DNA, 25 bp, Homo sapien
tatgaaaagtgcaccgaatcggagc

SEQ ID NO: 298870 - DNA, 25 bp, Homo sapien
cagtagaaaaggcatagttcgccct

SEQ ID NO: 298871 - DNA, 25 bp, Homo sapien
cagagggcggacagtatatggtgca

SEQ ID NO: 298872 - DNA, 25 bp, Homo sapien
ccacggcagccgctttcagaggagc

SEQ ID NO: 298873 - DNA, 25 bp, Homo sapien
gcagtccgagcggtacctccaacag

SEQ ID NO: 298874 - DNA, 25 bp, Homo sapien
gcagccgctttcagaggagcccatt

SEQ ID NO: 298875 - DNA, 25 bp, Homo sapien
ctgtttctcagcagcttgcattgta

SEQ ID NO: 298876 - DNA, 25 bp, Homo sapien
cagagcttcttgacctgtttctcag

SEQ ID NO: 298877 - DNA, 25 bp, Homo sapien
tcagagcttcttgacctgtttctca

SEQ ID NO: 298878 - DNA, 25 bp, Homo sapien
gacctgtttctcagcagcttgcatt

SEQ ID NO: 298879 - DNA, 25 bp, Homo sapien
aataggctcttagaaattgtctgcc

SEQ ID NO: 298880 - DNA, 25 bp, Homo sapien
gacagggtaggagttgtttccctca

SEQ ID NO: 298881 - DNA, 25 bp, Homo sapien
catagtaacattgggaagcaaggtt

SEQ ID NO: 298882 - DNA, 25 bp, Homo sapien
ccagcaagaggtataattaaacagg

SEQ ID NO: 298883 - DNA, 25 bp, Homo sapien
tactcagagggaaatataagccaaa

SEQ ID NO: 298884 - DNA, 25 bp, Homo sapien
taaagatagtaggtgattcagtcca

SEQ ID NO: 298885 - DNA, 25 bp, Homo sapien
tcgtcttaaccataaaaggagtgtg

SEQ ID NO: 298886 - DNA, 25 bp, Homo sapien
tataggataagcataaatgccctcc

SEQ ID NO: 298887 - DNA, 25 bp, Homo sapien
gacactctacggaagtacgcaagcc

SEQ ID NO: 298888 - DNA, 25 bp, Homo sapien
tccgcagaatggaattcccacagag

SEQ ID NO: 298889 - DNA, 25 bp, Homo sapien
tgccacacactcaagactatgccgg

SEQ ID NO: 298890 - DNA, 25 bp, Homo sapien
gacaacaactcctgacgcaatggtt

SEQ ID NO: 298891 - DNA, 25 bp, Homo sapien
gctctctagcccaacaaagcagttt

SEQ ID NO: 298892 - DNA, 25 bp, Homo sapien
aagcagtttgctgtaatgtgcacac

SEQ ID NO: 298893 - DNA, 25 bp, Homo sapien
tgtgggattctacattgtacaggac

SEQ ID NO: 298894 - DNA, 25 bp, Homo sapien
ggactgtctccacccatcataatga

SEQ ID NO: 298895 - DNA, 25 bp, Homo sapien
tggtcacctgactgttgttcgctaa

SEQ ID NO: 298896 - DNA, 25 bp, Homo sapien
gggcactccggactgtgaaaatgat

SEQ ID NO: 298897 - DNA, 25 bp, Homo sapien
aaaatgatgaccactgctgcaaact

SEQ ID NO: 298898 - DNA, 25 bp, Homo sapien
tgttcgctaacatagagcaactgtg

SEQ ID NO: 298899 - DNA, 25 bp, Homo sapien
taccattcctctccgggatctgaca

SEQ ID NO: 298900 - DNA, 25 bp, Homo sapien
tctccgggatctgacattattggta

SEQ ID NO: 298901 - DNA, 25 bp, Homo sapien
gatctgacattattggtatcccaca

SEQ ID NO: 298902 - DNA, 25 bp, Homo sapien
ttctggtataccattcctctccggg

SEQ ID NO: 298903 - DNA, 25 bp, Homo sapien
ctgctgccagttcgctcttctgttc

SEQ ID NO: 298904 - DNA, 25 bp, Homo sapien
ctgagctgctgccagttcgctcttc

SEQ ID NO: 298905 - DNA, 25 bp, Homo sapien
gagctgctgccagttcgctcttctg

SEQ ID NO: 298906 - DNA, 25 bp, Homo sapien
gctgctgccagttcgctcttctgtt

SEQ ID NO: 298907 - DNA, 25 bp, Homo sapien
agagagccagctagttatcaggatg

SEQ ID NO: 298908 - DNA, 25 bp, Homo sapien
tattttcccattgggacccagagga

SEQ ID NO: 298909 - DNA, 25 bp, Homo sapien
ttagttatataatgccctgcagtgc

SEQ ID NO: 298910 - DNA, 25 bp, Homo sapien
tactgctttatgctctcggccttag

SEQ ID NO: 298911 - DNA, 25 bp, Homo sapien
gaccctgtggggatttgtctacctc

SEQ ID NO: 298912 - DNA, 25 bp, Homo sapien
gtttcctgtactgtgcagctgtagc

SEQ ID NO: 298913 - DNA, 25 bp, Homo sapien
gggatttgtctacctctttgtcttg

SEQ ID NO: 298914 - DNA, 25 bp, Homo sapien
cagctgtagctcaggaaagaccctg

SEQ ID NO: 298915 - DNA, 25 bp, Homo sapien
tacccacccttaaatagctagattg

SEQ ID NO: 298916 - DNA, 25 bp, Homo sapien
catctatccgtttggtttatggaga

SEQ ID NO: 298917 - DNA, 25 bp, Homo sapien
ggtataaagagagatcaattaccca

SEQ ID NO: 298918 - DNA, 25 bp, Homo sapien
cagcacggctgctttgaaaggttta

SEQ ID NO: 298919 - DNA, 25 bp, Homo sapien
tgtaaggcatgagcatagtgaacac

SEQ ID NO: 298920 - DNA, 25 bp, Homo sapien
ttttgaacgcaagagaatggcttct

SEQ ID NO: 298921 - DNA, 25 bp, Homo sapien
tagtgaacacaatccaagaagaggg

SEQ ID NO: 298922 - DNA, 25 bp, Homo sapien
cctggccgcctttttggattagctt

SEQ ID NO: 298923 - DNA, 25 bp, Homo sapien
gatggcagtatgtctcttgagcaaa

SEQ ID NO: 298924 - DNA, 25 bp, Homo sapien
tacagtccgttgcaaagatggcagt

SEQ ID NO: 298925 - DNA, 25 bp, Homo sapien
ccagatgtctggaattgcaggaacc

SEQ ID NO: 298926 - DNA, 25 bp, Homo sapien
taagggagcctactagatgtgatgc

SEQ ID NO: 298927 - DNA, 25 bp, Homo sapien
ccgctgagtttgagcagcccgatct

SEQ ID NO: 298928 - DNA, 25 bp, Homo sapien
cagcccgatctgacatgatgtacct

SEQ ID NO: 298929 - DNA, 25 bp, Homo sapien
gagcagcccgatctgacatgatgta

SEQ ID NO: 298930 - DNA, 25 bp, Homo sapien
caggatccactgaccgctgagtttg

SEQ ID NO: 298931 - DNA, 25 bp, Homo sapien
tctatctgacgagtagtggaacaca

SEQ ID NO: 298932 - DNA, 25 bp, Homo sapien
ggtgaatgttcctcaagtcagtggg

SEQ ID NO: 298933 - DNA, 25 bp, Homo sapien
tcttgttggacgagactgggaaacc

SEQ ID NO: 298934 - DNA, 25 bp, Homo sapien
tgttgtcaaccaccttggacgcgtg

SEQ ID NO: 298935 - DNA, 25 bp, Homo sapien
caaacctgataacaatgattttctg

SEQ ID NO: 298936 - DNA, 25 bp, Homo sapien
cagctgcaacaagaagcatgagcca

SEQ ID NO: 298937 - DNA, 25 bp, Homo sapien
agctgcaacaagaagcatgagccac

SEQ ID NO: 298938 - DNA, 25 bp, Homo sapien
cactgcaccaaacctgataacaatg

SEQ ID NO: 298939 - DNA, 25 bp, Homo sapien
taacaacttaatccctgagatcaca

SEQ ID NO: 298940 - DNA, 25 bp, Homo sapien
tgagatgggatatgggtcatgccac

SEQ ID NO: 298941 - DNA, 25 bp, Homo sapien
tcatgccactgctagtgaaaggaaa

SEQ ID NO: 298942 - DNA, 25 bp, Homo sapien
ggagtgtaacgataccagcagctaa

SEQ ID NO: 298943 - DNA, 25 bp, Homo sapien
tagcagtcactcccctactttccat

SEQ ID NO: 298944 - DNA, 25 bp, Homo sapien
gagcagaattgcttcctacgagaca

SEQ ID NO: 298945 - DNA, 25 bp, Homo sapien
ggaattcagccttatggttttaatc

SEQ ID NO: 298946 - DNA, 25 bp, Homo sapien
tgcctgcacagagtttttgagtcct

SEQ ID NO: 298947 - DNA, 25 bp, Homo sapien
ccctattatgggtcagagcagaatt

SEQ ID NO: 298948 - DNA, 25 bp, Homo sapien
cgggacagccaggttggtatctgct

SEQ ID NO: 298949 - DNA, 25 bp, Homo sapien
gtttgtaactcagatgatgtatgtg

SEQ ID NO: 298950 - DNA, 25 bp, Homo sapien
atcatggattcccagcgcgggacag

SEQ ID NO: 298951 - DNA, 25 bp, Homo sapien
ggtgtgtttcatcaaagggttgcta

SEQ ID NO: 298952 - DNA, 25 bp, Homo sapien
ttaccatggagatggtagctgtgtg

SEQ ID NO: 298953 - DNA, 25 bp, Homo sapien
cagattccatggaccagcccaggaa

SEQ ID NO: 298954 - DNA, 25 bp, Homo sapien
agagcagcagggtttagaattccag

SEQ ID NO: 298955 - DNA, 25 bp, Homo sapien
caggttcctgttgaaagcatcgtct

SEQ ID NO: 298956 - DNA, 25 bp, Homo sapien
agggtctcagccactaacagcttca

SEQ ID NO: 298957 - DNA, 25 bp, Homo sapien
cttcattgagggtctcagccactaa

SEQ ID NO: 298958 - DNA, 25 bp, Homo sapien
ggtctcagccactaacagcttcatt

SEQ ID NO: 298959 - DNA, 25 bp, Homo sapien
attgagggtctcagccactaacagc

SEQ ID NO: 298960 - DNA, 25 bp, Homo sapien
tcttccggtggctcctcatagactg

SEQ ID NO: 298961 - DNA, 25 bp, Homo sapien
cgatcttccggtggctcctcataga

SEQ ID NO: 298962 - DNA, 25 bp, Homo sapien
ccattccgatcttccggtggctcct

SEQ ID NO: 298963 - DNA, 25 bp, Homo sapien
tccgatcttccggtggctcctcata

SEQ ID NO: 298964 - DNA, 25 bp, Homo sapien
tgatggtcagagtccagtggctaaa

SEQ ID NO: 298965 - DNA, 25 bp, Homo sapien
gcctctgatgatggtcagagtccag

SEQ ID NO: 298966 - DNA, 25 bp, Homo sapien
tttcagtattacttggaacaattcg

SEQ ID NO: 298967 - DNA, 25 bp, Homo sapien
gtattacttggaacaattcgattca

SEQ ID NO: 298968 - DNA, 25 bp, Homo sapien
caacctcatggatactccagagctg

SEQ ID NO: 298969 - DNA, 25 bp, Homo sapien
acctcatggatactccagagctggc

SEQ ID NO: 298970 - DNA, 25 bp, Homo sapien
tttcaacctcatggatactccagag

SEQ ID NO: 298971 - DNA, 25 bp, Homo sapien
cctttcaacctcatggatactccag

SEQ ID NO: 298972 - DNA, 25 bp, Homo sapien
agtagtacctatgcaacagtgtgtg

SEQ ID NO: 298973 - DNA, 25 bp, Homo sapien
tatgacaacaggtatgccactatgc

SEQ ID NO: 298974 - DNA, 25 bp, Homo sapien
gcttttagtctacatatctttcatc

SEQ ID NO: 298975 - DNA, 25 bp, Homo sapien
ttgatcaacgttttgtagcttttag

SEQ ID NO: 298976 - DNA, 25 bp, Homo sapien
atctcttctgacgacgaactagtac

SEQ ID NO: 298977 - DNA, 25 bp, Homo sapien
cgcagtctctgtggcccgagtcaca

SEQ ID NO: 298978 - DNA, 25 bp, Homo sapien
ccaagtagtgaatggaagccggcag

SEQ ID NO: 298979 - DNA, 25 bp, Homo sapien
gtaggtgaattaggcccgcgcagtc

SEQ ID NO: 298980 - DNA, 25 bp, Homo sapien
cacccggtgtaaagtttccaggcat

SEQ ID NO: 298981 - DNA, 25 bp, Homo sapien
cttaggctcagaaggaaccctagga

SEQ ID NO: 298982 - DNA, 25 bp, Homo sapien
gaaacgccagagagtctgtgatgct

SEQ ID NO: 298983 - DNA, 25 bp, Homo sapien
cagtatacagaaacttgatgtaggt

SEQ ID NO: 298984 - DNA, 25 bp, Homo sapien
gcttttgttataatccttaggctca

SEQ ID NO: 298985 - DNA, 25 bp, Homo sapien
cacacagagtgtgagaagtacaagg

SEQ ID NO: 298986 - DNA, 25 bp, Homo sapien
caaaatagctctttaatgtcccggg

SEQ ID NO: 298987 - DNA, 25 bp, Homo sapien
gggacacggtggtgctcagtctcat

SEQ ID NO: 298988 - DNA, 25 bp, Homo sapien
tgcattctacatcaccaggacacaa

SEQ ID NO: 298989 - DNA, 25 bp, Homo sapien
ggggcgggggcaggcgcgcgcccgc

SEQ ID NO: 298990 - DNA, 25 bp, Homo sapien
gcgggggcgggggcaggcgcgcgcc

SEQ ID NO: 298991 - DNA, 25 bp, Homo sapien
gaagtctatgtcctacaaaatccag

SEQ ID NO: 298992 - DNA, 25 bp, Homo sapien
tctggacatgaagtctatgtcctac

SEQ ID NO: 298993 - DNA, 25 bp, Homo sapien
ccagaggttcaaacgaagcagaatc

SEQ ID NO: 298994 - DNA, 25 bp, Homo sapien
gccaggataggtttggcagccccac

SEQ ID NO: 298995 - DNA, 25 bp, Homo sapien
tcgcagtggttgacgctggccacag

SEQ ID NO: 298996 - DNA, 25 bp, Homo sapien
tatgtcgcagtggttgacgctggcc

SEQ ID NO: 298997 - DNA, 25 bp, Homo sapien
tgtcgcagtggttgacgctggccac

SEQ ID NO: 298998 - DNA, 25 bp, Homo sapien
ttatatgtcgcagtggttgacgctg

SEQ ID NO: 298999 - DNA, 25 bp, Homo sapien
ttcccctgatatcttgtgatcaggg

SEQ ID NO: 299000 - DNA, 25 bp, Homo sapien
tcagggcatcgcaggtctggcccag

SEQ ID NO: 299001 - DNA, 25 bp, Homo sapien
ttgtgatcagggcatcgcaggtctg

SEQ ID NO: 299002 - DNA, 25 bp, Homo sapien
tatcttgtgatcagggcatcgcagg

SEQ ID NO: 299003 - DNA, 25 bp, Homo sapien
tgccctagacctggagatgttgctg

SEQ ID NO: 299004 - DNA, 25 bp, Homo sapien
acggtgccctttgcttggtaccaca

SEQ ID NO: 299005 - DNA, 25 bp, Homo sapien
cacacactgtttgccctagacctgg

SEQ ID NO: 299006 - DNA, 25 bp, Homo sapien
ggggctgctgtacatcctggctcca

SEQ ID NO: 299007 - DNA, 25 bp, Homo sapien
caggcaccccggctcctcctcattc

SEQ ID NO: 299008 - DNA, 25 bp, Homo sapien
tcattcccctctggcttctcccttc

SEQ ID NO: 299009 - DNA, 25 bp, Homo sapien
tcctcattcccctctggcttctccc

SEQ ID NO: 299010 - DNA, 25 bp, Homo sapien
aggcaccccggctcctcctcattcc

SEQ ID NO: 299011 - DNA, 25 bp, Homo sapien
cttggaggacaggcggtcggagccg

SEQ ID NO: 299012 - DNA, 25 bp, Homo sapien
tcggcacacgcatcgtgctgtcggc

SEQ ID NO: 299013 - DNA, 25 bp, Homo sapien
gtgttgccaacagcctcggcagagc

SEQ ID NO: 299014 - DNA, 25 bp, Homo sapien
gctgcagtagaaaagcgggcgcact

SEQ ID NO: 299015 - DNA, 25 bp, Homo sapien
tagccaagcctcgtgctgaattttg

SEQ ID NO: 299016 - DNA, 25 bp, Homo sapien
caggcagccagtgaggttctgagta

SEQ ID NO: 299017 - DNA, 25 bp, Homo sapien
gcttagagtctcttctgctgatccc

SEQ ID NO: 299018 - DNA, 25 bp, Homo sapien
tgaactggaaactcaagctgtccac

SEQ ID NO: 299019 - DNA, 25 bp, Homo sapien
gagttgggattgcaaacccagaggc

SEQ ID NO: 299020 - DNA, 25 bp, Homo sapien
tattgtccccatttgacgaagaaga

SEQ ID NO: 299021 - DNA, 25 bp, Homo sapien
tgataatagctggatctcactggcc

SEQ ID NO: 299022 - DNA, 25 bp, Homo sapien
ccttgggttgttggcgaccagcatc

SEQ ID NO: 299023 - DNA, 25 bp, Homo sapien
ttggagtccttgttcccctgaggaa

SEQ ID NO: 299024 - DNA, 25 bp, Homo sapien
tcatggtgtctgacccaaagatcac

SEQ ID NO: 299025 - DNA, 25 bp, Homo sapien
gatgacaatgccatgggacacaggc

SEQ ID NO: 299026 - DNA, 25 bp, Homo sapien
gaatgttggccggagaccacagaat

SEQ ID NO: 299027 - DNA, 25 bp, Homo sapien
taaatgacgctcagttgcgatctgc

SEQ ID NO: 299028 - DNA, 25 bp, Homo sapien
tcctctcgagctgagatccagaaag

SEQ ID NO: 299029 - DNA, 25 bp, Homo sapien
tcaaactcctctcgagctgagatcc

SEQ ID NO: 299030 - DNA, 25 bp, Homo sapien
aactcctctcgagctgagatccaga

SEQ ID NO: 299031 - DNA, 25 bp, Homo sapien
aaactcctctcgagctgagatccag

SEQ ID NO: 299032 - DNA, 25 bp, Homo sapien
ccatactgacttgaacactggctgt

SEQ ID NO: 299033 - DNA, 25 bp, Homo sapien
tgacagcgagctctttctcctgctg

SEQ ID NO: 299034 - DNA, 25 bp, Homo sapien
tcagctcttcggagctttgacagcg

SEQ ID NO: 299035 - DNA, 25 bp, Homo sapien
tgcagttcactctcaaggccatact

SEQ ID NO: 299036 - DNA, 25 bp, Homo sapien
cctggctcctttctcgctttgggag

SEQ ID NO: 299037 - DNA, 25 bp, Homo sapien
ctcgctttgggagcaagttcctgtc

SEQ ID NO: 299038 - DNA, 25 bp, Homo sapien
agcaggaggacttgacaaatgtcag

SEQ ID NO: 299039 - DNA, 25 bp, Homo sapien
caggatacactgagggaacgatgac

SEQ ID NO: 299040 - DNA, 25 bp, Homo sapien
tgtgttcttgagtccgtctggttgg

SEQ ID NO: 299041 - DNA, 25 bp, Homo sapien
acccagtctttacaccttagtagat

SEQ ID NO: 299042 - DNA, 25 bp, Homo sapien
gatttctgagattgggcaagtcgct

SEQ ID NO: 299043 - DNA, 25 bp, Homo sapien
ggcaagtcgctgaacatctgtttca

SEQ ID NO: 299044 - DNA, 25 bp, Homo sapien
tctttttgaatcttgtcctagagtt

SEQ ID NO: 299045 - DNA, 25 bp, Homo sapien
ctttttgaatcttgtcctagagttg

SEQ ID NO: 299046 - DNA, 25 bp, Homo sapien
ggggtgtcactatgtggcccatact

SEQ ID NO: 299047 - DNA, 25 bp, Homo sapien
ggtgggcaaccgtagagtcatttga

SEQ ID NO: 299048 - DNA, 25 bp, Homo sapien
gattatgaagctcgtttggaaccag

SEQ ID NO: 299049 - DNA, 25 bp, Homo sapien
tctgtctagtgtgtagcctgagaac

SEQ ID NO: 299050 - DNA, 25 bp, Homo sapien
tacatcgggataatcagagtactgc

SEQ ID NO: 299051 - DNA, 25 bp, Homo sapien
acaagttaactttgacaaagttatg

SEQ ID NO: 299052 - DNA, 25 bp, Homo sapien
ctttgacaaagttatgtaattattt

SEQ ID NO: 299053 - DNA, 25 bp, Homo sapien
taactttgacaaagttatgtaatta

SEQ ID NO: 299054 - DNA, 25 bp, Homo sapien
tgacaaagttatgtaattattttta

SEQ ID NO: 299055 - DNA, 25 bp, Homo sapien
tggtatggctcacaaatataggaca

SEQ ID NO: 299056 - DNA, 25 bp, Homo sapien
tacagaggctgaccaattttcgaag

SEQ ID NO: 299057 - DNA, 25 bp, Homo sapien
tataaagccatggttggatctgcag

SEQ ID NO: 299058 - DNA, 25 bp, Homo sapien
tgccctgggattgtaacgattttta

SEQ ID NO: 299059 - DNA, 25 bp, Homo sapien
tcctggctctcggtctttaacataa

SEQ ID NO: 299060 - DNA, 25 bp, Homo sapien
ctggctctcggtctttaacataaaa

SEQ ID NO: 299061 - DNA, 25 bp, Homo sapien
cctggctctcggtctttaacataaa

SEQ ID NO: 299062 - DNA, 25 bp, Homo sapien
cagtagttatgagcgcccctgtgaa

SEQ ID NO: 299063 - DNA, 25 bp, Homo sapien
gaaattttcgttgatgcacaaggca

SEQ ID NO: 299064 - DNA, 25 bp, Homo sapien
ggtaattgatactcccaaagctgag

SEQ ID NO: 299065 - DNA, 25 bp, Homo sapien
gacaattgacaagtggtggccatgg

SEQ ID NO: 299066 - DNA, 25 bp, Homo sapien
atggagttacatgaactaacctagg

SEQ ID NO: 299067 - DNA, 25 bp, Homo sapien
tgttttaatatcataagctacatta

SEQ ID NO: 299068 - DNA, 25 bp, Homo sapien
ttacatgaactaacctaggcatttt

SEQ ID NO: 299069 - DNA, 25 bp, Homo sapien
tttcagtgccttgttttaatatcat

SEQ ID NO: 299070 - DNA, 25 bp, Homo sapien
taagagatgataaagtggatgaccc

SEQ ID NO: 299071 - DNA, 25 bp, Homo sapien
gaaacaaccaatgaacctgcagcat

SEQ ID NO: 299072 - DNA, 25 bp, Homo sapien
caaactcataggtctgatgccctga

SEQ ID NO: 299073 - DNA, 25 bp, Homo sapien
tattcaacattgaagccgggccggg

SEQ ID NO: 299074 - DNA, 25 bp, Homo sapien
actctgtcaaagtaactctcttatc

SEQ ID NO: 299075 - DNA, 25 bp, Homo sapien
ttaaacctctgtaatttactctgtc

SEQ ID NO: 299076 - DNA, 25 bp, Homo sapien
agaaataggaagatttaaacctctg

SEQ ID NO: 299077 - DNA, 25 bp, Homo sapien
ctgtcaaagtaactctcttatcaga

SEQ ID NO: 299078 - DNA, 25 bp, Homo sapien
ggtgtatcagatagcatggagaatt

SEQ ID NO: 299079 - DNA, 25 bp, Homo sapien
catggagaattttgacttcttagga

SEQ ID NO: 299080 - DNA, 25 bp, Homo sapien
taggacatggtgtatcagatagcat

SEQ ID NO: 299081 - DNA, 25 bp, Homo sapien
tttgacttcttaggactagtttcaa

SEQ ID NO: 299082 - DNA, 25 bp, Homo sapien
cctgataacttatttagctgccatt

SEQ ID NO: 299083 - DNA, 25 bp, Homo sapien
gataacttatttagctgccattacc

SEQ ID NO: 299084 - DNA, 25 bp, Homo sapien
taaaccagcatattttgggtatggg

SEQ ID NO: 299085 - DNA, 25 bp, Homo sapien
ccagcatattttgggtatgggcctg

SEQ ID NO: 299086 - DNA, 25 bp, Homo sapien
agttatgtcacaggaggaaggcctc

SEQ ID NO: 299087 - DNA, 25 bp, Homo sapien
ggcacactgtcaatttttctcttgg

SEQ ID NO: 299088 - DNA, 25 bp, Homo sapien
gctgaagttatgtcacaggaggaag

SEQ ID NO: 299089 - DNA, 25 bp, Homo sapien
gaaggcctcggcacactgtcaattt

SEQ ID NO: 299090 - DNA, 25 bp, Homo sapien
tccaaagagagccacacacaccatc

SEQ ID NO: 299091 - DNA, 25 bp, Homo sapien
aaatgcacttgcttcttctccaaag

SEQ ID NO: 299092 - DNA, 25 bp, Homo sapien
tgttatgaatccagccatccgaacg

SEQ ID NO: 299093 - DNA, 25 bp, Homo sapien
catccgaacgacaaagacaaatgca

SEQ ID NO: 299094 - DNA, 25 bp, Homo sapien
tcaaggagcgtcttcagaatgttcc

SEQ ID NO: 299095 - DNA, 25 bp, Homo sapien
ccaagtaaaagtctcgttgctcata

SEQ ID NO: 299096 - DNA, 25 bp, Homo sapien
tccaagaatggaatccttccctggt

SEQ ID NO: 299097 - DNA, 25 bp, Homo sapien
tccctggtgatggtctctcaccctg

SEQ ID NO: 299098 - DNA, 25 bp, Homo sapien
aaggccgggtaatgagccatttcca

SEQ ID NO: 299099 - DNA, 25 bp, Homo sapien
gtgatctttgtgacccacacccaca

SEQ ID NO: 299100 - DNA, 25 bp, Homo sapien
tgatctttgtgacccacacccacac

SEQ ID NO: 299101 - DNA, 25 bp, Homo sapien
taagggacattctgcgtgacatcac

SEQ ID NO: 299102 - DNA, 25 bp, Homo sapien
tgttggacgccctttgattgcttgg

SEQ ID NO: 299103 - DNA, 25 bp, Homo sapien
tgttgagacactgagaacacgtggg

SEQ ID NO: 299104 - DNA, 25 bp, Homo sapien
gagaacacatacacaaggtcagcag

SEQ ID NO: 299105 - DNA, 25 bp, Homo sapien
tcatcgccaatgtggtgtctggctc

SEQ ID NO: 299106 - DNA, 25 bp, Homo sapien
gaaaaggtccacagaggctgcgtca

SEQ ID NO: 299107 - DNA, 25 bp, Homo sapien
tatgttggcaccatttacagcaggg

SEQ ID NO: 299108 - DNA, 25 bp, Homo sapien
ggcatcctgtctgtcattggcgtta

SEQ ID NO: 299109 - DNA, 25 bp, Homo sapien
aaaaccagagaagccgactgcgtag

SEQ ID NO: 299110 - DNA, 25 bp, Homo sapien
gacagaagcccgtagtgtgactcag

SEQ ID NO: 299111 - DNA, 25 bp, Homo sapien
gaagccctgtaatcctccaggaggc

SEQ ID NO: 299112 - DNA, 25 bp, Homo sapien
tctcggtcttaggatgaagccctgt

SEQ ID NO: 299113 - DNA, 25 bp, Homo sapien
aaaagagagcgtgggcaccaggtca

SEQ ID NO: 299114 - DNA, 25 bp, Homo sapien
tgcttcaggtcccagcgttccttgt

SEQ ID NO: 299115 - DNA, 25 bp, Homo sapien
taggagaaattctaagaggccaact

SEQ ID NO: 299116 - DNA, 25 bp, Homo sapien
ttaccaggaactctctgaaattggg

SEQ ID NO: 299117 - DNA, 25 bp, Homo sapien
accaaccaatgaaaacagtcccatc

SEQ ID NO: 299118 - DNA, 25 bp, Homo sapien
attagcatgaaagcagtttagcatt

SEQ ID NO: 299119 - DNA, 25 bp, Homo sapien
gaaccaaccaatgaaaacagtccca

SEQ ID NO: 299120 - DNA, 25 bp, Homo sapien
tgagaaccaaccaatgaaaacagtc

SEQ ID NO: 299121 - DNA, 25 bp, Homo sapien
tatggaactgagtgttagtgacttt

SEQ ID NO: 299122 - DNA, 25 bp, Homo sapien
taaagcttatggaactgagtgttag

SEQ ID NO: 299123 - DNA, 25 bp, Homo sapien
gagggcaaggtaaagcttatggaac

SEQ ID NO: 299124 - DNA, 25 bp, Homo sapien
caaggtaaagcttatggaactgagt

SEQ ID NO: 299125 - DNA, 25 bp, Homo sapien
ccagttatgcgtctgtataataacc

SEQ ID NO: 299126 - DNA, 25 bp, Homo sapien
cacctccagttatgcgtctgtataa

SEQ ID NO: 299127 - DNA, 25 bp, Homo sapien
cccacctccagttatgcgtctgtat

SEQ ID NO: 299128 - DNA, 25 bp, Homo sapien
tatgcgtctgtataataaccagaca

SEQ ID NO: 299129 - DNA, 25 bp, Homo sapien
caaagctggcatcatgccacaggca

SEQ ID NO: 299130 - DNA, 25 bp, Homo sapien
tttcccattagggacacagcacagc

SEQ ID NO: 299131 - DNA, 25 bp, Homo sapien
agccacgtttcccattagggacaca

SEQ ID NO: 299132 - DNA, 25 bp, Homo sapien
cattctgcaacgcacccttctcact

SEQ ID NO: 299133 - DNA, 25 bp, Homo sapien
aattccacagtgtggcttttgaatc

SEQ ID NO: 299134 - DNA, 25 bp, Homo sapien
tccacagtgtggcttttgaatctca

SEQ ID NO: 299135 - DNA, 25 bp, Homo sapien
ccacagtgtggcttttgaatctcat

SEQ ID NO: 299136 - DNA, 25 bp, Homo sapien
attccacagtgtggcttttgaatct

SEQ ID NO: 299137 - DNA, 25 bp, Homo sapien
aaaagaggggttgagacagtgtgct

SEQ ID NO: 299138 - DNA, 25 bp, Homo sapien
cagatgcagaggacagagactctca

SEQ ID NO: 299139 - DNA, 25 bp, Homo sapien
tgcagaggacagagactctcagcaa

SEQ ID NO: 299140 - DNA, 25 bp, Homo sapien
gatgcagaggacagagactctcagc

SEQ ID NO: 299141 - DNA, 25 bp, Homo sapien
gcagaggacagagactctcagcaaa

SEQ ID NO: 299142 - DNA, 25 bp, Homo sapien
ctcccacaccaaggaaaagtgcact

SEQ ID NO: 299143 - DNA, 25 bp, Homo sapien
tcactcccacaccaaggaaaagtgc

SEQ ID NO: 299144 - DNA, 25 bp, Homo sapien
tgccctcactcccacaccaaggaaa

SEQ ID NO: 299145 - DNA, 25 bp, Homo sapien
gccctcactcccacaccaaggaaaa

SEQ ID NO: 299146 - DNA, 25 bp, Homo sapien
tatctgtcccacttggaacgttttg

SEQ ID NO: 299147 - DNA, 25 bp, Homo sapien
caccgaggggcttactttgaggatc

SEQ ID NO: 299148 - DNA, 25 bp, Homo sapien
tcccacttggaacgttttgttgcac

SEQ ID NO: 299149 - DNA, 25 bp, Homo sapien
tttgaggatctccagtatctgtccc

SEQ ID NO: 299150 - DNA, 25 bp, Homo sapien
caactaccatgcaaaggagattcct

SEQ ID NO: 299151 - DNA, 25 bp, Homo sapien
gaagctcaggatttgactccaaggc

SEQ ID NO: 299152 - DNA, 25 bp, Homo sapien
gcccaaaaccatcaagcaggaagct

SEQ ID NO: 299153 - DNA, 25 bp, Homo sapien
tggtcttgggcactctcagatgggc

SEQ ID NO: 299154 - DNA, 25 bp, Homo sapien
cacgaatccgttccaggcctcatta

SEQ ID NO: 299155 - DNA, 25 bp, Homo sapien
ccacgaatccgttccaggcctcatt

SEQ ID NO: 299156 - DNA, 25 bp, Homo sapien
tagactgatgacagtttccagtctc

SEQ ID NO: 299157 - DNA, 25 bp, Homo sapien
tatcacattgagttgctattcctat

SEQ ID NO: 299158 - DNA, 25 bp, Homo sapien
gagttgcctctaaggccttcaccac

SEQ ID NO: 299159 - DNA, 25 bp, Homo sapien
ctttgacctggagttgcctctaagg

SEQ ID NO: 299160 - DNA, 25 bp, Homo sapien
tacacaaattggcagcaactaattc

SEQ ID NO: 299161 - DNA, 25 bp, Homo sapien
gctcagtatccctgaaattacacaa

SEQ ID NO: 299162 - DNA, 25 bp, Homo sapien
aatggtcactaagacatactgcttg

SEQ ID NO: 299163 - DNA, 25 bp, Homo sapien
tcctccttggttgggaagttgtgag

SEQ ID NO: 299164 - DNA, 25 bp, Homo sapien
ctttatcgtgccagtttttgtcttt

SEQ ID NO: 299165 - DNA, 25 bp, Homo sapien
tactgctggcctttatcgtgccagt

SEQ ID NO: 299166 - DNA, 25 bp, Homo sapien
ctggcctttatcgtgccagtttttg

SEQ ID NO: 299167 - DNA, 25 bp, Homo sapien
tgtactgctggcctttatcgtgcca

SEQ ID NO: 299168 - DNA, 25 bp, Homo sapien
gggcacggagccttcttatgttatc

SEQ ID NO: 299169 - DNA, 25 bp, Homo sapien
caagggcacggagccttcttatgtt

SEQ ID NO: 299170 - DNA, 25 bp, Homo sapien
gcacggagccttcttatgttatcct

SEQ ID NO: 299171 - DNA, 25 bp, Homo sapien
agggcacggagccttcttatgttat

SEQ ID NO: 299172 - DNA, 25 bp, Homo sapien
cctttgtggaccttctgaaccccat

SEQ ID NO: 299173 - DNA, 25 bp, Homo sapien
tcaaagcggctgtgattcccaactc

SEQ ID NO: 299174 - DNA, 25 bp, Homo sapien
caccacttctttccgtagtccatgg

SEQ ID NO: 299175 - DNA, 25 bp, Homo sapien
ggtactgctggtaatcccggtcaaa

SEQ ID NO: 299176 - DNA, 25 bp, Homo sapien
tcgtctgagggcacggatgtccttc

SEQ ID NO: 299177 - DNA, 25 bp, Homo sapien
ttcgtacacgaggtagactacatcc

SEQ ID NO: 299178 - DNA, 25 bp, Homo sapien
tgaggcatgcggtactgactgaaga

SEQ ID NO: 299179 - DNA, 25 bp, Homo sapien
tcaccgctttcagctgagattggct

SEQ ID NO: 299180 - DNA, 25 bp, Homo sapien
tgccaggcatatctctcctggtggc

SEQ ID NO: 299181 - DNA, 25 bp, Homo sapien
cctgccaggcatatctctcctggtg

SEQ ID NO: 299182 - DNA, 25 bp, Homo sapien
tggcccctgccaggcatatctctcc

SEQ ID NO: 299183 - DNA, 25 bp, Homo sapien
gccaggcatatctctcctggtggct

SEQ ID NO: 299184 - DNA, 25 bp, Homo sapien
tttgggtcaaaagcgatggctcacg

SEQ ID NO: 299185 - DNA, 25 bp, Homo sapien
tcagctatggaaatgccaaagtccc

SEQ ID NO: 299186 - DNA, 25 bp, Homo sapien
tatggaaatgccaaagtccctaaca

SEQ ID NO: 299187 - DNA, 25 bp, Homo sapien
agctatggaaatgccaaagtcccta

SEQ ID NO: 299188 - DNA, 25 bp, Homo sapien
gaagccgctgcctgactgagatatg

SEQ ID NO: 299189 - DNA, 25 bp, Homo sapien
tcctctctattcttccgtcaatata

SEQ ID NO: 299190 - DNA, 25 bp, Homo sapien
ttcttcggaggacattgaacctggg

SEQ ID NO: 299191 - DNA, 25 bp, Homo sapien
accccaatgaccatcatcaggaagc

SEQ ID NO: 299192 - DNA, 25 bp, Homo sapien
aagagacacctgattctcacctgga

SEQ ID NO: 299193 - DNA, 25 bp, Homo sapien
gaagttaagagacacctgattctca

SEQ ID NO: 299194 - DNA, 25 bp, Homo sapien
ttaagagacacctgattctcacctg

SEQ ID NO: 299195 - DNA, 25 bp, Homo sapien
cctgaagttaagagacacctgattc

SEQ ID NO: 299196 - DNA, 25 bp, Homo sapien
gcatcgtcgggaaccagattggctg

SEQ ID NO: 299197 - DNA, 25 bp, Homo sapien
tctgtagcatttgtctgcggccagg

SEQ ID NO: 299198 - DNA, 25 bp, Homo sapien
tggacaggactaggcctggcttctg

SEQ ID NO: 299199 - DNA, 25 bp, Homo sapien
gcttctgcagccaatgccggctctg

SEQ ID NO: 299200 - DNA, 25 bp, Homo sapien
cattgagacttacggcaagaaggca

SEQ ID NO: 299201 - DNA, 25 bp, Homo sapien
tggtttacctgcaccgttgactcag

SEQ ID NO: 299202 - DNA, 25 bp, Homo sapien
caggcgatcttgtgtctactctagg

SEQ ID NO: 299203 - DNA, 25 bp, Homo sapien
gaagagagtagctcgtcctcactgg

SEQ ID NO: 299204 - DNA, 25 bp, Homo sapien
gggcctcccactcccatggctctgg

SEQ ID NO: 299205 - DNA, 25 bp, Homo sapien
ctctgccccttgggcctcccactcc

SEQ ID NO: 299206 - DNA, 25 bp, Homo sapien
gccccttgggcctcccactcccatg

SEQ ID NO: 299207 - DNA, 25 bp, Homo sapien
tgccccttgggcctcccactcccat

SEQ ID NO: 299208 - DNA, 25 bp, Homo sapien
ctgataccaaagagacagggcccgg

SEQ ID NO: 299209 - DNA, 25 bp, Homo sapien
aaagcacaagatgttgaggcgagca

SEQ ID NO: 299210 - DNA, 25 bp, Homo sapien
ttcttcagactgaggccttttggta

SEQ ID NO: 299211 - DNA, 25 bp, Homo sapien
tgctgtttgcaatcacacgtggtga

SEQ ID NO: 299212 - DNA, 25 bp, Homo sapien
cagaccctcatggttcagcttgtga

SEQ ID NO: 299213 - DNA, 25 bp, Homo sapien
caggtccccaggtgcatgtgtgctc

SEQ ID NO: 299214 - DNA, 25 bp, Homo sapien
actcggagcacaagcgcaagaaagt

SEQ ID NO: 299215 - DNA, 25 bp, Homo sapien
tcaagttcaacgagggagagcgcgt

SEQ ID NO: 299216 - DNA, 25 bp, Homo sapien
ggctcatcgtttgtcttatctcccc

SEQ ID NO: 299217 - DNA, 25 bp, Homo sapien
ggtacggccgtagaccactgcctta

SEQ ID NO: 299218 - DNA, 25 bp, Homo sapien
ccttattttgatgagattgggcgcg

SEQ ID NO: 299219 - DNA, 25 bp, Homo sapien
gccttattttgatgagatcgggcgc

SEQ ID NO: 299220 - DNA, 25 bp, Homo sapien
tgagctggctggaaacacctgtcca

SEQ ID NO: 299221 - DNA, 25 bp, Homo sapien
tgcacctgggatgaaatacctgcgg

SEQ ID NO: 299222 - DNA, 25 bp, Homo sapien
tgtccacaggtagatggccacatca

SEQ ID NO: 299223 - DNA, 25 bp, Homo sapien
gagcctcgtggccttttatggacaa

SEQ ID NO: 299224 - DNA, 25 bp, Homo sapien
catacccatttctcaagaagcccag

SEQ ID NO: 299225 - DNA, 25 bp, Homo sapien
ttctttcttggcccatacccatttc

SEQ ID NO: 299226 - DNA, 25 bp, Homo sapien
acccatttctcaagaagcccagtgg

SEQ ID NO: 299227 - DNA, 25 bp, Homo sapien
ccagtggagccgaagatggggtcct

SEQ ID NO: 299228 - DNA, 25 bp, Homo sapien
aacccaagcttgtgaattgagctgg

SEQ ID NO: 299229 - DNA, 25 bp, Homo sapien
gaagcagagcttctcgtcatgagag

SEQ ID NO: 299230 - DNA, 25 bp, Homo sapien
cctgcgggaggtgccgagtgctgtg

SEQ ID NO: 299231 - DNA, 25 bp, Homo sapien
gtgtcgcggccctttctttgcagca

SEQ ID NO: 299232 - DNA, 25 bp, Homo sapien
actcggcacagatctgcagcctctg

SEQ ID NO: 299233 - DNA, 25 bp, Homo sapien
tgtgtgcctgggagcgacggaaggg

SEQ ID NO: 299234 - DNA, 25 bp, Homo sapien
ttgctggcagattgctaggcaggca

SEQ ID NO: 299235 - DNA, 25 bp, Homo sapien
gcagcctctgctaatatgaagcatc

SEQ ID NO: 299236 - DNA, 25 bp, Homo sapien
gccgagtcgaactggcttctggtgt

SEQ ID NO: 299237 - DNA, 25 bp, Homo sapien
cagaggcactgggccgagtcgaact

SEQ ID NO: 299238 - DNA, 25 bp, Homo sapien
cttggtctgggcctaccgtggtggc

SEQ ID NO: 299239 - DNA, 25 bp, Homo sapien
gcactgggccgagtcgaactggctt

SEQ ID NO: 299240 - DNA, 25 bp, Homo sapien
tgcctcctataagtggggacttggg

SEQ ID NO: 299241 - DNA, 25 bp, Homo sapien
gagggggagggctacccattctctg

SEQ ID NO: 299242 - DNA, 25 bp, Homo sapien
tcagcaggttcaaaccaggttccac

SEQ ID NO: 299243 - DNA, 25 bp, Homo sapien
cattctctgcctcctataagtgggg

SEQ ID NO: 299244 - DNA, 25 bp, Homo sapien
tgagtttgtcatgagcagtgcctgg

SEQ ID NO: 299245 - DNA, 25 bp, Homo sapien
ctgagtttgtcatgagcagtgcctg

SEQ ID NO: 299246 - DNA, 25 bp, Homo sapien
gtttgtcatgagcagtgcctggctg

SEQ ID NO: 299247 - DNA, 25 bp, Homo sapien
gagtttgtcatgagcagtgcctggc

SEQ ID NO: 299248 - DNA, 25 bp, Homo sapien
cctaccattgatgtccctggtgctc

SEQ ID NO: 299249 - DNA, 25 bp, Homo sapien
ctaccattgatgtccctggtgctct

SEQ ID NO: 299250 - DNA, 25 bp, Homo sapien
ctggtgctctcaagcacgtttgact

SEQ ID NO: 299251 - DNA, 25 bp, Homo sapien
caagcacgtttgactcatcaaaagg

SEQ ID NO: 299252 - DNA, 25 bp, Homo sapien
ttccacatgagctggtccacagata

SEQ ID NO: 299253 - DNA, 25 bp, Homo sapien
tccacatgagctggtccacagatac

SEQ ID NO: 299254 - DNA, 25 bp, Homo sapien
ccacatgagctggtccacagataca

SEQ ID NO: 299255 - DNA, 25 bp, Homo sapien
tgcacgtggcttctgtcaaatttgt

SEQ ID NO: 299256 - DNA, 25 bp, Homo sapien
tcttttggcaaacagacagtactga

SEQ ID NO: 299257 - DNA, 25 bp, Homo sapien
tcagttgagaaccaaagtaattccc

SEQ ID NO: 299258 - DNA, 25 bp, Homo sapien
gccccgtgtggaccttgatcataaa

SEQ ID NO: 299259 - DNA, 25 bp, Homo sapien
tagagctggcagtaggagtccaaac

SEQ ID NO: 299260 - DNA, 25 bp, Homo sapien
ctcgcttaatgaaggtgatggccaa

SEQ ID NO: 299261 - DNA, 25 bp, Homo sapien
cacacactggaacgcgatagcagac

SEQ ID NO: 299262 - DNA, 25 bp, Homo sapien
tggcttatctggtctggtccacgca

SEQ ID NO: 299263 - DNA, 25 bp, Homo sapien
tgggtacgggcctttgatagatgac

SEQ ID NO: 299264 - DNA, 25 bp, Homo sapien
ggtacgggcctttgatagatgacac

SEQ ID NO: 299265 - DNA, 25 bp, Homo sapien
gggtacgggcctttgatagatgaca

SEQ ID NO: 299266 - DNA, 25 bp, Homo sapien
ggtgggtacgggcctttgatagatg

SEQ ID NO: 299267 - DNA, 25 bp, Homo sapien
agatgggatgactctgctgaagcag

SEQ ID NO: 299268 - DNA, 25 bp, Homo sapien
ctgccagccgtcagcacacaaaggc

SEQ ID NO: 299269 - DNA, 25 bp, Homo sapien
gccagccgtcagcacacaaaggcac

SEQ ID NO: 299270 - DNA, 25 bp, Homo sapien
aaggagcgccatggaagccacagat

SEQ ID NO: 299271 - DNA, 25 bp, Homo sapien
tgtatcttcacgtctgagcatggct

SEQ ID NO: 299272 - DNA, 25 bp, Homo sapien
ggcacagataatgttaactggcttg

SEQ ID NO: 299273 - DNA, 25 bp, Homo sapien
gagcatggctcttcgaattcatacg

SEQ ID NO: 299274 - DNA, 25 bp, Homo sapien
aattcatacgtaaagaggcaggcac

SEQ ID NO: 299275 - DNA, 25 bp, Homo sapien
tcggaactctgtgatggcaccaaag

SEQ ID NO: 299276 - DNA, 25 bp, Homo sapien
taattcgttgtcatggccgttcctg

SEQ ID NO: 299277 - DNA, 25 bp, Homo sapien
gggattggactgttgctcggaactc

SEQ ID NO: 299278 - DNA, 25 bp, Homo sapien
tgtcatggccgttcctgggtcttcc

SEQ ID NO: 299279 - DNA, 25 bp, Homo sapien
aagagggtacttgggtcactccagt

SEQ ID NO: 299280 - DNA, 25 bp, Homo sapien
gcttgaagagggttgcgttccccaa

SEQ ID NO: 299281 - DNA, 25 bp, Homo sapien
ttggcattggagacccgagtctgct

SEQ ID NO: 299282 - DNA, 25 bp, Homo sapien
gggagtcttgcgcagcttttaggaa

SEQ ID NO: 299283 - DNA, 25 bp, Homo sapien
gaaaggtttacatcagccctcgttg

SEQ ID NO: 299284 - DNA, 25 bp, Homo sapien
caggtccttggtctatgcagcttta

SEQ ID NO: 299285 - DNA, 25 bp, Homo sapien
gaacatgcagcgcttcctagcaggt

SEQ ID NO: 299286 - DNA, 25 bp, Homo sapien
ggttttgtgccttgtctgagcccca

SEQ ID NO: 299287 - DNA, 25 bp, Homo sapien
accaacggccgcaagtagaaagaga

SEQ ID NO: 299288 - DNA, 25 bp, Homo sapien
actcaaaaccaacggccgcaagtag

SEQ ID NO: 299289 - DNA, 25 bp, Homo sapien
gaagccagctacttcgatagtttta

SEQ ID NO: 299290 - DNA, 25 bp, Homo sapien
ctttcttaacaatggaagccagcta

SEQ ID NO: 299291 - DNA, 25 bp, Homo sapien
ttccccattaagtctttcttcctca

SEQ ID NO: 299292 - DNA, 25 bp, Homo sapien
acagcccaaggggattttccagcct

SEQ ID NO: 299293 - DNA, 25 bp, Homo sapien
ccctgtccctctttgcacagccaca

SEQ ID NO: 299294 - DNA, 25 bp, Homo sapien
cccaaggggattttccagcctctgg

SEQ ID NO: 299295 - DNA, 25 bp, Homo sapien
cttgggggtggatgctgggaacgcg

SEQ ID NO: 299296 - DNA, 25 bp, Homo sapien
gatgctgggaacgcggcctgcgccc

SEQ ID NO: 299297 - DNA, 25 bp, Homo sapien
ggatgctgggaacgcggcctgcgcc

SEQ ID NO: 299298 - DNA, 25 bp, Homo sapien
cacgattagcttctcgagcctgaga

SEQ ID NO: 299299 - DNA, 25 bp, Homo sapien
tctaaaatgggaccgccactgcatg

SEQ ID NO: 299300 - DNA, 25 bp, Homo sapien
catgagcacacactatgagactggc

SEQ ID NO: 299301 - DNA, 25 bp, Homo sapien
cctgagatgattcagcacccgggca

SEQ ID NO: 299302 - DNA, 25 bp, Homo sapien
cgctgctgttgtgcccgattgactc

SEQ ID NO: 299303 - DNA, 25 bp, Homo sapien
aaggatggctgtctttcgccttgga

SEQ ID NO: 299304 - DNA, 25 bp, Homo sapien
tttcgccttggatggtgtgggccct

SEQ ID NO: 299305 - DNA, 25 bp, Homo sapien
gaagtctggaagaccccatcagggt

SEQ ID NO: 299306 - DNA, 25 bp, Homo sapien
ggtgtctggagagccggcattggca

SEQ ID NO: 299307 - DNA, 25 bp, Homo sapien
ggcagcattcggtgaggctgttcat

SEQ ID NO: 299308 - DNA, 25 bp, Homo sapien
gaagggcagcattcggtgaggctgt

SEQ ID NO: 299309 - DNA, 25 bp, Homo sapien
gccaggtgtctggagagccggcatt

SEQ ID NO: 299310 - DNA, 25 bp, Homo sapien
ctgggtttaacaggatttcaaagtg

SEQ ID NO: 299311 - DNA, 25 bp, Homo sapien
tgggtttaacaggatttcaaagtga

SEQ ID NO: 299312 - DNA, 25 bp, Homo sapien
gcccagccacttctcggttcactgc

SEQ ID NO: 299313 - DNA, 25 bp, Homo sapien
ggaagtcccaggtcgtagaggcagg

SEQ ID NO: 299314 - DNA, 25 bp, Homo sapien
agagaagactccttgggaagtccca

SEQ ID NO: 299315 - DNA, 25 bp, Homo sapien
tggagagaagactccttgggaagtc

SEQ ID NO: 299316 - DNA, 25 bp, Homo sapien
ccccagcactagcttgccggctgtc

SEQ ID NO: 299317 - DNA, 25 bp, Homo sapien
aggagacaggactgcggcaccctca

SEQ ID NO: 299318 - DNA, 25 bp, Homo sapien
tccagggaagccccgctgtttcaaa

SEQ ID NO: 299319 - DNA, 25 bp, Homo sapien
cccgctgtttcaaactgagactcag

SEQ ID NO: 299320 - DNA, 25 bp, Homo sapien
gcagcgggcaccgtttggcagctgt

SEQ ID NO: 299321 - DNA, 25 bp, Homo sapien
attcgcccgctgccgtcggactggt

SEQ ID NO: 299322 - DNA, 25 bp, Homo sapien
tcctcctgagtcagagtcggaccgt

SEQ ID NO: 299323 - DNA, 25 bp, Homo sapien
tttctggcgtctgaggcacggaggt

SEQ ID NO: 299324 - DNA, 25 bp, Homo sapien
accaggacaaaatcatgttgtaaca

SEQ ID NO: 299325 - DNA, 25 bp, Homo sapien
cattctataaatttgctcttcctca

SEQ ID NO: 299326 - DNA, 25 bp, Homo sapien
tcttcctcacttagtagattttctt

SEQ ID NO: 299327 - DNA, 25 bp, Homo sapien
catgcccaactaagtgtgtatgtat

SEQ ID NO: 299328 - DNA, 25 bp, Homo sapien
ttacagctgggcttcaggaccatta

SEQ ID NO: 299329 - DNA, 25 bp, Homo sapien
tacagctgggcttcaggaccattaa

SEQ ID NO: 299330 - DNA, 25 bp, Homo sapien
tgtctgaaatggcttagacttgtaa

SEQ ID NO: 299331 - DNA, 25 bp, Homo sapien
cttcttgtctgaaatggcttagact

SEQ ID NO: 299332 - DNA, 25 bp, Homo sapien
aatggcttagacttgtaaactttgc

SEQ ID NO: 299333 - DNA, 25 bp, Homo sapien
tttaagtcatctactccatctcttc

SEQ ID NO: 299334 - DNA, 25 bp, Homo sapien
agcaatgacagtagggctacctccc

SEQ ID NO: 299335 - DNA, 25 bp, Homo sapien
acctgggcatcagcaatgacagtag

SEQ ID NO: 299336 - DNA, 25 bp, Homo sapien
gtagggctacctcccctgcattttg

SEQ ID NO: 299337 - DNA, 25 bp, Homo sapien
atgacagtagggctacctcccctgc

SEQ ID NO: 299338 - DNA, 25 bp, Homo sapien
cagccctagagagtgacgttggttt

SEQ ID NO: 299339 - DNA, 25 bp, Homo sapien
tagggctttagcgatggcgtctttg

SEQ ID NO: 299340 - DNA, 25 bp, Homo sapien
tgcctactcagtgcccagaaaatgg

SEQ ID NO: 299341 - DNA, 25 bp, Homo sapien
ggtccagacgtcttagattctctag

SEQ ID NO: 299342 - DNA, 25 bp, Homo sapien
cagatggaaaacagctggtggctga

SEQ ID NO: 299343 - DNA, 25 bp, Homo sapien
taagaataagacaagctctggagta

SEQ ID NO: 299344 - DNA, 25 bp, Homo sapien
ggctacagctggaagggactctccc

SEQ ID NO: 299345 - DNA, 25 bp, Homo sapien
gagtcaaaggcctacaggaattttg

SEQ ID NO: 299346 - DNA, 25 bp, Homo sapien
ctcagcgtactctcctagtagcggg

SEQ ID NO: 299347 - DNA, 25 bp, Homo sapien
tgcctcagcgtactctcctagtagc

SEQ ID NO: 299348 - DNA, 25 bp, Homo sapien
gcctcagcgtactctcctagtagcg

SEQ ID NO: 299349 - DNA, 25 bp, Homo sapien
cctgcctcagcgtactctcctagta

SEQ ID NO: 299350 - DNA, 25 bp, Homo sapien
gagtcacctttagtcacctggtccg

SEQ ID NO: 299351 - DNA, 25 bp, Homo sapien
tctgtcagggacgaattgtttaccc

SEQ ID NO: 299352 - DNA, 25 bp, Homo sapien
tttttaactacctggccccactgca

SEQ ID NO: 299353 - DNA, 25 bp, Homo sapien
tgtttaccccatgataatgtaggat

SEQ ID NO: 299354 - DNA, 25 bp, Homo sapien
cagggtttcaccacattggccaggc

SEQ ID NO: 299355 - DNA, 25 bp, Homo sapien
ggtctaaacaattctcttccctcaa

SEQ ID NO: 299356 - DNA, 25 bp, Homo sapien
cttccctcaacctcccaagtagctg

SEQ ID NO: 299357 - DNA, 25 bp, Homo sapien
gggtctaaacaattctcttccctca

SEQ ID NO: 299358 - DNA, 25 bp, Homo sapien
catcctgaaccatgccttgcttcta

SEQ ID NO: 299359 - DNA, 25 bp, Homo sapien
cctggtcaagttttgtgaaacttat

SEQ ID NO: 299360 - DNA, 25 bp, Homo sapien
acttatcctgctgtctcgggctggc

SEQ ID NO: 299361 - DNA, 25 bp, Homo sapien
ggcacccatatgtgctcaccatgtg

SEQ ID NO: 299362 - DNA, 25 bp, Homo sapien
cacagaggacgtgtaacagtgagcc

SEQ ID NO: 299363 - DNA, 25 bp, Homo sapien
gaatgatggatggacacacacggac

SEQ ID NO: 299364 - DNA, 25 bp, Homo sapien
catttgtagacgtgggaagttggac

SEQ ID NO: 299365 - DNA, 25 bp, Homo sapien
aagtgtcatataaacagcagagcca

SEQ ID NO: 299366 - DNA, 25 bp, Homo sapien
ttgcgtggtaaggaagggcttcaca

SEQ ID NO: 299367 - DNA, 25 bp, Homo sapien
taaaagctcgcctagacagggaatg

SEQ ID NO: 299368 - DNA, 25 bp, Homo sapien
tgtgtccgtgtgtgtccatccatca

SEQ ID NO: 299369 - DNA, 25 bp, Homo sapien
cattccctgtctaggcgagctttta

SEQ ID NO: 299370 - DNA, 25 bp, Homo sapien
tgtgaagcccttccttaccacgcaa

SEQ ID NO: 299371 - DNA, 25 bp, Homo sapien
gaattgtaagtcgttgagtgactgc

SEQ ID NO: 299372 - DNA, 25 bp, Homo sapien
ggctcactgttacacgtcctctgtg

SEQ ID NO: 299373 - DNA, 25 bp, Homo sapien
cttcccacgtctacaaatgatatgg

SEQ ID NO: 299374 - DNA, 25 bp, Homo sapien
tgagccagatcttagaatccatgag

SEQ ID NO: 299375 - DNA, 25 bp, Homo sapien
tccagtgtgctctttcaacaggtga

SEQ ID NO: 299376 - DNA, 25 bp, Homo sapien
cctctgaagagtcaattctgagcca

SEQ ID NO: 299377 - DNA, 25 bp, Homo sapien
gaaggcagtggctcagtcaatgaaa

SEQ ID NO: 299378 - DNA, 25 bp, Homo sapien
ccagagcggcaaaccttccagtgtg

SEQ ID NO: 299379 - DNA, 25 bp, Homo sapien
ggtcaaaaagaagagcggccagact

SEQ ID NO: 299380 - DNA, 25 bp, Homo sapien
tcacctgttgaaagagcacactgga

SEQ ID NO: 299381 - DNA, 25 bp, Homo sapien
tctttcattgactgagccactgcct

SEQ ID NO: 299382 - DNA, 25 bp, Homo sapien
tggctcagaattgactcttcagagg

SEQ ID NO: 299383 - DNA, 25 bp, Homo sapien
aagtctggccgctcttctttttgac

SEQ ID NO: 299384 - DNA, 25 bp, Homo sapien
cacactggaaggtttgccgctctgg

SEQ ID NO: 299385 - DNA, 25 bp, Homo sapien
catggattctaagatctggctcaga

SEQ ID NO: 299386 - DNA, 25 bp, Homo sapien
tctgcaaaagcgtggcatggtcact

SEQ ID NO: 299387 - DNA, 25 bp, Homo sapien
tcactgacaatgtgcgcagcgctgt

SEQ ID NO: 299388 - DNA, 25 bp, Homo sapien
gcttcaggctcagaatataaacact

SEQ ID NO: 299389 - DNA, 25 bp, Homo sapien
gcagctgctccaggataactcaaga

SEQ ID NO: 299390 - DNA, 25 bp, Homo sapien
tggtcactcaccatgcaacaaagag

SEQ ID NO: 299391 - DNA, 25 bp, Homo sapien
aaagaactgccctctcctaaagtgg

SEQ ID NO: 299392 - DNA, 25 bp, Homo sapien
ctctttgttgcatggtgagtgacca

SEQ ID NO: 299393 - DNA, 25 bp, Homo sapien
tccaaaacgactgaaaagggacagc

SEQ ID NO: 299394 - DNA, 25 bp, Homo sapien
tcttgagttatcctggagcagctgc

SEQ ID NO: 299395 - DNA, 25 bp, Homo sapien
ccactttaggagagggcagttcttt

SEQ ID NO: 299396 - DNA, 25 bp, Homo sapien
gagtgaccatgccacgcttttgcag

SEQ ID NO: 299397 - DNA, 25 bp, Homo sapien
acagcgctgcgcacattgtcagtga

SEQ ID NO: 299398 - DNA, 25 bp, Homo sapien
tgtggaagaggaccaaagggatcaa

SEQ ID NO: 299399 - DNA, 25 bp, Homo sapien
gaaaagaagctcatctgggctgggt

SEQ ID NO: 299400 - DNA, 25 bp, Homo sapien
cacaagcacacgcaggtgaacgttc

SEQ ID NO: 299401 - DNA, 25 bp, Homo sapien
tgttcatcagcatgtgaatggctca

SEQ ID NO: 299402 - DNA, 25 bp, Homo sapien
caggtgaacgttcacagcagcatca

SEQ ID NO: 299403 - DNA, 25 bp, Homo sapien
caggtaatgatgtcacctgatgaac

SEQ ID NO: 299404 - DNA, 25 bp, Homo sapien
gaacgttcacctgcgtgtgcttgtg

SEQ ID NO: 299405 - DNA, 25 bp, Homo sapien
caagaatagttaataacccgagaga

SEQ ID NO: 299406 - DNA, 25 bp, Homo sapien
tgagccattcacatgctgatgaaca

SEQ ID NO: 299407 - DNA, 25 bp, Homo sapien
ggagtggaaccccatttgcttttga

SEQ ID NO: 299408 - DNA, 25 bp, Homo sapien
cacccagcccagatgagcttctttt

SEQ ID NO: 299409 - DNA, 25 bp, Homo sapien
catcaggtgacatcattacctggga

SEQ ID NO: 299410 - DNA, 25 bp, Homo sapien
tatcctaacttagttctccaggcag

SEQ ID NO: 299411 - DNA, 25 bp, Homo sapien
cactctctgcgttattgtgtgagaa

SEQ ID NO: 299412 - DNA, 25 bp, Homo sapien
tctgaggtatttattgctaaccacc

SEQ ID NO: 299413 - DNA, 25 bp, Homo sapien
tccaactatctgaagtggcagagag

SEQ ID NO: 299414 - DNA, 25 bp, Homo sapien
gctaaccaccatctccattatcagg

SEQ ID NO: 299415 - DNA, 25 bp, Homo sapien
ggcccatggcaggtatgtctaatag

SEQ ID NO: 299416 - DNA, 25 bp, Homo sapien
acttcagatagttggaggtggctgc

SEQ ID NO: 299417 - DNA, 25 bp, Homo sapien
gccatgggcccctgataatggagat

SEQ ID NO: 299418 - DNA, 25 bp, Homo sapien
ggtggttagcaataaatacctcaga

SEQ ID NO: 299419 - DNA, 25 bp, Homo sapien
gattctcacacaataacgcagagag

SEQ ID NO: 299420 - DNA, 25 bp, Homo sapien
gaactaagttaggatagctgaggct

SEQ ID NO: 299421 - DNA, 25 bp, Homo sapien
tattagacatacctgccatgggccc

SEQ ID NO: 299422 - DNA, 25 bp, Homo sapien
gaaacacgccgctcacctgcaatgg

SEQ ID NO: 299423 - DNA, 25 bp, Homo sapien
acacgccgctcacctgcaatggcct

SEQ ID NO: 299424 - DNA, 25 bp, Homo sapien
tgaaacacgccgctcacctgcaatg

SEQ ID NO: 299425 - DNA, 25 bp, Homo sapien
acctgcaatggcctcggccggccgg

SEQ ID NO: 299426 - DNA, 25 bp, Homo sapien
gccgctcacctgcaatggcctcggc

SEQ ID NO: 299427 - DNA, 25 bp, Homo sapien
gctcacctgcaatggcctcggccgg

SEQ ID NO: 299428 - DNA, 25 bp, Homo sapien
gccggccgaggccattgcaggtgag

SEQ ID NO: 299429 - DNA, 25 bp, Homo sapien
ccgaggccattgcaggtgagcggcg

SEQ ID NO: 299430 - DNA, 25 bp, Homo sapien
ggccattgcaggtgagcggcgtgtt

SEQ ID NO: 299431 - DNA, 25 bp, Homo sapien
ccggccggccgaggccattgcaggt

SEQ ID NO: 299432 - DNA, 25 bp, Homo sapien
cattgcaggtgagcggcgtgtttca

SEQ ID NO: 299433 - DNA, 25 bp, Homo sapien
ccattgcaggtgagcggcgtgtttc

SEQ ID NO: 299434 - DNA, 25 bp, Homo sapien
tcacgagccgtaaagcgaaggtcca

SEQ ID NO: 299435 - DNA, 25 bp, Homo sapien
aaatccgttactgcgtttcgccagg

SEQ ID NO: 299436 - DNA, 25 bp, Homo sapien
tgtgattggcactacgtcaggcggt

SEQ ID NO: 299437 - DNA, 25 bp, Homo sapien
gaccggcgctgtcgtaaactgctct

SEQ ID NO: 299438 - DNA, 25 bp, Homo sapien
caggcgtcctcattagcctccgagg

SEQ ID NO: 299439 - DNA, 25 bp, Homo sapien
ttgggcggaagaactcacgagccgt

SEQ ID NO: 299440 - DNA, 25 bp, Homo sapien
ggaccttcgctttacggctcgtgag

SEQ ID NO: 299441 - DNA, 25 bp, Homo sapien
cgggagagcagtttacgacagcgcc

SEQ ID NO: 299442 - DNA, 25 bp, Homo sapien
gtagtgccaatcacacctctcgcgt

SEQ ID NO: 299443 - DNA, 25 bp, Homo sapien
ggataccgcctgacgtagtgccaat

SEQ ID NO: 299444 - DNA, 25 bp, Homo sapien
cctggcgaaacgcagtaacggattt

SEQ ID NO: 299445 - DNA, 25 bp, Homo sapien
cctcggaggctaatgaggacgcctg

SEQ ID NO: 299446 - DNA, 25 bp, Homo sapien
tctccatggaactctgagctcctag

SEQ ID NO: 299447 - DNA, 25 bp, Homo sapien
gagctcctagcagagctcccagcat

SEQ ID NO: 299448 - DNA, 25 bp, Homo sapien
ctgagctcctagcagagctcccagc

SEQ ID NO: 299449 - DNA, 25 bp, Homo sapien
cttctccatggaactctgagctcct

SEQ ID NO: 299450 - DNA, 25 bp, Homo sapien
cttcgccagctgcatgacgagctca

SEQ ID NO: 299451 - DNA, 25 bp, Homo sapien
catgacgagctcaagagatagcttc

SEQ ID NO: 299452 - DNA, 25 bp, Homo sapien
gacaatggagttggaaaggtctgca

SEQ ID NO: 299453 - DNA, 25 bp, Homo sapien
ggtctgcatttgaagccctgctcca

SEQ ID NO: 299454 - DNA, 25 bp, Homo sapien
tcagcttattctatgagtagaacag

SEQ ID NO: 299455 - DNA, 25 bp, Homo sapien
aaagtcaacacttcagttgccgtgg

SEQ ID NO: 299456 - DNA, 25 bp, Homo sapien
caacacttcagttgccgtggagaag

SEQ ID NO: 299457 - DNA, 25 bp, Homo sapien
ggaagtaagcagtttgacaaaaagc

SEQ ID NO: 299458 - DNA, 25 bp, Homo sapien
cttggtgaaagctggctggcagcca

SEQ ID NO: 299459 - DNA, 25 bp, Homo sapien
tggcagccagcaactgcctgctccc

SEQ ID NO: 299460 - DNA, 25 bp, Homo sapien
gccgcttggtgaaagctggctggca

SEQ ID NO: 299461 - DNA, 25 bp, Homo sapien
ctaaggccgcttggtgaaagctggc

SEQ ID NO: 299462 - DNA, 25 bp, Homo sapien
cactgcaggtgtccagatgagagat

SEQ ID NO: 299463 - DNA, 25 bp, Homo sapien
cagatgcagctatgtaagggacagc

SEQ ID NO: 299464 - DNA, 25 bp, Homo sapien
agagaagcggaaggctttttttgca

SEQ ID NO: 299465 - DNA, 25 bp, Homo sapien
cagacctgggaggaggtcactgcag

SEQ ID NO: 299466 - DNA, 25 bp, Homo sapien
gtgggacagcaaattgagataatga

SEQ ID NO: 299467 - DNA, 25 bp, Homo sapien
ggtgggacagcaaattgagataatg

SEQ ID NO: 299468 - DNA, 25 bp, Homo sapien
tgggacagcaaattgagataatgaa

SEQ ID NO: 299469 - DNA, 25 bp, Homo sapien
gggacagcaaattgagataatgaag

SEQ ID NO: 299470 - DNA, 25 bp, Homo sapien
gacattccagcaatgacacaaacca

SEQ ID NO: 299471 - DNA, 25 bp, Homo sapien
cattgattgggagcattggctgtgt

SEQ ID NO: 299472 - DNA, 25 bp, Homo sapien
ccacgtgtccttgggaagacggtgt

SEQ ID NO: 299473 - DNA, 25 bp, Homo sapien
tgcgatgagatggatgagccaagta

SEQ ID NO: 299474 - DNA, 25 bp, Homo sapien
gtcattggtggtgcagggatttaaa

SEQ ID NO: 299475 - DNA, 25 bp, Homo sapien
cacaaatggtcaactttacttcagc

SEQ ID NO: 299476 - DNA, 25 bp, Homo sapien
gatttaaaccctagtccagccaatg

SEQ ID NO: 299477 - DNA, 25 bp, Homo sapien
tggtgcagggatttaaaccctagtc

SEQ ID NO: 299478 - DNA, 25 bp, Homo sapien
ggcccggagcgatcatgagctagtt

SEQ ID NO: 299479 - DNA, 25 bp, Homo sapien
aagcgttctcgcaatgaagctgatg

SEQ ID NO: 299480 - DNA, 25 bp, Homo sapien
ttggctgtaagagccccctttggga

SEQ ID NO: 299481 - DNA, 25 bp, Homo sapien
gggaagtaagcgttctcgcaatgaa

SEQ ID NO: 299482 - DNA, 25 bp, Homo sapien
tgtaagatttctccataatgatcat

SEQ ID NO: 299483 - DNA, 25 bp, Homo sapien
gtaagatttctccataatgatcata

SEQ ID NO: 299484 - DNA, 25 bp, Homo sapien
taagatttctccataatgatcatac

SEQ ID NO: 299485 - DNA, 25 bp, Homo sapien
ctgtaagatttctccataatgatca

SEQ ID NO: 299486 - DNA, 25 bp, Homo sapien
ccatcacaccggctcatttttttga

SEQ ID NO: 299487 - DNA, 25 bp, Homo sapien
tcacaccggctcatttttttgaatt

SEQ ID NO: 299488 - DNA, 25 bp, Homo sapien
acaggggtgcaccatcacaccggct

SEQ ID NO: 299489 - DNA, 25 bp, Homo sapien
gtgcaccatcacaccggctcatttt

SEQ ID NO: 299490 - DNA, 25 bp, Homo sapien
tgcctggcacgtagtagcagctcac

SEQ ID NO: 299491 - DNA, 25 bp, Homo sapien
cactcatgcttgtgggacggaaggc

SEQ ID NO: 299492 - DNA, 25 bp, Homo sapien
aaaggaagggacttggtcatgccac

SEQ ID NO: 299493 - DNA, 25 bp, Homo sapien
cacggagtcagcaagtggcagtgca

SEQ ID NO: 299494 - DNA, 25 bp, Homo sapien
caaatgcttttaaccaccgttggtg

SEQ ID NO: 299495 - DNA, 25 bp, Homo sapien
cgactattggctctactccagaggg

SEQ ID NO: 299496 - DNA, 25 bp, Homo sapien
tgaccatagctgtgggaaccgacta

SEQ ID NO: 299497 - DNA, 25 bp, Homo sapien
ccttcagcctgatgaccatagctgt

SEQ ID NO: 299498 - DNA, 25 bp, Homo sapien
ctacgagtcgcccttttgcaccctt

SEQ ID NO: 299499 - DNA, 25 bp, Homo sapien
gcaagatttggaatttcacggaaaa

SEQ ID NO: 299500 - DNA, 25 bp, Homo sapien
tatccttgcaatgaaaatcattgcc

SEQ ID NO: 299501 - DNA, 25 bp, Homo sapien
aaatgtctgcttgtagaagcaagat

SEQ ID NO: 299502 - DNA, 25 bp, Homo sapien
cctggtctttgagggtcagcttatc

SEQ ID NO: 299503 - DNA, 25 bp, Homo sapien
gaagtccctcgtgcggcttcatgcc

SEQ ID NO: 299504 - DNA, 25 bp, Homo sapien
gcctctttgcacttgtatgtgtgat

SEQ ID NO: 299505 - DNA, 25 bp, Homo sapien
tgtgattgccatgcttggaatgccc

SEQ ID NO: 299506 - DNA, 25 bp, Homo sapien
ccaagattgacatgagctgaaagaa

SEQ ID NO: 299507 - DNA, 25 bp, Homo sapien
gaagttcatggccaccctctggtaa

SEQ ID NO: 299508 - DNA, 25 bp, Homo sapien
cactcatggtatgtgtccccatcca

SEQ ID NO: 299509 - DNA, 25 bp, Homo sapien
cagggccagcgccagtggtcattaa

SEQ ID NO: 299510 - DNA, 25 bp, Homo sapien
gccaggtactgttattagcctgtta

SEQ ID NO: 299511 - DNA, 25 bp, Homo sapien
gtgtttaatccacagctcagagcca

SEQ ID NO: 299512 - DNA, 25 bp, Homo sapien
gaacatgccttatgtagccggtggc

SEQ ID NO: 299513 - DNA, 25 bp, Homo sapien
cacaacagtgtgatagttaggataa

SEQ ID NO: 299514 - DNA, 25 bp, Homo sapien
taagatggagtatgagaaggcaccg

SEQ ID NO: 299515 - DNA, 25 bp, Homo sapien
ggaggccaagtgctgtcatctgcaa

SEQ ID NO: 299516 - DNA, 25 bp, Homo sapien
atctgcaagccgtgtgacccgggac

SEQ ID NO: 299517 - DNA, 25 bp, Homo sapien
tcctagcacacagaggaagcctcta

SEQ ID NO: 299518 - DNA, 25 bp, Homo sapien
ggaggatggcgagtccagcccttcc

SEQ ID NO: 299519 - DNA, 25 bp, Homo sapien
tcataacaccagttggggaggatgg

SEQ ID NO: 299520 - DNA, 25 bp, Homo sapien
agtaggtgctcagaacgataacgat

SEQ ID NO: 299521 - DNA, 25 bp, Homo sapien
acgataacgatcttcatacttcata

SEQ ID NO: 299522 - DNA, 25 bp, Homo sapien
ctatgtgtctgtgggacctacttca

SEQ ID NO: 299523 - DNA, 25 bp, Homo sapien
gagccaccacgatcggcctaagtag

SEQ ID NO: 299524 - DNA, 25 bp, Homo sapien
aatggacagacaaagctatgtgtct

SEQ ID NO: 299525 - DNA, 25 bp, Homo sapien
caaccccagagcaagtatcagcaca

SEQ ID NO: 299526 - DNA, 25 bp, Homo sapien
cgcagttgccacatttccatggctg

SEQ ID NO: 299527 - DNA, 25 bp, Homo sapien
catcgcagttgccacatttccatgg

SEQ ID NO: 299528 - DNA, 25 bp, Homo sapien
atggctggctgtgatgatttgcttg

SEQ ID NO: 299529 - DNA, 25 bp, Homo sapien
ttgttaacaaagacgtgtctgggga

SEQ ID NO: 299530 - DNA, 25 bp, Homo sapien
cagagcttgggagttacctgatgtg

SEQ ID NO: 299531 - DNA, 25 bp, Homo sapien
cagccagagcttgggagttacctga

SEQ ID NO: 299532 - DNA, 25 bp, Homo sapien
agcttgggagttacctgatgtgcag

SEQ ID NO: 299533 - DNA, 25 bp, Homo sapien
ataaataagaagaggcatcagaagc

SEQ ID NO: 299534 - DNA, 25 bp, Homo sapien
gattcggaacttccaagatcctgcc

SEQ ID NO: 299535 - DNA, 25 bp, Homo sapien
ctgacagccagattcggaacttcca

SEQ ID NO: 299536 - DNA, 25 bp, Homo sapien
gccagattcggaacttccaagatcc

SEQ ID NO: 299537 - DNA, 25 bp, Homo sapien
aacttccaagatcctgccgcacttg

SEQ ID NO: 299538 - DNA, 25 bp, Homo sapien
cgtatctgggaaacatgcattggat

SEQ ID NO: 299539 - DNA, 25 bp, Homo sapien
ttccgtatctgggaaacatgcattg

SEQ ID NO: 299540 - DNA, 25 bp, Homo sapien
caggtttccctggacggtgtttctg

SEQ ID NO: 299541 - DNA, 25 bp, Homo sapien
tagttttccgtatctgggaaacatg

SEQ ID NO: 299542 - DNA, 25 bp, Homo sapien
tggaacatggaggaacttaaggccg

SEQ ID NO: 299543 - DNA, 25 bp, Homo sapien
cttaaggccggtgaagacataccct

SEQ ID NO: 299544 - DNA, 25 bp, Homo sapien
ccctgaggcacgaacaagcttggaa

SEQ ID NO: 299545 - DNA, 25 bp, Homo sapien
tcagcaagaaggtcagcaagtgcaa

SEQ ID NO: 299546 - DNA, 25 bp, Homo sapien
cagaattggttaccagggccacagc

SEQ ID NO: 299547 - DNA, 25 bp, Homo sapien
aagggaaggctcaccataaccaagg

SEQ ID NO: 299548 - DNA, 25 bp, Homo sapien
gatcatggaagcttagggccagccc

SEQ ID NO: 299549 - DNA, 25 bp, Homo sapien
caggctgctggtttcgtgtcacatg

SEQ ID NO: 299550 - DNA, 25 bp, Homo sapien
cactcagggttacaagaggtgagac

SEQ ID NO: 299551 - DNA, 25 bp, Homo sapien
aaagtgctggttggtgcgagaaccc

SEQ ID NO: 299552 - DNA, 25 bp, Homo sapien
gaggtgagactccacacagaaagtg

SEQ ID NO: 299553 - DNA, 25 bp, Homo sapien
aacccgtcgtactgcctctctaaga

SEQ ID NO: 299554 - DNA, 25 bp, Homo sapien
gaatcctgggcgagttacccagcct

SEQ ID NO: 299555 - DNA, 25 bp, Homo sapien
cacatattggttcccttctaaggag

SEQ ID NO: 299556 - DNA, 25 bp, Homo sapien
gacctgaatagctcactcaaacctg

SEQ ID NO: 299557 - DNA, 25 bp, Homo sapien
tcaaacctggaggagttcacataaa

SEQ ID NO: 299558 - DNA, 25 bp, Homo sapien
caagtgttggagaactgaggaagca

SEQ ID NO: 299559 - DNA, 25 bp, Homo sapien
cagggcaagacacaccaaaccagtt

SEQ ID NO: 299560 - DNA, 25 bp, Homo sapien
catgttttaagaccactcctggtac

SEQ ID NO: 299561 - DNA, 25 bp, Homo sapien
ttgtcagaagcttgaagagacccag

SEQ ID NO: 299562 - DNA, 25 bp, Homo sapien
aatgagatttccctgcgggatgcgg

SEQ ID NO: 299563 - DNA, 25 bp, Homo sapien
ttaatagccgcgctgtgcagaaccc

SEQ ID NO: 299564 - DNA, 25 bp, Homo sapien
tttagattttaacgctcattacatc

SEQ ID NO: 299565 - DNA, 25 bp, Homo sapien
ggcaaggactgcacttctccatgca

SEQ ID NO: 299566 - DNA, 25 bp, Homo sapien
gtatcactttttacagctgaacggg

SEQ ID NO: 299567 - DNA, 25 bp, Homo sapien
agtcctgacagctccgtgggaaagg

SEQ ID NO: 299568 - DNA, 25 bp, Homo sapien
gctgaacgggactcagccacacaaa

SEQ ID NO: 299569 - DNA, 25 bp, Homo sapien
gactttcagtggaaatgcggtgata

SEQ ID NO: 299570 - DNA, 25 bp, Homo sapien
aggaggcttgctgtttatctctatg

SEQ ID NO: 299571 - DNA, 25 bp, Homo sapien
atcataggaggcttgctgtttatct

SEQ ID NO: 299572 - DNA, 25 bp, Homo sapien
ataggaggcttgctgtttatctcta

SEQ ID NO: 299573 - DNA, 25 bp, Homo sapien
cataggaggcttgctgtttatctct

SEQ ID NO: 299574 - DNA, 25 bp, Homo sapien
tctccactctggtggctgaaagcta

SEQ ID NO: 299575 - DNA, 25 bp, Homo sapien
aaggtgagtgatacttatcagtttc

SEQ ID NO: 299576 - DNA, 25 bp, Homo sapien
agatgatctgcaagccaaggttggg

SEQ ID NO: 299577 - DNA, 25 bp, Homo sapien
gatctgtggagacttgtctgtagca

SEQ ID NO: 299578 - DNA, 25 bp, Homo sapien
taactgctgtatgtagtgggagatg

SEQ ID NO: 299579 - DNA, 25 bp, Homo sapien
cccagatgccagagacctgtctgct

SEQ ID NO: 299580 - DNA, 25 bp, Homo sapien
gacaaagatggggacggcaaaattg

SEQ ID NO: 299581 - DNA, 25 bp, Homo sapien
gtctgctaaagaaaccaagatgctg

SEQ ID NO: 299582 - DNA, 25 bp, Homo sapien
gatggctgctggagacaaagatggg

SEQ ID NO: 299583 - DNA, 25 bp, Homo sapien
tgatgtcagtccttggcgccaagcc

SEQ ID NO: 299584 - DNA, 25 bp, Homo sapien
cctcagttgggtatcagaagccttg

SEQ ID NO: 299585 - DNA, 25 bp, Homo sapien
tcttaggcccagagtaaatgccacc

SEQ ID NO: 299586 - DNA, 25 bp, Homo sapien
tgtgaagtttggtttgcgcgccctg

SEQ ID NO: 299587 - DNA, 25 bp, Homo sapien
ggcccgcagctgctgggccacagcc

SEQ ID NO: 299588 - DNA, 25 bp, Homo sapien
cccgcagctgctgggccacagccat

SEQ ID NO: 299589 - DNA, 25 bp, Homo sapien
ctctcggcccgcagctgctgggcca

SEQ ID NO: 299590 - DNA, 25 bp, Homo sapien
tcggcccgcagctgctgggccacag

SEQ ID NO: 299591 - DNA, 25 bp, Homo sapien
catttgaggcaagccctgattagcg

SEQ ID NO: 299592 - DNA, 25 bp, Homo sapien
gaaagtcattgctgatcaccatgtg

SEQ ID NO: 299593 - DNA, 25 bp, Homo sapien
ccctaaggcctatgaggagcagtga

SEQ ID NO: 299594 - DNA, 25 bp, Homo sapien
tgattagcggaagaacaagccagat

SEQ ID NO: 299595 - DNA, 25 bp, Homo sapien
atggcaacatcatccggaagctgtt

SEQ ID NO: 299596 - DNA, 25 bp, Homo sapien
gatgtcagcaatgttggccgagatg

SEQ ID NO: 299597 - DNA, 25 bp, Homo sapien
cgatgtcagcaatgttggccgagat

SEQ ID NO: 299598 - DNA, 25 bp, Homo sapien
ccttttgtcttcacctcgatgacga

SEQ ID NO: 299599 - DNA, 25 bp, Homo sapien
tctgcaaagcatggaactggcggta

SEQ ID NO: 299600 - DNA, 25 bp, Homo sapien
ttgctgtctggcccgaagcgctcct

SEQ ID NO: 299601 - DNA, 25 bp, Homo sapien
tagatgaggtacttggatcctcctt

SEQ ID NO: 299602 - DNA, 25 bp, Homo sapien
tgtttcacacccacgtagactttgg

SEQ ID NO: 299603 - DNA, 25 bp, Homo sapien
gcgttgagggcaggtatccgcatct

SEQ ID NO: 299604 - DNA, 25 bp, Homo sapien
gcatctcggcgatctcctgtttcac

SEQ ID NO: 299605 - DNA, 25 bp, Homo sapien
gcaggtatccgcatctcggcgatct

SEQ ID NO: 299606 - DNA, 25 bp, Homo sapien
caaactccaagcgcacaggtctggg

SEQ ID NO: 299607 - DNA, 25 bp, Homo sapien
ccctgcagaggatcccatgggggca

SEQ ID NO: 299608 - DNA, 25 bp, Homo sapien
agccctgcagaggatcccatggggg

SEQ ID NO: 299609 - DNA, 25 bp, Homo sapien
gagccctgcagaggatcccatgggg

SEQ ID NO: 299610 - DNA, 25 bp, Homo sapien
tgcgcgggcggagccggcggagtgc

SEQ ID NO: 299611 - DNA, 25 bp, Homo sapien
gtaaaagaagatccggacgtcctca

SEQ ID NO: 299612 - DNA, 25 bp, Homo sapien
agtcatagggcgactggtaaaagaa

SEQ ID NO: 299613 - DNA, 25 bp, Homo sapien
cgactggtaaaagaagatccggacg

SEQ ID NO: 299614 - DNA, 25 bp, Homo sapien
tgccatgcggtcaacgctgttgccc

SEQ ID NO: 299615 - DNA, 25 bp, Homo sapien
agctgccatgcggtcaacgctgttg

SEQ ID NO: 299616 - DNA, 25 bp, Homo sapien
tgcggtcaacgctgttgccctgtgg

SEQ ID NO: 299617 - DNA, 25 bp, Homo sapien
tctcggagctgccatgcggtcaacg

SEQ ID NO: 299618 - DNA, 25 bp, Homo sapien
gggagaataagcgacttctctgagg

SEQ ID NO: 299619 - DNA, 25 bp, Homo sapien
aggcttggggagaataagcgacttc

SEQ ID NO: 299620 - DNA, 25 bp, Homo sapien
gcttggggagaataagcgacttctc

SEQ ID NO: 299621 - DNA, 25 bp, Homo sapien
tggggagaataagcgacttctctga

SEQ ID NO: 299622 - DNA, 25 bp, Homo sapien
tgtttccagtgaagtcaaatagagc

SEQ ID NO: 299623 - DNA, 25 bp, Homo sapien
ctccagctttgaaattcagctccag

SEQ ID NO: 299624 - DNA, 25 bp, Homo sapien
agctccagtttgctgtttccagtga

SEQ ID NO: 299625 - DNA, 25 bp, Homo sapien
ccagctttgaaattcagctccagtt

SEQ ID NO: 299626 - DNA, 25 bp, Homo sapien
ccagtctttgttgatccgactgagg

SEQ ID NO: 299627 - DNA, 25 bp, Homo sapien
gccagtctttgttgatccgactgag

SEQ ID NO: 299628 - DNA, 25 bp, Homo sapien
cagtctttgttgatccgactgagga

SEQ ID NO: 299629 - DNA, 25 bp, Homo sapien
tagtagtagcaacgcagccagttgg

SEQ ID NO: 299630 - DNA, 25 bp, Homo sapien
ctttgaggatcttcacgaaggagag

SEQ ID NO: 299631 - DNA, 25 bp, Homo sapien
tgatggtgctgatggtgtcttcgta

SEQ ID NO: 299632 - DNA, 25 bp, Homo sapien
gtctttgaggatcttcacgaaggag

SEQ ID NO: 299633 - DNA, 25 bp, Homo sapien
cctggacgttgatggcttgttacag

SEQ ID NO: 299634 - DNA, 25 bp, Homo sapien
cagtggtcgtagggatggcaggaag

SEQ ID NO: 299635 - DNA, 25 bp, Homo sapien
cttgttacagcattgtggctcatct

SEQ ID NO: 299636 - DNA, 25 bp, Homo sapien
gacgttgatggcttgttacagcatt

SEQ ID NO: 299637 - DNA, 25 bp, Homo sapien
gggaaaggggaatgaggctggccag

SEQ ID NO: 299638 - DNA, 25 bp, Homo sapien
tcaataggggagtgctgctgagatc

SEQ ID NO: 299639 - DNA, 25 bp, Homo sapien
ctgctgagatcttcctccaccgcga

SEQ ID NO: 299640 - DNA, 25 bp, Homo sapien
ctgagatcttcctccaccgcgatgt

SEQ ID NO: 299641 - DNA, 25 bp, Homo sapien
tgagatcttcctccaccgcgatgtc

SEQ ID NO: 299642 - DNA, 25 bp, Homo sapien
gcgtcccggtaattcagagctatgt

SEQ ID NO: 299643 - DNA, 25 bp, Homo sapien
gcatcgtgttgtagaccctgtagtt

SEQ ID NO: 299644 - DNA, 25 bp, Homo sapien
tgagcgctacgtcctcatccgacag

SEQ ID NO: 299645 - DNA, 25 bp, Homo sapien
tagttgtccttctgcgtgatgtgca

SEQ ID NO: 299646 - DNA, 25 bp, Homo sapien
gattacaagccccacgggtccatta

SEQ ID NO: 299647 - DNA, 25 bp, Homo sapien
tagtagaaagagacagattacaagc

SEQ ID NO: 299648 - DNA, 25 bp, Homo sapien
gggtccattagcctcaaagacagga

SEQ ID NO: 299649 - DNA, 25 bp, Homo sapien
taaatcagatgtaaatagtagaaag

SEQ ID NO: 299650 - DNA, 25 bp, Homo sapien
gttagcataatcagccacacagtga

SEQ ID NO: 299651 - DNA, 25 bp, Homo sapien
tttattgctgtcgtctagaaaggca

SEQ ID NO: 299652 - DNA, 25 bp, Homo sapien
cagtgacgcactcttatcacagtga

SEQ ID NO: 299653 - DNA, 25 bp, Homo sapien
caggtgttgcctacctttggttaga

SEQ ID NO: 299654 - DNA, 25 bp, Homo sapien
cttccagaaagcctcctactccaat

SEQ ID NO: 299655 - DNA, 25 bp, Homo sapien
tccagaaagcctcctactccaattt

SEQ ID NO: 299656 - DNA, 25 bp, Homo sapien
cagaaagcctcctactccaatttac

SEQ ID NO: 299657 - DNA, 25 bp, Homo sapien
tttcttacttccagaaagcctccta

SEQ ID NO: 299658 - DNA, 25 bp, Homo sapien
cacgtttcctatttatgttgatgtc

SEQ ID NO: 299659 - DNA, 25 bp, Homo sapien
cccacgtttcctatttatgttgatg

SEQ ID NO: 299660 - DNA, 25 bp, Homo sapien
cctcccacgtttcctatttatgttg

SEQ ID NO: 299661 - DNA, 25 bp, Homo sapien
tgggagagaccagtcttcttctgga

SEQ ID NO: 299662 - DNA, 25 bp, Homo sapien
aggacaaagaaagtttttcagatct

SEQ ID NO: 299663 - DNA, 25 bp, Homo sapien
gggcatgacagggtccttagtgtcc

SEQ ID NO: 299664 - DNA, 25 bp, Homo sapien
cagggtccttagtgtcctgaagtcc

SEQ ID NO: 299665 - DNA, 25 bp, Homo sapien
catgacagggtccttagtgtcctga

SEQ ID NO: 299666 - DNA, 25 bp, Homo sapien
ggtgctggccatgggcatgacaggg

SEQ ID NO: 299667 - DNA, 25 bp, Homo sapien
tgccaggctgcgctcccagcacagg

SEQ ID NO: 299668 - DNA, 25 bp, Homo sapien
ggccatggagagcagcccctgggcc

SEQ ID NO: 299669 - DNA, 25 bp, Homo sapien
ccctgccaggctgcgctcccagcac

SEQ ID NO: 299670 - DNA, 25 bp, Homo sapien
gcccctgccaggctgcgctcccagc

SEQ ID NO: 299671 - DNA, 25 bp, Homo sapien
agcagggagagaaccccagccaagg

SEQ ID NO: 299672 - DNA, 25 bp, Homo sapien
gagcatcccagtgcgggcttcaggc

SEQ ID NO: 299673 - DNA, 25 bp, Homo sapien
gctgaagcagggagagaaccccagc

SEQ ID NO: 299674 - DNA, 25 bp, Homo sapien
ggtgctagcggctgaagcagggaga

SEQ ID NO: 299675 - DNA, 25 bp, Homo sapien
cattcacccggcgaatgagggtcac

SEQ ID NO: 299676 - DNA, 25 bp, Homo sapien
tcacgttgacgagccgctgggcatc

SEQ ID NO: 299677 - DNA, 25 bp, Homo sapien
cccggcgaatgagggtcacgttgac

SEQ ID NO: 299678 - DNA, 25 bp, Homo sapien
aatgagggtcacgttgacgagccgc

SEQ ID NO: 299679 - DNA, 25 bp, Homo sapien
accagggcatgtcatcactgaggtc

SEQ ID NO: 299680 - DNA, 25 bp, Homo sapien
ggcatgtcatcactgaggtcacagg

SEQ ID NO: 299681 - DNA, 25 bp, Homo sapien
ggctgaccagggcatgtcatcactg

SEQ ID NO: 299682 - DNA, 25 bp, Homo sapien
ggcaggctgaccagggcatgtcatc

SEQ ID NO: 299683 - DNA, 25 bp, Homo sapien
gaagtagtcaacgtcagtgacgaca

SEQ ID NO: 299684 - DNA, 25 bp, Homo sapien
aacgtcagtgacgacaaaactctgg

SEQ ID NO: 299685 - DNA, 25 bp, Homo sapien
tgagaagtagtcaacgtcagtgacg

SEQ ID NO: 299686 - DNA, 25 bp, Homo sapien
gtgacgacaaaactctggcagggaa

SEQ ID NO: 299687 - DNA, 25 bp, Homo sapien
tcctggtcggtgctgatctgcaggt

SEQ ID NO: 299688 - DNA, 25 bp, Homo sapien
cagcaggaagtggtcctggtcggtg

SEQ ID NO: 299689 - DNA, 25 bp, Homo sapien
gcaggaagtggtcctggtcggtgct

SEQ ID NO: 299690 - DNA, 25 bp, Homo sapien
ctggtcggtgctgatctgcaggtcc

SEQ ID NO: 299691 - DNA, 25 bp, Homo sapien
ccaagagtcctgaagccgcttgtag

SEQ ID NO: 299692 - DNA, 25 bp, Homo sapien
aagagtcctgaagccgcttgtagac

SEQ ID NO: 299693 - DNA, 25 bp, Homo sapien
agtcctgaagccgcttgtagaccac

SEQ ID NO: 299694 - DNA, 25 bp, Homo sapien
ctcccaagagtcctgaagccgcttg

SEQ ID NO: 299695 - DNA, 25 bp, Homo sapien
ctgggcatgaggtgctctggcccca

SEQ ID NO: 299696 - DNA, 25 bp, Homo sapien
tccacttgctgggacgtcctgagag

SEQ ID NO: 299697 - DNA, 25 bp, Homo sapien
cttgctgggacgtcctgagagccga

SEQ ID NO: 299698 - DNA, 25 bp, Homo sapien
gacgtcctgagagccgagaacctgg

SEQ ID NO: 299699 - DNA, 25 bp, Homo sapien
ctggctgggagtcccagcaaacctc

SEQ ID NO: 299700 - DNA, 25 bp, Homo sapien
acggcggccccgtcaaagaagcact

SEQ ID NO: 299701 - DNA, 25 bp, Homo sapien
agctgagcacggcggccccgtcaaa

SEQ ID NO: 299702 - DNA, 25 bp, Homo sapien
tgagcacggcggccccgtcaaagaa

SEQ ID NO: 299703 - DNA, 25 bp, Homo sapien
agcagctgagcacggcggccccgtc

SEQ ID NO: 299704 - DNA, 25 bp, Homo sapien
ggctgggcttgtagaataggccaaa

SEQ ID NO: 299705 - DNA, 25 bp, Homo sapien
gaataggccaaaggagaccgagctg

SEQ ID NO: 299706 - DNA, 25 bp, Homo sapien
taggccaaaggagaccgagctggcc

SEQ ID NO: 299707 - DNA, 25 bp, Homo sapien
gcttgtagaataggccaaaggagac

SEQ ID NO: 299708 - DNA, 25 bp, Homo sapien
aacagagacgatgtattggccgtgg

SEQ ID NO: 299709 - DNA, 25 bp, Homo sapien
tcactgagctctttatgtgtttctc

SEQ ID NO: 299710 - DNA, 25 bp, Homo sapien
tcgggcacgggaatctggcagtggt

SEQ ID NO: 299711 - DNA, 25 bp, Homo sapien
tggtgtggaggctgccgagcccctc

SEQ ID NO: 299712 - DNA, 25 bp, Homo sapien
tcgggttacacaatgagggtgtgct

SEQ ID NO: 299713 - DNA, 25 bp, Homo sapien
ggtcactggactgcatctctttgaa

SEQ ID NO: 299714 - DNA, 25 bp, Homo sapien
aggaggaaccctgaactgattcggg

SEQ ID NO: 299715 - DNA, 25 bp, Homo sapien
cacagcgggctaggagcaaactcac

SEQ ID NO: 299716 - DNA, 25 bp, Homo sapien
atccttggtcacgttgagggatgga

SEQ ID NO: 299717 - DNA, 25 bp, Homo sapien
tccatccttggtcacgttgagggat

SEQ ID NO: 299718 - DNA, 25 bp, Homo sapien
ctccatccttggtcacgttgaggga

SEQ ID NO: 299719 - DNA, 25 bp, Homo sapien
ccatccttggtcacgttgagggatg

SEQ ID NO: 299720 - DNA, 25 bp, Homo sapien
gtgttcgtatcgcattttcattgtt

SEQ ID NO: 299721 - DNA, 25 bp, Homo sapien
tctatgtgttcgtatcgcattttca

SEQ ID NO: 299722 - DNA, 25 bp, Homo sapien
gttcgtatcgcattttcattgtttc

SEQ ID NO: 299723 - DNA, 25 bp, Homo sapien
gtgtggtctatgtgttcgtatcgca

SEQ ID NO: 299724 - DNA, 25 bp, Homo sapien
catgctgtgggcgttctggagggtc

SEQ ID NO: 299725 - DNA, 25 bp, Homo sapien
cccagtacctggtggagggctccag

SEQ ID NO: 299726 - DNA, 25 bp, Homo sapien
tctggagggtctcggtcttgctgtc

SEQ ID NO: 299727 - DNA, 25 bp, Homo sapien
gcccagtacctggtggagggctcca

SEQ ID NO: 299728 - DNA, 25 bp, Homo sapien
ccagatcccgttgtagccggtgcgg

SEQ ID NO: 299729 - DNA, 25 bp, Homo sapien
tccactcgctccagatcccgttgta

SEQ ID NO: 299730 - DNA, 25 bp, Homo sapien
agccggtgcgggaggtcctgaccct

SEQ ID NO: 299731 - DNA, 25 bp, Homo sapien
aggagcgcgcctcactccactcgct

SEQ ID NO: 299732 - DNA, 25 bp, Homo sapien
tgctcccaatatctcctgtatcctt

SEQ ID NO: 299733 - DNA, 25 bp, Homo sapien
ctgaaaccaccccttggacttgtct

SEQ ID NO: 299734 - DNA, 25 bp, Homo sapien
cttgtcttgttctgcgggagtcgcc

SEQ ID NO: 299735 - DNA, 25 bp, Homo sapien
aatatctcctgtatccttactctct

SEQ ID NO: 299736 - DNA, 25 bp, Homo sapien
gaaaggcatagtggcagaggcacca

SEQ ID NO: 299737 - DNA, 25 bp, Homo sapien
ggaaaggcatagtggcagaggcacc

SEQ ID NO: 299738 - DNA, 25 bp, Homo sapien
cttccagcagccggggagaaagagg

SEQ ID NO: 299739 - DNA, 25 bp, Homo sapien
gccggggagaaagaggaatgtcagc

SEQ ID NO: 299740 - DNA, 25 bp, Homo sapien
cggggagaaagaggaatgtcagcat

SEQ ID NO: 299741 - DNA, 25 bp, Homo sapien
cagccggggagaaagaggaatgtca

SEQ ID NO: 299742 - DNA, 25 bp, Homo sapien
gaagatcacgatgagggccagcacc

SEQ ID NO: 299743 - DNA, 25 bp, Homo sapien
agcgatggtgaggaagatcacgatg

SEQ ID NO: 299744 - DNA, 25 bp, Homo sapien
acagcgatggtgaggaagatcacga

SEQ ID NO: 299745 - DNA, 25 bp, Homo sapien
agatcacgatgagggccagcaccca

SEQ ID NO: 299746 - DNA, 25 bp, Homo sapien
ctcttgctggggttggggatcttct

SEQ ID NO: 299747 - DNA, 25 bp, Homo sapien
tgctggggttggggatcttctcctc

SEQ ID NO: 299748 - DNA, 25 bp, Homo sapien
ctggaacaggtggctcttgctgggg

SEQ ID NO: 299749 - DNA, 25 bp, Homo sapien
cttgctggggttggggatcttctcc

SEQ ID NO: 299750 - DNA, 25 bp, Homo sapien
tagtgaaggccgacatgctgcctgg

SEQ ID NO: 299751 - DNA, 25 bp, Homo sapien
cccgctagtgaaggccgacatgctg

SEQ ID NO: 299752 - DNA, 25 bp, Homo sapien
gggactcccgctagtgaaggccgac

SEQ ID NO: 299753 - DNA, 25 bp, Homo sapien
actcccgctagtgaaggccgacatg

SEQ ID NO: 299754 - DNA, 25 bp, Homo sapien
gtcctctatggtgagaggtgacacc

SEQ ID NO: 299755 - DNA, 25 bp, Homo sapien
ccagatggtggatcacagacatgct

SEQ ID NO: 299756 - DNA, 25 bp, Homo sapien
cgctgtccccgaatcctacagggaa

SEQ ID NO: 299757 - DNA, 25 bp, Homo sapien
agctggagtcgtgtcaggcccagat

SEQ ID NO: 299758 - DNA, 25 bp, Homo sapien
ggatgtcaggtagggagcggctgtg

SEQ ID NO: 299759 - DNA, 25 bp, Homo sapien
tccggctggcccaggatgtcaggta

SEQ ID NO: 299760 - DNA, 25 bp, Homo sapien
ggcggccccaggtagggcccattga

SEQ ID NO: 299761 - DNA, 25 bp, Homo sapien
caggtagggcccattgaagtcaaag

SEQ ID NO: 299762 - DNA, 25 bp, Homo sapien
ggcagacacaggtactccagggacc

SEQ ID NO: 299763 - DNA, 25 bp, Homo sapien
cagcaggcagacacaggtactccag

SEQ ID NO: 299764 - DNA, 25 bp, Homo sapien
ctggaggtggggacttctggctccc

SEQ ID NO: 299765 - DNA, 25 bp, Homo sapien
gacacaggtactccagggaccctgg

SEQ ID NO: 299766 - DNA, 25 bp, Homo sapien
ttccacggcctgtcctggtcccatc

SEQ ID NO: 299767 - DNA, 25 bp, Homo sapien
ctgtcctggtcccatcgcctgggcc

SEQ ID NO: 299768 - DNA, 25 bp, Homo sapien
acggcctgtcctggtcccatcgcct

SEQ ID NO: 299769 - DNA, 25 bp, Homo sapien
gcctgtcctggtcccatcgcctggg

SEQ ID NO: 299770 - DNA, 25 bp, Homo sapien
tttggggtgaataccaggtctgcag

SEQ ID NO: 299771 - DNA, 25 bp, Homo sapien
catgggtatagccacagggctgtcc

SEQ ID NO: 299772 - DNA, 25 bp, Homo sapien
aactagggagacagacgaggcccct

SEQ ID NO: 299773 - DNA, 25 bp, Homo sapien
tctgcagaggagacataaccagagg

SEQ ID NO: 299774 - DNA, 25 bp, Homo sapien
gaccggccctcaattggagggagct

SEQ ID NO: 299775 - DNA, 25 bp, Homo sapien
agccctcaaaccctgacttcacagg

SEQ ID NO: 299776 - DNA, 25 bp, Homo sapien
ctgggttcaggacagggcttttggc

SEQ ID NO: 299777 - DNA, 25 bp, Homo sapien
gacaggattgttccttggtgacctg

SEQ ID NO: 299778 - DNA, 25 bp, Homo sapien
ggggacacatctgccgggcgttccc

SEQ ID NO: 299779 - DNA, 25 bp, Homo sapien
tgttggggacacatctgccgggcgt

SEQ ID NO: 299780 - DNA, 25 bp, Homo sapien
ttggggacacatctgccgggcgttc

SEQ ID NO: 299781 - DNA, 25 bp, Homo sapien
ctgtggggatgttggggacacatct

SEQ ID NO: 299782 - DNA, 25 bp, Homo sapien
gaggaagcaatagtcgcccacttgc

SEQ ID NO: 299783 - DNA, 25 bp, Homo sapien
agcaatagtcgcccacttgctgcag

SEQ ID NO: 299784 - DNA, 25 bp, Homo sapien
ggaagcaatagtcgcccacttgctg

SEQ ID NO: 299785 - DNA, 25 bp, Homo sapien
cccaggccggggaggaagcaatagt

SEQ ID NO: 299786 - DNA, 25 bp, Homo sapien
gcttcttgacttgaaaagcctggtc

SEQ ID NO: 299787 - DNA, 25 bp, Homo sapien
gggcttcttgacttgaaaagcctgg

SEQ ID NO: 299788 - DNA, 25 bp, Homo sapien
aaaagcctggtctaggttcttgatc

SEQ ID NO: 299789 - DNA, 25 bp, Homo sapien
tctaggttcttgatctcaggaccgg

SEQ ID NO: 299790 - DNA, 25 bp, Homo sapien
ggctttgaagagctgaatgacgggc

SEQ ID NO: 299791 - DNA, 25 bp, Homo sapien
gctttgaagagctgaatgacgggca

SEQ ID NO: 299792 - DNA, 25 bp, Homo sapien
ctttgaagagctgaatgacgggcac

SEQ ID NO: 299793 - DNA, 25 bp, Homo sapien
tccccaggcttgttgacctcccaag

SEQ ID NO: 299794 - DNA, 25 bp, Homo sapien
cccaggcttgttgacctcccaaggg

SEQ ID NO: 299795 - DNA, 25 bp, Homo sapien
ccaggcttgttgacctcccaagggg

SEQ ID NO: 299796 - DNA, 25 bp, Homo sapien
ccccaggcttgttgacctcccaagg

SEQ ID NO: 299797 - DNA, 25 bp, Homo sapien
cagtctctcatgtgcgtcccttgca

SEQ ID NO: 299798 - DNA, 25 bp, Homo sapien
tcggagtgacaatcgaggctagtct

SEQ ID NO: 299799 - DNA, 25 bp, Homo sapien
taccatgcccatttctcggagtgac

SEQ ID NO: 299800 - DNA, 25 bp, Homo sapien
tgtcatgtgcatcagcgactgccgg

SEQ ID NO: 299801 - DNA, 25 bp, Homo sapien
aagggactggaggtcccacagacat

SEQ ID NO: 299802 - DNA, 25 bp, Homo sapien
gactggaggtcccacagacatcact

SEQ ID NO: 299803 - DNA, 25 bp, Homo sapien
tcaagggactggaggtcccacagac

SEQ ID NO: 299804 - DNA, 25 bp, Homo sapien
gggactggaggtcccacagacatca

SEQ ID NO: 299805 - DNA, 25 bp, Homo sapien
gacttttccgcagtagacgtgggct

SEQ ID NO: 299806 - DNA, 25 bp, Homo sapien
cgttaacttctctacatgacgtggg

SEQ ID NO: 299807 - DNA, 25 bp, Homo sapien
gaaaatgatagcacccaacagaaga

SEQ ID NO: 299808 - DNA, 25 bp, Homo sapien
gaatttcagtaccaaaaggcacctc

SEQ ID NO: 299809 - DNA, 25 bp, Homo sapien
acccaatcatcacgtctatgaatta

SEQ ID NO: 299810 - DNA, 25 bp, Homo sapien
caatcatcacgtctatgaattacaa

SEQ ID NO: 299811 - DNA, 25 bp, Homo sapien
cagagcacgtagaccgggatgagaa

SEQ ID NO: 299812 - DNA, 25 bp, Homo sapien
tgcaaacttgaaagcagagcacgta

SEQ ID NO: 299813 - DNA, 25 bp, Homo sapien
cctggctgaggtgctcgggaggcca

SEQ ID NO: 299814 - DNA, 25 bp, Homo sapien
aagtcagagcgggaaggagaaagca

SEQ ID NO: 299815 - DNA, 25 bp, Homo sapien
tgtccaggagattgaagaatcccac

SEQ ID NO: 299816 - DNA, 25 bp, Homo sapien
tgcaaaggagacgtggtgtaaagcc

SEQ ID NO: 299817 - DNA, 25 bp, Homo sapien
tgattcagtgtcacgtgggcctgga

SEQ ID NO: 299818 - DNA, 25 bp, Homo sapien
tcatcccaagcggtaaaagacaatt

SEQ ID NO: 299819 - DNA, 25 bp, Homo sapien
aaagcagactatggcctgtaatccc

SEQ ID NO: 299820 - DNA, 25 bp, Homo sapien
taaagcagactatggcctgtaatcc

SEQ ID NO: 299821 - DNA, 25 bp, Homo sapien
ttaaagcagactatggcctgtaatc

SEQ ID NO: 299822 - DNA, 25 bp, Homo sapien
ttggggtccacgtgcattttggaag

SEQ ID NO: 299823 - DNA, 25 bp, Homo sapien
ccttggggtccacgtgcattttgga

SEQ ID NO: 299824 - DNA, 25 bp, Homo sapien
cttggggtccacgtgcattttggaa

SEQ ID NO: 299825 - DNA, 25 bp, Homo sapien
tggggtccacgtgcattttggaagc

SEQ ID NO: 299826 - DNA, 25 bp, Homo sapien
catgaaggcttcttacacaccagag

SEQ ID NO: 299827 - DNA, 25 bp, Homo sapien
gagaaatcagtgagggacttagaac

SEQ ID NO: 299828 - DNA, 25 bp, Homo sapien
tagaacactggcatggcaggaagac

SEQ ID NO: 299829 - DNA, 25 bp, Homo sapien
gggtttcttcatggtattctacagg

SEQ ID NO: 299830 - DNA, 25 bp, Homo sapien
aatctgtaactggtgatcagttgat

SEQ ID NO: 299831 - DNA, 25 bp, Homo sapien
tctgtaactggtgatcagttgattg

SEQ ID NO: 299832 - DNA, 25 bp, Homo sapien
aactggtgatcagttgattgtaaac

SEQ ID NO: 299833 - DNA, 25 bp, Homo sapien
tgtaactggtgatcagttgattgta

SEQ ID NO: 299834 - DNA, 25 bp, Homo sapien
aaggatagcgttgcgagagtgggac

SEQ ID NO: 299835 - DNA, 25 bp, Homo sapien
gcaggcgatggcgtgtgcgcggctc

SEQ ID NO: 299836 - DNA, 25 bp, Homo sapien
ctacgggccggactcgggcactctg

SEQ ID NO: 299837 - DNA, 25 bp, Homo sapien
ggctcgcggagcttcctagccgtgc

SEQ ID NO: 299838 - DNA, 25 bp, Homo sapien
aggagactccggcacagcccaccgc

SEQ ID NO: 299839 - DNA, 25 bp, Homo sapien
gggaggagactccggcacagcccac

SEQ ID NO: 299840 - DNA, 25 bp, Homo sapien
ctgcagcggaccaaagggaggagac

SEQ ID NO: 299841 - DNA, 25 bp, Homo sapien
gactccggcacagcccaccgccgcg

SEQ ID NO: 299842 - DNA, 25 bp, Homo sapien
ctcccggcttcctggctccgccatg

SEQ ID NO: 299843 - DNA, 25 bp, Homo sapien
tcccggcttcctggctccgccatgg

SEQ ID NO: 299844 - DNA, 25 bp, Homo sapien
cccagacggaagtcattcattcact

SEQ ID NO: 299845 - DNA, 25 bp, Homo sapien
cctaagatgcagctcggctttattt

SEQ ID NO: 299846 - DNA, 25 bp, Homo sapien
cctgctggcttcaaggcacaaacag

SEQ ID NO: 299847 - DNA, 25 bp, Homo sapien
tatttgcaaccaagtcccagacgga

SEQ ID NO: 299848 - DNA, 25 bp, Homo sapien
aggccgctgttggggctagggctgg

SEQ ID NO: 299849 - DNA, 25 bp, Homo sapien
ggtgcggcccgtgcagggcagagtc

SEQ ID NO: 299850 - DNA, 25 bp, Homo sapien
agggaggatgtcagaagggaagcag

SEQ ID NO: 299851 - DNA, 25 bp, Homo sapien
gggaggtgcggcccgtgcagggcag

SEQ ID NO: 299852 - DNA, 25 bp, Homo sapien
catcaagcagtgacacggcgtggtg

SEQ ID NO: 299853 - DNA, 25 bp, Homo sapien
tggtcgctggcgtcgtagatcacga

SEQ ID NO: 299854 - DNA, 25 bp, Homo sapien
gtcgatgtcgaagaaagcggcgccc

SEQ ID NO: 299855 - DNA, 25 bp, Homo sapien
ggcggcctgcgtactccgcgaaatg

SEQ ID NO: 299856 - DNA, 25 bp, Homo sapien
ggtgccgcggaacctgccagtggct

SEQ ID NO: 299857 - DNA, 25 bp, Homo sapien
gctcgggctcggtgccgcggaacct

SEQ ID NO: 299858 - DNA, 25 bp, Homo sapien
tgccgcggaacctgccagtggctcg

SEQ ID NO: 299859 - DNA, 25 bp, Homo sapien
tcgggctcggtgccgcggaacctgc

SEQ ID NO: 299860 - DNA, 25 bp, Homo sapien
gggcactgctcagggcgtagaggcc

SEQ ID NO: 299861 - DNA, 25 bp, Homo sapien
tgctcagggcgtagaggccgcgccc

SEQ ID NO: 299862 - DNA, 25 bp, Homo sapien
actgctcagggcgtagaggccgcgc

SEQ ID NO: 299863 - DNA, 25 bp, Homo sapien
cagggcactgctcagggcgtagagg

SEQ ID NO: 299864 - DNA, 25 bp, Homo sapien
tggcctttaaaggcaaggtcaggct

SEQ ID NO: 299865 - DNA, 25 bp, Homo sapien
tacctgcaggcaaggagctttaatc

SEQ ID NO: 299866 - DNA, 25 bp, Homo sapien
aagacccctgcctagctagaacgtg

SEQ ID NO: 299867 - DNA, 25 bp, Homo sapien
tccaaaagtgccctactgggtggcc

SEQ ID NO: 299868 - DNA, 25 bp, Homo sapien
tcctgactatgcaccctagggacag

SEQ ID NO: 299869 - DNA, 25 bp, Homo sapien
ctgtgaaggggatgttcacggtacc

SEQ ID NO: 299870 - DNA, 25 bp, Homo sapien
tgaaggggatgttcacggtacctgg

SEQ ID NO: 299871 - DNA, 25 bp, Homo sapien
gttcacggtacctgggatgtggcca

SEQ ID NO: 299872 - DNA, 25 bp, Homo sapien
gatgttcacggtacctgggatgtgg

SEQ ID NO: 299873 - DNA, 25 bp, Homo sapien
agaggtaggcccctagtgccacgtg

SEQ ID NO: 299874 - DNA, 25 bp, Homo sapien
aacagatggcggatctcctcagggc

SEQ ID NO: 299875 - DNA, 25 bp, Homo sapien
gccaccagtggcttagacaggtcca

SEQ ID NO: 299876 - DNA, 25 bp, Homo sapien
cccaggagccatcgtagatgggcac

SEQ ID NO: 299877 - DNA, 25 bp, Homo sapien
ccccaaatgccacctgagttgagtg

SEQ ID NO: 299878 - DNA, 25 bp, Homo sapien
tactggcagccaacaagtcaacgga

SEQ ID NO: 299879 - DNA, 25 bp, Homo sapien
ggcagctcggagttgtggcctccct

SEQ ID NO: 299880 - DNA, 25 bp, Homo sapien
ggtgaaagcagaagcggagctacca

SEQ ID NO: 299881 - DNA, 25 bp, Homo sapien
ttggggccttctcagacacctacgt

SEQ ID NO: 299882 - DNA, 25 bp, Homo sapien
caaaggataaatcccgggcaaggag

SEQ ID NO: 299883 - DNA, 25 bp, Homo sapien
actccgggaattccacagaccagcc

SEQ ID NO: 299884 - DNA, 25 bp, Homo sapien
ctacgtccacctctgcacaaaggat

SEQ ID NO: 299885 - DNA, 25 bp, Homo sapien
tttgatctctggaggcaatgaccca

SEQ ID NO: 299886 - DNA, 25 bp, Homo sapien
gaccagatcgctgcatggatccata

SEQ ID NO: 299887 - DNA, 25 bp, Homo sapien
cattccagggcagctggttaggcaa

SEQ ID NO: 299888 - DNA, 25 bp, Homo sapien
ggaaggctctggaacgcagaccttc

SEQ ID NO: 299889 - DNA, 25 bp, Homo sapien
ctgtagtccgcgcctcctggctccg

SEQ ID NO: 299890 - DNA, 25 bp, Homo sapien
gtagtccgcgcctcctggctccgcg

SEQ ID NO: 299891 - DNA, 25 bp, Homo sapien
tgtagtccgcgcctcctggctccgc

SEQ ID NO: 299892 - DNA, 25 bp, Homo sapien
gccggccgcggcgtctgcatcctcc

SEQ ID NO: 299893 - DNA, 25 bp, Homo sapien
cgggcggggaccgcacgcggggcag

SEQ ID NO: 299894 - DNA, 25 bp, Homo sapien
cgccggccgcggcgtctgcatcctc

SEQ ID NO: 299895 - DNA, 25 bp, Homo sapien
ctgcctccccggcctccatcctcat

SEQ ID NO: 299896 - DNA, 25 bp, Homo sapien
gcggcgctgcctccccggcctccat

SEQ ID NO: 299897 - DNA, 25 bp, Homo sapien
cgcccccgccggcggcgctgcctcc

SEQ ID NO: 299898 - DNA, 25 bp, Homo sapien
gccggcggcgctgcctccccggcct

SEQ ID NO: 299899 - DNA, 25 bp, Homo sapien
cgtctgccgggtggtcaggaacacc

SEQ ID NO: 299900 - DNA, 25 bp, Homo sapien
ttccccctggcacaggcggctgagg

SEQ ID NO: 299901 - DNA, 25 bp, Homo sapien
ctgaggaaggacttctgctcgcggc

SEQ ID NO: 299902 - DNA, 25 bp, Homo sapien
cgttgagccgcacccacttgcccca

SEQ ID NO: 299903 - DNA, 25 bp, Homo sapien
gtcaatgaggtaggccccggtctca

SEQ ID NO: 299904 - DNA, 25 bp, Homo sapien
tgccatgccggaggaagttcaggat

SEQ ID NO: 299905 - DNA, 25 bp, Homo sapien
ccagcttgccatgccggaggaagtt

SEQ ID NO: 299906 - DNA, 25 bp, Homo sapien
cagcaccagcttgccatgccggagg

SEQ ID NO: 299907 - DNA, 25 bp, Homo sapien
tccccatgcctgtcaacactgcatt

SEQ ID NO: 299908 - DNA, 25 bp, Homo sapien
gatgtgaccgtccacacctggcttc

SEQ ID NO: 299909 - DNA, 25 bp, Homo sapien
cagcctccggatgtgaccgtccaca

SEQ ID NO: 299910 - DNA, 25 bp, Homo sapien
agaatttgagatactggatcagcca

SEQ ID NO: 299911 - DNA, 25 bp, Homo sapien
ctcttccatccggtctttgatgatg

SEQ ID NO: 299912 - DNA, 25 bp, Homo sapien
tcagcgggccgatgttgtagaactc

SEQ ID NO: 299913 - DNA, 25 bp, Homo sapien
tttgatgatgcggatcagcgggccg

SEQ ID NO: 299914 - DNA, 25 bp, Homo sapien
ctgggtgaccgtgtagtccttctct

SEQ ID NO: 299915 - DNA, 25 bp, Homo sapien
aagcgccagccatcagacatggtgg

SEQ ID NO: 299916 - DNA, 25 bp, Homo sapien
cagcacgcggtacacgtgcttgggt

SEQ ID NO: 299917 - DNA, 25 bp, Homo sapien
tgctcgaagcgccagccatcagaca

SEQ ID NO: 299918 - DNA, 25 bp, Homo sapien
ctgcagcacgcggtacacgtgcttg

SEQ ID NO: 299919 - DNA, 25 bp, Homo sapien
ctggactctgagctcagcccgtttg

SEQ ID NO: 299920 - DNA, 25 bp, Homo sapien
ggactctgagctcagcccgtttggg

SEQ ID NO: 299921 - DNA, 25 bp, Homo sapien
ctgcctggtcctcgctgccgtagtt

SEQ ID NO: 299922 - DNA, 25 bp, Homo sapien
gttgtaggaggagccgatgttcacc

SEQ ID NO: 299923 - DNA, 25 bp, Homo sapien
ctgttccacctccacctcctccacc

SEQ ID NO: 299924 - DNA, 25 bp, Homo sapien
gctcctccagctgctcctccgtgct

SEQ ID NO: 299925 - DNA, 25 bp, Homo sapien
gctgctcctccagctgctcctccgt

SEQ ID NO: 299926 - DNA, 25 bp, Homo sapien
tcctcctcctgctgctgctgctcct

SEQ ID NO: 299927 - DNA, 25 bp, Homo sapien
ttctcctgtgcatctgcctccacct

SEQ ID NO: 299928 - DNA, 25 bp, Homo sapien
ctttctcctgtgcatctgcctccac

SEQ ID NO: 299929 - DNA, 25 bp, Homo sapien
ctcctgtgcatctgcctccacctgc

SEQ ID NO: 299930 - DNA, 25 bp, Homo sapien
cctgtgcatctgcctccacctgcac

SEQ ID NO: 299931 - DNA, 25 bp, Homo sapien
caatcatcctcctgggggttggctg

SEQ ID NO: 299932 - DNA, 25 bp, Homo sapien
tcatcctcctgggggttggctgcac

SEQ ID NO: 299933 - DNA, 25 bp, Homo sapien
ttagcaatcatcctcctgggggttg

SEQ ID NO: 299934 - DNA, 25 bp, Homo sapien
agcaatcatcctcctgggggttggc

SEQ ID NO: 299935 - DNA, 25 bp, Homo sapien
gggtgaggcgccaggcaagtggctg

SEQ ID NO: 299936 - DNA, 25 bp, Homo sapien
caagtggctgagctaaccctggtgc

SEQ ID NO: 299937 - DNA, 25 bp, Homo sapien
gctggctccagcaaggagtgggcgg

SEQ ID NO: 299938 - DNA, 25 bp, Homo sapien
gagtgggcgggaggctccggctttg

SEQ ID NO: 299939 - DNA, 25 bp, Homo sapien
ggttagcgggatcctgagatgactg

SEQ ID NO: 299940 - DNA, 25 bp, Homo sapien
aaggttagcgggatcctgagatgac

SEQ ID NO: 299941 - DNA, 25 bp, Homo sapien
aaaaggttagcgggatcctgagatg

SEQ ID NO: 299942 - DNA, 25 bp, Homo sapien
aaaggttagcgggatcctgagatga

SEQ ID NO: 299943 - DNA, 25 bp, Homo sapien
gcggaggaggaggcagtggtgggag

SEQ ID NO: 299944 - DNA, 25 bp, Homo sapien
aggaggaggcagtggtgggagggag

SEQ ID NO: 299945 - DNA, 25 bp, Homo sapien
cggaggaggaggcagtggtgggagg

SEQ ID NO: 299946 - DNA, 25 bp, Homo sapien
ctccagcgggaagcggaggaggagg

SEQ ID NO: 299947 - DNA, 25 bp, Homo sapien
gcaggcaggacgctctgggatgcag

SEQ ID NO: 299948 - DNA, 25 bp, Homo sapien
gaggcagggtgcagatgagatccag

SEQ ID NO: 299949 - DNA, 25 bp, Homo sapien
gcagacccgggatggaggcgtgagc

SEQ ID NO: 299950 - DNA, 25 bp, Homo sapien
tgggaccagggcagacccgggatgg

SEQ ID NO: 299951 - DNA, 25 bp, Homo sapien
cccagtctcagaggtgcccggcagg

SEQ ID NO: 299952 - DNA, 25 bp, Homo sapien
gcccagtctcagaggtgcccggcag

SEQ ID NO: 299953 - DNA, 25 bp, Homo sapien
ggcccagtctcagaggtgcccggca

SEQ ID NO: 299954 - DNA, 25 bp, Homo sapien
cgaggagaagccctcactgcaagct

SEQ ID NO: 299955 - DNA, 25 bp, Homo sapien
gggccgaggagaagccctcactgca

SEQ ID NO: 299956 - DNA, 25 bp, Homo sapien
ggtctgagagggtgcggacgggaac

SEQ ID NO: 299957 - DNA, 25 bp, Homo sapien
tcagcctcaggtctgagagggtgcg

SEQ ID NO: 299958 - DNA, 25 bp, Homo sapien
caaggtcggatgagaaactttggtg

SEQ ID NO: 299959 - DNA, 25 bp, Homo sapien
tggagataatcagccgaaagctcgg

SEQ ID NO: 299960 - DNA, 25 bp, Homo sapien
gaaagctcggctcaagtccaaggat

SEQ ID NO: 299961 - DNA, 25 bp, Homo sapien
caaggatcaagagatgagcaccctc

SEQ ID NO: 299962 - DNA, 25 bp, Homo sapien
actgatgccccaggcgaaagaagcc

SEQ ID NO: 299963 - DNA, 25 bp, Homo sapien
caattttagaggcaattgtggccca

SEQ ID NO: 299964 - DNA, 25 bp, Homo sapien
tctgcaatccttaagccactctggc

SEQ ID NO: 299965 - DNA, 25 bp, Homo sapien
ggctgacacttcatgggccaagggt

SEQ ID NO: 299966 - DNA, 25 bp, Homo sapien
ggcaggaggatgggaggggcggagg

SEQ ID NO: 299967 - DNA, 25 bp, Homo sapien
gggccggtaaggagggggtgatgca

SEQ ID NO: 299968 - DNA, 25 bp, Homo sapien
ggccggtaaggagggggtgatgcag

SEQ ID NO: 299969 - DNA, 25 bp, Homo sapien
aggaggatgggaggggcggaggtgg

SEQ ID NO: 299970 - DNA, 25 bp, Homo sapien
gatctggggcctcacatccgggtgc

SEQ ID NO: 299971 - DNA, 25 bp, Homo sapien
gaaccccaagtccctggaggtgatc

SEQ ID NO: 299972 - DNA, 25 bp, Homo sapien
atctggggcctcacatccgggtgcc

SEQ ID NO: 299973 - DNA, 25 bp, Homo sapien
ctggggcctcacatccgggtgcctc

SEQ ID NO: 299974 - DNA, 25 bp, Homo sapien
cctggactaaggctcaaggaggcaa

SEQ ID NO: 299975 - DNA, 25 bp, Homo sapien
ggtgggatcaccaaagagaaggcca

SEQ ID NO: 299976 - DNA, 25 bp, Homo sapien
ggtgggcggcccctatatactgcct

SEQ ID NO: 299977 - DNA, 25 bp, Homo sapien
aggaaggagcacatccaccatgcag

SEQ ID NO: 299978 - DNA, 25 bp, Homo sapien
acagctgagaagcaaggacccatcc

SEQ ID NO: 299979 - DNA, 25 bp, Homo sapien
ttattacatggtggggtcggacaca

SEQ ID NO: 299980 - DNA, 25 bp, Homo sapien
atcccgggaagtcaaacacaggagg

SEQ ID NO: 299981 - DNA, 25 bp, Homo sapien
gcaaggacccatcccgggaagtcaa

SEQ ID NO: 299982 - DNA, 25 bp, Homo sapien
taagactgaacgtgactctggcacc

SEQ ID NO: 299983 - DNA, 25 bp, Homo sapien
caagtggtgacctgaggaactgccc

SEQ ID NO: 299984 - DNA, 25 bp, Homo sapien
tgctggttctacatcccgaggagtg

SEQ ID NO: 299985 - DNA, 25 bp, Homo sapien
tgcagttgatcccacaggacctgtg

SEQ ID NO: 299986 - DNA, 25 bp, Homo sapien
cctctctcacccgaggagctagcct

SEQ ID NO: 299987 - DNA, 25 bp, Homo sapien
cccgtggtggaggttctggcgtcgg

SEQ ID NO: 299988 - DNA, 25 bp, Homo sapien
gcagccgccaggagcccgtggtgga

SEQ ID NO: 299989 - DNA, 25 bp, Homo sapien
ctctcacccgaggagctagcctggt

SEQ ID NO: 299990 - DNA, 25 bp, Homo sapien
catccgtaggccatgaagtggtagc

SEQ ID NO: 299991 - DNA, 25 bp, Homo sapien
gccatgaagtggtagcttggggaca

SEQ ID NO: 299992 - DNA, 25 bp, Homo sapien
ccatgaagtggtagcttggggacat

SEQ ID NO: 299993 - DNA, 25 bp, Homo sapien
ccgtaggccatgaagtggtagcttg

SEQ ID NO: 299994 - DNA, 25 bp, Homo sapien
cccctaggctgacttgcttagagac

SEQ ID NO: 299995 - DNA, 25 bp, Homo sapien
gcacctgtgacaggcctgggacatc

SEQ ID NO: 299996 - DNA, 25 bp, Homo sapien
accaccagggctatgacacactcga

SEQ ID NO: 299997 - DNA, 25 bp, Homo sapien
tatgacacactcgaggctcccatca

SEQ ID NO: 299998 - DNA, 25 bp, Homo sapien
ctgttataaccaactgttgtgccgt

SEQ ID NO: 299999 - DNA, 25 bp, Homo sapien
ctctgttataaccaactgttgtgcc

SEQ ID NO: 300000 - DNA, 25 bp, Homo sapien
tctgttataaccaactgttgtgccg

SEQ ID NO: 300001 - DNA, 25 bp, Homo sapien
ccagtgtggatccgagtgtggatct

SEQ ID NO: 300002 - DNA, 25 bp, Homo sapien
gggccctggagaaccgtcaggtaca

SEQ ID NO: 300003 - DNA, 25 bp, Homo sapien
accgtcaggtacagagcgggaagca

SEQ ID NO: 300004 - DNA, 25 bp, Homo sapien
cactgtgtgtcatgcccagtgtgga

SEQ ID NO: 300005 - DNA, 25 bp, Homo sapien
tgagccactaagcagaggaccttgg

SEQ ID NO: 300006 - DNA, 25 bp, Homo sapien
tgcgcctgacattcacacagagagg

SEQ ID NO: 300007 - DNA, 25 bp, Homo sapien
caaaaatacctactgctgagagggc

SEQ ID NO: 300008 - DNA, 25 bp, Homo sapien
taggcagatcacgttgcaatggctc

SEQ ID NO: 300009 - DNA, 25 bp, Homo sapien
tactggctttcttgactgtccccat

SEQ ID NO: 300010 - DNA, 25 bp, Homo sapien
gtgggtactggctttcttgactgtc

SEQ ID NO: 300011 - DNA, 25 bp, Homo sapien
tgggtactggctttcttgactgtcc

SEQ ID NO: 300012 - DNA, 25 bp, Homo sapien
ggtactggctttcttgactgtcccc

SEQ ID NO: 300013 - DNA, 25 bp, Homo sapien
gagcctccttggtggtctgcattct

SEQ ID NO: 300014 - DNA, 25 bp, Homo sapien
ctagaactttctgctctgtagcatt

SEQ ID NO: 300015 - DNA, 25 bp, Homo sapien
gctctgtagcattctgccctctgca

SEQ ID NO: 300016 - DNA, 25 bp, Homo sapien
ctccttggtggtctgcattctgggc

SEQ ID NO: 300017 - DNA, 25 bp, Homo sapien
gatacggcatcctgcgagaagacct

SEQ ID NO: 300018 - DNA, 25 bp, Homo sapien
cataggttttaaagcagacccagag

SEQ ID NO: 300019 - DNA, 25 bp, Homo sapien
acctgcccagtgctcatcgttacag

SEQ ID NO: 300020 - DNA, 25 bp, Homo sapien
ttaaattctctcatccctccagggc

SEQ ID NO: 300021 - DNA, 25 bp, Homo sapien
gaaacagaaatgctcccaaaccatg

SEQ ID NO: 300022 - DNA, 25 bp, Homo sapien
gaggttcagccactagccctaggtc

SEQ ID NO: 300023 - DNA, 25 bp, Homo sapien
catgaggtcatatctgtggctggga

SEQ ID NO: 300024 - DNA, 25 bp, Homo sapien
caaaccatgccagtcctctgggaga

SEQ ID NO: 300025 - DNA, 25 bp, Homo sapien
gcatcagctacctgtagggcctggg

SEQ ID NO: 300026 - DNA, 25 bp, Homo sapien
gactcagggataggagtcatcagcc

SEQ ID NO: 300027 - DNA, 25 bp, Homo sapien
tagggcctacttcccaaggtgccac

SEQ ID NO: 300028 - DNA, 25 bp, Homo sapien
aagtccagcacgatgcgcatcagct

SEQ ID NO: 300029 - DNA, 25 bp, Homo sapien
tggcgagccggcttcatcatctaca

SEQ ID NO: 300030 - DNA, 25 bp, Homo sapien
tcatcgtggtgaaggtgcgctcagc

SEQ ID NO: 300031 - DNA, 25 bp, Homo sapien
tgctggatgcccttctacgtgctca

SEQ ID NO: 300032 - DNA, 25 bp, Homo sapien
tacgtgctcaacatcgtcaacgtgg

SEQ ID NO: 300033 - DNA, 25 bp, Homo sapien
agggtgggtccatgctcacacctgg

SEQ ID NO: 300034 - DNA, 25 bp, Homo sapien
ccgcgccaaagtcactgcggtaggg

SEQ ID NO: 300035 - DNA, 25 bp, Homo sapien
ttgcaggtccagtgcatgcatgcgt

SEQ ID NO: 300036 - DNA, 25 bp, Homo sapien
tccagtgcatgcatgcgtatcacgt

SEQ ID NO: 300037 - DNA, 25 bp, Homo sapien
catgcgtatcacgtgcacgaagagg

SEQ ID NO: 300038 - DNA, 25 bp, Homo sapien
tagatggctacgagttctgagcaca

SEQ ID NO: 300039 - DNA, 25 bp, Homo sapien
gatggctacgagttctgagcacaga

SEQ ID NO: 300040 - DNA, 25 bp, Homo sapien
cgtagatggctacgagttctgagca

SEQ ID NO: 300041 - DNA, 25 bp, Homo sapien
ctcgtagatggctacgagttctgag

SEQ ID NO: 300042 - DNA, 25 bp, Homo sapien
ctgcaaagcgaatgtagtcaggcct

SEQ ID NO: 300043 - DNA, 25 bp, Homo sapien
ggatttacggtgatttgaatcttct

SEQ ID NO: 300044 - DNA, 25 bp, Homo sapien
gacagtcaccaatgtggtgacagtc

SEQ ID NO: 300045 - DNA, 25 bp, Homo sapien
gacagtcactgtccctgtgttgtag

SEQ ID NO: 300046 - DNA, 25 bp, Homo sapien
tggaaaggacagtcaccaatgtggt

SEQ ID NO: 300047 - DNA, 25 bp, Homo sapien
ccttgactgtaacaggctccttcct

SEQ ID NO: 300048 - DNA, 25 bp, Homo sapien
ggggtctcgtgtgcaggcttttgac

SEQ ID NO: 300049 - DNA, 25 bp, Homo sapien
accttgactgtaacaggctccttcc

SEQ ID NO: 300050 - DNA, 25 bp, Homo sapien
tcctggcccacgggggtctcgtgtg

SEQ ID NO: 300051 - DNA, 25 bp, Homo sapien
gggaaaagatgacccgtgctcctgt

SEQ ID NO: 300052 - DNA, 25 bp, Homo sapien
agatgacccgtgctcctgtcgcttg

SEQ ID NO: 300053 - DNA, 25 bp, Homo sapien
tgtcgcttgccgacccagctgctgt

SEQ ID NO: 300054 - DNA, 25 bp, Homo sapien
gacccagctgctgttcgggctggcc

SEQ ID NO: 300055 - DNA, 25 bp, Homo sapien
tgtagtgggaatagctatttggaaa

SEQ ID NO: 300056 - DNA, 25 bp, Homo sapien
ggtcaggatcattgtagtgggaata

SEQ ID NO: 300057 - DNA, 25 bp, Homo sapien
ggatcattgtagtgggaatagctat

SEQ ID NO: 300058 - DNA, 25 bp, Homo sapien
cattgtagtgggaatagctatttgg

SEQ ID NO: 300059 - DNA, 25 bp, Homo sapien
cggtgccacttgatcctctgtaact

SEQ ID NO: 300060 - DNA, 25 bp, Homo sapien
tctgtaactcttccgtctccccgct

SEQ ID NO: 300061 - DNA, 25 bp, Homo sapien
aggagctgctttcggtgccacttga

SEQ ID NO: 300062 - DNA, 25 bp, Homo sapien
gctttcggtgccacttgatcctctg

SEQ ID NO: 300063 - DNA, 25 bp, Homo sapien
tttgggcaaacacatctgcaatctc

SEQ ID NO: 300064 - DNA, 25 bp, Homo sapien
tccgcactctcgaagcagtcgattt

SEQ ID NO: 300065 - DNA, 25 bp, Homo sapien
gaagcagtcgatttgggcaaacaca

SEQ ID NO: 300066 - DNA, 25 bp, Homo sapien
acatctgcaatctcatccttcagct

SEQ ID NO: 300067 - DNA, 25 bp, Homo sapien
gttgaacttcttgcgcccaatacac

SEQ ID NO: 300068 - DNA, 25 bp, Homo sapien
acttcttgcgcccaatacacagctc

SEQ ID NO: 300069 - DNA, 25 bp, Homo sapien
catgttgaacttcttgcgcccaata

SEQ ID NO: 300070 - DNA, 25 bp, Homo sapien
gaacttcttgcgcccaatacacagc

SEQ ID NO: 300071 - DNA, 25 bp, Homo sapien
agggggtacacagaagccgtgagca

SEQ ID NO: 300072 - DNA, 25 bp, Homo sapien
ggggtacacagaagccgtgagcagc

SEQ ID NO: 300073 - DNA, 25 bp, Homo sapien
gggtacacagaagccgtgagcagct

SEQ ID NO: 300074 - DNA, 25 bp, Homo sapien
ggtacacagaagccgtgagcagctg

SEQ ID NO: 300075 - DNA, 25 bp, Homo sapien
tttatacaggaaccgtgcaatgtcc

SEQ ID NO: 300076 - DNA, 25 bp, Homo sapien
gcagcttgtgctcaatgaaatactg

SEQ ID NO: 300077 - DNA, 25 bp, Homo sapien
cttgttgaggccctcgcctttatac

SEQ ID NO: 300078 - DNA, 25 bp, Homo sapien
ccaggtaggtaccaatggctgtctt

SEQ ID NO: 300079 - DNA, 25 bp, Homo sapien
cactaggagtgatgactttgctaac

SEQ ID NO: 300080 - DNA, 25 bp, Homo sapien
tattcactggtgtacacccagggct

SEQ ID NO: 300081 - DNA, 25 bp, Homo sapien
cgtgagcccctcaagcactaggagt

SEQ ID NO: 300082 - DNA, 25 bp, Homo sapien
tcccactagcatggacttcctgagg

SEQ ID NO: 300083 - DNA, 25 bp, Homo sapien
acccatatcacaccctgagggcaca

SEQ ID NO: 300084 - DNA, 25 bp, Homo sapien
gctgccatctggtgtgttcacatct

SEQ ID NO: 300085 - DNA, 25 bp, Homo sapien
tgagggcacacccttgtcctcccat

SEQ ID NO: 300086 - DNA, 25 bp, Homo sapien
tgtcccacccatatcacaccctgag

SEQ ID NO: 300087 - DNA, 25 bp, Homo sapien
aggttggcgaactcgtggcagtcca

SEQ ID NO: 300088 - DNA, 25 bp, Homo sapien
tgaggttggcgaactcgtggcagtc

SEQ ID NO: 300089 - DNA, 25 bp, Homo sapien
cgaggttgaggttggcgaactcgtg

SEQ ID NO: 300090 - DNA, 25 bp, Homo sapien
tggcgaactcgtggcagtccacgaa

SEQ ID NO: 300091 - DNA, 25 bp, Homo sapien
ctccaaagcccagatcagatgctcc

SEQ ID NO: 300092 - DNA, 25 bp, Homo sapien
gtattgtgaactcctactcaccctc

SEQ ID NO: 300093 - DNA, 25 bp, Homo sapien
aaagcccagatcagatgctccttct

SEQ ID NO: 300094 - DNA, 25 bp, Homo sapien
tccaaagcccagatcagatgctcct

SEQ ID NO: 300095 - DNA, 25 bp, Homo sapien
gctctggaagttggtggtttcgaca

SEQ ID NO: 300096 - DNA, 25 bp, Homo sapien
ggtttcgacagcttcaagctaagtt

SEQ ID NO: 300097 - DNA, 25 bp, Homo sapien
ttttgccttgctagggctccctttc

SEQ ID NO: 300098 - DNA, 25 bp, Homo sapien
gaaggtgagaactgggcctgtatct

SEQ ID NO: 300099 - DNA, 25 bp, Homo sapien
actggaagacgcctgggttgcagag

SEQ ID NO: 300100 - DNA, 25 bp, Homo sapien
ggcagtatcgagtggcaaaggcctc

SEQ ID NO: 300101 - DNA, 25 bp, Homo sapien
cctgggttgcagaggcagtatcgag

SEQ ID NO: 300102 - DNA, 25 bp, Homo sapien
tgcagaggcagtatcgagtggcaaa

SEQ ID NO: 300103 - DNA, 25 bp, Homo sapien
cggttgatgtatggattgagtaact

SEQ ID NO: 300104 - DNA, 25 bp, Homo sapien
gtgggaggtcgaggcgggcggatca

SEQ ID NO: 300105 - DNA, 25 bp, Homo sapien
ggctcacgcctgtaatctcagcact

SEQ ID NO: 300106 - DNA, 25 bp, Homo sapien
ttgagtaactttggcttggcatggt

SEQ ID NO: 300107 - DNA, 25 bp, Homo sapien
ctcaaaaggcggcctgtcccggacg

SEQ ID NO: 300108 - DNA, 25 bp, Homo sapien
catggacacaaagcgctcaaaaggc

SEQ ID NO: 300109 - DNA, 25 bp, Homo sapien
tcgggcaggtcgctaccattgttga

SEQ ID NO: 300110 - DNA, 25 bp, Homo sapien
gatggagaaggacaacacgtagcag

SEQ ID NO: 300111 - DNA, 25 bp, Homo sapien
tgaaatgtcctttcccggcttctcc

SEQ ID NO: 300112 - DNA, 25 bp, Homo sapien
cacgcctccgttctggccacttctt

SEQ ID NO: 300113 - DNA, 25 bp, Homo sapien
tctcctttcccaatcaggacacgcc

SEQ ID NO: 300114 - DNA, 25 bp, Homo sapien
ttgaaatgtcctttcccggcttctc

SEQ ID NO: 300115 - DNA, 25 bp, Homo sapien
caggctctgcccgtaacatttaaaa

SEQ ID NO: 300116 - DNA, 25 bp, Homo sapien
aactccagtgagtcattgcccaagg

SEQ ID NO: 300117 - DNA, 25 bp, Homo sapien
caagctctcatgctacggagtggct

SEQ ID NO: 300118 - DNA, 25 bp, Homo sapien
gaagatgggagtagacctgagctcc

SEQ ID NO: 300119 - DNA, 25 bp, Homo sapien
ccaaccctcccggtctggattgaag

SEQ ID NO: 300120 - DNA, 25 bp, Homo sapien
gtcctcagggatggagaatggctca

SEQ ID NO: 300121 - DNA, 25 bp, Homo sapien
gaggtcattgccgtcgtcctcaggg

SEQ ID NO: 300122 - DNA, 25 bp, Homo sapien
gccgtcgtcctcagggatggagaat

SEQ ID NO: 300123 - DNA, 25 bp, Homo sapien
catggagaggtaaaatcgcctgccc

SEQ ID NO: 300124 - DNA, 25 bp, Homo sapien
tgtgcatgcaacgatgtgtgcccgc

SEQ ID NO: 300125 - DNA, 25 bp, Homo sapien
tcacaaccacgtatgaagaggagac

SEQ ID NO: 300126 - DNA, 25 bp, Homo sapien
ggcctccgtgatcaggtcctaggaa

SEQ ID NO: 300127 - DNA, 25 bp, Homo sapien
tcaggatgaaccagcgccgtttcca

SEQ ID NO: 300128 - DNA, 25 bp, Homo sapien
gtcaggatgaaccagcgccgtttcc

SEQ ID NO: 300129 - DNA, 25 bp, Homo sapien
caggatgaaccagcgccgtttccac

SEQ ID NO: 300130 - DNA, 25 bp, Homo sapien
agtggtgaactcgaagtagtagagg

SEQ ID NO: 300131 - DNA, 25 bp, Homo sapien
tccaccttctgcaccgagaggttct

SEQ ID NO: 300132 - DNA, 25 bp, Homo sapien
ttctcaagaggtataattccccgtg

SEQ ID NO: 300133 - DNA, 25 bp, Homo sapien
gtataattccccgtggctccttgtc

SEQ ID NO: 300134 - DNA, 25 bp, Homo sapien
ccgagaggttctcaagaggtataat

SEQ ID NO: 300135 - DNA, 25 bp, Homo sapien
gctgagatgcggtacgattcgtgct

SEQ ID NO: 300136 - DNA, 25 bp, Homo sapien
tgccgtcgccatcggtcttgcaggc

SEQ ID NO: 300137 - DNA, 25 bp, Homo sapien
gactcgatccactggtcacgttcct

SEQ ID NO: 300138 - DNA, 25 bp, Homo sapien
cacgttcctcggcactggtggctga

SEQ ID NO: 300139 - DNA, 25 bp, Homo sapien
tcttccgagtagagaccaggtcgta

SEQ ID NO: 300140 - DNA, 25 bp, Homo sapien
ctggcaatcttcttcttccgagtag

SEQ ID NO: 300141 - DNA, 25 bp, Homo sapien
tcttcttcttccgagtagagaccag

SEQ ID NO: 300142 - DNA, 25 bp, Homo sapien
tccgagtagagaccaggtcgtagaa

SEQ ID NO: 300143 - DNA, 25 bp, Homo sapien
caggtgctgcaggcgatgggactct

SEQ ID NO: 300144 - DNA, 25 bp, Homo sapien
aggtgctgcaggcgatgggactctc

SEQ ID NO: 300145 - DNA, 25 bp, Homo sapien
ggtaacggggaacagcaatgatgtc

SEQ ID NO: 300146 - DNA, 25 bp, Homo sapien
caatgatgtctgtggcccaaaagag

SEQ ID NO: 300147 - DNA, 25 bp, Homo sapien
tctagagtcagctcgaggtaacggg

SEQ ID NO: 300148 - DNA, 25 bp, Homo sapien
cttcccctctagagtcagctcgagg

SEQ ID NO: 300149 - DNA, 25 bp, Homo sapien
tgcccgggtactggaagtcagctct

SEQ ID NO: 300150 - DNA, 25 bp, Homo sapien
taatacttctgcagagggtctcgag

SEQ ID NO: 300151 - DNA, 25 bp, Homo sapien
gactaagggagtagccagtgcatcc

SEQ ID NO: 300152 - DNA, 25 bp, Homo sapien
gcaacgttgaatccggagtcagcct

SEQ ID NO: 300153 - DNA, 25 bp, Homo sapien
ttaaatccttccgttgacttgggca

SEQ ID NO: 300154 - DNA, 25 bp, Homo sapien
tctgggagttcatttccgccgggac

SEQ ID NO: 300155 - DNA, 25 bp, Homo sapien
ggacctgggcccttgatatcagcgg

SEQ ID NO: 300156 - DNA, 25 bp, Homo sapien
gcgtgtaatgagctcaagccctgtg

SEQ ID NO: 300157 - DNA, 25 bp, Homo sapien
taatgcggagaacgacatcctgggt

SEQ ID NO: 300158 - DNA, 25 bp, Homo sapien
cctgggacacgcgtggcctgttctg

SEQ ID NO: 300159 - DNA, 25 bp, Homo sapien
tgcgcacggacggtttctcgaaagc

SEQ ID NO: 300160 - DNA, 25 bp, Homo sapien
gccttttcgggagatctctggctga

SEQ ID NO: 300161 - DNA, 25 bp, Homo sapien
tctgttctgaccgtccccgtgaggg

SEQ ID NO: 300162 - DNA, 25 bp, Homo sapien
aagtatgccggccatgcccacattt

SEQ ID NO: 300163 - DNA, 25 bp, Homo sapien
tgagggtggaagtatgccggccatg

SEQ ID NO: 300164 - DNA, 25 bp, Homo sapien
tgttctgaccgtccccgtgagggtg

SEQ ID NO: 300165 - DNA, 25 bp, Homo sapien
atattctcaggatggttgcggtgga

SEQ ID NO: 300166 - DNA, 25 bp, Homo sapien
aggagactctcgaggcatttgccaa

SEQ ID NO: 300167 - DNA, 25 bp, Homo sapien
ggatattctcaggatggttgcggtg

SEQ ID NO: 300168 - DNA, 25 bp, Homo sapien
aggaaggagactctcgaggcatttg

SEQ ID NO: 300169 - DNA, 25 bp, Homo sapien
gtggctgccagctccgagttgggca

SEQ ID NO: 300170 - DNA, 25 bp, Homo sapien
tacctgaatgcccacgagtcctggg

SEQ ID NO: 300171 - DNA, 25 bp, Homo sapien
agttgggcagcccagtctactcggg

SEQ ID NO: 300172 - DNA, 25 bp, Homo sapien
caggcgcaaagatgagtgaggcagc

SEQ ID NO: 300173 - DNA, 25 bp, Homo sapien
gagatgaaagttccgcctgggctgc

SEQ ID NO: 300174 - DNA, 25 bp, Homo sapien
gataccattcgagttcccaaagtgc

SEQ ID NO: 300175 - DNA, 25 bp, Homo sapien
tcattcatgtggatcggagcagcgg

SEQ ID NO: 300176 - DNA, 25 bp, Homo sapien
gagactggcgtctttccctcagcaa

SEQ ID NO: 300177 - DNA, 25 bp, Homo sapien
gctgctgttgccaggatcacagcag

SEQ ID NO: 300178 - DNA, 25 bp, Homo sapien
gctggcaatgggctgtggactctca

SEQ ID NO: 300179 - DNA, 25 bp, Homo sapien
gctgctgagggaatgaatcggtacc

SEQ ID NO: 300180 - DNA, 25 bp, Homo sapien
gctgcaggggtaccccttgggtgct

SEQ ID NO: 300181 - DNA, 25 bp, Homo sapien
gaggactcccacatggggaactggt

SEQ ID NO: 300182 - DNA, 25 bp, Homo sapien
ttaccccaattcccctggattgcag

SEQ ID NO: 300183 - DNA, 25 bp, Homo sapien
gggaactggttggccccatgagcct

SEQ ID NO: 300184 - DNA, 25 bp, Homo sapien
tgctcttggtctcactttaccccaa

SEQ ID NO: 300185 - DNA, 25 bp, Homo sapien
tgtgaacccttgctgtgttacgaaa

SEQ ID NO: 300186 - DNA, 25 bp, Homo sapien
tcctgtatggagagaatcaatttct

SEQ ID NO: 300187 - DNA, 25 bp, Homo sapien
ccaagttggctgtggttgggcacct

SEQ ID NO: 300188 - DNA, 25 bp, Homo sapien
ttgttttcctcaactcggagattcc

SEQ ID NO: 300189 - DNA, 25 bp, Homo sapien
aggagcaggctgggttcgtggcgcc

SEQ ID NO: 300190 - DNA, 25 bp, Homo sapien
agcaggctgggttcgtggcgcccca

SEQ ID NO: 300191 - DNA, 25 bp, Homo sapien
ggagcaggctgggttcgtggcgccc

SEQ ID NO: 300192 - DNA, 25 bp, Homo sapien
caggctgggttcgtggcgccccagc

SEQ ID NO: 300193 - DNA, 25 bp, Homo sapien
tctcggctcctatctcagccgccca

SEQ ID NO: 300194 - DNA, 25 bp, Homo sapien
ctgcccgaccccatcgtgggatctc

SEQ ID NO: 300195 - DNA, 25 bp, Homo sapien
cgaccccatcgtgggatctcggctc

SEQ ID NO: 300196 - DNA, 25 bp, Homo sapien
ggatctcggctcctatctcagccgc

SEQ ID NO: 300197 - DNA, 25 bp, Homo sapien
ccagagaagggagttgacaacccca

SEQ ID NO: 300198 - DNA, 25 bp, Homo sapien
gactgaagcccctctagggcaggga

SEQ ID NO: 300199 - DNA, 25 bp, Homo sapien
gaaaccagtcgtctttactgtgctg

SEQ ID NO: 300200 - DNA, 25 bp, Homo sapien
cagatttagcattagacatcgggca

SEQ ID NO: 300201 - DNA, 25 bp, Homo sapien
gctcagtgcggcactctccagcctc

SEQ ID NO: 300202 - DNA, 25 bp, Homo sapien
ttcaggaaccaggtgcagatgggtc

SEQ ID NO: 300203 - DNA, 25 bp, Homo sapien
ctgagccctcacactgatctgtcac

SEQ ID NO: 300204 - DNA, 25 bp, Homo sapien
cgctctcgatgctgcctttcaggaa

SEQ ID NO: 300205 - DNA, 25 bp, Homo sapien
aaacgtggatttctcagacctcatc

SEQ ID NO: 300206 - DNA, 25 bp, Homo sapien
tgtccaaacgtggatttctcagacc

SEQ ID NO: 300207 - DNA, 25 bp, Homo sapien
ggctcttgtgaacagtctctggctt

SEQ ID NO: 300208 - DNA, 25 bp, Homo sapien
ctttctgtgtccaaacgtggatttc

SEQ ID NO: 300209 - DNA, 25 bp, Homo sapien
tgcattggagcagacgagggttctc

SEQ ID NO: 300210 - DNA, 25 bp, Homo sapien
agacattccccgatgaggaagaggg

SEQ ID NO: 300211 - DNA, 25 bp, Homo sapien
agcagacgagggttctctgacaggc

SEQ ID NO: 300212 - DNA, 25 bp, Homo sapien
caggccggctcgtggatctctgaag

SEQ ID NO: 300213 - DNA, 25 bp, Homo sapien
tcagaggcggccgtcagtgtgggct

SEQ ID NO: 300214 - DNA, 25 bp, Homo sapien
ggggctcgatgtcgacccctctgca

SEQ ID NO: 300215 - DNA, 25 bp, Homo sapien
tgcaggccccccgtagcctcagagg

SEQ ID NO: 300216 - DNA, 25 bp, Homo sapien
tgtcgacccctctgcaccgacagag

SEQ ID NO: 300217 - DNA, 25 bp, Homo sapien
ttcaaaggaccacagctgtcacgct

SEQ ID NO: 300218 - DNA, 25 bp, Homo sapien
tacaccaggatcttgttattcaagc

SEQ ID NO: 300219 - DNA, 25 bp, Homo sapien
ccaggatcttgttattcaagctaat

SEQ ID NO: 300220 - DNA, 25 bp, Homo sapien
gataattcgttaattataacagcca

SEQ ID NO: 300221 - DNA, 25 bp, Homo sapien
tttaataatgaacgaagttgaagtg

SEQ ID NO: 300222 - DNA, 25 bp, Homo sapien
cagcaggcctgaagtaataagggac

SEQ ID NO: 300223 - DNA, 25 bp, Homo sapien
catttatcaggggagtttaataatg

SEQ ID NO: 300224 - DNA, 25 bp, Homo sapien
aataatgaacgaagttgaagtgtct

SEQ ID NO: 300225 - DNA, 25 bp, Homo sapien
tcatttgcagtgctccttagcgcca

SEQ ID NO: 300226 - DNA, 25 bp, Homo sapien
tctgccagcgaatgggggacccgtt

SEQ ID NO: 300227 - DNA, 25 bp, Homo sapien
cagagatcgggcctataaaggaaga

SEQ ID NO: 300228 - DNA, 25 bp, Homo sapien
ttagcgccaggcataatggagatgg

SEQ ID NO: 300229 - DNA, 25 bp, Homo sapien
taggctgcggctatggctttttctg

SEQ ID NO: 300230 - DNA, 25 bp, Homo sapien
aagatgtagctggtagtaactggga

SEQ ID NO: 300231 - DNA, 25 bp, Homo sapien
tttctgctcgatgccagcaggaggg

SEQ ID NO: 300232 - DNA, 25 bp, Homo sapien
ggcaagtgaggcatggtctctggcc

SEQ ID NO: 300233 - DNA, 25 bp, Homo sapien
cagtgcaccttggtctctaggccca

SEQ ID NO: 300234 - DNA, 25 bp, Homo sapien
tctctgcggcggtgggaagttctcc

SEQ ID NO: 300235 - DNA, 25 bp, Homo sapien
tctgtgatgtgcgtttctctgcggc

SEQ ID NO: 300236 - DNA, 25 bp, Homo sapien
gcccacgagtctctgggtctgtgat

SEQ ID NO: 300237 - DNA, 25 bp, Homo sapien
gaccgacgcacagccgcgtagcggt

SEQ ID NO: 300238 - DNA, 25 bp, Homo sapien
gagtttgcggctgtgcatgtgagca

SEQ ID NO: 300239 - DNA, 25 bp, Homo sapien
atccacttggcggaggcagacctgg

SEQ ID NO: 300240 - DNA, 25 bp, Homo sapien
cgtagcggtggctcgatatggtcca

SEQ ID NO: 300241 - DNA, 25 bp, Homo sapien
ggtgctgccgggtcaaggcattcat

SEQ ID NO: 300242 - DNA, 25 bp, Homo sapien
ggcattcatcctctagctggtaaga

SEQ ID NO: 300243 - DNA, 25 bp, Homo sapien
tctgccctcatcttttcgaatcggg

SEQ ID NO: 300244 - DNA, 25 bp, Homo sapien
tgcagaggctcgatggtggacggtg

SEQ ID NO: 300245 - DNA, 25 bp, Homo sapien
gaaaggccaagacaatcatccacag

SEQ ID NO: 300246 - DNA, 25 bp, Homo sapien
taacgggtcccagccaattgtgatg

SEQ ID NO: 300247 - DNA, 25 bp, Homo sapien
ccccttgcgaacaggaccagatttt

SEQ ID NO: 300248 - DNA, 25 bp, Homo sapien
ttgtttggagcctcagcatgccggg

SEQ ID NO: 300249 - DNA, 25 bp, Homo sapien
gtggcaattggcactgaaggcaccc

SEQ ID NO: 300250 - DNA, 25 bp, Homo sapien
cttgtgataggcagtccctggcagg

SEQ ID NO: 300251 - DNA, 25 bp, Homo sapien
agctgggtgcccgatgaatcctgaa

SEQ ID NO: 300252 - DNA, 25 bp, Homo sapien
cctaaccctttaggcagtgacatgg

SEQ ID NO: 300253 - DNA, 25 bp, Homo sapien
tcctggcgtttgaaagaaacctgga

SEQ ID NO: 300254 - DNA, 25 bp, Homo sapien
taaccctcaaggattagcatttgtg

SEQ ID NO: 300255 - DNA, 25 bp, Homo sapien
tcaaatgccgggaaggacctgaaca

SEQ ID NO: 300256 - DNA, 25 bp, Homo sapien
gcaaaggacaccctaagggtacaca

SEQ ID NO: 300257 - DNA, 25 bp, Homo sapien
gtcatgagaatgtacggcccgtgga

SEQ ID NO: 300258 - DNA, 25 bp, Homo sapien
gagtctgttctcacacctgtgcgca

SEQ ID NO: 300259 - DNA, 25 bp, Homo sapien
tcaagttctcatgggcaggctcagg

SEQ ID NO: 300260 - DNA, 25 bp, Homo sapien
actaacacgtgtgcgttcctggcgg

SEQ ID NO: 300261 - DNA, 25 bp, Homo sapien
gcaaatgtgtctcaggcgaagaggt

SEQ ID NO: 300262 - DNA, 25 bp, Homo sapien
catccttgtatgtgcgtctttgtgc

SEQ ID NO: 300263 - DNA, 25 bp, Homo sapien
tcctaccaggaatgtgtaagggccc

SEQ ID NO: 300264 - DNA, 25 bp, Homo sapien
aaaccttgggtaaataactgctctg

SEQ ID NO: 300265 - DNA, 25 bp, Homo sapien
tccatattatctgctatgagtttaa

SEQ ID NO: 300266 - DNA, 25 bp, Homo sapien
ctttgtttatagaccgggcgctgtg

SEQ ID NO: 300267 - DNA, 25 bp, Homo sapien
tctgctatgagtttaatgggttcat

SEQ ID NO: 300268 - DNA, 25 bp, Homo sapien
tttgtttatagaccgggcgctgtgg

SEQ ID NO: 300269 - DNA, 25 bp, Homo sapien
cctgtagttgcccaatgggtattga

SEQ ID NO: 300270 - DNA, 25 bp, Homo sapien
caatgggtattgaccgagggcctga

SEQ ID NO: 300271 - DNA, 25 bp, Homo sapien
agccccagccgatcgatcctgtagt

SEQ ID NO: 300272 - DNA, 25 bp, Homo sapien
gggtcagggtcgctggtccagaaga

SEQ ID NO: 300273 - DNA, 25 bp, Homo sapien
tggcgcctttaggccctgagcccag

SEQ ID NO: 300274 - DNA, 25 bp, Homo sapien
cacccctggcgcctttaggccctga

SEQ ID NO: 300275 - DNA, 25 bp, Homo sapien
ccctggcgcctttaggccctgagcc

SEQ ID NO: 300276 - DNA, 25 bp, Homo sapien
gggtggccagatgccccacccctgg

SEQ ID NO: 300277 - DNA, 25 bp, Homo sapien
cagcggtaaggaacgtgggccatac

SEQ ID NO: 300278 - DNA, 25 bp, Homo sapien
cagatccccacgagttaacacttgg

SEQ ID NO: 300279 - DNA, 25 bp, Homo sapien
taccagtaggcagtttccgtgaaca

SEQ ID NO: 300280 - DNA, 25 bp, Homo sapien
gccttgtggcccttgatgacaggaa

SEQ ID NO: 300281 - DNA, 25 bp, Homo sapien
gcggactcgtcgtctgcagcggcgg

SEQ ID NO: 300282 - DNA, 25 bp, Homo sapien
ctggcagcccgggagagtcgctggg

SEQ ID NO: 300283 - DNA, 25 bp, Homo sapien
ggcgcgggacgagggcggactcgtc

SEQ ID NO: 300284 - DNA, 25 bp, Homo sapien
tcgctgggccggtctgcgccgccct

SEQ ID NO: 300285 - DNA, 25 bp, Homo sapien
cacttcctgcgggcatccagctggg

SEQ ID NO: 300286 - DNA, 25 bp, Homo sapien
ccaccgctggacagcgggtccctgt

SEQ ID NO: 300287 - DNA, 25 bp, Homo sapien
gtccctgtcatggttacggcagctc

SEQ ID NO: 300288 - DNA, 25 bp, Homo sapien
agcgggtccctgtcatggttacggc

SEQ ID NO: 300289 - DNA, 25 bp, Homo sapien
gtgggaatgacgcaagaacaagttt

SEQ ID NO: 300290 - DNA, 25 bp, Homo sapien
tcgctgtggaggcacatgtggtcgc

SEQ ID NO: 300291 - DNA, 25 bp, Homo sapien
agaacaagttttggagccgggatcg

SEQ ID NO: 300292 - DNA, 25 bp, Homo sapien
cctatagaggatagtcagggcctgg

SEQ ID NO: 300293 - DNA, 25 bp, Homo sapien
cctgaacccccatggtcacttttga

SEQ ID NO: 300294 - DNA, 25 bp, Homo sapien
tccctgacttcttgaggcagcacct

SEQ ID NO: 300295 - DNA, 25 bp, Homo sapien
agcttcctccccaatcttgcgatga

SEQ ID NO: 300296 - DNA, 25 bp, Homo sapien
tcacttttgacttgggggaccagct

SEQ ID NO: 300297 - DNA, 25 bp, Homo sapien
ctttgtgaagctgggtaaacagcca

SEQ ID NO: 300298 - DNA, 25 bp, Homo sapien
ttgtcaaactgacgtaggagccttg

SEQ ID NO: 300299 - DNA, 25 bp, Homo sapien
catgcgtgagcatattcaagtctct

SEQ ID NO: 300300 - DNA, 25 bp, Homo sapien
tgagaaggcccgcaggaaaagactt

SEQ ID NO: 300301 - DNA, 25 bp, Homo sapien
ggtgaggtccccaaatgcagaggct

SEQ ID NO: 300302 - DNA, 25 bp, Homo sapien
gaagcagctatagatgttcaagcgc

SEQ ID NO: 300303 - DNA, 25 bp, Homo sapien
taaatggcactctcctaaggtgagg

SEQ ID NO: 300304 - DNA, 25 bp, Homo sapien
gggttcatggctcgtctctcccagg

SEQ ID NO: 300305 - DNA, 25 bp, Homo sapien
ggaaggacgtgtccccgaagacatc

SEQ ID NO: 300306 - DNA, 25 bp, Homo sapien
cgccacggcccacatgcatggtgtg

SEQ ID NO: 300307 - DNA, 25 bp, Homo sapien
tgagcttgccaaccacgaggctgtc

SEQ ID NO: 300308 - DNA, 25 bp, Homo sapien
ggctgctgtcgaagctgagcttgcc

SEQ ID NO: 300309 - DNA, 25 bp, Homo sapien
agtgagggcccaaggtcgaggtcca

SEQ ID NO: 300310 - DNA, 25 bp, Homo sapien
gacaagagagagtcagagcggcgaa

SEQ ID NO: 300311 - DNA, 25 bp, Homo sapien
ggaaccatcccggtctcggtcatgc

SEQ ID NO: 300312 - DNA, 25 bp, Homo sapien
tgacccctagcagctcgctgaggag

SEQ ID NO: 300313 - DNA, 25 bp, Homo sapien
ctgggtagtggtggccgccatccca

SEQ ID NO: 300314 - DNA, 25 bp, Homo sapien
tttgcagcaggacccgtgggggttg

SEQ ID NO: 300315 - DNA, 25 bp, Homo sapien
acccagctgttaccccattgggaca

SEQ ID NO: 300316 - DNA, 25 bp, Homo sapien
gcccaacccagctgttaccccattg

SEQ ID NO: 300317 - DNA, 25 bp, Homo sapien
aaattcaaaggtgtttgcttgcact

SEQ ID NO: 300318 - DNA, 25 bp, Homo sapien
ccactcttcgtccaggctctcccag

SEQ ID NO: 300319 - DNA, 25 bp, Homo sapien
tcctcctcagcatccgcaaattcaa

SEQ ID NO: 300320 - DNA, 25 bp, Homo sapien
ggcgccctccactcttcgtccaggc

SEQ ID NO: 300321 - DNA, 25 bp, Homo sapien
tggccctgtgtggtacactccctgc

SEQ ID NO: 300322 - DNA, 25 bp, Homo sapien
agggcctctgggagcataaaagtcc

SEQ ID NO: 300323 - DNA, 25 bp, Homo sapien
ccctctccggtctggtaggaaccag

SEQ ID NO: 300324 - DNA, 25 bp, Homo sapien
taaaagtcccagagcaagcctggcc

SEQ ID NO: 300325 - DNA, 25 bp, Homo sapien
aacagccttatttaatcaggcccca

SEQ ID NO: 300326 - DNA, 25 bp, Homo sapien
cacccggctgccatgttgggaggct

SEQ ID NO: 300327 - DNA, 25 bp, Homo sapien
gaaacagatatgaggacacccggct

SEQ ID NO: 300328 - DNA, 25 bp, Homo sapien
gaggctgagacatgctcccaacagt

SEQ ID NO: 300329 - DNA, 25 bp, Homo sapien
gaactgcagataagggctcccacct

SEQ ID NO: 300330 - DNA, 25 bp, Homo sapien
gtttttatcgagtcttcctgtggca

SEQ ID NO: 300331 - DNA, 25 bp, Homo sapien
cgagtcttcctgtggcaagaactgt

SEQ ID NO: 300332 - DNA, 25 bp, Homo sapien
tatcgagtcttcctgtggcaagaac

SEQ ID NO: 300333 - DNA, 25 bp, Homo sapien
aataatctgtttttatcgagtcttc

SEQ ID NO: 300334 - DNA, 25 bp, Homo sapien
agagctgtcaagcggctgcattgcg

SEQ ID NO: 300335 - DNA, 25 bp, Homo sapien
gctgtcaagcggctgcattgcggtt

SEQ ID NO: 300336 - DNA, 25 bp, Homo sapien
gagagctgtcaagcggctgcattgc

SEQ ID NO: 300337 - DNA, 25 bp, Homo sapien
agctgtcaagcggctgcattgcggt

SEQ ID NO: 300338 - DNA, 25 bp, Homo sapien
cttgtggcgtcacgacctggcggcg

SEQ ID NO: 300339 - DNA, 25 bp, Homo sapien
gcgtcacgacctggcggcgcctggt

SEQ ID NO: 300340 - DNA, 25 bp, Homo sapien
gcctggtccccgactcacctgggtc

SEQ ID NO: 300341 - DNA, 25 bp, Homo sapien
gcggcgcctggtccccgactcacct

SEQ ID NO: 300342 - DNA, 25 bp, Homo sapien
ggcaccatagagaggccaacgagct

SEQ ID NO: 300343 - DNA, 25 bp, Homo sapien
tctaactcgttctgcgtcacggaga

SEQ ID NO: 300344 - DNA, 25 bp, Homo sapien
catggaaaccccaagggacgctcta

SEQ ID NO: 300345 - DNA, 25 bp, Homo sapien
tcacggagatgtctgtgaccgcctc

SEQ ID NO: 300346 - DNA, 25 bp, Homo sapien
cctccagagtctccggctccatcgc

SEQ ID NO: 300347 - DNA, 25 bp, Homo sapien
ccagagtctccggctccatcgcggg

SEQ ID NO: 300348 - DNA, 25 bp, Homo sapien
tgattcgcgcctccagagtctccgg

SEQ ID NO: 300349 - DNA, 25 bp, Homo sapien
ttcgcgcctccagagtctccggctc

SEQ ID NO: 300350 - DNA, 25 bp, Homo sapien
agggatccgacaggtgggcggcgcc

SEQ ID NO: 300351 - DNA, 25 bp, Homo sapien
gctcccaccgctggaccgcgccggg

SEQ ID NO: 300352 - DNA, 25 bp, Homo sapien
gggtcatggcccagggatccgacag

SEQ ID NO: 300353 - DNA, 25 bp, Homo sapien
gggccgactgaggacaccgcccctc

SEQ ID NO: 300354 - DNA, 25 bp, Homo sapien
ccgctactccgtgaagcaatgtgag

SEQ ID NO: 300355 - DNA, 25 bp, Homo sapien
ctcccgggtgtgagatgcaaccccg

SEQ ID NO: 300356 - DNA, 25 bp, Homo sapien
ccgggccgctactccgtgaagcaat

SEQ ID NO: 300357 - DNA, 25 bp, Homo sapien
ggaaccgctcgcgtgctccttcccc

SEQ ID NO: 300358 - DNA, 25 bp, Homo sapien
agagagtggaggattcggggcctga

SEQ ID NO: 300359 - DNA, 25 bp, Homo sapien
gagtggaggattcggggcctgaaaa

SEQ ID NO: 300360 - DNA, 25 bp, Homo sapien
aggattcggggcctgaaaatagtag

SEQ ID NO: 300361 - DNA, 25 bp, Homo sapien
gaggattcggggcctgaaaatagta

SEQ ID NO: 300362 - DNA, 25 bp, Homo sapien
taggaagctacgtctgaggagaaac

SEQ ID NO: 300363 - DNA, 25 bp, Homo sapien
tagaagcctttgaaggaagttcagc

SEQ ID NO: 300364 - DNA, 25 bp, Homo sapien
ctgggaaaggcatcttggagactga

SEQ ID NO: 300365 - DNA, 25 bp, Homo sapien
ttaatacttctggagtctaagactc

SEQ ID NO: 300366 - DNA, 25 bp, Homo sapien
ggtgacaagagtgaaaacccgtctc

SEQ ID NO: 300367 - DNA, 25 bp, Homo sapien
tgggtgacaagagtgaaaacccgtc

SEQ ID NO: 300368 - DNA, 25 bp, Homo sapien
tttgagaggcctatataggcggatc

SEQ ID NO: 300369 - DNA, 25 bp, Homo sapien
tgagaggcctatataggcggatcac

SEQ ID NO: 300370 - DNA, 25 bp, Homo sapien
ttgagaggcctatataggcggatca

SEQ ID NO: 300371 - DNA, 25 bp, Homo sapien
gttggggagaacacctagagaggga

SEQ ID NO: 300372 - DNA, 25 bp, Homo sapien
tgccactctatagtgctgacaataa

SEQ ID NO: 300373 - DNA, 25 bp, Homo sapien
tgaccctcagccctcttaattctac

SEQ ID NO: 300374 - DNA, 25 bp, Homo sapien
aggggagtaccctccctagcaggca

SEQ ID NO: 300375 - DNA, 25 bp, Homo sapien
gaagcgctggcatcatgagacatca

SEQ ID NO: 300376 - DNA, 25 bp, Homo sapien
tagtccctcagaaaaatgaagcccc

SEQ ID NO: 300377 - DNA, 25 bp, Homo sapien
gaagctgattctggactgctcctgg

SEQ ID NO: 300378 - DNA, 25 bp, Homo sapien
ggtaactgtctactctgcctccgag

SEQ ID NO: 300379 - DNA, 25 bp, Homo sapien
aaatactttttgcatgggaaggcca

SEQ ID NO: 300380 - DNA, 25 bp, Homo sapien
catggcggcagccagagctcgatct

SEQ ID NO: 300381 - DNA, 25 bp, Homo sapien
gccagttctgcccacgcctgagcac

SEQ ID NO: 300382 - DNA, 25 bp, Homo sapien
cagagaaggatctgtggacaggagg

SEQ ID NO: 300383 - DNA, 25 bp, Homo sapien
ccttcattcccttgggagtggctcc

SEQ ID NO: 300384 - DNA, 25 bp, Homo sapien
cttgggagtggctccggtgtcccct

SEQ ID NO: 300385 - DNA, 25 bp, Homo sapien
ggagtggctccggtgtccccttctc

SEQ ID NO: 300386 - DNA, 25 bp, Homo sapien
agcctgctacggcactgcatcccag

SEQ ID NO: 300387 - DNA, 25 bp, Homo sapien
cgcagaagccgttgatgctggccca

SEQ ID NO: 300388 - DNA, 25 bp, Homo sapien
tgagctgctcgcagaagccgttgat

SEQ ID NO: 300389 - DNA, 25 bp, Homo sapien
ggcccagtcgagctccttgttcagg

SEQ ID NO: 300390 - DNA, 25 bp, Homo sapien
ttgatgctggcccagtcgagctcct

SEQ ID NO: 300391 - DNA, 25 bp, Homo sapien
cagcagccgggtggcgagtggaggc

SEQ ID NO: 300392 - DNA, 25 bp, Homo sapien
caaggcctggatcgcctcccactcc

SEQ ID NO: 300393 - DNA, 25 bp, Homo sapien
cgtcaaggcctggatcgcctcccac

SEQ ID NO: 300394 - DNA, 25 bp, Homo sapien
ccagcagccgggtggcgagtggagg

SEQ ID NO: 300395 - DNA, 25 bp, Homo sapien
cagtcttggcctcccttggtgtcgt

SEQ ID NO: 300396 - DNA, 25 bp, Homo sapien
ttggcctcccttggtgtcgtcacat

SEQ ID NO: 300397 - DNA, 25 bp, Homo sapien
ggcgggggacggatggtggcctctc

SEQ ID NO: 300398 - DNA, 25 bp, Homo sapien
tcccttggtgtcgtcacatggcggg

SEQ ID NO: 300399 - DNA, 25 bp, Homo sapien
caacaggcctacgtgtatggatgct

SEQ ID NO: 300400 - DNA, 25 bp, Homo sapien
gctttacaaacgtgcagatctctgg

SEQ ID NO: 300401 - DNA, 25 bp, Homo sapien
catgtgttgaacacgcttcctggag

SEQ ID NO: 300402 - DNA, 25 bp, Homo sapien
tggaccagatgaccctagagggcct

SEQ ID NO: 300403 - DNA, 25 bp, Homo sapien
gggctttcagaagggagggaatggc

SEQ ID NO: 300404 - DNA, 25 bp, Homo sapien
ccatgggtgggctttcagaagggag

SEQ ID NO: 300405 - DNA, 25 bp, Homo sapien
acgcccaggtgcatcagaggccgtg

SEQ ID NO: 300406 - DNA, 25 bp, Homo sapien
ggcctgtgaggttggaagattcaga

SEQ ID NO: 300407 - DNA, 25 bp, Homo sapien
cttgggagacacgaccttgatgagc

SEQ ID NO: 300408 - DNA, 25 bp, Homo sapien
ggaacttgcccacttcgtcgtggaa

SEQ ID NO: 300409 - DNA, 25 bp, Homo sapien
ctcgttgagaaagcggaacttgccc

SEQ ID NO: 300410 - DNA, 25 bp, Homo sapien
gtggaaccgcttgccgcagctcttc

SEQ ID NO: 300411 - DNA, 25 bp, Homo sapien
tctccgatgtccgagagcccagata

SEQ ID NO: 300412 - DNA, 25 bp, Homo sapien
tgcgattttcacctcctcgggcagg

SEQ ID NO: 300413 - DNA, 25 bp, Homo sapien
cccactgtccagctgtagaggagct

SEQ ID NO: 300414 - DNA, 25 bp, Homo sapien
ttctttagcatctggtaggcctctg

SEQ ID NO: 300415 - DNA, 25 bp, Homo sapien
aagatcacattcttcggccgtggag

SEQ ID NO: 300416 - DNA, 25 bp, Homo sapien
tggaagcttggggtcggactttaca

SEQ ID NO: 300417 - DNA, 25 bp, Homo sapien
gatcacattcttcggccgtggagga

SEQ ID NO: 300418 - DNA, 25 bp, Homo sapien
gaaggggaaaggtagtgtcatctgg

SEQ ID NO: 300419 - DNA, 25 bp, Homo sapien
gatgggagctcttcagcaggcgggc

SEQ ID NO: 300420 - DNA, 25 bp, Homo sapien
cttcgggatgggagctcttcagcag

SEQ ID NO: 300421 - DNA, 25 bp, Homo sapien
cgggatgggagctcttcagcaggcg

SEQ ID NO: 300422 - DNA, 25 bp, Homo sapien
ttcgggatgggagctcttcagcagg

SEQ ID NO: 300423 - DNA, 25 bp, Homo sapien
tctttgatgagcttattggctgcgc

SEQ ID NO: 300424 - DNA, 25 bp, Homo sapien
ttgatgagcttattggctgcgcgga

SEQ ID NO: 300425 - DNA, 25 bp, Homo sapien
ccatctctttgatgagcttattggc

SEQ ID NO: 300426 - DNA, 25 bp, Homo sapien
ctcctgcaccatctctttgatgagc

SEQ ID NO: 300427 - DNA, 25 bp, Homo sapien
ggcattcaccctcttcgagatcttc

SEQ ID NO: 300428 - DNA, 25 bp, Homo sapien
tcaccatctccgtgagcagtttcac

SEQ ID NO: 300429 - DNA, 25 bp, Homo sapien
catcaccatctccgtgagcagtttc

SEQ ID NO: 300430 - DNA, 25 bp, Homo sapien
ctcttcgagatcttctccatccgct

SEQ ID NO: 300431 - DNA, 25 bp, Homo sapien
gggcagggagtggggtaggcaggga

SEQ ID NO: 300432 - DNA, 25 bp, Homo sapien
gcagggagtggggtaggcagggagg

SEQ ID NO: 300433 - DNA, 25 bp, Homo sapien
gagtgggcagggagtggggtaggca

SEQ ID NO: 300434 - DNA, 25 bp, Homo sapien
tgtggagtgggcagggagtggggta

SEQ ID NO: 300435 - DNA, 25 bp, Homo sapien
cagcaggatgggcgggtcagggtcc

SEQ ID NO: 300436 - DNA, 25 bp, Homo sapien
ggcagcaggatgggcgggtcagggt

SEQ ID NO: 300437 - DNA, 25 bp, Homo sapien
atgggcgggtcagggtccgcgtggg

SEQ ID NO: 300438 - DNA, 25 bp, Homo sapien
caggatgggcgggtcagggtccgcg

SEQ ID NO: 300439 - DNA, 25 bp, Homo sapien
catccgctcacagcgctggtacagt

SEQ ID NO: 300440 - DNA, 25 bp, Homo sapien
gagcgtgggccgcatccgctcacag

SEQ ID NO: 300441 - DNA, 25 bp, Homo sapien
tcactcgccagtcggaagagcgtgg

SEQ ID NO: 300442 - DNA, 25 bp, Homo sapien
tgtcctctgtgtcactcgccagtcg

SEQ ID NO: 300443 - DNA, 25 bp, Homo sapien
tagtaaataagatgcctgttaaggg

SEQ ID NO: 300444 - DNA, 25 bp, Homo sapien
ctgcgggtagtaaataagatgcctg

SEQ ID NO: 300445 - DNA, 25 bp, Homo sapien
gaaacccaaggtcggtgctggagaa

SEQ ID NO: 300446 - DNA, 25 bp, Homo sapien
gaggagaaacccaaggtcggtgctg

SEQ ID NO: 300447 - DNA, 25 bp, Homo sapien
ggccctggcagaagccgtcaggctc

SEQ ID NO: 300448 - DNA, 25 bp, Homo sapien
ggcagaagccgtcaggctcaggtct

SEQ ID NO: 300449 - DNA, 25 bp, Homo sapien
ctgggggcagatggccctccgtctc

SEQ ID NO: 300450 - DNA, 25 bp, Homo sapien
gggcaagtcattttcctcccttagc

SEQ ID NO: 300451 - DNA, 25 bp, Homo sapien
tttgatcagtgccagatccctgagg

SEQ ID NO: 300452 - DNA, 25 bp, Homo sapien
gaaacagcccatctcgtctgctgag

SEQ ID NO: 300453 - DNA, 25 bp, Homo sapien
gacacgtgggcagagatcaaggaaa

SEQ ID NO: 300454 - DNA, 25 bp, Homo sapien
tgcacccggcgttttgcaaactttg

SEQ ID NO: 300455 - DNA, 25 bp, Homo sapien
tgtggcatcaccgttgacctcctca

SEQ ID NO: 300456 - DNA, 25 bp, Homo sapien
cacctgggtgaggttgtcattggcc

SEQ ID NO: 300457 - DNA, 25 bp, Homo sapien
agccggctgtggcatcaccgttgac

SEQ ID NO: 300458 - DNA, 25 bp, Homo sapien
accccgcaccagctgcttatacagg

SEQ ID NO: 300459 - DNA, 25 bp, Homo sapien
ccagagacatgagctcgtcgtcaag

SEQ ID NO: 300460 - DNA, 25 bp, Homo sapien
gctcgtcgtcaagcagggaaactga

SEQ ID NO: 300461 - DNA, 25 bp, Homo sapien
ggcatagctgggtaggtggtgcccg

SEQ ID NO: 300462 - DNA, 25 bp, Homo sapien
ggtggtgcccgcaggcgggagatcc

SEQ ID NO: 300463 - DNA, 25 bp, Homo sapien
gctggttagcttatccgaggccggc

SEQ ID NO: 300464 - DNA, 25 bp, Homo sapien
gtgggcaccaccaaaggaagcactc

SEQ ID NO: 300465 - DNA, 25 bp, Homo sapien
cgtgagggtcacctaagacaggaca

SEQ ID NO: 300466 - DNA, 25 bp, Homo sapien
cagttgtgaagtgggcctaatgctc

SEQ ID NO: 300467 - DNA, 25 bp, Homo sapien
gatccctgtggatggccctagaact

SEQ ID NO: 300468 - DNA, 25 bp, Homo sapien
tccaaaccgaagtgctacctgacag

SEQ ID NO: 300469 - DNA, 25 bp, Homo sapien
cctagaactagctgccgatgggaag

SEQ ID NO: 300470 - DNA, 25 bp, Homo sapien
tgccctggaatactgtcagccaagt

SEQ ID NO: 300471 - DNA, 25 bp, Homo sapien
gggccatgtgtgctggcatggggct

SEQ ID NO: 300472 - DNA, 25 bp, Homo sapien
gccatgtgtgctggcatggggctcc

SEQ ID NO: 300473 - DNA, 25 bp, Homo sapien
tctgaggctcagcacggaggggaga

SEQ ID NO: 300474 - DNA, 25 bp, Homo sapien
gctcagcacggaggggagaaaccca

SEQ ID NO: 300475 - DNA, 25 bp, Homo sapien
agctgttccatccggtaccatccag

SEQ ID NO: 300476 - DNA, 25 bp, Homo sapien
ctggaagctgttccatccggtacca

SEQ ID NO: 300477 - DNA, 25 bp, Homo sapien
ggaagctgttccatccggtaccatc

SEQ ID NO: 300478 - DNA, 25 bp, Homo sapien
gaagctgttccatccggtaccatcc

SEQ ID NO: 300479 - DNA, 25 bp, Homo sapien
gggggcctgggccagagcaggggct

SEQ ID NO: 300480 - DNA, 25 bp, Homo sapien
ggggctgggggctcagtggcatccg

SEQ ID NO: 300481 - DNA, 25 bp, Homo sapien
ggctgggggctcagtggcatccgac

SEQ ID NO: 300482 - DNA, 25 bp, Homo sapien
ctgggggctcagtggcatccgacga

SEQ ID NO: 300483 - DNA, 25 bp, Homo sapien
ttccccaggaggtctaggtcgtcca

SEQ ID NO: 300484 - DNA, 25 bp, Homo sapien
tctaggtcgtccagaccgctgcttg

SEQ ID NO: 300485 - DNA, 25 bp, Homo sapien
gaggtctaggtcgtccagaccgctg

SEQ ID NO: 300486 - DNA, 25 bp, Homo sapien
caggaggtctaggtcgtccagaccg

SEQ ID NO: 300487 - DNA, 25 bp, Homo sapien
gaagttgctggtttgtgggaacagg

SEQ ID NO: 300488 - DNA, 25 bp, Homo sapien
caccccatgccagccatggtgggcc

SEQ ID NO: 300489 - DNA, 25 bp, Homo sapien
tggacaagcccaggagaagttgctg

SEQ ID NO: 300490 - DNA, 25 bp, Homo sapien
tgtgggaacagggagtgctccccac

SEQ ID NO: 300491 - DNA, 25 bp, Homo sapien
gctcggttggtacgggctgctgcgg

SEQ ID NO: 300492 - DNA, 25 bp, Homo sapien
ttattctgcaggtcccggagtgtga

SEQ ID NO: 300493 - DNA, 25 bp, Homo sapien
tcttattctgcaggtcccggagtgt

SEQ ID NO: 300494 - DNA, 25 bp, Homo sapien
tggccagtgagagctcggttggtac

SEQ ID NO: 300495 - DNA, 25 bp, Homo sapien
accaggcctcatgtgtctgcttggg

SEQ ID NO: 300496 - DNA, 25 bp, Homo sapien
tcacagggagctcatagagggcaat

SEQ ID NO: 300497 - DNA, 25 bp, Homo sapien
tcagggttctcctactggtgagagg

SEQ ID NO: 300498 - DNA, 25 bp, Homo sapien
agggtgagtctcacgctgtgtgacc

SEQ ID NO: 300499 - DNA, 25 bp, Homo sapien
cagcacgtcggagcgccctggcagt

SEQ ID NO: 300500 - DNA, 25 bp, Homo sapien
ctggcagtgggtcccgggcaaaatg

SEQ ID NO: 300501 - DNA, 25 bp, Homo sapien
gcggaagccgtgctggtcatacaca

SEQ ID NO: 300502 - DNA, 25 bp, Homo sapien
ggacagctgactggaacacgatgtt

SEQ ID NO: 300503 - DNA, 25 bp, Homo sapien
tggcagctccgtgcccgagggtggc

SEQ ID NO: 300504 - DNA, 25 bp, Homo sapien
gctggcagctccgtgcccgagggtg

SEQ ID NO: 300505 - DNA, 25 bp, Homo sapien
aagctggcagctccgtgcccgaggg

SEQ ID NO: 300506 - DNA, 25 bp, Homo sapien
aaagctggcagctccgtgcccgagg

SEQ ID NO: 300507 - DNA, 25 bp, Homo sapien
ccccatctcgttgtaggtctggtca

SEQ ID NO: 300508 - DNA, 25 bp, Homo sapien
aaggtgagcttgtagcggaggcgaa

SEQ ID NO: 300509 - DNA, 25 bp, Homo sapien
taggtctggtcacccatggtgaagg

SEQ ID NO: 300510 - DNA, 25 bp, Homo sapien
gcttgtagcggaggcgaaccttctc

SEQ ID NO: 300511 - DNA, 25 bp, Homo sapien
cagacgtaagacacccataggaggc

SEQ ID NO: 300512 - DNA, 25 bp, Homo sapien
tcactgggttcctatggaggaggcc

SEQ ID NO: 300513 - DNA, 25 bp, Homo sapien
cacagggccaatccggaagaaaagc

SEQ ID NO: 300514 - DNA, 25 bp, Homo sapien
gagtcaaaccacacaccagagtgca

SEQ ID NO: 300515 - DNA, 25 bp, Homo sapien
aggccctggcggtcgcccacttcca

SEQ ID NO: 300516 - DNA, 25 bp, Homo sapien
tgggacggtcctggtccgccacagc

SEQ ID NO: 300517 - DNA, 25 bp, Homo sapien
ccacttccagctgggacggtcctgg

SEQ ID NO: 300518 - DNA, 25 bp, Homo sapien
tgctgcagcatcgaggttgtgtgga

SEQ ID NO: 300519 - DNA, 25 bp, Homo sapien
gggactctggcaccccaagtggatg

SEQ ID NO: 300520 - DNA, 25 bp, Homo sapien
caggagacatcacaagtgtggaggc

SEQ ID NO: 300521 - DNA, 25 bp, Homo sapien
aacttccaaccggagttatcttcag

SEQ ID NO: 300522 - DNA, 25 bp, Homo sapien
gaggcgagtcctgcagggtagggaa

SEQ ID NO: 300523 - DNA, 25 bp, Homo sapien
ggtccccagctggaaaagtggtaga

SEQ ID NO: 300524 - DNA, 25 bp, Homo sapien
tctagctgccttaggacaatgggac

SEQ ID NO: 300525 - DNA, 25 bp, Homo sapien
tatagcatatcctccagtgagggtg

SEQ ID NO: 300526 - DNA, 25 bp, Homo sapien
ttttacaggtgaatagcccaaggcc

SEQ ID NO: 300527 - DNA, 25 bp, Homo sapien
cgcggatactgccttgcactctctt

SEQ ID NO: 300528 - DNA, 25 bp, Homo sapien
gggcctgccgcggatactgccttgc

SEQ ID NO: 300529 - DNA, 25 bp, Homo sapien
gaactccggactcgctgtttctaat

SEQ ID NO: 300530 - DNA, 25 bp, Homo sapien
tcttccgcagaggacctctggcccc

SEQ ID NO: 300531 - DNA, 25 bp, Homo sapien
tggcgggaagcaggtaagcccattc

SEQ ID NO: 300532 - DNA, 25 bp, Homo sapien
aaataacctttgcatccctcgcaaa

SEQ ID NO: 300533 - DNA, 25 bp, Homo sapien
tccaagttggtttcctcgctcttcc

SEQ ID NO: 300534 - DNA, 25 bp, Homo sapien
gcctgcagacccgaagtataaataa

SEQ ID NO: 300535 - DNA, 25 bp, Homo sapien
ggctcttgccccggatgggtgggcg

SEQ ID NO: 300536 - DNA, 25 bp, Homo sapien
cggctcttgccccggatgggtgggc

SEQ ID NO: 300537 - DNA, 25 bp, Homo sapien
ctgcggggtcacggcgggggtcgcg

SEQ ID NO: 300538 - DNA, 25 bp, Homo sapien
cagctgccgcatgcggtgcagctgc

SEQ ID NO: 300539 - DNA, 25 bp, Homo sapien
caagctgcccgtctgggccagctgc

SEQ ID NO: 300540 - DNA, 25 bp, Homo sapien
gccgcatgcggtgcagctgcctctt

SEQ ID NO: 300541 - DNA, 25 bp, Homo sapien
ggccagctgccgcatgcggtgcagc

SEQ ID NO: 300542 - DNA, 25 bp, Homo sapien
gaggagtattagctggccccaagaa

SEQ ID NO: 300543 - DNA, 25 bp, Homo sapien
gatgccaaggcccactgcaaggtgg

SEQ ID NO: 300544 - DNA, 25 bp, Homo sapien
caaggtggtctgactgtccaggcta

SEQ ID NO: 300545 - DNA, 25 bp, Homo sapien
ccaggctatgtaggcatctgtgcca

SEQ ID NO: 300546 - DNA, 25 bp, Homo sapien
acccaggaactcagcggtctccggg

SEQ ID NO: 300547 - DNA, 25 bp, Homo sapien
tcacccaggaactcagcggtctccg

SEQ ID NO: 300548 - DNA, 25 bp, Homo sapien
cctcacccaggaactcagcggtctc

SEQ ID NO: 300549 - DNA, 25 bp, Homo sapien
cccaggaactcagcggtctccgggg

SEQ ID NO: 300550 - DNA, 25 bp, Homo sapien
cctgcagccgcttgtggatgttgtg

SEQ ID NO: 300551 - DNA, 25 bp, Homo sapien
acccgcttgtccatgtctgccccgc

SEQ ID NO: 300552 - DNA, 25 bp, Homo sapien
gatgttgtgggctgcccgcttggcc

SEQ ID NO: 300553 - DNA, 25 bp, Homo sapien
ttgtccatgtctgccccgctctggc

SEQ ID NO: 300554 - DNA, 25 bp, Homo sapien
aggagggccacagtcccagatgaga

SEQ ID NO: 300555 - DNA, 25 bp, Homo sapien
ggccacagtcccagatgagagtgga

SEQ ID NO: 300556 - DNA, 25 bp, Homo sapien
gggccggcgatgagtgtccgtgcct

SEQ ID NO: 300557 - DNA, 25 bp, Homo sapien
cacagtcccagatgagagtggaaac

SEQ ID NO: 300558 - DNA, 25 bp, Homo sapien
cgtggtggacagagccatgagggga

SEQ ID NO: 300559 - DNA, 25 bp, Homo sapien
gtggacagagccatgaggggaagct

SEQ ID NO: 300560 - DNA, 25 bp, Homo sapien
acagagccatgaggggaagcttctt

SEQ ID NO: 300561 - DNA, 25 bp, Homo sapien
gacagagccatgaggggaagcttct

SEQ ID NO: 300562 - DNA, 25 bp, Homo sapien
cccatgctggaatcagggtccagct

SEQ ID NO: 300563 - DNA, 25 bp, Homo sapien
ggtccagctccttgaagctctcagc

SEQ ID NO: 300564 - DNA, 25 bp, Homo sapien
ccagctccttgaagctctcagccat

SEQ ID NO: 300565 - DNA, 25 bp, Homo sapien
gggtccagctccttgaagctctcag

SEQ ID NO: 300566 - DNA, 25 bp, Homo sapien
cagctgagatcacgtcttggtatcc

SEQ ID NO: 300567 - DNA, 25 bp, Homo sapien
cctcccagctgagatcacgtcttgg

SEQ ID NO: 300568 - DNA, 25 bp, Homo sapien
acgtcttggtatccccaggtgaggg

SEQ ID NO: 300569 - DNA, 25 bp, Homo sapien
gagatcacgtcttggtatccccagg

SEQ ID NO: 300570 - DNA, 25 bp, Homo sapien
agggtcatctcaaactcggccagga

SEQ ID NO: 300571 - DNA, 25 bp, Homo sapien
cagggtcatctcaaactcggccagg

SEQ ID NO: 300572 - DNA, 25 bp, Homo sapien
agtcggacacgagcttctggaggct

SEQ ID NO: 300573 - DNA, 25 bp, Homo sapien
gagtgtgttccagtcggacacgagc

SEQ ID NO: 300574 - DNA, 25 bp, Homo sapien
tccagtcggacacgagcttctggag

SEQ ID NO: 300575 - DNA, 25 bp, Homo sapien
tgttccagtcggacacgagcttctg

SEQ ID NO: 300576 - DNA, 25 bp, Homo sapien
tcctagggaccaggcgtgcacaagt

SEQ ID NO: 300577 - DNA, 25 bp, Homo sapien
agggctgccgcaggactgtttacag

SEQ ID NO: 300578 - DNA, 25 bp, Homo sapien
gctaaccacctgtgctcctagggac

SEQ ID NO: 300579 - DNA, 25 bp, Homo sapien
gcacaagtacacacactgtactcag

SEQ ID NO: 300580 - DNA, 25 bp, Homo sapien
tgttgcatgtccagagccaagtgtc

SEQ ID NO: 300581 - DNA, 25 bp, Homo sapien
ggattctaggatttagagctgcaga

SEQ ID NO: 300582 - DNA, 25 bp, Homo sapien
cagcagaccacatgggattctagga

SEQ ID NO: 300583 - DNA, 25 bp, Homo sapien
gagatgatcccaaggtgagctggtc

SEQ ID NO: 300584 - DNA, 25 bp, Homo sapien
ggctgcctcctaggccttgactgct

SEQ ID NO: 300585 - DNA, 25 bp, Homo sapien
gcctgaattcttggttgcctgactg

SEQ ID NO: 300586 - DNA, 25 bp, Homo sapien
accttgttggccatggtcgtatggc

SEQ ID NO: 300587 - DNA, 25 bp, Homo sapien
atggctgtgactacccgggctgcct

SEQ ID NO: 300588 - DNA, 25 bp, Homo sapien
tggtacaggtcagccaagtactcgt

SEQ ID NO: 300589 - DNA, 25 bp, Homo sapien
acgaatgaagtagttggcataggag

SEQ ID NO: 300590 - DNA, 25 bp, Homo sapien
aggagtcctccttggtaacaaagtg

SEQ ID NO: 300591 - DNA, 25 bp, Homo sapien
taacaaagtggtacaggtcagccaa

SEQ ID NO: 300592 - DNA, 25 bp, Homo sapien
tgcgatggtaatcggcctgaatctc

SEQ ID NO: 300593 - DNA, 25 bp, Homo sapien
tcagtgacctgcgatggtaatcggc

SEQ ID NO: 300594 - DNA, 25 bp, Homo sapien
tccagcgagctcagtgacctgcgat

SEQ ID NO: 300595 - DNA, 25 bp, Homo sapien
gctgtgtccagcgagctcagtgacc

SEQ ID NO: 300596 - DNA, 25 bp, Homo sapien
tgcgagcttctcaataagccccgag

SEQ ID NO: 300597 - DNA, 25 bp, Homo sapien
gcttctcaataagccccgagcaggg

SEQ ID NO: 300598 - DNA, 25 bp, Homo sapien
tgtggtatcgccgggcctatgtccc

SEQ ID NO: 300599 - DNA, 25 bp, Homo sapien
tgaagtgcgagcttctcaataagcc

SEQ ID NO: 300600 - DNA, 25 bp, Homo sapien
tcccggcccagctcttgcaggtggg

SEQ ID NO: 300601 - DNA, 25 bp, Homo sapien
ttgcaggtgggttgccagcgacacc

SEQ ID NO: 300602 - DNA, 25 bp, Homo sapien
gcagcatcatgacgcaggcctcgat

SEQ ID NO: 300603 - DNA, 25 bp, Homo sapien
ggcctcgatgggcagggcaatctcc

SEQ ID NO: 300604 - DNA, 25 bp, Homo sapien
tgggttcgagaggaggcaggcaagg

SEQ ID NO: 300605 - DNA, 25 bp, Homo sapien
ctgggttcgagaggaggcaggcaag

SEQ ID NO: 300606 - DNA, 25 bp, Homo sapien
gggtccgaggccattgtctgcttga

SEQ ID NO: 300607 - DNA, 25 bp, Homo sapien
cgtgcgggtcggagcagaactcctc

SEQ ID NO: 300608 - DNA, 25 bp, Homo sapien
gccccagcagccagacggaagagac

SEQ ID NO: 300609 - DNA, 25 bp, Homo sapien
tgcttgagacgcttcagcaccgagg

SEQ ID NO: 300610 - DNA, 25 bp, Homo sapien
gaggctctggcagctcccgcagata

SEQ ID NO: 300611 - DNA, 25 bp, Homo sapien
ctcccgcagataggacttgagggca

SEQ ID NO: 300612 - DNA, 25 bp, Homo sapien
tcatagaggtcgaaggtcatcagag

SEQ ID NO: 300613 - DNA, 25 bp, Homo sapien
ccagtcatcatagaggtcgaaggtc

SEQ ID NO: 300614 - DNA, 25 bp, Homo sapien
taggcggctgcacacctcttggagg

SEQ ID NO: 300615 - DNA, 25 bp, Homo sapien
ttgctgaggttctcggggggtaggc

SEQ ID NO: 300616 - DNA, 25 bp, Homo sapien
ggtaggcggctgcacacctcttgga

SEQ ID NO: 300617 - DNA, 25 bp, Homo sapien
gggggtaggcggctgcacacctctt

SEQ ID NO: 300618 - DNA, 25 bp, Homo sapien
ggccacagcaagttgggtcccagga

SEQ ID NO: 300619 - DNA, 25 bp, Homo sapien
cgatgttgctgggtgtcatcttgtt

SEQ ID NO: 300620 - DNA, 25 bp, Homo sapien
gtcccaggactatggcgatgttgct

SEQ ID NO: 300621 - DNA, 25 bp, Homo sapien
tggccacagcaagttgggtcccagg

SEQ ID NO: 300622 - DNA, 25 bp, Homo sapien
gacaaagagatgcatctgctcagca

SEQ ID NO: 300623 - DNA, 25 bp, Homo sapien
tctgcgctctggatcagcgcctcga

SEQ ID NO: 300624 - DNA, 25 bp, Homo sapien
gggtgtctgcgctctggatcagcgc

SEQ ID NO: 300625 - DNA, 25 bp, Homo sapien
tgtctgcgctctggatcagcgcctc

SEQ ID NO: 300626 - DNA, 25 bp, Homo sapien
ggtgtctgcgctctggatcagcgcc

SEQ ID NO: 300627 - DNA, 25 bp, Homo sapien
gaagaggcctgacacgttgaagttg

SEQ ID NO: 300628 - DNA, 25 bp, Homo sapien
gagaagaggcctgacacgttgaagt

SEQ ID NO: 300629 - DNA, 25 bp, Homo sapien
aagaggcctgacacgttgaagttga

SEQ ID NO: 300630 - DNA, 25 bp, Homo sapien
gaggcctgacacgttgaagttgatg

SEQ ID NO: 300631 - DNA, 25 bp, Homo sapien
ggtgggcacggcagtggacggaagt

SEQ ID NO: 300632 - DNA, 25 bp, Homo sapien
cacggcagtggacggaagttcctca

SEQ ID NO: 300633 - DNA, 25 bp, Homo sapien
agtggacggaagttcctcagaggcc

SEQ ID NO: 300634 - DNA, 25 bp, Homo sapien
ggtagctgctgaagccaaggctggg

SEQ ID NO: 300635 - DNA, 25 bp, Homo sapien
ggagccattcaagcccctcagtcct

SEQ ID NO: 300636 - DNA, 25 bp, Homo sapien
aggagccattcaagcccctcagtcc

SEQ ID NO: 300637 - DNA, 25 bp, Homo sapien
acaggagccattcaagcccctcagt

SEQ ID NO: 300638 - DNA, 25 bp, Homo sapien
ccacaggagccattcaagcccctca

SEQ ID NO: 300639 - DNA, 25 bp, Homo sapien
ctggtaggtagggccaggatgggag

SEQ ID NO: 300640 - DNA, 25 bp, Homo sapien
tggtaggtagggccaggatgggagg

SEQ ID NO: 300641 - DNA, 25 bp, Homo sapien
gggacatagggcctgacctctgcct

SEQ ID NO: 300642 - DNA, 25 bp, Homo sapien
tgggacatagggcctgacctctgcc

SEQ ID NO: 300643 - DNA, 25 bp, Homo sapien
tctggcattggttggggtctgcatc

SEQ ID NO: 300644 - DNA, 25 bp, Homo sapien
tgacagagtccatgttcctctaggg

SEQ ID NO: 300645 - DNA, 25 bp, Homo sapien
ctggctgctttgtgaccctgtgaca

SEQ ID NO: 300646 - DNA, 25 bp, Homo sapien
gggtctgcatccactgagcccctgg

SEQ ID NO: 300647 - DNA, 25 bp, Homo sapien
gctgtctccgggggactcctggtga

SEQ ID NO: 300648 - DNA, 25 bp, Homo sapien
ctgtctccgggggactcctggtgac

SEQ ID NO: 300649 - DNA, 25 bp, Homo sapien
ctccgggggactcctggtgaccttg

SEQ ID NO: 300650 - DNA, 25 bp, Homo sapien
tgtctccgggggactcctggtgacc

SEQ ID NO: 300651 - DNA, 25 bp, Homo sapien
ggctcccccttagtgggcacgtgct

SEQ ID NO: 300652 - DNA, 25 bp, Homo sapien
tccactgtagtctgtgacctctggg

SEQ ID NO: 300653 - DNA, 25 bp, Homo sapien
cgggactccagtaccccagtactca

SEQ ID NO: 300654 - DNA, 25 bp, Homo sapien
agtaccccagtactcacgccggctc

SEQ ID NO: 300655 - DNA, 25 bp, Homo sapien
ctgggggggcggcatggtgggccgg

SEQ ID NO: 300656 - DNA, 25 bp, Homo sapien
gccggctttggcgccgggcaggctg

SEQ ID NO: 300657 - DNA, 25 bp, Homo sapien
tgtgggggctcggaggctgctgcca

SEQ ID NO: 300658 - DNA, 25 bp, Homo sapien
gctttggcgccgggcaggctgaggg

SEQ ID NO: 300659 - DNA, 25 bp, Homo sapien
ccaaccagacgtcggggcagggctt

SEQ ID NO: 300660 - DNA, 25 bp, Homo sapien
ggccgggctgggggaggctggtgaa

SEQ ID NO: 300661 - DNA, 25 bp, Homo sapien
aggccgggctgggggaggctggtga

SEQ ID NO: 300662 - DNA, 25 bp, Homo sapien
gccgggctgggggaggctggtgaac

SEQ ID NO: 300663 - DNA, 25 bp, Homo sapien
gaggccgggctgggggaggctggtg

SEQ ID NO: 300664 - DNA, 25 bp, Homo sapien
cctgtgcagggttactcaaagagac

SEQ ID NO: 300665 - DNA, 25 bp, Homo sapien
tgcagggttactcaaagagactggg

SEQ ID NO: 300666 - DNA, 25 bp, Homo sapien
gggaccccactgatagcctcagggg

SEQ ID NO: 300667 - DNA, 25 bp, Homo sapien
cagggttactcaaagagactgggct

SEQ ID NO: 300668 - DNA, 25 bp, Homo sapien
catgggggccgacccagtgggcact

SEQ ID NO: 300669 - DNA, 25 bp, Homo sapien
ccagggtggacgaggaaaaggtcag

SEQ ID NO: 300670 - DNA, 25 bp, Homo sapien
ctgagggctgcttagggagaaacca

SEQ ID NO: 300671 - DNA, 25 bp, Homo sapien
cactgaggcacttgtgggcaaaggc

SEQ ID NO: 300672 - DNA, 25 bp, Homo sapien
cgtaggagcaggcaaacctctcctt

SEQ ID NO: 300673 - DNA, 25 bp, Homo sapien
gagaagaatcagtcccgtaggagca

SEQ ID NO: 300674 - DNA, 25 bp, Homo sapien
cggcaagagaagaatcagtcccgta

SEQ ID NO: 300675 - DNA, 25 bp, Homo sapien
aatcagtcccgtaggagcaggcaaa

SEQ ID NO: 300676 - DNA, 25 bp, Homo sapien
tgtccaaaataatttatttaccagc

SEQ ID NO: 300677 - DNA, 25 bp, Homo sapien
taaaactatcatttgggcagctgct

SEQ ID NO: 300678 - DNA, 25 bp, Homo sapien
cgctctctccgcgggcacggcgcgc

SEQ ID NO: 300679 - DNA, 25 bp, Homo sapien
gccgcgctctctccgcgggcacggc

SEQ ID NO: 300680 - DNA, 25 bp, Homo sapien
gcgccgcgctctctccgcgggcacg

SEQ ID NO: 300681 - DNA, 25 bp, Homo sapien
ccgcgccgcgctctctccgcgggca

SEQ ID NO: 300682 - DNA, 25 bp, Homo sapien
cgcgcagcctctcgcagcgcgccat

SEQ ID NO: 300683 - DNA, 25 bp, Homo sapien
gtcgcgcagggccgctccgcgcagc

SEQ ID NO: 300684 - DNA, 25 bp, Homo sapien
ctccgcgcagcctctcgcagcgcgc

SEQ ID NO: 300685 - DNA, 25 bp, Homo sapien
cagcacgtcgcgcagggccgctccg

SEQ ID NO: 300686 - DNA, 25 bp, Homo sapien
agcaccccgtcacagtcgaacagga

SEQ ID NO: 300687 - DNA, 25 bp, Homo sapien
tgctcacaaacagagccgccttgcc

SEQ ID NO: 300688 - DNA, 25 bp, Homo sapien
gcgcgctcgccgttccacagcaccc

SEQ ID NO: 300689 - DNA, 25 bp, Homo sapien
ctgaagagctgctcggcgcgcagcc

SEQ ID NO: 300690 - DNA, 25 bp, Homo sapien
cgtagcccacaagcacggcgcgcac

SEQ ID NO: 300691 - DNA, 25 bp, Homo sapien
tagcccacaagcacggcgcgcacgc

SEQ ID NO: 300692 - DNA, 25 bp, Homo sapien
gtagcccacaagcacggcgcgcacg

SEQ ID NO: 300693 - DNA, 25 bp, Homo sapien
agcccacaagcacggcgcgcacgcg

SEQ ID NO: 300694 - DNA, 25 bp, Homo sapien
ggtcggtggccacgagtaggcactc

SEQ ID NO: 300695 - DNA, 25 bp, Homo sapien
tcgctcagcgggtgccatgggtcac

SEQ ID NO: 300696 - DNA, 25 bp, Homo sapien
gtccggctgccgtcgctcagcgggt

SEQ ID NO: 300697 - DNA, 25 bp, Homo sapien
gggtcgcgcaggtgcgcgcacgcct

SEQ ID NO: 300698 - DNA, 25 bp, Homo sapien
cacagcccctttggaacacagcggg

SEQ ID NO: 300699 - DNA, 25 bp, Homo sapien
tgctgcaggaattcacgcggctggc

SEQ ID NO: 300700 - DNA, 25 bp, Homo sapien
ggcacagaaatgttcgcacctctga

SEQ ID NO: 300701 - DNA, 25 bp, Homo sapien
tggaacagcacttaacaaatagcag

SEQ ID NO: 300702 - DNA, 25 bp, Homo sapien
gtggccaaagaggatgtcggtctcc

SEQ ID NO: 300703 - DNA, 25 bp, Homo sapien
cgtgagcacagtggtcatgccgcag

SEQ ID NO: 300704 - DNA, 25 bp, Homo sapien
tccgtgatgcactcgaacatgtagg

SEQ ID NO: 300705 - DNA, 25 bp, Homo sapien
tctgtcaagtctgcgatgctctcca

SEQ ID NO: 300706 - DNA, 25 bp, Homo sapien
ggtcaggccaagatgaatccatagg

SEQ ID NO: 300707 - DNA, 25 bp, Homo sapien
tactgaaaacactgaccgcacaggg

SEQ ID NO: 300708 - DNA, 25 bp, Homo sapien
gagggtcatcgtcacttaggcttcc

SEQ ID NO: 300709 - DNA, 25 bp, Homo sapien
tgtggccatcaacgctgtacgggta

SEQ ID NO: 300710 - DNA, 25 bp, Homo sapien
tcagctggcggtgctgaaggagggc

SEQ ID NO: 300711 - DNA, 25 bp, Homo sapien
tccttcagctggcggtgctgaagga

SEQ ID NO: 300712 - DNA, 25 bp, Homo sapien
cagctggcggtgctgaaggagggcg

SEQ ID NO: 300713 - DNA, 25 bp, Homo sapien
cttcagctggcggtgctgaaggagg

SEQ ID NO: 300714 - DNA, 25 bp, Homo sapien
gttgtcacggggacctccttctcca

SEQ ID NO: 300715 - DNA, 25 bp, Homo sapien
actgctggcaccaaagagggacgaa

SEQ ID NO: 300716 - DNA, 25 bp, Homo sapien
tggcaccaaagagggacgaagatgc

SEQ ID NO: 300717 - DNA, 25 bp, Homo sapien
caaagagggacgaagatgcggacca

SEQ ID NO: 300718 - DNA, 25 bp, Homo sapien
agtccaggaggatgttcccgggcag

SEQ ID NO: 300719 - DNA, 25 bp, Homo sapien
ccgggcaggcgcaccagctgtcaga

SEQ ID NO: 300720 - DNA, 25 bp, Homo sapien
tcagaagactccacccgagagagat

SEQ ID NO: 300721 - DNA, 25 bp, Homo sapien
gaaagttcagccaattgcaagtcag

SEQ ID NO: 300722 - DNA, 25 bp, Homo sapien
tgggcagcttgtctcgggtcctggc

SEQ ID NO: 300723 - DNA, 25 bp, Homo sapien
tcctgggcagcttgtctcgggtcct

SEQ ID NO: 300724 - DNA, 25 bp, Homo sapien
ggcagcttgtctcgggtcctggcaa

SEQ ID NO: 300725 - DNA, 25 bp, Homo sapien
catcctgggcagcttgtctcgggtc

SEQ ID NO: 300726 - DNA, 25 bp, Homo sapien
tggcccaccgtcacactgaatggag

SEQ ID NO: 300727 - DNA, 25 bp, Homo sapien
catcgcagatggagaggatcaggct

SEQ ID NO: 300728 - DNA, 25 bp, Homo sapien
cctctctgcattagggagaatagcc

SEQ ID NO: 300729 - DNA, 25 bp, Homo sapien
tcagggttaacaagattgagcaaac

SEQ ID NO: 300730 - DNA, 25 bp, Homo sapien
cggcatcctctgaccaagccaaggg

SEQ ID NO: 300731 - DNA, 25 bp, Homo sapien
cggcccagccgggttagaggacaag

SEQ ID NO: 300732 - DNA, 25 bp, Homo sapien
gcctccactgctcgaagtgtccggg

SEQ ID NO: 300733 - DNA, 25 bp, Homo sapien
aggacaaggcctccactgctcgaag

SEQ ID NO: 300734 - DNA, 25 bp, Homo sapien
gattcaggttgctggcgaccagacc

SEQ ID NO: 300735 - DNA, 25 bp, Homo sapien
tcttagcgtcaggagccacctcgcc

SEQ ID NO: 300736 - DNA, 25 bp, Homo sapien
ctcgcactcgaaggcactctccagg

SEQ ID NO: 300737 - DNA, 25 bp, Homo sapien
gtttgagattcaggttgctggcgac

SEQ ID NO: 300738 - DNA, 25 bp, Homo sapien
aggttggttgactggtccaaggtca

SEQ ID NO: 300739 - DNA, 25 bp, Homo sapien
ggttgactggtccaaggtcacctaa

SEQ ID NO: 300740 - DNA, 25 bp, Homo sapien
ctaggtgaggttggttgactggtcc

SEQ ID NO: 300741 - DNA, 25 bp, Homo sapien
tgaggctaggtgaggttggttgact

SEQ ID NO: 300742 - DNA, 25 bp, Homo sapien
tggtcaaggtcagtgactccctcca

SEQ ID NO: 300743 - DNA, 25 bp, Homo sapien
tcccgtcctgtcttgtacatctctg

SEQ ID NO: 300744 - DNA, 25 bp, Homo sapien
gtcattagcatcctagcccgtttgg

SEQ ID NO: 300745 - DNA, 25 bp, Homo sapien
taacagagacaagaaacctggattc

SEQ ID NO: 300746 - DNA, 25 bp, Homo sapien
cagccccactgaccgactaatctgt

SEQ ID NO: 300747 - DNA, 25 bp, Homo sapien
tgtcactcagtatcccatgaacgca

SEQ ID NO: 300748 - DNA, 25 bp, Homo sapien
gaccgactaatctgtcactcagtat

SEQ ID NO: 300749 - DNA, 25 bp, Homo sapien
taatctgtcactcagtatcccatga

SEQ ID NO: 300750 - DNA, 25 bp, Homo sapien
gtctttgcccaggttcagcacgaag

SEQ ID NO: 300751 - DNA, 25 bp, Homo sapien
tgctgtctttgcccaggttcagcac

SEQ ID NO: 300752 - DNA, 25 bp, Homo sapien
ctgtctttgcccaggttcagcacga

SEQ ID NO: 300753 - DNA, 25 bp, Homo sapien
gttgttgctgtctttgcccaggttc

SEQ ID NO: 300754 - DNA, 25 bp, Homo sapien
acgatggtgttggcgtcgccgtggg

SEQ ID NO: 300755 - DNA, 25 bp, Homo sapien
gttggcgtcgccgtgggcgttgaag

SEQ ID NO: 300756 - DNA, 25 bp, Homo sapien
tggcgtcgccgtgggcgttgaagcg

SEQ ID NO: 300757 - DNA, 25 bp, Homo sapien
tggtgttggcgtcgccgtgggcgtt

SEQ ID NO: 300758 - DNA, 25 bp, Homo sapien
gaagggaaagacagcctcccgctgc

SEQ ID NO: 300759 - DNA, 25 bp, Homo sapien
tcccgctgctcggtcccccaggccc

SEQ ID NO: 300760 - DNA, 25 bp, Homo sapien
aggccccgccgtccttgctgttgca

SEQ ID NO: 300761 - DNA, 25 bp, Homo sapien
tccaggctggaagggaaagacagcc

SEQ ID NO: 300762 - DNA, 25 bp, Homo sapien
ctggtccccggttccggtctgcagc

SEQ ID NO: 300763 - DNA, 25 bp, Homo sapien
aggtctctagtcactaacccagccc

SEQ ID NO: 300764 - DNA, 25 bp, Homo sapien
gtctctagtcactaacccagccccg

SEQ ID NO: 300765 - DNA, 25 bp, Homo sapien
tccccggttccggtctgcagcccac

SEQ ID NO: 300766 - DNA, 25 bp, Homo sapien
gaggagagcagtgagccgggcccac

SEQ ID NO: 300767 - DNA, 25 bp, Homo sapien
catctggcagcttgacggtcaggtt

SEQ ID NO: 300768 - DNA, 25 bp, Homo sapien
gaacttgaattcgtatccatctggc

SEQ ID NO: 300769 - DNA, 25 bp, Homo sapien
tggcctccaggttgaggcggttggg

SEQ ID NO: 300770 - DNA, 25 bp, Homo sapien
agctgccatgtagttgatggcctcc

SEQ ID NO: 300771 - DNA, 25 bp, Homo sapien
gacaaagcgaatggaagtgaaggaa

SEQ ID NO: 300772 - DNA, 25 bp, Homo sapien
ggacccagcggaagacgtcattgga

SEQ ID NO: 300773 - DNA, 25 bp, Homo sapien
tggtcactgaccctcctactatgtg

SEQ ID NO: 300774 - DNA, 25 bp, Homo sapien
gaactgaggaggtacccgtggacaa

SEQ ID NO: 300775 - DNA, 25 bp, Homo sapien
gaggggtctcgtattcttccctcca

SEQ ID NO: 300776 - DNA, 25 bp, Homo sapien
aatgagaggggtctcgtattcttcc

SEQ ID NO: 300777 - DNA, 25 bp, Homo sapien
aggactttcctctgcccggttgtgg

SEQ ID NO: 300778 - DNA, 25 bp, Homo sapien
gcagcctgggggacgtgttctccaa

SEQ ID NO: 300779 - DNA, 25 bp, Homo sapien
ggccccagtcctagtgtcctgtgag

SEQ ID NO: 300780 - DNA, 25 bp, Homo sapien
tcagccagtgtaggggagaatcaat

SEQ ID NO: 300781 - DNA, 25 bp, Homo sapien
tcctccccattcagcttcaggagta

SEQ ID NO: 300782 - DNA, 25 bp, Homo sapien
agacacttccgggtgtagcgtactc

SEQ ID NO: 300783 - DNA, 25 bp, Homo sapien
ctgaagacacttccgggtgtagcgt

SEQ ID NO: 300784 - DNA, 25 bp, Homo sapien
tccctgaagacacttccgggtgtag

SEQ ID NO: 300785 - DNA, 25 bp, Homo sapien
ctctccctgaagacacttccgggtg

SEQ ID NO: 300786 - DNA, 25 bp, Homo sapien
gcctcttctcctcgtcgaagctaag

SEQ ID NO: 300787 - DNA, 25 bp, Homo sapien
gccggtcgtcaccatctcgcttctt

SEQ ID NO: 300788 - DNA, 25 bp, Homo sapien
gaagctaagaacgagcctcggccgc

SEQ ID NO: 300789 - DNA, 25 bp, Homo sapien
tcgtcgaagctaagaacgagcctcg

SEQ ID NO: 300790 - DNA, 25 bp, Homo sapien
tgcttcctgatacgggacctggcac

SEQ ID NO: 300791 - DNA, 25 bp, Homo sapien
gagacccgagcttccggctatctgg

SEQ ID NO: 300792 - DNA, 25 bp, Homo sapien
tagggcctgttgatgcacgctagga

SEQ ID NO: 300793 - DNA, 25 bp, Homo sapien
tcatcatttatcaaccacggctggg

SEQ ID NO: 300794 - DNA, 25 bp, Homo sapien
tccagaccttcggaaaccctgcact

SEQ ID NO: 300795 - DNA, 25 bp, Homo sapien
ccaccaccatccagaccttcggaaa

SEQ ID NO: 300796 - DNA, 25 bp, Homo sapien
tgcactggaccaacacccatgtccc

SEQ ID NO: 300797 - DNA, 25 bp, Homo sapien
ccaggacacctgaccctaaactcgc

SEQ ID NO: 300798 - DNA, 25 bp, Homo sapien
gagaagggctcgctctaggagaaaa

SEQ ID NO: 300799 - DNA, 25 bp, Homo sapien
ctaatgccgcgctcactatgtgcta

SEQ ID NO: 300800 - DNA, 25 bp, Homo sapien
acaggagagtcattatacaaggaga

SEQ ID NO: 300801 - DNA, 25 bp, Homo sapien
agtcattatacaaggagagaagggc

SEQ ID NO: 300802 - DNA, 25 bp, Homo sapien
gctcctctttcagccgctgcttaat

SEQ ID NO: 300803 - DNA, 25 bp, Homo sapien
cttgtggaagcctgtcaggtactcc

SEQ ID NO: 300804 - DNA, 25 bp, Homo sapien
tttcgctcgaccttccgcttgtgga

SEQ ID NO: 300805 - DNA, 25 bp, Homo sapien
tggctgccttctttcgctcgacctt

SEQ ID NO: 300806 - DNA, 25 bp, Homo sapien
cagcatcttcaagtattcctggtgg

SEQ ID NO: 300807 - DNA, 25 bp, Homo sapien
gccagcatcttcaagtattcctggt

SEQ ID NO: 300808 - DNA, 25 bp, Homo sapien
tgccagcatcttcaagtattcctgg

SEQ ID NO: 300809 - DNA, 25 bp, Homo sapien
gcatcttcaagtattcctggtggcg

SEQ ID NO: 300810 - DNA, 25 bp, Homo sapien
ccccgagaggtccaggtcactgatg

SEQ ID NO: 300811 - DNA, 25 bp, Homo sapien
tggtcatactgcaccgactccgtct

SEQ ID NO: 300812 - DNA, 25 bp, Homo sapien
tttgctgtcaccaaccggtccagct

SEQ ID NO: 300813 - DNA, 25 bp, Homo sapien
cactgatggtggtcacggtgactgt

SEQ ID NO: 300814 - DNA, 25 bp, Homo sapien
tgacgcctcctcctcagacctgtct

SEQ ID NO: 300815 - DNA, 25 bp, Homo sapien
tggttggtttctccgtggatgacgc

SEQ ID NO: 300816 - DNA, 25 bp, Homo sapien
gtttctccgtggatgacgcctcctc

SEQ ID NO: 300817 - DNA, 25 bp, Homo sapien
caaggctttggttggtttctccgtg

SEQ ID NO: 300818 - DNA, 25 bp, Homo sapien
cgtcggggatgtttcctcttgacct

SEQ ID NO: 300819 - DNA, 25 bp, Homo sapien
gcccgtcggggatgtttcctcttga

SEQ ID NO: 300820 - DNA, 25 bp, Homo sapien
tcttgacctttttgcggctgtgtgc

SEQ ID NO: 300821 - DNA, 25 bp, Homo sapien
ctgtgtgcatgtagtgatgctgtga

SEQ ID NO: 300822 - DNA, 25 bp, Homo sapien
tgctttgcctgtgagacggcggcgc

SEQ ID NO: 300823 - DNA, 25 bp, Homo sapien
ctttgcctgtgagacggcggcgctg

SEQ ID NO: 300824 - DNA, 25 bp, Homo sapien
tgtgccgtgctttgcctgtgagacg

SEQ ID NO: 300825 - DNA, 25 bp, Homo sapien
cgtgctttgcctgtgagacggcggc

SEQ ID NO: 300826 - DNA, 25 bp, Homo sapien
gctgagcaaggacaggtccccgcag

SEQ ID NO: 300827 - DNA, 25 bp, Homo sapien
actggggcaccgcttcgttctcggt

SEQ ID NO: 300828 - DNA, 25 bp, Homo sapien
gcaaggacaggtccccgcagcctag

SEQ ID NO: 300829 - DNA, 25 bp, Homo sapien
gccaagctgagcaaggacaggtccc

SEQ ID NO: 300830 - DNA, 25 bp, Homo sapien
cagagaggtcctggcttcccaacct

SEQ ID NO: 300831 - DNA, 25 bp, Homo sapien
caaccttgagctgtgcagtcattac

SEQ ID NO: 300832 - DNA, 25 bp, Homo sapien
ccaggccagagaggtcctggcttcc

SEQ ID NO: 300833 - DNA, 25 bp, Homo sapien
ggcttcccaaccttgagctgtgcag

SEQ ID NO: 300834 - DNA, 25 bp, Homo sapien
tggattctagcaacggacacactga

SEQ ID NO: 300835 - DNA, 25 bp, Homo sapien
cacagggctaactgctggagacaga

SEQ ID NO: 300836 - DNA, 25 bp, Homo sapien
tgtactttattgcagccacagggct

SEQ ID NO: 300837 - DNA, 25 bp, Homo sapien
acagaggctcctcggtgaagggcat

SEQ ID NO: 300838 - DNA, 25 bp, Homo sapien
gggatgacctggcactcaactgctt

SEQ ID NO: 300839 - DNA, 25 bp, Homo sapien
gatgggggatgacctggcactcaac

SEQ ID NO: 300840 - DNA, 25 bp, Homo sapien
gggacgctgccccagtgtggtgatg

SEQ ID NO: 300841 - DNA, 25 bp, Homo sapien
atgacctggcactcaactgcttcca

SEQ ID NO: 300842 - DNA, 25 bp, Homo sapien
cctggagggcccataataggcacca

SEQ ID NO: 300843 - DNA, 25 bp, Homo sapien
aagggacagggtttccatcaactca

SEQ ID NO: 300844 - DNA, 25 bp, Homo sapien
catgacgagacaaaccagagaggtc

SEQ ID NO: 300845 - DNA, 25 bp, Homo sapien
gacatggccccttgtggagttctag

SEQ ID NO: 300846 - DNA, 25 bp, Homo sapien
aggaactggagtcagacgtcccagc

SEQ ID NO: 300847 - DNA, 25 bp, Homo sapien
agtcagacgtcccagcagaaacagc

SEQ ID NO: 300848 - DNA, 25 bp, Homo sapien
gtaagttgtaaatgaccttgtcact

SEQ ID NO: 300849 - DNA, 25 bp, Homo sapien
aaacagcagcggcaacatgcggtag

SEQ ID NO: 300850 - DNA, 25 bp, Homo sapien
gggtcatggcctctttattttaaca

SEQ ID NO: 300851 - DNA, 25 bp, Homo sapien
tccacgcacaggggctgccggggtg

SEQ ID NO: 300852 - DNA, 25 bp, Homo sapien
ccagggtcatggcctctttatttta

SEQ ID NO: 300853 - DNA, 25 bp, Homo sapien
cttggctgggtttccacgcacaggg

SEQ ID NO: 300854 - DNA, 25 bp, Homo sapien
tcctcccgactcctggtggtggaag

SEQ ID NO: 300855 - DNA, 25 bp, Homo sapien
ggagaacgccgctcattttcctggg

SEQ ID NO: 300856 - DNA, 25 bp, Homo sapien
tggtctggccacataaaggagcgtc

SEQ ID NO: 300857 - DNA, 25 bp, Homo sapien
agggctacccactggtccttccgtg

SEQ ID NO: 300858 - DNA, 25 bp, Homo sapien
caggggatcaggcttttgtggccaa

SEQ ID NO: 300859 - DNA, 25 bp, Homo sapien
tgttccaggggatcaggcttttgtg

SEQ ID NO: 300860 - DNA, 25 bp, Homo sapien
tttgtggccaatcttggtggagagc

SEQ ID NO: 300861 - DNA, 25 bp, Homo sapien
cttttgtggccaatcttggtggaga

SEQ ID NO: 300862 - DNA, 25 bp, Homo sapien
ggccagggcagttcctatgatccaa

SEQ ID NO: 300863 - DNA, 25 bp, Homo sapien
gaagcagttttgacagcggttctgg

SEQ ID NO: 300864 - DNA, 25 bp, Homo sapien
gcctcaaagtgttcacacagggcat

SEQ ID NO: 300865 - DNA, 25 bp, Homo sapien
ggttctgggtaagtatgttggcctc

SEQ ID NO: 300866 - DNA, 25 bp, Homo sapien
aacactctcaagttagggtgtaacg

SEQ ID NO: 300867 - DNA, 25 bp, Homo sapien
agttagggtgtaacgacatttctgt

SEQ ID NO: 300868 - DNA, 25 bp, Homo sapien
tcaagttagggtgtaacgacatttc

SEQ ID NO: 300869 - DNA, 25 bp, Homo sapien
cactctcaagttagggtgtaacgac

SEQ ID NO: 300870 - DNA, 25 bp, Homo sapien
tggctgtcgactgtcagcaccctcg

SEQ ID NO: 300871 - DNA, 25 bp, Homo sapien
ggtggtggctgtcgactgtcagcac

SEQ ID NO: 300872 - DNA, 25 bp, Homo sapien
tggtggctgtcgactgtcagcaccc

SEQ ID NO: 300873 - DNA, 25 bp, Homo sapien
aggccccgactccgggctgtggtgg

SEQ ID NO: 300874 - DNA, 25 bp, Homo sapien
caggggggaacggctgctcacctcc

SEQ ID NO: 300875 - DNA, 25 bp, Homo sapien
cacctctggagagcggcagttccct

SEQ ID NO: 300876 - DNA, 25 bp, Homo sapien
cccacctctggagagcggcagttcc

SEQ ID NO: 300877 - DNA, 25 bp, Homo sapien
tccccacctctggagagcggcagtt

SEQ ID NO: 300878 - DNA, 25 bp, Homo sapien
actggcagccggaggttgaggcgct

SEQ ID NO: 300879 - DNA, 25 bp, Homo sapien
caggtggacatcgaggcaggtcgca

SEQ ID NO: 300880 - DNA, 25 bp, Homo sapien
ttgaggcgctgagtgggtcctcagg

SEQ ID NO: 300881 - DNA, 25 bp, Homo sapien
caggtcgcagtagggcacctcagca

SEQ ID NO: 300882 - DNA, 25 bp, Homo sapien
gagcagtgcacacccacgtaggtgg

SEQ ID NO: 300883 - DNA, 25 bp, Homo sapien
tggccatgcccactgcaaggtgagt

SEQ ID NO: 300884 - DNA, 25 bp, Homo sapien
cctacctgtgaggagcacatgaatg

SEQ ID NO: 300885 - DNA, 25 bp, Homo sapien
tttctagactctcagaccatggcct

SEQ ID NO: 300886 - DNA, 25 bp, Homo sapien
ccagatagggtactgcctcaagctc

SEQ ID NO: 300887 - DNA, 25 bp, Homo sapien
cacagaggacgagttgctggtatca

SEQ ID NO: 300888 - DNA, 25 bp, Homo sapien
cagaggacgagttgctggtatcatc

SEQ ID NO: 300889 - DNA, 25 bp, Homo sapien
aggacgagttgctggtatcatcagg

SEQ ID NO: 300890 - DNA, 25 bp, Homo sapien
agaggacgagttgctggtatcatca

SEQ ID NO: 300891 - DNA, 25 bp, Homo sapien
cctcctgcctctcaacagtgtccca

SEQ ID NO: 300892 - DNA, 25 bp, Homo sapien
cctgcctctcaacagtgtcccagtc

SEQ ID NO: 300893 - DNA, 25 bp, Homo sapien
actgcgagctcgtcccagctggggg

SEQ ID NO: 300894 - DNA, 25 bp, Homo sapien
cactgcgagctcgtcccagctgggg

SEQ ID NO: 300895 - DNA, 25 bp, Homo sapien
cctcccgaggcctcctcgggatcat

SEQ ID NO: 300896 - DNA, 25 bp, Homo sapien
agacggagccctttgggagctgtca

SEQ ID NO: 300897 - DNA, 25 bp, Homo sapien
cctttgggagctgtcagctctcggc

SEQ ID NO: 300898 - DNA, 25 bp, Homo sapien
tggtgaggagagacggagccctttg

SEQ ID NO: 300899 - DNA, 25 bp, Homo sapien
tgcagcatctcctcccacaggggac

SEQ ID NO: 300900 - DNA, 25 bp, Homo sapien
gcctgcagcatctcctcccacaggg

SEQ ID NO: 300901 - DNA, 25 bp, Homo sapien
ggcctgcagcatctcctcccacagg

SEQ ID NO: 300902 - DNA, 25 bp, Homo sapien
cctcctttttctggcctgcagcatc

SEQ ID NO: 300903 - DNA, 25 bp, Homo sapien
gagacgtggtgcttcgaggtccact

SEQ ID NO: 300904 - DNA, 25 bp, Homo sapien
ggctctgggatcgtcctgctggaca

SEQ ID NO: 300905 - DNA, 25 bp, Homo sapien
ttatccagttgggtgcttcgtgagg

SEQ ID NO: 300906 - DNA, 25 bp, Homo sapien
tgttccactgtgtagatgaggccct

SEQ ID NO: 300907 - DNA, 25 bp, Homo sapien
gtcccgtcgggcacaggatgttctg

SEQ ID NO: 300908 - DNA, 25 bp, Homo sapien
tcccgtcgggcacaggatgttctgg

SEQ ID NO: 300909 - DNA, 25 bp, Homo sapien
ggaggctctgggattgtcccgctgg

SEQ ID NO: 300910 - DNA, 25 bp, Homo sapien
ggctctgggattgtcccgctgggca

SEQ ID NO: 300911 - DNA, 25 bp, Homo sapien
ggctctgggattgtcccgctgggca

SEQ ID NO: 300912 - DNA, 25 bp, Homo sapien
gtcccgtcgggcacaggatgttctg

SEQ ID NO: 300913 - DNA, 25 bp, Homo sapien
ggaggctctgggattgtcccgctgg

SEQ ID NO: 300914 - DNA, 25 bp, Homo sapien
tcccgtcgggcacaggatgttctgg

SEQ ID NO: 300915 - DNA, 25 bp, Homo sapien
tacaagtgggtctgaggttatctcg

SEQ ID NO: 300916 - DNA, 25 bp, Homo sapien
tctcggtacccaatacacacaggtg

SEQ ID NO: 300917 - DNA, 25 bp, Homo sapien
gaccatcactctgagttggccggag

SEQ ID NO: 300918 - DNA, 25 bp, Homo sapien
tgtgcggtcccgctgtgtacaagtg

SEQ ID NO: 300919 - DNA, 25 bp, Homo sapien
caggctctccatactagttccaggg

SEQ ID NO: 300920 - DNA, 25 bp, Homo sapien
tctccatactagttccagggggatc

SEQ ID NO: 300921 - DNA, 25 bp, Homo sapien
ggccaggctctccatactagttcca

SEQ ID NO: 300922 - DNA, 25 bp, Homo sapien
ctctccatactagttccagggggat

SEQ ID NO: 300923 - DNA, 25 bp, Homo sapien
ggcaggtcggccagcacagtgtact

SEQ ID NO: 300924 - DNA, 25 bp, Homo sapien
tgccaggaacgctaggtcactgggt

SEQ ID NO: 300925 - DNA, 25 bp, Homo sapien
aagttgtgcctggtctccccgggag

SEQ ID NO: 300926 - DNA, 25 bp, Homo sapien
gggtgcatcccggtgcccgatgcac

SEQ ID NO: 300927 - DNA, 25 bp, Homo sapien
ggcaatggttggacaacttggtaaa

SEQ ID NO: 300928 - DNA, 25 bp, Homo sapien
gaattctagctctgattcttgaaaa

SEQ ID NO: 300929 - DNA, 25 bp, Homo sapien
tattccataccctttagggtgatga

SEQ ID NO: 300930 - DNA, 25 bp, Homo sapien
gttctcttgaccctaactaatggaa

SEQ ID NO: 300931 - DNA, 25 bp, Homo sapien
aagagcccagacgtgacccagtggg

SEQ ID NO: 300932 - DNA, 25 bp, Homo sapien
tctgtgagagctgaaggccttagag

SEQ ID NO: 300933 - DNA, 25 bp, Homo sapien
gctgaaggccttagagtgaattttc

SEQ ID NO: 300934 - DNA, 25 bp, Homo sapien
taggagcttcgatgaagcaagagcc

SEQ ID NO: 300935 - DNA, 25 bp, Homo sapien
ggagccatgctggaacgacaccttc

SEQ ID NO: 300936 - DNA, 25 bp, Homo sapien
gctggaacgacaccttcaaaagtat

SEQ ID NO: 300937 - DNA, 25 bp, Homo sapien
gtatgaggaaactctgctcaggcct

SEQ ID NO: 300938 - DNA, 25 bp, Homo sapien
ttgggcagggcgcaatgggtcacgc

SEQ ID NO: 300939 - DNA, 25 bp, Homo sapien
tgtctttggtcgatgaactgaacca

SEQ ID NO: 300940 - DNA, 25 bp, Homo sapien
taacgtggtatctctattgacaggt

SEQ ID NO: 300941 - DNA, 25 bp, Homo sapien
gcattgttgacgcatccgatgaaga

SEQ ID NO: 300942 - DNA, 25 bp, Homo sapien
tgcttactaactgggaggcatggct

SEQ ID NO: 300943 - DNA, 25 bp, Homo sapien
atcatgatcgcagcccacgaggtgg

SEQ ID NO: 300944 - DNA, 25 bp, Homo sapien
tcagagaggccaacataaactgtcc

SEQ ID NO: 300945 - DNA, 25 bp, Homo sapien
tgttaaccaacagaatcccagcgct

SEQ ID NO: 300946 - DNA, 25 bp, Homo sapien
aactccaggccatcctagctgttgg

SEQ ID NO: 300947 - DNA, 25 bp, Homo sapien
agggctggactgtcttcggagaagt

SEQ ID NO: 300948 - DNA, 25 bp, Homo sapien
ctgtgaccgtccctcgtcctgggcc

SEQ ID NO: 300949 - DNA, 25 bp, Homo sapien
ctggactgtcttcggagaagttggc

SEQ ID NO: 300950 - DNA, 25 bp, Homo sapien
tgtgaccgtccctcgtcctgggcct

SEQ ID NO: 300951 - DNA, 25 bp, Homo sapien
acccctggagctgccgatctccctc

SEQ ID NO: 300952 - DNA, 25 bp, Homo sapien
tggctccgccgggtcagttctgcct

SEQ ID NO: 300953 - DNA, 25 bp, Homo sapien
tctgcttggctccgccgggtcagtt

SEQ ID NO: 300954 - DNA, 25 bp, Homo sapien
cctggagctgccgatctccctcagg

SEQ ID NO: 300955 - DNA, 25 bp, Homo sapien
ctgctccagctcctttctaggtgtc

SEQ ID NO: 300956 - DNA, 25 bp, Homo sapien
ctgggaccctggcggttcctcctga

SEQ ID NO: 300957 - DNA, 25 bp, Homo sapien
accctggcggttcctcctgactctg

SEQ ID NO: 300958 - DNA, 25 bp, Homo sapien
ttctaggtgtctatgagggccctgg

SEQ ID NO: 300959 - DNA, 25 bp, Homo sapien
ccagagtgccaggattgtgaggact

SEQ ID NO: 300960 - DNA, 25 bp, Homo sapien
ccccagttctcaggggggctcgtga

SEQ ID NO: 300961 - DNA, 25 bp, Homo sapien
ctctcagagccacgcgggtatggac

SEQ ID NO: 300962 - DNA, 25 bp, Homo sapien
gcgggtatggacacgctccctctgc

SEQ ID NO: 300963 - DNA, 25 bp, Homo sapien
ggccaagcagatccctccagtcaag

SEQ ID NO: 300964 - DNA, 25 bp, Homo sapien
agaaggccaagcagatccctccagt

SEQ ID NO: 300965 - DNA, 25 bp, Homo sapien
cagatccctccagtcaagctcgggt

SEQ ID NO: 300966 - DNA, 25 bp, Homo sapien
ccggagaaggccaagcagatccctc

SEQ ID NO: 300967 - DNA, 25 bp, Homo sapien
cctgccagagttgcggtcgctggtc

SEQ ID NO: 300968 - DNA, 25 bp, Homo sapien
cctgtgtccagctgggtccttgcgg

SEQ ID NO: 300969 - DNA, 25 bp, Homo sapien
tgtcactttgatctttggccactgg

SEQ ID NO: 300970 - DNA, 25 bp, Homo sapien
cctgctcagggacatcgtttgtgcc

SEQ ID NO: 300971 - DNA, 25 bp, Homo sapien
cttggttctgactcctcaggctcct

SEQ ID NO: 300972 - DNA, 25 bp, Homo sapien
tctggtcagtcagggggtcttggcc

SEQ ID NO: 300973 - DNA, 25 bp, Homo sapien
cgagtctgcctgcttctggtcagtc

SEQ ID NO: 300974 - DNA, 25 bp, Homo sapien
gggtcttggcctctgcttggttctg

SEQ ID NO: 300975 - DNA, 25 bp, Homo sapien
ggccgggcccgtttcatggagacta

SEQ ID NO: 300976 - DNA, 25 bp, Homo sapien
tgtataacctgggacgactcccctg

SEQ ID NO: 300977 - DNA, 25 bp, Homo sapien
gaacagtctgtttggtaggtcacgg

SEQ ID NO: 300978 - DNA, 25 bp, Homo sapien
gaagttacagcactgccgttcgaag

SEQ ID NO: 300979 - DNA, 25 bp, Homo sapien
ggtccccgggcatccgccatgaggt

SEQ ID NO: 300980 - DNA, 25 bp, Homo sapien
cagcaggaacggattgaacagcgtg

SEQ ID NO: 300981 - DNA, 25 bp, Homo sapien
agtcggcccttgagcgggctcccag

SEQ ID NO: 300982 - DNA, 25 bp, Homo sapien
agagacagcaggaacggattgaaca

SEQ ID NO: 300983 - DNA, 25 bp, Homo sapien
acgctgccccggccccttccatccg

SEQ ID NO: 300984 - DNA, 25 bp, Homo sapien
gctgccccggccccttccatccgcc

SEQ ID NO: 300985 - DNA, 25 bp, Homo sapien
gccgccgcccctctcggccgcccgc

SEQ ID NO: 300986 - DNA, 25 bp, Homo sapien
cgacgctgccccggccccttccatc

SEQ ID NO: 300987 - DNA, 25 bp, Homo sapien
aggaggcaggaacgtggacgcggct

SEQ ID NO: 300988 - DNA, 25 bp, Homo sapien
gaggcaggaacgtggacgcggctct

SEQ ID NO: 300989 - DNA, 25 bp, Homo sapien
ggaggcaggaacgtggacgcggctc

SEQ ID NO: 300990 - DNA, 25 bp, Homo sapien
tccccagggtcaaaaggtccgatca

SEQ ID NO: 300991 - DNA, 25 bp, Homo sapien
tgtgcccggccaaccaatgtgagtt

SEQ ID NO: 300992 - DNA, 25 bp, Homo sapien
ttcatacagggctcttcaggcccag

SEQ ID NO: 300993 - DNA, 25 bp, Homo sapien
tcacctgctagaagctcagtttctc

SEQ ID NO: 300994 - DNA, 25 bp, Homo sapien
tgaccatgctcatctagtgggtgcc

SEQ ID NO: 300995 - DNA, 25 bp, Homo sapien
ccccacccaggcctagataaagaag

SEQ ID NO: 300996 - DNA, 25 bp, Homo sapien
tgtcccatggagacctgtgccaggc

SEQ ID NO: 300997 - DNA, 25 bp, Homo sapien
aaagaagttgctcatcctgatattt

SEQ ID NO: 300998 - DNA, 25 bp, Homo sapien
gctgggaggactctgcctgcataga

SEQ ID NO: 300999 - DNA, 25 bp, Homo sapien
agccgacccctcgcccaagaatggg

SEQ ID NO: 301000 - DNA, 25 bp, Homo sapien
ccctcgcccaagaatgggagagagg

SEQ ID NO: 301001 - DNA, 25 bp, Homo sapien
tgcctgcatagagaccccctgagag

SEQ ID NO: 301002 - DNA, 25 bp, Homo sapien
aagatcgacatccatcccttcttga

SEQ ID NO: 301003 - DNA, 25 bp, Homo sapien
tctccaggctcgtccaagatcgaca

SEQ ID NO: 301004 - DNA, 25 bp, Homo sapien
tccatcccttcttgaagttgagcag

SEQ ID NO: 301005 - DNA, 25 bp, Homo sapien
ccttcttgaagttgagcagatcggg

SEQ ID NO: 301006 - DNA, 25 bp, Homo sapien
gaagggtctttagctgagcccacag

SEQ ID NO: 301007 - DNA, 25 bp, Homo sapien
gctggttccaaggacacatatgcca

SEQ ID NO: 301008 - DNA, 25 bp, Homo sapien
gaatctgtgtctcgggccagacagc

SEQ ID NO: 301009 - DNA, 25 bp, Homo sapien
gctcctactgaggtggcagggccaa

SEQ ID NO: 301010 - DNA, 25 bp, Homo sapien
aggcctagcctatgactgtctgaga

SEQ ID NO: 301011 - DNA, 25 bp, Homo sapien
ctggaagagaccaacaccctcatgg

SEQ ID NO: 301012 - DNA, 25 bp, Homo sapien
tggcatagggatggacaccaaccag

SEQ ID NO: 301013 - DNA, 25 bp, Homo sapien
taagtaaacggagttgctgctgcag

SEQ ID NO: 301014 - DNA, 25 bp, Homo sapien
ggtggtggtgagcgagggggaggga

SEQ ID NO: 301015 - DNA, 25 bp, Homo sapien
tggtggtgagcgagggggagggagg

SEQ ID NO: 301016 - DNA, 25 bp, Homo sapien
agaggtggtggtgagcgagggggag

SEQ ID NO: 301017 - DNA, 25 bp, Homo sapien
ctgcgaagtagaggtggtggtgagc

SEQ ID NO: 301018 - DNA, 25 bp, Homo sapien
cagcagtggagtctctgtaatattt

SEQ ID NO: 301019 - DNA, 25 bp, Homo sapien
tcagcacaaaccaatgtttcttcca

SEQ ID NO: 301020 - DNA, 25 bp, Homo sapien
gacttgaatctgtcagcacaaacca

SEQ ID NO: 301021 - DNA, 25 bp, Homo sapien
cagtggagtctctgtaatatttgag

SEQ ID NO: 301022 - DNA, 25 bp, Homo sapien
cgcgtactcagtgacatccgtgcag

SEQ ID NO: 301023 - DNA, 25 bp, Homo sapien
tggaagccatagttgcgctgcaccg

SEQ ID NO: 301024 - DNA, 25 bp, Homo sapien
aggtcgatctcaccatccagctcat

SEQ ID NO: 301025 - DNA, 25 bp, Homo sapien
tgcaggaacgcaggtcgatctcacc

SEQ ID NO: 301026 - DNA, 25 bp, Homo sapien
gcgtctcccccagatatgctaagtg

SEQ ID NO: 301027 - DNA, 25 bp, Homo sapien
atgcatctaaggtcttgagtctggg

SEQ ID NO: 301028 - DNA, 25 bp, Homo sapien
taagtgttggcatcacagctctggc

SEQ ID NO: 301029 - DNA, 25 bp, Homo sapien
ggtgagccatgttcaacaccaaaac

SEQ ID NO: 301030 - DNA, 25 bp, Homo sapien
gccgacaaggtatagacagcatcct

SEQ ID NO: 301031 - DNA, 25 bp, Homo sapien
agttccgccggatgcctgaggtcat

SEQ ID NO: 301032 - DNA, 25 bp, Homo sapien
gaagttggacgtacggtctttctca

SEQ ID NO: 301033 - DNA, 25 bp, Homo sapien
ggtctttctcagagcctcgatccag

SEQ ID NO: 301034 - DNA, 25 bp, Homo sapien
gcgagagctccacgtagtccaaggc

SEQ ID NO: 301035 - DNA, 25 bp, Homo sapien
cgctctccgcggctttggttgagca

SEQ ID NO: 301036 - DNA, 25 bp, Homo sapien
actaagccggttttgctggtcctca

SEQ ID NO: 301037 - DNA, 25 bp, Homo sapien
gctgtgcagcgcgttctccttgtta

SEQ ID NO: 301038 - DNA, 25 bp, Homo sapien
ggatgtggccatcctcctgggatct

SEQ ID NO: 301039 - DNA, 25 bp, Homo sapien
gatctcagtgcactctgaggagcct

SEQ ID NO: 301040 - DNA, 25 bp, Homo sapien
ttggagacgccacgcctccagctgg

SEQ ID NO: 301041 - DNA, 25 bp, Homo sapien
tcctgggatctcagtgcactctgag

SEQ ID NO: 301042 - DNA, 25 bp, Homo sapien
tgtttcctgataacacggcaagcag

SEQ ID NO: 301043 - DNA, 25 bp, Homo sapien
tgataacacggcaagcagaaatctg

SEQ ID NO: 301044 - DNA, 25 bp, Homo sapien
cagctgtttcctgataacacggcaa

SEQ ID NO: 301045 - DNA, 25 bp, Homo sapien
taacacggcaagcagaaatctgccc

SEQ ID NO: 301046 - DNA, 25 bp, Homo sapien
cttgtctgtaaaacgggcacagtga

SEQ ID NO: 301047 - DNA, 25 bp, Homo sapien
tcccacctttgagacctgcaggcgg

SEQ ID NO: 301048 - DNA, 25 bp, Homo sapien
tcaaatcccacctttgagacctgca

SEQ ID NO: 301049 - DNA, 25 bp, Homo sapien
ttgtctgtaaaacgggcacagtgat

SEQ ID NO: 301050 - DNA, 25 bp, Homo sapien
caaccagaagtattcccagacacag

SEQ ID NO: 301051 - DNA, 25 bp, Homo sapien
aatggaccccgttgagaaccgctgt

SEQ ID NO: 301052 - DNA, 25 bp, Homo sapien
cacacacacgttttttctagagagt

SEQ ID NO: 301053 - DNA, 25 bp, Homo sapien
gtcctaggcggacggtgcattctct

SEQ ID NO: 301054 - DNA, 25 bp, Homo sapien
aaaatgtcaaccagcacacgttaga

SEQ ID NO: 301055 - DNA, 25 bp, Homo sapien
gaagtagctgacaacatggaccagt

SEQ ID NO: 301056 - DNA, 25 bp, Homo sapien
cagttgtggatacaagagtatggaa

SEQ ID NO: 301057 - DNA, 25 bp, Homo sapien
tatccgatctagcaaagaagtagct

SEQ ID NO: 301058 - DNA, 25 bp, Homo sapien
cagggactttgtgctggtaatgcag

SEQ ID NO: 301059 - DNA, 25 bp, Homo sapien
catctactgtatccgcatggtggaa

SEQ ID NO: 301060 - DNA, 25 bp, Homo sapien
cagcattggccacagcgggagtatt

SEQ ID NO: 301061 - DNA, 25 bp, Homo sapien
ggtgtgataactacagacagctgat

SEQ ID NO: 301062 - DNA, 25 bp, Homo sapien
cgtggctgccgtctcctcagccagg

SEQ ID NO: 301063 - DNA, 25 bp, Homo sapien
catcacctgctggtgcgaggactcc

SEQ ID NO: 301064 - DNA, 25 bp, Homo sapien
gcagctcccgctcgtggtgccgctg

SEQ ID NO: 301065 - DNA, 25 bp, Homo sapien
acctgctggtgcgaggactccatct

SEQ ID NO: 301066 - DNA, 25 bp, Homo sapien
taacacacgcggctgcaaaggcgat

SEQ ID NO: 301067 - DNA, 25 bp, Homo sapien
ccttagtgccagattacagggcgaa

SEQ ID NO: 301068 - DNA, 25 bp, Homo sapien
cccaaggctgggttcgagtgcatga

SEQ ID NO: 301069 - DNA, 25 bp, Homo sapien
gagcaggaagagtcaccacctatgg

SEQ ID NO: 301070 - DNA, 25 bp, Homo sapien
acctttgccgcccactttcaagcga

SEQ ID NO: 301071 - DNA, 25 bp, Homo sapien
cctgctggagactccgtgttttgct

SEQ ID NO: 301072 - DNA, 25 bp, Homo sapien
gactccgtgttttgctcagctctcg

SEQ ID NO: 301073 - DNA, 25 bp, Homo sapien
tccggaggccatccgggccctgctg

SEQ ID NO: 301074 - DNA, 25 bp, Homo sapien
tggagactccgtgttttgctcagct

SEQ ID NO: 301075 - DNA, 25 bp, Homo sapien
gcatgagtgccccaatctccaggca

SEQ ID NO: 301076 - DNA, 25 bp, Homo sapien
tctcgcttcagtgcctccacatctg

SEQ ID NO: 301077 - DNA, 25 bp, Homo sapien
cagcggcgcagcgtgtgctcgcgct

SEQ ID NO: 301078 - DNA, 25 bp, Homo sapien
gagtactgctccgatagcacctgca

SEQ ID NO: 301079 - DNA, 25 bp, Homo sapien
aagccgcgcagctggtctatctcct

SEQ ID NO: 301080 - DNA, 25 bp, Homo sapien
ttgcccatgccctgcgaggcaatga

SEQ ID NO: 301081 - DNA, 25 bp, Homo sapien
gcaggaactccgctcgttgctgcgc

SEQ ID NO: 301082 - DNA, 25 bp, Homo sapien
tgcgaggcaatgaagccgcgcagct

SEQ ID NO: 301083 - DNA, 25 bp, Homo sapien
atcatctggagctcgtcccggaggc

SEQ ID NO: 301084 - DNA, 25 bp, Homo sapien
ctgcatcatctggagctcgtcccgg

SEQ ID NO: 301085 - DNA, 25 bp, Homo sapien
gcacctccttctttaggtactggag

SEQ ID NO: 301086 - DNA, 25 bp, Homo sapien
cgttttcttttacgcgaagcagcac

SEQ ID NO: 301087 - DNA, 25 bp, Homo sapien
gatgacacctacatgggagaagcac

SEQ ID NO: 301088 - DNA, 25 bp, Homo sapien
gagttcacgccacctgttcttcaag

SEQ ID NO: 301089 - DNA, 25 bp, Homo sapien
tcaagtgcggtaaacacggtctggc

SEQ ID NO: 301090 - DNA, 25 bp, Homo sapien
acggtctggctcacgtgcacttaca

SEQ ID NO: 301091 - DNA, 25 bp, Homo sapien
tggctccccaagatggccgtgggtt

SEQ ID NO: 301092 - DNA, 25 bp, Homo sapien
gggacacaggcgtcattgtcatcct

SEQ ID NO: 301093 - DNA, 25 bp, Homo sapien
ttttgaccaagaccgcagggcagtg

SEQ ID NO: 301094 - DNA, 25 bp, Homo sapien
gatacctcgcttcatccctccaggt

SEQ ID NO: 301095 - DNA, 25 bp, Homo sapien
ggtatgagggcatgaagtctctccc

SEQ ID NO: 301096 - DNA, 25 bp, Homo sapien
agaccgtgtcttgatgtggctcagc

SEQ ID NO: 301097 - DNA, 25 bp, Homo sapien
catggcaagacgcaggtgctccttc

SEQ ID NO: 301098 - DNA, 25 bp, Homo sapien
ggctgttgcgcatcgactccttctc

SEQ ID NO: 301099 - DNA, 25 bp, Homo sapien
tcagctccacatagacgtcctggta

SEQ ID NO: 301100 - DNA, 25 bp, Homo sapien
gctctggaggaacaggcttaagctg

SEQ ID NO: 301101 - DNA, 25 bp, Homo sapien
tacagaacgggaattggaggccaga

SEQ ID NO: 301102 - DNA, 25 bp, Homo sapien
caacaaccccgtgttgctggtttca

SEQ ID NO: 301103 - DNA, 25 bp, Homo sapien
cagggatgtgcacgctgcatttgcc

SEQ ID NO: 301104 - DNA, 25 bp, Homo sapien
caagggtgctgagtgggtccttcca

SEQ ID NO: 301105 - DNA, 25 bp, Homo sapien
taaggtacagccagatccgctcttc

SEQ ID NO: 301106 - DNA, 25 bp, Homo sapien
gacttatcagaaagaggatgctcca

SEQ ID NO: 301107 - DNA, 25 bp, Homo sapien
gactaactgggatagaagcccggcc

SEQ ID NO: 301108 - DNA, 25 bp, Homo sapien
caagtgcacgtgtggcccacagagg

SEQ ID NO: 301109 - DNA, 25 bp, Homo sapien
aagtgcacgtgtggcccacagaggg

SEQ ID NO: 301110 - DNA, 25 bp, Homo sapien
tgtcctgagccccatggtacgggtc

SEQ ID NO: 301111 - DNA, 25 bp, Homo sapien
acccagcacagcctcgaaggaggct

SEQ ID NO: 301112 - DNA, 25 bp, Homo sapien
gccatggaggccagctgctagctcc

SEQ ID NO: 301113 - DNA, 25 bp, Homo sapien
ccttttgggtggctctggcggttct

SEQ ID NO: 301114 - DNA, 25 bp, Homo sapien
tctgtggctcagaaatgggacctct

SEQ ID NO: 301115 - DNA, 25 bp, Homo sapien
ccaaggtcatggtcagggctagtct

SEQ ID NO: 301116 - DNA, 25 bp, Homo sapien
cacaaggccggaggatttgatggca

SEQ ID NO: 301117 - DNA, 25 bp, Homo sapien
ttcctgccgtgggtgcaacaaagca

SEQ ID NO: 301118 - DNA, 25 bp, Homo sapien
tttacagagcacatgcctggctgcc

SEQ ID NO: 301119 - DNA, 25 bp, Homo sapien
tggttgttggcgacacagcaataga

SEQ ID NO: 301120 - DNA, 25 bp, Homo sapien
taaggctcacctagccagctggagg

SEQ ID NO: 301121 - DNA, 25 bp, Homo sapien
gacacaaagaggttgagccaggtca

SEQ ID NO: 301122 - DNA, 25 bp, Homo sapien
gatgacacagactttcagcaactga

SEQ ID NO: 301123 - DNA, 25 bp, Homo sapien
tgcatccatgtcacactgctggtgg

SEQ ID NO: 301124 - DNA, 25 bp, Homo sapien
gatggccaagccaggtgaccaactt

SEQ ID NO: 301125 - DNA, 25 bp, Homo sapien
gagcagcccatgcaagagctcaggg

SEQ ID NO: 301126 - DNA, 25 bp, Homo sapien
cacatgggaaatagtgcagaacata

SEQ ID NO: 301127 - DNA, 25 bp, Homo sapien
gaggaggcaaccactattcccaggg

SEQ ID NO: 301128 - DNA, 25 bp, Homo sapien
ggccccttcacactgggttccctca

SEQ ID NO: 301129 - DNA, 25 bp, Homo sapien
gcagaacatatgaaagcatttaaca

SEQ ID NO: 301130 - DNA, 25 bp, Homo sapien
acaagactgaagggaggcccatctc

SEQ ID NO: 301131 - DNA, 25 bp, Homo sapien
aacaagactgaagggaggcccatct

SEQ ID NO: 301132 - DNA, 25 bp, Homo sapien
gtaacaagactgaagggaggcccat

SEQ ID NO: 301133 - DNA, 25 bp, Homo sapien
taacaagactgaagggaggcccatc

SEQ ID NO: 301134 - DNA, 25 bp, Homo sapien
acagaggaccctttggccttctgca

SEQ ID NO: 301135 - DNA, 25 bp, Homo sapien
tttcctagacagaggaccctttggc

SEQ ID NO: 301136 - DNA, 25 bp, Homo sapien
ctcaacctcccgattcaggtgatcc

SEQ ID NO: 301137 - DNA, 25 bp, Homo sapien
tagacagaggaccctttggccttct

SEQ ID NO: 301138 - DNA, 25 bp, Homo sapien
ccagagtggtctcgcaggtgatccg

SEQ ID NO: 301139 - DNA, 25 bp, Homo sapien
gccagagtggtctcgcaggtgatcc

SEQ ID NO: 301140 - DNA, 25 bp, Homo sapien
tgactaccgggccagtctggagtgc

SEQ ID NO: 301141 - DNA, 25 bp, Homo sapien
cttgggcggcgcatccgggtattta

SEQ ID NO: 301142 - DNA, 25 bp, Homo sapien
tgtcgcttggtctcggcaccgggct

SEQ ID NO: 301143 - DNA, 25 bp, Homo sapien
gcgaggagtcgctgcttttcctccc

SEQ ID NO: 301144 - DNA, 25 bp, Homo sapien
ccggctgttgaaggcgccttccaaa

SEQ ID NO: 301145 - DNA, 25 bp, Homo sapien
tgttgaaggcgccttccaaagggcc

SEQ ID NO: 301146 - DNA, 25 bp, Homo sapien
ctggtccggctgttgaaggcgcctt

SEQ ID NO: 301147 - DNA, 25 bp, Homo sapien
ttgaaggcgccttccaaagggccag

SEQ ID NO: 301148 - DNA, 25 bp, Homo sapien
caggggcggacgtggaattctcggt

SEQ ID NO: 301149 - DNA, 25 bp, Homo sapien
cgcaggggcggacgtggaattctcg

SEQ ID NO: 301150 - DNA, 25 bp, Homo sapien
tcgctcttggctagccggaaggacc

SEQ ID NO: 301151 - DNA, 25 bp, Homo sapien
tgaccaggcgcttgatggacaactt

SEQ ID NO: 301152 - DNA, 25 bp, Homo sapien
acttctgaatggactggcgcgagga

SEQ ID NO: 301153 - DNA, 25 bp, Homo sapien
gatctgcgagtcagcgttctcaccc

SEQ ID NO: 301154 - DNA, 25 bp, Homo sapien
tggactttgctttgggtttcactgg

SEQ ID NO: 301155 - DNA, 25 bp, Homo sapien
ttgctttgggtttcactggtttggc

SEQ ID NO: 301156 - DNA, 25 bp, Homo sapien
ctttgctttgggtttcactggtttg

SEQ ID NO: 301157 - DNA, 25 bp, Homo sapien
cacttcttcttgccggccctcttgg

SEQ ID NO: 301158 - DNA, 25 bp, Homo sapien
tcacttcttcttgccggccctcttg

SEQ ID NO: 301159 - DNA, 25 bp, Homo sapien
acttcttcttgccggccctcttggc

SEQ ID NO: 301160 - DNA, 25 bp, Homo sapien
ttcttcttgccggccctcttggcac

SEQ ID NO: 301161 - DNA, 25 bp, Homo sapien
taagtttcaacagggcacactgagg

SEQ ID NO: 301162 - DNA, 25 bp, Homo sapien
gacagcaaaattttcccggcacaag

SEQ ID NO: 301163 - DNA, 25 bp, Homo sapien
cagctcccgggtgtgaaactaagta

SEQ ID NO: 301164 - DNA, 25 bp, Homo sapien
gggtgcccaactcaaagaaaactca

SEQ ID NO: 301165 - DNA, 25 bp, Homo sapien
gagccgtgcgcatcgcggacgcagc

SEQ ID NO: 301166 - DNA, 25 bp, Homo sapien
ggagccgtgcgcatcgcggacgcag

SEQ ID NO: 301167 - DNA, 25 bp, Homo sapien
ctcctacctcgcccgagcgcgcctg

SEQ ID NO: 301168 - DNA, 25 bp, Homo sapien
cgctcctacctcgcccgagcgcgcc

SEQ ID NO: 301169 - DNA, 25 bp, Homo sapien
ccctgacgggacgtgatgacccgct

SEQ ID NO: 301170 - DNA, 25 bp, Homo sapien
ggcccctgacgggacgtgatgaccc

SEQ ID NO: 301171 - DNA, 25 bp, Homo sapien
gggacgtgatgacccgctcactctt

SEQ ID NO: 301172 - DNA, 25 bp, Homo sapien
gacgggacgtgatgacccgctcact

SEQ ID NO: 301173 - DNA, 25 bp, Homo sapien
gagaggagatggatacagcagctca

SEQ ID NO: 301174 - DNA, 25 bp, Homo sapien
aagggcaggcctggaaagatgacag

SEQ ID NO: 301175 - DNA, 25 bp, Homo sapien
cagcagctcaggtggggcaagggca

SEQ ID NO: 301176 - DNA, 25 bp, Homo sapien
cctggaaagatgacagtgccaggcc

SEQ ID NO: 301177 - DNA, 25 bp, Homo sapien
gataaagcggacagagctgaggcca

SEQ ID NO: 301178 - DNA, 25 bp, Homo sapien
ttgttggcacagaagttaaggattc

SEQ ID NO: 301179 - DNA, 25 bp, Homo sapien
acagataaagcggacagagctgagg

SEQ ID NO: 301180 - DNA, 25 bp, Homo sapien
ctgggttccacagataaagcggaca

SEQ ID NO: 301181 - DNA, 25 bp, Homo sapien
agaaaatgagtgagacacgtgttga

SEQ ID NO: 301182 - DNA, 25 bp, Homo sapien
ggtggaagcgggctatttttgcttc

SEQ ID NO: 301183 - DNA, 25 bp, Homo sapien
tatttttgcttctagattcttgtgg

SEQ ID NO: 301184 - DNA, 25 bp, Homo sapien
ttgcttctagattcttgtggatgct

SEQ ID NO: 301185 - DNA, 25 bp, Homo sapien
cctcccgctggtggaagcgggctat

SEQ ID NO: 301186 - DNA, 25 bp, Homo sapien
tgccgggctggaccagcgccctgct

SEQ ID NO: 301187 - DNA, 25 bp, Homo sapien
ggtagagaggcaaggtgttctgtgc

SEQ ID NO: 301188 - DNA, 25 bp, Homo sapien
ggcccccgtgtctcagtgccgggct

SEQ ID NO: 301189 - DNA, 25 bp, Homo sapien
ccgtgtctcagtgccgggctggacc

SEQ ID NO: 301190 - DNA, 25 bp, Homo sapien
cttgcacagccggatgccgtcgatg

SEQ ID NO: 301191 - DNA, 25 bp, Homo sapien
gcacagccggatgccgtcgatgatg

SEQ ID NO: 301192 - DNA, 25 bp, Homo sapien
tggcttctaggtcggccatgtccag

SEQ ID NO: 301193 - DNA, 25 bp, Homo sapien
ccatgtccaggtggcgatagcggta

SEQ ID NO: 301194 - DNA, 25 bp, Homo sapien
catgaagaccagggcaccatatcta

SEQ ID NO: 301195 - DNA, 25 bp, Homo sapien
ctcctgcaggggtgcgatgtcgcca

SEQ ID NO: 301196 - DNA, 25 bp, Homo sapien
tgaagaccagggcaccatatctaga

SEQ ID NO: 301197 - DNA, 25 bp, Homo sapien
ccatgaagaccagggcaccatatct

SEQ ID NO: 301198 - DNA, 25 bp, Homo sapien
ggcctcaggtgccacatggtcccac

SEQ ID NO: 301199 - DNA, 25 bp, Homo sapien
aggcctcaggtgccacatggtccca

SEQ ID NO: 301200 - DNA, 25 bp, Homo sapien
cagggtggagttgatgatggtgacc

SEQ ID NO: 301201 - DNA, 25 bp, Homo sapien
gtgacctggtccatcacacccagca

SEQ ID NO: 301202 - DNA, 25 bp, Homo sapien
atgatggtgacctggtccatcacac

SEQ ID NO: 301203 - DNA, 25 bp, Homo sapien
tcacacccagcagctcatctgtgcc

SEQ ID NO: 301204 - DNA, 25 bp, Homo sapien
aatggtgttactccccatcagcaga

SEQ ID NO: 301205 - DNA, 25 bp, Homo sapien
tactccccatcagcagatctagggc

SEQ ID NO: 301206 - DNA, 25 bp, Homo sapien
cttggaggcgcagccaacgacagca

SEQ ID NO: 301207 - DNA, 25 bp, Homo sapien
tagactggacaatggtgttactccc

SEQ ID NO: 301208 - DNA, 25 bp, Homo sapien
tgcgagaggccagccgggcatcacc

SEQ ID NO: 301209 - DNA, 25 bp, Homo sapien
catgcgagaggccagccgggcatca

SEQ ID NO: 301210 - DNA, 25 bp, Homo sapien
tgtcatccgccatgcgagaggccag

SEQ ID NO: 301211 - DNA, 25 bp, Homo sapien
atccgccatgcgagaggccagccgg

SEQ ID NO: 301212 - DNA, 25 bp, Homo sapien
ctgctgagatctgtacccggatccg

SEQ ID NO: 301213 - DNA, 25 bp, Homo sapien
cggggtagctgaacccgatgacaaa

SEQ ID NO: 301214 - DNA, 25 bp, Homo sapien
ggtcaatgtcttcctcgctatgcac

SEQ ID NO: 301215 - DNA, 25 bp, Homo sapien
ggcctccacgcagcggtcaatgtct

SEQ ID NO: 301216 - DNA, 25 bp, Homo sapien
agggcagtgccccgtgcagtcgccc

SEQ ID NO: 301217 - DNA, 25 bp, Homo sapien
gcagtgccccgtgcagtcgccccac

SEQ ID NO: 301218 - DNA, 25 bp, Homo sapien
tcagggcagtgccccgtgcagtcgc

SEQ ID NO: 301219 - DNA, 25 bp, Homo sapien
gggcagtgccccgtgcagtcgcccc

SEQ ID NO: 301220 - DNA, 25 bp, Homo sapien
gtaggcggaccttggctcttctcgt

SEQ ID NO: 301221 - DNA, 25 bp, Homo sapien
tcctttgaccctgtggcagtaggcg

SEQ ID NO: 301222 - DNA, 25 bp, Homo sapien
cagtaggcggaccttggctcttctc

SEQ ID NO: 301223 - DNA, 25 bp, Homo sapien
accctgtggcagtaggcggaccttg

SEQ ID NO: 301224 - DNA, 25 bp, Homo sapien
gcccagagacaataaagcagaccag

SEQ ID NO: 301225 - DNA, 25 bp, Homo sapien
ctgcccagagacaataaagcagacc

SEQ ID NO: 301226 - DNA, 25 bp, Homo sapien
agagacaataaagcagaccagagtg

SEQ ID NO: 301227 - DNA, 25 bp, Homo sapien
cccagagacaataaagcagaccaga

SEQ ID NO: 301228 - DNA, 25 bp, Homo sapien
tgcctgattcttcaaccggccacag

SEQ ID NO: 301229 - DNA, 25 bp, Homo sapien
tcttaatctagggaaagaggtcagt

SEQ ID NO: 301230 - DNA, 25 bp, Homo sapien
agaggtcagtggagatctgcagtcc

SEQ ID NO: 301231 - DNA, 25 bp, Homo sapien
ggagatctgcagtcctcaggcgcct

SEQ ID NO: 301232 - DNA, 25 bp, Homo sapien
actacccgagacaaacggtggactg

SEQ ID NO: 301233 - DNA, 25 bp, Homo sapien
gacaaacggtggactgggcctatct

SEQ ID NO: 301234 - DNA, 25 bp, Homo sapien
agcagcacagaaactacccgagaca

SEQ ID NO: 301235 - DNA, 25 bp, Homo sapien
cagaaactacccgagacaaacggtg

SEQ ID NO: 301236 - DNA, 25 bp, Homo sapien
gaacacagggttccagactgtctgg

SEQ ID NO: 301237 - DNA, 25 bp, Homo sapien
acagggactggagcttgccgaaagc

SEQ ID NO: 301238 - DNA, 25 bp, Homo sapien
tcatcgtaggccttggaatgagcga

SEQ ID NO: 301239 - DNA, 25 bp, Homo sapien
caaggtcacaccacgctgagggtgg

SEQ ID NO: 301240 - DNA, 25 bp, Homo sapien
tgcccgtggcgcttaacatgagctg

SEQ ID NO: 301241 - DNA, 25 bp, Homo sapien
cgcagctgcccgtggcgcttaacat

SEQ ID NO: 301242 - DNA, 25 bp, Homo sapien
cgtggcgcttaacatgagctgctgg

SEQ ID NO: 301243 - DNA, 25 bp, Homo sapien
gctgtctggatctcgcctcgtgccg

SEQ ID NO: 301244 - DNA, 25 bp, Homo sapien
gccttagcaaaacacgggtaacatc

SEQ ID NO: 301245 - DNA, 25 bp, Homo sapien
gactacctaggtatttgagggacac

SEQ ID NO: 301246 - DNA, 25 bp, Homo sapien
gaaggcacaagcgaagtaggatgaa

SEQ ID NO: 301247 - DNA, 25 bp, Homo sapien
ccagaaactggtatgttttccttct

SEQ ID NO: 301248 - DNA, 25 bp, Homo sapien
ggaatcctcaggcaagagcccccag

SEQ ID NO: 301249 - DNA, 25 bp, Homo sapien
agccaaagtcatcgctgagtgtcac

SEQ ID NO: 301250 - DNA, 25 bp, Homo sapien
tcgctgagtgtcactgtgtgagcaa

SEQ ID NO: 301251 - DNA, 25 bp, Homo sapien
ccagttctggttgcttgaccccggg

SEQ ID NO: 301252 - DNA, 25 bp, Homo sapien
aggtagatgagcaggtgcacggcct

SEQ ID NO: 301253 - DNA, 25 bp, Homo sapien
cgagggccccaaagagccaggcatc

SEQ ID NO: 301254 - DNA, 25 bp, Homo sapien
gagacagcagccagcgtaaagctgc

SEQ ID NO: 301255 - DNA, 25 bp, Homo sapien
gacgagggccccaaagagccaggca

SEQ ID NO: 301256 - DNA, 25 bp, Homo sapien
ccagtgaggatctgttcaggactcc

SEQ ID NO: 301257 - DNA, 25 bp, Homo sapien
cagtgaggatctgttcaggactcct

SEQ ID NO: 301258 - DNA, 25 bp, Homo sapien
tgaggatctgttcaggactcctccc

SEQ ID NO: 301259 - DNA, 25 bp, Homo sapien
agtgaggatctgttcaggactcctc

SEQ ID NO: 301260 - DNA, 25 bp, Homo sapien
catttcgcgcttacagagcacttac

SEQ ID NO: 301261 - DNA, 25 bp, Homo sapien
tgtgctgccacttgagactcagagg

SEQ ID NO: 301262 - DNA, 25 bp, Homo sapien
aacgcattcgtgagcttcttttgcg

SEQ ID NO: 301263 - DNA, 25 bp, Homo sapien
gactcagaggcgtcctctggaagtt

SEQ ID NO: 301264 - DNA, 25 bp, Homo sapien
cgtagcgcacggtgccgtagtagct

SEQ ID NO: 301265 - DNA, 25 bp, Homo sapien
agcgtgcgcccgtaggccaggctca

SEQ ID NO: 301266 - DNA, 25 bp, Homo sapien
ggtagggcgccgagaagagcgccgc

SEQ ID NO: 301267 - DNA, 25 bp, Homo sapien
tgcggcgcgggcgttacgcggcgtg

SEQ ID NO: 301268 - DNA, 25 bp, Homo sapien
aaggcgaagcggccgtaccagaagc

SEQ ID NO: 301269 - DNA, 25 bp, Homo sapien
gatgagcgcgtggtgcggaccccag

SEQ ID NO: 301270 - DNA, 25 bp, Homo sapien
gaccccagcagagcgcgtagagcgc

SEQ ID NO: 301271 - DNA, 25 bp, Homo sapien
gaagcggccgtaccagaagcacagg

SEQ ID NO: 301272 - DNA, 25 bp, Homo sapien
gaagcgcgcgcggaagtggcgcgag

SEQ ID NO: 301273 - DNA, 25 bp, Homo sapien
gcgcgtagacgagcgggttgaggca

SEQ ID NO: 301274 - DNA, 25 bp, Homo sapien
ggagttggcgtaggccaggcagtgt

SEQ ID NO: 301275 - DNA, 25 bp, Homo sapien
ggaagtggcgcgaggcgagcgcgta

SEQ ID NO: 301276 - DNA, 25 bp, Homo sapien
gcggacgcgacgcaaggcgcggcgg

SEQ ID NO: 301277 - DNA, 25 bp, Homo sapien
agcctcccgctaggccgggcgtctc

SEQ ID NO: 301278 - DNA, 25 bp, Homo sapien
ggcagcctctccgccgtggacgggt

SEQ ID NO: 301279 - DNA, 25 bp, Homo sapien
ttattccggtcctcgggcagcctct

SEQ ID NO: 301280 - DNA, 25 bp, Homo sapien
acaggcggagtccaggcggcagggt

SEQ ID NO: 301281 - DNA, 25 bp, Homo sapien
cctcacccgggtctgtataacagaa

SEQ ID NO: 301282 - DNA, 25 bp, Homo sapien
gaagttaaggatctttcgccaggaa

SEQ ID NO: 301283 - DNA, 25 bp, Homo sapien
tgctcccacctggactggctcagtg

SEQ ID NO: 301284 - DNA, 25 bp, Homo sapien
tataacagaagagcaggtgacggga

SEQ ID NO: 301285 - DNA, 25 bp, Homo sapien
tgaggccctcagttggtcctgtgcc

SEQ ID NO: 301286 - DNA, 25 bp, Homo sapien
tcaccagcacttagacagacacgtc

SEQ ID NO: 301287 - DNA, 25 bp, Homo sapien
catgggcttgttgcagtcagcaggt

SEQ ID NO: 301288 - DNA, 25 bp, Homo sapien
tgtgttccgtcctggccatgggctt

SEQ ID NO: 301289 - DNA, 25 bp, Homo sapien
tgggtttgagtaattctcctgcttc

SEQ ID NO: 301290 - DNA, 25 bp, Homo sapien
gggattataggcacgcatcatcaca

SEQ ID NO: 301291 - DNA, 25 bp, Homo sapien
attataggcacgcatcatcacaccc

SEQ ID NO: 301292 - DNA, 25 bp, Homo sapien
atcacacccagttaatttttgtatt

SEQ ID NO: 301293 - DNA, 25 bp, Homo sapien
accaagcccggctaattattgtaat

SEQ ID NO: 301294 - DNA, 25 bp, Homo sapien
gggttacaggcgcccactaccaagc

SEQ ID NO: 301295 - DNA, 25 bp, Homo sapien
caagcccggctaattattgtaattt

SEQ ID NO: 301296 - DNA, 25 bp, Homo sapien
ctaccaagcccggctaattattgta

SEQ ID NO: 301297 - DNA, 25 bp, Homo sapien
cgtatttggcgtaaaggagaggcaa

SEQ ID NO: 301298 - DNA, 25 bp, Homo sapien
tcagatataaggacacgtatttggc

SEQ ID NO: 301299 - DNA, 25 bp, Homo sapien
gaataagagggttacaagtagcctg

SEQ ID NO: 301300 - DNA, 25 bp, Homo sapien
ccggaaagagcgaaatgagcggccc

SEQ ID NO: 301301 - DNA, 25 bp, Homo sapien
cataatcatcagcgggataagacat

SEQ ID NO: 301302 - DNA, 25 bp, Homo sapien
actcataatcatcagcgggataaga

SEQ ID NO: 301303 - DNA, 25 bp, Homo sapien
tcataatcatcagcgggataagaca

SEQ ID NO: 301304 - DNA, 25 bp, Homo sapien
gactcataatcatcagcgggataag

SEQ ID NO: 301305 - DNA, 25 bp, Homo sapien
cagcgagatttgaccagacggagcc

SEQ ID NO: 301306 - DNA, 25 bp, Homo sapien
tttgaggaactcacacgccttagag

SEQ ID NO: 301307 - DNA, 25 bp, Homo sapien
ggacaagccaatcgaacacgcgaag

SEQ ID NO: 301308 - DNA, 25 bp, Homo sapien
ggacagccgccaagtcgtgaattca

SEQ ID NO: 301309 - DNA, 25 bp, Homo sapien
gataagcgtaggggtcataagccgc

SEQ ID NO: 301310 - DNA, 25 bp, Homo sapien
tgggataagcgtaggggtcataagc

SEQ ID NO: 301311 - DNA, 25 bp, Homo sapien
atcatagtcgctgggataagcgtag

SEQ ID NO: 301312 - DNA, 25 bp, Homo sapien
atatcatagtcgctgggataagcgt

SEQ ID NO: 301313 - DNA, 25 bp, Homo sapien
taagcaaggtcctgctttggatctc

SEQ ID NO: 301314 - DNA, 25 bp, Homo sapien
aagtttttgatcacctcagggatca

SEQ ID NO: 301315 - DNA, 25 bp, Homo sapien
tggaaatactggatgaagtttttga

SEQ ID NO: 301316 - DNA, 25 bp, Homo sapien
cataagcaaggtcctgctttggatc

SEQ ID NO: 301317 - DNA, 25 bp, Homo sapien
gagcaatggcttcagcctcgggcca

SEQ ID NO: 301318 - DNA, 25 bp, Homo sapien
tggcttcagcctcgggccaaggtgt

SEQ ID NO: 301319 - DNA, 25 bp, Homo sapien
agaatctttcagtcagcttggtcca

SEQ ID NO: 301320 - DNA, 25 bp, Homo sapien
gaatctttcagtcagcttggtccag

SEQ ID NO: 301321 - DNA, 25 bp, Homo sapien
taaattgctatgcatatgccccaag

SEQ ID NO: 301322 - DNA, 25 bp, Homo sapien
catcaacctcaatctctgtcgatga

SEQ ID NO: 301323 - DNA, 25 bp, Homo sapien
gatggcagaagggtgcttcactaac

SEQ ID NO: 301324 - DNA, 25 bp, Homo sapien
gaagactaaacaacatctaaattgc

SEQ ID NO: 301325 - DNA, 25 bp, Homo sapien
atatgtgcctgtagtataattcttt

SEQ ID NO: 301326 - DNA, 25 bp, Homo sapien
gttgaagagattgcagtagttgtaa

SEQ ID NO: 301327 - DNA, 25 bp, Homo sapien
tgaagagattgcagtagttgtaata

SEQ ID NO: 301328 - DNA, 25 bp, Homo sapien
gaagagattgcagtagttgtaatag

SEQ ID NO: 301329 - DNA, 25 bp, Homo sapien
agagattgcagtagttgtaatagga

SEQ ID NO: 301330 - DNA, 25 bp, Homo sapien
taatatcccagagccactggttggg

SEQ ID NO: 301331 - DNA, 25 bp, Homo sapien
ataatatcccagagccactggttgg

SEQ ID NO: 301332 - DNA, 25 bp, Homo sapien
tagatgaactcatcgataatatccc

SEQ ID NO: 301333 - DNA, 25 bp, Homo sapien
tgaactcatcgataatatcccagag

SEQ ID NO: 301334 - DNA, 25 bp, Homo sapien
tcctctgacttcttggcagtcttac

SEQ ID NO: 301335 - DNA, 25 bp, Homo sapien
acagcggtactgactgaatgactga

SEQ ID NO: 301336 - DNA, 25 bp, Homo sapien
agtcttacagcggtactgactgaat

SEQ ID NO: 301337 - DNA, 25 bp, Homo sapien
ctgacttcttggcagtcttacagcg

SEQ ID NO: 301338 - DNA, 25 bp, Homo sapien
cttgtgtatacctccaactgtcggt

SEQ ID NO: 301339 - DNA, 25 bp, Homo sapien
ctccaactgtcggttgatgttggat

SEQ ID NO: 301340 - DNA, 25 bp, Homo sapien
caactgtcggttgatgttggatttg

SEQ ID NO: 301341 - DNA, 25 bp, Homo sapien
cgcttgtgtatacctccaactgtcg

SEQ ID NO: 301342 - DNA, 25 bp, Homo sapien
gtagagggagtgccgcccatactcc

SEQ ID NO: 301343 - DNA, 25 bp, Homo sapien
ttgttcagttcgatgttctccagca

SEQ ID NO: 301344 - DNA, 25 bp, Homo sapien
gaagcccgaccaggctgaagtaacc

SEQ ID NO: 301345 - DNA, 25 bp, Homo sapien
cttcttgttcagttcgatgttctcc

SEQ ID NO: 301346 - DNA, 25 bp, Homo sapien
gagagcggatcttcctattcatcaa

SEQ ID NO: 301347 - DNA, 25 bp, Homo sapien
ggaagaacacaacagctaaccatgt

SEQ ID NO: 301348 - DNA, 25 bp, Homo sapien
ggttctggatcaggtaatccctaaa

SEQ ID NO: 301349 - DNA, 25 bp, Homo sapien
gagtcccaattcatcctagatagaa

SEQ ID NO: 301350 - DNA, 25 bp, Homo sapien
gtgacctggcactctggcacacggg

SEQ ID NO: 301351 - DNA, 25 bp, Homo sapien
catacttgtacgtggtcctctggaa

SEQ ID NO: 301352 - DNA, 25 bp, Homo sapien
catcctggtaacgacgcatcatcaa

SEQ ID NO: 301353 - DNA, 25 bp, Homo sapien
gaagacccggatggcatcctggtaa

SEQ ID NO: 301354 - DNA, 25 bp, Homo sapien
tggccagcagcgcatgcatctgctc

SEQ ID NO: 301355 - DNA, 25 bp, Homo sapien
cagcagcgcatgcatctgctcattc

SEQ ID NO: 301356 - DNA, 25 bp, Homo sapien
gcaatggccagcagcgcatgcatct

SEQ ID NO: 301357 - DNA, 25 bp, Homo sapien
agggcaatggccagcagcgcatgca

SEQ ID NO: 301358 - DNA, 25 bp, Homo sapien
tgcatgcgcaacatcttgtccccat

SEQ ID NO: 301359 - DNA, 25 bp, Homo sapien
ctgcatgcgcaacatcttgtcccca

SEQ ID NO: 301360 - DNA, 25 bp, Homo sapien
ctgagataccgctggtccacacgag

SEQ ID NO: 301361 - DNA, 25 bp, Homo sapien
tatacttcatgtgcccacaatagtg

SEQ ID NO: 301362 - DNA, 25 bp, Homo sapien
tttttgttccccgatatacttcatg

SEQ ID NO: 301363 - DNA, 25 bp, Homo sapien
ccctaaagtactagtattactggca

SEQ ID NO: 301364 - DNA, 25 bp, Homo sapien
cccacaatagtgaatgaaagatact

SEQ ID NO: 301365 - DNA, 25 bp, Homo sapien
gtggcacatatcagagttcgagacc

SEQ ID NO: 301366 - DNA, 25 bp, Homo sapien
aacttaaaatcggctgggaacagtg

SEQ ID NO: 301367 - DNA, 25 bp, Homo sapien
acttaaaatcggctgggaacagtgg

SEQ ID NO: 301368 - DNA, 25 bp, Homo sapien
acagtggcacatatcagagttcgag

SEQ ID NO: 301369 - DNA, 25 bp, Homo sapien
gtcaggctggtcttgatctcctgac

SEQ ID NO: 301370 - DNA, 25 bp, Homo sapien
tcaggctggtcttgatctcctgacc

SEQ ID NO: 301371 - DNA, 25 bp, Homo sapien
ttacaggcatgcgctgccacgtctg

SEQ ID NO: 301372 - DNA, 25 bp, Homo sapien
ggcatgcgctgccacgtctggctaa

SEQ ID NO: 301373 - DNA, 25 bp, Homo sapien
agtcagggaagagcagccaggtgga

SEQ ID NO: 301374 - DNA, 25 bp, Homo sapien
gggaaagcacagtcagggaagagca

SEQ ID NO: 301375 - DNA, 25 bp, Homo sapien
tgggggaaagcacagtcagggaaga

SEQ ID NO: 301376 - DNA, 25 bp, Homo sapien
ctgtgggggaaagcacagtcaggga

SEQ ID NO: 301377 - DNA, 25 bp, Homo sapien
gaagaaatccccataacgcctggcg

SEQ ID NO: 301378 - DNA, 25 bp, Homo sapien
tggtgtccgcgatgtggatcatgtc

SEQ ID NO: 301379 - DNA, 25 bp, Homo sapien
ctcctcaaatttgtggatctgacgg

SEQ ID NO: 301380 - DNA, 25 bp, Homo sapien
caaatttgtggatctgacggatgaa

SEQ ID NO: 301381 - DNA, 25 bp, Homo sapien
tccagcatgggtgacagcacaagac

SEQ ID NO: 301382 - DNA, 25 bp, Homo sapien
agcatgggtgacagcacaagactcc

SEQ ID NO: 301383 - DNA, 25 bp, Homo sapien
gtgagctaagatcacgtcgctgcac

SEQ ID NO: 301384 - DNA, 25 bp, Homo sapien
tgagctaagatcacgtcgctgcact

SEQ ID NO: 301385 - DNA, 25 bp, Homo sapien
tcaaggtctctgtcccatcttcttc

SEQ ID NO: 301386 - DNA, 25 bp, Homo sapien
ccatcttcttcagggttcgattaag

SEQ ID NO: 301387 - DNA, 25 bp, Homo sapien
tcccatcttcttcagggttcgatta

SEQ ID NO: 301388 - DNA, 25 bp, Homo sapien
tgtcccatcttcttcagggttcgat

SEQ ID NO: 301389 - DNA, 25 bp, Homo sapien
gtattactgccacaacccacaaatt

SEQ ID NO: 301390 - DNA, 25 bp, Homo sapien
cggaggatgcaacgaactgagatca

SEQ ID NO: 301391 - DNA, 25 bp, Homo sapien
taagaattcaatttagggctgggca

SEQ ID NO: 301392 - DNA, 25 bp, Homo sapien
tcctacaataatgagacgacaaatc

SEQ ID NO: 301393 - DNA, 25 bp, Homo sapien
gctaaactgcatcattccaattttg

SEQ ID NO: 301394 - DNA, 25 bp, Homo sapien
atgctaaactgcatcattccaattt

SEQ ID NO: 301395 - DNA, 25 bp, Homo sapien
ggggccatgctaaactgcatcattc

SEQ ID NO: 301396 - DNA, 25 bp, Homo sapien
caggggccatgctaaactgcatcat

SEQ ID NO: 301397 - DNA, 25 bp, Homo sapien
gaagttgtcatgtccaccatcccct

SEQ ID NO: 301398 - DNA, 25 bp, Homo sapien
cctaaagcaccgctgagctggaagt

SEQ ID NO: 301399 - DNA, 25 bp, Homo sapien
caccgctgagctggaagttgtcatg

SEQ ID NO: 301400 - DNA, 25 bp, Homo sapien
tgagctggaagttgtcatgtccacc

SEQ ID NO: 301401 - DNA, 25 bp, Homo sapien
ctctggcttcggggccccggcttgg

SEQ ID NO: 301402 - DNA, 25 bp, Homo sapien
cgcgcgggcccggtttccggctgcg

SEQ ID NO: 301403 - DNA, 25 bp, Homo sapien
gctctggcttcggggccccggcttg

SEQ ID NO: 301404 - DNA, 25 bp, Homo sapien
aggtcgcggatctccacgccgcggt

SEQ ID NO: 301405 - DNA, 25 bp, Homo sapien
gcagaaggccaggccgtcccggaag

SEQ ID NO: 301406 - DNA, 25 bp, Homo sapien
taggagtcttcccaacattgccggc

SEQ ID NO: 301407 - DNA, 25 bp, Homo sapien
ggtgtctatcaatcggatcctagga

SEQ ID NO: 301408 - DNA, 25 bp, Homo sapien
gaactgtgctactgtccggagacaa

SEQ ID NO: 301409 - DNA, 25 bp, Homo sapien
gaggctccaagtcaactgttccggg

SEQ ID NO: 301410 - DNA, 25 bp, Homo sapien
gtccttggaaagcgaatcaaaatct

SEQ ID NO: 301411 - DNA, 25 bp, Homo sapien
caaacggttattctcgaagacattg

SEQ ID NO: 301412 - DNA, 25 bp, Homo sapien
cggttattctcgaagacattgtcct

SEQ ID NO: 301413 - DNA, 25 bp, Homo sapien
gttattctcgaagacattgtccttg

SEQ ID NO: 301414 - DNA, 25 bp, Homo sapien
gccaggactgcagaagtggttgtaa

SEQ ID NO: 301415 - DNA, 25 bp, Homo sapien
tgcagaagtggttgtaatactggga

SEQ ID NO: 301416 - DNA, 25 bp, Homo sapien
cagggacgctcatggagaccatgtc

SEQ ID NO: 301417 - DNA, 25 bp, Homo sapien
gggacgctcatggagaccatgtcat

SEQ ID NO: 301418 - DNA, 25 bp, Homo sapien
ggccctttctgggtggcgagacacc

SEQ ID NO: 301419 - DNA, 25 bp, Homo sapien
ccctttctgggtggcgagacaccag

SEQ ID NO: 301420 - DNA, 25 bp, Homo sapien
caaggccctttctgggtggcgagac

SEQ ID NO: 301421 - DNA, 25 bp, Homo sapien
aaggccctttctgggtggcgagaca

SEQ ID NO: 301422 - DNA, 25 bp, Homo sapien
ctgagccacatcttctggttccact

SEQ ID NO: 301423 - DNA, 25 bp, Homo sapien
tcttctggttccactggagtgggtg

SEQ ID NO: 301424 - DNA, 25 bp, Homo sapien
catcttctggttccactggagtggg

SEQ ID NO: 301425 - DNA, 25 bp, Homo sapien
cacatcttctggttccactggagtg

SEQ ID NO: 301426 - DNA, 25 bp, Homo sapien
tagcgctgcaccaagtgcacatgct

SEQ ID NO: 301427 - DNA, 25 bp, Homo sapien
cgatggtacagcctgccgtcagcca

SEQ ID NO: 301428 - DNA, 25 bp, Homo sapien
caggtagcgctgcaccaagtgcaca

SEQ ID NO: 301429 - DNA, 25 bp, Homo sapien
cagtggcgatggtacagcctgccgt

SEQ ID NO: 301430 - DNA, 25 bp, Homo sapien
agatcaagtgcgtgctgccactccc

SEQ ID NO: 301431 - DNA, 25 bp, Homo sapien
tttactttccttgctgcttatacca

SEQ ID NO: 301432 - DNA, 25 bp, Homo sapien
tcaggggcacactcaaccagatcaa

SEQ ID NO: 301433 - DNA, 25 bp, Homo sapien
ttataccactctcttaaaatctggc

SEQ ID NO: 301434 - DNA, 25 bp, Homo sapien
tctgcacacacaaaggtgccctcct

SEQ ID NO: 301435 - DNA, 25 bp, Homo sapien
ccattctcataagccccagggagca

SEQ ID NO: 301436 - DNA, 25 bp, Homo sapien
cagggtgctggagcaccgccgacac

SEQ ID NO: 301437 - DNA, 25 bp, Homo sapien
tggcacagtgttctgcacacacaaa

SEQ ID NO: 301438 - DNA, 25 bp, Homo sapien
ggcatcttctgcgagttgctgctgg

SEQ ID NO: 301439 - DNA, 25 bp, Homo sapien
catcttctgcgagttgctgctggtg

SEQ ID NO: 301440 - DNA, 25 bp, Homo sapien
tccttggcatcttctgcgagttgct

SEQ ID NO: 301441 - DNA, 25 bp, Homo sapien
acatccttggcatcttctgcgagtt

SEQ ID NO: 301442 - DNA, 25 bp, Homo sapien
cctgctgcagactggagcggggccg

SEQ ID NO: 301443 - DNA, 25 bp, Homo sapien
ttggtagggatctgcggccgggcct

SEQ ID NO: 301444 - DNA, 25 bp, Homo sapien
ctcctgtagtttgccaggaacccgg

SEQ ID NO: 301445 - DNA, 25 bp, Homo sapien
ccagctcctgtagtttgccaggaac

SEQ ID NO: 301446 - DNA, 25 bp, Homo sapien
ttggggacaggcagttcgtgcagtc

SEQ ID NO: 301447 - DNA, 25 bp, Homo sapien
tggggacaggcagttcgtgcagtct

SEQ ID NO: 301448 - DNA, 25 bp, Homo sapien
cccagagtaccctgattcccaccac

SEQ ID NO: 301449 - DNA, 25 bp, Homo sapien
ggccccagagtaccctgattcccac

SEQ ID NO: 301450 - DNA, 25 bp, Homo sapien
agagtaccctgattcccaccaccag

SEQ ID NO: 301451 - DNA, 25 bp, Homo sapien
cggccccagagtaccctgattccca

SEQ ID NO: 301452 - DNA, 25 bp, Homo sapien
ggtggatgagaaacggctgtttccc

SEQ ID NO: 301453 - DNA, 25 bp, Homo sapien
tccttctctctctagacagttttga

SEQ ID NO: 301454 - DNA, 25 bp, Homo sapien
ctctctctagacagttttgactcta

SEQ ID NO: 301455 - DNA, 25 bp, Homo sapien
ttctctctctagacagttttgactc

SEQ ID NO: 301456 - DNA, 25 bp, Homo sapien
accagcgtgatccatggggggtcct

SEQ ID NO: 301457 - DNA, 25 bp, Homo sapien
caccagcgtgatccatggggggtcc

SEQ ID NO: 301458 - DNA, 25 bp, Homo sapien
cctgcaccagcgtgatccatggggg

SEQ ID NO: 301459 - DNA, 25 bp, Homo sapien
agcgtgatccatggggggtccttcc

SEQ ID NO: 301460 - DNA, 25 bp, Homo sapien
caggctggccgttgggctcggctgg

SEQ ID NO: 301461 - DNA, 25 bp, Homo sapien
gactccaggctggccgttgggctcg

SEQ ID NO: 301462 - DNA, 25 bp, Homo sapien
tccaggctggccgttgggctcggct

SEQ ID NO: 301463 - DNA, 25 bp, Homo sapien
gttatagggtttggactccaggctg

SEQ ID NO: 301464 - DNA, 25 bp, Homo sapien
ggcagggctggtggccaggctgggt

SEQ ID NO: 301465 - DNA, 25 bp, Homo sapien
gggctggtggccaggctgggtgcag

SEQ ID NO: 301466 - DNA, 25 bp, Homo sapien
ctccgggtggcccagggcagggctg

SEQ ID NO: 301467 - DNA, 25 bp, Homo sapien
ccagggcagggctggtggccaggct

SEQ ID NO: 301468 - DNA, 25 bp, Homo sapien
ggcgcttctttgtcttggggctgct

SEQ ID NO: 301469 - DNA, 25 bp, Homo sapien
cggggcagggcgcttctttgtcttg

SEQ ID NO: 301470 - DNA, 25 bp, Homo sapien
ggtgatgccgtaccaggggtgcagg

SEQ ID NO: 301471 - DNA, 25 bp, Homo sapien
aggggtgatgccgtaccaggggtgc

SEQ ID NO: 301472 - DNA, 25 bp, Homo sapien
ctgcagtctggctggcgctctcaga

SEQ ID NO: 301473 - DNA, 25 bp, Homo sapien
gcggctccgagtgcgagaggcggga

SEQ ID NO: 301474 - DNA, 25 bp, Homo sapien
tggcgctctcagacgacaggctctc

SEQ ID NO: 301475 - DNA, 25 bp, Homo sapien
gtctggctggcgctctcagacgaca

SEQ ID NO: 301476 - DNA, 25 bp, Homo sapien
tgttccactctaggctccactagtt

SEQ ID NO: 301477 - DNA, 25 bp, Homo sapien
taggctccactagttccccagagga

SEQ ID NO: 301478 - DNA, 25 bp, Homo sapien
ccagggaggagttggtagagaggct

SEQ ID NO: 301479 - DNA, 25 bp, Homo sapien
atttgttccactctaggctccacta

SEQ ID NO: 301480 - DNA, 25 bp, Homo sapien
tccaaccaacaagagaggcgttggg

SEQ ID NO: 301481 - DNA, 25 bp, Homo sapien
ccaacaagagaggcgttggggtggc

SEQ ID NO: 301482 - DNA, 25 bp, Homo sapien
aacaagagaggcgttggggtggcgc

SEQ ID NO: 301483 - DNA, 25 bp, Homo sapien
caagagaggcgttggggtggcgcca

SEQ ID NO: 301484 - DNA, 25 bp, Homo sapien
aggtgagcccacagcacacagcata

SEQ ID NO: 301485 - DNA, 25 bp, Homo sapien
ctgagaaacaggtgagcccacagca

SEQ ID NO: 301486 - DNA, 25 bp, Homo sapien
ggtgagcccacagcacacagcatac

SEQ ID NO: 301487 - DNA, 25 bp, Homo sapien
agaaacaggtgagcccacagcacac

SEQ ID NO: 301488 - DNA, 25 bp, Homo sapien
atgagccttgggagctcagaggcct

SEQ ID NO: 301489 - DNA, 25 bp, Homo sapien
tgggccatccaaaggcgctgtggct

SEQ ID NO: 301490 - DNA, 25 bp, Homo sapien
gacagggccctcatgaactgggtgc

SEQ ID NO: 301491 - DNA, 25 bp, Homo sapien
ggcaatccccaggttctcagtatgg

SEQ ID NO: 301492 - DNA, 25 bp, Homo sapien
tgatggcttccggttaaaaggattc

SEQ ID NO: 301493 - DNA, 25 bp, Homo sapien
gcctcactggcttggatcccttggt

SEQ ID NO: 301494 - DNA, 25 bp, Homo sapien
cttgcgtttgatgagtggaaagccg

SEQ ID NO: 301495 - DNA, 25 bp, Homo sapien
gttaaaaggattctccttgcaggag

SEQ ID NO: 301496 - DNA, 25 bp, Homo sapien
gcatccagccggcgctcaatggtat

SEQ ID NO: 301497 - DNA, 25 bp, Homo sapien
tcctcctcagggatgtactggtcag

SEQ ID NO: 301498 - DNA, 25 bp, Homo sapien
tcaatggtatccatctctccatgga

SEQ ID NO: 301499 - DNA, 25 bp, Homo sapien
tcctcagggatgtactggtcagcct

SEQ ID NO: 301500 - DNA, 25 bp, Homo sapien
acatagatgagctcggactctcgcc

SEQ ID NO: 301501 - DNA, 25 bp, Homo sapien
ggactctcgccgcaccagtaggtgc

SEQ ID NO: 301502 - DNA, 25 bp, Homo sapien
gcttgaaccagtccaccagcatgtc

SEQ ID NO: 301503 - DNA, 25 bp, Homo sapien
cagtaggtgcttctcgtggatgagc

SEQ ID NO: 301504 - DNA, 25 bp, Homo sapien
aggaggcaccggagctcatactcga

SEQ ID NO: 301505 - DNA, 25 bp, Homo sapien
aggcaccggagctcatactcgacat

SEQ ID NO: 301506 - DNA, 25 bp, Homo sapien
gcaccggagctcatactcgacatca

SEQ ID NO: 301507 - DNA, 25 bp, Homo sapien
cggagctcatactcgacatcagcct

SEQ ID NO: 301508 - DNA, 25 bp, Homo sapien
tggccacagggcgccgctgtggctc

SEQ ID NO: 301509 - DNA, 25 bp, Homo sapien
gctctggccacagggcgccgctgtg

SEQ ID NO: 301510 - DNA, 25 bp, Homo sapien
ccgctctggccacagggcgccgctg

SEQ ID NO: 301511 - DNA, 25 bp, Homo sapien
tctggccacagggcgccgctgtggc

SEQ ID NO: 301512 - DNA, 25 bp, Homo sapien
tagcgttgcgctgctcaatgagggt

SEQ ID NO: 301513 - DNA, 25 bp, Homo sapien
tgcgctgctcaatgagggtcacaag

SEQ ID NO: 301514 - DNA, 25 bp, Homo sapien
gttgatgatagcgttgcgctgctca

SEQ ID NO: 301515 - DNA, 25 bp, Homo sapien
gctgctcaatgagggtcacaagctc

SEQ ID NO: 301516 - DNA, 25 bp, Homo sapien
atggcttccaacatcttgtcttcct

SEQ ID NO: 301517 - DNA, 25 bp, Homo sapien
cagcctcatccccagcaagggcctc

SEQ ID NO: 301518 - DNA, 25 bp, Homo sapien
agcctcatccccagcaagggcctca

SEQ ID NO: 301519 - DNA, 25 bp, Homo sapien
gcctcatccccagcaagggcctcac

SEQ ID NO: 301520 - DNA, 25 bp, Homo sapien
caccgcgcctggcccccatttatct

SEQ ID NO: 301521 - DNA, 25 bp, Homo sapien
gcgcctggcccccatttatctttaa

SEQ ID NO: 301522 - DNA, 25 bp, Homo sapien
ccgcgcctggcccccatttatcttt

SEQ ID NO: 301523 - DNA, 25 bp, Homo sapien
cgcaagcgctgccatgcgcggctaa

SEQ ID NO: 301524 - DNA, 25 bp, Homo sapien
cttgccctcaggttcagcctccctc

SEQ ID NO: 301525 - DNA, 25 bp, Homo sapien
gctcttgtctctgggggacttgctc

SEQ ID NO: 301526 - DNA, 25 bp, Homo sapien
gtttcaacatcttcatggtcttgaa

SEQ ID NO: 301527 - DNA, 25 bp, Homo sapien
ggcatcacgtttgtttcctagcagt

SEQ ID NO: 301528 - DNA, 25 bp, Homo sapien
tccgcagtcatcagaatcaggttgg

SEQ ID NO: 301529 - DNA, 25 bp, Homo sapien
cattcacgtctgacagtacaggcca

SEQ ID NO: 301530 - DNA, 25 bp, Homo sapien
tatttgccccttgggtccgtcacag

SEQ ID NO: 301531 - DNA, 25 bp, Homo sapien
ggaaactgagatccaagggcgcctg

SEQ ID NO: 301532 - DNA, 25 bp, Homo sapien
tgaggggtcagactataaacgttaa

SEQ ID NO: 301533 - DNA, 25 bp, Homo sapien
taaggaaccgagatgagcacctgct

SEQ ID NO: 301534 - DNA, 25 bp, Homo sapien
agtgaggggtcagactataaacgtt

SEQ ID NO: 301535 - DNA, 25 bp, Homo sapien
tgggagcagctaacagagcactcac

SEQ ID NO: 301536 - DNA, 25 bp, Homo sapien
tagcaacagtgctttgaccaagagc

SEQ ID NO: 301537 - DNA, 25 bp, Homo sapien
tcccagagatagcttatagcaacag

SEQ ID NO: 301538 - DNA, 25 bp, Homo sapien
tgagtagccatcaggccttcggtgg

SEQ ID NO: 301539 - DNA, 25 bp, Homo sapien
tacagtgtaatcttttcccagaggt

SEQ ID NO: 301540 - DNA, 25 bp, Homo sapien
gaacagttgtcctcgacctcgaagg

SEQ ID NO: 301541 - DNA, 25 bp, Homo sapien
catgtttagaaggagcctgccaggg

SEQ ID NO: 301542 - DNA, 25 bp, Homo sapien
aaatatcaaccttgtctcgggcacc

SEQ ID NO: 301543 - DNA, 25 bp, Homo sapien
catgtgccgcgtgacctttcttggg

SEQ ID NO: 301544 - DNA, 25 bp, Homo sapien
tgaagagcgtaagactccgacggac

SEQ ID NO: 301545 - DNA, 25 bp, Homo sapien
agcccctgagctagaccgatttgaa

SEQ ID NO: 301546 - DNA, 25 bp, Homo sapien
caagtgcgaatggaaatacagggtc

SEQ ID NO: 301547 - DNA, 25 bp, Homo sapien
tgtctaaaggtatccactgggcctg

SEQ ID NO: 301548 - DNA, 25 bp, Homo sapien
ggatatcggtcaggcgtgatggctc

SEQ ID NO: 301549 - DNA, 25 bp, Homo sapien
tgggcacgatgacgtccacctgtag

SEQ ID NO: 301550 - DNA, 25 bp, Homo sapien
gcacgatgacgtccacctgtagtcc

SEQ ID NO: 301551 - DNA, 25 bp, Homo sapien
gataggatatcggtcaggcgtgatg

SEQ ID NO: 301552 - DNA, 25 bp, Homo sapien
cccaggttcctgagctttcttagcc

SEQ ID NO: 301553 - DNA, 25 bp, Homo sapien
tccctgcagcccctatacataagtt

SEQ ID NO: 301554 - DNA, 25 bp, Homo sapien
gataggggctatcagggctcaatgc

SEQ ID NO: 301555 - DNA, 25 bp, Homo sapien
taagttgccactacaggcatcgccg

SEQ ID NO: 301556 - DNA, 25 bp, Homo sapien
gaagagaagactccttgtactgttt

SEQ ID NO: 301557 - DNA, 25 bp, Homo sapien
aatggattgatctggacagatgtcc

SEQ ID NO: 301558 - DNA, 25 bp, Homo sapien
cagtacgatccagtgtttgaaagaa

SEQ ID NO: 301559 - DNA, 25 bp, Homo sapien
taagcatcaaaaaggaaggagacca

SEQ ID NO: 301560 - DNA, 25 bp, Homo sapien
ataaaaaaaaacaggtcagctgtgg

SEQ ID NO: 301561 - DNA, 25 bp, Homo sapien
gcttatacctataatcctatcactt

SEQ ID NO: 301562 - DNA, 25 bp, Homo sapien
aaaaaaacaggtcagctgtggtggc

SEQ ID NO: 301563 - DNA, 25 bp, Homo sapien
tggcttatacctataatcctatcac

SEQ ID NO: 301564 - DNA, 25 bp, Homo sapien
aacgccacaagccacaagacctcat

SEQ ID NO: 301565 - DNA, 25 bp, Homo sapien
gccacaagccacaagacctcatctc

SEQ ID NO: 301566 - DNA, 25 bp, Homo sapien
ccgggcaacgccacaagccacaaga

SEQ ID NO: 301567 - DNA, 25 bp, Homo sapien
accagcccgggcaacgccacaagcc

SEQ ID NO: 301568 - DNA, 25 bp, Homo sapien
ccaagaggcctcatagaatgctttg

SEQ ID NO: 301569 - DNA, 25 bp, Homo sapien
gatagagaaggcatgctcagtgcag

SEQ ID NO: 301570 - DNA, 25 bp, Homo sapien
ttaatgcttctccatgttaagggag

SEQ ID NO: 301571 - DNA, 25 bp, Homo sapien
gcagcgccacatcatggacatcatg

SEQ ID NO: 301572 - DNA, 25 bp, Homo sapien
gcggagacccgcaaacagcgacact

SEQ ID NO: 301573 - DNA, 25 bp, Homo sapien
aaacagcgacactacgactcgcgcg

SEQ ID NO: 301574 - DNA, 25 bp, Homo sapien
gactcgcgcggctcctagcttatct

SEQ ID NO: 301575 - DNA, 25 bp, Homo sapien
ctagcttatcttgcgcctgcgccgt

SEQ ID NO: 301576 - DNA, 25 bp, Homo sapien
aggttgccgcaaaggccactccgct

SEQ ID NO: 301577 - DNA, 25 bp, Homo sapien
cgccccttccaaggttgccgcaaag

SEQ ID NO: 301578 - DNA, 25 bp, Homo sapien
ccttccaaggttgccgcaaaggcca

SEQ ID NO: 301579 - DNA, 25 bp, Homo sapien
tcatccgccccttccaaggttgccg

SEQ ID NO: 301580 - DNA, 25 bp, Homo sapien
atcatcaaagtcgtcgccatcaaaa

SEQ ID NO: 301581 - DNA, 25 bp, Homo sapien
ttctccaagtcatctagcccttcat

SEQ ID NO: 301582 - DNA, 25 bp, Homo sapien
cacatcatcaaagtcgtcgccatca

SEQ ID NO: 301583 - DNA, 25 bp, Homo sapien
gcattctccaagtcatctagccctt

SEQ ID NO: 301584 - DNA, 25 bp, Homo sapien
ctgtcagacgatttggcagcttggg

SEQ ID NO: 301585 - DNA, 25 bp, Homo sapien
tgtcagacgatttggcagcttgggc

SEQ ID NO: 301586 - DNA, 25 bp, Homo sapien
gtcagacgatttggcagcttgggct

SEQ ID NO: 301587 - DNA, 25 bp, Homo sapien
ttggcctgcggtcgctccccagagg

SEQ ID NO: 301588 - DNA, 25 bp, Homo sapien
caatctggagcgctcgggtgcccag

SEQ ID NO: 301589 - DNA, 25 bp, Homo sapien
catgtatggtgtggtgattcgcttc

SEQ ID NO: 301590 - DNA, 25 bp, Homo sapien
gcgggctcgctcgtacttggtcatg

SEQ ID NO: 301591 - DNA, 25 bp, Homo sapien
tacaagagcttactgtggcctgaca

SEQ ID NO: 301592 - DNA, 25 bp, Homo sapien
tcaatgcctggtacgcagggacggc

SEQ ID NO: 301593 - DNA, 25 bp, Homo sapien
tgggaaagatcagcggtacaagagc

SEQ ID NO: 301594 - DNA, 25 bp, Homo sapien
cagggacggcaccacttttggaatg

SEQ ID NO: 301595 - DNA, 25 bp, Homo sapien
ggttccctagatgcgccatgttgtt

SEQ ID NO: 301596 - DNA, 25 bp, Homo sapien
gaaactttccacattagaccatgag

SEQ ID NO: 301597 - DNA, 25 bp, Homo sapien
accctggaaatcgtgtgctgactct

SEQ ID NO: 301598 - DNA, 25 bp, Homo sapien
cacatgtgattcaccacggaggccc

SEQ ID NO: 301599 - DNA, 25 bp, Homo sapien
gcaatgagcagaggatctgtctccc

SEQ ID NO: 301600 - DNA, 25 bp, Homo sapien
cagctccaccatcacaggggcacac

SEQ ID NO: 301601 - DNA, 25 bp, Homo sapien
tccagctccaccatcacaggggcac

SEQ ID NO: 301602 - DNA, 25 bp, Homo sapien
ttgagttccttcatggcaatgagca

SEQ ID NO: 301603 - DNA, 25 bp, Homo sapien
gggaaattccaacagccagaagacg

SEQ ID NO: 301604 - DNA, 25 bp, Homo sapien
gaatattggtaaggcctcctgcagc

SEQ ID NO: 301605 - DNA, 25 bp, Homo sapien
gaagtcacaagtacatgagggctgg

SEQ ID NO: 301606 - DNA, 25 bp, Homo sapien
gaagacgtccatgtctcatcagtgc

SEQ ID NO: 301607 - DNA, 25 bp, Homo sapien
tctggcaggtaacggcgaatgatga

SEQ ID NO: 301608 - DNA, 25 bp, Homo sapien
gcaggtaacggcgaatgatgatggg

SEQ ID NO: 301609 - DNA, 25 bp, Homo sapien
cccatctggcaggtaacggcgaatg

SEQ ID NO: 301610 - DNA, 25 bp, Homo sapien
catctggcaggtaacggcgaatgat

SEQ ID NO: 301611 - DNA, 25 bp, Homo sapien
gcaagggcaggaagatgactccagc

SEQ ID NO: 301612 - DNA, 25 bp, Homo sapien
tttacacatataaagtgagaatgaa

SEQ ID NO: 301613 - DNA, 25 bp, Homo sapien
aagtgagaatgaaaattgggcatgg

SEQ ID NO: 301614 - DNA, 25 bp, Homo sapien
tataaagtgagaatgaaaattgggc

SEQ ID NO: 301615 - DNA, 25 bp, Homo sapien
gcacaaaggcggcatttcagagctg

SEQ ID NO: 301616 - DNA, 25 bp, Homo sapien
ggatccgagcccacgataagaggct

SEQ ID NO: 301617 - DNA, 25 bp, Homo sapien
gcatattcagggagccagtttaccc

SEQ ID NO: 301618 - DNA, 25 bp, Homo sapien
ggacccattagaacctcaggcagag

SEQ ID NO: 301619 - DNA, 25 bp, Homo sapien
cttcatctcttatccctgtactggt

SEQ ID NO: 301620 - DNA, 25 bp, Homo sapien
tgcttggtgagcctgacctggcctg

SEQ ID NO: 301621 - DNA, 25 bp, Homo sapien
gtactggtgcttcctcaaatgcttt

SEQ ID NO: 301622 - DNA, 25 bp, Homo sapien
tatccctgtactggtgcttcctcaa

SEQ ID NO: 301623 - DNA, 25 bp, Homo sapien
gctgaagacactagaatcctgacct

SEQ ID NO: 301624 - DNA, 25 bp, Homo sapien
acccaggttgctgtcggcaggctga

SEQ ID NO: 301625 - DNA, 25 bp, Homo sapien
taaagtatgtagctatatctgcccc

SEQ ID NO: 301626 - DNA, 25 bp, Homo sapien
tgacctgtacattctgcccttgcct

SEQ ID NO: 301627 - DNA, 25 bp, Homo sapien
ggcagctttagtcttgtgtttccac

SEQ ID NO: 301628 - DNA, 25 bp, Homo sapien
accagaccagaacgcgcgtgtgctg

SEQ ID NO: 301629 - DNA, 25 bp, Homo sapien
agtctctcttactgtgcaggatggg

SEQ ID NO: 301630 - DNA, 25 bp, Homo sapien
gtgtttccaccttgaaccagaccag

SEQ ID NO: 301631 - DNA, 25 bp, Homo sapien
cagctcactgtttcaaggccccgaa

SEQ ID NO: 301632 - DNA, 25 bp, Homo sapien
tcaaggccccgaacaagagtctggg

SEQ ID NO: 301633 - DNA, 25 bp, Homo sapien
tgtatttcgaacaaagacagctcac

SEQ ID NO: 301634 - DNA, 25 bp, Homo sapien
tatttcgaacaaagacagctcactg

SEQ ID NO: 301635 - DNA, 25 bp, Homo sapien
cctctccgggcggttctgaggccga

SEQ ID NO: 301636 - DNA, 25 bp, Homo sapien
cagccgggacacgacggcagatgct

SEQ ID NO: 301637 - DNA, 25 bp, Homo sapien
tgtgttaatcacatgattgccgttc

SEQ ID NO: 301638 - DNA, 25 bp, Homo sapien
ccgagcgggcgctgttaaaaagctt

SEQ ID NO: 301639 - DNA, 25 bp, Homo sapien
gaaggcaggtcatagagcctaccag

SEQ ID NO: 301640 - DNA, 25 bp, Homo sapien
gccatggaaggaagcctggatttcc

SEQ ID NO: 301641 - DNA, 25 bp, Homo sapien
tgccatggacggtgacaaaccctca

SEQ ID NO: 301642 - DNA, 25 bp, Homo sapien
ctgttgctccggaaaggcctccttg

SEQ ID NO: 301643 - DNA, 25 bp, Homo sapien
gggcccatcttctgagtaaatccgg

SEQ ID NO: 301644 - DNA, 25 bp, Homo sapien
ttcatctcagtgtatccttcagggc

SEQ ID NO: 301645 - DNA, 25 bp, Homo sapien
tctgaaagtcaggaagacagtctca

SEQ ID NO: 301646 - DNA, 25 bp, Homo sapien
ggagccttccataaagccggaccag

SEQ ID NO: 301647 - DNA, 25 bp, Homo sapien
gaggagcttgtcatcccaagcagga

SEQ ID NO: 301648 - DNA, 25 bp, Homo sapien
taatagcgtgatctgcctaaggccc

SEQ ID NO: 301649 - DNA, 25 bp, Homo sapien
tatccaaaggtggaggtggcctaga

SEQ ID NO: 301650 - DNA, 25 bp, Homo sapien
tccgagactgaggatgacacagcct

SEQ ID NO: 301651 - DNA, 25 bp, Homo sapien
caggttccaggtttctacatcggtc

SEQ ID NO: 301652 - DNA, 25 bp, Homo sapien
tcccaataggaactggagactggcc

SEQ ID NO: 301653 - DNA, 25 bp, Homo sapien
aacaccaagggtctgaggcatcacg

SEQ ID NO: 301654 - DNA, 25 bp, Homo sapien
gaggcatcaccttgcaaacactgga

SEQ ID NO: 301655 - DNA, 25 bp, Homo sapien
gagctcgagaccacggtgaaacccc

SEQ ID NO: 301656 - DNA, 25 bp, Homo sapien
agctcgagaccacggtgaaaccccg

SEQ ID NO: 301657 - DNA, 25 bp, Homo sapien
cagcctgggcgacagagagagactc

SEQ ID NO: 301658 - DNA, 25 bp, Homo sapien
ctccagcctgggcgacagagagaga

SEQ ID NO: 301659 - DNA, 25 bp, Homo sapien
ggtctccatatgttcccaaaggaag

SEQ ID NO: 301660 - DNA, 25 bp, Homo sapien
gaaaataatgaatgccaaggtcacc

SEQ ID NO: 301661 - DNA, 25 bp, Homo sapien
tcatcagcccctgtgaagtgcctgt

SEQ ID NO: 301662 - DNA, 25 bp, Homo sapien
cacagcagagttggtgggtcctcat

SEQ ID NO: 301663 - DNA, 25 bp, Homo sapien
gatggaaaagctgctccttgctccc

SEQ ID NO: 301664 - DNA, 25 bp, Homo sapien
tgctgacccaagttctgttccctgt

SEQ ID NO: 301665 - DNA, 25 bp, Homo sapien
tagtgcgagcaggtatcagctccaa

SEQ ID NO: 301666 - DNA, 25 bp, Homo sapien
tccatctagaccagcgtttttgcag

SEQ ID NO: 301667 - DNA, 25 bp, Homo sapien
gatgcagggtgcactctggaaactt

SEQ ID NO: 301668 - DNA, 25 bp, Homo sapien
caagtctttgcggaaggcctgctgc

SEQ ID NO: 301669 - DNA, 25 bp, Homo sapien
cattttgcagacgtgaaagcgggtc

SEQ ID NO: 301670 - DNA, 25 bp, Homo sapien
cagggagcccagcaacgctgtaatt

SEQ ID NO: 301671 - DNA, 25 bp, Homo sapien
ttgtagaagagacgggatctcgcca

SEQ ID NO: 301672 - DNA, 25 bp, Homo sapien
gagacgggatctcgccatgtggcca

SEQ ID NO: 301673 - DNA, 25 bp, Homo sapien
aagagacgggatctcgccatgtggc

SEQ ID NO: 301674 - DNA, 25 bp, Homo sapien
cgggatctcgccatgtggccagcct

SEQ ID NO: 301675 - DNA, 25 bp, Homo sapien
tgaacacagagatcagggcacatct

SEQ ID NO: 301676 - DNA, 25 bp, Homo sapien
tctacagtgactgcacgtggttgcc

SEQ ID NO: 301677 - DNA, 25 bp, Homo sapien
tctcaacagagtagacagcaatcct

SEQ ID NO: 301678 - DNA, 25 bp, Homo sapien
tgcccttggagtacgagcccatgtc

SEQ ID NO: 301679 - DNA, 25 bp, Homo sapien
tgtgtcaagcgcagcacttcctgga

SEQ ID NO: 301680 - DNA, 25 bp, Homo sapien
ggcatcatggctaaagggccccttc

SEQ ID NO: 301681 - DNA, 25 bp, Homo sapien
ggagccctgctcataaacaagagga

SEQ ID NO: 301682 - DNA, 25 bp, Homo sapien
ctcgttaacccttcggacacaatgg

SEQ ID NO: 301683 - DNA, 25 bp, Homo sapien
gataacgttccaccttatggccacg

SEQ ID NO: 301684 - DNA, 25 bp, Homo sapien
gacttcttggctggtgctacagaga

SEQ ID NO: 301685 - DNA, 25 bp, Homo sapien
aagaacttcccaaacgcctgggctg

SEQ ID NO: 301686 - DNA, 25 bp, Homo sapien
gatgagccctggtttcgatcacagc

SEQ ID NO: 301687 - DNA, 25 bp, Homo sapien
cctgagagacaatatgagactccat

SEQ ID NO: 301688 - DNA, 25 bp, Homo sapien
tcactgcagtcttgatcccctgggc

SEQ ID NO: 301689 - DNA, 25 bp, Homo sapien
ctagagtgcagtggcatgattatag

SEQ ID NO: 301690 - DNA, 25 bp, Homo sapien
aagcctcccacctcagcctcccaag

SEQ ID NO: 301691 - DNA, 25 bp, Homo sapien
tcaagcaagcctcccacctcagcct

SEQ ID NO: 301692 - DNA, 25 bp, Homo sapien
tgttgagcgctcctgagtccatccc

SEQ ID NO: 301693 - DNA, 25 bp, Homo sapien
cagcagagtccgtcttattcagcaa

SEQ ID NO: 301694 - DNA, 25 bp, Homo sapien
ggagcacattctccggttgacttct

SEQ ID NO: 301695 - DNA, 25 bp, Homo sapien
ccaagtgcacgaggggaagattcca

SEQ ID NO: 301696 - DNA, 25 bp, Homo sapien
tgttctgctcagaagctgcctattc

SEQ ID NO: 301697 - DNA, 25 bp, Homo sapien
gatggacaaggcaccaaccaagcct

SEQ ID NO: 301698 - DNA, 25 bp, Homo sapien
agaagctgcctattcagggcttcag

SEQ ID NO: 301699 - DNA, 25 bp, Homo sapien
aggaggatggacaaggcaccaacca

SEQ ID NO: 301700 - DNA, 25 bp, Homo sapien
aaacacccaattgtctcaccaggcc

SEQ ID NO: 301701 - DNA, 25 bp, Homo sapien
tccatgcttgggtcaagcaagccag

SEQ ID NO: 301702 - DNA, 25 bp, Homo sapien
gaccagcccctggtgttatagaggg

SEQ ID NO: 301703 - DNA, 25 bp, Homo sapien
gcttgggtcaagcaagccagctacc

SEQ ID NO: 301704 - DNA, 25 bp, Homo sapien
caactgaggaaatcaagtggaaaca

SEQ ID NO: 301705 - DNA, 25 bp, Homo sapien
aggatcctgccaccgctcttggaaa

SEQ ID NO: 301706 - DNA, 25 bp, Homo sapien
ccgctgcaacctctagactctggga

SEQ ID NO: 301707 - DNA, 25 bp, Homo sapien
tcgtcagtcagtggagtcacatggg

SEQ ID NO: 301708 - DNA, 25 bp, Homo sapien
gaatgccaaggttcttcgccagcag

SEQ ID NO: 301709 - DNA, 25 bp, Homo sapien
gaagagaggatctgccctggagtca

SEQ ID NO: 301710 - DNA, 25 bp, Homo sapien
gcaaggtgggtcacgaacgtcctgt

SEQ ID NO: 301711 - DNA, 25 bp, Homo sapien
tcttgggagcagctgcgtacaacct

SEQ ID NO: 301712 - DNA, 25 bp, Homo sapien
cattgcctctggatacaccgctggc

SEQ ID NO: 301713 - DNA, 25 bp, Homo sapien
tgccagtgccctcgttcacaaagga

SEQ ID NO: 301714 - DNA, 25 bp, Homo sapien
cattacagagcgctgaccgtgtgca

SEQ ID NO: 301715 - DNA, 25 bp, Homo sapien
cacagggataactacggtgccgtct

SEQ ID NO: 301716 - DNA, 25 bp, Homo sapien
caggtgcgctgatgacaagttgccc

SEQ ID NO: 301717 - DNA, 25 bp, Homo sapien
tgtgttatacagtggctctagggcc

SEQ ID NO: 301718 - DNA, 25 bp, Homo sapien
aaagtgctttgaatctgcccagagc

SEQ ID NO: 301719 - DNA, 25 bp, Homo sapien
gagcatccgcgtgtccttcaacaag

SEQ ID NO: 301720 - DNA, 25 bp, Homo sapien
agtgctccccagagtccgaatcttg

SEQ ID NO: 301721 - DNA, 25 bp, Homo sapien
tgaggctcgggaaatgctatcagtg

SEQ ID NO: 301722 - DNA, 25 bp, Homo sapien
ctattgtgtaaagtgggttccctgg

SEQ ID NO: 301723 - DNA, 25 bp, Homo sapien
aggcatccacctcatccggcagcat

SEQ ID NO: 301724 - DNA, 25 bp, Homo sapien
agaacaagtattggcggaagctcgc

SEQ ID NO: 301725 - DNA, 25 bp, Homo sapien
ggatatttgctccaatccctgcaga

SEQ ID NO: 301726 - DNA, 25 bp, Homo sapien
tggccgcgattgtcacgtcacttcc

SEQ ID NO: 301727 - DNA, 25 bp, Homo sapien
aacggtctggacaggctgacagcgt

SEQ ID NO: 301728 - DNA, 25 bp, Homo sapien
cggaagcgttggtcccacagccggg

SEQ ID NO: 301729 - DNA, 25 bp, Homo sapien
tggtcccacagccgggtcccggcca

SEQ ID NO: 301730 - DNA, 25 bp, Homo sapien
gaagcgttggtcccacagccgggtc

SEQ ID NO: 301731 - DNA, 25 bp, Homo sapien
gggcgataggctcagatcccagagt

SEQ ID NO: 301732 - DNA, 25 bp, Homo sapien
aggccagggcgataggctcagatcc

SEQ ID NO: 301733 - DNA, 25 bp, Homo sapien
gccagggcgataggctcagatccca

SEQ ID NO: 301734 - DNA, 25 bp, Homo sapien
gctccaggccagggcgataggctca

SEQ ID NO: 301735 - DNA, 25 bp, Homo sapien
aggagcataggatttaaggaaccca

SEQ ID NO: 301736 - DNA, 25 bp, Homo sapien
ggagcataggatttaaggaacccaa

SEQ ID NO: 301737 - DNA, 25 bp, Homo sapien
gaaaggagcataggatttaaggaac

SEQ ID NO: 301738 - DNA, 25 bp, Homo sapien
agaaaggagcataggatttaaggaa

SEQ ID NO: 301739 - DNA, 25 bp, Homo sapien
ggctggctaactgcccagctcggta

SEQ ID NO: 301740 - DNA, 25 bp, Homo sapien
agttggagtgggctggctaactgcc

SEQ ID NO: 301741 - DNA, 25 bp, Homo sapien
gagtgggctggctaactgcccagct

SEQ ID NO: 301742 - DNA, 25 bp, Homo sapien
tggctaactgcccagctcggtaggg

SEQ ID NO: 301743 - DNA, 25 bp, Homo sapien
tatcctcttcgatgtcataatccaa

SEQ ID NO: 301744 - DNA, 25 bp, Homo sapien
tcctcttcgatgtcataatccaagt

SEQ ID NO: 301745 - DNA, 25 bp, Homo sapien
agtttatcctcttcgatgtcataat

SEQ ID NO: 301746 - DNA, 25 bp, Homo sapien
tcttcgatgtcataatccaagtctg

SEQ ID NO: 301747 - DNA, 25 bp, Homo sapien
tcctccaatgctgatcccgatcagg

SEQ ID NO: 301748 - DNA, 25 bp, Homo sapien
tcccgatcaggttctgagcatcctt

SEQ ID NO: 301749 - DNA, 25 bp, Homo sapien
acgatatagaggcagggacagtact

SEQ ID NO: 301750 - DNA, 25 bp, Homo sapien
cgatatagaggcagggacagtactg

SEQ ID NO: 301751 - DNA, 25 bp, Homo sapien
tgccactgtgccgtccaaggctgct

SEQ ID NO: 301752 - DNA, 25 bp, Homo sapien
tcctgaatcatcttcgccacctcca

SEQ ID NO: 301753 - DNA, 25 bp, Homo sapien
ctgccattgacaccggtgatctcat

SEQ ID NO: 301754 - DNA, 25 bp, Homo sapien
cctttgattgacctgccattgacac

SEQ ID NO: 301755 - DNA, 25 bp, Homo sapien
ctcagaaacatgtgttgctgcctct

SEQ ID NO: 301756 - DNA, 25 bp, Homo sapien
tctcagaaacatgtgttgctgcctc

SEQ ID NO: 301757 - DNA, 25 bp, Homo sapien
gtgttgctgcctctggacacctgct

SEQ ID NO: 301758 - DNA, 25 bp, Homo sapien
ttgctgcctctggacacctgctctg

SEQ ID NO: 301759 - DNA, 25 bp, Homo sapien
gcttgttgtagtggatggtcacctc

SEQ ID NO: 301760 - DNA, 25 bp, Homo sapien
cctgcttggggtccgcctgcagctt

SEQ ID NO: 301761 - DNA, 25 bp, Homo sapien
aatgtccagggacatgccctgcttg

SEQ ID NO: 301762 - DNA, 25 bp, Homo sapien
ctgcagcttgttgtagtggatggtc

SEQ ID NO: 301763 - DNA, 25 bp, Homo sapien
gacagagtacaagaacagatgcagg

SEQ ID NO: 301764 - DNA, 25 bp, Homo sapien
tggctgtggcacttctcctttgggc

SEQ ID NO: 301765 - DNA, 25 bp, Homo sapien
tctggattctcctgtcataaagggg

SEQ ID NO: 301766 - DNA, 25 bp, Homo sapien
tctcctgtcataaaggggagggcag

SEQ ID NO: 301767 - DNA, 25 bp, Homo sapien
agccggtgcttgactttcttcaaca

SEQ ID NO: 301768 - DNA, 25 bp, Homo sapien
ccagccggtgcttgactttcttcaa

SEQ ID NO: 301769 - DNA, 25 bp, Homo sapien
tccaccagccggtgcttgactttct

SEQ ID NO: 301770 - DNA, 25 bp, Homo sapien
ttgcacaggatggcccggctcaggc

SEQ ID NO: 301771 - DNA, 25 bp, Homo sapien
taaactcggactggcgacggtagga

SEQ ID NO: 301772 - DNA, 25 bp, Homo sapien
ggactgagtgtttcgctggccaccc

SEQ ID NO: 301773 - DNA, 25 bp, Homo sapien
tgacttctcagttccacgggcagag

SEQ ID NO: 301774 - DNA, 25 bp, Homo sapien
ttagccaataaagcccagtgtgccc

SEQ ID NO: 301775 - DNA, 25 bp, Homo sapien
ctttgtatagctcagcggtccgctc

SEQ ID NO: 301776 - DNA, 25 bp, Homo sapien
ccagctcctctagcctcttgacaag

SEQ ID NO: 301777 - DNA, 25 bp, Homo sapien
tccagctcctctagcctcttgacaa

SEQ ID NO: 301778 - DNA, 25 bp, Homo sapien
tatagctcagcggtccgctccagct

SEQ ID NO: 301779 - DNA, 25 bp, Homo sapien
cccggtgagtctgcgacagctcata

SEQ ID NO: 301780 - DNA, 25 bp, Homo sapien
tgcgacagctcataaaaggcccgta

SEQ ID NO: 301781 - DNA, 25 bp, Homo sapien
tgagtctgcgacagctcataaaagg

SEQ ID NO: 301782 - DNA, 25 bp, Homo sapien
gtctgcgacagctcataaaaggccc

SEQ ID NO: 301783 - DNA, 25 bp, Homo sapien
agctgatctagatgttccccgcagg

SEQ ID NO: 301784 - DNA, 25 bp, Homo sapien
ggaacaacagctccaccacttggga

SEQ ID NO: 301785 - DNA, 25 bp, Homo sapien
ttgcggcccttaagagaccagctga

SEQ ID NO: 301786 - DNA, 25 bp, Homo sapien
tgaggcagaacactggtccgagtct

SEQ ID NO: 301787 - DNA, 25 bp, Homo sapien
tgcaggacaagtttgccttgaaggc

SEQ ID NO: 301788 - DNA, 25 bp, Homo sapien
gggctacacctccaagagagctggt

SEQ ID NO: 301789 - DNA, 25 bp, Homo sapien
gccttgaaggctgcccctacttggc

SEQ ID NO: 301790 - DNA, 25 bp, Homo sapien
tctacacctggaggaaactggattg

SEQ ID NO: 301791 - DNA, 25 bp, Homo sapien
cgatcacggagaacacgtccccaaa

SEQ ID NO: 301792 - DNA, 25 bp, Homo sapien
aaaagcctcgctcgcagctggctgg

SEQ ID NO: 301793 - DNA, 25 bp, Homo sapien
ctgcggtgggcatcggcgaacttca

SEQ ID NO: 301794 - DNA, 25 bp, Homo sapien
tggttttcagaagccgaatgccgaa

SEQ ID NO: 301795 - DNA, 25 bp, Homo sapien
tcgactatcagagccagatggtgct

SEQ ID NO: 301796 - DNA, 25 bp, Homo sapien
ggcctagggcaagctgtgactcagt

SEQ ID NO: 301797 - DNA, 25 bp, Homo sapien
caatgaatggcactgatgcgtcacc

SEQ ID NO: 301798 - DNA, 25 bp, Homo sapien
gatgagaagactagtgccaggccta

SEQ ID NO: 301799 - DNA, 25 bp, Homo sapien
ttcacgtccaggtacttcttgatgg

SEQ ID NO: 301800 - DNA, 25 bp, Homo sapien
gttgaggtacgtgttcagatccgtc

SEQ ID NO: 301801 - DNA, 25 bp, Homo sapien
ttgttgaggtacgtgttcagatccg

SEQ ID NO: 301802 - DNA, 25 bp, Homo sapien
caggtactcaaacttcacgtccagg

SEQ ID NO: 301803 - DNA, 25 bp, Homo sapien
gatgcttctttgtgcaggcgcagca

SEQ ID NO: 301804 - DNA, 25 bp, Homo sapien
cagatgcttctttgtgcaggcgcag

SEQ ID NO: 301805 - DNA, 25 bp, Homo sapien
atgcttctttgtgcaggcgcagcag

SEQ ID NO: 301806 - DNA, 25 bp, Homo sapien
agatgcttctttgtgcaggcgcagc

SEQ ID NO: 301807 - DNA, 25 bp, Homo sapien
gagaggctggcgcaggtgttcaggg

SEQ ID NO: 301808 - DNA, 25 bp, Homo sapien
gaggctggcgcaggtgttcagggag

SEQ ID NO: 301809 - DNA, 25 bp, Homo sapien
aggctgtcagagtggctactacccc

SEQ ID NO: 301810 - DNA, 25 bp, Homo sapien
gctggcgcaggtgttcagggagtcc

SEQ ID NO: 301811 - DNA, 25 bp, Homo sapien
atgcagctgtattcctcgtcatcca

SEQ ID NO: 301812 - DNA, 25 bp, Homo sapien
tgcagctgtattcctcgtcatccat

SEQ ID NO: 301813 - DNA, 25 bp, Homo sapien
gcagctgtattcctcgtcatccatc

SEQ ID NO: 301814 - DNA, 25 bp, Homo sapien
aatgcagctgtattcctcgtcatcc

SEQ ID NO: 301815 - DNA, 25 bp, Homo sapien
tgtgctttcaaagccacggctgttc

SEQ ID NO: 301816 - DNA, 25 bp, Homo sapien
tgaacactggccacgaaatggatcc

SEQ ID NO: 301817 - DNA, 25 bp, Homo sapien
taaatctccaggaacgagagtccag

SEQ ID NO: 301818 - DNA, 25 bp, Homo sapien
taaaagcgcctcataggagtgaaga

SEQ ID NO: 301819 - DNA, 25 bp, Homo sapien
cctcctggcggcagcgcaggatcag

SEQ ID NO: 301820 - DNA, 25 bp, Homo sapien
catccttgcgcatctgggagaagcg

SEQ ID NO: 301821 - DNA, 25 bp, Homo sapien
tcaggcggtactcatagttgccggt

SEQ ID NO: 301822 - DNA, 25 bp, Homo sapien
tgctcacccggtaaaggggctcgcc

SEQ ID NO: 301823 - DNA, 25 bp, Homo sapien
cgtagcagtcgttgtagtacttgga

SEQ ID NO: 301824 - DNA, 25 bp, Homo sapien
tcgatggggaagacgtcggcatccc

SEQ ID NO: 301825 - DNA, 25 bp, Homo sapien
tacttggacatggtggacacgaggc

SEQ ID NO: 301826 - DNA, 25 bp, Homo sapien
tcccgcagcactgcgtagcagtcgt

SEQ ID NO: 301827 - DNA, 25 bp, Homo sapien
gccataggccaatgtggtgtgcgcc

SEQ ID NO: 301828 - DNA, 25 bp, Homo sapien
cataggccaatgtggtgtgcgccag

SEQ ID NO: 301829 - DNA, 25 bp, Homo sapien
ccaatgtggtgtgcgccaggtctac

SEQ ID NO: 301830 - DNA, 25 bp, Homo sapien
cctggttgaggccataggccaatgt

SEQ ID NO: 301831 - DNA, 25 bp, Homo sapien
tcctcctcctcctccccatctgtga

SEQ ID NO: 301832 - DNA, 25 bp, Homo sapien
cctcctcctcctccccatctgtgaa

SEQ ID NO: 301833 - DNA, 25 bp, Homo sapien
ctcctcctcctccccatctgtgaac

SEQ ID NO: 301834 - DNA, 25 bp, Homo sapien
agcagcccctcgtgtatccctggac

SEQ ID NO: 301835 - DNA, 25 bp, Homo sapien
gcccagcagcccctcgtgtatccct

SEQ ID NO: 301836 - DNA, 25 bp, Homo sapien
gcccctcgtgtatccctggacggct

SEQ ID NO: 301837 - DNA, 25 bp, Homo sapien
tcgtgtatccctggacggctcccca

SEQ ID NO: 301838 - DNA, 25 bp, Homo sapien
cctgcccccggcaccacagccgcgg

SEQ ID NO: 301839 - DNA, 25 bp, Homo sapien
cccccggcaccacagccgcggggca

SEQ ID NO: 301840 - DNA, 25 bp, Homo sapien
tgcccccggcaccacagccgcgggg

SEQ ID NO: 301841 - DNA, 25 bp, Homo sapien
ccccggcaccacagccgcggggcac

SEQ ID NO: 301842 - DNA, 25 bp, Homo sapien
aagccagcaggcctttatgcgtcgc

SEQ ID NO: 301843 - DNA, 25 bp, Homo sapien
cccaggttcgctgtgcgaggacaga

SEQ ID NO: 301844 - DNA, 25 bp, Homo sapien
gtgcccaggaggcattgaccccaac

SEQ ID NO: 301845 - DNA, 25 bp, Homo sapien
taaataaaggccgccgaggtgtgat

SEQ ID NO: 301846 - DNA, 25 bp, Homo sapien
gtttattcgatacaggcccagaacc

SEQ ID NO: 301847 - DNA, 25 bp, Homo sapien
tttgtgtttattcgatacaggccca

SEQ ID NO: 301848 - DNA, 25 bp, Homo sapien
caggtttgtgtttattcgatacagg

SEQ ID NO: 301849 - DNA, 25 bp, Homo sapien
ttattcgatacaggcccagaaccca

SEQ ID NO: 301850 - DNA, 25 bp, Homo sapien
aaggagggtctgaagccactgcgac

SEQ ID NO: 301851 - DNA, 25 bp, Homo sapien
tcaatagacggtggaggggaggggc

SEQ ID NO: 301852 - DNA, 25 bp, Homo sapien
acaaggagggtctgaagccactgcg

SEQ ID NO: 301853 - DNA, 25 bp, Homo sapien
ggagggtctgaagccactgcgacca

SEQ ID NO: 301854 - DNA, 25 bp, Homo sapien
gaatggggggacaggacaatttctc

SEQ ID NO: 301855 - DNA, 25 bp, Homo sapien
ctgctccgtgcccaacacatgccct

SEQ ID NO: 301856 - DNA, 25 bp, Homo sapien
ctggcttggggtccgagaccttcaa

SEQ ID NO: 301857 - DNA, 25 bp, Homo sapien
tcaaagtaaagcaggcggaatgggg

SEQ ID NO: 301858 - DNA, 25 bp, Homo sapien
tttaaaatacgacatgtgactgggt

SEQ ID NO: 301859 - DNA, 25 bp, Homo sapien
gtaatcatgacatgctggagaatgg

SEQ ID NO: 301860 - DNA, 25 bp, Homo sapien
gatatgcagaacctaatgctctcac

SEQ ID NO: 301861 - DNA, 25 bp, Homo sapien
tgcacaaaggccttcgggttttatc

SEQ ID NO: 301862 - DNA, 25 bp, Homo sapien
tgggattacatgcctgagccactgt

SEQ ID NO: 301863 - DNA, 25 bp, Homo sapien
gagccactgtgtctggtccatacta

SEQ ID NO: 301864 - DNA, 25 bp, Homo sapien
gattacatgcctgagccactgtgtc

SEQ ID NO: 301865 - DNA, 25 bp, Homo sapien
attacatgcctgagccactgtgtct

SEQ ID NO: 301866 - DNA, 25 bp, Homo sapien
gataataatacttgttcctcccgtc

SEQ ID NO: 301867 - DNA, 25 bp, Homo sapien
taatacttgttcctcccgtccttca

SEQ ID NO: 301868 - DNA, 25 bp, Homo sapien
gtctcgacctcaagaggatcaagca

SEQ ID NO: 301869 - DNA, 25 bp, Homo sapien
atacttgttcctcccgtccttcagc

SEQ ID NO: 301870 - DNA, 25 bp, Homo sapien
tcagaggacataggcaggcaatccc

SEQ ID NO: 301871 - DNA, 25 bp, Homo sapien
tcacccacagattgagcacctgctg

SEQ ID NO: 301872 - DNA, 25 bp, Homo sapien
cattttgccgggaggctgccttgga

SEQ ID NO: 301873 - DNA, 25 bp, Homo sapien
gccctttgcctagtgctgttcaaga

SEQ ID NO: 301874 - DNA, 25 bp, Homo sapien
tgaggctgcacccttgggctgaatg

SEQ ID NO: 301875 - DNA, 25 bp, Homo sapien
aacgttgaggctgcacccttgggct

SEQ ID NO: 301876 - DNA, 25 bp, Homo sapien
tcggtttggcaacgttgaggctgca

SEQ ID NO: 301877 - DNA, 25 bp, Homo sapien
atgtcaggcaggttcggtttggcaa

SEQ ID NO: 301878 - DNA, 25 bp, Homo sapien
agtgctcacttgattccccacttca

SEQ ID NO: 301879 - DNA, 25 bp, Homo sapien
tctttaggccccattggccgtccta

SEQ ID NO: 301880 - DNA, 25 bp, Homo sapien
tcgtggtgcctctactcatttctca

SEQ ID NO: 301881 - DNA, 25 bp, Homo sapien
tcagtatccctaacttcccgagtca

SEQ ID NO: 301882 - DNA, 25 bp, Homo sapien
attaacccttatgtgactccctgag

SEQ ID NO: 301883 - DNA, 25 bp, Homo sapien
ctgagtaagccgaggtgagtgacct

SEQ ID NO: 301884 - DNA, 25 bp, Homo sapien
tattcctcgtgtctccgattctgag

SEQ ID NO: 301885 - DNA, 25 bp, Homo sapien
taagggagccccttccattgggcag

SEQ ID NO: 301886 - DNA, 25 bp, Homo sapien
ggttcctccttgttatgccctatgc

SEQ ID NO: 301887 - DNA, 25 bp, Homo sapien
gctctggtcgctttaggaggcggaa

SEQ ID NO: 301888 - DNA, 25 bp, Homo sapien
aacaggactgccaagaagccgggca

SEQ ID NO: 301889 - DNA, 25 bp, Homo sapien
gcttgaggctacctggcaaaaatca

SEQ ID NO: 301890 - DNA, 25 bp, Homo sapien
ccccagcagcttcaatatacctgga

SEQ ID NO: 301891 - DNA, 25 bp, Homo sapien
cttttgtgccaagcctgtaaaacca

SEQ ID NO: 301892 - DNA, 25 bp, Homo sapien
tgagccccaggtttgtatttccgga

SEQ ID NO: 301893 - DNA, 25 bp, Homo sapien
cactctgcgcatccagtgggtgtca

SEQ ID NO: 301894 - DNA, 25 bp, Homo sapien
cattttacaggtagtggtcctggcc

SEQ ID NO: 301895 - DNA, 25 bp, Homo sapien
tatttccggagcgaacagcttctct

SEQ ID NO: 301896 - DNA, 25 bp, Homo sapien
gagcgctgcgctgagttttgttgtg

SEQ ID NO: 301897 - DNA, 25 bp, Homo sapien
gagttgtaaggcgagcttcccggaa

SEQ ID NO: 301898 - DNA, 25 bp, Homo sapien
gcaggtcgctctgaaccgggcgccc

SEQ ID NO: 301899 - DNA, 25 bp, Homo sapien
cctccgctctgagccgcaggtcgct

SEQ ID NO: 301900 - DNA, 25 bp, Homo sapien
tgtagaaggcccacccgctggcatg

SEQ ID NO: 301901 - DNA, 25 bp, Homo sapien
gtagaaggcccacccgctggcatgg

SEQ ID NO: 301902 - DNA, 25 bp, Homo sapien
gaaggcccacccgctggcatgggct

SEQ ID NO: 301903 - DNA, 25 bp, Homo sapien
cctgtagaaggcccacccgctggca

SEQ ID NO: 301904 - DNA, 25 bp, Homo sapien
ctgtcttctatgtcggccaccacca

SEQ ID NO: 301905 - DNA, 25 bp, Homo sapien
cactgtttggtagccgtggcggact

SEQ ID NO: 301906 - DNA, 25 bp, Homo sapien
caaccaagccactgtttggtagccg

SEQ ID NO: 301907 - DNA, 25 bp, Homo sapien
ctgaggcaaccaagccactgtttgg

SEQ ID NO: 301908 - DNA, 25 bp, Homo sapien
tgatttagcatctcccagctggctg

SEQ ID NO: 301909 - DNA, 25 bp, Homo sapien
tgcccagagaggacaatagagtagt

SEQ ID NO: 301910 - DNA, 25 bp, Homo sapien
tggttcgcccaaccctgaggtaatg

SEQ ID NO: 301911 - DNA, 25 bp, Homo sapien
tgtgaatgaatagctgcaaaggccc

SEQ ID NO: 301912 - DNA, 25 bp, Homo sapien
tggtcagagtctctgacgccatcac

SEQ ID NO: 301913 - DNA, 25 bp, Homo sapien
ctgcttccttgggcctgttggcaga

SEQ ID NO: 301914 - DNA, 25 bp, Homo sapien
gcttgtcaccaagccgggttccaag

SEQ ID NO: 301915 - DNA, 25 bp, Homo sapien
cgaaacgtagttcagtacctcctgg

SEQ ID NO: 301916 - DNA, 25 bp, Homo sapien
tcacccagttttgtggacagcagag

SEQ ID NO: 301917 - DNA, 25 bp, Homo sapien
gctgtctacagggttgacctcacgg

SEQ ID NO: 301918 - DNA, 25 bp, Homo sapien
cgtatcggaaagagcatcacccagt

SEQ ID NO: 301919 - DNA, 25 bp, Homo sapien
tctgacacattctggcaggaccggg

SEQ ID NO: 301920 - DNA, 25 bp, Homo sapien
catggtgactcctcatcatttaggt

SEQ ID NO: 301921 - DNA, 25 bp, Homo sapien
tcctcaggaggtcctctttgaccat

SEQ ID NO: 301922 - DNA, 25 bp, Homo sapien
tctctccacattggtccacaggcct

SEQ ID NO: 301923 - DNA, 25 bp, Homo sapien
tgctctttactgttctagccccatg

SEQ ID NO: 301924 - DNA, 25 bp, Homo sapien
agaaggtgccctctgggctgcagac

SEQ ID NO: 301925 - DNA, 25 bp, Homo sapien
tgcagaaggtgccctctgggctgca

SEQ ID NO: 301926 - DNA, 25 bp, Homo sapien
gtttgcagaaggtgccctctgggct

SEQ ID NO: 301927 - DNA, 25 bp, Homo sapien
cagaaggtgccctctgggctgcaga

SEQ ID NO: 301928 - DNA, 25 bp, Homo sapien
ctttagagctttgctggatagggga

SEQ ID NO: 301929 - DNA, 25 bp, Homo sapien
tagagctttgctggataggggatcc

SEQ ID NO: 301930 - DNA, 25 bp, Homo sapien
gagctttgctggataggggatccac

SEQ ID NO: 301931 - DNA, 25 bp, Homo sapien
gctttgctggataggggatccacag

SEQ ID NO: 301932 - DNA, 25 bp, Homo sapien
acaggtgcggcgtgttctcgctcag

SEQ ID NO: 301933 - DNA, 25 bp, Homo sapien
agagcccgcgcagatgccggttcag

SEQ ID NO: 301934 - DNA, 25 bp, Homo sapien
cagctggcggcgtagccacggtttt

SEQ ID NO: 301935 - DNA, 25 bp, Homo sapien
ccacggtttttgagtgtgcggcgcc

SEQ ID NO: 301936 - DNA, 25 bp, Homo sapien
cgcgaagccctgcagcgcctcgcac

SEQ ID NO: 301937 - DNA, 25 bp, Homo sapien
ggccggcgccacgagcgtggcgggc

SEQ ID NO: 301938 - DNA, 25 bp, Homo sapien
ccgagcccggggtggacttgacgat

SEQ ID NO: 301939 - DNA, 25 bp, Homo sapien
gtgatgacgctggccggcgccacga

SEQ ID NO: 301940 - DNA, 25 bp, Homo sapien
tgacgctggccggcgccacgagcgt

SEQ ID NO: 301941 - DNA, 25 bp, Homo sapien
taagccggctctgtatctctcaatc

SEQ ID NO: 301942 - DNA, 25 bp, Homo sapien
actttcagccaagggcgatcccaga

SEQ ID NO: 301943 - DNA, 25 bp, Homo sapien
cagggtcattcggtcccagtttggg

SEQ ID NO: 301944 - DNA, 25 bp, Homo sapien
ccacgaagggaatgtgtgtgcacca

SEQ ID NO: 301945 - DNA, 25 bp, Homo sapien
gataactcgcttgctgtaagtcagg

SEQ ID NO: 301946 - DNA, 25 bp, Homo sapien
ggacggtcccgtaagtcacagacag

SEQ ID NO: 301947 - DNA, 25 bp, Homo sapien
tgcaatttctcagcaggacggtccc

SEQ ID NO: 301948 - DNA, 25 bp, Homo sapien
tatttgccacagcagtccatggccc

SEQ ID NO: 301949 - DNA, 25 bp, Homo sapien
ctcagtggcagggaatcagcggtcc

SEQ ID NO: 301950 - DNA, 25 bp, Homo sapien
gactgccatgagttccaccagaaag

SEQ ID NO: 301951 - DNA, 25 bp, Homo sapien
tgtatcttgttgtatgactgccatg

SEQ ID NO: 301952 - DNA, 25 bp, Homo sapien
ttttaaatgcgtgacagaagtgagc

SEQ ID NO: 301953 - DNA, 25 bp, Homo sapien
cagcatctgcggacccattctgctg

SEQ ID NO: 301954 - DNA, 25 bp, Homo sapien
catctgcggacccattctgctgatt

SEQ ID NO: 301955 - DNA, 25 bp, Homo sapien
ttagaatcccagcatctgcggaccc

SEQ ID NO: 301956 - DNA, 25 bp, Homo sapien
gaatcccagcatctgcggacccatt

SEQ ID NO: 301957 - DNA, 25 bp, Homo sapien
gatcccactctggagtttgacttgc

SEQ ID NO: 301958 - DNA, 25 bp, Homo sapien
gaggtcaccgtactgctgccagact

SEQ ID NO: 301959 - DNA, 25 bp, Homo sapien
ctgttcagaggtgcgatcccactct

SEQ ID NO: 301960 - DNA, 25 bp, Homo sapien
ccagactcaagacgtcctcctgccg

SEQ ID NO: 301961 - DNA, 25 bp, Homo sapien
ctgccgtgtgctttgttgtagctca

SEQ ID NO: 301962 - DNA, 25 bp, Homo sapien
ccgctacaggttgttgactggatga

SEQ ID NO: 301963 - DNA, 25 bp, Homo sapien
gctcatagtgctgtgcgtattccgg

SEQ ID NO: 301964 - DNA, 25 bp, Homo sapien
ctggatgaaggttcttccctctcac

SEQ ID NO: 301965 - DNA, 25 bp, Homo sapien
ggcatgaagaatggcttggagcacc

SEQ ID NO: 301966 - DNA, 25 bp, Homo sapien
caggacttgttagaaagatgatttc

SEQ ID NO: 301967 - DNA, 25 bp, Homo sapien
catagagaaggcatgaagaatggct

SEQ ID NO: 301968 - DNA, 25 bp, Homo sapien
ccagaggcctcaggacttgttagaa

SEQ ID NO: 301969 - DNA, 25 bp, Homo sapien
ctatcttccttagggtgactaacag

SEQ ID NO: 301970 - DNA, 25 bp, Homo sapien
ttcagaacgctcagaaatcccaaag

SEQ ID NO: 301971 - DNA, 25 bp, Homo sapien
aaatctgaaaaattcggctgggcac

SEQ ID NO: 301972 - DNA, 25 bp, Homo sapien
tccaaaagccttagctacaggacag

SEQ ID NO: 301973 - DNA, 25 bp, Homo sapien
gatgctcccgaaataaactccaagg

SEQ ID NO: 301974 - DNA, 25 bp, Homo sapien
tagcagcagtaaggtgtccctcaaa

SEQ ID NO: 301975 - DNA, 25 bp, Homo sapien
gaagtgagactttgggtcccacggc

SEQ ID NO: 301976 - DNA, 25 bp, Homo sapien
ttcagtgacgacatagctgcgtagc

SEQ ID NO: 301977 - DNA, 25 bp, Homo sapien
cctggagtgtaatcggacctgtccg

SEQ ID NO: 301978 - DNA, 25 bp, Homo sapien
caagagggattgtgtgctcccgggt

SEQ ID NO: 301979 - DNA, 25 bp, Homo sapien
gaccaaggcgctttgcaagagggat

SEQ ID NO: 301980 - DNA, 25 bp, Homo sapien
agtggagggtgtacacgcccgccac

SEQ ID NO: 301981 - DNA, 25 bp, Homo sapien
tagcgcacccaatcggaatggcctt

SEQ ID NO: 301982 - DNA, 25 bp, Homo sapien
cgcacccaatcggaatggccttgtt

SEQ ID NO: 301983 - DNA, 25 bp, Homo sapien
ccaggtagcgcacccaatcggaatg

SEQ ID NO: 301984 - DNA, 25 bp, Homo sapien
cccaatcggaatggccttgttctgc

SEQ ID NO: 301985 - DNA, 25 bp, Homo sapien
caggcatccgtaatttgttctcaaa

SEQ ID NO: 301986 - DNA, 25 bp, Homo sapien
gccactgcgcttggtgagcaatgca

SEQ ID NO: 301987 - DNA, 25 bp, Homo sapien
ggctaagaatgctcagtccccatgg

SEQ ID NO: 301988 - DNA, 25 bp, Homo sapien
tatttcccgcctgcatgtgggtcag

SEQ ID NO: 301989 - DNA, 25 bp, Homo sapien
agtttgttgtgaggtcgaagaggcc

SEQ ID NO: 301990 - DNA, 25 bp, Homo sapien
cgaagaggcctgcaagtgttttgga

SEQ ID NO: 301991 - DNA, 25 bp, Homo sapien
tgggaggagtttgttgtgaggtcga

SEQ ID NO: 301992 - DNA, 25 bp, Homo sapien
tgaggtcgaagaggcctgcaagtgt

SEQ ID NO: 301993 - DNA, 25 bp, Homo sapien
gagctttatcgtggttgttaatttg

SEQ ID NO: 301994 - DNA, 25 bp, Homo sapien
tttttgagctttatcgtggttgtta

SEQ ID NO: 301995 - DNA, 25 bp, Homo sapien
ttgagctttatcgtggttgttaatt

SEQ ID NO: 301996 - DNA, 25 bp, Homo sapien
gctttatcgtggttgttaatttgaa

SEQ ID NO: 301997 - DNA, 25 bp, Homo sapien
cagaatccaggagatacgcacagcc

SEQ ID NO: 301998 - DNA, 25 bp, Homo sapien
gcagttcccaccgagttttccgagc

SEQ ID NO: 301999 - DNA, 25 bp, Homo sapien
ccaatggcaagaagatgagatgccc

SEQ ID NO: 302000 - DNA, 25 bp, Homo sapien
tccgtgtcggagaagtgacaggtcc

SEQ ID NO: 302001 - DNA, 25 bp, Homo sapien
gacagctgtgtacctcacctgtctt

SEQ ID NO: 302002 - DNA, 25 bp, Homo sapien
ccttctcccttctagtgtcttcact

SEQ ID NO: 302003 - DNA, 25 bp, Homo sapien
agagacagctgtgtacctcacctgt

SEQ ID NO: 302004 - DNA, 25 bp, Homo sapien
tgtgtacctcacctgtcttttccct

SEQ ID NO: 302005 - DNA, 25 bp, Homo sapien
gatagtcactcccacgtctggttcg

SEQ ID NO: 302006 - DNA, 25 bp, Homo sapien
tgtattctctagacggacactgtcc

SEQ ID NO: 302007 - DNA, 25 bp, Homo sapien
ggcactgggcactttcttatcgaga

SEQ ID NO: 302008 - DNA, 25 bp, Homo sapien
taatcaagactggaaatgtcggcca

SEQ ID NO: 302009 - DNA, 25 bp, Homo sapien
tcgttctctgcagacagccggtgag

SEQ ID NO: 302010 - DNA, 25 bp, Homo sapien
tcagggggtcctgaagggcttgccc

SEQ ID NO: 302011 - DNA, 25 bp, Homo sapien
ggcttgccccttcccgctctcgttc

SEQ ID NO: 302012 - DNA, 25 bp, Homo sapien
gctctcgttctctgcagacagccgg

SEQ ID NO: 302013 - DNA, 25 bp, Homo sapien
cccgctcgttggatgacgggcgttt

SEQ ID NO: 302014 - DNA, 25 bp, Homo sapien
attcgggcccgcgtagcgtttcatc

SEQ ID NO: 302015 - DNA, 25 bp, Homo sapien
aggctgcgcccgctcgttggatgac

SEQ ID NO: 302016 - DNA, 25 bp, Homo sapien
gtttcatcggacaatcaccggcgcc

SEQ ID NO: 302017 - DNA, 25 bp, Homo sapien
tgttctctgcggcactcggaacctg

SEQ ID NO: 302018 - DNA, 25 bp, Homo sapien
ttttgcagtgtcgtgaatagccgcc

SEQ ID NO: 302019 - DNA, 25 bp, Homo sapien
ggccttgtgtcgacatccctagctg

SEQ ID NO: 302020 - DNA, 25 bp, Homo sapien
tgagcctccagcagtctaacatctt

SEQ ID NO: 302021 - DNA, 25 bp, Homo sapien
tccacgggaggagaatgtatgagcc

SEQ ID NO: 302022 - DNA, 25 bp, Homo sapien
tttttccacgggaggagaatgtatg

SEQ ID NO: 302023 - DNA, 25 bp, Homo sapien
cacgggaggagaatgtatgagccca

SEQ ID NO: 302024 - DNA, 25 bp, Homo sapien
aggagaatgtatgagcccaggctac

SEQ ID NO: 302025 - DNA, 25 bp, Homo sapien
tgcgtgccaagtgatcttgaagggt

SEQ ID NO: 302026 - DNA, 25 bp, Homo sapien
tatctgcagccatatcgtcattatc

SEQ ID NO: 302027 - DNA, 25 bp, Homo sapien
agcccagtgctcctgcgtgccaagt

SEQ ID NO: 302028 - DNA, 25 bp, Homo sapien
tatcgtcattatctgggaattccag

SEQ ID NO: 302029 - DNA, 25 bp, Homo sapien
attcccggagcccagctaatgagtg

SEQ ID NO: 302030 - DNA, 25 bp, Homo sapien
tggttgactgcagcacaaacaaggg

SEQ ID NO: 302031 - DNA, 25 bp, Homo sapien
tgtgtgagctgggaacgggaagccc

SEQ ID NO: 302032 - DNA, 25 bp, Homo sapien
ccagctaatgagtggttgtgtgagc

SEQ ID NO: 302033 - DNA, 25 bp, Homo sapien
tctttcctaggaacagtctcttact

SEQ ID NO: 302034 - DNA, 25 bp, Homo sapien
ctaggaacagtctcttactattctt

SEQ ID NO: 302035 - DNA, 25 bp, Homo sapien
tcctaggaacagtctcttactattc

SEQ ID NO: 302036 - DNA, 25 bp, Homo sapien
tttctttcctaggaacagtctctta

SEQ ID NO: 302037 - DNA, 25 bp, Homo sapien
cctggagacacctttgggaggagca

SEQ ID NO: 302038 - DNA, 25 bp, Homo sapien
ctggagacacctttgggaggagcag

SEQ ID NO: 302039 - DNA, 25 bp, Homo sapien
gatgctggagttcggcagccacctg

SEQ ID NO: 302040 - DNA, 25 bp, Homo sapien
tgactcttcaaggacgtgccctctt

SEQ ID NO: 302041 - DNA, 25 bp, Homo sapien
tggacaacatctcctaccgcaggga

SEQ ID NO: 302042 - DNA, 25 bp, Homo sapien
ggagtctgccatctgacctccaggc

SEQ ID NO: 302043 - DNA, 25 bp, Homo sapien
cgtgtgacagtatttcttcgaggca

SEQ ID NO: 302044 - DNA, 25 bp, Homo sapien
gtggaagcaagcgtgtgacagtatt

SEQ ID NO: 302045 - DNA, 25 bp, Homo sapien
caagcgtgtgacagtatttcttcga

SEQ ID NO: 302046 - DNA, 25 bp, Homo sapien
gacagtatttcttcgaggcaggaca

SEQ ID NO: 302047 - DNA, 25 bp, Homo sapien
ttcagggatccactggccttcacag

SEQ ID NO: 302048 - DNA, 25 bp, Homo sapien
tgttctggaaaagagaagcttcagg

SEQ ID NO: 302049 - DNA, 25 bp, Homo sapien
agctgcggttgttctggaaaagaga

SEQ ID NO: 302050 - DNA, 25 bp, Homo sapien
tgccgccactgagggagctgcggtt

SEQ ID NO: 302051 - DNA, 25 bp, Homo sapien
taagctggccgagtccaaggcctgt

SEQ ID NO: 302052 - DNA, 25 bp, Homo sapien
catagtaactgagtggaagccccag

SEQ ID NO: 302053 - DNA, 25 bp, Homo sapien
cagctagcgtgcagtccatagtaac

SEQ ID NO: 302054 - DNA, 25 bp, Homo sapien
tctccagctcttgcataagctggcc

SEQ ID NO: 302055 - DNA, 25 bp, Homo sapien
ggtgaggtgccccagatgagacatt

SEQ ID NO: 302056 - DNA, 25 bp, Homo sapien
cccagatgagacattggcaggtcaa

SEQ ID NO: 302057 - DNA, 25 bp, Homo sapien
tcaagaggtccttaggggctaccag

SEQ ID NO: 302058 - DNA, 25 bp, Homo sapien
gtccttggtgttcccgaccccagca

SEQ ID NO: 302059 - DNA, 25 bp, Homo sapien
tcagatggctggtgccgttgcttgg

SEQ ID NO: 302060 - DNA, 25 bp, Homo sapien
ggctggtgccgttgcttggtggctg

SEQ ID NO: 302061 - DNA, 25 bp, Homo sapien
cagatggctggtgccgttgcttggt

SEQ ID NO: 302062 - DNA, 25 bp, Homo sapien
agatggctggtgccgttgcttggtg

SEQ ID NO: 302063 - DNA, 25 bp, Homo sapien
tcgcagccccctttcagcctgcgcg

SEQ ID NO: 302064 - DNA, 25 bp, Homo sapien
tcagcctgcgcgtgcatgctcaggc

SEQ ID NO: 302065 - DNA, 25 bp, Homo sapien
tgcgcgtgcatgctcaggcacagac

SEQ ID NO: 302066 - DNA, 25 bp, Homo sapien
agccccctttcagcctgcgcgtgca

SEQ ID NO: 302067 - DNA, 25 bp, Homo sapien
ggagcgtcgcggtctgggttgtggc

SEQ ID NO: 302068 - DNA, 25 bp, Homo sapien
cgtctgggagcgtcgcggtctgggt

SEQ ID NO: 302069 - DNA, 25 bp, Homo sapien
tgtccgtctgggagcgtcgcggtct

SEQ ID NO: 302070 - DNA, 25 bp, Homo sapien
ccgtctgtccgtctgggagcgtcgc

SEQ ID NO: 302071 - DNA, 25 bp, Homo sapien
ggaggagcactttccctcctgtctc

SEQ ID NO: 302072 - DNA, 25 bp, Homo sapien
tgtctaactgcaggtgttctctcgt

SEQ ID NO: 302073 - DNA, 25 bp, Homo sapien
tctcgtcctaccaccctggaaggag

SEQ ID NO: 302074 - DNA, 25 bp, Homo sapien
gactcccagggaagttttgctggct

SEQ ID NO: 302075 - DNA, 25 bp, Homo sapien
gaattctctgggcaaaaaaggtgga

SEQ ID NO: 302076 - DNA, 25 bp, Homo sapien
gcttttgagcctaggttagcctgac

SEQ ID NO: 302077 - DNA, 25 bp, Homo sapien
tattgagcgcctaccatgatctgtg

SEQ ID NO: 302078 - DNA, 25 bp, Homo sapien
taatctaccccttgggaatggagga

SEQ ID NO: 302079 - DNA, 25 bp, Homo sapien
ctgcatccacgcactgagcattcat

SEQ ID NO: 302080 - DNA, 25 bp, Homo sapien
gctgcttgagtctcccctgcatcca

SEQ ID NO: 302081 - DNA, 25 bp, Homo sapien
ttgagtctcccctgcatccacgcac

SEQ ID NO: 302082 - DNA, 25 bp, Homo sapien
ctcccctgcatccacgcactgagca

SEQ ID NO: 302083 - DNA, 25 bp, Homo sapien
tgagtgaccttcttccctagctgag

SEQ ID NO: 302084 - DNA, 25 bp, Homo sapien
tgccctgtggttgtagaagttcccc

SEQ ID NO: 302085 - DNA, 25 bp, Homo sapien
ccttccaagttcgtgcagtgcagcc

SEQ ID NO: 302086 - DNA, 25 bp, Homo sapien
gacaggtgtctctcggtgaccaaaa

SEQ ID NO: 302087 - DNA, 25 bp, Homo sapien
cagggtttcagatggtgacctctcc

SEQ ID NO: 302088 - DNA, 25 bp, Homo sapien
gcgatttgcaagatataaaccacgc

SEQ ID NO: 302089 - DNA, 25 bp, Homo sapien
tcttgatcatggtggtggtaacacg

SEQ ID NO: 302090 - DNA, 25 bp, Homo sapien
gatgtgagacttctagggcctggaa

SEQ ID NO: 302091 - DNA, 25 bp, Homo sapien
gaatttagactagctaatctctcca

SEQ ID NO: 302092 - DNA, 25 bp, Homo sapien
atagtgttcacatcattaacctggg

SEQ ID NO: 302093 - DNA, 25 bp, Homo sapien
tagacagatgagttaggccctcaaa

SEQ ID NO: 302094 - DNA, 25 bp, Homo sapien
tccaccacctaagagctatctgaat

SEQ ID NO: 302095 - DNA, 25 bp, Homo sapien
acaaaggcgaggagataagacgtgg

SEQ ID NO: 302096 - DNA, 25 bp, Homo sapien
caaaggcgaggagataagacgtggc

SEQ ID NO: 302097 - DNA, 25 bp, Homo sapien
gaggagataagacgtggcctgcccc

SEQ ID NO: 302098 - DNA, 25 bp, Homo sapien
ggcgaggagataagacgtggcctgc

SEQ ID NO: 302099 - DNA, 25 bp, Homo sapien
cttgcctcggagacaaaaccttggg

SEQ ID NO: 302100 - DNA, 25 bp, Homo sapien
tagggcaaatgatgctctagtgggc

SEQ ID NO: 302101 - DNA, 25 bp, Homo sapien
gctcttaaagaaggctttagggcaa

SEQ ID NO: 302102 - DNA, 25 bp, Homo sapien
tggaccgcacagaggaaaaatggca

SEQ ID NO: 302103 - DNA, 25 bp, Homo sapien
taacactggtgccagcgcttggcag

SEQ ID NO: 302104 - DNA, 25 bp, Homo sapien
gggcgattcctgctattgtcctcat

SEQ ID NO: 302105 - DNA, 25 bp, Homo sapien
ccagcacgtggaagtaccctgtggg

SEQ ID NO: 302106 - DNA, 25 bp, Homo sapien
gccttccctccgcagaaactggagg

SEQ ID NO: 302107 - DNA, 25 bp, Homo sapien
cgcgcccagcaaacttctaggaaac

SEQ ID NO: 302108 - DNA, 25 bp, Homo sapien
tgcgcctcacagctccgcgatcgca

SEQ ID NO: 302109 - DNA, 25 bp, Homo sapien
gccccggtctctaggtgccccagag

SEQ ID NO: 302110 - DNA, 25 bp, Homo sapien
ggtccagccagtcagtcgtgcgccc

SEQ ID NO: 302111 - DNA, 25 bp, Homo sapien
tcgccgaggattcggaacacgttca

SEQ ID NO: 302112 - DNA, 25 bp, Homo sapien
aggtcgccgaggattcggaacacgt

SEQ ID NO: 302113 - DNA, 25 bp, Homo sapien
tcaggtcgccgaggattcggaacac

SEQ ID NO: 302114 - DNA, 25 bp, Homo sapien
ccttgcagcacttggacctccagat

SEQ ID NO: 302115 - DNA, 25 bp, Homo sapien
gttcctgagtgcatatctgcttctc

SEQ ID NO: 302116 - DNA, 25 bp, Homo sapien
atggtggaaggaacaatgggtgtaa

SEQ ID NO: 302117 - DNA, 25 bp, Homo sapien
gagaagaccttgagaatcgtgggcc

SEQ ID NO: 302118 - DNA, 25 bp, Homo sapien
aatcgtgggccgttcctgagtgcat

SEQ ID NO: 302119 - DNA, 25 bp, Homo sapien
gtgaagacgagagcaaacaggatct

SEQ ID NO: 302120 - DNA, 25 bp, Homo sapien
tgaagacgagagcaaacaggatctg

SEQ ID NO: 302121 - DNA, 25 bp, Homo sapien
tggagatgaagttggtgaacaggtc

SEQ ID NO: 302122 - DNA, 25 bp, Homo sapien
ccagaagaaactccaggcggaatgt

SEQ ID NO: 302123 - DNA, 25 bp, Homo sapien
aggccaatgactgggaccagaagaa

SEQ ID NO: 302124 - DNA, 25 bp, Homo sapien
cactgtaacataggcacagaggaga

SEQ ID NO: 302125 - DNA, 25 bp, Homo sapien
ctcactgtcaaaagttttacggaat

SEQ ID NO: 302126 - DNA, 25 bp, Homo sapien
tccagatagatagagaaagtccaga

SEQ ID NO: 302127 - DNA, 25 bp, Homo sapien
tagaaattctcagtctggtaccgcc

SEQ ID NO: 302128 - DNA, 25 bp, Homo sapien
gaagatggtttgtactactccagac

SEQ ID NO: 302129 - DNA, 25 bp, Homo sapien
tactccagacacgactgcaatttgg

SEQ ID NO: 302130 - DNA, 25 bp, Homo sapien
cagttagccaggtagagtgcccggt

SEQ ID NO: 302131 - DNA, 25 bp, Homo sapien
tttggtcacatacaagtagaagaag

SEQ ID NO: 302132 - DNA, 25 bp, Homo sapien
tggtcacatacaagtagaagaagtc

SEQ ID NO: 302133 - DNA, 25 bp, Homo sapien
ctttggtcacatacaagtagaagaa

SEQ ID NO: 302134 - DNA, 25 bp, Homo sapien
gtcacatacaagtagaagaagtcac

SEQ ID NO: 302135 - DNA, 25 bp, Homo sapien
gagtaactccttaggccagtgtcag

SEQ ID NO: 302136 - DNA, 25 bp, Homo sapien
aaatggatgagtaactccttaggcc

SEQ ID NO: 302137 - DNA, 25 bp, Homo sapien
ttaaatggatgagtaactccttagg

SEQ ID NO: 302138 - DNA, 25 bp, Homo sapien
gatgagtaactccttaggccagtgt

SEQ ID NO: 302139 - DNA, 25 bp, Homo sapien
actgttcacatctgtatctgctgga

SEQ ID NO: 302140 - DNA, 25 bp, Homo sapien
acttgactgttcacatctgtatctg

SEQ ID NO: 302141 - DNA, 25 bp, Homo sapien
acacaagcattgtggatggcagaga

SEQ ID NO: 302142 - DNA, 25 bp, Homo sapien
tagaacacaagcattgtggatggca

SEQ ID NO: 302143 - DNA, 25 bp, Homo sapien
gcattggaagacttaacttctttcc

SEQ ID NO: 302144 - DNA, 25 bp, Homo sapien
gattggcattggaagacttaacttc

SEQ ID NO: 302145 - DNA, 25 bp, Homo sapien
ttggcattggaagacttaacttctt

SEQ ID NO: 302146 - DNA, 25 bp, Homo sapien
tcagattggcattggaagacttaac

SEQ ID NO: 302147 - DNA, 25 bp, Homo sapien
taagggcgatctattgatgagaagg

SEQ ID NO: 302148 - DNA, 25 bp, Homo sapien
atccacactaaacacttttctggtt

SEQ ID NO: 302149 - DNA, 25 bp, Homo sapien
cccaaattatggataagttgccaaa

SEQ ID NO: 302150 - DNA, 25 bp, Homo sapien
cttgttaaggcgtagactgtctctg

SEQ ID NO: 302151 - DNA, 25 bp, Homo sapien
gcaggtggccgaggttttttatgac

SEQ ID NO: 302152 - DNA, 25 bp, Homo sapien
gtgaggcaccatctttgtgcaggtg

SEQ ID NO: 302153 - DNA, 25 bp, Homo sapien
gattgtgcaaatggtactcgcctaa

SEQ ID NO: 302154 - DNA, 25 bp, Homo sapien
tagctgacacctttatatcttgacc

SEQ ID NO: 302155 - DNA, 25 bp, Homo sapien
gattgactgattactttcgcaccta

SEQ ID NO: 302156 - DNA, 25 bp, Homo sapien
tctgaataattcaacgtagacgtct

SEQ ID NO: 302157 - DNA, 25 bp, Homo sapien
caagactttatagcagatggaccca

SEQ ID NO: 302158 - DNA, 25 bp, Homo sapien
caacaggatagggacatcagacagc

SEQ ID NO: 302159 - DNA, 25 bp, Homo sapien
tagaggtaccaccacaagggatgcc

SEQ ID NO: 302160 - DNA, 25 bp, Homo sapien
tcttacagaagttgaggccaaggga

SEQ ID NO: 302161 - DNA, 25 bp, Homo sapien
ccttcacgtaaatgaaaccactcaa

SEQ ID NO: 302162 - DNA, 25 bp, Homo sapien
tccttcacgtaaatgaaaccactca

SEQ ID NO: 302163 - DNA, 25 bp, Homo sapien
tcctccttcacgtaaatgaaaccac

SEQ ID NO: 302164 - DNA, 25 bp, Homo sapien
ctcctcctccttcacgtaaatgaaa

SEQ ID NO: 302165 - DNA, 25 bp, Homo sapien
gatttggcctcataacttcacagtg

SEQ ID NO: 302166 - DNA, 25 bp, Homo sapien
cgtagcaccaacaagggtaccgcct

SEQ ID NO: 302167 - DNA, 25 bp, Homo sapien
tatgtgcaccgtattggccgaacag

SEQ ID NO: 302168 - DNA, 25 bp, Homo sapien
tatgactatccaaacagctcagagg

SEQ ID NO: 302169 - DNA, 25 bp, Homo sapien
taaaaggcaaagagacgggatcggc

SEQ ID NO: 302170 - DNA, 25 bp, Homo sapien
ggttattcagcccaattcccagcag

SEQ ID NO: 302171 - DNA, 25 bp, Homo sapien
tctaagccagttcacagagcgagcg

SEQ ID NO: 302172 - DNA, 25 bp, Homo sapien
gctgcagcggtttcccaaaggagga

SEQ ID NO: 302173 - DNA, 25 bp, Homo sapien
tacattggccggaagcagctctaga

SEQ ID NO: 302174 - DNA, 25 bp, Homo sapien
tgcagatcactcaatacatggccga

SEQ ID NO: 302175 - DNA, 25 bp, Homo sapien
ggcagtgcacagataacatcagggt

SEQ ID NO: 302176 - DNA, 25 bp, Homo sapien
catggccgagacaaatctacattgg

SEQ ID NO: 302177 - DNA, 25 bp, Homo sapien
acaaacaggctttggtctgcagcaa

SEQ ID NO: 302178 - DNA, 25 bp, Homo sapien
aattatcatgggcacttggctatcc

SEQ ID NO: 302179 - DNA, 25 bp, Homo sapien
catgactattcaaacagagggagag

SEQ ID NO: 302180 - DNA, 25 bp, Homo sapien
tagaataagcctgacgaaacctagc

SEQ ID NO: 302181 - DNA, 25 bp, Homo sapien
accaaatggtggtctctgttatagc

SEQ ID NO: 302182 - DNA, 25 bp, Homo sapien
tatccatggagacaagagtcaacca

SEQ ID NO: 302183 - DNA, 25 bp, Homo sapien
gatagttggccagctatgtgtatcc

SEQ ID NO: 302184 - DNA, 25 bp, Homo sapien
tcaaccagaaagagattgggtactt

SEQ ID NO: 302185 - DNA, 25 bp, Homo sapien
taatcctggggagcgtttgcgtaaa

SEQ ID NO: 302186 - DNA, 25 bp, Homo sapien
gtaatcctggggagcgtttgcgtaa

SEQ ID NO: 302187 - DNA, 25 bp, Homo sapien
gctgttcgatgtctccaggcctcgg

SEQ ID NO: 302188 - DNA, 25 bp, Homo sapien
cactgtttaaggcacgggagacgaa

SEQ ID NO: 302189 - DNA, 25 bp, Homo sapien
gagttgcttgccatctaaatgaccg

SEQ ID NO: 302190 - DNA, 25 bp, Homo sapien
gaaaaacgcggatcttcctgagaga

SEQ ID NO: 302191 - DNA, 25 bp, Homo sapien
ctgtgttttgctcccgtctccgacg

SEQ ID NO: 302192 - DNA, 25 bp, Homo sapien
atcggtcgtcaccagaccggagccg

SEQ ID NO: 302193 - DNA, 25 bp, Homo sapien
actgcccggtttgagcgtagccaaa

SEQ ID NO: 302194 - DNA, 25 bp, Homo sapien
ggaaggagacgcctaaaccgcggca

SEQ ID NO: 302195 - DNA, 25 bp, Homo sapien
aacacaatatagtctgcccttaagg

SEQ ID NO: 302196 - DNA, 25 bp, Homo sapien
gaagcagtagcattgtgttcagact

SEQ ID NO: 302197 - DNA, 25 bp, Homo sapien
tccccttggaattgttgtagcataa

SEQ ID NO: 302198 - DNA, 25 bp, Homo sapien
cattgagagactagctgggagaagc

SEQ ID NO: 302199 - DNA, 25 bp, Homo sapien
gggtactcatagctagccatctgaa

SEQ ID NO: 302200 - DNA, 25 bp, Homo sapien
tccgaacggtctcggttgccttcca

SEQ ID NO: 302201 - DNA, 25 bp, Homo sapien
cgaagatcccatccgaacggtctcg

SEQ ID NO: 302202 - DNA, 25 bp, Homo sapien
gaaggacagtgtccccgaagatccc

SEQ ID NO: 302203 - DNA, 25 bp, Homo sapien
aaaaggatcgccctgtactaggtct

SEQ ID NO: 302204 - DNA, 25 bp, Homo sapien
ggctggcctgcgacttctatttaaa

SEQ ID NO: 302205 - DNA, 25 bp, Homo sapien
tcctgaatgggcctcgggtgtctca

SEQ ID NO: 302206 - DNA, 25 bp, Homo sapien
caaaatatacttggcgtctgtggtc

SEQ ID NO: 302207 - DNA, 25 bp, Homo sapien
cctgccgcctgcccgccacgcgcat

SEQ ID NO: 302208 - DNA, 25 bp, Homo sapien
gcctcctgccgcctgcccgccacgc

SEQ ID NO: 302209 - DNA, 25 bp, Homo sapien
ccgcctcctgccgcctgcccgccac

SEQ ID NO: 302210 - DNA, 25 bp, Homo sapien
ctcctgccgcctgcccgccacgcgc

SEQ ID NO: 302211 - DNA, 25 bp, Homo sapien
cccagcaaggactctgtagcccaga

SEQ ID NO: 302212 - DNA, 25 bp, Homo sapien
cgaacccccagcaaggactctgtag

SEQ ID NO: 302213 - DNA, 25 bp, Homo sapien
gtagcccagagttaccttgacccac

SEQ ID NO: 302214 - DNA, 25 bp, Homo sapien
tcccagaagccggggtccaagcgct

SEQ ID NO: 302215 - DNA, 25 bp, Homo sapien
caagggcggaatctctggttttcat

SEQ ID NO: 302216 - DNA, 25 bp, Homo sapien
ccccaaggagttcagaggtagccat

SEQ ID NO: 302217 - DNA, 25 bp, Homo sapien
gccatgttacgcagatgcacggccc

SEQ ID NO: 302218 - DNA, 25 bp, Homo sapien
ccagggctgtcggactcaagtaaca

SEQ ID NO: 302219 - DNA, 25 bp, Homo sapien
ctctgtctcaaaaataaaataaact

SEQ ID NO: 302220 - DNA, 25 bp, Homo sapien
ctccagcctgggtgacagaacgaga

SEQ ID NO: 302221 - DNA, 25 bp, Homo sapien
ggtgagccgagaacacaccactgcg

SEQ ID NO: 302222 - DNA, 25 bp, Homo sapien
ttgttcatttgcattgctggataat

SEQ ID NO: 302223 - DNA, 25 bp, Homo sapien
tgcacagaattgcacagtgagtcct

SEQ ID NO: 302224 - DNA, 25 bp, Homo sapien
gctgtgtgtagttatagtttgttca

SEQ ID NO: 302225 - DNA, 25 bp, Homo sapien
tggcttctcacactcaacgtcatgt

SEQ ID NO: 302226 - DNA, 25 bp, Homo sapien
cacgttacctgttctgttatggaag

SEQ ID NO: 302227 - DNA, 25 bp, Homo sapien
ccagattgataacagtgctcctcac

SEQ ID NO: 302228 - DNA, 25 bp, Homo sapien
tcaacagtgcacctcatatgtcacg

SEQ ID NO: 302229 - DNA, 25 bp, Homo sapien
tcacttgtcaccagtgtcacttgtc

SEQ ID NO: 302230 - DNA, 25 bp, Homo sapien
tttataaattacccagtctgtggta

SEQ ID NO: 302231 - DNA, 25 bp, Homo sapien
tcccagtctccagaactgtgagcca

SEQ ID NO: 302232 - DNA, 25 bp, Homo sapien
ctgtgagccaaataaacttcttttc

SEQ ID NO: 302233 - DNA, 25 bp, Homo sapien
cagatacttgcaccatgctcttgga

SEQ ID NO: 302234 - DNA, 25 bp, Homo sapien
tacattttatcatgtggctactaac

SEQ ID NO: 302235 - DNA, 25 bp, Homo sapien
ggtacaagcagctggatcactgacc

SEQ ID NO: 302236 - DNA, 25 bp, Homo sapien
gaccttatgccattgtcttcaaatc

SEQ ID NO: 302237 - DNA, 25 bp, Homo sapien
cttcaaatcttgaagacatacattt

SEQ ID NO: 302238 - DNA, 25 bp, Homo sapien
gatgaaagcaaagccagtgctccct

SEQ ID NO: 302239 - DNA, 25 bp, Homo sapien
ctttggcctgatgaaagcaaagcca

SEQ ID NO: 302240 - DNA, 25 bp, Homo sapien
aaagcaaagccagtgctcccttctc

SEQ ID NO: 302241 - DNA, 25 bp, Homo sapien
ctgatgaaagcaaagccagtgctcc

SEQ ID NO: 302242 - DNA, 25 bp, Homo sapien
agatgccgacttccgaggaggtgtc

SEQ ID NO: 302243 - DNA, 25 bp, Homo sapien
gaggaggtgtcttcttcggactgaa

SEQ ID NO: 302244 - DNA, 25 bp, Homo sapien
tgaacgtattcccaaagaaaggcat

SEQ ID NO: 302245 - DNA, 25 bp, Homo sapien
tcttcttcggactgaacgtattccc

SEQ ID NO: 302246 - DNA, 25 bp, Homo sapien
ggccgaccccagtaccgacactcac

SEQ ID NO: 302247 - DNA, 25 bp, Homo sapien
tcaaattggatgatactggctgggc

SEQ ID NO: 302248 - DNA, 25 bp, Homo sapien
gctctgtaggaaaaggtcacagaat

SEQ ID NO: 302249 - DNA, 25 bp, Homo sapien
gtagaagtcaaattggatgatactg

SEQ ID NO: 302250 - DNA, 25 bp, Homo sapien
aattggatgatactggctgggcaca

SEQ ID NO: 302251 - DNA, 25 bp, Homo sapien
tcccatctcggcctctgaatagctg

SEQ ID NO: 302252 - DNA, 25 bp, Homo sapien
ggactacaggcatgcaccaccatac

SEQ ID NO: 302253 - DNA, 25 bp, Homo sapien
aggcatgcaccaccatacccggcta

SEQ ID NO: 302254 - DNA, 25 bp, Homo sapien
catgcaccaccatacccggctaatt

SEQ ID NO: 302255 - DNA, 25 bp, Homo sapien
agctcctcttccgccaacaatatga

SEQ ID NO: 302256 - DNA, 25 bp, Homo sapien
ctgtgggcgagatgctatgtgacaa

SEQ ID NO: 302257 - DNA, 25 bp, Homo sapien
atgtgacaacttcagcaggcccgga

SEQ ID NO: 302258 - DNA, 25 bp, Homo sapien
acaatatgaccccaacaactcattt

SEQ ID NO: 302259 - DNA, 25 bp, Homo sapien
tttcaaacttcaggctttgccctgc

SEQ ID NO: 302260 - DNA, 25 bp, Homo sapien
ggttcatagtcggggatccgtattc

SEQ ID NO: 302261 - DNA, 25 bp, Homo sapien
gatccgtattccaagcccagctcca

SEQ ID NO: 302262 - DNA, 25 bp, Homo sapien
ttcatagtcggggatccgtattcca

SEQ ID NO: 302263 - DNA, 25 bp, Homo sapien
tgtccactttcagccgcaagagatt

SEQ ID NO: 302264 - DNA, 25 bp, Homo sapien
ctttcagccgcaagagattgttctc

SEQ ID NO: 302265 - DNA, 25 bp, Homo sapien
ttccgcctgcgaaggcgctgaacct

SEQ ID NO: 302266 - DNA, 25 bp, Homo sapien
tccaactgctggttccgcctgcgaa

SEQ ID NO: 302267 - DNA, 25 bp, Homo sapien
gcattgaggagatatctgttggatt

SEQ ID NO: 302268 - DNA, 25 bp, Homo sapien
ttaagtgactcgaggtggagcctcc

SEQ ID NO: 302269 - DNA, 25 bp, Homo sapien
ggagatatctgttggattaagtgac

SEQ ID NO: 302270 - DNA, 25 bp, Homo sapien
tctgttggattaagtgactcgaggt

SEQ ID NO: 302271 - DNA, 25 bp, Homo sapien
gtgaggaacccaggccattttgctc

SEQ ID NO: 302272 - DNA, 25 bp, Homo sapien
ttacagagcagttagtcagtagcag

SEQ ID NO: 302273 - DNA, 25 bp, Homo sapien
aaagatggcatcttactttgcagcc

SEQ ID NO: 302274 - DNA, 25 bp, Homo sapien
gggtgcaccaccacaattagctatt

SEQ ID NO: 302275 - DNA, 25 bp, Homo sapien
ggtggcgggtgctaatcaggaggct

SEQ ID NO: 302276 - DNA, 25 bp, Homo sapien
cgtggtggcgggtgctaatcaggag

SEQ ID NO: 302277 - DNA, 25 bp, Homo sapien
tgcagtggggcagtgggtggagatc

SEQ ID NO: 302278 - DNA, 25 bp, Homo sapien
agaggttgcagtggggcagtgggtg

SEQ ID NO: 302279 - DNA, 25 bp, Homo sapien
caggtctcagaggacgtcaaaggca

SEQ ID NO: 302280 - DNA, 25 bp, Homo sapien
ccctctgtaactgggtagaatgcaa

SEQ ID NO: 302281 - DNA, 25 bp, Homo sapien
agaatgcaacccctgatgacccagg

SEQ ID NO: 302282 - DNA, 25 bp, Homo sapien
gaagcagcggctgttagcaagcagc

SEQ ID NO: 302283 - DNA, 25 bp, Homo sapien
tccggctgatcctcagttcatccag

SEQ ID NO: 302284 - DNA, 25 bp, Homo sapien
tctcttccggctgatcctcagttca

SEQ ID NO: 302285 - DNA, 25 bp, Homo sapien
ggctgatcctcagttcatccagttc

SEQ ID NO: 302286 - DNA, 25 bp, Homo sapien
attttctcttccggctgatcctcag

SEQ ID NO: 302287 - DNA, 25 bp, Homo sapien
tgtagaactgctgtcacacgccaaa

SEQ ID NO: 302288 - DNA, 25 bp, Homo sapien
gactgaatccgctagtctggccaaa

SEQ ID NO: 302289 - DNA, 25 bp, Homo sapien
ccaacagagctattctgggacatgt

SEQ ID NO: 302290 - DNA, 25 bp, Homo sapien
gcctttaagagccaagagagccgct

SEQ ID NO: 302291 - DNA, 25 bp, Homo sapien
taataaaaaagtagtagtgcaaaca

SEQ ID NO: 302292 - DNA, 25 bp, Homo sapien
taaaaaagtagtagtgcaaacagga

SEQ ID NO: 302293 - DNA, 25 bp, Homo sapien
aaagtagtagtgcaaacaggaaagt

SEQ ID NO: 302294 - DNA, 25 bp, Homo sapien
aaaagtagtagtgcaaacaggaaag

SEQ ID NO: 302295 - DNA, 25 bp, Homo sapien
agggaaccccgcgcacgacgaccga

SEQ ID NO: 302296 - DNA, 25 bp, Homo sapien
tcggtcgtcgtgcgcggggttccct

SEQ ID NO: 302297 - DNA, 25 bp, Homo sapien
cggccgaggcataagcaaactccac

SEQ ID NO: 302298 - DNA, 25 bp, Homo sapien
tttacaccttgcatatatgtggatc

SEQ ID NO: 302299 - DNA, 25 bp, Homo sapien
gctcctattatctgcacctgaagat

SEQ ID NO: 302300 - DNA, 25 bp, Homo sapien
aaactccactgctcctattatctgc

SEQ ID NO: 302301 - DNA, 25 bp, Homo sapien
gatccagtttcgttttcctgagcca

SEQ ID NO: 302302 - DNA, 25 bp, Homo sapien
tgtgaccagggccaaagatttatct

SEQ ID NO: 302303 - DNA, 25 bp, Homo sapien
cggatttcttaattcggcctgtgac

SEQ ID NO: 302304 - DNA, 25 bp, Homo sapien
tgagccatgttttacttggtaggaa

SEQ ID NO: 302305 - DNA, 25 bp, Homo sapien
cgggagcaattcgtccggggactgg

SEQ ID NO: 302306 - DNA, 25 bp, Homo sapien
gcgtcgcctttcgggagcaattcgt

SEQ ID NO: 302307 - DNA, 25 bp, Homo sapien
cgcgtcgcctttcgggagcaattcg

SEQ ID NO: 302308 - DNA, 25 bp, Homo sapien
tcgggagcaattcgtccggggactg

SEQ ID NO: 302309 - DNA, 25 bp, Homo sapien
tctgcaccccgcgaggccctagtac

SEQ ID NO: 302310 - DNA, 25 bp, Homo sapien
ccacgagcgggcccgcttcccgctc

SEQ ID NO: 302311 - DNA, 25 bp, Homo sapien
acgagcgggcccgcttcccgctctg

SEQ ID NO: 302312 - DNA, 25 bp, Homo sapien
ccgctctgcaccccgcgaggcccta

SEQ ID NO: 302313 - DNA, 25 bp, Homo sapien
ttagccgaaaaagcgacatccattc

SEQ ID NO: 302314 - DNA, 25 bp, Homo sapien
tgtggtggagtagacgcgggtctta

SEQ ID NO: 302315 - DNA, 25 bp, Homo sapien
gccgccgagccccactggagctagg

SEQ ID NO: 302316 - DNA, 25 bp, Homo sapien
gagtagacgcgggtcttagccgaaa

SEQ ID NO: 302317 - DNA, 25 bp, Homo sapien
gaaagatcaaaagtggctccggccg

SEQ ID NO: 302318 - DNA, 25 bp, Homo sapien
gggaaagatcaaaagtggctccggc

SEQ ID NO: 302319 - DNA, 25 bp, Homo sapien
atcaaaagtggctccggccgcggac

SEQ ID NO: 302320 - DNA, 25 bp, Homo sapien
aagatcaaaagtggctccggccgcg

SEQ ID NO: 302321 - DNA, 25 bp, Homo sapien
agacaacgggaagaaccaggatcat

SEQ ID NO: 302322 - DNA, 25 bp, Homo sapien
gatcataaaggaagtggtcccaatc

SEQ ID NO: 302323 - DNA, 25 bp, Homo sapien
ggaagtggtcccaatccacaaggct

SEQ ID NO: 302324 - DNA, 25 bp, Homo sapien
gtctcaaagacaacgggaagaacca

SEQ ID NO: 302325 - DNA, 25 bp, Homo sapien
aagtgagggtagagcccctggcatt

SEQ ID NO: 302326 - DNA, 25 bp, Homo sapien
agtgagggtagagcccctggcattc

SEQ ID NO: 302327 - DNA, 25 bp, Homo sapien
tatcccactgagacagctcaaacag

SEQ ID NO: 302328 - DNA, 25 bp, Homo sapien
cacacaggtctaacagccaaaatgt

SEQ ID NO: 302329 - DNA, 25 bp, Homo sapien
catacatagggattcatagtggcca

SEQ ID NO: 302330 - DNA, 25 bp, Homo sapien
tagtggccactttacactacaggtg

SEQ ID NO: 302331 - DNA, 25 bp, Homo sapien
caaagtgactgcctaaattcagggc

SEQ ID NO: 302332 - DNA, 25 bp, Homo sapien
caaagattgctatgaagtacttggc

SEQ ID NO: 302333 - DNA, 25 bp, Homo sapien
gaagtacatagacccaatcctttgt

SEQ ID NO: 302334 - DNA, 25 bp, Homo sapien
ggcagtacatgtctctgacgtggtc

SEQ ID NO: 302335 - DNA, 25 bp, Homo sapien
tgaacccaaacgacaccactgtact

SEQ ID NO: 302336 - DNA, 25 bp, Homo sapien
gttggttgatctgataaacacacaa

SEQ ID NO: 302337 - DNA, 25 bp, Homo sapien
gggaacagtaccacctagattgtag

SEQ ID NO: 302338 - DNA, 25 bp, Homo sapien
tctagcacttaactctgcagccttg

SEQ ID NO: 302339 - DNA, 25 bp, Homo sapien
tcctttaaggaagtgaacaggcctg

SEQ ID NO: 302340 - DNA, 25 bp, Homo sapien
gctggccctcagatcaatggtcgtg

SEQ ID NO: 302341 - DNA, 25 bp, Homo sapien
tgattgtcacaagcaggaccttggg

SEQ ID NO: 302342 - DNA, 25 bp, Homo sapien
cagtagacactctaggctcggaggc

SEQ ID NO: 302343 - DNA, 25 bp, Homo sapien
aaagcataaatcatggacaccagag

SEQ ID NO: 302344 - DNA, 25 bp, Homo sapien
tgagaaacagcgcagggagctttgt

SEQ ID NO: 302345 - DNA, 25 bp, Homo sapien
gacctcaggaatccggaaaagactg

SEQ ID NO: 302346 - DNA, 25 bp, Homo sapien
ggtgtttatagccatctctggaacc

SEQ ID NO: 302347 - DNA, 25 bp, Homo sapien
gcgaccgcgaccacgcctggctatt

SEQ ID NO: 302348 - DNA, 25 bp, Homo sapien
atggagtctctgttgcccaggctgg

SEQ ID NO: 302349 - DNA, 25 bp, Homo sapien
gcgctgtaagccttccgatgacgga

SEQ ID NO: 302350 - DNA, 25 bp, Homo sapien
taagccttccgatgacggacaaggg

SEQ ID NO: 302351 - DNA, 25 bp, Homo sapien
gatgacggacaagggcaggacccaa

SEQ ID NO: 302352 - DNA, 25 bp, Homo sapien
aaacagtaggcgctgtaagccttcc

SEQ ID NO: 302353 - DNA, 25 bp, Homo sapien
tgactaatctatgcacagagccccg

SEQ ID NO: 302354 - DNA, 25 bp, Homo sapien
ggtgacacgtacctctagctaagaa

SEQ ID NO: 302355 - DNA, 25 bp, Homo sapien
tccagccgcgtactgggtgacacgt

SEQ ID NO: 302356 - DNA, 25 bp, Homo sapien
taagaaacagtcgactaggcctctc

SEQ ID NO: 302357 - DNA, 25 bp, Homo sapien
cggagcgactgcgctccgtcgccat

SEQ ID NO: 302358 - DNA, 25 bp, Homo sapien
gcggagcgactgcgctccgtcgcca

SEQ ID NO: 302359 - DNA, 25 bp, Homo sapien
cgcggagcgactgcgctccgtcgcc

SEQ ID NO: 302360 - DNA, 25 bp, Homo sapien
atagaggccgggaccggcgagtcca

SEQ ID NO: 302361 - DNA, 25 bp, Homo sapien
tagaggccgggaccggcgagtccat

SEQ ID NO: 302362 - DNA, 25 bp, Homo sapien
cagtccgagtcaaagccgccgtgga

SEQ ID NO: 302363 - DNA, 25 bp, Homo sapien
ctgcagtccgagtcaaagccgccgt

SEQ ID NO: 302364 - DNA, 25 bp, Homo sapien
ccgccgtggagtcgggcggcggccg

SEQ ID NO: 302365 - DNA, 25 bp, Homo sapien
gtccgagtcaaagccgccgtggagt

SEQ ID NO: 302366 - DNA, 25 bp, Homo sapien
aggtccagctctggctcgccgttga

SEQ ID NO: 302367 - DNA, 25 bp, Homo sapien
tccagctctggctcgccgttgagcg

SEQ ID NO: 302368 - DNA, 25 bp, Homo sapien
tgaggtccagctctggctcgccgtt

SEQ ID NO: 302369 - DNA, 25 bp, Homo sapien
gtgaggtccagctctggctcgccgt

SEQ ID NO: 302370 - DNA, 25 bp, Homo sapien
aagtaggctgtcatactgctctgat

SEQ ID NO: 302371 - DNA, 25 bp, Homo sapien
gctgtcatactgctctgatgtaggg

SEQ ID NO: 302372 - DNA, 25 bp, Homo sapien
tctgatgtagggctcactagaacca

SEQ ID NO: 302373 - DNA, 25 bp, Homo sapien
cacatctgccgaagtaggctgtcat

SEQ ID NO: 302374 - DNA, 25 bp, Homo sapien
atatatggtctctccgcatccctcg

SEQ ID NO: 302375 - DNA, 25 bp, Homo sapien
gacatatatggtctctccgcatccc

SEQ ID NO: 302376 - DNA, 25 bp, Homo sapien
ccctgcccaatgacatatatggtct

SEQ ID NO: 302377 - DNA, 25 bp, Homo sapien
caatgacatatatggtctctccgca

SEQ ID NO: 302378 - DNA, 25 bp, Homo sapien
tcataatcgttaacaaccccagctg

SEQ ID NO: 302379 - DNA, 25 bp, Homo sapien
tctttaatgatgcatccaggcccac

SEQ ID NO: 302380 - DNA, 25 bp, Homo sapien
gcaggtcttgtattgaagttgctaa

SEQ ID NO: 302381 - DNA, 25 bp, Homo sapien
caagtgctggtatgggctgaattca

SEQ ID NO: 302382 - DNA, 25 bp, Homo sapien
taggtggtaagacccgcaactagag

SEQ ID NO: 302383 - DNA, 25 bp, Homo sapien
aatctaatagcatccaactggtgga

SEQ ID NO: 302384 - DNA, 25 bp, Homo sapien
caatgatctcctagtcaacaaatgg

SEQ ID NO: 302385 - DNA, 25 bp, Homo sapien
ggttcatcttattagagcaggccag

SEQ ID NO: 302386 - DNA, 25 bp, Homo sapien
ctggcccaccagtggccttctaaac

SEQ ID NO: 302387 - DNA, 25 bp, Homo sapien
accagtggccttctaaactctctaa

SEQ ID NO: 302388 - DNA, 25 bp, Homo sapien
cccaccagtggccttctaaactctc

SEQ ID NO: 302389 - DNA, 25 bp, Homo sapien
tggcccaccagtggccttctaaact

SEQ ID NO: 302390 - DNA, 25 bp, Homo sapien
acaagagcccagacatcagcaggag

SEQ ID NO: 302391 - DNA, 25 bp, Homo sapien
gtgacaagagcccagacatcagcag

SEQ ID NO: 302392 - DNA, 25 bp, Homo sapien
ctggtgacaagagcccagacatcag

SEQ ID NO: 302393 - DNA, 25 bp, Homo sapien
aagagcccagacatcagcaggagag

SEQ ID NO: 302394 - DNA, 25 bp, Homo sapien
tgttccgccatgctcttcactgtgg

SEQ ID NO: 302395 - DNA, 25 bp, Homo sapien
ttcactgtggcgtaggaggcctcca

SEQ ID NO: 302396 - DNA, 25 bp, Homo sapien
tttccggaccaggtaatcacgcacg

SEQ ID NO: 302397 - DNA, 25 bp, Homo sapien
gaaggatgacatcggcctctatctg

SEQ ID NO: 302398 - DNA, 25 bp, Homo sapien
gccacaggctcagtcaccaacctct

SEQ ID NO: 302399 - DNA, 25 bp, Homo sapien
caggctcagtcaccaacctctgtga

SEQ ID NO: 302400 - DNA, 25 bp, Homo sapien
ggctcagtcaccaacctctgtgaag

SEQ ID NO: 302401 - DNA, 25 bp, Homo sapien
gctcagtcaccaacctctgtgaaga

SEQ ID NO: 302402 - DNA, 25 bp, Homo sapien
cattgtccagctccccatgtgtcag

SEQ ID NO: 302403 - DNA, 25 bp, Homo sapien
aaagcccagaatgtcgttgcccaca

SEQ ID NO: 302404 - DNA, 25 bp, Homo sapien
catgccgaagacagtggttttcagg

SEQ ID NO: 302405 - DNA, 25 bp, Homo sapien
catgaccagccaagtcgatgaaggt

SEQ ID NO: 302406 - DNA, 25 bp, Homo sapien
caggtacattgagtgccagtgccaa

SEQ ID NO: 302407 - DNA, 25 bp, Homo sapien
tggtgactaccacaaagacaggtac

SEQ ID NO: 302408 - DNA, 25 bp, Homo sapien
caagcccaggtgttctttggtcatc

SEQ ID NO: 302409 - DNA, 25 bp, Homo sapien
ggtcatccccacgatgccagcattg

SEQ ID NO: 302410 - DNA, 25 bp, Homo sapien
ttggatttcaccttcgtggtcctac

SEQ ID NO: 302411 - DNA, 25 bp, Homo sapien
accttcgtggtcctacagaaactgt

SEQ ID NO: 302412 - DNA, 25 bp, Homo sapien
gatttcaccttcgtggtcctacaga

SEQ ID NO: 302413 - DNA, 25 bp, Homo sapien
tcaccttcgtggtcctacagaaact

SEQ ID NO: 302414 - DNA, 25 bp, Homo sapien
gagcatcggctgcccgacatgtgag

SEQ ID NO: 302415 - DNA, 25 bp, Homo sapien
ctgagcatcggctgcccgacatgtg

SEQ ID NO: 302416 - DNA, 25 bp, Homo sapien
tgagcatcggctgcccgacatgtga

SEQ ID NO: 302417 - DNA, 25 bp, Homo sapien
tctgcaccagcacggggatcttccg

SEQ ID NO: 302418 - DNA, 25 bp, Homo sapien
cctggtgacttcagcaggcgctgta

SEQ ID NO: 302419 - DNA, 25 bp, Homo sapien
cagcaggcgctgtaacagcttcagg

SEQ ID NO: 302420 - DNA, 25 bp, Homo sapien
agcacggggatcttccggcagcctg

SEQ ID NO: 302421 - DNA, 25 bp, Homo sapien
agaggcactcaggagaccaggtcct

SEQ ID NO: 302422 - DNA, 25 bp, Homo sapien
tgcctccaagggcttgacctctttg

SEQ ID NO: 302423 - DNA, 25 bp, Homo sapien
cagcaacagggctcgaggagcagat

SEQ ID NO: 302424 - DNA, 25 bp, Homo sapien
gatgccactattcatgactccacct

SEQ ID NO: 302425 - DNA, 25 bp, Homo sapien
tggagatctggaatatcgggcacat

SEQ ID NO: 302426 - DNA, 25 bp, Homo sapien
ctcgcctgtaacgttggagatctgg

SEQ ID NO: 302427 - DNA, 25 bp, Homo sapien
aggttctcgcctgtaacgttggaga

SEQ ID NO: 302428 - DNA, 25 bp, Homo sapien
ttcagcagatctaggttctcgcctg

SEQ ID NO: 302429 - DNA, 25 bp, Homo sapien
cgatggatggatttgacagcaatgg

SEQ ID NO: 302430 - DNA, 25 bp, Homo sapien
tccttgacaggcatgcgcttgcgat

SEQ ID NO: 302431 - DNA, 25 bp, Homo sapien
cagcaatggacaggaagttacccaa

SEQ ID NO: 302432 - DNA, 25 bp, Homo sapien
tcttcagcgcaaaggatgctgtctg

SEQ ID NO: 302433 - DNA, 25 bp, Homo sapien
catggcctggtagcgcgggctaatt

SEQ ID NO: 302434 - DNA, 25 bp, Homo sapien
ggacgagaatctcggcctcaaactc

SEQ ID NO: 302435 - DNA, 25 bp, Homo sapien
ccttccggatggacgagcgcttgat

SEQ ID NO: 302436 - DNA, 25 bp, Homo sapien
aaacgtggggaaaccatcaccatgc

SEQ ID NO: 302437 - DNA, 25 bp, Homo sapien
tgtccatgctcagaatggtggctgt

SEQ ID NO: 302438 - DNA, 25 bp, Homo sapien
tgaagcggaagtgtacagtggcctt

SEQ ID NO: 302439 - DNA, 25 bp, Homo sapien
ccagtgcgcagacagtccttgtcca

SEQ ID NO: 302440 - DNA, 25 bp, Homo sapien
cagccgctggtctatgtgcaggtac

SEQ ID NO: 302441 - DNA, 25 bp, Homo sapien
ttgaaatcttcccttgtggcccaag

SEQ ID NO: 302442 - DNA, 25 bp, Homo sapien
tcccagtgaggccataggaacctgt

SEQ ID NO: 302443 - DNA, 25 bp, Homo sapien
cctcccgaagagaccaagtgaatgt

SEQ ID NO: 302444 - DNA, 25 bp, Homo sapien
caaactcagcagtcccaggagcatg

SEQ ID NO: 302445 - DNA, 25 bp, Homo sapien
gtggagctccgggatctcctgattg

SEQ ID NO: 302446 - DNA, 25 bp, Homo sapien
tgattgctaagctggtggagactcc

SEQ ID NO: 302447 - DNA, 25 bp, Homo sapien
gctccgggatctcctgattgctaag

SEQ ID NO: 302448 - DNA, 25 bp, Homo sapien
gagactcctcagagcatgctgcagc

SEQ ID NO: 302449 - DNA, 25 bp, Homo sapien
ccttgatcttgccagttcagggcaa

SEQ ID NO: 302450 - DNA, 25 bp, Homo sapien
tatggccctggactcatgcctcact

SEQ ID NO: 302451 - DNA, 25 bp, Homo sapien
gctgcagctactattcctgcagaga

SEQ ID NO: 302452 - DNA, 25 bp, Homo sapien
gatgaagaggcattctcatccccac

SEQ ID NO: 302453 - DNA, 25 bp, Homo sapien
cctgcccctacagaggaggcttcat

SEQ ID NO: 302454 - DNA, 25 bp, Homo sapien
gattgctggacgcagctggttgccc

SEQ ID NO: 302455 - DNA, 25 bp, Homo sapien
ttttaatctgctgcggcttggagtt

SEQ ID NO: 302456 - DNA, 25 bp, Homo sapien
gccctttttcgtcgactgcatttta

SEQ ID NO: 302457 - DNA, 25 bp, Homo sapien
ccgaagctgcgaggggcccgtgctc

SEQ ID NO: 302458 - DNA, 25 bp, Homo sapien
catgccgaagctgcgaggggcccgt

SEQ ID NO: 302459 - DNA, 25 bp, Homo sapien
caccatgccgaagctgcgaggggcc

SEQ ID NO: 302460 - DNA, 25 bp, Homo sapien
tgccgaagctgcgaggggcccgtgc

SEQ ID NO: 302461 - DNA, 25 bp, Homo sapien
gaatcagagtaaaagccacagcccc

SEQ ID NO: 302462 - DNA, 25 bp, Homo sapien
cgaatcagagtaaaagccacagccc

SEQ ID NO: 302463 - DNA, 25 bp, Homo sapien
tcagagtaaaagccacagcccccac

SEQ ID NO: 302464 - DNA, 25 bp, Homo sapien
aatcagagtaaaagccacagccccc

SEQ ID NO: 302465 - DNA, 25 bp, Homo sapien
cttgtggcgctggccccctcgtcgc

SEQ ID NO: 302466 - DNA, 25 bp, Homo sapien
tgtggcgctggccccctcgtcgccg

SEQ ID NO: 302467 - DNA, 25 bp, Homo sapien
tcgtcgccggcctccactgctgggc

SEQ ID NO: 302468 - DNA, 25 bp, Homo sapien
gcgctggccccctcgtcgccggcct

SEQ ID NO: 302469 - DNA, 25 bp, Homo sapien
tcacacaggccccctgggacttcac

SEQ ID NO: 302470 - DNA, 25 bp, Homo sapien
tcagcagccgctggcaggagtcaca

SEQ ID NO: 302471 - DNA, 25 bp, Homo sapien
cagccgctggcaggagtcacacagg

SEQ ID NO: 302472 - DNA, 25 bp, Homo sapien
agcagccgctggcaggagtcacaca

SEQ ID NO: 302473 - DNA, 25 bp, Homo sapien
tgaccgccccgaggattctcagaga

SEQ ID NO: 302474 - DNA, 25 bp, Homo sapien
gatggtcagtcctccggaagtctgg

SEQ ID NO: 302475 - DNA, 25 bp, Homo sapien
ttctccctgttaaaatgcccaagtc

SEQ ID NO: 302476 - DNA, 25 bp, Homo sapien
ggaagtctggctaccttcgtcagct

SEQ ID NO: 302477 - DNA, 25 bp, Homo sapien
gctgtctttgggttggtggcaaggg

SEQ ID NO: 302478 - DNA, 25 bp, Homo sapien
ttttggcatgacctgaatctgtggg

SEQ ID NO: 302479 - DNA, 25 bp, Homo sapien
gagagtcctataatcccatcgccat

SEQ ID NO: 302480 - DNA, 25 bp, Homo sapien
gtctttgggttggtggcaagggtca

SEQ ID NO: 302481 - DNA, 25 bp, Homo sapien
tgctctgtcctaaccctggaagtgt

SEQ ID NO: 302482 - DNA, 25 bp, Homo sapien
cagttgggtctttcaaacctggagc

SEQ ID NO: 302483 - DNA, 25 bp, Homo sapien
ctggtaaccagtgcctgaggcccaa

SEQ ID NO: 302484 - DNA, 25 bp, Homo sapien
ggcccaggcaaacgcaggattgtct

SEQ ID NO: 302485 - DNA, 25 bp, Homo sapien
tgtctgccccggctagagaacgaac

SEQ ID NO: 302486 - DNA, 25 bp, Homo sapien
tgcagaagtcagtccaggtgggttc

SEQ ID NO: 302487 - DNA, 25 bp, Homo sapien
gccagctgggtgtctgccccggcta

SEQ ID NO: 302488 - DNA, 25 bp, Homo sapien
cagcagtccgcaagcaggaggaaag

SEQ ID NO: 302489 - DNA, 25 bp, Homo sapien
tgctggtctgatcagtccacggcca

SEQ ID NO: 302490 - DNA, 25 bp, Homo sapien
tgaatgctggtctgatcagtccacg

SEQ ID NO: 302491 - DNA, 25 bp, Homo sapien
ttattttgaatgctggtctgatcag

SEQ ID NO: 302492 - DNA, 25 bp, Homo sapien
tggtctgatcagtccacggccaggg

SEQ ID NO: 302493 - DNA, 25 bp, Homo sapien
gagcaagcctttcccttgtgtagga

SEQ ID NO: 302494 - DNA, 25 bp, Homo sapien
cagacgcttgttatggaggcaccag

SEQ ID NO: 302495 - DNA, 25 bp, Homo sapien
caaggctggcatgggaatgaacacc

SEQ ID NO: 302496 - DNA, 25 bp, Homo sapien
ttgtaagcttgtcccgtgtcaccag

SEQ ID NO: 302497 - DNA, 25 bp, Homo sapien
ttctgcatccactacaaaagggctg

SEQ ID NO: 302498 - DNA, 25 bp, Homo sapien
tgtgggcctggcaactacacagatc

SEQ ID NO: 302499 - DNA, 25 bp, Homo sapien
caagaatggttctggcaagtactgc

SEQ ID NO: 302500 - DNA, 25 bp, Homo sapien
cgagctcctgaatcccaagaatggt

SEQ ID NO: 302501 - DNA, 25 bp, Homo sapien
agctccccagacctggttcgcgtgg

SEQ ID NO: 302502 - DNA, 25 bp, Homo sapien
gatcctggagcctctcatactgacc

SEQ ID NO: 302503 - DNA, 25 bp, Homo sapien
ggttcgcgtggttctctagcctgat

SEQ ID NO: 302504 - DNA, 25 bp, Homo sapien
ctctcatactgaccgtggcacctgg

SEQ ID NO: 302505 - DNA, 25 bp, Homo sapien
gaattcgctatttgccccttggacc

SEQ ID NO: 302506 - DNA, 25 bp, Homo sapien
cctccatgggaattcgctatttgcc

SEQ ID NO: 302507 - DNA, 25 bp, Homo sapien
tgggaattcgctatttgccccttgg

SEQ ID NO: 302508 - DNA, 25 bp, Homo sapien
cgctatttgccccttggacctgtga

SEQ ID NO: 302509 - DNA, 25 bp, Homo sapien
ttgataacccatcacaaagggtggg

SEQ ID NO: 302510 - DNA, 25 bp, Homo sapien
agtgaggtggctttattagctgtca

SEQ ID NO: 302511 - DNA, 25 bp, Homo sapien
cctccagtgtttgtgggtcaagggc

SEQ ID NO: 302512 - DNA, 25 bp, Homo sapien
gggacctgaggcaggtctcctccag

SEQ ID NO: 302513 - DNA, 25 bp, Homo sapien
gttccggctgtgtctggtggtctgg

SEQ ID NO: 302514 - DNA, 25 bp, Homo sapien
cactggttccggctgtgtctggtgg

SEQ ID NO: 302515 - DNA, 25 bp, Homo sapien
ctggttccggctgtgtctggtggtc

SEQ ID NO: 302516 - DNA, 25 bp, Homo sapien
ctggggcactggttccggctgtgtc

SEQ ID NO: 302517 - DNA, 25 bp, Homo sapien
agagccagcaggccccactgtatta

SEQ ID NO: 302518 - DNA, 25 bp, Homo sapien
gagccagcaggccccactgtattat

SEQ ID NO: 302519 - DNA, 25 bp, Homo sapien
tagagccagcaggccccactgtatt

SEQ ID NO: 302520 - DNA, 25 bp, Homo sapien
ttagagccagcaggccccactgtat

SEQ ID NO: 302521 - DNA, 25 bp, Homo sapien
agctcttgttcaggtagtcgccctt

SEQ ID NO: 302522 - DNA, 25 bp, Homo sapien
cctgatgtaggggtcgtccgctcag

SEQ ID NO: 302523 - DNA, 25 bp, Homo sapien
taaccaggccctgatgtaggggtcg

SEQ ID NO: 302524 - DNA, 25 bp, Homo sapien
tgttcaggtagtcgcccttctggtt

SEQ ID NO: 302525 - DNA, 25 bp, Homo sapien
ctgccagtgcccctgagcttgcttt

SEQ ID NO: 302526 - DNA, 25 bp, Homo sapien
ctcccagggtatggagacctagacc

SEQ ID NO: 302527 - DNA, 25 bp, Homo sapien
gtgcgaggtctgtctgcaccggccc

SEQ ID NO: 302528 - DNA, 25 bp, Homo sapien
catctggggttatagcaagaagagt

SEQ ID NO: 302529 - DNA, 25 bp, Homo sapien
tgctagcagaagtggcgcagactcc

SEQ ID NO: 302530 - DNA, 25 bp, Homo sapien
ttcactttcaggtacgggatgctgc

SEQ ID NO: 302531 - DNA, 25 bp, Homo sapien
gctcaagatgtgatatccaaatggg

SEQ ID NO: 302532 - DNA, 25 bp, Homo sapien
acttacgatcaggacggcgagccta

SEQ ID NO: 302533 - DNA, 25 bp, Homo sapien
agccagatgtgcacccaggcaactg

SEQ ID NO: 302534 - DNA, 25 bp, Homo sapien
gccagcgtcatcagcacccgatgtt

SEQ ID NO: 302535 - DNA, 25 bp, Homo sapien
ccgttaccttagagcatgtgcccaa

SEQ ID NO: 302536 - DNA, 25 bp, Homo sapien
tctgagacctacgagaccaagacgg

SEQ ID NO: 302537 - DNA, 25 bp, Homo sapien
gggagaggctgacctttaaagctgc

SEQ ID NO: 302538 - DNA, 25 bp, Homo sapien
gcatctcggttagggttaaaggcta

SEQ ID NO: 302539 - DNA, 25 bp, Homo sapien
tccaccttcagcgaggagacagcca

SEQ ID NO: 302540 - DNA, 25 bp, Homo sapien
gaggctgacctttaaagctgctctg

SEQ ID NO: 302541 - DNA, 25 bp, Homo sapien
cagtcagttccttgcccgaggtgga

SEQ ID NO: 302542 - DNA, 25 bp, Homo sapien
tcagttcccggcctggatcagtcag

SEQ ID NO: 302543 - DNA, 25 bp, Homo sapien
taagcactagccctgtcatagcagc

SEQ ID NO: 302544 - DNA, 25 bp, Homo sapien
gagagcaagatcctcacccatgtgg

SEQ ID NO: 302545 - DNA, 25 bp, Homo sapien
tgatctcgactcactacaacctgtg

SEQ ID NO: 302546 - DNA, 25 bp, Homo sapien
gtgcctcccaggttcaagcgattct

SEQ ID NO: 302547 - DNA, 25 bp, Homo sapien
agctggattacaggcgtgcaccacc

SEQ ID NO: 302548 - DNA, 25 bp, Homo sapien
tcttgcctcactcagcctcccgagt

SEQ ID NO: 302549 - DNA, 25 bp, Homo sapien
tgggaagcactatcatccaagggtc

SEQ ID NO: 302550 - DNA, 25 bp, Homo sapien
gccttatgctggaacgtctctggaa

SEQ ID NO: 302551 - DNA, 25 bp, Homo sapien
ggtacactctctggagcggcgtctg

SEQ ID NO: 302552 - DNA, 25 bp, Homo sapien
tgagcagcgtgttatgtcccgggta

SEQ ID NO: 302553 - DNA, 25 bp, Homo sapien
cagaccatgatcttattattttaca

SEQ ID NO: 302554 - DNA, 25 bp, Homo sapien
gagtaccagaccatgatcttattat

SEQ ID NO: 302555 - DNA, 25 bp, Homo sapien
gccaaagtgagtaccagaccatgat

SEQ ID NO: 302556 - DNA, 25 bp, Homo sapien
aagtgagtaccagaccatgatctta

SEQ ID NO: 302557 - DNA, 25 bp, Homo sapien
catgctggaatgctgcgtcacccag

SEQ ID NO: 302558 - DNA, 25 bp, Homo sapien
ccatgctggaatgctgcgtcaccca

SEQ ID NO: 302559 - DNA, 25 bp, Homo sapien
tcacccatgctggaatgctgcgtca

SEQ ID NO: 302560 - DNA, 25 bp, Homo sapien
acccatgctggaatgctgcgtcacc

SEQ ID NO: 302561 - DNA, 25 bp, Homo sapien
gatgccctcccattatcattagcag

SEQ ID NO: 302562 - DNA, 25 bp, Homo sapien
ggagcacaccctagtgccgcaacat

SEQ ID NO: 302563 - DNA, 25 bp, Homo sapien
cattgggtgaaaagcgggatgccct

SEQ ID NO: 302564 - DNA, 25 bp, Homo sapien
ggacatctgctatgagggagttatt

SEQ ID NO: 302565 - DNA, 25 bp, Homo sapien
ctgacgtgcctgacgtatggtgagc

SEQ ID NO: 302566 - DNA, 25 bp, Homo sapien
cctgaagacgttcctctggttcctg

SEQ ID NO: 302567 - DNA, 25 bp, Homo sapien
gccctggcacagtgagaagctcaag

SEQ ID NO: 302568 - DNA, 25 bp, Homo sapien
aaggctctgacgtgtccaggctggc

SEQ ID NO: 302569 - DNA, 25 bp, Homo sapien
tatgagcacacagcacccattcttc

SEQ ID NO: 302570 - DNA, 25 bp, Homo sapien
ttcttgttgcaaccttgggtggaaa

SEQ ID NO: 302571 - DNA, 25 bp, Homo sapien
gcaaccttgggtggaaatcgaagga

SEQ ID NO: 302572 - DNA, 25 bp, Homo sapien
gggtccttccttgctccatgtgtat

SEQ ID NO: 302573 - DNA, 25 bp, Homo sapien
cagcggagggagctcggtggctggg

SEQ ID NO: 302574 - DNA, 25 bp, Homo sapien
acctcatcatgtcccgaagaagcca

SEQ ID NO: 302575 - DNA, 25 bp, Homo sapien
tggctgggagtcagagcaccctgtt

SEQ ID NO: 302576 - DNA, 25 bp, Homo sapien
ctactcccagggtgacgatgacggc

SEQ ID NO: 302577 - DNA, 25 bp, Homo sapien
tgcctgagtagaaagacccaggccc

SEQ ID NO: 302578 - DNA, 25 bp, Homo sapien
gaggacacacaactagaatcttcaa

SEQ ID NO: 302579 - DNA, 25 bp, Homo sapien
agtgtccaggttcttcccttgtaga

SEQ ID NO: 302580 - DNA, 25 bp, Homo sapien
ggacaagttacccattgcctcagtg

SEQ ID NO: 302581 - DNA, 25 bp, Homo sapien
gagccttgatttctgccccacatgg

SEQ ID NO: 302582 - DNA, 25 bp, Homo sapien
catggtgaccggaactgactgtaat

SEQ ID NO: 302583 - DNA, 25 bp, Homo sapien
cagcagaggcactaacgttgagact

SEQ ID NO: 302584 - DNA, 25 bp, Homo sapien
tgactttgttgtacgggccagcaga

SEQ ID NO: 302585 - DNA, 25 bp, Homo sapien
ccgatgagcgtttcctaactgattg

SEQ ID NO: 302586 - DNA, 25 bp, Homo sapien
tgctttccgatgagcgtttcctaac

SEQ ID NO: 302587 - DNA, 25 bp, Homo sapien
aggatgctttccgatgagcgtttcc

SEQ ID NO: 302588 - DNA, 25 bp, Homo sapien
cctaactgattgttagggaggaggt

SEQ ID NO: 302589 - DNA, 25 bp, Homo sapien
gcgcacacatacagagtcggccaca

SEQ ID NO: 302590 - DNA, 25 bp, Homo sapien
acacatacagagtcggccacacgcg

SEQ ID NO: 302591 - DNA, 25 bp, Homo sapien
gcgttgactgacaggcgcacacata

SEQ ID NO: 302592 - DNA, 25 bp, Homo sapien
gctgcggcctgtcagcgttgactga

SEQ ID NO: 302593 - DNA, 25 bp, Homo sapien
cggcggtgggcggtgacggccggcg

SEQ ID NO: 302594 - DNA, 25 bp, Homo sapien
ggggcgagccggggctttgtgttca

SEQ ID NO: 302595 - DNA, 25 bp, Homo sapien
gcgagccggggctttgtgttcaaac

SEQ ID NO: 302596 - DNA, 25 bp, Homo sapien
ggcgagccggggctttgtgttcaaa

SEQ ID NO: 302597 - DNA, 25 bp, Homo sapien
gggcgagccggggctttgtgttcaa

SEQ ID NO: 302598 - DNA, 25 bp, Homo sapien
agccaggctcggtaccaggctctgg

SEQ ID NO: 302599 - DNA, 25 bp, Homo sapien
cattgctccatccagcagacactca

SEQ ID NO: 302600 - DNA, 25 bp, Homo sapien
tggatgctgcccctacgtctgattt

SEQ ID NO: 302601 - DNA, 25 bp, Homo sapien
gcccctacgtctgatttgaattctc

SEQ ID NO: 302602 - DNA, 25 bp, Homo sapien
aatgagtttaactgcggttgtcacc

SEQ ID NO: 302603 - DNA, 25 bp, Homo sapien
taaggcacagtcacccataagagtc

SEQ ID NO: 302604 - DNA, 25 bp, Homo sapien
tagctgacccactttgtaacctgga

SEQ ID NO: 302605 - DNA, 25 bp, Homo sapien
tgagcatttattaggagccaggtac

SEQ ID NO: 302606 - DNA, 25 bp, Homo sapien
aagctgcagaaaccatccagagtca

SEQ ID NO: 302607 - DNA, 25 bp, Homo sapien
gagtcaagttcagggattgaagctc

SEQ ID NO: 302608 - DNA, 25 bp, Homo sapien
ccagagtcaagttcagggattgaag

SEQ ID NO: 302609 - DNA, 25 bp, Homo sapien
tgcagaaaccatccagagtcaagtt

SEQ ID NO: 302610 - DNA, 25 bp, Homo sapien
ctccaggccatggacttggccgtgg

SEQ ID NO: 302611 - DNA, 25 bp, Homo sapien
ctgcaggcaggtggccgggtccagc

SEQ ID NO: 302612 - DNA, 25 bp, Homo sapien
gccatgcacggatgatcggctgcag

SEQ ID NO: 302613 - DNA, 25 bp, Homo sapien
atgcacggatgatcggctgcaggca

SEQ ID NO: 302614 - DNA, 25 bp, Homo sapien
tccaagagctcccacctgggtgccc

SEQ ID NO: 302615 - DNA, 25 bp, Homo sapien
cacctgggtgcccaaatctcattgc

SEQ ID NO: 302616 - DNA, 25 bp, Homo sapien
ggtggtcccattggcaatcatcacc

SEQ ID NO: 302617 - DNA, 25 bp, Homo sapien
tggtcccattggcaatcatcaccca

SEQ ID NO: 302618 - DNA, 25 bp, Homo sapien
cccatgttgccgctcagtattgccg

SEQ ID NO: 302619 - DNA, 25 bp, Homo sapien
gccgctcagtattgccggtctcaca

SEQ ID NO: 302620 - DNA, 25 bp, Homo sapien
tcaccccatgttgccgctcagtatt

SEQ ID NO: 302621 - DNA, 25 bp, Homo sapien
actccgagctcaccccatgttgccg

SEQ ID NO: 302622 - DNA, 25 bp, Homo sapien
ttattgggcccacagtggggagcca

SEQ ID NO: 302623 - DNA, 25 bp, Homo sapien
tattgggcccacagtggggagccac

SEQ ID NO: 302624 - DNA, 25 bp, Homo sapien
gcccacagtggggagccacgaaggg

SEQ ID NO: 302625 - DNA, 25 bp, Homo sapien
acagtggggagccacgaagggcctc

SEQ ID NO: 302626 - DNA, 25 bp, Homo sapien
gcagtagcacgttggtgatgggctg

SEQ ID NO: 302627 - DNA, 25 bp, Homo sapien
cgtcttcagaggtttgtccagggtg

SEQ ID NO: 302628 - DNA, 25 bp, Homo sapien
catctctgatggggctagctggtcc

SEQ ID NO: 302629 - DNA, 25 bp, Homo sapien
gaagaaggcagtagcacgttggtga

SEQ ID NO: 302630 - DNA, 25 bp, Homo sapien
tcctcgacccgtacagttgagagcc

SEQ ID NO: 302631 - DNA, 25 bp, Homo sapien
cggccgtccttgtcattagtggtca

SEQ ID NO: 302632 - DNA, 25 bp, Homo sapien
tagtggtcatatgaaaatggcccca

SEQ ID NO: 302633 - DNA, 25 bp, Homo sapien
gagatgagatcttccgcacaggaac

SEQ ID NO: 302634 - DNA, 25 bp, Homo sapien
tgcctgtgacattaatacccctgga

SEQ ID NO: 302635 - DNA, 25 bp, Homo sapien
gctctgaaatgaaactgacctgctt

SEQ ID NO: 302636 - DNA, 25 bp, Homo sapien
gccccgatagcccatgacttggtga

SEQ ID NO: 302637 - DNA, 25 bp, Homo sapien
tgcatgcagagctcacatcgtctcc

SEQ ID NO: 302638 - DNA, 25 bp, Homo sapien
ggacctgcgagctctgtcgtgacag

SEQ ID NO: 302639 - DNA, 25 bp, Homo sapien
ccacttcgggacctgcgagctctgt

SEQ ID NO: 302640 - DNA, 25 bp, Homo sapien
tcgggacctgcgagctctgtcgtga

SEQ ID NO: 302641 - DNA, 25 bp, Homo sapien
acttcgggacctgcgagctctgtcg

SEQ ID NO: 302642 - DNA, 25 bp, Homo sapien
tagtgaggagtcgaaattggcatgc

SEQ ID NO: 302643 - DNA, 25 bp, Homo sapien
ataaattagagaggtgcaagactgc

SEQ ID NO: 302644 - DNA, 25 bp, Homo sapien
agggtgccatgaacgtggccagaaa

SEQ ID NO: 302645 - DNA, 25 bp, Homo sapien
gtcccaccaggagattgcactcagg

SEQ ID NO: 302646 - DNA, 25 bp, Homo sapien
ggagcaccgccacctgcggaaccat

SEQ ID NO: 302647 - DNA, 25 bp, Homo sapien
gctgggagcaccgccacctgcggaa

SEQ ID NO: 302648 - DNA, 25 bp, Homo sapien
gccacctgcggaaccatggggccat

SEQ ID NO: 302649 - DNA, 25 bp, Homo sapien
gcaccgccacctgcggaaccatggg

SEQ ID NO: 302650 - DNA, 25 bp, Homo sapien
tgggtaggaggaggcggagccacct

SEQ ID NO: 302651 - DNA, 25 bp, Homo sapien
ctgggtaggaggaggcggagccacc

SEQ ID NO: 302652 - DNA, 25 bp, Homo sapien
ggtaggaggaggcggagccacctgc

SEQ ID NO: 302653 - DNA, 25 bp, Homo sapien
taggaggaggcggagccacctgctg

SEQ ID NO: 302654 - DNA, 25 bp, Homo sapien
tccccaggacagtcttgggcacatc

SEQ ID NO: 302655 - DNA, 25 bp, Homo sapien
ccccaggacagtcttgggcacatca

SEQ ID NO: 302656 - DNA, 25 bp, Homo sapien
ttgggcacatcatccccgtggaact

SEQ ID NO: 302657 - DNA, 25 bp, Homo sapien
tctccccaggacagtcttgggcaca

SEQ ID NO: 302658 - DNA, 25 bp, Homo sapien
tttcggtgggcgtgtagtgcactca

SEQ ID NO: 302659 - DNA, 25 bp, Homo sapien
tgtaaacctcgccaaactcggtatg

SEQ ID NO: 302660 - DNA, 25 bp, Homo sapien
tgtattgctctgatgattcatgacg

SEQ ID NO: 302661 - DNA, 25 bp, Homo sapien
gattcatgacgttgagcaccttttc

SEQ ID NO: 302662 - DNA, 25 bp, Homo sapien
ctcggcccagcgcgcccgggctccg

SEQ ID NO: 302663 - DNA, 25 bp, Homo sapien
agcggccgcggcgacagctccagct

SEQ ID NO: 302664 - DNA, 25 bp, Homo sapien
cggctcccgcgcctgccccgctcgg

SEQ ID NO: 302665 - DNA, 25 bp, Homo sapien
cagcggccgcggcgacagctccagc

SEQ ID NO: 302666 - DNA, 25 bp, Homo sapien
gtggcaccgcttgccaacgaaggca

SEQ ID NO: 302667 - DNA, 25 bp, Homo sapien
cagaagaaagtaaaacgctcctctg

SEQ ID NO: 302668 - DNA, 25 bp, Homo sapien
taagcccccaaggattcagaggaga

SEQ ID NO: 302669 - DNA, 25 bp, Homo sapien
cagaagttaggtcaaaatccgagcc

SEQ ID NO: 302670 - DNA, 25 bp, Homo sapien
tcacattccgaagctgaggcctagc

SEQ ID NO: 302671 - DNA, 25 bp, Homo sapien
tccattctggattcggcggttccgg

SEQ ID NO: 302672 - DNA, 25 bp, Homo sapien
tgtatgcaggtagtcagccaggcaa

SEQ ID NO: 302673 - DNA, 25 bp, Homo sapien
ccaggcaaagagagactaacggtct

SEQ ID NO: 302674 - DNA, 25 bp, Homo sapien
aatggttttggagaagcgcagctgc

SEQ ID NO: 302675 - DNA, 25 bp, Homo sapien
atggttttggagaagcgcagctgct

SEQ ID NO: 302676 - DNA, 25 bp, Homo sapien
ggactggggcccaggatgctttggc

SEQ ID NO: 302677 - DNA, 25 bp, Homo sapien
gaaacttccagttgtgcgtctgccc

SEQ ID NO: 302678 - DNA, 25 bp, Homo sapien
tacatgcattgggtgctaggcccca

SEQ ID NO: 302679 - DNA, 25 bp, Homo sapien
gatttctcggtgctaacctggcagc

SEQ ID NO: 302680 - DNA, 25 bp, Homo sapien
tcaaatggctcggtgttgacccagg

SEQ ID NO: 302681 - DNA, 25 bp, Homo sapien
atgatgacccgctgtgggcccaagg

SEQ ID NO: 302682 - DNA, 25 bp, Homo sapien
tccccagagcaatggcggaagcttc

SEQ ID NO: 302683 - DNA, 25 bp, Homo sapien
aaggcggtttctgccgaatgaccag

SEQ ID NO: 302684 - DNA, 25 bp, Homo sapien
aacacagatatgaccgcgaaggcgg

SEQ ID NO: 302685 - DNA, 25 bp, Homo sapien
tctcctgccagatctgtcgtatctt

SEQ ID NO: 302686 - DNA, 25 bp, Homo sapien
cagatctgtcgtatctttattggct

SEQ ID NO: 302687 - DNA, 25 bp, Homo sapien
tctgtcgtatctttattggctctcc

SEQ ID NO: 302688 - DNA, 25 bp, Homo sapien
agcctcacaccccatcacctgggct

SEQ ID NO: 302689 - DNA, 25 bp, Homo sapien
gaaacacaggtagtatgcaggtcag

SEQ ID NO: 302690 - DNA, 25 bp, Homo sapien
aggacccgtgccagagttgaagccg

SEQ ID NO: 302691 - DNA, 25 bp, Homo sapien
caaacttcgtctaattctggatgag

SEQ ID NO: 302692 - DNA, 25 bp, Homo sapien
tatgagggaaaaatgctgcctggct

SEQ ID NO: 302693 - DNA, 25 bp, Homo sapien
ggtagccccggcattgcaactttgg

SEQ ID NO: 302694 - DNA, 25 bp, Homo sapien
tcagagagcacaaatggtagccccg

SEQ ID NO: 302695 - DNA, 25 bp, Homo sapien
tagtcatagcaggtagccagtagcc

SEQ ID NO: 302696 - DNA, 25 bp, Homo sapien
taaaggttagctgcccaagtttgtc

SEQ ID NO: 302697 - DNA, 25 bp, Homo sapien
ctgtggcacttttcatctgaacctg

SEQ ID NO: 302698 - DNA, 25 bp, Homo sapien
tgtggcacttttcatctgaacctgg

SEQ ID NO: 302699 - DNA, 25 bp, Homo sapien
ctggaccttttcaagagtgacaggg

SEQ ID NO: 302700 - DNA, 25 bp, Homo sapien
ccttttcaagagtgacaggggtgct

SEQ ID NO: 302701 - DNA, 25 bp, Homo sapien
ttccttagagactgaggcccatcct

SEQ ID NO: 302702 - DNA, 25 bp, Homo sapien
cttccttagagactgaggcccatcc

SEQ ID NO: 302703 - DNA, 25 bp, Homo sapien
gagtattaaccataatcatacaatt

SEQ ID NO: 302704 - DNA, 25 bp, Homo sapien
taataaatcgaaagctattcccaga

SEQ ID NO: 302705 - DNA, 25 bp, Homo sapien
tcccagagtattaaccataatcata

SEQ ID NO: 302706 - DNA, 25 bp, Homo sapien
taaatcgaaagctattcccagagta

SEQ ID NO: 302707 - DNA, 25 bp, Homo sapien
agggaagattccatgcctgcctcgt

SEQ ID NO: 302708 - DNA, 25 bp, Homo sapien
tggaaacacccggagcagaaaaggc

SEQ ID NO: 302709 - DNA, 25 bp, Homo sapien
ctgcctcgtggaaacacccggagca

SEQ ID NO: 302710 - DNA, 25 bp, Homo sapien
tctctccacggtatgtcgcttgtcc

SEQ ID NO: 302711 - DNA, 25 bp, Homo sapien
cctgcacggtgagctccgggccagt

SEQ ID NO: 302712 - DNA, 25 bp, Homo sapien
acaccccagtgccatccccggaggg

SEQ ID NO: 302713 - DNA, 25 bp, Homo sapien
gctccttggcctccgacaccccagt

SEQ ID NO: 302714 - DNA, 25 bp, Homo sapien
gccgggggccctgctctcggcacca

SEQ ID NO: 302715 - DNA, 25 bp, Homo sapien
aagaccctgaataacactcagcggt

SEQ ID NO: 302716 - DNA, 25 bp, Homo sapien
gaataacactcagcggtccagagag

SEQ ID NO: 302717 - DNA, 25 bp, Homo sapien
gaccctgaataacactcagcggtcc

SEQ ID NO: 302718 - DNA, 25 bp, Homo sapien
cctgaataacactcagcggtccaga

SEQ ID NO: 302719 - DNA, 25 bp, Homo sapien
aatggggatgtagagctggccacac

SEQ ID NO: 302720 - DNA, 25 bp, Homo sapien
acaatggggatgtagagctggccac

SEQ ID NO: 302721 - DNA, 25 bp, Homo sapien
ggatgtagagctggccacactttgc

SEQ ID NO: 302722 - DNA, 25 bp, Homo sapien
cactgtggagtgacaatggggatgt

SEQ ID NO: 302723 - DNA, 25 bp, Homo sapien
tatcatcagagcaacctggaagctg

SEQ ID NO: 302724 - DNA, 25 bp, Homo sapien
catcagagcaacctggaagctgctg

SEQ ID NO: 302725 - DNA, 25 bp, Homo sapien
ttaatatatcatcagagcaacctgg

SEQ ID NO: 302726 - DNA, 25 bp, Homo sapien
tatatcatcagagcaacctggaagc

SEQ ID NO: 302727 - DNA, 25 bp, Homo sapien
ggtctgtgtcctcccgctcttgcga

SEQ ID NO: 302728 - DNA, 25 bp, Homo sapien
caacattctcttaggattcaggagc

SEQ ID NO: 302729 - DNA, 25 bp, Homo sapien
gtgcttgtcccttctcggttcctgg

SEQ ID NO: 302730 - DNA, 25 bp, Homo sapien
tgctcaaggcgtggtgttaagatct

SEQ ID NO: 302731 - DNA, 25 bp, Homo sapien
tgggcccggatgctgggctggcttc

SEQ ID NO: 302732 - DNA, 25 bp, Homo sapien
ctgggcccggatgctgggctggctt

SEQ ID NO: 302733 - DNA, 25 bp, Homo sapien
ggcccggatgctgggctggcttcca

SEQ ID NO: 302734 - DNA, 25 bp, Homo sapien
gcccggatgctgggctggcttccat

SEQ ID NO: 302735 - DNA, 25 bp, Homo sapien
gaaggagacctggaattggtaccat

SEQ ID NO: 302736 - DNA, 25 bp, Homo sapien
gagagaccagcgctgggaccaaaac

SEQ ID NO: 302737 - DNA, 25 bp, Homo sapien
ctggaattggtaccatcggaggaga

SEQ ID NO: 302738 - DNA, 25 bp, Homo sapien
cagcgctgggaccaaaactgggaac

SEQ ID NO: 302739 - DNA, 25 bp, Homo sapien
tcgagtagacctgggcatgaatctg

SEQ ID NO: 302740 - DNA, 25 bp, Homo sapien
tcatagccaagcagtcctacaagca

SEQ ID NO: 302741 - DNA, 25 bp, Homo sapien
ggcttaggccaagtccagatacatg

SEQ ID NO: 302742 - DNA, 25 bp, Homo sapien
tattagggagaacgagatgacactg

SEQ ID NO: 302743 - DNA, 25 bp, Homo sapien
tgccattgttaaagttggaagtgaa

SEQ ID NO: 302744 - DNA, 25 bp, Homo sapien
tgaatatgtgtggatccatcaagtg

SEQ ID NO: 302745 - DNA, 25 bp, Homo sapien
taaagttggaagtgaatatgtgtgg

SEQ ID NO: 302746 - DNA, 25 bp, Homo sapien
ccaatgccattgttaaagttggaag

SEQ ID NO: 302747 - DNA, 25 bp, Homo sapien
aaagcccctgtgctggtccatcttg

SEQ ID NO: 302748 - DNA, 25 bp, Homo sapien
ctggttgtgtagaaagcccctgtgc

SEQ ID NO: 302749 - DNA, 25 bp, Homo sapien
catcttgaccgaggtgccattgtcc

SEQ ID NO: 302750 - DNA, 25 bp, Homo sapien
cgctccacttcgtagcacaggtagg

SEQ ID NO: 302751 - DNA, 25 bp, Homo sapien
ggattcggatggctgggtcggtcac

SEQ ID NO: 302752 - DNA, 25 bp, Homo sapien
ccctggattggaagggccctgcccg

SEQ ID NO: 302753 - DNA, 25 bp, Homo sapien
attggaagggccctgcccggattcg

SEQ ID NO: 302754 - DNA, 25 bp, Homo sapien
ctatgaatgtccctggattggaagg

SEQ ID NO: 302755 - DNA, 25 bp, Homo sapien
ctggtctctccagacagaggctgtg

SEQ ID NO: 302756 - DNA, 25 bp, Homo sapien
gaaggaaccaggtccaagaagcgca

SEQ ID NO: 302757 - DNA, 25 bp, Homo sapien
aagaagcgcagctccgcatggcggc

SEQ ID NO: 302758 - DNA, 25 bp, Homo sapien
ggccgggtccaactgcaaagaagga

SEQ ID NO: 302759 - DNA, 25 bp, Homo sapien
tgaaccaagtgaccctgtagatctg

SEQ ID NO: 302760 - DNA, 25 bp, Homo sapien
tagatgcgggcagcgaagatacgca

SEQ ID NO: 302761 - DNA, 25 bp, Homo sapien
atgcgggcagcgaagatacgcagtc

SEQ ID NO: 302762 - DNA, 25 bp, Homo sapien
catagatgcgggcagcgaagatacg

SEQ ID NO: 302763 - DNA, 25 bp, Homo sapien
gcatcccgcagcatttgcagtgcct

SEQ ID NO: 302764 - DNA, 25 bp, Homo sapien
aaggtgtcccagcagtgcttaaatt

SEQ ID NO: 302765 - DNA, 25 bp, Homo sapien
taaaaatctacttgatcgggagcat

SEQ ID NO: 302766 - DNA, 25 bp, Homo sapien
cgggagcatactgctttgctggcgt

SEQ ID NO: 302767 - DNA, 25 bp, Homo sapien
cttgatcgggagcatactgctttgc

SEQ ID NO: 302768 - DNA, 25 bp, Homo sapien
aatctacttgatcgggagcatactg

SEQ ID NO: 302769 - DNA, 25 bp, Homo sapien
agatggagtctggtactgtcgccca

SEQ ID NO: 302770 - DNA, 25 bp, Homo sapien
gccttggcctccaaagtgctgggat

SEQ ID NO: 302771 - DNA, 25 bp, Homo sapien
gagatggagtctggtactgtcgccc

SEQ ID NO: 302772 - DNA, 25 bp, Homo sapien
cgccttggcctccaaagtgctggga

SEQ ID NO: 302773 - DNA, 25 bp, Homo sapien
gaatattgagcataatcttactatt

SEQ ID NO: 302774 - DNA, 25 bp, Homo sapien
tgtgttagtctagatatgaagccaa

SEQ ID NO: 302775 - DNA, 25 bp, Homo sapien
gaaactcttgcaattcatgacacag

SEQ ID NO: 302776 - DNA, 25 bp, Homo sapien
tactattgtgtacttggaacataag

SEQ ID NO: 302777 - DNA, 25 bp, Homo sapien
ggacaggagcctgggcccttggaag

SEQ ID NO: 302778 - DNA, 25 bp, Homo sapien
tgtgagttgaggcccgggggacagg

SEQ ID NO: 302779 - DNA, 25 bp, Homo sapien
ccagggctcccaggtcatgggcaaa

SEQ ID NO: 302780 - DNA, 25 bp, Homo sapien
ggcaaagctgtgagttgaggcccgg

SEQ ID NO: 302781 - DNA, 25 bp, Homo sapien
tgtagaatccccttttatggttaca

SEQ ID NO: 302782 - DNA, 25 bp, Homo sapien
agtccttgtagaatccccttttatg

SEQ ID NO: 302783 - DNA, 25 bp, Homo sapien
tgaggggagtccttgtagaatcccc

SEQ ID NO: 302784 - DNA, 25 bp, Homo sapien
gacctgggggatatccaaggacaag

SEQ ID NO: 302785 - DNA, 25 bp, Homo sapien
tgggtcgccagtggccacgacagcc

SEQ ID NO: 302786 - DNA, 25 bp, Homo sapien
ctgggtcgccagtggccacgacagc

SEQ ID NO: 302787 - DNA, 25 bp, Homo sapien
agtggccacgacagccctcactgag

SEQ ID NO: 302788 - DNA, 25 bp, Homo sapien
tgcctgggtcgccagtggccacgac

SEQ ID NO: 302789 - DNA, 25 bp, Homo sapien
gagcttgcaccggaactccttgcct

SEQ ID NO: 302790 - DNA, 25 bp, Homo sapien
gactgtcaaggcaaagcagcctggg

SEQ ID NO: 302791 - DNA, 25 bp, Homo sapien
tactgagggtcctagcgagcttgca

SEQ ID NO: 302792 - DNA, 25 bp, Homo sapien
gctttggtaaaaaggttctctctgc

SEQ ID NO: 302793 - DNA, 25 bp, Homo sapien
gggtcctgcaacctgactttcacgg

SEQ ID NO: 302794 - DNA, 25 bp, Homo sapien
cctgcaacctgactttcacgggacc

SEQ ID NO: 302795 - DNA, 25 bp, Homo sapien
ctctgcaaggcacggactcctgggt

SEQ ID NO: 302796 - DNA, 25 bp, Homo sapien
gtgacaaagtggagcttcagggtct

SEQ ID NO: 302797 - DNA, 25 bp, Homo sapien
ggacagccctccttaaagtgacctc

SEQ ID NO: 302798 - DNA, 25 bp, Homo sapien
tccttgcagttggacagccctcctt

SEQ ID NO: 302799 - DNA, 25 bp, Homo sapien
agttggacagccctccttaaagtga

SEQ ID NO: 302800 - DNA, 25 bp, Homo sapien
tgcagttggacagccctccttaaag

SEQ ID NO: 302801 - DNA, 25 bp, Homo sapien
ttcagcctcttagatacgcttgtcc

SEQ ID NO: 302802 - DNA, 25 bp, Homo sapien
tcagcctcttagatacgcttgtccc

SEQ ID NO: 302803 - DNA, 25 bp, Homo sapien
gttcagcctcttagatacgcttgtc

SEQ ID NO: 302804 - DNA, 25 bp, Homo sapien
tcaaagttgtcgtagaatgtgtctc

SEQ ID NO: 302805 - DNA, 25 bp, Homo sapien
agacccctgtgtcccaaaggagatt

SEQ ID NO: 302806 - DNA, 25 bp, Homo sapien
cacagccaagtgtagctccgaccat

SEQ ID NO: 302807 - DNA, 25 bp, Homo sapien
catagaggatgggttcgttttcaaa

SEQ ID NO: 302808 - DNA, 25 bp, Homo sapien
gaggaagcacatttctgcgtggtac

SEQ ID NO: 302809 - DNA, 25 bp, Homo sapien
aattcggccagcttcgccacacagt

SEQ ID NO: 302810 - DNA, 25 bp, Homo sapien
tctggaaacacttgtaagcaggcag

SEQ ID NO: 302811 - DNA, 25 bp, Homo sapien
tgcagagcgcccttcggtaatctct

SEQ ID NO: 302812 - DNA, 25 bp, Homo sapien
caaaccaggtgatctggaaacactt

SEQ ID NO: 302813 - DNA, 25 bp, Homo sapien
cgaatttgtaccaaggcatgaattg

SEQ ID NO: 302814 - DNA, 25 bp, Homo sapien
gaatttgtaccaaggcatgaattgc

SEQ ID NO: 302815 - DNA, 25 bp, Homo sapien
tcgaatttgtaccaaggcatgaatt

SEQ ID NO: 302816 - DNA, 25 bp, Homo sapien
tcatagcacaagtaggtctggcgcc

SEQ ID NO: 302817 - DNA, 25 bp, Homo sapien
cgtcgaaggaccaaagggtcattat

SEQ ID NO: 302818 - DNA, 25 bp, Homo sapien
ggcgctccacctcatagcacaagta

SEQ ID NO: 302819 - DNA, 25 bp, Homo sapien
attaaagttgaaagtgaatgtgtct

SEQ ID NO: 302820 - DNA, 25 bp, Homo sapien
gaaggaaccaggtccaagaagcgca

SEQ ID NO: 302821 - DNA, 25 bp, Homo sapien
aagaagcgcagctccgcatggcggc

SEQ ID NO: 302822 - DNA, 25 bp, Homo sapien
ggccgggtccaactgcaaagaagga

SEQ ID NO: 302823 - DNA, 25 bp, Homo sapien
tgaaccaagtgaccctgtagatctg

SEQ ID NO: 302824 - DNA, 25 bp, Homo sapien
ggcacagccccaggagaagcagggg

SEQ ID NO: 302825 - DNA, 25 bp, Homo sapien
ccccggcacagccccaggagaagca

SEQ ID NO: 302826 - DNA, 25 bp, Homo sapien
ccggcacagccccaggagaagcagg

SEQ ID NO: 302827 - DNA, 25 bp, Homo sapien
ttccccggcacagccccaggagaag

SEQ ID NO: 302828 - DNA, 25 bp, Homo sapien
tatagggggtcgtaatcatagatgc

SEQ ID NO: 302829 - DNA, 25 bp, Homo sapien
tcgtaggtcatgatggagacttggg

SEQ ID NO: 302830 - DNA, 25 bp, Homo sapien
ggtcgtaatcatagatgcgggcagc

SEQ ID NO: 302831 - DNA, 25 bp, Homo sapien
gtaatcatagatgcgggcagcgaag

SEQ ID NO: 302832 - DNA, 25 bp, Homo sapien
tccctggcggtacacaaaggtgtcc

SEQ ID NO: 302833 - DNA, 25 bp, Homo sapien
gaagggacatccctggcggtacaca

SEQ ID NO: 302834 - DNA, 25 bp, Homo sapien
aaggtgtcccagcagtactcaaact

SEQ ID NO: 302835 - DNA, 25 bp, Homo sapien
ttggctgtgctcctctagtccatcc

SEQ ID NO: 302836 - DNA, 25 bp, Homo sapien
ggaggtgagagagtggaaagagggc

SEQ ID NO: 302837 - DNA, 25 bp, Homo sapien
gaaggcaaggcacaggggagcgggg

SEQ ID NO: 302838 - DNA, 25 bp, Homo sapien
gagggatgcgggaggtgggaaagag

SEQ ID NO: 302839 - DNA, 25 bp, Homo sapien
agggacggagctgggcgccctgtgg

SEQ ID NO: 302840 - DNA, 25 bp, Homo sapien
gaatattgagcataatcttactctt

SEQ ID NO: 302841 - DNA, 25 bp, Homo sapien
aatcttactcttgtacacttggaac

SEQ ID NO: 302842 - DNA, 25 bp, Homo sapien
tctacttgatcaggagcacattgct

SEQ ID NO: 302843 - DNA, 25 bp, Homo sapien
aaatatggagccaattaatcacttc

SEQ ID NO: 302844 - DNA, 25 bp, Homo sapien
cttcccccgactgggtctgtcctgg

SEQ ID NO: 302845 - DNA, 25 bp, Homo sapien
tgtagatcaggggctttccaggcat

SEQ ID NO: 302846 - DNA, 25 bp, Homo sapien
acacttcctctttcaggagggagca

SEQ ID NO: 302847 - DNA, 25 bp, Homo sapien
gtctgactgggtaactccggcgagc

SEQ ID NO: 302848 - DNA, 25 bp, Homo sapien
tgttcttccccaactagtgccacag

SEQ ID NO: 302849 - DNA, 25 bp, Homo sapien
tgttgtagggtaacactgaaggagt

SEQ ID NO: 302850 - DNA, 25 bp, Homo sapien
gttgtgcaatgtgtttggtctgagc

SEQ ID NO: 302851 - DNA, 25 bp, Homo sapien
ctgcgttgtgcaatgtgtttggtct

SEQ ID NO: 302852 - DNA, 25 bp, Homo sapien
gcgttgtgcaatgtgtttggtctga

SEQ ID NO: 302853 - DNA, 25 bp, Homo sapien
cgttgtgcaatgtgtttggtctgag

SEQ ID NO: 302854 - DNA, 25 bp, Homo sapien
ttccatctttgtggcttccatgcaa

SEQ ID NO: 302855 - DNA, 25 bp, Homo sapien
tgggtttccatctttgtggcttcca

SEQ ID NO: 302856 - DNA, 25 bp, Homo sapien
ggctatgatcgtgtgtaggtccctc

SEQ ID NO: 302857 - DNA, 25 bp, Homo sapien
tgttgggcacacgaggcattgtcgg

SEQ ID NO: 302858 - DNA, 25 bp, Homo sapien
agctgtgtggaggtctgttaccctg

SEQ ID NO: 302859 - DNA, 25 bp, Homo sapien
tcgttgacgttgacatgctcagcca

SEQ ID NO: 302860 - DNA, 25 bp, Homo sapien
cttctcgttgacgttgacatgctca

SEQ ID NO: 302861 - DNA, 25 bp, Homo sapien
tcaagccttctcgttgacgttgaca

SEQ ID NO: 302862 - DNA, 25 bp, Homo sapien
gttgacgttgacatgctcagccagg

SEQ ID NO: 302863 - DNA, 25 bp, Homo sapien
gcccctcctactggcagaggaacct

SEQ ID NO: 302864 - DNA, 25 bp, Homo sapien
tcctactggcagaggaacctccgat

SEQ ID NO: 302865 - DNA, 25 bp, Homo sapien
actggcagaggaacctccgataaag

SEQ ID NO: 302866 - DNA, 25 bp, Homo sapien
ttctccgggcccctcctactggcag

SEQ ID NO: 302867 - DNA, 25 bp, Homo sapien
agtgacctcccagggccttgtgaat

SEQ ID NO: 302868 - DNA, 25 bp, Homo sapien
taaagtgacctcccagggccttgtg

SEQ ID NO: 302869 - DNA, 25 bp, Homo sapien
gacctcccagggccttgtgaatcat

SEQ ID NO: 302870 - DNA, 25 bp, Homo sapien
aaagtgacctcccagggccttgtga

SEQ ID NO: 302871 - DNA, 25 bp, Homo sapien
agcgtccttgcagttgagcagccct

SEQ ID NO: 302872 - DNA, 25 bp, Homo sapien
cgtccttgcagttgagcagccctct

SEQ ID NO: 302873 - DNA, 25 bp, Homo sapien
gcgtccttgcagttgagcagccctc

SEQ ID NO: 302874 - DNA, 25 bp, Homo sapien
gttcagcctcttagatatgcttgtc

SEQ ID NO: 302875 - DNA, 25 bp, Homo sapien
actcttttctgaagcgctgtggctt

SEQ ID NO: 302876 - DNA, 25 bp, Homo sapien
tttctgaagcgctgtggcttctctt

SEQ ID NO: 302877 - DNA, 25 bp, Homo sapien
gtcccactcttttctgaagcgctgt

SEQ ID NO: 302878 - DNA, 25 bp, Homo sapien
cgatcgttggcttcccataggtttt

SEQ ID NO: 302879 - DNA, 25 bp, Homo sapien
aagcacagccaagtttcgttccgat

SEQ ID NO: 302880 - DNA, 25 bp, Homo sapien
gcctggatacattgccttcatcggg

SEQ ID NO: 302881 - DNA, 25 bp, Homo sapien
tgtgcctggatacattgccttcatc

SEQ ID NO: 302882 - DNA, 25 bp, Homo sapien
aggagacaactgagcggcgctttat

SEQ ID NO: 302883 - DNA, 25 bp, Homo sapien
ggagacaactgagcggcgctttata

SEQ ID NO: 302884 - DNA, 25 bp, Homo sapien
gagacaactgagcggcgctttatac

SEQ ID NO: 302885 - DNA, 25 bp, Homo sapien
tgtgttaggagacagtatgtcgtcg

SEQ ID NO: 302886 - DNA, 25 bp, Homo sapien
atgatctccacagcgaccccttcct

SEQ ID NO: 302887 - DNA, 25 bp, Homo sapien
gtgttaggagacagtatgtcgtcgc

SEQ ID NO: 302888 - DNA, 25 bp, Homo sapien
tcccttccaaggcttgaatggctca

SEQ ID NO: 302889 - DNA, 25 bp, Homo sapien
tcttgccctatgtaaagcccatggg

SEQ ID NO: 302890 - DNA, 25 bp, Homo sapien
tgatgcatgccttttactcgggagg

SEQ ID NO: 302891 - DNA, 25 bp, Homo sapien
cctgggacatcttctatggaggcca

SEQ ID NO: 302892 - DNA, 25 bp, Homo sapien
tttgagacatacacggagtccggat

SEQ ID NO: 302893 - DNA, 25 bp, Homo sapien
cccagctggagccgccactccacca

SEQ ID NO: 302894 - DNA, 25 bp, Homo sapien
tcccctggtggtcccgcccagctgg

SEQ ID NO: 302895 - DNA, 25 bp, Homo sapien
ccagctggagccgccactccaccat

SEQ ID NO: 302896 - DNA, 25 bp, Homo sapien
cagcagagcacaagcccctcccctg

SEQ ID NO: 302897 - DNA, 25 bp, Homo sapien
cctgcttgcggctccttgcagttgg

SEQ ID NO: 302898 - DNA, 25 bp, Homo sapien
tcacttcctgcttgcggctccttgc

SEQ ID NO: 302899 - DNA, 25 bp, Homo sapien
acttcctgcttgcggctccttgcag

SEQ ID NO: 302900 - DNA, 25 bp, Homo sapien
tgcttgcggctccttgcagttggac

SEQ ID NO: 302901 - DNA, 25 bp, Homo sapien
gccctgagaatttctgctgccttcc

SEQ ID NO: 302902 - DNA, 25 bp, Homo sapien
ccctccacagccctgagaatttctg

SEQ ID NO: 302903 - DNA, 25 bp, Homo sapien
acagccctgagaatttctgctgcct

SEQ ID NO: 302904 - DNA, 25 bp, Homo sapien
ctccacagccctgagaatttctgct

SEQ ID NO: 302905 - DNA, 25 bp, Homo sapien
tgtgattcgactgacgtttgggtag

SEQ ID NO: 302906 - DNA, 25 bp, Homo sapien
gcctgtgattcgactgacgtttggg

SEQ ID NO: 302907 - DNA, 25 bp, Homo sapien
gattcgactgacgtttgggtagtac

SEQ ID NO: 302908 - DNA, 25 bp, Homo sapien
tcctgcctgtgattcgactgacgtt

SEQ ID NO: 302909 - DNA, 25 bp, Homo sapien
tcttgtcgcctttttagcgtgtggg

SEQ ID NO: 302910 - DNA, 25 bp, Homo sapien
cgttgaagtaatatgttagctacac

SEQ ID NO: 302911 - DNA, 25 bp, Homo sapien
tcctgggtgtttccgtggccagcac

SEQ ID NO: 302912 - DNA, 25 bp, Homo sapien
tcagcgttgaagtaatatgttagct

SEQ ID NO: 302913 - DNA, 25 bp, Homo sapien
gcacatttctgcgtggttctcaaac

SEQ ID NO: 302914 - DNA, 25 bp, Homo sapien
gttagcaggcagtcggttgccacag

SEQ ID NO: 302915 - DNA, 25 bp, Homo sapien
gcgtggttctcaaaccggaaataca

SEQ ID NO: 302916 - DNA, 25 bp, Homo sapien
ctggaagcgcctgttagcaggcagt

SEQ ID NO: 302917 - DNA, 25 bp, Homo sapien
caggcaggggttccatgatacaaac

SEQ ID NO: 302918 - DNA, 25 bp, Homo sapien
gcaggcaggggttccatgatacaaa

SEQ ID NO: 302919 - DNA, 25 bp, Homo sapien
aggcaggggttccatgatacaaacc

SEQ ID NO: 302920 - DNA, 25 bp, Homo sapien
agtccatgatcttcacacgggcccc

SEQ ID NO: 302921 - DNA, 25 bp, Homo sapien
cccctgccttatgcagcctgaggag

SEQ ID NO: 302922 - DNA, 25 bp, Homo sapien
gccaatctctatcccggtagtagta

SEQ ID NO: 302923 - DNA, 25 bp, Homo sapien
ttatgcagcctgaggagcacccacc

SEQ ID NO: 302924 - DNA, 25 bp, Homo sapien
aagaggtgggaagcactcaggctct

SEQ ID NO: 302925 - DNA, 25 bp, Homo sapien
agaggtgggaagcactcaggctctc

SEQ ID NO: 302926 - DNA, 25 bp, Homo sapien
gaagaggtgggaagcactcaggctc

SEQ ID NO: 302927 - DNA, 25 bp, Homo sapien
cagttgcaatcagtgccagccccac

SEQ ID NO: 302928 - DNA, 25 bp, Homo sapien
acaaagttttcccagcagtatgcaa

SEQ ID NO: 302929 - DNA, 25 bp, Homo sapien
atctcctttagcgtgcggtgcaggg

SEQ ID NO: 302930 - DNA, 25 bp, Homo sapien
actcaaatgggaccttgatcactga

SEQ ID NO: 302931 - DNA, 25 bp, Homo sapien
tcaaatgggaccttgatcactgagt

SEQ ID NO: 302932 - DNA, 25 bp, Homo sapien
caaatgggaccttgatcactgagtg

SEQ ID NO: 302933 - DNA, 25 bp, Homo sapien
ttactcaaatgggaccttgatcact

SEQ ID NO: 302934 - DNA, 25 bp, Homo sapien
cgaccacaggctttcagtaggtttt

SEQ ID NO: 302935 - DNA, 25 bp, Homo sapien
cagctgagtggtgctttgtaacttc

SEQ ID NO: 302936 - DNA, 25 bp, Homo sapien
gacgcccctcttccggaagacagct

SEQ ID NO: 302937 - DNA, 25 bp, Homo sapien
agccagctttcgttccgaccacagg

SEQ ID NO: 302938 - DNA, 25 bp, Homo sapien
tttgtagcccatgatcttcacggag

SEQ ID NO: 302939 - DNA, 25 bp, Homo sapien
atctgtatcccagaagtagcagagg

SEQ ID NO: 302940 - DNA, 25 bp, Homo sapien
ctttgtagcccatgatcttcacgga

SEQ ID NO: 302941 - DNA, 25 bp, Homo sapien
ctgtatcccagaagtagcagaggcg

SEQ ID NO: 302942 - DNA, 25 bp, Homo sapien
ccctcccgcacccactctcctcagc

SEQ ID NO: 302943 - DNA, 25 bp, Homo sapien
tgtccctcccgcacccactctcctc

SEQ ID NO: 302944 - DNA, 25 bp, Homo sapien
gtccctcccgcacccactctcctca

SEQ ID NO: 302945 - DNA, 25 bp, Homo sapien
cctcccgcacccactctcctcagcc

SEQ ID NO: 302946 - DNA, 25 bp, Homo sapien
ttcagaagtcgaaagttggtttgta

SEQ ID NO: 302947 - DNA, 25 bp, Homo sapien
gcactatggaatggccctgaggcca

SEQ ID NO: 302948 - DNA, 25 bp, Homo sapien
ccagactagattgagtttaataaga

SEQ ID NO: 302949 - DNA, 25 bp, Homo sapien
aagagtcaagttaggggcacccagg

SEQ ID NO: 302950 - DNA, 25 bp, Homo sapien
ctctgcctccgaaaggcgtgagtca

SEQ ID NO: 302951 - DNA, 25 bp, Homo sapien
cagggccagactagattgagtttaa

SEQ ID NO: 302952 - DNA, 25 bp, Homo sapien
agacttacagccatttatggcagaa

SEQ ID NO: 302953 - DNA, 25 bp, Homo sapien
agtccaagacttacagccatttatg

SEQ ID NO: 302954 - DNA, 25 bp, Homo sapien
ccaagacttacagccatttatggca

SEQ ID NO: 302955 - DNA, 25 bp, Homo sapien
aataagcctggcatgggcaacatga

SEQ ID NO: 302956 - DNA, 25 bp, Homo sapien
taggctgtgtcctagcccagagctg

SEQ ID NO: 302957 - DNA, 25 bp, Homo sapien
tgcactgctgggagggatttgagaa

SEQ ID NO: 302958 - DNA, 25 bp, Homo sapien
aatcttacttaaacaccaacttgat

SEQ ID NO: 302959 - DNA, 25 bp, Homo sapien
tctttctcagtcacgttccctaggc

SEQ ID NO: 302960 - DNA, 25 bp, Homo sapien
tgacaggcagcaaggtagccatccc

SEQ ID NO: 302961 - DNA, 25 bp, Homo sapien
tgtaacatatgatcccaggcaggca

SEQ ID NO: 302962 - DNA, 25 bp, Homo sapien
tggacaatgggtctcatggtctccc

SEQ ID NO: 302963 - DNA, 25 bp, Homo sapien
cattaggacttgttcctgccctacc

SEQ ID NO: 302964 - DNA, 25 bp, Homo sapien
tgataaagacaggccgctctgtgcg

SEQ ID NO: 302965 - DNA, 25 bp, Homo sapien
ctctgtgcggcaggacccaaggcaa

SEQ ID NO: 302966 - DNA, 25 bp, Homo sapien
cttcctgctcaggcgctggtgtagg

SEQ ID NO: 302967 - DNA, 25 bp, Homo sapien
gaggccctgggacgctttatcttcc

SEQ ID NO: 302968 - DNA, 25 bp, Homo sapien
tagtcccgactaagatctttgtctg

SEQ ID NO: 302969 - DNA, 25 bp, Homo sapien
ctaagatctttgtctggagcaccag

SEQ ID NO: 302970 - DNA, 25 bp, Homo sapien
ccttggccggctagtcccgactaag

SEQ ID NO: 302971 - DNA, 25 bp, Homo sapien
tggccggctagtcccgactaagatc

SEQ ID NO: 302972 - DNA, 25 bp, Homo sapien
ccagggccgggagcaccagccctgc

SEQ ID NO: 302973 - DNA, 25 bp, Homo sapien
gggccgggagcaccagccctgccat

SEQ ID NO: 302974 - DNA, 25 bp, Homo sapien
cctcccagggccgggagcaccagcc

SEQ ID NO: 302975 - DNA, 25 bp, Homo sapien
tcccagggccgggagcaccagccct

SEQ ID NO: 302976 - DNA, 25 bp, Homo sapien
tcgaaagatctttgcgtccaaacgg

SEQ ID NO: 302977 - DNA, 25 bp, Homo sapien
agatctttgcgtccaaacggggcct

SEQ ID NO: 302978 - DNA, 25 bp, Homo sapien
cgaaagatctttgcgtccaaacggg

SEQ ID NO: 302979 - DNA, 25 bp, Homo sapien
cctcgaaagatctttgcgtccaaac

SEQ ID NO: 302980 - DNA, 25 bp, Homo sapien
aaccccctccacgatccgatcccag

SEQ ID NO: 302981 - DNA, 25 bp, Homo sapien
accccctccacgatccgatcccagg

SEQ ID NO: 302982 - DNA, 25 bp, Homo sapien
cccctccacgatccgatcccaggac

SEQ ID NO: 302983 - DNA, 25 bp, Homo sapien
ccccctccacgatccgatcccagga

SEQ ID NO: 302984 - DNA, 25 bp, Homo sapien
aaatacaccatacaccgctcattta

SEQ ID NO: 302985 - DNA, 25 bp, Homo sapien
aaaatacaccatacaccgctcattt

SEQ ID NO: 302986 - DNA, 25 bp, Homo sapien
tacaccatacaccgctcatttatct

SEQ ID NO: 302987 - DNA, 25 bp, Homo sapien
aatacaccatacaccgctcatttat

SEQ ID NO: 302988 - DNA, 25 bp, Homo sapien
ttgttccctgcctgcggtcagctgg

SEQ ID NO: 302989 - DNA, 25 bp, Homo sapien
tgtggtggggcgcactggccaaagg

SEQ ID NO: 302990 - DNA, 25 bp, Homo sapien
tggacctgcgctgtcccatgtggtg

SEQ ID NO: 302991 - DNA, 25 bp, Homo sapien
gggctctgatgaaagacctgggcac

SEQ ID NO: 302992 - DNA, 25 bp, Homo sapien
tgctgttgaagcatcatcacaaagt

SEQ ID NO: 302993 - DNA, 25 bp, Homo sapien
agacatgagcttcccttcgtttgga

SEQ ID NO: 302994 - DNA, 25 bp, Homo sapien
agagcctcatgcgtgaattctggca

SEQ ID NO: 302995 - DNA, 25 bp, Homo sapien
cacaaagtgcaccaagacatgagct

SEQ ID NO: 302996 - DNA, 25 bp, Homo sapien
gaggaagcacatttctgcgtggtgc

SEQ ID NO: 302997 - DNA, 25 bp, Homo sapien
tcgtccataatcttcacgcgggccc

SEQ ID NO: 302998 - DNA, 25 bp, Homo sapien
catcgtccataatcttcacgcgggc

SEQ ID NO: 302999 - DNA, 25 bp, Homo sapien
tcatcgtccataatcttcacgcggg

SEQ ID NO: 303000 - DNA, 25 bp, Homo sapien
cttcatcgtccataatcttcacgcg

SEQ ID NO: 303001 - DNA, 25 bp, Homo sapien
acaaagttttcccagcagtatgcaa

SEQ ID NO: 303002 - DNA, 25 bp, Homo sapien
gaatttgtaccaaggcatgaatggc

SEQ ID NO: 303003 - DNA, 25 bp, Homo sapien
gcataattgtcatcgaatttgtacc

SEQ ID NO: 303004 - DNA, 25 bp, Homo sapien
agaatctcctttagcgtgcggtgca

SEQ ID NO: 303005 - DNA, 25 bp, Homo sapien
gcgtgcggtgcaggaatgcataatt

SEQ ID NO: 303006 - DNA, 25 bp, Homo sapien
taactcatggcccttagggtgggcc

SEQ ID NO: 303007 - DNA, 25 bp, Homo sapien
taatcctgtctgactggggtccata

SEQ ID NO: 303008 - DNA, 25 bp, Homo sapien
ggtccataaacgaggaggacattta

SEQ ID NO: 303009 - DNA, 25 bp, Homo sapien
ccggcccgggggcatcttctatggc

SEQ ID NO: 303010 - DNA, 25 bp, Homo sapien
acagctctgggcctaccaatgggac

SEQ ID NO: 303011 - DNA, 25 bp, Homo sapien
tctgggcctaccaatgggacaccct

SEQ ID NO: 303012 - DNA, 25 bp, Homo sapien
tgggcctaccaatgggacaccctca

SEQ ID NO: 303013 - DNA, 25 bp, Homo sapien
gctctgggcctaccaatgggacacc

SEQ ID NO: 303014 - DNA, 25 bp, Homo sapien
tgtctgctgctttcccaggcagaaa

SEQ ID NO: 303015 - DNA, 25 bp, Homo sapien
gtctgctgctttcccaggcagaaag

SEQ ID NO: 303016 - DNA, 25 bp, Homo sapien
cagccctgggaatgtctgctgcttt

SEQ ID NO: 303017 - DNA, 25 bp, Homo sapien
tggacagccctgggaatgtctgctg

SEQ ID NO: 303018 - DNA, 25 bp, Homo sapien
acaatagagaaaccccaatgcagag

SEQ ID NO: 303019 - DNA, 25 bp, Homo sapien
ggcacaatagagaaaccccaatgca

SEQ ID NO: 303020 - DNA, 25 bp, Homo sapien
ctgatgcccactgaacaccactcac

SEQ ID NO: 303021 - DNA, 25 bp, Homo sapien
agagacccccctggattcctcggag

SEQ ID NO: 303022 - DNA, 25 bp, Homo sapien
cgaccataggctttgcgtaggtttt

SEQ ID NO: 303023 - DNA, 25 bp, Homo sapien
caggtgagtggtgctttacaacttc

SEQ ID NO: 303024 - DNA, 25 bp, Homo sapien
acagccagctttcgttccgaccata

SEQ ID NO: 303025 - DNA, 25 bp, Homo sapien
ggaagtagaatatgtgtggatacat

SEQ ID NO: 303026 - DNA, 25 bp, Homo sapien
ctttgtagcccatgatctccacgga

SEQ ID NO: 303027 - DNA, 25 bp, Homo sapien
tttgtagcccatgatctccacggag

SEQ ID NO: 303028 - DNA, 25 bp, Homo sapien
ctgtccaggaatagaaagttgtatt

SEQ ID NO: 303029 - DNA, 25 bp, Homo sapien
tattttagtcctttccaaggcttga

SEQ ID NO: 303030 - DNA, 25 bp, Homo sapien
gaatctcctgcagcttgctgtccag

SEQ ID NO: 303031 - DNA, 25 bp, Homo sapien
caaggcttgaatggctcatcatcat

SEQ ID NO: 303032 - DNA, 25 bp, Homo sapien
aggggaggcctgcacaacatgagca

SEQ ID NO: 303033 - DNA, 25 bp, Homo sapien
tggaggggaggcctgcacaacatga

SEQ ID NO: 303034 - DNA, 25 bp, Homo sapien
aggcctgcacaacatgagcaggagg

SEQ ID NO: 303035 - DNA, 25 bp, Homo sapien
ggaggcctgcacaacatgagcagga

SEQ ID NO: 303036 - DNA, 25 bp, Homo sapien
ttaggggcatgcaggctcagggaac

SEQ ID NO: 303037 - DNA, 25 bp, Homo sapien
tgggtggatggatagccatggaggc

SEQ ID NO: 303038 - DNA, 25 bp, Homo sapien
ctcagggaacagggtcttggtgggt

SEQ ID NO: 303039 - DNA, 25 bp, Homo sapien
ggaggcagaaagaggcctctgcagg

SEQ ID NO: 303040 - DNA, 25 bp, Homo sapien
cgcggccagcctagggtgagtttaa

SEQ ID NO: 303041 - DNA, 25 bp, Homo sapien
aagatttggttgtgccgccgggcca

SEQ ID NO: 303042 - DNA, 25 bp, Homo sapien
tgacccaatttgtaggatgaaagtt

SEQ ID NO: 303043 - DNA, 25 bp, Homo sapien
aactttcatacccatttcggttgag

SEQ ID NO: 303044 - DNA, 25 bp, Homo sapien
tttgggacatacacgcagtccgggt

SEQ ID NO: 303045 - DNA, 25 bp, Homo sapien
taataacttatatctgcctagaaaa

SEQ ID NO: 303046 - DNA, 25 bp, Homo sapien
gcctgtggcccgcattattcatgtg

SEQ ID NO: 303047 - DNA, 25 bp, Homo sapien
gagaccccagaggtacagtacaggt

SEQ ID NO: 303048 - DNA, 25 bp, Homo sapien
taaaacaagcggtcaggtcaggagt

SEQ ID NO: 303049 - DNA, 25 bp, Homo sapien
tagattgtgcaagcgtgggctacgt

SEQ ID NO: 303050 - DNA, 25 bp, Homo sapien
taatcagctgggagcgttgacagac

SEQ ID NO: 303051 - DNA, 25 bp, Homo sapien
gcatctgaagattggagctccctga

SEQ ID NO: 303052 - DNA, 25 bp, Homo sapien
taggctgtgtcctagcccagagctg

SEQ ID NO: 303053 - DNA, 25 bp, Homo sapien
aatcttacttaaacaccaacttgat

SEQ ID NO: 303054 - DNA, 25 bp, Homo sapien
tgcactgctgggagggatttgagaa

SEQ ID NO: 303055 - DNA, 25 bp, Homo sapien
tctttctcagtcacgttccctaggc

SEQ ID NO: 303056 - DNA, 25 bp, Homo sapien
caagactgtgcggtcggaatttaca

SEQ ID NO: 303057 - DNA, 25 bp, Homo sapien
tacacacagccgaagtacaagactg

SEQ ID NO: 303058 - DNA, 25 bp, Homo sapien
aatttacacaagagccgggacagca

SEQ ID NO: 303059 - DNA, 25 bp, Homo sapien
gaaaacacgcgtgatctccctgctg

SEQ ID NO: 303060 - DNA, 25 bp, Homo sapien
ctgagcccagcctgcgagtatacat

SEQ ID NO: 303061 - DNA, 25 bp, Homo sapien
agcccagcctgcgagtatacatcca

SEQ ID NO: 303062 - DNA, 25 bp, Homo sapien
cagcctgcgagtatacatccagatg

SEQ ID NO: 303063 - DNA, 25 bp, Homo sapien
cccagcctgcgagtatacatccaga

SEQ ID NO: 303064 - DNA, 25 bp, Homo sapien
catgaaggcaccgaaatttgccagg

SEQ ID NO: 303065 - DNA, 25 bp, Homo sapien
tttgccaggtctgtaaaccatgcag

SEQ ID NO: 303066 - DNA, 25 bp, Homo sapien
ggctctgttgctccgtgtcagcgcg

SEQ ID NO: 303067 - DNA, 25 bp, Homo sapien
gcagaaccagtctgttgtcagtggt

SEQ ID NO: 303068 - DNA, 25 bp, Homo sapien
cattggaacagcattgtcccgtgga

SEQ ID NO: 303069 - DNA, 25 bp, Homo sapien
ggtacatagtaggtcccagtgcatt

SEQ ID NO: 303070 - DNA, 25 bp, Homo sapien
tcatgtcctcgagcacgaattctgg

SEQ ID NO: 303071 - DNA, 25 bp, Homo sapien
tgaaggttgaccacagaagctactg

SEQ ID NO: 303072 - DNA, 25 bp, Homo sapien
tggtagtttttgttaggagacagtg

SEQ ID NO: 303073 - DNA, 25 bp, Homo sapien
aggaagcacctttctgcatgactat

SEQ ID NO: 303074 - DNA, 25 bp, Homo sapien
agctcagactaggagcaggaggagt

SEQ ID NO: 303075 - DNA, 25 bp, Homo sapien
tatgggtctcaggattgacctggga

SEQ ID NO: 303076 - DNA, 25 bp, Homo sapien
ctttgtagcccacgaactccatgga

SEQ ID NO: 303077 - DNA, 25 bp, Homo sapien
tgtagcccacgaactccatggaggc

SEQ ID NO: 303078 - DNA, 25 bp, Homo sapien
cctgctggtaatatggacactggaa

SEQ ID NO: 303079 - DNA, 25 bp, Homo sapien
tggagcccctgctggtaatatggac

SEQ ID NO: 303080 - DNA, 25 bp, Homo sapien
gtaacatatgatcccaggcgggcac

SEQ ID NO: 303081 - DNA, 25 bp, Homo sapien
cgtgtaacatatgatcccaggcggg

SEQ ID NO: 303082 - DNA, 25 bp, Homo sapien
taacatatgatcccaggcgggcaca

SEQ ID NO: 303083 - DNA, 25 bp, Homo sapien
tgcgtgtaacatatgatcccaggcg

SEQ ID NO: 303084 - DNA, 25 bp, Homo sapien
cctctggttaacaccagagacagac

SEQ ID NO: 303085 - DNA, 25 bp, Homo sapien
caaggtagccatccagcagcctggg

SEQ ID NO: 303086 - DNA, 25 bp, Homo sapien
gcaaggtagccatccagcagcctgg

SEQ ID NO: 303087 - DNA, 25 bp, Homo sapien
gcagcctctggttaacaccagagac

SEQ ID NO: 303088 - DNA, 25 bp, Homo sapien
gccagcgcccgggaggtgggtccac

SEQ ID NO: 303089 - DNA, 25 bp, Homo sapien
ccagcgcccgggaggtgggtccaca

SEQ ID NO: 303090 - DNA, 25 bp, Homo sapien
aaagagaaagtcattgcagccagcg

SEQ ID NO: 303091 - DNA, 25 bp, Homo sapien
gggaaagagaaagtcattgcagcca

SEQ ID NO: 303092 - DNA, 25 bp, Homo sapien
cttcctgctcaggcgctggtgtagg

SEQ ID NO: 303093 - DNA, 25 bp, Homo sapien
ctcccagggcctcgtagtcatggcc

SEQ ID NO: 303094 - DNA, 25 bp, Homo sapien
ccctgggacgctttatcttcctcag

SEQ ID NO: 303095 - DNA, 25 bp, Homo sapien
gtaggaggccctgggacgctttatc

SEQ ID NO: 303096 - DNA, 25 bp, Homo sapien
ccttggccggctagtcccgactaag

SEQ ID NO: 303097 - DNA, 25 bp, Homo sapien
ctaagatctttgtctggagcaccag

SEQ ID NO: 303098 - DNA, 25 bp, Homo sapien
tagtcccgactaagatctttgtctg

SEQ ID NO: 303099 - DNA, 25 bp, Homo sapien
tggccggctagtcccgactaagatc

SEQ ID NO: 303100 - DNA, 25 bp, Homo sapien
gccagacggtattccgacgagaaag

SEQ ID NO: 303101 - DNA, 25 bp, Homo sapien
gtctcgatacattcgctccactgtg

SEQ ID NO: 303102 - DNA, 25 bp, Homo sapien
ttttcacttcgtagcacagccagac

SEQ ID NO: 303103 - DNA, 25 bp, Homo sapien
gttgtaggagaatgtgtctcgatac

SEQ ID NO: 303104 - DNA, 25 bp, Homo sapien
gcaaagtgattggagtccgggtggt

SEQ ID NO: 303105 - DNA, 25 bp, Homo sapien
caaagtgattggagtccgggtggta

SEQ ID NO: 303106 - DNA, 25 bp, Homo sapien
ctgcaaagtgattggagtccgggtg

SEQ ID NO: 303107 - DNA, 25 bp, Homo sapien
tgcaaagtgattggagtccgggtgg

SEQ ID NO: 303108 - DNA, 25 bp, Homo sapien
tcagtgcgtggtttgctttcccagc

SEQ ID NO: 303109 - DNA, 25 bp, Homo sapien
ggtttgctttcccagctggcttagc

SEQ ID NO: 303110 - DNA, 25 bp, Homo sapien
tgctttcccagctggcttagctcct

SEQ ID NO: 303111 - DNA, 25 bp, Homo sapien
gcgtggtttgctttcccagctggct

SEQ ID NO: 303112 - DNA, 25 bp, Homo sapien
tcagggccacggacttggaaagtgt

SEQ ID NO: 303113 - DNA, 25 bp, Homo sapien
ggagagaaggacacactggatagcc

SEQ ID NO: 303114 - DNA, 25 bp, Homo sapien
cccaggacggtccagcaggaaggtc

SEQ ID NO: 303115 - DNA, 25 bp, Homo sapien
gagaaggacacactggatagcccgc

SEQ ID NO: 303116 - DNA, 25 bp, Homo sapien
cacaaggccttttgtgcagaggcaa

SEQ ID NO: 303117 - DNA, 25 bp, Homo sapien
aggtgcgagccacccactgtacgtg

SEQ ID NO: 303118 - DNA, 25 bp, Homo sapien
tacttgcgagtctgaggcgacagca

SEQ ID NO: 303119 - DNA, 25 bp, Homo sapien
cgtgacccacgcagctcatttcaaa

SEQ ID NO: 303120 - DNA, 25 bp, Homo sapien
ctgaaaaatacaccactcatttctt

SEQ ID NO: 303121 - DNA, 25 bp, Homo sapien
gaggtggcacctacaagcagctatg

SEQ ID NO: 303122 - DNA, 25 bp, Homo sapien
gctgttgaagcatcacaaggtgcac

SEQ ID NO: 303123 - DNA, 25 bp, Homo sapien
tgacatggccaagggactactgagt

SEQ ID NO: 303124 - DNA, 25 bp, Homo sapien
catggcctcgtgtgtgaattctagc

SEQ ID NO: 303125 - DNA, 25 bp, Homo sapien
ctgaaccagtggaagaatctcatct

SEQ ID NO: 303126 - DNA, 25 bp, Homo sapien
ttttctgacacaggctgcgaagcgc

SEQ ID NO: 303127 - DNA, 25 bp, Homo sapien
ggaacgtggccatatcccttgtaca

SEQ ID NO: 303128 - DNA, 25 bp, Homo sapien
ccaggatatgtaccaggtgacctca

SEQ ID NO: 303129 - DNA, 25 bp, Homo sapien
tgatcttcatggtggcacgcggacc

SEQ ID NO: 303130 - DNA, 25 bp, Homo sapien
cgaacttgctccaacagtgctgaaa

SEQ ID NO: 303131 - DNA, 25 bp, Homo sapien
aaggctcaaatagctctctttggct

SEQ ID NO: 303132 - DNA, 25 bp, Homo sapien
gctctctttggctgtacacgaactt

SEQ ID NO: 303133 - DNA, 25 bp, Homo sapien
ccccagcatgatgtgcagtaatata

SEQ ID NO: 303134 - DNA, 25 bp, Homo sapien
tgtgggcccaaattcacatgactgg

SEQ ID NO: 303135 - DNA, 25 bp, Homo sapien
tagcacccagtgcagaggcatttcc

SEQ ID NO: 303136 - DNA, 25 bp, Homo sapien
gacaaattcggttatgccagggaga

SEQ ID NO: 303137 - DNA, 25 bp, Homo sapien
taaatgagaccttcagtgtgggccc

SEQ ID NO: 303138 - DNA, 25 bp, Homo sapien
tgccgtcctctgacccaaggttcat

SEQ ID NO: 303139 - DNA, 25 bp, Homo sapien
cacaggtaagtctcatgccgtcctc

SEQ ID NO: 303140 - DNA, 25 bp, Homo sapien
caggtgtcattgtgcatgcgctcca

SEQ ID NO: 303141 - DNA, 25 bp, Homo sapien
tggttgcatagaaagcccctgcgct

SEQ ID NO: 303142 - DNA, 25 bp, Homo sapien
tattaagctcatagagcccagagga

SEQ ID NO: 303143 - DNA, 25 bp, Homo sapien
caagcagaatttggcctctccagcc

SEQ ID NO: 303144 - DNA, 25 bp, Homo sapien
agggaagaacgtccctcgggctcag

SEQ ID NO: 303145 - DNA, 25 bp, Homo sapien
gcctttgaaagtagcttccaagcag

SEQ ID NO: 303146 - DNA, 25 bp, Homo sapien
cttcaaggaaaccgtgtttatgtgg

SEQ ID NO: 303147 - DNA, 25 bp, Homo sapien
ttcaaggaaaccgtgtttatgtgga

SEQ ID NO: 303148 - DNA, 25 bp, Homo sapien
tgaagcaggtaaccctgtagtcctg

SEQ ID NO: 303149 - DNA, 25 bp, Homo sapien
taaccctgtagtcctggtccaggtc

SEQ ID NO: 303150 - DNA, 25 bp, Homo sapien
tgcgggcagtgaagatgcacaggct

SEQ ID NO: 303151 - DNA, 25 bp, Homo sapien
tccaggaggtgaagcaggtaaccct

SEQ ID NO: 303152 - DNA, 25 bp, Homo sapien
gtcattattgaaattttggccccag

SEQ ID NO: 303153 - DNA, 25 bp, Homo sapien
tatgtcattattgaaattttggccc

SEQ ID NO: 303154 - DNA, 25 bp, Homo sapien
ccagcctcggccagggtgcgcagcc

SEQ ID NO: 303155 - DNA, 25 bp, Homo sapien
ctgtatgtcattattgaaattttgg

SEQ ID NO: 303156 - DNA, 25 bp, Homo sapien
aaggtgtcccagcagtgcttaaatt

SEQ ID NO: 303157 - DNA, 25 bp, Homo sapien
gttgaatggagcaaagggtgagcga

SEQ ID NO: 303158 - DNA, 25 bp, Homo sapien
caaagggtgagcgagtggaaagtag

SEQ ID NO: 303159 - DNA, 25 bp, Homo sapien
gagcagggaggttgaatggagcaaa

SEQ ID NO: 303160 - DNA, 25 bp, Homo sapien
aaagtaggcatatggtggaggcctg

SEQ ID NO: 303161 - DNA, 25 bp, Homo sapien
caaaaccgattcaaattgtcgctgg

SEQ ID NO: 303162 - DNA, 25 bp, Homo sapien
tttttgattcaaagtaatgcactct

SEQ ID NO: 303163 - DNA, 25 bp, Homo sapien
tgaaacttttctgtgtattgagcac

SEQ ID NO: 303164 - DNA, 25 bp, Homo sapien
gtcgctggattagtaggtttgaaac

SEQ ID NO: 303165 - DNA, 25 bp, Homo sapien
cttgtaaggaggcagcacgttgcag

SEQ ID NO: 303166 - DNA, 25 bp, Homo sapien
tgtaaggaggcagcacgttgcaggt

SEQ ID NO: 303167 - DNA, 25 bp, Homo sapien
taaggaggcagcacgttgcaggtca

SEQ ID NO: 303168 - DNA, 25 bp, Homo sapien
gtcaggacgggaagcacatgtctgc

SEQ ID NO: 303169 - DNA, 25 bp, Homo sapien
ggctccgggatatgaaccaggtgat

SEQ ID NO: 303170 - DNA, 25 bp, Homo sapien
cacagtcgtgatagaggcgggcaat

SEQ ID NO: 303171 - DNA, 25 bp, Homo sapien
gaagacatgatgtgcacgcgtgcct

SEQ ID NO: 303172 - DNA, 25 bp, Homo sapien
tgtcctgcagtctgcgaagcccgtg

SEQ ID NO: 303173 - DNA, 25 bp, Homo sapien
cctgcaacttggtgaccggagatgg

SEQ ID NO: 303174 - DNA, 25 bp, Homo sapien
ttttcacgctgtcccttgcaaggct

SEQ ID NO: 303175 - DNA, 25 bp, Homo sapien
cggagatgggtagttttcacgctgt

SEQ ID NO: 303176 - DNA, 25 bp, Homo sapien
gggtagttttcacgctgtcccttgc

SEQ ID NO: 303177 - DNA, 25 bp, Homo sapien
gacaagatttaggtatgatgaggag

SEQ ID NO: 303178 - DNA, 25 bp, Homo sapien
caaaacttaactttcacacttatgt

SEQ ID NO: 303179 - DNA, 25 bp, Homo sapien
cacacttatgtatatttctactacc

SEQ ID NO: 303180 - DNA, 25 bp, Homo sapien
gaatgacccaatacttaccatcggt

SEQ ID NO: 303181 - DNA, 25 bp, Homo sapien
ccatcaggcttgtggaagcgacgtt

SEQ ID NO: 303182 - DNA, 25 bp, Homo sapien
caaactgagtggtttcccctcctgg

SEQ ID NO: 303183 - DNA, 25 bp, Homo sapien
actgtgataggcatcgtgggtccca

SEQ ID NO: 303184 - DNA, 25 bp, Homo sapien
tcagggtacagtgagcagtttcagc

SEQ ID NO: 303185 - DNA, 25 bp, Homo sapien
gcattcagcctcctggcaggaccct

SEQ ID NO: 303186 - DNA, 25 bp, Homo sapien
ttggcattcagcctcctggcaggac

SEQ ID NO: 303187 - DNA, 25 bp, Homo sapien
ctttggcattcagcctcctggcagg

SEQ ID NO: 303188 - DNA, 25 bp, Homo sapien
tggcattcagcctcctggcaggacc

SEQ ID NO: 303189 - DNA, 25 bp, Homo sapien
agcttccttagcagacttgcccctg

SEQ ID NO: 303190 - DNA, 25 bp, Homo sapien
cccaaaagtcacaaaaggtcagctc

SEQ ID NO: 303191 - DNA, 25 bp, Homo sapien
aaaagtcacaaaaggtcagctctcc

SEQ ID NO: 303192 - DNA, 25 bp, Homo sapien
tcacttttggcagctctcccaaaag

SEQ ID NO: 303193 - DNA, 25 bp, Homo sapien
gaggcggcccgttcagaagcagcag

SEQ ID NO: 303194 - DNA, 25 bp, Homo sapien
ggcggcccgttcagaagcagcagtg

SEQ ID NO: 303195 - DNA, 25 bp, Homo sapien
aggcggcccgttcagaagcagcagt

SEQ ID NO: 303196 - DNA, 25 bp, Homo sapien
tgcccacagctgaggctctttgcat

SEQ ID NO: 303197 - DNA, 25 bp, Homo sapien
ctgggagggcaccggctgctgccca

SEQ ID NO: 303198 - DNA, 25 bp, Homo sapien
gctgctgcccacagctgaggctctt

SEQ ID NO: 303199 - DNA, 25 bp, Homo sapien
tgctgcccacagctgaggctctttg

SEQ ID NO: 303200 - DNA, 25 bp, Homo sapien
gctggtaacacaagagggccttcct

SEQ ID NO: 303201 - DNA, 25 bp, Homo sapien
cttcctcgggtagtaaggccttctg

SEQ ID NO: 303202 - DNA, 25 bp, Homo sapien
cattctgcggcgtcagctggtaaca

SEQ ID NO: 303203 - DNA, 25 bp, Homo sapien
caaagtagcctctcgtgggcgtgga

SEQ ID NO: 303204 - DNA, 25 bp, Homo sapien
tcagatggggttagcccctgccggc

SEQ ID NO: 303205 - DNA, 25 bp, Homo sapien
acatcagatggggttagcccctgcc

SEQ ID NO: 303206 - DNA, 25 bp, Homo sapien
catcagatggggttagcccctgccg

SEQ ID NO: 303207 - DNA, 25 bp, Homo sapien
cagatggggttagcccctgccggcc

SEQ ID NO: 303208 - DNA, 25 bp, Homo sapien
actgcgtttcgtccagtcccatgga

SEQ ID NO: 303209 - DNA, 25 bp, Homo sapien
cccaggttcagatggtcgtgagcct

SEQ ID NO: 303210 - DNA, 25 bp, Homo sapien
ttgatgaagtcaaccagctcccagg

SEQ ID NO: 303211 - DNA, 25 bp, Homo sapien
tccacgtgaggtaacaggtgacttg

SEQ ID NO: 303212 - DNA, 25 bp, Homo sapien
tataactgcaaagcctctttcctac

SEQ ID NO: 303213 - DNA, 25 bp, Homo sapien
ttataactgcaaagcctctttccta

SEQ ID NO: 303214 - DNA, 25 bp, Homo sapien
gactgtttttatctagctcctctaa

SEQ ID NO: 303215 - DNA, 25 bp, Homo sapien
gaaagcggtttctcgtggtccacaa

SEQ ID NO: 303216 - DNA, 25 bp, Homo sapien
tctcgtggtccacaaagttttccca

SEQ ID NO: 303217 - DNA, 25 bp, Homo sapien
tcaagccgtcgctttatggctcgac

SEQ ID NO: 303218 - DNA, 25 bp, Homo sapien
gttccagtagattgggtgactcaga

SEQ ID NO: 303219 - DNA, 25 bp, Homo sapien
atatatccatgtaacgaccctgcgc

SEQ ID NO: 303220 - DNA, 25 bp, Homo sapien
ctattgggtgctatgttccagtaga

SEQ ID NO: 303221 - DNA, 25 bp, Homo sapien
tccatgtaacgaccctgcgcacgta

SEQ ID NO: 303222 - DNA, 25 bp, Homo sapien
gagaaaagaactggcaccagaaggg

SEQ ID NO: 303223 - DNA, 25 bp, Homo sapien
cgtacccggctggatttacagactt

SEQ ID NO: 303224 - DNA, 25 bp, Homo sapien
tatgaggcaactgacatgccccagg

SEQ ID NO: 303225 - DNA, 25 bp, Homo sapien
aatttattggccgagcatctcagcc

SEQ ID NO: 303226 - DNA, 25 bp, Homo sapien
tgggatacgggtccaagctgcaaac

SEQ ID NO: 303227 - DNA, 25 bp, Homo sapien
cagcatcgcactactgatgacaagc

SEQ ID NO: 303228 - DNA, 25 bp, Homo sapien
acaagcaggcaactgcgttggagag

SEQ ID NO: 303229 - DNA, 25 bp, Homo sapien
cctgcaaacagcatcgcactactga

SEQ ID NO: 303230 - DNA, 25 bp, Homo sapien
atgacaagcaggcaactgcgttgga

SEQ ID NO: 303231 - DNA, 25 bp, Homo sapien
gatgcggggaggtctcctctggaga

SEQ ID NO: 303232 - DNA, 25 bp, Homo sapien
agcgggagtgcaggccatcgtccct

SEQ ID NO: 303233 - DNA, 25 bp, Homo sapien
gggcagtcaggccagcgggagtgca

SEQ ID NO: 303234 - DNA, 25 bp, Homo sapien
agtgcaggccatcgtccctgccttg

SEQ ID NO: 303235 - DNA, 25 bp, Homo sapien
gaaggcggacgcctcttccactgtc

SEQ ID NO: 303236 - DNA, 25 bp, Homo sapien
tcaggggaaggcggacgcctcttcc

SEQ ID NO: 303237 - DNA, 25 bp, Homo sapien
caggggaaggcggacgcctcttcca

SEQ ID NO: 303238 - DNA, 25 bp, Homo sapien
gggaaggcggacgcctcttccactg

SEQ ID NO: 303239 - DNA, 25 bp, Homo sapien
tgttcgggtgatgacctcgttgcca

SEQ ID NO: 303240 - DNA, 25 bp, Homo sapien
caagagcgcttcctttgcacagaat

SEQ ID NO: 303241 - DNA, 25 bp, Homo sapien
gggcacgagttgattccaagcacat

SEQ ID NO: 303242 - DNA, 25 bp, Homo sapien
tttgctttcgaagtggccagctgcg

SEQ ID NO: 303243 - DNA, 25 bp, Homo sapien
catgcaccttgctacctgcttgcgg

SEQ ID NO: 303244 - DNA, 25 bp, Homo sapien
ttgcatgcaccttgctacctgcttg

SEQ ID NO: 303245 - DNA, 25 bp, Homo sapien
cttgctacctgcttgcggctttcag

SEQ ID NO: 303246 - DNA, 25 bp, Homo sapien
caccttgctacctgcttgcggcttt

SEQ ID NO: 303247 - DNA, 25 bp, Homo sapien
tgcagaaacgctcatgcacacctgg

SEQ ID NO: 303248 - DNA, 25 bp, Homo sapien
cgcattacccttcgcgtgtacgttc

SEQ ID NO: 303249 - DNA, 25 bp, Homo sapien
cccatgtgccccgtgaaagcatgtg

SEQ ID NO: 303250 - DNA, 25 bp, Homo sapien
catgggccttgcgaacctgggttag

SEQ ID NO: 303251 - DNA, 25 bp, Homo sapien
gaaagtaagcgttcccacctgtgca

SEQ ID NO: 303252 - DNA, 25 bp, Homo sapien
tcttctcagggtaaagtcgagtatc

SEQ ID NO: 303253 - DNA, 25 bp, Homo sapien
tgggccttaactgtccttccgagtg

SEQ ID NO: 303254 - DNA, 25 bp, Homo sapien
ggctctactttctaacaaccacagg

SEQ ID NO: 303255 - DNA, 25 bp, Homo sapien
ttttcagagacaggggtctcaccgt

SEQ ID NO: 303256 - DNA, 25 bp, Homo sapien
tttcagagacaggggtctcaccgtg

SEQ ID NO: 303257 - DNA, 25 bp, Homo sapien
gtgttgcccaggcttgtctcaaact

SEQ ID NO: 303258 - DNA, 25 bp, Homo sapien
ttcagagacaggggtctcaccgtgt

SEQ ID NO: 303259 - DNA, 25 bp, Homo sapien
gttgcgcaggttcaaaaatggaacg

SEQ ID NO: 303260 - DNA, 25 bp, Homo sapien
caaaaatggaacgtcggcggcgtga

SEQ ID NO: 303261 - DNA, 25 bp, Homo sapien
tcggcggcgtgagggagcgcgaggg

SEQ ID NO: 303262 - DNA, 25 bp, Homo sapien
tgcgcgcccggacgagggtgacggg

SEQ ID NO: 303263 - DNA, 25 bp, Homo sapien
actggccaaactgcgccgcggagaa

SEQ ID NO: 303264 - DNA, 25 bp, Homo sapien
ccgagggtcgggtggatggacaaat

SEQ ID NO: 303265 - DNA, 25 bp, Homo sapien
tctgggcaccgaccaccgagggtcg

SEQ ID NO: 303266 - DNA, 25 bp, Homo sapien
gcgtctgacccgtgcgtctgggcac

SEQ ID NO: 303267 - DNA, 25 bp, Homo sapien
caaattccacaaggtccagcgactc

SEQ ID NO: 303268 - DNA, 25 bp, Homo sapien
catcgagcttgtcttgcgaggacac

SEQ ID NO: 303269 - DNA, 25 bp, Homo sapien
tgcttgactggactcggccatttca

SEQ ID NO: 303270 - DNA, 25 bp, Homo sapien
acacacgcagaggatccgcgctgta

SEQ ID NO: 303271 - DNA, 25 bp, Homo sapien
attcctgcctgaacagcttacacca

SEQ ID NO: 303272 - DNA, 25 bp, Homo sapien
aggtccagattcctgcctgaacagc

SEQ ID NO: 303273 - DNA, 25 bp, Homo sapien
tttcggggaaggtccagattcctgc

SEQ ID NO: 303274 - DNA, 25 bp, Homo sapien
cagattcctgcctgaacagcttaca

SEQ ID NO: 303275 - DNA, 25 bp, Homo sapien
aatgaacggctgggttgccaccctt

SEQ ID NO: 303276 - DNA, 25 bp, Homo sapien
atgaacggctgggttgccacccttc

SEQ ID NO: 303277 - DNA, 25 bp, Homo sapien
caaaacacctcccacaactgttaca

SEQ ID NO: 303278 - DNA, 25 bp, Homo sapien
ctgttacagccaactttccaacctt

SEQ ID NO: 303279 - DNA, 25 bp, Homo sapien
aaaacacctcccacaactgttacag

SEQ ID NO: 303280 - DNA, 25 bp, Homo sapien
tttccaaccttctgggatatgaaac

SEQ ID NO: 303281 - DNA, 25 bp, Homo sapien
tgatgtacccagtatgatttgcaag

SEQ ID NO: 303282 - DNA, 25 bp, Homo sapien
tttgatgtacccagtatgatttgca

SEQ ID NO: 303283 - DNA, 25 bp, Homo sapien
ttgatgtacccagtatgatttgcaa

SEQ ID NO: 303284 - DNA, 25 bp, Homo sapien
ctttgatgtacccagtatgatttgc

SEQ ID NO: 303285 - DNA, 25 bp, Homo sapien
tctttggctttctttatatctttct

SEQ ID NO: 303286 - DNA, 25 bp, Homo sapien
atctttctccactcgttgccagtca

SEQ ID NO: 303287 - DNA, 25 bp, Homo sapien
tctttatatctttctccactcgttg

SEQ ID NO: 303288 - DNA, 25 bp, Homo sapien
tatatctttctccactcgttgccag

SEQ ID NO: 303289 - DNA, 25 bp, Homo sapien
ggatgccatgccaaacagaaagcct

SEQ ID NO: 303290 - DNA, 25 bp, Homo sapien
gaacattcttcacaaacgacaccac

SEQ ID NO: 303291 - DNA, 25 bp, Homo sapien
ctagaacattcttcacaaacgacac

SEQ ID NO: 303292 - DNA, 25 bp, Homo sapien
cattcttcacaaacgacaccacctc

SEQ ID NO: 303293 - DNA, 25 bp, Homo sapien
catcaagctcatggtagggccacat

SEQ ID NO: 303294 - DNA, 25 bp, Homo sapien
tgacctacagattggccacatacgg

SEQ ID NO: 303295 - DNA, 25 bp, Homo sapien
gggaggagacctaacaactattgcc

SEQ ID NO: 303296 - DNA, 25 bp, Homo sapien
catggcgagtcatcttgcaatgtga

SEQ ID NO: 303297 - DNA, 25 bp, Homo sapien
gaggacctcttccaatccctggtgg

SEQ ID NO: 303298 - DNA, 25 bp, Homo sapien
gaagggttgtagtctgtgggtggct

SEQ ID NO: 303299 - DNA, 25 bp, Homo sapien
tggaaatcctctcgggggctgttga

SEQ ID NO: 303300 - DNA, 25 bp, Homo sapien
gggctgtaggaagggttgtagtctg

SEQ ID NO: 303301 - DNA, 25 bp, Homo sapien
gatgtgccttgttttccgggctggc

SEQ ID NO: 303302 - DNA, 25 bp, Homo sapien
ctgcatcttagtggcttcctcccct

SEQ ID NO: 303303 - DNA, 25 bp, Homo sapien
tatgtttgtgagggcatcactttcc

SEQ ID NO: 303304 - DNA, 25 bp, Homo sapien
tgtggtgtcgtggtattatgtttgt

SEQ ID NO: 303305 - DNA, 25 bp, Homo sapien
agactttgtgtctaggccagggatg

SEQ ID NO: 303306 - DNA, 25 bp, Homo sapien
ggcctgggtatttgaagactttgtg

SEQ ID NO: 303307 - DNA, 25 bp, Homo sapien
ttgaagactttgtgtctaggccagg

SEQ ID NO: 303308 - DNA, 25 bp, Homo sapien
gaagactttgtgtctaggccaggga

SEQ ID NO: 303309 - DNA, 25 bp, Homo sapien
tcactgcagtctcgatttccccgac

SEQ ID NO: 303310 - DNA, 25 bp, Homo sapien
aacagggtctttacttagtagagat

SEQ ID NO: 303311 - DNA, 25 bp, Homo sapien
tgcagtctcgatttccccgactcaa

SEQ ID NO: 303312 - DNA, 25 bp, Homo sapien
actgcagtctcgatttccccgactc

SEQ ID NO: 303313 - DNA, 25 bp, Homo sapien
tcccttcccacctactgcactttcc

SEQ ID NO: 303314 - DNA, 25 bp, Homo sapien
gagagaagggaaaagatccccaaga

SEQ ID NO: 303315 - DNA, 25 bp, Homo sapien
tgcttccttcagtttgtaaagtcgg

SEQ ID NO: 303316 - DNA, 25 bp, Homo sapien
ggtgggatctgagctcccacctccc

SEQ ID NO: 303317 - DNA, 25 bp, Homo sapien
cacgactgccatgtaaggttgtgca

SEQ ID NO: 303318 - DNA, 25 bp, Homo sapien
cacaaggacattgtatgcagggagc

SEQ ID NO: 303319 - DNA, 25 bp, Homo sapien
caaagactccttgtggactggctgt

SEQ ID NO: 303320 - DNA, 25 bp, Homo sapien
cagcctgtggcttggagtggccaaa

SEQ ID NO: 303321 - DNA, 25 bp, Homo sapien
tgcaagacgcgcaccgaggtgttcg

SEQ ID NO: 303322 - DNA, 25 bp, Homo sapien
gccaggacttgaaacctgaaccctg

SEQ ID NO: 303323 - DNA, 25 bp, Homo sapien
tgaccattgctgagccggccatgat

SEQ ID NO: 303324 - DNA, 25 bp, Homo sapien
tcttgggtgtagatctcatggtccc

SEQ ID NO: 303325 - DNA, 25 bp, Homo sapien
catattaatgcatgtggcgctcacc

SEQ ID NO: 303326 - DNA, 25 bp, Homo sapien
gcagagcaggttcccacatattaat

SEQ ID NO: 303327 - DNA, 25 bp, Homo sapien
aagtcagagttcatatgggtccatc

SEQ ID NO: 303328 - DNA, 25 bp, Homo sapien
taggaataacacatctcacaggagc

SEQ ID NO: 303329 - DNA, 25 bp, Homo sapien
cactgagagcatgggaagtccctga

SEQ ID NO: 303330 - DNA, 25 bp, Homo sapien
tgtcacgtagcattcaggcccaggt

SEQ ID NO: 303331 - DNA, 25 bp, Homo sapien
gatttgggtctatctcactgagagc

SEQ ID NO: 303332 - DNA, 25 bp, Homo sapien
ccaggtgtcacgcaggtgtcacgta

SEQ ID NO: 303333 - DNA, 25 bp, Homo sapien
gacactggtgcacaaacacctgggc

SEQ ID NO: 303334 - DNA, 25 bp, Homo sapien
tcactcggacactggtgcacaaaca

SEQ ID NO: 303335 - DNA, 25 bp, Homo sapien
acacacgtctcactcggacactggt

SEQ ID NO: 303336 - DNA, 25 bp, Homo sapien
gtctcactcggacactggtgcacaa

SEQ ID NO: 303337 - DNA, 25 bp, Homo sapien
ctctgcagcccccttgcacccctgc

SEQ ID NO: 303338 - DNA, 25 bp, Homo sapien
cacccctgccctctccggtccccat

SEQ ID NO: 303339 - DNA, 25 bp, Homo sapien
cttgcacccctgccctctccggtcc

SEQ ID NO: 303340 - DNA, 25 bp, Homo sapien
ctgcagtgggttcccactctgcagc

SEQ ID NO: 303341 - DNA, 25 bp, Homo sapien
ggcagccacatcctgcctttcaggg

SEQ ID NO: 303342 - DNA, 25 bp, Homo sapien
ccacatcctgcctttcaggggtgga

SEQ ID NO: 303343 - DNA, 25 bp, Homo sapien
ttggcagccacatcctgcctttcag

SEQ ID NO: 303344 - DNA, 25 bp, Homo sapien
atcctgcctttcaggggtggaccag

SEQ ID NO: 303345 - DNA, 25 bp, Homo sapien
tgagcaagcggctccagagtgtctc

SEQ ID NO: 303346 - DNA, 25 bp, Homo sapien
gatgatccagtcttggaaacccaag

SEQ ID NO: 303347 - DNA, 25 bp, Homo sapien
ccggcaccgtgtccgggaagagctc

SEQ ID NO: 303348 - DNA, 25 bp, Homo sapien
aagccaggcggtttcatcccgggag

SEQ ID NO: 303349 - DNA, 25 bp, Homo sapien
tcagcacagaaacagcttccttgag

SEQ ID NO: 303350 - DNA, 25 bp, Homo sapien
cttgagctgcggtgtatgggtgggt

SEQ ID NO: 303351 - DNA, 25 bp, Homo sapien
tgtatgggtgggtgttccattgtta

SEQ ID NO: 303352 - DNA, 25 bp, Homo sapien
tgaatggcggagttttttcttggag

SEQ ID NO: 303353 - DNA, 25 bp, Homo sapien
aagtaccgagggactcccaggcaca

SEQ ID NO: 303354 - DNA, 25 bp, Homo sapien
ctttggacctgggatgggaccattc

SEQ ID NO: 303355 - DNA, 25 bp, Homo sapien
ccccagctgcaccggaggttcaggg

SEQ ID NO: 303356 - DNA, 25 bp, Homo sapien
tggaaatgactctggatggagccca

SEQ ID NO: 303357 - DNA, 25 bp, Homo sapien
tgtccccgaagtgtacacctgggtg

SEQ ID NO: 303358 - DNA, 25 bp, Homo sapien
gaattctctaaagctggcactcgat

SEQ ID NO: 303359 - DNA, 25 bp, Homo sapien
ggctgcttatgttgctgagtgacgc

SEQ ID NO: 303360 - DNA, 25 bp, Homo sapien
caggcctctgtgtatgttggcgtgc

SEQ ID NO: 303361 - DNA, 25 bp, Homo sapien
caggtatcagaggcgtccaccctgc

SEQ ID NO: 303362 - DNA, 25 bp, Homo sapien
ggtatcagaggcgtccaccctgcca

SEQ ID NO: 303363 - DNA, 25 bp, Homo sapien
aggtatcagaggcgtccaccctgcc

SEQ ID NO: 303364 - DNA, 25 bp, Homo sapien
gcaggtatcagaggcgtccaccctg

SEQ ID NO: 303365 - DNA, 25 bp, Homo sapien
ggcaaggatgcgactgtcaccggtc

SEQ ID NO: 303366 - DNA, 25 bp, Homo sapien
atgcgactgtcaccggtccagcaaa

SEQ ID NO: 303367 - DNA, 25 bp, Homo sapien
acacaggcaaggatgcgactgtcac

SEQ ID NO: 303368 - DNA, 25 bp, Homo sapien
aaggatgcgactgtcaccggtccag

SEQ ID NO: 303369 - DNA, 25 bp, Homo sapien
cagctggggaaaggagcagggtcat

SEQ ID NO: 303370 - DNA, 25 bp, Homo sapien
ggagcagctggggaaaggagcaggg

SEQ ID NO: 303371 - DNA, 25 bp, Homo sapien
tggaggagcagctggggaaaggagc

SEQ ID NO: 303372 - DNA, 25 bp, Homo sapien
agcagctggggaaaggagcagggtc

SEQ ID NO: 303373 - DNA, 25 bp, Homo sapien
cgacggcattgagccaagggctggg

SEQ ID NO: 303374 - DNA, 25 bp, Homo sapien
gggccgacggcattgagccaagggc

SEQ ID NO: 303375 - DNA, 25 bp, Homo sapien
cagttggggccgacggcattgagcc

SEQ ID NO: 303376 - DNA, 25 bp, Homo sapien
ccgacggcattgagccaagggctgg

SEQ ID NO: 303377 - DNA, 25 bp, Homo sapien
cactgtgttcgaggtgtctccttca

SEQ ID NO: 303378 - DNA, 25 bp, Homo sapien
gggtgccccgcagatcatacaaatg

SEQ ID NO: 303379 - DNA, 25 bp, Homo sapien
cacagtgatgaagctttggctgctc

SEQ ID NO: 303380 - DNA, 25 bp, Homo sapien
tgggccctgcgccaacactgtgttc

SEQ ID NO: 303381 - DNA, 25 bp, Homo sapien
ggcatggaagtgggttagaaccagc

SEQ ID NO: 303382 - DNA, 25 bp, Homo sapien
gggcatggaagtgggttagaaccag

SEQ ID NO: 303383 - DNA, 25 bp, Homo sapien
tggacattgacacgccacgccatct

SEQ ID NO: 303384 - DNA, 25 bp, Homo sapien
gacattgacacgccacgccatcttc

SEQ ID NO: 303385 - DNA, 25 bp, Homo sapien
ctggacattgacacgccacgccatc

SEQ ID NO: 303386 - DNA, 25 bp, Homo sapien
ggacattgacacgccacgccatctt

SEQ ID NO: 303387 - DNA, 25 bp, Homo sapien
tgggaatttctgagcaagtgggaac

SEQ ID NO: 303388 - DNA, 25 bp, Homo sapien
tttgccttaaaaggtgtgacggagc

SEQ ID NO: 303389 - DNA, 25 bp, Homo sapien
gagccagggacttcgctcagctcac

SEQ ID NO: 303390 - DNA, 25 bp, Homo sapien
ggcgggagctgcctttgccttaaaa

SEQ ID NO: 303391 - DNA, 25 bp, Homo sapien
gctgtagaaatccagcctggagcag

SEQ ID NO: 303392 - DNA, 25 bp, Homo sapien
gggtctctgctgtttgcacagcttg

SEQ ID NO: 303393 - DNA, 25 bp, Homo sapien
cagtgggcattgtgcaaatgtttgt

SEQ ID NO: 303394 - DNA, 25 bp, Homo sapien
aaatgtttgtcaccagggtgaggca

SEQ ID NO: 303395 - DNA, 25 bp, Homo sapien
caggaacagattttgcagttggtgg

SEQ ID NO: 303396 - DNA, 25 bp, Homo sapien
agattttgcagttggtggggtctca

SEQ ID NO: 303397 - DNA, 25 bp, Homo sapien
acagattttgcagttggtggggtct

SEQ ID NO: 303398 - DNA, 25 bp, Homo sapien
gccaggaacagattttgcagttggt

SEQ ID NO: 303399 - DNA, 25 bp, Homo sapien
cttgctggtgcagacgaagcggcgg

SEQ ID NO: 303400 - DNA, 25 bp, Homo sapien
acctccaagtttggccatggccgct

SEQ ID NO: 303401 - DNA, 25 bp, Homo sapien
agcggcgggctctggagaagattga

SEQ ID NO: 303402 - DNA, 25 bp, Homo sapien
catggccgcttccagaccatggagg

SEQ ID NO: 303403 - DNA, 25 bp, Homo sapien
gaagcgggtgctcaccctccgcaag

SEQ ID NO: 303404 - DNA, 25 bp, Homo sapien
ggctttgtccactatggtgaagtga

SEQ ID NO: 303405 - DNA, 25 bp, Homo sapien
tgggaaccaagaagcgggtgctcac

SEQ ID NO: 303406 - DNA, 25 bp, Homo sapien
ttgtccactatggtgaagtgaccaa

SEQ ID NO: 303407 - DNA, 25 bp, Homo sapien
gactatgacctatctgacaagagca

SEQ ID NO: 303408 - DNA, 25 bp, Homo sapien
ctgactatgacctatctgacaagag

SEQ ID NO: 303409 - DNA, 25 bp, Homo sapien
ctatgacctatctgacaagagcatc

SEQ ID NO: 303410 - DNA, 25 bp, Homo sapien
atctgacaagagcatcaaccctctg

SEQ ID NO: 303411 - DNA, 25 bp, Homo sapien
ccagaagaaggcccacctgatggag

SEQ ID NO: 303412 - DNA, 25 bp, Homo sapien
ttgtagagacaccacccatggtggt

SEQ ID NO: 303413 - DNA, 25 bp, Homo sapien
tggaggctgtgaccattgtagagac

SEQ ID NO: 303414 - DNA, 25 bp, Homo sapien
ggctgtgaccattgtagagacacca

SEQ ID NO: 303415 - DNA, 25 bp, Homo sapien
accattgtagagacaccacccatgg

SEQ ID NO: 303416 - DNA, 25 bp, Homo sapien
tggcatgactcacatcgtgcgggaa

SEQ ID NO: 303417 - DNA, 25 bp, Homo sapien
gggatacaaggctggcatgactcac

SEQ ID NO: 303418 - DNA, 25 bp, Homo sapien
tacaaggctggcatgactcacatcg

SEQ ID NO: 303419 - DNA, 25 bp, Homo sapien
acatcgtgcgggaagtcgacaggcc

SEQ ID NO: 303420 - DNA, 25 bp, Homo sapien
caggcatcgtgggaaggtgaagagc

SEQ ID NO: 303421 - DNA, 25 bp, Homo sapien
cttctgaacgaaagctaggagcgga

SEQ ID NO: 303422 - DNA, 25 bp, Homo sapien
tggaaatggcgctcggtacgtgccc

SEQ ID NO: 303423 - DNA, 25 bp, Homo sapien
aatggcggccgtttcattgtcaccg

SEQ ID NO: 303424 - DNA, 25 bp, Homo sapien
ttatatagcggacccgtaaggccga

SEQ ID NO: 303425 - DNA, 25 bp, Homo sapien
cagcgaaagccctcgctgatgcata

SEQ ID NO: 303426 - DNA, 25 bp, Homo sapien
agcgaaagccctcgctgatgcatag

SEQ ID NO: 303427 - DNA, 25 bp, Homo sapien
cgaaagccctcgctgatgcataggt

SEQ ID NO: 303428 - DNA, 25 bp, Homo sapien
tcagcgaaagccctcgctgatgcat

SEQ ID NO: 303429 - DNA, 25 bp, Homo sapien
gtgtgttcactgtgggctgatgttc

SEQ ID NO: 303430 - DNA, 25 bp, Homo sapien
gcgtacacggccattgtgtgttcac

SEQ ID NO: 303431 - DNA, 25 bp, Homo sapien
cggatcagcatgtcgctgtgagttc

SEQ ID NO: 303432 - DNA, 25 bp, Homo sapien
gagttctttggtctgcactgagcgt

SEQ ID NO: 303433 - DNA, 25 bp, Homo sapien
cagcagggatgcacagaagttcacc

SEQ ID NO: 303434 - DNA, 25 bp, Homo sapien
agccccagcagggatgcacagaagt

SEQ ID NO: 303435 - DNA, 25 bp, Homo sapien
gccccagcagggatgcacagaagtt

SEQ ID NO: 303436 - DNA, 25 bp, Homo sapien
cccagcagggatgcacagaagttca

SEQ ID NO: 303437 - DNA, 25 bp, Homo sapien
gatccgcacaacagtcagctgctgc

SEQ ID NO: 303438 - DNA, 25 bp, Homo sapien
cttgctgttatcgtggcggaagccc

SEQ ID NO: 303439 - DNA, 25 bp, Homo sapien
caggctgtagtaggcccaatgggcc

SEQ ID NO: 303440 - DNA, 25 bp, Homo sapien
cagctgtaggttccagatccgcaca

SEQ ID NO: 303441 - DNA, 25 bp, Homo sapien
actcatggtggccaggtcaggtccg

SEQ ID NO: 303442 - DNA, 25 bp, Homo sapien
gctaagagatatgttggtggcccca

SEQ ID NO: 303443 - DNA, 25 bp, Homo sapien
gagagacacggcacagatatacaga

SEQ ID NO: 303444 - DNA, 25 bp, Homo sapien
caggtcgtcttgagctgctgtgcga

SEQ ID NO: 303445 - DNA, 25 bp, Homo sapien
cgtggctgcacccgcgcggtgcccc

SEQ ID NO: 303446 - DNA, 25 bp, Homo sapien
gcggtgccccccgctcggcgcgcgc

SEQ ID NO: 303447 - DNA, 25 bp, Homo sapien
gcggctgccggaccagggtgtaggg

SEQ ID NO: 303448 - DNA, 25 bp, Homo sapien
gcaggatggtgtgcggctgccggac

SEQ ID NO: 303449 - DNA, 25 bp, Homo sapien
ccaagacacgacgcgcaggatggtg

SEQ ID NO: 303450 - DNA, 25 bp, Homo sapien
cggctttgcccgctccgtacgcacc

SEQ ID NO: 303451 - DNA, 25 bp, Homo sapien
cacaatccgagcctttcgcggcata

SEQ ID NO: 303452 - DNA, 25 bp, Homo sapien
gcggccgcgcacaatccgagccttt

SEQ ID NO: 303453 - DNA, 25 bp, Homo sapien
aatccgagcctttcgcggcatagcc

SEQ ID NO: 303454 - DNA, 25 bp, Homo sapien
cccagtccgccctggcggccgcgca

SEQ ID NO: 303455 - DNA, 25 bp, Homo sapien
acgtccatcgcaggcgcggcatgca

SEQ ID NO: 303456 - DNA, 25 bp, Homo sapien
tcctccaacgtccatcgcaggcgcg

SEQ ID NO: 303457 - DNA, 25 bp, Homo sapien
tccaacgtccatcgcaggcgcggca

SEQ ID NO: 303458 - DNA, 25 bp, Homo sapien
tctcctcctccaacgtccatcgcag

SEQ ID NO: 303459 - DNA, 25 bp, Homo sapien
ggagcaggagactggcacagataaa

SEQ ID NO: 303460 - DNA, 25 bp, Homo sapien
tttggcaagggtctgttggggcatc

SEQ ID NO: 303461 - DNA, 25 bp, Homo sapien
gagccacaaacacagatgtgctggg

SEQ ID NO: 303462 - DNA, 25 bp, Homo sapien
caggagactggcacagataaatgaa

SEQ ID NO: 303463 - DNA, 25 bp, Homo sapien
gctcttgaggccgcccctgggctgt

SEQ ID NO: 303464 - DNA, 25 bp, Homo sapien
gacatgaggaagtgcccaaaacaca

SEQ ID NO: 303465 - DNA, 25 bp, Homo sapien
aaaacacagcagaaatctatcacct

SEQ ID NO: 303466 - DNA, 25 bp, Homo sapien
aacacagcagaaatctatcacctcc

SEQ ID NO: 303467 - DNA, 25 bp, Homo sapien
caaaatttatcgcaacgagcagacg

SEQ ID NO: 303468 - DNA, 25 bp, Homo sapien
ttgttaaagctcctgcatgattgca

SEQ ID NO: 303469 - DNA, 25 bp, Homo sapien
tatctgtgaagggacgtttgtccca

SEQ ID NO: 303470 - DNA, 25 bp, Homo sapien
tggaggagccccaacttgttaaagc

SEQ ID NO: 303471 - DNA, 25 bp, Homo sapien
catccggcccgtgctcagcatgtat

SEQ ID NO: 303472 - DNA, 25 bp, Homo sapien
tgagggtgtccacattctgcggcga

SEQ ID NO: 303473 - DNA, 25 bp, Homo sapien
agggtgtccacattctgcggcgagc

SEQ ID NO: 303474 - DNA, 25 bp, Homo sapien
tgtatattaaagagaggacgagcgg

SEQ ID NO: 303475 - DNA, 25 bp, Homo sapien
ctgcccccgccctgccagtccctgc

SEQ ID NO: 303476 - DNA, 25 bp, Homo sapien
gcctgcccccgccctgccagtccct

SEQ ID NO: 303477 - DNA, 25 bp, Homo sapien
cagtgcctgcccccgccctgccagt

SEQ ID NO: 303478 - DNA, 25 bp, Homo sapien
cccagtgcctgcccccgccctgcca

SEQ ID NO: 303479 - DNA, 25 bp, Homo sapien
cctgagctgggtggctcgggggagc

SEQ ID NO: 303480 - DNA, 25 bp, Homo sapien
tgagctgggtggctcgggggagccc

SEQ ID NO: 303481 - DNA, 25 bp, Homo sapien
ccctgagctgggtggctcgggggag

SEQ ID NO: 303482 - DNA, 25 bp, Homo sapien
gagctgggtggctcgggggagccct

SEQ ID NO: 303483 - DNA, 25 bp, Homo sapien
ctccagctcacccacgacctctgtg

SEQ ID NO: 303484 - DNA, 25 bp, Homo sapien
gctcacccacgacctctgtgtccag

SEQ ID NO: 303485 - DNA, 25 bp, Homo sapien
cctatccatgaaggatcgaattcca

SEQ ID NO: 303486 - DNA, 25 bp, Homo sapien
tgcctatccatgaaggatcgaattc

SEQ ID NO: 303487 - DNA, 25 bp, Homo sapien
ggatatagtgactcccagacacctt

SEQ ID NO: 303488 - DNA, 25 bp, Homo sapien
tctttgccctctgaacgctgctggg

SEQ ID NO: 303489 - DNA, 25 bp, Homo sapien
gaacgctgctgggatatagtgactc

SEQ ID NO: 303490 - DNA, 25 bp, Homo sapien
tcttcaatgggagcgaactcctctt

SEQ ID NO: 303491 - DNA, 25 bp, Homo sapien
ttaaaaacggattccagatggcgct

SEQ ID NO: 303492 - DNA, 25 bp, Homo sapien
ccttggctactggattcagagacac

SEQ ID NO: 303493 - DNA, 25 bp, Homo sapien
tgtctgacaactctgcacctgcctt

SEQ ID NO: 303494 - DNA, 25 bp, Homo sapien
ggtggagatctatgtcaaactcaga

SEQ ID NO: 303495 - DNA, 25 bp, Homo sapien
gcagtgacccgggaactaagtacat

SEQ ID NO: 303496 - DNA, 25 bp, Homo sapien
acgtggcctggagtaaggagcccca

SEQ ID NO: 303497 - DNA, 25 bp, Homo sapien
ggcaccaggcggtaattcagtccaa

SEQ ID NO: 303498 - DNA, 25 bp, Homo sapien
gatcacaaaggcaatggcggtccct

SEQ ID NO: 303499 - DNA, 25 bp, Homo sapien
aaaataagtgtggatctccttccaa

SEQ ID NO: 303500 - DNA, 25 bp, Homo sapien
gcgctgaaaataagtgtggatctcc

SEQ ID NO: 303501 - DNA, 25 bp, Homo sapien
taacagacacatgcttccgggggct

SEQ ID NO: 303502 - DNA, 25 bp, Homo sapien
ccagcgctgaaaataagtgtggatc

SEQ ID NO: 303503 - DNA, 25 bp, Homo sapien
cttgagcccaggaggtggaggttgt

SEQ ID NO: 303504 - DNA, 25 bp, Homo sapien
tggaggttgtagtgaaccgtgatca

SEQ ID NO: 303505 - DNA, 25 bp, Homo sapien
gaagatgagggggaggatctcttga

SEQ ID NO: 303506 - DNA, 25 bp, Homo sapien
ggttgtagtgaaccgtgatcatgcc

SEQ ID NO: 303507 - DNA, 25 bp, Homo sapien
tgcggttgtagatgcagaactcctc

SEQ ID NO: 303508 - DNA, 25 bp, Homo sapien
ccgatgtcggacaggacggctttct

SEQ ID NO: 303509 - DNA, 25 bp, Homo sapien
tcgttcacgatggagccgaacacca

SEQ ID NO: 303510 - DNA, 25 bp, Homo sapien
tgatctgcgggaagtacacgtccag

SEQ ID NO: 303511 - DNA, 25 bp, Homo sapien
gtggcagccgcctcctatggccggg

SEQ ID NO: 303512 - DNA, 25 bp, Homo sapien
gcagccgcctcctatggccgggaca

SEQ ID NO: 303513 - DNA, 25 bp, Homo sapien
cgggacagccctctgtagactctgt

SEQ ID NO: 303514 - DNA, 25 bp, Homo sapien
agccgcctcctatggccgggacagc

SEQ ID NO: 303515 - DNA, 25 bp, Homo sapien
gaaagaaggtaatcaactcaggccg

SEQ ID NO: 303516 - DNA, 25 bp, Homo sapien
gggcttcgacttctaacgtgctgcg

SEQ ID NO: 303517 - DNA, 25 bp, Homo sapien
cctgctcaggacaaggcgtgcatct

SEQ ID NO: 303518 - DNA, 25 bp, Homo sapien
cacagagccccaggtttagcgaggg

SEQ ID NO: 303519 - DNA, 25 bp, Homo sapien
ggacattcaagagtgcatctcccat

SEQ ID NO: 303520 - DNA, 25 bp, Homo sapien
gtcccaggaccgggcagaataggca

SEQ ID NO: 303521 - DNA, 25 bp, Homo sapien
ggcagaataggcagtgccacacatg

SEQ ID NO: 303522 - DNA, 25 bp, Homo sapien
gacattcaagagtgcatctcccatg

SEQ ID NO: 303523 - DNA, 25 bp, Homo sapien
tgcgtccgtcccttcgttcagtggg

SEQ ID NO: 303524 - DNA, 25 bp, Homo sapien
tagcagaatcccacgaaccagagga

SEQ ID NO: 303525 - DNA, 25 bp, Homo sapien
agaaaaaggagaaggcgatggcggc

SEQ ID NO: 303526 - DNA, 25 bp, Homo sapien
cactggttggccaggtagcagaatc

SEQ ID NO: 303527 - DNA, 25 bp, Homo sapien
tcttaggacttaggataggcacgca

SEQ ID NO: 303528 - DNA, 25 bp, Homo sapien
caggtacttcagacccatggctaga

SEQ ID NO: 303529 - DNA, 25 bp, Homo sapien
tgtgcatctgatgtcgacacctgtg

SEQ ID NO: 303530 - DNA, 25 bp, Homo sapien
cagacatgacccagaccagtgggaa

SEQ ID NO: 303531 - DNA, 25 bp, Homo sapien
ctgccaggagagagtaggggtgagg

SEQ ID NO: 303532 - DNA, 25 bp, Homo sapien
ccaggagagagtaggggtgaggcca

SEQ ID NO: 303533 - DNA, 25 bp, Homo sapien
gagagagtaggggtgaggccagtgg

SEQ ID NO: 303534 - DNA, 25 bp, Homo sapien
aggagagagtaggggtgaggccagt

SEQ ID NO: 303535 - DNA, 25 bp, Homo sapien
tcctcctggaagcttaggtccttga

SEQ ID NO: 303536 - DNA, 25 bp, Homo sapien
gaagcttaggtccttgaatctccgc

SEQ ID NO: 303537 - DNA, 25 bp, Homo sapien
gctgtgccgaggcagggaacagtgt

SEQ ID NO: 303538 - DNA, 25 bp, Homo sapien
ttaggtccttgaatctccgcacggc

SEQ ID NO: 303539 - DNA, 25 bp, Homo sapien
gagaggctattgctctgcacccaca

SEQ ID NO: 303540 - DNA, 25 bp, Homo sapien
ttcatcactaggcacaaaacagctg

SEQ ID NO: 303541 - DNA, 25 bp, Homo sapien
tcacaccgctgtgaagggagaggct

SEQ ID NO: 303542 - DNA, 25 bp, Homo sapien
tgagcatgcttgtgctaagccctgg

SEQ ID NO: 303543 - DNA, 25 bp, Homo sapien
tctggctgtaggcactcatactgtc

SEQ ID NO: 303544 - DNA, 25 bp, Homo sapien
tgtgtagaaccagagaccaaaatcc

SEQ ID NO: 303545 - DNA, 25 bp, Homo sapien
caggccctcgcagggttgaggcatt

SEQ ID NO: 303546 - DNA, 25 bp, Homo sapien
tggaggtgcccctgactctctggag

SEQ ID NO: 303547 - DNA, 25 bp, Homo sapien
ttgattgtactcattgaccaaagtt

SEQ ID NO: 303548 - DNA, 25 bp, Homo sapien
gagttactgctagaacccttcccta

SEQ ID NO: 303549 - DNA, 25 bp, Homo sapien
gatactctccagacccctgttttag

SEQ ID NO: 303550 - DNA, 25 bp, Homo sapien
taagtcaaccaacaacctaaagagc

SEQ ID NO: 303551 - DNA, 25 bp, Homo sapien
tggcccctgacgaggcactaagtca

SEQ ID NO: 303552 - DNA, 25 bp, Homo sapien
attgttattaaggacaatgacactg

SEQ ID NO: 303553 - DNA, 25 bp, Homo sapien
attaaggacaatgacactgaccaca

SEQ ID NO: 303554 - DNA, 25 bp, Homo sapien
aaggacaatgacactgaccacactg

SEQ ID NO: 303555 - DNA, 25 bp, Homo sapien
aagacttgtctacagcacacatgca

SEQ ID NO: 303556 - DNA, 25 bp, Homo sapien
gctctaattgccaaaagggaccaca

SEQ ID NO: 303557 - DNA, 25 bp, Homo sapien
ggtcagtctgggctaccaaaagttc

SEQ ID NO: 303558 - DNA, 25 bp, Homo sapien
cgggacaaaggactgttagcatctc

SEQ ID NO: 303559 - DNA, 25 bp, Homo sapien
agaccatgagccaagtctgtaggaa

SEQ ID NO: 303560 - DNA, 25 bp, Homo sapien
tcggcgccaatctggtaccgctgga

SEQ ID NO: 303561 - DNA, 25 bp, Homo sapien
ccgagtcggcgccaatctggtaccg

SEQ ID NO: 303562 - DNA, 25 bp, Homo sapien
gccaatctggtaccgctggaaggcc

SEQ ID NO: 303563 - DNA, 25 bp, Homo sapien
aagagggccgagtcggcgccaatct

SEQ ID NO: 303564 - DNA, 25 bp, Homo sapien
cataccggcgggatccggcccagtg

SEQ ID NO: 303565 - DNA, 25 bp, Homo sapien
gctccacgtagggcgcgtaaggcat

SEQ ID NO: 303566 - DNA, 25 bp, Homo sapien
cggctgctggtaggtgccgcccata

SEQ ID NO: 303567 - DNA, 25 bp, Homo sapien
agtagccctgcgactggtagccctg

SEQ ID NO: 303568 - DNA, 25 bp, Homo sapien
ccagggctaacaggcagggtgtctc

SEQ ID NO: 303569 - DNA, 25 bp, Homo sapien
tgccaacagaaggagcgagtttccc

SEQ ID NO: 303570 - DNA, 25 bp, Homo sapien
ccataaaatggagacggccctgaca

SEQ ID NO: 303571 - DNA, 25 bp, Homo sapien
gaaacacctctcatgcgcttggctg

SEQ ID NO: 303572 - DNA, 25 bp, Homo sapien
catgagcaccttctggcctgtcctt

SEQ ID NO: 303573 - DNA, 25 bp, Homo sapien
actgtgggatccatgagcaccttct

SEQ ID NO: 303574 - DNA, 25 bp, Homo sapien
ccttcatggctttacagaggcctcc

SEQ ID NO: 303575 - DNA, 25 bp, Homo sapien
catggctttacagaggcctccaggc

SEQ ID NO: 303576 - DNA, 25 bp, Homo sapien
ttcagcatccgacaggcggcaggtg

SEQ ID NO: 303577 - DNA, 25 bp, Homo sapien
ggaagcacgtgacgggcctttggtg

SEQ ID NO: 303578 - DNA, 25 bp, Homo sapien
ggccttcggatgacagtttcggtgt

SEQ ID NO: 303579 - DNA, 25 bp, Homo sapien
cacgtgacgggcctttggtgccgca

SEQ ID NO: 303580 - DNA, 25 bp, Homo sapien
cttctgaaggctgcgccattgggcg

SEQ ID NO: 303581 - DNA, 25 bp, Homo sapien
attgggcgccccaactgcttttcgg

SEQ ID NO: 303582 - DNA, 25 bp, Homo sapien
tgggatgctgccaacagttccaaaa

SEQ ID NO: 303583 - DNA, 25 bp, Homo sapien
tgcttttcggccagttatcaccttt

SEQ ID NO: 303584 - DNA, 25 bp, Homo sapien
cttggaggaacccctgcgggagcgc

SEQ ID NO: 303585 - DNA, 25 bp, Homo sapien
gaacccctgcgggagcgcccgcctc

SEQ ID NO: 303586 - DNA, 25 bp, Homo sapien
cgcctccccgcagagcagcgagtgg

SEQ ID NO: 303587 - DNA, 25 bp, Homo sapien
cgcccgcctccccgcagagcagcga

SEQ ID NO: 303588 - DNA, 25 bp, Homo sapien
gcagcaagctcctcctctgcgccgc

SEQ ID NO: 303589 - DNA, 25 bp, Homo sapien
gcaagctcctcctctgcgccgccat

SEQ ID NO: 303590 - DNA, 25 bp, Homo sapien
ctgcagcaagctcctcctctgcgcc

SEQ ID NO: 303591 - DNA, 25 bp, Homo sapien
actctgcagcaagctcctcctctgc

SEQ ID NO: 303592 - DNA, 25 bp, Homo sapien
gacaattcttccactcagcgctctc

SEQ ID NO: 303593 - DNA, 25 bp, Homo sapien
tagggatgagtctgaagacaattct

SEQ ID NO: 303594 - DNA, 25 bp, Homo sapien
acatacgcgtcagaggacgcagggc

SEQ ID NO: 303595 - DNA, 25 bp, Homo sapien
ctatgtgcacatacgcgtcagagga

SEQ ID NO: 303596 - DNA, 25 bp, Homo sapien
acaggactgccaagtctctcgcttc

SEQ ID NO: 303597 - DNA, 25 bp, Homo sapien
ggactgccaagtctctcgcttcctt

SEQ ID NO: 303598 - DNA, 25 bp, Homo sapien
gattccattaaagcctacaggactg

SEQ ID NO: 303599 - DNA, 25 bp, Homo sapien
cgagcgtccattgctgattccatta

SEQ ID NO: 303600 - DNA, 25 bp, Homo sapien
taagtacccgtgaatagtgtctaga

SEQ ID NO: 303601 - DNA, 25 bp, Homo sapien
tcattaagatcagggccatagggct

SEQ ID NO: 303602 - DNA, 25 bp, Homo sapien
taatgctggcaacttactcagtggg

SEQ ID NO: 303603 - DNA, 25 bp, Homo sapien
aaaactgtgtgtctgacggcaatca

SEQ ID NO: 303604 - DNA, 25 bp, Homo sapien
cttttaagtcggagtttatgagcta

SEQ ID NO: 303605 - DNA, 25 bp, Homo sapien
ttatgagctagtttataggacatcc

SEQ ID NO: 303606 - DNA, 25 bp, Homo sapien
gagagtaactgagactggcttttaa

SEQ ID NO: 303607 - DNA, 25 bp, Homo sapien
gagctagtttataggacatcctcat

SEQ ID NO: 303608 - DNA, 25 bp, Homo sapien
tgagccaaccccagagaggtggcag

SEQ ID NO: 303609 - DNA, 25 bp, Homo sapien
agaggcaggtcatctgtccagcttg

SEQ ID NO: 303610 - DNA, 25 bp, Homo sapien
tggcagagaggcaggtcatctgtcc

SEQ ID NO: 303611 - DNA, 25 bp, Homo sapien
gtcatctgtccagcttggctgctgc

SEQ ID NO: 303612 - DNA, 25 bp, Homo sapien
catcagcagagtagctgcggttgga

SEQ ID NO: 303613 - DNA, 25 bp, Homo sapien
gccatcagcagagtagctgcggttg

SEQ ID NO: 303614 - DNA, 25 bp, Homo sapien
tgccatcagcagagtagctgcggtt

SEQ ID NO: 303615 - DNA, 25 bp, Homo sapien
tcagcagagtagctgcggttggagg

SEQ ID NO: 303616 - DNA, 25 bp, Homo sapien
catcatagccgttgaagaccccata

SEQ ID NO: 303617 - DNA, 25 bp, Homo sapien
tggtcactcggttgccatcatagcc

SEQ ID NO: 303618 - DNA, 25 bp, Homo sapien
gaccccatacaggaagcagttgttc

SEQ ID NO: 303619 - DNA, 25 bp, Homo sapien
agccgctgggccacgaagttggtca

SEQ ID NO: 303620 - DNA, 25 bp, Homo sapien
acagggcaaaggctggttcaaaaca

SEQ ID NO: 303621 - DNA, 25 bp, Homo sapien
aggacagggcaaaggctggttcaaa

SEQ ID NO: 303622 - DNA, 25 bp, Homo sapien
ggacagggcaaaggctggttcaaaa

SEQ ID NO: 303623 - DNA, 25 bp, Homo sapien
cagggcaaaggctggttcaaaacac

SEQ ID NO: 303624 - DNA, 25 bp, Homo sapien
ccaaggcgtcgtcaatggactccag

SEQ ID NO: 303625 - DNA, 25 bp, Homo sapien
cttctcagccaaggcgtcgtcaatg

SEQ ID NO: 303626 - DNA, 25 bp, Homo sapien
tctggcaattgcgactggaggcttg

SEQ ID NO: 303627 - DNA, 25 bp, Homo sapien
cgactggaggcttgccttctcagcc

SEQ ID NO: 303628 - DNA, 25 bp, Homo sapien
cagtaggcgatgtgagcaggtggtt

SEQ ID NO: 303629 - DNA, 25 bp, Homo sapien
gggacccattcaggacgaaggactg

SEQ ID NO: 303630 - DNA, 25 bp, Homo sapien
ccattcaggacgaaggactgggaaa

SEQ ID NO: 303631 - DNA, 25 bp, Homo sapien
gttgacaagggcggggacccattca

SEQ ID NO: 303632 - DNA, 25 bp, Homo sapien
ggatcttctgatactgaggaggcag

SEQ ID NO: 303633 - DNA, 25 bp, Homo sapien
cgacattggcgacgtagagcttgtt

SEQ ID NO: 303634 - DNA, 25 bp, Homo sapien
ctctctaacgtcttgagtctctcaa

SEQ ID NO: 303635 - DNA, 25 bp, Homo sapien
tgttgagaaggaccgccacaacggc

SEQ ID NO: 303636 - DNA, 25 bp, Homo sapien
gcaacccatccactgtcgatttgca

SEQ ID NO: 303637 - DNA, 25 bp, Homo sapien
agctgcgaaagacggaagagctcat

SEQ ID NO: 303638 - DNA, 25 bp, Homo sapien
ccagctgcgaaagacggaagagctc

SEQ ID NO: 303639 - DNA, 25 bp, Homo sapien
ttgcataaaagtgcacggtttgtac

SEQ ID NO: 303640 - DNA, 25 bp, Homo sapien
tgtaatccccgatccgccgggtgct

SEQ ID NO: 303641 - DNA, 25 bp, Homo sapien
tccgtgtagccatatttaaccttgt

SEQ ID NO: 303642 - DNA, 25 bp, Homo sapien
tgtccgtgtagccatatttaacctt

SEQ ID NO: 303643 - DNA, 25 bp, Homo sapien
cttgtaatccccgatccgccgggtg

SEQ ID NO: 303644 - DNA, 25 bp, Homo sapien
gacatcagcaccaagaagcccgtca

SEQ ID NO: 303645 - DNA, 25 bp, Homo sapien
tgtgccccatggatttctggctctg

SEQ ID NO: 303646 - DNA, 25 bp, Homo sapien
catgggctgcctctagggccttgta

SEQ ID NO: 303647 - DNA, 25 bp, Homo sapien
cgatgattggtttggacttggcagc

SEQ ID NO: 303648 - DNA, 25 bp, Homo sapien
actagcagggtcatgtcctcgtgcc

SEQ ID NO: 303649 - DNA, 25 bp, Homo sapien
ccaccactggcgaaggtgtcgctgt

SEQ ID NO: 303650 - DNA, 25 bp, Homo sapien
tagccaaagttcctcactagcaggg

SEQ ID NO: 303651 - DNA, 25 bp, Homo sapien
caaactcagtgtcaatcatcgcagc

SEQ ID NO: 303652 - DNA, 25 bp, Homo sapien
cacagacacagggtacactcgtcct

SEQ ID NO: 303653 - DNA, 25 bp, Homo sapien
ctgtgagccccgttgaccatctggc

SEQ ID NO: 303654 - DNA, 25 bp, Homo sapien
tgctctgggcgctggagtatggcac

SEQ ID NO: 303655 - DNA, 25 bp, Homo sapien
ggcatgacaagggagagggtcacgc

SEQ ID NO: 303656 - DNA, 25 bp, Homo sapien
ggaactgcctgttagcgctgcccag

SEQ ID NO: 303657 - DNA, 25 bp, Homo sapien
tggaactgcctgttagcgctgccca

SEQ ID NO: 303658 - DNA, 25 bp, Homo sapien
ctggaactgcctgttagcgctgccc

SEQ ID NO: 303659 - DNA, 25 bp, Homo sapien
cacaggaagttcctcgggtgaagct

SEQ ID NO: 303660 - DNA, 25 bp, Homo sapien
tcagttcaagcgtctaatagccaca

SEQ ID NO: 303661 - DNA, 25 bp, Homo sapien
caagtggctagagacgccgtgacag

SEQ ID NO: 303662 - DNA, 25 bp, Homo sapien
ttttaaagcaccagatgcatgtggc

SEQ ID NO: 303663 - DNA, 25 bp, Homo sapien
tggtccacgctccagaggcggtaaa

SEQ ID NO: 303664 - DNA, 25 bp, Homo sapien
agctgctgctctgcgtgtgcgtgtt

SEQ ID NO: 303665 - DNA, 25 bp, Homo sapien
aggcggtaaaactcagcaaagtcca

SEQ ID NO: 303666 - DNA, 25 bp, Homo sapien
aagaggcctccgtcagagctggagc

SEQ ID NO: 303667 - DNA, 25 bp, Homo sapien
ccatctgggaggaagtggccttcag

SEQ ID NO: 303668 - DNA, 25 bp, Homo sapien
tggccttcagcttcccgggtggtga

SEQ ID NO: 303669 - DNA, 25 bp, Homo sapien
tatgaaccacaggtccagtctgcac

SEQ ID NO: 303670 - DNA, 25 bp, Homo sapien
ccgttgtggcacaggcagatgttag

SEQ ID NO: 303671 - DNA, 25 bp, Homo sapien
agaggcccctcatcagtggtaaaga

SEQ ID NO: 303672 - DNA, 25 bp, Homo sapien
gaaatagtctaactcaggccctggg

SEQ ID NO: 303673 - DNA, 25 bp, Homo sapien
caacagatgacacaaccaaggcagg

SEQ ID NO: 303674 - DNA, 25 bp, Homo sapien
taaagacagttcatctcagctgcct

SEQ ID NO: 303675 - DNA, 25 bp, Homo sapien
ggctgtgcgacagcggctagtccct

SEQ ID NO: 303676 - DNA, 25 bp, Homo sapien
tggctgccccactgattgtgtggct

SEQ ID NO: 303677 - DNA, 25 bp, Homo sapien
tttgacttcgcagagaccaagcacc

SEQ ID NO: 303678 - DNA, 25 bp, Homo sapien
tgtggcttggccaaggtgcaagtct

SEQ ID NO: 303679 - DNA, 25 bp, Homo sapien
gctctgccgcaggaaaatggattcc

SEQ ID NO: 303680 - DNA, 25 bp, Homo sapien
agaacagagatggcttcaaagtggg

SEQ ID NO: 303681 - DNA, 25 bp, Homo sapien
cagaggcattcttggaagagaattc

SEQ ID NO: 303682 - DNA, 25 bp, Homo sapien
gactttaaatcctctcacctgcaga

SEQ ID NO: 303683 - DNA, 25 bp, Homo sapien
gttcctaagcagatgcactgtttcg

SEQ ID NO: 303684 - DNA, 25 bp, Homo sapien
tgcagaggctcttcttagagggatg

SEQ ID NO: 303685 - DNA, 25 bp, Homo sapien
tgagttcttacgtcccagaaagcag

SEQ ID NO: 303686 - DNA, 25 bp, Homo sapien
gagtggagttggcaccacaaccctg

SEQ ID NO: 303687 - DNA, 25 bp, Homo sapien
gaagctgagaaggacagatcctgga

SEQ ID NO: 303688 - DNA, 25 bp, Homo sapien
ctgacaccaaagctccaggagtgtt

SEQ ID NO: 303689 - DNA, 25 bp, Homo sapien
tctctctctcgggtggcagggctga

SEQ ID NO: 303690 - DNA, 25 bp, Homo sapien
gacaccaaagctccaggagtgttca

SEQ ID NO: 303691 - DNA, 25 bp, Homo sapien
accaaagctccaggagtgttcaggg

SEQ ID NO: 303692 - DNA, 25 bp, Homo sapien
tgcagtaagtaacaccaaggctggg

SEQ ID NO: 303693 - DNA, 25 bp, Homo sapien
gacataaagtcaacagtgcagcgcc

SEQ ID NO: 303694 - DNA, 25 bp, Homo sapien
tttccccacggaggctatgggaggc

SEQ ID NO: 303695 - DNA, 25 bp, Homo sapien
catgagagaatgagacgaccagacc

SEQ ID NO: 303696 - DNA, 25 bp, Homo sapien
gcggaaatttcaggagcttggccca

SEQ ID NO: 303697 - DNA, 25 bp, Homo sapien
tcagcaatctaagtgggtcgtcgcc

SEQ ID NO: 303698 - DNA, 25 bp, Homo sapien
gagtgcaggagcttaatcatggcgc

SEQ ID NO: 303699 - DNA, 25 bp, Homo sapien
tccgcgtgggaacagagcctgtgct

SEQ ID NO: 303700 - DNA, 25 bp, Homo sapien
tgacagcacgcacgcttagaaagcc

SEQ ID NO: 303701 - DNA, 25 bp, Homo sapien
tcaaagagatttatgggccaaggtc

SEQ ID NO: 303702 - DNA, 25 bp, Homo sapien
gatacggagctgaactgtctcccag

SEQ ID NO: 303703 - DNA, 25 bp, Homo sapien
cagggagccgcttacatgtgacagc

SEQ ID NO: 303704 - DNA, 25 bp, Homo sapien
tcagctacatacctggaacgtagtt

SEQ ID NO: 303705 - DNA, 25 bp, Homo sapien
taaatgagatattacacgtcagcta

SEQ ID NO: 303706 - DNA, 25 bp, Homo sapien
gaggccacggataccaactctttgc

SEQ ID NO: 303707 - DNA, 25 bp, Homo sapien
caggaggaaacttcatgacacatga

SEQ ID NO: 303708 - DNA, 25 bp, Homo sapien
tgtcaaatcgcttgcaggcctggaa

SEQ ID NO: 303709 - DNA, 25 bp, Homo sapien
ctgagggatggctgtcaaatcgctt

SEQ ID NO: 303710 - DNA, 25 bp, Homo sapien
gctgcccaggaggtttagttggcac

SEQ ID NO: 303711 - DNA, 25 bp, Homo sapien
cccaggaggtttagttggcactgag

SEQ ID NO: 303712 - DNA, 25 bp, Homo sapien
tggcctggcacgagaagatcccagt

SEQ ID NO: 303713 - DNA, 25 bp, Homo sapien
gaccaggcgacaaaaccccaggatg

SEQ ID NO: 303714 - DNA, 25 bp, Homo sapien
atcccagtgcacaagtcagaccagg

SEQ ID NO: 303715 - DNA, 25 bp, Homo sapien
gggtcctgaaggatgggccattcta

SEQ ID NO: 303716 - DNA, 25 bp, Homo sapien
cagaacagaggacagccttggggga

SEQ ID NO: 303717 - DNA, 25 bp, Homo sapien
cagaggacagccttgggggataagt

SEQ ID NO: 303718 - DNA, 25 bp, Homo sapien
aacagaggacagccttgggggataa

SEQ ID NO: 303719 - DNA, 25 bp, Homo sapien
gaacagaggacagccttgggggata

SEQ ID NO: 303720 - DNA, 25 bp, Homo sapien
gagtccttctctcagaatagctggg

SEQ ID NO: 303721 - DNA, 25 bp, Homo sapien
agaggcccatgaaagtcacaatgca

SEQ ID NO: 303722 - DNA, 25 bp, Homo sapien
cacacctgatggaaggttggagtcc

SEQ ID NO: 303723 - DNA, 25 bp, Homo sapien
gagaacatgggtcctaaccaggaac

SEQ ID NO: 303724 - DNA, 25 bp, Homo sapien
caaagagaaattttaatgtattaat

SEQ ID NO: 303725 - DNA, 25 bp, Homo sapien
ttaatatatttatctttctaccaat

SEQ ID NO: 303726 - DNA, 25 bp, Homo sapien
gtattaatatatttatctttctacc

SEQ ID NO: 303727 - DNA, 25 bp, Homo sapien
tcaaagagaaattttaatgtattaa

SEQ ID NO: 303728 - DNA, 25 bp, Homo sapien
ggaaggttccggaactcatcagaca

SEQ ID NO: 303729 - DNA, 25 bp, Homo sapien
tagttttatcttccgcagagactga

SEQ ID NO: 303730 - DNA, 25 bp, Homo sapien
gacttccaggtgtagttttatcttc

SEQ ID NO: 303731 - DNA, 25 bp, Homo sapien
gggaaggttccggaactcatcagac

SEQ ID NO: 303732 - DNA, 25 bp, Homo sapien
acataggtcagtgtgtgtcatcggg

SEQ ID NO: 303733 - DNA, 25 bp, Homo sapien
gttacataggtcagtgtgtgtcatc

SEQ ID NO: 303734 - DNA, 25 bp, Homo sapien
agattaattcatcactcagcctagt

SEQ ID NO: 303735 - DNA, 25 bp, Homo sapien
gattaattcatcactcagcctagta

SEQ ID NO: 303736 - DNA, 25 bp, Homo sapien
ccagcagttaaggacggctctgagg

SEQ ID NO: 303737 - DNA, 25 bp, Homo sapien
tggggatcaccatacactctgctgc

SEQ ID NO: 303738 - DNA, 25 bp, Homo sapien
gggatcaccatacactctgctgccc

SEQ ID NO: 303739 - DNA, 25 bp, Homo sapien
ggggatcaccatacactctgctgcc

SEQ ID NO: 303740 - DNA, 25 bp, Homo sapien
tccatgtcctcaatgcggcactcag

SEQ ID NO: 303741 - DNA, 25 bp, Homo sapien
caatgcggcactcagtgtgttgggc

SEQ ID NO: 303742 - DNA, 25 bp, Homo sapien
ggttcataccaaagtccgcctccat

SEQ ID NO: 303743 - DNA, 25 bp, Homo sapien
gaggccgaagtggagtcagccttgt

SEQ ID NO: 303744 - DNA, 25 bp, Homo sapien
aagtctggattctccattgaactcg

SEQ ID NO: 303745 - DNA, 25 bp, Homo sapien
ggcaggcacaaaataatcacattcc

SEQ ID NO: 303746 - DNA, 25 bp, Homo sapien
tctgagcatcaagaaaaccttgaca

SEQ ID NO: 303747 - DNA, 25 bp, Homo sapien
caagcacgaaggcaggcacaaaata

SEQ ID NO: 303748 - DNA, 25 bp, Homo sapien
ggggagatgctggcgtccgccgcag

SEQ ID NO: 303749 - DNA, 25 bp, Homo sapien
cgcccggcatcgcaggcagcgcggc

SEQ ID NO: 303750 - DNA, 25 bp, Homo sapien
ctgggtctcagcaacggcggcagca

SEQ ID NO: 303751 - DNA, 25 bp, Homo sapien
cgggcgcccggcatcgcaggcagcg

SEQ ID NO: 303752 - DNA, 25 bp, Homo sapien
ggattcgctgcccaggaaagctgca

SEQ ID NO: 303753 - DNA, 25 bp, Homo sapien
gctctggtagatgatcggattcgct

SEQ ID NO: 303754 - DNA, 25 bp, Homo sapien
ggtagatgatcggattcgctgccca

SEQ ID NO: 303755 - DNA, 25 bp, Homo sapien
tgatcggattcgctgcccaggaaag

SEQ ID NO: 303756 - DNA, 25 bp, Homo sapien
ttgcccaaggcaagggtccctctca

SEQ ID NO: 303757 - DNA, 25 bp, Homo sapien
ggcaaagtccaggctgctgccttca

SEQ ID NO: 303758 - DNA, 25 bp, Homo sapien
tcagccttgcccaaggcaagggtcc

SEQ ID NO: 303759 - DNA, 25 bp, Homo sapien
gctgccttcagccttgcccaaggca

SEQ ID NO: 303760 - DNA, 25 bp, Homo sapien
agggcccgagggctctgactgcctc

SEQ ID NO: 303761 - DNA, 25 bp, Homo sapien
tctgactgcctcttacacacaaagc

SEQ ID NO: 303762 - DNA, 25 bp, Homo sapien
ggtgcatatgcacatttcaggaggg

SEQ ID NO: 303763 - DNA, 25 bp, Homo sapien
ccggggctagtggtgcatatgcaca

SEQ ID NO: 303764 - DNA, 25 bp, Homo sapien
catcccatggactggtcccatgggc

SEQ ID NO: 303765 - DNA, 25 bp, Homo sapien
gggcccgatacacagatgtacagac

SEQ ID NO: 303766 - DNA, 25 bp, Homo sapien
gatgtacagacacatcccatggact

SEQ ID NO: 303767 - DNA, 25 bp, Homo sapien
tcagggcccgatacacagatgtaca

SEQ ID NO: 303768 - DNA, 25 bp, Homo sapien
cagggacgcctacacaaagtggtca

SEQ ID NO: 303769 - DNA, 25 bp, Homo sapien
cagtttagactgaacggagagggca

SEQ ID NO: 303770 - DNA, 25 bp, Homo sapien
tgaaacagacggaaacggagactcc

SEQ ID NO: 303771 - DNA, 25 bp, Homo sapien
tcccggcgagactgaagaaacaact

SEQ ID NO: 303772 - DNA, 25 bp, Homo sapien
gacctctgctaaatgtcccagggca

SEQ ID NO: 303773 - DNA, 25 bp, Homo sapien
tgactgcgggcaggtagaacaatct

SEQ ID NO: 303774 - DNA, 25 bp, Homo sapien
caaagtgagaccagttgggctggac

SEQ ID NO: 303775 - DNA, 25 bp, Homo sapien
gagctgtccacacggagtgggcaca

SEQ ID NO: 303776 - DNA, 25 bp, Homo sapien
tataatcccagctataccggctgag

SEQ ID NO: 303777 - DNA, 25 bp, Homo sapien
aagttagctgagtgtagtggcgcat

SEQ ID NO: 303778 - DNA, 25 bp, Homo sapien
ctataatcccagctataccggctga

SEQ ID NO: 303779 - DNA, 25 bp, Homo sapien
caaaagttagctgagtgtagtggcg

SEQ ID NO: 303780 - DNA, 25 bp, Homo sapien
cataagccgtgaagttggactcgca

SEQ ID NO: 303781 - DNA, 25 bp, Homo sapien
aagaagccgtagagcgacttgcgca

SEQ ID NO: 303782 - DNA, 25 bp, Homo sapien
gcttgaagtagatgccctcgggcgt

SEQ ID NO: 303783 - DNA, 25 bp, Homo sapien
tcaggccgcggatgtagttcaggtc

SEQ ID NO: 303784 - DNA, 25 bp, Homo sapien
gataactcccaaggtgaggccaggc

SEQ ID NO: 303785 - DNA, 25 bp, Homo sapien
catagggaccccgagtgtttgagcc

SEQ ID NO: 303786 - DNA, 25 bp, Homo sapien
cagccgctgtgtacccagaattgga

SEQ ID NO: 303787 - DNA, 25 bp, Homo sapien
gacaatgagagctggatccgacgac

SEQ ID NO: 303788 - DNA, 25 bp, Homo sapien
gtgcctttgtaggccagagacccac

SEQ ID NO: 303789 - DNA, 25 bp, Homo sapien
gggcactgacccaaacctcagggct

SEQ ID NO: 303790 - DNA, 25 bp, Homo sapien
gggcaagaggcattccaggatctct

SEQ ID NO: 303791 - DNA, 25 bp, Homo sapien
ggatctcttggattgatattgcagg

SEQ ID NO: 303792 - DNA, 25 bp, Homo sapien
ccttcactgggaaatctctcccagc

SEQ ID NO: 303793 - DNA, 25 bp, Homo sapien
caaaacccattttctcagatcgcct

SEQ ID NO: 303794 - DNA, 25 bp, Homo sapien
ggtacctgagggaattctaacacta

SEQ ID NO: 303795 - DNA, 25 bp, Homo sapien
tgctggcaaccccttagcctgtcgg

SEQ ID NO: 303796 - DNA, 25 bp, Homo sapien
gagcacgagggcgagtggaggcgga

SEQ ID NO: 303797 - DNA, 25 bp, Homo sapien
gggagcacgagggcgagtggaggcg

SEQ ID NO: 303798 - DNA, 25 bp, Homo sapien
gcacgagggcgagtggaggcggagg

SEQ ID NO: 303799 - DNA, 25 bp, Homo sapien
aagggagcacgagggcgagtggagg

SEQ ID NO: 303800 - DNA, 25 bp, Homo sapien
cgaccttgcgcacggagctgcgaag

SEQ ID NO: 303801 - DNA, 25 bp, Homo sapien
cacccatcaacatggccccttcact

SEQ ID NO: 303802 - DNA, 25 bp, Homo sapien
gtgcgcgctaccactccgcaggact

SEQ ID NO: 303803 - DNA, 25 bp, Homo sapien
ctccgcaggactcgcctctggccgg

SEQ ID NO: 303804 - DNA, 25 bp, Homo sapien
cagcctgagaggaggcgctgcaacc

SEQ ID NO: 303805 - DNA, 25 bp, Homo sapien
gagaggaggcgctgcaacctccccg

SEQ ID NO: 303806 - DNA, 25 bp, Homo sapien
aggcgccggcagcagcctgagagga

SEQ ID NO: 303807 - DNA, 25 bp, Homo sapien
cgccggcggccctcattccttctct

SEQ ID NO: 303808 - DNA, 25 bp, Homo sapien
gggcaggcctgcttcggggcactgg

SEQ ID NO: 303809 - DNA, 25 bp, Homo sapien
ggcactggaggtctccgaggttggg

SEQ ID NO: 303810 - DNA, 25 bp, Homo sapien
tcggggcactggaggtctccgaggt

SEQ ID NO: 303811 - DNA, 25 bp, Homo sapien
agggcaggcctgcttcggggcactg

SEQ ID NO: 303812 - DNA, 25 bp, Homo sapien
tcacggcgagggctgtaactacaag

SEQ ID NO: 303813 - DNA, 25 bp, Homo sapien
tgtaaaaggcgactgtcacggcgag

SEQ ID NO: 303814 - DNA, 25 bp, Homo sapien
taaggacctcccgatgcagaaaatc

SEQ ID NO: 303815 - DNA, 25 bp, Homo sapien
ttaagagatccctcggccctaagga

SEQ ID NO: 303816 - DNA, 25 bp, Homo sapien
gcaacagagcccgatagagactcag

SEQ ID NO: 303817 - DNA, 25 bp, Homo sapien
tcagtgtagcgaagctgtcggccct

SEQ ID NO: 303818 - DNA, 25 bp, Homo sapien
ccaatttgccgttgagaaagaccag

SEQ ID NO: 303819 - DNA, 25 bp, Homo sapien
aattcacggcggatggaggcaaagt

SEQ ID NO: 303820 - DNA, 25 bp, Homo sapien
caggtttagggacatgaaagactat

SEQ ID NO: 303821 - DNA, 25 bp, Homo sapien
gataacgtttgtatttacaggtgga

SEQ ID NO: 303822 - DNA, 25 bp, Homo sapien
ccatttacagtcaatagaggcttca

SEQ ID NO: 303823 - DNA, 25 bp, Homo sapien
cgagtacattcccacctcaaatgca

SEQ ID NO: 303824 - DNA, 25 bp, Homo sapien
caggaatgacataagggaaaacaaa

SEQ ID NO: 303825 - DNA, 25 bp, Homo sapien
actctcctctataatatcccgtgtc

SEQ ID NO: 303826 - DNA, 25 bp, Homo sapien
gatgacagtgtgattcagatcggaa

SEQ ID NO: 303827 - DNA, 25 bp, Homo sapien
ctgagccggataaaggatgacagtg

SEQ ID NO: 303828 - DNA, 25 bp, Homo sapien
gtgtgattcagatcggaataccact

SEQ ID NO: 303829 - DNA, 25 bp, Homo sapien
tcccgactacagtggagtcttcctg

SEQ ID NO: 303830 - DNA, 25 bp, Homo sapien
ttcctgtggagttagaaccctgggc

SEQ ID NO: 303831 - DNA, 25 bp, Homo sapien
aagtacttgggcaccacagcgaaga

SEQ ID NO: 303832 - DNA, 25 bp, Homo sapien
gcagcagtccccagataagcccatt

SEQ ID NO: 303833 - DNA, 25 bp, Homo sapien
catctgctcgattacacctggaaga

SEQ ID NO: 303834 - DNA, 25 bp, Homo sapien
acccatctgctcgattacacctgga

SEQ ID NO: 303835 - DNA, 25 bp, Homo sapien
aacacccatctgctcgattacacct

SEQ ID NO: 303836 - DNA, 25 bp, Homo sapien
tctgctcgattacacctggaagagg

SEQ ID NO: 303837 - DNA, 25 bp, Homo sapien
aagtcaatggccgtgccaatgccat

SEQ ID NO: 303838 - DNA, 25 bp, Homo sapien
gtcatccttcttgcctttgcgctca

SEQ ID NO: 303839 - DNA, 25 bp, Homo sapien
gcaccagccgggcattggagagcac

SEQ ID NO: 303840 - DNA, 25 bp, Homo sapien
ccgcttaactgccagcgtggcgatg

SEQ ID NO: 303841 - DNA, 25 bp, Homo sapien
tccagttgggttcttcccagctcct

SEQ ID NO: 303842 - DNA, 25 bp, Homo sapien
ctggtaggggcactgatcgcccgat

SEQ ID NO: 303843 - DNA, 25 bp, Homo sapien
tttccccgaatggctcaggcgggtg

SEQ ID NO: 303844 - DNA, 25 bp, Homo sapien
gggcactgatcgcccgatcgtacat

SEQ ID NO: 303845 - DNA, 25 bp, Homo sapien
ggcccgtcttcatgtccctgttcag

SEQ ID NO: 303846 - DNA, 25 bp, Homo sapien
aggcccgtcttcatgtccctgttca

SEQ ID NO: 303847 - DNA, 25 bp, Homo sapien
tctgcaaggaccggctcaggcccgt

SEQ ID NO: 303848 - DNA, 25 bp, Homo sapien
aggaccggctcaggcccgtcttcat

SEQ ID NO: 303849 - DNA, 25 bp, Homo sapien
caaggcaagagagagaggcacgtga

SEQ ID NO: 303850 - DNA, 25 bp, Homo sapien
gccaaggcaagagagagaggcacgt

SEQ ID NO: 303851 - DNA, 25 bp, Homo sapien
ctgccaaggcaagagagagaggcac

SEQ ID NO: 303852 - DNA, 25 bp, Homo sapien
ggcaagagagagaggcacgtgagct

SEQ ID NO: 303853 - DNA, 25 bp, Homo sapien
gacttcttcaagtctacctggccct

SEQ ID NO: 303854 - DNA, 25 bp, Homo sapien
gtgacttcttcaagtctacctggcc

SEQ ID NO: 303855 - DNA, 25 bp, Homo sapien
ctgcagggacatgcggagtcgtgac

SEQ ID NO: 303856 - DNA, 25 bp, Homo sapien
catgcggagtcgtgacttcttcaag

SEQ ID NO: 303857 - DNA, 25 bp, Homo sapien
atgtcaggcaacttggcccgcagga

SEQ ID NO: 303858 - DNA, 25 bp, Homo sapien
tgcaggtcatcgtagaggctgccac

SEQ ID NO: 303859 - DNA, 25 bp, Homo sapien
gaagctccggagctcggcacatatg

SEQ ID NO: 303860 - DNA, 25 bp, Homo sapien
tcaagtacatgtcccgaagcggcat

SEQ ID NO: 303861 - DNA, 25 bp, Homo sapien
aagagggaccctatggctggccaat

SEQ ID NO: 303862 - DNA, 25 bp, Homo sapien
actgtctttggagagaggtagcccc

SEQ ID NO: 303863 - DNA, 25 bp, Homo sapien
aacggtcggccagcatatccggaga

SEQ ID NO: 303864 - DNA, 25 bp, Homo sapien
tggattctcacgacgcaccaggaag

SEQ ID NO: 303865 - DNA, 25 bp, Homo sapien
gagtgtatcctaattcgtctatttc

SEQ ID NO: 303866 - DNA, 25 bp, Homo sapien
cagacaatgagcaatacagagtgta

SEQ ID NO: 303867 - DNA, 25 bp, Homo sapien
gcaatacagagtgtatcctaattcg

SEQ ID NO: 303868 - DNA, 25 bp, Homo sapien
tcctaattcgtctatttcttcaggg

SEQ ID NO: 303869 - DNA, 25 bp, Homo sapien
caccaactaggtagccaagtgtatc

SEQ ID NO: 303870 - DNA, 25 bp, Homo sapien
tgtatctaacggagaatccagggcc

SEQ ID NO: 303871 - DNA, 25 bp, Homo sapien
ggcctgaccaccaacacccgctttg

SEQ ID NO: 303872 - DNA, 25 bp, Homo sapien
tgtgaggcaccaactaggtagccaa

SEQ ID NO: 303873 - DNA, 25 bp, Homo sapien
taggcagatatgctccagggacaag

SEQ ID NO: 303874 - DNA, 25 bp, Homo sapien
tgaataggaacaggcaaacgggcaa

SEQ ID NO: 303875 - DNA, 25 bp, Homo sapien
tcatgatgaagtggtgccctggcag

SEQ ID NO: 303876 - DNA, 25 bp, Homo sapien
cacagatgacgagcagacactgggc

SEQ ID NO: 303877 - DNA, 25 bp, Homo sapien
cagctgacattcagtcgactgtcta

SEQ ID NO: 303878 - DNA, 25 bp, Homo sapien
ccaaaccccaactagtgactggatt

SEQ ID NO: 303879 - DNA, 25 bp, Homo sapien
tctaaggctgcgttccttcaaggcc

SEQ ID NO: 303880 - DNA, 25 bp, Homo sapien
cagggcctgtctgggtagaaaacat

SEQ ID NO: 303881 - DNA, 25 bp, Homo sapien
caaggaggaatgtaggaaatgccca

SEQ ID NO: 303882 - DNA, 25 bp, Homo sapien
ggtctgttcttgctctaaggccaca

SEQ ID NO: 303883 - DNA, 25 bp, Homo sapien
tctcagcagcggcaaacaaggagga

SEQ ID NO: 303884 - DNA, 25 bp, Homo sapien
aagaggtccgtgcatgctcacttgc

SEQ ID NO: 303885 - DNA, 25 bp, Homo sapien
tactatcgttgggaaggaatgagac

SEQ ID NO: 303886 - DNA, 25 bp, Homo sapien
tcaccagaacctcaatgatggagag

SEQ ID NO: 303887 - DNA, 25 bp, Homo sapien
cagacagggtagatgagctctctca

SEQ ID NO: 303888 - DNA, 25 bp, Homo sapien
ttgaggtatcgatgctaaagagtca

SEQ ID NO: 303889 - DNA, 25 bp, Homo sapien
cccagtgggtacacaggaaccctgt

SEQ ID NO: 303890 - DNA, 25 bp, Homo sapien
ccttacctctaacggatacccagtg

SEQ ID NO: 303891 - DNA, 25 bp, Homo sapien
tccaggatggtactcaggcatacag

SEQ ID NO: 303892 - DNA, 25 bp, Homo sapien
taatactcatggcagggaaaccaaa

SEQ ID NO: 303893 - DNA, 25 bp, Homo sapien
gagatgctctttaagaaggatgata

SEQ ID NO: 303894 - DNA, 25 bp, Homo sapien
aaagagatgctctttaagaaggatg

SEQ ID NO: 303895 - DNA, 25 bp, Homo sapien
aagagatgctctttaagaaggatga

SEQ ID NO: 303896 - DNA, 25 bp, Homo sapien
agatgctctttaagaaggatgataa

SEQ ID NO: 303897 - DNA, 25 bp, Homo sapien
ctgagagttcacattgcttctggtt

SEQ ID NO: 303898 - DNA, 25 bp, Homo sapien
caggaccagcgctgagagttcacat

SEQ ID NO: 303899 - DNA, 25 bp, Homo sapien
taagagttactgaacaggaaggcag

SEQ ID NO: 303900 - DNA, 25 bp, Homo sapien
gaacggcttgcccagtcatggtcag

SEQ ID NO: 303901 - DNA, 25 bp, Homo sapien
gaagatggcagcaaaaagaacggct

SEQ ID NO: 303902 - DNA, 25 bp, Homo sapien
taaagtttgctaaccttgatggcac

SEQ ID NO: 303903 - DNA, 25 bp, Homo sapien
actgtcatcttcagctcatttttta

SEQ ID NO: 303904 - DNA, 25 bp, Homo sapien
aactttaaaagtcataaccaagcat

SEQ ID NO: 303905 - DNA, 25 bp, Homo sapien
actttaaaagtcataaccaagcatg

SEQ ID NO: 303906 - DNA, 25 bp, Homo sapien
tactgtcatcttcagctcatttttt

SEQ ID NO: 303907 - DNA, 25 bp, Homo sapien
cacagtcagcaaatgtggaatatgg

SEQ ID NO: 303908 - DNA, 25 bp, Homo sapien
aaatgtggaatatggacaggtggcc

SEQ ID NO: 303909 - DNA, 25 bp, Homo sapien
ttccccttcaagactatttgaactc

SEQ ID NO: 303910 - DNA, 25 bp, Homo sapien
ccttcaagactatttgaactctcaa

SEQ ID NO: 303911 - DNA, 25 bp, Homo sapien
agagagctctggacactcgcagtag

SEQ ID NO: 303912 - DNA, 25 bp, Homo sapien
agttgtggacttggcctcagggacc

SEQ ID NO: 303913 - DNA, 25 bp, Homo sapien
cagccaagtcagtcccaaggaagta

SEQ ID NO: 303914 - DNA, 25 bp, Homo sapien
tacagtaagtggcatctaaaagggc

SEQ ID NO: 303915 - DNA, 25 bp, Homo sapien
cttcccatgctatggaaggacattg

SEQ ID NO: 303916 - DNA, 25 bp, Homo sapien
cttcttcccatgctatggaaggaca

SEQ ID NO: 303917 - DNA, 25 bp, Homo sapien
ggacattgtattccgcagttttatt

SEQ ID NO: 303918 - DNA, 25 bp, Homo sapien
atggaaggacattgtattccgcagt

SEQ ID NO: 303919 - DNA, 25 bp, Homo sapien
tggaaactttgagtttccgcctcca

SEQ ID NO: 303920 - DNA, 25 bp, Homo sapien
ggtagtctgttttaagaatacaaga

SEQ ID NO: 303921 - DNA, 25 bp, Homo sapien
agccccttccagtcaggccctgtga

SEQ ID NO: 303922 - DNA, 25 bp, Homo sapien
ccagtcaggccctgtgaaggtggaa

SEQ ID NO: 303923 - DNA, 25 bp, Homo sapien
aaggggcctcgagagggcgcgccgg

SEQ ID NO: 303924 - DNA, 25 bp, Homo sapien
ggggcctcgagagggcgcgccgggc

SEQ ID NO: 303925 - DNA, 25 bp, Homo sapien
tgaaggggcctcgagagggcgcgcc

SEQ ID NO: 303926 - DNA, 25 bp, Homo sapien
gaggttgaaggggcctcgagagggc

SEQ ID NO: 303927 - DNA, 25 bp, Homo sapien
ctgttccaagcctgagttttccaga

SEQ ID NO: 303928 - DNA, 25 bp, Homo sapien
aagcctgagttttccagaggcccca

SEQ ID NO: 303929 - DNA, 25 bp, Homo sapien
agcctgagttttccagaggccccat

SEQ ID NO: 303930 - DNA, 25 bp, Homo sapien
ttccaagcctgagttttccagaggc

SEQ ID NO: 303931 - DNA, 25 bp, Homo sapien
gggaccagcccttgcggtcggatcc

SEQ ID NO: 303932 - DNA, 25 bp, Homo sapien
cagcctgcgcgtccttcggttgcgg

SEQ ID NO: 303933 - DNA, 25 bp, Homo sapien
cccagcctgcgcgtccttcggttgc

SEQ ID NO: 303934 - DNA, 25 bp, Homo sapien
cgtccttcggttgcgggtggtgatt

SEQ ID NO: 303935 - DNA, 25 bp, Homo sapien
cccaggcggccttagcccagcgcac

SEQ ID NO: 303936 - DNA, 25 bp, Homo sapien
gctggcccgccacgatcgcgctggc

SEQ ID NO: 303937 - DNA, 25 bp, Homo sapien
ccccaggcggccttagcccagcgca

SEQ ID NO: 303938 - DNA, 25 bp, Homo sapien
gcccgccacgatcgcgctggctcct

SEQ ID NO: 303939 - DNA, 25 bp, Homo sapien
tcttatggcctcacgaaaggagaga

SEQ ID NO: 303940 - DNA, 25 bp, Homo sapien
tcagagtccgttctttccttcgccg

SEQ ID NO: 303941 - DNA, 25 bp, Homo sapien
ccaaccgtttatgcccagggcgtag

SEQ ID NO: 303942 - DNA, 25 bp, Homo sapien
cgcacacgcgcagagaaaactacat

SEQ ID NO: 303943 - DNA, 25 bp, Homo sapien
gcaggcactgctgcccctaatacgc

SEQ ID NO: 303944 - DNA, 25 bp, Homo sapien
gccatggcttaagccgctgggggtt

SEQ ID NO: 303945 - DNA, 25 bp, Homo sapien
aaaggccaatgctgccgcaggcact

SEQ ID NO: 303946 - DNA, 25 bp, Homo sapien
ccgctgggggttgccgctgcagagc

SEQ ID NO: 303947 - DNA, 25 bp, Homo sapien
caggccgcaccccaccaatccaaaa

SEQ ID NO: 303948 - DNA, 25 bp, Homo sapien
aggagcacagctggacgacccgccc

SEQ ID NO: 303949 - DNA, 25 bp, Homo sapien
cgtcccgggcgctcgttaaatcgct

SEQ ID NO: 303950 - DNA, 25 bp, Homo sapien
ggacacccaagcaaagaccacgcgt

SEQ ID NO: 303951 - DNA, 25 bp, Homo sapien
cgactacgctttcccgatcccaggc

SEQ ID NO: 303952 - DNA, 25 bp, Homo sapien
gggaagcagtccgggcacccgacta

SEQ ID NO: 303953 - DNA, 25 bp, Homo sapien
ggcacccgactacgctttcccgatc

SEQ ID NO: 303954 - DNA, 25 bp, Homo sapien
ttcccgatcccaggcacgcgagcgt

SEQ ID NO: 303955 - DNA, 25 bp, Homo sapien
tcctgccacgtttcgtggggcaaca

SEQ ID NO: 303956 - DNA, 25 bp, Homo sapien
cttggttcctgccacgtttcgtggg

SEQ ID NO: 303957 - DNA, 25 bp, Homo sapien
tgccacgtttcgtggggcaacagcc

SEQ ID NO: 303958 - DNA, 25 bp, Homo sapien
gccacgtttcgtggggcaacagcca

SEQ ID NO: 303959 - DNA, 25 bp, Homo sapien
tgcaactcaggttccacaaaatgga

SEQ ID NO: 303960 - DNA, 25 bp, Homo sapien
ctagagaatcgggaacagggcagtt

SEQ ID NO: 303961 - DNA, 25 bp, Homo sapien
acaaaatggacgctcacggagacca

SEQ ID NO: 303962 - DNA, 25 bp, Homo sapien
ttgtatttgcccctccctgcttgca

SEQ ID NO: 303963 - DNA, 25 bp, Homo sapien
agccaactcccattagaggttagct

SEQ ID NO: 303964 - DNA, 25 bp, Homo sapien
ttccacttatgaggcgggacttctc

SEQ ID NO: 303965 - DNA, 25 bp, Homo sapien
ccttccacttatgaggcgggacttc

SEQ ID NO: 303966 - DNA, 25 bp, Homo sapien
cccattagaggttagctgttctgag

SEQ ID NO: 303967 - DNA, 25 bp, Homo sapien
ttcgaaggtgtctttgtcggttaca

SEQ ID NO: 303968 - DNA, 25 bp, Homo sapien
gaaggtgtctttgtcggttacagca

SEQ ID NO: 303969 - DNA, 25 bp, Homo sapien
aaggtgtctttgtcggttacagcaa

SEQ ID NO: 303970 - DNA, 25 bp, Homo sapien
cgaaggtgtctttgtcggttacagc

SEQ ID NO: 303971 - DNA, 25 bp, Homo sapien
tgctcaggaagctcatttcggtcat

SEQ ID NO: 303972 - DNA, 25 bp, Homo sapien
tcgctgctcaggaagctcatttcgg

SEQ ID NO: 303973 - DNA, 25 bp, Homo sapien
gctgctcaggaagctcatttcggtc

SEQ ID NO: 303974 - DNA, 25 bp, Homo sapien
ctcgctgctcaggaagctcatttcg

SEQ ID NO: 303975 - DNA, 25 bp, Homo sapien
gctgttgttggagggactgaccaac

SEQ ID NO: 303976 - DNA, 25 bp, Homo sapien
tgatggggccaagtgagtcagatac

SEQ ID NO: 303977 - DNA, 25 bp, Homo sapien
aaccctagatcccaccaggacgatg

SEQ ID NO: 303978 - DNA, 25 bp, Homo sapien
tggggccaagtgagtcagatacaaa

SEQ ID NO: 303979 - DNA, 25 bp, Homo sapien
tagatcccaccaggacgatgtggtg

SEQ ID NO: 303980 - DNA, 25 bp, Homo sapien
gagggatcatggcaacgtaagcagt

SEQ ID NO: 303981 - DNA, 25 bp, Homo sapien
tcctcctttatgcactgagggatca

SEQ ID NO: 303982 - DNA, 25 bp, Homo sapien
gcactgagggatcatggcaacgtaa

SEQ ID NO: 303983 - DNA, 25 bp, Homo sapien
tgtcttcctcctttatgcactgagg

SEQ ID NO: 303984 - DNA, 25 bp, Homo sapien
tttgcactcaccagtaagagcctcc

SEQ ID NO: 303985 - DNA, 25 bp, Homo sapien
ttcttctggcggtacctagtggctg

SEQ ID NO: 303986 - DNA, 25 bp, Homo sapien
tctggcggtacctagtggctgctgt

SEQ ID NO: 303987 - DNA, 25 bp, Homo sapien
tgcactcaccagtaagagcctcctg

SEQ ID NO: 303988 - DNA, 25 bp, Homo sapien
cattgacgctcctgactatcctcaa

SEQ ID NO: 303989 - DNA, 25 bp, Homo sapien
gctacagcactctatgtacaagcac

SEQ ID NO: 303990 - DNA, 25 bp, Homo sapien
ctacagcactctatgtacaagcaca

SEQ ID NO: 303991 - DNA, 25 bp, Homo sapien
caagcacattgacgctcctgactat

SEQ ID NO: 303992 - DNA, 25 bp, Homo sapien
acaaaataatttattggaacacaca

SEQ ID NO: 303993 - DNA, 25 bp, Homo sapien
accaagcttggcagacagatggaga

SEQ ID NO: 303994 - DNA, 25 bp, Homo sapien
tctagaatctcaacaggaaagacct

SEQ ID NO: 303995 - DNA, 25 bp, Homo sapien
tttctcgtctgccaaatgagggccg

SEQ ID NO: 303996 - DNA, 25 bp, Homo sapien
cacctatttagtacctggatgtgga

SEQ ID NO: 303997 - DNA, 25 bp, Homo sapien
agccaccccatgacccagaggaggg

SEQ ID NO: 303998 - DNA, 25 bp, Homo sapien
agcgtcacaggtggtttggggaagc

SEQ ID NO: 303999 - DNA, 25 bp, Homo sapien
gaagccaccccatgacccagaggag

SEQ ID NO: 304000 - DNA, 25 bp, Homo sapien
cggaagcgtcacaggtggtttgggg

SEQ ID NO: 304001 - DNA, 25 bp, Homo sapien
ttgtgtttactgctggcactctggt

SEQ ID NO: 304002 - DNA, 25 bp, Homo sapien
tgccttttaactgtcaccctgagca

SEQ ID NO: 304003 - DNA, 25 bp, Homo sapien
ttttaactgtcaccctgagcagttc

SEQ ID NO: 304004 - DNA, 25 bp, Homo sapien
atttgtgtttactgctggcactctg

SEQ ID NO: 304005 - DNA, 25 bp, Homo sapien
gcacctgccggaaaggaacgtatct

SEQ ID NO: 304006 - DNA, 25 bp, Homo sapien
gatttacacacagaccggagctggc

SEQ ID NO: 304007 - DNA, 25 bp, Homo sapien
gcaggaatacttcggcagctaggct

SEQ ID NO: 304008 - DNA, 25 bp, Homo sapien
ccgtgttcaccgaggaagacttcca

SEQ ID NO: 304009 - DNA, 25 bp, Homo sapien
ggttgtgagttttcacactgtcaca

SEQ ID NO: 304010 - DNA, 25 bp, Homo sapien
ccatctcgatgaaaaggttgtgagt

SEQ ID NO: 304011 - DNA, 25 bp, Homo sapien
gctgtgacttccgtttcccagggta

SEQ ID NO: 304012 - DNA, 25 bp, Homo sapien
tcccagggtacgtggctgtttcatg

SEQ ID NO: 304013 - DNA, 25 bp, Homo sapien
gggacttcgatttgaagtggtttgc

SEQ ID NO: 304014 - DNA, 25 bp, Homo sapien
agcggggggacttcgatttgaagtg

SEQ ID NO: 304015 - DNA, 25 bp, Homo sapien
gacttcgatttgaagtggtttgcat

SEQ ID NO: 304016 - DNA, 25 bp, Homo sapien
ccagaagcggggggacttcgatttg

SEQ ID NO: 304017 - DNA, 25 bp, Homo sapien
ccagtctggaaggtagtggctggat

SEQ ID NO: 304018 - DNA, 25 bp, Homo sapien
cccagtctggaaggtagtggctgga

SEQ ID NO: 304019 - DNA, 25 bp, Homo sapien
cagtctggaaggtagtggctggatt

SEQ ID NO: 304020 - DNA, 25 bp, Homo sapien
ggcatggacgtggcccggccgcggg

SEQ ID NO: 304021 - DNA, 25 bp, Homo sapien
ccccgccaattcaggatcagctgag

SEQ ID NO: 304022 - DNA, 25 bp, Homo sapien
tccaggttagagacgcggggacaac

SEQ ID NO: 304023 - DNA, 25 bp, Homo sapien
cgaagccggcgatcgagagggaccc

SEQ ID NO: 304024 - DNA, 25 bp, Homo sapien
ggtgcccagaaactgactggcctga

SEQ ID NO: 304025 - DNA, 25 bp, Homo sapien
tgactggcctgagagccccttcctt

SEQ ID NO: 304026 - DNA, 25 bp, Homo sapien
ggagggacagagtggtgcccagaaa

SEQ ID NO: 304027 - DNA, 25 bp, Homo sapien
cttggaaagcgctaggaactgcggg

SEQ ID NO: 304028 - DNA, 25 bp, Homo sapien
ctgctgctgggctgtcgaccaagcc

SEQ ID NO: 304029 - DNA, 25 bp, Homo sapien
gctgctgggctgtcgaccaagccac

SEQ ID NO: 304030 - DNA, 25 bp, Homo sapien
tcgaccaagccacccggagctgatg

SEQ ID NO: 304031 - DNA, 25 bp, Homo sapien
tgggctgtcgaccaagccacccgga

SEQ ID NO: 304032 - DNA, 25 bp, Homo sapien
tccgtggtgactcctggctcagcgg

SEQ ID NO: 304033 - DNA, 25 bp, Homo sapien
ggctgctccgtggtgactcctggct

SEQ ID NO: 304034 - DNA, 25 bp, Homo sapien
cgggctgctccgtggtgactcctgg

SEQ ID NO: 304035 - DNA, 25 bp, Homo sapien
tgctccgtggtgactcctggctcag

SEQ ID NO: 304036 - DNA, 25 bp, Homo sapien
ttgatgcaccagttccgggggctgg

SEQ ID NO: 304037 - DNA, 25 bp, Homo sapien
tgatgcaccagttccgggggctggt

SEQ ID NO: 304038 - DNA, 25 bp, Homo sapien
agaagaaggcaataggcgccaggtc

SEQ ID NO: 304039 - DNA, 25 bp, Homo sapien
ggcagaagaaggcaataggcgccag

SEQ ID NO: 304040 - DNA, 25 bp, Homo sapien
tgcagggccccgatcagccgaggct

SEQ ID NO: 304041 - DNA, 25 bp, Homo sapien
gccccgatcagccgaggctgcggag

SEQ ID NO: 304042 - DNA, 25 bp, Homo sapien
ggccccgatcagccgaggctgcgga

SEQ ID NO: 304043 - DNA, 25 bp, Homo sapien
acagccaccaagtcttaggctcaca

SEQ ID NO: 304044 - DNA, 25 bp, Homo sapien
aatcctccaactcgtaggcacacag

SEQ ID NO: 304045 - DNA, 25 bp, Homo sapien
aagtcttaggctcacacactctttg

SEQ ID NO: 304046 - DNA, 25 bp, Homo sapien
ggtccagaatcctccaactcgtagg

SEQ ID NO: 304047 - DNA, 25 bp, Homo sapien
tgttccaggaccacccgtgatgtgt

SEQ ID NO: 304048 - DNA, 25 bp, Homo sapien
agggtgctgagatgaaccaggctca

SEQ ID NO: 304049 - DNA, 25 bp, Homo sapien
catgtgttcgagcaacagtggccac

SEQ ID NO: 304050 - DNA, 25 bp, Homo sapien
tgctgtatacgtggcctgtgcctca

SEQ ID NO: 304051 - DNA, 25 bp, Homo sapien
gccagttcccagctagaagagcaac

SEQ ID NO: 304052 - DNA, 25 bp, Homo sapien
cagttcccagctagaagagcaaccg

SEQ ID NO: 304053 - DNA, 25 bp, Homo sapien
gcaaccgtgtggaggggcagtgccc

SEQ ID NO: 304054 - DNA, 25 bp, Homo sapien
ctgccagttcccagctagaagagca

SEQ ID NO: 304055 - DNA, 25 bp, Homo sapien
ggggaggggaagccagcaagggcat

SEQ ID NO: 304056 - DNA, 25 bp, Homo sapien
aggggaggggaagccagcaagggca

SEQ ID NO: 304057 - DNA, 25 bp, Homo sapien
gaagaaggggaggggaagccagcaa

SEQ ID NO: 304058 - DNA, 25 bp, Homo sapien
agaaggggaggggaagccagcaagg

SEQ ID NO: 304059 - DNA, 25 bp, Homo sapien
cacagtgatgaatttggcagtacct

SEQ ID NO: 304060 - DNA, 25 bp, Homo sapien
accctagggacatgacctcagctct

SEQ ID NO: 304061 - DNA, 25 bp, Homo sapien
tacctctgacgactgtgtaccagac

SEQ ID NO: 304062 - DNA, 25 bp, Homo sapien
tgtgtaccagacaccctagggacat

SEQ ID NO: 304063 - DNA, 25 bp, Homo sapien
tgtaatacccgcaacccaccacaca

SEQ ID NO: 304064 - DNA, 25 bp, Homo sapien
ctagagtgtaatacccgcaacccac

SEQ ID NO: 304065 - DNA, 25 bp, Homo sapien
agtgtaatacccgcaacccaccaca

SEQ ID NO: 304066 - DNA, 25 bp, Homo sapien
agagtgtaatacccgcaacccacca

SEQ ID NO: 304067 - DNA, 25 bp, Homo sapien
aaagcagcaggtgggatcgcccgtg

SEQ ID NO: 304068 - DNA, 25 bp, Homo sapien
gtgcacaccaagtcaaggacaaagc

SEQ ID NO: 304069 - DNA, 25 bp, Homo sapien
caagtcaaggacaaagcagcaggtg

SEQ ID NO: 304070 - DNA, 25 bp, Homo sapien
agcagcaggtgggatcgcccgtggg

SEQ ID NO: 304071 - DNA, 25 bp, Homo sapien
ggacaggcagtccatgtcgtcgcac

SEQ ID NO: 304072 - DNA, 25 bp, Homo sapien
tgcaggatcttgcagcggtcggaca

SEQ ID NO: 304073 - DNA, 25 bp, Homo sapien
tgccaagtgtcacgcagttcagcag

SEQ ID NO: 304074 - DNA, 25 bp, Homo sapien
gtcgtcgcacggctggtacatgcca

SEQ ID NO: 304075 - DNA, 25 bp, Homo sapien
gatgaagaaatccaggcggttccat

SEQ ID NO: 304076 - DNA, 25 bp, Homo sapien
tgaagaaatccaggcggttccatgt

SEQ ID NO: 304077 - DNA, 25 bp, Homo sapien
gttccatgtgtccccgaggtagcac

SEQ ID NO: 304078 - DNA, 25 bp, Homo sapien
tccccgaggtagcacttcttgccaa

SEQ ID NO: 304079 - DNA, 25 bp, Homo sapien
gcacacagagttgtgcaggaaggcc

SEQ ID NO: 304080 - DNA, 25 bp, Homo sapien
atgaccacagcaggatctgctgaca

SEQ ID NO: 304081 - DNA, 25 bp, Homo sapien
cttctgggcatccaagtgattgcct

SEQ ID NO: 304082 - DNA, 25 bp, Homo sapien
gtgcacacagagttgtgcaggaagg

SEQ ID NO: 304083 - DNA, 25 bp, Homo sapien
catccacagccgcagggcagacaga

SEQ ID NO: 304084 - DNA, 25 bp, Homo sapien
tcagagcacccagtgcatctgagca

SEQ ID NO: 304085 - DNA, 25 bp, Homo sapien
tctgagcatccacagccgcagggca

SEQ ID NO: 304086 - DNA, 25 bp, Homo sapien
agagcacccagtgcatctgagcatc

SEQ ID NO: 304087 - DNA, 25 bp, Homo sapien
ccaccacagcactaggaccagggcc

SEQ ID NO: 304088 - DNA, 25 bp, Homo sapien
cgcccaccacagcactaggaccagg

SEQ ID NO: 304089 - DNA, 25 bp, Homo sapien
ggtggaaggcacagcgcccaccaca

SEQ ID NO: 304090 - DNA, 25 bp, Homo sapien
accacagcactaggaccagggccag

SEQ ID NO: 304091 - DNA, 25 bp, Homo sapien
ccacttcatgaaccatttgcgggta

SEQ ID NO: 304092 - DNA, 25 bp, Homo sapien
gtattctgcggtggccgcatctcct

SEQ ID NO: 304093 - DNA, 25 bp, Homo sapien
catttgcgggtattctgcggtggcc

SEQ ID NO: 304094 - DNA, 25 bp, Homo sapien
catgaaccatttgcgggtattctgc

SEQ ID NO: 304095 - DNA, 25 bp, Homo sapien
aaggtccagggagtactcgaccatc

SEQ ID NO: 304096 - DNA, 25 bp, Homo sapien
gacgcgcacggtgcggatggctgac

SEQ ID NO: 304097 - DNA, 25 bp, Homo sapien
gaaggtccagggagtactcgaccat

SEQ ID NO: 304098 - DNA, 25 bp, Homo sapien
gatggctgacaggttgatgttctga

SEQ ID NO: 304099 - DNA, 25 bp, Homo sapien
ttcgtccctgaaaagccagactccc

SEQ ID NO: 304100 - DNA, 25 bp, Homo sapien
gcattgggaccacctgccagtgtct

SEQ ID NO: 304101 - DNA, 25 bp, Homo sapien
tcccataaactcttcgtccctgaaa

SEQ ID NO: 304102 - DNA, 25 bp, Homo sapien
cttgccttgacatcctatgaagacc

SEQ ID NO: 304103 - DNA, 25 bp, Homo sapien
ctgctgagggcagcccccgccgtcc

SEQ ID NO: 304104 - DNA, 25 bp, Homo sapien
tcccccaggacagaaacaagcagca

SEQ ID NO: 304105 - DNA, 25 bp, Homo sapien
cgtcccccaggacagaaacaagcag

SEQ ID NO: 304106 - DNA, 25 bp, Homo sapien
cgccgtcccccaggacagaaacaag

SEQ ID NO: 304107 - DNA, 25 bp, Homo sapien
tgtgggctccgtggcctggagtgtg

SEQ ID NO: 304108 - DNA, 25 bp, Homo sapien
tgtctctgccatgagttactgctgc

SEQ ID NO: 304109 - DNA, 25 bp, Homo sapien
tgctggaaagcccactttcggggct

SEQ ID NO: 304110 - DNA, 25 bp, Homo sapien
tgagcggtcgccttgtctggtgtct

SEQ ID NO: 304111 - DNA, 25 bp, Homo sapien
taggatcccggaactgctgtgctgc

SEQ ID NO: 304112 - DNA, 25 bp, Homo sapien
ggggacaggctacaggcagccccat

SEQ ID NO: 304113 - DNA, 25 bp, Homo sapien
ggacaggctacaggcagccccatga

SEQ ID NO: 304114 - DNA, 25 bp, Homo sapien
ccatgagtgtgattgagggccctgg

SEQ ID NO: 304115 - DNA, 25 bp, Homo sapien
atgagtgtgattgagggccctggct

SEQ ID NO: 304116 - DNA, 25 bp, Homo sapien
tcttagtgcaccttttcaggccttc

SEQ ID NO: 304117 - DNA, 25 bp, Homo sapien
tgttcttagtgcaccttttcaggcc

SEQ ID NO: 304118 - DNA, 25 bp, Homo sapien
tgtgttcttagtgcaccttttcagg

SEQ ID NO: 304119 - DNA, 25 bp, Homo sapien
ttagtgcaccttttcaggccttctg

SEQ ID NO: 304120 - DNA, 25 bp, Homo sapien
gctgcacacctatgatgccaaagat

SEQ ID NO: 304121 - DNA, 25 bp, Homo sapien
agagctgcacacctatgatgccaaa

SEQ ID NO: 304122 - DNA, 25 bp, Homo sapien
gaagcagcggttacgcagcaggccc

SEQ ID NO: 304123 - DNA, 25 bp, Homo sapien
aagcagcggttacgcagcaggcccg

SEQ ID NO: 304124 - DNA, 25 bp, Homo sapien
agcccaagcacatcctcagcatcct

SEQ ID NO: 304125 - DNA, 25 bp, Homo sapien
cagggctggggccatctcatggggc

SEQ ID NO: 304126 - DNA, 25 bp, Homo sapien
caactctccttttgcagccgagaca

SEQ ID NO: 304127 - DNA, 25 bp, Homo sapien
ccttttgcagccgagacagggctgg

SEQ ID NO: 304128 - DNA, 25 bp, Homo sapien
ccacaggcgagggtgggtaaaagag

SEQ ID NO: 304129 - DNA, 25 bp, Homo sapien
tccacaggcgagggtgggtaaaaga

SEQ ID NO: 304130 - DNA, 25 bp, Homo sapien
tgtccacaggcgagggtgggtaaaa

SEQ ID NO: 304131 - DNA, 25 bp, Homo sapien
gcacacattgtagtaacggttccag

SEQ ID NO: 304132 - DNA, 25 bp, Homo sapien
ttgtcgcccgacagggagcagatga

SEQ ID NO: 304133 - DNA, 25 bp, Homo sapien
tccagttgacacagaggccgctggc

SEQ ID NO: 304134 - DNA, 25 bp, Homo sapien
gatgacaatccaagcataaccgatg

SEQ ID NO: 304135 - DNA, 25 bp, Homo sapien
atccatcacgtagtacatgatctcc

SEQ ID NO: 304136 - DNA, 25 bp, Homo sapien
catccatcacgtagtacatgatctc

SEQ ID NO: 304137 - DNA, 25 bp, Homo sapien
tatgataagcaggatgaagtagatg

SEQ ID NO: 304138 - DNA, 25 bp, Homo sapien
ccatatgggggtgcaggcaagaggg

SEQ ID NO: 304139 - DNA, 25 bp, Homo sapien
catatgggggtgcaggcaagagggg

SEQ ID NO: 304140 - DNA, 25 bp, Homo sapien
ggaagaccatatgggggtgcaggca

SEQ ID NO: 304141 - DNA, 25 bp, Homo sapien
ctgggaagaccatatgggggtgcag

SEQ ID NO: 304142 - DNA, 25 bp, Homo sapien
tgcagtcaggcatgacgaggtggat

SEQ ID NO: 304143 - DNA, 25 bp, Homo sapien
gctgcagtcaggcatgacgaggtgg

SEQ ID NO: 304144 - DNA, 25 bp, Homo sapien
cagtcaggcatgacgaggtggatga

SEQ ID NO: 304145 - DNA, 25 bp, Homo sapien
cttgacattttggggactgtgctgt

SEQ ID NO: 304146 - DNA, 25 bp, Homo sapien
cagcagcagggattcagcagcgact

SEQ ID NO: 304147 - DNA, 25 bp, Homo sapien
agcagcagggattcagcagcgactc

SEQ ID NO: 304148 - DNA, 25 bp, Homo sapien
ctcgcagcagcagggattcagcagc

SEQ ID NO: 304149 - DNA, 25 bp, Homo sapien
cgcagcagcagggattcagcagcga

SEQ ID NO: 304150 - DNA, 25 bp, Homo sapien
gagggccaagcgtgccctctcccac

SEQ ID NO: 304151 - DNA, 25 bp, Homo sapien
caagcgtgccctctcccaccaccag

SEQ ID NO: 304152 - DNA, 25 bp, Homo sapien
gccctggagggccaagcgtgccctc

SEQ ID NO: 304153 - DNA, 25 bp, Homo sapien
cctggagggccaagcgtgccctctc

SEQ ID NO: 304154 - DNA, 25 bp, Homo sapien
ttcagggtcctcacaggaggtgacc

SEQ ID NO: 304155 - DNA, 25 bp, Homo sapien
tggggttcagggtcctcacaggagg

SEQ ID NO: 304156 - DNA, 25 bp, Homo sapien
gggttcagggtcctcacaggaggtg

SEQ ID NO: 304157 - DNA, 25 bp, Homo sapien
ctttctggggttcagggtcctcaca

SEQ ID NO: 304158 - DNA, 25 bp, Homo sapien
cacaagcatttcctggggagcctcc

SEQ ID NO: 304159 - DNA, 25 bp, Homo sapien
gtccacaagcatttcctggggagcc

SEQ ID NO: 304160 - DNA, 25 bp, Homo sapien
ttcctggggagcctccctgcaccag

SEQ ID NO: 304161 - DNA, 25 bp, Homo sapien
gcatttcctggggagcctccctgca

SEQ ID NO: 304162 - DNA, 25 bp, Homo sapien
ctatgacaacgaggcacaggttgat

SEQ ID NO: 304163 - DNA, 25 bp, Homo sapien
gctcggcgtagctggccaccgtgct

SEQ ID NO: 304164 - DNA, 25 bp, Homo sapien
gctcccgttgcttggtctccgagaa

SEQ ID NO: 304165 - DNA, 25 bp, Homo sapien
tgtggcagacatactggaagatctc

SEQ ID NO: 304166 - DNA, 25 bp, Homo sapien
tgctggaggacaggtagcgctgccg

SEQ ID NO: 304167 - DNA, 25 bp, Homo sapien
tggcaatgccggcttccgagatgtc

SEQ ID NO: 304168 - DNA, 25 bp, Homo sapien
gaggcaggcccatgcaaagtctggc

SEQ ID NO: 304169 - DNA, 25 bp, Homo sapien
cggcttccgagatgtctcccttcat

SEQ ID NO: 304170 - DNA, 25 bp, Homo sapien
catgcaaagtctggcaatgccggct

SEQ ID NO: 304171 - DNA, 25 bp, Homo sapien
gggtgggcggcagctctgagcgtgc

SEQ ID NO: 304172 - DNA, 25 bp, Homo sapien
acccgaggacgggtgggcggcagct

SEQ ID NO: 304173 - DNA, 25 bp, Homo sapien
ttgcctcccaagaatcgattcccag

SEQ ID NO: 304174 - DNA, 25 bp, Homo sapien
tccgagcccacgcctggatggctgg

SEQ ID NO: 304175 - DNA, 25 bp, Homo sapien
cgccggccgtcctcatgctggcagc

SEQ ID NO: 304176 - DNA, 25 bp, Homo sapien
cgggatcggaagccagcgtggcggg

SEQ ID NO: 304177 - DNA, 25 bp, Homo sapien
cctggcccgagtcggtgctgcccag

SEQ ID NO: 304178 - DNA, 25 bp, Homo sapien
tccagggggctatgttgcgggcaca

SEQ ID NO: 304179 - DNA, 25 bp, Homo sapien
cagttctgaggaggctccgtcctcg

SEQ ID NO: 304180 - DNA, 25 bp, Homo sapien
gttctgaggaggctccgtcctcgct

SEQ ID NO: 304181 - DNA, 25 bp, Homo sapien
tctgaggaggctccgtcctcgctgc

SEQ ID NO: 304182 - DNA, 25 bp, Homo sapien
cccagttctgaggaggctccgtcct

SEQ ID NO: 304183 - DNA, 25 bp, Homo sapien
ctgtccacgatgccgcgcagcttgg

SEQ ID NO: 304184 - DNA, 25 bp, Homo sapien
catgatgccccggttgaagtacttg

SEQ ID NO: 304185 - DNA, 25 bp, Homo sapien
atggccatcatgatgccccggttga

SEQ ID NO: 304186 - DNA, 25 bp, Homo sapien
catcatgatgccccggttgaagtac

SEQ ID NO: 304187 - DNA, 25 bp, Homo sapien
gccatcatgatgccccggttgaagt

SEQ ID NO: 304188 - DNA, 25 bp, Homo sapien
tcgtggtgctcgatgcccatgctga

SEQ ID NO: 304189 - DNA, 25 bp, Homo sapien
gctcgtggtgctcgatgcccatgct

SEQ ID NO: 304190 - DNA, 25 bp, Homo sapien
ctgctcgtggtgctcgatgcccatg

SEQ ID NO: 304191 - DNA, 25 bp, Homo sapien
cgtggtgctcgatgcccatgctgac

SEQ ID NO: 304192 - DNA, 25 bp, Homo sapien
ctctcccgcaggcccggcccggctg

SEQ ID NO: 304193 - DNA, 25 bp, Homo sapien
cccgcaggcccggcccggctgcgct

SEQ ID NO: 304194 - DNA, 25 bp, Homo sapien
caggcccggcccggctgcgctgcac

SEQ ID NO: 304195 - DNA, 25 bp, Homo sapien
cgcaggcccggcccggctgcgctgc

SEQ ID NO: 304196 - DNA, 25 bp, Homo sapien
ttagtagatgaggaaatcaggtggg

SEQ ID NO: 304197 - DNA, 25 bp, Homo sapien
agtagatgaggaaatcaggtgggcc

SEQ ID NO: 304198 - DNA, 25 bp, Homo sapien
tagtagatgaggaaatcaggtgggc

SEQ ID NO: 304199 - DNA, 25 bp, Homo sapien
ttgcttgcaagcctttccgggctcc

SEQ ID NO: 304200 - DNA, 25 bp, Homo sapien
aggccccagttcagcacaaatgtgt

SEQ ID NO: 304201 - DNA, 25 bp, Homo sapien
gtcatttgcttgcaagcctttccgg

SEQ ID NO: 304202 - DNA, 25 bp, Homo sapien
ggccccagttcagcacaaatgtgtc

SEQ ID NO: 304203 - DNA, 25 bp, Homo sapien
tggatcccctctggacacccaccct

SEQ ID NO: 304204 - DNA, 25 bp, Homo sapien
gtggggaatggagacccggtcaggc

SEQ ID NO: 304205 - DNA, 25 bp, Homo sapien
tggagacccggtcaggccagagggc

SEQ ID NO: 304206 - DNA, 25 bp, Homo sapien
aatggagacccggtcaggccagagg

SEQ ID NO: 304207 - DNA, 25 bp, Homo sapien
ggaatggagacccggtcaggccaga

SEQ ID NO: 304208 - DNA, 25 bp, Homo sapien
aggtagtcgaagagcccaaatgcag

SEQ ID NO: 304209 - DNA, 25 bp, Homo sapien
ttgtaggggttacgcaggtagtcga

SEQ ID NO: 304210 - DNA, 25 bp, Homo sapien
agtcgaagagcccaaatgcagccag

SEQ ID NO: 304211 - DNA, 25 bp, Homo sapien
aaatgcagccagcttcaggatcatc

SEQ ID NO: 304212 - DNA, 25 bp, Homo sapien
ggcaggcatgaagcgcaccagtttc

SEQ ID NO: 304213 - DNA, 25 bp, Homo sapien
caccgacagcccaccgtccgcctgc

SEQ ID NO: 304214 - DNA, 25 bp, Homo sapien
gcaccgacagcccaccgtccgcctg

SEQ ID NO: 304215 - DNA, 25 bp, Homo sapien
aggcatgaagcgcaccagtttcagc

SEQ ID NO: 304216 - DNA, 25 bp, Homo sapien
tgtccgtgcggaggctgaacttgca

SEQ ID NO: 304217 - DNA, 25 bp, Homo sapien
accgtgtctccagtgtccgtgcgga

SEQ ID NO: 304218 - DNA, 25 bp, Homo sapien
tccagtgtccgtgcggaggctgaac

SEQ ID NO: 304219 - DNA, 25 bp, Homo sapien
ttcctgtcgggcaccgtgtctccag

SEQ ID NO: 304220 - DNA, 25 bp, Homo sapien
gtagagaacgacgttccagtcctcc

SEQ ID NO: 304221 - DNA, 25 bp, Homo sapien
tcatgagggcgacaaagtagaggga

SEQ ID NO: 304222 - DNA, 25 bp, Homo sapien
tgccattgtagagaacgacgttcca

SEQ ID NO: 304223 - DNA, 25 bp, Homo sapien
tgagggcgacaaagtagagggaggc

SEQ ID NO: 304224 - DNA, 25 bp, Homo sapien
ccgagtaggagcgattggcgtcacc

SEQ ID NO: 304225 - DNA, 25 bp, Homo sapien
cctcgtccgagtaggagcgattggc

SEQ ID NO: 304226 - DNA, 25 bp, Homo sapien
cttctatgttggatgagctctggtc

SEQ ID NO: 304227 - DNA, 25 bp, Homo sapien
gagctctggtcctcgtccgagtagg

SEQ ID NO: 304228 - DNA, 25 bp, Homo sapien
tctaggtgacaagcgagggcctgtt

SEQ ID NO: 304229 - DNA, 25 bp, Homo sapien
ctctctaggtgacaagcgagggcct

SEQ ID NO: 304230 - DNA, 25 bp, Homo sapien
aggtgacaagcgagggcctgtttac

SEQ ID NO: 304231 - DNA, 25 bp, Homo sapien
tctctaggtgacaagcgagggcctg

SEQ ID NO: 304232 - DNA, 25 bp, Homo sapien
gggtcatggggattgggcagagctt

SEQ ID NO: 304233 - DNA, 25 bp, Homo sapien
gtcatggggattgggcagagcttgg

SEQ ID NO: 304234 - DNA, 25 bp, Homo sapien
gtgagagtcggggggcaggtcccgc

SEQ ID NO: 304235 - DNA, 25 bp, Homo sapien
agcaggacctaggtgcccacccagt

SEQ ID NO: 304236 - DNA, 25 bp, Homo sapien
gacactgctctttcgggagcccagg

SEQ ID NO: 304237 - DNA, 25 bp, Homo sapien
agggagcgctggtcatagctcatcc

SEQ ID NO: 304238 - DNA, 25 bp, Homo sapien
tcctccctagagacatgacactgct

SEQ ID NO: 304239 - DNA, 25 bp, Homo sapien
ggtcatagctcatcctccctagaga

SEQ ID NO: 304240 - DNA, 25 bp, Homo sapien
cccaaaggcagcctgcacccccgct

SEQ ID NO: 304241 - DNA, 25 bp, Homo sapien
tgcccaaaggcagcctgcacccccg

SEQ ID NO: 304242 - DNA, 25 bp, Homo sapien
gtgcccaaaggcagcctgcaccccc

SEQ ID NO: 304243 - DNA, 25 bp, Homo sapien
gcccaaaggcagcctgcacccccgc

SEQ ID NO: 304244 - DNA, 25 bp, Homo sapien
ccgttcgggtcagcgccccacaggc

SEQ ID NO: 304245 - DNA, 25 bp, Homo sapien
tcccgttcgggtcagcgccccacag

SEQ ID NO: 304246 - DNA, 25 bp, Homo sapien
ttcgggtcagcgccccacaggcaca

SEQ ID NO: 304247 - DNA, 25 bp, Homo sapien
ttcccgttcgggtcagcgccccaca

SEQ ID NO: 304248 - DNA, 25 bp, Homo sapien
gccaggtccaccgagtccctgttgt

SEQ ID NO: 304249 - DNA, 25 bp, Homo sapien
ccatggcccgtagtaggagctccgg

SEQ ID NO: 304250 - DNA, 25 bp, Homo sapien
ccgacggcggcttgtgcttgaggct

SEQ ID NO: 304251 - DNA, 25 bp, Homo sapien
agagcagggactcatgctccgccga

SEQ ID NO: 304252 - DNA, 25 bp, Homo sapien
gggcctgccgccctccaggcggccc

SEQ ID NO: 304253 - DNA, 25 bp, Homo sapien
cgggcctgccgccctccaggcggcc

SEQ ID NO: 304254 - DNA, 25 bp, Homo sapien
gccgggcctgccgccctccaggcgg

SEQ ID NO: 304255 - DNA, 25 bp, Homo sapien
gcctgccgccctccaggcggcccgg

SEQ ID NO: 304256 - DNA, 25 bp, Homo sapien
cccgcggtcgcccatcttggtgaag

SEQ ID NO: 304257 - DNA, 25 bp, Homo sapien
atcctccccgcgatccccgcggtcg

SEQ ID NO: 304258 - DNA, 25 bp, Homo sapien
ggtgaagacgtctttggcgatgctg

SEQ ID NO: 304259 - DNA, 25 bp, Homo sapien
cgtctttggcgatgctgggcatcct

SEQ ID NO: 304260 - DNA, 25 bp, Homo sapien
tagacagaccagtcttcgcggacct

SEQ ID NO: 304261 - DNA, 25 bp, Homo sapien
cagtcgggcttatagacgtcgatca

SEQ ID NO: 304262 - DNA, 25 bp, Homo sapien
gcggacctcgcaccagtcgggctta

SEQ ID NO: 304263 - DNA, 25 bp, Homo sapien
acgtcgatcatcttgcggacgcgga

SEQ ID NO: 304264 - DNA, 25 bp, Homo sapien
tccctggcactcgaggcttacccag

SEQ ID NO: 304265 - DNA, 25 bp, Homo sapien
ctttccctggcactcgaggcttacc

SEQ ID NO: 304266 - DNA, 25 bp, Homo sapien
aggcttacccagcccagatccctga

SEQ ID NO: 304267 - DNA, 25 bp, Homo sapien
cctggcactcgaggcttacccagcc

SEQ ID NO: 304268 - DNA, 25 bp, Homo sapien
ctcctctgaccatacacccacacca

SEQ ID NO: 304269 - DNA, 25 bp, Homo sapien
tgcctcctctgaccatacacccaca

SEQ ID NO: 304270 - DNA, 25 bp, Homo sapien
ctctgaccatacacccacaccacga

SEQ ID NO: 304271 - DNA, 25 bp, Homo sapien
gcctcctctgaccatacacccacac

SEQ ID NO: 304272 - DNA, 25 bp, Homo sapien
gggctgcctgagcgtcagctgcctc

SEQ ID NO: 304273 - DNA, 25 bp, Homo sapien
ggcgggggctgcctgagcgtcagct

SEQ ID NO: 304274 - DNA, 25 bp, Homo sapien
tttgtgggcaataatggtctgacac

SEQ ID NO: 304275 - DNA, 25 bp, Homo sapien
taatggtctgacacaggacccggaa

SEQ ID NO: 304276 - DNA, 25 bp, Homo sapien
agatgaaggccaggacgacgtagtc

SEQ ID NO: 304277 - DNA, 25 bp, Homo sapien
gcctcgatctgaggccgctccaggg

SEQ ID NO: 304278 - DNA, 25 bp, Homo sapien
tagttggacacggtgagaaagatgc

SEQ ID NO: 304279 - DNA, 25 bp, Homo sapien
gatgtagttggacacggtgagaaag

SEQ ID NO: 304280 - DNA, 25 bp, Homo sapien
agttggacacggtgagaaagatgcg

SEQ ID NO: 304281 - DNA, 25 bp, Homo sapien
tgtagttggacacggtgagaaagat

SEQ ID NO: 304282 - DNA, 25 bp, Homo sapien
tgatggacacgaagacaagaaagcc

SEQ ID NO: 304283 - DNA, 25 bp, Homo sapien
gttccagctgctgcgtaggtacgcc

SEQ ID NO: 304284 - DNA, 25 bp, Homo sapien
agggacaccacgatgtcgatgatgg

SEQ ID NO: 304285 - DNA, 25 bp, Homo sapien
aagaaagccatccagcacgttccag

SEQ ID NO: 304286 - DNA, 25 bp, Homo sapien
agcacgatgttgccgatgggcttga

SEQ ID NO: 304287 - DNA, 25 bp, Homo sapien
cacgatgttgccgatgggcttgagg

SEQ ID NO: 304288 - DNA, 25 bp, Homo sapien
atgagcacgatgttgccgatgggct

SEQ ID NO: 304289 - DNA, 25 bp, Homo sapien
cgatgttgccgatgggcttgaggga

SEQ ID NO: 304290 - DNA, 25 bp, Homo sapien
ccatgcagtccgagcggttggtgat

SEQ ID NO: 304291 - DNA, 25 bp, Homo sapien
tgtgatggacccagcggtagttggc

SEQ ID NO: 304292 - DNA, 25 bp, Homo sapien
tgtccacgcccagacagtggtagaa

SEQ ID NO: 304293 - DNA, 25 bp, Homo sapien
gtgatgttgcgggtgtccacgccca

SEQ ID NO: 304294 - DNA, 25 bp, Homo sapien
catccagtccattgtacatgatgtt

SEQ ID NO: 304295 - DNA, 25 bp, Homo sapien
ccagtccattgtacatgatgttcac

SEQ ID NO: 304296 - DNA, 25 bp, Homo sapien
tgctggtccacagcaacagcatcca

SEQ ID NO: 304297 - DNA, 25 bp, Homo sapien
tccagtccattgtacatgatgttca

SEQ ID NO: 304298 - DNA, 25 bp, Homo sapien
gcgcttcttctccaggcgccgcagc

SEQ ID NO: 304299 - DNA, 25 bp, Homo sapien
tccggcgcttcttctccaggcgccg

SEQ ID NO: 304300 - DNA, 25 bp, Homo sapien
tcacgccgccgtgcctcttcagcct

SEQ ID NO: 304301 - DNA, 25 bp, Homo sapien
ttctcctcacgccgccgtgcctctt

SEQ ID NO: 304302 - DNA, 25 bp, Homo sapien
taggtggcatagtagggcagccgct

SEQ ID NO: 304303 - DNA, 25 bp, Homo sapien
cacatggagtggatgagcagccggg

SEQ ID NO: 304304 - DNA, 25 bp, Homo sapien
cagccgggtgtgacaataggtggca

SEQ ID NO: 304305 - DNA, 25 bp, Homo sapien
gattgtagtgctccagggacatggt

SEQ ID NO: 304306 - DNA, 25 bp, Homo sapien
gtccttgaagaagcgcctcagacca

SEQ ID NO: 304307 - DNA, 25 bp, Homo sapien
ggtgaacatatagttgcagtacttg

SEQ ID NO: 304308 - DNA, 25 bp, Homo sapien
cggtccttgaagaagcgcctcagac

SEQ ID NO: 304309 - DNA, 25 bp, Homo sapien
aaagacagtggtgaacatatagttg

SEQ ID NO: 304310 - DNA, 25 bp, Homo sapien
ggcagggccgcattgatctcgatct

SEQ ID NO: 304311 - DNA, 25 bp, Homo sapien
cagggccgcattgatctcgatctcc

SEQ ID NO: 304312 - DNA, 25 bp, Homo sapien
tgatgggcagggccgcattgatctc

SEQ ID NO: 304313 - DNA, 25 bp, Homo sapien
gattgatgggcagggccgcattgat

SEQ ID NO: 304314 - DNA, 25 bp, Homo sapien
cagcagggcccgcattcctgtggcc

SEQ ID NO: 304315 - DNA, 25 bp, Homo sapien
agcagggcccgcattcctgtggcca

SEQ ID NO: 304316 - DNA, 25 bp, Homo sapien
gcagggcccgcattcctgtggccat

SEQ ID NO: 304317 - DNA, 25 bp, Homo sapien
gggcaaagcttgcaccaccgtgtcc

SEQ ID NO: 304318 - DNA, 25 bp, Homo sapien
ttcccaaagagctccaccccgagag

SEQ ID NO: 304319 - DNA, 25 bp, Homo sapien
ccaaagagctccaccccgagagcag

SEQ ID NO: 304320 - DNA, 25 bp, Homo sapien
tcccaaagagctccaccccgagagc

SEQ ID NO: 304321 - DNA, 25 bp, Homo sapien
agcagcatgaagaggaggcccaggt

SEQ ID NO: 304322 - DNA, 25 bp, Homo sapien
gtcacccgtggagacctggaagagt

SEQ ID NO: 304323 - DNA, 25 bp, Homo sapien
ttccagttgtcacccgtggagacct

SEQ ID NO: 304324 - DNA, 25 bp, Homo sapien
tctcgaaggtggcatgccggctcat

SEQ ID NO: 304325 - DNA, 25 bp, Homo sapien
ggccatgccgaagttctcgaaggtg

SEQ ID NO: 304326 - DNA, 25 bp, Homo sapien
tgaggatgaggacggagacatccca

SEQ ID NO: 304327 - DNA, 25 bp, Homo sapien
gtcgtgggtgcagtcccgcagcgtg

SEQ ID NO: 304328 - DNA, 25 bp, Homo sapien
cgtgggtgcagtcccgcagcgtgtc

SEQ ID NO: 304329 - DNA, 25 bp, Homo sapien
cgtcgtgggtgcagtcccgcagcgt

SEQ ID NO: 304330 - DNA, 25 bp, Homo sapien
tcgtgggtgcagtcccgcagcgtgt

SEQ ID NO: 304331 - DNA, 25 bp, Homo sapien
acagcggcgacacaaactgcaggct

SEQ ID NO: 304332 - DNA, 25 bp, Homo sapien
aagtacagcggcgacacaaactgca

SEQ ID NO: 304333 - DNA, 25 bp, Homo sapien
gtacagcggcgacacaaactgcagg

SEQ ID NO: 304334 - DNA, 25 bp, Homo sapien
agcggcgacacaaactgcaggctgc

SEQ ID NO: 304335 - DNA, 25 bp, Homo sapien
gaactgcgcggtgagcacgaagctc

SEQ ID NO: 304336 - DNA, 25 bp, Homo sapien
acgaactgcgcggtgagcacgaagc

SEQ ID NO: 304337 - DNA, 25 bp, Homo sapien
atgagcacgaactgcgcggtgagca

SEQ ID NO: 304338 - DNA, 25 bp, Homo sapien
cacgttgatgagcacgaactgcgcg

SEQ ID NO: 304339 - DNA, 25 bp, Homo sapien
caggcgagtagcagcgccggcacaa

SEQ ID NO: 304340 - DNA, 25 bp, Homo sapien
tctccagctcgagctcggcatccat

SEQ ID NO: 304341 - DNA, 25 bp, Homo sapien
gcacaagccgccctcggtgtcgccc

SEQ ID NO: 304342 - DNA, 25 bp, Homo sapien
tccatctcggcgtcctcctgcgcct

SEQ ID NO: 304343 - DNA, 25 bp, Homo sapien
acttcttgcagccggcaggcgagga

SEQ ID NO: 304344 - DNA, 25 bp, Homo sapien
ccttgatgattaaagagacgctgtc

SEQ ID NO: 304345 - DNA, 25 bp, Homo sapien
ctcttgcttgtcgtggtgacacttc

SEQ ID NO: 304346 - DNA, 25 bp, Homo sapien
ggttgtcgatgatggtcagctcccc

SEQ ID NO: 304347 - DNA, 25 bp, Homo sapien
ctgctggacacggatgatgtgtcca

SEQ ID NO: 304348 - DNA, 25 bp, Homo sapien
acggatgatgtgtccatcctgtgca

SEQ ID NO: 304349 - DNA, 25 bp, Homo sapien
cctgggtgacatgcgatggtgacac

SEQ ID NO: 304350 - DNA, 25 bp, Homo sapien
agcctgggtgacatgcgatggtgac

SEQ ID NO: 304351 - DNA, 25 bp, Homo sapien
acccaggtttgggatgggcagacct

SEQ ID NO: 304352 - DNA, 25 bp, Homo sapien
ggctgtggggtcctcgagactcagg

SEQ ID NO: 304353 - DNA, 25 bp, Homo sapien
ctgtggggtcctcgagactcaggtc

SEQ ID NO: 304354 - DNA, 25 bp, Homo sapien
tggggtcctcgagactcaggtcgtc

SEQ ID NO: 304355 - DNA, 25 bp, Homo sapien
ggtcctcgagactcaggtcgtcacc

SEQ ID NO: 304356 - DNA, 25 bp, Homo sapien
tccacctccgaatgcccactggatg

SEQ ID NO: 304357 - DNA, 25 bp, Homo sapien
agttagtgacttcccctggtacaga

SEQ ID NO: 304358 - DNA, 25 bp, Homo sapien
cccaggcagttagtgacttcccctg

SEQ ID NO: 304359 - DNA, 25 bp, Homo sapien
catcttccaaaatcccgtgaaagga

SEQ ID NO: 304360 - DNA, 25 bp, Homo sapien
cacggccccttgcttaactaggcta

SEQ ID NO: 304361 - DNA, 25 bp, Homo sapien
taggctaccctcatgtctagtctga

SEQ ID NO: 304362 - DNA, 25 bp, Homo sapien
gacagctcatgaagggtacctcatg

SEQ ID NO: 304363 - DNA, 25 bp, Homo sapien
gggacagctcatgaagggtacctca

SEQ ID NO: 304364 - DNA, 25 bp, Homo sapien
tgtcatgtttcagccaggaccggac

SEQ ID NO: 304365 - DNA, 25 bp, Homo sapien
acaggaagttctctggatccggcga

SEQ ID NO: 304366 - DNA, 25 bp, Homo sapien
gggaagaagcattcgcccaggtctc

SEQ ID NO: 304367 - DNA, 25 bp, Homo sapien
gacagggttgaatgggatctcctcc

SEQ ID NO: 304368 - DNA, 25 bp, Homo sapien
ggagggttccagtgccagtgccctt

SEQ ID NO: 304369 - DNA, 25 bp, Homo sapien
agttgacccttggtgaccgcagaga

SEQ ID NO: 304370 - DNA, 25 bp, Homo sapien
aggagccctgcagcgcaatcttggg

SEQ ID NO: 304371 - DNA, 25 bp, Homo sapien
ggaagaactcggctggcatgggcag

SEQ ID NO: 304372 - DNA, 25 bp, Homo sapien
tcagcactaaacagtgagcccggca

SEQ ID NO: 304373 - DNA, 25 bp, Homo sapien
tcaagctagggatcacaggcctctt

SEQ ID NO: 304374 - DNA, 25 bp, Homo sapien
acagcctggtgtgacgggtcagaca

SEQ ID NO: 304375 - DNA, 25 bp, Homo sapien
agggagtttgtgtcctgcccgccag

SEQ ID NO: 304376 - DNA, 25 bp, Homo sapien
cgggggctgtcgctcagggtcaggc

SEQ ID NO: 304377 - DNA, 25 bp, Homo sapien
tccagcgacgtgtcgctcccggtgg

SEQ ID NO: 304378 - DNA, 25 bp, Homo sapien
gggctgtcgctcagggtcaggctgt

SEQ ID NO: 304379 - DNA, 25 bp, Homo sapien
ctggcgtccagcgacgtgtcgctcc

SEQ ID NO: 304380 - DNA, 25 bp, Homo sapien
ctcctcgtccgaggggtccatggag

SEQ ID NO: 304381 - DNA, 25 bp, Homo sapien
aggcccatgggcagcggtgcccggc

SEQ ID NO: 304382 - DNA, 25 bp, Homo sapien
tgctgctgaacttcctggcgggcgt

SEQ ID NO: 304383 - DNA, 25 bp, Homo sapien
ggctgcgctgatgcgcccgcagccc

SEQ ID NO: 304384 - DNA, 25 bp, Homo sapien
caagctactcttaaccagggaggag

SEQ ID NO: 304385 - DNA, 25 bp, Homo sapien
tgcagagtcacacggttcagggtaa

SEQ ID NO: 304386 - DNA, 25 bp, Homo sapien
tatgtatatgcactggaagggccac

SEQ ID NO: 304387 - DNA, 25 bp, Homo sapien
gagagacatctaaccggtggactaa

SEQ ID NO: 304388 - DNA, 25 bp, Homo sapien
tagaaactgtacagcgactgagagt

SEQ ID NO: 304389 - DNA, 25 bp, Homo sapien
tattcaaaacaacactggtggtggc

SEQ ID NO: 304390 - DNA, 25 bp, Homo sapien
taggagggaagttcattcacaccat

SEQ ID NO: 304391 - DNA, 25 bp, Homo sapien
cagcgccatcagcaactaggaggga

SEQ ID NO: 304392 - DNA, 25 bp, Homo sapien
gacccagggctagcaggactagaaa

SEQ ID NO: 304393 - DNA, 25 bp, Homo sapien
acggacccagggctagcaggactag

SEQ ID NO: 304394 - DNA, 25 bp, Homo sapien
gcaggagacagtgcacactccagag

SEQ ID NO: 304395 - DNA, 25 bp, Homo sapien
cactccagagatgggacggacccag

SEQ ID NO: 304396 - DNA, 25 bp, Homo sapien
ctccagacaacgcagctgtggtcct

SEQ ID NO: 304397 - DNA, 25 bp, Homo sapien
aggcacacacaaaggcggcccaggg

SEQ ID NO: 304398 - DNA, 25 bp, Homo sapien
caaaggcggcccagggacaagagga

SEQ ID NO: 304399 - DNA, 25 bp, Homo sapien
actggccaccgagctccagacaacg

SEQ ID NO: 304400 - DNA, 25 bp, Homo sapien
cccaggacccccagctccctcctgg

SEQ ID NO: 304401 - DNA, 25 bp, Homo sapien
cagctccctcctggcgggggcagcc

SEQ ID NO: 304402 - DNA, 25 bp, Homo sapien
ccccagctccctcctggcgggggca

SEQ ID NO: 304403 - DNA, 25 bp, Homo sapien
aggacccccagctccctcctggcgg

SEQ ID NO: 304404 - DNA, 25 bp, Homo sapien
gcagacgaatagtcttgggccaaat

SEQ ID NO: 304405 - DNA, 25 bp, Homo sapien
agacgaatagtcttgggccaaatcc

SEQ ID NO: 304406 - DNA, 25 bp, Homo sapien
acgaatagtcttgggccaaatccca

SEQ ID NO: 304407 - DNA, 25 bp, Homo sapien
ctgcagacgaatagtcttgggccaa

SEQ ID NO: 304408 - DNA, 25 bp, Homo sapien
agggacagcagggtgaccgcatagc

SEQ ID NO: 304409 - DNA, 25 bp, Homo sapien
gggacagcagggtgaccgcatagcc

SEQ ID NO: 304410 - DNA, 25 bp, Homo sapien
gctcacaaaatgctttcatgagcat

SEQ ID NO: 304411 - DNA, 25 bp, Homo sapien
ggatcccggaacatgtctcagggag

SEQ ID NO: 304412 - DNA, 25 bp, Homo sapien
cttcggatcccggaacatgtctcag

SEQ ID NO: 304413 - DNA, 25 bp, Homo sapien
ggggaagtggtgaggccagccttcc

SEQ ID NO: 304414 - DNA, 25 bp, Homo sapien
ctggtggaccaccaggtccaagatg

SEQ ID NO: 304415 - DNA, 25 bp, Homo sapien
ggtggaccaccaggtccaagatggc

SEQ ID NO: 304416 - DNA, 25 bp, Homo sapien
ccaggtccaagatggccacactgag

SEQ ID NO: 304417 - DNA, 25 bp, Homo sapien
caccaggtccaagatggccacactg

SEQ ID NO: 304418 - DNA, 25 bp, Homo sapien
aacactgctgtctgccagcgggaag

SEQ ID NO: 304419 - DNA, 25 bp, Homo sapien
tctgccagcgggaagggagagacac

SEQ ID NO: 304420 - DNA, 25 bp, Homo sapien
tttgtgtgcccgaaacactgctgtc

SEQ ID NO: 304421 - DNA, 25 bp, Homo sapien
gatgaatcctttgtgtgcccgaaac

SEQ ID NO: 304422 - DNA, 25 bp, Homo sapien
gattcgggcaatctcatgggctgca

SEQ ID NO: 304423 - DNA, 25 bp, Homo sapien
tgggctgcaatttgggacagagcta

SEQ ID NO: 304424 - DNA, 25 bp, Homo sapien
gctccatctgagtggaagtttctga

SEQ ID NO: 304425 - DNA, 25 bp, Homo sapien
tctgatctacagcagggttcccggg

SEQ ID NO: 304426 - DNA, 25 bp, Homo sapien
ttacagccgcagtgtgcctggactg

SEQ ID NO: 304427 - DNA, 25 bp, Homo sapien
ctccacgcactctggtgatagaagg

SEQ ID NO: 304428 - DNA, 25 bp, Homo sapien
tggagaggctccacgcactctggtg

SEQ ID NO: 304429 - DNA, 25 bp, Homo sapien
acagccgcagtgtgcctggactgga

SEQ ID NO: 304430 - DNA, 25 bp, Homo sapien
tcacttaaaggatacggctgaagcc

SEQ ID NO: 304431 - DNA, 25 bp, Homo sapien
cccctggaagttaggcatggccatg

SEQ ID NO: 304432 - DNA, 25 bp, Homo sapien
tgggaaactcccatcgtaggcacga

SEQ ID NO: 304433 - DNA, 25 bp, Homo sapien
tcccagggacaaggcgaaatggtgc

SEQ ID NO: 304434 - DNA, 25 bp, Homo sapien
aagatgggagtgacaacaacaatga

SEQ ID NO: 304435 - DNA, 25 bp, Homo sapien
tgttgaagatgggagtgacaacaac

SEQ ID NO: 304436 - DNA, 25 bp, Homo sapien
tgaagatgggagtgacaacaacaat

SEQ ID NO: 304437 - DNA, 25 bp, Homo sapien
gaatggtgttgaagatgggagtgac

SEQ ID NO: 304438 - DNA, 25 bp, Homo sapien
gggatgcgtccgacggccacggctg

SEQ ID NO: 304439 - DNA, 25 bp, Homo sapien
ggtctgctccgggtcttttgtcctg

SEQ ID NO: 304440 - DNA, 25 bp, Homo sapien
atgcgtccgacggccacggctgatt

SEQ ID NO: 304441 - DNA, 25 bp, Homo sapien
ctccgggtcttttgtcctgacagga

SEQ ID NO: 304442 - DNA, 25 bp, Homo sapien
ttccgcagaggaccaggccggtgac

SEQ ID NO: 304443 - DNA, 25 bp, Homo sapien
ggtgacggtgaagccagccaccttc

SEQ ID NO: 304444 - DNA, 25 bp, Homo sapien
caagagggtccgcttctgaggtctg

SEQ ID NO: 304445 - DNA, 25 bp, Homo sapien
tattccaaacatgccttcaagaggg

SEQ ID NO: 304446 - DNA, 25 bp, Homo sapien
cattcagtgcccacttgaaggacaa

SEQ ID NO: 304447 - DNA, 25 bp, Homo sapien
caaggagacgcattcagtgcccact

SEQ ID NO: 304448 - DNA, 25 bp, Homo sapien
gacgcattcagtgcccacttgaagg

SEQ ID NO: 304449 - DNA, 25 bp, Homo sapien
ctgttctgcaaggagacgcattcag

SEQ ID NO: 304450 - DNA, 25 bp, Homo sapien
ctaactccatatgcatacttcagtg

SEQ ID NO: 304451 - DNA, 25 bp, Homo sapien
gttgagtcacgtcataagcacacct

SEQ ID NO: 304452 - DNA, 25 bp, Homo sapien
tacccacacacagttgagtcacgtc

SEQ ID NO: 304453 - DNA, 25 bp, Homo sapien
acatggatcttgctacccacacaca

SEQ ID NO: 304454 - DNA, 25 bp, Homo sapien
gcgcagtgcctggagcatcccaaag

SEQ ID NO: 304455 - DNA, 25 bp, Homo sapien
ctagcgcagtgcctggagcatccca

SEQ ID NO: 304456 - DNA, 25 bp, Homo sapien
cagtgcctggagcatcccaaagatc

SEQ ID NO: 304457 - DNA, 25 bp, Homo sapien
tgcctggagcatcccaaagatctgg

SEQ ID NO: 304458 - DNA, 25 bp, Homo sapien
gcacgtgtatgctcctccagctgaa

SEQ ID NO: 304459 - DNA, 25 bp, Homo sapien
ccgttaattgacaaggaggagcatc

SEQ ID NO: 304460 - DNA, 25 bp, Homo sapien
tacaccaagggtaccaagtcgctga

SEQ ID NO: 304461 - DNA, 25 bp, Homo sapien
gacactgttcgatgattccgcagca

SEQ ID NO: 304462 - DNA, 25 bp, Homo sapien
ggcgacttccggtgcgaatactggt

SEQ ID NO: 304463 - DNA, 25 bp, Homo sapien
atactggtgttaccagaaacatcac

SEQ ID NO: 304464 - DNA, 25 bp, Homo sapien
tccggtgcgaatactggtgttacca

SEQ ID NO: 304465 - DNA, 25 bp, Homo sapien
tgcgaatactggtgttaccagaaac

SEQ ID NO: 304466 - DNA, 25 bp, Homo sapien
caggaaacgttgcaatagataaaga

SEQ ID NO: 304467 - DNA, 25 bp, Homo sapien
cgttgaaactctcactagcggaaag

SEQ ID NO: 304468 - DNA, 25 bp, Homo sapien
taaagattgccagcttcacaaagac

SEQ ID NO: 304469 - DNA, 25 bp, Homo sapien
cagagaccaggctccgttgaaactc

SEQ ID NO: 304470 - DNA, 25 bp, Homo sapien
gaagccacagaagcctggtgagttg

SEQ ID NO: 304471 - DNA, 25 bp, Homo sapien
cagtagctctttggtggtgaagcca

SEQ ID NO: 304472 - DNA, 25 bp, Homo sapien
catagaggcttgtccagtagggctg

SEQ ID NO: 304473 - DNA, 25 bp, Homo sapien
ccccaagctggtcaaagcaagggct

SEQ ID NO: 304474 - DNA, 25 bp, Homo sapien
tgagggaattctgcagtgttgctca

SEQ ID NO: 304475 - DNA, 25 bp, Homo sapien
gagggaattctgcagtgttgctcac

SEQ ID NO: 304476 - DNA, 25 bp, Homo sapien
ttgagggaattctgcagtgttgctc

SEQ ID NO: 304477 - DNA, 25 bp, Homo sapien
caggcagcatgaacaatgtgagagg

SEQ ID NO: 304478 - DNA, 25 bp, Homo sapien
tcaggcagcatgaacaatgtgagag

SEQ ID NO: 304479 - DNA, 25 bp, Homo sapien
tccatgaagatgttaatcttggttt

SEQ ID NO: 304480 - DNA, 25 bp, Homo sapien
gcagcttcatgtgttccaagagaaa

SEQ ID NO: 304481 - DNA, 25 bp, Homo sapien
tatcaaagttttatggtctgtgcta

SEQ ID NO: 304482 - DNA, 25 bp, Homo sapien
tttctggaggccctagcggatgatg

SEQ ID NO: 304483 - DNA, 25 bp, Homo sapien
agaaattgtgcttgtcttttaactt

SEQ ID NO: 304484 - DNA, 25 bp, Homo sapien
taattctagtagatagcctgggtgg

SEQ ID NO: 304485 - DNA, 25 bp, Homo sapien
gaaaaacatcaattcccggctgagg

SEQ ID NO: 304486 - DNA, 25 bp, Homo sapien
tctccagaggcactacttacagcca

SEQ ID NO: 304487 - DNA, 25 bp, Homo sapien
gcttgatggcaagacagaacaatac

SEQ ID NO: 304488 - DNA, 25 bp, Homo sapien
tttaattcatcacacctagagccca

SEQ ID NO: 304489 - DNA, 25 bp, Homo sapien
tccttaatgaagtgacccgcagtga

SEQ ID NO: 304490 - DNA, 25 bp, Homo sapien
tcttggaaaagatggcaacttgagc

SEQ ID NO: 304491 - DNA, 25 bp, Homo sapien
gagagaacatcgttggccactgtca

SEQ ID NO: 304492 - DNA, 25 bp, Homo sapien
gctcgttagctgaattaggtgccac

SEQ ID NO: 304493 - DNA, 25 bp, Homo sapien
tttgaggtcttacatagattgctga

SEQ ID NO: 304494 - DNA, 25 bp, Homo sapien
taggtgccactggtcaatttttggg

SEQ ID NO: 304495 - DNA, 25 bp, Homo sapien
caagttcaatgtccagcgtggtgtt

SEQ ID NO: 304496 - DNA, 25 bp, Homo sapien
gaggatgacctttgctgatagaaga

SEQ ID NO: 304497 - DNA, 25 bp, Homo sapien
tcagagaaacttgcctatcccaagg

SEQ ID NO: 304498 - DNA, 25 bp, Homo sapien
cattttggatgtgagggcaatctgg

SEQ ID NO: 304499 - DNA, 25 bp, Homo sapien
gtatgtgtgtctctcctaaagttgg

SEQ ID NO: 304500 - DNA, 25 bp, Homo sapien
cgggacgtggccgacaggacgggcg

SEQ ID NO: 304501 - DNA, 25 bp, Homo sapien
tggccgacaggacgggcgcgaacgg

SEQ ID NO: 304502 - DNA, 25 bp, Homo sapien
gccaccccgcgggacgtggccgaca

SEQ ID NO: 304503 - DNA, 25 bp, Homo sapien
cccgcgggacgtggccgacaggacg

SEQ ID NO: 304504 - DNA, 25 bp, Homo sapien
gcatatgcgacacccacagtagtta

SEQ ID NO: 304505 - DNA, 25 bp, Homo sapien
ctggaaacgaactgggtgacggcat

SEQ ID NO: 304506 - DNA, 25 bp, Homo sapien
tcaaggcggcggtattcagagaagt

SEQ ID NO: 304507 - DNA, 25 bp, Homo sapien
tgatttcgattttcgccagggccaa

SEQ ID NO: 304508 - DNA, 25 bp, Homo sapien
tcaacttcaagtacagaaggcttcc

SEQ ID NO: 304509 - DNA, 25 bp, Homo sapien
ggcttcctctcaaataagtctcctg

SEQ ID NO: 304510 - DNA, 25 bp, Homo sapien
gaagcctatgacttgagtccaagtc

SEQ ID NO: 304511 - DNA, 25 bp, Homo sapien
caaataagtctcctgaggtgacata

SEQ ID NO: 304512 - DNA, 25 bp, Homo sapien
tatcttgtacaccagtctgtaattt

SEQ ID NO: 304513 - DNA, 25 bp, Homo sapien
ctgagcataacagtgcttaacagtg

SEQ ID NO: 304514 - DNA, 25 bp, Homo sapien
tgtacctttcgcgtgtatgactgag

SEQ ID NO: 304515 - DNA, 25 bp, Homo sapien
ttcgcgtgtatgactgagcataaca

SEQ ID NO: 304516 - DNA, 25 bp, Homo sapien
gtctataggcagaacctgtacaaac

SEQ ID NO: 304517 - DNA, 25 bp, Homo sapien
ggcagaacctgtacaaacacaagag

SEQ ID NO: 304518 - DNA, 25 bp, Homo sapien
tataggcagaacctgtacaaacaca

SEQ ID NO: 304519 - DNA, 25 bp, Homo sapien
tctcatagttccaccttaaatgcat

SEQ ID NO: 304520 - DNA, 25 bp, Homo sapien
tagtctctataaccattttcccgta

SEQ ID NO: 304521 - DNA, 25 bp, Homo sapien
ctcctaatggcatggtagtctctat

SEQ ID NO: 304522 - DNA, 25 bp, Homo sapien
cattcttggccagagctcatttcct

SEQ ID NO: 304523 - DNA, 25 bp, Homo sapien
cattttcccgtagcattcttggcca

SEQ ID NO: 304524 - DNA, 25 bp, Homo sapien
ctggctcatctggtacacagtcgtc

SEQ ID NO: 304525 - DNA, 25 bp, Homo sapien
aatgaagacgaggatgccgaggaaa

SEQ ID NO: 304526 - DNA, 25 bp, Homo sapien
gtacacagtcgtcatctgaagtggg

SEQ ID NO: 304527 - DNA, 25 bp, Homo sapien
ttgtatgaatgaagacgaggatgcc

SEQ ID NO: 304528 - DNA, 25 bp, Homo sapien
agctcaggtatctgcaaccatcttg

SEQ ID NO: 304529 - DNA, 25 bp, Homo sapien
gcttgacgccctgacaggaactgca

SEQ ID NO: 304530 - DNA, 25 bp, Homo sapien
aaccatcttgcttgacgccctgaca

SEQ ID NO: 304531 - DNA, 25 bp, Homo sapien
ctccagctcaggtatctgcaaccat

SEQ ID NO: 304532 - DNA, 25 bp, Homo sapien
taaccctagtcagccctgcagtctg

SEQ ID NO: 304533 - DNA, 25 bp, Homo sapien
tttatgtcttggctttgacaccgag

SEQ ID NO: 304534 - DNA, 25 bp, Homo sapien
attagaatcctttctggcaagaagg

SEQ ID NO: 304535 - DNA, 25 bp, Homo sapien
caagcatcagagttactgcatttca

SEQ ID NO: 304536 - DNA, 25 bp, Homo sapien
ggaagagttgggacaaagaacacaa

SEQ ID NO: 304537 - DNA, 25 bp, Homo sapien
tcaatcctcacgttcaggaagagtt

SEQ ID NO: 304538 - DNA, 25 bp, Homo sapien
aagcagctatcttcagactggacgc

SEQ ID NO: 304539 - DNA, 25 bp, Homo sapien
cacaaagcagctatcttcagactgg

SEQ ID NO: 304540 - DNA, 25 bp, Homo sapien
tatgttggaactaggatcattttca

SEQ ID NO: 304541 - DNA, 25 bp, Homo sapien
gttggaactaggatcattttcagct

SEQ ID NO: 304542 - DNA, 25 bp, Homo sapien
gttattatctgggaatcaataaata

SEQ ID NO: 304543 - DNA, 25 bp, Homo sapien
tattatctgggaatcaataaatatg

SEQ ID NO: 304544 - DNA, 25 bp, Homo sapien
ctggtcctaggatcacactctgcta

SEQ ID NO: 304545 - DNA, 25 bp, Homo sapien
tgctccacaagaacccagaaaggca

SEQ ID NO: 304546 - DNA, 25 bp, Homo sapien
ttacaacataaggtctacagcgggt

SEQ ID NO: 304547 - DNA, 25 bp, Homo sapien
tagcttctacccaccagtaggacct

SEQ ID NO: 304548 - DNA, 25 bp, Homo sapien
ttccaaggcaagcttgtttagcctg

SEQ ID NO: 304549 - DNA, 25 bp, Homo sapien
tccaaggcaagcttgtttagcctgc

SEQ ID NO: 304550 - DNA, 25 bp, Homo sapien
ccaaggcaagcttgtttagcctgcc

SEQ ID NO: 304551 - DNA, 25 bp, Homo sapien
aatactcccctaattggcagtgatc

SEQ ID NO: 304552 - DNA, 25 bp, Homo sapien
gctgtctctctatcaggcaaagcga

SEQ ID NO: 304553 - DNA, 25 bp, Homo sapien
tccagaattgtttgggcgaacctgc

SEQ ID NO: 304554 - DNA, 25 bp, Homo sapien
tcatgcatggcaacgaattttccaa

SEQ ID NO: 304555 - DNA, 25 bp, Homo sapien
tatccatagtaccagtaagaaaata

SEQ ID NO: 304556 - DNA, 25 bp, Homo sapien
tgtggtatccatagtaccagtaaga

SEQ ID NO: 304557 - DNA, 25 bp, Homo sapien
atctccacttgtggtatccatagta

SEQ ID NO: 304558 - DNA, 25 bp, Homo sapien
ccacttgtggtatccatagtaccag

SEQ ID NO: 304559 - DNA, 25 bp, Homo sapien
tgtccctcttcggcaattgcttttc

SEQ ID NO: 304560 - DNA, 25 bp, Homo sapien
cgctttcctcgacctcttttgcaag

SEQ ID NO: 304561 - DNA, 25 bp, Homo sapien
gcaattgcttttccgctttcctcga

SEQ ID NO: 304562 - DNA, 25 bp, Homo sapien
tttcctcgacctcttttgcaagcca

SEQ ID NO: 304563 - DNA, 25 bp, Homo sapien
tcaactttccccacaatatattctg

SEQ ID NO: 304564 - DNA, 25 bp, Homo sapien
cttcatcaactttccccacaatata

SEQ ID NO: 304565 - DNA, 25 bp, Homo sapien
aactttccccacaatatattctgct

SEQ ID NO: 304566 - DNA, 25 bp, Homo sapien
acaatatattctgctttttccaagt

SEQ ID NO: 304567 - DNA, 25 bp, Homo sapien
tagccattagcagcatgcagtgtgg

SEQ ID NO: 304568 - DNA, 25 bp, Homo sapien
tcaccagagggtaatgccacacagg

SEQ ID NO: 304569 - DNA, 25 bp, Homo sapien
ctaaaatatagccaccacagaggat

SEQ ID NO: 304570 - DNA, 25 bp, Homo sapien
gcagtgtggatctgcttcaccagag

SEQ ID NO: 304571 - DNA, 25 bp, Homo sapien
ctttttagagaacctcacagacgga

SEQ ID NO: 304572 - DNA, 25 bp, Homo sapien
tggtgatgccatttgtagggcctca

SEQ ID NO: 304573 - DNA, 25 bp, Homo sapien
catacagtgtgagacgctgcagcct

SEQ ID NO: 304574 - DNA, 25 bp, Homo sapien
accccgccaacctgatagatggtga

SEQ ID NO: 304575 - DNA, 25 bp, Homo sapien
atgcagatataaactgggtagcaac

SEQ ID NO: 304576 - DNA, 25 bp, Homo sapien
tgttttcaatttcagcgcttctgac

SEQ ID NO: 304577 - DNA, 25 bp, Homo sapien
gggcggagtgcaacagcctgaattc

SEQ ID NO: 304578 - DNA, 25 bp, Homo sapien
gccaccactacatactgcattggag

SEQ ID NO: 304579 - DNA, 25 bp, Homo sapien
gaagagctgccggaatctataggat

SEQ ID NO: 304580 - DNA, 25 bp, Homo sapien
tcagcagttcctaggagagtgggca

SEQ ID NO: 304581 - DNA, 25 bp, Homo sapien
ccgatggtgcttcctggtaatcagc

SEQ ID NO: 304582 - DNA, 25 bp, Homo sapien
ggaaatgaaggccatccgcagcctt

SEQ ID NO: 304583 - DNA, 25 bp, Homo sapien
ctggaagagaaataatgtggtcatt

SEQ ID NO: 304584 - DNA, 25 bp, Homo sapien
gaaataatgtggtcattgtgcctct

SEQ ID NO: 304585 - DNA, 25 bp, Homo sapien
tggaagagaaataatgtggtcattg

SEQ ID NO: 304586 - DNA, 25 bp, Homo sapien
agagaaataatgtggtcattgtgcc

SEQ ID NO: 304587 - DNA, 25 bp, Homo sapien
gaaagctcagttcatcctcacctga

SEQ ID NO: 304588 - DNA, 25 bp, Homo sapien
tgtgaaagctcagttcatcctcacc

SEQ ID NO: 304589 - DNA, 25 bp, Homo sapien
gctcagttcatcctcacctgaagca

SEQ ID NO: 304590 - DNA, 25 bp, Homo sapien
ctccagtgtgaaagctcagttcatc

SEQ ID NO: 304591 - DNA, 25 bp, Homo sapien
tgtgctccctgagaacttagccaag

SEQ ID NO: 304592 - DNA, 25 bp, Homo sapien
taagggtgcacaaagggaatcaagg

SEQ ID NO: 304593 - DNA, 25 bp, Homo sapien
ctcccaggacaaggatggtggctta

SEQ ID NO: 304594 - DNA, 25 bp, Homo sapien
cagcatgggcttgcacatctctgag

SEQ ID NO: 304595 - DNA, 25 bp, Homo sapien
ctgtccacttgtgccgtccactcat

SEQ ID NO: 304596 - DNA, 25 bp, Homo sapien
tgggaaactggatgtctatgaaatt

SEQ ID NO: 304597 - DNA, 25 bp, Homo sapien
gaaattcttgggcacatatccttcc

SEQ ID NO: 304598 - DNA, 25 bp, Homo sapien
gctccgccttaaaccactcctcttg

SEQ ID NO: 304599 - DNA, 25 bp, Homo sapien
ttgggcacatatccttcctggctcc

SEQ ID NO: 304600 - DNA, 25 bp, Homo sapien
cctgccggcagctgcggaagagata

SEQ ID NO: 304601 - DNA, 25 bp, Homo sapien
tgccggcagctgcggaagagataga

SEQ ID NO: 304602 - DNA, 25 bp, Homo sapien
cggcagctgcggaagagatagacca

SEQ ID NO: 304603 - DNA, 25 bp, Homo sapien
gcctgccggcagctgcggaagagat

SEQ ID NO: 304604 - DNA, 25 bp, Homo sapien
gccaacctccttgcccatgagtaag

SEQ ID NO: 304605 - DNA, 25 bp, Homo sapien
tggtgtcgagagaggccttcgtgaa

SEQ ID NO: 304606 - DNA, 25 bp, Homo sapien
cctccttgcccatgagtaagttctc

SEQ ID NO: 304607 - DNA, 25 bp, Homo sapien
tctggctggcccggatgatgaagaa

SEQ ID NO: 304608 - DNA, 25 bp, Homo sapien
ggctgagcctttaccattagatcca

SEQ ID NO: 304609 - DNA, 25 bp, Homo sapien
tctggactcacaagtgatgggacac

SEQ ID NO: 304610 - DNA, 25 bp, Homo sapien
ttttatccatctaggaagggtgggc

SEQ ID NO: 304611 - DNA, 25 bp, Homo sapien
gggacacattcgaaccagggctaga

SEQ ID NO: 304612 - DNA, 25 bp, Homo sapien
gcgcctgccgccccttccccagacc

SEQ ID NO: 304613 - DNA, 25 bp, Homo sapien
ggcgcctgccgccccttccccagac

SEQ ID NO: 304614 - DNA, 25 bp, Homo sapien
ttcgcttttagcacctcgagtttct

SEQ ID NO: 304615 - DNA, 25 bp, Homo sapien
gcttttagcacctcgagtttcttct

SEQ ID NO: 304616 - DNA, 25 bp, Homo sapien
cttcgcttttagcacctcgagtttc

SEQ ID NO: 304617 - DNA, 25 bp, Homo sapien
tcttgccaccttcgtggctggacat

SEQ ID NO: 304618 - DNA, 25 bp, Homo sapien
ctgtggccagaggccccttccccac

SEQ ID NO: 304619 - DNA, 25 bp, Homo sapien
ttttttgccagatttcttaattcca

SEQ ID NO: 304620 - DNA, 25 bp, Homo sapien
tttttgccagatttcttaattccac

SEQ ID NO: 304621 - DNA, 25 bp, Homo sapien
tattttttgccagatttcttaattc

SEQ ID NO: 304622 - DNA, 25 bp, Homo sapien
gtggcaaaagatattataggaggga

SEQ ID NO: 304623 - DNA, 25 bp, Homo sapien
gaactttgtaggatggaccacttag

SEQ ID NO: 304624 - DNA, 25 bp, Homo sapien
aggcttcggcaggaactttgtagga

SEQ ID NO: 304625 - DNA, 25 bp, Homo sapien
tggaccacttaggatacaggctatg

SEQ ID NO: 304626 - DNA, 25 bp, Homo sapien
taggatggaccacttaggatacagg

SEQ ID NO: 304627 - DNA, 25 bp, Homo sapien
ctcacatctgggatggtggagttct

SEQ ID NO: 304628 - DNA, 25 bp, Homo sapien
aattgtatgttacacggtgataatg

SEQ ID NO: 304629 - DNA, 25 bp, Homo sapien
cctccaggctgctcacatctgggat

SEQ ID NO: 304630 - DNA, 25 bp, Homo sapien
tacacggtgataatgtcaccacctc

SEQ ID NO: 304631 - DNA, 25 bp, Homo sapien
tttagggatggaaacttctcagtcc

SEQ ID NO: 304632 - DNA, 25 bp, Homo sapien
gaagtgttgaacgtcatcctcatgc

SEQ ID NO: 304633 - DNA, 25 bp, Homo sapien
ccacagaaagtaattacccttgttg

SEQ ID NO: 304634 - DNA, 25 bp, Homo sapien
acccttgttgtctcgcatgaccttg

SEQ ID NO: 304635 - DNA, 25 bp, Homo sapien
gtcttctcgggttctgtctctaagg

SEQ ID NO: 304636 - DNA, 25 bp, Homo sapien
tggaatttgtcctgtagtagtctac

SEQ ID NO: 304637 - DNA, 25 bp, Homo sapien
tcttctcgggttctgtctctaagga

SEQ ID NO: 304638 - DNA, 25 bp, Homo sapien
tggagatggaatttgtcctgtagta

SEQ ID NO: 304639 - DNA, 25 bp, Homo sapien
tgggacctccggtccaggctgttgc

SEQ ID NO: 304640 - DNA, 25 bp, Homo sapien
gggtgatccgacagcttccggttca

SEQ ID NO: 304641 - DNA, 25 bp, Homo sapien
gaaggtcggatttcttctcccacag

SEQ ID NO: 304642 - DNA, 25 bp, Homo sapien
tggtgctgcagatatcgctgctgtg

SEQ ID NO: 304643 - DNA, 25 bp, Homo sapien
aatcccatcgggaacaagggtggag

SEQ ID NO: 304644 - DNA, 25 bp, Homo sapien
gaccattcgggtaactaaggcagcg

SEQ ID NO: 304645 - DNA, 25 bp, Homo sapien
tattgtccatctcagtaagccgcct

SEQ ID NO: 304646 - DNA, 25 bp, Homo sapien
gcatgagaggaaacgcaatggacca

SEQ ID NO: 304647 - DNA, 25 bp, Homo sapien
tccgatgcatgagggccgcattcat

SEQ ID NO: 304648 - DNA, 25 bp, Homo sapien
gggtctgtgtgtctccgatgcatga

SEQ ID NO: 304649 - DNA, 25 bp, Homo sapien
atcatttatgtcaaggctgcctcct

SEQ ID NO: 304650 - DNA, 25 bp, Homo sapien
attcatttcactgcccaagccggtg

SEQ ID NO: 304651 - DNA, 25 bp, Homo sapien
tgcccggctaccctgctgcaattta

SEQ ID NO: 304652 - DNA, 25 bp, Homo sapien
gcccggctaccctgctgcaatttaa

SEQ ID NO: 304653 - DNA, 25 bp, Homo sapien
ctttgagagcaacattccctgaagg

SEQ ID NO: 304654 - DNA, 25 bp, Homo sapien
gagagcaacattccctgaaggctga

SEQ ID NO: 304655 - DNA, 25 bp, Homo sapien
ttatcgggtcatgggtgccacgtag

SEQ ID NO: 304656 - DNA, 25 bp, Homo sapien
agcttgttgtgcaggcggccggtcc

SEQ ID NO: 304657 - DNA, 25 bp, Homo sapien
ccaccaggatgggttggagctatcc

SEQ ID NO: 304658 - DNA, 25 bp, Homo sapien
ggcctcaaagtcatacagcgcccgg

SEQ ID NO: 304659 - DNA, 25 bp, Homo sapien
atggagtccagccttttttccttgc

SEQ ID NO: 304660 - DNA, 25 bp, Homo sapien
ttaccagcccaattgccaataaatt

SEQ ID NO: 304661 - DNA, 25 bp, Homo sapien
ttgcatcaactaattaccagcccaa

SEQ ID NO: 304662 - DNA, 25 bp, Homo sapien
agtcatggagtccagccttttttcc

SEQ ID NO: 304663 - DNA, 25 bp, Homo sapien
ttgcaggtcagctagaacgtgcccc

SEQ ID NO: 304664 - DNA, 25 bp, Homo sapien
taggtgttgactaggaggccagcct

SEQ ID NO: 304665 - DNA, 25 bp, Homo sapien
tcaggctcctatcatcaagtgggct

SEQ ID NO: 304666 - DNA, 25 bp, Homo sapien
gtgcccaccccttggagaacaggag

SEQ ID NO: 304667 - DNA, 25 bp, Homo sapien
gacacatgattctagcgtgatggga

SEQ ID NO: 304668 - DNA, 25 bp, Homo sapien
catgattctagcgtgatgggatgga

SEQ ID NO: 304669 - DNA, 25 bp, Homo sapien
tgatgggatggagagcgacagccat

SEQ ID NO: 304670 - DNA, 25 bp, Homo sapien
tggacacatgattctagcgtgatgg

SEQ ID NO: 304671 - DNA, 25 bp, Homo sapien
tgcacttggtgcagaacgggtttgc

SEQ ID NO: 304672 - DNA, 25 bp, Homo sapien
ggacactgcttgtgctacactggca

SEQ ID NO: 304673 - DNA, 25 bp, Homo sapien
catacctccgtctaactagagctgg

SEQ ID NO: 304674 - DNA, 25 bp, Homo sapien
aatagctgaggaggtcttctctgcc

SEQ ID NO: 304675 - DNA, 25 bp, Homo sapien
tgaaagctctgctcataccgcctgc

SEQ ID NO: 304676 - DNA, 25 bp, Homo sapien
ttacctggccgctaagagccctcat

SEQ ID NO: 304677 - DNA, 25 bp, Homo sapien
tttgctacaacagaacaccgagctc

SEQ ID NO: 304678 - DNA, 25 bp, Homo sapien
tactcttcagtagcttttgctacaa

SEQ ID NO: 304679 - DNA, 25 bp, Homo sapien
tggatccgcagcatctgggaaggca

SEQ ID NO: 304680 - DNA, 25 bp, Homo sapien
tgaaggattgggtcaattcaccagc

SEQ ID NO: 304681 - DNA, 25 bp, Homo sapien
taaatgtggtgcatagtggatccgc

SEQ ID NO: 304682 - DNA, 25 bp, Homo sapien
aatctccttgtcatgtggactgcag

SEQ ID NO: 304683 - DNA, 25 bp, Homo sapien
agaaagtcctaatagacagcccttg

SEQ ID NO: 304684 - DNA, 25 bp, Homo sapien
cttgtctagacaaaacagtgggaga

SEQ ID NO: 304685 - DNA, 25 bp, Homo sapien
gatggagcagatacagagcttttcc

SEQ ID NO: 304686 - DNA, 25 bp, Homo sapien
taagtaacagttgtctggacccacg

SEQ ID NO: 304687 - DNA, 25 bp, Homo sapien
tggactgcagcccacgtgtttctga

SEQ ID NO: 304688 - DNA, 25 bp, Homo sapien
tagcgtaagtagcagagtctggact

SEQ ID NO: 304689 - DNA, 25 bp, Homo sapien
gatcagctcagagtggtcaagaaac

SEQ ID NO: 304690 - DNA, 25 bp, Homo sapien
gaaacttgtccaggctgatagcgta

SEQ ID NO: 304691 - DNA, 25 bp, Homo sapien
cccgccgcggtccgaggtcccacag

SEQ ID NO: 304692 - DNA, 25 bp, Homo sapien
ccgccgcggtccgaggtcccacagc

SEQ ID NO: 304693 - DNA, 25 bp, Homo sapien
acgtgcgcctcgtccaggcagttca

SEQ ID NO: 304694 - DNA, 25 bp, Homo sapien
cgtgcgcctcgtccaggcagttcag

SEQ ID NO: 304695 - DNA, 25 bp, Homo sapien
ggcagttcagctgggactcggccat

SEQ ID NO: 304696 - DNA, 25 bp, Homo sapien
caggcagttcagctgggactcggcc

SEQ ID NO: 304697 - DNA, 25 bp, Homo sapien
ccgccgccgctcgcagtagtagaag

SEQ ID NO: 304698 - DNA, 25 bp, Homo sapien
agtagtagaaggcggcctgcgcctc

SEQ ID NO: 304699 - DNA, 25 bp, Homo sapien
ccgccgctcgcagtagtagaaggcg

SEQ ID NO: 304700 - DNA, 25 bp, Homo sapien
ccttgagccgctcgcggtaggcctg

SEQ ID NO: 304701 - DNA, 25 bp, Homo sapien
gccttggccttgctcttgccccggg

SEQ ID NO: 304702 - DNA, 25 bp, Homo sapien
ggccttgctcttgccccgggcgttg

SEQ ID NO: 304703 - DNA, 25 bp, Homo sapien
cgccggcgcgggggccttggccttg

SEQ ID NO: 304704 - DNA, 25 bp, Homo sapien
ttggccttgctcttgccccgggcgt

SEQ ID NO: 304705 - DNA, 25 bp, Homo sapien
tcggaacggtcgggccagtaggcca

SEQ ID NO: 304706 - DNA, 25 bp, Homo sapien
tgtcggaacggtcgggccagtaggc

SEQ ID NO: 304707 - DNA, 25 bp, Homo sapien
ctcggtgtcggaacggtcgggccag

SEQ ID NO: 304708 - DNA, 25 bp, Homo sapien
cggaacggtcgggccagtaggccag

SEQ ID NO: 304709 - DNA, 25 bp, Homo sapien
gtgaagagcgtgacccggctcacgc

SEQ ID NO: 304710 - DNA, 25 bp, Homo sapien
acgccgcggtagaaaccagtgtccg

SEQ ID NO: 304711 - DNA, 25 bp, Homo sapien
gggcctgttggatcatctgcctgac

SEQ ID NO: 304712 - DNA, 25 bp, Homo sapien
aggtgcggcgccttctcgtccttgg

SEQ ID NO: 304713 - DNA, 25 bp, Homo sapien
taatttgccaaacacgttcccagcc

SEQ ID NO: 304714 - DNA, 25 bp, Homo sapien
gaataccgacggctgacatctgtcc

SEQ ID NO: 304715 - DNA, 25 bp, Homo sapien
gccattcgctctacaggcctcactg

SEQ ID NO: 304716 - DNA, 25 bp, Homo sapien
gccagtgcctctgaacgctggaata

SEQ ID NO: 304717 - DNA, 25 bp, Homo sapien
ccaccatatgcaaagctgagtcttt

SEQ ID NO: 304718 - DNA, 25 bp, Homo sapien
actccaagactttgccatgcccggg

SEQ ID NO: 304719 - DNA, 25 bp, Homo sapien
tgagggaaacgtcatttgcagttaa

SEQ ID NO: 304720 - DNA, 25 bp, Homo sapien
ggtactgtttgccagtgtagctgaa

SEQ ID NO: 304721 - DNA, 25 bp, Homo sapien
tacctactgacgtgcaatgcctggg

SEQ ID NO: 304722 - DNA, 25 bp, Homo sapien
cccacgtgtgtttggatgacccaga

SEQ ID NO: 304723 - DNA, 25 bp, Homo sapien
gattcgaggcggcagcagtttctat

SEQ ID NO: 304724 - DNA, 25 bp, Homo sapien
tataagctgtcgcaggcgcattggc

SEQ ID NO: 304725 - DNA, 25 bp, Homo sapien
ccccgatctttgagcatatctgagc

SEQ ID NO: 304726 - DNA, 25 bp, Homo sapien
gatctttgagcatatctgagccctg

SEQ ID NO: 304727 - DNA, 25 bp, Homo sapien
cattcctggagttccacgtcccccg

SEQ ID NO: 304728 - DNA, 25 bp, Homo sapien
cacgtcccccgatctttgagcatat

SEQ ID NO: 304729 - DNA, 25 bp, Homo sapien
cctgacacatctccaggaaatactt

SEQ ID NO: 304730 - DNA, 25 bp, Homo sapien
caggaaatacttcactcctgcctcg

SEQ ID NO: 304731 - DNA, 25 bp, Homo sapien
atgtacactgggacccggcgcttac

SEQ ID NO: 304732 - DNA, 25 bp, Homo sapien
caggatgatgtacactgggacccgg

SEQ ID NO: 304733 - DNA, 25 bp, Homo sapien
attctgcaggctaagcaccccagga

SEQ ID NO: 304734 - DNA, 25 bp, Homo sapien
tcagtagttaacagtaaagccaagg

SEQ ID NO: 304735 - DNA, 25 bp, Homo sapien
catagggaaccctctttggcgagca

SEQ ID NO: 304736 - DNA, 25 bp, Homo sapien
ttgagatcttgaagttcgcctgagc

SEQ ID NO: 304737 - DNA, 25 bp, Homo sapien
gcctgtcacagagcggacacggatg

SEQ ID NO: 304738 - DNA, 25 bp, Homo sapien
cccatgggcatgtagaagccgacgc

SEQ ID NO: 304739 - DNA, 25 bp, Homo sapien
agatccagtggccactttgtcaccg

SEQ ID NO: 304740 - DNA, 25 bp, Homo sapien
tttgtcaccgtccaccatcaggaac

SEQ ID NO: 304741 - DNA, 25 bp, Homo sapien
tccacatgggaggaactccaggtga

SEQ ID NO: 304742 - DNA, 25 bp, Homo sapien
ccacatgggaggaactccaggtgaa

SEQ ID NO: 304743 - DNA, 25 bp, Homo sapien
cacatgggaggaactccaggtgaac

SEQ ID NO: 304744 - DNA, 25 bp, Homo sapien
tgtccacatgggaggaactccaggt

SEQ ID NO: 304745 - DNA, 25 bp, Homo sapien
gcactggaattctcgttgggcctct

SEQ ID NO: 304746 - DNA, 25 bp, Homo sapien
acctcctcggagatggcgtacagct

SEQ ID NO: 304747 - DNA, 25 bp, Homo sapien
cggaactccgtgtcaaagggctcta

SEQ ID NO: 304748 - DNA, 25 bp, Homo sapien
gataagctttcgagccacagtggag

SEQ ID NO: 304749 - DNA, 25 bp, Homo sapien
actgggctccacagcgatggaggga

SEQ ID NO: 304750 - DNA, 25 bp, Homo sapien
cagcgatggagggagaaaccccacc

SEQ ID NO: 304751 - DNA, 25 bp, Homo sapien
tccacagcgatggagggagaaaccc

SEQ ID NO: 304752 - DNA, 25 bp, Homo sapien
gctccacagcgatggagggagaaac

SEQ ID NO: 304753 - DNA, 25 bp, Homo sapien
gggcatccccggaccttcctggctg

SEQ ID NO: 304754 - DNA, 25 bp, Homo sapien
caaggaacgggatgatggttccggg

SEQ ID NO: 304755 - DNA, 25 bp, Homo sapien
aaggacggacaaggaacgggatgat

SEQ ID NO: 304756 - DNA, 25 bp, Homo sapien
cgggatgatggttccgggcatcccc

SEQ ID NO: 304757 - DNA, 25 bp, Homo sapien
tcactcactgctgcaatggacacat

SEQ ID NO: 304758 - DNA, 25 bp, Homo sapien
gcggccatcttagagtcactcactg

SEQ ID NO: 304759 - DNA, 25 bp, Homo sapien
gctgcaatggacacattcgtcccca

SEQ ID NO: 304760 - DNA, 25 bp, Homo sapien
ctagtgggatgaaatgcggccatct

SEQ ID NO: 304761 - DNA, 25 bp, Homo sapien
aaggcgctgggggtcactttccgca

SEQ ID NO: 304762 - DNA, 25 bp, Homo sapien
actttccgcagtggtgccgagcacg

SEQ ID NO: 304763 - DNA, 25 bp, Homo sapien
ttccgcagtggtgccgagcacgtct

SEQ ID NO: 304764 - DNA, 25 bp, Homo sapien
ggtcactttccgcagtggtgccgag

SEQ ID NO: 304765 - DNA, 25 bp, Homo sapien
tgcaccctcattaagggtgttcccc

SEQ ID NO: 304766 - DNA, 25 bp, Homo sapien
gctgcaccctcattaagggtgttcc

SEQ ID NO: 304767 - DNA, 25 bp, Homo sapien
tccagctgcaccctcattaagggtg

SEQ ID NO: 304768 - DNA, 25 bp, Homo sapien
cagctgcaccctcattaagggtgtt

SEQ ID NO: 304769 - DNA, 25 bp, Homo sapien
agcgacagtgccagaacctggcctt

SEQ ID NO: 304770 - DNA, 25 bp, Homo sapien
gctccaccgcctgcaaagtaagact

SEQ ID NO: 304771 - DNA, 25 bp, Homo sapien
gctgccgcattctaccgctgaggtg

SEQ ID NO: 304772 - DNA, 25 bp, Homo sapien
caaagtaagactgcggtccttctct

SEQ ID NO: 304773 - DNA, 25 bp, Homo sapien
tcagcttcagttcctaccctgtgtg

SEQ ID NO: 304774 - DNA, 25 bp, Homo sapien
gttcctaccctgtgtgctgtccaca

SEQ ID NO: 304775 - DNA, 25 bp, Homo sapien
gaaggatgtaagtgaaacgcttggt

SEQ ID NO: 304776 - DNA, 25 bp, Homo sapien
aaacgcttggtggattcagcttcag

SEQ ID NO: 304777 - DNA, 25 bp, Homo sapien
gaaatcacacagttgctaggcttgg

SEQ ID NO: 304778 - DNA, 25 bp, Homo sapien
ggaaatcacacagttgctaggcttg

SEQ ID NO: 304779 - DNA, 25 bp, Homo sapien
aggaaatcacacagttgctaggctt

SEQ ID NO: 304780 - DNA, 25 bp, Homo sapien
tcatgtaaacaaggaggccgtggca

SEQ ID NO: 304781 - DNA, 25 bp, Homo sapien
tggcgtctgatgtgcaaactggtgc

SEQ ID NO: 304782 - DNA, 25 bp, Homo sapien
aaactggtgcagtgtgcgacctgcg

SEQ ID NO: 304783 - DNA, 25 bp, Homo sapien
tgtgactgagatgcttcggaccctc

SEQ ID NO: 304784 - DNA, 25 bp, Homo sapien
cctcattcaagtctagttcaggagc

SEQ ID NO: 304785 - DNA, 25 bp, Homo sapien
gcagtcccaggtaaaggccctgtaa

SEQ ID NO: 304786 - DNA, 25 bp, Homo sapien
agcagccaaggaggtctcaaccacc

SEQ ID NO: 304787 - DNA, 25 bp, Homo sapien
cagtgcgagcgctctcagaaaagca

SEQ ID NO: 304788 - DNA, 25 bp, Homo sapien
cccactgcgggaggccgcaggatct

SEQ ID NO: 304789 - DNA, 25 bp, Homo sapien
ttaggctgacctgctctggcgaggc

SEQ ID NO: 304790 - DNA, 25 bp, Homo sapien
tggccattaggctgacctgctctgg

SEQ ID NO: 304791 - DNA, 25 bp, Homo sapien
caaagtgtaacctggaagccctggt

SEQ ID NO: 304792 - DNA, 25 bp, Homo sapien
agtctggccaaagtgtaacctggaa

SEQ ID NO: 304793 - DNA, 25 bp, Homo sapien
cagagggcaagaaagtccgctgcat

SEQ ID NO: 304794 - DNA, 25 bp, Homo sapien
tgctctcacatcagctgccttgcag

SEQ ID NO: 304795 - DNA, 25 bp, Homo sapien
tgggattaacagagaagaccctggg

SEQ ID NO: 304796 - DNA, 25 bp, Homo sapien
tcaccttcataaaagctcagggagg

SEQ ID NO: 304797 - DNA, 25 bp, Homo sapien
taagattaaggacaggtagctaagg

SEQ ID NO: 304798 - DNA, 25 bp, Homo sapien
gaaaccttcatgttactaaagcatc

SEQ ID NO: 304799 - DNA, 25 bp, Homo sapien
ccaatacacaggaaaactgttacct

SEQ ID NO: 304800 - DNA, 25 bp, Homo sapien
caattacttgcgcttctcatcatac

SEQ ID NO: 304801 - DNA, 25 bp, Homo sapien
gggataatgaaccttagccaggctg

SEQ ID NO: 304802 - DNA, 25 bp, Homo sapien
aaagatgctactgcgtctcccagga

SEQ ID NO: 304803 - DNA, 25 bp, Homo sapien
tcatctgaaggagtgctagtggcat

SEQ ID NO: 304804 - DNA, 25 bp, Homo sapien
ggaagcagcgtctcaggcaagtcag

SEQ ID NO: 304805 - DNA, 25 bp, Homo sapien
ctgtctgtgcaggacgtagctgagc

SEQ ID NO: 304806 - DNA, 25 bp, Homo sapien
acacaggtatgtgcagtggtactgt

SEQ ID NO: 304807 - DNA, 25 bp, Homo sapien
cagtggtactgtctgtgcaggacgt

SEQ ID NO: 304808 - DNA, 25 bp, Homo sapien
ctgcttttggaggtgggtccaccgc

SEQ ID NO: 304809 - DNA, 25 bp, Homo sapien
tgaaaacttgattccagccggctgt

SEQ ID NO: 304810 - DNA, 25 bp, Homo sapien
actgtgaaagtgctctaggacggtc

SEQ ID NO: 304811 - DNA, 25 bp, Homo sapien
gagaaattgcatccctagcgcacgg

SEQ ID NO: 304812 - DNA, 25 bp, Homo sapien
tgggtacctatcgtgccaggcagca

SEQ ID NO: 304813 - DNA, 25 bp, Homo sapien
tgcaagcactgcagcgaacctttcc

SEQ ID NO: 304814 - DNA, 25 bp, Homo sapien
taaatgggtgcaggcctgcaagcac

SEQ ID NO: 304815 - DNA, 25 bp, Homo sapien
gaacctttccctgtgcagtcgccta

SEQ ID NO: 304816 - DNA, 25 bp, Homo sapien
cccagcaaatatccaccggatgaat

SEQ ID NO: 304817 - DNA, 25 bp, Homo sapien
gttagccctgtgtgccaacgattca

SEQ ID NO: 304818 - DNA, 25 bp, Homo sapien
gagagtcgtctcgagatcatcccca

SEQ ID NO: 304819 - DNA, 25 bp, Homo sapien
ccttcaggtgaacaagcagttagcc

SEQ ID NO: 304820 - DNA, 25 bp, Homo sapien
gaagcctgtcctctctatgccatgc

SEQ ID NO: 304821 - DNA, 25 bp, Homo sapien
tatcaatccagaaaggttgtgggac

SEQ ID NO: 304822 - DNA, 25 bp, Homo sapien
ctttctgtcgaaacctgggccttgg

SEQ ID NO: 304823 - DNA, 25 bp, Homo sapien
cagagtggctccgaaatggcatctc

SEQ ID NO: 304824 - DNA, 25 bp, Homo sapien
acaggtccctgccaagcagagtggc

SEQ ID NO: 304825 - DNA, 25 bp, Homo sapien
cccaccaggctatagtcactagtgt

SEQ ID NO: 304826 - DNA, 25 bp, Homo sapien
gtcactagtgtgaaagccaaagaca

SEQ ID NO: 304827 - DNA, 25 bp, Homo sapien
gctatagtcactagtgtgaaagcca

SEQ ID NO: 304828 - DNA, 25 bp, Homo sapien
ccaaagacatcaaggcggggtgtgg

SEQ ID NO: 304829 - DNA, 25 bp, Homo sapien
tgccagccgcgtgggcttctccaag

SEQ ID NO: 304830 - DNA, 25 bp, Homo sapien
caagttctccaaggcttctctccag

SEQ ID NO: 304831 - DNA, 25 bp, Homo sapien
atgatgctgccagccgcgtgggctt

SEQ ID NO: 304832 - DNA, 25 bp, Homo sapien
gccgcgtgggcttctccaagttctc

SEQ ID NO: 304833 - DNA, 25 bp, Homo sapien
tccatatccttggagcagcttgctg

SEQ ID NO: 304834 - DNA, 25 bp, Homo sapien
ggccaggtctatcttatcacagtgc

SEQ ID NO: 304835 - DNA, 25 bp, Homo sapien
cactcctcaggtatcggctcagaga

SEQ ID NO: 304836 - DNA, 25 bp, Homo sapien
gacaggaaggctttgcgggcaaaac

SEQ ID NO: 304837 - DNA, 25 bp, Homo sapien
taattggtagaattgaggaaaataa

SEQ ID NO: 304838 - DNA, 25 bp, Homo sapien
caggtgcatagggaaggctggttcc

SEQ ID NO: 304839 - DNA, 25 bp, Homo sapien
ggctgttgtgagactcacgggtgca

SEQ ID NO: 304840 - DNA, 25 bp, Homo sapien
tgagactcacgggtgcaggtgcata

SEQ ID NO: 304841 - DNA, 25 bp, Homo sapien
ctcggcttggacaaattccaaggca

SEQ ID NO: 304842 - DNA, 25 bp, Homo sapien
ttcccttgagaggttgtgttgtgat

SEQ ID NO: 304843 - DNA, 25 bp, Homo sapien
cccttgagaggttgtgttgtgatcc

SEQ ID NO: 304844 - DNA, 25 bp, Homo sapien
gtgatccctgccctcggcttggaca

SEQ ID NO: 304845 - DNA, 25 bp, Homo sapien
tcataccctgaaaaggcagcccagg

SEQ ID NO: 304846 - DNA, 25 bp, Homo sapien
tggtgcctgcggaatcaactcatac

SEQ ID NO: 304847 - DNA, 25 bp, Homo sapien
tcttccaacaaacagtgggatgtgg

SEQ ID NO: 304848 - DNA, 25 bp, Homo sapien
cagaactgcggctttggatggaacc

SEQ ID NO: 304849 - DNA, 25 bp, Homo sapien
tacggttagctaggcaagagactgg

SEQ ID NO: 304850 - DNA, 25 bp, Homo sapien
tgtggtgacctacgacatttgctct

SEQ ID NO: 304851 - DNA, 25 bp, Homo sapien
cattgttctgatcgtaaaaggcccc

SEQ ID NO: 304852 - DNA, 25 bp, Homo sapien
tattcctagggcaactgcaagaagg

SEQ ID NO: 304853 - DNA, 25 bp, Homo sapien
aagctgttgtgtaacctccttggca

SEQ ID NO: 304854 - DNA, 25 bp, Homo sapien
cattgccagtgagcttttgcgaccg

SEQ ID NO: 304855 - DNA, 25 bp, Homo sapien
ggttctttccctatagcagcattca

SEQ ID NO: 304856 - DNA, 25 bp, Homo sapien
aggacgcttaggacccattgccagt

SEQ ID NO: 304857 - DNA, 25 bp, Homo sapien
tccaaccagtactgccctataacgg

SEQ ID NO: 304858 - DNA, 25 bp, Homo sapien
ggtcgcttggcgcaaccatcgtctt

SEQ ID NO: 304859 - DNA, 25 bp, Homo sapien
ttagctcattagtgccttgcctcgg

SEQ ID NO: 304860 - DNA, 25 bp, Homo sapien
agaggccgcttcctcggtcgaggac

SEQ ID NO: 304861 - DNA, 25 bp, Homo sapien
ttgtgcccgtcaagctgtcgttccg

SEQ ID NO: 304862 - DNA, 25 bp, Homo sapien
tccaattcctcgttgctgccttcgc

SEQ ID NO: 304863 - DNA, 25 bp, Homo sapien
cgtttaacgagctaggattggctga

SEQ ID NO: 304864 - DNA, 25 bp, Homo sapien
tgccttcgcccctcattggttaagt

SEQ ID NO: 304865 - DNA, 25 bp, Homo sapien
ctccattggccgcagggaggatgct

SEQ ID NO: 304866 - DNA, 25 bp, Homo sapien
gcagggaggatgcttccggctctca

SEQ ID NO: 304867 - DNA, 25 bp, Homo sapien
ccattggccgcagggaggatgcttc

SEQ ID NO: 304868 - DNA, 25 bp, Homo sapien
agagccccactccattggccgcagg

SEQ ID NO: 304869 - DNA, 25 bp, Homo sapien
ccgtttcgccttgcagcagcacggg

SEQ ID NO: 304870 - DNA, 25 bp, Homo sapien
ctcccgtttcgccttgcagcagcac

SEQ ID NO: 304871 - DNA, 25 bp, Homo sapien
tcactccctcccgtttcgccttgca

SEQ ID NO: 304872 - DNA, 25 bp, Homo sapien
tccctcccgtttcgccttgcagcag

SEQ ID NO: 304873 - DNA, 25 bp, Homo sapien
tatggaggcgacgtcgtagggggga

SEQ ID NO: 304874 - DNA, 25 bp, Homo sapien
ctatggaggcgacgtcgtagggggg

SEQ ID NO: 304875 - DNA, 25 bp, Homo sapien
gctgtgaggcgaggcgcgcagtctc

SEQ ID NO: 304876 - DNA, 25 bp, Homo sapien
gtgccggctccgagtgcgcggcgtt

SEQ ID NO: 304877 - DNA, 25 bp, Homo sapien
tgcgcggcgtttcgctgtgaggcga

SEQ ID NO: 304878 - DNA, 25 bp, Homo sapien
ggcgaggcgcgcagtctccgcttct

SEQ ID NO: 304879 - DNA, 25 bp, Homo sapien
atccgaggcctgacgcctccctctg

SEQ ID NO: 304880 - DNA, 25 bp, Homo sapien
ggacgctgcgcagggacccgaggat

SEQ ID NO: 304881 - DNA, 25 bp, Homo sapien
ggacccgaggatccgaggcctgacg

SEQ ID NO: 304882 - DNA, 25 bp, Homo sapien
gggacgctgcgcagggacccgagga

SEQ ID NO: 304883 - DNA, 25 bp, Homo sapien
ctacagccgaataaaccggtagtct

SEQ ID NO: 304884 - DNA, 25 bp, Homo sapien
cagccgaataaaccggtagtctgga

SEQ ID NO: 304885 - DNA, 25 bp, Homo sapien
tacagccgaataaaccggtagtctg

SEQ ID NO: 304886 - DNA, 25 bp, Homo sapien
acagccgaataaaccggtagtctgg

SEQ ID NO: 304887 - DNA, 25 bp, Homo sapien
gaattttccaagaccccatgagttg

SEQ ID NO: 304888 - DNA, 25 bp, Homo sapien
gatagtagaacggagagatccagca

SEQ ID NO: 304889 - DNA, 25 bp, Homo sapien
ttatcacaatacacaatagcccggg

SEQ ID NO: 304890 - DNA, 25 bp, Homo sapien
ttggcaaccttggaacaatctggct

SEQ ID NO: 304891 - DNA, 25 bp, Homo sapien
tggcacccagtatgcactcaagcaa

SEQ ID NO: 304892 - DNA, 25 bp, Homo sapien
tgcctactactacacaactggtcag

SEQ ID NO: 304893 - DNA, 25 bp, Homo sapien
gaaatgctcccatgaagacaaccaa

SEQ ID NO: 304894 - DNA, 25 bp, Homo sapien
caaagcgggtaagataaatgcctgc

SEQ ID NO: 304895 - DNA, 25 bp, Homo sapien
tacaattgatatcttctaatgtggg

SEQ ID NO: 304896 - DNA, 25 bp, Homo sapien
cctactatgtgcaactcacagtgct

SEQ ID NO: 304897 - DNA, 25 bp, Homo sapien
gctagatgttggtgacacaaatgtg

SEQ ID NO: 304898 - DNA, 25 bp, Homo sapien
accaagctttgcctaaaatgaggtt

SEQ ID NO: 304899 - DNA, 25 bp, Homo sapien
taccatgcggttcatgcagaacacc

SEQ ID NO: 304900 - DNA, 25 bp, Homo sapien
caaaaaggttggctcttgggtggca

SEQ ID NO: 304901 - DNA, 25 bp, Homo sapien
gaaattttggttcatgctaggtacc

SEQ ID NO: 304902 - DNA, 25 bp, Homo sapien
tatccttggaaaagtcggcttgcaa

SEQ ID NO: 304903 - DNA, 25 bp, Homo sapien
tatttttcaagatacacacccctaa

SEQ ID NO: 304904 - DNA, 25 bp, Homo sapien
aatcaagttggagggagactatcac

SEQ ID NO: 304905 - DNA, 25 bp, Homo sapien
tccacagttaagagtgcaatgtagt

SEQ ID NO: 304906 - DNA, 25 bp, Homo sapien
tatcatgatgtgacaagcttccaca

SEQ ID NO: 304907 - DNA, 25 bp, Homo sapien
agaaagcatgttgcaccttctgaaa

SEQ ID NO: 304908 - DNA, 25 bp, Homo sapien
gggaactatgagatccttcatataa

SEQ ID NO: 304909 - DNA, 25 bp, Homo sapien
tcgctggtaataggaaaagtcggtc

SEQ ID NO: 304910 - DNA, 25 bp, Homo sapien
catttattaacacgaggtacctccg

SEQ ID NO: 304911 - DNA, 25 bp, Homo sapien
acccagccctggctgctaatttttg

SEQ ID NO: 304912 - DNA, 25 bp, Homo sapien
agagcgaccttcactctgtcaccga

SEQ ID NO: 304913 - DNA, 25 bp, Homo sapien
tttttgagacagagcgaccttcact

SEQ ID NO: 304914 - DNA, 25 bp, Homo sapien
tgcagtctctgtcacacaggttcaa

SEQ ID NO: 304915 - DNA, 25 bp, Homo sapien
cacccagctaagaattgctgggtca

SEQ ID NO: 304916 - DNA, 25 bp, Homo sapien
gatacacattgtcaagctaaaggta

SEQ ID NO: 304917 - DNA, 25 bp, Homo sapien
ggtactttgctcagactagtctcaa

SEQ ID NO: 304918 - DNA, 25 bp, Homo sapien
aagcttagaaacagtagtggaaagt

SEQ ID NO: 304919 - DNA, 25 bp, Homo sapien
caccgcacctggcaaagaaaccctg

SEQ ID NO: 304920 - DNA, 25 bp, Homo sapien
cgcacctggcaaagaaaccctgttt

SEQ ID NO: 304921 - DNA, 25 bp, Homo sapien
cacctggcaaagaaaccctgtttct

SEQ ID NO: 304922 - DNA, 25 bp, Homo sapien
ccgcacctggcaaagaaaccctgtt

SEQ ID NO: 304923 - DNA, 25 bp, Homo sapien
tgcttatcaaggctacctggagagc

SEQ ID NO: 304924 - DNA, 25 bp, Homo sapien
aggctacctggagagctctgtaaca

SEQ ID NO: 304925 - DNA, 25 bp, Homo sapien
tatcaaggctacctggagagctctg

SEQ ID NO: 304926 - DNA, 25 bp, Homo sapien
tgtaacacccactcgcccaccagaa

SEQ ID NO: 304927 - DNA, 25 bp, Homo sapien
aacattcaggtcattacattcaccc

SEQ ID NO: 304928 - DNA, 25 bp, Homo sapien
acattcaggtcattacattcaccct

SEQ ID NO: 304929 - DNA, 25 bp, Homo sapien
cattcaggtcattacattcaccctg

SEQ ID NO: 304930 - DNA, 25 bp, Homo sapien
caacattcaggtcattacattcacc

SEQ ID NO: 304931 - DNA, 25 bp, Homo sapien
tgggtcaccaaacgctgtacatctg

SEQ ID NO: 304932 - DNA, 25 bp, Homo sapien
catctgtaacggagatggaggccaa

SEQ ID NO: 304933 - DNA, 25 bp, Homo sapien
caaaggaccctcgagaaataggaga

SEQ ID NO: 304934 - DNA, 25 bp, Homo sapien
gaaaagtattatgtctggtctctag

SEQ ID NO: 304935 - DNA, 25 bp, Homo sapien
gggtgacaaagtgagatttcatctc

SEQ ID NO: 304936 - DNA, 25 bp, Homo sapien
ggtgacaaagtgagatttcatctca

SEQ ID NO: 304937 - DNA, 25 bp, Homo sapien
ctgggtgacaaagtgagatttcatc

SEQ ID NO: 304938 - DNA, 25 bp, Homo sapien
tgggtgacaaagtgagatttcatct

SEQ ID NO: 304939 - DNA, 25 bp, Homo sapien
tacagtatctgtttttagccaggca

SEQ ID NO: 304940 - DNA, 25 bp, Homo sapien
accagaggccggcatttgagaccag

SEQ ID NO: 304941 - DNA, 25 bp, Homo sapien
gctagtcaaatacctctatagtggc

SEQ ID NO: 304942 - DNA, 25 bp, Homo sapien
taaactgtggatggctaaactgatg

SEQ ID NO: 304943 - DNA, 25 bp, Homo sapien
tttgagtcaggaggctataaaggac

SEQ ID NO: 304944 - DNA, 25 bp, Homo sapien
ctgcagtcctaatttgagtcaggag

SEQ ID NO: 304945 - DNA, 25 bp, Homo sapien
caccactgcagtcctaatttgagtc

SEQ ID NO: 304946 - DNA, 25 bp, Homo sapien
gtctctaaagcccattaatccttct

SEQ ID NO: 304947 - DNA, 25 bp, Homo sapien
aaagttcaagacagatacgccccat

SEQ ID NO: 304948 - DNA, 25 bp, Homo sapien
tatccataatagtccccagctggga

SEQ ID NO: 304949 - DNA, 25 bp, Homo sapien
gttgctcgggctatggaacaacaga

SEQ ID NO: 304950 - DNA, 25 bp, Homo sapien
gaaaaggcatctagtctcagtagta

SEQ ID NO: 304951 - DNA, 25 bp, Homo sapien
atttgccatcaggatcagaggtatc

SEQ ID NO: 304952 - DNA, 25 bp, Homo sapien
ttggcatttgccatcaggatcagag

SEQ ID NO: 304953 - DNA, 25 bp, Homo sapien
gcatttgccatcaggatcagaggta

SEQ ID NO: 304954 - DNA, 25 bp, Homo sapien
acccaaattggcatttgccatcagg

SEQ ID NO: 304955 - DNA, 25 bp, Homo sapien
tattctgttcctgtgcatcttgcgc

SEQ ID NO: 304956 - DNA, 25 bp, Homo sapien
gcaaatttaacatcagccacgtagc

SEQ ID NO: 304957 - DNA, 25 bp, Homo sapien
ggttttccttgccaacaatcatgtg

SEQ ID NO: 304958 - DNA, 25 bp, Homo sapien
cctggagcatcatatgtcatggatc

SEQ ID NO: 304959 - DNA, 25 bp, Homo sapien
aaaaattcaagcagtatagagaggc

SEQ ID NO: 304960 - DNA, 25 bp, Homo sapien
caggactcaccactcctatcagttt

SEQ ID NO: 304961 - DNA, 25 bp, Homo sapien
tagagaggctcttaaccaatgtccc

SEQ ID NO: 304962 - DNA, 25 bp, Homo sapien
tacctaactaaactcacaggattta

SEQ ID NO: 304963 - DNA, 25 bp, Homo sapien
gagtctaggttacattcagtgcaaa

SEQ ID NO: 304964 - DNA, 25 bp, Homo sapien
gcaacacaagcccgtgaagatgagt

SEQ ID NO: 304965 - DNA, 25 bp, Homo sapien
ctttgacagtacctggggcaacaca

SEQ ID NO: 304966 - DNA, 25 bp, Homo sapien
tgagtctaggttacattcagtgcaa

SEQ ID NO: 304967 - DNA, 25 bp, Homo sapien
gtcatattgatacccatttttatct

SEQ ID NO: 304968 - DNA, 25 bp, Homo sapien
tgtcatattgatacccatttttatc

SEQ ID NO: 304969 - DNA, 25 bp, Homo sapien
aatgtcatattgatacccattttta

SEQ ID NO: 304970 - DNA, 25 bp, Homo sapien
taaatgtcatattgatacccatttt

SEQ ID NO: 304971 - DNA, 25 bp, Homo sapien
gaacagattttgtgcaaaactctgc

SEQ ID NO: 304972 - DNA, 25 bp, Homo sapien
tgcaaaactctgcagaaacacaaaa

SEQ ID NO: 304973 - DNA, 25 bp, Homo sapien
gggaacagattttgtgcaaaactct

SEQ ID NO: 304974 - DNA, 25 bp, Homo sapien
ttgtgcaaaactctgcagaaacaca

SEQ ID NO: 304975 - DNA, 25 bp, Homo sapien
actgctttcttccgatacttctccc

SEQ ID NO: 304976 - DNA, 25 bp, Homo sapien
gctttcttccgatacttctccctca

SEQ ID NO: 304977 - DNA, 25 bp, Homo sapien
tgctttcttccgatacttctccctc

SEQ ID NO: 304978 - DNA, 25 bp, Homo sapien
cggactagatcatagccccgcagag

SEQ ID NO: 304979 - DNA, 25 bp, Homo sapien
tcccaggaagagctacagacaattc

SEQ ID NO: 304980 - DNA, 25 bp, Homo sapien
gacaattctgaatggacagagaggg

SEQ ID NO: 304981 - DNA, 25 bp, Homo sapien
aaaactaagaggacaggatgacatc

SEQ ID NO: 304982 - DNA, 25 bp, Homo sapien
caggctctgactaaccctacatcag

SEQ ID NO: 304983 - DNA, 25 bp, Homo sapien
attcagggtctaaatgagtctgatg

SEQ ID NO: 304984 - DNA, 25 bp, Homo sapien
aatgagtctgatgaaaacctatatg

SEQ ID NO: 304985 - DNA, 25 bp, Homo sapien
tcacaggctctgactaaccctacat

SEQ ID NO: 304986 - DNA, 25 bp, Homo sapien
tgggtgtcctgggtatgtgtgcctc

SEQ ID NO: 304987 - DNA, 25 bp, Homo sapien
gggtgtcctgggtatgtgtgcctct

SEQ ID NO: 304988 - DNA, 25 bp, Homo sapien
ggagattcctagatcgtgtgtgtac

SEQ ID NO: 304989 - DNA, 25 bp, Homo sapien
gagggagattcctagatcgtgtgtg

SEQ ID NO: 304990 - DNA, 25 bp, Homo sapien
gacagagccacctcttaaaatgcaa

SEQ ID NO: 304991 - DNA, 25 bp, Homo sapien
ccttcaatggctgccctaggcatgg

SEQ ID NO: 304992 - DNA, 25 bp, Homo sapien
gaatgtagtcctacccgaacagctg

SEQ ID NO: 304993 - DNA, 25 bp, Homo sapien
tctttccaatccactgtccagacag

SEQ ID NO: 304994 - DNA, 25 bp, Homo sapien
tcgctacaactgcaattccaagcct

SEQ ID NO: 304995 - DNA, 25 bp, Homo sapien
agagcaggatttgggcctgagctca

SEQ ID NO: 304996 - DNA, 25 bp, Homo sapien
tccgccattaaacaagagtcagaag

SEQ ID NO: 304997 - DNA, 25 bp, Homo sapien
tgttaactattcttagcaccttcgc

SEQ ID NO: 304998 - DNA, 25 bp, Homo sapien
tatgcttgtgcataattcaggaatg

SEQ ID NO: 304999 - DNA, 25 bp, Homo sapien
gtttaaggagtcaattctgtgtatc

SEQ ID NO: 305000 - DNA, 25 bp, Homo sapien
tttacagcagtcttttagaaaccat

SEQ ID NO: 305001 - DNA, 25 bp, Homo sapien
tgtgctgaattaatcaggagagagg

SEQ ID NO: 305002 - DNA, 25 bp, Homo sapien
aaggtacagagaatatgatcacaga

SEQ ID NO: 305003 - DNA, 25 bp, Homo sapien
tcaagtctagagctacagaatctct

SEQ ID NO: 305004 - DNA, 25 bp, Homo sapien
gaatatgatcacagacacccaacgg

SEQ ID NO: 305005 - DNA, 25 bp, Homo sapien
caacggctcagctctataacaaatt

SEQ ID NO: 305006 - DNA, 25 bp, Homo sapien
tagatatggttgtaccttcaagcaa

SEQ ID NO: 305007 - DNA, 25 bp, Homo sapien
tgggattgacatgttcgaaagctta

SEQ ID NO: 305008 - DNA, 25 bp, Homo sapien
caagcaacatatagattgagacaga

SEQ ID NO: 305009 - DNA, 25 bp, Homo sapien
cttcccttgaagatcgccctattaa

SEQ ID NO: 305010 - DNA, 25 bp, Homo sapien
cctaaagagcttgattttgggtgta

SEQ ID NO: 305011 - DNA, 25 bp, Homo sapien
ggaccttcagatgcctacagctata

SEQ ID NO: 305012 - DNA, 25 bp, Homo sapien
taagtcaggctttcagtgttctggg

SEQ ID NO: 305013 - DNA, 25 bp, Homo sapien
ccactgatatttaagagcgagaccc

SEQ ID NO: 305014 - DNA, 25 bp, Homo sapien
cagggccgtttcactgtggtgcaca

SEQ ID NO: 305015 - DNA, 25 bp, Homo sapien
acagggccgtttcactgtggtgcac

SEQ ID NO: 305016 - DNA, 25 bp, Homo sapien
agggccgtttcactgtggtgcacag

SEQ ID NO: 305017 - DNA, 25 bp, Homo sapien
cacagggccgtttcactgtggtgca

SEQ ID NO: 305018 - DNA, 25 bp, Homo sapien
ggtggagtcttgccatgcccttcca

SEQ ID NO: 305019 - DNA, 25 bp, Homo sapien
gtggagtcttgccatgcccttccat

SEQ ID NO: 305020 - DNA, 25 bp, Homo sapien
tgttggcatgaaagatatctaatgt

SEQ ID NO: 305021 - DNA, 25 bp, Homo sapien
aatgtataaagggctcctacaaagc

SEQ ID NO: 305022 - DNA, 25 bp, Homo sapien
gtttgttggcatgaaagatatctaa

SEQ ID NO: 305023 - DNA, 25 bp, Homo sapien
taaaaagtttgttggcatgaaagat

SEQ ID NO: 305024 - DNA, 25 bp, Homo sapien
ccagaattcagcacaactgatctag

SEQ ID NO: 305025 - DNA, 25 bp, Homo sapien
cacgtcatgcaattaaagctgtgta

SEQ ID NO: 305026 - DNA, 25 bp, Homo sapien
taaaccccatggaaacaatacacat

SEQ ID NO: 305027 - DNA, 25 bp, Homo sapien
attatatggcaataaactttgcttg

SEQ ID NO: 305028 - DNA, 25 bp, Homo sapien
cccagaaagtttagtgcctaattgg

SEQ ID NO: 305029 - DNA, 25 bp, Homo sapien
gaaatgctatagagctgcccagggt

SEQ ID NO: 305030 - DNA, 25 bp, Homo sapien
tgtaattaatccatggtccaggcat

SEQ ID NO: 305031 - DNA, 25 bp, Homo sapien
tcatctactgaacctctttgtggca

SEQ ID NO: 305032 - DNA, 25 bp, Homo sapien
gctaatagcatcttagggaggtcct

SEQ ID NO: 305033 - DNA, 25 bp, Homo sapien
cagacttgcatggaagaccttcagg

SEQ ID NO: 305034 - DNA, 25 bp, Homo sapien
cacagaatagggagggatgatcaaa

SEQ ID NO: 305035 - DNA, 25 bp, Homo sapien
caaaagccggatttgcagctagtca

SEQ ID NO: 305036 - DNA, 25 bp, Homo sapien
ccttccataccaactttcttgccat

SEQ ID NO: 305037 - DNA, 25 bp, Homo sapien
actgctctaagtaccttggataaat

SEQ ID NO: 305038 - DNA, 25 bp, Homo sapien
cattatgtatattcactctgctgtg

SEQ ID NO: 305039 - DNA, 25 bp, Homo sapien
tctaagtaccttggataaatggaat

SEQ ID NO: 305040 - DNA, 25 bp, Homo sapien
ggattacagacacatgccaccatgc

SEQ ID NO: 305041 - DNA, 25 bp, Homo sapien
gaacctccacctcctgggttcaagc

SEQ ID NO: 305042 - DNA, 25 bp, Homo sapien
ctgggattacagacacatgccacca

SEQ ID NO: 305043 - DNA, 25 bp, Homo sapien
agtggcatggtatcggctcacagga

SEQ ID NO: 305044 - DNA, 25 bp, Homo sapien
gcaaattgaggcatacaaggtagaa

SEQ ID NO: 305045 - DNA, 25 bp, Homo sapien
aagtgcagcagtgcttaaatccagc

SEQ ID NO: 305046 - DNA, 25 bp, Homo sapien
aaccagcagagactctgtcggccat

SEQ ID NO: 305047 - DNA, 25 bp, Homo sapien
gccattttggcttgaactaactctc

SEQ ID NO: 305048 - DNA, 25 bp, Homo sapien
cagtgaaaacggttagacaagatcc

SEQ ID NO: 305049 - DNA, 25 bp, Homo sapien
aaatgtcgatttgcaacaccaccag

SEQ ID NO: 305050 - DNA, 25 bp, Homo sapien
ccagatcctttgtcggccttagcag

SEQ ID NO: 305051 - DNA, 25 bp, Homo sapien
tgccgaaccaaagtacatcacgggt

SEQ ID NO: 305052 - DNA, 25 bp, Homo sapien
caccagaccgagaagcattacatca

SEQ ID NO: 305053 - DNA, 25 bp, Homo sapien
tagactgctacttatacatgtgacc

SEQ ID NO: 305054 - DNA, 25 bp, Homo sapien
gaccctaaatgaccacttcgcagtg

SEQ ID NO: 305055 - DNA, 25 bp, Homo sapien
tatgccacagcataaatcaggagga

SEQ ID NO: 305056 - DNA, 25 bp, Homo sapien
tcccatacgtgaagccaggtcttat

SEQ ID NO: 305057 - DNA, 25 bp, Homo sapien
ttaggtctaccacaatgcaacattc

SEQ ID NO: 305058 - DNA, 25 bp, Homo sapien
tccttgcttgttagagacagagggc

SEQ ID NO: 305059 - DNA, 25 bp, Homo sapien
gaatcatataacaagcaaagcccca

SEQ ID NO: 305060 - DNA, 25 bp, Homo sapien
ccaaaatggcagtcgagctatcaac

SEQ ID NO: 305061 - DNA, 25 bp, Homo sapien
gccagaaggattggctctgcaggat

SEQ ID NO: 305062 - DNA, 25 bp, Homo sapien
catttccttctggatgaccatcgtg

SEQ ID NO: 305063 - DNA, 25 bp, Homo sapien
acttcaacagaaggcacaaattaaa

SEQ ID NO: 305064 - DNA, 25 bp, Homo sapien
gcttaaactgcagatgatcaatgat

SEQ ID NO: 305065 - DNA, 25 bp, Homo sapien
agtacattcatctatctgcattgcc

SEQ ID NO: 305066 - DNA, 25 bp, Homo sapien
gggtgaggaccacccttattcctca

SEQ ID NO: 305067 - DNA, 25 bp, Homo sapien
caaacttttcagtcatggagcagct

SEQ ID NO: 305068 - DNA, 25 bp, Homo sapien
tgtttaccaataatgctgacctggt

SEQ ID NO: 305069 - DNA, 25 bp, Homo sapien
ctaatgcagatactcagatacttct

SEQ ID NO: 305070 - DNA, 25 bp, Homo sapien
actcagatacttctgtaaccaggaa

SEQ ID NO: 305071 - DNA, 25 bp, Homo sapien
ccaagttgtgacgatctgtttacca

SEQ ID NO: 305072 - DNA, 25 bp, Homo sapien
tcactggctcaaactatcctttcac

SEQ ID NO: 305073 - DNA, 25 bp, Homo sapien
gactggcctatttggcttctttaag

SEQ ID NO: 305074 - DNA, 25 bp, Homo sapien
accacgactggcctatttggcttct

SEQ ID NO: 305075 - DNA, 25 bp, Homo sapien
cttggctaactgcagtgtcaacatc

SEQ ID NO: 305076 - DNA, 25 bp, Homo sapien
tatagcaggacctttcataacagtc

SEQ ID NO: 305077 - DNA, 25 bp, Homo sapien
tagcaatacaaactactcagcaggc

SEQ ID NO: 305078 - DNA, 25 bp, Homo sapien
aaaacctggtccctagttgcatggc

SEQ ID NO: 305079 - DNA, 25 bp, Homo sapien
cagtaagtctgacctggaatgcgtc

SEQ ID NO: 305080 - DNA, 25 bp, Homo sapien
actgaaatgtgttgtaagcctaaga

SEQ ID NO: 305081 - DNA, 25 bp, Homo sapien
caccaggtttcaaagtcttggtaca

SEQ ID NO: 305082 - DNA, 25 bp, Homo sapien
taagatacacaccaggtttcaaagt

SEQ ID NO: 305083 - DNA, 25 bp, Homo sapien
tgtaagcctaagatacacaccaggt

SEQ ID NO: 305084 - DNA, 25 bp, Homo sapien
cacagggacgctgggacactgactt

SEQ ID NO: 305085 - DNA, 25 bp, Homo sapien
ccaggtcggcaaaaagtacacaatg

SEQ ID NO: 305086 - DNA, 25 bp, Homo sapien
gatggtctagttaacagctgcaaag

SEQ ID NO: 305087 - DNA, 25 bp, Homo sapien
tatgcgttcaattggcccaggtcgg

SEQ ID NO: 305088 - DNA, 25 bp, Homo sapien
tgaaaccgaagtctgggaaccaaca

SEQ ID NO: 305089 - DNA, 25 bp, Homo sapien
tctggtagctacaaaggtgtttccc

SEQ ID NO: 305090 - DNA, 25 bp, Homo sapien
gaaaccatggtaagacaaccctcag

SEQ ID NO: 305091 - DNA, 25 bp, Homo sapien
tgagagatgtgccttcgtgaaacct

SEQ ID NO: 305092 - DNA, 25 bp, Homo sapien
gccaaactttagcacctgtgatgat

SEQ ID NO: 305093 - DNA, 25 bp, Homo sapien
tgtaatacatactaagagatggtct

SEQ ID NO: 305094 - DNA, 25 bp, Homo sapien
taattaggatgtggttcccaaatgc

SEQ ID NO: 305095 - DNA, 25 bp, Homo sapien
aatgccaaactttagcacctgtgat

SEQ ID NO: 305096 - DNA, 25 bp, Homo sapien
aaacccttgaggagactttgccacg

SEQ ID NO: 305097 - DNA, 25 bp, Homo sapien
aggatgaacaatgcgctcggctgct

SEQ ID NO: 305098 - DNA, 25 bp, Homo sapien
tttgccacgcgacaacaagaagcag

SEQ ID NO: 305099 - DNA, 25 bp, Homo sapien
tttatgaagtgcctacggagtgcca

SEQ ID NO: 305100 - DNA, 25 bp, Homo sapien
tacactcactgctattggaatactg

SEQ ID NO: 305101 - DNA, 25 bp, Homo sapien
gctttctaacccaagatgttccagg

SEQ ID NO: 305102 - DNA, 25 bp, Homo sapien
tggccagtgggaaccgcttcaaact

SEQ ID NO: 305103 - DNA, 25 bp, Homo sapien
gatctagaaacctgatacactcact

SEQ ID NO: 305104 - DNA, 25 bp, Homo sapien
cttcttcagttttccttctctccat

SEQ ID NO: 305105 - DNA, 25 bp, Homo sapien
cgcccagccatgttatcctgtttaa

SEQ ID NO: 305106 - DNA, 25 bp, Homo sapien
aacgtgaaggactgccagcaaccag

SEQ ID NO: 305107 - DNA, 25 bp, Homo sapien
tagaggtgcccacgaacttctgagc

SEQ ID NO: 305108 - DNA, 25 bp, Homo sapien
tagagccttcggaggtcgagtaatt

SEQ ID NO: 305109 - DNA, 25 bp, Homo sapien
gaacaggcgtcagctaaagggatgc

SEQ ID NO: 305110 - DNA, 25 bp, Homo sapien
taggctttccagtgagggccacgtt

SEQ ID NO: 305111 - DNA, 25 bp, Homo sapien
taagaaagactatccagcaggagaa

SEQ ID NO: 305112 - DNA, 25 bp, Homo sapien
gccacgttgcatcctgaacaggcgt

SEQ ID NO: 305113 - DNA, 25 bp, Homo sapien
ttggggtgcagtagcgtgacctcgg

SEQ ID NO: 305114 - DNA, 25 bp, Homo sapien
ggttggggtgcagtagcgtgacctc

SEQ ID NO: 305115 - DNA, 25 bp, Homo sapien
ggcacacgaaaccaggcccggctaa

SEQ ID NO: 305116 - DNA, 25 bp, Homo sapien
ccacaggcacacgaaaccaggcccg

SEQ ID NO: 305117 - DNA, 25 bp, Homo sapien
ctgctgccttgacttaaactctagc

SEQ ID NO: 305118 - DNA, 25 bp, Homo sapien
actgggaattacattctggctccgg

SEQ ID NO: 305119 - DNA, 25 bp, Homo sapien
gggaattacattctggctccggctc

SEQ ID NO: 305120 - DNA, 25 bp, Homo sapien
ctagctcctggtcacactgggaatt

SEQ ID NO: 305121 - DNA, 25 bp, Homo sapien
caacgagtccagtcttgaaaagcta

SEQ ID NO: 305122 - DNA, 25 bp, Homo sapien
aactgctctccaaacacaccaattt

SEQ ID NO: 305123 - DNA, 25 bp, Homo sapien
cttgaaaagctaacaactgctctcc

SEQ ID NO: 305124 - DNA, 25 bp, Homo sapien
caaattagaccaacgagtccagtct

SEQ ID NO: 305125 - DNA, 25 bp, Homo sapien
tcatgggacgtgttctgggccctta

SEQ ID NO: 305126 - DNA, 25 bp, Homo sapien
ttcatgggacgtgttctgggccctt

SEQ ID NO: 305127 - DNA, 25 bp, Homo sapien
catgggacgtgttctgggcccttac

SEQ ID NO: 305128 - DNA, 25 bp, Homo sapien
tcttggacactacaatggtaggagc

SEQ ID NO: 305129 - DNA, 25 bp, Homo sapien
tcaagcatggtcaactgcaataagc

SEQ ID NO: 305130 - DNA, 25 bp, Homo sapien
cataccttgcgtgaaaataaactcc

SEQ ID NO: 305131 - DNA, 25 bp, Homo sapien
caaagtatacgaagacaggctaggc

SEQ ID NO: 305132 - DNA, 25 bp, Homo sapien
ttctcaatgctcttaatttgtgctc

SEQ ID NO: 305133 - DNA, 25 bp, Homo sapien
taaatttagcaagctgaataattga

SEQ ID NO: 305134 - DNA, 25 bp, Homo sapien
gaataattgaattaccttgacgaaa

SEQ ID NO: 305135 - DNA, 25 bp, Homo sapien
gaaagtcgtgttcttgtgtgccagc

SEQ ID NO: 305136 - DNA, 25 bp, Homo sapien
tattaataccgtcagtgccagactg

SEQ ID NO: 305137 - DNA, 25 bp, Homo sapien
cataggcaacaacaggcaggacttt

SEQ ID NO: 305138 - DNA, 25 bp, Homo sapien
tagggttccaggttagctgccacca

SEQ ID NO: 305139 - DNA, 25 bp, Homo sapien
acttgtcccgtatgatatgccgctg

SEQ ID NO: 305140 - DNA, 25 bp, Homo sapien
gtcttgctctatcacgcaggaatgc

SEQ ID NO: 305141 - DNA, 25 bp, Homo sapien
tgctctatcacgcaggaatgcaatg

SEQ ID NO: 305142 - DNA, 25 bp, Homo sapien
cattgtgttaccttcctttctgagg

SEQ ID NO: 305143 - DNA, 25 bp, Homo sapien
gaatgctgtgggacagggcctacaa

SEQ ID NO: 305144 - DNA, 25 bp, Homo sapien
tctgaggctgtgtaaagcaatgctt

SEQ ID NO: 305145 - DNA, 25 bp, Homo sapien
tagatctttgagcagcacacgagta

SEQ ID NO: 305146 - DNA, 25 bp, Homo sapien
ttttcttgtcttccattaactgttc

SEQ ID NO: 305147 - DNA, 25 bp, Homo sapien
cttttcttgtcttccattaactgtt

SEQ ID NO: 305148 - DNA, 25 bp, Homo sapien
tgtcttccattaactgttcttccct

SEQ ID NO: 305149 - DNA, 25 bp, Homo sapien
tcttgtcttccattaactgttcttc

SEQ ID NO: 305150 - DNA, 25 bp, Homo sapien
acaaactcaggtgagaagcaacaca

SEQ ID NO: 305151 - DNA, 25 bp, Homo sapien
tctaacaaactcaggtgagaagcaa

SEQ ID NO: 305152 - DNA, 25 bp, Homo sapien
gcaacacattagaagcaggtaccct

SEQ ID NO: 305153 - DNA, 25 bp, Homo sapien
gatgtgatggagaatataccactat

SEQ ID NO: 305154 - DNA, 25 bp, Homo sapien
cacaaagaggtggtcaaaaagcact

SEQ ID NO: 305155 - DNA, 25 bp, Homo sapien
tttgcggaccgaatgaatgaaccac

SEQ ID NO: 305156 - DNA, 25 bp, Homo sapien
gaagaggcaccacaaatgtttgcgg

SEQ ID NO: 305157 - DNA, 25 bp, Homo sapien
caggcactgccctagttactggcca

SEQ ID NO: 305158 - DNA, 25 bp, Homo sapien
gctttgcaagcatcagtcttgtggc

SEQ ID NO: 305159 - DNA, 25 bp, Homo sapien
cagcacaactaacacttggctttgc

SEQ ID NO: 305160 - DNA, 25 bp, Homo sapien
cacttggctttgcaagcatcagtct

SEQ ID NO: 305161 - DNA, 25 bp, Homo sapien
gaggagctcagttctacagcacaac

SEQ ID NO: 305162 - DNA, 25 bp, Homo sapien
aatttttgtatgtttaacagagacg

SEQ ID NO: 305163 - DNA, 25 bp, Homo sapien
acgcctcactaatttttgtatgttt

SEQ ID NO: 305164 - DNA, 25 bp, Homo sapien
actaatttttgtatgtttaacagag

SEQ ID NO: 305165 - DNA, 25 bp, Homo sapien
tcccgagtagctggcgtgcaccacc

SEQ ID NO: 305166 - DNA, 25 bp, Homo sapien
agttcggatgattctgaggcccaaa

SEQ ID NO: 305167 - DNA, 25 bp, Homo sapien
caagcctgacagttcggatgattct

SEQ ID NO: 305168 - DNA, 25 bp, Homo sapien
ccagggtaacgtcagggccaactct

SEQ ID NO: 305169 - DNA, 25 bp, Homo sapien
gctttgactgctaaaatgatgcggg

SEQ ID NO: 305170 - DNA, 25 bp, Homo sapien
ggctggaagtcgtacagaaataatc

SEQ ID NO: 305171 - DNA, 25 bp, Homo sapien
gctggaagtcgtacagaaataatca

SEQ ID NO: 305172 - DNA, 25 bp, Homo sapien
cagaagatcactaccctctccataa

SEQ ID NO: 305173 - DNA, 25 bp, Homo sapien
aagatcactaccctctccataaaaa

SEQ ID NO: 305174 - DNA, 25 bp, Homo sapien
gctgccagaagatcactaccctctc

SEQ ID NO: 305175 - DNA, 25 bp, Homo sapien
gatcactaccctctccataaaaatc

SEQ ID NO: 305176 - DNA, 25 bp, Homo sapien
actctactctcaagggaaacagttt

SEQ ID NO: 305177 - DNA, 25 bp, Homo sapien
ttctccttttactctactctcaagg

SEQ ID NO: 305178 - DNA, 25 bp, Homo sapien
ttactctactctcaagggaaacagt

SEQ ID NO: 305179 - DNA, 25 bp, Homo sapien
aacttctccttttactctactctca

SEQ ID NO: 305180 - DNA, 25 bp, Homo sapien
tgtcacccagtgtgagtgtcgccca

SEQ ID NO: 305181 - DNA, 25 bp, Homo sapien
tcacccagtgtgagtgtcgcccagg

SEQ ID NO: 305182 - DNA, 25 bp, Homo sapien
gtcacccagtgtgagtgtcgcccag

SEQ ID NO: 305183 - DNA, 25 bp, Homo sapien
ctgtcacccagtgtgagtgtcgccc

SEQ ID NO: 305184 - DNA, 25 bp, Homo sapien
gctggcggccgttggttggcttaaa

SEQ ID NO: 305185 - DNA, 25 bp, Homo sapien
gcttggcggttgtccgttcggcact

SEQ ID NO: 305186 - DNA, 25 bp, Homo sapien
gttcggcactgccacccttttggca

SEQ ID NO: 305187 - DNA, 25 bp, Homo sapien
ccaccattgactggtggcgatggag

SEQ ID NO: 305188 - DNA, 25 bp, Homo sapien
tcctgctggcaacggaatcgcggcg

SEQ ID NO: 305189 - DNA, 25 bp, Homo sapien
aaggagcatgcaggacggtggaggg

SEQ ID NO: 305190 - DNA, 25 bp, Homo sapien
gtggtcctgctggcaacggaatcgc

SEQ ID NO: 305191 - DNA, 25 bp, Homo sapien
tggtcctgctggcaacggaatcgcg

SEQ ID NO: 305192 - DNA, 25 bp, Homo sapien
tcctgtcacttgtgcgttgtttggg

SEQ ID NO: 305193 - DNA, 25 bp, Homo sapien
agcgctcctgtcacttgtgcgttgt

SEQ ID NO: 305194 - DNA, 25 bp, Homo sapien
tcacttgtgcgttgtttgggtttgc

SEQ ID NO: 305195 - DNA, 25 bp, Homo sapien
agcagcgctcctgtcacttgtgcgt

SEQ ID NO: 305196 - DNA, 25 bp, Homo sapien
gcattcgattcacagggtgccttac

SEQ ID NO: 305197 - DNA, 25 bp, Homo sapien
tagaagttccttcttggaccagtgc

SEQ ID NO: 305198 - DNA, 25 bp, Homo sapien
tcagttcggctcaaaagagtctgca

SEQ ID NO: 305199 - DNA, 25 bp, Homo sapien
ccatccttgattgggctggcgtcca

SEQ ID NO: 305200 - DNA, 25 bp, Homo sapien
gcataatttgaagcagcagcacctc

SEQ ID NO: 305201 - DNA, 25 bp, Homo sapien
taggattccttttcttcatcaaaag

SEQ ID NO: 305202 - DNA, 25 bp, Homo sapien
ctaggattccttttcttcatcaaaa

SEQ ID NO: 305203 - DNA, 25 bp, Homo sapien
tttcataaaaagaggttctgttagc

SEQ ID NO: 305204 - DNA, 25 bp, Homo sapien
tgtaggaaagcatctcagaacaaaa

SEQ ID NO: 305205 - DNA, 25 bp, Homo sapien
ctgccatcactagcatttcataaaa

SEQ ID NO: 305206 - DNA, 25 bp, Homo sapien
gggactaacacagggttgtcatctt

SEQ ID NO: 305207 - DNA, 25 bp, Homo sapien
tttggctcaccccaagcggaagtac

SEQ ID NO: 305208 - DNA, 25 bp, Homo sapien
gctttcatttggctcaccccaagcg

SEQ ID NO: 305209 - DNA, 25 bp, Homo sapien
cccacccaggactgctttcatttgg

SEQ ID NO: 305210 - DNA, 25 bp, Homo sapien
caagcggaagtaccattatctggag

SEQ ID NO: 305211 - DNA, 25 bp, Homo sapien
catggcattgggagcgttggcgggc

SEQ ID NO: 305212 - DNA, 25 bp, Homo sapien
gcctgtggtcgatgctcctgtatca

SEQ ID NO: 305213 - DNA, 25 bp, Homo sapien
cattgggagcgttggcgggcgtgtt

SEQ ID NO: 305214 - DNA, 25 bp, Homo sapien
ggcgtgttcccccagcctgtggtcg

SEQ ID NO: 305215 - DNA, 25 bp, Homo sapien
cacagaaaggatgtgtgctataact

SEQ ID NO: 305216 - DNA, 25 bp, Homo sapien
cagaaaggatgtgtgctataactac

SEQ ID NO: 305217 - DNA, 25 bp, Homo sapien
ccacagaaaggatgtgtgctataac

SEQ ID NO: 305218 - DNA, 25 bp, Homo sapien
agaaaggatgtgtgctataactaca

SEQ ID NO: 305219 - DNA, 25 bp, Homo sapien
gagctcctgtgactggcccgtcact

SEQ ID NO: 305220 - DNA, 25 bp, Homo sapien
ttgtgggaggaagcactgccctgag

SEQ ID NO: 305221 - DNA, 25 bp, Homo sapien
ttcccagctgggatggcgagctcct

SEQ ID NO: 305222 - DNA, 25 bp, Homo sapien
tgccctgagagccagtggtgttcca

SEQ ID NO: 305223 - DNA, 25 bp, Homo sapien
tcagagcgaatgagcaagtgcgaac

SEQ ID NO: 305224 - DNA, 25 bp, Homo sapien
gtgcgaacatttctaagcaggctac

SEQ ID NO: 305225 - DNA, 25 bp, Homo sapien
gagcaagtgcgaacatttctaagca

SEQ ID NO: 305226 - DNA, 25 bp, Homo sapien
ctgccttctcagagcgaatgagcaa

SEQ ID NO: 305227 - DNA, 25 bp, Homo sapien
cagttgcctcacacctttcatttaa

SEQ ID NO: 305228 - DNA, 25 bp, Homo sapien
ccccagttgcctcacacctttcatt

SEQ ID NO: 305229 - DNA, 25 bp, Homo sapien
aggaccccagttgcctcacaccttt

SEQ ID NO: 305230 - DNA, 25 bp, Homo sapien
cttgaggaccccagttgcctcacac

SEQ ID NO: 305231 - DNA, 25 bp, Homo sapien
tgagagcctccaaaagattattata

SEQ ID NO: 305232 - DNA, 25 bp, Homo sapien
tttacccacagcaacagttttatag

SEQ ID NO: 305233 - DNA, 25 bp, Homo sapien
catgggaaagcaagacgaagggtaa

SEQ ID NO: 305234 - DNA, 25 bp, Homo sapien
tttataaagtatgccttgagagcct

SEQ ID NO: 305235 - DNA, 25 bp, Homo sapien
aactgtttggcaagaggattcatcc

SEQ ID NO: 305236 - DNA, 25 bp, Homo sapien
gattcatccatgaatcattgtttcc

SEQ ID NO: 305237 - DNA, 25 bp, Homo sapien
tggcaagaggattcatccatgaatc

SEQ ID NO: 305238 - DNA, 25 bp, Homo sapien
tttgaaaactgtttggcaagaggat

SEQ ID NO: 305239 - DNA, 25 bp, Homo sapien
gctgcttggattatcttcagtctga

SEQ ID NO: 305240 - DNA, 25 bp, Homo sapien
tgcttggattatcttcagtctgact

SEQ ID NO: 305241 - DNA, 25 bp, Homo sapien
ccattttgctgcttggattatcttc

SEQ ID NO: 305242 - DNA, 25 bp, Homo sapien
tttgctgcttggattatcttcagtc

SEQ ID NO: 305243 - DNA, 25 bp, Homo sapien
taaggcccactatctgtggttccca

SEQ ID NO: 305244 - DNA, 25 bp, Homo sapien
cccatgtctttggaattaggtggac

SEQ ID NO: 305245 - DNA, 25 bp, Homo sapien
ttaggtggacggaacccagatcgat

SEQ ID NO: 305246 - DNA, 25 bp, Homo sapien
gagattcatcgctcgcttgtccaca

SEQ ID NO: 305247 - DNA, 25 bp, Homo sapien
atccccaaggcacccatcttgattg

SEQ ID NO: 305248 - DNA, 25 bp, Homo sapien
aaggcacccatcttgattggagaaa

SEQ ID NO: 305249 - DNA, 25 bp, Homo sapien
ccaaggcacccatcttgattggaga

SEQ ID NO: 305250 - DNA, 25 bp, Homo sapien
gcagggagcctcatccccaaggcac

SEQ ID NO: 305251 - DNA, 25 bp, Homo sapien
cctgtgccgattgctccaaggctga

SEQ ID NO: 305252 - DNA, 25 bp, Homo sapien
ggtagtgtggaaccagagggagaca

SEQ ID NO: 305253 - DNA, 25 bp, Homo sapien
ctccaaggctgacgttgggtagtgt

SEQ ID NO: 305254 - DNA, 25 bp, Homo sapien
gttgagccctgtgccgattgctcca

SEQ ID NO: 305255 - DNA, 25 bp, Homo sapien
gaggccatagccaagcagttataaa

SEQ ID NO: 305256 - DNA, 25 bp, Homo sapien
cagttataaatttgagaggcctcct

SEQ ID NO: 305257 - DNA, 25 bp, Homo sapien
caataaactgcagaccaggaccaag

SEQ ID NO: 305258 - DNA, 25 bp, Homo sapien
gaaaaacatgaagagagatgggttc

SEQ ID NO: 305259 - DNA, 25 bp, Homo sapien
ttatactgagtattatacatatacc

SEQ ID NO: 305260 - DNA, 25 bp, Homo sapien
actgaataccttcagcaaagacagc

SEQ ID NO: 305261 - DNA, 25 bp, Homo sapien
caattccacacaccggaaaatgtcc

SEQ ID NO: 305262 - DNA, 25 bp, Homo sapien
ctgaataccttcagcaaagacagct

SEQ ID NO: 305263 - DNA, 25 bp, Homo sapien
cacgggtgtgtgcagacctctcgat

SEQ ID NO: 305264 - DNA, 25 bp, Homo sapien
cacttgcgcccggagactgggagaa

SEQ ID NO: 305265 - DNA, 25 bp, Homo sapien
agaagaatttagtggctgcacgggt

SEQ ID NO: 305266 - DNA, 25 bp, Homo sapien
gacctctcgattgtgctgtgctgtt

SEQ ID NO: 305267 - DNA, 25 bp, Homo sapien
acattgacacatcagaacttataaa

SEQ ID NO: 305268 - DNA, 25 bp, Homo sapien
aaaataggagatctaaaaggaatag

SEQ ID NO: 305269 - DNA, 25 bp, Homo sapien
tatctttgggtgaatccttgagggc

SEQ ID NO: 305270 - DNA, 25 bp, Homo sapien
ggcaaccagcctctgaacattgaca

SEQ ID NO: 305271 - DNA, 25 bp, Homo sapien
cacttggtaagatcacctggcactg

SEQ ID NO: 305272 - DNA, 25 bp, Homo sapien
cctgtaaggcaacctatgagtagtc

SEQ ID NO: 305273 - DNA, 25 bp, Homo sapien
tccacaagaaggttaattcccactg

SEQ ID NO: 305274 - DNA, 25 bp, Homo sapien
tcgaaggttgagatctgggacattc

SEQ ID NO: 305275 - DNA, 25 bp, Homo sapien
gattgcagcggtgtcaccatggctc

SEQ ID NO: 305276 - DNA, 25 bp, Homo sapien
gcagacactttggtcataaagagat

SEQ ID NO: 305277 - DNA, 25 bp, Homo sapien
agatctgtagtacccaagtctctca

SEQ ID NO: 305278 - DNA, 25 bp, Homo sapien
tagaaatacagaaatgttgggaaaa

SEQ ID NO: 305279 - DNA, 25 bp, Homo sapien
ttagggcgagcatgaggaacacgtc

SEQ ID NO: 305280 - DNA, 25 bp, Homo sapien
tgaggaacacgtcctccacaatttc

SEQ ID NO: 305281 - DNA, 25 bp, Homo sapien
cagttttagggcgagcatgaggaac

SEQ ID NO: 305282 - DNA, 25 bp, Homo sapien
gaggaacacgtcctccacaatttcc

SEQ ID NO: 305283 - DNA, 25 bp, Homo sapien
ctcctcaatttcttatagtggaggg

SEQ ID NO: 305284 - DNA, 25 bp, Homo sapien
tttcttatagtggaggggtgcttct

SEQ ID NO: 305285 - DNA, 25 bp, Homo sapien
tatagtggaggggtgcttctttccc

SEQ ID NO: 305286 - DNA, 25 bp, Homo sapien
tcaatttcttatagtggaggggtgc

SEQ ID NO: 305287 - DNA, 25 bp, Homo sapien
gctttcatgaacaatgcctaagatg

SEQ ID NO: 305288 - DNA, 25 bp, Homo sapien
gcctaagatgtcaatttctctggtg

SEQ ID NO: 305289 - DNA, 25 bp, Homo sapien
tgtaatatttaacccatgtagctgg

SEQ ID NO: 305290 - DNA, 25 bp, Homo sapien
tgtaactcctgattcacacactaag

SEQ ID NO: 305291 - DNA, 25 bp, Homo sapien
caagtagtgtagcacaatggccaag

SEQ ID NO: 305292 - DNA, 25 bp, Homo sapien
aaagagcctggaaggtcactgaccc

SEQ ID NO: 305293 - DNA, 25 bp, Homo sapien
gaacaagcttaagaacgtgtccgtg

SEQ ID NO: 305294 - DNA, 25 bp, Homo sapien
cgtgtccgtgagtgccaagtagtgt

SEQ ID NO: 305295 - DNA, 25 bp, Homo sapien
tgtaaatagaagacatgagtttcaa

SEQ ID NO: 305296 - DNA, 25 bp, Homo sapien
caagtaagacaaatatattaacttg

SEQ ID NO: 305297 - DNA, 25 bp, Homo sapien
aaatagaagacatgagtttcaatgc

SEQ ID NO: 305298 - DNA, 25 bp, Homo sapien
cttgtaaatagaagacatgagtttc

SEQ ID NO: 305299 - DNA, 25 bp, Homo sapien
gatgaatctaaagcaagagttgtca

SEQ ID NO: 305300 - DNA, 25 bp, Homo sapien
cactcaagggttaacaatgattatc

SEQ ID NO: 305301 - DNA, 25 bp, Homo sapien
gaaattattactggaaatgtgccat

SEQ ID NO: 305302 - DNA, 25 bp, Homo sapien
tatggcttttatccaaccaagaaat

SEQ ID NO: 305303 - DNA, 25 bp, Homo sapien
gggccccacattgaaaagacctgga

SEQ ID NO: 305304 - DNA, 25 bp, Homo sapien
tggctcagcatggcaatttgttgag

SEQ ID NO: 305305 - DNA, 25 bp, Homo sapien
gcaatttgttgaggagataactggg

SEQ ID NO: 305306 - DNA, 25 bp, Homo sapien
gggaaactgcttgagcattgaggca

SEQ ID NO: 305307 - DNA, 25 bp, Homo sapien
ggcgtacagcttgagaaatctttct

SEQ ID NO: 305308 - DNA, 25 bp, Homo sapien
ttgctgttggcgtacagcttgagaa

SEQ ID NO: 305309 - DNA, 25 bp, Homo sapien
tggcgtacagcttgagaaatctttc

SEQ ID NO: 305310 - DNA, 25 bp, Homo sapien
tgttggcgtacagcttgagaaatct

SEQ ID NO: 305311 - DNA, 25 bp, Homo sapien
gcccaacaggatgagagggcgagtg

SEQ ID NO: 305312 - DNA, 25 bp, Homo sapien
ggcccaacaggatgagagggcgagt

SEQ ID NO: 305313 - DNA, 25 bp, Homo sapien
gaaggtctgggagccccacattcaa

SEQ ID NO: 305314 - DNA, 25 bp, Homo sapien
ccatatccaggtattggccctttgg

SEQ ID NO: 305315 - DNA, 25 bp, Homo sapien
attggccctttggtttgaaggtctg

SEQ ID NO: 305316 - DNA, 25 bp, Homo sapien
aatgcgttgggtaccatgttgtcca

SEQ ID NO: 305317 - DNA, 25 bp, Homo sapien
aacagatcataacctcagccatgtg

SEQ ID NO: 305318 - DNA, 25 bp, Homo sapien
tcatacacacgtattgaaagactgc

SEQ ID NO: 305319 - DNA, 25 bp, Homo sapien
catgcacaagcatttaaatagggtt

SEQ ID NO: 305320 - DNA, 25 bp, Homo sapien
aattcccggcggtaggagagcagtt

SEQ ID NO: 305321 - DNA, 25 bp, Homo sapien
atattggcttcctgtgtggctacag

SEQ ID NO: 305322 - DNA, 25 bp, Homo sapien
taaagcgagactcggttccagcctc

SEQ ID NO: 305323 - DNA, 25 bp, Homo sapien
ccctccatcatggaggtccactgtt

SEQ ID NO: 305324 - DNA, 25 bp, Homo sapien
catgccatagtccatgccgccagag

SEQ ID NO: 305325 - DNA, 25 bp, Homo sapien
gatttggcaggtaaccagctatcac

SEQ ID NO: 305326 - DNA, 25 bp, Homo sapien
tatcaaactggttgtacggtgaccc

SEQ ID NO: 305327 - DNA, 25 bp, Homo sapien
acccgtatggccacccagtgtgtca

SEQ ID NO: 305328 - DNA, 25 bp, Homo sapien
gctatcaccagcaggacccgtatgg

SEQ ID NO: 305329 - DNA, 25 bp, Homo sapien
ctgtggtgttatcccgcagcagttg

SEQ ID NO: 305330 - DNA, 25 bp, Homo sapien
cagggtcaatgttttggataccttt

SEQ ID NO: 305331 - DNA, 25 bp, Homo sapien
tggatacctttccatggcactcctg

SEQ ID NO: 305332 - DNA, 25 bp, Homo sapien
cagtatctacaatgggagatgtggc

SEQ ID NO: 305333 - DNA, 25 bp, Homo sapien
agcgaggtgttgagggaagaattag

SEQ ID NO: 305334 - DNA, 25 bp, Homo sapien
gaagtgctatgaacgttggtaaagg

SEQ ID NO: 305335 - DNA, 25 bp, Homo sapien
ttggtaaaggagttgtcagaggcac

SEQ ID NO: 305336 - DNA, 25 bp, Homo sapien
tcagaggcactgtagggccaggcac

SEQ ID NO: 305337 - DNA, 25 bp, Homo sapien
ggttcttctcatgacccttgacttc

SEQ ID NO: 305338 - DNA, 25 bp, Homo sapien
actggttcttctcatgacccttgac

SEQ ID NO: 305339 - DNA, 25 bp, Homo sapien
tggttcttctcatgacccttgactt

SEQ ID NO: 305340 - DNA, 25 bp, Homo sapien
ctggttcttctcatgacccttgact

SEQ ID NO: 305341 - DNA, 25 bp, Homo sapien
ttttgttgacaaatacacatgagtt

SEQ ID NO: 305342 - DNA, 25 bp, Homo sapien
cagtgactactactctgaattgata

SEQ ID NO: 305343 - DNA, 25 bp, Homo sapien
tgacttgaaaaggaggacacattca

SEQ ID NO: 305344 - DNA, 25 bp, Homo sapien
ttcctaaagataccagcttctgggt

SEQ ID NO: 305345 - DNA, 25 bp, Homo sapien
ctgatcggggtgctgtgctgctcca

SEQ ID NO: 305346 - DNA, 25 bp, Homo sapien
gaccatgttgatttgtaatcaggga

SEQ ID NO: 305347 - DNA, 25 bp, Homo sapien
gatctggggaccatgttgatttgta

SEQ ID NO: 305348 - DNA, 25 bp, Homo sapien
aggcgagccgtgagtcctgtgtccc

SEQ ID NO: 305349 - DNA, 25 bp, Homo sapien
aacaatggtgttcctttaggcagat

SEQ ID NO: 305350 - DNA, 25 bp, Homo sapien
ttgtggatgaacaatggtgttcctt

SEQ ID NO: 305351 - DNA, 25 bp, Homo sapien
gatgaacaatggtgttcctttaggc

SEQ ID NO: 305352 - DNA, 25 bp, Homo sapien
ctcttgggaagacctctttgtgtct

SEQ ID NO: 305353 - DNA, 25 bp, Homo sapien
tgtgaagaaccagccagtaactagg

SEQ ID NO: 305354 - DNA, 25 bp, Homo sapien
ttgtgaagaaccagccagtaactag

SEQ ID NO: 305355 - DNA, 25 bp, Homo sapien
taggacgaactgagccaccatcact

SEQ ID NO: 305356 - DNA, 25 bp, Homo sapien
gccagtaactaggacgaactgagcc

SEQ ID NO: 305357 - DNA, 25 bp, Homo sapien
gatctgcagaaacccactctctagt

SEQ ID NO: 305358 - DNA, 25 bp, Homo sapien
agtcaaatgatctcttccactggag

SEQ ID NO: 305359 - DNA, 25 bp, Homo sapien
gcatgaagcctagtggccagcatca

SEQ ID NO: 305360 - DNA, 25 bp, Homo sapien
tataggttcaggtcttcttggagga

SEQ ID NO: 305361 - DNA, 25 bp, Homo sapien
cccagttagactttcaccacttaag

SEQ ID NO: 305362 - DNA, 25 bp, Homo sapien
cttaagatcttcagcgattagggac

SEQ ID NO: 305363 - DNA, 25 bp, Homo sapien
gacaattttcctaacctatgagttg

SEQ ID NO: 305364 - DNA, 25 bp, Homo sapien
tctcaaggtgagactatttctgcct

SEQ ID NO: 305365 - DNA, 25 bp, Homo sapien
agatcgttctcaaggttgacccatc

SEQ ID NO: 305366 - DNA, 25 bp, Homo sapien
gatcgttctcaaggttgacccatca

SEQ ID NO: 305367 - DNA, 25 bp, Homo sapien
ctgggttagattcagatggaatgtc

SEQ ID NO: 305368 - DNA, 25 bp, Homo sapien
ggttagattcagatggaatgtcagc

SEQ ID NO: 305369 - DNA, 25 bp, Homo sapien
gggttagattcagatggaatgtcag

SEQ ID NO: 305370 - DNA, 25 bp, Homo sapien
gttagattcagatggaatgtcagca

SEQ ID NO: 305371 - DNA, 25 bp, Homo sapien
cctgtttggtgctgtatcggatcag

SEQ ID NO: 305372 - DNA, 25 bp, Homo sapien
cagtgcagtttgggccttggccgcc

SEQ ID NO: 305373 - DNA, 25 bp, Homo sapien
tgctgtatcggatcagggcagtgcc

SEQ ID NO: 305374 - DNA, 25 bp, Homo sapien
ccttggccgcctcctgtttggtgct

SEQ ID NO: 305375 - DNA, 25 bp, Homo sapien
ttgtctacgtgggtgtaggaccgaa

SEQ ID NO: 305376 - DNA, 25 bp, Homo sapien
cgtgggtgtaggaccgaatactcac

SEQ ID NO: 305377 - DNA, 25 bp, Homo sapien
tctacgtgggtgtaggaccgaatac

SEQ ID NO: 305378 - DNA, 25 bp, Homo sapien
tacgtgggtgtaggaccgaatactc

SEQ ID NO: 305379 - DNA, 25 bp, Homo sapien
cattcttcgtatatgttctggtgca

SEQ ID NO: 305380 - DNA, 25 bp, Homo sapien
tgacggtgccattcttcgtatatgt

SEQ ID NO: 305381 - DNA, 25 bp, Homo sapien
gacttgcagatgcacgtgtgacggt

SEQ ID NO: 305382 - DNA, 25 bp, Homo sapien
cacgtgtgacggtgccattcttcgt

SEQ ID NO: 305383 - DNA, 25 bp, Homo sapien
tacgtttggaattctgacgactggc

SEQ ID NO: 305384 - DNA, 25 bp, Homo sapien
ctgacgactggcctctgatatatac

SEQ ID NO: 305385 - DNA, 25 bp, Homo sapien
caaattatttacgtttggaattctg

SEQ ID NO: 305386 - DNA, 25 bp, Homo sapien
tgttacttagaatttactcactact

SEQ ID NO: 305387 - DNA, 25 bp, Homo sapien
ccatatactgtacaaggccgagtga

SEQ ID NO: 305388 - DNA, 25 bp, Homo sapien
gctaagagggatgactgaactggca

SEQ ID NO: 305389 - DNA, 25 bp, Homo sapien
tacagacttttggtgataaggaggg

SEQ ID NO: 305390 - DNA, 25 bp, Homo sapien
tcctctcgatttggctgtgatccta

SEQ ID NO: 305391 - DNA, 25 bp, Homo sapien
gcttgtgccagaaagcggctgactt

SEQ ID NO: 305392 - DNA, 25 bp, Homo sapien
gccagaaagcggctgacttcatcat

SEQ ID NO: 305393 - DNA, 25 bp, Homo sapien
ttcagagcaggtcccacgggatctg

SEQ ID NO: 305394 - DNA, 25 bp, Homo sapien
gtcccacgggatctgactggttctg

SEQ ID NO: 305395 - DNA, 25 bp, Homo sapien
tgaagcgccagcaagatcggccccg

SEQ ID NO: 305396 - DNA, 25 bp, Homo sapien
aatgaagcgccagcaagatcggccc

SEQ ID NO: 305397 - DNA, 25 bp, Homo sapien
ccccacaatgaagcgccagcaagat

SEQ ID NO: 305398 - DNA, 25 bp, Homo sapien
acaatgaagcgccagcaagatcggc

SEQ ID NO: 305399 - DNA, 25 bp, Homo sapien
tcaccaggtagtaaaggagcagggc

SEQ ID NO: 305400 - DNA, 25 bp, Homo sapien
ccagaaggtcaccaggtagtaaagg

SEQ ID NO: 305401 - DNA, 25 bp, Homo sapien
tcttccaccgttgggactccccata

SEQ ID NO: 305402 - DNA, 25 bp, Homo sapien
ggctgcccatcctatggggatcttc

SEQ ID NO: 305403 - DNA, 25 bp, Homo sapien
tgttccaaaaaaggtcacgaggtca

SEQ ID NO: 305404 - DNA, 25 bp, Homo sapien
aaggtcacgaggtcagagttgaaag

SEQ ID NO: 305405 - DNA, 25 bp, Homo sapien
tccaaaaaaggtcacgaggtcagag

SEQ ID NO: 305406 - DNA, 25 bp, Homo sapien
caaaaaaggtcacgaggtcagagtt

SEQ ID NO: 305407 - DNA, 25 bp, Homo sapien
aaaaatgtatttattgcaagttgaa

SEQ ID NO: 305408 - DNA, 25 bp, Homo sapien
aaatgtatttattgcaagttgaaaa

SEQ ID NO: 305409 - DNA, 25 bp, Homo sapien
atgtatttattgcaagttgaaaaaa

SEQ ID NO: 305410 - DNA, 25 bp, Homo sapien
taaaaatgtatttattgcaagttga

SEQ ID NO: 305411 - DNA, 25 bp, Homo sapien
ttataagggaggcaactatgtgctc

SEQ ID NO: 305412 - DNA, 25 bp, Homo sapien
aaatggtatgtgtacttgcttcaca

SEQ ID NO: 305413 - DNA, 25 bp, Homo sapien
ctcagacagtctgtcaatgacccac

SEQ ID NO: 305414 - DNA, 25 bp, Homo sapien
tctaggttggcgttcatgattcaag

SEQ ID NO: 305415 - DNA, 25 bp, Homo sapien
tcaaactaacgaaaaggcctgcatg

SEQ ID NO: 305416 - DNA, 25 bp, Homo sapien
aaataaaaagcagatgggccggcca

SEQ ID NO: 305417 - DNA, 25 bp, Homo sapien
gatactcagatgtgcctggtggcca

SEQ ID NO: 305418 - DNA, 25 bp, Homo sapien
tgggatgtccacacaagtgctagca

SEQ ID NO: 305419 - DNA, 25 bp, Homo sapien
taaaacgagcacaacagtagctggg

SEQ ID NO: 305420 - DNA, 25 bp, Homo sapien
tatgtacgaaggcactaaagcggtt

SEQ ID NO: 305421 - DNA, 25 bp, Homo sapien
tggcccagggacactaagatttaac

SEQ ID NO: 305422 - DNA, 25 bp, Homo sapien
gcacagtaatggagggcacacgaca

SEQ ID NO: 305423 - DNA, 25 bp, Homo sapien
tgtaaatgaaacacgtccagggttg

SEQ ID NO: 305424 - DNA, 25 bp, Homo sapien
tgtatggactccctgtacttgcaga

SEQ ID NO: 305425 - DNA, 25 bp, Homo sapien
catattcaacccacaggagtttgga

SEQ ID NO: 305426 - DNA, 25 bp, Homo sapien
tatgccacaatcactcgggatctgg

SEQ ID NO: 305427 - DNA, 25 bp, Homo sapien
tgctacaacagcatcataagccacc

SEQ ID NO: 305428 - DNA, 25 bp, Homo sapien
ctgtgagcagtaaagaggaatttcc

SEQ ID NO: 305429 - DNA, 25 bp, Homo sapien
cataagccaccttgacaactttctt

SEQ ID NO: 305430 - DNA, 25 bp, Homo sapien
ttgcagcttactgtgagcagtaaag

SEQ ID NO: 305431 - DNA, 25 bp, Homo sapien
gaacggacggtctctgtactcacaa

SEQ ID NO: 305432 - DNA, 25 bp, Homo sapien
tacaagagatacaagggcaggcaga

SEQ ID NO: 305433 - DNA, 25 bp, Homo sapien
actcaaagggtaaaagcgtgctgcc

SEQ ID NO: 305434 - DNA, 25 bp, Homo sapien
cattggttgacaggaactgcaggcc

SEQ ID NO: 305435 - DNA, 25 bp, Homo sapien
gaacccaaagcagcatttatatctc

SEQ ID NO: 305436 - DNA, 25 bp, Homo sapien
cccaaagcagcatttatatctccat

SEQ ID NO: 305437 - DNA, 25 bp, Homo sapien
ctaggattatggaacccaaagcagc

SEQ ID NO: 305438 - DNA, 25 bp, Homo sapien
taggattatggaacccaaagcagca

SEQ ID NO: 305439 - DNA, 25 bp, Homo sapien
tattttactatgtaaacatagcccc

SEQ ID NO: 305440 - DNA, 25 bp, Homo sapien
gactcccattattcactgtttcctg

SEQ ID NO: 305441 - DNA, 25 bp, Homo sapien
tctgtgaagtgactcccattattca

SEQ ID NO: 305442 - DNA, 25 bp, Homo sapien
tgtttcctgatttggtaggatgtat

SEQ ID NO: 305443 - DNA, 25 bp, Homo sapien
gaggagcaatttcaacatatgggag

SEQ ID NO: 305444 - DNA, 25 bp, Homo sapien
gccatgcaagtgcacctctaaagtg

SEQ ID NO: 305445 - DNA, 25 bp, Homo sapien
cacttaaaggtaacttgcagagagc

SEQ ID NO: 305446 - DNA, 25 bp, Homo sapien
tcctgttacctgtttgtgtgcaaag

SEQ ID NO: 305447 - DNA, 25 bp, Homo sapien
gaccagggaagagcggaagcggaaa

SEQ ID NO: 305448 - DNA, 25 bp, Homo sapien
actggaccagggaagagcggaagcg

SEQ ID NO: 305449 - DNA, 25 bp, Homo sapien
tggaccagggaagagcggaagcgga

SEQ ID NO: 305450 - DNA, 25 bp, Homo sapien
gactggaccagggaagagcggaagc

SEQ ID NO: 305451 - DNA, 25 bp, Homo sapien
tagctgtcgggcgaaccatgatcgc

SEQ ID NO: 305452 - DNA, 25 bp, Homo sapien
catgtccggaatttatacctgtcgc

SEQ ID NO: 305453 - DNA, 25 bp, Homo sapien
tacctgtcgctaaacacgaagcaca

SEQ ID NO: 305454 - DNA, 25 bp, Homo sapien
acatctccgggctggcatagcggga

SEQ ID NO: 305455 - DNA, 25 bp, Homo sapien
catgtcgtaaacgtttctcttcctc

SEQ ID NO: 305456 - DNA, 25 bp, Homo sapien
ccatcttgaagtcgatgttctccag

SEQ ID NO: 305457 - DNA, 25 bp, Homo sapien
gccatcttgaagtcgatgttctcca

SEQ ID NO: 305458 - DNA, 25 bp, Homo sapien
agccatcacatcatgtcgtaaacgt

SEQ ID NO: 305459 - DNA, 25 bp, Homo sapien
gacagcagtggccaaatgtgtgcac

SEQ ID NO: 305460 - DNA, 25 bp, Homo sapien
tccaacatagcaagaagtagcacca

SEQ ID NO: 305461 - DNA, 25 bp, Homo sapien
tagcaagaagtagcaccaaggtgaa

SEQ ID NO: 305462 - DNA, 25 bp, Homo sapien
ccaaggtgaataatgcctgcagctt

SEQ ID NO: 305463 - DNA, 25 bp, Homo sapien
ttgacaaatagattctagagactga

SEQ ID NO: 305464 - DNA, 25 bp, Homo sapien
aaaaagatctatagtgtcacttcct

SEQ ID NO: 305465 - DNA, 25 bp, Homo sapien
taagtataaacaacacaggcgccta

SEQ ID NO: 305466 - DNA, 25 bp, Homo sapien
cctcaactggacaacatcaaataaa

SEQ ID NO: 305467 - DNA, 25 bp, Homo sapien
tactactgagatctgtaaggaacaa

SEQ ID NO: 305468 - DNA, 25 bp, Homo sapien
gggttgctcagctaccagcctatat

SEQ ID NO: 305469 - DNA, 25 bp, Homo sapien
caaggtacatggtatctaagatgac

SEQ ID NO: 305470 - DNA, 25 bp, Homo sapien
taagcacgccagaaaatactaacac

SEQ ID NO: 305471 - DNA, 25 bp, Homo sapien
gtgcatttctaagaataatcaagtc

SEQ ID NO: 305472 - DNA, 25 bp, Homo sapien
caggtcaagtgcatttctaagaata

SEQ ID NO: 305473 - DNA, 25 bp, Homo sapien
caaaagcaggtcaagtgcatttcta

SEQ ID NO: 305474 - DNA, 25 bp, Homo sapien
ttggcaaaagcaggtcaagtgcatt

SEQ ID NO: 305475 - DNA, 25 bp, Homo sapien
gcaagccgagagatcactctggcaa

SEQ ID NO: 305476 - DNA, 25 bp, Homo sapien
tccttagcaaagtcggcaagccgag

SEQ ID NO: 305477 - DNA, 25 bp, Homo sapien
aaatgtgtgaaacctaatgtgggta

SEQ ID NO: 305478 - DNA, 25 bp, Homo sapien
taatgtgggtagactggctcgttcc

SEQ ID NO: 305479 - DNA, 25 bp, Homo sapien
ctgaatccaaagacagcaacgtttc

SEQ ID NO: 305480 - DNA, 25 bp, Homo sapien
gaatccaaagacagcaacgtttccc

SEQ ID NO: 305481 - DNA, 25 bp, Homo sapien
aaagacagcaacgtttcccaactgt

SEQ ID NO: 305482 - DNA, 25 bp, Homo sapien
gacagcaacgtttcccaactgtggt

SEQ ID NO: 305483 - DNA, 25 bp, Homo sapien
tccccggaagcgcaggtcatctcgg

SEQ ID NO: 305484 - DNA, 25 bp, Homo sapien
tcggacacgcttcaagttctggaga

SEQ ID NO: 305485 - DNA, 25 bp, Homo sapien
ctgagtgccagtggtaccctttact

SEQ ID NO: 305486 - DNA, 25 bp, Homo sapien
agttctggagatccatgcaaagatc

SEQ ID NO: 305487 - DNA, 25 bp, Homo sapien
ttttctgtcaccatcttgtcaagct

SEQ ID NO: 305488 - DNA, 25 bp, Homo sapien
gccttttctgtcaccatcttgtcaa

SEQ ID NO: 305489 - DNA, 25 bp, Homo sapien
tctgtcaccatcttgtcaagctgct

SEQ ID NO: 305490 - DNA, 25 bp, Homo sapien
tttctgtcaccatcttgtcaagctg

SEQ ID NO: 305491 - DNA, 25 bp, Homo sapien
ttgtgcactgatgcccccaagctag

SEQ ID NO: 305492 - DNA, 25 bp, Homo sapien
tagccagcacagacagtacttcaat

SEQ ID NO: 305493 - DNA, 25 bp, Homo sapien
tcaatatccacttttcgtgtatatg

SEQ ID NO: 305494 - DNA, 25 bp, Homo sapien
tcgtgtatatgtctgccctgtgatg

SEQ ID NO: 305495 - DNA, 25 bp, Homo sapien
ggtttgccaggaggcgtatgtcggt

SEQ ID NO: 305496 - DNA, 25 bp, Homo sapien
ttgaggtttgccaggaggcgtatgt

SEQ ID NO: 305497 - DNA, 25 bp, Homo sapien
ccaggaggcgtatgtcggtgcaaat

SEQ ID NO: 305498 - DNA, 25 bp, Homo sapien
ttgccaggaggcgtatgtcggtgca

SEQ ID NO: 305499 - DNA, 25 bp, Homo sapien
cagagagacttcagaggatagtgag

SEQ ID NO: 305500 - DNA, 25 bp, Homo sapien
aggatagtgagtaggcaagcatgct

SEQ ID NO: 305501 - DNA, 25 bp, Homo sapien
tagtgagtaggcaagcatgctgaat

SEQ ID NO: 305502 - DNA, 25 bp, Homo sapien
cttcagaggatagtgagtaggcaag

SEQ ID NO: 305503 - DNA, 25 bp, Homo sapien
ttctgaacgcatgggattccgctta

SEQ ID NO: 305504 - DNA, 25 bp, Homo sapien
gatgctgtctgtagcgggtccatga

SEQ ID NO: 305505 - DNA, 25 bp, Homo sapien
tggcgggcaagactgcagcaacgtt

SEQ ID NO: 305506 - DNA, 25 bp, Homo sapien
tgtgcgttcaaaccactggacagat

SEQ ID NO: 305507 - DNA, 25 bp, Homo sapien
cactcaacttggtgtatgtgatgtc

SEQ ID NO: 305508 - DNA, 25 bp, Homo sapien
tccactcaacttggtgtatgtgatg

SEQ ID NO: 305509 - DNA, 25 bp, Homo sapien
caacttggtgtatgtgatgtccctg

SEQ ID NO: 305510 - DNA, 25 bp, Homo sapien
ctcaacttggtgtatgtgatgtccc

SEQ ID NO: 305511 - DNA, 25 bp, Homo sapien
tgggctggccagtctgccttcgact

SEQ ID NO: 305512 - DNA, 25 bp, Homo sapien
ggcaaatcagcagacctacagggtc

SEQ ID NO: 305513 - DNA, 25 bp, Homo sapien
tagggtcttttagcaggcaaatcag

SEQ ID NO: 305514 - DNA, 25 bp, Homo sapien
tcagtaaatggcagtagcgccccac

SEQ ID NO: 305515 - DNA, 25 bp, Homo sapien
ggggtacacgaccaatccttcagaa

SEQ ID NO: 305516 - DNA, 25 bp, Homo sapien
gaaatgttctgcagcgtattcaata

SEQ ID NO: 305517 - DNA, 25 bp, Homo sapien
aaatgcctcggccaaacagatccgt

SEQ ID NO: 305518 - DNA, 25 bp, Homo sapien
caatatagtatctgcggtaagaaat

SEQ ID NO: 305519 - DNA, 25 bp, Homo sapien
ctcttgccgaatgcgccgttcaatt

SEQ ID NO: 305520 - DNA, 25 bp, Homo sapien
gcagctcttgccgaatgcgccgttc

SEQ ID NO: 305521 - DNA, 25 bp, Homo sapien
agctcttgccgaatgcgccgttcaa

SEQ ID NO: 305522 - DNA, 25 bp, Homo sapien
aaggcagctcttgccgaatgcgccg

SEQ ID NO: 305523 - DNA, 25 bp, Homo sapien
aactctctgcccacatcttaggaca

SEQ ID NO: 305524 - DNA, 25 bp, Homo sapien
aagcctgaaatggatgcccaccttg

SEQ ID NO: 305525 - DNA, 25 bp, Homo sapien
tgtcagttccctactaacagggcgt

SEQ ID NO: 305526 - DNA, 25 bp, Homo sapien
gtctatctgtaccagggtcttctca

SEQ ID NO: 305527 - DNA, 25 bp, Homo sapien
ggaggcacgaccagtgaaagaagaa

SEQ ID NO: 305528 - DNA, 25 bp, Homo sapien
gggactgaagtaggcatcaacctgg

SEQ ID NO: 305529 - DNA, 25 bp, Homo sapien
ccaactgggagtgaatgggactgaa

SEQ ID NO: 305530 - DNA, 25 bp, Homo sapien
cttcctgcttaaccacagaagctgc

SEQ ID NO: 305531 - DNA, 25 bp, Homo sapien
taccttctcagccagtaaatgccag

SEQ ID NO: 305532 - DNA, 25 bp, Homo sapien
tcatcatctactgcttggcccgttg

SEQ ID NO: 305533 - DNA, 25 bp, Homo sapien
tcaagtagccaccaagagcttaacc

SEQ ID NO: 305534 - DNA, 25 bp, Homo sapien
gggataccactgaaacctaatttga

SEQ ID NO: 305535 - DNA, 25 bp, Homo sapien
tcacgctttcatatggttttaacag

SEQ ID NO: 305536 - DNA, 25 bp, Homo sapien
tcatcacgctttcatatggttttaa

SEQ ID NO: 305537 - DNA, 25 bp, Homo sapien
taacaggggatacacctcctcttct

SEQ ID NO: 305538 - DNA, 25 bp, Homo sapien
acgctttcatatggttttaacaggg

SEQ ID NO: 305539 - DNA, 25 bp, Homo sapien
gcagagtcaacttcaacgctctttg

SEQ ID NO: 305540 - DNA, 25 bp, Homo sapien
catttactatgcaagagcagagtca

SEQ ID NO: 305541 - DNA, 25 bp, Homo sapien
tgctagacctagatcaaattcactt

SEQ ID NO: 305542 - DNA, 25 bp, Homo sapien
gccttgttgagaaatgtgagactga

SEQ ID NO: 305543 - DNA, 25 bp, Homo sapien
gaatgtaatgccaagagtgcggagc

SEQ ID NO: 305544 - DNA, 25 bp, Homo sapien
gggcaacacacaatcaagtcactct

SEQ ID NO: 305545 - DNA, 25 bp, Homo sapien
tcttctgtataggataaagagccct

SEQ ID NO: 305546 - DNA, 25 bp, Homo sapien
gctttttgggcactggacaaccatt

SEQ ID NO: 305547 - DNA, 25 bp, Homo sapien
gacagaatatctggtcagagtccca

SEQ ID NO: 305548 - DNA, 25 bp, Homo sapien
gccaatcactggagatcattagtct

SEQ ID NO: 305549 - DNA, 25 bp, Homo sapien
gaaaccaggtcaaatcgccaatcac

SEQ ID NO: 305550 - DNA, 25 bp, Homo sapien
gaaagaagacaagagatgcaccaac

SEQ ID NO: 305551 - DNA, 25 bp, Homo sapien
ttccccactcgcacccagtcagcgc

SEQ ID NO: 305552 - DNA, 25 bp, Homo sapien
gccaatccgggtcgggttagcagct

SEQ ID NO: 305553 - DNA, 25 bp, Homo sapien
acgggccacctcagcgccaatccgg

SEQ ID NO: 305554 - DNA, 25 bp, Homo sapien
acctcagcgccaatccgggtcgggt

SEQ ID NO: 305555 - DNA, 25 bp, Homo sapien
cggcccgaggcggtgcttctctcgt

SEQ ID NO: 305556 - DNA, 25 bp, Homo sapien
attccaacggcgacgcgagcaaggt

SEQ ID NO: 305557 - DNA, 25 bp, Homo sapien
tcgtgggcgccttcggcccatacga

SEQ ID NO: 305558 - DNA, 25 bp, Homo sapien
tacgaccctcggtcggacagtccga

SEQ ID NO: 305559 - DNA, 25 bp, Homo sapien
cggctgccagcgcggtggattccgg

SEQ ID NO: 305560 - DNA, 25 bp, Homo sapien
tggattccggctggcgccccgaaca

SEQ ID NO: 305561 - DNA, 25 bp, Homo sapien
tgccagcgcggtggattccggctgg

SEQ ID NO: 305562 - DNA, 25 bp, Homo sapien
ttcgtaaaaccgctcccggctgcca

SEQ ID NO: 305563 - DNA, 25 bp, Homo sapien
cgagtctcgggcctggatccgagcc

SEQ ID NO: 305564 - DNA, 25 bp, Homo sapien
gatccgagcccgggttctgcacctg

SEQ ID NO: 305565 - DNA, 25 bp, Homo sapien
tggatccgagcccgggttctgcacc

SEQ ID NO: 305566 - DNA, 25 bp, Homo sapien
cggtgttccgagtctcgggcctgga

SEQ ID NO: 305567 - DNA, 25 bp, Homo sapien
agggcactgtctgcacacatgctgc

SEQ ID NO: 305568 - DNA, 25 bp, Homo sapien
gatctagatatggaggagcaacacc

SEQ ID NO: 305569 - DNA, 25 bp, Homo sapien
cagacaagcaaggaagcaagcagca

SEQ ID NO: 305570 - DNA, 25 bp, Homo sapien
tgtttcctgccggacagtgatggtc

SEQ ID NO: 305571 - DNA, 25 bp, Homo sapien
cctcttttctgatggcttatataga

SEQ ID NO: 305572 - DNA, 25 bp, Homo sapien
cgtgtacctcttttctgatggctta

SEQ ID NO: 305573 - DNA, 25 bp, Homo sapien
aagaaaagcgtgtacctcttttctg

SEQ ID NO: 305574 - DNA, 25 bp, Homo sapien
ctgatggcttatatagactagtaaa

SEQ ID NO: 305575 - DNA, 25 bp, Homo sapien
gcgcatgccatcatgacttgctaat

SEQ ID NO: 305576 - DNA, 25 bp, Homo sapien
tcctgcttttactctcatatcaaat

SEQ ID NO: 305577 - DNA, 25 bp, Homo sapien
gtttcttctcccaagacattcagat

SEQ ID NO: 305578 - DNA, 25 bp, Homo sapien
cattcagatcctaaggtttagggta

SEQ ID NO: 305579 - DNA, 25 bp, Homo sapien
agttaaactcagctgccctacgcgg

SEQ ID NO: 305580 - DNA, 25 bp, Homo sapien
cctttaggcgagactgaggtgtgac

SEQ ID NO: 305581 - DNA, 25 bp, Homo sapien
tatgacaaggacatctgaggtgaac

SEQ ID NO: 305582 - DNA, 25 bp, Homo sapien
cacgatgaaggagctagtggcacag

SEQ ID NO: 305583 - DNA, 25 bp, Homo sapien
ccgtgttagccgggatggtcgggat

SEQ ID NO: 305584 - DNA, 25 bp, Homo sapien
cgtgttagccgggatggtcgggatc

SEQ ID NO: 305585 - DNA, 25 bp, Homo sapien
catactcgttctgtacctttttcat

SEQ ID NO: 305586 - DNA, 25 bp, Homo sapien
cagggagacttttacttcatactcg

SEQ ID NO: 305587 - DNA, 25 bp, Homo sapien
tacttcatactcgttctgtaccttt

SEQ ID NO: 305588 - DNA, 25 bp, Homo sapien
ctaggtggcagggagacttttactt

SEQ ID NO: 305589 - DNA, 25 bp, Homo sapien
tctatagaataaaatggtgtgcagc

SEQ ID NO: 305590 - DNA, 25 bp, Homo sapien
aatggtgtgcagctgtcactgacag

SEQ ID NO: 305591 - DNA, 25 bp, Homo sapien
taaaatggtgtgcagctgtcactga

SEQ ID NO: 305592 - DNA, 25 bp, Homo sapien
tatagaataaaatggtgtgcagctg

SEQ ID NO: 305593 - DNA, 25 bp, Homo sapien
gagactgatagtttccaaatggact

SEQ ID NO: 305594 - DNA, 25 bp, Homo sapien
aatggactcccaaaactttgccctg

SEQ ID NO: 305595 - DNA, 25 bp, Homo sapien
tgtgaaatgacggacacatggccac

SEQ ID NO: 305596 - DNA, 25 bp, Homo sapien
tggccaccagctagatggccctggg

SEQ ID NO: 305597 - DNA, 25 bp, Homo sapien
tggaaggctcctcaggcttcatctg

SEQ ID NO: 305598 - DNA, 25 bp, Homo sapien
tcctgctatcttagagctggaaggc

SEQ ID NO: 305599 - DNA, 25 bp, Homo sapien
gaagtctcctatcctgctatcttag

SEQ ID NO: 305600 - DNA, 25 bp, Homo sapien
tgcagctccaatcttagaagtctcc

SEQ ID NO: 305601 - DNA, 25 bp, Homo sapien
tcctggggccatatgctcggagtca

SEQ ID NO: 305602 - DNA, 25 bp, Homo sapien
gtgtacttggccaagatctcctggg

SEQ ID NO: 305603 - DNA, 25 bp, Homo sapien
aagggccacaggcaggtgtatggct

SEQ ID NO: 305604 - DNA, 25 bp, Homo sapien
catatgctcggagtcagggctgaga

SEQ ID NO: 305605 - DNA, 25 bp, Homo sapien
ccaaactcatcgtagtagaactctg

SEQ ID NO: 305606 - DNA, 25 bp, Homo sapien
cttgtacacacggaaaccaaactca

SEQ ID NO: 305607 - DNA, 25 bp, Homo sapien
ggaaaccaaactcatcgtagtagaa

SEQ ID NO: 305608 - DNA, 25 bp, Homo sapien
gtacacacggaaaccaaactcatcg

SEQ ID NO: 305609 - DNA, 25 bp, Homo sapien
ccaagcctccgtcttcaggagggtc

SEQ ID NO: 305610 - DNA, 25 bp, Homo sapien
aaagcattctctactacgtgttctc

SEQ ID NO: 305611 - DNA, 25 bp, Homo sapien
tctctactacgtgttctccaagcag

SEQ ID NO: 305612 - DNA, 25 bp, Homo sapien
tgagcttcatggctctaggccagct

SEQ ID NO: 305613 - DNA, 25 bp, Homo sapien
cacatcgtggttatgggtgaactcc

SEQ ID NO: 305614 - DNA, 25 bp, Homo sapien
catgccatgtgggatgccggccagc

SEQ ID NO: 305615 - DNA, 25 bp, Homo sapien
ttatgggtgaactccaggtgggcct

SEQ ID NO: 305616 - DNA, 25 bp, Homo sapien
ggagacggcaatcttgtcccaggtg

SEQ ID NO: 305617 - DNA, 25 bp, Homo sapien
ggagctgttcttcacaatctcgcgg

SEQ ID NO: 305618 - DNA, 25 bp, Homo sapien
cagcgatggtctcatcgttggagct

SEQ ID NO: 305619 - DNA, 25 bp, Homo sapien
tctcgcggtaggacagctcagagtt

SEQ ID NO: 305620 - DNA, 25 bp, Homo sapien
tgcttggcagcgatggtctcatcgt

SEQ ID NO: 305621 - DNA, 25 bp, Homo sapien
ggcacccacaataacaagaccttgt

SEQ ID NO: 305622 - DNA, 25 bp, Homo sapien
atcggcacccacaataacaagacct

SEQ ID NO: 305623 - DNA, 25 bp, Homo sapien
gccatcggcacccacaataacaaga

SEQ ID NO: 305624 - DNA, 25 bp, Homo sapien
gcagccatcggcacccacaataaca

SEQ ID NO: 305625 - DNA, 25 bp, Homo sapien
gatgctacccatgctggcgaagcag

SEQ ID NO: 305626 - DNA, 25 bp, Homo sapien
tgggcatggtgcggagcaggtcctt

SEQ ID NO: 305627 - DNA, 25 bp, Homo sapien
gcgaagcaggcgttgctgggcatgg

SEQ ID NO: 305628 - DNA, 25 bp, Homo sapien
cagtagccgatctctgggtagagcc

SEQ ID NO: 305629 - DNA, 25 bp, Homo sapien
cagacatcatccagaaggcgtcctc

SEQ ID NO: 305630 - DNA, 25 bp, Homo sapien
agacatcatccagaaggcgtcctcc

SEQ ID NO: 305631 - DNA, 25 bp, Homo sapien
agcttgtccaggcgaggcaggtact

SEQ ID NO: 305632 - DNA, 25 bp, Homo sapien
ggtactggacaatgaggtggcgcag

SEQ ID NO: 305633 - DNA, 25 bp, Homo sapien
gcagcttgtccaggcgaggcaggta

SEQ ID NO: 305634 - DNA, 25 bp, Homo sapien
caggtactggacaatgaggtggcgc

SEQ ID NO: 305635 - DNA, 25 bp, Homo sapien
catgcccagcgtgagctggaacagc

SEQ ID NO: 305636 - DNA, 25 bp, Homo sapien
aaacaggtcccagatgcgcaggagc

SEQ ID NO: 305637 - DNA, 25 bp, Homo sapien
caggagcagcttgatgtccaccacg

SEQ ID NO: 305638 - DNA, 25 bp, Homo sapien
gccgtgaggaaccagtgcagtgtga

SEQ ID NO: 305639 - DNA, 25 bp, Homo sapien
ggaggccgagttctctgactggatc

SEQ ID NO: 305640 - DNA, 25 bp, Homo sapien
ttgcggcgctgagtctccacggcca

SEQ ID NO: 305641 - DNA, 25 bp, Homo sapien
tatccgatagcgtgttgaagatgga

SEQ ID NO: 305642 - DNA, 25 bp, Homo sapien
cgcgtcctccatctgcgacgggata

SEQ ID NO: 305643 - DNA, 25 bp, Homo sapien
ctggtctgcaatgagataggccagg

SEQ ID NO: 305644 - DNA, 25 bp, Homo sapien
ccaaaccgtgccaggatcagaacct

SEQ ID NO: 305645 - DNA, 25 bp, Homo sapien
atctgaaatagcctctgacgctggc

SEQ ID NO: 305646 - DNA, 25 bp, Homo sapien
tctgaacttcaaggtgacccctcct

SEQ ID NO: 305647 - DNA, 25 bp, Homo sapien
tgaggaggcctggatcaccccacag

SEQ ID NO: 305648 - DNA, 25 bp, Homo sapien
tccgctgggtcctgcggcgaacaac

SEQ ID NO: 305649 - DNA, 25 bp, Homo sapien
ctccgctgggtcctgcggcgaacaa

SEQ ID NO: 305650 - DNA, 25 bp, Homo sapien
agtgatggtggacttcctccgctgg

SEQ ID NO: 305651 - DNA, 25 bp, Homo sapien
atggtggacttcctccgctgggtcc

SEQ ID NO: 305652 - DNA, 25 bp, Homo sapien
agctccacgtccacatgagcgtgag

SEQ ID NO: 305653 - DNA, 25 bp, Homo sapien
acactgcctggcactcgcagagctc

SEQ ID NO: 305654 - DNA, 25 bp, Homo sapien
tccacatgagcgtgaggacagactc

SEQ ID NO: 305655 - DNA, 25 bp, Homo sapien
gtgaggacagactcccgcatgccca

SEQ ID NO: 305656 - DNA, 25 bp, Homo sapien
tgttcttggccttgagtgcctccag

SEQ ID NO: 305657 - DNA, 25 bp, Homo sapien
gccaccagttccgtctgcttgatgt

SEQ ID NO: 305658 - DNA, 25 bp, Homo sapien
ctgtgcactggaagtggcgtgccac

SEQ ID NO: 305659 - DNA, 25 bp, Homo sapien
gtgccacgcgcaggatggcttcccg

SEQ ID NO: 305660 - DNA, 25 bp, Homo sapien
agttagggccgtgtttggtagcagc

SEQ ID NO: 305661 - DNA, 25 bp, Homo sapien
gagttagggccgtgtttggtagcag

SEQ ID NO: 305662 - DNA, 25 bp, Homo sapien
gttagggccgtgtttggtagcagcc

SEQ ID NO: 305663 - DNA, 25 bp, Homo sapien
ggagttagggccgtgtttggtagca

SEQ ID NO: 305664 - DNA, 25 bp, Homo sapien
tcgtggtcccgctggtggctctcca

SEQ ID NO: 305665 - DNA, 25 bp, Homo sapien
gatgatgtcgttcttgcggaagccc

SEQ ID NO: 305666 - DNA, 25 bp, Homo sapien
ccatgctatagtctggagtcagctc

SEQ ID NO: 305667 - DNA, 25 bp, Homo sapien
tgagcacgccacgtagttctcgtgg

SEQ ID NO: 305668 - DNA, 25 bp, Homo sapien
caggaaccaaagctgggtgccctgg

SEQ ID NO: 305669 - DNA, 25 bp, Homo sapien
cacagcctgaggacctggtagtcca

SEQ ID NO: 305670 - DNA, 25 bp, Homo sapien
atcttcacaagagaagctcttggca

SEQ ID NO: 305671 - DNA, 25 bp, Homo sapien
ccgatatgactcctcagcaactagg

SEQ ID NO: 305672 - DNA, 25 bp, Homo sapien
agtgctcgtccttctgagacacgat

SEQ ID NO: 305673 - DNA, 25 bp, Homo sapien
cagcagtgctcgtccttctgagaca

SEQ ID NO: 305674 - DNA, 25 bp, Homo sapien
acccagcagtgctcgtccttctgag

SEQ ID NO: 305675 - DNA, 25 bp, Homo sapien
gcagtgctcgtccttctgagacacg

SEQ ID NO: 305676 - DNA, 25 bp, Homo sapien
ctgtaaggagcaaccacgagggccg

SEQ ID NO: 305677 - DNA, 25 bp, Homo sapien
ccagctcaagagcagaccaaggacc

SEQ ID NO: 305678 - DNA, 25 bp, Homo sapien
ggagcaaccacgagggccgaggaca

SEQ ID NO: 305679 - DNA, 25 bp, Homo sapien
agcaaccacgagggccgaggacaga

SEQ ID NO: 305680 - DNA, 25 bp, Homo sapien
caggacttccacgaacttggctgga

SEQ ID NO: 305681 - DNA, 25 bp, Homo sapien
tcatccaggacttccacgaacttgg

SEQ ID NO: 305682 - DNA, 25 bp, Homo sapien
ttgctgcgctcatccaggacttcca

SEQ ID NO: 305683 - DNA, 25 bp, Homo sapien
ttccacgaacttggctggaaaccag

SEQ ID NO: 305684 - DNA, 25 bp, Homo sapien
ctgagaaagccctgcctgacgcctg

SEQ ID NO: 305685 - DNA, 25 bp, Homo sapien
gactcgctaggcacgcaggccctgg

SEQ ID NO: 305686 - DNA, 25 bp, Homo sapien
tgctacaggccaggactcgctaggc

SEQ ID NO: 305687 - DNA, 25 bp, Homo sapien
gatgggagggatgggtctgagaaag

SEQ ID NO: 305688 - DNA, 25 bp, Homo sapien
tccatgttcgaacagggccttaagg

SEQ ID NO: 305689 - DNA, 25 bp, Homo sapien
tcctcgataaacagccaggggtggc

SEQ ID NO: 305690 - DNA, 25 bp, Homo sapien
gcagagggtccctcgcacgaggtct

SEQ ID NO: 305691 - DNA, 25 bp, Homo sapien
caggcgcccccaagcagggatggct

SEQ ID NO: 305692 - DNA, 25 bp, Homo sapien
cagcacacggtgtgagtgcagggac

SEQ ID NO: 305693 - DNA, 25 bp, Homo sapien
cctaagatgggtactagggggcaca

SEQ ID NO: 305694 - DNA, 25 bp, Homo sapien
gcaggaaggacctaagatgggtact

SEQ ID NO: 305695 - DNA, 25 bp, Homo sapien
cttggggccgactgggcacctgtca

SEQ ID NO: 305696 - DNA, 25 bp, Homo sapien
ctgaaggtcttacagagcaccagac

SEQ ID NO: 305697 - DNA, 25 bp, Homo sapien
acagagcaccagacgggaatacacg

SEQ ID NO: 305698 - DNA, 25 bp, Homo sapien
gggaatacacggaggcaaagtctct

SEQ ID NO: 305699 - DNA, 25 bp, Homo sapien
ggcaaagtctctctcgacctcccgg

SEQ ID NO: 305700 - DNA, 25 bp, Homo sapien
tcccactgctggtgaccccaccaga

SEQ ID NO: 305701 - DNA, 25 bp, Homo sapien
ctggggtgccggggctgggtcaggc

SEQ ID NO: 305702 - DNA, 25 bp, Homo sapien
tgctggtgaccccaccagaagaacc

SEQ ID NO: 305703 - DNA, 25 bp, Homo sapien
gccccgccctcccactgctggtgac

SEQ ID NO: 305704 - DNA, 25 bp, Homo sapien
ctcctccggggtcaggactttgcca

SEQ ID NO: 305705 - DNA, 25 bp, Homo sapien
ctgggaacggcaccgtcagctgtca

SEQ ID NO: 305706 - DNA, 25 bp, Homo sapien
ccagagaggtctctagggtctggca

SEQ ID NO: 305707 - DNA, 25 bp, Homo sapien
cccagagaggtctctagggtctggc

SEQ ID NO: 305708 - DNA, 25 bp, Homo sapien
aacggcaccgtcagctgtcactcag

SEQ ID NO: 305709 - DNA, 25 bp, Homo sapien
ctgcatcgtgggtcacgttcacaga

SEQ ID NO: 305710 - DNA, 25 bp, Homo sapien
cgcagatcagtgagcggagcttcac

SEQ ID NO: 305711 - DNA, 25 bp, Homo sapien
ttgagccccacgcagatcagtgagc

SEQ ID NO: 305712 - DNA, 25 bp, Homo sapien
gagcttcacatccatttgtgcatgc

SEQ ID NO: 305713 - DNA, 25 bp, Homo sapien
taaggaccccccctgatgctgggct

SEQ ID NO: 305714 - DNA, 25 bp, Homo sapien
tggaagcctctgacctgtctctcag

SEQ ID NO: 305715 - DNA, 25 bp, Homo sapien
tccctgtaaggaccccccctgatgc

SEQ ID NO: 305716 - DNA, 25 bp, Homo sapien
gtggaagcctctgacctgtctctca

SEQ ID NO: 305717 - DNA, 25 bp, Homo sapien
cacttctccacggtgggcaggctgg

SEQ ID NO: 305718 - DNA, 25 bp, Homo sapien
acttctccacggtgggcaggctgga

SEQ ID NO: 305719 - DNA, 25 bp, Homo sapien
caggaaggaccagggctggtaccac

SEQ ID NO: 305720 - DNA, 25 bp, Homo sapien
taccacttctccacggtgggcaggc

SEQ ID NO: 305721 - DNA, 25 bp, Homo sapien
acacttgatctggacccagcccggg

SEQ ID NO: 305722 - DNA, 25 bp, Homo sapien
tcacacttgatctggacccagcccg

SEQ ID NO: 305723 - DNA, 25 bp, Homo sapien
cacacttgatctggacccagcccgg

SEQ ID NO: 305724 - DNA, 25 bp, Homo sapien
ggagaggctgaaggcaaagcagcag

SEQ ID NO: 305725 - DNA, 25 bp, Homo sapien
cttcgcagggagctcccagtcctgg

SEQ ID NO: 305726 - DNA, 25 bp, Homo sapien
ctctctcttcgcagggagctcccag

SEQ ID NO: 305727 - DNA, 25 bp, Homo sapien
gctgaaggcaaagcagcagaggact

SEQ ID NO: 305728 - DNA, 25 bp, Homo sapien
cccgcgaacggtttgggcagctcca

SEQ ID NO: 305729 - DNA, 25 bp, Homo sapien
gcacttcgggttcccaccttagcca

SEQ ID NO: 305730 - DNA, 25 bp, Homo sapien
gctccatcagtgcaggccctacgag

SEQ ID NO: 305731 - DNA, 25 bp, Homo sapien
gggtagttcctaaccgctgacacca

SEQ ID NO: 305732 - DNA, 25 bp, Homo sapien
tggtgcttcaccagcatgtcccgga

SEQ ID NO: 305733 - DNA, 25 bp, Homo sapien
cagcatgtcccggacgccctccttc

SEQ ID NO: 305734 - DNA, 25 bp, Homo sapien
gcatgtcccggacgccctccttcag

SEQ ID NO: 305735 - DNA, 25 bp, Homo sapien
ggtggtgcttcaccagcatgtcccg

SEQ ID NO: 305736 - DNA, 25 bp, Homo sapien
cgcaggcccgaggttgggctgggga

SEQ ID NO: 305737 - DNA, 25 bp, Homo sapien
acgcaggcccgaggttgggctgggg

SEQ ID NO: 305738 - DNA, 25 bp, Homo sapien
tgatattgatatcccgcggccccgg

SEQ ID NO: 305739 - DNA, 25 bp, Homo sapien
tagagcatccctaaggaccctggtg

SEQ ID NO: 305740 - DNA, 25 bp, Homo sapien
ctgtggtttggcctagagcatccct

SEQ ID NO: 305741 - DNA, 25 bp, Homo sapien
ctcacaaggtttttggtacaaactg

SEQ ID NO: 305742 - DNA, 25 bp, Homo sapien
atttataaaccaaagaggccaggag

SEQ ID NO: 305743 - DNA, 25 bp, Homo sapien
tttataaaccaaagaggccaggagc

SEQ ID NO: 305744 - DNA, 25 bp, Homo sapien
tatttataaaccaaagaggccagga

SEQ ID NO: 305745 - DNA, 25 bp, Homo sapien
gcagaaccttggacctgaatacagc

SEQ ID NO: 305746 - DNA, 25 bp, Homo sapien
aaggaagggcagaaccttggacctg

SEQ ID NO: 305747 - DNA, 25 bp, Homo sapien
atctgaggggccacgcagtgccttc

SEQ ID NO: 305748 - DNA, 25 bp, Homo sapien
tctagaccactcaaggaagggcaga

SEQ ID NO: 305749 - DNA, 25 bp, Homo sapien
aaccatttagtggttggtggcaaca

SEQ ID NO: 305750 - DNA, 25 bp, Homo sapien
caatttggctaaggtaggtgaagcc

SEQ ID NO: 305751 - DNA, 25 bp, Homo sapien
ccaggcgggaggcttctcttctgac

SEQ ID NO: 305752 - DNA, 25 bp, Homo sapien
ttgacatgtaggtaccctgccacgg

SEQ ID NO: 305753 - DNA, 25 bp, Homo sapien
tagctctctggctcaagacggggtg

SEQ ID NO: 305754 - DNA, 25 bp, Homo sapien
agctgtcgtcaggtggtcccgtgct

SEQ ID NO: 305755 - DNA, 25 bp, Homo sapien
gacttcctcgatggccatgatttgc

SEQ ID NO: 305756 - DNA, 25 bp, Homo sapien
tccacagacttcctcgatggccatg

SEQ ID NO: 305757 - DNA, 25 bp, Homo sapien
cagaggtattaggtccattcacagt

SEQ ID NO: 305758 - DNA, 25 bp, Homo sapien
tcaccccataaggaaactgtaccca

SEQ ID NO: 305759 - DNA, 25 bp, Homo sapien
gtgtggattcaccacattctcttca

SEQ ID NO: 305760 - DNA, 25 bp, Homo sapien
gatttgcctgtcgtggggacctcac

SEQ ID NO: 305761 - DNA, 25 bp, Homo sapien
gtctgtaattctcaagccctaggga

SEQ ID NO: 305762 - DNA, 25 bp, Homo sapien
tgccgccaaagggacactgaaaagt

SEQ ID NO: 305763 - DNA, 25 bp, Homo sapien
aactctagcttctaagggatggcag

SEQ ID NO: 305764 - DNA, 25 bp, Homo sapien
tgaggcgcatctctcaccagtgcag

SEQ ID NO: 305765 - DNA, 25 bp, Homo sapien
cagtccagagtagcctctaggtagt

SEQ ID NO: 305766 - DNA, 25 bp, Homo sapien
tctaggtagtcaggtttcagccatt

SEQ ID NO: 305767 - DNA, 25 bp, Homo sapien
acatctgtgcgtgctacataaggca

SEQ ID NO: 305768 - DNA, 25 bp, Homo sapien
tagctgggatgtgtaggcatctacc

SEQ ID NO: 305769 - DNA, 25 bp, Homo sapien
cgcttagctttcaagtgtgaggaac

SEQ ID NO: 305770 - DNA, 25 bp, Homo sapien
tggaacagattgatcagcatagagg

SEQ ID NO: 305771 - DNA, 25 bp, Homo sapien
tgtgtctctatactgcatgcctcgc

SEQ ID NO: 305772 - DNA, 25 bp, Homo sapien
gggagaagaatatggtggcacatct

SEQ ID NO: 305773 - DNA, 25 bp, Homo sapien
ccctctgcccggccagccgccccgt

SEQ ID NO: 305774 - DNA, 25 bp, Homo sapien
tctgcccggccagccgccccgtccg

SEQ ID NO: 305775 - DNA, 25 bp, Homo sapien
gtcagccccccgcccggccagccgc

SEQ ID NO: 305776 - DNA, 25 bp, Homo sapien
agcccctctgcccggccagccgccc

SEQ ID NO: 305777 - DNA, 25 bp, Homo sapien
ccagccgccctgtccgggagggagg

SEQ ID NO: 305778 - DNA, 25 bp, Homo sapien
cccgcccggccagccgccctgtccg

SEQ ID NO: 305779 - DNA, 25 bp, Homo sapien
cggccagccgccctgtccgggaggg

SEQ ID NO: 305780 - DNA, 25 bp, Homo sapien
cccggccagccgccctgtccgggag

SEQ ID NO: 305781 - DNA, 25 bp, Homo sapien
agaccctctgcctggcaaccacccc

SEQ ID NO: 305782 - DNA, 25 bp, Homo sapien
gaggagaccctctgcctggcaacca

SEQ ID NO: 305783 - DNA, 25 bp, Homo sapien
tgcctggcaaccaccccgtctgaga

SEQ ID NO: 305784 - DNA, 25 bp, Homo sapien
tctgcctggcaaccaccccgtctga

SEQ ID NO: 305785 - DNA, 25 bp, Homo sapien
agcgtctccgcccggccgccatccc

SEQ ID NO: 305786 - DNA, 25 bp, Homo sapien
ggagcgtctccgcccggccgccatc

SEQ ID NO: 305787 - DNA, 25 bp, Homo sapien
tccgcccggccgccatcccatctag

SEQ ID NO: 305788 - DNA, 25 bp, Homo sapien
cgcccggccgccatcccatctagga

SEQ ID NO: 305789 - DNA, 25 bp, Homo sapien
tgcatctggcctaaatcaacttctt

SEQ ID NO: 305790 - DNA, 25 bp, Homo sapien
tgtttactgcataccaccaaagact

SEQ ID NO: 305791 - DNA, 25 bp, Homo sapien
agaaacttcggtgccccttctgctg

SEQ ID NO: 305792 - DNA, 25 bp, Homo sapien
tctcattgttagaagtatggcccct

SEQ ID NO: 305793 - DNA, 25 bp, Homo sapien
gagcttgccttctttgtgatcagcc

SEQ ID NO: 305794 - DNA, 25 bp, Homo sapien
tgtgctacccctctgtgttgctgaa

SEQ ID NO: 305795 - DNA, 25 bp, Homo sapien
ccttctacaaactggtggagcttgc

SEQ ID NO: 305796 - DNA, 25 bp, Homo sapien
gatgttggttgaaaccatcccgaac

SEQ ID NO: 305797 - DNA, 25 bp, Homo sapien
gatcatatagcgtggactccctgtg

SEQ ID NO: 305798 - DNA, 25 bp, Homo sapien
gcaccacggtattccagctgggcca

SEQ ID NO: 305799 - DNA, 25 bp, Homo sapien
ccgtgtttgcaccacggtattccag

SEQ ID NO: 305800 - DNA, 25 bp, Homo sapien
gtgaaccgtgtttgcaccacggtat

SEQ ID NO: 305801 - DNA, 25 bp, Homo sapien
gtttgcaccacggtattccagctgg

SEQ ID NO: 305802 - DNA, 25 bp, Homo sapien
tgcagaatctcagacgccacctcag

SEQ ID NO: 305803 - DNA, 25 bp, Homo sapien
agacgccacctcagacctgcggaat

SEQ ID NO: 305804 - DNA, 25 bp, Homo sapien
gacctgcggaatcacaatctgtttt

SEQ ID NO: 305805 - DNA, 25 bp, Homo sapien
cacctcagacctgcggaatcacaat

SEQ ID NO: 305806 - DNA, 25 bp, Homo sapien
ttctatttagagcacgtttccctga

SEQ ID NO: 305807 - DNA, 25 bp, Homo sapien
gagcaccttagctcgcatatcaggg

SEQ ID NO: 305808 - DNA, 25 bp, Homo sapien
agttcaaggctagtcgggcatcatg

SEQ ID NO: 305809 - DNA, 25 bp, Homo sapien
acttttgggcctgttatggtggctc

SEQ ID NO: 305810 - DNA, 25 bp, Homo sapien
tcatggcaaagtcgcataaatggct

SEQ ID NO: 305811 - DNA, 25 bp, Homo sapien
aggtctggggcattaatctcatggc

SEQ ID NO: 305812 - DNA, 25 bp, Homo sapien
cattaatctcatggcaaagtcgcat

SEQ ID NO: 305813 - DNA, 25 bp, Homo sapien
caaagtcgcataaatggctgatggt

SEQ ID NO: 305814 - DNA, 25 bp, Homo sapien
tactcagaatgactcacatcttagg

SEQ ID NO: 305815 - DNA, 25 bp, Homo sapien
tggagataaaaaccagtgcctgggt

SEQ ID NO: 305816 - DNA, 25 bp, Homo sapien
tggagtcagaatgcgacaggcctca

SEQ ID NO: 305817 - DNA, 25 bp, Homo sapien
tgcaggattctgtcactactcagaa

SEQ ID NO: 305818 - DNA, 25 bp, Homo sapien
tccaggtatttctgccagccattcc

SEQ ID NO: 305819 - DNA, 25 bp, Homo sapien
tctgccagccattcctggtctggtt

SEQ ID NO: 305820 - DNA, 25 bp, Homo sapien
aggtatttctgccagccattcctgg

SEQ ID NO: 305821 - DNA, 25 bp, Homo sapien
ctgccagccattcctggtctggttc

SEQ ID NO: 305822 - DNA, 25 bp, Homo sapien
aggcagctgccatcgtgcccaacta

SEQ ID NO: 305823 - DNA, 25 bp, Homo sapien
atgtattaattatggagtcttgccc

SEQ ID NO: 305824 - DNA, 25 bp, Homo sapien
atgtatgtattaattatggagtctt

SEQ ID NO: 305825 - DNA, 25 bp, Homo sapien
gcagctgccatcgtgcccaactaat

SEQ ID NO: 305826 - DNA, 25 bp, Homo sapien
gtatagggcagagagacttgtacac

SEQ ID NO: 305827 - DNA, 25 bp, Homo sapien
ggtagggatcaccatatacccaggt

SEQ ID NO: 305828 - DNA, 25 bp, Homo sapien
taagtgaggttcttttactccctgc

SEQ ID NO: 305829 - DNA, 25 bp, Homo sapien
tcacatgaccccacttagctgcaag

SEQ ID NO: 305830 - DNA, 25 bp, Homo sapien
taagacatgattcagggtcccaggg

SEQ ID NO: 305831 - DNA, 25 bp, Homo sapien
tcagctctttcctaggtgatatgca

SEQ ID NO: 305832 - DNA, 25 bp, Homo sapien
cttctcctttggacttgtgcatata

SEQ ID NO: 305833 - DNA, 25 bp, Homo sapien
ttctcctttggacttgtgcatatat

SEQ ID NO: 305834 - DNA, 25 bp, Homo sapien
tcctaggtgatatgcaattaaactg

SEQ ID NO: 305835 - DNA, 25 bp, Homo sapien
taggtagtaggagaaacagtagaac

SEQ ID NO: 305836 - DNA, 25 bp, Homo sapien
caggattaatgttacccgccaggga

SEQ ID NO: 305837 - DNA, 25 bp, Homo sapien
gattatgaaaggcttcagggccagg

SEQ ID NO: 305838 - DNA, 25 bp, Homo sapien
gagctacggcactcagcctcagttg

SEQ ID NO: 305839 - DNA, 25 bp, Homo sapien
ttttgtagagaagagaagagagtct

SEQ ID NO: 305840 - DNA, 25 bp, Homo sapien
gcccagcctctgcttggctaattta

SEQ ID NO: 305841 - DNA, 25 bp, Homo sapien
tattgcctagactagtctcaaattc

SEQ ID NO: 305842 - DNA, 25 bp, Homo sapien
gagaagagaagagagtcttgctata

SEQ ID NO: 305843 - DNA, 25 bp, Homo sapien
cgcccgccctttagtccgccgatca

SEQ ID NO: 305844 - DNA, 25 bp, Homo sapien
cgccgtcacttctccagcggacagt

SEQ ID NO: 305845 - DNA, 25 bp, Homo sapien
acgaccccgatcaggcctctgattg

SEQ ID NO: 305846 - DNA, 25 bp, Homo sapien
tctgattggctagcgccgccgtcac

SEQ ID NO: 305847 - DNA, 25 bp, Homo sapien
tcagagaaacaaggcgacgggcctc

SEQ ID NO: 305848 - DNA, 25 bp, Homo sapien
tgaaatgatcgacttcggagcccca

SEQ ID NO: 305849 - DNA, 25 bp, Homo sapien
cctgggcattgaccccttggcaact

SEQ ID NO: 305850 - DNA, 25 bp, Homo sapien
gcagtaattactcgcgcctgggcat

SEQ ID NO: 305851 - DNA, 25 bp, Homo sapien
gccctcagcccggaataggttcaga

SEQ ID NO: 305852 - DNA, 25 bp, Homo sapien
cactacacgaatgggtgcgggcaag

SEQ ID NO: 305853 - DNA, 25 bp, Homo sapien
ttcacttgcggagcgtgtggcctct

SEQ ID NO: 305854 - DNA, 25 bp, Homo sapien
gttcagagaggtgcccgggttcact

SEQ ID NO: 305855 - DNA, 25 bp, Homo sapien
cttgttgctctctcccctttcgcct

SEQ ID NO: 305856 - DNA, 25 bp, Homo sapien
tgctctctcccctttcgcctttctc

SEQ ID NO: 305857 - DNA, 25 bp, Homo sapien
tctcctttctccctgttgcagtcat

SEQ ID NO: 305858 - DNA, 25 bp, Homo sapien
gttgctctctcccctttcgcctttc

SEQ ID NO: 305859 - DNA, 25 bp, Homo sapien
tatcatccgtcatggcctttatgcg

SEQ ID NO: 305860 - DNA, 25 bp, Homo sapien
gccctgacccaagacacctatgaaa

SEQ ID NO: 305861 - DNA, 25 bp, Homo sapien
tggtcctcactgttaatgccaggtg

SEQ ID NO: 305862 - DNA, 25 bp, Homo sapien
ggttctcaaacagagctatcatccg

SEQ ID NO: 305863 - DNA, 25 bp, Homo sapien
ctgtgtgccccatcccgggaacagg

SEQ ID NO: 305864 - DNA, 25 bp, Homo sapien
ggctgcacgggcccgcagacagcat

SEQ ID NO: 305865 - DNA, 25 bp, Homo sapien
cacagcggagccctggggcgctccc

SEQ ID NO: 305866 - DNA, 25 bp, Homo sapien
acgggcccgcgtgcagagagcccac

SEQ ID NO: 305867 - DNA, 25 bp, Homo sapien
caggccactgggaactacgttgaac

SEQ ID NO: 305868 - DNA, 25 bp, Homo sapien
tgcttcctggaagcgacatccagtt

SEQ ID NO: 305869 - DNA, 25 bp, Homo sapien
ctgctgaccatttggcaggccactg

SEQ ID NO: 305870 - DNA, 25 bp, Homo sapien
gacatccagttacaccttgctgctg

SEQ ID NO: 305871 - DNA, 25 bp, Homo sapien
ccatcaagagagtgtaaacagctgg

SEQ ID NO: 305872 - DNA, 25 bp, Homo sapien
tactgcttcctaccaacttgtgtgc

SEQ ID NO: 305873 - DNA, 25 bp, Homo sapien
cattcttttggtcagactagggtgc

SEQ ID NO: 305874 - DNA, 25 bp, Homo sapien
cagtttcaacctgccggactcaagg

SEQ ID NO: 305875 - DNA, 25 bp, Homo sapien
aaccagagaagccagtactgaggct

SEQ ID NO: 305876 - DNA, 25 bp, Homo sapien
gaggctcagtccaaatttaacagac

SEQ ID NO: 305877 - DNA, 25 bp, Homo sapien
ccagattccaagagctgaagaacct

SEQ ID NO: 305878 - DNA, 25 bp, Homo sapien
gggtcacgcaattacagaggcaaag

SEQ ID NO: 305879 - DNA, 25 bp, Homo sapien
gaaaacgcgaagcttgtcaccagtg

SEQ ID NO: 305880 - DNA, 25 bp, Homo sapien
gaagcatgttaggactggctccagc

SEQ ID NO: 305881 - DNA, 25 bp, Homo sapien
gattatgttatagagcccaccagtg

SEQ ID NO: 305882 - DNA, 25 bp, Homo sapien
gaagactactgatggtacctctggg

SEQ ID NO: 305883 - DNA, 25 bp, Homo sapien
gctgctgcttgccttgcgtgaagat

SEQ ID NO: 305884 - DNA, 25 bp, Homo sapien
acttgggattgtctcgtgtgcttac

SEQ ID NO: 305885 - DNA, 25 bp, Homo sapien
tagacacattaacattcggaggcag

SEQ ID NO: 305886 - DNA, 25 bp, Homo sapien
cattaacctcttcagtcccaggctg

SEQ ID NO: 305887 - DNA, 25 bp, Homo sapien
ggagcgcaagccccgcagttgggaa

SEQ ID NO: 305888 - DNA, 25 bp, Homo sapien
tatcggggccatcagaggtgttgct

SEQ ID NO: 305889 - DNA, 25 bp, Homo sapien
ctgctcccacaaccgagctgagctc

SEQ ID NO: 305890 - DNA, 25 bp, Homo sapien
ttcctccgtagcctggcagccgctg

SEQ ID NO: 305891 - DNA, 25 bp, Homo sapien
cacgtatgcggctgtgatgaccaca

SEQ ID NO: 305892 - DNA, 25 bp, Homo sapien
gcttggacttcttcacgaccgcgaa

SEQ ID NO: 305893 - DNA, 25 bp, Homo sapien
tttgcggaacgtctcacagagcacg

SEQ ID NO: 305894 - DNA, 25 bp, Homo sapien
tccatggccgtgatgagggtgcaca

SEQ ID NO: 305895 - DNA, 25 bp, Homo sapien
catcgcaccagtgagaggcgggaaa

SEQ ID NO: 305896 - DNA, 25 bp, Homo sapien
catctctcccggtggcgtgttgtgg

SEQ ID NO: 305897 - DNA, 25 bp, Homo sapien
agcaacgtgtgagccccatggaatg

SEQ ID NO: 305898 - DNA, 25 bp, Homo sapien
gctcacagatatagtgcaaccggtt

SEQ ID NO: 305899 - DNA, 25 bp, Homo sapien
gaacacacggacactcaagctggat

SEQ ID NO: 305900 - DNA, 25 bp, Homo sapien
ttagtgactgagcaaatgtgccccg

SEQ ID NO: 305901 - DNA, 25 bp, Homo sapien
taagcagacctcctagcaaactggg

SEQ ID NO: 305902 - DNA, 25 bp, Homo sapien
tagaatgacccctgcacatgcagaa

SEQ ID NO: 305903 - DNA, 25 bp, Homo sapien
cttctgttagaagattactaatact

SEQ ID NO: 305904 - DNA, 25 bp, Homo sapien
tctaaagatcctggacagaacttct

SEQ ID NO: 305905 - DNA, 25 bp, Homo sapien
gacagaacttctgttagaagattac

SEQ ID NO: 305906 - DNA, 25 bp, Homo sapien
ctctatactctaaagatcctggaca

SEQ ID NO: 305907 - DNA, 25 bp, Homo sapien
ggacggcctgtgtcccttgcctctg

SEQ ID NO: 305908 - DNA, 25 bp, Homo sapien
tagtaggacggcctgtgtcccttgc

SEQ ID NO: 305909 - DNA, 25 bp, Homo sapien
gcagtagtaggacggcctgtgtccc

SEQ ID NO: 305910 - DNA, 25 bp, Homo sapien
agaagcagtagtaggacggcctgtg

SEQ ID NO: 305911 - DNA, 25 bp, Homo sapien
gggtagcgctgactttgttgatttc

SEQ ID NO: 305912 - DNA, 25 bp, Homo sapien
accttgtgtagccaatggtgtggca

SEQ ID NO: 305913 - DNA, 25 bp, Homo sapien
actgtaaccttgtgtagccaatggt

SEQ ID NO: 305914 - DNA, 25 bp, Homo sapien
caggggtagcgctgactttgttgat

SEQ ID NO: 305915 - DNA, 25 bp, Homo sapien
taacaggacaactggctatgccact

SEQ ID NO: 305916 - DNA, 25 bp, Homo sapien
tgaccacgaaagaagcctgggctcc

SEQ ID NO: 305917 - DNA, 25 bp, Homo sapien
caaatgggcagaaccaaatgaggca

SEQ ID NO: 305918 - DNA, 25 bp, Homo sapien
cacatgtgatggctgttaacaggac

SEQ ID NO: 305919 - DNA, 25 bp, Homo sapien
tagtagccaggttacagctaggtca

SEQ ID NO: 305920 - DNA, 25 bp, Homo sapien
cagctaggtcatcttgactgtacca

SEQ ID NO: 305921 - DNA, 25 bp, Homo sapien
ttctccttggtcctctagtagccag

SEQ ID NO: 305922 - DNA, 25 bp, Homo sapien
ggtcctctagtagccaggttacagc

SEQ ID NO: 305923 - DNA, 25 bp, Homo sapien
gatggttgcggggtctgtgtggata

SEQ ID NO: 305924 - DNA, 25 bp, Homo sapien
aggtggggggatcagccccctgcct

SEQ ID NO: 305925 - DNA, 25 bp, Homo sapien
gaggtgaggggcacttctgccgggc

SEQ ID NO: 305926 - DNA, 25 bp, Homo sapien
gtgaggggcacttctgccgggccgc

SEQ ID NO: 305927 - DNA, 25 bp, Homo sapien
tcagacggtagtactgccacaagct

SEQ ID NO: 305928 - DNA, 25 bp, Homo sapien
gacccctgacccatgagaagaagtg

SEQ ID NO: 305929 - DNA, 25 bp, Homo sapien
aaactaacattagggctgtgccacg

SEQ ID NO: 305930 - DNA, 25 bp, Homo sapien
gctcagtgtggtccatcagacggta

SEQ ID NO: 305931 - DNA, 25 bp, Homo sapien
gggacaataacaatgcctcacttaa

SEQ ID NO: 305932 - DNA, 25 bp, Homo sapien
cctctcgccgagtggctgggtttac

SEQ ID NO: 305933 - DNA, 25 bp, Homo sapien
tcatcaatcgaactataaaacaggg

SEQ ID NO: 305934 - DNA, 25 bp, Homo sapien
cataatggaacgttgtagtaagacc

SEQ ID NO: 305935 - DNA, 25 bp, Homo sapien
aggccgagaaaataagattgcacca

SEQ ID NO: 305936 - DNA, 25 bp, Homo sapien
aagaactaagagtgaaagccacgtg

SEQ ID NO: 305937 - DNA, 25 bp, Homo sapien
gagggaagctaagaactaagagtga

SEQ ID NO: 305938 - DNA, 25 bp, Homo sapien
caaacgaaggatggatcagtactgc

SEQ ID NO: 305939 - DNA, 25 bp, Homo sapien
tgggaccacccgtatttcagtagga

SEQ ID NO: 305940 - DNA, 25 bp, Homo sapien
tttgatataacatgcatccttgggc

SEQ ID NO: 305941 - DNA, 25 bp, Homo sapien
gacaggctttttccaccggcatcat

SEQ ID NO: 305942 - DNA, 25 bp, Homo sapien
agggtaatacccacaacaactgtag

SEQ ID NO: 305943 - DNA, 25 bp, Homo sapien
tgtacctaggaaacaaaagtcatgg

SEQ ID NO: 305944 - DNA, 25 bp, Homo sapien
catggtagtcttggtaatctagcca

SEQ ID NO: 305945 - DNA, 25 bp, Homo sapien
gagaataacggaaaagatgtaccta

SEQ ID NO: 305946 - DNA, 25 bp, Homo sapien
gaacatgaaagaacctaaggctgta

SEQ ID NO: 305947 - DNA, 25 bp, Homo sapien
taactcacgcgtcgggaagagaaag

SEQ ID NO: 305948 - DNA, 25 bp, Homo sapien
cgacggggaacgcaaccgcctgcag

SEQ ID NO: 305949 - DNA, 25 bp, Homo sapien
tacggcctaactcacgcgtcgggaa

SEQ ID NO: 305950 - DNA, 25 bp, Homo sapien
ctgcagggccgcgtcgccaggaaac

SEQ ID NO: 305951 - DNA, 25 bp, Homo sapien
gacgtttgctacagcgggaaccagc

SEQ ID NO: 305952 - DNA, 25 bp, Homo sapien
ttgctacagcgggaaccagcttggg

SEQ ID NO: 305953 - DNA, 25 bp, Homo sapien
agaggccgcggacgtttgctacagc

SEQ ID NO: 305954 - DNA, 25 bp, Homo sapien
ccgcggacgtttgctacagcgggaa

SEQ ID NO: 305955 - DNA, 25 bp, Homo sapien
taattgctcgcaatagaggacaccc

SEQ ID NO: 305956 - DNA, 25 bp, Homo sapien
caggagcagccggtatagaagaaat

SEQ ID NO: 305957 - DNA, 25 bp, Homo sapien
cagatccgcctgcaaggaaggtgat

SEQ ID NO: 305958 - DNA, 25 bp, Homo sapien
gagcaagctctcacgcctaacagaa

SEQ ID NO: 305959 - DNA, 25 bp, Homo sapien
aattactgcggaacacatctctcag

SEQ ID NO: 305960 - DNA, 25 bp, Homo sapien
cctagactattaagggctgggtgca

SEQ ID NO: 305961 - DNA, 25 bp, Homo sapien
tccagggataccagttcaagattca

SEQ ID NO: 305962 - DNA, 25 bp, Homo sapien
tgtactcatcttatgctctagccca

SEQ ID NO: 305963 - DNA, 25 bp, Homo sapien
acataggttgcagtgtaatgggatc

SEQ ID NO: 305964 - DNA, 25 bp, Homo sapien
cataggttgcagtgtaatgggatca

SEQ ID NO: 305965 - DNA, 25 bp, Homo sapien
gatatacatcacagggttcattggg

SEQ ID NO: 305966 - DNA, 25 bp, Homo sapien
cttcagacaaaatcgttaatggcag

SEQ ID NO: 305967 - DNA, 25 bp, Homo sapien
gtgggatggacaactacatatctgt

SEQ ID NO: 305968 - DNA, 25 bp, Homo sapien
gggcatgaaggccttacttctttct

SEQ ID NO: 305969 - DNA, 25 bp, Homo sapien
gattccattggcttatgaggcactg

SEQ ID NO: 305970 - DNA, 25 bp, Homo sapien
taaggcgcagtaatctagaggtcat

SEQ ID NO: 305971 - DNA, 25 bp, Homo sapien
gaagactcgcttgaggacctgttaa

SEQ ID NO: 305972 - DNA, 25 bp, Homo sapien
tggcacttaaatggcaccctgataa

SEQ ID NO: 305973 - DNA, 25 bp, Homo sapien
gggtggacaaagatactataatctc

SEQ ID NO: 305974 - DNA, 25 bp, Homo sapien
taattacatgttttacagcagtaaa

SEQ ID NO: 305975 - DNA, 25 bp, Homo sapien
catgttttacagcagtaaaccttgg

SEQ ID NO: 305976 - DNA, 25 bp, Homo sapien
cagcagtaaaccttgggtggacaaa

SEQ ID NO: 305977 - DNA, 25 bp, Homo sapien
aaattcgggtctagactactggtag

SEQ ID NO: 305978 - DNA, 25 bp, Homo sapien
tagatcactatgtggctgactgtca

SEQ ID NO: 305979 - DNA, 25 bp, Homo sapien
gctttatgtccaacagccccaactg

SEQ ID NO: 305980 - DNA, 25 bp, Homo sapien
caaaggcttcccactgtacttgaaa

SEQ ID NO: 305981 - DNA, 25 bp, Homo sapien
caccagcaccccaagagtttacaga

SEQ ID NO: 305982 - DNA, 25 bp, Homo sapien
ttaagtcctagtccgagaaatgcag

SEQ ID NO: 305983 - DNA, 25 bp, Homo sapien
agcacttgctacagtgtgactcaga

SEQ ID NO: 305984 - DNA, 25 bp, Homo sapien
gcgaacatcttctcctagactgtca

SEQ ID NO: 305985 - DNA, 25 bp, Homo sapien
gcacgctcgtgcacacgtactcatg

SEQ ID NO: 305986 - DNA, 25 bp, Homo sapien
tccagcagcactaacccactggtgg

SEQ ID NO: 305987 - DNA, 25 bp, Homo sapien
actcatgcacacatagtgtcttctg

SEQ ID NO: 305988 - DNA, 25 bp, Homo sapien
aggctgctgttgcattggtgatttc

SEQ ID NO: 305989 - DNA, 25 bp, Homo sapien
tactaagtgtgtaaccttgtccaga

SEQ ID NO: 305990 - DNA, 25 bp, Homo sapien
aacagagaggacctagtgagcggca

SEQ ID NO: 305991 - DNA, 25 bp, Homo sapien
cagaaattgtatgttcacaaggaga

SEQ ID NO: 305992 - DNA, 25 bp, Homo sapien
gcctacctcacgtgacagttaaaaa

SEQ ID NO: 305993 - DNA, 25 bp, Homo sapien
tatccatctccaacagtttggatgc

SEQ ID NO: 305994 - DNA, 25 bp, Homo sapien
atgcacttatccatctccaacagtt

SEQ ID NO: 305995 - DNA, 25 bp, Homo sapien
gaaacaatagatctagaaagtcttc

SEQ ID NO: 305996 - DNA, 25 bp, Homo sapien
gaaagtcttcatggtataaatgcac

SEQ ID NO: 305997 - DNA, 25 bp, Homo sapien
ggacaggctgaagggagtaccttcg

SEQ ID NO: 305998 - DNA, 25 bp, Homo sapien
gctgggctggcctaagtatcggttt

SEQ ID NO: 305999 - DNA, 25 bp, Homo sapien
atcggtttggaatcctcctttctgg

SEQ ID NO: 306000 - DNA, 25 bp, Homo sapien
tggcctaagtatcggtttggaatcc

SEQ ID NO: 306001 - DNA, 25 bp, Homo sapien
tgagtggggatagtgaaaaaggaac

SEQ ID NO: 306002 - DNA, 25 bp, Homo sapien
agtggggatagtgaaaaaggaacat

SEQ ID NO: 306003 - DNA, 25 bp, Homo sapien
tggggatagtgaaaaaggaacatat

SEQ ID NO: 306004 - DNA, 25 bp, Homo sapien
ctgagtggggatagtgaaaaaggaa

SEQ ID NO: 306005 - DNA, 25 bp, Homo sapien
aatcagcaaaaggaagccctcactg

SEQ ID NO: 306006 - DNA, 25 bp, Homo sapien
aaatcagcaaaaggaagccctcact

SEQ ID NO: 306007 - DNA, 25 bp, Homo sapien
aaaaatcagcaaaaggaagccctca

SEQ ID NO: 306008 - DNA, 25 bp, Homo sapien
tgaaaaatcagcaaaaggaagccct

SEQ ID NO: 306009 - DNA, 25 bp, Homo sapien
tccttagtttcagccgacttcccag

SEQ ID NO: 306010 - DNA, 25 bp, Homo sapien
ccttagtttcagccgacttcccagc

SEQ ID NO: 306011 - DNA, 25 bp, Homo sapien
ttccttagtttcagccgacttccca

SEQ ID NO: 306012 - DNA, 25 bp, Homo sapien
tttgaaaaactctgatttcttgtgg

SEQ ID NO: 306013 - DNA, 25 bp, Homo sapien
cttacagctttgaaaaactctgatt

SEQ ID NO: 306014 - DNA, 25 bp, Homo sapien
atttcttgtgggtttcagtggtgag

SEQ ID NO: 306015 - DNA, 25 bp, Homo sapien
ctgatttcttgtgggtttcagtggt

SEQ ID NO: 306016 - DNA, 25 bp, Homo sapien
taagtacatactgccatgtattaga

SEQ ID NO: 306017 - DNA, 25 bp, Homo sapien
gccatgtattagagaaatatgcaaa

SEQ ID NO: 306018 - DNA, 25 bp, Homo sapien
aagtattaagtacatactgccatgt

SEQ ID NO: 306019 - DNA, 25 bp, Homo sapien
catactgccatgtattagagaaata

SEQ ID NO: 306020 - DNA, 25 bp, Homo sapien
tattctctttttctgtatgtataga

SEQ ID NO: 306021 - DNA, 25 bp, Homo sapien
attctctttttctgtatgtatagaa

SEQ ID NO: 306022 - DNA, 25 bp, Homo sapien
ctgtattctctttttctgtatgtat

SEQ ID NO: 306023 - DNA, 25 bp, Homo sapien
gtattctctttttctgtatgtatag

SEQ ID NO: 306024 - DNA, 25 bp, Homo sapien
attttccatctctaccgatacagac

SEQ ID NO: 306025 - DNA, 25 bp, Homo sapien
cattttccatctctaccgatacaga

SEQ ID NO: 306026 - DNA, 25 bp, Homo sapien
caacattttccatctctaccgatac

SEQ ID NO: 306027 - DNA, 25 bp, Homo sapien
acattttccatctctaccgatacag

SEQ ID NO: 306028 - DNA, 25 bp, Homo sapien
atattccacctgagatagtcctgga

SEQ ID NO: 306029 - DNA, 25 bp, Homo sapien
gaagtgcatattccacctgagatag

SEQ ID NO: 306030 - DNA, 25 bp, Homo sapien
acctgagatagtcctggagttacct

SEQ ID NO: 306031 - DNA, 25 bp, Homo sapien
gcatattccacctgagatagtcctg

SEQ ID NO: 306032 - DNA, 25 bp, Homo sapien
taggcttcgtctactccagttagag

SEQ ID NO: 306033 - DNA, 25 bp, Homo sapien
aaagttctcgactgggatctcgccg

SEQ ID NO: 306034 - DNA, 25 bp, Homo sapien
tcttggaatccacataggtacagga

SEQ ID NO: 306035 - DNA, 25 bp, Homo sapien
gttggagagcacaaccactgtctgg

SEQ ID NO: 306036 - DNA, 25 bp, Homo sapien
ttaatcccaatctggtttgtaatgt

SEQ ID NO: 306037 - DNA, 25 bp, Homo sapien
atcccaatctggtttgtaatgtgac

SEQ ID NO: 306038 - DNA, 25 bp, Homo sapien
tcccaatctggtttgtaatgtgact

SEQ ID NO: 306039 - DNA, 25 bp, Homo sapien
gtttgtaatgtgacttctgctccca

SEQ ID NO: 306040 - DNA, 25 bp, Homo sapien
taaggacttgtctaaacaggcaaga

SEQ ID NO: 306041 - DNA, 25 bp, Homo sapien
tgagccaatgcaccaggcataaatg

SEQ ID NO: 306042 - DNA, 25 bp, Homo sapien
tgctacgataacaaaattaaggact

SEQ ID NO: 306043 - DNA, 25 bp, Homo sapien
catggtcttttcatggtggtgctac

SEQ ID NO: 306044 - DNA, 25 bp, Homo sapien
ctatacctacatcccaacctgggtg

SEQ ID NO: 306045 - DNA, 25 bp, Homo sapien
tgtgcccaggtagtcccagtattct

SEQ ID NO: 306046 - DNA, 25 bp, Homo sapien
tcaccagaataactgtagagaaagt

SEQ ID NO: 306047 - DNA, 25 bp, Homo sapien
gacaagaactcaactatggccaggc

SEQ ID NO: 306048 - DNA, 25 bp, Homo sapien
tctgcaggagacttgatcagccgga

SEQ ID NO: 306049 - DNA, 25 bp, Homo sapien
tgtatcagctgctgaacaccccgaa

SEQ ID NO: 306050 - DNA, 25 bp, Homo sapien
cagtcaggggctgcatatagtcaga

SEQ ID NO: 306051 - DNA, 25 bp, Homo sapien
gagggcctcatccagtcataccaaa

SEQ ID NO: 306052 - DNA, 25 bp, Homo sapien
ggcatagtggcatgcaccaatggtc

SEQ ID NO: 306053 - DNA, 25 bp, Homo sapien
caggcatagtggcatgcaccaatgg

SEQ ID NO: 306054 - DNA, 25 bp, Homo sapien
catagtggcatgcaccaatggtccc

SEQ ID NO: 306055 - DNA, 25 bp, Homo sapien
tagcaggcatagtggcatgcaccaa

SEQ ID NO: 306056 - DNA, 25 bp, Homo sapien
agactagcctggacaacactgagaa

SEQ ID NO: 306057 - DNA, 25 bp, Homo sapien
gactagcctggacaacactgagaaa

SEQ ID NO: 306058 - DNA, 25 bp, Homo sapien
tagcctggacaacactgagaaaccc

SEQ ID NO: 306059 - DNA, 25 bp, Homo sapien
ctggacaacactgagaaaccctgtc

SEQ ID NO: 306060 - DNA, 25 bp, Homo sapien
agacaaataaaatatggcatacgca

SEQ ID NO: 306061 - DNA, 25 bp, Homo sapien
aatatggcatacgcatacaatggaa

SEQ ID NO: 306062 - DNA, 25 bp, Homo sapien
tagaaaccaaatgtttatcaatgga

SEQ ID NO: 306063 - DNA, 25 bp, Homo sapien
aaagatagaaaccaaatgtttatca

SEQ ID NO: 306064 - DNA, 25 bp, Homo sapien
cttagcataaagaaaggcttcttcc

SEQ ID NO: 306065 - DNA, 25 bp, Homo sapien
gggctttactggtgaacatggtttc

SEQ ID NO: 306066 - DNA, 25 bp, Homo sapien
tactggtgaacatggtttctatgaa

SEQ ID NO: 306067 - DNA, 25 bp, Homo sapien
tggtgaacatggtttctatgaaagc

SEQ ID NO: 306068 - DNA, 25 bp, Homo sapien
aaggtatgacaaagggtttctgtag

SEQ ID NO: 306069 - DNA, 25 bp, Homo sapien
aaaacaacagcaaggtatgacaaag

SEQ ID NO: 306070 - DNA, 25 bp, Homo sapien
aaaaacaacagcaaggtatgacaaa

SEQ ID NO: 306071 - DNA, 25 bp, Homo sapien
accagccaccacaggtggataggct

SEQ ID NO: 306072 - DNA, 25 bp, Homo sapien
taggctaaaatgtctgcgccacgag

SEQ ID NO: 306073 - DNA, 25 bp, Homo sapien
gtgtttgaccgattaccaccagcca

SEQ ID NO: 306074 - DNA, 25 bp, Homo sapien
ccacgagcccggcattcaaattcaa

SEQ ID NO: 306075 - DNA, 25 bp, Homo sapien
gagtagcactgagggcatctcacgt

SEQ ID NO: 306076 - DNA, 25 bp, Homo sapien
tatctggacctagtgggagtagcac

SEQ ID NO: 306077 - DNA, 25 bp, Homo sapien
gctaatttgtgaaagctgaaggtga

SEQ ID NO: 306078 - DNA, 25 bp, Homo sapien
gttagcaggttttctactaggctat

SEQ ID NO: 306079 - DNA, 25 bp, Homo sapien
tgataacatacagtaatggcaactt

SEQ ID NO: 306080 - DNA, 25 bp, Homo sapien
caaacagtagaataatgggtaaatg

SEQ ID NO: 306081 - DNA, 25 bp, Homo sapien
tatctaagtaagtacaaaatttgac

SEQ ID NO: 306082 - DNA, 25 bp, Homo sapien
tgcccttgaagacagagtatatgtt

SEQ ID NO: 306083 - DNA, 25 bp, Homo sapien
ccattgactggccacgtacgtgtga

SEQ ID NO: 306084 - DNA, 25 bp, Homo sapien
aagactcacaacctccatccagaag

SEQ ID NO: 306085 - DNA, 25 bp, Homo sapien
tgtcactcacatagcaggaagactc

SEQ ID NO: 306086 - DNA, 25 bp, Homo sapien
ggccacgtacgtgtgatgtcactca

SEQ ID NO: 306087 - DNA, 25 bp, Homo sapien
atcatcacactcatgagctacaaag

SEQ ID NO: 306088 - DNA, 25 bp, Homo sapien
gggtagcacatctcatacctgcacg

SEQ ID NO: 306089 - DNA, 25 bp, Homo sapien
cttgtaagaaggtttgagggtagca

SEQ ID NO: 306090 - DNA, 25 bp, Homo sapien
agcacatctcatacctgcacgtgaa

SEQ ID NO: 306091 - DNA, 25 bp, Homo sapien
gccctccttaggtaatgtgcaaaaa

SEQ ID NO: 306092 - DNA, 25 bp, Homo sapien
ttactgatcagtatgagagttgtga

SEQ ID NO: 306093 - DNA, 25 bp, Homo sapien
ggctattcacaagcttgttcccatt

SEQ ID NO: 306094 - DNA, 25 bp, Homo sapien
ccttaggtaatgtgcaaaaacctct

SEQ ID NO: 306095 - DNA, 25 bp, Homo sapien
ttttgagtagagatgggtttctgcc

SEQ ID NO: 306096 - DNA, 25 bp, Homo sapien
ctctgcccccaccgggttcaagcga

SEQ ID NO: 306097 - DNA, 25 bp, Homo sapien
tacaggcatgagtcaccacgcctgg

SEQ ID NO: 306098 - DNA, 25 bp, Homo sapien
tgagtagagatgggtttctgccatg

SEQ ID NO: 306099 - DNA, 25 bp, Homo sapien
tcatagagttctgcctgaggtgcgg

SEQ ID NO: 306100 - DNA, 25 bp, Homo sapien
ttctgtcctatcagggtcagcatca

SEQ ID NO: 306101 - DNA, 25 bp, Homo sapien
ttggatctctagaacggcttcatag

SEQ ID NO: 306102 - DNA, 25 bp, Homo sapien
gatgttctccaagcttgtcccaggg

SEQ ID NO: 306103 - DNA, 25 bp, Homo sapien
tccatcccgaggtagtggccaacat

SEQ ID NO: 306104 - DNA, 25 bp, Homo sapien
gacatccatcccgaggtagtggcca

SEQ ID NO: 306105 - DNA, 25 bp, Homo sapien
tcccgaggtagtggccaacatgatg

SEQ ID NO: 306106 - DNA, 25 bp, Homo sapien
catcccgaggtagtggccaacatga

SEQ ID NO: 306107 - DNA, 25 bp, Homo sapien
gggctcaattgtgattaccatccca

SEQ ID NO: 306108 - DNA, 25 bp, Homo sapien
cgggctcaattgtgattaccatccc

SEQ ID NO: 306109 - DNA, 25 bp, Homo sapien
ggctcaattgtgattaccatcccag

SEQ ID NO: 306110 - DNA, 25 bp, Homo sapien
gctcaattgtgattaccatcccagg

SEQ ID NO: 306111 - DNA, 25 bp, Homo sapien
cactacatcatcctcaattcgtaca

SEQ ID NO: 306112 - DNA, 25 bp, Homo sapien
gagaggtgagtcctgagtcaccact

SEQ ID NO: 306113 - DNA, 25 bp, Homo sapien
tcaattcgtacaccaagaccccgaa

SEQ ID NO: 306114 - DNA, 25 bp, Homo sapien
tgagtcctgagtcaccactacatca

SEQ ID NO: 306115 - DNA, 25 bp, Homo sapien
gaagacacccattttgaacctgagg

SEQ ID NO: 306116 - DNA, 25 bp, Homo sapien
cctgagggctcatatggctccagta

SEQ ID NO: 306117 - DNA, 25 bp, Homo sapien
tgactagtaagactgcaggacacca

SEQ ID NO: 306118 - DNA, 25 bp, Homo sapien
gagacactcagaaagcacacgtgca

SEQ ID NO: 306119 - DNA, 25 bp, Homo sapien
cagtgtttcaccacgttggccaggc

SEQ ID NO: 306120 - DNA, 25 bp, Homo sapien
ggcatgtatcatcacacccagctca

SEQ ID NO: 306121 - DNA, 25 bp, Homo sapien
aggcatgtatcatcacacccagctc

SEQ ID NO: 306122 - DNA, 25 bp, Homo sapien
acagtgtttcaccacgttggccagg

SEQ ID NO: 306123 - DNA, 25 bp, Homo sapien
tctctgaaaactgggcgctactact

SEQ ID NO: 306124 - DNA, 25 bp, Homo sapien
aaaatatgactcttacaccgggcgc

SEQ ID NO: 306125 - DNA, 25 bp, Homo sapien
gagattgttaatcccctagcttgtg

SEQ ID NO: 306126 - DNA, 25 bp, Homo sapien
ggtacgtaagtagaggatctgctcc

SEQ ID NO: 306127 - DNA, 25 bp, Homo sapien
tagttaatctgggactcaaaggaca

SEQ ID NO: 306128 - DNA, 25 bp, Homo sapien
aaatgggtatgtctgcggcatggct

SEQ ID NO: 306129 - DNA, 25 bp, Homo sapien
gacaatatacctgggtcagggactg

SEQ ID NO: 306130 - DNA, 25 bp, Homo sapien
gagaatgagtaagatcacacacagc

SEQ ID NO: 306131 - DNA, 25 bp, Homo sapien
gaactaaaggctcaacacaaataaa

SEQ ID NO: 306132 - DNA, 25 bp, Homo sapien
tatcaaaacatcattatttaccctg

SEQ ID NO: 306133 - DNA, 25 bp, Homo sapien
aaagaactaaaggctcaacacaaat

SEQ ID NO: 306134 - DNA, 25 bp, Homo sapien
gtatcaaaacatcattatttaccct

SEQ ID NO: 306135 - DNA, 25 bp, Homo sapien
cactgttacaaaggactccgaggtc

SEQ ID NO: 306136 - DNA, 25 bp, Homo sapien
cttagaactaaaggctcggctgggc

SEQ ID NO: 306137 - DNA, 25 bp, Homo sapien
catctctgacatgggaacaggaggg

SEQ ID NO: 306138 - DNA, 25 bp, Homo sapien
tatcagacactagttgagggacagc

SEQ ID NO: 306139 - DNA, 25 bp, Homo sapien
ttttaaatgacagttacaagtgctt

SEQ ID NO: 306140 - DNA, 25 bp, Homo sapien
tttttaaatgacagttacaagtgct

SEQ ID NO: 306141 - DNA, 25 bp, Homo sapien
tttaaatgacagttacaagtgcttt

SEQ ID NO: 306142 - DNA, 25 bp, Homo sapien
ttttttaaatgacagttacaagtgc

SEQ ID NO: 306143 - DNA, 25 bp, Homo sapien
tgttgagcacagtgtcacatgaaag

SEQ ID NO: 306144 - DNA, 25 bp, Homo sapien
caaggatgtcatggaatttagctag

SEQ ID NO: 306145 - DNA, 25 bp, Homo sapien
taagggctgctagccataggtgtca

SEQ ID NO: 306146 - DNA, 25 bp, Homo sapien
tcatctacttcagtggcagctgttg

SEQ ID NO: 306147 - DNA, 25 bp, Homo sapien
tggaaacacacggtctgtcgtccga

SEQ ID NO: 306148 - DNA, 25 bp, Homo sapien
tttggaaacacacggtctgtcgtcc

SEQ ID NO: 306149 - DNA, 25 bp, Homo sapien
aaacacacggtctgtcgtccgacca

SEQ ID NO: 306150 - DNA, 25 bp, Homo sapien
ggaaacacacggtctgtcgtccgac

SEQ ID NO: 306151 - DNA, 25 bp, Homo sapien
ttcacttcaaagcgcttcttgcccg

SEQ ID NO: 306152 - DNA, 25 bp, Homo sapien
ttcaaagcgcttcttgcccgcgccg

SEQ ID NO: 306153 - DNA, 25 bp, Homo sapien
ttgcccgcgccgctgttggtgccgc

SEQ ID NO: 306154 - DNA, 25 bp, Homo sapien
gttggtgccgctcggggtatccaca

SEQ ID NO: 306155 - DNA, 25 bp, Homo sapien
gcctgccagccagatccgcgcctct

SEQ ID NO: 306156 - DNA, 25 bp, Homo sapien
atgaaaccctttactccgcgcctcg

SEQ ID NO: 306157 - DNA, 25 bp, Homo sapien
gatccgcgcctctctagcttccctg

SEQ ID NO: 306158 - DNA, 25 bp, Homo sapien
cctcgaccatcctcgggcctgccag

SEQ ID NO: 306159 - DNA, 25 bp, Homo sapien
caacagacgtctcagaagagccaag

SEQ ID NO: 306160 - DNA, 25 bp, Homo sapien
tgagaggaccccaagcttcaaaaag

SEQ ID NO: 306161 - DNA, 25 bp, Homo sapien
taatgcggtaggacctcaggttcca

SEQ ID NO: 306162 - DNA, 25 bp, Homo sapien
gacgtgacagagaacccaagagtgg

SEQ ID NO: 306163 - DNA, 25 bp, Homo sapien
tgtttagactcttctattaagataa

SEQ ID NO: 306164 - DNA, 25 bp, Homo sapien
tatgtttagactcttctattaagat

SEQ ID NO: 306165 - DNA, 25 bp, Homo sapien
acttttatatgtttagactcttcta

SEQ ID NO: 306166 - DNA, 25 bp, Homo sapien
tatatgtttagactcttctattaag

SEQ ID NO: 306167 - DNA, 25 bp, Homo sapien
tacccgtgtcagtacacagaacaag

SEQ ID NO: 306168 - DNA, 25 bp, Homo sapien
gataagctggataattaaatacccg

SEQ ID NO: 306169 - DNA, 25 bp, Homo sapien
aatgggtaatcatgggataagctgg

SEQ ID NO: 306170 - DNA, 25 bp, Homo sapien
caatgaagtgaaagctagagaacag

SEQ ID NO: 306171 - DNA, 25 bp, Homo sapien
acacacatactctttaggacctcag

SEQ ID NO: 306172 - DNA, 25 bp, Homo sapien
gttatcaaccacaatatcccaggcc

SEQ ID NO: 306173 - DNA, 25 bp, Homo sapien
agatccataatgtggttcctgcaga

SEQ ID NO: 306174 - DNA, 25 bp, Homo sapien
gatggcacagttatcaaccacaata

SEQ ID NO: 306175 - DNA, 25 bp, Homo sapien
tcccaggcccagagggctactgcat

SEQ ID NO: 306176 - DNA, 25 bp, Homo sapien
gactagatacagaagaccgagtgct

SEQ ID NO: 306177 - DNA, 25 bp, Homo sapien
taggcttgctatctcctcgtgtgaa

SEQ ID NO: 306178 - DNA, 25 bp, Homo sapien
gaaaaatcaacagtgcctgtcgtcc

SEQ ID NO: 306179 - DNA, 25 bp, Homo sapien
tattctgagagctgggtatgcctcc

SEQ ID NO: 306180 - DNA, 25 bp, Homo sapien
ccagcaaaaattagatcagatagac

SEQ ID NO: 306181 - DNA, 25 bp, Homo sapien
aaatcctcactccttaacgcttctt

SEQ ID NO: 306182 - DNA, 25 bp, Homo sapien
cctttgtaaacaatgaccagcaaaa

SEQ ID NO: 306183 - DNA, 25 bp, Homo sapien
cactccttaacgcttctttcctttg

SEQ ID NO: 306184 - DNA, 25 bp, Homo sapien
ctttatgaatgtggatactagaaaa

SEQ ID NO: 306185 - DNA, 25 bp, Homo sapien
tgtggatactagaaaatttcaggcc

SEQ ID NO: 306186 - DNA, 25 bp, Homo sapien
atgaatgtggatactagaaaatttc

SEQ ID NO: 306187 - DNA, 25 bp, Homo sapien
ttatgaatgtggatactagaaaatt

SEQ ID NO: 306188 - DNA, 25 bp, Homo sapien
cagcctgggcacttgagtgagaccc

SEQ ID NO: 306189 - DNA, 25 bp, Homo sapien
aaacagtgtttctctttttgagata

SEQ ID NO: 306190 - DNA, 25 bp, Homo sapien
ctgggcacttgagtgagaccctgtc

SEQ ID NO: 306191 - DNA, 25 bp, Homo sapien
aataaacagtgtttctctttttgag

SEQ ID NO: 306192 - DNA, 25 bp, Homo sapien
aattagcagctagatgcggtggctc

SEQ ID NO: 306193 - DNA, 25 bp, Homo sapien
tgtaagctcagtgttttggaagggc

SEQ ID NO: 306194 - DNA, 25 bp, Homo sapien
ctgtaagctcagtgttttggaaggg

SEQ ID NO: 306195 - DNA, 25 bp, Homo sapien
cacctgtaagctcagtgttttggaa

SEQ ID NO: 306196 - DNA, 25 bp, Homo sapien
ttacagactccccatgcgacagtac

SEQ ID NO: 306197 - DNA, 25 bp, Homo sapien
catgcgacagtacactcttctgaag

SEQ ID NO: 306198 - DNA, 25 bp, Homo sapien
cactcttctgaagtagcggacgcct

SEQ ID NO: 306199 - DNA, 25 bp, Homo sapien
tagcggacgcctggttagcttgaca

SEQ ID NO: 306200 - DNA, 25 bp, Homo sapien
ttagcggtcaaagtacaatttacag

SEQ ID NO: 306201 - DNA, 25 bp, Homo sapien
taatggatatatttagcggtcaaag

SEQ ID NO: 306202 - DNA, 25 bp, Homo sapien
gaacatttactaagatgtattaatg

SEQ ID NO: 306203 - DNA, 25 bp, Homo sapien
catttactaagatgtattaatggat

SEQ ID NO: 306204 - DNA, 25 bp, Homo sapien
cgaagggtattcgacagcttctccc

SEQ ID NO: 306205 - DNA, 25 bp, Homo sapien
actttgcagcagtacggtgtcctgg

SEQ ID NO: 306206 - DNA, 25 bp, Homo sapien
tacggtgtcctggtagagcccaact

SEQ ID NO: 306207 - DNA, 25 bp, Homo sapien
caactaagtcagagcataccacgcg

SEQ ID NO: 306208 - DNA, 25 bp, Homo sapien
aaagagcaaaatttccaaaaggcag

SEQ ID NO: 306209 - DNA, 25 bp, Homo sapien
atttttcttaaccatcaggtgttgg

SEQ ID NO: 306210 - DNA, 25 bp, Homo sapien
cttaaccatcaggtgttggggtcgg

SEQ ID NO: 306211 - DNA, 25 bp, Homo sapien
agcaaaatttccaaaaggcagaaag

SEQ ID NO: 306212 - DNA, 25 bp, Homo sapien
tttcagctgactcttgtataactca

SEQ ID NO: 306213 - DNA, 25 bp, Homo sapien
tacactagggatacccaagaggaca

SEQ ID NO: 306214 - DNA, 25 bp, Homo sapien
caaatattctcttagagtgacagcc

SEQ ID NO: 306215 - DNA, 25 bp, Homo sapien
aactaagagtggaatccacagctag

SEQ ID NO: 306216 - DNA, 25 bp, Homo sapien
acaactgaaatctggtcggtacgtc

SEQ ID NO: 306217 - DNA, 25 bp, Homo sapien
ccaaagtatgtatggaacttaaggg

SEQ ID NO: 306218 - DNA, 25 bp, Homo sapien
ggcacgggcagaaattactcaccct

SEQ ID NO: 306219 - DNA, 25 bp, Homo sapien
tacaagcttcatttaataacaactg

SEQ ID NO: 306220 - DNA, 25 bp, Homo sapien
cttcatttcgtctgtgattggtgca

SEQ ID NO: 306221 - DNA, 25 bp, Homo sapien
aagtgcttccttcatttcgtctgtg

SEQ ID NO: 306222 - DNA, 25 bp, Homo sapien
tgcgtattaggacagacgcagcaag

SEQ ID NO: 306223 - DNA, 25 bp, Homo sapien
catgtgcgtattaggacagacgcag

SEQ ID NO: 306224 - DNA, 25 bp, Homo sapien
tcttatgagggacaaacggcacaca

SEQ ID NO: 306225 - DNA, 25 bp, Homo sapien
aaaataactctatgcaggctcagcc

SEQ ID NO: 306226 - DNA, 25 bp, Homo sapien
gaatgcgacctgtaggagcagagcc

SEQ ID NO: 306227 - DNA, 25 bp, Homo sapien
ttttggcgtgggctcatgacatgca

SEQ ID NO: 306228 - DNA, 25 bp, Homo sapien
tgttttgagccagcgagagatgcag

SEQ ID NO: 306229 - DNA, 25 bp, Homo sapien
tggacacacctgtcgtgttttgagc

SEQ ID NO: 306230 - DNA, 25 bp, Homo sapien
tccaatggacacacctgtcgtgttt

SEQ ID NO: 306231 - DNA, 25 bp, Homo sapien
cctgtcgtgttttgagccagcgaga

SEQ ID NO: 306232 - DNA, 25 bp, Homo sapien
caggcatggcctaatttactatttt

SEQ ID NO: 306233 - DNA, 25 bp, Homo sapien
tcaggcatggcctaatttactattt

SEQ ID NO: 306234 - DNA, 25 bp, Homo sapien
atgagccatcaggcatggcctaatt

SEQ ID NO: 306235 - DNA, 25 bp, Homo sapien
gccatcaggcatggcctaatttact

SEQ ID NO: 306236 - DNA, 25 bp, Homo sapien
cagtgtgctccaggattaggtgacg

SEQ ID NO: 306237 - DNA, 25 bp, Homo sapien
gattaattccaagataatttcctgt

SEQ ID NO: 306238 - DNA, 25 bp, Homo sapien
gaacctaagtgatcacagtgtgctc

SEQ ID NO: 306239 - DNA, 25 bp, Homo sapien
gacgacactgacactagcttggctg

SEQ ID NO: 306240 - DNA, 25 bp, Homo sapien
atttgtaattaggtaacagcaggga

SEQ ID NO: 306241 - DNA, 25 bp, Homo sapien
aaaaacacagttccatccaatttgt

SEQ ID NO: 306242 - DNA, 25 bp, Homo sapien
taattaggtaacagcagggaaagtc

SEQ ID NO: 306243 - DNA, 25 bp, Homo sapien
tccatccaatttgtaattaggtaac

SEQ ID NO: 306244 - DNA, 25 bp, Homo sapien
tccaactggactttatttgacacag

SEQ ID NO: 306245 - DNA, 25 bp, Homo sapien
tgacacagaatacaatatggctaca

SEQ ID NO: 306246 - DNA, 25 bp, Homo sapien
atttgacacagaatacaatatggct

SEQ ID NO: 306247 - DNA, 25 bp, Homo sapien
ctggactttatttgacacagaatac

SEQ ID NO: 306248 - DNA, 25 bp, Homo sapien
tcactaagtgatgcgctcagaggac

SEQ ID NO: 306249 - DNA, 25 bp, Homo sapien
ttcagagtagagagacaacttggcc

SEQ ID NO: 306250 - DNA, 25 bp, Homo sapien
taacccttgagctgcggagtggatg

SEQ ID NO: 306251 - DNA, 25 bp, Homo sapien
gattgccatcagtacccaagctgtg

SEQ ID NO: 306252 - DNA, 25 bp, Homo sapien
cttgtaatcgcctgattataggcat

SEQ ID NO: 306253 - DNA, 25 bp, Homo sapien
ttgtaatcgcctgattataggcatg

SEQ ID NO: 306254 - DNA, 25 bp, Homo sapien
cttgtcaggaatcctcagatgatac

SEQ ID NO: 306255 - DNA, 25 bp, Homo sapien
taagtcggtgtcttcattagatatg

SEQ ID NO: 306256 - DNA, 25 bp, Homo sapien
catagacttgcggttcatgaacccc

SEQ ID NO: 306257 - DNA, 25 bp, Homo sapien
aagacactggattcttaagtcggtg

SEQ ID NO: 306258 - DNA, 25 bp, Homo sapien
tggttgcaggagctgttggtcccct

SEQ ID NO: 306259 - DNA, 25 bp, Homo sapien
tgtggacagatgaaacgcaaggctt

SEQ ID NO: 306260 - DNA, 25 bp, Homo sapien
caaggcttacgtggagatttgtgca

SEQ ID NO: 306261 - DNA, 25 bp, Homo sapien
gctttaagcatgcaggagtacgcag

SEQ ID NO: 306262 - DNA, 25 bp, Homo sapien
tcttcgaaagctggctcttggtcaa

SEQ ID NO: 306263 - DNA, 25 bp, Homo sapien
tttttacttggctcttcgaaagctg

SEQ ID NO: 306264 - DNA, 25 bp, Homo sapien
gctgtcatttccacgctgttaattc

SEQ ID NO: 306265 - DNA, 25 bp, Homo sapien
catcttgacaactccctgttcccta

SEQ ID NO: 306266 - DNA, 25 bp, Homo sapien
gagctctgaagggaactcgatttct

SEQ ID NO: 306267 - DNA, 25 bp, Homo sapien
ggtgcttagtgtctgatgccttcat

SEQ ID NO: 306268 - DNA, 25 bp, Homo sapien
tgagttctgtggtgcttagtgtctg

SEQ ID NO: 306269 - DNA, 25 bp, Homo sapien
ttctccgcagccgtcctgagttctg

SEQ ID NO: 306270 - DNA, 25 bp, Homo sapien
cagatgatggtaaaatgctcagtgt

SEQ ID NO: 306271 - DNA, 25 bp, Homo sapien
ccagatgatggtaaaatgctcagtg

SEQ ID NO: 306272 - DNA, 25 bp, Homo sapien
agatgatggtaaaatgctcagtgtg

SEQ ID NO: 306273 - DNA, 25 bp, Homo sapien
cccagatgatggtaaaatgctcagt

SEQ ID NO: 306274 - DNA, 25 bp, Homo sapien
cggatgctgccgagatgaagacagc

SEQ ID NO: 306275 - DNA, 25 bp, Homo sapien
atattctgaggcttcggcgccagcc

SEQ ID NO: 306276 - DNA, 25 bp, Homo sapien
ggcgccagccctttgccggcggatg

SEQ ID NO: 306277 - DNA, 25 bp, Homo sapien
tcttcttccatcgaatattctgagg

SEQ ID NO: 306278 - DNA, 25 bp, Homo sapien
tggggttcgtgggatctggacccac

SEQ ID NO: 306279 - DNA, 25 bp, Homo sapien
agcccaggcggcccggattgtcgtc

SEQ ID NO: 306280 - DNA, 25 bp, Homo sapien
gggtgtggccgaagccagcccaggc

SEQ ID NO: 306281 - DNA, 25 bp, Homo sapien
gcgcgcgaggctgcgccgagagagg

SEQ ID NO: 306282 - DNA, 25 bp, Homo sapien
gttccgataatccactatgcttaca

SEQ ID NO: 306283 - DNA, 25 bp, Homo sapien
taatccactatgcttacaccagcct

SEQ ID NO: 306284 - DNA, 25 bp, Homo sapien
gataatccactatgcttacaccagc

SEQ ID NO: 306285 - DNA, 25 bp, Homo sapien
taagttccgataatccactatgctt

SEQ ID NO: 306286 - DNA, 25 bp, Homo sapien
gccccactgggccataaatcactgg

SEQ ID NO: 306287 - DNA, 25 bp, Homo sapien
taaatcactggcgacactaaacagg

SEQ ID NO: 306288 - DNA, 25 bp, Homo sapien
caggtcggcatagtcagcggctgct

SEQ ID NO: 306289 - DNA, 25 bp, Homo sapien
gacactaaacaggtcggcatagtca

SEQ ID NO: 306290 - DNA, 25 bp, Homo sapien
tttcagactggcaacatgatcgccc

SEQ ID NO: 306291 - DNA, 25 bp, Homo sapien
accccaagagggaacaactgcactg

SEQ ID NO: 306292 - DNA, 25 bp, Homo sapien
tagcttgcgttggttttcagactgg

SEQ ID NO: 306293 - DNA, 25 bp, Homo sapien
gtgacttgcatccctcacacagggc

SEQ ID NO: 306294 - DNA, 25 bp, Homo sapien
tggctcccctaacccgtctgcgcct

SEQ ID NO: 306295 - DNA, 25 bp, Homo sapien
ggctcccctaacccgtctgcgccta

SEQ ID NO: 306296 - DNA, 25 bp, Homo sapien
gctcccctaacccgtctgcgcctaa

SEQ ID NO: 306297 - DNA, 25 bp, Homo sapien
ctcaaaggatctccgcggggtcacg

SEQ ID NO: 306298 - DNA, 25 bp, Homo sapien
caaaggatctccgcggggtcacgta

SEQ ID NO: 306299 - DNA, 25 bp, Homo sapien
tcaaaggatctccgcggggtcacgt

SEQ ID NO: 306300 - DNA, 25 bp, Homo sapien
atcagcttcagctcttggtcgagac

SEQ ID NO: 306301 - DNA, 25 bp, Homo sapien
ctcttcgatcagcttcagctcttgg

SEQ ID NO: 306302 - DNA, 25 bp, Homo sapien
tcgatcagcttcagctcttggtcga

SEQ ID NO: 306303 - DNA, 25 bp, Homo sapien
ttcgatcagcttcagctcttggtcg

SEQ ID NO: 306304 - DNA, 25 bp, Homo sapien
ggcgtctctctaagaaatcctctat

SEQ ID NO: 306305 - DNA, 25 bp, Homo sapien
aggcgtctctctaagaaatcctcta

SEQ ID NO: 306306 - DNA, 25 bp, Homo sapien
cgtctctctaagaaatcctctatct

SEQ ID NO: 306307 - DNA, 25 bp, Homo sapien
tctctctaagaaatcctctatcttc

SEQ ID NO: 306308 - DNA, 25 bp, Homo sapien
gaatccaggcggacaatgaaggacg

SEQ ID NO: 306309 - DNA, 25 bp, Homo sapien
aatccaggcggacaatgaaggacgg

SEQ ID NO: 306310 - DNA, 25 bp, Homo sapien
gcggacaatgaaggacgggatgttc

SEQ ID NO: 306311 - DNA, 25 bp, Homo sapien
ccaggcggacaatgaaggacgggat

SEQ ID NO: 306312 - DNA, 25 bp, Homo sapien
gctgatcctgtttatttggcaggaa

SEQ ID NO: 306313 - DNA, 25 bp, Homo sapien
taatggccgcagagaactcgcccga

SEQ ID NO: 306314 - DNA, 25 bp, Homo sapien
aaaataaataaatacggccgctgct

SEQ ID NO: 306315 - DNA, 25 bp, Homo sapien
gaggaggaggcgacaagagacactc

SEQ ID NO: 306316 - DNA, 25 bp, Homo sapien
tctggctcccgcagttagcactcag

SEQ ID NO: 306317 - DNA, 25 bp, Homo sapien
ccgaggtctctcggagctccgccgc

SEQ ID NO: 306318 - DNA, 25 bp, Homo sapien
gccgaggtctctcggagctccgccg

SEQ ID NO: 306319 - DNA, 25 bp, Homo sapien
taattctttcggagatacaagcgag

SEQ ID NO: 306320 - DNA, 25 bp, Homo sapien
tgcggactcgatagaaaaggtaagg

SEQ ID NO: 306321 - DNA, 25 bp, Homo sapien
cacaagagcacaaattcgccgagcg

SEQ ID NO: 306322 - DNA, 25 bp, Homo sapien
cctttttctcttcgccgggtcgcag

SEQ ID NO: 306323 - DNA, 25 bp, Homo sapien
agatgagagtttaggccgcttggct

SEQ ID NO: 306324 - DNA, 25 bp, Homo sapien
ctgtgccatcgctggcggacgccga

SEQ ID NO: 306325 - DNA, 25 bp, Homo sapien
cccggttccaccacattctcggcca

SEQ ID NO: 306326 - DNA, 25 bp, Homo sapien
gcggacgccgagagggccggagatg

SEQ ID NO: 306327 - DNA, 25 bp, Homo sapien
ggaacataaaggtgtgaaggctaca

SEQ ID NO: 306328 - DNA, 25 bp, Homo sapien
aacgctcttggtggatatatttaca

SEQ ID NO: 306329 - DNA, 25 bp, Homo sapien
agaatttcgggcttatttcaaccag

SEQ ID NO: 306330 - DNA, 25 bp, Homo sapien
taaagctgacattagaacgctcttg

SEQ ID NO: 306331 - DNA, 25 bp, Homo sapien
tgcggaggttacaaagatcaaatct

SEQ ID NO: 306332 - DNA, 25 bp, Homo sapien
tgttttaaactgtgcgccattctga

SEQ ID NO: 306333 - DNA, 25 bp, Homo sapien
gtccctaagtccaaaagtagcaatg

SEQ ID NO: 306334 - DNA, 25 bp, Homo sapien
tgatgaaatctcacctgaccgggta

SEQ ID NO: 306335 - DNA, 25 bp, Homo sapien
caagtaatccacctgcctcagcctc

SEQ ID NO: 306336 - DNA, 25 bp, Homo sapien
accgtgcccggccatgcccagctaa

SEQ ID NO: 306337 - DNA, 25 bp, Homo sapien
aagtaatccacctgcctcagcctcc

SEQ ID NO: 306338 - DNA, 25 bp, Homo sapien
caccgtgcccggccatgcccagcta

SEQ ID NO: 306339 - DNA, 25 bp, Homo sapien
tgaagagtggaacaacctaaggtgg

SEQ ID NO: 306340 - DNA, 25 bp, Homo sapien
taacccagtggttgagtccacagga

SEQ ID NO: 306341 - DNA, 25 bp, Homo sapien
tggacactcctactcttacaatgga

SEQ ID NO: 306342 - DNA, 25 bp, Homo sapien
tcagagcgccaaggccaggttagag

SEQ ID NO: 306343 - DNA, 25 bp, Homo sapien
agtttagcataggttgggcaccgtg

SEQ ID NO: 306344 - DNA, 25 bp, Homo sapien
caggacacatataaatctgatgtga

SEQ ID NO: 306345 - DNA, 25 bp, Homo sapien
gtaaaacgggacaggacacatataa

SEQ ID NO: 306346 - DNA, 25 bp, Homo sapien
aagtaaaacgggacaggacacatat

SEQ ID NO: 306347 - DNA, 25 bp, Homo sapien
ttacatatgtgtgccacggcgctgg

SEQ ID NO: 306348 - DNA, 25 bp, Homo sapien
gcgctgggccagcaagtattttttc

SEQ ID NO: 306349 - DNA, 25 bp, Homo sapien
aatcctccttagtagctgccaccaa

SEQ ID NO: 306350 - DNA, 25 bp, Homo sapien
tttttctagacagtaaggtgagctc

SEQ ID NO: 306351 - DNA, 25 bp, Homo sapien
ttagctggatataggccggatgtgg

SEQ ID NO: 306352 - DNA, 25 bp, Homo sapien
attagctggatataggccggatgtg

SEQ ID NO: 306353 - DNA, 25 bp, Homo sapien
tacctgttgactgcgtaggaccctg

SEQ ID NO: 306354 - DNA, 25 bp, Homo sapien
catgttgggagaagtcaagcctgcc

SEQ ID NO: 306355 - DNA, 25 bp, Homo sapien
tgtgttcattcccatggcaggctga

SEQ ID NO: 306356 - DNA, 25 bp, Homo sapien
taattcatctggtaagtcgtgctcc

SEQ ID NO: 306357 - DNA, 25 bp, Homo sapien
tctgttaaacaaggtttgccattca

SEQ ID NO: 306358 - DNA, 25 bp, Homo sapien
tacgtcacacatgatgctacatggc

SEQ ID NO: 306359 - DNA, 25 bp, Homo sapien
ggcgaattcaacttaataagccatc

SEQ ID NO: 306360 - DNA, 25 bp, Homo sapien
taagccatctaacccctttgtcatg

SEQ ID NO: 306361 - DNA, 25 bp, Homo sapien
ggagataagttatttgatagtacag

SEQ ID NO: 306362 - DNA, 25 bp, Homo sapien
cagtttttgtctgaatctggagacc

SEQ ID NO: 306363 - DNA, 25 bp, Homo sapien
gtccatagcaaatggagataagtta

SEQ ID NO: 306364 - DNA, 25 bp, Homo sapien
gattctgagtatatggtgaaccata

SEQ ID NO: 306365 - DNA, 25 bp, Homo sapien
aaagtgaagatttcaggccgggcgc

SEQ ID NO: 306366 - DNA, 25 bp, Homo sapien
gagagttgcttgaaaccaggaggga

SEQ ID NO: 306367 - DNA, 25 bp, Homo sapien
agttgcttgaaaccaggagggagaa

SEQ ID NO: 306368 - DNA, 25 bp, Homo sapien
attaaaaagtgaagatttcaggccg

SEQ ID NO: 306369 - DNA, 25 bp, Homo sapien
ctggatcagctgtatgtgctccaga

SEQ ID NO: 306370 - DNA, 25 bp, Homo sapien
gctgctggatgagcttgcgcttctc

SEQ ID NO: 306371 - DNA, 25 bp, Homo sapien
tgagcttgcgcttctctggatcagc

SEQ ID NO: 306372 - DNA, 25 bp, Homo sapien
tctctggatcagctgtatgtgctcc

SEQ ID NO: 306373 - DNA, 25 bp, Homo sapien
acattcttcattgtgcgacagtggg

SEQ ID NO: 306374 - DNA, 25 bp, Homo sapien
gactggcagtgtgtcatgtggttta

SEQ ID NO: 306375 - DNA, 25 bp, Homo sapien
gtcatgtggtttaggacattcttca

SEQ ID NO: 306376 - DNA, 25 bp, Homo sapien
cattggcctgttcccggcgctggca

SEQ ID NO: 306377 - DNA, 25 bp, Homo sapien
gttaactgtgatgatgcatttagac

SEQ ID NO: 306378 - DNA, 25 bp, Homo sapien
cgacctttaccgagtgagttaactg

SEQ ID NO: 306379 - DNA, 25 bp, Homo sapien
acagaatggacgcagccaagacgac

SEQ ID NO: 306380 - DNA, 25 bp, Homo sapien
tcactatcagtaaaggagtctcaaa

SEQ ID NO: 306381 - DNA, 25 bp, Homo sapien
tgagattcaacctcaagcagtctgg

SEQ ID NO: 306382 - DNA, 25 bp, Homo sapien
cagccctataaggtagctcctatta

SEQ ID NO: 306383 - DNA, 25 bp, Homo sapien
cacagagtactcaaagtgagattca

SEQ ID NO: 306384 - DNA, 25 bp, Homo sapien
agcagtctggcttaagagccctcat

SEQ ID NO: 306385 - DNA, 25 bp, Homo sapien
catgtcttgtacaattcttccagtg

SEQ ID NO: 306386 - DNA, 25 bp, Homo sapien
tgtcgagaagatgcacagtgtgcca

SEQ ID NO: 306387 - DNA, 25 bp, Homo sapien
gggagacacacaggacaatcatgtc

SEQ ID NO: 306388 - DNA, 25 bp, Homo sapien
aattcttccagtgtgaaatgatttg

SEQ ID NO: 306389 - DNA, 25 bp, Homo sapien
tggagcgcagtaacatgaccatagc

SEQ ID NO: 306390 - DNA, 25 bp, Homo sapien
caattctatgcactagggaagcaga

SEQ ID NO: 306391 - DNA, 25 bp, Homo sapien
tcaacatagtacaacaccacaggtc

SEQ ID NO: 306392 - DNA, 25 bp, Homo sapien
acaggtccctcacataatcaagtag

SEQ ID NO: 306393 - DNA, 25 bp, Homo sapien
tacctggaacgtttagatcacaagt

SEQ ID NO: 306394 - DNA, 25 bp, Homo sapien
tattttggatgttaagcagtgttca

SEQ ID NO: 306395 - DNA, 25 bp, Homo sapien
aaattttcataggttcaaagcagaa

SEQ ID NO: 306396 - DNA, 25 bp, Homo sapien
aaagacagggtatccttgtgtcacc

SEQ ID NO: 306397 - DNA, 25 bp, Homo sapien
gttgacccacccctagagagctagg

SEQ ID NO: 306398 - DNA, 25 bp, Homo sapien
tctttctatggagctgggatcaatc

SEQ ID NO: 306399 - DNA, 25 bp, Homo sapien
tacttgatagggtagtccaagagct

SEQ ID NO: 306400 - DNA, 25 bp, Homo sapien
gatttccaagtccaacgggtgctcc

SEQ ID NO: 306401 - DNA, 25 bp, Homo sapien
gtttgaactcctacacctccattta

SEQ ID NO: 306402 - DNA, 25 bp, Homo sapien
cattgagtcagaaagaagactcggc

SEQ ID NO: 306403 - DNA, 25 bp, Homo sapien
tccatttactcccataggactagca

SEQ ID NO: 306404 - DNA, 25 bp, Homo sapien
tatggctgaatgcaacattgagtca

SEQ ID NO: 306405 - DNA, 25 bp, Homo sapien
tttctaaggcttgtgttatcagact

SEQ ID NO: 306406 - DNA, 25 bp, Homo sapien
ccttcttgagatggcgtgtcgctct

SEQ ID NO: 306407 - DNA, 25 bp, Homo sapien
catgctcggcccatacttagttttc

SEQ ID NO: 306408 - DNA, 25 bp, Homo sapien
cagactaagctgtcattttaacaca

SEQ ID NO: 306409 - DNA, 25 bp, Homo sapien
tggcataggacccagggagggcaca

SEQ ID NO: 306410 - DNA, 25 bp, Homo sapien
ctgttggcataggacccagggaggg

SEQ ID NO: 306411 - DNA, 25 bp, Homo sapien
gttggcataggacccagggagggca

SEQ ID NO: 306412 - DNA, 25 bp, Homo sapien
agggcacactggcattttcactcat

SEQ ID NO: 306413 - DNA, 25 bp, Homo sapien
atttcgaagatcctgagtaatatct

SEQ ID NO: 306414 - DNA, 25 bp, Homo sapien
taatatcttcgtgccactgtttccg

SEQ ID NO: 306415 - DNA, 25 bp, Homo sapien
aattccagtagtggatggttgagct

SEQ ID NO: 306416 - DNA, 25 bp, Homo sapien
actgtttccgaattccagtagtgga

SEQ ID NO: 306417 - DNA, 25 bp, Homo sapien
cccttcaactttccgagcatatgca

SEQ ID NO: 306418 - DNA, 25 bp, Homo sapien
gcaactaggttttccatccgtctgt

SEQ ID NO: 306419 - DNA, 25 bp, Homo sapien
tttaaagcagcaggatccggcgtag

SEQ ID NO: 306420 - DNA, 25 bp, Homo sapien
tgtttgcagattcatacatgtcccc

SEQ ID NO: 306421 - DNA, 25 bp, Homo sapien
tagaagtcattcctggttgcggctg

SEQ ID NO: 306422 - DNA, 25 bp, Homo sapien
cagctagaaggtggtagtattccgc

SEQ ID NO: 306423 - DNA, 25 bp, Homo sapien
ggccctggattcatggaaactggaa

SEQ ID NO: 306424 - DNA, 25 bp, Homo sapien
ggctgtcccatgttaggccctggat

SEQ ID NO: 306425 - DNA, 25 bp, Homo sapien
ctttgaaaattgagtatgaatcaca

SEQ ID NO: 306426 - DNA, 25 bp, Homo sapien
aataaagctctgaactagacagaag

SEQ ID NO: 306427 - DNA, 25 bp, Homo sapien
gaaataagtatctttgcaccatctt

SEQ ID NO: 306428 - DNA, 25 bp, Homo sapien
gaaaattgagtatgaatcacaaaat

SEQ ID NO: 306429 - DNA, 25 bp, Homo sapien
ggcacactgccacggatcatacttg

SEQ ID NO: 306430 - DNA, 25 bp, Homo sapien
tcatacttgggtcaggtagagggcc

SEQ ID NO: 306431 - DNA, 25 bp, Homo sapien
cagattgtggagttattcgaggcat

SEQ ID NO: 306432 - DNA, 25 bp, Homo sapien
ttattcgaggcatcatctggtttgg

SEQ ID NO: 306433 - DNA, 25 bp, Homo sapien
aggttgagccaactgtccatggtgc

SEQ ID NO: 306434 - DNA, 25 bp, Homo sapien
gctccaggttgagccaactgtccat

SEQ ID NO: 306435 - DNA, 25 bp, Homo sapien
tccaggttgagccaactgtccatgg

SEQ ID NO: 306436 - DNA, 25 bp, Homo sapien
tacaatagggggctgggccatgctc

SEQ ID NO: 306437 - DNA, 25 bp, Homo sapien
tgaaaacgcatgcaggccactaaac

SEQ ID NO: 306438 - DNA, 25 bp, Homo sapien
gaggcaccagctaactctaaagggc

SEQ ID NO: 306439 - DNA, 25 bp, Homo sapien
taagagttcgcataaggagcaggag

SEQ ID NO: 306440 - DNA, 25 bp, Homo sapien
gccaaagagattaccaaagacgtca

SEQ ID NO: 306441 - DNA, 25 bp, Homo sapien
ccaaactgcttcattatagttattc

SEQ ID NO: 306442 - DNA, 25 bp, Homo sapien
cctaacgtcaggcttattaagtaga

SEQ ID NO: 306443 - DNA, 25 bp, Homo sapien
caaagacaggagtataggtgaagag

SEQ ID NO: 306444 - DNA, 25 bp, Homo sapien
aatcatcaaatgctcctaacgtcag

SEQ ID NO: 306445 - DNA, 25 bp, Homo sapien
gccctggttggaaggctgttgcata

SEQ ID NO: 306446 - DNA, 25 bp, Homo sapien
tacattcattccctgtgatgggaac

SEQ ID NO: 306447 - DNA, 25 bp, Homo sapien
gcttgaccgctggacggagccaaag

SEQ ID NO: 306448 - DNA, 25 bp, Homo sapien
tgttgcatacgaggcccatagccca

SEQ ID NO: 306449 - DNA, 25 bp, Homo sapien
aacaagacagcaattcagaacagaa

SEQ ID NO: 306450 - DNA, 25 bp, Homo sapien
cataacaagacagcaattcagaaca

SEQ ID NO: 306451 - DNA, 25 bp, Homo sapien
caagacagcaattcagaacagaatt

SEQ ID NO: 306452 - DNA, 25 bp, Homo sapien
taacaagacagcaattcagaacaga

SEQ ID NO: 306453 - DNA, 25 bp, Homo sapien
caccgggcaggaagaactagacatt

SEQ ID NO: 306454 - DNA, 25 bp, Homo sapien
ccctggaggcattataggagagttc

SEQ ID NO: 306455 - DNA, 25 bp, Homo sapien
ctaggtacaggcgagggtgaattct

SEQ ID NO: 306456 - DNA, 25 bp, Homo sapien
cattataggagagttcaccgggcag

SEQ ID NO: 306457 - DNA, 25 bp, Homo sapien
cacttgttggggaagttgtgttgtt

SEQ ID NO: 306458 - DNA, 25 bp, Homo sapien
agcaggaagtgaaggctgcacttgt

SEQ ID NO: 306459 - DNA, 25 bp, Homo sapien
gccttggagggggatgtagagcctg

SEQ ID NO: 306460 - DNA, 25 bp, Homo sapien
gtggtgtaggtgtctgccttggagg

SEQ ID NO: 306461 - DNA, 25 bp, Homo sapien
tgctgttggggtaggaacagacgct

SEQ ID NO: 306462 - DNA, 25 bp, Homo sapien
aggctgcggaggaagcagcggtgct

SEQ ID NO: 306463 - DNA, 25 bp, Homo sapien
cagcggtgctgttggggtaggaaca

SEQ ID NO: 306464 - DNA, 25 bp, Homo sapien
ggggtaggaacagacgctgctgtgc

SEQ ID NO: 306465 - DNA, 25 bp, Homo sapien
aaagtgctaggatgaaaagtgtaca

SEQ ID NO: 306466 - DNA, 25 bp, Homo sapien
gctaggatgaaaagtgtacaccacc

SEQ ID NO: 306467 - DNA, 25 bp, Homo sapien
ggatgaaaagtgtacaccaccgcgc

SEQ ID NO: 306468 - DNA, 25 bp, Homo sapien
accgcgcccgtccaaatctgcaatt

SEQ ID NO: 306469 - DNA, 25 bp, Homo sapien
ggaggatttgatacctgtccttcaa

SEQ ID NO: 306470 - DNA, 25 bp, Homo sapien
cttctcagcaatggcctgagaattc

SEQ ID NO: 306471 - DNA, 25 bp, Homo sapien
acttctgtgctactagtagatggag

SEQ ID NO: 306472 - DNA, 25 bp, Homo sapien
tccggctgagtatctgctggttctg

SEQ ID NO: 306473 - DNA, 25 bp, Homo sapien
ggtagctgaagtacttggctggtct

SEQ ID NO: 306474 - DNA, 25 bp, Homo sapien
tctctcttctgtttcggtagattcc

SEQ ID NO: 306475 - DNA, 25 bp, Homo sapien
tggagccggagatgactgggtagct

SEQ ID NO: 306476 - DNA, 25 bp, Homo sapien
ccattttacagtcttccactttaga

SEQ ID NO: 306477 - DNA, 25 bp, Homo sapien
gtaaagtgcctccaaagttggcatc

SEQ ID NO: 306478 - DNA, 25 bp, Homo sapien
catcagtgcctgtcgtagttcttct

SEQ ID NO: 306479 - DNA, 25 bp, Homo sapien
ggattctggatcctgacggtaaagt

SEQ ID NO: 306480 - DNA, 25 bp, Homo sapien
gattcctaaaagctgagggtccaca

SEQ ID NO: 306481 - DNA, 25 bp, Homo sapien
gccagggctcctgatactgtccagt

SEQ ID NO: 306482 - DNA, 25 bp, Homo sapien
tttctgccacaacagtatccaaggc

SEQ ID NO: 306483 - DNA, 25 bp, Homo sapien
tatcatcgacatactgccagggctc

SEQ ID NO: 306484 - DNA, 25 bp, Homo sapien
ccaaggctttgcatcactgggtcaa

SEQ ID NO: 306485 - DNA, 25 bp, Homo sapien
aaaaagcacagaggccttaaggaca

SEQ ID NO: 306486 - DNA, 25 bp, Homo sapien
catttgttaaaaagcacagaggcct

SEQ ID NO: 306487 - DNA, 25 bp, Homo sapien
accatttgttaaaaagcacagaggc

SEQ ID NO: 306488 - DNA, 25 bp, Homo sapien
ttaaaaagcacagaggccttaagga

SEQ ID NO: 306489 - DNA, 25 bp, Homo sapien
gttctggtaactgtaataagtggca

SEQ ID NO: 306490 - DNA, 25 bp, Homo sapien
tgtttgccgtagcaacacagtgtct

SEQ ID NO: 306491 - DNA, 25 bp, Homo sapien
tgcacaactgtttgccgtagcaaca

SEQ ID NO: 306492 - DNA, 25 bp, Homo sapien
catcacgaggtattgtgcacaactg

SEQ ID NO: 306493 - DNA, 25 bp, Homo sapien
catccgcatgcactccctggacatg

SEQ ID NO: 306494 - DNA, 25 bp, Homo sapien
tggacacatggaccatggtccacac

SEQ ID NO: 306495 - DNA, 25 bp, Homo sapien
gtgtgctggcccatccgcatgcact

SEQ ID NO: 306496 - DNA, 25 bp, Homo sapien
acatggaccatggtccacacctggc

SEQ ID NO: 306497 - DNA, 25 bp, Homo sapien
tataccagggagagaagaactgcta

SEQ ID NO: 306498 - DNA, 25 bp, Homo sapien
catttcagcaattaacgctatgtga

SEQ ID NO: 306499 - DNA, 25 bp, Homo sapien
tgcagacaacgacaagcatgaggga

SEQ ID NO: 306500 - DNA, 25 bp, Homo sapien
tatctcaaatgggatcacaagtagc

SEQ ID NO: 306501 - DNA, 25 bp, Homo sapien
caagccaagcaacgaagccaccaat

SEQ ID NO: 306502 - DNA, 25 bp, Homo sapien
aacacagcccaagccaagcaacgaa

SEQ ID NO: 306503 - DNA, 25 bp, Homo sapien
cacaacacagcccaagccaagcaac

SEQ ID NO: 306504 - DNA, 25 bp, Homo sapien
agccaagcaacgaagccaccaatca

SEQ ID NO: 306505 - DNA, 25 bp, Homo sapien
ggcaagaaggccatactggggtgaa

SEQ ID NO: 306506 - DNA, 25 bp, Homo sapien
tcggcaagaaggccatactggggtg

SEQ ID NO: 306507 - DNA, 25 bp, Homo sapien
tgtcggcaagaaggccatactgggg

SEQ ID NO: 306508 - DNA, 25 bp, Homo sapien
ctgtcggcaagaaggccatactggg

SEQ ID NO: 306509 - DNA, 25 bp, Homo sapien
tctccccttggatctcattgaaaca

SEQ ID NO: 306510 - DNA, 25 bp, Homo sapien
tccccttggatctcattgaaacact

SEQ ID NO: 306511 - DNA, 25 bp, Homo sapien
ctccccttggatctcattgaaacac

SEQ ID NO: 306512 - DNA, 25 bp, Homo sapien
actaagatgattgcccattgctgac

SEQ ID NO: 306513 - DNA, 25 bp, Homo sapien
aaatctcttaaaccccggcatgctg

SEQ ID NO: 306514 - DNA, 25 bp, Homo sapien
tctgttaacctacaagagaagggtg

SEQ ID NO: 306515 - DNA, 25 bp, Homo sapien
gacacagatagctactgaacagttg

SEQ ID NO: 306516 - DNA, 25 bp, Homo sapien
caggatccagtgtgtcattttttct

SEQ ID NO: 306517 - DNA, 25 bp, Homo sapien
ggatccagtgtgtcattttttctct

SEQ ID NO: 306518 - DNA, 25 bp, Homo sapien
agttcaggatccagtgtgtcatttt

SEQ ID NO: 306519 - DNA, 25 bp, Homo sapien
tcaggatccagtgtgtcattttttc

SEQ ID NO: 306520 - DNA, 25 bp, Homo sapien
tacctggctaggataggcacatact

SEQ ID NO: 306521 - DNA, 25 bp, Homo sapien
gaagagcagagccaattccaaaatt

SEQ ID NO: 306522 - DNA, 25 bp, Homo sapien
cttgcaatatttcccatgacttctg

SEQ ID NO: 306523 - DNA, 25 bp, Homo sapien
gacagccaaggtcatgaccaaagaa

SEQ ID NO: 306524 - DNA, 25 bp, Homo sapien
atctttcttccgcactctgtacatt

SEQ ID NO: 306525 - DNA, 25 bp, Homo sapien
gccagatgatctcatggtgaaggac

SEQ ID NO: 306526 - DNA, 25 bp, Homo sapien
ttcttccgcactctgtacattcaac

SEQ ID NO: 306527 - DNA, 25 bp, Homo sapien
aggccagatgatctcatggtgaagg

SEQ ID NO: 306528 - DNA, 25 bp, Homo sapien
tataattatcgtggccaaacccaaa

SEQ ID NO: 306529 - DNA, 25 bp, Homo sapien
tattcacgataaagaaaaattccag

SEQ ID NO: 306530 - DNA, 25 bp, Homo sapien
cagagaaagtaacaacgttaagact

SEQ ID NO: 306531 - DNA, 25 bp, Homo sapien
gaagatataatacagtcaattgcat

SEQ ID NO: 306532 - DNA, 25 bp, Homo sapien
tctttcctagttcgtgcacttttct

SEQ ID NO: 306533 - DNA, 25 bp, Homo sapien
tcctagttcgtgcacttttctttaa

SEQ ID NO: 306534 - DNA, 25 bp, Homo sapien
tattttctttcctagttcgtgcact

SEQ ID NO: 306535 - DNA, 25 bp, Homo sapien
agttcgtgcacttttctttaaacag

SEQ ID NO: 306536 - DNA, 25 bp, Homo sapien
ttcacacgattctctagaaaggtgc

SEQ ID NO: 306537 - DNA, 25 bp, Homo sapien
gactcagggtgattctgtcgcctca

SEQ ID NO: 306538 - DNA, 25 bp, Homo sapien
ccacggttttgtcagaagcatgaac

SEQ ID NO: 306539 - DNA, 25 bp, Homo sapien
tcatgcctggttttacttccacggt

SEQ ID NO: 306540 - DNA, 25 bp, Homo sapien
caaagagggctttggttcggtatgg

SEQ ID NO: 306541 - DNA, 25 bp, Homo sapien
agaagcacaggtcaacaccatcaat

SEQ ID NO: 306542 - DNA, 25 bp, Homo sapien
aagaagcacaggtcaacaccatcaa

SEQ ID NO: 306543 - DNA, 25 bp, Homo sapien
cagagccatactcttgaacatgcat

SEQ ID NO: 306544 - DNA, 25 bp, Homo sapien
tcagagccatactcttgaacatgca

SEQ ID NO: 306545 - DNA, 25 bp, Homo sapien
gtcagagccatactcttgaacatgc

SEQ ID NO: 306546 - DNA, 25 bp, Homo sapien
tttaggacggaagaaatgaacacta

SEQ ID NO: 306547 - DNA, 25 bp, Homo sapien
atcgaggtaagatatgtatactctc

SEQ ID NO: 306548 - DNA, 25 bp, Homo sapien
gaaatgaacactatcgaggtaagat

SEQ ID NO: 306549 - DNA, 25 bp, Homo sapien
actgcagtcctcaagcatttaggac

SEQ ID NO: 306550 - DNA, 25 bp, Homo sapien
tcaggaggatggcaatggaagatat

SEQ ID NO: 306551 - DNA, 25 bp, Homo sapien
cttggtggacatgcccaaatatgcc

SEQ ID NO: 306552 - DNA, 25 bp, Homo sapien
gatataatcatctccctcacttggt

SEQ ID NO: 306553 - DNA, 25 bp, Homo sapien
gaggatggcaatggaagatataatc

SEQ ID NO: 306554 - DNA, 25 bp, Homo sapien
tacgctctgatacagccttgtcaag

SEQ ID NO: 306555 - DNA, 25 bp, Homo sapien
tcatggacaatacgctctgatacag

SEQ ID NO: 306556 - DNA, 25 bp, Homo sapien
gacaatacgctctgatacagccttg

SEQ ID NO: 306557 - DNA, 25 bp, Homo sapien
cttgtagtcatggacaatacgctct

SEQ ID NO: 306558 - DNA, 25 bp, Homo sapien
taatctatcttcagtagcttgttta

SEQ ID NO: 306559 - DNA, 25 bp, Homo sapien
ggcaattcctttgcacttgttaatc

SEQ ID NO: 306560 - DNA, 25 bp, Homo sapien
cagaaatcaccctcgaaataaggca

SEQ ID NO: 306561 - DNA, 25 bp, Homo sapien
gggccagaaatcaccctcgaaataa

SEQ ID NO: 306562 - DNA, 25 bp, Homo sapien
gcatttttgctgtctcccttggtca

SEQ ID NO: 306563 - DNA, 25 bp, Homo sapien
catatagtttctgtgagaggtcgtt

SEQ ID NO: 306564 - DNA, 25 bp, Homo sapien
tcttgttgcccctactcaggctgct

SEQ ID NO: 306565 - DNA, 25 bp, Homo sapien
tacattgggcatcccgggtttcttc

SEQ ID NO: 306566 - DNA, 25 bp, Homo sapien
ccaccccagcatcccaaggattaca

SEQ ID NO: 306567 - DNA, 25 bp, Homo sapien
cccaccccagcatcccaaggattac

SEQ ID NO: 306568 - DNA, 25 bp, Homo sapien
cacccaggctgtaagtgcactgcaa

SEQ ID NO: 306569 - DNA, 25 bp, Homo sapien
ccaggctgtaagtgcactgcaacct

SEQ ID NO: 306570 - DNA, 25 bp, Homo sapien
ttatcccaccatggcctcctgaata

SEQ ID NO: 306571 - DNA, 25 bp, Homo sapien
agcaattatcccaccatggcctcct

SEQ ID NO: 306572 - DNA, 25 bp, Homo sapien
ctgaaaaacagacagtctctttttt

SEQ ID NO: 306573 - DNA, 25 bp, Homo sapien
aaacagacagtctcttttttttgag

SEQ ID NO: 306574 - DNA, 25 bp, Homo sapien
accactgggctcttcggagtgaaga

SEQ ID NO: 306575 - DNA, 25 bp, Homo sapien
gatcaggatcaacaatgggaggcag

SEQ ID NO: 306576 - DNA, 25 bp, Homo sapien
tgagaaacgcatcccgaccatccat

SEQ ID NO: 306577 - DNA, 25 bp, Homo sapien
ttgtcccttgccagcgtgagaaacg

SEQ ID NO: 306578 - DNA, 25 bp, Homo sapien
agacagtacagtgccagcgtgtctc

SEQ ID NO: 306579 - DNA, 25 bp, Homo sapien
tcacagacagtacagtgccagcgtg

SEQ ID NO: 306580 - DNA, 25 bp, Homo sapien
acagacagtacagtgccagcgtgtc

SEQ ID NO: 306581 - DNA, 25 bp, Homo sapien
ctcacagacagtacagtgccagcgt

SEQ ID NO: 306582 - DNA, 25 bp, Homo sapien
catcctcctgcgaagcatttgggcc

SEQ ID NO: 306583 - DNA, 25 bp, Homo sapien
tgagcaattggcattccgacactgg

SEQ ID NO: 306584 - DNA, 25 bp, Homo sapien
tgatgtttaggcagaacggcaccgg

SEQ ID NO: 306585 - DNA, 25 bp, Homo sapien
catttgggcctgctgtagtcggtgc

SEQ ID NO: 306586 - DNA, 25 bp, Homo sapien
ctgagaagtgggctggggcgtctgc

SEQ ID NO: 306587 - DNA, 25 bp, Homo sapien
tggtgtcgttggagtggcaggagtg

SEQ ID NO: 306588 - DNA, 25 bp, Homo sapien
ctgttggccagttggtgtcgttgga

SEQ ID NO: 306589 - DNA, 25 bp, Homo sapien
tgctgccttaccctgggacacaggg

SEQ ID NO: 306590 - DNA, 25 bp, Homo sapien
gaaaaatttgcacgtgggccatctg

SEQ ID NO: 306591 - DNA, 25 bp, Homo sapien
gctgtcgtctcaagatgtctcggaa

SEQ ID NO: 306592 - DNA, 25 bp, Homo sapien
ttgagtgggctgatacctacctggc

SEQ ID NO: 306593 - DNA, 25 bp, Homo sapien
tagagttggcatacttggcagcccg

SEQ ID NO: 306594 - DNA, 25 bp, Homo sapien
tgtggtgggtagccaactccttggg

SEQ ID NO: 306595 - DNA, 25 bp, Homo sapien
gtagccaactccttggggttgctgg

SEQ ID NO: 306596 - DNA, 25 bp, Homo sapien
ggtagccaactccttggggttgctg

SEQ ID NO: 306597 - DNA, 25 bp, Homo sapien
tgggtagccaactccttggggttgc

SEQ ID NO: 306598 - DNA, 25 bp, Homo sapien
ttggagagagaattagggatctgct

SEQ ID NO: 306599 - DNA, 25 bp, Homo sapien
gagtcgctgctgataggcctgtaga

SEQ ID NO: 306600 - DNA, 25 bp, Homo sapien
gggaccccatctgttgctgaaggag

SEQ ID NO: 306601 - DNA, 25 bp, Homo sapien
gactgggcctgatttgggagcatat

SEQ ID NO: 306602 - DNA, 25 bp, Homo sapien
tggggaaacgtggtgtggagaaggc

SEQ ID NO: 306603 - DNA, 25 bp, Homo sapien
ctgtggggaaacgtggtgtggagaa

SEQ ID NO: 306604 - DNA, 25 bp, Homo sapien
tgtggggaaacgtggtgtggagaag

SEQ ID NO: 306605 - DNA, 25 bp, Homo sapien
catgcctggattgctagcaagctga

SEQ ID NO: 306606 - DNA, 25 bp, Homo sapien
gcattgaattctggtccgggctggc

SEQ ID NO: 306607 - DNA, 25 bp, Homo sapien
tctgagttatcggtgctgagtccca

SEQ ID NO: 306608 - DNA, 25 bp, Homo sapien
cgtggcgcttgcaccatggaggttt

SEQ ID NO: 306609 - DNA, 25 bp, Homo sapien
tgctcccaaaatactacaaggtgtc

SEQ ID NO: 306610 - DNA, 25 bp, Homo sapien
gaagttttacgctcagacttacaga

SEQ ID NO: 306611 - DNA, 25 bp, Homo sapien
tgctttaaaccacaaacggctactg

SEQ ID NO: 306612 - DNA, 25 bp, Homo sapien
taatacatcaatttggcagctgccc

SEQ ID NO: 306613 - DNA, 25 bp, Homo sapien
gtcccagctactagggaggctgagg

SEQ ID NO: 306614 - DNA, 25 bp, Homo sapien
ggcatgatggtacacacctttgagt

SEQ ID NO: 306615 - DNA, 25 bp, Homo sapien
catgatggtacacacctttgagtcc

SEQ ID NO: 306616 - DNA, 25 bp, Homo sapien
tgatggtacacacctttgagtccca

SEQ ID NO: 306617 - DNA, 25 bp, Homo sapien
tccgtttatcgggtctcagccaagt

SEQ ID NO: 306618 - DNA, 25 bp, Homo sapien
gaaggccgtatttctggaacaggtg

SEQ ID NO: 306619 - DNA, 25 bp, Homo sapien
tagctgctccatggatatctgcggg

SEQ ID NO: 306620 - DNA, 25 bp, Homo sapien
tgctccctagcagaatgtggtgcac

SEQ ID NO: 306621 - DNA, 25 bp, Homo sapien
caggccccatcactatggtaatttt

SEQ ID NO: 306622 - DNA, 25 bp, Homo sapien
gattacaggccccatcactatggta

SEQ ID NO: 306623 - DNA, 25 bp, Homo sapien
gccccatcactatggtaatttttaa

SEQ ID NO: 306624 - DNA, 25 bp, Homo sapien
tacaggccccatcactatggtaatt

SEQ ID NO: 306625 - DNA, 25 bp, Homo sapien
tggcgagatctctgctcatgcaagc

SEQ ID NO: 306626 - DNA, 25 bp, Homo sapien
agtggcgagatctctgctcatgcaa

SEQ ID NO: 306627 - DNA, 25 bp, Homo sapien
ttttgatactgagtcatgctcttgt

SEQ ID NO: 306628 - DNA, 25 bp, Homo sapien
tgatactgagtcatgctcttgtcac

SEQ ID NO: 306629 - DNA, 25 bp, Homo sapien
ctcatgtcacgaacaggcctcctga

SEQ ID NO: 306630 - DNA, 25 bp, Homo sapien
tatctggaccttgaaaatggaatgt

SEQ ID NO: 306631 - DNA, 25 bp, Homo sapien
tcagaaacacatgtgcaagggacct

SEQ ID NO: 306632 - DNA, 25 bp, Homo sapien
tgtgccaagctcatgtcacgaacag

SEQ ID NO: 306633 - DNA, 25 bp, Homo sapien
gggaactcctctcactgattggaaa

SEQ ID NO: 306634 - DNA, 25 bp, Homo sapien
tcttaatcaagcgagagcaggtcct

SEQ ID NO: 306635 - DNA, 25 bp, Homo sapien
tcaggcaccgtgaatgtaacatggc

SEQ ID NO: 306636 - DNA, 25 bp, Homo sapien
cagctcctgagtggcttgctcctgt

SEQ ID NO: 306637 - DNA, 25 bp, Homo sapien
gagacctcagtttcgccaagcgtca

SEQ ID NO: 306638 - DNA, 25 bp, Homo sapien
ccaggtgcaggaagccatattggcc

SEQ ID NO: 306639 - DNA, 25 bp, Homo sapien
agcactcattggtcgcctccctgag

SEQ ID NO: 306640 - DNA, 25 bp, Homo sapien
cgcgggccaatcacgctgcaggaag

SEQ ID NO: 306641 - DNA, 25 bp, Homo sapien
tgtaatcccaggaacatgggagatg

SEQ ID NO: 306642 - DNA, 25 bp, Homo sapien
gtaatcccaggaacatgggagatgg

SEQ ID NO: 306643 - DNA, 25 bp, Homo sapien
taatcccaggaacatgggagatgga

SEQ ID NO: 306644 - DNA, 25 bp, Homo sapien
agaaaacgtgtgaagagcctgggta

SEQ ID NO: 306645 - DNA, 25 bp, Homo sapien
taacagaaaacgtgtgaagagcctg

SEQ ID NO: 306646 - DNA, 25 bp, Homo sapien
catgtaacagaaaacgtgtgaagag

SEQ ID NO: 306647 - DNA, 25 bp, Homo sapien
tgtaacagaaaacgtgtgaagagcc

SEQ ID NO: 306648 - DNA, 25 bp, Homo sapien
gggaggtcggcagttcccctgcttc

SEQ ID NO: 306649 - DNA, 25 bp, Homo sapien
accactgccatccaaggagcgagga

SEQ ID NO: 306650 - DNA, 25 bp, Homo sapien
tccagataggagctgctctcactgc

SEQ ID NO: 306651 - DNA, 25 bp, Homo sapien
tataactccggaaactatcatagcc

SEQ ID NO: 306652 - DNA, 25 bp, Homo sapien
cctctataatcttctatctcctctc

SEQ ID NO: 306653 - DNA, 25 bp, Homo sapien
tcctctataatcttctatctcctct

SEQ ID NO: 306654 - DNA, 25 bp, Homo sapien
gaacttagcacatgactcacccgat

SEQ ID NO: 306655 - DNA, 25 bp, Homo sapien
gaagagaacttagcacatgactcac

SEQ ID NO: 306656 - DNA, 25 bp, Homo sapien
gcacatgactcacccgatatgacca

SEQ ID NO: 306657 - DNA, 25 bp, Homo sapien
ctgggaagagaacttagcacatgac

SEQ ID NO: 306658 - DNA, 25 bp, Homo sapien
gatactggctttcttggagttggag

SEQ ID NO: 306659 - DNA, 25 bp, Homo sapien
tgtacccacgataccacacatctca

SEQ ID NO: 306660 - DNA, 25 bp, Homo sapien
tcttggtcttggagaagaaggcttc

SEQ ID NO: 306661 - DNA, 25 bp, Homo sapien
aggagacgctgcagaacctcttggt

SEQ ID NO: 306662 - DNA, 25 bp, Homo sapien
ctgttggtgtcccatctgccagctg

SEQ ID NO: 306663 - DNA, 25 bp, Homo sapien
ctgtcctgtcccttgagagtggagg

SEQ ID NO: 306664 - DNA, 25 bp, Homo sapien
cctgttggtgtcccatctgccagct

SEQ ID NO: 306665 - DNA, 25 bp, Homo sapien
acagctgacgggagcagccttgtaa

SEQ ID NO: 306666 - DNA, 25 bp, Homo sapien
cccccagtcgaagcccaagaccaga

SEQ ID NO: 306667 - DNA, 25 bp, Homo sapien
ttcccccagtcgaagcccaagacca

SEQ ID NO: 306668 - DNA, 25 bp, Homo sapien
aaacagctgacgggagcagccttgt

SEQ ID NO: 306669 - DNA, 25 bp, Homo sapien
ttcagaccgggagtgaagccaagca

SEQ ID NO: 306670 - DNA, 25 bp, Homo sapien
tacatgatccgcatcgaggagcctt

SEQ ID NO: 306671 - DNA, 25 bp, Homo sapien
ggcagggcgctgatattagcacaaa

SEQ ID NO: 306672 - DNA, 25 bp, Homo sapien
tcattagccattcagagacgagagg

SEQ ID NO: 306673 - DNA, 25 bp, Homo sapien
gatgacagaggcgatccagtacacc

SEQ ID NO: 306674 - DNA, 25 bp, Homo sapien
accttcatccctttcatcacatcct

SEQ ID NO: 306675 - DNA, 25 bp, Homo sapien
cagaggcgatccagtacacccggct

SEQ ID NO: 306676 - DNA, 25 bp, Homo sapien
gctgtctggatgacagaggcgatcc

SEQ ID NO: 306677 - DNA, 25 bp, Homo sapien
tgttgatggcacaccagccaatggg

SEQ ID NO: 306678 - DNA, 25 bp, Homo sapien
ttcataccgaagcagcacccgatac

SEQ ID NO: 306679 - DNA, 25 bp, Homo sapien
tgttcccaggttgcaccagaagtca

SEQ ID NO: 306680 - DNA, 25 bp, Homo sapien
tttcaaagccttcataccgaagcag

SEQ ID NO: 306681 - DNA, 25 bp, Homo sapien
tgagaacatcagattccacacgtgg

SEQ ID NO: 306682 - DNA, 25 bp, Homo sapien
tgacaggggcgctagcgccgaccca

SEQ ID NO: 306683 - DNA, 25 bp, Homo sapien
atcagattccacacgtggatctgcc

SEQ ID NO: 306684 - DNA, 25 bp, Homo sapien
gaacatcagattccacacgtggatc

SEQ ID NO: 306685 - DNA, 25 bp, Homo sapien
gccgtttcatgaggtagcccttcca

SEQ ID NO: 306686 - DNA, 25 bp, Homo sapien
ggaaatccacgggaagcgtcctgga

SEQ ID NO: 306687 - DNA, 25 bp, Homo sapien
gaaatccacgggaagcgtcctggag

SEQ ID NO: 306688 - DNA, 25 bp, Homo sapien
tggagcccaccagccgtttcatgag

SEQ ID NO: 306689 - DNA, 25 bp, Homo sapien
aaggaggcacatcagttaagggctc

SEQ ID NO: 306690 - DNA, 25 bp, Homo sapien
catcagttaagggctcactgccgac

SEQ ID NO: 306691 - DNA, 25 bp, Homo sapien
gaggcacatcagttaagggctcact

SEQ ID NO: 306692 - DNA, 25 bp, Homo sapien
aaaaatggaagagcggaaggaggca

SEQ ID NO: 306693 - DNA, 25 bp, Homo sapien
cagcctagactagactaagcagtgc

SEQ ID NO: 306694 - DNA, 25 bp, Homo sapien
aagggcttgggatacgtcctgacac

SEQ ID NO: 306695 - DNA, 25 bp, Homo sapien
ctgggtcaggaagaaccagcctaga

SEQ ID NO: 306696 - DNA, 25 bp, Homo sapien
gaaggaaagcgtctcagaggtcaca

SEQ ID NO: 306697 - DNA, 25 bp, Homo sapien
tgacatcttgatgccgtggcccaca

SEQ ID NO: 306698 - DNA, 25 bp, Homo sapien
catgtggcaccagaagtcgtcgtca

SEQ ID NO: 306699 - DNA, 25 bp, Homo sapien
tgtcaccatcctcgtagaggagccg

SEQ ID NO: 306700 - DNA, 25 bp, Homo sapien
acagccatgcgagtgcgtgacacct

SEQ ID NO: 306701 - DNA, 25 bp, Homo sapien
aagaggtaaggaacggcatcacagt

SEQ ID NO: 306702 - DNA, 25 bp, Homo sapien
aggaacggcatcacagtagatcttc

SEQ ID NO: 306703 - DNA, 25 bp, Homo sapien
gtgatgggccatgtcacttcgcctc

SEQ ID NO: 306704 - DNA, 25 bp, Homo sapien
tgatgggccatgtcacttcgcctct

SEQ ID NO: 306705 - DNA, 25 bp, Homo sapien
agttgccacgcagatgttgcccaga

SEQ ID NO: 306706 - DNA, 25 bp, Homo sapien
caaaccaaccgccttctgtgtagac

SEQ ID NO: 306707 - DNA, 25 bp, Homo sapien
tgcccagattcagggggtcaatggc

SEQ ID NO: 306708 - DNA, 25 bp, Homo sapien
ttcctcaaaccaaccgccttctgtg

SEQ ID NO: 306709 - DNA, 25 bp, Homo sapien
tggcggtgtgagctcaatgtcattc

SEQ ID NO: 306710 - DNA, 25 bp, Homo sapien
aagaggcatggtagcagaaccagtc

SEQ ID NO: 306711 - DNA, 25 bp, Homo sapien
ccagtccaagccatctgtggagggc

SEQ ID NO: 306712 - DNA, 25 bp, Homo sapien
cttttggcggtgtgagctcaatgtc

SEQ ID NO: 306713 - DNA, 25 bp, Homo sapien
cagtcctgttgtataggttgttcac

SEQ ID NO: 306714 - DNA, 25 bp, Homo sapien
ggttgttcactgaccaatgggataa

SEQ ID NO: 306715 - DNA, 25 bp, Homo sapien
taagtgggagctctgttcatcaacc

SEQ ID NO: 306716 - DNA, 25 bp, Homo sapien
tcatcaaccatacactggccatggg

SEQ ID NO: 306717 - DNA, 25 bp, Homo sapien
ggtcttctccaagtagttctcccag

SEQ ID NO: 306718 - DNA, 25 bp, Homo sapien
catgttaaagagtctcgatggagcg

SEQ ID NO: 306719 - DNA, 25 bp, Homo sapien
gagtctcgatggagcggctttcgac

SEQ ID NO: 306720 - DNA, 25 bp, Homo sapien
tggagcggctttcgacttggtcttc

SEQ ID NO: 306721 - DNA, 25 bp, Homo sapien
tcgtttcaccgtggccacacagatg

SEQ ID NO: 306722 - DNA, 25 bp, Homo sapien
tgagctcacaccagccgacggggta

SEQ ID NO: 306723 - DNA, 25 bp, Homo sapien
ccaccttgaagccatggtttgggca

SEQ ID NO: 306724 - DNA, 25 bp, Homo sapien
tggatgctgaggagccgatgcacca

SEQ ID NO: 306725 - DNA, 25 bp, Homo sapien
agcctcttagggccacgagagccca

SEQ ID NO: 306726 - DNA, 25 bp, Homo sapien
cagagcctcttagggccacgagagc

SEQ ID NO: 306727 - DNA, 25 bp, Homo sapien
tcagagcctcttagggccacgagag

SEQ ID NO: 306728 - DNA, 25 bp, Homo sapien
ctcttagggccacgagagcccacac

SEQ ID NO: 306729 - DNA, 25 bp, Homo sapien
gctcactctctacttaaagtggtcc

SEQ ID NO: 306730 - DNA, 25 bp, Homo sapien
tccacctcatgccaaagaacggaga

SEQ ID NO: 306731 - DNA, 25 bp, Homo sapien
catgccaaagaacggagatgggcac

SEQ ID NO: 306732 - DNA, 25 bp, Homo sapien
tggtccatgagacatctccacctca

SEQ ID NO: 306733 - DNA, 25 bp, Homo sapien
caagggcacgaacatatgacagagt

SEQ ID NO: 306734 - DNA, 25 bp, Homo sapien
catatgacagagtgggcaagatgaa

SEQ ID NO: 306735 - DNA, 25 bp, Homo sapien
ctgggtgcacaagggcacgaacata

SEQ ID NO: 306736 - DNA, 25 bp, Homo sapien
gcacgaacatatgacagagtgggca

SEQ ID NO: 306737 - DNA, 25 bp, Homo sapien
gggccggagaacagctgtcccttct

SEQ ID NO: 306738 - DNA, 25 bp, Homo sapien
cttcccacccttgttaccagggctg

SEQ ID NO: 306739 - DNA, 25 bp, Homo sapien
gctcagagggacctgggtagtttac

SEQ ID NO: 306740 - DNA, 25 bp, Homo sapien
cacccttgttaccagggctgctcag

SEQ ID NO: 306741 - DNA, 25 bp, Homo sapien
aggcgcatcccgagaccccatccac

SEQ ID NO: 306742 - DNA, 25 bp, Homo sapien
ccacacgagacaccccaagacagga

SEQ ID NO: 306743 - DNA, 25 bp, Homo sapien
catccaccctcccacacgagacacc

SEQ ID NO: 306744 - DNA, 25 bp, Homo sapien
caggcgcatcccgagaccccatcca

SEQ ID NO: 306745 - DNA, 25 bp, Homo sapien
aagacaagggtgaaagagatgagaa

SEQ ID NO: 306746 - DNA, 25 bp, Homo sapien
ctgttgttgaaagacaagggtgaaa

SEQ ID NO: 306747 - DNA, 25 bp, Homo sapien
tgttgaaagacaagggtgaaagaga

SEQ ID NO: 306748 - DNA, 25 bp, Homo sapien
tgaaagacaagggtgaaagagatga

SEQ ID NO: 306749 - DNA, 25 bp, Homo sapien
cctctttggccttcagcggtgtggc

SEQ ID NO: 306750 - DNA, 25 bp, Homo sapien
tctttggccttcagcggtgtggccg

SEQ ID NO: 306751 - DNA, 25 bp, Homo sapien
tttgtggcctctttggccttcagcg

SEQ ID NO: 306752 - DNA, 25 bp, Homo sapien
ggcctctttggccttcagcggtgtg

SEQ ID NO: 306753 - DNA, 25 bp, Homo sapien
tcttattggctatgtgccctgagct

SEQ ID NO: 306754 - DNA, 25 bp, Homo sapien
ggataggtctcacccagtggtcagg

SEQ ID NO: 306755 - DNA, 25 bp, Homo sapien
ctccaatgggaagtaataccaccac

SEQ ID NO: 306756 - DNA, 25 bp, Homo sapien
caagccccaggcagtcgtggttgta

SEQ ID NO: 306757 - DNA, 25 bp, Homo sapien
aggctccgacgagatcttcctggca

SEQ ID NO: 306758 - DNA, 25 bp, Homo sapien
tcgcgtcttagtgggcgggattctt

SEQ ID NO: 306759 - DNA, 25 bp, Homo sapien
tctcgccaggaacaggctccgacga

SEQ ID NO: 306760 - DNA, 25 bp, Homo sapien
ggcaccctgagggtcgtcctccagc

SEQ ID NO: 306761 - DNA, 25 bp, Homo sapien
ttgaagccttgtcgggcgaggccac

SEQ ID NO: 306762 - DNA, 25 bp, Homo sapien
caggcagctctggacttgaagcctt

SEQ ID NO: 306763 - DNA, 25 bp, Homo sapien
tcttccttcacacgcacagcaatga

SEQ ID NO: 306764 - DNA, 25 bp, Homo sapien
tgttctcgacggagacaggcagctc

SEQ ID NO: 306765 - DNA, 25 bp, Homo sapien
taatttacatggctcgttcaggcag

SEQ ID NO: 306766 - DNA, 25 bp, Homo sapien
cttcaggagcaggtagcagagccaa

SEQ ID NO: 306767 - DNA, 25 bp, Homo sapien
tcttagctgccgagacaagctgggt

SEQ ID NO: 306768 - DNA, 25 bp, Homo sapien
cagcaccgggcagaatttacacaga

SEQ ID NO: 306769 - DNA, 25 bp, Homo sapien
caagcaagcagggggtttaatttct

SEQ ID NO: 306770 - DNA, 25 bp, Homo sapien
gcaagcagggggtttaatttctcac

SEQ ID NO: 306771 - DNA, 25 bp, Homo sapien
agcaagcagggggtttaatttctca

SEQ ID NO: 306772 - DNA, 25 bp, Homo sapien
gagtggaaaccgcatcaccgaagtg

SEQ ID NO: 306773 - DNA, 25 bp, Homo sapien
gcaatttgctgaaggtgatccccgc

SEQ ID NO: 306774 - DNA, 25 bp, Homo sapien
gctacctgtacctagaacgcaaccg

SEQ ID NO: 306775 - DNA, 25 bp, Homo sapien
acctgcaggacaacgctgtggaccg

SEQ ID NO: 306776 - DNA, 25 bp, Homo sapien
tttaaaatccttactgtgtgaatgg

SEQ ID NO: 306777 - DNA, 25 bp, Homo sapien
tgaatggaataagtaggtgacccat

SEQ ID NO: 306778 - DNA, 25 bp, Homo sapien
tgaaaaatgccacagtgggtgatgc

SEQ ID NO: 306779 - DNA, 25 bp, Homo sapien
ggtgacccatagatcgatactgaat

SEQ ID NO: 306780 - DNA, 25 bp, Homo sapien
gatgtcgtctgtgactggcctggct

SEQ ID NO: 306781 - DNA, 25 bp, Homo sapien
tggactgggcagatgctgtatgacc

SEQ ID NO: 306782 - DNA, 25 bp, Homo sapien
tctggacgctgctcttaaaggacct

SEQ ID NO: 306783 - DNA, 25 bp, Homo sapien
gagtgttgacaacccaaagctgttc

SEQ ID NO: 306784 - DNA, 25 bp, Homo sapien
ccagaacctgcatcaagggcggcct

SEQ ID NO: 306785 - DNA, 25 bp, Homo sapien
ggcggcctgccgtattattctcttc

SEQ ID NO: 306786 - DNA, 25 bp, Homo sapien
ttagacccagggttggaggacactg

SEQ ID NO: 306787 - DNA, 25 bp, Homo sapien
tagacccagggttggaggacactga

SEQ ID NO: 306788 - DNA, 25 bp, Homo sapien
gctcactttaacctctgcctgggtt

SEQ ID NO: 306789 - DNA, 25 bp, Homo sapien
ggactgcaggctcacaccatcacgc

SEQ ID NO: 306790 - DNA, 25 bp, Homo sapien
tgggactgcaggctcacaccatcac

SEQ ID NO: 306791 - DNA, 25 bp, Homo sapien
actgcaggctcacaccatcacgcct

SEQ ID NO: 306792 - DNA, 25 bp, Homo sapien
taaagctggagtaccatgagcaggc

SEQ ID NO: 306793 - DNA, 25 bp, Homo sapien
tataagttagaacccagaggaagcc

SEQ ID NO: 306794 - DNA, 25 bp, Homo sapien
gaatgagtggacaccttacccagga

SEQ ID NO: 306795 - DNA, 25 bp, Homo sapien
caggcgcaggagttctcaaagcttt

SEQ ID NO: 306796 - DNA, 25 bp, Homo sapien
tcaaatgggctttatgacttgggcc

SEQ ID NO: 306797 - DNA, 25 bp, Homo sapien
ttgtcacttatagcgaaagccactg

SEQ ID NO: 306798 - DNA, 25 bp, Homo sapien
agtgaaccattacacccgactctgg

SEQ ID NO: 306799 - DNA, 25 bp, Homo sapien
tgtgcatggcccaatccctgatatc

SEQ ID NO: 306800 - DNA, 25 bp, Homo sapien
tgtaatcggcaacagttcctcagtt

SEQ ID NO: 306801 - DNA, 25 bp, Homo sapien
gggcagtctcttacataaccctgta

SEQ ID NO: 306802 - DNA, 25 bp, Homo sapien
cataatacagacatttccggaaggg

SEQ ID NO: 306803 - DNA, 25 bp, Homo sapien
cagttattctgtaccatgtccctca

SEQ ID NO: 306804 - DNA, 25 bp, Homo sapien
cacttcctagatgggatggcggctg

SEQ ID NO: 306805 - DNA, 25 bp, Homo sapien
gacgaggtggctgccgggcggagac

SEQ ID NO: 306806 - DNA, 25 bp, Homo sapien
cctagatgggatggcggctgggcag

SEQ ID NO: 306807 - DNA, 25 bp, Homo sapien
ggacgaggtggctgccgggcggaga

SEQ ID NO: 306808 - DNA, 25 bp, Homo sapien
ggacattcctcccaaatccctctgt

SEQ ID NO: 306809 - DNA, 25 bp, Homo sapien
ggtcagtacatcatccaagagtttc

SEQ ID NO: 306810 - DNA, 25 bp, Homo sapien
cacttggggctgataggtccttttc

SEQ ID NO: 306811 - DNA, 25 bp, Homo sapien
tgtgatctccggtttcctaaaatcc

SEQ ID NO: 306812 - DNA, 25 bp, Homo sapien
agccccattccccgtcgaaagctca

SEQ ID NO: 306813 - DNA, 25 bp, Homo sapien
gccccattccccgtcgaaagctcat

SEQ ID NO: 306814 - DNA, 25 bp, Homo sapien
ccgctcgcggcagcacccgctggag

SEQ ID NO: 306815 - DNA, 25 bp, Homo sapien
ggctctggagcgctttactttcatt

SEQ ID NO: 306816 - DNA, 25 bp, Homo sapien
atgtggctctggagcgctttacttt

SEQ ID NO: 306817 - DNA, 25 bp, Homo sapien
gtggctctggagcgctttactttca

SEQ ID NO: 306818 - DNA, 25 bp, Homo sapien
tgcgccgagcccgataaatggtatg

SEQ ID NO: 306819 - DNA, 25 bp, Homo sapien
taaatggtatgctatgactagaggt

SEQ ID NO: 306820 - DNA, 25 bp, Homo sapien
gactagaggtatgattacgttatta

SEQ ID NO: 306821 - DNA, 25 bp, Homo sapien
tgctatgactagaggtatgattacg

SEQ ID NO: 306822 - DNA, 25 bp, Homo sapien
ccgccgggctgcgctccccgcgggc

SEQ ID NO: 306823 - DNA, 25 bp, Homo sapien
tccgccgggctgcgctccccgcggg

SEQ ID NO: 306824 - DNA, 25 bp, Homo sapien
ctccgccgggctgcgctccccgcgg

SEQ ID NO: 306825 - DNA, 25 bp, Homo sapien
gtctcagggaatccaataccctgtt

SEQ ID NO: 306826 - DNA, 25 bp, Homo sapien
tcagggaatccaataccctgttccc

SEQ ID NO: 306827 - DNA, 25 bp, Homo sapien
catggttctcggtctcagggaatcc

SEQ ID NO: 306828 - DNA, 25 bp, Homo sapien
tcagaagacatggttctcggtctca

SEQ ID NO: 306829 - DNA, 25 bp, Homo sapien
attcccttccccatgtcgggaggcg

SEQ ID NO: 306830 - DNA, 25 bp, Homo sapien
gggcgatgaccaccctcaggccagt

SEQ ID NO: 306831 - DNA, 25 bp, Homo sapien
cccatgtcgggaggcgtgtccctga

SEQ ID NO: 306832 - DNA, 25 bp, Homo sapien
tgagggcgatgaccaccctcaggcc

SEQ ID NO: 306833 - DNA, 25 bp, Homo sapien
tgaatgaactgcagccctttctcga

SEQ ID NO: 306834 - DNA, 25 bp, Homo sapien
ctttctcgatgtccgccttccgttt

SEQ ID NO: 306835 - DNA, 25 bp, Homo sapien
aactgcagccctttctcgatgtccg

SEQ ID NO: 306836 - DNA, 25 bp, Homo sapien
tgaactgcagccctttctcgatgtc

SEQ ID NO: 306837 - DNA, 25 bp, Homo sapien
tcgtgcaagtgagaggccacgatgc

SEQ ID NO: 306838 - DNA, 25 bp, Homo sapien
tccagggcctcggaaggggctcgtg

SEQ ID NO: 306839 - DNA, 25 bp, Homo sapien
gggctcgtgcaagtgagaggccacg

SEQ ID NO: 306840 - DNA, 25 bp, Homo sapien
gattgcaagggtgcatgccttccag

SEQ ID NO: 306841 - DNA, 25 bp, Homo sapien
cttcttgctttaggggtagtgtcga

SEQ ID NO: 306842 - DNA, 25 bp, Homo sapien
tcatattcttcttgctttaggggta

SEQ ID NO: 306843 - DNA, 25 bp, Homo sapien
tattcttcttgctttaggggtagtg

SEQ ID NO: 306844 - DNA, 25 bp, Homo sapien
ttcttcttgctttaggggtagtgtc

SEQ ID NO: 306845 - DNA, 25 bp, Homo sapien
ttccatgtactgcaccagagcctgc

SEQ ID NO: 306846 - DNA, 25 bp, Homo sapien
ttctcccggaacagatcattgccct

SEQ ID NO: 306847 - DNA, 25 bp, Homo sapien
catggtgaagtagcaggcggcccta

SEQ ID NO: 306848 - DNA, 25 bp, Homo sapien
ggcggccctattgacatgcagcttg

SEQ ID NO: 306849 - DNA, 25 bp, Homo sapien
agttcattgagagcgcgtgccttgc

SEQ ID NO: 306850 - DNA, 25 bp, Homo sapien
tccttgtggcgtcccagttcattga

SEQ ID NO: 306851 - DNA, 25 bp, Homo sapien
aacaacgcccggatactctcactgt

SEQ ID NO: 306852 - DNA, 25 bp, Homo sapien
tgctgcactcgtaggcctccttgtg

SEQ ID NO: 306853 - DNA, 25 bp, Homo sapien
gacgatacatacatgaggcacaggg

SEQ ID NO: 306854 - DNA, 25 bp, Homo sapien
caggagctcggtcagtatttgccca

SEQ ID NO: 306855 - DNA, 25 bp, Homo sapien
tgtggtgcggatgaaacctgccctg

SEQ ID NO: 306856 - DNA, 25 bp, Homo sapien
taatacagaacatacactacgtgcc

SEQ ID NO: 306857 - DNA, 25 bp, Homo sapien
gccagctcctgaccaagctgagtca

SEQ ID NO: 306858 - DNA, 25 bp, Homo sapien
gggcctcttatacgccttgcgaact

SEQ ID NO: 306859 - DNA, 25 bp, Homo sapien
tgaccaagctgagtcacgctttcat

SEQ ID NO: 306860 - DNA, 25 bp, Homo sapien
tcttatacgccttgcgaactcgcag

SEQ ID NO: 306861 - DNA, 25 bp, Homo sapien
gccagccgcagtgccgttactgagc

SEQ ID NO: 306862 - DNA, 25 bp, Homo sapien
acgccagccgcagtgccgttactga

SEQ ID NO: 306863 - DNA, 25 bp, Homo sapien
cgcagtgccgttactgagcagagaa

SEQ ID NO: 306864 - DNA, 25 bp, Homo sapien
agccgcagtgccgttactgagcaga

SEQ ID NO: 306865 - DNA, 25 bp, Homo sapien
tgaacatctctagggaaagcggtga

SEQ ID NO: 306866 - DNA, 25 bp, Homo sapien
caaactgagttcatgaggcagggtc

SEQ ID NO: 306867 - DNA, 25 bp, Homo sapien
catggtggagaacctacagggaccc

SEQ ID NO: 306868 - DNA, 25 bp, Homo sapien
cctgcgtagataaggagcgtgctca

SEQ ID NO: 306869 - DNA, 25 bp, Homo sapien
gagattaaagccctcacatgcggcc

SEQ ID NO: 306870 - DNA, 25 bp, Homo sapien
caccgaggagcacttagagtgccag

SEQ ID NO: 306871 - DNA, 25 bp, Homo sapien
tgactatgctgttgacccagcaccg

SEQ ID NO: 306872 - DNA, 25 bp, Homo sapien
attaaagccctcacatgcggccagg

SEQ ID NO: 306873 - DNA, 25 bp, Homo sapien
tctatggaccccaatccattagaag

SEQ ID NO: 306874 - DNA, 25 bp, Homo sapien
ctgtttcgatgtcatctatggaccc

SEQ ID NO: 306875 - DNA, 25 bp, Homo sapien
tcgatgtcatctatggaccccaatc

SEQ ID NO: 306876 - DNA, 25 bp, Homo sapien
tggaccccaatccattagaagttcc

SEQ ID NO: 306877 - DNA, 25 bp, Homo sapien
tgttccctcgtatcggggacattac

SEQ ID NO: 306878 - DNA, 25 bp, Homo sapien
cacttgttccctcgtatcggggaca

SEQ ID NO: 306879 - DNA, 25 bp, Homo sapien
cttgttccctcgtatcggggacatt

SEQ ID NO: 306880 - DNA, 25 bp, Homo sapien
tccacttgttccctcgtatcgggga

SEQ ID NO: 306881 - DNA, 25 bp, Homo sapien
tgagtgggtctgtagctctcaaccc

SEQ ID NO: 306882 - DNA, 25 bp, Homo sapien
tggcccaggctcaatgcctaaatgt

SEQ ID NO: 306883 - DNA, 25 bp, Homo sapien
catgggactgttgcacctagctaag

SEQ ID NO: 306884 - DNA, 25 bp, Homo sapien
ccatgcctcagggagtaccagggtg

SEQ ID NO: 306885 - DNA, 25 bp, Homo sapien
gggccaaagacatccccgtctgaga

SEQ ID NO: 306886 - DNA, 25 bp, Homo sapien
aagtcatccaggctgtcggtgctgg

SEQ ID NO: 306887 - DNA, 25 bp, Homo sapien
ggcatcgtgggcgtggaggggagaa

SEQ ID NO: 306888 - DNA, 25 bp, Homo sapien
caggggcatcgtgggcgtggagggg

SEQ ID NO: 306889 - DNA, 25 bp, Homo sapien
aggggatcaggggagcacaaggagg

SEQ ID NO: 306890 - DNA, 25 bp, Homo sapien
tgagacacatgacatgagcattggg

SEQ ID NO: 306891 - DNA, 25 bp, Homo sapien
tgacatgagcattggggccttccct

SEQ ID NO: 306892 - DNA, 25 bp, Homo sapien
gtaccaaacaagtccctactgaggc

SEQ ID NO: 306893 - DNA, 25 bp, Homo sapien
tcgtgtcgacccaaagctgtcgagt

SEQ ID NO: 306894 - DNA, 25 bp, Homo sapien
gctgtcgagtgcatccagccgggtc

SEQ ID NO: 306895 - DNA, 25 bp, Homo sapien
gtttgtccagggagcctcgtgtcga

SEQ ID NO: 306896 - DNA, 25 bp, Homo sapien
agccgggtctccgagtacggcagca

SEQ ID NO: 306897 - DNA, 25 bp, Homo sapien
tttgcttaaacttgccagggcttcc

SEQ ID NO: 306898 - DNA, 25 bp, Homo sapien
cgttaagccctctcagtcgagtgcc

SEQ ID NO: 306899 - DNA, 25 bp, Homo sapien
cccttatgtattgctgactcggaga

SEQ ID NO: 306900 - DNA, 25 bp, Homo sapien
aggctgagtgaagtcccctccgtgc

SEQ ID NO: 306901 - DNA, 25 bp, Homo sapien
gctagggggacggtggtcctgtgag

SEQ ID NO: 306902 - DNA, 25 bp, Homo sapien
tggtttctgagcaccgctaggggga

SEQ ID NO: 306903 - DNA, 25 bp, Homo sapien
caccgctagggggacggtggtcctg

SEQ ID NO: 306904 - DNA, 25 bp, Homo sapien
ttctgagcaccgctagggggacggt

SEQ ID NO: 306905 - DNA, 25 bp, Homo sapien
ggaatgcagtgccttaccccatgca

SEQ ID NO: 306906 - DNA, 25 bp, Homo sapien
gtgtgcccgcccagcatatggcttg

SEQ ID NO: 306907 - DNA, 25 bp, Homo sapien
aggaagggcacgaggtgatcatctt

SEQ ID NO: 306908 - DNA, 25 bp, Homo sapien
tctttgatccatccactctgggagt

SEQ ID NO: 306909 - DNA, 25 bp, Homo sapien
cgcctggcccctcatcagatgttct

SEQ ID NO: 306910 - DNA, 25 bp, Homo sapien
acgcctggcccctcatcagatgttc

SEQ ID NO: 306911 - DNA, 25 bp, Homo sapien
cacgcctggcccctcatcagatgtt

SEQ ID NO: 306912 - DNA, 25 bp, Homo sapien
gagcaaggcagtgttgggcatgcag

SEQ ID NO: 306913 - DNA, 25 bp, Homo sapien
ggcagccaaggggttcttgatgagc

SEQ ID NO: 306914 - DNA, 25 bp, Homo sapien
gcttgaactcgtgggtggcagccaa

SEQ ID NO: 306915 - DNA, 25 bp, Homo sapien
tgatgagcaaggcagtgttgggcat

SEQ ID NO: 306916 - DNA, 25 bp, Homo sapien
ggatgtcccgcttgcacttgtgctc

SEQ ID NO: 306917 - DNA, 25 bp, Homo sapien
tagtaggagcccacgaagctggtct

SEQ ID NO: 306918 - DNA, 25 bp, Homo sapien
cctcacggtaggtgtagtcgccagc

SEQ ID NO: 306919 - DNA, 25 bp, Homo sapien
acttgtgctcaaggccctcacggta

SEQ ID NO: 306920 - DNA, 25 bp, Homo sapien
ctcaaagggcacagcgtgtgtgacg

SEQ ID NO: 306921 - DNA, 25 bp, Homo sapien
tcttggcgcacaaggacaaacaggc

SEQ ID NO: 306922 - DNA, 25 bp, Homo sapien
tgattgcaaggggaagcaccgcaga

SEQ ID NO: 306923 - DNA, 25 bp, Homo sapien
gcttcccaagattcaggcggtgctt

SEQ ID NO: 306924 - DNA, 25 bp, Homo sapien
cccaacacagctaggtgagccaggg

SEQ ID NO: 306925 - DNA, 25 bp, Homo sapien
cctgcagagtacagtaatcactcct

SEQ ID NO: 306926 - DNA, 25 bp, Homo sapien
caccccaacgcaggtgaggcagggt

SEQ ID NO: 306927 - DNA, 25 bp, Homo sapien
ccacaggattgcttttgtagaagta

SEQ ID NO: 306928 - DNA, 25 bp, Homo sapien
ttacagtcctgcttgttaatcatgt

SEQ ID NO: 306929 - DNA, 25 bp, Homo sapien
gaaggtgcagttatccccgtactta

SEQ ID NO: 306930 - DNA, 25 bp, Homo sapien
agttatccccgtacttacagtcctg

SEQ ID NO: 306931 - DNA, 25 bp, Homo sapien
atggtaggcgaaggtgcagttatcc

SEQ ID NO: 306932 - DNA, 25 bp, Homo sapien
ggaaggtgaagatgccctggtgctc

SEQ ID NO: 306933 - DNA, 25 bp, Homo sapien
gatggtgaggctgccgcgcttaaca

SEQ ID NO: 306934 - DNA, 25 bp, Homo sapien
tcgcggttgagggtgcccttccgct

SEQ ID NO: 306935 - DNA, 25 bp, Homo sapien
ccttcaggagcttggcgatggtgag

SEQ ID NO: 306936 - DNA, 25 bp, Homo sapien
tggttctaagaccaggcctccacag

SEQ ID NO: 306937 - DNA, 25 bp, Homo sapien
cagggctgacttcctatggtggtcc

SEQ ID NO: 306938 - DNA, 25 bp, Homo sapien
ccctccaggacctactggttctaag

SEQ ID NO: 306939 - DNA, 25 bp, Homo sapien
tgacttcctatggtggtccgtgcca

SEQ ID NO: 306940 - DNA, 25 bp, Homo sapien
ctggctgtcagaaaagagcaggtgt

SEQ ID NO: 306941 - DNA, 25 bp, Homo sapien
caagccctgcctatgactggctgtc

SEQ ID NO: 306942 - DNA, 25 bp, Homo sapien
tctggcctctagcaagataggatcc

SEQ ID NO: 306943 - DNA, 25 bp, Homo sapien
tgcatcaggctaggaatgagaaacg

SEQ ID NO: 306944 - DNA, 25 bp, Homo sapien
tgcccagggaggggaagggctggga

SEQ ID NO: 306945 - DNA, 25 bp, Homo sapien
ctgcccagggaggggaagggctggg

SEQ ID NO: 306946 - DNA, 25 bp, Homo sapien
tgttgtagaagctgtgcttggcagc

SEQ ID NO: 306947 - DNA, 25 bp, Homo sapien
agcagacagacggagagtccttggt

SEQ ID NO: 306948 - DNA, 25 bp, Homo sapien
gacagacggagagtccttggtgcct

SEQ ID NO: 306949 - DNA, 25 bp, Homo sapien
tgatccggggtttactgtcaaagca

SEQ ID NO: 306950 - DNA, 25 bp, Homo sapien
atggcggcacacgtcgaactggaag

SEQ ID NO: 306951 - DNA, 25 bp, Homo sapien
cagaccttgagctcgatgaagctgt

SEQ ID NO: 306952 - DNA, 25 bp, Homo sapien
agtacttgagggaggtggagcggac

SEQ ID NO: 306953 - DNA, 25 bp, Homo sapien
agccgtagcgcacctcatggcggca

SEQ ID NO: 306954 - DNA, 25 bp, Homo sapien
tggccttccccgcatgcgcctccat

SEQ ID NO: 306955 - DNA, 25 bp, Homo sapien
gctgccagtacttcttagactcctg

SEQ ID NO: 306956 - DNA, 25 bp, Homo sapien
tgaacgatgtcttcgtgggtcatgc

SEQ ID NO: 306957 - DNA, 25 bp, Homo sapien
cttagactcctgaacgatgtcttcg

SEQ ID NO: 306958 - DNA, 25 bp, Homo sapien
gccacatacaaacttcatctgcagg

SEQ ID NO: 306959 - DNA, 25 bp, Homo sapien
agtacttgaggtccttgtcaggctc

SEQ ID NO: 306960 - DNA, 25 bp, Homo sapien
tgcaggtcaaaggtgctgggcccat

SEQ ID NO: 306961 - DNA, 25 bp, Homo sapien
agtgccgggccttggcactacagta

SEQ ID NO: 306962 - DNA, 25 bp, Homo sapien
cttggacatcaccagaaggacccgc

SEQ ID NO: 306963 - DNA, 25 bp, Homo sapien
tcttggccttggacatcaccagaag

SEQ ID NO: 306964 - DNA, 25 bp, Homo sapien
tcaccagaaggacccgccgctcctt

SEQ ID NO: 306965 - DNA, 25 bp, Homo sapien
acacccatttcctcttggccttgga

SEQ ID NO: 306966 - DNA, 25 bp, Homo sapien
tgggaagttacgaatggatggcagt

SEQ ID NO: 306967 - DNA, 25 bp, Homo sapien
ggaagttacgaatggatggcagtgg

SEQ ID NO: 306968 - DNA, 25 bp, Homo sapien
gtgggaagttacgaatggatggcag

SEQ ID NO: 306969 - DNA, 25 bp, Homo sapien
gaagttacgaatggatggcagtggc

SEQ ID NO: 306970 - DNA, 25 bp, Homo sapien
tccttcatgaaggtccacatgtccc

SEQ ID NO: 306971 - DNA, 25 bp, Homo sapien
agttccccacatattggcacttgcg

SEQ ID NO: 306972 - DNA, 25 bp, Homo sapien
cgggctgtgtgcgaaggagcagttc

SEQ ID NO: 306973 - DNA, 25 bp, Homo sapien
cggccgttctgtgcatggatgcaga

SEQ ID NO: 306974 - DNA, 25 bp, Homo sapien
gaactgatgggggtcccttctccag

SEQ ID NO: 306975 - DNA, 25 bp, Homo sapien
tcagccacatgtcataggtctgctg

SEQ ID NO: 306976 - DNA, 25 bp, Homo sapien
catgatgtccgcgtagtccgtgggc

SEQ ID NO: 306977 - DNA, 25 bp, Homo sapien
cgtgggcatctggatctgcttctcc

SEQ ID NO: 306978 - DNA, 25 bp, Homo sapien
tgcccggaccacccacctcggagag

SEQ ID NO: 306979 - DNA, 25 bp, Homo sapien
gaccgcagccccgagcatgcagggc

SEQ ID NO: 306980 - DNA, 25 bp, Homo sapien
cccgagcatgcagggcggaggcgtt

SEQ ID NO: 306981 - DNA, 25 bp, Homo sapien
gaccacagccccgaccgcagccccg

SEQ ID NO: 306982 - DNA, 25 bp, Homo sapien
gtcgcagagccggaactcgcccatg

SEQ ID NO: 306983 - DNA, 25 bp, Homo sapien
tgctgttgctgttcttgccgcagag

SEQ ID NO: 306984 - DNA, 25 bp, Homo sapien
cactgtcggacgtgaagaccttctc

SEQ ID NO: 306985 - DNA, 25 bp, Homo sapien
ccttgtgcttctcggactggatgtg

SEQ ID NO: 306986 - DNA, 25 bp, Homo sapien
gccaccccatgtcccgccaggccct

SEQ ID NO: 306987 - DNA, 25 bp, Homo sapien
ccaccccatgtcccgccaggccctg

SEQ ID NO: 306988 - DNA, 25 bp, Homo sapien
ggtggcaggaggctcactgcccgag

SEQ ID NO: 306989 - DNA, 25 bp, Homo sapien
tgggtggcaggaggctcactgcccg

SEQ ID NO: 306990 - DNA, 25 bp, Homo sapien
gtgggtggcaggaggctcactgccc

SEQ ID NO: 306991 - DNA, 25 bp, Homo sapien
tggcaggaggctcactgcccgagct

SEQ ID NO: 306992 - DNA, 25 bp, Homo sapien
ctgtccatgggcgcagcggcacttg

SEQ ID NO: 306993 - DNA, 25 bp, Homo sapien
tccatgggcgcagcggcacttgtcc

SEQ ID NO: 306994 - DNA, 25 bp, Homo sapien
tgggcgcagcggcacttgtccccat

SEQ ID NO: 306995 - DNA, 25 bp, Homo sapien
atgggcgcagcggcacttgtcccca

SEQ ID NO: 306996 - DNA, 25 bp, Homo sapien
agcagcatgtccttgcgagccttgg

SEQ ID NO: 306997 - DNA, 25 bp, Homo sapien
tcttgcagcaggaagttgtatttgc

SEQ ID NO: 306998 - DNA, 25 bp, Homo sapien
ttgccaaagtcgtcgtcccgtgggc

SEQ ID NO: 306999 - DNA, 25 bp, Homo sapien
gcaaggtccccgtcctcttgcagca

SEQ ID NO: 307000 - DNA, 25 bp, Homo sapien
ggtaagtggccagtacagtgttccc

SEQ ID NO: 307001 - DNA, 25 bp, Homo sapien
agggcgcatgccacgattatcagga

SEQ ID NO: 307002 - DNA, 25 bp, Homo sapien
gaaacaaggctggtgacaacggact

SEQ ID NO: 307003 - DNA, 25 bp, Homo sapien
ccacggatcagggaaaacgagtatc

SEQ ID NO: 307004 - DNA, 25 bp, Homo sapien
tcctaatcacacaaggatggctgca

SEQ ID NO: 307005 - DNA, 25 bp, Homo sapien
taaattgattactgcccagctgaga

SEQ ID NO: 307006 - DNA, 25 bp, Homo sapien
tgtcaccttgcaaatagtccagtgg

SEQ ID NO: 307007 - DNA, 25 bp, Homo sapien
agtgattccttggataccacacaca

SEQ ID NO: 307008 - DNA, 25 bp, Homo sapien
cacaagtttattttctagaacaaag

SEQ ID NO: 307009 - DNA, 25 bp, Homo sapien
aagtgcacaagtttattttctagaa

SEQ ID NO: 307010 - DNA, 25 bp, Homo sapien
gcacaagtttattttctagaacaaa

SEQ ID NO: 307011 - DNA, 25 bp, Homo sapien
gtgcacaagtttattttctagaaca

SEQ ID NO: 307012 - DNA, 25 bp, Homo sapien
ctgtgcgcttctgagcctcaagggc

SEQ ID NO: 307013 - DNA, 25 bp, Homo sapien
tgccttcacctgtgcgcttctgagc

SEQ ID NO: 307014 - DNA, 25 bp, Homo sapien
catgccttcacctgtgcgcttctga

SEQ ID NO: 307015 - DNA, 25 bp, Homo sapien
ttcacctgtgcgcttctgagcctca

SEQ ID NO: 307016 - DNA, 25 bp, Homo sapien
gcagatgcagggatgcggtcggaca

SEQ ID NO: 307017 - DNA, 25 bp, Homo sapien
cagatgcagggatgcggtcggacat

SEQ ID NO: 307018 - DNA, 25 bp, Homo sapien
ccagtcgcagctcacacagcccagc

SEQ ID NO: 307019 - DNA, 25 bp, Homo sapien
aggacctcaggcatgtccatggcag

SEQ ID NO: 307020 - DNA, 25 bp, Homo sapien
tgaggacctcaggcatgtccatggc

SEQ ID NO: 307021 - DNA, 25 bp, Homo sapien
gaggacctcaggcatgtccatggca

SEQ ID NO: 307022 - DNA, 25 bp, Homo sapien
gacctcaggcatgtccatggcaggg

SEQ ID NO: 307023 - DNA, 25 bp, Homo sapien
tctcacactccgcagactttcctgt

SEQ ID NO: 307024 - DNA, 25 bp, Homo sapien
taaatgtgtgccgaagcacagccat

SEQ ID NO: 307025 - DNA, 25 bp, Homo sapien
gagatacgctctgcacatgacctaa

SEQ ID NO: 307026 - DNA, 25 bp, Homo sapien
tcctgtacacttccctcccactgga

SEQ ID NO: 307027 - DNA, 25 bp, Homo sapien
aaagaggcaaggtctacacgggctg

SEQ ID NO: 307028 - DNA, 25 bp, Homo sapien
aggggcagcacgagggagagggacc

SEQ ID NO: 307029 - DNA, 25 bp, Homo sapien
catcaatgaactagaaaacggaatg

SEQ ID NO: 307030 - DNA, 25 bp, Homo sapien
gggcatcaatgaactagaaaacgga

SEQ ID NO: 307031 - DNA, 25 bp, Homo sapien
caagaagccattgtcgttggaagcc

SEQ ID NO: 307032 - DNA, 25 bp, Homo sapien
ggcctagagtgaaggccaccaagaa

SEQ ID NO: 307033 - DNA, 25 bp, Homo sapien
ctcatggcctagagtgaaggccacc

SEQ ID NO: 307034 - DNA, 25 bp, Homo sapien
gccaagggagtctgggagctggtca

SEQ ID NO: 307035 - DNA, 25 bp, Homo sapien
gaatgagggtcaggttgcaaatggg

SEQ ID NO: 307036 - DNA, 25 bp, Homo sapien
gatgtaggtggaagacgcacgacgc

SEQ ID NO: 307037 - DNA, 25 bp, Homo sapien
ttgtaccatccagttcttcaaagga

SEQ ID NO: 307038 - DNA, 25 bp, Homo sapien
acgacgccaggccatgctgctgttt

SEQ ID NO: 307039 - DNA, 25 bp, Homo sapien
gtggggggcaggtagagaagaaggc

SEQ ID NO: 307040 - DNA, 25 bp, Homo sapien
gggggcaggtagagaagaaggctct

SEQ ID NO: 307041 - DNA, 25 bp, Homo sapien
ggggcaggtagagaagaaggctctg

SEQ ID NO: 307042 - DNA, 25 bp, Homo sapien
tggggtggggggcaggtagagaaga

SEQ ID NO: 307043 - DNA, 25 bp, Homo sapien
gacatgccgtcaatgcctggcactt

SEQ ID NO: 307044 - DNA, 25 bp, Homo sapien
atctggaaggatcactcctcgacat

SEQ ID NO: 307045 - DNA, 25 bp, Homo sapien
ctcgacatgccgtcaatgcctggca

SEQ ID NO: 307046 - DNA, 25 bp, Homo sapien
ggatcactcctcgacatgccgtcaa

SEQ ID NO: 307047 - DNA, 25 bp, Homo sapien
caaatactgcaggagcgttgcaaac

SEQ ID NO: 307048 - DNA, 25 bp, Homo sapien
ccagagggtagatgatgtgtcacaa

SEQ ID NO: 307049 - DNA, 25 bp, Homo sapien
gaagtgagaccagcgggttaagcct

SEQ ID NO: 307050 - DNA, 25 bp, Homo sapien
ggagcagctaccctaacaggcaagt

SEQ ID NO: 307051 - DNA, 25 bp, Homo sapien
ggactcggctcgcgcacctcgcctc

SEQ ID NO: 307052 - DNA, 25 bp, Homo sapien
gactcggctcgcgcacctcgcctcc

SEQ ID NO: 307053 - DNA, 25 bp, Homo sapien
cggactcggctcgcgcacctcgcct

SEQ ID NO: 307054 - DNA, 25 bp, Homo sapien
cgccccccgagatgggccggagccg

SEQ ID NO: 307055 - DNA, 25 bp, Homo sapien
gcttctttccgccgcccgcgtcgga

SEQ ID NO: 307056 - DNA, 25 bp, Homo sapien
tccacaggcggcttctttccgccgc

SEQ ID NO: 307057 - DNA, 25 bp, Homo sapien
ctgcctgcgggtccacaggcggctt

SEQ ID NO: 307058 - DNA, 25 bp, Homo sapien
gcggcttctttccgccgcccgcgtc

SEQ ID NO: 307059 - DNA, 25 bp, Homo sapien
gcgcctcgcgcggggggttctccat

SEQ ID NO: 307060 - DNA, 25 bp, Homo sapien
cgcgcctcgcgcggggggttctcca

SEQ ID NO: 307061 - DNA, 25 bp, Homo sapien
gcgcgcctcgcgcggggggttctcc

SEQ ID NO: 307062 - DNA, 25 bp, Homo sapien
gctggcggggatgccattctccagc

SEQ ID NO: 307063 - DNA, 25 bp, Homo sapien
catgtactccaggtggaaagattcg

SEQ ID NO: 307064 - DNA, 25 bp, Homo sapien
ggaaagattcgccatcatatgggat

SEQ ID NO: 307065 - DNA, 25 bp, Homo sapien
tgtcccagatgggtggcatgaggga

SEQ ID NO: 307066 - DNA, 25 bp, Homo sapien
ggtgacataccgactggcaggagct

SEQ ID NO: 307067 - DNA, 25 bp, Homo sapien
catagaggttcattatagtcgtctc

SEQ ID NO: 307068 - DNA, 25 bp, Homo sapien
taggttcgtgtccaaggagcatgaa

SEQ ID NO: 307069 - DNA, 25 bp, Homo sapien
tgaagctgggtgacggttacataga

SEQ ID NO: 307070 - DNA, 25 bp, Homo sapien
ggcggggtccggattgaagttcaca

SEQ ID NO: 307071 - DNA, 25 bp, Homo sapien
cagcaaacttgtgcttccgagggtt

SEQ ID NO: 307072 - DNA, 25 bp, Homo sapien
acttccacacaattggggtcgatgg

SEQ ID NO: 307073 - DNA, 25 bp, Homo sapien
ctttttgatcataggctggggcttc

SEQ ID NO: 307074 - DNA, 25 bp, Homo sapien
gggcatcccgtgaccgtttagctgc

SEQ ID NO: 307075 - DNA, 25 bp, Homo sapien
catacttggacacgatggtcttgca

SEQ ID NO: 307076 - DNA, 25 bp, Homo sapien
tagctgccacgttgttcttcttgcg

SEQ ID NO: 307077 - DNA, 25 bp, Homo sapien
tgcccggatggtgatctgattctct

SEQ ID NO: 307078 - DNA, 25 bp, Homo sapien
caagagcctgctatcccgtgaaagt

SEQ ID NO: 307079 - DNA, 25 bp, Homo sapien
tgggacaaacgagcttcacatggcc

SEQ ID NO: 307080 - DNA, 25 bp, Homo sapien
tgaaatgcagagacagccgatggcc

SEQ ID NO: 307081 - DNA, 25 bp, Homo sapien
tataatgaagctgagacgtggccgc

SEQ ID NO: 307082 - DNA, 25 bp, Homo sapien
tttgcgttccaaggagcacggctcc

SEQ ID NO: 307083 - DNA, 25 bp, Homo sapien
aaaccaagtggtgttctggcatccc

SEQ ID NO: 307084 - DNA, 25 bp, Homo sapien
catttcgaaaagagtccagcagcca

SEQ ID NO: 307085 - DNA, 25 bp, Homo sapien
taagagagcaatatccacctggaag

SEQ ID NO: 307086 - DNA, 25 bp, Homo sapien
gcacacacgcacataaggccaatgg

SEQ ID NO: 307087 - DNA, 25 bp, Homo sapien
aaggccaatgggctacggtctgctt

SEQ ID NO: 307088 - DNA, 25 bp, Homo sapien
cacacgcacataaggccaatgggct

SEQ ID NO: 307089 - DNA, 25 bp, Homo sapien
cgcacataaggccaatgggctacgg

SEQ ID NO: 307090 - DNA, 25 bp, Homo sapien
taggtccgtaccttcctctctgtca

SEQ ID NO: 307091 - DNA, 25 bp, Homo sapien
ggtctccatgtaggtccgtaccttc

SEQ ID NO: 307092 - DNA, 25 bp, Homo sapien
gctggtagacaacccgcgatgggca

SEQ ID NO: 307093 - DNA, 25 bp, Homo sapien
cagctggtagacaacccgcgatggg

SEQ ID NO: 307094 - DNA, 25 bp, Homo sapien
gctgtctggtaatagggtgcagtaa

SEQ ID NO: 307095 - DNA, 25 bp, Homo sapien
gcagtgtgtgaagggctgtctggta

SEQ ID NO: 307096 - DNA, 25 bp, Homo sapien
gggcatgtgtccagcttcggaattt

SEQ ID NO: 307097 - DNA, 25 bp, Homo sapien
agctttcccggattagctgctgacg

SEQ ID NO: 307098 - DNA, 25 bp, Homo sapien
tgacagcaggcgatggcaggtgcag

SEQ ID NO: 307099 - DNA, 25 bp, Homo sapien
actgcggcagactggatttgatggg

SEQ ID NO: 307100 - DNA, 25 bp, Homo sapien
gggactgcggcagactggatttgat

SEQ ID NO: 307101 - DNA, 25 bp, Homo sapien
tagggaagagagctagctgacagca

SEQ ID NO: 307102 - DNA, 25 bp, Homo sapien
gggtgtcgacatgctgctgttcttc

SEQ ID NO: 307103 - DNA, 25 bp, Homo sapien
catgctgctgttcttccccaccaca

SEQ ID NO: 307104 - DNA, 25 bp, Homo sapien
cgggtgtcgacatgctgctgttctt

SEQ ID NO: 307105 - DNA, 25 bp, Homo sapien
cgacatgctgctgttcttccccacc

SEQ ID NO: 307106 - DNA, 25 bp, Homo sapien
gatgactggttaccctgcctggaag

SEQ ID NO: 307107 - DNA, 25 bp, Homo sapien
ctggaagagcgactccccctcttgg

SEQ ID NO: 307108 - DNA, 25 bp, Homo sapien
aaggcgaggctggtgccgtgtggcc

SEQ ID NO: 307109 - DNA, 25 bp, Homo sapien
tcctcaattgtcaaaggcgaggctg

SEQ ID NO: 307110 - DNA, 25 bp, Homo sapien
gtgacaagtctgaagccaaaccgct

SEQ ID NO: 307111 - DNA, 25 bp, Homo sapien
tcagaccaaggcacatgagccaagg

SEQ ID NO: 307112 - DNA, 25 bp, Homo sapien
ttcttggaactcagcagcggaacca

SEQ ID NO: 307113 - DNA, 25 bp, Homo sapien
tacaagcctgttgggtggaccctgg

SEQ ID NO: 307114 - DNA, 25 bp, Homo sapien
cctaactagggatcaaagtaaggcg

SEQ ID NO: 307115 - DNA, 25 bp, Homo sapien
ggacagtaaccctcacacagaaagt

SEQ ID NO: 307116 - DNA, 25 bp, Homo sapien
catgcgcagcatttaggacagtaac

SEQ ID NO: 307117 - DNA, 25 bp, Homo sapien
tcactgggcgtgaatgcatgcgcag

SEQ ID NO: 307118 - DNA, 25 bp, Homo sapien
gtagacatttggtttctccacattg

SEQ ID NO: 307119 - DNA, 25 bp, Homo sapien
tagtagacatttggtttctccacat

SEQ ID NO: 307120 - DNA, 25 bp, Homo sapien
gtcgcccaggctcccgagtagttgg

SEQ ID NO: 307121 - DNA, 25 bp, Homo sapien
ctgtcgcccaggctcccgagtagtt

SEQ ID NO: 307122 - DNA, 25 bp, Homo sapien
tgtagtagctcgatatcggctcact

SEQ ID NO: 307123 - DNA, 25 bp, Homo sapien
ctggagtgtagtagctcgatatcgg

SEQ ID NO: 307124 - DNA, 25 bp, Homo sapien
accattttggaaaataatgtggaag

SEQ ID NO: 307125 - DNA, 25 bp, Homo sapien
ataatgtggaagggaagtttcttct

SEQ ID NO: 307126 - DNA, 25 bp, Homo sapien
ctggatttgagggggccttagggag

SEQ ID NO: 307127 - DNA, 25 bp, Homo sapien
ggcggccgaggagctatatgcaccc

SEQ ID NO: 307128 - DNA, 25 bp, Homo sapien
tcaacaccacatcagatccacagca

SEQ ID NO: 307129 - DNA, 25 bp, Homo sapien
ggaaggcttttcagagggttgacaa

SEQ ID NO: 307130 - DNA, 25 bp, Homo sapien
gagctatatgcacccagacgaggct

SEQ ID NO: 307131 - DNA, 25 bp, Homo sapien
tctcgacctcctgacggcgtgattc

SEQ ID NO: 307132 - DNA, 25 bp, Homo sapien
tcgacctcctgacggcgtgattcac

SEQ ID NO: 307133 - DNA, 25 bp, Homo sapien
tcacacccaactaatgttttgtgtt

SEQ ID NO: 307134 - DNA, 25 bp, Homo sapien
cgtgccatcacacccaactaatgtt

SEQ ID NO: 307135 - DNA, 25 bp, Homo sapien
ggagtccaacattagccctaggcaa

SEQ ID NO: 307136 - DNA, 25 bp, Homo sapien
gtatgcacgggcgacctgagagcca

SEQ ID NO: 307137 - DNA, 25 bp, Homo sapien
accatccatgggcatccactctctg

SEQ ID NO: 307138 - DNA, 25 bp, Homo sapien
tgaagacagagtacgggccgggtgc

SEQ ID NO: 307139 - DNA, 25 bp, Homo sapien
gcctactctagatctagtacttgat

SEQ ID NO: 307140 - DNA, 25 bp, Homo sapien
aggatgagaacagcttgcctaagcc

SEQ ID NO: 307141 - DNA, 25 bp, Homo sapien
tagtactagatccttagatgtgggc

SEQ ID NO: 307142 - DNA, 25 bp, Homo sapien
gcctaagccaggttccatccaaaag

SEQ ID NO: 307143 - DNA, 25 bp, Homo sapien
cagtgacagcctcggatggacataa

SEQ ID NO: 307144 - DNA, 25 bp, Homo sapien
tacatcattgtgcttgctaccgcag

SEQ ID NO: 307145 - DNA, 25 bp, Homo sapien
tccacaaagttagaaaccgctccag

SEQ ID NO: 307146 - DNA, 25 bp, Homo sapien
gaaacgattggtcctccttacagtg

SEQ ID NO: 307147 - DNA, 25 bp, Homo sapien
caaaaggtggattatcttctgaaga

SEQ ID NO: 307148 - DNA, 25 bp, Homo sapien
tctgcactaatttacctggtttcgt

SEQ ID NO: 307149 - DNA, 25 bp, Homo sapien
catttgtaaaatgtaagaggtatat

SEQ ID NO: 307150 - DNA, 25 bp, Homo sapien
tttggtgtccgtttgtattgaataa

SEQ ID NO: 307151 - DNA, 25 bp, Homo sapien
tctaggcccagaccatcatcatggc

SEQ ID NO: 307152 - DNA, 25 bp, Homo sapien
tgactacagggagattagcacttcg

SEQ ID NO: 307153 - DNA, 25 bp, Homo sapien
tgtccaagctcatagggaagaaaga

SEQ ID NO: 307154 - DNA, 25 bp, Homo sapien
taatgagtggcttcctgtgctaaga

SEQ ID NO: 307155 - DNA, 25 bp, Homo sapien
gatccctttgaggtgtcctaccaga

SEQ ID NO: 307156 - DNA, 25 bp, Homo sapien
caaggagttcgtgtacaacggtggt

SEQ ID NO: 307157 - DNA, 25 bp, Homo sapien
tgacgcccaggtgttcgtgcccatt

SEQ ID NO: 307158 - DNA, 25 bp, Homo sapien
gagctgagtgtctggattgatccct

SEQ ID NO: 307159 - DNA, 25 bp, Homo sapien
tggactgaaccagacagcatacaca

SEQ ID NO: 307160 - DNA, 25 bp, Homo sapien
tcaccaagatattgcagagacagca

SEQ ID NO: 307161 - DNA, 25 bp, Homo sapien
gcacctggccggagttcttaaatca

SEQ ID NO: 307162 - DNA, 25 bp, Homo sapien
tagtgtcattcatacagtgacctga

SEQ ID NO: 307163 - DNA, 25 bp, Homo sapien
acgtgatgaaaccccgtgtgtacta

SEQ ID NO: 307164 - DNA, 25 bp, Homo sapien
caacgtgatgaaaccccgtgtgtac

SEQ ID NO: 307165 - DNA, 25 bp, Homo sapien
ggccaacgtgatgaaaccccgtgtg

SEQ ID NO: 307166 - DNA, 25 bp, Homo sapien
gccaacgtgatgaaaccccgtgtgt

SEQ ID NO: 307167 - DNA, 25 bp, Homo sapien
gtctgtattgatcattaatagacat

SEQ ID NO: 307168 - DNA, 25 bp, Homo sapien
tctgtattgatcattaatagacatt

SEQ ID NO: 307169 - DNA, 25 bp, Homo sapien
cggacagcggcagggcactcgcatc

SEQ ID NO: 307170 - DNA, 25 bp, Homo sapien
ccctccacacttagttgagtcctgt

SEQ ID NO: 307171 - DNA, 25 bp, Homo sapien
tccacacttagttgagtcctgtagt

SEQ ID NO: 307172 - DNA, 25 bp, Homo sapien
ggcactcgcatccacccggtctgtg

SEQ ID NO: 307173 - DNA, 25 bp, Homo sapien
gtcttcatagccgaaaggggccttg

SEQ ID NO: 307174 - DNA, 25 bp, Homo sapien
ccttgttgtcagacctaaggttgac

SEQ ID NO: 307175 - DNA, 25 bp, Homo sapien
tcttcatagccgaaaggggccttgt

SEQ ID NO: 307176 - DNA, 25 bp, Homo sapien
gaaaggggccttgttgtcagaccta

SEQ ID NO: 307177 - DNA, 25 bp, Homo sapien
ccagttccaagagtggccctctcct

SEQ ID NO: 307178 - DNA, 25 bp, Homo sapien
ccctctcctgggtggggtgcatttc

SEQ ID NO: 307179 - DNA, 25 bp, Homo sapien
agttccaagagtggccctctcctgg

SEQ ID NO: 307180 - DNA, 25 bp, Homo sapien
ctgggtggggtgcatttcctccctt

SEQ ID NO: 307181 - DNA, 25 bp, Homo sapien
ataccgtctgccgttgcgcgacacg

SEQ ID NO: 307182 - DNA, 25 bp, Homo sapien
tgttggctgaggcaagccgtggctc

SEQ ID NO: 307183 - DNA, 25 bp, Homo sapien
aggagggcaggaccgtctgccggcg

SEQ ID NO: 307184 - DNA, 25 bp, Homo sapien
ttgactttgctcacttcgggccggg

SEQ ID NO: 307185 - DNA, 25 bp, Homo sapien
tcatgcctgcccgaaacgggtccga

SEQ ID NO: 307186 - DNA, 25 bp, Homo sapien
gaggaatcacaaggcgctcggaaga

SEQ ID NO: 307187 - DNA, 25 bp, Homo sapien
gctcgggcaaacgtccgaaccatgg

SEQ ID NO: 307188 - DNA, 25 bp, Homo sapien
cggacacggccagacgctcggagct

SEQ ID NO: 307189 - DNA, 25 bp, Homo sapien
tgtggcactcggctagtttcacggc

SEQ ID NO: 307190 - DNA, 25 bp, Homo sapien
tgacgcacaaggcaagtagtccctg

SEQ ID NO: 307191 - DNA, 25 bp, Homo sapien
caagatcacacagtcggtagccgaa

SEQ ID NO: 307192 - DNA, 25 bp, Homo sapien
tcttagcggctggatcctaaaccca

SEQ ID NO: 307193 - DNA, 25 bp, Homo sapien
tcacttgcttgctcatggagctcac

SEQ ID NO: 307194 - DNA, 25 bp, Homo sapien
gcctgagtaggcattcagctcacaa

SEQ ID NO: 307195 - DNA, 25 bp, Homo sapien
tattttgcaagcacggtgcatgccg

SEQ ID NO: 307196 - DNA, 25 bp, Homo sapien
taagccctggcaagatgtaatcaca

SEQ ID NO: 307197 - DNA, 25 bp, Homo sapien
ccagccctgacctgtagcatttttt

SEQ ID NO: 307198 - DNA, 25 bp, Homo sapien
cgcccagccctgacctgtagcattt

SEQ ID NO: 307199 - DNA, 25 bp, Homo sapien
gcccagccctgacctgtagcatttt

SEQ ID NO: 307200 - DNA, 25 bp, Homo sapien
ccacgcccagccctgacctgtagca

SEQ ID NO: 307201 - DNA, 25 bp, Homo sapien
tactttgtcctcttattaccactgg

SEQ ID NO: 307202 - DNA, 25 bp, Homo sapien
tgtgattcaaaacagaggtagtggg

SEQ ID NO: 307203 - DNA, 25 bp, Homo sapien
ttaacacttgtccagctacagtggg

SEQ ID NO: 307204 - DNA, 25 bp, Homo sapien
tagtcacccaggaatttgtgattca

SEQ ID NO: 307205 - DNA, 25 bp, Homo sapien
cacattctgctgtccgaaaatccaa

SEQ ID NO: 307206 - DNA, 25 bp, Homo sapien
tctcttgtcctcaactctgatttgc

SEQ ID NO: 307207 - DNA, 25 bp, Homo sapien
agtgagtacaccattgaatcttctg

SEQ ID NO: 307208 - DNA, 25 bp, Homo sapien
tactagctagattacacttcattag

SEQ ID NO: 307209 - DNA, 25 bp, Homo sapien
cccatgagcgaagaataggtctttt

SEQ ID NO: 307210 - DNA, 25 bp, Homo sapien
tagtgctacaggcaagatttacccc

SEQ ID NO: 307211 - DNA, 25 bp, Homo sapien
ttttcggttagtattggcagcaggg

SEQ ID NO: 307212 - DNA, 25 bp, Homo sapien
tacagtctcactaggttaatgatgg

SEQ ID NO: 307213 - DNA, 25 bp, Homo sapien
gacaaagatgaggtcgcattaaagt

SEQ ID NO: 307214 - DNA, 25 bp, Homo sapien
aagatgaggtcgcattaaagtgacg

SEQ ID NO: 307215 - DNA, 25 bp, Homo sapien
agatgaggtcgcattaaagtgacgt

SEQ ID NO: 307216 - DNA, 25 bp, Homo sapien
caaagatgaggtcgcattaaagtga

SEQ ID NO: 307217 - DNA, 25 bp, Homo sapien
ctgcagccgagtcaccagtaggctg

SEQ ID NO: 307218 - DNA, 25 bp, Homo sapien
gcagccgagtcaccagtaggctgta

SEQ ID NO: 307219 - DNA, 25 bp, Homo sapien
ccgagtcaccagtaggctgtagggc

SEQ ID NO: 307220 - DNA, 25 bp, Homo sapien
agccgagtcaccagtaggctgtagg

SEQ ID NO: 307221 - DNA, 25 bp, Homo sapien
tacacgagaagttggccccaggttg

SEQ ID NO: 307222 - DNA, 25 bp, Homo sapien
cagagaagcgggcacgggtgccggg

SEQ ID NO: 307223 - DNA, 25 bp, Homo sapien
gcccacaaccgggacaggtacacga

SEQ ID NO: 307224 - DNA, 25 bp, Homo sapien
acagccgccggcacagtaggaggca

SEQ ID NO: 307225 - DNA, 25 bp, Homo sapien
tgggcccacgcttcttgcgaggcag

SEQ ID NO: 307226 - DNA, 25 bp, Homo sapien
gaaagaggtgcctccgctcttcacc

SEQ ID NO: 307227 - DNA, 25 bp, Homo sapien
gctgcttgggcccacgcttcttgcg

SEQ ID NO: 307228 - DNA, 25 bp, Homo sapien
gaagaaagaggtgcctccgctcttc

SEQ ID NO: 307229 - DNA, 25 bp, Homo sapien
ccaatggacaatggattcaggaagt

SEQ ID NO: 307230 - DNA, 25 bp, Homo sapien
gatcaggaaagagagcccagatctc

SEQ ID NO: 307231 - DNA, 25 bp, Homo sapien
gactcccttaaatcatgagacagga

SEQ ID NO: 307232 - DNA, 25 bp, Homo sapien
caagatccttttcggttcaaaatgg

SEQ ID NO: 307233 - DNA, 25 bp, Homo sapien
tccagaacaagcattgggcgctcag

SEQ ID NO: 307234 - DNA, 25 bp, Homo sapien
tcttagctgaaggaacaaacaagga

SEQ ID NO: 307235 - DNA, 25 bp, Homo sapien
aataggcctgcctcatctcacagag

SEQ ID NO: 307236 - DNA, 25 bp, Homo sapien
gggactgtctttgcttaccacggta

SEQ ID NO: 307237 - DNA, 25 bp, Homo sapien
tagttgtaccacattggacactggg

SEQ ID NO: 307238 - DNA, 25 bp, Homo sapien
accacattggacactgggaacacca

SEQ ID NO: 307239 - DNA, 25 bp, Homo sapien
gatgcctagttgtaccacattggac

SEQ ID NO: 307240 - DNA, 25 bp, Homo sapien
ctgagggatgcctagttgtaccaca

SEQ ID NO: 307241 - DNA, 25 bp, Homo sapien
ctactacacccaattatttgtttat

SEQ ID NO: 307242 - DNA, 25 bp, Homo sapien
cactactacacccaattatttgttt

SEQ ID NO: 307243 - DNA, 25 bp, Homo sapien
acactactacacccaattatttgtt

SEQ ID NO: 307244 - DNA, 25 bp, Homo sapien
gttaatgttcttctctagcaggtca

SEQ ID NO: 307245 - DNA, 25 bp, Homo sapien
taatgttcttctctagcaggtcata

SEQ ID NO: 307246 - DNA, 25 bp, Homo sapien
aacaatgttaatgttcttctctagc

SEQ ID NO: 307247 - DNA, 25 bp, Homo sapien
aatgttaatgttcttctctagcagg

SEQ ID NO: 307248 - DNA, 25 bp, Homo sapien
cgacttgcctcgctcaatttcctgg

SEQ ID NO: 307249 - DNA, 25 bp, Homo sapien
agccgcaggtacgacttgcctcgct

SEQ ID NO: 307250 - DNA, 25 bp, Homo sapien
catacacaatcttctccgagagtgt

SEQ ID NO: 307251 - DNA, 25 bp, Homo sapien
tctccgagagtgtcagcggccggtt

SEQ ID NO: 307252 - DNA, 25 bp, Homo sapien
cataatgagcaagtgctatttttag

SEQ ID NO: 307253 - DNA, 25 bp, Homo sapien
tccaaagaggtgtgagaatttggag

SEQ ID NO: 307254 - DNA, 25 bp, Homo sapien
tgagggtgaggcctctcgcccagtc

SEQ ID NO: 307255 - DNA, 25 bp, Homo sapien
tttaaaagcagaccaatccaaagag

SEQ ID NO: 307256 - DNA, 25 bp, Homo sapien
ttccagaagcccacgccatatttgg

SEQ ID NO: 307257 - DNA, 25 bp, Homo sapien
tagagatgcttgagtacacacccag

SEQ ID NO: 307258 - DNA, 25 bp, Homo sapien
cacttaaaatgctggttacctgggt

SEQ ID NO: 307259 - DNA, 25 bp, Homo sapien
gcctggaacatacttctctggcttg

SEQ ID NO: 307260 - DNA, 25 bp, Homo sapien
cacccagaaaatgagcacgtataat

SEQ ID NO: 307261 - DNA, 25 bp, Homo sapien
gacaaaactgtccaactgtccacca

SEQ ID NO: 307262 - DNA, 25 bp, Homo sapien
catggccacatgacctatggtacct

SEQ ID NO: 307263 - DNA, 25 bp, Homo sapien
caaaagaagatccatccttgggaca

SEQ ID NO: 307264 - DNA, 25 bp, Homo sapien
acgttcacacttgcacttccagaga

SEQ ID NO: 307265 - DNA, 25 bp, Homo sapien
accagggtacgcatagttttccaga

SEQ ID NO: 307266 - DNA, 25 bp, Homo sapien
aagaacaccagggtacgcatagttt

SEQ ID NO: 307267 - DNA, 25 bp, Homo sapien
acaccagggtacgcatagttttcca

SEQ ID NO: 307268 - DNA, 25 bp, Homo sapien
gaacaccagggtacgcatagttttc

SEQ ID NO: 307269 - DNA, 25 bp, Homo sapien
tttgggtgaggaccaaccggagaga

SEQ ID NO: 307270 - DNA, 25 bp, Homo sapien
cggagagagagcccgtcagcttcac

SEQ ID NO: 307271 - DNA, 25 bp, Homo sapien
ggagagagagcccgtcagcttcacg

SEQ ID NO: 307272 - DNA, 25 bp, Homo sapien
gggtgaggaccaaccggagagagag

SEQ ID NO: 307273 - DNA, 25 bp, Homo sapien
tgaggatgtggactagacaatctct

SEQ ID NO: 307274 - DNA, 25 bp, Homo sapien
tggactagacaatctctaatgctgt

SEQ ID NO: 307275 - DNA, 25 bp, Homo sapien
tgaaggccattcaccgcttctactc

SEQ ID NO: 307276 - DNA, 25 bp, Homo sapien
aatggaacagacagattctcaagtg

SEQ ID NO: 307277 - DNA, 25 bp, Homo sapien
acagcgggccgactcatcccttgag

SEQ ID NO: 307278 - DNA, 25 bp, Homo sapien
tgacagcgggccgactcatcccttg

SEQ ID NO: 307279 - DNA, 25 bp, Homo sapien
gtgacagcgggccgactcatccctt

SEQ ID NO: 307280 - DNA, 25 bp, Homo sapien
atgtggtgacagcgggccgactcat

SEQ ID NO: 307281 - DNA, 25 bp, Homo sapien
cttcccggccggtcttgctcaggta

SEQ ID NO: 307282 - DNA, 25 bp, Homo sapien
aattcatcagctagattggcaatgt

SEQ ID NO: 307283 - DNA, 25 bp, Homo sapien
gaattcatcagctagattggcaatg

SEQ ID NO: 307284 - DNA, 25 bp, Homo sapien
tgtgcgcagcatgcagtaaacctcc

SEQ ID NO: 307285 - DNA, 25 bp, Homo sapien
cagaggctaagtgcgtgaccaaggc

SEQ ID NO: 307286 - DNA, 25 bp, Homo sapien
caaaaatggacttaaggccagacgc

SEQ ID NO: 307287 - DNA, 25 bp, Homo sapien
tgcccggccgcttttggaatcatga

SEQ ID NO: 307288 - DNA, 25 bp, Homo sapien
cttgcccacttctgccacagggtga

SEQ ID NO: 307289 - DNA, 25 bp, Homo sapien
agggcccattgatgtgtggcttcag

SEQ ID NO: 307290 - DNA, 25 bp, Homo sapien
cactcggatgtccagaggccatcct

SEQ ID NO: 307291 - DNA, 25 bp, Homo sapien
tcggatgtccagaggccatccttcc

SEQ ID NO: 307292 - DNA, 25 bp, Homo sapien
caccacttctggccgaaaaagtaat

SEQ ID NO: 307293 - DNA, 25 bp, Homo sapien
tcagaaactgcccaccttagaaagt

SEQ ID NO: 307294 - DNA, 25 bp, Homo sapien
gtgattgtctacagccctgggcaga

SEQ ID NO: 307295 - DNA, 25 bp, Homo sapien
aataataaacccatttcagaaactg

SEQ ID NO: 307296 - DNA, 25 bp, Homo sapien
gcttgagtctgcagttttgagtctg

SEQ ID NO: 307297 - DNA, 25 bp, Homo sapien
ttgagtctgcagttttgagtctgcc

SEQ ID NO: 307298 - DNA, 25 bp, Homo sapien
cagttttgagtctgcctttgttgcc

SEQ ID NO: 307299 - DNA, 25 bp, Homo sapien
gtctgcagttttgagtctgcctttg

SEQ ID NO: 307300 - DNA, 25 bp, Homo sapien
aaaagtcacataaagcagcatgggt

SEQ ID NO: 307301 - DNA, 25 bp, Homo sapien
aaagtcacataaagcagcatgggtg

SEQ ID NO: 307302 - DNA, 25 bp, Homo sapien
aaacgggaaaatctatgcacacaat

SEQ ID NO: 307303 - DNA, 25 bp, Homo sapien
aatgtaaaacgggaaaatctatgca

SEQ ID NO: 307304 - DNA, 25 bp, Homo sapien
ttagtggctgttaggtggcagagcc

SEQ ID NO: 307305 - DNA, 25 bp, Homo sapien
tggtgatagcagcagtaggcccaac

SEQ ID NO: 307306 - DNA, 25 bp, Homo sapien
ggtgtcagtacgatcatgactcctg

SEQ ID NO: 307307 - DNA, 25 bp, Homo sapien
gaacccacacatagacagtgaagta

SEQ ID NO: 307308 - DNA, 25 bp, Homo sapien
ttcggccagacggtatagaaatctc

SEQ ID NO: 307309 - DNA, 25 bp, Homo sapien
cggccagacggtatagaaatctctt

SEQ ID NO: 307310 - DNA, 25 bp, Homo sapien
gccagacggtatagaaatctctttt

SEQ ID NO: 307311 - DNA, 25 bp, Homo sapien
cagacggtatagaaatctcttttca

SEQ ID NO: 307312 - DNA, 25 bp, Homo sapien
ggagacagtgagcagaggtctccac

SEQ ID NO: 307313 - DNA, 25 bp, Homo sapien
ctggtgcattgtgggtggtggggtt

SEQ ID NO: 307314 - DNA, 25 bp, Homo sapien
gaattggtgcagctaccaattagac

SEQ ID NO: 307315 - DNA, 25 bp, Homo sapien
tgaattggtgcagctaccaattaga

SEQ ID NO: 307316 - DNA, 25 bp, Homo sapien
ctctgggcttgtgccgcctggaggc

SEQ ID NO: 307317 - DNA, 25 bp, Homo sapien
tgcaggacgaagtgctgtactggaa

SEQ ID NO: 307318 - DNA, 25 bp, Homo sapien
ggtggctgcaggacgaagtgctgta

SEQ ID NO: 307319 - DNA, 25 bp, Homo sapien
aggacgaagtgctgtactggaaccc

SEQ ID NO: 307320 - DNA, 25 bp, Homo sapien
cacccagatccctcaagatctgtgc

SEQ ID NO: 307321 - DNA, 25 bp, Homo sapien
acaatgccacccagatccctcaaga

SEQ ID NO: 307322 - DNA, 25 bp, Homo sapien
gccacaagcattggccaggacaatg

SEQ ID NO: 307323 - DNA, 25 bp, Homo sapien
ctgtcccactggccaatgcaggggc

SEQ ID NO: 307324 - DNA, 25 bp, Homo sapien
atgggtctcggggtttgcgtcgttg

SEQ ID NO: 307325 - DNA, 25 bp, Homo sapien
ggacgtgacaaaggcatgggtctcg

SEQ ID NO: 307326 - DNA, 25 bp, Homo sapien
gtctcggggtttgcgtcgttgcggc

SEQ ID NO: 307327 - DNA, 25 bp, Homo sapien
tctcggggtttgcgtcgttgcggcc

SEQ ID NO: 307328 - DNA, 25 bp, Homo sapien
cgtgcccgtcaggtagtcggtctct

SEQ ID NO: 307329 - DNA, 25 bp, Homo sapien
ccgtgcccgtcaggtagtcggtctc

SEQ ID NO: 307330 - DNA, 25 bp, Homo sapien
gtgcccgtcaggtagtcggtctctg

SEQ ID NO: 307331 - DNA, 25 bp, Homo sapien
cttgatgaggatctgcaggtcctcc

SEQ ID NO: 307332 - DNA, 25 bp, Homo sapien
catcccacttgtcaaaaggctccag

SEQ ID NO: 307333 - DNA, 25 bp, Homo sapien
tggtggggctcacgtccacatgctg

SEQ ID NO: 307334 - DNA, 25 bp, Homo sapien
ccgctgctgtccttgggtgggtgct

SEQ ID NO: 307335 - DNA, 25 bp, Homo sapien
ggcccttcccgatgctcaggggacg

SEQ ID NO: 307336 - DNA, 25 bp, Homo sapien
cccttcccgatgctcaggggacggg

SEQ ID NO: 307337 - DNA, 25 bp, Homo sapien
tggcccttcccgatgctcaggggac

SEQ ID NO: 307338 - DNA, 25 bp, Homo sapien
cttcccgatgctcaggggacggggg

SEQ ID NO: 307339 - DNA, 25 bp, Homo sapien
ggacgctggactgcgttgcgatacc

SEQ ID NO: 307340 - DNA, 25 bp, Homo sapien
ggactgcgttgcgataccctctctg

SEQ ID NO: 307341 - DNA, 25 bp, Homo sapien
gctggactgcgttgcgataccctct

SEQ ID NO: 307342 - DNA, 25 bp, Homo sapien
tgcgttgcgataccctctctgctct

SEQ ID NO: 307343 - DNA, 25 bp, Homo sapien
ctgctggatggctgagggccccaga

SEQ ID NO: 307344 - DNA, 25 bp, Homo sapien
gctgagggccccagacggaggctgg

SEQ ID NO: 307345 - DNA, 25 bp, Homo sapien
ccacacccactggaggtggctctga

SEQ ID NO: 307346 - DNA, 25 bp, Homo sapien
cccagacggaggctggccagatcta

SEQ ID NO: 307347 - DNA, 25 bp, Homo sapien
gagaggcaggcaagtcttcagacac

SEQ ID NO: 307348 - DNA, 25 bp, Homo sapien
ggtgcctggagaccccttaataagc

SEQ ID NO: 307349 - DNA, 25 bp, Homo sapien
catatccacgggtgcccaactgtgg

SEQ ID NO: 307350 - DNA, 25 bp, Homo sapien
tgcaagatcagccacagacctcatg

SEQ ID NO: 307351 - DNA, 25 bp, Homo sapien
actcctgagtgacggcattgcgcac

SEQ ID NO: 307352 - DNA, 25 bp, Homo sapien
cctgagtgacggcattgcgcacgga

SEQ ID NO: 307353 - DNA, 25 bp, Homo sapien
aaactcctgagtgacggcattgcgc

SEQ ID NO: 307354 - DNA, 25 bp, Homo sapien
ccaaactcctgagtgacggcattgc

SEQ ID NO: 307355 - DNA, 25 bp, Homo sapien
gcatgctcccggctcgagccctcgc

SEQ ID NO: 307356 - DNA, 25 bp, Homo sapien
gagccctcgccgtagttctcgtctc

SEQ ID NO: 307357 - DNA, 25 bp, Homo sapien
ccggctcgagccctcgccgtagttc

SEQ ID NO: 307358 - DNA, 25 bp, Homo sapien
tcgccgtagttctcgtctccgatca

SEQ ID NO: 307359 - DNA, 25 bp, Homo sapien
atcttgttgtagtcagccgggtcag

SEQ ID NO: 307360 - DNA, 25 bp, Homo sapien
gttgtagtcagccgggtcagcgaag

SEQ ID NO: 307361 - DNA, 25 bp, Homo sapien
gaatcttgttgtagtcagccgggtc

SEQ ID NO: 307362 - DNA, 25 bp, Homo sapien
ttgttgtagtcagccgggtcagcga

SEQ ID NO: 307363 - DNA, 25 bp, Homo sapien
tctgcgtctcgttgaaggtgtggtt

SEQ ID NO: 307364 - DNA, 25 bp, Homo sapien
cactcaatctgcgtctcgttgaagg

SEQ ID NO: 307365 - DNA, 25 bp, Homo sapien
ctgccagcgcggaaccactcaatct

SEQ ID NO: 307366 - DNA, 25 bp, Homo sapien
cttcattctgttgagggcactgcca

SEQ ID NO: 307367 - DNA, 25 bp, Homo sapien
atggctggacggatcggatccactg

SEQ ID NO: 307368 - DNA, 25 bp, Homo sapien
tggagctgaacttgacgccagcggc

SEQ ID NO: 307369 - DNA, 25 bp, Homo sapien
gatccactgatggcacacgtggagc

SEQ ID NO: 307370 - DNA, 25 bp, Homo sapien
agctgaacttgacgccagcggcggg

SEQ ID NO: 307371 - DNA, 25 bp, Homo sapien
accacaaccacagtcactccgtggg

SEQ ID NO: 307372 - DNA, 25 bp, Homo sapien
ttcagccaccaatgaaatgatcagg

SEQ ID NO: 307373 - DNA, 25 bp, Homo sapien
cagtcactggttttggattcttgtt

SEQ ID NO: 307374 - DNA, 25 bp, Homo sapien
gaatccttcagccaccaatgaaatg

SEQ ID NO: 307375 - DNA, 25 bp, Homo sapien
gtgttagaaaacctggcgcagcccg

SEQ ID NO: 307376 - DNA, 25 bp, Homo sapien
tctgaggctcctcactgggaaggac

SEQ ID NO: 307377 - DNA, 25 bp, Homo sapien
gaaggactctgacatgtcacagctg

SEQ ID NO: 307378 - DNA, 25 bp, Homo sapien
ggtcgtgggctaagatgtgttcctc

SEQ ID NO: 307379 - DNA, 25 bp, Homo sapien
tgtctgggttgtacactgcacacca

SEQ ID NO: 307380 - DNA, 25 bp, Homo sapien
cagtgtttggcgtccactgggaccc

SEQ ID NO: 307381 - DNA, 25 bp, Homo sapien
tctaggcttcttcgatgacattctc

SEQ ID NO: 307382 - DNA, 25 bp, Homo sapien
gccaagttgtatcctccaagggtta

SEQ ID NO: 307383 - DNA, 25 bp, Homo sapien
ctgacgcctcagacaagacttggga

SEQ ID NO: 307384 - DNA, 25 bp, Homo sapien
cccagaaggagtgcacggtaacagt

SEQ ID NO: 307385 - DNA, 25 bp, Homo sapien
gaaccttccccgtggtgtcagagaa

SEQ ID NO: 307386 - DNA, 25 bp, Homo sapien
ttgggaagatcaaaggctgcagccc

SEQ ID NO: 307387 - DNA, 25 bp, Homo sapien
catgttggccgactaaatggttgac

SEQ ID NO: 307388 - DNA, 25 bp, Homo sapien
tctgaggaaggcaagattcgacccg

SEQ ID NO: 307389 - DNA, 25 bp, Homo sapien
catctgtgcgtaagtggcccttggc

SEQ ID NO: 307390 - DNA, 25 bp, Homo sapien
cactgccttatcctcacggtgggaa

SEQ ID NO: 307391 - DNA, 25 bp, Homo sapien
tgaatggagtcgcacactgtgtggc

SEQ ID NO: 307392 - DNA, 25 bp, Homo sapien
tctggacactgtacatgaatggagt

SEQ ID NO: 307393 - DNA, 25 bp, Homo sapien
ggcgcaggatcatgtgctgtcccac

SEQ ID NO: 307394 - DNA, 25 bp, Homo sapien
agcccgaggttgagccacactgtag

SEQ ID NO: 307395 - DNA, 25 bp, Homo sapien
tcaacaccgattatgaggcagttct

SEQ ID NO: 307396 - DNA, 25 bp, Homo sapien
cagttctgttgctaaacgctaggag

SEQ ID NO: 307397 - DNA, 25 bp, Homo sapien
gaatacagtgactggcaccacaggc

SEQ ID NO: 307398 - DNA, 25 bp, Homo sapien
gttcctggtggaagaactcaacacc

SEQ ID NO: 307399 - DNA, 25 bp, Homo sapien
ttggcccaagccaaaccagggagca

SEQ ID NO: 307400 - DNA, 25 bp, Homo sapien
atacctggtgactctctgcatttca

SEQ ID NO: 307401 - DNA, 25 bp, Homo sapien
caaatacctggtgactctctgcatt

SEQ ID NO: 307402 - DNA, 25 bp, Homo sapien
tcacttttggcccaagccaaaccag

SEQ ID NO: 307403 - DNA, 25 bp, Homo sapien
ggcagcagccacatcgtatgggatt

SEQ ID NO: 307404 - DNA, 25 bp, Homo sapien
gcagccacatcgtatgggatttggg

SEQ ID NO: 307405 - DNA, 25 bp, Homo sapien
ctggaacagcatgtaggagaagggc

SEQ ID NO: 307406 - DNA, 25 bp, Homo sapien
cagcagccacatcgtatgggatttg

SEQ ID NO: 307407 - DNA, 25 bp, Homo sapien
caagatgatgaggatgctcaggcac

SEQ ID NO: 307408 - DNA, 25 bp, Homo sapien
cattgaatccacatccctttgagat

SEQ ID NO: 307409 - DNA, 25 bp, Homo sapien
tgttggtgccgtgtgacaagatgat

SEQ ID NO: 307410 - DNA, 25 bp, Homo sapien
caggcctggacctatgtggcattga

SEQ ID NO: 307411 - DNA, 25 bp, Homo sapien
cggcgtccgcgctctgtctctctct

SEQ ID NO: 307412 - DNA, 25 bp, Homo sapien
cgcgggcggtacctcagcccctcac

SEQ ID NO: 307413 - DNA, 25 bp, Homo sapien
ggcgtccgcgctctgtctctctctg

SEQ ID NO: 307414 - DNA, 25 bp, Homo sapien
gcgcgggcggtacctcagcccctca

SEQ ID NO: 307415 - DNA, 25 bp, Homo sapien
gttgtacctctctccttcggcctgg

SEQ ID NO: 307416 - DNA, 25 bp, Homo sapien
tcaggataagacagctgctccaggt

SEQ ID NO: 307417 - DNA, 25 bp, Homo sapien
gctttcagcaactggaagcggcact

SEQ ID NO: 307418 - DNA, 25 bp, Homo sapien
tctgtaagctgaactgggctgatcc

SEQ ID NO: 307419 - DNA, 25 bp, Homo sapien
gaagtcctgatgtgagcctcagcca

SEQ ID NO: 307420 - DNA, 25 bp, Homo sapien
agcagcattggaagtcctgatgtga

SEQ ID NO: 307421 - DNA, 25 bp, Homo sapien
ccaccatctagtgatctattgatac

SEQ ID NO: 307422 - DNA, 25 bp, Homo sapien
ccatctagtgatctattgatactga

SEQ ID NO: 307423 - DNA, 25 bp, Homo sapien
tgtgcctggccatagtcctcttttt

SEQ ID NO: 307424 - DNA, 25 bp, Homo sapien
actgcagcctcagtctccctaagtg

SEQ ID NO: 307425 - DNA, 25 bp, Homo sapien
tgcagcctcagtctccctaagtgct

SEQ ID NO: 307426 - DNA, 25 bp, Homo sapien
actgtgcctggccatagtcctcttt

SEQ ID NO: 307427 - DNA, 25 bp, Homo sapien
agctgtgtcaaaggccccccggcga

SEQ ID NO: 307428 - DNA, 25 bp, Homo sapien
tgatcataacatcctacccaggttg

SEQ ID NO: 307429 - DNA, 25 bp, Homo sapien
aacatcctacccaggttgtcgggag

SEQ ID NO: 307430 - DNA, 25 bp, Homo sapien
gggctgatcataacatcctacccag

SEQ ID NO: 307431 - DNA, 25 bp, Homo sapien
acccaagtgactgtgcggctccagg

SEQ ID NO: 307432 - DNA, 25 bp, Homo sapien
cacccaagtgactgtgcggctccag

SEQ ID NO: 307433 - DNA, 25 bp, Homo sapien
gcaggagagcctggtgggctctggg

SEQ ID NO: 307434 - DNA, 25 bp, Homo sapien
tttggtcgtccttgcgggcagggcc

SEQ ID NO: 307435 - DNA, 25 bp, Homo sapien
ctggccctgctctgcggcctcacca

SEQ ID NO: 307436 - DNA, 25 bp, Homo sapien
tctgcggcctcaccagccacgggct

SEQ ID NO: 307437 - DNA, 25 bp, Homo sapien
aactgggggtgacgtcgactctgaa

SEQ ID NO: 307438 - DNA, 25 bp, Homo sapien
ggggtgacgtcgactctgaagtcat

SEQ ID NO: 307439 - DNA, 25 bp, Homo sapien
gagcgggggcacaactgggggtgac

SEQ ID NO: 307440 - DNA, 25 bp, Homo sapien
gcacaactgggggtgacgtcgactc

SEQ ID NO: 307441 - DNA, 25 bp, Homo sapien
agagggctgggtaggtcccgaggtg

SEQ ID NO: 307442 - DNA, 25 bp, Homo sapien
tcctggtccgcttggtgggcagagg

SEQ ID NO: 307443 - DNA, 25 bp, Homo sapien
cagagggctgggtaggtcccgaggt

SEQ ID NO: 307444 - DNA, 25 bp, Homo sapien
gagaactgcttacagacgcccttga

SEQ ID NO: 307445 - DNA, 25 bp, Homo sapien
catggccctgtgagcgtgagaactg

SEQ ID NO: 307446 - DNA, 25 bp, Homo sapien
tacgaagatgtcctcggacccgttc

SEQ ID NO: 307447 - DNA, 25 bp, Homo sapien
tcagacacatgtacgaagatgtcct

SEQ ID NO: 307448 - DNA, 25 bp, Homo sapien
agcctggccctaagcctccctaggc

SEQ ID NO: 307449 - DNA, 25 bp, Homo sapien
aagaggggtattagcccagcagcag

SEQ ID NO: 307450 - DNA, 25 bp, Homo sapien
caggaagaggggtattagcccagca

SEQ ID NO: 307451 - DNA, 25 bp, Homo sapien
ggcagcctggccctaagcctcccta

SEQ ID NO: 307452 - DNA, 25 bp, Homo sapien
ccagaccacgtctcgtggggagtgt

SEQ ID NO: 307453 - DNA, 25 bp, Homo sapien
ggagggatagggcacatcttgtagg

SEQ ID NO: 307454 - DNA, 25 bp, Homo sapien
gtcgccctccactggcacgtactcc

SEQ ID NO: 307455 - DNA, 25 bp, Homo sapien
atcttgtaggtcacctcgtcgccct

SEQ ID NO: 307456 - DNA, 25 bp, Homo sapien
acactgaggccaccgaaggactcat

SEQ ID NO: 307457 - DNA, 25 bp, Homo sapien
gacagacagacgtgcacactgaggc

SEQ ID NO: 307458 - DNA, 25 bp, Homo sapien
tggaggcacacgctcatagccacaa

SEQ ID NO: 307459 - DNA, 25 bp, Homo sapien
tagccacaagcacagacggacagac

SEQ ID NO: 307460 - DNA, 25 bp, Homo sapien
cagtggacagcgcgaagccaggtct

SEQ ID NO: 307461 - DNA, 25 bp, Homo sapien
tggacagcgcgaagccaggtctggt

SEQ ID NO: 307462 - DNA, 25 bp, Homo sapien
gagagaggcagtggacagcgcgaag

SEQ ID NO: 307463 - DNA, 25 bp, Homo sapien
agtggacagcgcgaagccaggtctg

SEQ ID NO: 307464 - DNA, 25 bp, Homo sapien
acccatcggccaggcttctgaggga

SEQ ID NO: 307465 - DNA, 25 bp, Homo sapien
agaggctccccaaaagcacccatcg

SEQ ID NO: 307466 - DNA, 25 bp, Homo sapien
gctctcgcagctcagtcaccgtggg

SEQ ID NO: 307467 - DNA, 25 bp, Homo sapien
agcgcaggctctcgcagctcagtca

SEQ ID NO: 307468 - DNA, 25 bp, Homo sapien
tggccggcgaaatgggagccccaaa

SEQ ID NO: 307469 - DNA, 25 bp, Homo sapien
ggactggccggcgaaatgggagccc

SEQ ID NO: 307470 - DNA, 25 bp, Homo sapien
actggccggcgaaatgggagcccca

SEQ ID NO: 307471 - DNA, 25 bp, Homo sapien
gagggactggccggcgaaatgggag

SEQ ID NO: 307472 - DNA, 25 bp, Homo sapien
tcaggcgatgtgctctctagaaggg

SEQ ID NO: 307473 - DNA, 25 bp, Homo sapien
tcagggtaaaggaggtctgcagcca

SEQ ID NO: 307474 - DNA, 25 bp, Homo sapien
catatcctgactgctagtggtgcct

SEQ ID NO: 307475 - DNA, 25 bp, Homo sapien
tggatgcaataagagccacacctcg

SEQ ID NO: 307476 - DNA, 25 bp, Homo sapien
cagggtgggaacgactttgagatct

SEQ ID NO: 307477 - DNA, 25 bp, Homo sapien
cacagcgtggtgtctcctcaggaca

SEQ ID NO: 307478 - DNA, 25 bp, Homo sapien
tgtggagagggactccacctaaata

SEQ ID NO: 307479 - DNA, 25 bp, Homo sapien
cacatctgtgtgtcgtgacttctga

SEQ ID NO: 307480 - DNA, 25 bp, Homo sapien
cctgccctgaggtggacactgatgt

SEQ ID NO: 307481 - DNA, 25 bp, Homo sapien
cactgatgtgggatccagattgccc

SEQ ID NO: 307482 - DNA, 25 bp, Homo sapien
ggtctcgagaccctctgtcagctga

SEQ ID NO: 307483 - DNA, 25 bp, Homo sapien
tacagataacaggatcgagccctgc

SEQ ID NO: 307484 - DNA, 25 bp, Homo sapien
gagcattctcattgtggccggctaa

SEQ ID NO: 307485 - DNA, 25 bp, Homo sapien
gctaactccgcctggatgtgaacag

SEQ ID NO: 307486 - DNA, 25 bp, Homo sapien
agcagctcccctgagagaatttgag

SEQ ID NO: 307487 - DNA, 25 bp, Homo sapien
tgtattgcacagtggacacctctag

SEQ ID NO: 307488 - DNA, 25 bp, Homo sapien
cggtgcccctcgtggtgacagagac

SEQ ID NO: 307489 - DNA, 25 bp, Homo sapien
cgcggtgcccctcgtggtgacagag

SEQ ID NO: 307490 - DNA, 25 bp, Homo sapien
cgcgcggtgcccctcgtggtgacag

SEQ ID NO: 307491 - DNA, 25 bp, Homo sapien
ctgccgcgcggtgcccctcgtggtg

SEQ ID NO: 307492 - DNA, 25 bp, Homo sapien
cactatatcgcgtcaggctggcacg

SEQ ID NO: 307493 - DNA, 25 bp, Homo sapien
tcacagtagtcgttgccggtagcgg

SEQ ID NO: 307494 - DNA, 25 bp, Homo sapien
tctctatccggtgaagctctacgtg

SEQ ID NO: 307495 - DNA, 25 bp, Homo sapien
gacagaagacgacaatccacgcatg

SEQ ID NO: 307496 - DNA, 25 bp, Homo sapien
cgaggccaggcctagctggcgaaca

SEQ ID NO: 307497 - DNA, 25 bp, Homo sapien
ctagctggcgaacaacacaaatgga

SEQ ID NO: 307498 - DNA, 25 bp, Homo sapien
gcgaagcgggacgaggccaggccta

SEQ ID NO: 307499 - DNA, 25 bp, Homo sapien
acacaaatggataacggcccgctta

SEQ ID NO: 307500 - DNA, 25 bp, Homo sapien
gtctcgagtctgtcgctgctcctcg

SEQ ID NO: 307501 - DNA, 25 bp, Homo sapien
gattcgcacacttaaggctaacgct

SEQ ID NO: 307502 - DNA, 25 bp, Homo sapien
ttcccgaggaaggagcgtggtctcg

SEQ ID NO: 307503 - DNA, 25 bp, Homo sapien
ggctaacgctaaccctctagcaagg

SEQ ID NO: 307504 - DNA, 25 bp, Homo sapien
cagtcggactgcatgtaaatgcgca

SEQ ID NO: 307505 - DNA, 25 bp, Homo sapien
aatgagatctcaaacgcagacaggc

SEQ ID NO: 307506 - DNA, 25 bp, Homo sapien
gacggtaaatcctgctgcctcgaaa

SEQ ID NO: 307507 - DNA, 25 bp, Homo sapien
gccatttagacggtgagggattccc

SEQ ID NO: 307508 - DNA, 25 bp, Homo sapien
tcggttttgtaatatgactcccacc

SEQ ID NO: 307509 - DNA, 25 bp, Homo sapien
gccctcggttttgtaatatgactcc

SEQ ID NO: 307510 - DNA, 25 bp, Homo sapien
cctcggttttgtaatatgactccca

SEQ ID NO: 307511 - DNA, 25 bp, Homo sapien
ctcggttttgtaatatgactcccac

SEQ ID NO: 307512 - DNA, 25 bp, Homo sapien
tgaacaaccataaaatctccaccta

SEQ ID NO: 307513 - DNA, 25 bp, Homo sapien
ggaaattgagtcttgccagacaccc

SEQ ID NO: 307514 - DNA, 25 bp, Homo sapien
taagataaataaaggccataaagga

SEQ ID NO: 307515 - DNA, 25 bp, Homo sapien
taaattattataaggtgaacaacca

SEQ ID NO: 307516 - DNA, 25 bp, Homo sapien
tctcttcctgaatatttatagtctc

SEQ ID NO: 307517 - DNA, 25 bp, Homo sapien
aatcaaactatctcttcctgaatat

SEQ ID NO: 307518 - DNA, 25 bp, Homo sapien
ggtgtcaactcatcttcactctgag

SEQ ID NO: 307519 - DNA, 25 bp, Homo sapien
catagccttggaggcatcaaccaaa

SEQ ID NO: 307520 - DNA, 25 bp, Homo sapien
tccacactataactgtgggaacttc

SEQ ID NO: 307521 - DNA, 25 bp, Homo sapien
ccacaggcagtagtcaactcccaag

SEQ ID NO: 307522 - DNA, 25 bp, Homo sapien
cttttccacactataactgtgggaa

SEQ ID NO: 307523 - DNA, 25 bp, Homo sapien
agtcaactcccaagtatcactcact

SEQ ID NO: 307524 - DNA, 25 bp, Homo sapien
gttaaatggattgaaggcagcatgc

SEQ ID NO: 307525 - DNA, 25 bp, Homo sapien
gggttaaatggattgaaggcagcat

SEQ ID NO: 307526 - DNA, 25 bp, Homo sapien
ggttaaatggattgaaggcagcatg

SEQ ID NO: 307527 - DNA, 25 bp, Homo sapien
agggttaaatggattgaaggcagca

SEQ ID NO: 307528 - DNA, 25 bp, Homo sapien
tttctcggtaccatagaacaccaca

SEQ ID NO: 307529 - DNA, 25 bp, Homo sapien
gccaagagatctcgatcactgctta

SEQ ID NO: 307530 - DNA, 25 bp, Homo sapien
atttttgtctttctcggtaccatag

SEQ ID NO: 307531 - DNA, 25 bp, Homo sapien
gtaccatagaacaccacagccaaga

SEQ ID NO: 307532 - DNA, 25 bp, Homo sapien
catcttgaattggacatcactaaag

SEQ ID NO: 307533 - DNA, 25 bp, Homo sapien
tcattggtgaacagcatgatcctct

SEQ ID NO: 307534 - DNA, 25 bp, Homo sapien
atgatcctcttatgactcatcttga

SEQ ID NO: 307535 - DNA, 25 bp, Homo sapien
tcctggcccggctggctttggcact

SEQ ID NO: 307536 - DNA, 25 bp, Homo sapien
tcagcaagtgagaagttctttcagt

SEQ ID NO: 307537 - DNA, 25 bp, Homo sapien
tttcaaataatcaccattcgtggta

SEQ ID NO: 307538 - DNA, 25 bp, Homo sapien
taaggaaaccaactgctataatgac

SEQ ID NO: 307539 - DNA, 25 bp, Homo sapien
aaaagctccctgaaaactagactat

SEQ ID NO: 307540 - DNA, 25 bp, Homo sapien
ctgatgatatctctgtagaacaagg

SEQ ID NO: 307541 - DNA, 25 bp, Homo sapien
ctgctgagtgctcgcttcctggtct

SEQ ID NO: 307542 - DNA, 25 bp, Homo sapien
tcaggtgcatcaagtcaaggaagat

SEQ ID NO: 307543 - DNA, 25 bp, Homo sapien
cttggcgcgaaccttccgcaacagg

SEQ ID NO: 307544 - DNA, 25 bp, Homo sapien
gagaaatatcatgccagctcttgcc

SEQ ID NO: 307545 - DNA, 25 bp, Homo sapien
gcatagtcgagttaagtagccagtc

SEQ ID NO: 307546 - DNA, 25 bp, Homo sapien
tgtagtcaagctgtactctctgggt

SEQ ID NO: 307547 - DNA, 25 bp, Homo sapien
aagagcaacaggctaaccacacagc

SEQ ID NO: 307548 - DNA, 25 bp, Homo sapien
ttcagattagaaacactcaacccgt

SEQ ID NO: 307549 - DNA, 25 bp, Homo sapien
gataaagaacgtactacaggttgcg

SEQ ID NO: 307550 - DNA, 25 bp, Homo sapien
cctttgaacattaggtcggtgctca

SEQ ID NO: 307551 - DNA, 25 bp, Homo sapien
aatcgaatttgctataccacctcag

SEQ ID NO: 307552 - DNA, 25 bp, Homo sapien
taggcagaagcaaaccgcctgtact

SEQ ID NO: 307553 - DNA, 25 bp, Homo sapien
gaagcaaaccgcctgtacttgtatt

SEQ ID NO: 307554 - DNA, 25 bp, Homo sapien
cttctggaccagattataaatgccc

SEQ ID NO: 307555 - DNA, 25 bp, Homo sapien
gcaaaccgcctgtacttgtattaaa

SEQ ID NO: 307556 - DNA, 25 bp, Homo sapien
ggttgaagctacagtcaaccatgat

SEQ ID NO: 307557 - DNA, 25 bp, Homo sapien
gctacagtcaaccatgatggcgcta

SEQ ID NO: 307558 - DNA, 25 bp, Homo sapien
tacagtcaaccatgatggcgctact

SEQ ID NO: 307559 - DNA, 25 bp, Homo sapien
gaagctacagtcaaccatgatggcg

SEQ ID NO: 307560 - DNA, 25 bp, Homo sapien
ctgtcacccaggcagcgatctcggc

SEQ ID NO: 307561 - DNA, 25 bp, Homo sapien
tgtcacccaggcagcgatctcggct

SEQ ID NO: 307562 - DNA, 25 bp, Homo sapien
gtcacccaggcagcgatctcggctc

SEQ ID NO: 307563 - DNA, 25 bp, Homo sapien
cgctgtcacccaggcagcgatctcg

SEQ ID NO: 307564 - DNA, 25 bp, Homo sapien
gaagaacgacaaggatcaaatggga

SEQ ID NO: 307565 - DNA, 25 bp, Homo sapien
gaacgacaaggatcaaatgggaagg

SEQ ID NO: 307566 - DNA, 25 bp, Homo sapien
gagaagaacgacaaggatcaaatgg

SEQ ID NO: 307567 - DNA, 25 bp, Homo sapien
aggagaagaacgacaaggatcaaat

SEQ ID NO: 307568 - DNA, 25 bp, Homo sapien
gactcctctgggtacacgaacaggg

SEQ ID NO: 307569 - DNA, 25 bp, Homo sapien
gcctcaggtaatggtgtttcttcag

SEQ ID NO: 307570 - DNA, 25 bp, Homo sapien
gtttcttcagcagtaccaacggctt

SEQ ID NO: 307571 - DNA, 25 bp, Homo sapien
cagtataatctgacgactcccatag

SEQ ID NO: 307572 - DNA, 25 bp, Homo sapien
gggtgtgtatctgcacaatgctgca

SEQ ID NO: 307573 - DNA, 25 bp, Homo sapien
agacacttgatgagcagagcactga

SEQ ID NO: 307574 - DNA, 25 bp, Homo sapien
gaggagtcacctgaattttctggtc

SEQ ID NO: 307575 - DNA, 25 bp, Homo sapien
tatctgcacaatgctgcaacctcct

SEQ ID NO: 307576 - DNA, 25 bp, Homo sapien
catttacagtgtggagatgctgaac

SEQ ID NO: 307577 - DNA, 25 bp, Homo sapien
attcctgccccaggtgggattgtgc

SEQ ID NO: 307578 - DNA, 25 bp, Homo sapien
cacaagcaccgcaatactgattacc

SEQ ID NO: 307579 - DNA, 25 bp, Homo sapien
tgactaactggtgggtagcatttac

SEQ ID NO: 307580 - DNA, 25 bp, Homo sapien
ctcaagtagcctatcaagtagctgg

SEQ ID NO: 307581 - DNA, 25 bp, Homo sapien
ctgtatgtgaagcgaagcttctcaa

SEQ ID NO: 307582 - DNA, 25 bp, Homo sapien
ttctcaacgatagccttcatcttgc

SEQ ID NO: 307583 - DNA, 25 bp, Homo sapien
ctggagttgccatgattttttcagt

SEQ ID NO: 307584 - DNA, 25 bp, Homo sapien
tatgtgaagcgaagcttctcaacga

SEQ ID NO: 307585 - DNA, 25 bp, Homo sapien
tgcttgttccggctccatcaaatcc

SEQ ID NO: 307586 - DNA, 25 bp, Homo sapien
aggtccactgcttgttccggctcca

SEQ ID NO: 307587 - DNA, 25 bp, Homo sapien
gttccggctccatcaaatccaaggc

SEQ ID NO: 307588 - DNA, 25 bp, Homo sapien
gtcaggtccactgcttgttccggct

SEQ ID NO: 307589 - DNA, 25 bp, Homo sapien
atctggtgggtaaacaagctcctta

SEQ ID NO: 307590 - DNA, 25 bp, Homo sapien
caccaaggagcccagtcttttattc

SEQ ID NO: 307591 - DNA, 25 bp, Homo sapien
agctccttaaactcatccaccaagg

SEQ ID NO: 307592 - DNA, 25 bp, Homo sapien
ccaaggagcccagtcttttattcat

SEQ ID NO: 307593 - DNA, 25 bp, Homo sapien
ccgcacctggccaacttctgtatca

SEQ ID NO: 307594 - DNA, 25 bp, Homo sapien
aaattaagtcctggaagggtgagag

SEQ ID NO: 307595 - DNA, 25 bp, Homo sapien
aattaagtcctggaagggtgagagt

SEQ ID NO: 307596 - DNA, 25 bp, Homo sapien
ccaacttctgtatcattttaaatag

SEQ ID NO: 307597 - DNA, 25 bp, Homo sapien
gcccagcgtacccttgctgatgtgg

SEQ ID NO: 307598 - DNA, 25 bp, Homo sapien
agcccggcaggcctctttcagcatg

SEQ ID NO: 307599 - DNA, 25 bp, Homo sapien
cagcccactcttcagcccgtaagcc

SEQ ID NO: 307600 - DNA, 25 bp, Homo sapien
gtgaacttgcccagcgtacccttgc

SEQ ID NO: 307601 - DNA, 25 bp, Homo sapien
agactcttcctagctcaggagaaac

SEQ ID NO: 307602 - DNA, 25 bp, Homo sapien
ttatgtcgggtagactcttcctagc

SEQ ID NO: 307603 - DNA, 25 bp, Homo sapien
agtaaagtaaggaacagcaaagtgg

SEQ ID NO: 307604 - DNA, 25 bp, Homo sapien
gggagggctacaccatcaccatggc

SEQ ID NO: 307605 - DNA, 25 bp, Homo sapien
cagcaaagtgggagggctacaccat

SEQ ID NO: 307606 - DNA, 25 bp, Homo sapien
aaagtgggagggctacaccatcacc

SEQ ID NO: 307607 - DNA, 25 bp, Homo sapien
gaggagagtgctagttcatgtgttc

SEQ ID NO: 307608 - DNA, 25 bp, Homo sapien
cctgtctctggtgaatgggactttc

SEQ ID NO: 307609 - DNA, 25 bp, Homo sapien
gccaccatgtgggtcagatgtactc

SEQ ID NO: 307610 - DNA, 25 bp, Homo sapien
tggagtccaaggaaacagcctgtct

SEQ ID NO: 307611 - DNA, 25 bp, Homo sapien
ccagcttcccccctgaggttgtgta

SEQ ID NO: 307612 - DNA, 25 bp, Homo sapien
attttcagctactctctattgttat

SEQ ID NO: 307613 - DNA, 25 bp, Homo sapien
tctgtgttagcatgtagtattttca

SEQ ID NO: 307614 - DNA, 25 bp, Homo sapien
tcttagtctaaacctgtggcctctg

SEQ ID NO: 307615 - DNA, 25 bp, Homo sapien
ctaatcttctctgtattgttccaat

SEQ ID NO: 307616 - DNA, 25 bp, Homo sapien
atgtcatccttgtgcaggggtcatg

SEQ ID NO: 307617 - DNA, 25 bp, Homo sapien
tatatgtactgctgaagcgagcact

SEQ ID NO: 307618 - DNA, 25 bp, Homo sapien
aacatggaacgtttcacgaatttgc

SEQ ID NO: 307619 - DNA, 25 bp, Homo sapien
caaggcggtggcttcaaaaaccaga

SEQ ID NO: 307620 - DNA, 25 bp, Homo sapien
tctcccatgggtctgcgcttagtgc

SEQ ID NO: 307621 - DNA, 25 bp, Homo sapien
cacgtgcggcgtctctaaactcttg

SEQ ID NO: 307622 - DNA, 25 bp, Homo sapien
aagttctaaaacgtgtgtcctggcg

SEQ ID NO: 307623 - DNA, 25 bp, Homo sapien
ggtgatataacctgcggtctgcttg

SEQ ID NO: 307624 - DNA, 25 bp, Homo sapien
catgctcttggtgcaggtaaggaca

SEQ ID NO: 307625 - DNA, 25 bp, Homo sapien
aacatgcctttctcgttgcttgcag

SEQ ID NO: 307626 - DNA, 25 bp, Homo sapien
gcaaagcttagatcaggcagatggt

SEQ ID NO: 307627 - DNA, 25 bp, Homo sapien
caagcaggttgccacagcactgagg

SEQ ID NO: 307628 - DNA, 25 bp, Homo sapien
gacaagcaggttgccacagcactga

SEQ ID NO: 307629 - DNA, 25 bp, Homo sapien
agcaggttgccacagcactgagggt

SEQ ID NO: 307630 - DNA, 25 bp, Homo sapien
aagcaggttgccacagcactgaggg

SEQ ID NO: 307631 - DNA, 25 bp, Homo sapien
cttgatgacattccttgtgctgaag

SEQ ID NO: 307632 - DNA, 25 bp, Homo sapien
gcctttgtgcgcattgttgagaatc

SEQ ID NO: 307633 - DNA, 25 bp, Homo sapien
ttcgcacctcatggagggcactgcc

SEQ ID NO: 307634 - DNA, 25 bp, Homo sapien
gttgagaatctaggcccctggactt

SEQ ID NO: 307635 - DNA, 25 bp, Homo sapien
gcttgaagacagtttcgcacctcat

SEQ ID NO: 307636 - DNA, 25 bp, Homo sapien
aggtggtacaaaagatgggctcaga

SEQ ID NO: 307637 - DNA, 25 bp, Homo sapien
aggaactgttctgaggcagtaaaca

SEQ ID NO: 307638 - DNA, 25 bp, Homo sapien
tgggctcagagtgggtgtggacacc

SEQ ID NO: 307639 - DNA, 25 bp, Homo sapien
gacacccgaaggtgggcctggacat

SEQ ID NO: 307640 - DNA, 25 bp, Homo sapien
catgtccaaggcagggcgagtctga

SEQ ID NO: 307641 - DNA, 25 bp, Homo sapien
gacttccaagtgcacattctcagtg

SEQ ID NO: 307642 - DNA, 25 bp, Homo sapien
gtgacaccaacctttcctgtgagtg

SEQ ID NO: 307643 - DNA, 25 bp, Homo sapien
gcctctcagctgaaagtaagtttgg

SEQ ID NO: 307644 - DNA, 25 bp, Homo sapien
ggttctctcccatatgtgcctgggt

SEQ ID NO: 307645 - DNA, 25 bp, Homo sapien
ggtttgtgcagcatcctgacctcca

SEQ ID NO: 307646 - DNA, 25 bp, Homo sapien
ggtgtcaagatctcgccatcagttt

SEQ ID NO: 307647 - DNA, 25 bp, Homo sapien
ggtttgcacactccaacacgttagt

SEQ ID NO: 307648 - DNA, 25 bp, Homo sapien
ttccaccttgatcatgcttctccca

SEQ ID NO: 307649 - DNA, 25 bp, Homo sapien
tccaccttgatcatgcttctcccac

SEQ ID NO: 307650 - DNA, 25 bp, Homo sapien
cttggtagctatctgggtttcctta

SEQ ID NO: 307651 - DNA, 25 bp, Homo sapien
tcttggtagctatctgggtttcctt

SEQ ID NO: 307652 - DNA, 25 bp, Homo sapien
gatcaccacccaatccttctcttat

SEQ ID NO: 307653 - DNA, 25 bp, Homo sapien
cctggatcaccacccaatccttctc

SEQ ID NO: 307654 - DNA, 25 bp, Homo sapien
tgctacttgtctccggtttccccac

SEQ ID NO: 307655 - DNA, 25 bp, Homo sapien
tcacttgctacttgtctccggtttc

SEQ ID NO: 307656 - DNA, 25 bp, Homo sapien
cacttgctacttgtctccggtttcc

SEQ ID NO: 307657 - DNA, 25 bp, Homo sapien
ttgctacttgtctccggtttcccca

SEQ ID NO: 307658 - DNA, 25 bp, Homo sapien
tgattctcccaacatagtatctcaa

SEQ ID NO: 307659 - DNA, 25 bp, Homo sapien
attctcccaacatagtatctcaaat

SEQ ID NO: 307660 - DNA, 25 bp, Homo sapien
ctcccaacatagtatctcaaattct

SEQ ID NO: 307661 - DNA, 25 bp, Homo sapien
ctgattctcccaacatagtatctca

SEQ ID NO: 307662 - DNA, 25 bp, Homo sapien
ctagtgactgaatgtctgtaccatc

SEQ ID NO: 307663 - DNA, 25 bp, Homo sapien
catcagtttcaccttttaattgttc

SEQ ID NO: 307664 - DNA, 25 bp, Homo sapien
agtgactgaatgtctgtaccatcct

SEQ ID NO: 307665 - DNA, 25 bp, Homo sapien
tctgctctatgttcacctccaatcc

SEQ ID NO: 307666 - DNA, 25 bp, Homo sapien
aaattcatttcctaactgaccctga

SEQ ID NO: 307667 - DNA, 25 bp, Homo sapien
tcccctttggtatgtgaatctttcc

SEQ ID NO: 307668 - DNA, 25 bp, Homo sapien
cagttccctgactcagatatctggg

SEQ ID NO: 307669 - DNA, 25 bp, Homo sapien
gatcacttctaaactgactctgggt

SEQ ID NO: 307670 - DNA, 25 bp, Homo sapien
tgatgcctgattttctgcaacatcc

SEQ ID NO: 307671 - DNA, 25 bp, Homo sapien
tgcaacatcctttccaatcagctcc

SEQ ID NO: 307672 - DNA, 25 bp, Homo sapien
taggtctctgagtctttacaccgtc

SEQ ID NO: 307673 - DNA, 25 bp, Homo sapien
cactatctaactggtcctcgttctc

SEQ ID NO: 307674 - DNA, 25 bp, Homo sapien
tttttaacagtctgtttcttcgctc

SEQ ID NO: 307675 - DNA, 25 bp, Homo sapien
acagtctgtttcttcgctctaagcc

SEQ ID NO: 307676 - DNA, 25 bp, Homo sapien
gtttcttcgctctaagcctccagtt

SEQ ID NO: 307677 - DNA, 25 bp, Homo sapien
ctgtttcttcgctctaagcctccag

SEQ ID NO: 307678 - DNA, 25 bp, Homo sapien
cactcccagaacagtcgacttggag

SEQ ID NO: 307679 - DNA, 25 bp, Homo sapien
gcaatttcaactcttaactgtccct

SEQ ID NO: 307680 - DNA, 25 bp, Homo sapien
tttcctccccttggtgctcgaggct

SEQ ID NO: 307681 - DNA, 25 bp, Homo sapien
tgggtctctgtaccatcatcagctg

SEQ ID NO: 307682 - DNA, 25 bp, Homo sapien
tcaccccagtgggggacaggattca

SEQ ID NO: 307683 - DNA, 25 bp, Homo sapien
cagcaggaagacttcaccccagtgg

SEQ ID NO: 307684 - DNA, 25 bp, Homo sapien
caggaagacttcaccccagtggggg

SEQ ID NO: 307685 - DNA, 25 bp, Homo sapien
caccccagtgggggacaggattcat

SEQ ID NO: 307686 - DNA, 25 bp, Homo sapien
gggcatgcccaagggagctgtcaga

SEQ ID NO: 307687 - DNA, 25 bp, Homo sapien
tttgggactgccgagtcaggctggg

SEQ ID NO: 307688 - DNA, 25 bp, Homo sapien
tctccaggattcaggttgggcctgc

SEQ ID NO: 307689 - DNA, 25 bp, Homo sapien
ggctggactgatccccactctatga

SEQ ID NO: 307690 - DNA, 25 bp, Homo sapien
gcggtgggaggacccgctagaatga

SEQ ID NO: 307691 - DNA, 25 bp, Homo sapien
tgggaggacccgctagaatgatggc

SEQ ID NO: 307692 - DNA, 25 bp, Homo sapien
ggcggtgggaggacccgctagaatg

SEQ ID NO: 307693 - DNA, 25 bp, Homo sapien
gaggacccgctagaatgatggcagc

SEQ ID NO: 307694 - DNA, 25 bp, Homo sapien
aggtgtgcaatcctcctccgcatga

SEQ ID NO: 307695 - DNA, 25 bp, Homo sapien
gactccaggagcagtcgtttgctct

SEQ ID NO: 307696 - DNA, 25 bp, Homo sapien
cctcgccccagcaagggtcaatgag

SEQ ID NO: 307697 - DNA, 25 bp, Homo sapien
ggaagaccccacttcaggtgtgcaa

SEQ ID NO: 307698 - DNA, 25 bp, Homo sapien
gctctggcttgtataggaagtttcg

SEQ ID NO: 307699 - DNA, 25 bp, Homo sapien
gacatgtgcggtctgttcctctcca

SEQ ID NO: 307700 - DNA, 25 bp, Homo sapien
gagctttttctgtctgggcgctgaa

SEQ ID NO: 307701 - DNA, 25 bp, Homo sapien
gggcgctgaaccctctggaacctct

SEQ ID NO: 307702 - DNA, 25 bp, Homo sapien
gcttagaggcctcccaggatgtaca

SEQ ID NO: 307703 - DNA, 25 bp, Homo sapien
gcgtggtctgccctagagaatgaag

SEQ ID NO: 307704 - DNA, 25 bp, Homo sapien
ctgggagacccttgacctgatcatt

SEQ ID NO: 307705 - DNA, 25 bp, Homo sapien
ggaggctctccgaccctttgtgggc

SEQ ID NO: 307706 - DNA, 25 bp, Homo sapien
gggccaagtgcttgcgcttggcgag

SEQ ID NO: 307707 - DNA, 25 bp, Homo sapien
gcacgaggatcacccactttgggag

SEQ ID NO: 307708 - DNA, 25 bp, Homo sapien
cctgcacgaggatcacccactttgg

SEQ ID NO: 307709 - DNA, 25 bp, Homo sapien
ctcaggctcaggttaggggccaagt

SEQ ID NO: 307710 - DNA, 25 bp, Homo sapien
tcagatgcttcataatactaaactt

SEQ ID NO: 307711 - DNA, 25 bp, Homo sapien
ggctcgtgtattctgtggagcccca

SEQ ID NO: 307712 - DNA, 25 bp, Homo sapien
gatgcttcataatactaaacttttt

SEQ ID NO: 307713 - DNA, 25 bp, Homo sapien
actttttggaggctcgtgtattctg

SEQ ID NO: 307714 - DNA, 25 bp, Homo sapien
tgcacgcatgcgcacttggaggacg

SEQ ID NO: 307715 - DNA, 25 bp, Homo sapien
gcagactgcacgcatgcgcacttgg

SEQ ID NO: 307716 - DNA, 25 bp, Homo sapien
ggacctgcgtcggtgtggaatgcgc

SEQ ID NO: 307717 - DNA, 25 bp, Homo sapien
cgcacttggaggacggacctgcgtc

SEQ ID NO: 307718 - DNA, 25 bp, Homo sapien
cctcagctgaggcggcactctttcc

SEQ ID NO: 307719 - DNA, 25 bp, Homo sapien
tgccctcagctgaggcggcactctt

SEQ ID NO: 307720 - DNA, 25 bp, Homo sapien
cagctgaggcggcactctttcccgc

SEQ ID NO: 307721 - DNA, 25 bp, Homo sapien
gccctcagctgaggcggcactcttt

SEQ ID NO: 307722 - DNA, 25 bp, Homo sapien
ccgggagtgcccgccgtcgccgcct

SEQ ID NO: 307723 - DNA, 25 bp, Homo sapien
cggtaatgggccctctcgaatagaa

SEQ ID NO: 307724 - DNA, 25 bp, Homo sapien
tgggccctctcgaatagaagcgccg

SEQ ID NO: 307725 - DNA, 25 bp, Homo sapien
ggtcgtgccggtaatgggccctctc

SEQ ID NO: 307726 - DNA, 25 bp, Homo sapien
agccagcgcgggtcgtgccggtaat

SEQ ID NO: 307727 - DNA, 25 bp, Homo sapien
caccagttgcgtgaccagggaggta

SEQ ID NO: 307728 - DNA, 25 bp, Homo sapien
cacttatgaagtggatgcagactct

SEQ ID NO: 307729 - DNA, 25 bp, Homo sapien
caggacaacatgtgcttcttgcgca

SEQ ID NO: 307730 - DNA, 25 bp, Homo sapien
tgcagactctctgatcctgagacac

SEQ ID NO: 307731 - DNA, 25 bp, Homo sapien
cttcaatacagaggtctgtcacact

SEQ ID NO: 307732 - DNA, 25 bp, Homo sapien
ttcaatacagaggtctgtcacactc

SEQ ID NO: 307733 - DNA, 25 bp, Homo sapien
ttggtatccactgaagacgggagtt

SEQ ID NO: 307734 - DNA, 25 bp, Homo sapien
tttccgatttttggtatccactgaa

SEQ ID NO: 307735 - DNA, 25 bp, Homo sapien
tggtatccactgaagacgggagttt

SEQ ID NO: 307736 - DNA, 25 bp, Homo sapien
gtggctttccgatttttggtatcca

SEQ ID NO: 307737 - DNA, 25 bp, Homo sapien
gatccacaaggttgtctgcaaaatc

SEQ ID NO: 307738 - DNA, 25 bp, Homo sapien
tccacaaggttgtctgcaaaatctg

SEQ ID NO: 307739 - DNA, 25 bp, Homo sapien
gaagatccacaaggttgtctgcaaa

SEQ ID NO: 307740 - DNA, 25 bp, Homo sapien
acaaggttgtctgcaaaatctgctc

SEQ ID NO: 307741 - DNA, 25 bp, Homo sapien
ccagcttcagctgcgttgtgatctg

SEQ ID NO: 307742 - DNA, 25 bp, Homo sapien
caacggatagtctgctccagcttca

SEQ ID NO: 307743 - DNA, 25 bp, Homo sapien
cactcatccagcaggcaacggatag

SEQ ID NO: 307744 - DNA, 25 bp, Homo sapien
cttcagctgcgttgtgatctgaata

SEQ ID NO: 307745 - DNA, 25 bp, Homo sapien
cattacaagctcgtctgccagagca

SEQ ID NO: 307746 - DNA, 25 bp, Homo sapien
ctgcctcgcatggagggcatgttac

SEQ ID NO: 307747 - DNA, 25 bp, Homo sapien
catgctccattacaagctcgtctgc

SEQ ID NO: 307748 - DNA, 25 bp, Homo sapien
gcctcgcatggagggcatgttacac

SEQ ID NO: 307749 - DNA, 25 bp, Homo sapien
ggtatactaagcctctcaacagatg

SEQ ID NO: 307750 - DNA, 25 bp, Homo sapien
tgcagctcctttgtctgggcaccat

SEQ ID NO: 307751 - DNA, 25 bp, Homo sapien
cagaagcttgtatgccctcactggg

SEQ ID NO: 307752 - DNA, 25 bp, Homo sapien
cccataaaggtaacagacagaagct

SEQ ID NO: 307753 - DNA, 25 bp, Homo sapien
agagatcatacttcaacagctgcct

SEQ ID NO: 307754 - DNA, 25 bp, Homo sapien
caccaaaggcagtgaggtatttcct

SEQ ID NO: 307755 - DNA, 25 bp, Homo sapien
gacccttcgatattcttagcacttt

SEQ ID NO: 307756 - DNA, 25 bp, Homo sapien
ttctcccagtccatcctggttcatg

SEQ ID NO: 307757 - DNA, 25 bp, Homo sapien
gggagtggacaagcaccgcagttat

SEQ ID NO: 307758 - DNA, 25 bp, Homo sapien
gacaagcaccgcagttatacagtga

SEQ ID NO: 307759 - DNA, 25 bp, Homo sapien
tcagcgtggatgaaggctgacgcat

SEQ ID NO: 307760 - DNA, 25 bp, Homo sapien
tgaaggctgacgcatgctttgctgg

SEQ ID NO: 307761 - DNA, 25 bp, Homo sapien
gagtgtcaagcagttacagctggac

SEQ ID NO: 307762 - DNA, 25 bp, Homo sapien
gttacagctggaccagacgagcact

SEQ ID NO: 307763 - DNA, 25 bp, Homo sapien
ttctaccaggagtgtcaagcagtta

SEQ ID NO: 307764 - DNA, 25 bp, Homo sapien
ccagacgagcacttcactggaagaa

SEQ ID NO: 307765 - DNA, 25 bp, Homo sapien
gtgcagctctatgttgttcatcttc

SEQ ID NO: 307766 - DNA, 25 bp, Homo sapien
tttcagcgaaaagcagcaggccctg

SEQ ID NO: 307767 - DNA, 25 bp, Homo sapien
ggtcaggatttcagcgaaaagcagc

SEQ ID NO: 307768 - DNA, 25 bp, Homo sapien
gccctgcttgtgcagctctatgttg

SEQ ID NO: 307769 - DNA, 25 bp, Homo sapien
agcagaagtggccttcaaggcctca

SEQ ID NO: 307770 - DNA, 25 bp, Homo sapien
ttcttggagggcacggccagcatct

SEQ ID NO: 307771 - DNA, 25 bp, Homo sapien
gagggcacggccagcatctctgcac

SEQ ID NO: 307772 - DNA, 25 bp, Homo sapien
tgcttcttggagggcacggccagca

SEQ ID NO: 307773 - DNA, 25 bp, Homo sapien
gaaagggaccagttccatcttttca

SEQ ID NO: 307774 - DNA, 25 bp, Homo sapien
aagggaccagttccatcttttcact

SEQ ID NO: 307775 - DNA, 25 bp, Homo sapien
actagtttaattgtgagtttccaag

SEQ ID NO: 307776 - DNA, 25 bp, Homo sapien
cagtcattgactagtttaattgtga

SEQ ID NO: 307777 - DNA, 25 bp, Homo sapien
tagcatggcttctagcaaagcctgc

SEQ ID NO: 307778 - DNA, 25 bp, Homo sapien
tgcagttccccatactgcacaggtg

SEQ ID NO: 307779 - DNA, 25 bp, Homo sapien
tctgggaaaactccgcacatcggtt

SEQ ID NO: 307780 - DNA, 25 bp, Homo sapien
cacaggtggagtgctctgatggtcc

SEQ ID NO: 307781 - DNA, 25 bp, Homo sapien
ttgaagaatggccttctctgaatct

SEQ ID NO: 307782 - DNA, 25 bp, Homo sapien
ctctgaatctctactggaggcatgg

SEQ ID NO: 307783 - DNA, 25 bp, Homo sapien
ctgcaggcacttctaaatccctcca

SEQ ID NO: 307784 - DNA, 25 bp, Homo sapien
caggcacttctaaatccctccagag

SEQ ID NO: 307785 - DNA, 25 bp, Homo sapien
catggggatacacagcgagtcacag

SEQ ID NO: 307786 - DNA, 25 bp, Homo sapien
tcttccttcttggcgctgggagctg

SEQ ID NO: 307787 - DNA, 25 bp, Homo sapien
gaaattctgagaaggcctccaaggt

SEQ ID NO: 307788 - DNA, 25 bp, Homo sapien
gagctgtgaatggattctcctgggc

SEQ ID NO: 307789 - DNA, 25 bp, Homo sapien
tgttgcccgtggctcaggagaaccc

SEQ ID NO: 307790 - DNA, 25 bp, Homo sapien
catgttgcccgtggctcaggagaac

SEQ ID NO: 307791 - DNA, 25 bp, Homo sapien
atgttgcccgtggctcaggagaacc

SEQ ID NO: 307792 - DNA, 25 bp, Homo sapien
tcatgttgcccgtggctcaggagaa

SEQ ID NO: 307793 - DNA, 25 bp, Homo sapien
gtcactgccttatgcctctgagcct

SEQ ID NO: 307794 - DNA, 25 bp, Homo sapien
gaaaggtagcagcaagaattgcact

SEQ ID NO: 307795 - DNA, 25 bp, Homo sapien
gaacctgttagtttcataatcaaac

SEQ ID NO: 307796 - DNA, 25 bp, Homo sapien
gagcctggctcgcctgcacattctt

SEQ ID NO: 307797 - DNA, 25 bp, Homo sapien
ctggtcaagtaaagcagggggaatg

SEQ ID NO: 307798 - DNA, 25 bp, Homo sapien
ggctggtcaagtaaagcagggggaa

SEQ ID NO: 307799 - DNA, 25 bp, Homo sapien
gctggtcaagtaaagcagggggaat

SEQ ID NO: 307800 - DNA, 25 bp, Homo sapien
gatgacaaagaggttatgtagaatt

SEQ ID NO: 307801 - DNA, 25 bp, Homo sapien
cgatgacaaagaggttatgtagaat

SEQ ID NO: 307802 - DNA, 25 bp, Homo sapien
gggtgggtggtctgctccaagtgtc

SEQ ID NO: 307803 - DNA, 25 bp, Homo sapien
tgacaaagaggttatgtagaattga

SEQ ID NO: 307804 - DNA, 25 bp, Homo sapien
acacttcctttcactcatcactgga

SEQ ID NO: 307805 - DNA, 25 bp, Homo sapien
aaagaatagatacagattctgaatg

SEQ ID NO: 307806 - DNA, 25 bp, Homo sapien
cactcatcactggacaaagaataga

SEQ ID NO: 307807 - DNA, 25 bp, Homo sapien
gaattagtaaatgtgcacccacaac

SEQ ID NO: 307808 - DNA, 25 bp, Homo sapien
gagtcccaagcctgggtggtatcaa

SEQ ID NO: 307809 - DNA, 25 bp, Homo sapien
agcctgggtggtatcaaaaagctct

SEQ ID NO: 307810 - DNA, 25 bp, Homo sapien
aaccagacttgtcacagagagtccc

SEQ ID NO: 307811 - DNA, 25 bp, Homo sapien
gcagagagcagtttaaaccagactt

SEQ ID NO: 307812 - DNA, 25 bp, Homo sapien
tcagaccactgcaaaacctggcctt

SEQ ID NO: 307813 - DNA, 25 bp, Homo sapien
ctcagaccactgcaaaacctggcct

SEQ ID NO: 307814 - DNA, 25 bp, Homo sapien
ccagggtcagtcgtatgaaggatga

SEQ ID NO: 307815 - DNA, 25 bp, Homo sapien
gctccagggtcagtcgtatgaagga

SEQ ID NO: 307816 - DNA, 25 bp, Homo sapien
tgctttgtgccagaggctagtgaaa

SEQ ID NO: 307817 - DNA, 25 bp, Homo sapien
gatgacattgctactttggctggga

SEQ ID NO: 307818 - DNA, 25 bp, Homo sapien
tagtgaaattctagccatggccgtg

SEQ ID NO: 307819 - DNA, 25 bp, Homo sapien
cattatccctgccatatgcctgggc

SEQ ID NO: 307820 - DNA, 25 bp, Homo sapien
acacacctggtttagggctgagtga

SEQ ID NO: 307821 - DNA, 25 bp, Homo sapien
ggcacatatagtagaggaaattgga

SEQ ID NO: 307822 - DNA, 25 bp, Homo sapien
cacatatagtagaggaaattggaac

SEQ ID NO: 307823 - DNA, 25 bp, Homo sapien
attggaacacacctggtttagggct

SEQ ID NO: 307824 - DNA, 25 bp, Homo sapien
tctttggaaggtggtcctgtcttct

SEQ ID NO: 307825 - DNA, 25 bp, Homo sapien
cttctttggaaggtggtcctgtctt

SEQ ID NO: 307826 - DNA, 25 bp, Homo sapien
ctttggaaggtggtcctgtcttctc

SEQ ID NO: 307827 - DNA, 25 bp, Homo sapien
tggaaggtggtcctgtcttctctgg

SEQ ID NO: 307828 - DNA, 25 bp, Homo sapien
caattgcaggacatgtgatcagcgc

SEQ ID NO: 307829 - DNA, 25 bp, Homo sapien
cacagcaatttggtagcagagccag

SEQ ID NO: 307830 - DNA, 25 bp, Homo sapien
tatagtgaacactggactcctgagg

SEQ ID NO: 307831 - DNA, 25 bp, Homo sapien
cagcctcaggcaaagaaatctcgtg

SEQ ID NO: 307832 - DNA, 25 bp, Homo sapien
ttatctggggcagcccatgctgcag

SEQ ID NO: 307833 - DNA, 25 bp, Homo sapien
tactggcgatcagacaggaaggcaa

SEQ ID NO: 307834 - DNA, 25 bp, Homo sapien
atggatgtaggccaagtagaagagg

SEQ ID NO: 307835 - DNA, 25 bp, Homo sapien
gcagtactgtctctggcgagcagct

SEQ ID NO: 307836 - DNA, 25 bp, Homo sapien
cacagcctcaaataactctgcctct

SEQ ID NO: 307837 - DNA, 25 bp, Homo sapien
tgcacagcctcaaataactctgcct

SEQ ID NO: 307838 - DNA, 25 bp, Homo sapien
ctgcagcgacaggaggaagctttgc

SEQ ID NO: 307839 - DNA, 25 bp, Homo sapien
gcacagcctcaaataactctgcctc

SEQ ID NO: 307840 - DNA, 25 bp, Homo sapien
tctttgtcctggcagattgcaagca

SEQ ID NO: 307841 - DNA, 25 bp, Homo sapien
tttgtcctggcagattgcaagcaga

SEQ ID NO: 307842 - DNA, 25 bp, Homo sapien
ctttgtcctggcagattgcaagcag

SEQ ID NO: 307843 - DNA, 25 bp, Homo sapien
aaagttccaggacacggtgcccata

SEQ ID NO: 307844 - DNA, 25 bp, Homo sapien
gagtatagactagctgcaggtctgg

SEQ ID NO: 307845 - DNA, 25 bp, Homo sapien
acaggactactaagctggcaggaag

SEQ ID NO: 307846 - DNA, 25 bp, Homo sapien
ggtgcccatacctactcatgagctc

SEQ ID NO: 307847 - DNA, 25 bp, Homo sapien
tgcccaaggtcatagatcccagagt

SEQ ID NO: 307848 - DNA, 25 bp, Homo sapien
tatgacccaatctgtagtctctgct

SEQ ID NO: 307849 - DNA, 25 bp, Homo sapien
tttacagagtatgaggctgaagccc

SEQ ID NO: 307850 - DNA, 25 bp, Homo sapien
tgaggaccccaccatatggatcagt

SEQ ID NO: 307851 - DNA, 25 bp, Homo sapien
gagagaagaaagccagagatcagag

SEQ ID NO: 307852 - DNA, 25 bp, Homo sapien
ccagagatcagagggtactgcagtt

SEQ ID NO: 307853 - DNA, 25 bp, Homo sapien
aggagagaagaaagccagagatcag

SEQ ID NO: 307854 - DNA, 25 bp, Homo sapien
aagccagagatcagagggtactgca

SEQ ID NO: 307855 - DNA, 25 bp, Homo sapien
tcaggaaggtcctcaggctaatcag

SEQ ID NO: 307856 - DNA, 25 bp, Homo sapien
tcagtaccttgtgagctgtgtccac

SEQ ID NO: 307857 - DNA, 25 bp, Homo sapien
caggaagtggcctcggataagaccg

SEQ ID NO: 307858 - DNA, 25 bp, Homo sapien
ccactgggctggaatagatgaggtc

SEQ ID NO: 307859 - DNA, 25 bp, Homo sapien
tcagcagcaatggtaggttccccga

SEQ ID NO: 307860 - DNA, 25 bp, Homo sapien
ggctcagcagcaatggtaggttccc

SEQ ID NO: 307861 - DNA, 25 bp, Homo sapien
gaggctcagcagcaatggtaggttc

SEQ ID NO: 307862 - DNA, 25 bp, Homo sapien
agcagcaatggtaggttccccgagg

SEQ ID NO: 307863 - DNA, 25 bp, Homo sapien
agtgagcacccactgcacgtccagc

SEQ ID NO: 307864 - DNA, 25 bp, Homo sapien
tagtgagcacccactgcacgtccag

SEQ ID NO: 307865 - DNA, 25 bp, Homo sapien
gggcccttgggcgctatcccaagca

SEQ ID NO: 307866 - DNA, 25 bp, Homo sapien
ttagtgagcacccactgcacgtcca

SEQ ID NO: 307867 - DNA, 25 bp, Homo sapien
gggatccatcctgtgaacatcgtca

SEQ ID NO: 307868 - DNA, 25 bp, Homo sapien
taacagtcgaatgaagtgcagttcc

SEQ ID NO: 307869 - DNA, 25 bp, Homo sapien
tcataggtggtagcctgcgactggc

SEQ ID NO: 307870 - DNA, 25 bp, Homo sapien
tgcaagagatgaaagtccccagtcg

SEQ ID NO: 307871 - DNA, 25 bp, Homo sapien
caatacaggaagttgaaggagggct

SEQ ID NO: 307872 - DNA, 25 bp, Homo sapien
gctccaatacaggaagttgaaggag

SEQ ID NO: 307873 - DNA, 25 bp, Homo sapien
ggctgcacttcccacacagcttgct

SEQ ID NO: 307874 - DNA, 25 bp, Homo sapien
tggggctgcacttcccacacagctt

SEQ ID NO: 307875 - DNA, 25 bp, Homo sapien
caaacagaggatcatcctgaggctc

SEQ ID NO: 307876 - DNA, 25 bp, Homo sapien
gaggagcttcagctaagtgccacta

SEQ ID NO: 307877 - DNA, 25 bp, Homo sapien
aagggtcccagcttcataacagaag

SEQ ID NO: 307878 - DNA, 25 bp, Homo sapien
ctatggtgcttagcacctgattggg

SEQ ID NO: 307879 - DNA, 25 bp, Homo sapien
tgtgctgctcaggagcactgcagca

SEQ ID NO: 307880 - DNA, 25 bp, Homo sapien
tcaggcctgtgctgctcaggagcac

SEQ ID NO: 307881 - DNA, 25 bp, Homo sapien
tccagaagctccatcaggcctgtgc

SEQ ID NO: 307882 - DNA, 25 bp, Homo sapien
ggcctgtgctgctcaggagcactgc

SEQ ID NO: 307883 - DNA, 25 bp, Homo sapien
gagtgcagtcctgggagaatctgcc

SEQ ID NO: 307884 - DNA, 25 bp, Homo sapien
agagccttcaatacttggtccattt

SEQ ID NO: 307885 - DNA, 25 bp, Homo sapien
ctgagagtagtgcagcctttttctt

SEQ ID NO: 307886 - DNA, 25 bp, Homo sapien
gccttcaatacttggtccatttcca

SEQ ID NO: 307887 - DNA, 25 bp, Homo sapien
gagccttcaatacttggtccatttc

SEQ ID NO: 307888 - DNA, 25 bp, Homo sapien
cgacattcgcagtggagctaggaca

SEQ ID NO: 307889 - DNA, 25 bp, Homo sapien
tgtccgcaggaagcataagatggca

SEQ ID NO: 307890 - DNA, 25 bp, Homo sapien
agcccaatgaccagggaccggactt

SEQ ID NO: 307891 - DNA, 25 bp, Homo sapien
gaaaagctttgtcgcagggctgtcc

SEQ ID NO: 307892 - DNA, 25 bp, Homo sapien
gcatccaggtagtcaagcaaggcct

SEQ ID NO: 307893 - DNA, 25 bp, Homo sapien
catccaggtagtcaagcaaggcctc

SEQ ID NO: 307894 - DNA, 25 bp, Homo sapien
atccaggtagtcaagcaaggcctcc

SEQ ID NO: 307895 - DNA, 25 bp, Homo sapien
tccaggtagtcaagcaaggcctcca

SEQ ID NO: 307896 - DNA, 25 bp, Homo sapien
gactggctcggtgaaactatatacg

SEQ ID NO: 307897 - DNA, 25 bp, Homo sapien
tacgccatgattgtggaaggcaggc

SEQ ID NO: 307898 - DNA, 25 bp, Homo sapien
catctgtataatgggcatgactgcc

SEQ ID NO: 307899 - DNA, 25 bp, Homo sapien
taatccacttatgttgactggctcg

SEQ ID NO: 307900 - DNA, 25 bp, Homo sapien
tgttaatgcttccaagaccttgcct

SEQ ID NO: 307901 - DNA, 25 bp, Homo sapien
gctcaagaggaccttctcctattgg

SEQ ID NO: 307902 - DNA, 25 bp, Homo sapien
ccaagaccttgccttgggacattgc

SEQ ID NO: 307903 - DNA, 25 bp, Homo sapien
attgctcaagaggaccttctcctat

SEQ ID NO: 307904 - DNA, 25 bp, Homo sapien
tcatgagcctcaaaatctcaggtct

SEQ ID NO: 307905 - DNA, 25 bp, Homo sapien
tctgaggaaggaattctctccagca

SEQ ID NO: 307906 - DNA, 25 bp, Homo sapien
ggtcatgagcctcaaaatctcaggt

SEQ ID NO: 307907 - DNA, 25 bp, Homo sapien
agggtcatgagcctcaaaatctcag

SEQ ID NO: 307908 - DNA, 25 bp, Homo sapien
catgagagaggacactgctactccg

SEQ ID NO: 307909 - DNA, 25 bp, Homo sapien
gagagaggacactgctactccggta

SEQ ID NO: 307910 - DNA, 25 bp, Homo sapien
gacactgctactccggtaccgcata

SEQ ID NO: 307911 - DNA, 25 bp, Homo sapien
agaggacactgctactccggtaccg

SEQ ID NO: 307912 - DNA, 25 bp, Homo sapien
gtagacaggtcagccaaagccacac

SEQ ID NO: 307913 - DNA, 25 bp, Homo sapien
ttcgagagggtagacaggtcagcca

SEQ ID NO: 307914 - DNA, 25 bp, Homo sapien
gagggtagacaggtcagccaaagcc

SEQ ID NO: 307915 - DNA, 25 bp, Homo sapien
cctggagtgtggtgttcgagagggt

SEQ ID NO: 307916 - DNA, 25 bp, Homo sapien
tcagccaggtgtcccatgctctgga

SEQ ID NO: 307917 - DNA, 25 bp, Homo sapien
gtcagccaggtgtcccatgctctgg

SEQ ID NO: 307918 - DNA, 25 bp, Homo sapien
cagccaggtgtcccatgctctggag

SEQ ID NO: 307919 - DNA, 25 bp, Homo sapien
catgagagaggacactgctactccg

SEQ ID NO: 307920 - DNA, 25 bp, Homo sapien
gagagaggacactgctactccggta

SEQ ID NO: 307921 - DNA, 25 bp, Homo sapien
agaggacactgctactccggtaccg

SEQ ID NO: 307922 - DNA, 25 bp, Homo sapien
gacactgctactccggtaccgcata

SEQ ID NO: 307923 - DNA, 25 bp, Homo sapien
atgtgggacagggatacagccaccc

SEQ ID NO: 307924 - DNA, 25 bp, Homo sapien
ctgatgtgggacagggatacagcca

SEQ ID NO: 307925 - DNA, 25 bp, Homo sapien
tgggacagggatacagccacccctc

SEQ ID NO: 307926 - DNA, 25 bp, Homo sapien
tgatgtgggacagggatacagccac

SEQ ID NO: 307927 - DNA, 25 bp, Homo sapien
tatttcaacaatagagtatatggct

SEQ ID NO: 307928 - DNA, 25 bp, Homo sapien
tctatttcaacaatagagtatatgg

SEQ ID NO: 307929 - DNA, 25 bp, Homo sapien
tttcaacaatagagtatatggctcc

SEQ ID NO: 307930 - DNA, 25 bp, Homo sapien
caacaatagagtatatggctccata

SEQ ID NO: 307931 - DNA, 25 bp, Homo sapien
tccctgaaactgtgtcgtcgtctgt

SEQ ID NO: 307932 - DNA, 25 bp, Homo sapien
tctggcgtgcctccagcgcgctgtg

SEQ ID NO: 307933 - DNA, 25 bp, Homo sapien
gggtctgtgcccaatttaaggcgtg

SEQ ID NO: 307934 - DNA, 25 bp, Homo sapien
ttaaggcgtgaatcagcaaactggg

SEQ ID NO: 307935 - DNA, 25 bp, Homo sapien
cgagtcctgtgcgagcagctaggct

SEQ ID NO: 307936 - DNA, 25 bp, Homo sapien
aaacggctagcaaccgagcgcagac

SEQ ID NO: 307937 - DNA, 25 bp, Homo sapien
agctaggctcgaaggtccaacaggc

SEQ ID NO: 307938 - DNA, 25 bp, Homo sapien
caaagcaactgaaagcgggagcaaa

SEQ ID NO: 307939 - DNA, 25 bp, Homo sapien
aatcccgatcctgccgtatgcgtca

SEQ ID NO: 307940 - DNA, 25 bp, Homo sapien
ttttcagcctctcaatcccgatcct

SEQ ID NO: 307941 - DNA, 25 bp, Homo sapien
tctcaatcccgatcctgccgtatgc

SEQ ID NO: 307942 - DNA, 25 bp, Homo sapien
atcctgccgtatgcgtcacccggag

SEQ ID NO: 307943 - DNA, 25 bp, Homo sapien
gctgcagagatcatccggagaaccc

SEQ ID NO: 307944 - DNA, 25 bp, Homo sapien
ggctactgaactaccaggacacctg

SEQ ID NO: 307945 - DNA, 25 bp, Homo sapien
ccccaagcagacgagataagtgaaa

SEQ ID NO: 307946 - DNA, 25 bp, Homo sapien
ggagagatgctcagttacagacagt

SEQ ID NO: 307947 - DNA, 25 bp, Homo sapien
tcctcaaggtgcctgtggctcccat

SEQ ID NO: 307948 - DNA, 25 bp, Homo sapien
catcccagacaaaagcaggacaaag

SEQ ID NO: 307949 - DNA, 25 bp, Homo sapien
agatctccaggcttgggtccaggga

SEQ ID NO: 307950 - DNA, 25 bp, Homo sapien
gaaggccaggaattgaagaaggtcc

SEQ ID NO: 307951 - DNA, 25 bp, Homo sapien
ctgggcctgcttatccctggaatcc

SEQ ID NO: 307952 - DNA, 25 bp, Homo sapien
gctgggcctgcttatccctggaatc

SEQ ID NO: 307953 - DNA, 25 bp, Homo sapien
cttaaagagccccttgagcatgaca

SEQ ID NO: 307954 - DNA, 25 bp, Homo sapien
gccccttgagcatgacatcaaggat

SEQ ID NO: 307955 - DNA, 25 bp, Homo sapien
tggtggatgtcgttcagctgtgcca

SEQ ID NO: 307956 - DNA, 25 bp, Homo sapien
gctcccgccgcttcacctcaaacat

SEQ ID NO: 307957 - DNA, 25 bp, Homo sapien
ccatctgggagcacatcagcagcgg

SEQ ID NO: 307958 - DNA, 25 bp, Homo sapien
agcactgtccgggagtcctccagca

SEQ ID NO: 307959 - DNA, 25 bp, Homo sapien
gagcacatcagcagcggtgagcact

SEQ ID NO: 307960 - DNA, 25 bp, Homo sapien
cggtgagcactgtccgggagtcctc

SEQ ID NO: 307961 - DNA, 25 bp, Homo sapien
ccagatccaggttagccaaaagtgt

SEQ ID NO: 307962 - DNA, 25 bp, Homo sapien
tgtgtaaacaggtctaagcagtccc

SEQ ID NO: 307963 - DNA, 25 bp, Homo sapien
ccttggagggtaggtttgcacagac

SEQ ID NO: 307964 - DNA, 25 bp, Homo sapien
tagactccaaagatatgccagggtg

SEQ ID NO: 307965 - DNA, 25 bp, Homo sapien
gagtctcgctttcttgtccaggctg

SEQ ID NO: 307966 - DNA, 25 bp, Homo sapien
agacggagtctcgctttcttgtcca

SEQ ID NO: 307967 - DNA, 25 bp, Homo sapien
ggagtctcgctttcttgtccaggct

SEQ ID NO: 307968 - DNA, 25 bp, Homo sapien
acggagtctcgctttcttgtccagg

SEQ ID NO: 307969 - DNA, 25 bp, Homo sapien
tgcagaaactgataccccagcggat

SEQ ID NO: 307970 - DNA, 25 bp, Homo sapien
gggcccctggttgaagacgcctgtc

SEQ ID NO: 307971 - DNA, 25 bp, Homo sapien
taatagtgcacaatcctcgggaagc

SEQ ID NO: 307972 - DNA, 25 bp, Homo sapien
catcgccgaagaaggccgtgttctc

SEQ ID NO: 307973 - DNA, 25 bp, Homo sapien
ctgggacccagactcctgacttggg

SEQ ID NO: 307974 - DNA, 25 bp, Homo sapien
gatgtgggccacatgatgatcccat

SEQ ID NO: 307975 - DNA, 25 bp, Homo sapien
gaaacactagtcatcatctgccttc

SEQ ID NO: 307976 - DNA, 25 bp, Homo sapien
caccagagagtcattccttccatgc

SEQ ID NO: 307977 - DNA, 25 bp, Homo sapien
taaatgggttctggaagttggagtc

SEQ ID NO: 307978 - DNA, 25 bp, Homo sapien
aatgggttctggaagttggagtctt

SEQ ID NO: 307979 - DNA, 25 bp, Homo sapien
ctctgtgcggtcgattttaaatggg

SEQ ID NO: 307980 - DNA, 25 bp, Homo sapien
ctgtgcggtcgattttaaatgggtt

SEQ ID NO: 307981 - DNA, 25 bp, Homo sapien
catgctgtgaacagacagggagcct

SEQ ID NO: 307982 - DNA, 25 bp, Homo sapien
tggaacccctggaatgagagcatgt

SEQ ID NO: 307983 - DNA, 25 bp, Homo sapien
tgcccacaggctccaatgagtcagt

SEQ ID NO: 307984 - DNA, 25 bp, Homo sapien
tagctaccctgatatccacctgaag

SEQ ID NO: 307985 - DNA, 25 bp, Homo sapien
tcacctccgtgggagttagggaaca

SEQ ID NO: 307986 - DNA, 25 bp, Homo sapien
caaccaggccaacagtctagctagt

SEQ ID NO: 307987 - DNA, 25 bp, Homo sapien
cctcgaacggtgtggtgatgtctct

SEQ ID NO: 307988 - DNA, 25 bp, Homo sapien
gacaccagggtttgacaagtccagt

SEQ ID NO: 307989 - DNA, 25 bp, Homo sapien
gccttttcggatctccttccgcttc

SEQ ID NO: 307990 - DNA, 25 bp, Homo sapien
ctggaaagggtcagtgctgggaatg

SEQ ID NO: 307991 - DNA, 25 bp, Homo sapien
ctataactcagactgggatctggag

SEQ ID NO: 307992 - DNA, 25 bp, Homo sapien
aactcagactgggatctggagatcc

SEQ ID NO: 307993 - DNA, 25 bp, Homo sapien
gccagaggtcttcagccaccaacag

SEQ ID NO: 307994 - DNA, 25 bp, Homo sapien
tggctcagaacctagttctgctgct

SEQ ID NO: 307995 - DNA, 25 bp, Homo sapien
accctgacccgtggctcagaaccta

SEQ ID NO: 307996 - DNA, 25 bp, Homo sapien
ctggccagaggtcttcagccaccaa

SEQ ID NO: 307997 - DNA, 25 bp, Homo sapien
tcttccagcgctgccagagagaaca

SEQ ID NO: 307998 - DNA, 25 bp, Homo sapien
gacgggaagctgtctgacccatgca

SEQ ID NO: 307999 - DNA, 25 bp, Homo sapien
caagctgtttctacatccctgaggg

SEQ ID NO: 308000 - DNA, 25 bp, Homo sapien
gaagggctaacactcagatctcact

SEQ ID NO: 308001 - DNA, 25 bp, Homo sapien
cagccctttagttcacagactcggg

SEQ ID NO: 308002 - DNA, 25 bp, Homo sapien
ctctcccatgctgtggagtatactt

SEQ ID NO: 308003 - DNA, 25 bp, Homo sapien
acagactcgggtgtccatgtggctg

SEQ ID NO: 308004 - DNA, 25 bp, Homo sapien
tgttaatgccatggaccagcccttt

SEQ ID NO: 308005 - DNA, 25 bp, Homo sapien
tctagcatgaaaaggacagcgactg

SEQ ID NO: 308006 - DNA, 25 bp, Homo sapien
tacatgggatgaacaaggaaccgtc

SEQ ID NO: 308007 - DNA, 25 bp, Homo sapien
caagaaagctaggtctgctgccaac

SEQ ID NO: 308008 - DNA, 25 bp, Homo sapien
gtagaaagaacctccagccgaagct

SEQ ID NO: 308009 - DNA, 25 bp, Homo sapien
tcaagaagcctctgaagaagtgaca

SEQ ID NO: 308010 - DNA, 25 bp, Homo sapien
gtgatgcctcgccaagtggactgaa

SEQ ID NO: 308011 - DNA, 25 bp, Homo sapien
cagctaaccggtaggagaactgccg

SEQ ID NO: 308012 - DNA, 25 bp, Homo sapien
aacgatggaagacccaacagctggc

SEQ ID NO: 308013 - DNA, 25 bp, Homo sapien
gcctggctgggagcacattacgtca

SEQ ID NO: 308014 - DNA, 25 bp, Homo sapien
gggagcacattacgtcatcttccca

SEQ ID NO: 308015 - DNA, 25 bp, Homo sapien
tggctgggagcacattacgtcatct

SEQ ID NO: 308016 - DNA, 25 bp, Homo sapien
gctgggagcacattacgtcatcttc

SEQ ID NO: 308017 - DNA, 25 bp, Homo sapien
gcccgggcgccgcacagaaagggcg

SEQ ID NO: 308018 - DNA, 25 bp, Homo sapien
gggcggtgccgtcgccaccgcccat

SEQ ID NO: 308019 - DNA, 25 bp, Homo sapien
ggcaccgcctcaccgacgggtgcca

SEQ ID NO: 308020 - DNA, 25 bp, Homo sapien
gccgccatgtttgcgttgcgcccgg

SEQ ID NO: 308021 - DNA, 25 bp, Homo sapien
cagctccgtgagggtctccatggtc

SEQ ID NO: 308022 - DNA, 25 bp, Homo sapien
agctcgtcgcccagctccgtgaggg

SEQ ID NO: 308023 - DNA, 25 bp, Homo sapien
tcgatgtctcccagggtcagctcgt

SEQ ID NO: 308024 - DNA, 25 bp, Homo sapien
tccatggtctccagaccacccagct

SEQ ID NO: 308025 - DNA, 25 bp, Homo sapien
gcggcgggagagcggaccacggaaa

SEQ ID NO: 308026 - DNA, 25 bp, Homo sapien
agcggaccacggaaaccgcgtgtgg

SEQ ID NO: 308027 - DNA, 25 bp, Homo sapien
acggaaaccgcgtgtgggcgcgcga

SEQ ID NO: 308028 - DNA, 25 bp, Homo sapien
gaaaccgcgtgtgggcgcgcgaggg

SEQ ID NO: 308029 - DNA, 25 bp, Homo sapien
caatgttcagacgagaatccagaag

SEQ ID NO: 308030 - DNA, 25 bp, Homo sapien
tagtgtgttacccagctgaacttga

SEQ ID NO: 308031 - DNA, 25 bp, Homo sapien
cctctttggaagatacacgcccatg

SEQ ID NO: 308032 - DNA, 25 bp, Homo sapien
tacacaggtgtgcaagggtttgcct

SEQ ID NO: 308033 - DNA, 25 bp, Homo sapien
acaactatgtcggagacagcaccac

SEQ ID NO: 308034 - DNA, 25 bp, Homo sapien
taactggattcttgcgacaactatg

SEQ ID NO: 308035 - DNA, 25 bp, Homo sapien
tggtgtcccagctagaatacagtgg

SEQ ID NO: 308036 - DNA, 25 bp, Homo sapien
gtaaccgctcctgcctctagacttg

SEQ ID NO: 308037 - DNA, 25 bp, Homo sapien
gggtgctgcctacacagtgatttca

SEQ ID NO: 308038 - DNA, 25 bp, Homo sapien
cattctgtgagaacaaggaacttgt

SEQ ID NO: 308039 - DNA, 25 bp, Homo sapien
tatttgccagcactgaacctggagc

SEQ ID NO: 308040 - DNA, 25 bp, Homo sapien
caggatgagtcacgttcacttagag

SEQ ID NO: 308041 - DNA, 25 bp, Homo sapien
cacctggtatttgcaacttagaagc

SEQ ID NO: 308042 - DNA, 25 bp, Homo sapien
tgcacatgttggatttaggccactg

SEQ ID NO: 308043 - DNA, 25 bp, Homo sapien
taggccactgttccatcacttacaa

SEQ ID NO: 308044 - DNA, 25 bp, Homo sapien
gcttacatcagacagggcatgggac

SEQ ID NO: 308045 - DNA, 25 bp, Homo sapien
aaagagtgacaagggatcagattta

SEQ ID NO: 308046 - DNA, 25 bp, Homo sapien
tctcccatggcctgtagggttcagg

SEQ ID NO: 308047 - DNA, 25 bp, Homo sapien
tataaatatggcccaaaaagtgacc

SEQ ID NO: 308048 - DNA, 25 bp, Homo sapien
ctgtagggttcagggtttcagatga

SEQ ID NO: 308049 - DNA, 25 bp, Homo sapien
tggcccactatagcaggggacctga

SEQ ID NO: 308050 - DNA, 25 bp, Homo sapien
gcatataccgaatattacataataa

SEQ ID NO: 308051 - DNA, 25 bp, Homo sapien
tacacacaaaggtgtcatatattcc

SEQ ID NO: 308052 - DNA, 25 bp, Homo sapien
ggagaggtgcggattctcaaatgct

SEQ ID NO: 308053 - DNA, 25 bp, Homo sapien
ttattgttgtgatccttaaccctcc

SEQ ID NO: 308054 - DNA, 25 bp, Homo sapien
ctttttttggtcacctatgagattt

SEQ ID NO: 308055 - DNA, 25 bp, Homo sapien
tgtgcccggcaggtccctatctttt

SEQ ID NO: 308056 - DNA, 25 bp, Homo sapien
ctccatttcacagtaagttctgggt

SEQ ID NO: 308057 - DNA, 25 bp, Homo sapien
tattcggctgaaatgagccatgcag

SEQ ID NO: 308058 - DNA, 25 bp, Homo sapien
caggtgtttttcaagccaaagtgcc

SEQ ID NO: 308059 - DNA, 25 bp, Homo sapien
tttccattggacttcagacagccct

SEQ ID NO: 308060 - DNA, 25 bp, Homo sapien
gataactcccaagctgtaacctaat

SEQ ID NO: 308061 - DNA, 25 bp, Homo sapien
tatgctcctgctagtgtttcctcac

SEQ ID NO: 308062 - DNA, 25 bp, Homo sapien
gtaaaccgcctgctcttgaccttcg

SEQ ID NO: 308063 - DNA, 25 bp, Homo sapien
gggtcaaaggaccactatacatgct

SEQ ID NO: 308064 - DNA, 25 bp, Homo sapien
cctagaagttagatggctgggtcaa

SEQ ID NO: 308065 - DNA, 25 bp, Homo sapien
caagctgagtaaaaccctgggcact

SEQ ID NO: 308066 - DNA, 25 bp, Homo sapien
gcagcgagtagggagtcactgtcct

SEQ ID NO: 308067 - DNA, 25 bp, Homo sapien
ttcttctaccacaacacagtgcagg

SEQ ID NO: 308068 - DNA, 25 bp, Homo sapien
tgatggcccctaagtcatggagctt

SEQ ID NO: 308069 - DNA, 25 bp, Homo sapien
ttgattactgacaaattgcagcatc

SEQ ID NO: 308070 - DNA, 25 bp, Homo sapien
tgattactgacaaattgcagcatct

SEQ ID NO: 308071 - DNA, 25 bp, Homo sapien
tcctcgtctgcggagtggtgctgaa

SEQ ID NO: 308072 - DNA, 25 bp, Homo sapien
tgaaaacaagtcagggaactctccc

SEQ ID NO: 308073 - DNA, 25 bp, Homo sapien
gacctgggtgaatgaccgttgcact

SEQ ID NO: 308074 - DNA, 25 bp, Homo sapien
aaccttgacttgcagagttggagcc

SEQ ID NO: 308075 - DNA, 25 bp, Homo sapien
tgccattcctgaagacgacagaaat

SEQ ID NO: 308076 - DNA, 25 bp, Homo sapien
taccagaacctcattcagacaggac

SEQ ID NO: 308077 - DNA, 25 bp, Homo sapien
gatattaaggtatttgaagctgcag

SEQ ID NO: 308078 - DNA, 25 bp, Homo sapien
tgcaaactggcacataaacattgga

SEQ ID NO: 308079 - DNA, 25 bp, Homo sapien
cactagttatcagaatggccctgtg

SEQ ID NO: 308080 - DNA, 25 bp, Homo sapien
cagctgagatctggctgccgcctag

SEQ ID NO: 308081 - DNA, 25 bp, Homo sapien
tcaacacatactaagggcccagcat

SEQ ID NO: 308082 - DNA, 25 bp, Homo sapien
gccgcctagccaatttcaagcctta

SEQ ID NO: 308083 - DNA, 25 bp, Homo sapien
tgttgagaatcaacaactccctggg

SEQ ID NO: 308084 - DNA, 25 bp, Homo sapien
cccagcaagggagttaacagatgtt

SEQ ID NO: 308085 - DNA, 25 bp, Homo sapien
tttctggacggcaagtgcactttgg

SEQ ID NO: 308086 - DNA, 25 bp, Homo sapien
caatttctgagggaacgagtacaaa

SEQ ID NO: 308087 - DNA, 25 bp, Homo sapien
ttggccgtttgtgtcagcacccgct

SEQ ID NO: 308088 - DNA, 25 bp, Homo sapien
tgctgcacctgtggcgcagcaactg

SEQ ID NO: 308089 - DNA, 25 bp, Homo sapien
agcaactgtctgcaccgtagccggg

SEQ ID NO: 308090 - DNA, 25 bp, Homo sapien
tgctgaatggtgaccggctgtacct

SEQ ID NO: 308091 - DNA, 25 bp, Homo sapien
gtcttcagtgtggtcaaaacaaggg

SEQ ID NO: 308092 - DNA, 25 bp, Homo sapien
cttgatgatctgaggctggaccagg

SEQ ID NO: 308093 - DNA, 25 bp, Homo sapien
gaccgcagccataacagggctgcca

SEQ ID NO: 308094 - DNA, 25 bp, Homo sapien
ggccgggttctggaccgcagccata

SEQ ID NO: 308095 - DNA, 25 bp, Homo sapien
tggtacttgaagggcagccgtctgg

SEQ ID NO: 308096 - DNA, 25 bp, Homo sapien
ggtacttgaagggcagccgtctgga

SEQ ID NO: 308097 - DNA, 25 bp, Homo sapien
taacatctctgaagactaacacctc

SEQ ID NO: 308098 - DNA, 25 bp, Homo sapien
tgtagactccagtactcccacatcg

SEQ ID NO: 308099 - DNA, 25 bp, Homo sapien
ggccctagggtccttcagaagtcat

SEQ ID NO: 308100 - DNA, 25 bp, Homo sapien
ggtcttgtgtggagctattagccaa

SEQ ID NO: 308101 - DNA, 25 bp, Homo sapien
aattgctaggcataatttcattgta

SEQ ID NO: 308102 - DNA, 25 bp, Homo sapien
tttatgaataaagctagtgcttcta

SEQ ID NO: 308103 - DNA, 25 bp, Homo sapien
agttcttggattttatgaataaagc

SEQ ID NO: 308104 - DNA, 25 bp, Homo sapien
gaataaagctagtgcttctaaattt

SEQ ID NO: 308105 - DNA, 25 bp, Homo sapien
atgttgtttcatgcatcagtagctt

SEQ ID NO: 308106 - DNA, 25 bp, Homo sapien
cccggtggcttgacacactatttct

SEQ ID NO: 308107 - DNA, 25 bp, Homo sapien
tcccccaggtacctgcttaatgggc

SEQ ID NO: 308108 - DNA, 25 bp, Homo sapien
gactcccccaggtacctgcttaatg

SEQ ID NO: 308109 - DNA, 25 bp, Homo sapien
ctcaagctgcttgactcccccaggt

SEQ ID NO: 308110 - DNA, 25 bp, Homo sapien
tttggggggctcaagctgcttgact

SEQ ID NO: 308111 - DNA, 25 bp, Homo sapien
ggagcgatatcgtttctcaatgata

SEQ ID NO: 308112 - DNA, 25 bp, Homo sapien
attgatggaggagcgatatcgtttc

SEQ ID NO: 308113 - DNA, 25 bp, Homo sapien
ctcaatgatattatgggttgtccgc

SEQ ID NO: 308114 - DNA, 25 bp, Homo sapien
catgaccaggtctttcaattcgatg

SEQ ID NO: 308115 - DNA, 25 bp, Homo sapien
ggtacacacagtcctgtatctggaa

SEQ ID NO: 308116 - DNA, 25 bp, Homo sapien
gtcaaaggtctcagcgggtcactgc

SEQ ID NO: 308117 - DNA, 25 bp, Homo sapien
tctgcctctgacagtggagtcccca

SEQ ID NO: 308118 - DNA, 25 bp, Homo sapien
aaaaagcacctctaactcggtcttg

SEQ ID NO: 308119 - DNA, 25 bp, Homo sapien
tatttgatgtaatcaatggccttcc

SEQ ID NO: 308120 - DNA, 25 bp, Homo sapien
tcctggcgcagtttatgattgacct

SEQ ID NO: 308121 - DNA, 25 bp, Homo sapien
ccttcctcagaacgccagacttgtg

SEQ ID NO: 308122 - DNA, 25 bp, Homo sapien
gacctgctgcaagtatttgatgtaa

SEQ ID NO: 308123 - DNA, 25 bp, Homo sapien
gctgacaagccttttctcagcacac

SEQ ID NO: 308124 - DNA, 25 bp, Homo sapien
gggccagggctgacaagccttttct

SEQ ID NO: 308125 - DNA, 25 bp, Homo sapien
gacaagccttttctcagcacactta

SEQ ID NO: 308126 - DNA, 25 bp, Homo sapien
cagggctgacaagccttttctcagc

SEQ ID NO: 308127 - DNA, 25 bp, Homo sapien
ccccacctggtgaaaatgatctgct

SEQ ID NO: 308128 - DNA, 25 bp, Homo sapien
aaaccccacctggtgaaaatgatct

SEQ ID NO: 308129 - DNA, 25 bp, Homo sapien
accccacctggtgaaaatgatctgc

SEQ ID NO: 308130 - DNA, 25 bp, Homo sapien
aaccccacctggtgaaaatgatctg

SEQ ID NO: 308131 - DNA, 25 bp, Homo sapien
tccaatagagggcttcctggctcag

SEQ ID NO: 308132 - DNA, 25 bp, Homo sapien
gcctaggtcgatgccctttagaagc

SEQ ID NO: 308133 - DNA, 25 bp, Homo sapien
gggacatcagaaggacattctgatt

SEQ ID NO: 308134 - DNA, 25 bp, Homo sapien
taaagtcctcgatcttcaggtccac

SEQ ID NO: 308135 - DNA, 25 bp, Homo sapien
cacacagaagaatccgtgagcggtc

SEQ ID NO: 308136 - DNA, 25 bp, Homo sapien
tgcccagcgccacaggaggagagtc

SEQ ID NO: 308137 - DNA, 25 bp, Homo sapien
aatccgtgagcggtctaccatgccc

SEQ ID NO: 308138 - DNA, 25 bp, Homo sapien
cccagcgccacaggaggagagtctg

SEQ ID NO: 308139 - DNA, 25 bp, Homo sapien
ctgactcgaatgacaggacactgcg

SEQ ID NO: 308140 - DNA, 25 bp, Homo sapien
gctggtcagagtcgtgggcccctcc

SEQ ID NO: 308141 - DNA, 25 bp, Homo sapien
caggacactgcggccagagcctgag

SEQ ID NO: 308142 - DNA, 25 bp, Homo sapien
gtgctggtcagagtcgtgggcccct

SEQ ID NO: 308143 - DNA, 25 bp, Homo sapien
acagaccccagcactatcacaggaa

SEQ ID NO: 308144 - DNA, 25 bp, Homo sapien
ctaggaaaggccttgcggagcagcc

SEQ ID NO: 308145 - DNA, 25 bp, Homo sapien
gaaagagtcttctacctcattttca

SEQ ID NO: 308146 - DNA, 25 bp, Homo sapien
aaaggccttgcggagcagccaggca

SEQ ID NO: 308147 - DNA, 25 bp, Homo sapien
tgtttccggtgcctccagaaggtga

SEQ ID NO: 308148 - DNA, 25 bp, Homo sapien
gcagcttcacaaagacgctcaggac

SEQ ID NO: 308149 - DNA, 25 bp, Homo sapien
cgagtgtggccggatcactggctcc

SEQ ID NO: 308150 - DNA, 25 bp, Homo sapien
gaagagtaggcatcatccagtcaaa

SEQ ID NO: 308151 - DNA, 25 bp, Homo sapien
taggactttctttgacacgagttgc

SEQ ID NO: 308152 - DNA, 25 bp, Homo sapien
caatttgggcctagacacactacca

SEQ ID NO: 308153 - DNA, 25 bp, Homo sapien
taaagccccaaatcagttcctagtg

SEQ ID NO: 308154 - DNA, 25 bp, Homo sapien
taattatctatgcagaggcgcccac

SEQ ID NO: 308155 - DNA, 25 bp, Homo sapien
ctgctgaggagtgttctggttcttg

SEQ ID NO: 308156 - DNA, 25 bp, Homo sapien
tcctcaatgctgtgagttgccccag

SEQ ID NO: 308157 - DNA, 25 bp, Homo sapien
tggatgtttaactcttcctcaatgc

SEQ ID NO: 308158 - DNA, 25 bp, Homo sapien
ctcttgaaatgtggatgtttaactc

SEQ ID NO: 308159 - DNA, 25 bp, Homo sapien
aaggaacaggcctctcaaaatcaca

SEQ ID NO: 308160 - DNA, 25 bp, Homo sapien
tctgagacccatagccccagcaagg

SEQ ID NO: 308161 - DNA, 25 bp, Homo sapien
acatctatattctgagacccatagc

SEQ ID NO: 308162 - DNA, 25 bp, Homo sapien
agattctcactaatggccctgcagc

SEQ ID NO: 308163 - DNA, 25 bp, Homo sapien
tattgggcagctggtacactatctg

SEQ ID NO: 308164 - DNA, 25 bp, Homo sapien
aagatgggctattcccaagtcccag

SEQ ID NO: 308165 - DNA, 25 bp, Homo sapien
tctacggcactgtactggagaccgc

SEQ ID NO: 308166 - DNA, 25 bp, Homo sapien
gggtctaatggagagtctacggcac

SEQ ID NO: 308167 - DNA, 25 bp, Homo sapien
tgcaagcacttggaccttaccccag

SEQ ID NO: 308168 - DNA, 25 bp, Homo sapien
gcttttagacataaggtggtgacac

SEQ ID NO: 308169 - DNA, 25 bp, Homo sapien
gaatctctggtattgcagccctcta

SEQ ID NO: 308170 - DNA, 25 bp, Homo sapien
catgcccggccagcagtagctttta

SEQ ID NO: 308171 - DNA, 25 bp, Homo sapien
tctatgagcaaatgctggtcagagt

SEQ ID NO: 308172 - DNA, 25 bp, Homo sapien
caattatcagaggaattagtgcaca

SEQ ID NO: 308173 - DNA, 25 bp, Homo sapien
tagtgcacactcataaaaacgaggg

SEQ ID NO: 308174 - DNA, 25 bp, Homo sapien
tactgcgtgcgtttgttctatgagc

SEQ ID NO: 308175 - DNA, 25 bp, Homo sapien
ggatcacgttccaggagaggctgca

SEQ ID NO: 308176 - DNA, 25 bp, Homo sapien
aagactttcttgagcagccagcgca

SEQ ID NO: 308177 - DNA, 25 bp, Homo sapien
tctgcaggctgtagcggatcacgtt

SEQ ID NO: 308178 - DNA, 25 bp, Homo sapien
gcaccaggcgtagcttctgcaggct

SEQ ID NO: 308179 - DNA, 25 bp, Homo sapien
tcttctttgggctgtagatcctgca

SEQ ID NO: 308180 - DNA, 25 bp, Homo sapien
tctcacaggcaagtgtccaaaaggg

SEQ ID NO: 308181 - DNA, 25 bp, Homo sapien
cactctcacctgtagtcttctttgg

SEQ ID NO: 308182 - DNA, 25 bp, Homo sapien
gttcttctgaatggccctgagggtc

SEQ ID NO: 308183 - DNA, 25 bp, Homo sapien
taaaaaaccttcacaatgtggctgg

SEQ ID NO: 308184 - DNA, 25 bp, Homo sapien
ttcacaatgtggctgggtgccagtg

SEQ ID NO: 308185 - DNA, 25 bp, Homo sapien
aaaaaccttcacaatgtggctgggt

SEQ ID NO: 308186 - DNA, 25 bp, Homo sapien
accttcacaatgtggctgggtgcca

SEQ ID NO: 308187 - DNA, 25 bp, Homo sapien
cagtgtgctcggtgggatcttctcc

SEQ ID NO: 308188 - DNA, 25 bp, Homo sapien
ttcagccaggttcacggcacacaac

SEQ ID NO: 308189 - DNA, 25 bp, Homo sapien
gcagcagtcagatggatctcaacca

SEQ ID NO: 308190 - DNA, 25 bp, Homo sapien
gcacacaacgccatgtgtacatcgg

SEQ ID NO: 308191 - DNA, 25 bp, Homo sapien
tatatcaatgtcactacagggcacg

SEQ ID NO: 308192 - DNA, 25 bp, Homo sapien
tgagctccttgtagacaggcacagg

SEQ ID NO: 308193 - DNA, 25 bp, Homo sapien
tgagctagctgataacaaggaccgg

SEQ ID NO: 308194 - DNA, 25 bp, Homo sapien
catatgggaggtgcttgatagccac

SEQ ID NO: 308195 - DNA, 25 bp, Homo sapien
gttgaaatgaataggaagaatgatg

SEQ ID NO: 308196 - DNA, 25 bp, Homo sapien
gaaggttgaaatgaataggaagaat

SEQ ID NO: 308197 - DNA, 25 bp, Homo sapien
tctgtggactcccaggtcgtctagc

SEQ ID NO: 308198 - DNA, 25 bp, Homo sapien
ccaggtcgtctagcccacaagtgag

SEQ ID NO: 308199 - DNA, 25 bp, Homo sapien
gtcctgaagacctggtcccaggaag

SEQ ID NO: 308200 - DNA, 25 bp, Homo sapien
cctagctcacactgtcctgaagacc

SEQ ID NO: 308201 - DNA, 25 bp, Homo sapien
tagctcacactgtcctgaagacctg

SEQ ID NO: 308202 - DNA, 25 bp, Homo sapien
cctgaagacctggtcccaggaagat

SEQ ID NO: 308203 - DNA, 25 bp, Homo sapien
tcacttcaagccgtaagttaaaatg

SEQ ID NO: 308204 - DNA, 25 bp, Homo sapien
acttcaagccgtaagttaaaatgtg

SEQ ID NO: 308205 - DNA, 25 bp, Homo sapien
tgttgcatgggtaacttcacttcaa

SEQ ID NO: 308206 - DNA, 25 bp, Homo sapien
tggggggcatggaagttacaaatgt

SEQ ID NO: 308207 - DNA, 25 bp, Homo sapien
aatttttgtttgtatgtacgtatgt

SEQ ID NO: 308208 - DNA, 25 bp, Homo sapien
ctaatttttgtttgtatgtacgtat

SEQ ID NO: 308209 - DNA, 25 bp, Homo sapien
agctaatttttgtttgtatgtacgt

SEQ ID NO: 308210 - DNA, 25 bp, Homo sapien
cgtgatctccgctcaatgcaccctc

SEQ ID NO: 308211 - DNA, 25 bp, Homo sapien
aataacaggttctgcgtcaggtaga

SEQ ID NO: 308212 - DNA, 25 bp, Homo sapien
caatctcattaatcacctgggaagt

SEQ ID NO: 308213 - DNA, 25 bp, Homo sapien
gagcttgtgctctcactagacacca

SEQ ID NO: 308214 - DNA, 25 bp, Homo sapien
taatcaatgagacgacagatagtcc

SEQ ID NO: 308215 - DNA, 25 bp, Homo sapien
caacaactggctcatttgtagctaa

SEQ ID NO: 308216 - DNA, 25 bp, Homo sapien
gaagagcagttactttaaagatgac

SEQ ID NO: 308217 - DNA, 25 bp, Homo sapien
ccatctctacagatttggtctgagg

SEQ ID NO: 308218 - DNA, 25 bp, Homo sapien
ctgaggaaactcttatggaggtgca

SEQ ID NO: 308219 - DNA, 25 bp, Homo sapien
aactcgtggtttcaggagattctcc

SEQ ID NO: 308220 - DNA, 25 bp, Homo sapien
ttttttcaaatgaccactaagctgt

SEQ ID NO: 308221 - DNA, 25 bp, Homo sapien
tttttcaaatgaccactaagctgtt

SEQ ID NO: 308222 - DNA, 25 bp, Homo sapien
gcctcaaactcgtggtttcaggaga

SEQ ID NO: 308223 - DNA, 25 bp, Homo sapien
gctctcaaatcgtgtgccaaggcag

SEQ ID NO: 308224 - DNA, 25 bp, Homo sapien
ggttgtgtcccctaacatcggtcta

SEQ ID NO: 308225 - DNA, 25 bp, Homo sapien
ttccaaagcttgaggtgtgcagtgc

SEQ ID NO: 308226 - DNA, 25 bp, Homo sapien
cagtgacaccatgcttgtgaagagc

SEQ ID NO: 308227 - DNA, 25 bp, Homo sapien
caaagcctagtccaggtcatacggc

SEQ ID NO: 308228 - DNA, 25 bp, Homo sapien
aattccacatgtccaatcagcaagg

SEQ ID NO: 308229 - DNA, 25 bp, Homo sapien
cagaacatttgaacggttgactcca

SEQ ID NO: 308230 - DNA, 25 bp, Homo sapien
gaggaaccagaaaggcaaatgtgga

SEQ ID NO: 308231 - DNA, 25 bp, Homo sapien
tggtgggagaatagcagttgaggag

SEQ ID NO: 308232 - DNA, 25 bp, Homo sapien
caatggtgggagaatagcagttgag

SEQ ID NO: 308233 - DNA, 25 bp, Homo sapien
ctgcaatggtgggagaatagcagtt

SEQ ID NO: 308234 - DNA, 25 bp, Homo sapien
tgcaatggtgggagaatagcagttg

SEQ ID NO: 308235 - DNA, 25 bp, Homo sapien
agaacaaatgtagaggaccctcgcg

SEQ ID NO: 308236 - DNA, 25 bp, Homo sapien
gtgttgatactggatactggagaac

SEQ ID NO: 308237 - DNA, 25 bp, Homo sapien
ggaccaggggcaccaatagtccgtc

SEQ ID NO: 308238 - DNA, 25 bp, Homo sapien
gggcaccaatagtccgtccttcctc

SEQ ID NO: 308239 - DNA, 25 bp, Homo sapien
caggagcagcgctgtttcatggtct

SEQ ID NO: 308240 - DNA, 25 bp, Homo sapien
gtgccactcgaggacacagacagag

SEQ ID NO: 308241 - DNA, 25 bp, Homo sapien
taagtagccatcagcgaatgtaacg

SEQ ID NO: 308242 - DNA, 25 bp, Homo sapien
tcagaagacttgaatgccagggtca

SEQ ID NO: 308243 - DNA, 25 bp, Homo sapien
cagccactgtggggtgcagaaagca

SEQ ID NO: 308244 - DNA, 25 bp, Homo sapien
gaccaggggtaacaccaaggtggca

SEQ ID NO: 308245 - DNA, 25 bp, Homo sapien
ccactgtggggtgcagaaagcacca

SEQ ID NO: 308246 - DNA, 25 bp, Homo sapien
agccactgtggggtgcagaaagcac

SEQ ID NO: 308247 - DNA, 25 bp, Homo sapien
cactgtgctcggggccacacaggct

SEQ ID NO: 308248 - DNA, 25 bp, Homo sapien
gctccatgaaaaacttctggcccag

SEQ ID NO: 308249 - DNA, 25 bp, Homo sapien
agccagcgcagggagtcaggaacag

SEQ ID NO: 308250 - DNA, 25 bp, Homo sapien
tctgggctcggctgaggaagtagct

SEQ ID NO: 308251 - DNA, 25 bp, Homo sapien
tctatagctcgctccagcaggttct

SEQ ID NO: 308252 - DNA, 25 bp, Homo sapien
gactctatagctcgctccagcaggt

SEQ ID NO: 308253 - DNA, 25 bp, Homo sapien
ccaaggactctatagctcgctccag

SEQ ID NO: 308254 - DNA, 25 bp, Homo sapien
ttcaccaaggactctatagctcgct

SEQ ID NO: 308255 - DNA, 25 bp, Homo sapien
cccacagagtccacaaaagaatgaa

SEQ ID NO: 308256 - DNA, 25 bp, Homo sapien
aatgaagtaatttcaagtactccag

SEQ ID NO: 308257 - DNA, 25 bp, Homo sapien
gagagtggggggctcataaccccca

SEQ ID NO: 308258 - DNA, 25 bp, Homo sapien
aaagaatgaagtaatttcaagtact

SEQ ID NO: 308259 - DNA, 25 bp, Homo sapien
cctgcctctgagtgctgtttgggag

SEQ ID NO: 308260 - DNA, 25 bp, Homo sapien
aagcactgtgaagacctgaactgag

SEQ ID NO: 308261 - DNA, 25 bp, Homo sapien
ctgaactgagcaccctgagactgtg

SEQ ID NO: 308262 - DNA, 25 bp, Homo sapien
gaactggagccacaggtatgaacct

SEQ ID NO: 308263 - DNA, 25 bp, Homo sapien
tggccacagtgattgcagacgtcca

SEQ ID NO: 308264 - DNA, 25 bp, Homo sapien
ccaccaccgacagatgatgtctgga

SEQ ID NO: 308265 - DNA, 25 bp, Homo sapien
agctgcatcgtctccctggagccag

SEQ ID NO: 308266 - DNA, 25 bp, Homo sapien
ttggtaaaatgagagcgcacagctg

SEQ ID NO: 308267 - DNA, 25 bp, Homo sapien
taactcaaacaagattcccctggag

SEQ ID NO: 308268 - DNA, 25 bp, Homo sapien
ctgctaactcaaacaagattcccct

SEQ ID NO: 308269 - DNA, 25 bp, Homo sapien
gctaactcaaacaagattcccctgg

SEQ ID NO: 308270 - DNA, 25 bp, Homo sapien
aactcaaacaagattcccctggaga

SEQ ID NO: 308271 - DNA, 25 bp, Homo sapien
gaatgtcaaaagctctccggttatg

SEQ ID NO: 308272 - DNA, 25 bp, Homo sapien
gacgcagacatgaatctccaaagag

SEQ ID NO: 308273 - DNA, 25 bp, Homo sapien
tcctgtgcgccggttaagggtctgc

SEQ ID NO: 308274 - DNA, 25 bp, Homo sapien
ttggctctaaggataggacctcgtg

SEQ ID NO: 308275 - DNA, 25 bp, Homo sapien
tagtcattccaacgtgtgcctcagt

SEQ ID NO: 308276 - DNA, 25 bp, Homo sapien
gccacccaagatagtcattccaacg

SEQ ID NO: 308277 - DNA, 25 bp, Homo sapien
cccaagatagtcattccaacgtgtg

SEQ ID NO: 308278 - DNA, 25 bp, Homo sapien
aagaagccacccaagatagtcattc

SEQ ID NO: 308279 - DNA, 25 bp, Homo sapien
acaggcttcaccatcacgtctgctg

SEQ ID NO: 308280 - DNA, 25 bp, Homo sapien
cttcattcaatgctggaagtcagag

SEQ ID NO: 308281 - DNA, 25 bp, Homo sapien
ctgcaggcatggaagatggccttca

SEQ ID NO: 308282 - DNA, 25 bp, Homo sapien
tggaagatggccttcaccagggggc

SEQ ID NO: 308283 - DNA, 25 bp, Homo sapien
gaagatggccttcaccagggggctc

SEQ ID NO: 308284 - DNA, 25 bp, Homo sapien
catggaagatggccttcaccagggg

SEQ ID NO: 308285 - DNA, 25 bp, Homo sapien
acgttgaggctgctccataggtggc

SEQ ID NO: 308286 - DNA, 25 bp, Homo sapien
ggctgctccataggtggccactggc

SEQ ID NO: 308287 - DNA, 25 bp, Homo sapien
cactggccctctcgcaatggcagaa

SEQ ID NO: 308288 - DNA, 25 bp, Homo sapien
ttgaggctgctccataggtggccac

SEQ ID NO: 308289 - DNA, 25 bp, Homo sapien
tgggtaccaccagaacatgcaatgc

SEQ ID NO: 308290 - DNA, 25 bp, Homo sapien
gaacatgcaatgcaactacaatgca

SEQ ID NO: 308291 - DNA, 25 bp, Homo sapien
tgtggaaacattgcatgggtaccac

SEQ ID NO: 308292 - DNA, 25 bp, Homo sapien
tgcaatgcaactacaatgcaccaca

SEQ ID NO: 308293 - DNA, 25 bp, Homo sapien
gagtccttgttgagatgggccgcaa

SEQ ID NO: 308294 - DNA, 25 bp, Homo sapien
catgtgggccatgcatactctctgc

SEQ ID NO: 308295 - DNA, 25 bp, Homo sapien
gctgttgtatcatatgagaaggtac

SEQ ID NO: 308296 - DNA, 25 bp, Homo sapien
gacaccgagcagtgaggagtccttg

SEQ ID NO: 308297 - DNA, 25 bp, Homo sapien
gtttttgccagagcgctgtccgtag

SEQ ID NO: 308298 - DNA, 25 bp, Homo sapien
ccagttcagcgcctgacgcgtggta

SEQ ID NO: 308299 - DNA, 25 bp, Homo sapien
tgtccgtagcgacagtagcaggtca

SEQ ID NO: 308300 - DNA, 25 bp, Homo sapien
gtcccgttggaagcccgccagttca

SEQ ID NO: 308301 - DNA, 25 bp, Homo sapien
ggggtacatgccctcttctccacag

SEQ ID NO: 308302 - DNA, 25 bp, Homo sapien
caggcctggggtacatgccctcttc

SEQ ID NO: 308303 - DNA, 25 bp, Homo sapien
tccgatgatactgtctgttgtgtct

SEQ ID NO: 308304 - DNA, 25 bp, Homo sapien
cagtaaggaatggctctccgatgat

SEQ ID NO: 308305 - DNA, 25 bp, Homo sapien
gctcctgccatcaggcgcacggtgg

SEQ ID NO: 308306 - DNA, 25 bp, Homo sapien
tcaggcgcacggtggcttcatgcag

SEQ ID NO: 308307 - DNA, 25 bp, Homo sapien
tggctcctgccatcaggcgcacggt

SEQ ID NO: 308308 - DNA, 25 bp, Homo sapien
tgccatcaggcgcacggtggcttca

SEQ ID NO: 308309 - DNA, 25 bp, Homo sapien
gtggtgcgccgccgcaggctgtgtt

SEQ ID NO: 308310 - DNA, 25 bp, Homo sapien
tgcttggtgctctgcgtggtgcgcc

SEQ ID NO: 308311 - DNA, 25 bp, Homo sapien
gccgccgcaggctgtgttccagcag

SEQ ID NO: 308312 - DNA, 25 bp, Homo sapien
cgtgcttggtgctctgcgtggtgcg

SEQ ID NO: 308313 - DNA, 25 bp, Homo sapien
caggtggcggcaggccagcaggatg

SEQ ID NO: 308314 - DNA, 25 bp, Homo sapien
cacccagcttaacaatcatctgctg

SEQ ID NO: 308315 - DNA, 25 bp, Homo sapien
agcaggatggcggtggcccgctctc

SEQ ID NO: 308316 - DNA, 25 bp, Homo sapien
tcgttgcaggagcgccggtcgccca

SEQ ID NO: 308317 - DNA, 25 bp, Homo sapien
tgacagctaagaagacaaggctctt

SEQ ID NO: 308318 - DNA, 25 bp, Homo sapien
cagaagcctcggcaggtgacagcta

SEQ ID NO: 308319 - DNA, 25 bp, Homo sapien
gaccatgggcatctagtgacagcag

SEQ ID NO: 308320 - DNA, 25 bp, Homo sapien
gctgctatcaagtcagggctgccca

SEQ ID NO: 308321 - DNA, 25 bp, Homo sapien
tcccctggctgtcctgtgtaataaa

SEQ ID NO: 308322 - DNA, 25 bp, Homo sapien
aaaacaatgagcaggctcagtcagg

SEQ ID NO: 308323 - DNA, 25 bp, Homo sapien
gaatcaagacgctacagcaactcag

SEQ ID NO: 308324 - DNA, 25 bp, Homo sapien
gctgtcctgtgtaataaagggaaaa

SEQ ID NO: 308325 - DNA, 25 bp, Homo sapien
cagatatgcctcaacttaccatggg

SEQ ID NO: 308326 - DNA, 25 bp, Homo sapien
gagggaacctagaagccatgctgaa

SEQ ID NO: 308327 - DNA, 25 bp, Homo sapien
tgagcttgggctaacatcctaggag

SEQ ID NO: 308328 - DNA, 25 bp, Homo sapien
ttttctcctaggacccgcatcgagg

SEQ ID NO: 308329 - DNA, 25 bp, Homo sapien
catcaagaaagctataggtgtaccc

SEQ ID NO: 308330 - DNA, 25 bp, Homo sapien
atacacacaacacgcaggcgggcag

SEQ ID NO: 308331 - DNA, 25 bp, Homo sapien
cacagtgactgattgattgaacatc

SEQ ID NO: 308332 - DNA, 25 bp, Homo sapien
cgggcagggtccataaattacagtg

SEQ ID NO: 308333 - DNA, 25 bp, Homo sapien
gtatgcaaggttctcctcctggcct

SEQ ID NO: 308334 - DNA, 25 bp, Homo sapien
cagggaagaaatgacccgtgtccag

SEQ ID NO: 308335 - DNA, 25 bp, Homo sapien
tgatcttcataagagcacctggagg

SEQ ID NO: 308336 - DNA, 25 bp, Homo sapien
caatctggaagttctggaccggaat

SEQ ID NO: 308337 - DNA, 25 bp, Homo sapien
taatcaattcatgggttcgcttgct

SEQ ID NO: 308338 - DNA, 25 bp, Homo sapien
tctgccagaacctaagatgccattt

SEQ ID NO: 308339 - DNA, 25 bp, Homo sapien
tcaggtatctgtaccccagggtcaa

SEQ ID NO: 308340 - DNA, 25 bp, Homo sapien
gagccacaagcctgcatttgggagg

SEQ ID NO: 308341 - DNA, 25 bp, Homo sapien
gctggaacgcccctcagaaaaggag

SEQ ID NO: 308342 - DNA, 25 bp, Homo sapien
gaagccccgcctataaggaggcacg

SEQ ID NO: 308343 - DNA, 25 bp, Homo sapien
tactgtggagcgtggaaccaaaggc

SEQ ID NO: 308344 - DNA, 25 bp, Homo sapien
caacggttggtcctgcggctgtgat

SEQ ID NO: 308345 - DNA, 25 bp, Homo sapien
taaaagcagtcaattggcagggcct

SEQ ID NO: 308346 - DNA, 25 bp, Homo sapien
aaaagcagtcaattggcagggcctg

SEQ ID NO: 308347 - DNA, 25 bp, Homo sapien
agtgcctactactgcttgactttca

SEQ ID NO: 308348 - DNA, 25 bp, Homo sapien
gaaagccgtatctgtgctgagggca

SEQ ID NO: 308349 - DNA, 25 bp, Homo sapien
gggccatttacgtcctgatctttct

SEQ ID NO: 308350 - DNA, 25 bp, Homo sapien
tgatctttctgagcaagacacagtt

SEQ ID NO: 308351 - DNA, 25 bp, Homo sapien
tcaaatgtcaccttagggaggcctc

SEQ ID NO: 308352 - DNA, 25 bp, Homo sapien
tcttcatcatacttaaggggcccct

SEQ ID NO: 308353 - DNA, 25 bp, Homo sapien
tcactgaattcaagcatctgctcaa

SEQ ID NO: 308354 - DNA, 25 bp, Homo sapien
tcatcatacttaaggggcccctctc

SEQ ID NO: 308355 - DNA, 25 bp, Homo sapien
gatagggcagagccaatgcaaccca

SEQ ID NO: 308356 - DNA, 25 bp, Homo sapien
gagggggcagtcctggactggctca

SEQ ID NO: 308357 - DNA, 25 bp, Homo sapien
gccaatgcaacccacgggagacgag

SEQ ID NO: 308358 - DNA, 25 bp, Homo sapien
gcaacccacgggagacgagcttctc

SEQ ID NO: 308359 - DNA, 25 bp, Homo sapien
ctgccatctgcggccgccctgggtg

SEQ ID NO: 308360 - DNA, 25 bp, Homo sapien
tgcagatgccagttccgggggctct

SEQ ID NO: 308361 - DNA, 25 bp, Homo sapien
tctgtgctgagcacaccgcctcagc

SEQ ID NO: 308362 - DNA, 25 bp, Homo sapien
cagcattggcccgtggactcattcg

SEQ ID NO: 308363 - DNA, 25 bp, Homo sapien
gcccaccagaatgaggaccgagatg

SEQ ID NO: 308364 - DNA, 25 bp, Homo sapien
caccattagcgtcttgcggaggtcg

SEQ ID NO: 308365 - DNA, 25 bp, Homo sapien
cgaaccagtccaggaagtgcggcat

SEQ ID NO: 308366 - DNA, 25 bp, Homo sapien
gcaggcccggctcgaagtagtagat

SEQ ID NO: 308367 - DNA, 25 bp, Homo sapien
ggatagcgtggagggccaacaggcc

SEQ ID NO: 308368 - DNA, 25 bp, Homo sapien
ctgcagagggatagcgtggagggcc

SEQ ID NO: 308369 - DNA, 25 bp, Homo sapien
gtggagggccaacaggccggcctcc

SEQ ID NO: 308370 - DNA, 25 bp, Homo sapien
agggcgcccggtgccgcccgcctat

SEQ ID NO: 308371 - DNA, 25 bp, Homo sapien
gcacctggggcctctgtcgggaggg

SEQ ID NO: 308372 - DNA, 25 bp, Homo sapien
ctccactgccagcgcacctggggcc

SEQ ID NO: 308373 - DNA, 25 bp, Homo sapien
tggggcctctgtcgggagggcccag

SEQ ID NO: 308374 - DNA, 25 bp, Homo sapien
ctgccagcgcacctggggcctctgt

SEQ ID NO: 308375 - DNA, 25 bp, Homo sapien
gtgagtcggcttgacacggagagca

SEQ ID NO: 308376 - DNA, 25 bp, Homo sapien
acacggagagcaagccctgggccag

SEQ ID NO: 308377 - DNA, 25 bp, Homo sapien
ctctgggtgagtcggcttgacacgg

SEQ ID NO: 308378 - DNA, 25 bp, Homo sapien
tgctgcgcagcgcaaaggcactggg

SEQ ID NO: 308379 - DNA, 25 bp, Homo sapien
taccacggtcttatccctctgcata

SEQ ID NO: 308380 - DNA, 25 bp, Homo sapien
tccttgggttggcttcgacctgcct

SEQ ID NO: 308381 - DNA, 25 bp, Homo sapien
aagctgacatccctccaaacgaggt

SEQ ID NO: 308382 - DNA, 25 bp, Homo sapien
gacttcacgaagaaatgagggctcc

SEQ ID NO: 308383 - DNA, 25 bp, Homo sapien
cacagcccacggagttcaccccgtt

SEQ ID NO: 308384 - DNA, 25 bp, Homo sapien
gggttgggacccactatggacagtc

SEQ ID NO: 308385 - DNA, 25 bp, Homo sapien
aattaagatggaagccccagcgaag

SEQ ID NO: 308386 - DNA, 25 bp, Homo sapien
ggaagggctaggaaactccagcaga

SEQ ID NO: 308387 - DNA, 25 bp, Homo sapien
ggttgcttttaacacagcaggctgg

SEQ ID NO: 308388 - DNA, 25 bp, Homo sapien
ggagtgatcatgtagccaggtcctt

SEQ ID NO: 308389 - DNA, 25 bp, Homo sapien
gggagtgatcatgtagccaggtcct

SEQ ID NO: 308390 - DNA, 25 bp, Homo sapien
ttggtttggttgcttttaacacagc

SEQ ID NO: 308391 - DNA, 25 bp, Homo sapien
gaggaccaatttggcttagagcccc

SEQ ID NO: 308392 - DNA, 25 bp, Homo sapien
tcacatacatgttcagggactccag

SEQ ID NO: 308393 - DNA, 25 bp, Homo sapien
cacagcagccaacataggagctcag

SEQ ID NO: 308394 - DNA, 25 bp, Homo sapien
gctggcctagtgctggagtcagaaa

SEQ ID NO: 308395 - DNA, 25 bp, Homo sapien
aaagttgtggtccatccaggtcgtt

SEQ ID NO: 308396 - DNA, 25 bp, Homo sapien
cctgtgggggcacactccgggtcct

SEQ ID NO: 308397 - DNA, 25 bp, Homo sapien
tatccagatggatggtcttcctgag

SEQ ID NO: 308398 - DNA, 25 bp, Homo sapien
gagctccatgcgactgcatctctgg

SEQ ID NO: 308399 - DNA, 25 bp, Homo sapien
catcctgttggatttggtcagacct

SEQ ID NO: 308400 - DNA, 25 bp, Homo sapien
gggcttctccgtggcaagcatcctg

SEQ ID NO: 308401 - DNA, 25 bp, Homo sapien
ccttcatggggagcagccttctttc

SEQ ID NO: 308402 - DNA, 25 bp, Homo sapien
gggtaggcaactcttcccagtgaga

SEQ ID NO: 308403 - DNA, 25 bp, Homo sapien
gcaaggactggtgcactctgggcta

SEQ ID NO: 308404 - DNA, 25 bp, Homo sapien
cactctgggctaaccgggattggaa

SEQ ID NO: 308405 - DNA, 25 bp, Homo sapien
ggcccaacgagcctggctctgcaag

SEQ ID NO: 308406 - DNA, 25 bp, Homo sapien
ctggtgcactctgggctaaccggga

SEQ ID NO: 308407 - DNA, 25 bp, Homo sapien
caagctaggtctgttggtggccatt

SEQ ID NO: 308408 - DNA, 25 bp, Homo sapien
gctgtgcccagcttgatatccaggg

SEQ ID NO: 308409 - DNA, 25 bp, Homo sapien
tagtcagattcatggctgtgcccgg

SEQ ID NO: 308410 - DNA, 25 bp, Homo sapien
cattgtggctaaatgtctggctgcg

SEQ ID NO: 308411 - DNA, 25 bp, Homo sapien
cattagcaggcatgtagcaacgtct

SEQ ID NO: 308412 - DNA, 25 bp, Homo sapien
aagagaattcttagccgtgcccagc

SEQ ID NO: 308413 - DNA, 25 bp, Homo sapien
tgtgcccatcctgcttgtgtccaaa

SEQ ID NO: 308414 - DNA, 25 bp, Homo sapien
tggcacaactgaacccacagctgtg

SEQ ID NO: 308415 - DNA, 25 bp, Homo sapien
ccccttcgcgctctcctcccacccg

SEQ ID NO: 308416 - DNA, 25 bp, Homo sapien
tgcaaacgggcctcgccccttcgcg

SEQ ID NO: 308417 - DNA, 25 bp, Homo sapien
ccgggccgagcggcccctgcaaacg

SEQ ID NO: 308418 - DNA, 25 bp, Homo sapien
gctgagcggggcgcgggcttccccg

SEQ ID NO: 308419 - DNA, 25 bp, Homo sapien
gcgtccgtcctggtctctgggagcc

SEQ ID NO: 308420 - DNA, 25 bp, Homo sapien
gctgcgtccgtcctggtctctggga

SEQ ID NO: 308421 - DNA, 25 bp, Homo sapien
ggctgcgtccgtcctggtctctggg

SEQ ID NO: 308422 - DNA, 25 bp, Homo sapien
tgcgtccgtcctggtctctgggagc

SEQ ID NO: 308423 - DNA, 25 bp, Homo sapien
cgatgccgatgtagcccagcaggtt

SEQ ID NO: 308424 - DNA, 25 bp, Homo sapien
tgctcgatgatggtgtcgatgccga

SEQ ID NO: 308425 - DNA, 25 bp, Homo sapien
tcatgggcaccgctggcttaggcct

SEQ ID NO: 308426 - DNA, 25 bp, Homo sapien
gaccatgatgttgaagtcgaaaccg

SEQ ID NO: 308427 - DNA, 25 bp, Homo sapien
tcttagaagagccagggtcacagcc

SEQ ID NO: 308428 - DNA, 25 bp, Homo sapien
gaaagaaatgggatccttggtgctg

SEQ ID NO: 308429 - DNA, 25 bp, Homo sapien
agaaatgggatccttggtgctgccc

SEQ ID NO: 308430 - DNA, 25 bp, Homo sapien
tcatcttagaagagccagggtcaca

SEQ ID NO: 308431 - DNA, 25 bp, Homo sapien
gcctcacagtgcatattgtacattc

SEQ ID NO: 308432 - DNA, 25 bp, Homo sapien
tatcctcagttgagatggtcctaga

SEQ ID NO: 308433 - DNA, 25 bp, Homo sapien
gaattctagagccatgatccaggcc

SEQ ID NO: 308434 - DNA, 25 bp, Homo sapien
tttgcatcctgatactgcctcacag

SEQ ID NO: 308435 - DNA, 25 bp, Homo sapien
gatttgaagagcgtgttgaccagcg

SEQ ID NO: 308436 - DNA, 25 bp, Homo sapien
tgcccgatagctttgatctccactg

SEQ ID NO: 308437 - DNA, 25 bp, Homo sapien
ccttgcggctcacttgggatttgaa

SEQ ID NO: 308438 - DNA, 25 bp, Homo sapien
ttctcctcccggttccagctggagg

SEQ ID NO: 308439 - DNA, 25 bp, Homo sapien
gaatctggaataccctctctactca

SEQ ID NO: 308440 - DNA, 25 bp, Homo sapien
ctcgatatcatggcttatgctgttc

SEQ ID NO: 308441 - DNA, 25 bp, Homo sapien
cgatatcatggcttatgctgttccc

SEQ ID NO: 308442 - DNA, 25 bp, Homo sapien
tctggaataccctctctactcattt

SEQ ID NO: 308443 - DNA, 25 bp, Homo sapien
ttcattttgacaccgccttcctcta

SEQ ID NO: 308444 - DNA, 25 bp, Homo sapien
tcgatgacggtcagcttcattttga

SEQ ID NO: 308445 - DNA, 25 bp, Homo sapien
gggtgtcgatgacggtcagcttcat

SEQ ID NO: 308446 - DNA, 25 bp, Homo sapien
gacggtcagcttcattttgacaccg

SEQ ID NO: 308447 - DNA, 25 bp, Homo sapien
ggaacttctcgtactgctcattgat

SEQ ID NO: 308448 - DNA, 25 bp, Homo sapien
tcaggaacttctcgtactgctcatt

SEQ ID NO: 308449 - DNA, 25 bp, Homo sapien
cattgatgtacttctcaatgggctc

SEQ ID NO: 308450 - DNA, 25 bp, Homo sapien
tcattgatgtacttctcaatgggct

SEQ ID NO: 308451 - DNA, 25 bp, Homo sapien
gacacgagtgtcagggatgcgtttc

SEQ ID NO: 308452 - DNA, 25 bp, Homo sapien
tgggagagatgaagtaaaggcagca

SEQ ID NO: 308453 - DNA, 25 bp, Homo sapien
tcttcctggcgatgttgacctcctc

SEQ ID NO: 308454 - DNA, 25 bp, Homo sapien
agtaaaggcagcagtggacacgagt

SEQ ID NO: 308455 - DNA, 25 bp, Homo sapien
cttgctgaggtgtttcatgaactca

SEQ ID NO: 308456 - DNA, 25 bp, Homo sapien
gaactcaagatccagaggtcgcaag

SEQ ID NO: 308457 - DNA, 25 bp, Homo sapien
catgaactcaagatccagaggtcgc

SEQ ID NO: 308458 - DNA, 25 bp, Homo sapien
gtttcatgaactcaagatccagagg

SEQ ID NO: 308459 - DNA, 25 bp, Homo sapien
gcttgaattcagacttctcctccag

SEQ ID NO: 308460 - DNA, 25 bp, Homo sapien
tggtgtcagccttagcaatgacagg

SEQ ID NO: 308461 - DNA, 25 bp, Homo sapien
caatgacagggatgatgttcacaac

SEQ ID NO: 308462 - DNA, 25 bp, Homo sapien
tccagggtcatggtgtcagccttag

SEQ ID NO: 308463 - DNA, 25 bp, Homo sapien
attcaatgccatttacttcaagctc

SEQ ID NO: 308464 - DNA, 25 bp, Homo sapien
gtcattctccgtcttatcctccaaa

SEQ ID NO: 308465 - DNA, 25 bp, Homo sapien
gggtagaattcaatgccatttactt

SEQ ID NO: 308466 - DNA, 25 bp, Homo sapien
gattttgtcattctccgtcttatcc

SEQ ID NO: 308467 - DNA, 25 bp, Homo sapien
ttttcggccgaggaccctcttgcca

SEQ ID NO: 308468 - DNA, 25 bp, Homo sapien
cttgccattcacttggtactccttg

SEQ ID NO: 308469 - DNA, 25 bp, Homo sapien
ccacagcaaaaggcatgctctcctg

SEQ ID NO: 308470 - DNA, 25 bp, Homo sapien
gatgatcccccatggagtttttcgg

SEQ ID NO: 308471 - DNA, 25 bp, Homo sapien
gatgacaaagtctcgaagcagggca

SEQ ID NO: 308472 - DNA, 25 bp, Homo sapien
atgacaaagtctcgaagcagggcaa

SEQ ID NO: 308473 - DNA, 25 bp, Homo sapien
tgatgacaaagtctcgaagcagggc

SEQ ID NO: 308474 - DNA, 25 bp, Homo sapien
gaggcctccattgtcattgagccgc

SEQ ID NO: 308475 - DNA, 25 bp, Homo sapien
gccctgtaagtctcatagtggatgt

SEQ ID NO: 308476 - DNA, 25 bp, Homo sapien
gccgcttggccctgtaagtctcata

SEQ ID NO: 308477 - DNA, 25 bp, Homo sapien
tccattgtcattgagccgcttggcc

SEQ ID NO: 308478 - DNA, 25 bp, Homo sapien
tcatgggttactgtcgtggctttcc

SEQ ID NO: 308479 - DNA, 25 bp, Homo sapien
tggaggagccaaacttacaagggac

SEQ ID NO: 308480 - DNA, 25 bp, Homo sapien
tagaggaccagtgaaacacctaggc

SEQ ID NO: 308481 - DNA, 25 bp, Homo sapien
taactggacactgggaactgcataa

SEQ ID NO: 308482 - DNA, 25 bp, Homo sapien
tagccccagtttgtgtgcaggttcc

SEQ ID NO: 308483 - DNA, 25 bp, Homo sapien
ggctggcacaggtggaaggacagtg

SEQ ID NO: 308484 - DNA, 25 bp, Homo sapien
gcagggggtggctggcacaggtgga

SEQ ID NO: 308485 - DNA, 25 bp, Homo sapien
ggcacaggtggaaggacagtgccca

SEQ ID NO: 308486 - DNA, 25 bp, Homo sapien
ggacagtgcccaggaggccttctcc

SEQ ID NO: 308487 - DNA, 25 bp, Homo sapien
tgagctggacgagcacagcactaaa

SEQ ID NO: 308488 - DNA, 25 bp, Homo sapien
ttggccctgcagcaataacagctga

SEQ ID NO: 308489 - DNA, 25 bp, Homo sapien
tggataaatggaggatgcaactggc

SEQ ID NO: 308490 - DNA, 25 bp, Homo sapien
cagcactaaaaagggcttggccctg

SEQ ID NO: 308491 - DNA, 25 bp, Homo sapien
aaaataatgactgaggcccgacctg

SEQ ID NO: 308492 - DNA, 25 bp, Homo sapien
gaggatgtacaaccgcactctggga

SEQ ID NO: 308493 - DNA, 25 bp, Homo sapien
gacctgacgccaactgaagatgaac

SEQ ID NO: 308494 - DNA, 25 bp, Homo sapien
gttgttcttgcatcccctaggcgtg

SEQ ID NO: 308495 - DNA, 25 bp, Homo sapien
gaaaggggcgggacctgcgccgagc

SEQ ID NO: 308496 - DNA, 25 bp, Homo sapien
cctgccgccccgtagatggaaaggg

SEQ ID NO: 308497 - DNA, 25 bp, Homo sapien
cgagctgtggggcgcggttctgaag

SEQ ID NO: 308498 - DNA, 25 bp, Homo sapien
gggcgggacctgcgccgagctgtgg

SEQ ID NO: 308499 - DNA, 25 bp, Homo sapien
tagggatgagggctccgcggcggtt

SEQ ID NO: 308500 - DNA, 25 bp, Homo sapien
cggtgtggctctgattcaccgccat

SEQ ID NO: 308501 - DNA, 25 bp, Homo sapien
cggcggttctcggtgtggctctgat

SEQ ID NO: 308502 - DNA, 25 bp, Homo sapien
cggttctcggtgtggctctgattca

SEQ ID NO: 308503 - DNA, 25 bp, Homo sapien
caaagtccctgactcgctgagagtt

SEQ ID NO: 308504 - DNA, 25 bp, Homo sapien
gcgccgcgcccaaaaaaggcggcaa

SEQ ID NO: 308505 - DNA, 25 bp, Homo sapien
gagagtttgcgagccgccatgtcta

SEQ ID NO: 308506 - DNA, 25 bp, Homo sapien
tccacatgccggaacaccagtgagg

SEQ ID NO: 308507 - DNA, 25 bp, Homo sapien
aggcatctgttcagtcccatctttt

SEQ ID NO: 308508 - DNA, 25 bp, Homo sapien
catcatccagcttgagtttcaatgc

SEQ ID NO: 308509 - DNA, 25 bp, Homo sapien
tttcaatgctggttgggagaaaagg

SEQ ID NO: 308510 - DNA, 25 bp, Homo sapien
ttggtaacgtctacttcgatcttcc

SEQ ID NO: 308511 - DNA, 25 bp, Homo sapien
gaagaaagacctggatatcagcatt

SEQ ID NO: 308512 - DNA, 25 bp, Homo sapien
tcagagtggtgagcaatcatctacc

SEQ ID NO: 308513 - DNA, 25 bp, Homo sapien
ggcttcacaccatggaatgacaagt

SEQ ID NO: 308514 - DNA, 25 bp, Homo sapien
gaacatacaacctctaaggcccata

SEQ ID NO: 308515 - DNA, 25 bp, Homo sapien
ggaagcaggtgagaacatacaacct

SEQ ID NO: 308516 - DNA, 25 bp, Homo sapien
cgcgcccggctatcttgagcattct

SEQ ID NO: 308517 - DNA, 25 bp, Homo sapien
accgcgcccggctatcttgagcatt

SEQ ID NO: 308518 - DNA, 25 bp, Homo sapien
tgctcctgaactcccgatcttgtga

SEQ ID NO: 308519 - DNA, 25 bp, Homo sapien
gctcctgaactcccgatcttgtgat

SEQ ID NO: 308520 - DNA, 25 bp, Homo sapien
catgtacacaggcacatttgactgc

SEQ ID NO: 308521 - DNA, 25 bp, Homo sapien
gttgacttcctattcatttaacacc

SEQ ID NO: 308522 - DNA, 25 bp, Homo sapien
cagttggatgatgcacagactgtca

SEQ ID NO: 308523 - DNA, 25 bp, Homo sapien
ccatttgctgctacatgatgatgca

SEQ ID NO: 308524 - DNA, 25 bp, Homo sapien
ttgattttgcccatactcgtgtagc

SEQ ID NO: 308525 - DNA, 25 bp, Homo sapien
cagttttggcgctactttgcaggga

SEQ ID NO: 308526 - DNA, 25 bp, Homo sapien
gatggtgtggacaagagatcccagt

SEQ ID NO: 308527 - DNA, 25 bp, Homo sapien
catactcgtgtagcagctgatgtgg

SEQ ID NO: 308528 - DNA, 25 bp, Homo sapien
gatgtgcaccactatctctggttct

SEQ ID NO: 308529 - DNA, 25 bp, Homo sapien
actattttgctcagcgtggtcttga

SEQ ID NO: 308530 - DNA, 25 bp, Homo sapien
ggaagctagggtactaataggatct

SEQ ID NO: 308531 - DNA, 25 bp, Homo sapien
tatgcacagtacctaagttcaaatc

SEQ ID NO: 308532 - DNA, 25 bp, Homo sapien
tgtgccctgcccaggcttcgtcttt

SEQ ID NO: 308533 - DNA, 25 bp, Homo sapien
actgtgccctgcccaggcttcgtct

SEQ ID NO: 308534 - DNA, 25 bp, Homo sapien
ccactgtgccctgcccaggcttcgt

SEQ ID NO: 308535 - DNA, 25 bp, Homo sapien
ctgtgccctgcccaggcttcgtctt

SEQ ID NO: 308536 - DNA, 25 bp, Homo sapien
tgaagtaggtcaatgggaataacgg

SEQ ID NO: 308537 - DNA, 25 bp, Homo sapien
actacctgagtaacacaaatgggaa

SEQ ID NO: 308538 - DNA, 25 bp, Homo sapien
aaatgaacgaagtctaagaaatctg

SEQ ID NO: 308539 - DNA, 25 bp, Homo sapien
cataccaatatatctagaatgggaa

SEQ ID NO: 308540 - DNA, 25 bp, Homo sapien
tgatcattaggtacaatgtctgcct

SEQ ID NO: 308541 - DNA, 25 bp, Homo sapien
tgtataatgatcattaggtacaatg

SEQ ID NO: 308542 - DNA, 25 bp, Homo sapien
taatgatcattaggtacaatgtctg

SEQ ID NO: 308543 - DNA, 25 bp, Homo sapien
tcattaggtacaatgtctgccttct

SEQ ID NO: 308544 - DNA, 25 bp, Homo sapien
tgtcactcatcaaatcctgctgggt

SEQ ID NO: 308545 - DNA, 25 bp, Homo sapien
cttactgtcactcatcaaatcctgc

SEQ ID NO: 308546 - DNA, 25 bp, Homo sapien
tcactcatcaaatcctgctgggttc

SEQ ID NO: 308547 - DNA, 25 bp, Homo sapien
atcaaatcctgctgggttctttttt

SEQ ID NO: 308548 - DNA, 25 bp, Homo sapien
aacctactcctattctcaatgtgtg

SEQ ID NO: 308549 - DNA, 25 bp, Homo sapien
taattcttatacttcttgtgcggta

SEQ ID NO: 308550 - DNA, 25 bp, Homo sapien
gctaatagaaatggttctttgacgc

SEQ ID NO: 308551 - DNA, 25 bp, Homo sapien
tgctctctccttactgttaacctgg

SEQ ID NO: 308552 - DNA, 25 bp, Homo sapien
agagctccacattcggagaccgctt

SEQ ID NO: 308553 - DNA, 25 bp, Homo sapien
tccacattcggagaccgcttcaaga

SEQ ID NO: 308554 - DNA, 25 bp, Homo sapien
cacattcggagaccgcttcaagaga

SEQ ID NO: 308555 - DNA, 25 bp, Homo sapien
gctccacattcggagaccgcttcaa

SEQ ID NO: 308556 - DNA, 25 bp, Homo sapien
actaaagacatttgagccttctgat

SEQ ID NO: 308557 - DNA, 25 bp, Homo sapien
taaagacatttgagccttctgatcg

SEQ ID NO: 308558 - DNA, 25 bp, Homo sapien
ctaaagacatttgagccttctgatc

SEQ ID NO: 308559 - DNA, 25 bp, Homo sapien
ttcaacagtgaggttcgtcatcaga

SEQ ID NO: 308560 - DNA, 25 bp, Homo sapien
tagttcccttaatgaagtttgcagc

SEQ ID NO: 308561 - DNA, 25 bp, Homo sapien
taaaagacaacatgggatcactgat

SEQ ID NO: 308562 - DNA, 25 bp, Homo sapien
gcagcaaatactggttgttcaacag

SEQ ID NO: 308563 - DNA, 25 bp, Homo sapien
ctgggcaaattcaatggcatctcca

SEQ ID NO: 308564 - DNA, 25 bp, Homo sapien
caactgggcaaattcaatggcatct

SEQ ID NO: 308565 - DNA, 25 bp, Homo sapien
aattcaatggcatctccatttctga

SEQ ID NO: 308566 - DNA, 25 bp, Homo sapien
tgaagactaatttaaaagtagcttg

SEQ ID NO: 308567 - DNA, 25 bp, Homo sapien
ccagtaattacataaattcccatag

SEQ ID NO: 308568 - DNA, 25 bp, Homo sapien
attacataaattcccatagagctga

SEQ ID NO: 308569 - DNA, 25 bp, Homo sapien
tgaacaaggcatctgtggagtgcac

SEQ ID NO: 308570 - DNA, 25 bp, Homo sapien
ggttctaagtggaaatcctcgggca

SEQ ID NO: 308571 - DNA, 25 bp, Homo sapien
gcaggtggggctccgtatccgggag

SEQ ID NO: 308572 - DNA, 25 bp, Homo sapien
gcaggtggggctccatagacaataa

SEQ ID NO: 308573 - DNA, 25 bp, Homo sapien
tatccgggaggtggggctccatatc

SEQ ID NO: 308574 - DNA, 25 bp, Homo sapien
tacgggttgggctccatatcctgca

SEQ ID NO: 308575 - DNA, 25 bp, Homo sapien
caagaggtggggctccatatcgcac

SEQ ID NO: 308576 - DNA, 25 bp, Homo sapien
aagcctcgttttcaggagcctgggc

SEQ ID NO: 308577 - DNA, 25 bp, Homo sapien
ttaagaatggacctgagaagaggag

SEQ ID NO: 308578 - DNA, 25 bp, Homo sapien
tccatatcgcacaggtgaggctctg

SEQ ID NO: 308579 - DNA, 25 bp, Homo sapien
acctctttgcttggtgagtcttcaa

SEQ ID NO: 308580 - DNA, 25 bp, Homo sapien
tttagggtacctctttgcttggtga

SEQ ID NO: 308581 - DNA, 25 bp, Homo sapien
gcttggtgagtcttcaaggtttaca

SEQ ID NO: 308582 - DNA, 25 bp, Homo sapien
ttggtgagtcttcaaggtttacatc

SEQ ID NO: 308583 - DNA, 25 bp, Homo sapien
caggaaccttgaatgcgagtgtgga

SEQ ID NO: 308584 - DNA, 25 bp, Homo sapien
tacctgcgagaagcctgtgatcaca

SEQ ID NO: 308585 - DNA, 25 bp, Homo sapien
aaagggtggaacaactacctgcgag

SEQ ID NO: 308586 - DNA, 25 bp, Homo sapien
taagattgcccttccaaagggtgga

SEQ ID NO: 308587 - DNA, 25 bp, Homo sapien
aatgcagatcaatcaatgactctaa

SEQ ID NO: 308588 - DNA, 25 bp, Homo sapien
cctaattttcacaatgcagatcaat

SEQ ID NO: 308589 - DNA, 25 bp, Homo sapien
tccttaagaaaggctgtccttgaga

SEQ ID NO: 308590 - DNA, 25 bp, Homo sapien
atgcagatcaatcaatgactctaag

SEQ ID NO: 308591 - DNA, 25 bp, Homo sapien
gataaaagcgccagatcctatgacc

SEQ ID NO: 308592 - DNA, 25 bp, Homo sapien
cgccagatcctatgacccatgttta

SEQ ID NO: 308593 - DNA, 25 bp, Homo sapien
aaagcgccagatcctatgacccatg

SEQ ID NO: 308594 - DNA, 25 bp, Homo sapien
attttagggataaaagcgccagatc

SEQ ID NO: 308595 - DNA, 25 bp, Homo sapien
ctgctctagttggttgagtctctcc

SEQ ID NO: 308596 - DNA, 25 bp, Homo sapien
tccctgctctagttggttgagtctc

SEQ ID NO: 308597 - DNA, 25 bp, Homo sapien
ctgaacaagggaaaccttatccctg

SEQ ID NO: 308598 - DNA, 25 bp, Homo sapien
agggaaaccttatccctgctctagt

SEQ ID NO: 308599 - DNA, 25 bp, Homo sapien
gcttttagacttgacgggactgcca

SEQ ID NO: 308600 - DNA, 25 bp, Homo sapien
tcttaggatttgtgagaagcccacc

SEQ ID NO: 308601 - DNA, 25 bp, Homo sapien
taaacaggtaccctttgcacaggag

SEQ ID NO: 308602 - DNA, 25 bp, Homo sapien
taactaacagtaggtgtgccacgca

SEQ ID NO: 308603 - DNA, 25 bp, Homo sapien
tccagaagactctcaaggcaaaggc

SEQ ID NO: 308604 - DNA, 25 bp, Homo sapien
tagcagtccatggttgtctgcccca

SEQ ID NO: 308605 - DNA, 25 bp, Homo sapien
gccaggaagaatatcatacgtttca

SEQ ID NO: 308606 - DNA, 25 bp, Homo sapien
ttattctctagcagtccatggttgt

SEQ ID NO: 308607 - DNA, 25 bp, Homo sapien
aatcatacatctaaactaatcaaac

SEQ ID NO: 308608 - DNA, 25 bp, Homo sapien
actaatcaaactgctggtcacatct

SEQ ID NO: 308609 - DNA, 25 bp, Homo sapien
caagtttcttatattggctactaaa

SEQ ID NO: 308610 - DNA, 25 bp, Homo sapien
tctgtatagaccctttccctttgac

SEQ ID NO: 308611 - DNA, 25 bp, Homo sapien
ccccttgcccttgcaggcatggaaa

SEQ ID NO: 308612 - DNA, 25 bp, Homo sapien
caaagttgggcagtgctgacacacc

SEQ ID NO: 308613 - DNA, 25 bp, Homo sapien
tctctgatctcagagcaaagttggg

SEQ ID NO: 308614 - DNA, 25 bp, Homo sapien
ccagattttgggcacaatgagcata

SEQ ID NO: 308615 - DNA, 25 bp, Homo sapien
gctgcagcaactaggcatggccagg

SEQ ID NO: 308616 - DNA, 25 bp, Homo sapien
ttccaagttggggtgagagcttcct

SEQ ID NO: 308617 - DNA, 25 bp, Homo sapien
cgccccttccaagttggggtgagag

SEQ ID NO: 308618 - DNA, 25 bp, Homo sapien
aaaagccagggacaagcgcgagacc

SEQ ID NO: 308619 - DNA, 25 bp, Homo sapien
tgtatatgttgtcatctcaagaggg

SEQ ID NO: 308620 - DNA, 25 bp, Homo sapien
gtgtctatcaacaagtagcttcaac

SEQ ID NO: 308621 - DNA, 25 bp, Homo sapien
tacttcacttgacagcatgtgtcta

SEQ ID NO: 308622 - DNA, 25 bp, Homo sapien
aatgtcagaatagtacatcactgag

SEQ ID NO: 308623 - DNA, 25 bp, Homo sapien
ggcccaggcttttctacatggtggt

SEQ ID NO: 308624 - DNA, 25 bp, Homo sapien
tacctcatgggattatcgctcagga

SEQ ID NO: 308625 - DNA, 25 bp, Homo sapien
tcgctcaggaattaagtgagctaat

SEQ ID NO: 308626 - DNA, 25 bp, Homo sapien
gaataagtagttactcaggcccagg

SEQ ID NO: 308627 - DNA, 25 bp, Homo sapien
acataagtataaatcttagtgactt

SEQ ID NO: 308628 - DNA, 25 bp, Homo sapien
aataaatggcactgggacaactaga

SEQ ID NO: 308629 - DNA, 25 bp, Homo sapien
aaataaatggcactgggacaactag

SEQ ID NO: 308630 - DNA, 25 bp, Homo sapien
ataaatggcactgggacaactagat

SEQ ID NO: 308631 - DNA, 25 bp, Homo sapien
tccagtaaccatcaacgtgtaccat

SEQ ID NO: 308632 - DNA, 25 bp, Homo sapien
gtaccattatttcatctctcttcct

SEQ ID NO: 308633 - DNA, 25 bp, Homo sapien
gctccagtaaccatcaacgtgtacc

SEQ ID NO: 308634 - DNA, 25 bp, Homo sapien
gtaaccatcaacgtgtaccattatt

SEQ ID NO: 308635 - DNA, 25 bp, Homo sapien
gaattaggagtagagagatctgacc

SEQ ID NO: 308636 - DNA, 25 bp, Homo sapien
ggttctatgccctgtccaagcgtaa

SEQ ID NO: 308637 - DNA, 25 bp, Homo sapien
gactgaccccatcatacccaaagtg

SEQ ID NO: 308638 - DNA, 25 bp, Homo sapien
aagtgcaatctcacggccaggttct

SEQ ID NO: 308639 - DNA, 25 bp, Homo sapien
tacatcacgcaagcgtgggaaacgt

SEQ ID NO: 308640 - DNA, 25 bp, Homo sapien
tcgtgatacatcacgcaagcgtggg

SEQ ID NO: 308641 - DNA, 25 bp, Homo sapien
tcacgcaagcgtgggaaacgtgact

SEQ ID NO: 308642 - DNA, 25 bp, Homo sapien
gatacatcacgcaagcgtgggaaac

SEQ ID NO: 308643 - DNA, 25 bp, Homo sapien
tccttgtagagacgattaatcccag

SEQ ID NO: 308644 - DNA, 25 bp, Homo sapien
aaggaagtagcccagtctgtgcgag

SEQ ID NO: 308645 - DNA, 25 bp, Homo sapien
actaggcgggccttgcttcagagca

SEQ ID NO: 308646 - DNA, 25 bp, Homo sapien
ctgtgcgagtagtccctgagcgtca

SEQ ID NO: 308647 - DNA, 25 bp, Homo sapien
ggtgaactgcccgagccacagcact

SEQ ID NO: 308648 - DNA, 25 bp, Homo sapien
gccgatcgcaccgaagcccaagagg

SEQ ID NO: 308649 - DNA, 25 bp, Homo sapien
agagggcgatcccagctcgagatcc

SEQ ID NO: 308650 - DNA, 25 bp, Homo sapien
tcgaggtctgccagggcgggaaact

SEQ ID NO: 308651 - DNA, 25 bp, Homo sapien
agcccttcgaccacctggttcccag

SEQ ID NO: 308652 - DNA, 25 bp, Homo sapien
gggacctcttgtctggccacacagc

SEQ ID NO: 308653 - DNA, 25 bp, Homo sapien
cagcccttcgaccacctggttccca

SEQ ID NO: 308654 - DNA, 25 bp, Homo sapien
taccaccaggcgcatgtagccaaag

SEQ ID NO: 308655 - DNA, 25 bp, Homo sapien
tgcatagtgggctacactcctctcg

SEQ ID NO: 308656 - DNA, 25 bp, Homo sapien
gacaaaccagcatcttcggccagtg

SEQ ID NO: 308657 - DNA, 25 bp, Homo sapien
cttacagcggctggcaacagacttc

SEQ ID NO: 308658 - DNA, 25 bp, Homo sapien
cagctccacgatctcctggccatac

SEQ ID NO: 308659 - DNA, 25 bp, Homo sapien
caacactgccgcagctccacgatct

SEQ ID NO: 308660 - DNA, 25 bp, Homo sapien
ctgccgcagctccacgatctcctgg

SEQ ID NO: 308661 - DNA, 25 bp, Homo sapien
ccaacactgccgcagctccacgatc

SEQ ID NO: 308662 - DNA, 25 bp, Homo sapien
ttagggcctatcctgttcctcacat

SEQ ID NO: 308663 - DNA, 25 bp, Homo sapien
tctagagcccggtgtgtaggccaaa

SEQ ID NO: 308664 - DNA, 25 bp, Homo sapien
tttagcacaggaaacgcaatcccgt

SEQ ID NO: 308665 - DNA, 25 bp, Homo sapien
tgtagcaataagagaaaggcccgtg

SEQ ID NO: 308666 - DNA, 25 bp, Homo sapien
gacaaacggctatgagagttcccag

SEQ ID NO: 308667 - DNA, 25 bp, Homo sapien
agccctcgtgccgccctcgggaaga

SEQ ID NO: 308668 - DNA, 25 bp, Homo sapien
acgggtgccaatactagccagcgag

SEQ ID NO: 308669 - DNA, 25 bp, Homo sapien
atactagccagcgagccgctccgga

SEQ ID NO: 308670 - DNA, 25 bp, Homo sapien
gtgccaatactagccagcgagccgc

SEQ ID NO: 308671 - DNA, 25 bp, Homo sapien
ctgacgggtgccaatactagccagc

SEQ ID NO: 308672 - DNA, 25 bp, Homo sapien
tcgacggtaccaggctccggcctga

SEQ ID NO: 308673 - DNA, 25 bp, Homo sapien
ctccatgcggcggagacatcgccat

SEQ ID NO: 308674 - DNA, 25 bp, Homo sapien
catcgccatctttcctcaagctagg

SEQ ID NO: 308675 - DNA, 25 bp, Homo sapien
gacggtaccaggctccggcctgagc

SEQ ID NO: 308676 - DNA, 25 bp, Homo sapien
gcaaaatggcgccgctgcgggtaac

SEQ ID NO: 308677 - DNA, 25 bp, Homo sapien
ccggtttgggcaaaatggcgccgct

SEQ ID NO: 308678 - DNA, 25 bp, Homo sapien
tttgggcaaaatggcgccgctgcgg

SEQ ID NO: 308679 - DNA, 25 bp, Homo sapien
ttcaccggtttgggcaaaatggcgc

SEQ ID NO: 308680 - DNA, 25 bp, Homo sapien
taccaggaagaaacccggatgctgc

SEQ ID NO: 308681 - DNA, 25 bp, Homo sapien
tcagcgctggccttggatacgagct

SEQ ID NO: 308682 - DNA, 25 bp, Homo sapien
acaggcagggcagagattacaggac

SEQ ID NO: 308683 - DNA, 25 bp, Homo sapien
tctaagctagaagcacacggcctag

SEQ ID NO: 308684 - DNA, 25 bp, Homo sapien
tcatcatcctctggaacaaaaatgt

SEQ ID NO: 308685 - DNA, 25 bp, Homo sapien
gttcttgctaatgagtgtcccgaca

SEQ ID NO: 308686 - DNA, 25 bp, Homo sapien
aacacacggagaaggccgaaggaca

SEQ ID NO: 308687 - DNA, 25 bp, Homo sapien
aaatgtcatgttcctcaagtagagc

SEQ ID NO: 308688 - DNA, 25 bp, Homo sapien
tgttcatgcgcacgttaactgggca

SEQ ID NO: 308689 - DNA, 25 bp, Homo sapien
tgtataaaaaacgtcccctgccagc

SEQ ID NO: 308690 - DNA, 25 bp, Homo sapien
gaaggagccgtcaactttcaaatga

SEQ ID NO: 308691 - DNA, 25 bp, Homo sapien
gtggaattaagacccagagctctgg

SEQ ID NO: 308692 - DNA, 25 bp, Homo sapien
aatacggtcatggaccatacaggaa

SEQ ID NO: 308693 - DNA, 25 bp, Homo sapien
gagcatcaccatttcttcagttagt

SEQ ID NO: 308694 - DNA, 25 bp, Homo sapien
agcctttctgctgatagggaaggca

SEQ ID NO: 308695 - DNA, 25 bp, Homo sapien
caggaagcttcaccagactgggagg

SEQ ID NO: 308696 - DNA, 25 bp, Homo sapien
tttgattgcttgtttgtgcagtgct

SEQ ID NO: 308697 - DNA, 25 bp, Homo sapien
gtgcagtgcttagtggacagcacat

SEQ ID NO: 308698 - DNA, 25 bp, Homo sapien
cttgtttgtgcagtgcttagtggac

SEQ ID NO: 308699 - DNA, 25 bp, Homo sapien
gtttattcataatttgattgcttgt

SEQ ID NO: 308700 - DNA, 25 bp, Homo sapien
gaacctagggatactgagaaactgc

SEQ ID NO: 308701 - DNA, 25 bp, Homo sapien
ggaagtccaacaaggcctgtctaca

SEQ ID NO: 308702 - DNA, 25 bp, Homo sapien
ttttatggccaactggaagacgggc

SEQ ID NO: 308703 - DNA, 25 bp, Homo sapien
tgcagcctggatagcctgggcctat

SEQ ID NO: 308704 - DNA, 25 bp, Homo sapien
atagagatggcgtctctccattgcc

SEQ ID NO: 308705 - DNA, 25 bp, Homo sapien
ttaaatagagatggcgtctctccat

SEQ ID NO: 308706 - DNA, 25 bp, Homo sapien
aaatagagatggcgtctctccattg

SEQ ID NO: 308707 - DNA, 25 bp, Homo sapien
agagatggcgtctctccattgccca

SEQ ID NO: 308708 - DNA, 25 bp, Homo sapien
gacacttcagtgtcagggcacagat

SEQ ID NO: 308709 - DNA, 25 bp, Homo sapien
tagcccctatgattagacacttcag

SEQ ID NO: 308710 - DNA, 25 bp, Homo sapien
aaaattgtgacattgggcatgaggc

SEQ ID NO: 308711 - DNA, 25 bp, Homo sapien
atcagggcagcactaacaggcgcaa

SEQ ID NO: 308712 - DNA, 25 bp, Homo sapien
catgaaacagaagcgccaaggccaa

SEQ ID NO: 308713 - DNA, 25 bp, Homo sapien
cagcggacacatgttatgcggttct

SEQ ID NO: 308714 - DNA, 25 bp, Homo sapien
gaaagatcgaactggaagaaacaat

SEQ ID NO: 308715 - DNA, 25 bp, Homo sapien
attaaagtatggaagcagcggacac

SEQ ID NO: 308716 - DNA, 25 bp, Homo sapien
accaattccagctggacatcactgt

SEQ ID NO: 308717 - DNA, 25 bp, Homo sapien
gcaccaattccagctggacatcact

SEQ ID NO: 308718 - DNA, 25 bp, Homo sapien
caccaattccagctggacatcactg

SEQ ID NO: 308719 - DNA, 25 bp, Homo sapien
tgcaccaattccagctggacatcac

SEQ ID NO: 308720 - DNA, 25 bp, Homo sapien
tcagtcgggacatgaacgaggccaa

SEQ ID NO: 308721 - DNA, 25 bp, Homo sapien
tcgtgaagcccattttcagtcggga

SEQ ID NO: 308722 - DNA, 25 bp, Homo sapien
ttctaccgccagcaccttcgtgaag

SEQ ID NO: 308723 - DNA, 25 bp, Homo sapien
agggtgcgcgagctctaccgcgcct

SEQ ID NO: 308724 - DNA, 25 bp, Homo sapien
ccacggacactaccaaggagcgcgg

SEQ ID NO: 308725 - DNA, 25 bp, Homo sapien
cggcaacgccggctcgttagagcga

SEQ ID NO: 308726 - DNA, 25 bp, Homo sapien
gtcccgccacgaggaggttcttcaa

SEQ ID NO: 308727 - DNA, 25 bp, Homo sapien
agcaggacgctgagggaaaccccgc

SEQ ID NO: 308728 - DNA, 25 bp, Homo sapien
gcgccattatctgcctcagcagtta

SEQ ID NO: 308729 - DNA, 25 bp, Homo sapien
caggcgccattatctgcctcagcag

SEQ ID NO: 308730 - DNA, 25 bp, Homo sapien
cagcccaggcgccattatctgcctc

SEQ ID NO: 308731 - DNA, 25 bp, Homo sapien
cctgcagaaagccgccaggcggcag

SEQ ID NO: 308732 - DNA, 25 bp, Homo sapien
actgagatatcttgcccatggcctg

SEQ ID NO: 308733 - DNA, 25 bp, Homo sapien
tgacctatgagagcggagaacactg

SEQ ID NO: 308734 - DNA, 25 bp, Homo sapien
tacataacctcagtgggaaaacgcc

SEQ ID NO: 308735 - DNA, 25 bp, Homo sapien
tccagggctcgggatgcgaatgtcc

SEQ ID NO: 308736 - DNA, 25 bp, Homo sapien
tttggagtagatgctcagccccggc

SEQ ID NO: 308737 - DNA, 25 bp, Homo sapien
gggcgatctgtcaggtgacctagac

SEQ ID NO: 308738 - DNA, 25 bp, Homo sapien
tgacctagactctgggccatctcag

SEQ ID NO: 308739 - DNA, 25 bp, Homo sapien
caccttcagaaaaagacggagcctc

SEQ ID NO: 308740 - DNA, 25 bp, Homo sapien
ttgcagtccagcctaggtgagtctc

SEQ ID NO: 308741 - DNA, 25 bp, Homo sapien
ctgtaatcccagcgattcggaaagc

SEQ ID NO: 308742 - DNA, 25 bp, Homo sapien
cagtccagcctaggtgagtctcact

SEQ ID NO: 308743 - DNA, 25 bp, Homo sapien
gtaatcccagcgattcggaaagctg

SEQ ID NO: 308744 - DNA, 25 bp, Homo sapien
gactggagtccagcggcgcaatctt

SEQ ID NO: 308745 - DNA, 25 bp, Homo sapien
agactggagtccagcggcgcaatct

SEQ ID NO: 308746 - DNA, 25 bp, Homo sapien
tgtcatcccaaagcaaatatgcctg

SEQ ID NO: 308747 - DNA, 25 bp, Homo sapien
ggcatgccccttggctgaagacagc

SEQ ID NO: 308748 - DNA, 25 bp, Homo sapien
tacctcaagggtttacagactctcc

SEQ ID NO: 308749 - DNA, 25 bp, Homo sapien
gagtggtaggatccccattcagggc

SEQ ID NO: 308750 - DNA, 25 bp, Homo sapien
atttattcattagcccccacactgg

SEQ ID NO: 308751 - DNA, 25 bp, Homo sapien
gcatttattcattagcccccacact

SEQ ID NO: 308752 - DNA, 25 bp, Homo sapien
ctgagtgggcacagtgtagcattta

SEQ ID NO: 308753 - DNA, 25 bp, Homo sapien
gagtgggcacagtgtagcatttatt

SEQ ID NO: 308754 - DNA, 25 bp, Homo sapien
tgtctgccaagggtgccagcacagc

SEQ ID NO: 308755 - DNA, 25 bp, Homo sapien
tgatgagtagtcctgccccgactgg

SEQ ID NO: 308756 - DNA, 25 bp, Homo sapien
tgacacccacactatgagtgatgag

SEQ ID NO: 308757 - DNA, 25 bp, Homo sapien
tttccaggtgcagtcccccttactg

SEQ ID NO: 308758 - DNA, 25 bp, Homo sapien
ctcagaggttggcttcttcctactc

SEQ ID NO: 308759 - DNA, 25 bp, Homo sapien
gcttcttcctactcttgactttgcg

SEQ ID NO: 308760 - DNA, 25 bp, Homo sapien
ggttggcttcttcctactcttgact

SEQ ID NO: 308761 - DNA, 25 bp, Homo sapien
tcttcctactcttgactttgcgtct

SEQ ID NO: 308762 - DNA, 25 bp, Homo sapien
gtgtctgggtctaactgagctctga

SEQ ID NO: 308763 - DNA, 25 bp, Homo sapien
cagttgagctgtggtaaccttgtga

SEQ ID NO: 308764 - DNA, 25 bp, Homo sapien
tacccttgggactccctgccgtgtg

SEQ ID NO: 308765 - DNA, 25 bp, Homo sapien
tcttccttttcagttgagctgtggt

SEQ ID NO: 308766 - DNA, 25 bp, Homo sapien
tcctgggataagacggcagcctcct

SEQ ID NO: 308767 - DNA, 25 bp, Homo sapien
ccctcctgggataagacggcagcct

SEQ ID NO: 308768 - DNA, 25 bp, Homo sapien
ctccctcctgggataagacggcagc

SEQ ID NO: 308769 - DNA, 25 bp, Homo sapien
ctcctgggataagacggcagcctcc

SEQ ID NO: 308770 - DNA, 25 bp, Homo sapien
gaatggggctaggtgcttcctcccc

SEQ ID NO: 308771 - DNA, 25 bp, Homo sapien
gcaggaatggggctaggtgcttcct

SEQ ID NO: 308772 - DNA, 25 bp, Homo sapien
aggaatggggctaggtgcttcctcc

SEQ ID NO: 308773 - DNA, 25 bp, Homo sapien
agcaggaatggggctaggtgcttcc

SEQ ID NO: 308774 - DNA, 25 bp, Homo sapien
cagctctgcacagacgtcctcgctc

SEQ ID NO: 308775 - DNA, 25 bp, Homo sapien
acgttcagtcgaagccccgggctgt

SEQ ID NO: 308776 - DNA, 25 bp, Homo sapien
cacacaaagtcggtggggccaggat

SEQ ID NO: 308777 - DNA, 25 bp, Homo sapien
ggctgctcagttggacccacgctgg

SEQ ID NO: 308778 - DNA, 25 bp, Homo sapien
tacgcagcaacttccttttgaacct

SEQ ID NO: 308779 - DNA, 25 bp, Homo sapien
cagatggatacgcagcaacttcctt

SEQ ID NO: 308780 - DNA, 25 bp, Homo sapien
cgcagcaacttccttttgaaccttt

SEQ ID NO: 308781 - DNA, 25 bp, Homo sapien
gatggatacgcagcaacttcctttt

SEQ ID NO: 308782 - DNA, 25 bp, Homo sapien
agagctctgtcatgggcacgtagac

SEQ ID NO: 308783 - DNA, 25 bp, Homo sapien
atgggcacgtagacccggtcccagg

SEQ ID NO: 308784 - DNA, 25 bp, Homo sapien
tttcttcacggttctgagtcttggg

SEQ ID NO: 308785 - DNA, 25 bp, Homo sapien
aagattttcttcacggttctgagtc

SEQ ID NO: 308786 - DNA, 25 bp, Homo sapien
taattggtgcatgcacgaacccgga

SEQ ID NO: 308787 - DNA, 25 bp, Homo sapien
taaatgccctcatgccagggtgcgg

SEQ ID NO: 308788 - DNA, 25 bp, Homo sapien
gtttgtctgaagacggaggccccga

SEQ ID NO: 308789 - DNA, 25 bp, Homo sapien
caattcaagtgtggtgagcgccggc

SEQ ID NO: 308790 - DNA, 25 bp, Homo sapien
cccagattggtgacaaggactacat

SEQ ID NO: 308791 - DNA, 25 bp, Homo sapien
cttcatatatgacaccccaaaatgg

SEQ ID NO: 308792 - DNA, 25 bp, Homo sapien
ggactacattgtcctggcatgtggg

SEQ ID NO: 308793 - DNA, 25 bp, Homo sapien
catgtcagggagctatatgccaggg

SEQ ID NO: 308794 - DNA, 25 bp, Homo sapien
gctttctggtgaccccatcccccta

SEQ ID NO: 308795 - DNA, 25 bp, Homo sapien
ccaacctgtcatcggtgctgaagga

SEQ ID NO: 308796 - DNA, 25 bp, Homo sapien
gatgaggccgtctggaagaagccct

SEQ ID NO: 308797 - DNA, 25 bp, Homo sapien
ttctcgggcgcaggactagttgaca

SEQ ID NO: 308798 - DNA, 25 bp, Homo sapien
gggtcccagcatcctagagtccagt

SEQ ID NO: 308799 - DNA, 25 bp, Homo sapien
ttcggggacgtgttcagcctgcagc

SEQ ID NO: 308800 - DNA, 25 bp, Homo sapien
ttcgggccgcgttcccaaggcaagc

SEQ ID NO: 308801 - DNA, 25 bp, Homo sapien
ctggacgccggtggtcgtgctcaat

SEQ ID NO: 308802 - DNA, 25 bp, Homo sapien
tggcttgacaagaggccctgaccct

SEQ ID NO: 308803 - DNA, 25 bp, Homo sapien
gctcaccggcatggaccatcatctg

SEQ ID NO: 308804 - DNA, 25 bp, Homo sapien
ctctcggcaattttggtgactcttg

SEQ ID NO: 308805 - DNA, 25 bp, Homo sapien
tcatctgggaatgggatgctaactg

SEQ ID NO: 308806 - DNA, 25 bp, Homo sapien
gggcctctcggcaattttggtgact

SEQ ID NO: 308807 - DNA, 25 bp, Homo sapien
accaggtgagggaggaggtcctgga

SEQ ID NO: 308808 - DNA, 25 bp, Homo sapien
ggaggaggtcctggagggcggcaga

SEQ ID NO: 308809 - DNA, 25 bp, Homo sapien
ggaggtcctggagggcggcagaggt

SEQ ID NO: 308810 - DNA, 25 bp, Homo sapien
caggtgagggaggaggtcctggagg

SEQ ID NO: 308811 - DNA, 25 bp, Homo sapien
ggagggcatttatgcatggcatgaa

SEQ ID NO: 308812 - DNA, 25 bp, Homo sapien
cagggtcctgtgtgccgtttaaatc

SEQ ID NO: 308813 - DNA, 25 bp, Homo sapien
cagcatatgttaggagcacaaagtc

SEQ ID NO: 308814 - DNA, 25 bp, Homo sapien
ttggcagtgggcgtgcaagcccatt

SEQ ID NO: 308815 - DNA, 25 bp, Homo sapien
aggtcatagctgtgtcctgggtcac

SEQ ID NO: 308816 - DNA, 25 bp, Homo sapien
gcagcagcaaaatcaagggatgacc

SEQ ID NO: 308817 - DNA, 25 bp, Homo sapien
ggacctcaaggaccccatcaagtgt

SEQ ID NO: 308818 - DNA, 25 bp, Homo sapien
cactagacccaggattgaaaaagca

SEQ ID NO: 308819 - DNA, 25 bp, Homo sapien
cctggaatgtgtcctagaagacctg

SEQ ID NO: 308820 - DNA, 25 bp, Homo sapien
gaccacgatgcgtattcctggaatg

SEQ ID NO: 308821 - DNA, 25 bp, Homo sapien
tgcattgcgtggttttgaaaggact

SEQ ID NO: 308822 - DNA, 25 bp, Homo sapien
caggccaagatggttagagtcaagt

SEQ ID NO: 308823 - DNA, 25 bp, Homo sapien
tatgtctgaccctgtcaatcccagc

SEQ ID NO: 308824 - DNA, 25 bp, Homo sapien
tattagaagtaagtgtagcgacctg

SEQ ID NO: 308825 - DNA, 25 bp, Homo sapien
gcatgaccacacctatgtccagctg

SEQ ID NO: 308826 - DNA, 25 bp, Homo sapien
tatcatagcttacttgggttgtctc

SEQ ID NO: 308827 - DNA, 25 bp, Homo sapien
gggaacatttggtatcttctagtca

SEQ ID NO: 308828 - DNA, 25 bp, Homo sapien
aactgtggttatcctacagtgatac

SEQ ID NO: 308829 - DNA, 25 bp, Homo sapien
tcagacctaggtaattagcaaatcc

SEQ ID NO: 308830 - DNA, 25 bp, Homo sapien
tccatcgtctcaaacaacatgtctg

SEQ ID NO: 308831 - DNA, 25 bp, Homo sapien
gaacagctgaagtcccctatggcag

SEQ ID NO: 308832 - DNA, 25 bp, Homo sapien
caagcatgagtcttaccgcggcaat

SEQ ID NO: 308833 - DNA, 25 bp, Homo sapien
tagtcctgccgcaagagaagaggcc

SEQ ID NO: 308834 - DNA, 25 bp, Homo sapien
tacggagccctctgaaaaatgacaa

SEQ ID NO: 308835 - DNA, 25 bp, Homo sapien
gcattttcagaagtggataggataa

SEQ ID NO: 308836 - DNA, 25 bp, Homo sapien
ttcagaagtggataggataaaatat

SEQ ID NO: 308837 - DNA, 25 bp, Homo sapien
ttttcagaagtggataggataaaat

SEQ ID NO: 308838 - DNA, 25 bp, Homo sapien
cttgcctcactctttaggccatttc

SEQ ID NO: 308839 - DNA, 25 bp, Homo sapien
catattttaatctggttgagtttgg

SEQ ID NO: 308840 - DNA, 25 bp, Homo sapien
tgggggctcatttgtctaataaggc

SEQ ID NO: 308841 - DNA, 25 bp, Homo sapien
catttgtctaataaggcattattag

SEQ ID NO: 308842 - DNA, 25 bp, Homo sapien
taatctggttgagtttgggggctca

SEQ ID NO: 308843 - DNA, 25 bp, Homo sapien
ggcctagttcttacaccatttaatc

SEQ ID NO: 308844 - DNA, 25 bp, Homo sapien
taattctctcatgtcactcccacag

SEQ ID NO: 308845 - DNA, 25 bp, Homo sapien
tctgaatatgtgagttctagcctag

SEQ ID NO: 308846 - DNA, 25 bp, Homo sapien
acagactccggtgtgatgacgtgag

SEQ ID NO: 308847 - DNA, 25 bp, Homo sapien
tcttgacagtatacctggtcaccta

SEQ ID NO: 308848 - DNA, 25 bp, Homo sapien
tagccttatgtcagaaaagatgcca

SEQ ID NO: 308849 - DNA, 25 bp, Homo sapien
tctgtcagtggatcaacaaaaccta

SEQ ID NO: 308850 - DNA, 25 bp, Homo sapien
ttctaataattctagggcccataaa

SEQ ID NO: 308851 - DNA, 25 bp, Homo sapien
ttggcattttgcctgagctgtagtt

SEQ ID NO: 308852 - DNA, 25 bp, Homo sapien
aaggaggatgtgcaacctcatcctg

SEQ ID NO: 308853 - DNA, 25 bp, Homo sapien
gaaagtccacgtgatggaaggcagc

SEQ ID NO: 308854 - DNA, 25 bp, Homo sapien
tctgtgcaacggagatatatcttct

SEQ ID NO: 308855 - DNA, 25 bp, Homo sapien
taaagggctatctcttcctgactag

SEQ ID NO: 308856 - DNA, 25 bp, Homo sapien
aattccgtcattctgtcctgagctg

SEQ ID NO: 308857 - DNA, 25 bp, Homo sapien
ctcagttcgactgggtgggactcaa

SEQ ID NO: 308858 - DNA, 25 bp, Homo sapien
ttgaaatacagtaagcctgggcaac

SEQ ID NO: 308859 - DNA, 25 bp, Homo sapien
tgtgactgcttatggttttgtgacc

SEQ ID NO: 308860 - DNA, 25 bp, Homo sapien
agatttaggtgaaatactggaaagg

SEQ ID NO: 308861 - DNA, 25 bp, Homo sapien
taaagctatgatgaacctgaaatct

SEQ ID NO: 308862 - DNA, 25 bp, Homo sapien
gaaatctagatttaggtgaaatact

SEQ ID NO: 308863 - DNA, 25 bp, Homo sapien
ctgaagccatgtggacgcggctgct

SEQ ID NO: 308864 - DNA, 25 bp, Homo sapien
gagcaggggcccgtttactgccatg

SEQ ID NO: 308865 - DNA, 25 bp, Homo sapien
gctgggccgggatgtgggcgggagg

SEQ ID NO: 308866 - DNA, 25 bp, Homo sapien
gggcccgtttactgccatgtgaaca

SEQ ID NO: 308867 - DNA, 25 bp, Homo sapien
gcgaggccttgggtgcaaaggcggc

SEQ ID NO: 308868 - DNA, 25 bp, Homo sapien
gtccgggagtcagcgccgcctgctt

SEQ ID NO: 308869 - DNA, 25 bp, Homo sapien
gcgggtgtgagcgggcggcgtccgg

SEQ ID NO: 308870 - DNA, 25 bp, Homo sapien
ccttgggtgcaaaggcggcgggtgt

SEQ ID NO: 308871 - DNA, 25 bp, Homo sapien
ccttgtcacttttgatggccgtggg

SEQ ID NO: 308872 - DNA, 25 bp, Homo sapien
gatgggagcctaatttagaatcggc

SEQ ID NO: 308873 - DNA, 25 bp, Homo sapien
gggcaggatcacaaattctcaacgc

SEQ ID NO: 308874 - DNA, 25 bp, Homo sapien
gcaattttagccaacattagggaca

SEQ ID NO: 308875 - DNA, 25 bp, Homo sapien
ggactccagttatctgtctgcattc

SEQ ID NO: 308876 - DNA, 25 bp, Homo sapien
cttttgaatgaggctctgcgacaga

SEQ ID NO: 308877 - DNA, 25 bp, Homo sapien
tcccttttgaatgaggctctgcgac

SEQ ID NO: 308878 - DNA, 25 bp, Homo sapien
cccttttgaatgaggctctgcgaca

SEQ ID NO: 308879 - DNA, 25 bp, Homo sapien
tcttgggcagcaacttaacctgttt

SEQ ID NO: 308880 - DNA, 25 bp, Homo sapien
cgctcagttattgagtgcctgccac

SEQ ID NO: 308881 - DNA, 25 bp, Homo sapien
catgcagctagtgttaacagtgcct

SEQ ID NO: 308882 - DNA, 25 bp, Homo sapien
tttccttaaagagctccgagtgtgg

SEQ ID NO: 308883 - DNA, 25 bp, Homo sapien
tcaatcaatccacgctgacagatgg

SEQ ID NO: 308884 - DNA, 25 bp, Homo sapien
caagtcactgatctgccgagcaggg

SEQ ID NO: 308885 - DNA, 25 bp, Homo sapien
gagcagggccagtctcctcaatcaa

SEQ ID NO: 308886 - DNA, 25 bp, Homo sapien
aaggacatccgcctgctctgaaggc

SEQ ID NO: 308887 - DNA, 25 bp, Homo sapien
tcagtatccttgtgctttgcaaggg

SEQ ID NO: 308888 - DNA, 25 bp, Homo sapien
cccgagcttgtgagcaggaattcca

SEQ ID NO: 308889 - DNA, 25 bp, Homo sapien
ggcttttgtaagttgcctcctggca

SEQ ID NO: 308890 - DNA, 25 bp, Homo sapien
ggagtttcccgctctgttagccaga

SEQ ID NO: 308891 - DNA, 25 bp, Homo sapien
aacatgtcaatgctctaaggccctg

SEQ ID NO: 308892 - DNA, 25 bp, Homo sapien
tgtgggaccctgtgaaacaaatcca

SEQ ID NO: 308893 - DNA, 25 bp, Homo sapien
gatgccacacttctatcctggaggg

SEQ ID NO: 308894 - DNA, 25 bp, Homo sapien
ttaatggacatggtgccctaccctg

SEQ ID NO: 308895 - DNA, 25 bp, Homo sapien
gacttttggtcctactgactgtcta

SEQ ID NO: 308896 - DNA, 25 bp, Homo sapien
ggcctgcagacttttggtcctactg

SEQ ID NO: 308897 - DNA, 25 bp, Homo sapien
tggttaagagtgcagcctctgaaaa

SEQ ID NO: 308898 - DNA, 25 bp, Homo sapien
agtgctgggaagcttggtggttaag

SEQ ID NO: 308899 - DNA, 25 bp, Homo sapien
ttactgcaggaaaagcgcttagagc

SEQ ID NO: 308900 - DNA, 25 bp, Homo sapien
gaagatgacaatccctgcctcatgg

SEQ ID NO: 308901 - DNA, 25 bp, Homo sapien
gcaaaatgaggcgagaacagtaccc

SEQ ID NO: 308902 - DNA, 25 bp, Homo sapien
tcacttgtgaaaatggaggctgccc

SEQ ID NO: 308903 - DNA, 25 bp, Homo sapien
ccaggaatcttgacgctgaaggacc

SEQ ID NO: 308904 - DNA, 25 bp, Homo sapien
ggcccaggaatcttgacgctgaagg

SEQ ID NO: 308905 - DNA, 25 bp, Homo sapien
ggaatcttgacgctgaaggaccaac

SEQ ID NO: 308906 - DNA, 25 bp, Homo sapien
tctattaataagtggcccaggaatc

SEQ ID NO: 308907 - DNA, 25 bp, Homo sapien
gaaaagtggctccagtcgaggacca

SEQ ID NO: 308908 - DNA, 25 bp, Homo sapien
ttttgcaattatccccgagagctcg

SEQ ID NO: 308909 - DNA, 25 bp, Homo sapien
ttgaatggtgaagccgctcaggacc

SEQ ID NO: 308910 - DNA, 25 bp, Homo sapien
cagctatccccgagtcactagaggg

SEQ ID NO: 308911 - DNA, 25 bp, Homo sapien
tgcccagggataaagtcgcaaagcc

SEQ ID NO: 308912 - DNA, 25 bp, Homo sapien
aatgtcctagatccccaaggctcag

SEQ ID NO: 308913 - DNA, 25 bp, Homo sapien
ctaggaatgttctctgttgtcggcc

SEQ ID NO: 308914 - DNA, 25 bp, Homo sapien
ggcaggatcgcgtctaaatacatac

SEQ ID NO: 308915 - DNA, 25 bp, Homo sapien
catttgcccacagagggatatactg

SEQ ID NO: 308916 - DNA, 25 bp, Homo sapien
tccatctgaggcaggacgggtaaag

SEQ ID NO: 308917 - DNA, 25 bp, Homo sapien
ccacctactaccaagaaggcacaga

SEQ ID NO: 308918 - DNA, 25 bp, Homo sapien
aagtggttaccatgcatgtctgtca

SEQ ID NO: 308919 - DNA, 25 bp, Homo sapien
tcattcaggctgtcgagggagccgt

SEQ ID NO: 308920 - DNA, 25 bp, Homo sapien
gagggccgagagaaacgccaacaat

SEQ ID NO: 308921 - DNA, 25 bp, Homo sapien
tgaagaggcagatcgagggctttgc

SEQ ID NO: 308922 - DNA, 25 bp, Homo sapien
tctgctgcgagttgggcgatgggca

SEQ ID NO: 308923 - DNA, 25 bp, Homo sapien
tgcacacgccgaggagaatattacg

SEQ ID NO: 308924 - DNA, 25 bp, Homo sapien
ggcctgcacgcaatatctggatgga

SEQ ID NO: 308925 - DNA, 25 bp, Homo sapien
taatattcctggaacatcgccccgg

SEQ ID NO: 308926 - DNA, 25 bp, Homo sapien
aatattacggcgattagcggtggga

SEQ ID NO: 308927 - DNA, 25 bp, Homo sapien
ccggctgacagctcgggcactgtga

SEQ ID NO: 308928 - DNA, 25 bp, Homo sapien
catcccgggcccaatgccagggggc

SEQ ID NO: 308929 - DNA, 25 bp, Homo sapien
ctcccggctgacagctcgggcactg

SEQ ID NO: 308930 - DNA, 25 bp, Homo sapien
gctggctggcatcccgggcccaatg

SEQ ID NO: 308931 - DNA, 25 bp, Homo sapien
gggatgtcttcaggaagggttacat

SEQ ID NO: 308932 - DNA, 25 bp, Homo sapien
accattcttagctcctgcgccaagg

SEQ ID NO: 308933 - DNA, 25 bp, Homo sapien
gggttacatctagcaccattcttag

SEQ ID NO: 308934 - DNA, 25 bp, Homo sapien
attcttagctcctgcgccaagggca

SEQ ID NO: 308935 - DNA, 25 bp, Homo sapien
ccctggtgagttcatactccctcca

SEQ ID NO: 308936 - DNA, 25 bp, Homo sapien
cagccatttcgggggccacactttc

SEQ ID NO: 308937 - DNA, 25 bp, Homo sapien
tggtgagttcatactccctccacct

SEQ ID NO: 308938 - DNA, 25 bp, Homo sapien
gcccacagccatttcgggggccaca

SEQ ID NO: 308939 - DNA, 25 bp, Homo sapien
gtctctgccgggagctgtgcagcac

SEQ ID NO: 308940 - DNA, 25 bp, Homo sapien
tagttcaggttgacagtcgcgctcc

SEQ ID NO: 308941 - DNA, 25 bp, Homo sapien
tgtttccagggcgtgcggcaggact

SEQ ID NO: 308942 - DNA, 25 bp, Homo sapien
gctcgtggcttagcggcttgtcagc

SEQ ID NO: 308943 - DNA, 25 bp, Homo sapien
tattgttgccgcctcgtgccgtgcc

SEQ ID NO: 308944 - DNA, 25 bp, Homo sapien
tggcagcctccgtcgcaggagctgg

SEQ ID NO: 308945 - DNA, 25 bp, Homo sapien
ggtgcctattgttgccgcctcgtgc

SEQ ID NO: 308946 - DNA, 25 bp, Homo sapien
gaagaggtgcctattgttgccgcct

SEQ ID NO: 308947 - DNA, 25 bp, Homo sapien
tgccagcttcgcggcatctgcaggg

SEQ ID NO: 308948 - DNA, 25 bp, Homo sapien
atctgcagggccttcattagaggct

SEQ ID NO: 308949 - DNA, 25 bp, Homo sapien
tgacactgccagcttcgcggcatct

SEQ ID NO: 308950 - DNA, 25 bp, Homo sapien
ctgcagggccttcattagaggcttt

SEQ ID NO: 308951 - DNA, 25 bp, Homo sapien
tgtcggccatcttcattagcgtgtc

SEQ ID NO: 308952 - DNA, 25 bp, Homo sapien
ggtgacggcgtctgccctgagctgg

SEQ ID NO: 308953 - DNA, 25 bp, Homo sapien
taaattgacctgtcgggagagggaa

SEQ ID NO: 308954 - DNA, 25 bp, Homo sapien
agcgccagggctccccgtggaacta

SEQ ID NO: 308955 - DNA, 25 bp, Homo sapien
tgagaactgtcattaatagccccac

SEQ ID NO: 308956 - DNA, 25 bp, Homo sapien
aactgaggcctcgagcaggtgagtc

SEQ ID NO: 308957 - DNA, 25 bp, Homo sapien
cacagctaggtgatcgggaagtcag

SEQ ID NO: 308958 - DNA, 25 bp, Homo sapien
tgctgaggtcccaaccatgcatggt

SEQ ID NO: 308959 - DNA, 25 bp, Homo sapien
caacaggtattgtgatcaagaatgc

SEQ ID NO: 308960 - DNA, 25 bp, Homo sapien
cgctgtagatcacattccaatggac

SEQ ID NO: 308961 - DNA, 25 bp, Homo sapien
taggtgtccatggaaggtctcattg

SEQ ID NO: 308962 - DNA, 25 bp, Homo sapien
aaaacataataaggaagcaacaggt

SEQ ID NO: 308963 - DNA, 25 bp, Homo sapien
tgtcagcagggcgggaccaagacca

SEQ ID NO: 308964 - DNA, 25 bp, Homo sapien
tgtgaagcccttaagagaatgcagt

SEQ ID NO: 308965 - DNA, 25 bp, Homo sapien
gccaggcgcttcttggaatgagaag

SEQ ID NO: 308966 - DNA, 25 bp, Homo sapien
ggtctgcagacactatattcccctt

SEQ ID NO: 308967 - DNA, 25 bp, Homo sapien
gacctgaggtcaaagcccaaatgct

SEQ ID NO: 308968 - DNA, 25 bp, Homo sapien
ccctaccggaaatctgatgggctta

SEQ ID NO: 308969 - DNA, 25 bp, Homo sapien
gcagccgcgaggatgtacagctcct

SEQ ID NO: 308970 - DNA, 25 bp, Homo sapien
tcctgacgggtaagaaacatccatt

SEQ ID NO: 308971 - DNA, 25 bp, Homo sapien
tgaaggatctcgagagccatggatg

SEQ ID NO: 308972 - DNA, 25 bp, Homo sapien
ccatggatggtgcaggcgggaccct

SEQ ID NO: 308973 - DNA, 25 bp, Homo sapien
gtctcggccgggtccgcgctctgaa

SEQ ID NO: 308974 - DNA, 25 bp, Homo sapien
gagaccagcacaggtggtccggccc

SEQ ID NO: 308975 - DNA, 25 bp, Homo sapien
cgatgttatcgcaaaatgtgtgaga

SEQ ID NO: 308976 - DNA, 25 bp, Homo sapien
atgtgtgagagaagcggctgcgcag

SEQ ID NO: 308977 - DNA, 25 bp, Homo sapien
acaacattttctttcgccatcgatg

SEQ ID NO: 308978 - DNA, 25 bp, Homo sapien
cacgtggccgcaggaggatttacaa

SEQ ID NO: 308979 - DNA, 25 bp, Homo sapien
gaacagccgcgatgcattcattttg

SEQ ID NO: 308980 - DNA, 25 bp, Homo sapien
tttgttgatgcagccccacgtggtg

SEQ ID NO: 308981 - DNA, 25 bp, Homo sapien
taaccaatcgggtcatttgggagtg

SEQ ID NO: 308982 - DNA, 25 bp, Homo sapien
cgtcgctgcttttatggcatctagg

SEQ ID NO: 308983 - DNA, 25 bp, Homo sapien
gaacatgtgctggttctgcgctgaa

SEQ ID NO: 308984 - DNA, 25 bp, Homo sapien
caccagtccagaacttgcagtgggt

SEQ ID NO: 308985 - DNA, 25 bp, Homo sapien
tgacctgtggtcagaatgatggcct

SEQ ID NO: 308986 - DNA, 25 bp, Homo sapien
tcagccttgactgagcgcgggtcag

SEQ ID NO: 308987 - DNA, 25 bp, Homo sapien
gacaatgccgctcagggtgcagtga

SEQ ID NO: 308988 - DNA, 25 bp, Homo sapien
tttgaatgaactccgggcctgtttg

SEQ ID NO: 308989 - DNA, 25 bp, Homo sapien
ggctggatttgaatgaactccgggc

SEQ ID NO: 308990 - DNA, 25 bp, Homo sapien
cagtgagctcccctgggaaaaccga

SEQ ID NO: 308991 - DNA, 25 bp, Homo sapien
ccccgggctgttgggctctgcttcc

SEQ ID NO: 308992 - DNA, 25 bp, Homo sapien
atttcctcctcgcagtagccctgca

SEQ ID NO: 308993 - DNA, 25 bp, Homo sapien
agtagccctgcaccgtggccagaaa

SEQ ID NO: 308994 - DNA, 25 bp, Homo sapien
gtaaaatgggcaggtcaatcttccc

SEQ ID NO: 308995 - DNA, 25 bp, Homo sapien
tcatgggggcatcctattggagcag

SEQ ID NO: 308996 - DNA, 25 bp, Homo sapien
gagcagtggccacaggtatcatgca

SEQ ID NO: 308997 - DNA, 25 bp, Homo sapien
tgctggctgccaagcccttaagagc

SEQ ID NO: 308998 - DNA, 25 bp, Homo sapien
gcagtggccacaggtatcatgcagg

SEQ ID NO: 308999 - DNA, 25 bp, Homo sapien
tcgttgctggctgtccgagggtaca

SEQ ID NO: 309000 - DNA, 25 bp, Homo sapien
cagttagtcacaccaagccagcttg

SEQ ID NO: 309001 - DNA, 25 bp, Homo sapien
tgagagcatcaaagcctcgcgtggt

SEQ ID NO: 309002 - DNA, 25 bp, Homo sapien
tatccatgtgtagctcagtcgttgc

SEQ ID NO: 309003 - DNA, 25 bp, Homo sapien
gaaacttcccatgggtacctgcaca

SEQ ID NO: 309004 - DNA, 25 bp, Homo sapien
tcaacctgttggagccatgaggtgc

SEQ ID NO: 309005 - DNA, 25 bp, Homo sapien
ggttcaactatattctgggtctgtc

SEQ ID NO: 309006 - DNA, 25 bp, Homo sapien
catgaggtgcccagtatttggttca

SEQ ID NO: 309007 - DNA, 25 bp, Homo sapien
tttagtgttcttagtacaggaggta

SEQ ID NO: 309008 - DNA, 25 bp, Homo sapien
tgggcgcagaggctccaacctgtca

SEQ ID NO: 309009 - DNA, 25 bp, Homo sapien
ggcgcagaggctccaacctgtcatc

SEQ ID NO: 309010 - DNA, 25 bp, Homo sapien
tacaggaggtataacaaggcagtta

SEQ ID NO: 309011 - DNA, 25 bp, Homo sapien
gattggactctttggtgacctctgt

SEQ ID NO: 309012 - DNA, 25 bp, Homo sapien
ctttggtgacctctgttcccttggg

SEQ ID NO: 309013 - DNA, 25 bp, Homo sapien
gactctttggtgacctctgttccct

SEQ ID NO: 309014 - DNA, 25 bp, Homo sapien
ctgattggactctttggtgacctct

SEQ ID NO: 309015 - DNA, 25 bp, Homo sapien
taggtccagatttaaacattcccag

SEQ ID NO: 309016 - DNA, 25 bp, Homo sapien
ctctgaatcgcacaagttaggtcca

SEQ ID NO: 309017 - DNA, 25 bp, Homo sapien
ttaggtccagatttaaacattccca

SEQ ID NO: 309018 - DNA, 25 bp, Homo sapien
tgaatcgcacaagttaggtccagat

SEQ ID NO: 309019 - DNA, 25 bp, Homo sapien
gacaaatggtgatgcgagatgctca

SEQ ID NO: 309020 - DNA, 25 bp, Homo sapien
actgttctgcgagcccgggagagtt

SEQ ID NO: 309021 - DNA, 25 bp, Homo sapien
tacaccaatgtttagggccgctgcg

SEQ ID NO: 309022 - DNA, 25 bp, Homo sapien
agttgtggtgccctcggtactgagc

SEQ ID NO: 309023 - DNA, 25 bp, Homo sapien
gcccacgggcttcgctggtccgaga

SEQ ID NO: 309024 - DNA, 25 bp, Homo sapien
acgggcttcgctggtccgagaccaa

SEQ ID NO: 309025 - DNA, 25 bp, Homo sapien
cgagaccaagtgtcctttctcttga

SEQ ID NO: 309026 - DNA, 25 bp, Homo sapien
tcgctggtccgagaccaagtgtcct

SEQ ID NO: 309027 - DNA, 25 bp, Homo sapien
tcgtctggcgaatgcgcggccgtca

SEQ ID NO: 309028 - DNA, 25 bp, Homo sapien
cctgcctaggtagcaggaggggagt

SEQ ID NO: 309029 - DNA, 25 bp, Homo sapien
cgctctcgtctggcgaatgcgcggc

SEQ ID NO: 309030 - DNA, 25 bp, Homo sapien
tctcgtctggcgaatgcgcggccgt

SEQ ID NO: 309031 - DNA, 25 bp, Homo sapien
agggatgagtctgtcgaaggagctg

SEQ ID NO: 309032 - DNA, 25 bp, Homo sapien
attgtccagccagccgtgcaggcag

SEQ ID NO: 309033 - DNA, 25 bp, Homo sapien
gctggcattgtccagccagccgtgc

SEQ ID NO: 309034 - DNA, 25 bp, Homo sapien
gtctgtcgaaggagctggcattgtc

SEQ ID NO: 309035 - DNA, 25 bp, Homo sapien
aagtctggaggtaatatgggacacc

SEQ ID NO: 309036 - DNA, 25 bp, Homo sapien
ttcggatctcactcacaaaagtctg

SEQ ID NO: 309037 - DNA, 25 bp, Homo sapien
gaaatccatggcaacgtaataaaag

SEQ ID NO: 309038 - DNA, 25 bp, Homo sapien
gctgtaatgggacgagagcccatga

SEQ ID NO: 309039 - DNA, 25 bp, Homo sapien
gaatggagaatcgattccatttcaa

SEQ ID NO: 309040 - DNA, 25 bp, Homo sapien
cccagaatggagaatcgattccatt

SEQ ID NO: 309041 - DNA, 25 bp, Homo sapien
cagaatggagaatcgattccatttc

SEQ ID NO: 309042 - DNA, 25 bp, Homo sapien
atggagaatcgattccatttcaagg

SEQ ID NO: 309043 - DNA, 25 bp, Homo sapien
gctgcataccctaaagcttcttccc

SEQ ID NO: 309044 - DNA, 25 bp, Homo sapien
aagagctgtgggtgacattccctca

SEQ ID NO: 309045 - DNA, 25 bp, Homo sapien
ggcgtgtccagcaagataagtttat

SEQ ID NO: 309046 - DNA, 25 bp, Homo sapien
gagcggcgtgtccagcaagataagt

SEQ ID NO: 309047 - DNA, 25 bp, Homo sapien
agaaagagcggcgtgtccagcaaga

SEQ ID NO: 309048 - DNA, 25 bp, Homo sapien
aagagcggcgtgtccagcaagataa

SEQ ID NO: 309049 - DNA, 25 bp, Homo sapien
ccgcatctggccgatctgtggtcat

SEQ ID NO: 309050 - DNA, 25 bp, Homo sapien
catctggccgatctgtggtcattct

SEQ ID NO: 309051 - DNA, 25 bp, Homo sapien
ggccgatctgtggtcattctatgga

SEQ ID NO: 309052 - DNA, 25 bp, Homo sapien
ctgtggtcattctatggacaagaaa

SEQ ID NO: 309053 - DNA, 25 bp, Homo sapien
tgctctatggctctccgcttgtagg

SEQ ID NO: 309054 - DNA, 25 bp, Homo sapien
ggctctccgcttgtaggtcagcaag

SEQ ID NO: 309055 - DNA, 25 bp, Homo sapien
tgtaggtcagcaagttctccatttc

SEQ ID NO: 309056 - DNA, 25 bp, Homo sapien
tgcagcacgtgctctatggctctcc

SEQ ID NO: 309057 - DNA, 25 bp, Homo sapien
ctgcttcaggctgaacacgtgcgag

SEQ ID NO: 309058 - DNA, 25 bp, Homo sapien
tcaggctgaacacgtgcgagggctc

SEQ ID NO: 309059 - DNA, 25 bp, Homo sapien
aggctgaacacgtgcgagggctcct

SEQ ID NO: 309060 - DNA, 25 bp, Homo sapien
cttcaggctgaacacgtgcgagggc

SEQ ID NO: 309061 - DNA, 25 bp, Homo sapien
gctccccgtccacaccgggcaccca

SEQ ID NO: 309062 - DNA, 25 bp, Homo sapien
cagctccccgtccacaccgggcacc

SEQ ID NO: 309063 - DNA, 25 bp, Homo sapien
cggagttcacatgcctcgggaaaca

SEQ ID NO: 309064 - DNA, 25 bp, Homo sapien
tcgggaaacagaggaatcaataggc

SEQ ID NO: 309065 - DNA, 25 bp, Homo sapien
tcgattgcatgtttacagcggcagg

SEQ ID NO: 309066 - DNA, 25 bp, Homo sapien
aatatgtgtggagctctgacctacc

SEQ ID NO: 309067 - DNA, 25 bp, Homo sapien
tgattacatcttaaatcacattgtg

SEQ ID NO: 309068 - DNA, 25 bp, Homo sapien
aattctcgtcacaaggcacaggcac

SEQ ID NO: 309069 - DNA, 25 bp, Homo sapien
gagacaaaaacatggtgaattctcg

SEQ ID NO: 309070 - DNA, 25 bp, Homo sapien
caaaaacatggtgaattctcgtcac

SEQ ID NO: 309071 - DNA, 25 bp, Homo sapien
catggtgaattctcgtcacaaggca

SEQ ID NO: 309072 - DNA, 25 bp, Homo sapien
ttcctgatggaatgcgcacacagct

SEQ ID NO: 309073 - DNA, 25 bp, Homo sapien
tcctgatggaatgcgcacacagctc

SEQ ID NO: 309074 - DNA, 25 bp, Homo sapien
gatgtggtcgacacgcagagaactt

SEQ ID NO: 309075 - DNA, 25 bp, Homo sapien
tcactggttatggagccttacctgg

SEQ ID NO: 309076 - DNA, 25 bp, Homo sapien
gacacctgtggaaaggcatgggaca

SEQ ID NO: 309077 - DNA, 25 bp, Homo sapien
ttatggagccttacctgggcatgcc

SEQ ID NO: 309078 - DNA, 25 bp, Homo sapien
gtctatcatgaacgacagggactcc

SEQ ID NO: 309079 - DNA, 25 bp, Homo sapien
tctatcatgaacgacagggactcct

SEQ ID NO: 309080 - DNA, 25 bp, Homo sapien
gtgtctatcatgaacgacagggact

SEQ ID NO: 309081 - DNA, 25 bp, Homo sapien
ctatcatgaacgacagggactcctt

SEQ ID NO: 309082 - DNA, 25 bp, Homo sapien
aggcctctagggactgatcactgga

SEQ ID NO: 309083 - DNA, 25 bp, Homo sapien
gcagttgggtcacctaattgtgcct

SEQ ID NO: 309084 - DNA, 25 bp, Homo sapien
tcactggagcatgaggcctgataga

SEQ ID NO: 309085 - DNA, 25 bp, Homo sapien
gaggcctgatagatcctggtggtca

SEQ ID NO: 309086 - DNA, 25 bp, Homo sapien
tgctgtgattgtatccgaagtagtc

SEQ ID NO: 309087 - DNA, 25 bp, Homo sapien
gggttgctgtgattgtatccgaagt

SEQ ID NO: 309088 - DNA, 25 bp, Homo sapien
cagctgagttgtgaagttgcatggc

SEQ ID NO: 309089 - DNA, 25 bp, Homo sapien
gccagctgagttgtgaagttgcatg

SEQ ID NO: 309090 - DNA, 25 bp, Homo sapien
gctggggttcgctcatgtggacaca

SEQ ID NO: 309091 - DNA, 25 bp, Homo sapien
tggacacagtgattgcctgggactt

SEQ ID NO: 309092 - DNA, 25 bp, Homo sapien
gacacagtgattgcctgggacttcc

SEQ ID NO: 309093 - DNA, 25 bp, Homo sapien
tgtggacacagtgattgcctgggac

SEQ ID NO: 309094 - DNA, 25 bp, Homo sapien
tgagtctgggagcactaggtcttca

SEQ ID NO: 309095 - DNA, 25 bp, Homo sapien
taggctgggcctcaagactagtgag

SEQ ID NO: 309096 - DNA, 25 bp, Homo sapien
taggtcttcatagttccaggcccag

SEQ ID NO: 309097 - DNA, 25 bp, Homo sapien
agaaggagctgatgatactggccac

SEQ ID NO: 309098 - DNA, 25 bp, Homo sapien
ctggagcacagcgttcacaactcac

SEQ ID NO: 309099 - DNA, 25 bp, Homo sapien
caggctggagcacagcgttcacaac

SEQ ID NO: 309100 - DNA, 25 bp, Homo sapien
tcaggctggagcacagcgttcacaa

SEQ ID NO: 309101 - DNA, 25 bp, Homo sapien
ggctggagcacagcgttcacaactc

SEQ ID NO: 309102 - DNA, 25 bp, Homo sapien
ctgggctgttataggccctcctact

SEQ ID NO: 309103 - DNA, 25 bp, Homo sapien
tgggctgttataggccctcctactc

SEQ ID NO: 309104 - DNA, 25 bp, Homo sapien
ctgttataggccctcctactcggtt

SEQ ID NO: 309105 - DNA, 25 bp, Homo sapien
ttataggccctcctactcggttgcc

SEQ ID NO: 309106 - DNA, 25 bp, Homo sapien
gcccacgggcttcgctggtccgaga

SEQ ID NO: 309107 - DNA, 25 bp, Homo sapien
cgagaccaagtgtcctttctcttga

SEQ ID NO: 309108 - DNA, 25 bp, Homo sapien
acgggcttcgctggtccgagaccaa

SEQ ID NO: 309109 - DNA, 25 bp, Homo sapien
tcgctggtccgagaccaagtgtcct

SEQ ID NO: 309110 - DNA, 25 bp, Homo sapien
attccgggccctatctccaagctgt

SEQ ID NO: 309111 - DNA, 25 bp, Homo sapien
aggagcagagtgacgcccgcaattc

SEQ ID NO: 309112 - DNA, 25 bp, Homo sapien
tctcgtcccgcgaatgcgctgctgt

SEQ ID NO: 309113 - DNA, 25 bp, Homo sapien
tcacgcctggctaggtcgcaggagc

SEQ ID NO: 309114 - DNA, 25 bp, Homo sapien
agggatgagtctgtcgaaggagctg

SEQ ID NO: 309115 - DNA, 25 bp, Homo sapien
attgtccagccagccgtgcaggcag

SEQ ID NO: 309116 - DNA, 25 bp, Homo sapien
gctggcattgtccagccagccgtgc

SEQ ID NO: 309117 - DNA, 25 bp, Homo sapien
gtctgtcgaaggagctggcattgtc

SEQ ID NO: 309118 - DNA, 25 bp, Homo sapien
gagagaagcgggttggagggtagga

SEQ ID NO: 309119 - DNA, 25 bp, Homo sapien
gaagaggtgtctatgccagctgtct

SEQ ID NO: 309120 - DNA, 25 bp, Homo sapien
ggaagaggtgtctatgccagctgtc

SEQ ID NO: 309121 - DNA, 25 bp, Homo sapien
ttcggatctcactcacaaaagtctg

SEQ ID NO: 309122 - DNA, 25 bp, Homo sapien
gaaatccatggcaacgtaataaaag

SEQ ID NO: 309123 - DNA, 25 bp, Homo sapien
gctgtaatgggacgagagcccatga

SEQ ID NO: 309124 - DNA, 25 bp, Homo sapien
aagtctggaggtaatatgggacacc

SEQ ID NO: 309125 - DNA, 25 bp, Homo sapien
gaatggagaatcgattccatttcaa

SEQ ID NO: 309126 - DNA, 25 bp, Homo sapien
cccagaatggagaatcgattccatt

SEQ ID NO: 309127 - DNA, 25 bp, Homo sapien
cagaatggagaatcgattccatttc

SEQ ID NO: 309128 - DNA, 25 bp, Homo sapien
atggagaatcgattccatttcaagg

SEQ ID NO: 309129 - DNA, 25 bp, Homo sapien
ctctctttgcagatctcataagtgc

SEQ ID NO: 309130 - DNA, 25 bp, Homo sapien
gtggtcaacctctgactgaccctct

SEQ ID NO: 309131 - DNA, 25 bp, Homo sapien
catgatgtccccttcatcagacctg

SEQ ID NO: 309132 - DNA, 25 bp, Homo sapien
tcatccctgtgtcccttgcggcagt

SEQ ID NO: 309133 - DNA, 25 bp, Homo sapien
ggcgtgtccagcaagataagtttat

SEQ ID NO: 309134 - DNA, 25 bp, Homo sapien
gagcggcgtgtccagcaagataagt

SEQ ID NO: 309135 - DNA, 25 bp, Homo sapien
agaaagagcggcgtgtccagcaaga

SEQ ID NO: 309136 - DNA, 25 bp, Homo sapien
aagagcggcgtgtccagcaagataa

SEQ ID NO: 309137 - DNA, 25 bp, Homo sapien
caaaggcattcgactgggtgtgagt

SEQ ID NO: 309138 - DNA, 25 bp, Homo sapien
agctggccaggtcattgagcccaac

SEQ ID NO: 309139 - DNA, 25 bp, Homo sapien
tgtcacaactgataggctgagacct

SEQ ID NO: 309140 - DNA, 25 bp, Homo sapien
caacctcattttacacgtgcgggaa

SEQ ID NO: 309141 - DNA, 25 bp, Homo sapien
tgctctatggctctccgcttgtagg

SEQ ID NO: 309142 - DNA, 25 bp, Homo sapien
ggctctccgcttgtaggtcagcaag

SEQ ID NO: 309143 - DNA, 25 bp, Homo sapien
tgcagcacgtgctctatggctctcc

SEQ ID NO: 309144 - DNA, 25 bp, Homo sapien
tgtaggtcagcaagttctccatttc

SEQ ID NO: 309145 - DNA, 25 bp, Homo sapien
tcaggctgaacacgtgcgagggctc

SEQ ID NO: 309146 - DNA, 25 bp, Homo sapien
aggctgaacacgtgcgagggctcct

SEQ ID NO: 309147 - DNA, 25 bp, Homo sapien
cttcaggctgaacacgtgcgagggc

SEQ ID NO: 309148 - DNA, 25 bp, Homo sapien
ctgcttcaggctgaacacgtgcgag

SEQ ID NO: 309149 - DNA, 25 bp, Homo sapien
tcgggaaacagaggaatcaataggc

SEQ ID NO: 309150 - DNA, 25 bp, Homo sapien
tcgattgcatgtttacagcggcagg

SEQ ID NO: 309151 - DNA, 25 bp, Homo sapien
aatatgtgtggagctctgacctacc

SEQ ID NO: 309152 - DNA, 25 bp, Homo sapien
cggagttcacatgcctcgggaaaca

SEQ ID NO: 309153 - DNA, 25 bp, Homo sapien
tggttcctctttgcaggagaagctc

SEQ ID NO: 309154 - DNA, 25 bp, Homo sapien
ctccccgcactcctcactcaagtgg

SEQ ID NO: 309155 - DNA, 25 bp, Homo sapien
ctgtggccaccttcgtggttcctct

SEQ ID NO: 309156 - DNA, 25 bp, Homo sapien
ttcctctttgcaggagaagctcccc

SEQ ID NO: 309157 - DNA, 25 bp, Homo sapien
gagcctctggtctctgttcagaacc

SEQ ID NO: 309158 - DNA, 25 bp, Homo sapien
ctctggtctctgttcagaaccagac

SEQ ID NO: 309159 - DNA, 25 bp, Homo sapien
gcctctggtctctgttcagaaccag

SEQ ID NO: 309160 - DNA, 25 bp, Homo sapien
caggcgagcctctggtctctgttca

SEQ ID NO: 309161 - DNA, 25 bp, Homo sapien
cctggattttaggacttaggtgtgg

SEQ ID NO: 309162 - DNA, 25 bp, Homo sapien
agagaagtgagttgggccacttctg

SEQ ID NO: 309163 - DNA, 25 bp, Homo sapien
agaagtgagttgggccacttctggg

SEQ ID NO: 309164 - DNA, 25 bp, Homo sapien
gcagagaagtgagttgggccacttc

SEQ ID NO: 309165 - DNA, 25 bp, Homo sapien
ttcctgatggaatgcgcacacagct

SEQ ID NO: 309166 - DNA, 25 bp, Homo sapien
tcctgatggaatgcgcacacagctc

SEQ ID NO: 309167 - DNA, 25 bp, Homo sapien
attcctggcgcccatgtctccttgg

SEQ ID NO: 309168 - DNA, 25 bp, Homo sapien
tcagccgagactgggctcactggtt

SEQ ID NO: 309169 - DNA, 25 bp, Homo sapien
gcagtcagccgagactgggctcact

SEQ ID NO: 309170 - DNA, 25 bp, Homo sapien
tgcagtcagccgagactgggctcac

SEQ ID NO: 309171 - DNA, 25 bp, Homo sapien
agtcagccgagactgggctcactgg

SEQ ID NO: 309172 - DNA, 25 bp, Homo sapien
tgtctgaattcgtccacttagcgcg

SEQ ID NO: 309173 - DNA, 25 bp, Homo sapien
aaatcgtctatggtgggccacgcac

SEQ ID NO: 309174 - DNA, 25 bp, Homo sapien
tgcagccatacaacacgtagacggt

SEQ ID NO: 309175 - DNA, 25 bp, Homo sapien
gccctatttggacttgacttgaacg

SEQ ID NO: 309176 - DNA, 25 bp, Homo sapien
ggcttccggtcctgagcaaccatga

SEQ ID NO: 309177 - DNA, 25 bp, Homo sapien
cacaagccaggcacaagtgaatgct

SEQ ID NO: 309178 - DNA, 25 bp, Homo sapien
gaccctgggttggatttgaggctca

SEQ ID NO: 309179 - DNA, 25 bp, Homo sapien
caaagaaatcgcgaacctctgagct

SEQ ID NO: 309180 - DNA, 25 bp, Homo sapien
cttctcagagtaattctgtcttgaa

SEQ ID NO: 309181 - DNA, 25 bp, Homo sapien
atgccaagaaacctgcagaggcccc

SEQ ID NO: 309182 - DNA, 25 bp, Homo sapien
cagggtcagtgttcccgggtaggtg

SEQ ID NO: 309183 - DNA, 25 bp, Homo sapien
ttcttccctttgtgacaatgccaag

SEQ ID NO: 309184 - DNA, 25 bp, Homo sapien
cagtgttcccgggtaggtgaccata

SEQ ID NO: 309185 - DNA, 25 bp, Homo sapien
gctggggttcgctcatgtggacaca

SEQ ID NO: 309186 - DNA, 25 bp, Homo sapien
gacacagtgattgcctgggacttcc

SEQ ID NO: 309187 - DNA, 25 bp, Homo sapien
gctgatgatactggccacgtgctgg

SEQ ID NO: 309188 - DNA, 25 bp, Homo sapien
agaaggagctgatgatactggccac

SEQ ID NO: 309189 - DNA, 25 bp, Homo sapien
ggctggatatttattattagccagg

SEQ ID NO: 309190 - DNA, 25 bp, Homo sapien
gctggatatttattattagccagga

SEQ ID NO: 309191 - DNA, 25 bp, Homo sapien
ttttccctcaatgcaaaagcccttg

SEQ ID NO: 309192 - DNA, 25 bp, Homo sapien
ttgaggaccctggatgaatccgttc

SEQ ID NO: 309193 - DNA, 25 bp, Homo sapien
ccttgctggcaacaaaaaagcctca

SEQ ID NO: 309194 - DNA, 25 bp, Homo sapien
cctagaggaggacttgtccttccca

SEQ ID NO: 309195 - DNA, 25 bp, Homo sapien
tcgcgtccaacagccccatcagagt

SEQ ID NO: 309196 - DNA, 25 bp, Homo sapien
gttgaaggccatcgcgtccaacagc

SEQ ID NO: 309197 - DNA, 25 bp, Homo sapien
tctggccaacgggccccaggttgaa

SEQ ID NO: 309198 - DNA, 25 bp, Homo sapien
ggccccaggttgaaggccatcgcgt

SEQ ID NO: 309199 - DNA, 25 bp, Homo sapien
gacaagcagaggatcgagctgctgc

SEQ ID NO: 309200 - DNA, 25 bp, Homo sapien
agcgcagctgcgcaagaagtttgag

SEQ ID NO: 309201 - DNA, 25 bp, Homo sapien
agcgcaaattccgaccctactgagc

SEQ ID NO: 309202 - DNA, 25 bp, Homo sapien
gggcccagcgcaaattccgacccta

SEQ ID NO: 309203 - DNA, 25 bp, Homo sapien
actacgcctggcagcatcgagagag

SEQ ID NO: 309204 - DNA, 25 bp, Homo sapien
gagggctgggtgaaggtgacccgcc

SEQ ID NO: 309205 - DNA, 25 bp, Homo sapien
gagctgctcaactacgcctggcagc

SEQ ID NO: 309206 - DNA, 25 bp, Homo sapien
gacggaagcgcagccaaaaagagct

SEQ ID NO: 309207 - DNA, 25 bp, Homo sapien
tgagggtggaagtggacacgttcat

SEQ ID NO: 309208 - DNA, 25 bp, Homo sapien
tggatcagtgactacgcagactctg

SEQ ID NO: 309209 - DNA, 25 bp, Homo sapien
ggcatatgaccagaagatcgctgag

SEQ ID NO: 309210 - DNA, 25 bp, Homo sapien
ggacacgttcatggaggcatatgac

SEQ ID NO: 309211 - DNA, 25 bp, Homo sapien
tccaggtagcctacgtggtgttcca

SEQ ID NO: 309212 - DNA, 25 bp, Homo sapien
caagtggggtgtcagcggccttggc

SEQ ID NO: 309213 - DNA, 25 bp, Homo sapien
tttccaggtagcctacgtggtgttc

SEQ ID NO: 309214 - DNA, 25 bp, Homo sapien
aggtagcctacgtggtgttccagaa

SEQ ID NO: 309215 - DNA, 25 bp, Homo sapien
gccttgtccagtctgtagagttgaa

SEQ ID NO: 309216 - DNA, 25 bp, Homo sapien
gagtcaaggtcgaagttttttcatc

SEQ ID NO: 309217 - DNA, 25 bp, Homo sapien
tccagtctgtagagttgaaggagaa

SEQ ID NO: 309218 - DNA, 25 bp, Homo sapien
tgcctccagtccacctgtggccttg

SEQ ID NO: 309219 - DNA, 25 bp, Homo sapien
cacggcattcaacaaggcaccaagt

SEQ ID NO: 309220 - DNA, 25 bp, Homo sapien
ttgtcttcaatgtgcccccatactg

SEQ ID NO: 309221 - DNA, 25 bp, Homo sapien
aaaagcaacaggcttctcactacct

SEQ ID NO: 309222 - DNA, 25 bp, Homo sapien
gcaccaagtccacctggcctcagaa

SEQ ID NO: 309223 - DNA, 25 bp, Homo sapien
atggtggcgcgcaggacgaagctcg

SEQ ID NO: 309224 - DNA, 25 bp, Homo sapien
tggcgcgcaggacgaagctcgcggc

SEQ ID NO: 309225 - DNA, 25 bp, Homo sapien
caggacgaagctcgcggcgcgggac

SEQ ID NO: 309226 - DNA, 25 bp, Homo sapien
aggacggtatcccgagcccaccgtg

SEQ ID NO: 309227 - DNA, 25 bp, Homo sapien
aggtgtttccccagcataggcgcag

SEQ ID NO: 309228 - DNA, 25 bp, Homo sapien
caagatttgcttgaggctagcccag

SEQ ID NO: 309229 - DNA, 25 bp, Homo sapien
ggcacatgccgaagatactcaagag

SEQ ID NO: 309230 - DNA, 25 bp, Homo sapien
taagcagtcatcttgggagaccggg

SEQ ID NO: 309231 - DNA, 25 bp, Homo sapien
accaatgggccatcggactggagac

SEQ ID NO: 309232 - DNA, 25 bp, Homo sapien
tgtgctcttctctctacgttaacgt

SEQ ID NO: 309233 - DNA, 25 bp, Homo sapien
tttccccaaggcaaagcttatgacc

SEQ ID NO: 309234 - DNA, 25 bp, Homo sapien
gatgggacccgcctttctgtgttgt

SEQ ID NO: 309235 - DNA, 25 bp, Homo sapien
ttttctggagaacggggtctcgcta

SEQ ID NO: 309236 - DNA, 25 bp, Homo sapien
tcccgcctcttagcctccctgagag

SEQ ID NO: 309237 - DNA, 25 bp, Homo sapien
tttctggagaacggggtctcgctat

SEQ ID NO: 309238 - DNA, 25 bp, Homo sapien
tcaagctatcctcccgcctcttagc

SEQ ID NO: 309239 - DNA, 25 bp, Homo sapien
tcgagttgggatccagcaaggcctt

SEQ ID NO: 309240 - DNA, 25 bp, Homo sapien
cagcagagatttgatgcccggcaga

SEQ ID NO: 309241 - DNA, 25 bp, Homo sapien
gatgttgaactctcgcaagcagcag

SEQ ID NO: 309242 - DNA, 25 bp, Homo sapien
gaagattggcctctcagatgcccgg

SEQ ID NO: 309243 - DNA, 25 bp, Homo sapien
tggacgaactcatcaggaagcgcgg

SEQ ID NO: 309244 - DNA, 25 bp, Homo sapien
agcaagatggcggacatctccctgg

SEQ ID NO: 309245 - DNA, 25 bp, Homo sapien
atctccctggacgaactcatcagga

SEQ ID NO: 309246 - DNA, 25 bp, Homo sapien
gcaagatggcggacatctccctgga

SEQ ID NO: 309247 - DNA, 25 bp, Homo sapien
aggattcgggcgtcaccccgaatcg

SEQ ID NO: 309248 - DNA, 25 bp, Homo sapien
caaagtaggcgggtcaccttgaggg

SEQ ID NO: 309249 - DNA, 25 bp, Homo sapien
tgagggcgacctttacccgctcaaa

SEQ ID NO: 309250 - DNA, 25 bp, Homo sapien
cgggcagatcgcaactcccaggcat

SEQ ID NO: 309251 - DNA, 25 bp, Homo sapien
tatgtgccgaacacctacgtcaggt

SEQ ID NO: 309252 - DNA, 25 bp, Homo sapien
tactgtgggcaaccttagaccggct

SEQ ID NO: 309253 - DNA, 25 bp, Homo sapien
ggtaaggccgcacacatggaaattg

SEQ ID NO: 309254 - DNA, 25 bp, Homo sapien
taaacgctgtcacgaactgagctgc

SEQ ID NO: 309255 - DNA, 25 bp, Homo sapien
tgtctgagggacatatcagtgacct

SEQ ID NO: 309256 - DNA, 25 bp, Homo sapien
cactgcaccgcctcagggttttggg

SEQ ID NO: 309257 - DNA, 25 bp, Homo sapien
tgacctcgacgttgcctttagacta

SEQ ID NO: 309258 - DNA, 25 bp, Homo sapien
tggcagaactcccacaaccacatgt

SEQ ID NO: 309259 - DNA, 25 bp, Homo sapien
ttgtgactgatgacgtagatttggg

SEQ ID NO: 309260 - DNA, 25 bp, Homo sapien
gttagtgttttgtgactgatgacgt

SEQ ID NO: 309261 - DNA, 25 bp, Homo sapien
ggtccttggatgtgggtccttgccc

SEQ ID NO: 309262 - DNA, 25 bp, Homo sapien
agaaaactgccgcaaggccaaccaa

SEQ ID NO: 309263 - DNA, 25 bp, Homo sapien
cctactaatatactattgactagaa

SEQ ID NO: 309264 - DNA, 25 bp, Homo sapien
actttcctactaatatactattgac

SEQ ID NO: 309265 - DNA, 25 bp, Homo sapien
aaactttcctactaatatactattg

SEQ ID NO: 309266 - DNA, 25 bp, Homo sapien
taatatactattgactagaagcctt

SEQ ID NO: 309267 - DNA, 25 bp, Homo sapien
cccttctttggctaatttagtgagg

SEQ ID NO: 309268 - DNA, 25 bp, Homo sapien
tctattctgaaaattgctacagtat

SEQ ID NO: 309269 - DNA, 25 bp, Homo sapien
gctacagtattatttgatgcattat

SEQ ID NO: 309270 - DNA, 25 bp, Homo sapien
tataccgttagcataataaattgcc

SEQ ID NO: 309271 - DNA, 25 bp, Homo sapien
cccgggatggatttacacaggacca

SEQ ID NO: 309272 - DNA, 25 bp, Homo sapien
gatcatactctagcgtgggtgacgg

SEQ ID NO: 309273 - DNA, 25 bp, Homo sapien
cgctctgcgtggttacgtgggctca

SEQ ID NO: 309274 - DNA, 25 bp, Homo sapien
attgtttgcactgcgtcccgggatg

SEQ ID NO: 309275 - DNA, 25 bp, Homo sapien
tataggatgattgttcgtgtaactg

SEQ ID NO: 309276 - DNA, 25 bp, Homo sapien
taggatgattgttcgtgtaactgac

SEQ ID NO: 309277 - DNA, 25 bp, Homo sapien
aacacacccaagtataggatgattg

SEQ ID NO: 309278 - DNA, 25 bp, Homo sapien
cccaagtataggatgattgttcgtg

SEQ ID NO: 309279 - DNA, 25 bp, Homo sapien
gcagagaagcagcatggtctttggg

SEQ ID NO: 309280 - DNA, 25 bp, Homo sapien
agagaagcagcatggtctttgggcg

SEQ ID NO: 309281 - DNA, 25 bp, Homo sapien
cagagaagcagcatggtctttgggc

SEQ ID NO: 309282 - DNA, 25 bp, Homo sapien
gagaagcagcatggtctttgggcgt

SEQ ID NO: 309283 - DNA, 25 bp, Homo sapien
ttcatccatgagattgaggccagtg

SEQ ID NO: 309284 - DNA, 25 bp, Homo sapien
catccatgagattgaggccagtgtc

SEQ ID NO: 309285 - DNA, 25 bp, Homo sapien
tgagattgaggccagtgtcagcatc

SEQ ID NO: 309286 - DNA, 25 bp, Homo sapien
ccatgagattgaggccagtgtcagc

SEQ ID NO: 309287 - DNA, 25 bp, Homo sapien
caagactattgagttgttgggagag

SEQ ID NO: 309288 - DNA, 25 bp, Homo sapien
caggctctccgtcgatgagaaagtc

SEQ ID NO: 309289 - DNA, 25 bp, Homo sapien
ggagagttgtcgcaggctctccgtc

SEQ ID NO: 309290 - DNA, 25 bp, Homo sapien
tgtcgcaggctctccgtcgatgaga

SEQ ID NO: 309291 - DNA, 25 bp, Homo sapien
gatgcaggccctcccctttgacaga

SEQ ID NO: 309292 - DNA, 25 bp, Homo sapien
cctcccctttgacagatgttgttga

SEQ ID NO: 309293 - DNA, 25 bp, Homo sapien
aggttagcagacgatgcaggccctc

SEQ ID NO: 309294 - DNA, 25 bp, Homo sapien
gatccttcaggttagcagacgatgc

SEQ ID NO: 309295 - DNA, 25 bp, Homo sapien
ggttctaggagagcgcacagctgac

SEQ ID NO: 309296 - DNA, 25 bp, Homo sapien
tggtgagctcggtctgcatggcctc

SEQ ID NO: 309297 - DNA, 25 bp, Homo sapien
tccttgaagccgctctgcagctcgg

SEQ ID NO: 309298 - DNA, 25 bp, Homo sapien
gcatggcctccagggtttgcacgcg

SEQ ID NO: 309299 - DNA, 25 bp, Homo sapien
tgcagctccgactgcaacggactgg

SEQ ID NO: 309300 - DNA, 25 bp, Homo sapien
gactgcaacggactggctatctcca

SEQ ID NO: 309301 - DNA, 25 bp, Homo sapien
caacggactggctatctccatgttc

SEQ ID NO: 309302 - DNA, 25 bp, Homo sapien
gctccgactgcaacggactggctat

SEQ ID NO: 309303 - DNA, 25 bp, Homo sapien
tgctacaggtgtcccaggtattggt

SEQ ID NO: 309304 - DNA, 25 bp, Homo sapien
ggtctccctgcagactctgagtctc

SEQ ID NO: 309305 - DNA, 25 bp, Homo sapien
tgtcccaggtattggtctccctgca

SEQ ID NO: 309306 - DNA, 25 bp, Homo sapien
aggtattggtctccctgcagactct

SEQ ID NO: 309307 - DNA, 25 bp, Homo sapien
gtactgacatacctgctagcgtgtg

SEQ ID NO: 309308 - DNA, 25 bp, Homo sapien
tcgtggtgagctgacacatccaggt

SEQ ID NO: 309309 - DNA, 25 bp, Homo sapien
aaagggccacgccattactagggtg

SEQ ID NO: 309310 - DNA, 25 bp, Homo sapien
cagctgccagctgatagatcgagtc

SEQ ID NO: 309311 - DNA, 25 bp, Homo sapien
gtttctattgatggcacgcagacgc

SEQ ID NO: 309312 - DNA, 25 bp, Homo sapien
tggaaataggcctctggtcaccctc

SEQ ID NO: 309313 - DNA, 25 bp, Homo sapien
cacgaggatctgtgctatgggccct

SEQ ID NO: 309314 - DNA, 25 bp, Homo sapien
tgacatcgggcagtggacaggttac

SEQ ID NO: 309315 - DNA, 25 bp, Homo sapien
tgaaaccaggctggacaacacagca

SEQ ID NO: 309316 - DNA, 25 bp, Homo sapien
aaagaaaaaattcagccgggtgcag

SEQ ID NO: 309317 - DNA, 25 bp, Homo sapien
ctagcaccttaggaggctggggcgg

SEQ ID NO: 309318 - DNA, 25 bp, Homo sapien
tcctagcaccttaggaggctggggc

SEQ ID NO: 309319 - DNA, 25 bp, Homo sapien
gaacctttgatttcaacactgaggg

SEQ ID NO: 309320 - DNA, 25 bp, Homo sapien
tcagggctgccagaatcagcggatg

SEQ ID NO: 309321 - DNA, 25 bp, Homo sapien
tctacatagtaaggtgactgccaaa

SEQ ID NO: 309322 - DNA, 25 bp, Homo sapien
acttaagcttctgccctgccaaggg

SEQ ID NO: 309323 - DNA, 25 bp, Homo sapien
gaggaagacgtatcgcttgagctca

SEQ ID NO: 309324 - DNA, 25 bp, Homo sapien
gctgaggaagacgtatcgcttgagc

SEQ ID NO: 309325 - DNA, 25 bp, Homo sapien
ggcagcctgtgtttaccttcctgtt

SEQ ID NO: 309326 - DNA, 25 bp, Homo sapien
tggtcattgtaaggtgcaccctggg

SEQ ID NO: 309327 - DNA, 25 bp, Homo sapien
tgtggatgccaaaccaaccctggtt

SEQ ID NO: 309328 - DNA, 25 bp, Homo sapien
aatagtggcagcctgtgtttacctt

SEQ ID NO: 309329 - DNA, 25 bp, Homo sapien
tagtccacagaggtagtaagtatct

SEQ ID NO: 309330 - DNA, 25 bp, Homo sapien
gaatcgtattagttgaagagaccac

SEQ ID NO: 309331 - DNA, 25 bp, Homo sapien
gtaagtatcttttgacaggtcacat

SEQ ID NO: 309332 - DNA, 25 bp, Homo sapien
tacattgggtatgtatagtccacag

SEQ ID NO: 309333 - DNA, 25 bp, Homo sapien
cctggccgacccttctgtcttaaca

SEQ ID NO: 309334 - DNA, 25 bp, Homo sapien
ccacacctggccgacccttctgtct

SEQ ID NO: 309335 - DNA, 25 bp, Homo sapien
acacctggccgacccttctgtctta

SEQ ID NO: 309336 - DNA, 25 bp, Homo sapien
ggccgacccttctgtcttaacagga

SEQ ID NO: 309337 - DNA, 25 bp, Homo sapien
gtttcccaggctgtagcgcaatggc

SEQ ID NO: 309338 - DNA, 25 bp, Homo sapien
tcaggcttgtctcaaactcctgacc

SEQ ID NO: 309339 - DNA, 25 bp, Homo sapien
tcccaggctgtagcgcaatggcgcg

SEQ ID NO: 309340 - DNA, 25 bp, Homo sapien
gtcaggcttgtctcaaactcctgac

SEQ ID NO: 309341 - DNA, 25 bp, Homo sapien
cttctggtagcgatcaaactggaca

SEQ ID NO: 309342 - DNA, 25 bp, Homo sapien
tggacaagtagatcaccgacctgaa

SEQ ID NO: 309343 - DNA, 25 bp, Homo sapien
caaagagttggtgtcgttccagcag

SEQ ID NO: 309344 - DNA, 25 bp, Homo sapien
caaatcatatccaaccaaggatggg

SEQ ID NO: 309345 - DNA, 25 bp, Homo sapien
ctagactgtgggctccatgtgggca

SEQ ID NO: 309346 - DNA, 25 bp, Homo sapien
gcagacttcctgaaccacgctggta

SEQ ID NO: 309347 - DNA, 25 bp, Homo sapien
ttgcccactggactgctagactgtg

SEQ ID NO: 309348 - DNA, 25 bp, Homo sapien
tgatggtaagtgcacagcaactggt

SEQ ID NO: 309349 - DNA, 25 bp, Homo sapien
gataaagttgccgagtagtctacgc

SEQ ID NO: 309350 - DNA, 25 bp, Homo sapien
cttttgtcgctttggccagggaggc

SEQ ID NO: 309351 - DNA, 25 bp, Homo sapien
gctgtcgcgtcagcgtgggctctcc

SEQ ID NO: 309352 - DNA, 25 bp, Homo sapien
gaccccgcctgttggagccggcttg

SEQ ID NO: 309353 - DNA, 25 bp, Homo sapien
tcctcacgcgagccggggagcgttc

SEQ ID NO: 309354 - DNA, 25 bp, Homo sapien
gccagtgcccgtggcttgggaggcg

SEQ ID NO: 309355 - DNA, 25 bp, Homo sapien
cggcctgtgacacgtcgcactgtgg

SEQ ID NO: 309356 - DNA, 25 bp, Homo sapien
cgcggcctgtgacacgtcgcactgt

SEQ ID NO: 309357 - DNA, 25 bp, Homo sapien
cccagcaagcaggacatcttgacca

SEQ ID NO: 309358 - DNA, 25 bp, Homo sapien
atcttcaagcgcctccgctcggtgc

SEQ ID NO: 309359 - DNA, 25 bp, Homo sapien
ccactaacaaggtagcggccgcggg

SEQ ID NO: 309360 - DNA, 25 bp, Homo sapien
cgccgcggctcacagctgacgatgg

SEQ ID NO: 309361 - DNA, 25 bp, Homo sapien
aggaaagagacatgctgagcaaagg

SEQ ID NO: 309362 - DNA, 25 bp, Homo sapien
ttataatcatagcagaaggggcagc

SEQ ID NO: 309363 - DNA, 25 bp, Homo sapien
cagcaggaaagagacatgctgagca

SEQ ID NO: 309364 - DNA, 25 bp, Homo sapien
ggcagcaggaaagagacatgctgag

SEQ ID NO: 309365 - DNA, 25 bp, Homo sapien
aaagtgcccgcgtctttgcagtagt

SEQ ID NO: 309366 - DNA, 25 bp, Homo sapien
tcctggctccgtagcagaacactgt

SEQ ID NO: 309367 - DNA, 25 bp, Homo sapien
tggcattcaggcacacgtctggctg

SEQ ID NO: 309368 - DNA, 25 bp, Homo sapien
ggtcttacccgcagcacgagtgtct

SEQ ID NO: 309369 - DNA, 25 bp, Homo sapien
actggtctggcagaagcggcacgac

SEQ ID NO: 309370 - DNA, 25 bp, Homo sapien
tgcaaaattagctcccagccagtgt

SEQ ID NO: 309371 - DNA, 25 bp, Homo sapien
tctgggttagatctgcaggcgcact

SEQ ID NO: 309372 - DNA, 25 bp, Homo sapien
tgagagcacagcaaccaatgaaggc

SEQ ID NO: 309373 - DNA, 25 bp, Homo sapien
ttcaatcctgcctattgggtttgac

SEQ ID NO: 309374 - DNA, 25 bp, Homo sapien
tataatttctaactccttttcaatc

SEQ ID NO: 309375 - DNA, 25 bp, Homo sapien
ttgggtttgacagtaattttgtaga

SEQ ID NO: 309376 - DNA, 25 bp, Homo sapien
actccttttcaatcctgcctattgg

SEQ ID NO: 309377 - DNA, 25 bp, Homo sapien
tgcgggcatgcacagactcttctag

SEQ ID NO: 309378 - DNA, 25 bp, Homo sapien
ggatcttcagcacttcaggacaggt

SEQ ID NO: 309379 - DNA, 25 bp, Homo sapien
cagggacaatttagggcatcgacgc

SEQ ID NO: 309380 - DNA, 25 bp, Homo sapien
acctgttgcctaggagtggtccgca

SEQ ID NO: 309381 - DNA, 25 bp, Homo sapien
gcagtaaattcagtgaatcctgatt

SEQ ID NO: 309382 - DNA, 25 bp, Homo sapien
ggtggtctcagtgggcagccctccc

SEQ ID NO: 309383 - DNA, 25 bp, Homo sapien
ccatcatgtgggtctaagctttcat

SEQ ID NO: 309384 - DNA, 25 bp, Homo sapien
agtgctcccctcacggtgggccagg

SEQ ID NO: 309385 - DNA, 25 bp, Homo sapien
caggacagcacataccctctgagac

SEQ ID NO: 309386 - DNA, 25 bp, Homo sapien
taagtcaaggacgtggattactgtc

SEQ ID NO: 309387 - DNA, 25 bp, Homo sapien
tcaggtgactgcttagtggctctca

SEQ ID NO: 309388 - DNA, 25 bp, Homo sapien
gccgcagctggcatatgtaagatcc

SEQ ID NO: 309389 - DNA, 25 bp, Homo sapien
tactccatgggtgttcgctgagaac

SEQ ID NO: 309390 - DNA, 25 bp, Homo sapien
gaaggccgcctcttgttttactcca

SEQ ID NO: 309391 - DNA, 25 bp, Homo sapien
cccagaggtggagcatcttgttgcc

SEQ ID NO: 309392 - DNA, 25 bp, Homo sapien
tcttgttgccactgagtaccctgag

SEQ ID NO: 309393 - DNA, 25 bp, Homo sapien
tcagggtcatccttggcaaccggtc

SEQ ID NO: 309394 - DNA, 25 bp, Homo sapien
cggtcctagaagtttacaggcttgg

SEQ ID NO: 309395 - DNA, 25 bp, Homo sapien
ttctgtttgtgacttgctggcgccc

SEQ ID NO: 309396 - DNA, 25 bp, Homo sapien
aactttgttggcatatggtggggac

SEQ ID NO: 309397 - DNA, 25 bp, Homo sapien
agagttgcctcatccttgtctgcca

SEQ ID NO: 309398 - DNA, 25 bp, Homo sapien
tgcagacttggaattaaggaatccc

SEQ ID NO: 309399 - DNA, 25 bp, Homo sapien
agcattttgcccgtctcgttgccaa

SEQ ID NO: 309400 - DNA, 25 bp, Homo sapien
gaggagatgctagagcttcttggca

SEQ ID NO: 309401 - DNA, 25 bp, Homo sapien
gtttctgcagccacacgcgggagca

SEQ ID NO: 309402 - DNA, 25 bp, Homo sapien
cgtttctgcagccacacgcgggagc

SEQ ID NO: 309403 - DNA, 25 bp, Homo sapien
tttctgcagccacacgcgggagcat

SEQ ID NO: 309404 - DNA, 25 bp, Homo sapien
ttgtcctcttggagctcacaggcca

SEQ ID NO: 309405 - DNA, 25 bp, Homo sapien
ccccttggtcagtcagtcaggctca

SEQ ID NO: 309406 - DNA, 25 bp, Homo sapien
gcagcacaagacagttccacaagtg

SEQ ID NO: 309407 - DNA, 25 bp, Homo sapien
gcttggacgcttatgaaaacagacg

SEQ ID NO: 309408 - DNA, 25 bp, Homo sapien
aataaggtagacactaggcaggtca

SEQ ID NO: 309409 - DNA, 25 bp, Homo sapien
gcaggtcatcatgccaggtgccgta

SEQ ID NO: 309410 - DNA, 25 bp, Homo sapien
ccgtaggatttgctaggtttgccca

SEQ ID NO: 309411 - DNA, 25 bp, Homo sapien
cttgctggacgaatgaaggaaccca

SEQ ID NO: 309412 - DNA, 25 bp, Homo sapien
caaccctgagcttggcgttcctacc

SEQ ID NO: 309413 - DNA, 25 bp, Homo sapien
ttcctaccctgccaaggcctgtctc

SEQ ID NO: 309414 - DNA, 25 bp, Homo sapien
tccagcactggcgtttttaggtggt

SEQ ID NO: 309415 - DNA, 25 bp, Homo sapien
ttttcttctcctggtgcacacctgg

SEQ ID NO: 309416 - DNA, 25 bp, Homo sapien
tgcctccacagcaactgaagtcttg

SEQ ID NO: 309417 - DNA, 25 bp, Homo sapien
tcagcacgtgaagagacagtgaatc

SEQ ID NO: 309418 - DNA, 25 bp, Homo sapien
tacagcactctcagattcagcacgt

SEQ ID NO: 309419 - DNA, 25 bp, Homo sapien
ggacttcagaggcagcgacattttt

SEQ ID NO: 309420 - DNA, 25 bp, Homo sapien
caattggaaagatgtccccagctgt

SEQ ID NO: 309421 - DNA, 25 bp, Homo sapien
tgccttgtccgagttgaagtagacc

SEQ ID NO: 309422 - DNA, 25 bp, Homo sapien
tctggagcagacgtcacacaattgg

SEQ ID NO: 309423 - DNA, 25 bp, Homo sapien
ccagctgtgtgattagtatgacatc

SEQ ID NO: 309424 - DNA, 25 bp, Homo sapien
gaacgtgggtatccatgtacttctt

SEQ ID NO: 309425 - DNA, 25 bp, Homo sapien
tcccttgtttatgtggtgtgaacgt

SEQ ID NO: 309426 - DNA, 25 bp, Homo sapien
gacaggagggtccagagaaggtctg

SEQ ID NO: 309427 - DNA, 25 bp, Homo sapien
tgtgctaggctctgcgtgagacacg

SEQ ID NO: 309428 - DNA, 25 bp, Homo sapien
gggtaacgtggccagtaagacttga

SEQ ID NO: 309429 - DNA, 25 bp, Homo sapien
aacgtggccagtaagacttgatggc

SEQ ID NO: 309430 - DNA, 25 bp, Homo sapien
ctgggtaacgtggccagtaagactt

SEQ ID NO: 309431 - DNA, 25 bp, Homo sapien
taacgtggccagtaagacttgatgg

SEQ ID NO: 309432 - DNA, 25 bp, Homo sapien
agcaagcggtctgaatgccaccagg

SEQ ID NO: 309433 - DNA, 25 bp, Homo sapien
tcagctggagcaagcggtctgaatg

SEQ ID NO: 309434 - DNA, 25 bp, Homo sapien
agcggtctgaatgccaccaggatgg

SEQ ID NO: 309435 - DNA, 25 bp, Homo sapien
tggagcaagcggtctgaatgccacc

SEQ ID NO: 309436 - DNA, 25 bp, Homo sapien
attcccagggtgcttgccaaccaga

SEQ ID NO: 309437 - DNA, 25 bp, Homo sapien
cagactgtaaaagccagagcgggca

SEQ ID NO: 309438 - DNA, 25 bp, Homo sapien
taatgacctttcgttcaccctgaga

SEQ ID NO: 309439 - DNA, 25 bp, Homo sapien
taaaaatcagtccaaggcaagtctg

SEQ ID NO: 309440 - DNA, 25 bp, Homo sapien
attgtcttttatacagctaatgcta

SEQ ID NO: 309441 - DNA, 25 bp, Homo sapien
tttaaatcctgcaaatttgccattg

SEQ ID NO: 309442 - DNA, 25 bp, Homo sapien
cagctaatgctatttagatttatcc

SEQ ID NO: 309443 - DNA, 25 bp, Homo sapien
ccttcttgtgcttcagggctttcca

SEQ ID NO: 309444 - DNA, 25 bp, Homo sapien
aaaacacaatgactgccgcgggctg

SEQ ID NO: 309445 - DNA, 25 bp, Homo sapien
aacacaatgactgccgcgggctggg

SEQ ID NO: 309446 - DNA, 25 bp, Homo sapien
tgtaaaacacaatgactgccgcggg

SEQ ID NO: 309447 - DNA, 25 bp, Homo sapien
gaaagggttgggaatagagggatga

SEQ ID NO: 309448 - DNA, 25 bp, Homo sapien
gcactatcaagcccagcttaaaaat

SEQ ID NO: 309449 - DNA, 25 bp, Homo sapien
cactatcaagcccagcttaaaaatt

SEQ ID NO: 309450 - DNA, 25 bp, Homo sapien
tgcactatcaagcccagcttaaaaa

SEQ ID NO: 309451 - DNA, 25 bp, Homo sapien
gtgcactatcaagcccagcttaaaa

SEQ ID NO: 309452 - DNA, 25 bp, Homo sapien
tgagcataatcagttccttggaaga

SEQ ID NO: 309453 - DNA, 25 bp, Homo sapien
tggagtgacctcatagactcatagg

SEQ ID NO: 309454 - DNA, 25 bp, Homo sapien
catagactcataggaaacctgaaaa

SEQ ID NO: 309455 - DNA, 25 bp, Homo sapien
agacattgggtggagtgacctcata

SEQ ID NO: 309456 - DNA, 25 bp, Homo sapien
tttgaagtttctatgtctcagccag

SEQ ID NO: 309457 - DNA, 25 bp, Homo sapien
gatgaaccatcattgggccttgggc

SEQ ID NO: 309458 - DNA, 25 bp, Homo sapien
tgggcagtggtatggacatttgaat

SEQ ID NO: 309459 - DNA, 25 bp, Homo sapien
cagtacaggtgctggctgtttctcc

SEQ ID NO: 309460 - DNA, 25 bp, Homo sapien
ggtgaagccaagtggccggtggctc

SEQ ID NO: 309461 - DNA, 25 bp, Homo sapien
ccaagtggccggtggctctatagtg

SEQ ID NO: 309462 - DNA, 25 bp, Homo sapien
agaagacctcgatgtttctttgtgt

SEQ ID NO: 309463 - DNA, 25 bp, Homo sapien
gggcattggcccaatcaagaagacc

SEQ ID NO: 309464 - DNA, 25 bp, Homo sapien
gactgggcgatgcccgctggattcc

SEQ ID NO: 309465 - DNA, 25 bp, Homo sapien
ctctatcattggatagggctgggaa

SEQ ID NO: 309466 - DNA, 25 bp, Homo sapien
gatgcccgctggattcccgcacagt

SEQ ID NO: 309467 - DNA, 25 bp, Homo sapien
agcaggagctctatcattggatagg

SEQ ID NO: 309468 - DNA, 25 bp, Homo sapien
tatgaatacactgttaagccatcat

SEQ ID NO: 309469 - DNA, 25 bp, Homo sapien
taagttttggcatatgaatacactg

SEQ ID NO: 309470 - DNA, 25 bp, Homo sapien
agttataatgaacaggcgataagtt

SEQ ID NO: 309471 - DNA, 25 bp, Homo sapien
caggcgataagttttggcatatgaa

SEQ ID NO: 309472 - DNA, 25 bp, Homo sapien
ccaggtcggatgtggagatgaaccc

SEQ ID NO: 309473 - DNA, 25 bp, Homo sapien
tcttcagctgcataggagtgcttca

SEQ ID NO: 309474 - DNA, 25 bp, Homo sapien
gatgaacccggagagtgtccttcgg

SEQ ID NO: 309475 - DNA, 25 bp, Homo sapien
tacatcgtggtcttcttgagagctc

SEQ ID NO: 309476 - DNA, 25 bp, Homo sapien
caggcttggtcagcacgttgatgga

SEQ ID NO: 309477 - DNA, 25 bp, Homo sapien
aacatttctgagtggtacaggtggc

SEQ ID NO: 309478 - DNA, 25 bp, Homo sapien
caaacagccagaggccgtcctggga

SEQ ID NO: 309479 - DNA, 25 bp, Homo sapien
tacaggtggcaatagatattccttc

SEQ ID NO: 309480 - DNA, 25 bp, Homo sapien
tataaggcccaaagagttcaggcaa

SEQ ID NO: 309481 - DNA, 25 bp, Homo sapien
gctgccaggacagaaggtataaggc

SEQ ID NO: 309482 - DNA, 25 bp, Homo sapien
tgatgtcaagctgctaggtgcaaga

SEQ ID NO: 309483 - DNA, 25 bp, Homo sapien
ggaaaaataccctgataagctgcca

SEQ ID NO: 309484 - DNA, 25 bp, Homo sapien
tagtgagggcctggtgacaaccttc

SEQ ID NO: 309485 - DNA, 25 bp, Homo sapien
tttgcacacgggctgctccccgggt

SEQ ID NO: 309486 - DNA, 25 bp, Homo sapien
ctccccgggtattagtgagggcctg

SEQ ID NO: 309487 - DNA, 25 bp, Homo sapien
acacgggctgctccccgggtattag

SEQ ID NO: 309488 - DNA, 25 bp, Homo sapien
tgccattgtggctcaacttcctggg

SEQ ID NO: 309489 - DNA, 25 bp, Homo sapien
acctggaagtgagtcccacctggac

SEQ ID NO: 309490 - DNA, 25 bp, Homo sapien
gcccctgctgaagccctattttgaa

SEQ ID NO: 309491 - DNA, 25 bp, Homo sapien
tcgtcctgccacgagagaggaatgt

SEQ ID NO: 309492 - DNA, 25 bp, Homo sapien
tggagtcattgccatatttgacctg

SEQ ID NO: 309493 - DNA, 25 bp, Homo sapien
ctcatgcatgttgcctttggagtca

SEQ ID NO: 309494 - DNA, 25 bp, Homo sapien
gccatatttgacctggtgacctgta

SEQ ID NO: 309495 - DNA, 25 bp, Homo sapien
ctggtgacctgtataaaatgtcagc

SEQ ID NO: 309496 - DNA, 25 bp, Homo sapien
acaccgacggatgtgctttaactgg

SEQ ID NO: 309497 - DNA, 25 bp, Homo sapien
tacaaccgagggtcctagtcaggat

SEQ ID NO: 309498 - DNA, 25 bp, Homo sapien
gtcctagtcaggatggccagcgcag

SEQ ID NO: 309499 - DNA, 25 bp, Homo sapien
aactggggaaagatgctttccacac

SEQ ID NO: 309500 - DNA, 25 bp, Homo sapien
gccacgtcatctgagcggcgccgcc

SEQ ID NO: 309501 - DNA, 25 bp, Homo sapien
gcccgtccatgccaggtgctctgcg

SEQ ID NO: 309502 - DNA, 25 bp, Homo sapien
ttaggcattcagctgatcaaagaac

SEQ ID NO: 309503 - DNA, 25 bp, Homo sapien
cagcagtagcagttggtgctgactg

SEQ ID NO: 309504 - DNA, 25 bp, Homo sapien
caagcctctgatgagtgagacgcag

SEQ ID NO: 309505 - DNA, 25 bp, Homo sapien
tgatgacagtctcacgccaacagag

SEQ ID NO: 309506 - DNA, 25 bp, Homo sapien
gaggttaatagtctggcacccggat

SEQ ID NO: 309507 - DNA, 25 bp, Homo sapien
gaggaaagtgcccaatctctgagct

SEQ ID NO: 309508 - DNA, 25 bp, Homo sapien
tcctgcgagcgccggagaggggctg

SEQ ID NO: 309509 - DNA, 25 bp, Homo sapien
tgcgagcgccggagaggggctggag

SEQ ID NO: 309510 - DNA, 25 bp, Homo sapien
ctgcgagcgccggagaggggctgga

SEQ ID NO: 309511 - DNA, 25 bp, Homo sapien
cctgcgagcgccggagaggggctgg

SEQ ID NO: 309512 - DNA, 25 bp, Homo sapien
tgaatctttgtctttcttagcgact

SEQ ID NO: 309513 - DNA, 25 bp, Homo sapien
ctgcccccagatttgttcactgaat

SEQ ID NO: 309514 - DNA, 25 bp, Homo sapien
cccagatttgttcactgaatctttg

SEQ ID NO: 309515 - DNA, 25 bp, Homo sapien
ttcttagcgactttccggtgtcttc

SEQ ID NO: 309516 - DNA, 25 bp, Homo sapien
taggtaggtttgtcaaacacgactc

SEQ ID NO: 309517 - DNA, 25 bp, Homo sapien
ggtaggtttgtcaaacacgactcag

SEQ ID NO: 309518 - DNA, 25 bp, Homo sapien
ggtttgtcaaacacgactcagttat

SEQ ID NO: 309519 - DNA, 25 bp, Homo sapien
taggtttgtcaaacacgactcagtt

SEQ ID NO: 309520 - DNA, 25 bp, Homo sapien
cagcagggcttataagtttatggtt

SEQ ID NO: 309521 - DNA, 25 bp, Homo sapien
tggacctgttcatgtatcatcacca

SEQ ID NO: 309522 - DNA, 25 bp, Homo sapien
tatcatcaccagcagctataacatc

SEQ ID NO: 309523 - DNA, 25 bp, Homo sapien
gcagctataacatctccacccttgg

SEQ ID NO: 309524 - DNA, 25 bp, Homo sapien
tttttctgagacatattctcaccct

SEQ ID NO: 309525 - DNA, 25 bp, Homo sapien
ttttctgagacatattctcaccctg

SEQ ID NO: 309526 - DNA, 25 bp, Homo sapien
ggcttcgtgtctgcggcccggctgc

SEQ ID NO: 309527 - DNA, 25 bp, Homo sapien
tgccggcgcgggacctaataggccc

SEQ ID NO: 309528 - DNA, 25 bp, Homo sapien
tgctggcagcgtctgtaagccaccc

SEQ ID NO: 309529 - DNA, 25 bp, Homo sapien
cccggactggggtctgaatggcatt

SEQ ID NO: 309530 - DNA, 25 bp, Homo sapien
gcggcagcagggtcgggggcactca

SEQ ID NO: 309531 - DNA, 25 bp, Homo sapien
cgggcggcagcagggtcgggggcac

SEQ ID NO: 309532 - DNA, 25 bp, Homo sapien
cgccgggctcgagctgggcggagca

SEQ ID NO: 309533 - DNA, 25 bp, Homo sapien
agcagcgggcggcagcagggtcggg

SEQ ID NO: 309534 - DNA, 25 bp, Homo sapien
ggctgacaccaatgctccctgggaa

SEQ ID NO: 309535 - DNA, 25 bp, Homo sapien
cgacttgctggagcggtaaaacctg

SEQ ID NO: 309536 - DNA, 25 bp, Homo sapien
aagcgatcgcatttaggaggccaga

SEQ ID NO: 309537 - DNA, 25 bp, Homo sapien
gatgttaagaacttcccggcgctag

SEQ ID NO: 309538 - DNA, 25 bp, Homo sapien
gtccgagctcggatttatcttcatg

SEQ ID NO: 309539 - DNA, 25 bp, Homo sapien
tccgagctcggatttatcttcatga

SEQ ID NO: 309540 - DNA, 25 bp, Homo sapien
ccgagctcggatttatcttcatgat

SEQ ID NO: 309541 - DNA, 25 bp, Homo sapien
ggtccgagctcggatttatcttcat

SEQ ID NO: 309542 - DNA, 25 bp, Homo sapien
gtgtctgccccagccagtcgggaac

SEQ ID NO: 309543 - DNA, 25 bp, Homo sapien
gtctgccccagccagtcgggaacct

SEQ ID NO: 309544 - DNA, 25 bp, Homo sapien
gccccagccagtcgggaacctgcat

SEQ ID NO: 309545 - DNA, 25 bp, Homo sapien
tctgccccagccagtcgggaacctg

SEQ ID NO: 309546 - DNA, 25 bp, Homo sapien
agctcaggacgccacggtggactga

SEQ ID NO: 309547 - DNA, 25 bp, Homo sapien
tgcctttctggagggtagtgtgacc

SEQ ID NO: 309548 - DNA, 25 bp, Homo sapien
cggtggactgaacatgttgctgcct

SEQ ID NO: 309549 - DNA, 25 bp, Homo sapien
tggagggtagtgtgaccatcagcat

SEQ ID NO: 309550 - DNA, 25 bp, Homo sapien
atgacctcgcccagtcctgtcaaag

SEQ ID NO: 309551 - DNA, 25 bp, Homo sapien
acaggcaggcaaaccgagagggtca

SEQ ID NO: 309552 - DNA, 25 bp, Homo sapien
ccaagcaggcgggatctgacacttc

SEQ ID NO: 309553 - DNA, 25 bp, Homo sapien
tcagactctcatgacctcgcccagt

SEQ ID NO: 309554 - DNA, 25 bp, Homo sapien
tcttcaaatgtgcagagctcaccag

SEQ ID NO: 309555 - DNA, 25 bp, Homo sapien
ccagggtaactcgacaggtatgtac

SEQ ID NO: 309556 - DNA, 25 bp, Homo sapien
gaaatgatccggcacagagtaaacc

SEQ ID NO: 309557 - DNA, 25 bp, Homo sapien
tatgaggctggcctattcgggcatc

SEQ ID NO: 309558 - DNA, 25 bp, Homo sapien
tccatcaagatgtctctggagaggg

SEQ ID NO: 309559 - DNA, 25 bp, Homo sapien
tcagagtcagtcatgccaagaacct

SEQ ID NO: 309560 - DNA, 25 bp, Homo sapien
gagctgctcatacaggagggtctcc

SEQ ID NO: 309561 - DNA, 25 bp, Homo sapien
gaagtcctccatagggtccaggtcc

SEQ ID NO: 309562 - DNA, 25 bp, Homo sapien
gaaatggtggacaaggggaacaggc

SEQ ID NO: 309563 - DNA, 25 bp, Homo sapien
aatggtggacaaggggaacaggcag

SEQ ID NO: 309564 - DNA, 25 bp, Homo sapien
gtggaaatggtggacaaggggaaca

SEQ ID NO: 309565 - DNA, 25 bp, Homo sapien
tggaaatggtggacaaggggaacag

SEQ ID NO: 309566 - DNA, 25 bp, Homo sapien
tccatctcgtccccgatgcaggcca

SEQ ID NO: 309567 - DNA, 25 bp, Homo sapien
cgtccatctcgtccccgatgcaggc

SEQ ID NO: 309568 - DNA, 25 bp, Homo sapien
acgtccatctcgtccccgatgcagg

SEQ ID NO: 309569 - DNA, 25 bp, Homo sapien
ggccagccgcagggccaatgcgtca

SEQ ID NO: 309570 - DNA, 25 bp, Homo sapien
tcagtctggtcgtagatgaaagcca

SEQ ID NO: 309571 - DNA, 25 bp, Homo sapien
gggatctccagaacctcattatgtt

SEQ ID NO: 309572 - DNA, 25 bp, Homo sapien
aaacttctaagaacatccctgatgt

SEQ ID NO: 309573 - DNA, 25 bp, Homo sapien
tccttaagtgtggtgaaaccgtcca

SEQ ID NO: 309574 - DNA, 25 bp, Homo sapien
caggtgacacagatgatgatacgga

SEQ ID NO: 309575 - DNA, 25 bp, Homo sapien
gcactggtttgtgcactcagaacca

SEQ ID NO: 309576 - DNA, 25 bp, Homo sapien
gcatctcaaacccaaaagcccatgg

SEQ ID NO: 309577 - DNA, 25 bp, Homo sapien
gcgccccaaggagcggctctgacag

SEQ ID NO: 309578 - DNA, 25 bp, Homo sapien
ccagcagcacctgttcgcaggacac

SEQ ID NO: 309579 - DNA, 25 bp, Homo sapien
agcgccagcagcacctgttcgcagg

SEQ ID NO: 309580 - DNA, 25 bp, Homo sapien
gccagcagcacctgttcgcaggaca

SEQ ID NO: 309581 - DNA, 25 bp, Homo sapien
gcgccagcagcacctgttcgcagga

SEQ ID NO: 309582 - DNA, 25 bp, Homo sapien
ccagcactatctcggggtttaaata

SEQ ID NO: 309583 - DNA, 25 bp, Homo sapien
gcagtgttccagcactatctcgggg

SEQ ID NO: 309584 - DNA, 25 bp, Homo sapien
gtgttccagcactatctcggggttt

SEQ ID NO: 309585 - DNA, 25 bp, Homo sapien
tgttccagcactatctcggggttta

SEQ ID NO: 309586 - DNA, 25 bp, Homo sapien
gacaattgcagagccataggaattc

SEQ ID NO: 309587 - DNA, 25 bp, Homo sapien
agttaaccggtgacaattgcagagc

SEQ ID NO: 309588 - DNA, 25 bp, Homo sapien
ttgcagagccataggaattcatctt

SEQ ID NO: 309589 - DNA, 25 bp, Homo sapien
ggcacaggccacagttaaccggtga

SEQ ID NO: 309590 - DNA, 25 bp, Homo sapien
ttccagtagattctttgccgagggc

SEQ ID NO: 309591 - DNA, 25 bp, Homo sapien
cgagggcatcacatatcacacaggg

SEQ ID NO: 309592 - DNA, 25 bp, Homo sapien
ccagtagattctttgccgagggcat

SEQ ID NO: 309593 - DNA, 25 bp, Homo sapien
tttgccgagggcatcacatatcaca

SEQ ID NO: 309594 - DNA, 25 bp, Homo sapien
ggaaaccaacattttattgagcact

SEQ ID NO: 309595 - DNA, 25 bp, Homo sapien
acattttattgagcactcctgctcc

SEQ ID NO: 309596 - DNA, 25 bp, Homo sapien
caacattttattgagcactcctgct

SEQ ID NO: 309597 - DNA, 25 bp, Homo sapien
accaacattttattgagcactcctg

SEQ ID NO: 309598 - DNA, 25 bp, Homo sapien
gctctctctgcactacccttgtcct

SEQ ID NO: 309599 - DNA, 25 bp, Homo sapien
tgctctctctgcactacccttgtcc

SEQ ID NO: 309600 - DNA, 25 bp, Homo sapien
tctctgcactacccttgtcctcatg

SEQ ID NO: 309601 - DNA, 25 bp, Homo sapien
tctctctgcactacccttgtcctca

SEQ ID NO: 309602 - DNA, 25 bp, Homo sapien
gcatgtttgaagctccttccctgaa

SEQ ID NO: 309603 - DNA, 25 bp, Homo sapien
gagcatgtttgaagctccttccctg

SEQ ID NO: 309604 - DNA, 25 bp, Homo sapien
tgagcatgtttgaagctccttccct

SEQ ID NO: 309605 - DNA, 25 bp, Homo sapien
agcatgtttgaagctccttccctga

SEQ ID NO: 309606 - DNA, 25 bp, Homo sapien
aggccaaggccctgagcgtcctgct

SEQ ID NO: 309607 - DNA, 25 bp, Homo sapien
ggccaaggccctgagcgtcctgctg

SEQ ID NO: 309608 - DNA, 25 bp, Homo sapien
tgaggccaaggccctgagcgtcctg

SEQ ID NO: 309609 - DNA, 25 bp, Homo sapien
gaggccaaggccctgagcgtcctgc

SEQ ID NO: 309610 - DNA, 25 bp, Homo sapien
ggcgagggcacgctccgggaagggc

SEQ ID NO: 309611 - DNA, 25 bp, Homo sapien
cgagggcacgctccgggaagggcac

SEQ ID NO: 309612 - DNA, 25 bp, Homo sapien
agcggcgagggcacgctccgggaag

SEQ ID NO: 309613 - DNA, 25 bp, Homo sapien
gcccctctcagtcgcccggccccgc

SEQ ID NO: 309614 - DNA, 25 bp, Homo sapien
tggactgttctccactacgaaacgg

SEQ ID NO: 309615 - DNA, 25 bp, Homo sapien
taaacttccccgatctggactgttc

SEQ ID NO: 309616 - DNA, 25 bp, Homo sapien
ggtgtctcggagatcaagagcccga

SEQ ID NO: 309617 - DNA, 25 bp, Homo sapien
ccctcaagggagttccgcctgggat

SEQ ID NO: 309618 - DNA, 25 bp, Homo sapien
cggctcacagtaagacccgtctagg

SEQ ID NO: 309619 - DNA, 25 bp, Homo sapien
ggctgctcggctcacagtaagaccc

SEQ ID NO: 309620 - DNA, 25 bp, Homo sapien
gtaagacccgtctaggctgcaacgc

SEQ ID NO: 309621 - DNA, 25 bp, Homo sapien
gctccggcttctttgcaaggggtag

SEQ ID NO: 309622 - DNA, 25 bp, Homo sapien
ctttctggtagatccagccagacat

SEQ ID NO: 309623 - DNA, 25 bp, Homo sapien
cccgctgtgaatactttctggtaga

SEQ ID NO: 309624 - DNA, 25 bp, Homo sapien
tactttctggtagatccagccagac

SEQ ID NO: 309625 - DNA, 25 bp, Homo sapien
agaacccgctgtgaatactttctgg

SEQ ID NO: 309626 - DNA, 25 bp, Homo sapien
tggaaaaatccacagcgaacctggc

SEQ ID NO: 309627 - DNA, 25 bp, Homo sapien
cacagcgaacctggccatcgagtgg

SEQ ID NO: 309628 - DNA, 25 bp, Homo sapien
gtcctcatcgtaacctttgtgtgca

SEQ ID NO: 309629 - DNA, 25 bp, Homo sapien
attacaaaagtaaccagtgaaacag

SEQ ID NO: 309630 - DNA, 25 bp, Homo sapien
ttgtgcacaggcctctggtaggcag

SEQ ID NO: 309631 - DNA, 25 bp, Homo sapien
tcagctctggttgtgcacaggcctc

SEQ ID NO: 309632 - DNA, 25 bp, Homo sapien
cctgcgtggtggagtccgtgctcat

SEQ ID NO: 309633 - DNA, 25 bp, Homo sapien
ctggttgtgcacaggcctctggtag

SEQ ID NO: 309634 - DNA, 25 bp, Homo sapien
tgctgcagctgctgttcaggggagc

SEQ ID NO: 309635 - DNA, 25 bp, Homo sapien
gctgcagctgctgttcaggggagct

SEQ ID NO: 309636 - DNA, 25 bp, Homo sapien
gctgctgcagctgctgttcagggga

SEQ ID NO: 309637 - DNA, 25 bp, Homo sapien
ggctgctgcagctgctgttcagggg

SEQ ID NO: 309638 - DNA, 25 bp, Homo sapien
agcggagaccctcgccgtggacaaa

SEQ ID NO: 309639 - DNA, 25 bp, Homo sapien
tggacaaagcgggagcccacgaagc

SEQ ID NO: 309640 - DNA, 25 bp, Homo sapien
aggccggcgtaccagcggagaccct

SEQ ID NO: 309641 - DNA, 25 bp, Homo sapien
atggctgagtagagcgtgccccaga

SEQ ID NO: 309642 - DNA, 25 bp, Homo sapien
tttccagaccaggtaggagccgtac

SEQ ID NO: 309643 - DNA, 25 bp, Homo sapien
ccagcccatttgtcgggcaccaaag

SEQ ID NO: 309644 - DNA, 25 bp, Homo sapien
atttgtcgggcaccaaagaagatgg

SEQ ID NO: 309645 - DNA, 25 bp, Homo sapien
ccatttgtcgggcaccaaagaagat

SEQ ID NO: 309646 - DNA, 25 bp, Homo sapien
agcccatttgtcgggcaccaaagaa

SEQ ID NO: 309647 - DNA, 25 bp, Homo sapien
tgccacctgacccatgccttgtgtg

SEQ ID NO: 309648 - DNA, 25 bp, Homo sapien
ggcttaggaggtcttgcacgtccct

SEQ ID NO: 309649 - DNA, 25 bp, Homo sapien
catgacatgcctgaagtgaactcgg

SEQ ID NO: 309650 - DNA, 25 bp, Homo sapien
tccactgagagcgatgctgacctcc

SEQ ID NO: 309651 - DNA, 25 bp, Homo sapien
agccatggttgtcccgccatacgca

SEQ ID NO: 309652 - DNA, 25 bp, Homo sapien
cgccatacgcagtagttgagtgtgg

SEQ ID NO: 309653 - DNA, 25 bp, Homo sapien
actgaccagcaggagatccaccaag

SEQ ID NO: 309654 - DNA, 25 bp, Homo sapien
taccaggccacggtagtggctgccg

SEQ ID NO: 309655 - DNA, 25 bp, Homo sapien
tcacaagcgtgatggcacctgctgg

SEQ ID NO: 309656 - DNA, 25 bp, Homo sapien
ggccaccacatcacaagcgtgatgg

SEQ ID NO: 309657 - DNA, 25 bp, Homo sapien
tcatgaaagcgtgacggccaccaca

SEQ ID NO: 309658 - DNA, 25 bp, Homo sapien
atgaaagcgtgacggccaccacatc

SEQ ID NO: 309659 - DNA, 25 bp, Homo sapien
tctgctgacccctgggccaaggccc

SEQ ID NO: 309660 - DNA, 25 bp, Homo sapien
ccaaggccctgacagactagcaggc

SEQ ID NO: 309661 - DNA, 25 bp, Homo sapien
tataaaattccatgttccaagaaca

SEQ ID NO: 309662 - DNA, 25 bp, Homo sapien
cctgacagactagcaggcccagtgg

SEQ ID NO: 309663 - DNA, 25 bp, Homo sapien
cgtcccaggaagcgtggggcagccc

SEQ ID NO: 309664 - DNA, 25 bp, Homo sapien
gagcgtcccaggaagcgtggggcag

SEQ ID NO: 309665 - DNA, 25 bp, Homo sapien
agcgtcccaggaagcgtggggcagc

SEQ ID NO: 309666 - DNA, 25 bp, Homo sapien
gcgtcccaggaagcgtggggcagcc

SEQ ID NO: 309667 - DNA, 25 bp, Homo sapien
tctgctgaagcccacggccccagct

SEQ ID NO: 309668 - DNA, 25 bp, Homo sapien
cccctccctctgctgaagcccacgg

SEQ ID NO: 309669 - DNA, 25 bp, Homo sapien
ctgaagcccacggccccagctgggt

SEQ ID NO: 309670 - DNA, 25 bp, Homo sapien
tgctgaagcccacggccccagctgg

SEQ ID NO: 309671 - DNA, 25 bp, Homo sapien
cggaagccatgggaagcggacagga

SEQ ID NO: 309672 - DNA, 25 bp, Homo sapien
cccggaagccatgggaagcggacag

SEQ ID NO: 309673 - DNA, 25 bp, Homo sapien
ccggaagccatgggaagcggacagg

SEQ ID NO: 309674 - DNA, 25 bp, Homo sapien
ggaagccatgggaagcggacaggac

SEQ ID NO: 309675 - DNA, 25 bp, Homo sapien
cggccattaaagggcccgggctgag

SEQ ID NO: 309676 - DNA, 25 bp, Homo sapien
caggcgtcgaacagtggttgtgggc

SEQ ID NO: 309677 - DNA, 25 bp, Homo sapien
gcgtcgaacagtggttgtgggcccg

SEQ ID NO: 309678 - DNA, 25 bp, Homo sapien
ccattaaagggcccgggctgagcat

SEQ ID NO: 309679 - DNA, 25 bp, Homo sapien
gctgttgagtgatgacgagctgtct

SEQ ID NO: 309680 - DNA, 25 bp, Homo sapien
gatgacgagctgtctatgaacattt

SEQ ID NO: 309681 - DNA, 25 bp, Homo sapien
tgttgagtgatgacgagctgtctat

SEQ ID NO: 309682 - DNA, 25 bp, Homo sapien
tgagtgatgacgagctgtctatgaa

SEQ ID NO: 309683 - DNA, 25 bp, Homo sapien
tcagttcgtgctgcaataaaggcca

SEQ ID NO: 309684 - DNA, 25 bp, Homo sapien
tccagagccttccagtgcatgggag

SEQ ID NO: 309685 - DNA, 25 bp, Homo sapien
tgtcactgaaaagccccggatacca

SEQ ID NO: 309686 - DNA, 25 bp, Homo sapien
gaaattaggagtcagctgccagcgt

SEQ ID NO: 309687 - DNA, 25 bp, Homo sapien
gttcctggcatggagaatttgttcc

SEQ ID NO: 309688 - DNA, 25 bp, Homo sapien
tctcacctgtgggtcagagcaggac

SEQ ID NO: 309689 - DNA, 25 bp, Homo sapien
gtttgggagccctgtatcacacggg

SEQ ID NO: 309690 - DNA, 25 bp, Homo sapien
gagtctccagtttagccaagggctt

SEQ ID NO: 309691 - DNA, 25 bp, Homo sapien
agcccggtggctgccacgttacctg

SEQ ID NO: 309692 - DNA, 25 bp, Homo sapien
ggtggctgccacgttacctgccttg

SEQ ID NO: 309693 - DNA, 25 bp, Homo sapien
ctgccttgtctaggcactcgctgtc

SEQ ID NO: 309694 - DNA, 25 bp, Homo sapien
tgccacgttacctgccttgtctagg

SEQ ID NO: 309695 - DNA, 25 bp, Homo sapien
gacatgcttctaactggcagaaggc

SEQ ID NO: 309696 - DNA, 25 bp, Homo sapien
tagggaacagacatgcttctaactg

SEQ ID NO: 309697 - DNA, 25 bp, Homo sapien
gggcgcccacatttagggaacagac

SEQ ID NO: 309698 - DNA, 25 bp, Homo sapien
gcttctaactggcagaaggcaaaat

SEQ ID NO: 309699 - DNA, 25 bp, Homo sapien
gagctgaccgatgccgggtgtctta

SEQ ID NO: 309700 - DNA, 25 bp, Homo sapien
agatcagaacctccaacatgccgag

SEQ ID NO: 309701 - DNA, 25 bp, Homo sapien
gagggcactgtattgtccagacgct

SEQ ID NO: 309702 - DNA, 25 bp, Homo sapien
gggtgtcttactccgctgagatcag

SEQ ID NO: 309703 - DNA, 25 bp, Homo sapien
ttcaaaatgggtgcacttcctgtcc

SEQ ID NO: 309704 - DNA, 25 bp, Homo sapien
caagcaccggcaccgtggaagtgtt

SEQ ID NO: 309705 - DNA, 25 bp, Homo sapien
gcttgccgaggtcaccagaagtggt

SEQ ID NO: 309706 - DNA, 25 bp, Homo sapien
gaaaaaagtttcttgagcgctgacc

SEQ ID NO: 309707 - DNA, 25 bp, Homo sapien
gccagtgacactggacagggccctt

SEQ ID NO: 309708 - DNA, 25 bp, Homo sapien
tctggcaggtctgctgagacgtggc

SEQ ID NO: 309709 - DNA, 25 bp, Homo sapien
cccaggacgggctctgcagatgctg

SEQ ID NO: 309710 - DNA, 25 bp, Homo sapien
gcccttcaggtacctggctcagcaa

SEQ ID NO: 309711 - DNA, 25 bp, Homo sapien
gcagctgccccgttggattcacact

SEQ ID NO: 309712 - DNA, 25 bp, Homo sapien
cccagcagagttcgagagaacacag

SEQ ID NO: 309713 - DNA, 25 bp, Homo sapien
gacgtgcgcagtcaataacggaggc

SEQ ID NO: 309714 - DNA, 25 bp, Homo sapien
gacgggaagacatgcaaaggtcagc

SEQ ID NO: 309715 - DNA, 25 bp, Homo sapien
cgcatctcaaccctccaagcctcct

SEQ ID NO: 309716 - DNA, 25 bp, Homo sapien
catctcaaccctccaagcctcctgg

SEQ ID NO: 309717 - DNA, 25 bp, Homo sapien
tccaagcctcctggggcacggccat

SEQ ID NO: 309718 - DNA, 25 bp, Homo sapien
cctccaagcctcctggggcacggcc

SEQ ID NO: 309719 - DNA, 25 bp, Homo sapien
gctgctaacagattcccgcaatctc

SEQ ID NO: 309720 - DNA, 25 bp, Homo sapien
ttaggataggtggagcattccgctc

SEQ ID NO: 309721 - DNA, 25 bp, Homo sapien
gattcccgcaatctcagttgcttaa

SEQ ID NO: 309722 - DNA, 25 bp, Homo sapien
cctctccctggagcatgcttaggat

SEQ ID NO: 309723 - DNA, 25 bp, Homo sapien
tgttcatgctgccaggattgctggc

SEQ ID NO: 309724 - DNA, 25 bp, Homo sapien
catatgttcatgctgccaggattgc

SEQ ID NO: 309725 - DNA, 25 bp, Homo sapien
tatgttcatgctgccaggattgctg

SEQ ID NO: 309726 - DNA, 25 bp, Homo sapien
tcatatgttcatgctgccaggattg

SEQ ID NO: 309727 - DNA, 25 bp, Homo sapien
cactgctcttggacagagctcagcg

SEQ ID NO: 309728 - DNA, 25 bp, Homo sapien
tcggttctgctgttttgctggcctc

SEQ ID NO: 309729 - DNA, 25 bp, Homo sapien
cctagggttgtcacgaccttcttca

SEQ ID NO: 309730 - DNA, 25 bp, Homo sapien
tcctgagcgtagctgtggtcgccta

SEQ ID NO: 309731 - DNA, 25 bp, Homo sapien
cagctcggggccacttctcctctgc

SEQ ID NO: 309732 - DNA, 25 bp, Homo sapien
gcctcttggcatagccaggatgctc

SEQ ID NO: 309733 - DNA, 25 bp, Homo sapien
tcttggcatagccaggatgctccct

SEQ ID NO: 309734 - DNA, 25 bp, Homo sapien
aagcctcttggcatagccaggatgc

SEQ ID NO: 309735 - DNA, 25 bp, Homo sapien
gctgctacttctactcctgtccagg

SEQ ID NO: 309736 - DNA, 25 bp, Homo sapien
tcctgtccaggaagagatgccttca

SEQ ID NO: 309737 - DNA, 25 bp, Homo sapien
cccttgggaacgaatgtctccgcat

SEQ ID NO: 309738 - DNA, 25 bp, Homo sapien
tgccttcgcccactgttcatctgtg

SEQ ID NO: 309739 - DNA, 25 bp, Homo sapien
cctagcagcagggattctgcacgtc

SEQ ID NO: 309740 - DNA, 25 bp, Homo sapien
tttgtgttccctggcgacgcctgac

SEQ ID NO: 309741 - DNA, 25 bp, Homo sapien
gcctgacgtgggctccctagcagca

SEQ ID NO: 309742 - DNA, 25 bp, Homo sapien
gaaaggcaagcccatggcaatggcg

SEQ ID NO: 309743 - DNA, 25 bp, Homo sapien
gctgtagactctccggtattcgaag

SEQ ID NO: 309744 - DNA, 25 bp, Homo sapien
tgtgtacaagctgtagactctccgg

SEQ ID NO: 309745 - DNA, 25 bp, Homo sapien
gactctccggtattcgaaggctcga

SEQ ID NO: 309746 - DNA, 25 bp, Homo sapien
ccggtattcgaaggctcgacctttg

SEQ ID NO: 309747 - DNA, 25 bp, Homo sapien
ggtatggtccaagaggcggaccacc

SEQ ID NO: 309748 - DNA, 25 bp, Homo sapien
tccttctgtcccaggtatggtccaa

SEQ ID NO: 309749 - DNA, 25 bp, Homo sapien
cattcttcaaagtgaaggtgcttcc

SEQ ID NO: 309750 - DNA, 25 bp, Homo sapien
gggacccacgtgtaccagatgtgat

SEQ ID NO: 309751 - DNA, 25 bp, Homo sapien
catatcaagcccacattctaatgca

SEQ ID NO: 309752 - DNA, 25 bp, Homo sapien
gagacaagtgcctcatatcaagccc

SEQ ID NO: 309753 - DNA, 25 bp, Homo sapien
ctggcaagagacaagtgcctcatat

SEQ ID NO: 309754 - DNA, 25 bp, Homo sapien
tatcaagcccacattctaatgcaga

SEQ ID NO: 309755 - DNA, 25 bp, Homo sapien
gctgaactcagaagcttgggagcca

SEQ ID NO: 309756 - DNA, 25 bp, Homo sapien
gagccaggaaaccaagtagaacgat

SEQ ID NO: 309757 - DNA, 25 bp, Homo sapien
gcccacgtgtagtccagcctcttaa

SEQ ID NO: 309758 - DNA, 25 bp, Homo sapien
cagggatacccaaagcgatgtcata

SEQ ID NO: 309759 - DNA, 25 bp, Homo sapien
ggaaggtttctctaccgagagccgc

SEQ ID NO: 309760 - DNA, 25 bp, Homo sapien
gactgaatatgtctcagtagcctgg

SEQ ID NO: 309761 - DNA, 25 bp, Homo sapien
cagaggacctgatgagggactgaat

SEQ ID NO: 309762 - DNA, 25 bp, Homo sapien
gtttctctaccgagagccgcctctg

SEQ ID NO: 309763 - DNA, 25 bp, Homo sapien
gatctcctgtgccggccataggaca

SEQ ID NO: 309764 - DNA, 25 bp, Homo sapien
cattgatctcctgtgccggccatag

SEQ ID NO: 309765 - DNA, 25 bp, Homo sapien
tctcctgtgccggccataggacagc

SEQ ID NO: 309766 - DNA, 25 bp, Homo sapien
ttgatctcctgtgccggccatagga

SEQ ID NO: 309767 - DNA, 25 bp, Homo sapien
tctataagcctttgccaaacaaggg

SEQ ID NO: 309768 - DNA, 25 bp, Homo sapien
ctataagcctttgccaaacaagggc

SEQ ID NO: 309769 - DNA, 25 bp, Homo sapien
tcatctataagcctttgccaaacaa

SEQ ID NO: 309770 - DNA, 25 bp, Homo sapien
agcctttgccaaacaagggcccttg

SEQ ID NO: 309771 - DNA, 25 bp, Homo sapien
aggcaccgtgtagtcgcccactctg

SEQ ID NO: 309772 - DNA, 25 bp, Homo sapien
gaaacgtctgctccctattagccat

SEQ ID NO: 309773 - DNA, 25 bp, Homo sapien
acagtggccagtaacaggcaccgtg

SEQ ID NO: 309774 - DNA, 25 bp, Homo sapien
cccaggaaacgtctgctccctatta

SEQ ID NO: 309775 - DNA, 25 bp, Homo sapien
gggacgtagcatctgaactggcctt

SEQ ID NO: 309776 - DNA, 25 bp, Homo sapien
ccttggatttcgctgggctcttacg

SEQ ID NO: 309777 - DNA, 25 bp, Homo sapien
gagccagggtatgtgcttcgtggag

SEQ ID NO: 309778 - DNA, 25 bp, Homo sapien
ccagtaacagccgtggaaggtcaaa

SEQ ID NO: 309779 - DNA, 25 bp, Homo sapien
tgacggaagcaactattccgatttc

SEQ ID NO: 309780 - DNA, 25 bp, Homo sapien
ttggcaggaaagagtgtgacggaag

SEQ ID NO: 309781 - DNA, 25 bp, Homo sapien
tgtgacggaagcaactattccgatt

SEQ ID NO: 309782 - DNA, 25 bp, Homo sapien
gaaagagtgtgacggaagcaactat

SEQ ID NO: 309783 - DNA, 25 bp, Homo sapien
ccacatcaggcatccgaagcgctgt

SEQ ID NO: 309784 - DNA, 25 bp, Homo sapien
catgtgctgcgaatttcccacatca

SEQ ID NO: 309785 - DNA, 25 bp, Homo sapien
tcaggcatccgaagcgctgtgtttc

SEQ ID NO: 309786 - DNA, 25 bp, Homo sapien
agcgctgtgtttctagcacacgcag

SEQ ID NO: 309787 - DNA, 25 bp, Homo sapien
ttttgggatgctaccaccttggccc

SEQ ID NO: 309788 - DNA, 25 bp, Homo sapien
cactgtctccttccgggttcccagg

SEQ ID NO: 309789 - DNA, 25 bp, Homo sapien
cttttgggatgctaccaccttggcc

SEQ ID NO: 309790 - DNA, 25 bp, Homo sapien
ttgggatgctaccaccttggccccc

SEQ ID NO: 309791 - DNA, 25 bp, Homo sapien
tgttcgtgtgtccacagtgctctta

SEQ ID NO: 309792 - DNA, 25 bp, Homo sapien
tcctgttcgtgtgtccacagtgctc

SEQ ID NO: 309793 - DNA, 25 bp, Homo sapien
atcctcctgttcgtgtgtccacagt

SEQ ID NO: 309794 - DNA, 25 bp, Homo sapien
gttcgtgtgtccacagtgctcttac

SEQ ID NO: 309795 - DNA, 25 bp, Homo sapien
tcctcgaagggccatgagaagtacc

SEQ ID NO: 309796 - DNA, 25 bp, Homo sapien
agggccatgagaagtacccgctgcc

SEQ ID NO: 309797 - DNA, 25 bp, Homo sapien
ccccttttgtcctcgaagggccatg

SEQ ID NO: 309798 - DNA, 25 bp, Homo sapien
cccgagcccatgagccccttttgtc

SEQ ID NO: 309799 - DNA, 25 bp, Homo sapien
ccagccagcttcctcacccctgttg

SEQ ID NO: 309800 - DNA, 25 bp, Homo sapien
tcctcacccctgttgccctgccttc

SEQ ID NO: 309801 - DNA, 25 bp, Homo sapien
agccagcttcctcacccctgttgcc

SEQ ID NO: 309802 - DNA, 25 bp, Homo sapien
ctcacccctgttgccctgccttctt

SEQ ID NO: 309803 - DNA, 25 bp, Homo sapien
ccttgaaccctgtgagctgagtact

SEQ ID NO: 309804 - DNA, 25 bp, Homo sapien
tctgactgcaagcaattccgtggct

SEQ ID NO: 309805 - DNA, 25 bp, Homo sapien
tagccgctcccatgttgcagatgtg

SEQ ID NO: 309806 - DNA, 25 bp, Homo sapien
gattccagcttgttccggttggcca

SEQ ID NO: 309807 - DNA, 25 bp, Homo sapien
gtcttgctctgaagaccacggccgt

SEQ ID NO: 309808 - DNA, 25 bp, Homo sapien
gggcttgctgatagactgcctgaac

SEQ ID NO: 309809 - DNA, 25 bp, Homo sapien
tgcctgaactttagagcagctgccg

SEQ ID NO: 309810 - DNA, 25 bp, Homo sapien
tacacagaccaggtaagagcctgcg

SEQ ID NO: 309811 - DNA, 25 bp, Homo sapien
gacactgctcttattaactgttaca

SEQ ID NO: 309812 - DNA, 25 bp, Homo sapien
aagcaaacgcttttctttcgacact

SEQ ID NO: 309813 - DNA, 25 bp, Homo sapien
cgcttttctttcgacactgctctta

SEQ ID NO: 309814 - DNA, 25 bp, Homo sapien
tttcgacactgctcttattaactgt

SEQ ID NO: 309815 - DNA, 25 bp, Homo sapien
tgtcggcccaagtatggtgagactc

SEQ ID NO: 309816 - DNA, 25 bp, Homo sapien
ggcctgaggttcaacggagatgcct

SEQ ID NO: 309817 - DNA, 25 bp, Homo sapien
cagttgtcggcccaagtatggtgag

SEQ ID NO: 309818 - DNA, 25 bp, Homo sapien
cccaagtatggtgagactcaggcgg

SEQ ID NO: 309819 - DNA, 25 bp, Homo sapien
acttggcatcaagagtgatgttgtc

SEQ ID NO: 309820 - DNA, 25 bp, Homo sapien
gaactgttgctattccgagggtcca

SEQ ID NO: 309821 - DNA, 25 bp, Homo sapien
gacgttcgtgacatggtctcctcct

SEQ ID NO: 309822 - DNA, 25 bp, Homo sapien
aagcctcatcagacgccgcctgtgg

SEQ ID NO: 309823 - DNA, 25 bp, Homo sapien
tgagcagcagagacgttcgtgacat

SEQ ID NO: 309824 - DNA, 25 bp, Homo sapien
gactggccagcggtctgcactgggc

SEQ ID NO: 309825 - DNA, 25 bp, Homo sapien
cactgggcggtagactcccgtcctt

SEQ ID NO: 309826 - DNA, 25 bp, Homo sapien
agcatcacgcagacccctttgagga

SEQ ID NO: 309827 - DNA, 25 bp, Homo sapien
tgaatcttgtactccatctggtatg

SEQ ID NO: 309828 - DNA, 25 bp, Homo sapien
tcaacaggagtgggacttgccctgc

SEQ ID NO: 309829 - DNA, 25 bp, Homo sapien
caacaggagtgggacttgccctgcc

SEQ ID NO: 309830 - DNA, 25 bp, Homo sapien
acaggagtgggacttgccctgccgc

SEQ ID NO: 309831 - DNA, 25 bp, Homo sapien
aggagtgggacttgccctgccgccc

SEQ ID NO: 309832 - DNA, 25 bp, Homo sapien
gcaggatgaactggccagaggacct

SEQ ID NO: 309833 - DNA, 25 bp, Homo sapien
ggatgaactggccagaggacctgtg

SEQ ID NO: 309834 - DNA, 25 bp, Homo sapien
gaactggccagaggacctgtgtcac

SEQ ID NO: 309835 - DNA, 25 bp, Homo sapien
gatgaactggccagaggacctgtgt

SEQ ID NO: 309836 - DNA, 25 bp, Homo sapien
ggtgaggacaggtgtacacatggag

SEQ ID NO: 309837 - DNA, 25 bp, Homo sapien
gtgaggacaggtgtacacatggagg

SEQ ID NO: 309838 - DNA, 25 bp, Homo sapien
tgaggacaggtgtacacatggaggg

SEQ ID NO: 309839 - DNA, 25 bp, Homo sapien
gtggcagtcacccattgaggtttat

SEQ ID NO: 309840 - DNA, 25 bp, Homo sapien
cccattgaggtttatgtgccgcttc

SEQ ID NO: 309841 - DNA, 25 bp, Homo sapien
tgaggtttatgtgccgcttctcctc

SEQ ID NO: 309842 - DNA, 25 bp, Homo sapien
gcttctcctccgtattccggcagga

SEQ ID NO: 309843 - DNA, 25 bp, Homo sapien
tgtcctgatgtccgtgtccagtgtc

SEQ ID NO: 309844 - DNA, 25 bp, Homo sapien
tcctgatgtccgtgtccagtgtcac

SEQ ID NO: 309845 - DNA, 25 bp, Homo sapien
gtcctgatgtccgtgtccagtgtca

SEQ ID NO: 309846 - DNA, 25 bp, Homo sapien
gacaaaatcattcccccatttctca

SEQ ID NO: 309847 - DNA, 25 bp, Homo sapien
tcagccacacgtgcaataattatac

SEQ ID NO: 309848 - DNA, 25 bp, Homo sapien
cacccctccaatagagcaagcgttt

SEQ ID NO: 309849 - DNA, 25 bp, Homo sapien
atttctcacccctccaatagagcaa

SEQ ID NO: 309850 - DNA, 25 bp, Homo sapien
ggtagaagcgctgggaaagtctccc

SEQ ID NO: 309851 - DNA, 25 bp, Homo sapien
ctcggccagcgatggcctgtgactc

SEQ ID NO: 309852 - DNA, 25 bp, Homo sapien
agaagcgctgggaaagtctccctgt

SEQ ID NO: 309853 - DNA, 25 bp, Homo sapien
actccccagtccacttctccgtgcc

SEQ ID NO: 309854 - DNA, 25 bp, Homo sapien
caaaactgatgattgggtttccccg

SEQ ID NO: 309855 - DNA, 25 bp, Homo sapien
tcagagcggttggtggcttcgttca

SEQ ID NO: 309856 - DNA, 25 bp, Homo sapien
ttgaaaacagttgacgggagcagcc

SEQ ID NO: 309857 - DNA, 25 bp, Homo sapien
taagcagggaaaccactgcagtggc

SEQ ID NO: 309858 - DNA, 25 bp, Homo sapien
aaccattagtcctgatgccagagcc

SEQ ID NO: 309859 - DNA, 25 bp, Homo sapien
tcttcatcatatcggtttggtggga

SEQ ID NO: 309860 - DNA, 25 bp, Homo sapien
gcagaactagactcaagcctggcag

SEQ ID NO: 309861 - DNA, 25 bp, Homo sapien
aatgactgcctgtaattggcaggag

SEQ ID NO: 309862 - DNA, 25 bp, Homo sapien
tccaggtttcaacactctcccggtg

SEQ ID NO: 309863 - DNA, 25 bp, Homo sapien
aacattttgatctaagcgggaagac

SEQ ID NO: 309864 - DNA, 25 bp, Homo sapien
ggtttcaacactctcccggtgctca

SEQ ID NO: 309865 - DNA, 25 bp, Homo sapien
aagacgtcgacaggccgacaggttc

SEQ ID NO: 309866 - DNA, 25 bp, Homo sapien
acaccccctgctctgctcccctcca

SEQ ID NO: 309867 - DNA, 25 bp, Homo sapien
cacaccccctgctctgctcccctcc

SEQ ID NO: 309868 - DNA, 25 bp, Homo sapien
caccccctgctctgctcccctccat

SEQ ID NO: 309869 - DNA, 25 bp, Homo sapien
ccacaccccctgctctgctcccctc

SEQ ID NO: 309870 - DNA, 25 bp, Homo sapien
caggaagagtgctggataatgactc

SEQ ID NO: 309871 - DNA, 25 bp, Homo sapien
actgtgttggtcttgggtttagaga

SEQ ID NO: 309872 - DNA, 25 bp, Homo sapien
gataatgactccaaagggtagagga

SEQ ID NO: 309873 - DNA, 25 bp, Homo sapien
tgggtagcatccttgggcagaagcc

SEQ ID NO: 309874 - DNA, 25 bp, Homo sapien
ggggaatccaggcaaatgtctcctc

SEQ ID NO: 309875 - DNA, 25 bp, Homo sapien
ggaatccaggcaaatgtctcctctg

SEQ ID NO: 309876 - DNA, 25 bp, Homo sapien
ttaaggggaatccaggcaaatgtct

SEQ ID NO: 309877 - DNA, 25 bp, Homo sapien
tttctctgttggaccacttgctggg

SEQ ID NO: 309878 - DNA, 25 bp, Homo sapien
aagcgattcttctcaaaccctggca

SEQ ID NO: 309879 - DNA, 25 bp, Homo sapien
gatgaggagtttagaggctccgggt

SEQ ID NO: 309880 - DNA, 25 bp, Homo sapien
tgggttccaaaatgaggagcccctg

SEQ ID NO: 309881 - DNA, 25 bp, Homo sapien
gtgagggtcctaaggcttacttcaa

SEQ ID NO: 309882 - DNA, 25 bp, Homo sapien
atccacaatccattcgtttgttttg

SEQ ID NO: 309883 - DNA, 25 bp, Homo sapien
caaatccacaatccattcgtttgtt

SEQ ID NO: 309884 - DNA, 25 bp, Homo sapien
aaatccacaatccattcgtttgttt

SEQ ID NO: 309885 - DNA, 25 bp, Homo sapien
aatccacaatccattcgtttgtttt

SEQ ID NO: 309886 - DNA, 25 bp, Homo sapien
gcttgacctatcgatgtcagttgca

SEQ ID NO: 309887 - DNA, 25 bp, Homo sapien
gggctgctgggcttgacctatcgat

SEQ ID NO: 309888 - DNA, 25 bp, Homo sapien
cctatcgatgtcagttgcaaatgag

SEQ ID NO: 309889 - DNA, 25 bp, Homo sapien
atctgagacccgtgctccaaaaaag

SEQ ID NO: 309890 - DNA, 25 bp, Homo sapien
catgtcggccacacgagggcagcag

SEQ ID NO: 309891 - DNA, 25 bp, Homo sapien
ccatgtcggccacacgagggcagca

SEQ ID NO: 309892 - DNA, 25 bp, Homo sapien
cgggcttcgcactgaggcttcttcc

SEQ ID NO: 309893 - DNA, 25 bp, Homo sapien
gccatcgccgggcttcgcactgagg

SEQ ID NO: 309894 - DNA, 25 bp, Homo sapien
ccctgcaagagctgcagactctctt

SEQ ID NO: 309895 - DNA, 25 bp, Homo sapien
aggccccctgcaagagctgcagact

SEQ ID NO: 309896 - DNA, 25 bp, Homo sapien
ccccctgcaagagctgcagactctc

SEQ ID NO: 309897 - DNA, 25 bp, Homo sapien
cctgcaagagctgcagactctcttg

SEQ ID NO: 309898 - DNA, 25 bp, Homo sapien
cccttgaagctgtcgacctggagct

SEQ ID NO: 309899 - DNA, 25 bp, Homo sapien
ggccccccttgaagctgtcgacctg

SEQ ID NO: 309900 - DNA, 25 bp, Homo sapien
cccccttgaagctgtcgacctggag

SEQ ID NO: 309901 - DNA, 25 bp, Homo sapien
gccccccttgaagctgtcgacctgg

SEQ ID NO: 309902 - DNA, 25 bp, Homo sapien
caacattctggctcccacgttccag

SEQ ID NO: 309903 - DNA, 25 bp, Homo sapien
aacattctggctcccacgttccagc

SEQ ID NO: 309904 - DNA, 25 bp, Homo sapien
tccttcaattgtctggtggtccatt

SEQ ID NO: 309905 - DNA, 25 bp, Homo sapien
catttaattccttcaattgtctggt

SEQ ID NO: 309906 - DNA, 25 bp, Homo sapien
actgaactacctgatcatttctcac

SEQ ID NO: 309907 - DNA, 25 bp, Homo sapien
aattgtctggtggtccatttgcagg

SEQ ID NO: 309908 - DNA, 25 bp, Homo sapien
ggacagctgccagatcccagggagc

SEQ ID NO: 309909 - DNA, 25 bp, Homo sapien
tcaggacagctgccagatcccaggg

SEQ ID NO: 309910 - DNA, 25 bp, Homo sapien
gccagatcccagggagccccatgca

SEQ ID NO: 309911 - DNA, 25 bp, Homo sapien
tgccagatcccagggagccccatgc

SEQ ID NO: 309912 - DNA, 25 bp, Homo sapien
gcaaccccgcacaccagcagccccg

SEQ ID NO: 309913 - DNA, 25 bp, Homo sapien
accccgcacaccagcagccccgcac

SEQ ID NO: 309914 - DNA, 25 bp, Homo sapien
agcaaccccgcacaccagcagcccc

SEQ ID NO: 309915 - DNA, 25 bp, Homo sapien
aaccccgcacaccagcagccccgca

SEQ ID NO: 309916 - DNA, 25 bp, Homo sapien
caacaatgacactggtaataggagc

SEQ ID NO: 309917 - DNA, 25 bp, Homo sapien
gtaatgtcccaatggagaggacccc

SEQ ID NO: 309918 - DNA, 25 bp, Homo sapien
ggacttcggtccatgcagcaagaca

SEQ ID NO: 309919 - DNA, 25 bp, Homo sapien
aggcggccgacggacttcggtccat

SEQ ID NO: 309920 - DNA, 25 bp, Homo sapien
gcctccggtgacagtggctaaattt

SEQ ID NO: 309921 - DNA, 25 bp, Homo sapien
cggtgacagtggctaaatttgtaaa

SEQ ID NO: 309922 - DNA, 25 bp, Homo sapien
ttgtaaaatcaacccatcgtggtga

SEQ ID NO: 309923 - DNA, 25 bp, Homo sapien
gtggtgatgatccaaagtctctgga

SEQ ID NO: 309924 - DNA, 25 bp, Homo sapien
ccctgggactccatgctggctcagt

SEQ ID NO: 309925 - DNA, 25 bp, Homo sapien
tctgcacccttgataaacaatcaca

SEQ ID NO: 309926 - DNA, 25 bp, Homo sapien
cttgataaacaatcacagcagcaat

SEQ ID NO: 309927 - DNA, 25 bp, Homo sapien
tgccctgggactccatgctggctca

SEQ ID NO: 309928 - DNA, 25 bp, Homo sapien
gtctgaacattccactcctgccctt

SEQ ID NO: 309929 - DNA, 25 bp, Homo sapien
tattcagctgtgacagaccagaaac

SEQ ID NO: 309930 - DNA, 25 bp, Homo sapien
ctggcccagaatcccagagtattag

SEQ ID NO: 309931 - DNA, 25 bp, Homo sapien
tgggccaaggtcctcttggagcagt

SEQ ID NO: 309932 - DNA, 25 bp, Homo sapien
cagcctgaggcgtcagacaagcctg

SEQ ID NO: 309933 - DNA, 25 bp, Homo sapien
agaggcaccgcagtgagctggagag

SEQ ID NO: 309934 - DNA, 25 bp, Homo sapien
agcctgggccctctatgtggttgtg

SEQ ID NO: 309935 - DNA, 25 bp, Homo sapien
tggttgtgggcagggtgccggcctg

SEQ ID NO: 309936 - DNA, 25 bp, Homo sapien
agcagaccctgcagcgaatgttcgg

SEQ ID NO: 309937 - DNA, 25 bp, Homo sapien
taagaaagggctcgggacatgggcc

SEQ ID NO: 309938 - DNA, 25 bp, Homo sapien
tccatgggtggctcggataagaaag

SEQ ID NO: 309939 - DNA, 25 bp, Homo sapien
ggcctgagtcttggcacgagtgtcc

SEQ ID NO: 309940 - DNA, 25 bp, Homo sapien
gaaaacatttcctaggcgcctacta

SEQ ID NO: 309941 - DNA, 25 bp, Homo sapien
cgaacgagcgaagcaggttacacca

SEQ ID NO: 309942 - DNA, 25 bp, Homo sapien
gagatggctcgttctgctggaaaac

SEQ ID NO: 309943 - DNA, 25 bp, Homo sapien
tcagaggctccaaagtgcatgtgcg

SEQ ID NO: 309944 - DNA, 25 bp, Homo sapien
cagcggccggagccccaacgggatg

SEQ ID NO: 309945 - DNA, 25 bp, Homo sapien
gatgggtaaacaagtcaggaactca

SEQ ID NO: 309946 - DNA, 25 bp, Homo sapien
ccaacgggatgggtaaacaagtcag

SEQ ID NO: 309947 - DNA, 25 bp, Homo sapien
ggatgggtaaacaagtcaggaactc

SEQ ID NO: 309948 - DNA, 25 bp, Homo sapien
ggatccgtggcctccgcagcgggca

SEQ ID NO: 309949 - DNA, 25 bp, Homo sapien
tcttccactcgggagtcacaggtcc

SEQ ID NO: 309950 - DNA, 25 bp, Homo sapien
actcgggagtcacaggtccccaatc

SEQ ID NO: 309951 - DNA, 25 bp, Homo sapien
caccatctcttccactcgggagtca

SEQ ID NO: 309952 - DNA, 25 bp, Homo sapien
gcccggcgcccctcttggcgcccgc

SEQ ID NO: 309953 - DNA, 25 bp, Homo sapien
gcgcccctcttggcgcccgccccca

SEQ ID NO: 309954 - DNA, 25 bp, Homo sapien
cattcaatccaggtcttccgaaatt

SEQ ID NO: 309955 - DNA, 25 bp, Homo sapien
tcattcaatccaggtcttccgaaat

SEQ ID NO: 309956 - DNA, 25 bp, Homo sapien
gaagggatgctcactgatggtctca

SEQ ID NO: 309957 - DNA, 25 bp, Homo sapien
aaaacatttgtgttggcagcagacc

SEQ ID NO: 309958 - DNA, 25 bp, Homo sapien
aatggctttcggagtgccccaggct

SEQ ID NO: 309959 - DNA, 25 bp, Homo sapien
tataaagtgagcataccaaggcccg

SEQ ID NO: 309960 - DNA, 25 bp, Homo sapien
tagctatgaatgcagtcggctcgcc

SEQ ID NO: 309961 - DNA, 25 bp, Homo sapien
gaaacacacaaagctcgggcagaga

SEQ ID NO: 309962 - DNA, 25 bp, Homo sapien
tgtcctgtctgccacaaatagctgc

SEQ ID NO: 309963 - DNA, 25 bp, Homo sapien
taaagcacttggagagtcacgtatc

SEQ ID NO: 309964 - DNA, 25 bp, Homo sapien
gctgccctgcagaccaaagatagat

SEQ ID NO: 309965 - DNA, 25 bp, Homo sapien
cgatgcagagaaaaagccggcttgg

SEQ ID NO: 309966 - DNA, 25 bp, Homo sapien
gagtaggagcgactgaatagcccca

SEQ ID NO: 309967 - DNA, 25 bp, Homo sapien
gaaagctttcaccaggatcctagac

SEQ ID NO: 309968 - DNA, 25 bp, Homo sapien
cagaaagggcaatggaaaaacaaag

SEQ ID NO: 309969 - DNA, 25 bp, Homo sapien
cagaacagggtgatggtttgactaa

SEQ ID NO: 309970 - DNA, 25 bp, Homo sapien
ttaaacagaaaagacactttcagct

SEQ ID NO: 309971 - DNA, 25 bp, Homo sapien
gctaataatcagtacctggaaaaag

SEQ ID NO: 309972 - DNA, 25 bp, Homo sapien
tgcggtggcttctctgataaaatcc

SEQ ID NO: 309973 - DNA, 25 bp, Homo sapien
tcccttgaccataagaccctgcatg

SEQ ID NO: 309974 - DNA, 25 bp, Homo sapien
tggtctggccctacgactggtctgg

SEQ ID NO: 309975 - DNA, 25 bp, Homo sapien
tctacttgaaatccttgcggtggct

SEQ ID NO: 309976 - DNA, 25 bp, Homo sapien
cccacagacctctaaagacacttcc

SEQ ID NO: 309977 - DNA, 25 bp, Homo sapien
cgccccggcatctcccaccgctgcc

SEQ ID NO: 309978 - DNA, 25 bp, Homo sapien
ccccggcatctcccaccgctgccgc

SEQ ID NO: 309979 - DNA, 25 bp, Homo sapien
gccgccccggcatctcccaccgctg

SEQ ID NO: 309980 - DNA, 25 bp, Homo sapien
gccccggcatctcccaccgctgccg

SEQ ID NO: 309981 - DNA, 25 bp, Homo sapien
gggttggagctgtactcgtccacct

SEQ ID NO: 309982 - DNA, 25 bp, Homo sapien
atctgcacatgcggtggctggaagc

SEQ ID NO: 309983 - DNA, 25 bp, Homo sapien
cgtccacctcgatgatgagccggct

SEQ ID NO: 309984 - DNA, 25 bp, Homo sapien
cgccgagcggccatcacgtgggact

SEQ ID NO: 309985 - DNA, 25 bp, Homo sapien
acaagcaccgctgccctaagatgga

SEQ ID NO: 309986 - DNA, 25 bp, Homo sapien
tccttctccgagtggtccgagggac

SEQ ID NO: 309987 - DNA, 25 bp, Homo sapien
ggtccgagggacagcggctgggatg

SEQ ID NO: 309988 - DNA, 25 bp, Homo sapien
gggcaccagactcacgggcagtctg

SEQ ID NO: 309989 - DNA, 25 bp, Homo sapien
ttcttactgaccaccaggccagtgg

SEQ ID NO: 309990 - DNA, 25 bp, Homo sapien
tactgaccaccaggccagtggtccg

SEQ ID NO: 309991 - DNA, 25 bp, Homo sapien
gccttcttactgaccaccaggccag

SEQ ID NO: 309992 - DNA, 25 bp, Homo sapien
tcttgccttcttactgaccaccagg

SEQ ID NO: 309993 - DNA, 25 bp, Homo sapien
cttccaaaaccttagcatcctcatc

SEQ ID NO: 309994 - DNA, 25 bp, Homo sapien
ctgtagagagggtgtccacattgac

SEQ ID NO: 309995 - DNA, 25 bp, Homo sapien
cttagcatcctcatctgtagagagg

SEQ ID NO: 309996 - DNA, 25 bp, Homo sapien
tcatctgtagagagggtgtccacat

SEQ ID NO: 309997 - DNA, 25 bp, Homo sapien
gttcctggcgccaaaagcccagaga

SEQ ID NO: 309998 - DNA, 25 bp, Homo sapien
caagtgcagttcctggcgccaaaag

SEQ ID NO: 309999 - DNA, 25 bp, Homo sapien
tctctcccataagccactggttctg

SEQ ID NO: 310000 - DNA, 25 bp, Homo sapien
aagcagaggctgttacccctcgtaa

SEQ ID NO: 310001 - DNA, 25 bp, Homo sapien
atgccgcggcgggagcgcgcacccg

SEQ ID NO: 310002 - DNA, 25 bp, Homo sapien
cacgatgccgcggcgggagcgcgca

SEQ ID NO: 310003 - DNA, 25 bp, Homo sapien
agcgcgcacccggggccccttcctg

SEQ ID NO: 310004 - DNA, 25 bp, Homo sapien
gcggcgggagcgcgcacccggggcc

SEQ ID NO: 310005 - DNA, 25 bp, Homo sapien
tatcagagacgcagacgaagcgggt

SEQ ID NO: 310006 - DNA, 25 bp, Homo sapien
gaacttcttcacctcgctcgggagc

SEQ ID NO: 310007 - DNA, 25 bp, Homo sapien
agcgtggatcagcacgtcgccgtac

SEQ ID NO: 310008 - DNA, 25 bp, Homo sapien
ggtccgtcctcgagtgggtatcaga

SEQ ID NO: 310009 - DNA, 25 bp, Homo sapien
cagccaactgcacagcgggacgccc

SEQ ID NO: 310010 - DNA, 25 bp, Homo sapien
cgcggctgccctgcctcactcctgg

SEQ ID NO: 310011 - DNA, 25 bp, Homo sapien
ctggctggcgctggacatgaagcct

SEQ ID NO: 310012 - DNA, 25 bp, Homo sapien
ctggcgctggacatgaagccttgac

SEQ ID NO: 310013 - DNA, 25 bp, Homo sapien
ggacatgaagccttgaccctcccct

SEQ ID NO: 310014 - DNA, 25 bp, Homo sapien
gacatgaagccttgaccctcccctt

SEQ ID NO: 310015 - DNA, 25 bp, Homo sapien
gtcagcggggtcagcatgccactca

SEQ ID NO: 310016 - DNA, 25 bp, Homo sapien
agacagggctgcgtcagcggggtca

SEQ ID NO: 310017 - DNA, 25 bp, Homo sapien
cagctgacagacagggctgcgtcag

SEQ ID NO: 310018 - DNA, 25 bp, Homo sapien
accatggccagctgacagacagggc

SEQ ID NO: 310019 - DNA, 25 bp, Homo sapien
atcttgcaaatcccagctcaggaac

SEQ ID NO: 310020 - DNA, 25 bp, Homo sapien
gaatttggacctggcattcttgcct

SEQ ID NO: 310021 - DNA, 25 bp, Homo sapien
gcatcttgcaaatcccagctcagga

SEQ ID NO: 310022 - DNA, 25 bp, Homo sapien
cagaatttggacctggcattcttgc

SEQ ID NO: 310023 - DNA, 25 bp, Homo sapien
tcacactggccatgtgcgtacgcaa

SEQ ID NO: 310024 - DNA, 25 bp, Homo sapien
tcactctccaggtggtcactcagtt

SEQ ID NO: 310025 - DNA, 25 bp, Homo sapien
cactcagtttatcaatcacactggc

SEQ ID NO: 310026 - DNA, 25 bp, Homo sapien
ctggccatgtgcgtacgcaaccaaa

SEQ ID NO: 310027 - DNA, 25 bp, Homo sapien
atgtgccgtcaacacccccaactca

SEQ ID NO: 310028 - DNA, 25 bp, Homo sapien
ttcccatgtgccgtcaacaccccca

SEQ ID NO: 310029 - DNA, 25 bp, Homo sapien
cacccccaactcagagttgctgcct

SEQ ID NO: 310030 - DNA, 25 bp, Homo sapien
cgtcaacacccccaactcagagttg

SEQ ID NO: 310031 - DNA, 25 bp, Homo sapien
ttgctcagactctccgtggggttcc

SEQ ID NO: 310032 - DNA, 25 bp, Homo sapien
tgctcagactctccgtggggttcca

SEQ ID NO: 310033 - DNA, 25 bp, Homo sapien
cagactctccgtggggttccagcca

SEQ ID NO: 310034 - DNA, 25 bp, Homo sapien
ctcagactctccgtggggttccagc

SEQ ID NO: 310035 - DNA, 25 bp, Homo sapien
ccttcagtgtcgtggctgtcaaacc

SEQ ID NO: 310036 - DNA, 25 bp, Homo sapien
gatcttcatttgcatcgtgcacact

SEQ ID NO: 310037 - DNA, 25 bp, Homo sapien
cccagaattagctccaaacggcctt

SEQ ID NO: 310038 - DNA, 25 bp, Homo sapien
gcacactccgaaaggtgtgaaatcc

SEQ ID NO: 310039 - DNA, 25 bp, Homo sapien
ggaaattcccagcaaggattgtgct

SEQ ID NO: 310040 - DNA, 25 bp, Homo sapien
tcatcagaaaatcccacaacgaagc

SEQ ID NO: 310041 - DNA, 25 bp, Homo sapien
acaacgaagccgcaggactggaagg

SEQ ID NO: 310042 - DNA, 25 bp, Homo sapien
tggaaggctatacctggttccaact

SEQ ID NO: 310043 - DNA, 25 bp, Homo sapien
caacaccccagatagaacagacatc

SEQ ID NO: 310044 - DNA, 25 bp, Homo sapien
gagctcggtgccacaacaccccaga

SEQ ID NO: 310045 - DNA, 25 bp, Homo sapien
cacaacaccccagatagaacagaca

SEQ ID NO: 310046 - DNA, 25 bp, Homo sapien
ccagagctcggtgccacaacacccc

SEQ ID NO: 310047 - DNA, 25 bp, Homo sapien
tcggtgcatgaacgccaggaatggc

SEQ ID NO: 310048 - DNA, 25 bp, Homo sapien
ctgcgagagtcagctgtgagccacc

SEQ ID NO: 310049 - DNA, 25 bp, Homo sapien
caggaatggcttcacacggccaagc

SEQ ID NO: 310050 - DNA, 25 bp, Homo sapien
ggtcttggtgcaactcggtgcatga

SEQ ID NO: 310051 - DNA, 25 bp, Homo sapien
catctttgacagttctgtgtttaaa

SEQ ID NO: 310052 - DNA, 25 bp, Homo sapien
cagacttctcggtatggcgcatggt

SEQ ID NO: 310053 - DNA, 25 bp, Homo sapien
taaacacttgccgatgtctaggaga

SEQ ID NO: 310054 - DNA, 25 bp, Homo sapien
tgtctaggagattcacattagcaga

SEQ ID NO: 310055 - DNA, 25 bp, Homo sapien
gctggggtgacaccctcaaacactg

SEQ ID NO: 310056 - DNA, 25 bp, Homo sapien
ggggtgacaccctcaaacactgtct

SEQ ID NO: 310057 - DNA, 25 bp, Homo sapien
ggtgacaccctcaaacactgtctgc

SEQ ID NO: 310058 - DNA, 25 bp, Homo sapien
ctgctggggtgacaccctcaaacac

SEQ ID NO: 310059 - DNA, 25 bp, Homo sapien
ggaacagcagagccttttccaccat

SEQ ID NO: 310060 - DNA, 25 bp, Homo sapien
ctgggacaacacagcagcccaggaa

SEQ ID NO: 310061 - DNA, 25 bp, Homo sapien
ccaggaacagcagagccttttccac

SEQ ID NO: 310062 - DNA, 25 bp, Homo sapien
agcccaggaacagcagagccttttc

SEQ ID NO: 310063 - DNA, 25 bp, Homo sapien
cagcagcacgggcaccgtggtctgt

SEQ ID NO: 310064 - DNA, 25 bp, Homo sapien
gcccagcagcacgggcaccgtggtc

SEQ ID NO: 310065 - DNA, 25 bp, Homo sapien
gcagcacgggcaccgtggtctgtcc

SEQ ID NO: 310066 - DNA, 25 bp, Homo sapien
ccagcagcacgggcaccgtggtctg

SEQ ID NO: 310067 - DNA, 25 bp, Homo sapien
acaggtgtcttcatcagatcaaagg

SEQ ID NO: 310068 - DNA, 25 bp, Homo sapien
caacaggtgtcttcatcagatcaaa

SEQ ID NO: 310069 - DNA, 25 bp, Homo sapien
cccaacaggtgtcttcatcagatca

SEQ ID NO: 310070 - DNA, 25 bp, Homo sapien
caggtgtcttcatcagatcaaagga

SEQ ID NO: 310071 - DNA, 25 bp, Homo sapien
gaggaagctgctggaatcgctgaca

SEQ ID NO: 310072 - DNA, 25 bp, Homo sapien
gcacacagctgtcagcttgtccaga

SEQ ID NO: 310073 - DNA, 25 bp, Homo sapien
gcatggctgagagaggggcgggcag

SEQ ID NO: 310074 - DNA, 25 bp, Homo sapien
tgtcagcttgtccagaagccacagc

SEQ ID NO: 310075 - DNA, 25 bp, Homo sapien
gtcagctcgtggttgcccgcgatca

SEQ ID NO: 310076 - DNA, 25 bp, Homo sapien
gtcaaaggtcagctcgtggttgccc

SEQ ID NO: 310077 - DNA, 25 bp, Homo sapien
gatcacgatcttgtactcatagggc

SEQ ID NO: 310078 - DNA, 25 bp, Homo sapien
gcgatcacgatcttgtactcatagg

SEQ ID NO: 310079 - DNA, 25 bp, Homo sapien
gccgtcagcttgtccagaagccaca

SEQ ID NO: 310080 - DNA, 25 bp, Homo sapien
cgtcagcttgtccagaagccacagc

SEQ ID NO: 310081 - DNA, 25 bp, Homo sapien
agccgtcagcttgtccagaagccac

SEQ ID NO: 310082 - DNA, 25 bp, Homo sapien
tcagcttgtccagaagccacagcac

SEQ ID NO: 310083 - DNA, 25 bp, Homo sapien
gtcagctcgtggttgcctgcgatca

SEQ ID NO: 310084 - DNA, 25 bp, Homo sapien
cattctcatagttctccggcttcag

SEQ ID NO: 310085 - DNA, 25 bp, Homo sapien
tgcttgatgaggtcggccatgaact

SEQ ID NO: 310086 - DNA, 25 bp, Homo sapien
ggcttcagcttcgacacagatggga

SEQ ID NO: 310087 - DNA, 25 bp, Homo sapien
tacatcgtgaagtccagggagatga

SEQ ID NO: 310088 - DNA, 25 bp, Homo sapien
ggttcaccaagaccctgtacatcgt

SEQ ID NO: 310089 - DNA, 25 bp, Homo sapien
caagaccctgtacatcgtgaagtcc

SEQ ID NO: 310090 - DNA, 25 bp, Homo sapien
tgcagggagggttcaccaagaccct

SEQ ID NO: 310091 - DNA, 25 bp, Homo sapien
gcaatctgctcaccccggttggaaa

SEQ ID NO: 310092 - DNA, 25 bp, Homo sapien
ggttggaaactgagtgaaacttgcc

SEQ ID NO: 310093 - DNA, 25 bp, Homo sapien
gtggcttggcatccattccgtggca

SEQ ID NO: 310094 - DNA, 25 bp, Homo sapien
gggtttcccagacactctctgctgg

SEQ ID NO: 310095 - DNA, 25 bp, Homo sapien
gagaccaggtcctaaatctgcccac

SEQ ID NO: 310096 - DNA, 25 bp, Homo sapien
ccgtggcaagatgagaccaggtcct

SEQ ID NO: 310097 - DNA, 25 bp, Homo sapien
tgctccatgaggaggccgtggcaag

SEQ ID NO: 310098 - DNA, 25 bp, Homo sapien
gcaagatgagaccaggtcctaaatc

SEQ ID NO: 310099 - DNA, 25 bp, Homo sapien
tacatcgtgaagtccagggagatga

SEQ ID NO: 310100 - DNA, 25 bp, Homo sapien
caagaccctgtacatcgtgaagtcc

SEQ ID NO: 310101 - DNA, 25 bp, Homo sapien
ggttcaccaagaccctgtacatcgt

SEQ ID NO: 310102 - DNA, 25 bp, Homo sapien
tgcagggagggttcaccaagaccct

SEQ ID NO: 310103 - DNA, 25 bp, Homo sapien
gccaaaaaggcccatatgcacccaa

SEQ ID NO: 310104 - DNA, 25 bp, Homo sapien
aggcctgccacacgggatacgttca

SEQ ID NO: 310105 - DNA, 25 bp, Homo sapien
gcacccaaaggctgttctgagaacg

SEQ ID NO: 310106 - DNA, 25 bp, Homo sapien
ctgttctgagaacggaggcctgcca

SEQ ID NO: 310107 - DNA, 25 bp, Homo sapien
tcaccctgtttcaccatccagggcc

SEQ ID NO: 310108 - DNA, 25 bp, Homo sapien
cacccagactgttattgcgatcggg

SEQ ID NO: 310109 - DNA, 25 bp, Homo sapien
ccaagaagacgtttccacggcggct

SEQ ID NO: 310110 - DNA, 25 bp, Homo sapien
cacggcggcttttctattatagctg

SEQ ID NO: 310111 - DNA, 25 bp, Homo sapien
gctgtcatggtgcacccagactgtt

SEQ ID NO: 310112 - DNA, 25 bp, Homo sapien
ccatcttagactggaagacagttgg

SEQ ID NO: 310113 - DNA, 25 bp, Homo sapien
catcttagactggaagacagttggg

SEQ ID NO: 310114 - DNA, 25 bp, Homo sapien
gactaaaggcagcttgggatcatgg

SEQ ID NO: 310115 - DNA, 25 bp, Homo sapien
gccatgatgactaaaggcagcttgg

SEQ ID NO: 310116 - DNA, 25 bp, Homo sapien
gctgagagactcaggcagcgtttgc

SEQ ID NO: 310117 - DNA, 25 bp, Homo sapien
aggcagcgtttgccaccttctggaa

SEQ ID NO: 310118 - DNA, 25 bp, Homo sapien
gcagcgtttgccaccttctggaagg

SEQ ID NO: 310119 - DNA, 25 bp, Homo sapien
ggcagcgtttgccaccttctggaag

SEQ ID NO: 310120 - DNA, 25 bp, Homo sapien
tgctcttcagaggttccggtgggcc

SEQ ID NO: 310121 - DNA, 25 bp, Homo sapien
tatgtccagccaccaaccgtgagtt

SEQ ID NO: 310122 - DNA, 25 bp, Homo sapien
ggagcatccacatgagcctgatcag

SEQ ID NO: 310123 - DNA, 25 bp, Homo sapien
tgtgcaagggcaaagaaatctctgc

SEQ ID NO: 310124 - DNA, 25 bp, Homo sapien
ccggccttctgaacattttagacat

SEQ ID NO: 310125 - DNA, 25 bp, Homo sapien
gccatttcctcctcaaggaggcctg

SEQ ID NO: 310126 - DNA, 25 bp, Homo sapien
gaggcctgcagtggccaccccaacc

SEQ ID NO: 310127 - DNA, 25 bp, Homo sapien
cagtggccaccccaaccagggccat

SEQ ID NO: 310128 - DNA, 25 bp, Homo sapien
catttcctcctcaaggaggcctgca

SEQ ID NO: 310129 - DNA, 25 bp, Homo sapien
taattaagacagtcggcaactctcc

SEQ ID NO: 310130 - DNA, 25 bp, Homo sapien
aagttcaccgtgagtaatccccagc

SEQ ID NO: 310131 - DNA, 25 bp, Homo sapien
aagcacacagagagtaaagatgaca

SEQ ID NO: 310132 - DNA, 25 bp, Homo sapien
gcctaagaccttgagtaaactgaaa

SEQ ID NO: 310133 - DNA, 25 bp, Homo sapien
tgaggactcctgagcgagcgagcca

SEQ ID NO: 310134 - DNA, 25 bp, Homo sapien
gggaagaaccccagactgcattcat

SEQ ID NO: 310135 - DNA, 25 bp, Homo sapien
tctgaataaagaagaatcgctgagg

SEQ ID NO: 310136 - DNA, 25 bp, Homo sapien
attggctgcagagtttaggtccctt

SEQ ID NO: 310137 - DNA, 25 bp, Homo sapien
cacagatacacaagacctccgtatg

SEQ ID NO: 310138 - DNA, 25 bp, Homo sapien
cctccgtatgtgatacaggagccat

SEQ ID NO: 310139 - DNA, 25 bp, Homo sapien
aatttgtgacccctagacagagatg

SEQ ID NO: 310140 - DNA, 25 bp, Homo sapien
aactggacaccctctcacatgtgca

SEQ ID NO: 310141 - DNA, 25 bp, Homo sapien
gacagatttgatctccaggacttga

SEQ ID NO: 310142 - DNA, 25 bp, Homo sapien
taggcacgacttgtctgcttttatc

SEQ ID NO: 310143 - DNA, 25 bp, Homo sapien
ctctgaagttgaagtaggcacgact

SEQ ID NO: 310144 - DNA, 25 bp, Homo sapien
cctttgaacgacagatttgatctcc

SEQ ID NO: 310145 - DNA, 25 bp, Homo sapien
tttatatgttggaaatgtatctgct

SEQ ID NO: 310146 - DNA, 25 bp, Homo sapien
tacatttatatgttggaaatgtatc

SEQ ID NO: 310147 - DNA, 25 bp, Homo sapien
catttatatgttggaaatgtatctg

SEQ ID NO: 310148 - DNA, 25 bp, Homo sapien
atttatatgttggaaatgtatctgc

SEQ ID NO: 310149 - DNA, 25 bp, Homo sapien
tctgcctgggccgtctgccccagtc

SEQ ID NO: 310150 - DNA, 25 bp, Homo sapien
tcatgagctcctcacatactttact

SEQ ID NO: 310151 - DNA, 25 bp, Homo sapien
tttgggtctctccttttgttgtctc

SEQ ID NO: 310152 - DNA, 25 bp, Homo sapien
tcctcacatactttacttgcttctc

SEQ ID NO: 310153 - DNA, 25 bp, Homo sapien
tgtttaatgtccacccccacaatca

SEQ ID NO: 310154 - DNA, 25 bp, Homo sapien
ccacaatcaccagctgttcacacat

SEQ ID NO: 310155 - DNA, 25 bp, Homo sapien
caatttctctgtttaatgtccaccc

SEQ ID NO: 310156 - DNA, 25 bp, Homo sapien
tgcctggaccaacccaatttctctg

SEQ ID NO: 310157 - DNA, 25 bp, Homo sapien
tcgatcccctgcgtaccacgaaagt

SEQ ID NO: 310158 - DNA, 25 bp, Homo sapien
ccacgaaagtgtgggggcttccatc

SEQ ID NO: 310159 - DNA, 25 bp, Homo sapien
ctgggcttcgatcccctgcgtacca

SEQ ID NO: 310160 - DNA, 25 bp, Homo sapien
cccctgcgtaccacgaaagtgtggg

SEQ ID NO: 310161 - DNA, 25 bp, Homo sapien
agttcctgaggcttgctgtgaggcc

SEQ ID NO: 310162 - DNA, 25 bp, Homo sapien
gcaagggccgctgacatcattgtgt

SEQ ID NO: 310163 - DNA, 25 bp, Homo sapien
ctgtgaggcctagtcagattcagca

SEQ ID NO: 310164 - DNA, 25 bp, Homo sapien
tgtgttttgactgctgtcggcacag

SEQ ID NO: 310165 - DNA, 25 bp, Homo sapien
aaatagagtagaagctaatggaaag

SEQ ID NO: 310166 - DNA, 25 bp, Homo sapien
tctgtccaggtaagacagagaacct

SEQ ID NO: 310167 - DNA, 25 bp, Homo sapien
aaagattgtcctgtcaaactgtggg

SEQ ID NO: 310168 - DNA, 25 bp, Homo sapien
aaactgtgggtaattgataggtgcc

SEQ ID NO: 310169 - DNA, 25 bp, Homo sapien
tcttgatcatcgcagaaacactctc

SEQ ID NO: 310170 - DNA, 25 bp, Homo sapien
aagctcttgatcatcgcagaaacac

SEQ ID NO: 310171 - DNA, 25 bp, Homo sapien
ctaaaagctcttgatcatcgcagaa

SEQ ID NO: 310172 - DNA, 25 bp, Homo sapien
tttctaaaagctcttgatcatcgca

SEQ ID NO: 310173 - DNA, 25 bp, Homo sapien
tagaccacttcaggtcccgcttctg

SEQ ID NO: 310174 - DNA, 25 bp, Homo sapien
ctgagaacaggatgaggtgtccaag

SEQ ID NO: 310175 - DNA, 25 bp, Homo sapien
gactgagaacaggatgaggtgtcca

SEQ ID NO: 310176 - DNA, 25 bp, Homo sapien
gaggcctctgtgtgctagaccactt

SEQ ID NO: 310177 - DNA, 25 bp, Homo sapien
tagcaccctcatgggcactgacacc

SEQ ID NO: 310178 - DNA, 25 bp, Homo sapien
atcacgctaatgcactctagcaccc

SEQ ID NO: 310179 - DNA, 25 bp, Homo sapien
tcaccccatatcctcctctgggctt

SEQ ID NO: 310180 - DNA, 25 bp, Homo sapien
tgacaccccactatgatgatgccct

SEQ ID NO: 310181 - DNA, 25 bp, Homo sapien
acccagcctgttcctgctcttaagg

SEQ ID NO: 310182 - DNA, 25 bp, Homo sapien
gcacccagcctgttcctgctcttaa

SEQ ID NO: 310183 - DNA, 25 bp, Homo sapien
agcgcacccagcctgttcctgctct

SEQ ID NO: 310184 - DNA, 25 bp, Homo sapien
agccagcgcacccagcctgttcctg

SEQ ID NO: 310185 - DNA, 25 bp, Homo sapien
tggcagtgggatgtcggtgctggtt

SEQ ID NO: 310186 - DNA, 25 bp, Homo sapien
tgatgatggcagtgggatgtcggtg

SEQ ID NO: 310187 - DNA, 25 bp, Homo sapien
ttctttcatgtcctattcaaccttt

SEQ ID NO: 310188 - DNA, 25 bp, Homo sapien
agtgggatgtcggtgctggttgcag

SEQ ID NO: 310189 - DNA, 25 bp, Homo sapien
tgttgtgcagggttattctcctcct

SEQ ID NO: 310190 - DNA, 25 bp, Homo sapien
catgttgtgcagggttattctcctc

SEQ ID NO: 310191 - DNA, 25 bp, Homo sapien
gacaagcttgcagatctctgtgatt

SEQ ID NO: 310192 - DNA, 25 bp, Homo sapien
gttgtgcagggttattctcctcctt

SEQ ID NO: 310193 - DNA, 25 bp, Homo sapien
caggtcccaacaggtatctcggttt

SEQ ID NO: 310194 - DNA, 25 bp, Homo sapien
gccaggaaatccctccttgtgggag

SEQ ID NO: 310195 - DNA, 25 bp, Homo sapien
cacaacccagaaagagaaccgctgc

SEQ ID NO: 310196 - DNA, 25 bp, Homo sapien
gaaagcccctatcaaaccctatgaa

SEQ ID NO: 310197 - DNA, 25 bp, Homo sapien
tgtgtgtggaaacgccctaaatctc

SEQ ID NO: 310198 - DNA, 25 bp, Homo sapien
gtttacaacatgtctcatgcccctg

SEQ ID NO: 310199 - DNA, 25 bp, Homo sapien
tctctccagtttacaacatgtctca

SEQ ID NO: 310200 - DNA, 25 bp, Homo sapien
gaatgtcatgattgactccctcctg

SEQ ID NO: 310201 - DNA, 25 bp, Homo sapien
tacacggccctatgcagttcggtgg

SEQ ID NO: 310202 - DNA, 25 bp, Homo sapien
tcaccctaacgaaggcgcaggatgc

SEQ ID NO: 310203 - DNA, 25 bp, Homo sapien
cacgcttagccttttacagatgcag

SEQ ID NO: 310204 - DNA, 25 bp, Homo sapien
tacgtggtggcacaatgcgagtccc

SEQ ID NO: 310205 - DNA, 25 bp, Homo sapien
tctggcttagtacaagaccgctgga

SEQ ID NO: 310206 - DNA, 25 bp, Homo sapien
gaagtgctccatagggtcagcgaca

SEQ ID NO: 310207 - DNA, 25 bp, Homo sapien
aagtagtcagagtgcccagcaggga

SEQ ID NO: 310208 - DNA, 25 bp, Homo sapien
catggtcattgagtccggtgaggaa

SEQ ID NO: 310209 - DNA, 25 bp, Homo sapien
gataggattaggtgatgcattccag

SEQ ID NO: 310210 - DNA, 25 bp, Homo sapien
tattatggtatccaagcattgtcca

SEQ ID NO: 310211 - DNA, 25 bp, Homo sapien
caacggaggttgtccttcacattac

SEQ ID NO: 310212 - DNA, 25 bp, Homo sapien
gattagaatactacagcagttgccc

SEQ ID NO: 310213 - DNA, 25 bp, Homo sapien
cagtgatgctgaatggtatctagga

SEQ ID NO: 310214 - DNA, 25 bp, Homo sapien
tggtctgttccatcaaagatcaaac

SEQ ID NO: 310215 - DNA, 25 bp, Homo sapien
tagtacagatggtaacggttcctca

SEQ ID NO: 310216 - DNA, 25 bp, Homo sapien
gaggtgagacgtttcctggaacaag

SEQ ID NO: 310217 - DNA, 25 bp, Homo sapien
ctgtttttcaatgggtgatggctgc

SEQ ID NO: 310218 - DNA, 25 bp, Homo sapien
aggctgtttttcaatgggtgatggc

SEQ ID NO: 310219 - DNA, 25 bp, Homo sapien
tgtttttcaatgggtgatggctgcc

SEQ ID NO: 310220 - DNA, 25 bp, Homo sapien
gctgtttttcaatgggtgatggctg

SEQ ID NO: 310221 - DNA, 25 bp, Homo sapien
tcctggctgctttgtgggtagactg

SEQ ID NO: 310222 - DNA, 25 bp, Homo sapien
cttttgtactaagatagggagccat

SEQ ID NO: 310223 - DNA, 25 bp, Homo sapien
gcaagagcgagtggacctttgtccc

SEQ ID NO: 310224 - DNA, 25 bp, Homo sapien
catgggagggcttattcagaagaac

SEQ ID NO: 310225 - DNA, 25 bp, Homo sapien
ggagccctgtgttcagcgttgcgca

SEQ ID NO: 310226 - DNA, 25 bp, Homo sapien
cagcgttgcgcactgtggtgcccga

SEQ ID NO: 310227 - DNA, 25 bp, Homo sapien
ctttccttgagaaagctcgagcctt

SEQ ID NO: 310228 - DNA, 25 bp, Homo sapien
tgtgttcagcgttgcgcactgtggt

SEQ ID NO: 310229 - DNA, 25 bp, Homo sapien
gttactgagcactacacatgatcct

SEQ ID NO: 310230 - DNA, 25 bp, Homo sapien
tcgcatggtgggctcggcagcacct

SEQ ID NO: 310231 - DNA, 25 bp, Homo sapien
ttgaaacgggtgtagagagaagctt

SEQ ID NO: 310232 - DNA, 25 bp, Homo sapien
caggtggcacgtggcatcgcatggt

SEQ ID NO: 310233 - DNA, 25 bp, Homo sapien
ggaccggggttgtctgtcatttatg

SEQ ID NO: 310234 - DNA, 25 bp, Homo sapien
cagtagccagccaaccccgtgggga

SEQ ID NO: 310235 - DNA, 25 bp, Homo sapien
agtcgggggccagtagccagccaac

SEQ ID NO: 310236 - DNA, 25 bp, Homo sapien
ccacattcgctgaagcgatggagag

SEQ ID NO: 310237 - DNA, 25 bp, Homo sapien
gaggtctttattgcttcactgccta

SEQ ID NO: 310238 - DNA, 25 bp, Homo sapien
ggtgaggtctttattgcttcactgc

SEQ ID NO: 310239 - DNA, 25 bp, Homo sapien
tgaggtctttattgcttcactgcct

SEQ ID NO: 310240 - DNA, 25 bp, Homo sapien
gtctttattgcttcactgcctaatt

SEQ ID NO: 310241 - DNA, 25 bp, Homo sapien
tccaaaggcccaatgcagaggagcc

SEQ ID NO: 310242 - DNA, 25 bp, Homo sapien
ttcactcggatcaggttggcacggc

SEQ ID NO: 310243 - DNA, 25 bp, Homo sapien
gaatggacgtccttctgccagagac

SEQ ID NO: 310244 - DNA, 25 bp, Homo sapien
ggaccattttgcgagtgtagccctg

SEQ ID NO: 310245 - DNA, 25 bp, Homo sapien
tctggaagcagcgtgtgaaacagcg

SEQ ID NO: 310246 - DNA, 25 bp, Homo sapien
gatgattcccaaccgaaagcagctg

SEQ ID NO: 310247 - DNA, 25 bp, Homo sapien
aagcagctgtctcgcctttagaacg

SEQ ID NO: 310248 - DNA, 25 bp, Homo sapien
ttattccttgctggacaaactctgg

SEQ ID NO: 310249 - DNA, 25 bp, Homo sapien
ggaggccccagaccgcaccctgaag

SEQ ID NO: 310250 - DNA, 25 bp, Homo sapien
gcctgcaaggggtaggaggccccag

SEQ ID NO: 310251 - DNA, 25 bp, Homo sapien
tgaaaacccacgagggcctcaaagc

SEQ ID NO: 310252 - DNA, 25 bp, Homo sapien
gttgcttgcagtttgaaaacccacg

SEQ ID NO: 310253 - DNA, 25 bp, Homo sapien
aggaaccagtgctatggacgctggt

SEQ ID NO: 310254 - DNA, 25 bp, Homo sapien
caaggaaccagtgctatggacgctg

SEQ ID NO: 310255 - DNA, 25 bp, Homo sapien
aaggaaccagtgctatggacgctgg

SEQ ID NO: 310256 - DNA, 25 bp, Homo sapien
gaaccagtgctatggacgctggtgt

SEQ ID NO: 310257 - DNA, 25 bp, Homo sapien
catctagtccagagtgacatccagg

SEQ ID NO: 310258 - DNA, 25 bp, Homo sapien
ctggtgggcgggctccatctagtcc

SEQ ID NO: 310259 - DNA, 25 bp, Homo sapien
gacttcgccacctgcgatgagctca

SEQ ID NO: 310260 - DNA, 25 bp, Homo sapien
cactgacttcgccacctgcgatgag

SEQ ID NO: 310261 - DNA, 25 bp, Homo sapien
tggagggactggcaggatccctggg

SEQ ID NO: 310262 - DNA, 25 bp, Homo sapien
tgtggagggactggcaggatccctg

SEQ ID NO: 310263 - DNA, 25 bp, Homo sapien
gtgtggagggactggcaggatccct

SEQ ID NO: 310264 - DNA, 25 bp, Homo sapien
gagggactggcaggatccctgggcg

SEQ ID NO: 310265 - DNA, 25 bp, Homo sapien
ggcccctgcagtaccaaccactcca

SEQ ID NO: 310266 - DNA, 25 bp, Homo sapien
cccggcccctgcagtaccaaccact

SEQ ID NO: 310267 - DNA, 25 bp, Homo sapien
cacccggcccctgcagtaccaacca

SEQ ID NO: 310268 - DNA, 25 bp, Homo sapien
cccctgcagtaccaaccactccaca

SEQ ID NO: 310269 - DNA, 25 bp, Homo sapien
agcatcctggaaccggctgcctgca

SEQ ID NO: 310270 - DNA, 25 bp, Homo sapien
tatctagggcaccatgggctggaag

SEQ ID NO: 310271 - DNA, 25 bp, Homo sapien
ctggaagaacggttgtcagacttgg

SEQ ID NO: 310272 - DNA, 25 bp, Homo sapien
aggagacatttggacttgaatgtgg

SEQ ID NO: 310273 - DNA, 25 bp, Homo sapien
catttgggaagaggggggcctgaag

SEQ ID NO: 310274 - DNA, 25 bp, Homo sapien
tcagatgccatttgggaagaggggg

SEQ ID NO: 310275 - DNA, 25 bp, Homo sapien
ttgggaagaggggggcctgaagcac

SEQ ID NO: 310276 - DNA, 25 bp, Homo sapien
tgccatttgggaagaggggggcctg

SEQ ID NO: 310277 - DNA, 25 bp, Homo sapien
tctgggtcgggatcgggaatcggct

SEQ ID NO: 310278 - DNA, 25 bp, Homo sapien
tgcctcagtgtctcggccagggcat

SEQ ID NO: 310279 - DNA, 25 bp, Homo sapien
gctcgggtcctgatccgcagcagct

SEQ ID NO: 310280 - DNA, 25 bp, Homo sapien
cgcgggttaggatctgggtcgggat

SEQ ID NO: 310281 - DNA, 25 bp, Homo sapien
gtcgccccgacgtggtagaagccca

SEQ ID NO: 310282 - DNA, 25 bp, Homo sapien
gaagcgccgaacaacatgcgcgcgt

SEQ ID NO: 310283 - DNA, 25 bp, Homo sapien
gcagcccgcgaaggacaagctccag

SEQ ID NO: 310284 - DNA, 25 bp, Homo sapien
agaggacgccgacgcagtgcaacgc

SEQ ID NO: 310285 - DNA, 25 bp, Homo sapien
gcccgggcagcgtccccagacgcac

SEQ ID NO: 310286 - DNA, 25 bp, Homo sapien
ggagcccgggcagcgtccccagacg

SEQ ID NO: 310287 - DNA, 25 bp, Homo sapien
agcccgggcagcgtccccagacgca

SEQ ID NO: 310288 - DNA, 25 bp, Homo sapien
gagcccgggcagcgtccccagacgc

SEQ ID NO: 310289 - DNA, 25 bp, Homo sapien
atgcaccccgccgtgtccgcgtccg

SEQ ID NO: 310290 - DNA, 25 bp, Homo sapien
gccgtgtccgcgtccgatgcccgct

SEQ ID NO: 310291 - DNA, 25 bp, Homo sapien
gggcccaggaacagcgcccccgcag

SEQ ID NO: 310292 - DNA, 25 bp, Homo sapien
ccgcaggaagcatctgcctcggagg

SEQ ID NO: 310293 - DNA, 25 bp, Homo sapien
catttgcagagaccctgtcggagga

SEQ ID NO: 310294 - DNA, 25 bp, Homo sapien
gagagatgcctattttgccggagat

SEQ ID NO: 310295 - DNA, 25 bp, Homo sapien
gaagatgccaatgttccgactcctg

SEQ ID NO: 310296 - DNA, 25 bp, Homo sapien
acattggccgggaggcatttgcaga

SEQ ID NO: 310297 - DNA, 25 bp, Homo sapien
agagaagttataggcgagagcaccc

SEQ ID NO: 310298 - DNA, 25 bp, Homo sapien
agagagaagttataggcgagagcac

SEQ ID NO: 310299 - DNA, 25 bp, Homo sapien
gaagttataggcgagagcacccttt

SEQ ID NO: 310300 - DNA, 25 bp, Homo sapien
tataggcgagagcacccttttaatt

SEQ ID NO: 310301 - DNA, 25 bp, Homo sapien
aaggagggataaggccactgtagaa

SEQ ID NO: 310302 - DNA, 25 bp, Homo sapien
gagggataaggccactgtagaaggg

SEQ ID NO: 310303 - DNA, 25 bp, Homo sapien
taaggccactgtagaaggggatgaa

SEQ ID NO: 310304 - DNA, 25 bp, Homo sapien
ggataaggccactgtagaaggggat

SEQ ID NO: 310305 - DNA, 25 bp, Homo sapien
gtagcctggaaatagggccagctgt

SEQ ID NO: 310306 - DNA, 25 bp, Homo sapien
cacatgcagtaagttttgctgcccg

SEQ ID NO: 310307 - DNA, 25 bp, Homo sapien
cagctgtggctactctgtctgaaag

SEQ ID NO: 310308 - DNA, 25 bp, Homo sapien
tgggacagaccctgaggtgcccgac

SEQ ID NO: 310309 - DNA, 25 bp, Homo sapien
cattccggtgctaggacaggctcta

SEQ ID NO: 310310 - DNA, 25 bp, Homo sapien
gacaaatccttaccgagcattccgg

SEQ ID NO: 310311 - DNA, 25 bp, Homo sapien
gactggcactgtctgaagctctggg

SEQ ID NO: 310312 - DNA, 25 bp, Homo sapien
tataggagtgcccatgtaacatgcc

SEQ ID NO: 310313 - DNA, 25 bp, Homo sapien
tggacttgactttagggcagatgtc

SEQ ID NO: 310314 - DNA, 25 bp, Homo sapien
tgaagggtacgttgtcactcactcc

SEQ ID NO: 310315 - DNA, 25 bp, Homo sapien
agatgtcgtactccccatagaaggg

SEQ ID NO: 310316 - DNA, 25 bp, Homo sapien
tctcgagagaaggtagaggttccct

SEQ ID NO: 310317 - DNA, 25 bp, Homo sapien
gagcttctgggacaagcgcctttta

SEQ ID NO: 310318 - DNA, 25 bp, Homo sapien
gcctgggaagtggatctgagtttta

SEQ ID NO: 310319 - DNA, 25 bp, Homo sapien
ccgttaaccatcaaggacaggtcta

SEQ ID NO: 310320 - DNA, 25 bp, Homo sapien
tgattcccataatcagggtggtgcc

SEQ ID NO: 310321 - DNA, 25 bp, Homo sapien
aatcctgttagacagctttccctct

SEQ ID NO: 310322 - DNA, 25 bp, Homo sapien
aaagcacacgggaaaaccaatcctg

SEQ ID NO: 310323 - DNA, 25 bp, Homo sapien
taggacaataagagctgtctcctct

SEQ ID NO: 310324 - DNA, 25 bp, Homo sapien
taacaaactttgcagcctatcccaa

SEQ ID NO: 310325 - DNA, 25 bp, Homo sapien
ctcgaaggcatatctctcccagcac

SEQ ID NO: 310326 - DNA, 25 bp, Homo sapien
cctcgaaggcatatctctcccagca

SEQ ID NO: 310327 - DNA, 25 bp, Homo sapien
tcctcgaaggcatatctctcccagc

SEQ ID NO: 310328 - DNA, 25 bp, Homo sapien
gcatccaaatatcctcgaaggcata

SEQ ID NO: 310329 - DNA, 25 bp, Homo sapien
acatatctggtttcatgaggtgcaa

SEQ ID NO: 310330 - DNA, 25 bp, Homo sapien
caggtgtttgtcacccggagaaagg

SEQ ID NO: 310331 - DNA, 25 bp, Homo sapien
gggctttaaagcaggacacacgtga

SEQ ID NO: 310332 - DNA, 25 bp, Homo sapien
caggccctgagctaggtgcttcacc

SEQ ID NO: 310333 - DNA, 25 bp, Homo sapien
tgaagggcacggaaaacaagcccat

SEQ ID NO: 310334 - DNA, 25 bp, Homo sapien
gaaaacaagcccatcaggcgaacgt

SEQ ID NO: 310335 - DNA, 25 bp, Homo sapien
tcaggcgaacgtgggagtggtggtc

SEQ ID NO: 310336 - DNA, 25 bp, Homo sapien
gtggtggtcgttacccacccatcta

SEQ ID NO: 310337 - DNA, 25 bp, Homo sapien
ccatcccttctgaggatgacttcag

SEQ ID NO: 310338 - DNA, 25 bp, Homo sapien
gaatccagactcatgtttgcccagc

SEQ ID NO: 310339 - DNA, 25 bp, Homo sapien
tgagacgcaggtggtctagcagctc

SEQ ID NO: 310340 - DNA, 25 bp, Homo sapien
ggcatggcgacctcaggatccatcc

SEQ ID NO: 310341 - DNA, 25 bp, Homo sapien
ttttccttgaaaagacatgtccatt

SEQ ID NO: 310342 - DNA, 25 bp, Homo sapien
tccttgaaaagacatgtccatttcc

SEQ ID NO: 310343 - DNA, 25 bp, Homo sapien
gacatgtccatttccaatatcatag

SEQ ID NO: 310344 - DNA, 25 bp, Homo sapien
tattttccttgaaaagacatgtcca

SEQ ID NO: 310345 - DNA, 25 bp, Homo sapien
ttggtgcttagcatttccataaaat

SEQ ID NO: 310346 - DNA, 25 bp, Homo sapien
actttactctgttggtgcttagcat

SEQ ID NO: 310347 - DNA, 25 bp, Homo sapien
caatttggagctattatctcccacc

SEQ ID NO: 310348 - DNA, 25 bp, Homo sapien
tgaaaaagacaatttggagctatta

SEQ ID NO: 310349 - DNA, 25 bp, Homo sapien
gcaaatcttgctcatgtatccacct

SEQ ID NO: 310350 - DNA, 25 bp, Homo sapien
agttgcaaatcttgctcatgtatcc

SEQ ID NO: 310351 - DNA, 25 bp, Homo sapien
ggcagcattacataagacattatcc

SEQ ID NO: 310352 - DNA, 25 bp, Homo sapien
tcctaatgggtagcaagttgcaaat

SEQ ID NO: 310353 - DNA, 25 bp, Homo sapien
tgtcagacaacccactgaggtcggt

SEQ ID NO: 310354 - DNA, 25 bp, Homo sapien
gatctctctagacgggaagctgcag

SEQ ID NO: 310355 - DNA, 25 bp, Homo sapien
gcttagaaattgcagtgccctggcc

SEQ ID NO: 310356 - DNA, 25 bp, Homo sapien
cactttcagaggaagcccaatcaga

SEQ ID NO: 310357 - DNA, 25 bp, Homo sapien
aaataagtgctcaggactgcagcat

SEQ ID NO: 310358 - DNA, 25 bp, Homo sapien
tgcagcatgcaaccaccctatgttt

SEQ ID NO: 310359 - DNA, 25 bp, Homo sapien
caaatcttcgtgtaaagatgtgagt

SEQ ID NO: 310360 - DNA, 25 bp, Homo sapien
tggcacagagaaaatcccgaagtac

SEQ ID NO: 310361 - DNA, 25 bp, Homo sapien
ctgcaaccacaggacatcgtcgggc

SEQ ID NO: 310362 - DNA, 25 bp, Homo sapien
tgcaaccacaggacatcgtcgggca

SEQ ID NO: 310363 - DNA, 25 bp, Homo sapien
gcaaccacaggacatcgtcgggcat

SEQ ID NO: 310364 - DNA, 25 bp, Homo sapien
catcagcactcgagtgaacacctgt

SEQ ID NO: 310365 - DNA, 25 bp, Homo sapien
gagtgaacacctgtgaggtcaccca

SEQ ID NO: 310366 - DNA, 25 bp, Homo sapien
cactcgagtgaacacctgtgaggtc

SEQ ID NO: 310367 - DNA, 25 bp, Homo sapien
agcagacacatcagcactcgagtga

SEQ ID NO: 310368 - DNA, 25 bp, Homo sapien
gatcacccctgttagccaagtgagg

SEQ ID NO: 310369 - DNA, 25 bp, Homo sapien
tcaaagagactcatccgacgggaag

SEQ ID NO: 310370 - DNA, 25 bp, Homo sapien
aattcaggaagtagcggcatcccct

SEQ ID NO: 310371 - DNA, 25 bp, Homo sapien
tgattttcaggataacgcccaaccc

SEQ ID NO: 310372 - DNA, 25 bp, Homo sapien
cagggccagtcctgctcaggtgtgc

SEQ ID NO: 310373 - DNA, 25 bp, Homo sapien
tgtgcatggggaggcctgttggctg

SEQ ID NO: 310374 - DNA, 25 bp, Homo sapien
gccagtcctgctcaggtgtgcatgg

SEQ ID NO: 310375 - DNA, 25 bp, Homo sapien
ttggctgctcactggcatttgggac

SEQ ID NO: 310376 - DNA, 25 bp, Homo sapien
ccagcaggtactttattgcccaaga

SEQ ID NO: 310377 - DNA, 25 bp, Homo sapien
ggaaaggtggagagcccctcagcac

SEQ ID NO: 310378 - DNA, 25 bp, Homo sapien
tcagcaccagcaggtactttattgc

SEQ ID NO: 310379 - DNA, 25 bp, Homo sapien
cctgaggatggaccgcggggtggcc

SEQ ID NO: 310380 - DNA, 25 bp, Homo sapien
taatagggccacgaaacagtcagta

SEQ ID NO: 310381 - DNA, 25 bp, Homo sapien
gggtcactacacagcaatgcggagg

SEQ ID NO: 310382 - DNA, 25 bp, Homo sapien
gctggtccctgcagaaaataagcca

SEQ ID NO: 310383 - DNA, 25 bp, Homo sapien
gaacagtctgaccattaatagggcc

SEQ ID NO: 310384 - DNA, 25 bp, Homo sapien
ggagtctcactgcatctcgggtcac

SEQ ID NO: 310385 - DNA, 25 bp, Homo sapien
tacaaataacagtctgccataaggg

SEQ ID NO: 310386 - DNA, 25 bp, Homo sapien
gatgcataccgttcaccatagaaac

SEQ ID NO: 310387 - DNA, 25 bp, Homo sapien
tgggcaacacatataagcacgacaa

SEQ ID NO: 310388 - DNA, 25 bp, Homo sapien
agctcggtgtccaggatagagatgg

SEQ ID NO: 310389 - DNA, 25 bp, Homo sapien
gctgggccttggtgacaagctcggt

SEQ ID NO: 310390 - DNA, 25 bp, Homo sapien
ccttggtgacaagctcggtgtccag

SEQ ID NO: 310391 - DNA, 25 bp, Homo sapien
ggccttggtgacaagctcggtgtcc

SEQ ID NO: 310392 - DNA, 25 bp, Homo sapien
tcattgcctctatcagccagcacct

SEQ ID NO: 310393 - DNA, 25 bp, Homo sapien
gcctctatcagccagcacctgacct

SEQ ID NO: 310394 - DNA, 25 bp, Homo sapien
ctcattgcctctatcagccagcacc

SEQ ID NO: 310395 - DNA, 25 bp, Homo sapien
attgcctctatcagccagcacctga

SEQ ID NO: 310396 - DNA, 25 bp, Homo sapien
cacacggccgcggaggacgttctga

SEQ ID NO: 310397 - DNA, 25 bp, Homo sapien
gaagagcgttcactgacatccgcga

SEQ ID NO: 310398 - DNA, 25 bp, Homo sapien
tctgactgcgcaagcgaagagcgtt

SEQ ID NO: 310399 - DNA, 25 bp, Homo sapien
tctgcgagagggtccgctgggaggc

SEQ ID NO: 310400 - DNA, 25 bp, Homo sapien
ctgcccgggcgggacagagcgtctg

SEQ ID NO: 310401 - DNA, 25 bp, Homo sapien
gacgcggaacactgggggcggccat

SEQ ID NO: 310402 - DNA, 25 bp, Homo sapien
gcgggacagagcgtctgctgctgag

SEQ ID NO: 310403 - DNA, 25 bp, Homo sapien
gaacactgggggcggccatgattcc

SEQ ID NO: 310404 - DNA, 25 bp, Homo sapien
tccctctccagccgctgcctcgcag

SEQ ID NO: 310405 - DNA, 25 bp, Homo sapien
gttccctctccagccgctgcctcgc

SEQ ID NO: 310406 - DNA, 25 bp, Homo sapien
cctctccagccgctgcctcgcagag

SEQ ID NO: 310407 - DNA, 25 bp, Homo sapien
ggttccctctccagccgctgcctcg

SEQ ID NO: 310408 - DNA, 25 bp, Homo sapien
ctgggcgcagccacgagagcgtctc

SEQ ID NO: 310409 - DNA, 25 bp, Homo sapien
tatcaggttcctgctcgaaggtctg

SEQ ID NO: 310410 - DNA, 25 bp, Homo sapien
aagtctcgtccctcctatcaggttc

SEQ ID NO: 310411 - DNA, 25 bp, Homo sapien
aaggtctgcaagactcgctggcccg

SEQ ID NO: 310412 - DNA, 25 bp, Homo sapien
cactgcggtctaagacatcacagaa

SEQ ID NO: 310413 - DNA, 25 bp, Homo sapien
aagaaagagcacattcactgcggtc

SEQ ID NO: 310414 - DNA, 25 bp, Homo sapien
gaaagttggcaagtcctttgggcca

SEQ ID NO: 310415 - DNA, 25 bp, Homo sapien
gctggaagtgaccagtaaagagaga

SEQ ID NO: 310416 - DNA, 25 bp, Homo sapien
ctgctcccggcaggccgccacagga

SEQ ID NO: 310417 - DNA, 25 bp, Homo sapien
atatttcctttcagaagtcctgctc

SEQ ID NO: 310418 - DNA, 25 bp, Homo sapien
tgctcccggcaggccgccacaggag

SEQ ID NO: 310419 - DNA, 25 bp, Homo sapien
ctttcagaagtcctgctcccggcag

SEQ ID NO: 310420 - DNA, 25 bp, Homo sapien
tggttccggagactccacttatagc

SEQ ID NO: 310421 - DNA, 25 bp, Homo sapien
ctttggttccggagactccacttat

SEQ ID NO: 310422 - DNA, 25 bp, Homo sapien
gctccctttggttccggagactcca

SEQ ID NO: 310423 - DNA, 25 bp, Homo sapien
gtgctccctttggttccggagactc

SEQ ID NO: 310424 - DNA, 25 bp, Homo sapien
ttgctttgtatacatgagcccaaat

SEQ ID NO: 310425 - DNA, 25 bp, Homo sapien
gctttgtatacatgagcccaaatag

SEQ ID NO: 310426 - DNA, 25 bp, Homo sapien
tgctttgtatacatgagcccaaata

SEQ ID NO: 310427 - DNA, 25 bp, Homo sapien
tttgtatacatgagcccaaatagaa

SEQ ID NO: 310428 - DNA, 25 bp, Homo sapien
cagaatttggcacgaatcatgccat

SEQ ID NO: 310429 - DNA, 25 bp, Homo sapien
ttggtggttaactcactggtggtca

SEQ ID NO: 310430 - DNA, 25 bp, Homo sapien
tcagtagttgttcccttcaagtaga

SEQ ID NO: 310431 - DNA, 25 bp, Homo sapien
cagctattgctaatgagcaagttct

SEQ ID NO: 310432 - DNA, 25 bp, Homo sapien
agttgttcccttcaagtagaggtag

SEQ ID NO: 310433 - DNA, 25 bp, Homo sapien
tgttttcaagaatttcctgtttagc

SEQ ID NO: 310434 - DNA, 25 bp, Homo sapien
cctgtttagcttcaggctcaacttc

SEQ ID NO: 310435 - DNA, 25 bp, Homo sapien
ctcaacttcaacaaattcagcttct

SEQ ID NO: 310436 - DNA, 25 bp, Homo sapien
taatcctccaaaatcaggtccactt

SEQ ID NO: 310437 - DNA, 25 bp, Homo sapien
gatatcatctttagtccttccaagt

SEQ ID NO: 310438 - DNA, 25 bp, Homo sapien
gatgatatcatctttagtccttcca

SEQ ID NO: 310439 - DNA, 25 bp, Homo sapien
tgatatcatctttagtccttccaag

SEQ ID NO: 310440 - DNA, 25 bp, Homo sapien
atcatctttagtccttccaagtcca

SEQ ID NO: 310441 - DNA, 25 bp, Homo sapien
aacatccacttgtctaaaaattcca

SEQ ID NO: 310442 - DNA, 25 bp, Homo sapien
aatttttcacgggcttcatgagatt

SEQ ID NO: 310443 - DNA, 25 bp, Homo sapien
tgtcaatcaaaacatccacttgtct

SEQ ID NO: 310444 - DNA, 25 bp, Homo sapien
ttccaagacggagcaatttttcacg

SEQ ID NO: 310445 - DNA, 25 bp, Homo sapien
tcagttacttcaaaggtaacgtcta

SEQ ID NO: 310446 - DNA, 25 bp, Homo sapien
aacccatttggaagtgcgtcatcac

SEQ ID NO: 310447 - DNA, 25 bp, Homo sapien
atggtgttataactgcccgttaatc

SEQ ID NO: 310448 - DNA, 25 bp, Homo sapien
tgcccgttaatctcctcaattcagt

SEQ ID NO: 310449 - DNA, 25 bp, Homo sapien
ctgcacgaccaagaagattaggaag

SEQ ID NO: 310450 - DNA, 25 bp, Homo sapien
accaagaagattaggaagcttgagg

SEQ ID NO: 310451 - DNA, 25 bp, Homo sapien
caagaagattaggaagcttgaggcc

SEQ ID NO: 310452 - DNA, 25 bp, Homo sapien
gcacgaccaagaagattaggaagct

SEQ ID NO: 310453 - DNA, 25 bp, Homo sapien
agaaggacaggccatacgaagtttc

SEQ ID NO: 310454 - DNA, 25 bp, Homo sapien
tgaagaaggacaggccatacgaagt

SEQ ID NO: 310455 - DNA, 25 bp, Homo sapien
aggacaggccatacgaagtttcttt

SEQ ID NO: 310456 - DNA, 25 bp, Homo sapien
gacaggccatacgaagtttcttttg

SEQ ID NO: 310457 - DNA, 25 bp, Homo sapien
tcaacagacttaacactacgcccgt

SEQ ID NO: 310458 - DNA, 25 bp, Homo sapien
gaaacagtgattagaacttgcacac

SEQ ID NO: 310459 - DNA, 25 bp, Homo sapien
gaggaaatctacagcatgtggtcac

SEQ ID NO: 310460 - DNA, 25 bp, Homo sapien
taacttttctatcaggccagtgtac

SEQ ID NO: 310461 - DNA, 25 bp, Homo sapien
gctccaagggaactgtccagtaact

SEQ ID NO: 310462 - DNA, 25 bp, Homo sapien
tcccgcagtgagctccaagggaact

SEQ ID NO: 310463 - DNA, 25 bp, Homo sapien
ctctgtccgtctcccgcagtgagct

SEQ ID NO: 310464 - DNA, 25 bp, Homo sapien
ccagtaactttatataagtttacag

SEQ ID NO: 310465 - DNA, 25 bp, Homo sapien
ccaatggtgcctcgggtagtcagga

SEQ ID NO: 310466 - DNA, 25 bp, Homo sapien
tcaggaccaggttaaggagctgcta

SEQ ID NO: 310467 - DNA, 25 bp, Homo sapien
aaagaaaccttccagtgatctgacc

SEQ ID NO: 310468 - DNA, 25 bp, Homo sapien
tcgggtccctgtagcctgtactcgg

SEQ ID NO: 310469 - DNA, 25 bp, Homo sapien
tgggccccaaggataccactgagta

SEQ ID NO: 310470 - DNA, 25 bp, Homo sapien
cactgagtatgatctggtccgttcc

SEQ ID NO: 310471 - DNA, 25 bp, Homo sapien
tgcaggcagctctatcatcgacagg

SEQ ID NO: 310472 - DNA, 25 bp, Homo sapien
agatgatctgatggcgcaaacccca

SEQ ID NO: 310473 - DNA, 25 bp, Homo sapien
tcttttcgaacagcaaatgacgccg

SEQ ID NO: 310474 - DNA, 25 bp, Homo sapien
gcaaatgacgccgtccttgagaggc

SEQ ID NO: 310475 - DNA, 25 bp, Homo sapien
gaatgtccgctttcttttcgaacag

SEQ ID NO: 310476 - DNA, 25 bp, Homo sapien
cgaaagagatgatttcagtgaatgt

SEQ ID NO: 310477 - DNA, 25 bp, Homo sapien
ggtaagatggaagaattccgagaat

SEQ ID NO: 310478 - DNA, 25 bp, Homo sapien
gaagaattccgagaatcgatgacca

SEQ ID NO: 310479 - DNA, 25 bp, Homo sapien
aagcacctctccttggtaagatgga

SEQ ID NO: 310480 - DNA, 25 bp, Homo sapien
gcaaagcacctctccttggtaagat

SEQ ID NO: 310481 - DNA, 25 bp, Homo sapien
aatcaaatatgagttgcttgttcaa

SEQ ID NO: 310482 - DNA, 25 bp, Homo sapien
tcacatccccgccagtgtagcctgc

SEQ ID NO: 310483 - DNA, 25 bp, Homo sapien
gaagctcacatccccgccagtgtag

SEQ ID NO: 310484 - DNA, 25 bp, Homo sapien
cttgttcaactgaagttcaaaatct

SEQ ID NO: 310485 - DNA, 25 bp, Homo sapien
aagcagggtggggagatggcaacag

SEQ ID NO: 310486 - DNA, 25 bp, Homo sapien
gtaggagactgtcccagagagaagc

SEQ ID NO: 310487 - DNA, 25 bp, Homo sapien
cagccacagggctgtaggagactgt

SEQ ID NO: 310488 - DNA, 25 bp, Homo sapien
acagggctgtaggagactgtcccag

SEQ ID NO: 310489 - DNA, 25 bp, Homo sapien
agcagggcccggcttccattcggac

SEQ ID NO: 310490 - DNA, 25 bp, Homo sapien
tcaagacacaccgaaggcgagcagg

SEQ ID NO: 310491 - DNA, 25 bp, Homo sapien
gcttccattcggacacagggcaggc

SEQ ID NO: 310492 - DNA, 25 bp, Homo sapien
gggccacgtggattctattaaaaca

SEQ ID NO: 310493 - DNA, 25 bp, Homo sapien
gagctccgcgatggggtgcaagggc

SEQ ID NO: 310494 - DNA, 25 bp, Homo sapien
tgcctggcttgtcccgttgcagagc

SEQ ID NO: 310495 - DNA, 25 bp, Homo sapien
tgaatgcccgtggcgtgcagagctc

SEQ ID NO: 310496 - DNA, 25 bp, Homo sapien
ctggcttgtcccgttgcagagctac

SEQ ID NO: 310497 - DNA, 25 bp, Homo sapien
ccaggaacatcagcaactagcaact

SEQ ID NO: 310498 - DNA, 25 bp, Homo sapien
tccaggaacatcagcaactagcaac

SEQ ID NO: 310499 - DNA, 25 bp, Homo sapien
ccagcattcctttcactccaggaac

SEQ ID NO: 310500 - DNA, 25 bp, Homo sapien
atgcttgacggcttatcaccaatgg

SEQ ID NO: 310501 - DNA, 25 bp, Homo sapien
aatgggtaccaacattccgccccag

SEQ ID NO: 310502 - DNA, 25 bp, Homo sapien
ctatcagcaatgcttgacggcttat

SEQ ID NO: 310503 - DNA, 25 bp, Homo sapien
tgggtaccaacattccgccccagaa

SEQ ID NO: 310504 - DNA, 25 bp, Homo sapien
cgcgggaggctaagaacaccctgca

SEQ ID NO: 310505 - DNA, 25 bp, Homo sapien
gccgcgggaggctaagaacaccctg

SEQ ID NO: 310506 - DNA, 25 bp, Homo sapien
ccgcgggaggctaagaacaccctgc

SEQ ID NO: 310507 - DNA, 25 bp, Homo sapien
gctctgtggcccgatgctgtgcatg

SEQ ID NO: 310508 - DNA, 25 bp, Homo sapien
aatccgcggatgcttgtgggtcccc

SEQ ID NO: 310509 - DNA, 25 bp, Homo sapien
gctgtgcatgctgaatccgcggatg

SEQ ID NO: 310510 - DNA, 25 bp, Homo sapien
tctgtggcccgatgctgtgcatgct

SEQ ID NO: 310511 - DNA, 25 bp, Homo sapien
gcccagcatttttagcgcagtgaag

SEQ ID NO: 310512 - DNA, 25 bp, Homo sapien
gaagccactttgtgtgatcctggaa

SEQ ID NO: 310513 - DNA, 25 bp, Homo sapien
ttaacacgtgaccaaacaactgcgc

SEQ ID NO: 310514 - DNA, 25 bp, Homo sapien
catggatagttcaaagacctgtcgt

SEQ ID NO: 310515 - DNA, 25 bp, Homo sapien
tgtaaacaacgccacacagtgctgg

SEQ ID NO: 310516 - DNA, 25 bp, Homo sapien
tctcaggtaggtaaaggctcagctc

SEQ ID NO: 310517 - DNA, 25 bp, Homo sapien
tacattcttgcccacagagtctggc

SEQ ID NO: 310518 - DNA, 25 bp, Homo sapien
tagcatgtggagatacctctgacgg

SEQ ID NO: 310519 - DNA, 25 bp, Homo sapien
ggcccagtacgcttctccacctagg

SEQ ID NO: 310520 - DNA, 25 bp, Homo sapien
tttcctgcgttgagaaagaagtgtg

SEQ ID NO: 310521 - DNA, 25 bp, Homo sapien
ctggcctggccggaaaggtaatggg

SEQ ID NO: 310522 - DNA, 25 bp, Homo sapien
tgtgttcggaaaagttctccaaagc

SEQ ID NO: 310523 - DNA, 25 bp, Homo sapien
tgtaatctaaaaagacagacatggc

SEQ ID NO: 310524 - DNA, 25 bp, Homo sapien
tctaggaagctttccaggcacccct

SEQ ID NO: 310525 - DNA, 25 bp, Homo sapien
ttttttcaagtaaggcacagtctct

SEQ ID NO: 310526 - DNA, 25 bp, Homo sapien
gaggaaggcacccaatcctactcag

SEQ ID NO: 310527 - DNA, 25 bp, Homo sapien
aagacctgtgagcaacagtgcgtgc

SEQ ID NO: 310528 - DNA, 25 bp, Homo sapien
ggagccacacttactcacatccaga

SEQ ID NO: 310529 - DNA, 25 bp, Homo sapien
tgtttttaaagccaggcctagagat

SEQ ID NO: 310530 - DNA, 25 bp, Homo sapien
tgcatgaagtgagattaggacccag

SEQ ID NO: 310531 - DNA, 25 bp, Homo sapien
ccatggggacgcagtaattaagttc

SEQ ID NO: 310532 - DNA, 25 bp, Homo sapien
gagcgatgttgccaagcctgaggac

SEQ ID NO: 310533 - DNA, 25 bp, Homo sapien
ccagcttacgaatatgagctttggg

SEQ ID NO: 310534 - DNA, 25 bp, Homo sapien
gtacgaccagcggatgcactcagcc

SEQ ID NO: 310535 - DNA, 25 bp, Homo sapien
cactaatgaaattaaccacgtccaa

SEQ ID NO: 310536 - DNA, 25 bp, Homo sapien
gggatgtgattgtggaaaataattc

SEQ ID NO: 310537 - DNA, 25 bp, Homo sapien
gtgattgtggaaaataattcccaac

SEQ ID NO: 310538 - DNA, 25 bp, Homo sapien
aaagccactaatgaaattaaccacg

SEQ ID NO: 310539 - DNA, 25 bp, Homo sapien
atatacaaaaaattagccgggtgtg

SEQ ID NO: 310540 - DNA, 25 bp, Homo sapien
gtgacgcatgcctgtaatcccaact

SEQ ID NO: 310541 - DNA, 25 bp, Homo sapien
gaaaccctgtctctactaaatatac

SEQ ID NO: 310542 - DNA, 25 bp, Homo sapien
ttgacaccaccctgaccaacatggt

SEQ ID NO: 310543 - DNA, 25 bp, Homo sapien
tccagaactggcagagtatgaacat

SEQ ID NO: 310544 - DNA, 25 bp, Homo sapien
taagagacagtatgaacactgttgt

SEQ ID NO: 310545 - DNA, 25 bp, Homo sapien
gctgaggtgcagacgaggtaacgaa

SEQ ID NO: 310546 - DNA, 25 bp, Homo sapien
cctgacaggatggtgttgatacctg

SEQ ID NO: 310547 - DNA, 25 bp, Homo sapien
ctggcaagagtgtaaggagcagatt

SEQ ID NO: 310548 - DNA, 25 bp, Homo sapien
gcagattccgctgaagcaataaccg

SEQ ID NO: 310549 - DNA, 25 bp, Homo sapien
cgctgaagcaataaccgtaaaggac

SEQ ID NO: 310550 - DNA, 25 bp, Homo sapien
ccccagacgcggagcagatgctgaa

SEQ ID NO: 310551 - DNA, 25 bp, Homo sapien
atgcatgcagcctgcgtgactacac

SEQ ID NO: 310552 - DNA, 25 bp, Homo sapien
taaaagccgcgttgacttctcaggg

SEQ ID NO: 310553 - DNA, 25 bp, Homo sapien
aaatgtcacgtgcttaggatgctgc

SEQ ID NO: 310554 - DNA, 25 bp, Homo sapien
aagaaacttgcaaaaccagcctggt

SEQ ID NO: 310555 - DNA, 25 bp, Homo sapien
caaatgagaacctggctgttaggcc

SEQ ID NO: 310556 - DNA, 25 bp, Homo sapien
gttctttccgacacactgccatgca

SEQ ID NO: 310557 - DNA, 25 bp, Homo sapien
tccacacagtggttaagaacctggg

SEQ ID NO: 310558 - DNA, 25 bp, Homo sapien
ttaggaaaccagcagtacccacagc

SEQ ID NO: 310559 - DNA, 25 bp, Homo sapien
gggtttagcctgaccacctcttaga

SEQ ID NO: 310560 - DNA, 25 bp, Homo sapien
ttgctggttaagaaccttcaccagc

SEQ ID NO: 310561 - DNA, 25 bp, Homo sapien
tggttaagccctcggagaatggaaa

SEQ ID NO: 310562 - DNA, 25 bp, Homo sapien
taagaaccttcaccagctggttaag

SEQ ID NO: 310563 - DNA, 25 bp, Homo sapien
ttcaccagctggttaagccctcgga

SEQ ID NO: 310564 - DNA, 25 bp, Homo sapien
gagcatgcgcctctcagaaggtgcc

SEQ ID NO: 310565 - DNA, 25 bp, Homo sapien
aaaaaaggggagagatcagatgcgg

SEQ ID NO: 310566 - DNA, 25 bp, Homo sapien
gcatgcgcctctcagaaggtgccgc

SEQ ID NO: 310567 - DNA, 25 bp, Homo sapien
ggggagagatcagatgcggcggccg

SEQ ID NO: 310568 - DNA, 25 bp, Homo sapien
cttatcccagctccaaactggacgc

SEQ ID NO: 310569 - DNA, 25 bp, Homo sapien
tatcccagctccaaactggacgcca

SEQ ID NO: 310570 - DNA, 25 bp, Homo sapien
ttatcccagctccaaactggacgcc

SEQ ID NO: 310571 - DNA, 25 bp, Homo sapien
tttcctcgagagacggtgtgtggca

SEQ ID NO: 310572 - DNA, 25 bp, Homo sapien
tgaaccgcgtttcctcgagagacgg

SEQ ID NO: 310573 - DNA, 25 bp, Homo sapien
agaatcgctgaaccgcgtttcctcg

SEQ ID NO: 310574 - DNA, 25 bp, Homo sapien
tggcatgggcgccttgctgctgccc

SEQ ID NO: 310575 - DNA, 25 bp, Homo sapien
catttattgacggggtttcccacag

SEQ ID NO: 310576 - DNA, 25 bp, Homo sapien
gaaccaaacacggagactcgcagac

SEQ ID NO: 310577 - DNA, 25 bp, Homo sapien
cactcaaatggctcgagcactgtgg

SEQ ID NO: 310578 - DNA, 25 bp, Homo sapien
tctgacaacggctggtgcatcgagg

SEQ ID NO: 310579 - DNA, 25 bp, Homo sapien
tctccgtaacagcatggctgagctt

SEQ ID NO: 310580 - DNA, 25 bp, Homo sapien
tctcaggtgaccctttcgctgggtt

SEQ ID NO: 310581 - DNA, 25 bp, Homo sapien
gctttcattaaggagctggctgtag

SEQ ID NO: 310582 - DNA, 25 bp, Homo sapien
gggtaccccagacttgcttgattaa

SEQ ID NO: 310583 - DNA, 25 bp, Homo sapien
ggctgtagcgacctggggtacccca

SEQ ID NO: 310584 - DNA, 25 bp, Homo sapien
ggatgaacagaacccgcattttcac

SEQ ID NO: 310585 - DNA, 25 bp, Homo sapien
aacagaacccgcattttcacccagg

SEQ ID NO: 310586 - DNA, 25 bp, Homo sapien
atgaacagaacccgcattttcaccc

SEQ ID NO: 310587 - DNA, 25 bp, Homo sapien
actgttttcacttcacctgtggagg

SEQ ID NO: 310588 - DNA, 25 bp, Homo sapien
ttgtagacagcagccaggtacaaaa

SEQ ID NO: 310589 - DNA, 25 bp, Homo sapien
agacagcagccaggtacaaaagagc

SEQ ID NO: 310590 - DNA, 25 bp, Homo sapien
gtagacagcagccaggtacaaaaga

SEQ ID NO: 310591 - DNA, 25 bp, Homo sapien
cttgtagacagcagccaggtacaaa

SEQ ID NO: 310592 - DNA, 25 bp, Homo sapien
gaaaatgtggcctgatggcagatcc

SEQ ID NO: 310593 - DNA, 25 bp, Homo sapien
ttagtttaaggagctgccggagatg

SEQ ID NO: 310594 - DNA, 25 bp, Homo sapien
cctagtagcgatggcatttggcaga

SEQ ID NO: 310595 - DNA, 25 bp, Homo sapien
gacgtcaaagtgtagggcctttgca

SEQ ID NO: 310596 - DNA, 25 bp, Homo sapien
tgtgcacatctaactgtcccaaagg

SEQ ID NO: 310597 - DNA, 25 bp, Homo sapien
ctgtcccaaaggtaaatttatctgg

SEQ ID NO: 310598 - DNA, 25 bp, Homo sapien
actgtcccaaaggtaaatttatctg

SEQ ID NO: 310599 - DNA, 25 bp, Homo sapien
acatctaactgtcccaaaggtaaat

SEQ ID NO: 310600 - DNA, 25 bp, Homo sapien
ggtgatctttaaacacatggtgcat

SEQ ID NO: 310601 - DNA, 25 bp, Homo sapien
ctttggtgatctttaaacacatggt

SEQ ID NO: 310602 - DNA, 25 bp, Homo sapien
tgttctctggactaaggaatcccct

SEQ ID NO: 310603 - DNA, 25 bp, Homo sapien
tttgttctctggactaaggaatccc

SEQ ID NO: 310604 - DNA, 25 bp, Homo sapien
acattttttgtttgtcggatccagt

SEQ ID NO: 310605 - DNA, 25 bp, Homo sapien
gtttgtcggatccagtttctcaaga

SEQ ID NO: 310606 - DNA, 25 bp, Homo sapien
gacttctgagtacaacctgatttta

SEQ ID NO: 310607 - DNA, 25 bp, Homo sapien
caagagaagctagaaatttggactt

SEQ ID NO: 310608 - DNA, 25 bp, Homo sapien
gagccagggagaagtgaaccagcca

SEQ ID NO: 310609 - DNA, 25 bp, Homo sapien
tgagccagggagaagtgaaccagcc

SEQ ID NO: 310610 - DNA, 25 bp, Homo sapien
agccagggagaagtgaaccagccag

SEQ ID NO: 310611 - DNA, 25 bp, Homo sapien
gagcatattcagatgtttccactcc

SEQ ID NO: 310612 - DNA, 25 bp, Homo sapien
gcatattcagatgtttccactcctg

SEQ ID NO: 310613 - DNA, 25 bp, Homo sapien
ttgagcatattcagatgtttccact

SEQ ID NO: 310614 - DNA, 25 bp, Homo sapien
tgagcatattcagatgtttccactc

SEQ ID NO: 310615 - DNA, 25 bp, Homo sapien
atgttgtgcagagtagtctcaaatt

SEQ ID NO: 310616 - DNA, 25 bp, Homo sapien
gccctcatccactttctgacagttt

SEQ ID NO: 310617 - DNA, 25 bp, Homo sapien
gttgtgcagagtagtctcaaattcc

SEQ ID NO: 310618 - DNA, 25 bp, Homo sapien
cactatgttgtgcagagtagtctca

SEQ ID NO: 310619 - DNA, 25 bp, Homo sapien
gtgtctgtgattaccattcgcccca

SEQ ID NO: 310620 - DNA, 25 bp, Homo sapien
tacaactctggcaccgagacgtgtg

SEQ ID NO: 310621 - DNA, 25 bp, Homo sapien
taattgaccggcacatccatctagt

SEQ ID NO: 310622 - DNA, 25 bp, Homo sapien
ggctggctattatctcaaccctgcg

SEQ ID NO: 310623 - DNA, 25 bp, Homo sapien
cagcagcggcaactacaggtcattt

SEQ ID NO: 310624 - DNA, 25 bp, Homo sapien
ggctgccgcagcacattataacagg

SEQ ID NO: 310625 - DNA, 25 bp, Homo sapien
tataacagggcttaatctctctggg

SEQ ID NO: 310626 - DNA, 25 bp, Homo sapien
taaacctgacggcagttgccagaag

SEQ ID NO: 310627 - DNA, 25 bp, Homo sapien
aaagggtcctcactgacttcgcgcg

SEQ ID NO: 310628 - DNA, 25 bp, Homo sapien
taaacatcttaaggcaggaactacg

SEQ ID NO: 310629 - DNA, 25 bp, Homo sapien
gacataggtccagaaagtttgagcc

SEQ ID NO: 310630 - DNA, 25 bp, Homo sapien
tattggtcttgtgaccctgcagcca

SEQ ID NO: 310631 - DNA, 25 bp, Homo sapien
cactaagagcttgatcgctgtcccc

SEQ ID NO: 310632 - DNA, 25 bp, Homo sapien
tgaatgaacggaaggtagtggccac

SEQ ID NO: 310633 - DNA, 25 bp, Homo sapien
cactgacagtaggtggatggtaacc

SEQ ID NO: 310634 - DNA, 25 bp, Homo sapien
aacgcagcctcgcacacactaagag

SEQ ID NO: 310635 - DNA, 25 bp, Homo sapien
taaaactttctcgtggagaagagga

SEQ ID NO: 310636 - DNA, 25 bp, Homo sapien
aaactttctcgtggagaagaggaat

SEQ ID NO: 310637 - DNA, 25 bp, Homo sapien
ctaaaactttctcgtggagaagagg

SEQ ID NO: 310638 - DNA, 25 bp, Homo sapien
tcttgccttgggggattggaaaagc

SEQ ID NO: 310639 - DNA, 25 bp, Homo sapien
gggaaggcatgaaaagactattcaa

SEQ ID NO: 310640 - DNA, 25 bp, Homo sapien
aagactattcaaacatcactgctac

SEQ ID NO: 310641 - DNA, 25 bp, Homo sapien
tcaaattcgcaaggaaatcagtaaa

SEQ ID NO: 310642 - DNA, 25 bp, Homo sapien
tgctacttaaatactataatgagct

SEQ ID NO: 310643 - DNA, 25 bp, Homo sapien
cgcagcgcgtgtggagccgcccggt

SEQ ID NO: 310644 - DNA, 25 bp, Homo sapien
ggcgggcgcagcgcgtgtggagccg

SEQ ID NO: 310645 - DNA, 25 bp, Homo sapien
agcgcgtgtggagccgcccggtcgc

SEQ ID NO: 310646 - DNA, 25 bp, Homo sapien
gggcgcagcgcgtgtggagccgccc

SEQ ID NO: 310647 - DNA, 25 bp, Homo sapien
cggggtgggcgagcgcggcgcggag

SEQ ID NO: 310648 - DNA, 25 bp, Homo sapien
tgggcgagcgcggcgcggaggacat

SEQ ID NO: 310649 - DNA, 25 bp, Homo sapien
gccgcggggtgggcgagcgcggcgc

SEQ ID NO: 310650 - DNA, 25 bp, Homo sapien
tgcggggccgcggggtgggcgagcg

SEQ ID NO: 310651 - DNA, 25 bp, Homo sapien
tcctggccagggtgccgcccagctt

SEQ ID NO: 310652 - DNA, 25 bp, Homo sapien
tgcccaggaacgactcgtccttctt

SEQ ID NO: 310653 - DNA, 25 bp, Homo sapien
ccaggaacgactcgtccttcttcat

SEQ ID NO: 310654 - DNA, 25 bp, Homo sapien
agcttgcccaggaacgactcgtcct

SEQ ID NO: 310655 - DNA, 25 bp, Homo sapien
aagagctgaacacccggcaggcaga

SEQ ID NO: 310656 - DNA, 25 bp, Homo sapien
caggcgcccgcacgcgcgtttggca

SEQ ID NO: 310657 - DNA, 25 bp, Homo sapien
gaagagctgaacacccggcaggcag

SEQ ID NO: 310658 - DNA, 25 bp, Homo sapien
gcacgcgcgtttggcagactccgga

SEQ ID NO: 310659 - DNA, 25 bp, Homo sapien
aagggtgacagccactaatcatgtc

SEQ ID NO: 310660 - DNA, 25 bp, Homo sapien
tgatgactgcatggaagaacagtgg

SEQ ID NO: 310661 - DNA, 25 bp, Homo sapien
tttaggagacgtgaccaacaccgac

SEQ ID NO: 310662 - DNA, 25 bp, Homo sapien
gcgtctataatcgttgcaagccata

SEQ ID NO: 310663 - DNA, 25 bp, Homo sapien
gaagagatgctccacttcatacctc

SEQ ID NO: 310664 - DNA, 25 bp, Homo sapien
tgaccttaatagacacttcactgaa

SEQ ID NO: 310665 - DNA, 25 bp, Homo sapien
tgagccaatgaccttaatagacact

SEQ ID NO: 310666 - DNA, 25 bp, Homo sapien
aagagatgctccacttcatacctca

SEQ ID NO: 310667 - DNA, 25 bp, Homo sapien
tcaaccttcagttcaatgtcgcagc

SEQ ID NO: 310668 - DNA, 25 bp, Homo sapien
tggctccgtgtaaaagatggatgcc

SEQ ID NO: 310669 - DNA, 25 bp, Homo sapien
catctacacaactgatggctccgtg

SEQ ID NO: 310670 - DNA, 25 bp, Homo sapien
ggatgccctgaaggaaattctcggt

SEQ ID NO: 310671 - DNA, 25 bp, Homo sapien
gcagagtttccgacagctcttagta

SEQ ID NO: 310672 - DNA, 25 bp, Homo sapien
acccacgtggtgcaggtcgactttg

SEQ ID NO: 310673 - DNA, 25 bp, Homo sapien
cagctcttagtaggccttcaagaaa

SEQ ID NO: 310674 - DNA, 25 bp, Homo sapien
gtcgactttgctgccccggacaaca

SEQ ID NO: 310675 - DNA, 25 bp, Homo sapien
taaaaaggggttctctctatgttgc

SEQ ID NO: 310676 - DNA, 25 bp, Homo sapien
ataaaaaggggttctctctatgttg

SEQ ID NO: 310677 - DNA, 25 bp, Homo sapien
tgagccaacgcactccttctattaa

SEQ ID NO: 310678 - DNA, 25 bp, Homo sapien
agccaacgcactccttctattaaac

SEQ ID NO: 310679 - DNA, 25 bp, Homo sapien
gcctgagtgagtagcagctgtccta

SEQ ID NO: 310680 - DNA, 25 bp, Homo sapien
cagattcctacttctgttgagcaaa

SEQ ID NO: 310681 - DNA, 25 bp, Homo sapien
gggcattccctgttcttctcatgtg

SEQ ID NO: 310682 - DNA, 25 bp, Homo sapien
tccagcctttcccatgggtctgcgg

SEQ ID NO: 310683 - DNA, 25 bp, Homo sapien
gttttgacaaatgctgcacctgcgt

SEQ ID NO: 310684 - DNA, 25 bp, Homo sapien
tggtccccaagctgtttccaagtac

SEQ ID NO: 310685 - DNA, 25 bp, Homo sapien
cctgtaccggcaccttgttccttga

SEQ ID NO: 310686 - DNA, 25 bp, Homo sapien
gagagtctcgggtgatttcctgtac

SEQ ID NO: 310687 - DNA, 25 bp, Homo sapien
ggcctccatacgacacaaatttcta

SEQ ID NO: 310688 - DNA, 25 bp, Homo sapien
agggctgcattccctctagaagctc

SEQ ID NO: 310689 - DNA, 25 bp, Homo sapien
gcccggcctccatacgacacaaatt

SEQ ID NO: 310690 - DNA, 25 bp, Homo sapien
tctatcttgtggttccggatgccag

SEQ ID NO: 310691 - DNA, 25 bp, Homo sapien
caccaggatttttagaacctcaaag

SEQ ID NO: 310692 - DNA, 25 bp, Homo sapien
cacaccaggatttttagaacctcaa

SEQ ID NO: 310693 - DNA, 25 bp, Homo sapien
caggatttttagaacctcaaagctc

SEQ ID NO: 310694 - DNA, 25 bp, Homo sapien
gatttttagaacctcaaagctccca

SEQ ID NO: 310695 - DNA, 25 bp, Homo sapien
ctatggtaccaccacgtcccctgat

SEQ ID NO: 310696 - DNA, 25 bp, Homo sapien
cctgtatgcatcgactgcctcctac

SEQ ID NO: 310697 - DNA, 25 bp, Homo sapien
tgcagttcccaacactggttttggt

SEQ ID NO: 310698 - DNA, 25 bp, Homo sapien
ccaggtccccagcactgatgtggtc

SEQ ID NO: 310699 - DNA, 25 bp, Homo sapien
tttcctgctgggagacttgatgcag

SEQ ID NO: 310700 - DNA, 25 bp, Homo sapien
aatccaggtccccaatgctgatcca

SEQ ID NO: 310701 - DNA, 25 bp, Homo sapien
ggcacacaccccgttcatataggga

SEQ ID NO: 310702 - DNA, 25 bp, Homo sapien
gggcgccactatgacttgcacttca

SEQ ID NO: 310703 - DNA, 25 bp, Homo sapien
gcacttcaagggaaagcctctttgg

SEQ ID NO: 310704 - DNA, 25 bp, Homo sapien
cccgttcatatagggacgtggcagg

SEQ ID NO: 310705 - DNA, 25 bp, Homo sapien
gaaacggccgtgcagaagctaagtc

SEQ ID NO: 310706 - DNA, 25 bp, Homo sapien
tgagatactcaaagaaccaccatgg

SEQ ID NO: 310707 - DNA, 25 bp, Homo sapien
gaagcacgttcgctggttcccaagt

SEQ ID NO: 310708 - DNA, 25 bp, Homo sapien
tccagggaagtccaaagcgttgtct

SEQ ID NO: 310709 - DNA, 25 bp, Homo sapien
ggcatcgggatccttcgcttgggct

SEQ ID NO: 310710 - DNA, 25 bp, Homo sapien
aaggtgcggctctgtgccaactcac

SEQ ID NO: 310711 - DNA, 25 bp, Homo sapien
caggcctctgccaggaaatgacagc

SEQ ID NO: 310712 - DNA, 25 bp, Homo sapien
gaataactaacttcatcaggcacga

SEQ ID NO: 310713 - DNA, 25 bp, Homo sapien
aagtgccggctgtcttcagtcacag

SEQ ID NO: 310714 - DNA, 25 bp, Homo sapien
gtgtggagggtgtgagcttccaagg

SEQ ID NO: 310715 - DNA, 25 bp, Homo sapien
attctctcagtgtctggagggtgtg

SEQ ID NO: 310716 - DNA, 25 bp, Homo sapien
ggagggtgtgagcttccaagggact

SEQ ID NO: 310717 - DNA, 25 bp, Homo sapien
gaaccttgaacacctctagctctgg

SEQ ID NO: 310718 - DNA, 25 bp, Homo sapien
gatggaacagcaagggggtgtggca

SEQ ID NO: 310719 - DNA, 25 bp, Homo sapien
ttaacaccagaatcaccttgaacct

SEQ ID NO: 310720 - DNA, 25 bp, Homo sapien
cctccacagcggcagatgatggaac

SEQ ID NO: 310721 - DNA, 25 bp, Homo sapien
cttgccttcttcctgcaggtcactc

SEQ ID NO: 310722 - DNA, 25 bp, Homo sapien
tcttgccttcttcctgcaggtcact

SEQ ID NO: 310723 - DNA, 25 bp, Homo sapien
ttgccttcttcctgcaggtcactca

SEQ ID NO: 310724 - DNA, 25 bp, Homo sapien
ggcgggggacatcggtgagttgatg

SEQ ID NO: 310725 - DNA, 25 bp, Homo sapien
agggcgggggacatcggtgagttga

SEQ ID NO: 310726 - DNA, 25 bp, Homo sapien
cgggggacatcggtgagttgatggc

SEQ ID NO: 310727 - DNA, 25 bp, Homo sapien
ggggacatcggtgagttgatggcat

SEQ ID NO: 310728 - DNA, 25 bp, Homo sapien
agatggtaaaccaccctctgtgagc

SEQ ID NO: 310729 - DNA, 25 bp, Homo sapien
cctagagatggtaaaccaccctctg

SEQ ID NO: 310730 - DNA, 25 bp, Homo sapien
gactctggagagattgcacctccag

SEQ ID NO: 310731 - DNA, 25 bp, Homo sapien
gagagattgcacctccagggcaagc

SEQ ID NO: 310732 - DNA, 25 bp, Homo sapien
ggacttcagaaagaatcaggtgctg

SEQ ID NO: 310733 - DNA, 25 bp, Homo sapien
ctcaacttcttcagactcaggcaat

SEQ ID NO: 310734 - DNA, 25 bp, Homo sapien
ggtgctgtgcaaatattcagtgagt

SEQ ID NO: 310735 - DNA, 25 bp, Homo sapien
atatgaaatatacaaagaggacttc

SEQ ID NO: 310736 - DNA, 25 bp, Homo sapien
ggtcagacatgggctcagaatcttc

SEQ ID NO: 310737 - DNA, 25 bp, Homo sapien
tagtggtcgctaaactgtgccatgc

SEQ ID NO: 310738 - DNA, 25 bp, Homo sapien
tgggtacagcaagcgctgctccatc

SEQ ID NO: 310739 - DNA, 25 bp, Homo sapien
tcgaggagcccacagtcccgggaca

SEQ ID NO: 310740 - DNA, 25 bp, Homo sapien
cccgtggggtagctttcattcctga

SEQ ID NO: 310741 - DNA, 25 bp, Homo sapien
ccccgtggggtagctttcattcctg

SEQ ID NO: 310742 - DNA, 25 bp, Homo sapien
aggaatggggcgtctgacccagaga

SEQ ID NO: 310743 - DNA, 25 bp, Homo sapien
tcggcgggaccactgagaggaatgg

SEQ ID NO: 310744 - DNA, 25 bp, Homo sapien
atgccatggtggctcggatgtccca

SEQ ID NO: 310745 - DNA, 25 bp, Homo sapien
cacgtctgaccccagactgggcagc

SEQ ID NO: 310746 - DNA, 25 bp, Homo sapien
gggtcaatcatcgtgcgctcctcgt

SEQ ID NO: 310747 - DNA, 25 bp, Homo sapien
cttccttggaagtggggtcaatcat

SEQ ID NO: 310748 - DNA, 25 bp, Homo sapien
gtcaatcatcgtgcgctcctcgttc

SEQ ID NO: 310749 - DNA, 25 bp, Homo sapien
gaagtggggtcaatcatcgtgcgct

SEQ ID NO: 310750 - DNA, 25 bp, Homo sapien
caaagccaagtcctcgccctaagag

SEQ ID NO: 310751 - DNA, 25 bp, Homo sapien
caagtcctcgccctaagaggaagat

SEQ ID NO: 310752 - DNA, 25 bp, Homo sapien
tcgccctaagaggaagattccaacc

SEQ ID NO: 310753 - DNA, 25 bp, Homo sapien
tcctcgccctaagaggaagattcca

SEQ ID NO: 310754 - DNA, 25 bp, Homo sapien
gactggtcgttaaagccccagccga

SEQ ID NO: 310755 - DNA, 25 bp, Homo sapien
gctctgtccagcaaagagttcacaa

SEQ ID NO: 310756 - DNA, 25 bp, Homo sapien
aaggtactacactagctcacgccag

SEQ ID NO: 310757 - DNA, 25 bp, Homo sapien
cgcttggcacttcgggctggatcct

SEQ ID NO: 310758 - DNA, 25 bp, Homo sapien
atctttagaaaggtgcatgggatgg

SEQ ID NO: 310759 - DNA, 25 bp, Homo sapien
caaggagataatcctgtgaatggag

SEQ ID NO: 310760 - DNA, 25 bp, Homo sapien
aggagataatcctgtgaatggagtt

SEQ ID NO: 310761 - DNA, 25 bp, Homo sapien
gagataatcctgtgaatggagtttg

SEQ ID NO: 310762 - DNA, 25 bp, Homo sapien
agcctgctttgagacgcaacctgca

SEQ ID NO: 310763 - DNA, 25 bp, Homo sapien
gacagttgcagtaacaggcatctca

SEQ ID NO: 310764 - DNA, 25 bp, Homo sapien
aatatgcctggacgcacagagagcc

SEQ ID NO: 310765 - DNA, 25 bp, Homo sapien
gggagtccctctagcaaatgaccaa

SEQ ID NO: 310766 - DNA, 25 bp, Homo sapien
ttggtgtgaccaccgtcagctgcat

SEQ ID NO: 310767 - DNA, 25 bp, Homo sapien
tatgcatcattactgacaggcttgg

SEQ ID NO: 310768 - DNA, 25 bp, Homo sapien
caggcttggtgtgaccaccgtcagc

SEQ ID NO: 310769 - DNA, 25 bp, Homo sapien
gcatcattactgacaggcttggtgt

SEQ ID NO: 310770 - DNA, 25 bp, Homo sapien
agcacctggccgtcatacaggtctt

SEQ ID NO: 310771 - DNA, 25 bp, Homo sapien
acgtcattaatccagtcgaggagga

SEQ ID NO: 310772 - DNA, 25 bp, Homo sapien
tggccgtcatacaggtcttcctcca

SEQ ID NO: 310773 - DNA, 25 bp, Homo sapien
cgtcattaatccagtcgaggaggac

SEQ ID NO: 310774 - DNA, 25 bp, Homo sapien
cactatgcagagaatcctggcccag

SEQ ID NO: 310775 - DNA, 25 bp, Homo sapien
gacctgtggccgatgtcactatgca

SEQ ID NO: 310776 - DNA, 25 bp, Homo sapien
ttgagtgtcttcctaggacctgtgg

SEQ ID NO: 310777 - DNA, 25 bp, Homo sapien
ggagagaggaccctgaagccacagc

SEQ ID NO: 310778 - DNA, 25 bp, Homo sapien
tgagacccaacaggatgggagccgc

SEQ ID NO: 310779 - DNA, 25 bp, Homo sapien
acccaacaggatgggagccgcaggc

SEQ ID NO: 310780 - DNA, 25 bp, Homo sapien
gatgggagccgcaggcagttttgga

SEQ ID NO: 310781 - DNA, 25 bp, Homo sapien
atgggagccgcaggcagttttggaa

SEQ ID NO: 310782 - DNA, 25 bp, Homo sapien
cctcccatcctgaaccgaaggagtt

SEQ ID NO: 310783 - DNA, 25 bp, Homo sapien
tcccatcctgaaccgaaggagttca

SEQ ID NO: 310784 - DNA, 25 bp, Homo sapien
ccatcctgaaccgaaggagttcaag

SEQ ID NO: 310785 - DNA, 25 bp, Homo sapien
tgcctcccatcctgaaccgaaggag

SEQ ID NO: 310786 - DNA, 25 bp, Homo sapien
gggagatgggaagcctgacgcgccc

SEQ ID NO: 310787 - DNA, 25 bp, Homo sapien
tgggaagcctgacgcgcccccgttg

SEQ ID NO: 310788 - DNA, 25 bp, Homo sapien
acctgccaccatccggccccgcaga

SEQ ID NO: 310789 - DNA, 25 bp, Homo sapien
ccatccggccccgcagactgaacat

SEQ ID NO: 310790 - DNA, 25 bp, Homo sapien
acattcagcttgcaccctgccagtt

SEQ ID NO: 310791 - DNA, 25 bp, Homo sapien
gactgtgtcacctcagccacattca

SEQ ID NO: 310792 - DNA, 25 bp, Homo sapien
tctgtttctgccctatttcggactg

SEQ ID NO: 310793 - DNA, 25 bp, Homo sapien
gggccgcagcaggtcatgtactgct

SEQ ID NO: 310794 - DNA, 25 bp, Homo sapien
gagcagggagatgaacccaatttta

SEQ ID NO: 310795 - DNA, 25 bp, Homo sapien
cccaattttaagatgcaaggccaga

SEQ ID NO: 310796 - DNA, 25 bp, Homo sapien
acgaatgtcgagaggacgggctccc

SEQ ID NO: 310797 - DNA, 25 bp, Homo sapien
tgacaaatgtggatgacgaatgtcg

SEQ ID NO: 310798 - DNA, 25 bp, Homo sapien
ctgcaccgttacatgctcaggaagg

SEQ ID NO: 310799 - DNA, 25 bp, Homo sapien
accacctgcaccgttacatgctcag

SEQ ID NO: 310800 - DNA, 25 bp, Homo sapien
cacctgcaccgttacatgctcagga

SEQ ID NO: 310801 - DNA, 25 bp, Homo sapien
ctcaggaaggcggatgggggccctg

SEQ ID NO: 310802 - DNA, 25 bp, Homo sapien
tctgtagttgtggtcagctcctccg

SEQ ID NO: 310803 - DNA, 25 bp, Homo sapien
tggaatgcagcaggccttcccgttt

SEQ ID NO: 310804 - DNA, 25 bp, Homo sapien
cagctcctccgagatgtggctggaa

SEQ ID NO: 310805 - DNA, 25 bp, Homo sapien
gttgtggtcagctcctccgagatgt

SEQ ID NO: 310806 - DNA, 25 bp, Homo sapien
gccctgatctcaggcaggcggcagc

SEQ ID NO: 310807 - DNA, 25 bp, Homo sapien
ccctgatctcaggcaggcggcagcg

SEQ ID NO: 310808 - DNA, 25 bp, Homo sapien
aaagattcccagtgagtgagtgcac

SEQ ID NO: 310809 - DNA, 25 bp, Homo sapien
caaagattcccagtgagtgagtgca

SEQ ID NO: 310810 - DNA, 25 bp, Homo sapien
cacaagcagcacaatggaggatgag

SEQ ID NO: 310811 - DNA, 25 bp, Homo sapien
agatgggtcactcagaacacagttt

SEQ ID NO: 310812 - DNA, 25 bp, Homo sapien
tgagatgggtcactcagaacacagt

SEQ ID NO: 310813 - DNA, 25 bp, Homo sapien
catgagatgggtcactcagaacaca

SEQ ID NO: 310814 - DNA, 25 bp, Homo sapien
tgaagggtgcaaggcgtggttcctg

SEQ ID NO: 310815 - DNA, 25 bp, Homo sapien
gagctggaattctccttaaaaacaa

SEQ ID NO: 310816 - DNA, 25 bp, Homo sapien
ttctcaattcaagccccgcaggatc

SEQ ID NO: 310817 - DNA, 25 bp, Homo sapien
tcccagcacagcttaaggtctagta

SEQ ID NO: 310818 - DNA, 25 bp, Homo sapien
gacacgaaggagcgtttatggaaac

SEQ ID NO: 310819 - DNA, 25 bp, Homo sapien
cgtttatggaaacccgtggtgctgc

SEQ ID NO: 310820 - DNA, 25 bp, Homo sapien
agacacgaaggagcgtttatggaaa

SEQ ID NO: 310821 - DNA, 25 bp, Homo sapien
gagcgtttatggaaacccgtggtgc

SEQ ID NO: 310822 - DNA, 25 bp, Homo sapien
ttcttcaccacgctgagcttatccg

SEQ ID NO: 310823 - DNA, 25 bp, Homo sapien
aacagcgtgtcgaaggcatcccgct

SEQ ID NO: 310824 - DNA, 25 bp, Homo sapien
cttcaccacgctgagcttatccggg

SEQ ID NO: 310825 - DNA, 25 bp, Homo sapien
gggcgtggtcgaacagcgtgtcgaa

SEQ ID NO: 310826 - DNA, 25 bp, Homo sapien
catgatcccagctcactgcaacctc

SEQ ID NO: 310827 - DNA, 25 bp, Homo sapien
ggcatgatcccagctcactgcaacc

SEQ ID NO: 310828 - DNA, 25 bp, Homo sapien
tttggtgccccggctagagtgcaat

SEQ ID NO: 310829 - DNA, 25 bp, Homo sapien
gacagctacaggtttgaagcctgca

SEQ ID NO: 310830 - DNA, 25 bp, Homo sapien
tagacagctacaggtttgaagcctg

SEQ ID NO: 310831 - DNA, 25 bp, Homo sapien
ctagacagctacaggtttgaagcct

SEQ ID NO: 310832 - DNA, 25 bp, Homo sapien
cagctacaggtttgaagcctgcacc

SEQ ID NO: 310833 - DNA, 25 bp, Homo sapien
tgggtctccagttccgtcacctcca

SEQ ID NO: 310834 - DNA, 25 bp, Homo sapien
acctccaaattcagcttgttcaggt

SEQ ID NO: 310835 - DNA, 25 bp, Homo sapien
agttccgtcacctccaaattcagct

SEQ ID NO: 310836 - DNA, 25 bp, Homo sapien
cgtcacctccaaattcagcttgttc

SEQ ID NO: 310837 - DNA, 25 bp, Homo sapien
ctgcagagaaagacttgtgatgttt

SEQ ID NO: 310838 - DNA, 25 bp, Homo sapien
ggagttggcaaatgctttgcacaaa

SEQ ID NO: 310839 - DNA, 25 bp, Homo sapien
gaaagacttgtgatgtttccgggca

SEQ ID NO: 310840 - DNA, 25 bp, Homo sapien
cttgtgatgtttccgggcagggtaa

SEQ ID NO: 310841 - DNA, 25 bp, Homo sapien
gaggaacaaagtagtcttccagaag

SEQ ID NO: 310842 - DNA, 25 bp, Homo sapien
ctttccggagtcaggtagaagtggt

SEQ ID NO: 310843 - DNA, 25 bp, Homo sapien
gcccatgagcagaaccaggtacacg

SEQ ID NO: 310844 - DNA, 25 bp, Homo sapien
cttctgatcgaagctttccggagtc

SEQ ID NO: 310845 - DNA, 25 bp, Homo sapien
ccttctgggctgtgtttaaagacca

SEQ ID NO: 310846 - DNA, 25 bp, Homo sapien
ttatcctgctaatgatggctgaaca

SEQ ID NO: 310847 - DNA, 25 bp, Homo sapien
cactcagagggatgccggcaatgaa

SEQ ID NO: 310848 - DNA, 25 bp, Homo sapien
gaagcttttatcctgctaatgatgg

SEQ ID NO: 310849 - DNA, 25 bp, Homo sapien
cgcttactaggtggttctcacccct

SEQ ID NO: 310850 - DNA, 25 bp, Homo sapien
gtgcgcttactaggtggttctcacc

SEQ ID NO: 310851 - DNA, 25 bp, Homo sapien
tactaggtggttctcacccctcaca

SEQ ID NO: 310852 - DNA, 25 bp, Homo sapien
tcacccctcacaccagtgatctggg

SEQ ID NO: 310853 - DNA, 25 bp, Homo sapien
gggtgggcagacacgggtgaggaag

SEQ ID NO: 310854 - DNA, 25 bp, Homo sapien
ccggcatggacaggaccgagcctct

SEQ ID NO: 310855 - DNA, 25 bp, Homo sapien
gaccgagcctctgcaacgctgacgt

SEQ ID NO: 310856 - DNA, 25 bp, Homo sapien
ctgcaacgctgacgtccacaaggac

SEQ ID NO: 310857 - DNA, 25 bp, Homo sapien
gtcagcgttagggtccaacagtcgt

SEQ ID NO: 310858 - DNA, 25 bp, Homo sapien
cagcgttagggtccaacagtcgttc

SEQ ID NO: 310859 - DNA, 25 bp, Homo sapien
tcagcgttagggtccaacagtcgtt

SEQ ID NO: 310860 - DNA, 25 bp, Homo sapien
gcatcagctcaaaggcgaaggacac

SEQ ID NO: 310861 - DNA, 25 bp, Homo sapien
ctcaaaggcgaaggacacattgtgg

SEQ ID NO: 310862 - DNA, 25 bp, Homo sapien
ttgaggcctccgtccagcatcagct

SEQ ID NO: 310863 - DNA, 25 bp, Homo sapien
tttcttgaggcctccgtccagcatc

SEQ ID NO: 310864 - DNA, 25 bp, Homo sapien
ccgggggaacctgagccaggggcat

SEQ ID NO: 310865 - DNA, 25 bp, Homo sapien
ctctcccgggggaacctgagccagg

SEQ ID NO: 310866 - DNA, 25 bp, Homo sapien
ggggaacctgagccaggggcattac

SEQ ID NO: 310867 - DNA, 25 bp, Homo sapien
cgggggaacctgagccaggggcatt

SEQ ID NO: 310868 - DNA, 25 bp, Homo sapien
cagacactaacgccgagctagcagc

SEQ ID NO: 310869 - DNA, 25 bp, Homo sapien
ttccagtgctcatgggagcagctca

SEQ ID NO: 310870 - DNA, 25 bp, Homo sapien
cttccagtgctcatgggagcagctc

SEQ ID NO: 310871 - DNA, 25 bp, Homo sapien
acgccgagctagcagccaccatcag

SEQ ID NO: 310872 - DNA, 25 bp, Homo sapien
aaatgggcctggaccaggtaacgct

SEQ ID NO: 310873 - DNA, 25 bp, Homo sapien
cagtaacacttaatggacccgacag

SEQ ID NO: 310874 - DNA, 25 bp, Homo sapien
tatgtggacaagaaccttcctggga

SEQ ID NO: 310875 - DNA, 25 bp, Homo sapien
aggtaacgctcgaggcccttggagt

SEQ ID NO: 310876 - DNA, 25 bp, Homo sapien
gaaccctcagggtggatttgaggtc

SEQ ID NO: 310877 - DNA, 25 bp, Homo sapien
gggatgacagtcaacacagcttgga

SEQ ID NO: 310878 - DNA, 25 bp, Homo sapien
tcatctttcggccaaggcagacaac

SEQ ID NO: 310879 - DNA, 25 bp, Homo sapien
tgagtgacgcgaggcttcaaacgca

SEQ ID NO: 310880 - DNA, 25 bp, Homo sapien
gagatccccggtgaatcgtcaagcc

SEQ ID NO: 310881 - DNA, 25 bp, Homo sapien
aaaggccaggctcactacggagaat

SEQ ID NO: 310882 - DNA, 25 bp, Homo sapien
gaatgtcactgcatcccgcaagaga

SEQ ID NO: 310883 - DNA, 25 bp, Homo sapien
caaagctctgatctgcggcaggaag

SEQ ID NO: 310884 - DNA, 25 bp, Homo sapien
tagcaacagccggaactgagaggga

SEQ ID NO: 310885 - DNA, 25 bp, Homo sapien
tccccatgggtggacatacttggcc

SEQ ID NO: 310886 - DNA, 25 bp, Homo sapien
gaattctgccttggaactggcccct

SEQ ID NO: 310887 - DNA, 25 bp, Homo sapien
aaagatcacatccaagccgggtgcg

SEQ ID NO: 310888 - DNA, 25 bp, Homo sapien
cattcactgaaaacgtggtgccggg

SEQ ID NO: 310889 - DNA, 25 bp, Homo sapien
taaccgcatccctggcggaagaagt

SEQ ID NO: 310890 - DNA, 25 bp, Homo sapien
cagtgagctcctgaaaagcgcttgc

SEQ ID NO: 310891 - DNA, 25 bp, Homo sapien
gaagaagtgtttgcccggtgttgca

SEQ ID NO: 310892 - DNA, 25 bp, Homo sapien
aacagcatactgtgacgccacgtgg

SEQ ID NO: 310893 - DNA, 25 bp, Homo sapien
aaggtcccgggaagcagcgctgggt

SEQ ID NO: 310894 - DNA, 25 bp, Homo sapien
caaacaaagacggtggacaggccca

SEQ ID NO: 310895 - DNA, 25 bp, Homo sapien
tgggtggagtcacaacgccctggca

SEQ ID NO: 310896 - DNA, 25 bp, Homo sapien
ctcctgtccaattggaaggtcccgg

SEQ ID NO: 310897 - DNA, 25 bp, Homo sapien
tgacctgtgccaaggagagtttatg

SEQ ID NO: 310898 - DNA, 25 bp, Homo sapien
ctgtgccaaggagagtttatggcag

SEQ ID NO: 310899 - DNA, 25 bp, Homo sapien
ctgaaacctgctatgacctgtgcca

SEQ ID NO: 310900 - DNA, 25 bp, Homo sapien
acctgtgccaaggagagtttatggc

SEQ ID NO: 310901 - DNA, 25 bp, Homo sapien
ttgccccagccttggacaaaccaga

SEQ ID NO: 310902 - DNA, 25 bp, Homo sapien
agacccttggtaaacgactgctgaa

SEQ ID NO: 310903 - DNA, 25 bp, Homo sapien
actgctgaacagaaccaatcggaag

SEQ ID NO: 310904 - DNA, 25 bp, Homo sapien
caatcggaagatccccagaaggttc

SEQ ID NO: 310905 - DNA, 25 bp, Homo sapien
caatgcttggcacaaagtgggctca

SEQ ID NO: 310906 - DNA, 25 bp, Homo sapien
aaaggcatagcagggttcgagaagg

SEQ ID NO: 310907 - DNA, 25 bp, Homo sapien
gaaaacagcgtatgcaaaggcatag

SEQ ID NO: 310908 - DNA, 25 bp, Homo sapien
cagtgaataaatattggtggtggtt

SEQ ID NO: 310909 - DNA, 25 bp, Homo sapien
ccttcctctcccgggaccacgcagg

SEQ ID NO: 310910 - DNA, 25 bp, Homo sapien
cttcctctcccgggaccacgcagga

SEQ ID NO: 310911 - DNA, 25 bp, Homo sapien
ttcctctcccgggaccacgcaggag

SEQ ID NO: 310912 - DNA, 25 bp, Homo sapien
cctccaaaatggcagctacataggc

SEQ ID NO: 310913 - DNA, 25 bp, Homo sapien
ggtggatgccgtgaaagtgaagctg

SEQ ID NO: 310914 - DNA, 25 bp, Homo sapien
ggcagctacataggccagagcctgg

SEQ ID NO: 310915 - DNA, 25 bp, Homo sapien
catgccagtttccccgcaggctgtt

SEQ ID NO: 310916 - DNA, 25 bp, Homo sapien
attccgaatggaagcaagttccggg

SEQ ID NO: 310917 - DNA, 25 bp, Homo sapien
gattccgaatggaagcaagttccgg

SEQ ID NO: 310918 - DNA, 25 bp, Homo sapien
cgaatggaagcaagttccgggttct

SEQ ID NO: 310919 - DNA, 25 bp, Homo sapien
tggaagcaagttccgggttcttctg

SEQ ID NO: 310920 - DNA, 25 bp, Homo sapien
gcctactgagtgcaaagggtggtcc

SEQ ID NO: 310921 - DNA, 25 bp, Homo sapien
cgctttccacgcaggaaaacaaagg

SEQ ID NO: 310922 - DNA, 25 bp, Homo sapien
caaccgctttccacgcaggaaaaca

SEQ ID NO: 310923 - DNA, 25 bp, Homo sapien
aaaacaaaggcctactgagtgcaaa

SEQ ID NO: 310924 - DNA, 25 bp, Homo sapien
tgacccccaacactcaagtatggtg

SEQ ID NO: 310925 - DNA, 25 bp, Homo sapien
gggaggacgccgagcagcctctgag

SEQ ID NO: 310926 - DNA, 25 bp, Homo sapien
tatggtggccccgatgccagaactc

SEQ ID NO: 310927 - DNA, 25 bp, Homo sapien
tgggactgcactctgggatccttcc

SEQ ID NO: 310928 - DNA, 25 bp, Homo sapien
aactcaatcagacattgaggtaggg

SEQ ID NO: 310929 - DNA, 25 bp, Homo sapien
gtgttttcaaactcaatcagacatt

SEQ ID NO: 310930 - DNA, 25 bp, Homo sapien
ctgtgaaggcttcgctggctcggct

SEQ ID NO: 310931 - DNA, 25 bp, Homo sapien
gtaggggagtcacatggcagaagtt

SEQ ID NO: 310932 - DNA, 25 bp, Homo sapien
cgggacaggggcagacccagaggcc

SEQ ID NO: 310933 - DNA, 25 bp, Homo sapien
ccgggacaggggcagacccagaggc

SEQ ID NO: 310934 - DNA, 25 bp, Homo sapien
ggaggcaggagagggcgtcacggtc

SEQ ID NO: 310935 - DNA, 25 bp, Homo sapien
gcaggagagggcgtcacggtctgag

SEQ ID NO: 310936 - DNA, 25 bp, Homo sapien
agggcgtcacggtctgagaagcccc

SEQ ID NO: 310937 - DNA, 25 bp, Homo sapien
cccaaactcactgagcccctcattt

SEQ ID NO: 310938 - DNA, 25 bp, Homo sapien
tgcagcaggtcgtacaagaactccg

SEQ ID NO: 310939 - DNA, 25 bp, Homo sapien
gagctgcagcaggtcgtacaagaac

SEQ ID NO: 310940 - DNA, 25 bp, Homo sapien
caggtcgtacaagaactccggctcc

SEQ ID NO: 310941 - DNA, 25 bp, Homo sapien
agcaggtcgtacaagaactccggct

SEQ ID NO: 310942 - DNA, 25 bp, Homo sapien
aggtgctgcaagtcccaggcatggc

SEQ ID NO: 310943 - DNA, 25 bp, Homo sapien
gcagaattgggcgctcagctgacag

SEQ ID NO: 310944 - DNA, 25 bp, Homo sapien
accctcagacctgcgtgggcacaca

SEQ ID NO: 310945 - DNA, 25 bp, Homo sapien
gagttaggtcaagcataaagcagaa

SEQ ID NO: 310946 - DNA, 25 bp, Homo sapien
gatgcccgcccttgagaataaatga

SEQ ID NO: 310947 - DNA, 25 bp, Homo sapien
cacagagctttactgaaagggcgac

SEQ ID NO: 310948 - DNA, 25 bp, Homo sapien
gcaaagtatcactccatggtgggca

SEQ ID NO: 310949 - DNA, 25 bp, Homo sapien
tatgctcaccccacttttgaaaggg

SEQ ID NO: 310950 - DNA, 25 bp, Homo sapien
tactttgagacataaactcggaagt

SEQ ID NO: 310951 - DNA, 25 bp, Homo sapien
tatgacaagcgcatggggaccctgt

SEQ ID NO: 310952 - DNA, 25 bp, Homo sapien
tcaaagttaactgggtatcctatgt

SEQ ID NO: 310953 - DNA, 25 bp, Homo sapien
acagatttcagcaccgcagacccag

SEQ ID NO: 310954 - DNA, 25 bp, Homo sapien
tgcagttcttcaaatttggggtcct

SEQ ID NO: 310955 - DNA, 25 bp, Homo sapien
cttctgcagttcttcaaatttgggg

SEQ ID NO: 310956 - DNA, 25 bp, Homo sapien
cttccgggaagtgggtggcaggtat

SEQ ID NO: 310957 - DNA, 25 bp, Homo sapien
tctgcagttcttcaaatttggggtc

SEQ ID NO: 310958 - DNA, 25 bp, Homo sapien
caaaccacagctccgttacgggcag

SEQ ID NO: 310959 - DNA, 25 bp, Homo sapien
agagaactaagaatgggtgacccag

SEQ ID NO: 310960 - DNA, 25 bp, Homo sapien
cacaaagcctctgggtatggaagat

SEQ ID NO: 310961 - DNA, 25 bp, Homo sapien
gctggcagctcgtgtcaaaccacag

SEQ ID NO: 310962 - DNA, 25 bp, Homo sapien
gagaccgagctgagacgacatgtca

SEQ ID NO: 310963 - DNA, 25 bp, Homo sapien
cactaaaggttgtcaggaggttgtc

SEQ ID NO: 310964 - DNA, 25 bp, Homo sapien
tcttccgggcaagaccacagatggt

SEQ ID NO: 310965 - DNA, 25 bp, Homo sapien
gaacttgctctatgctggctccagg

SEQ ID NO: 310966 - DNA, 25 bp, Homo sapien
ggatgagcccgtcgaacatgtcctc

SEQ ID NO: 310967 - DNA, 25 bp, Homo sapien
caggctgcggaccacaatgtgctcg

SEQ ID NO: 310968 - DNA, 25 bp, Homo sapien
ggaataggtggtgtaggatgagccc

SEQ ID NO: 310969 - DNA, 25 bp, Homo sapien
ctccaggctgcggaccacaatgtgc

SEQ ID NO: 310970 - DNA, 25 bp, Homo sapien
aggcagccccagaaacagccactta

SEQ ID NO: 310971 - DNA, 25 bp, Homo sapien
cagggggatggggccgaggcccagg

SEQ ID NO: 310972 - DNA, 25 bp, Homo sapien
cctggaggggccaggtcagggggat

SEQ ID NO: 310973 - DNA, 25 bp, Homo sapien
ccaggcagccccagaaacagccact

SEQ ID NO: 310974 - DNA, 25 bp, Homo sapien
tcttggtgttggaccgtgggccaca

SEQ ID NO: 310975 - DNA, 25 bp, Homo sapien
tacacagaacaggattggtgggcca

SEQ ID NO: 310976 - DNA, 25 bp, Homo sapien
agcccaggcccatctagaaagtgag

SEQ ID NO: 310977 - DNA, 25 bp, Homo sapien
gtagaaagagcaccaaccctggcgt

SEQ ID NO: 310978 - DNA, 25 bp, Homo sapien
tggctgtcagggcgatgtcctctgc

SEQ ID NO: 310979 - DNA, 25 bp, Homo sapien
ctgcagactccggttcacggcctcc

SEQ ID NO: 310980 - DNA, 25 bp, Homo sapien
agactccggttcacggcctccagca

SEQ ID NO: 310981 - DNA, 25 bp, Homo sapien
gtggctgtcagggcgatgtcctctg

SEQ ID NO: 310982 - DNA, 25 bp, Homo sapien
tcccaggttgtacccctgctgggag

SEQ ID NO: 310983 - DNA, 25 bp, Homo sapien
tccccaggggtagccaggttgtggc

SEQ ID NO: 310984 - DNA, 25 bp, Homo sapien
agaaggatgagtgcgccttcctggt

SEQ ID NO: 310985 - DNA, 25 bp, Homo sapien
tcctgactcccaggttgtacccctg

SEQ ID NO: 310986 - DNA, 25 bp, Homo sapien
gagaggtcgggctggaagcgcttgg

SEQ ID NO: 310987 - DNA, 25 bp, Homo sapien
ctcgatagtgatgacctccacctgg

SEQ ID NO: 310988 - DNA, 25 bp, Homo sapien
agaggtcgggctggaagcgcttggc

SEQ ID NO: 310989 - DNA, 25 bp, Homo sapien
gatagtgatgacctccacctggacg

SEQ ID NO: 310990 - DNA, 25 bp, Homo sapien
aaatccctggggcccaggctgctac

SEQ ID NO: 310991 - DNA, 25 bp, Homo sapien
cacccatgcagggtacggcaatggg

SEQ ID NO: 310992 - DNA, 25 bp, Homo sapien
agctccacccatgcagggtacggca

SEQ ID NO: 310993 - DNA, 25 bp, Homo sapien
cagccagctccacccatgcagggta

SEQ ID NO: 310994 - DNA, 25 bp, Homo sapien
tccacccatgcagggtacggcaatg

SEQ ID NO: 310995 - DNA, 25 bp, Homo sapien
attcagtgagctgttccaccaactt

SEQ ID NO: 310996 - DNA, 25 bp, Homo sapien
tattcagtgagctgttccaccaact

SEQ ID NO: 310997 - DNA, 25 bp, Homo sapien
tgtattcagtgagctgttccaccaa

SEQ ID NO: 310998 - DNA, 25 bp, Homo sapien
ctgtattcagtgagctgttccacca

SEQ ID NO: 310999 - DNA, 25 bp, Homo sapien
ccatgggccctcatccttccctcac

SEQ ID NO: 311000 - DNA, 25 bp, Homo sapien
gaggtcagcgcagcattttcgggtc

SEQ ID NO: 311001 - DNA, 25 bp, Homo sapien
caggatggtcaaccccagtaggtgg

SEQ ID NO: 311002 - DNA, 25 bp, Homo sapien
gctgcatccctgtgagagatcgtga

SEQ ID NO: 311003 - DNA, 25 bp, Homo sapien
gatcgtgagttagcgccacacagaa

SEQ ID NO: 311004 - DNA, 25 bp, Homo sapien
caatatgacaagcctcagtgctggc

SEQ ID NO: 311005 - DNA, 25 bp, Homo sapien
cccgcaaacctacaatttctcaata

SEQ ID NO: 311006 - DNA, 25 bp, Homo sapien
cctggcagctttgtaggtagggcag

SEQ ID NO: 311007 - DNA, 25 bp, Homo sapien
tatgacaagcctcagtgctggcaag

SEQ ID NO: 311008 - DNA, 25 bp, Homo sapien
cggagccagcttaaataattcatca

SEQ ID NO: 311009 - DNA, 25 bp, Homo sapien
tcactgcgttcactttctccggagc

SEQ ID NO: 311010 - DNA, 25 bp, Homo sapien
tccggagccagcttaaataattcat

SEQ ID NO: 311011 - DNA, 25 bp, Homo sapien
ctgcgttcactttctccggagccag

SEQ ID NO: 311012 - DNA, 25 bp, Homo sapien
tccagattctgcacagacaggccca

SEQ ID NO: 311013 - DNA, 25 bp, Homo sapien
tctcacttatttcatgccggcagcg

SEQ ID NO: 311014 - DNA, 25 bp, Homo sapien
ttataagcactaactctggccccag

SEQ ID NO: 311015 - DNA, 25 bp, Homo sapien
cggcagcgtgccaggtaatatacca

SEQ ID NO: 311016 - DNA, 25 bp, Homo sapien
agagataaagctgtcgtccctgcca

SEQ ID NO: 311017 - DNA, 25 bp, Homo sapien
gcaggaagaagccttcaagttgtcc

SEQ ID NO: 311018 - DNA, 25 bp, Homo sapien
tcagcaagagtaagatgaccccatc

SEQ ID NO: 311019 - DNA, 25 bp, Homo sapien
agttgggagtgaggtagaattcctt

SEQ ID NO: 311020 - DNA, 25 bp, Homo sapien
tgggagtgaggtagaattcctttaa

SEQ ID NO: 311021 - DNA, 25 bp, Homo sapien
gctccagcgccagggtgacgttgtg

SEQ ID NO: 311022 - DNA, 25 bp, Homo sapien
cagctccagcgccagggtgacgttg

SEQ ID NO: 311023 - DNA, 25 bp, Homo sapien
gagcaggccctcgtccttcagcagc

SEQ ID NO: 311024 - DNA, 25 bp, Homo sapien
tccagcgccagggtgacgttgtgca

SEQ ID NO: 311025 - DNA, 25 bp, Homo sapien
ctgcgggccaaaggagggcagggca

SEQ ID NO: 311026 - DNA, 25 bp, Homo sapien
gtcaggcctgggtggcagtgaccga

SEQ ID NO: 311027 - DNA, 25 bp, Homo sapien
gggcagggcagccagtcaggcctgg

SEQ ID NO: 311028 - DNA, 25 bp, Homo sapien
tgcgggccaaaggagggcagggcag

SEQ ID NO: 311029 - DNA, 25 bp, Homo sapien
gcttgcagaacagaccatagagcac

SEQ ID NO: 311030 - DNA, 25 bp, Homo sapien
tccatggggcgtcctgtccctgtgt

SEQ ID NO: 311031 - DNA, 25 bp, Homo sapien
gtgccttctgcgtgtgcttgcagaa

SEQ ID NO: 311032 - DNA, 25 bp, Homo sapien
cagaccatagagcaccctcagtgtg

SEQ ID NO: 311033 - DNA, 25 bp, Homo sapien
ggagggaagcgggtcacgaatgcac

SEQ ID NO: 311034 - DNA, 25 bp, Homo sapien
aaagataatccaacgatggagacag

SEQ ID NO: 311035 - DNA, 25 bp, Homo sapien
gctcaaaatgatccacacaaggggg

SEQ ID NO: 311036 - DNA, 25 bp, Homo sapien
gggttcaaagataatccaacgatgg

SEQ ID NO: 311037 - DNA, 25 bp, Homo sapien
gctgcaggtttaagggccctcctca

SEQ ID NO: 311038 - DNA, 25 bp, Homo sapien
tttgggcaaaactcacgagggcagc

SEQ ID NO: 311039 - DNA, 25 bp, Homo sapien
acagcccgggttgctttgacagtca

SEQ ID NO: 311040 - DNA, 25 bp, Homo sapien
aaatgccaagtctcactggagcgag

SEQ ID NO: 311041 - DNA, 25 bp, Homo sapien
tcctccccggttcccatcagccatc

SEQ ID NO: 311042 - DNA, 25 bp, Homo sapien
agcctcacccctccccatcagtccc

SEQ ID NO: 311043 - DNA, 25 bp, Homo sapien
tccccgccagcctcacccctcccca

SEQ ID NO: 311044 - DNA, 25 bp, Homo sapien
ctcacccctccccatcagtcccacc

SEQ ID NO: 311045 - DNA, 25 bp, Homo sapien
ccagcctcacccctccccatcagtc

SEQ ID NO: 311046 - DNA, 25 bp, Homo sapien
ccaaggcctcagctgtcaaactgtg

SEQ ID NO: 311047 - DNA, 25 bp, Homo sapien
gctgtcaaactgtgaaaaccccaga

SEQ ID NO: 311048 - DNA, 25 bp, Homo sapien
gtcaatgatgacctagcccctaacc

SEQ ID NO: 311049 - DNA, 25 bp, Homo sapien
cagtgggtgtcaatgatgacctagc

SEQ ID NO: 311050 - DNA, 25 bp, Homo sapien
acgcttatgggcttgggtttgccct

SEQ ID NO: 311051 - DNA, 25 bp, Homo sapien
cttgggtttgccctgtgaattggga

SEQ ID NO: 311052 - DNA, 25 bp, Homo sapien
cagatgggaggctaggtgaagggaa

SEQ ID NO: 311053 - DNA, 25 bp, Homo sapien
tatgggcttgggtttgccctgtgaa

SEQ ID NO: 311054 - DNA, 25 bp, Homo sapien
acaagagtgaggacgtggaacagcc

SEQ ID NO: 311055 - DNA, 25 bp, Homo sapien
taacccatgagtgaaagaggaagtc

SEQ ID NO: 311056 - DNA, 25 bp, Homo sapien
gaggatgcacgtttcccagaggcag

SEQ ID NO: 311057 - DNA, 25 bp, Homo sapien
gcttttgggatgaagccagctgaga

SEQ ID NO: 311058 - DNA, 25 bp, Homo sapien
gatttgtccacatgctaatccccag

SEQ ID NO: 311059 - DNA, 25 bp, Homo sapien
tgttatagtagattaaatggtgacc

SEQ ID NO: 311060 - DNA, 25 bp, Homo sapien
agcaaagtgactgtgaaggtagata

SEQ ID NO: 311061 - DNA, 25 bp, Homo sapien
ggtgggtcctaaatctcatgacaag

SEQ ID NO: 311062 - DNA, 25 bp, Homo sapien
tgatgccctggaatctcaaggttgg

SEQ ID NO: 311063 - DNA, 25 bp, Homo sapien
aatctcaaggttggagcctcctgcc

SEQ ID NO: 311064 - DNA, 25 bp, Homo sapien
cagggagggtgatgccctggaatct

SEQ ID NO: 311065 - DNA, 25 bp, Homo sapien
gggtgcttctgagaagcccagagca

SEQ ID NO: 311066 - DNA, 25 bp, Homo sapien
caatgaggtaccctgttgaatgacc

SEQ ID NO: 311067 - DNA, 25 bp, Homo sapien
tatagatgatatggccaccctggcc

SEQ ID NO: 311068 - DNA, 25 bp, Homo sapien
taaagctagtggcatacctcacagt

SEQ ID NO: 311069 - DNA, 25 bp, Homo sapien
tagactgcactgagaacggtgaccc

SEQ ID NO: 311070 - DNA, 25 bp, Homo sapien
ggtccctcttgctgtctccaatgct

SEQ ID NO: 311071 - DNA, 25 bp, Homo sapien
tggtccctcttgctgtctccaatgc

SEQ ID NO: 311072 - DNA, 25 bp, Homo sapien
atctggtccctcttgctgtctccaa

SEQ ID NO: 311073 - DNA, 25 bp, Homo sapien
tcacaggtagatctggtccctcttg

SEQ ID NO: 311074 - DNA, 25 bp, Homo sapien
aggccagccacctgaccatgaccat

SEQ ID NO: 311075 - DNA, 25 bp, Homo sapien
caggccagccacctgaccatgacca

SEQ ID NO: 311076 - DNA, 25 bp, Homo sapien
ctggctgctccagcggccaggccag

SEQ ID NO: 311077 - DNA, 25 bp, Homo sapien
ggccaggccagccacctgaccatga

SEQ ID NO: 311078 - DNA, 25 bp, Homo sapien
tctccccaactagcagtgaagcaga

SEQ ID NO: 311079 - DNA, 25 bp, Homo sapien
cgaatctcaatgaccaatgcccagg

SEQ ID NO: 311080 - DNA, 25 bp, Homo sapien
ctgagcctgattggtctctgtgtga

SEQ ID NO: 311081 - DNA, 25 bp, Homo sapien
acacttcagtgatccgaatcttctg

SEQ ID NO: 311082 - DNA, 25 bp, Homo sapien
ccagagactgaattgtcaccaggtc

SEQ ID NO: 311083 - DNA, 25 bp, Homo sapien
cgtctccaaggccagagactgaatt

SEQ ID NO: 311084 - DNA, 25 bp, Homo sapien
ctccaaggccagagactgaattgtc

SEQ ID NO: 311085 - DNA, 25 bp, Homo sapien
caaggccagagactgaattgtcacc

SEQ ID NO: 311086 - DNA, 25 bp, Homo sapien
gaagccgctgggcatagctggcacc

SEQ ID NO: 311087 - DNA, 25 bp, Homo sapien
tagctggcaccaaatagctttgtca

SEQ ID NO: 311088 - DNA, 25 bp, Homo sapien
aggcaccgtcctgtctgccagaagc

SEQ ID NO: 311089 - DNA, 25 bp, Homo sapien
caggcaccgtcctgtctgccagaag

SEQ ID NO: 311090 - DNA, 25 bp, Homo sapien
tctgtgggacatctcaacgttgacg

SEQ ID NO: 311091 - DNA, 25 bp, Homo sapien
tgtgggacatctcaacgttgacggc

SEQ ID NO: 311092 - DNA, 25 bp, Homo sapien
ctgtgggacatctcaacgttgacgg

SEQ ID NO: 311093 - DNA, 25 bp, Homo sapien
gtgggacatctcaacgttgacggca

SEQ ID NO: 311094 - DNA, 25 bp, Homo sapien
ggctcgttgtatcccaggatctgct

SEQ ID NO: 311095 - DNA, 25 bp, Homo sapien
gctgctctgggctcgttgtatccca

SEQ ID NO: 311096 - DNA, 25 bp, Homo sapien
gaaggagatactgtgctacgtggtt

SEQ ID NO: 311097 - DNA, 25 bp, Homo sapien
gctacgtggttctgttgccagcctg

SEQ ID NO: 311098 - DNA, 25 bp, Homo sapien
gtagcttctaaggtgccccagaggg

SEQ ID NO: 311099 - DNA, 25 bp, Homo sapien
tagcttctaaggtgccccagagggt

SEQ ID NO: 311100 - DNA, 25 bp, Homo sapien
ggaattccacataatcaccctccgg

SEQ ID NO: 311101 - DNA, 25 bp, Homo sapien
gtaatatggaagaagcgagatcacc

SEQ ID NO: 311102 - DNA, 25 bp, Homo sapien
gagtaatatggaagaagcgagatca

SEQ ID NO: 311103 - DNA, 25 bp, Homo sapien
ataatcaccctccgggctgcagcaa

SEQ ID NO: 311104 - DNA, 25 bp, Homo sapien
tccaaggtctggtgactggtgtctg

SEQ ID NO: 311105 - DNA, 25 bp, Homo sapien
tggctgaacgccagacaaggcttgg

SEQ ID NO: 311106 - DNA, 25 bp, Homo sapien
tgcacaggatttcacacggaacact

SEQ ID NO: 311107 - DNA, 25 bp, Homo sapien
ttgggctgcaaagtaaaggccttcc

SEQ ID NO: 311108 - DNA, 25 bp, Homo sapien
tgggtcctgtaagctcctcgaggtg

SEQ ID NO: 311109 - DNA, 25 bp, Homo sapien
acctgggtcctgtaagctcctcgag

SEQ ID NO: 311110 - DNA, 25 bp, Homo sapien
gacctgggtcctgtaagctcctcga

SEQ ID NO: 311111 - DNA, 25 bp, Homo sapien
cctgggtcctgtaagctcctcgagg

SEQ ID NO: 311112 - DNA, 25 bp, Homo sapien
ctggcgtggacaggatggagcgggc

SEQ ID NO: 311113 - DNA, 25 bp, Homo sapien
tggcgtggacaggatggagcgggca

SEQ ID NO: 311114 - DNA, 25 bp, Homo sapien
ggcgtggacaggatggagcgggcag

SEQ ID NO: 311115 - DNA, 25 bp, Homo sapien
acgatgcccatgctacaggggagga

SEQ ID NO: 311116 - DNA, 25 bp, Homo sapien
ccacgatgcccatgctacaggggag

SEQ ID NO: 311117 - DNA, 25 bp, Homo sapien
cgccacgatgcccatgctacagggg

SEQ ID NO: 311118 - DNA, 25 bp, Homo sapien
tgcccatgctacaggggaggagacc

SEQ ID NO: 311119 - DNA, 25 bp, Homo sapien
cagctcttggacctgagccccagcc

SEQ ID NO: 311120 - DNA, 25 bp, Homo sapien
agccacagaagtggggcagccccac

SEQ ID NO: 311121 - DNA, 25 bp, Homo sapien
agctcttggacctgagccccagcca

SEQ ID NO: 311122 - DNA, 25 bp, Homo sapien
gccccagccacagaagtggggcagc

SEQ ID NO: 311123 - DNA, 25 bp, Homo sapien
gtgaacatcagtgctattgaactca

SEQ ID NO: 311124 - DNA, 25 bp, Homo sapien
cttgtgaacatcagtgctattgaac

SEQ ID NO: 311125 - DNA, 25 bp, Homo sapien
catcagtgctattgaactcatggcc

SEQ ID NO: 311126 - DNA, 25 bp, Homo sapien
gaacatcagtgctattgaactcatg

SEQ ID NO: 311127 - DNA, 25 bp, Homo sapien
agggacccaaggtgatgactttggc

SEQ ID NO: 311128 - DNA, 25 bp, Homo sapien
acatcccacggagggacccaaggtg

SEQ ID NO: 311129 - DNA, 25 bp, Homo sapien
gcacatcccacggagggacccaagg

SEQ ID NO: 311130 - DNA, 25 bp, Homo sapien
cacggagggacccaaggtgatgact

SEQ ID NO: 311131 - DNA, 25 bp, Homo sapien
ctctgcacacgccatcgtcatcaca

SEQ ID NO: 311132 - DNA, 25 bp, Homo sapien
aggtcccctctgcacacgccatcgt

SEQ ID NO: 311133 - DNA, 25 bp, Homo sapien
ctccgcacacgccatcgtcatcaca

SEQ ID NO: 311134 - DNA, 25 bp, Homo sapien
gtcatcacagctccccgagctcagt

SEQ ID NO: 311135 - DNA, 25 bp, Homo sapien
ccgagcccaggtaccctctacacat

SEQ ID NO: 311136 - DNA, 25 bp, Homo sapien
cgagcccaggtaccctctacacatg

SEQ ID NO: 311137 - DNA, 25 bp, Homo sapien
cgccatcattatcagagctcccaga

SEQ ID NO: 311138 - DNA, 25 bp, Homo sapien
ggtgtaacacgccatcattatcaga

SEQ ID NO: 311139 - DNA, 25 bp, Homo sapien
gccgtcgtcatcacaattccccgag

SEQ ID NO: 311140 - DNA, 25 bp, Homo sapien
gggatgttgtccagtggtgtaacac

SEQ ID NO: 311141 - DNA, 25 bp, Homo sapien
ggaccgcagtcagccatggcgatga

SEQ ID NO: 311142 - DNA, 25 bp, Homo sapien
tctgtgggaccgcagtcagccatgg

SEQ ID NO: 311143 - DNA, 25 bp, Homo sapien
ccgcagtcagccatggcgatgatgc

SEQ ID NO: 311144 - DNA, 25 bp, Homo sapien
tgggaccgcagtcagccatggcgat

SEQ ID NO: 311145 - DNA, 25 bp, Homo sapien
gatgtaatgcgcatcacacgctgag

SEQ ID NO: 311146 - DNA, 25 bp, Homo sapien
acagagcccggtgctacccgagcgg

SEQ ID NO: 311147 - DNA, 25 bp, Homo sapien
aatgcgcatcacacgctgagaacag

SEQ ID NO: 311148 - DNA, 25 bp, Homo sapien
ccgagcggggcttatcatcagtgat

SEQ ID NO: 311149 - DNA, 25 bp, Homo sapien
gttagacgcacagcgccgggaaaca

SEQ ID NO: 311150 - DNA, 25 bp, Homo sapien
tgcctggcggtaggatgcagtgagc

SEQ ID NO: 311151 - DNA, 25 bp, Homo sapien
cgggaaacaggagtggattccgcca

SEQ ID NO: 311152 - DNA, 25 bp, Homo sapien
agagatgccaagcccgggttagacg

SEQ ID NO: 311153 - DNA, 25 bp, Homo sapien
tggcttggtaacaataataaaccag

SEQ ID NO: 311154 - DNA, 25 bp, Homo sapien
gtgtggcttggtaacaataataaac

SEQ ID NO: 311155 - DNA, 25 bp, Homo sapien
gaggcagcaagctcatgtgtggctt

SEQ ID NO: 311156 - DNA, 25 bp, Homo sapien
caagctcatgtgtggcttggtaaca

SEQ ID NO: 311157 - DNA, 25 bp, Homo sapien
ggatgagccctcagcccagattgaa

SEQ ID NO: 311158 - DNA, 25 bp, Homo sapien
tcagcccagattgaatccacctgtc

SEQ ID NO: 311159 - DNA, 25 bp, Homo sapien
gattgaatccacctgtccatgttca

SEQ ID NO: 311160 - DNA, 25 bp, Homo sapien
gctggtgttggccttttgtccttcc

SEQ ID NO: 311161 - DNA, 25 bp, Homo sapien
caccaaggtctgctggaccgcaggt

SEQ ID NO: 311162 - DNA, 25 bp, Homo sapien
caaggtctgctggaccgcaggtggg

SEQ ID NO: 311163 - DNA, 25 bp, Homo sapien
accaaggtctgctggaccgcaggtg

SEQ ID NO: 311164 - DNA, 25 bp, Homo sapien
aaggtctgctggaccgcaggtgggg

SEQ ID NO: 311165 - DNA, 25 bp, Homo sapien
attccttgccgctcgcagtctccag

SEQ ID NO: 311166 - DNA, 25 bp, Homo sapien
gccagctgtaacagcctgagatggc

SEQ ID NO: 311167 - DNA, 25 bp, Homo sapien
cagaaatccgcagctagcacacgtt

SEQ ID NO: 311168 - DNA, 25 bp, Homo sapien
ggccctggctccgaattccttgccg

SEQ ID NO: 311169 - DNA, 25 bp, Homo sapien
ggcttggcacacaactgctgttcgg

SEQ ID NO: 311170 - DNA, 25 bp, Homo sapien
ggcacacaactgctgttcggaagtt

SEQ ID NO: 311171 - DNA, 25 bp, Homo sapien
caatgacacatttgggcacagtcct

SEQ ID NO: 311172 - DNA, 25 bp, Homo sapien
cggaagttgttggatgaattcgaca

SEQ ID NO: 311173 - DNA, 25 bp, Homo sapien
catctttcttgggattctggtttca

SEQ ID NO: 311174 - DNA, 25 bp, Homo sapien
tttctcggaaaatccctcccacatc

SEQ ID NO: 311175 - DNA, 25 bp, Homo sapien
tgatttttccttggccctgtgtgac

SEQ ID NO: 311176 - DNA, 25 bp, Homo sapien
gacaggtctctgtcttcggaacgtg

SEQ ID NO: 311177 - DNA, 25 bp, Homo sapien
ggagagagtttcgtcacggacatcc

SEQ ID NO: 311178 - DNA, 25 bp, Homo sapien
catagctagatggacttggcctgta

SEQ ID NO: 311179 - DNA, 25 bp, Homo sapien
gacatcctttggatcgtcgatggac

SEQ ID NO: 311180 - DNA, 25 bp, Homo sapien
cgatggactgttatctcccgaggca

SEQ ID NO: 311181 - DNA, 25 bp, Homo sapien
tcaacaggtcattaaggcagccggc

SEQ ID NO: 311182 - DNA, 25 bp, Homo sapien
gcagccggcgacatctggtttggat

SEQ ID NO: 311183 - DNA, 25 bp, Homo sapien
gcagaaatgcccgaagtgcttccac

SEQ ID NO: 311184 - DNA, 25 bp, Homo sapien
ctggcatttggaggatcaacaggtc

SEQ ID NO: 311185 - DNA, 25 bp, Homo sapien
gtctgtgaagtagcacagaactccc

SEQ ID NO: 311186 - DNA, 25 bp, Homo sapien
cattgacactgccaactggctttgt

SEQ ID NO: 311187 - DNA, 25 bp, Homo sapien
agccaagccattgacactgccaact

SEQ ID NO: 311188 - DNA, 25 bp, Homo sapien
ctttgttttgtctgtgaagtagcac

SEQ ID NO: 311189 - DNA, 25 bp, Homo sapien
caagtcttggatgctctgatagccc

SEQ ID NO: 311190 - DNA, 25 bp, Homo sapien
tgatagccctcaactccaagattta

SEQ ID NO: 311191 - DNA, 25 bp, Homo sapien
ttcctggtcccttgcgacttccagg

SEQ ID NO: 311192 - DNA, 25 bp, Homo sapien
ttccaggagttctgattagctgtca

SEQ ID NO: 311193 - DNA, 25 bp, Homo sapien
ctttgctcacttagctgctggagag

SEQ ID NO: 311194 - DNA, 25 bp, Homo sapien
ccacggccatctgtggctgaccttg

SEQ ID NO: 311195 - DNA, 25 bp, Homo sapien
tttgctcacttagctgctggagagg

SEQ ID NO: 311196 - DNA, 25 bp, Homo sapien
cgagctgtcgggagtgtggccacgg

SEQ ID NO: 311197 - DNA, 25 bp, Homo sapien
ttaaatgccagaccacgggcagacc

SEQ ID NO: 311198 - DNA, 25 bp, Homo sapien
ggtggctttagctgtggtggttgtt

SEQ ID NO: 311199 - DNA, 25 bp, Homo sapien
agaatccgggagcacacggtggtgg

SEQ ID NO: 311200 - DNA, 25 bp, Homo sapien
cctggaggagaatccgggagcacac

SEQ ID NO: 311201 - DNA, 25 bp, Homo sapien
gcacacggtggtggctttagctgtg

SEQ ID NO: 311202 - DNA, 25 bp, Homo sapien
cacaactccgccagcctcatccccg

SEQ ID NO: 311203 - DNA, 25 bp, Homo sapien
tggaacttcccgagacacaactccg

SEQ ID NO: 311204 - DNA, 25 bp, Homo sapien
cttgtggaacttcccgagacacaac

SEQ ID NO: 311205 - DNA, 25 bp, Homo sapien
acaactccgccagcctcatccccgg

SEQ ID NO: 311206 - DNA, 25 bp, Homo sapien
ccagggagcagggcgtgttccggga

SEQ ID NO: 311207 - DNA, 25 bp, Homo sapien
agggagcagggcgtgttccgggaga

SEQ ID NO: 311208 - DNA, 25 bp, Homo sapien
ggccagggagcagggcgtgttccgg

SEQ ID NO: 311209 - DNA, 25 bp, Homo sapien
gggccagggagcagggcgtgttccg

SEQ ID NO: 311210 - DNA, 25 bp, Homo sapien
cacaagcctgagatccacggagggg

SEQ ID NO: 311211 - DNA, 25 bp, Homo sapien
agggatatctgagcggcctgacaga

SEQ ID NO: 311212 - DNA, 25 bp, Homo sapien
ctgcctgcagccatcagaagcgctt

SEQ ID NO: 311213 - DNA, 25 bp, Homo sapien
gcagccatcagaagcgctttccctg

SEQ ID NO: 311214 - DNA, 25 bp, Homo sapien
cagagtcctgtgaacccagtgtgcc

SEQ ID NO: 311215 - DNA, 25 bp, Homo sapien
actttctgcttttggcggccccagg

SEQ ID NO: 311216 - DNA, 25 bp, Homo sapien
taggagttcgccctctctctaagca

SEQ ID NO: 311217 - DNA, 25 bp, Homo sapien
gggcagtaagtccaccctagcaggg

SEQ ID NO: 311218 - DNA, 25 bp, Homo sapien
tccggaagtcaaaggtccctgtcac

SEQ ID NO: 311219 - DNA, 25 bp, Homo sapien
gaagtcaaaggtccctgtcaccagc

SEQ ID NO: 311220 - DNA, 25 bp, Homo sapien
tcaggcagttccacgcaggcccact

SEQ ID NO: 311221 - DNA, 25 bp, Homo sapien
tcaaaggtccctgtcaccagcaact

SEQ ID NO: 311222 - DNA, 25 bp, Homo sapien
aaacctgtgcttaggagaatccacc

SEQ ID NO: 311223 - DNA, 25 bp, Homo sapien
tcctaaatgcggtgtgcgtgcagcc

SEQ ID NO: 311224 - DNA, 25 bp, Homo sapien
gttgagggcctctgcaatccaggtg

SEQ ID NO: 311225 - DNA, 25 bp, Homo sapien
ttgggagctccacggtcaaggttga

SEQ ID NO: 311226 - DNA, 25 bp, Homo sapien
cgccgccgccgtggggcttctctcc

SEQ ID NO: 311227 - DNA, 25 bp, Homo sapien
cttctctcctgtgttggtggtgggc

SEQ ID NO: 311228 - DNA, 25 bp, Homo sapien
cgcgccgccgccgtggggcttctct

SEQ ID NO: 311229 - DNA, 25 bp, Homo sapien
ctctcctgtgttggtggtgggcttc

SEQ ID NO: 311230 - DNA, 25 bp, Homo sapien
cgccttgcaattcctctggcagggc

SEQ ID NO: 311231 - DNA, 25 bp, Homo sapien
gctggccgccttgcaattcctctgg

SEQ ID NO: 311232 - DNA, 25 bp, Homo sapien
tgagccccgggcaggacgatcgggt

SEQ ID NO: 311233 - DNA, 25 bp, Homo sapien
cgggcaggacgatcgggtccttctt

SEQ ID NO: 311234 - DNA, 25 bp, Homo sapien
cagcctccataagctgccccaactt

SEQ ID NO: 311235 - DNA, 25 bp, Homo sapien
agtctacactctttatcacgccctt

SEQ ID NO: 311236 - DNA, 25 bp, Homo sapien
ccccatcacccacgggcttaagtct

SEQ ID NO: 311237 - DNA, 25 bp, Homo sapien
ccacgggcttaagtctacactcttt

SEQ ID NO: 311238 - DNA, 25 bp, Homo sapien
ctgcacttcctctttggcatcttct

SEQ ID NO: 311239 - DNA, 25 bp, Homo sapien
cttcctctttggcatcttctatctc

SEQ ID NO: 311240 - DNA, 25 bp, Homo sapien
gcacttcctctttggcatcttctat

SEQ ID NO: 311241 - DNA, 25 bp, Homo sapien
cctctttggcatcttctatctccat

SEQ ID NO: 311242 - DNA, 25 bp, Homo sapien
tggaaaagttgagacagggcagaag

SEQ ID NO: 311243 - DNA, 25 bp, Homo sapien
ctcccaaaccgcgaaggagaattct

SEQ ID NO: 311244 - DNA, 25 bp, Homo sapien
cccaaaccgcgaaggagaattctga

SEQ ID NO: 311245 - DNA, 25 bp, Homo sapien
tgctccgactcccaaaccgcgaagg

SEQ ID NO: 311246 - DNA, 25 bp, Homo sapien
tccgactcccaaaccgcgaaggaga

SEQ ID NO: 311247 - DNA, 25 bp, Homo sapien
cagagcaaggtgagctcatgcagcc

SEQ ID NO: 311248 - DNA, 25 bp, Homo sapien
ctgtggccctggagtaagcttgcac

SEQ ID NO: 311249 - DNA, 25 bp, Homo sapien
ggtcactgagttcaccagagcaagg

SEQ ID NO: 311250 - DNA, 25 bp, Homo sapien
ccagtgggacccatgagtgttctgt

SEQ ID NO: 311251 - DNA, 25 bp, Homo sapien
gaaggtaagggcactggaggcccca

SEQ ID NO: 311252 - DNA, 25 bp, Homo sapien
gccccatgaccaggggttcctgaat

SEQ ID NO: 311253 - DNA, 25 bp, Homo sapien
gaggccccatgaccaggggttcctg

SEQ ID NO: 311254 - DNA, 25 bp, Homo sapien
cctcaggtgtggggcccccactgct

SEQ ID NO: 311255 - DNA, 25 bp, Homo sapien
attttgccatctccgcacagagcca

SEQ ID NO: 311256 - DNA, 25 bp, Homo sapien
catgaaccctcagggtcctcgctct

SEQ ID NO: 311257 - DNA, 25 bp, Homo sapien
gccagccagcccaagaccattttgc

SEQ ID NO: 311258 - DNA, 25 bp, Homo sapien
tcgctctccactccttcccatgcca

SEQ ID NO: 311259 - DNA, 25 bp, Homo sapien
tctgccaaagcagaccacaaggcca

SEQ ID NO: 311260 - DNA, 25 bp, Homo sapien
gatgagagtgtagacccccactgaa

SEQ ID NO: 311261 - DNA, 25 bp, Homo sapien
cacaaggccaggctccgagtcagca

SEQ ID NO: 311262 - DNA, 25 bp, Homo sapien
tctgctcgtgtgtctcggctgctgt

SEQ ID NO: 311263 - DNA, 25 bp, Homo sapien
agagctgtccatagacccacgaggc

SEQ ID NO: 311264 - DNA, 25 bp, Homo sapien
catagacccacgaggctggaagaag

SEQ ID NO: 311265 - DNA, 25 bp, Homo sapien
agctccatctgaccgggtgcagcct

SEQ ID NO: 311266 - DNA, 25 bp, Homo sapien
aagagctccatctgaccgggtgcag

SEQ ID NO: 311267 - DNA, 25 bp, Homo sapien
agcctctcccccagacgcctctcac

SEQ ID NO: 311268 - DNA, 25 bp, Homo sapien
ccagcctctcccccagacgcctctc

SEQ ID NO: 311269 - DNA, 25 bp, Homo sapien
cagcctctcccccagacgcctctca

SEQ ID NO: 311270 - DNA, 25 bp, Homo sapien
caggaaacaccaggcggccagtgct

SEQ ID NO: 311271 - DNA, 25 bp, Homo sapien
aaacaccaggcggccagtgctgggt

SEQ ID NO: 311272 - DNA, 25 bp, Homo sapien
ctgtggcaggtcaggaaacaccagg

SEQ ID NO: 311273 - DNA, 25 bp, Homo sapien
aggaaacaccaggcggccagtgctg

SEQ ID NO: 311274 - DNA, 25 bp, Homo sapien
tcagcagggccagacttcgtctggg

SEQ ID NO: 311275 - DNA, 25 bp, Homo sapien
tggcttggctgagcacaggtgtgag

SEQ ID NO: 311276 - DNA, 25 bp, Homo sapien
tttttctcggcctgagggcgagctg

SEQ ID NO: 311277 - DNA, 25 bp, Homo sapien
tgggattagccatgatggatttttc

SEQ ID NO: 311278 - DNA, 25 bp, Homo sapien
gactcgccttgggagctcggttcat

SEQ ID NO: 311279 - DNA, 25 bp, Homo sapien
gcccgatggactcaaggtagaatga

SEQ ID NO: 311280 - DNA, 25 bp, Homo sapien
taaagagctttctgtgtctgatccc

SEQ ID NO: 311281 - DNA, 25 bp, Homo sapien
gaaactcgttttggtgagcgctgct

SEQ ID NO: 311282 - DNA, 25 bp, Homo sapien
gcaaacttctttccggtgagctgag

SEQ ID NO: 311283 - DNA, 25 bp, Homo sapien
cgggttgctctgttagctccagcac

SEQ ID NO: 311284 - DNA, 25 bp, Homo sapien
tcaaagcggatgagcaaacacgggc

SEQ ID NO: 311285 - DNA, 25 bp, Homo sapien
aacacgggcgccctgtgagtctggc

SEQ ID NO: 311286 - DNA, 25 bp, Homo sapien
aggaaagagtgttgtttagctccat

SEQ ID NO: 311287 - DNA, 25 bp, Homo sapien
ccccgggaatccagacgtacttgat

SEQ ID NO: 311288 - DNA, 25 bp, Homo sapien
gatgctgaggctacataaatccgga

SEQ ID NO: 311289 - DNA, 25 bp, Homo sapien
gccaaacgccgattctaagagagtg

SEQ ID NO: 311290 - DNA, 25 bp, Homo sapien
tcttcatccgaagcagaaaatggca

SEQ ID NO: 311291 - DNA, 25 bp, Homo sapien
gacacttggggaacatcgccccagg

SEQ ID NO: 311292 - DNA, 25 bp, Homo sapien
ctccggatgcgtttctccaggtaca

SEQ ID NO: 311293 - DNA, 25 bp, Homo sapien
aggtacatctcataggacacttggg

SEQ ID NO: 311294 - DNA, 25 bp, Homo sapien
ctccaggtacatctcataggacact

SEQ ID NO: 311295 - DNA, 25 bp, Homo sapien
atagggccggtccctgccctcttga

SEQ ID NO: 311296 - DNA, 25 bp, Homo sapien
tgccctcttgaagcccgagccagag

SEQ ID NO: 311297 - DNA, 25 bp, Homo sapien
tctgctgtgggtggtatggaaacca

SEQ ID NO: 311298 - DNA, 25 bp, Homo sapien
cttgaagcccgagccagagtctgct

SEQ ID NO: 311299 - DNA, 25 bp, Homo sapien
actgaactgtctaattcctcgagga

SEQ ID NO: 311300 - DNA, 25 bp, Homo sapien
gtggctcagggaccagaacgtgcgg

SEQ ID NO: 311301 - DNA, 25 bp, Homo sapien
gaaattgtcaaaccatgtccacgga

SEQ ID NO: 311302 - DNA, 25 bp, Homo sapien
gaacgtgcggctctcagataaattg

SEQ ID NO: 311303 - DNA, 25 bp, Homo sapien
actcagggcggccactttgctgtca

SEQ ID NO: 311304 - DNA, 25 bp, Homo sapien
ttacatgcgagctgcccctggcagg

SEQ ID NO: 311305 - DNA, 25 bp, Homo sapien
tggcaggtccccactcagggcggcc

SEQ ID NO: 311306 - DNA, 25 bp, Homo sapien
gcggccactttgctgtcaacagcag

SEQ ID NO: 311307 - DNA, 25 bp, Homo sapien
cagtcctggtggctgtgtcctctgg

SEQ ID NO: 311308 - DNA, 25 bp, Homo sapien
tgtcctctgggcttgctgggcccac

SEQ ID NO: 311309 - DNA, 25 bp, Homo sapien
cgcccttccccaggagtgggtgaca

SEQ ID NO: 311310 - DNA, 25 bp, Homo sapien
gtcctctgggcttgctgggcccacc

SEQ ID NO: 311311 - DNA, 25 bp, Homo sapien
tggacttttctgacaaccccggaga

SEQ ID NO: 311312 - DNA, 25 bp, Homo sapien
cgcagagagacttcaactccaggag

SEQ ID NO: 311313 - DNA, 25 bp, Homo sapien
tcagccttggagtaacatgacaggc

SEQ ID NO: 311314 - DNA, 25 bp, Homo sapien
agggttccagttcctcgccatcctg

SEQ ID NO: 311315 - DNA, 25 bp, Homo sapien
ctggtagaatacatgcacggtgcct

SEQ ID NO: 311316 - DNA, 25 bp, Homo sapien
gacgggtctaggttgttctgctcat

SEQ ID NO: 311317 - DNA, 25 bp, Homo sapien
tgcacgccgactgggttaatcctct

SEQ ID NO: 311318 - DNA, 25 bp, Homo sapien
ttactagactagtgcctggctcaga

SEQ ID NO: 311319 - DNA, 25 bp, Homo sapien
agtccccggttcagaccgcacaaag

SEQ ID NO: 311320 - DNA, 25 bp, Homo sapien
catcaggggcttgagtccccgctgc

SEQ ID NO: 311321 - DNA, 25 bp, Homo sapien
gctgcgcgatcgtttgctgcagtcc

SEQ ID NO: 311322 - DNA, 25 bp, Homo sapien
tgggcgctcttggactctgggcctt

SEQ ID NO: 311323 - DNA, 25 bp, Homo sapien
acgacttggacgccctccatgtcct

SEQ ID NO: 311324 - DNA, 25 bp, Homo sapien
acacgacttggacgccctccatgtc

SEQ ID NO: 311325 - DNA, 25 bp, Homo sapien
cacgacttggacgccctccatgtcc

SEQ ID NO: 311326 - DNA, 25 bp, Homo sapien
aattggcgtcccatcccagtctgat

SEQ ID NO: 311327 - DNA, 25 bp, Homo sapien
cagtctgatactctctgagcttctt

SEQ ID NO: 311328 - DNA, 25 bp, Homo sapien
gggcacagaattggcgtcccatccc

SEQ ID NO: 311329 - DNA, 25 bp, Homo sapien
gctgtcattagtgttcaggaagatg

SEQ ID NO: 311330 - DNA, 25 bp, Homo sapien
tctgtccgggggctaccatggaggc

SEQ ID NO: 311331 - DNA, 25 bp, Homo sapien
gagtgatctgtccgggggctaccat

SEQ ID NO: 311332 - DNA, 25 bp, Homo sapien
tgtgggagtgatctgtccgggggct

SEQ ID NO: 311333 - DNA, 25 bp, Homo sapien
tccgggggctaccatggaggcttgg

SEQ ID NO: 311334 - DNA, 25 bp, Homo sapien
tcaggagcacacactgtggacatcc

SEQ ID NO: 311335 - DNA, 25 bp, Homo sapien
caggagcacacactgtggacatccc

SEQ ID NO: 311336 - DNA, 25 bp, Homo sapien
acttagcatatcgtgggcatctccc

SEQ ID NO: 311337 - DNA, 25 bp, Homo sapien
catgtccatcttgcccgtattggga

SEQ ID NO: 311338 - DNA, 25 bp, Homo sapien
gcatttcactgacttctagcacggt

SEQ ID NO: 311339 - DNA, 25 bp, Homo sapien
caagttattagggtagactccagga

SEQ ID NO: 311340 - DNA, 25 bp, Homo sapien
tgaggttgacttagggaacaagccc

SEQ ID NO: 311341 - DNA, 25 bp, Homo sapien
aagagatcctaatggaggcgcctcc

SEQ ID NO: 311342 - DNA, 25 bp, Homo sapien
gacgcacacgctcctgttgtcatgg

SEQ ID NO: 311343 - DNA, 25 bp, Homo sapien
caaaacccagaaagtgcggcaggac

SEQ ID NO: 311344 - DNA, 25 bp, Homo sapien
cagcacttggtagcgtctgcagcca

SEQ ID NO: 311345 - DNA, 25 bp, Homo sapien
gaatctttaagaatccgccagcact

SEQ ID NO: 311346 - DNA, 25 bp, Homo sapien
tcctggcagagttgcggagaaccta

SEQ ID NO: 311347 - DNA, 25 bp, Homo sapien
gaagaaatgcccatacgacagcttt

SEQ ID NO: 311348 - DNA, 25 bp, Homo sapien
tccgcgcggtgattcatcggcctgg

SEQ ID NO: 311349 - DNA, 25 bp, Homo sapien
cgcgcggtgattcatcggcctggcc

SEQ ID NO: 311350 - DNA, 25 bp, Homo sapien
cgcggtgattcatcggcctggccgc

SEQ ID NO: 311351 - DNA, 25 bp, Homo sapien
cggtccgcgcggtgattcatcggcc

SEQ ID NO: 311352 - DNA, 25 bp, Homo sapien
tgagagctccaatggtgtacgaggt

SEQ ID NO: 311353 - DNA, 25 bp, Homo sapien
tgtgttcaataaaccagtgccaaga

SEQ ID NO: 311354 - DNA, 25 bp, Homo sapien
cagaaacaatccttgccaatagaga

SEQ ID NO: 311355 - DNA, 25 bp, Homo sapien
ccctgccgccttgttggaagtcttt

SEQ ID NO: 311356 - DNA, 25 bp, Homo sapien
tgtctggacatgagattccccaaaa

SEQ ID NO: 311357 - DNA, 25 bp, Homo sapien
ccgagggtgggatgtagactcttta

SEQ ID NO: 311358 - DNA, 25 bp, Homo sapien
tctttaagatgtgctaggaaagctg

SEQ ID NO: 311359 - DNA, 25 bp, Homo sapien
ccagggccaccttatggccgtgtct

SEQ ID NO: 311360 - DNA, 25 bp, Homo sapien
ttgagtccagtgactgtgggcacag

SEQ ID NO: 311361 - DNA, 25 bp, Homo sapien
agccccaggaatctctagcatcttg

SEQ ID NO: 311362 - DNA, 25 bp, Homo sapien
cacaggtgtcggtggtagttcctca

SEQ ID NO: 311363 - DNA, 25 bp, Homo sapien
cccagaaacaggtgatgttgctgcc

SEQ ID NO: 311364 - DNA, 25 bp, Homo sapien
atgtggagcaagtggtgaagctcaa

SEQ ID NO: 311365 - DNA, 25 bp, Homo sapien
gcagggcccagggatcggtagttgg

SEQ ID NO: 311366 - DNA, 25 bp, Homo sapien
gtagttggtggagaatgtggagcaa

SEQ ID NO: 311367 - DNA, 25 bp, Homo sapien
ctgggcagggcccagggatcggtag

SEQ ID NO: 311368 - DNA, 25 bp, Homo sapien
gatcctggaaccagagttcccagtg

SEQ ID NO: 311369 - DNA, 25 bp, Homo sapien
agagttcccagtgcctgcatagacg

SEQ ID NO: 311370 - DNA, 25 bp, Homo sapien
cacggagatcctggaaccagagttc

SEQ ID NO: 311371 - DNA, 25 bp, Homo sapien
tccatgctgccccggaagctcgtgg

SEQ ID NO: 311372 - DNA, 25 bp, Homo sapien
agaccccagtcatccccgcggccag

SEQ ID NO: 311373 - DNA, 25 bp, Homo sapien
catccccgcggccaggcctccggac

SEQ ID NO: 311374 - DNA, 25 bp, Homo sapien
gtcatccccgcggccaggcctccgg

SEQ ID NO: 311375 - DNA, 25 bp, Homo sapien
ctgccagaccccagtcatccccgcg

SEQ ID NO: 311376 - DNA, 25 bp, Homo sapien
ctttgcatggtctcctcgttctgga

SEQ ID NO: 311377 - DNA, 25 bp, Homo sapien
ccagcagtcgttcaggctttgcatg

SEQ ID NO: 311378 - DNA, 25 bp, Homo sapien
gtctcctcgttctggatgcctccca

SEQ ID NO: 311379 - DNA, 25 bp, Homo sapien
ctgtccgggtaggaggccagcagtc

SEQ ID NO: 311380 - DNA, 25 bp, Homo sapien
gcaggcattgtctacagtaattgcc

SEQ ID NO: 311381 - DNA, 25 bp, Homo sapien
ctctggttcctgatggtcttgaagt

SEQ ID NO: 311382 - DNA, 25 bp, Homo sapien
ggtgtcatcattgaccttacagagt

SEQ ID NO: 311383 - DNA, 25 bp, Homo sapien
gtcatcattgaccttacagagtcca

SEQ ID NO: 311384 - DNA, 25 bp, Homo sapien
atcattgaccttacagagtccatgg

SEQ ID NO: 311385 - DNA, 25 bp, Homo sapien
gacgttggtgtcatcattgacctta

SEQ ID NO: 311386 - DNA, 25 bp, Homo sapien
gcaaggtgtagcaggccttcacctc

SEQ ID NO: 311387 - DNA, 25 bp, Homo sapien
cagctccagccttggcagactgcgt

SEQ ID NO: 311388 - DNA, 25 bp, Homo sapien
ctgcaaggtgtagcaggccttcacc

SEQ ID NO: 311389 - DNA, 25 bp, Homo sapien
cgctgttctccaaactggctttcag

SEQ ID NO: 311390 - DNA, 25 bp, Homo sapien
ctggcactgtccctttgcctgggtc

SEQ ID NO: 311391 - DNA, 25 bp, Homo sapien
ttgccatccactctctggtgggtgg

SEQ ID NO: 311392 - DNA, 25 bp, Homo sapien
tggtgggtggtggtctttggaatgg

SEQ ID NO: 311393 - DNA, 25 bp, Homo sapien
actctctggtgggtggtggtctttg

SEQ ID NO: 311394 - DNA, 25 bp, Homo sapien
tttattggcctcctgctctctaaag

SEQ ID NO: 311395 - DNA, 25 bp, Homo sapien
tggcctcctgctctctaaagggtac

SEQ ID NO: 311396 - DNA, 25 bp, Homo sapien
tattggcctcctgctctctaaaggg

SEQ ID NO: 311397 - DNA, 25 bp, Homo sapien
ttggcctcctgctctctaaagggta

SEQ ID NO: 311398 - DNA, 25 bp, Homo sapien
caaggtagaggacatttctgccagc

SEQ ID NO: 311399 - DNA, 25 bp, Homo sapien
tgccagctggaaaatctctcaccag

SEQ ID NO: 311400 - DNA, 25 bp, Homo sapien
atgtcacacgcctccctcaaggtag

SEQ ID NO: 311401 - DNA, 25 bp, Homo sapien
aggtcaccctcccatctgatccccg

SEQ ID NO: 311402 - DNA, 25 bp, Homo sapien
gaaacctggtggatgagccgtaacc

SEQ ID NO: 311403 - DNA, 25 bp, Homo sapien
ggtggatgagccgtaacccactagg

SEQ ID NO: 311404 - DNA, 25 bp, Homo sapien
ccactaggtgagcttgagaagctga

SEQ ID NO: 311405 - DNA, 25 bp, Homo sapien
gccgtaacccactaggtgagcttga

SEQ ID NO: 311406 - DNA, 25 bp, Homo sapien
ttcccctctggttcagtgattggat

SEQ ID NO: 311407 - DNA, 25 bp, Homo sapien
cagtgattggatcccaagcaggatg

SEQ ID NO: 311408 - DNA, 25 bp, Homo sapien
ggatgtgtaaccatccattctcctc

SEQ ID NO: 311409 - DNA, 25 bp, Homo sapien
aagcaggatgtgtaaccatccattc

SEQ ID NO: 311410 - DNA, 25 bp, Homo sapien
tgtcatgctgtactgacccccacgc

SEQ ID NO: 311411 - DNA, 25 bp, Homo sapien
tcatgctgtactgacccccacgcct

SEQ ID NO: 311412 - DNA, 25 bp, Homo sapien
tgctgtactgacccccacgccttac

SEQ ID NO: 311413 - DNA, 25 bp, Homo sapien
atgctgtactgacccccacgcctta

SEQ ID NO: 311414 - DNA, 25 bp, Homo sapien
ttttttagcctctccaatcaggccg

SEQ ID NO: 311415 - DNA, 25 bp, Homo sapien
aatcaggccggcatcgtgcttggct

SEQ ID NO: 311416 - DNA, 25 bp, Homo sapien
ttggctattgttagcatctcagctc

SEQ ID NO: 311417 - DNA, 25 bp, Homo sapien
gccggcatcgtgcttggctattgtt

SEQ ID NO: 311418 - DNA, 25 bp, Homo sapien
gtctgccagcttcatctcccgagcc

SEQ ID NO: 311419 - DNA, 25 bp, Homo sapien
ccagcttcatctcccgagcctccat

SEQ ID NO: 311420 - DNA, 25 bp, Homo sapien
gctgacaggacgtccctccagatgt

SEQ ID NO: 311421 - DNA, 25 bp, Homo sapien
acaggacgtccctccagatgtccag

SEQ ID NO: 311422 - DNA, 25 bp, Homo sapien
tgattctgagcctcacgtctcagag

SEQ ID NO: 311423 - DNA, 25 bp, Homo sapien
tctgagcctcacgtctcagagcaga

SEQ ID NO: 311424 - DNA, 25 bp, Homo sapien
agcctcacgtctcagagcagaactg

SEQ ID NO: 311425 - DNA, 25 bp, Homo sapien
ctgattctgagcctcacgtctcaga

SEQ ID NO: 311426 - DNA, 25 bp, Homo sapien
tgctgtggttccagccgggagcaac

SEQ ID NO: 311427 - DNA, 25 bp, Homo sapien
tgtatcagtgtggccgctccactct

SEQ ID NO: 311428 - DNA, 25 bp, Homo sapien
ctgttcactcatcgccactgctgtg

SEQ ID NO: 311429 - DNA, 25 bp, Homo sapien
ggctgttcactcatcgccactgctg

SEQ ID NO: 311430 - DNA, 25 bp, Homo sapien
agttttcacggccagggaccctgct

SEQ ID NO: 311431 - DNA, 25 bp, Homo sapien
gctttattgtggcactaaatacagt

SEQ ID NO: 311432 - DNA, 25 bp, Homo sapien
ctgctctgaggtccgtgtgatttgc

SEQ ID NO: 311433 - DNA, 25 bp, Homo sapien
gataggaaggcggttttgcctggcc

SEQ ID NO: 311434 - DNA, 25 bp, Homo sapien
cgggactgaatgatgtgggttcaaa

SEQ ID NO: 311435 - DNA, 25 bp, Homo sapien
ccttcgggaggaagagaggtgctca

SEQ ID NO: 311436 - DNA, 25 bp, Homo sapien
tgccttcgggaggaagagaggtgct

SEQ ID NO: 311437 - DNA, 25 bp, Homo sapien
tgacctggggatcgggactgaatga

SEQ ID NO: 311438 - DNA, 25 bp, Homo sapien
ggatggcagtggcaccagcgggatg

SEQ ID NO: 311439 - DNA, 25 bp, Homo sapien
gatggcagtggcaccagcgggatga

SEQ ID NO: 311440 - DNA, 25 bp, Homo sapien
taagggcttgcttggagcagcgtac

SEQ ID NO: 311441 - DNA, 25 bp, Homo sapien
agcagcgtacgggagagctgctggt

SEQ ID NO: 311442 - DNA, 25 bp, Homo sapien
gcgtacgggagagctgctggtggct

SEQ ID NO: 311443 - DNA, 25 bp, Homo sapien
gaccattaagggcttgcttggagca

SEQ ID NO: 311444 - DNA, 25 bp, Homo sapien
gagggggcaagagatggtcggggct

SEQ ID NO: 311445 - DNA, 25 bp, Homo sapien
tgagagcgccgagctggaaaggtgg

SEQ ID NO: 311446 - DNA, 25 bp, Homo sapien
gggctggcggtgagtgcttcccact

SEQ ID NO: 311447 - DNA, 25 bp, Homo sapien
ttgctgtgttcgtttggaaggaggg

SEQ ID NO: 311448 - DNA, 25 bp, Homo sapien
tgccttggcccaagtgttgcttcca

SEQ ID NO: 311449 - DNA, 25 bp, Homo sapien
cataggccacggtgtgcctcaggct

SEQ ID NO: 311450 - DNA, 25 bp, Homo sapien
tggcccaagtgttgcttccagccct

SEQ ID NO: 311451 - DNA, 25 bp, Homo sapien
ttgattgcactaaagcacccgctct

SEQ ID NO: 311452 - DNA, 25 bp, Homo sapien
gaggcgtcttttacctcccagttca

SEQ ID NO: 311453 - DNA, 25 bp, Homo sapien
aggacagcccggcagggtgcggaag

SEQ ID NO: 311454 - DNA, 25 bp, Homo sapien
ccagttcatggaggcggttgggcag

SEQ ID NO: 311455 - DNA, 25 bp, Homo sapien
cttgcgaggacttgggtcggcagca

SEQ ID NO: 311456 - DNA, 25 bp, Homo sapien
tgcctgcaaatacggcctcaaagag

SEQ ID NO: 311457 - DNA, 25 bp, Homo sapien
ctctgaagttgcctgcaaatacggc

SEQ ID NO: 311458 - DNA, 25 bp, Homo sapien
tgaagttgcctgcaaatacggcctc

SEQ ID NO: 311459 - DNA, 25 bp, Homo sapien
aagttgcctgcaaatacggcctcaa

SEQ ID NO: 311460 - DNA, 25 bp, Homo sapien
ggcgctgacggtgtgtgcttgtgga

SEQ ID NO: 311461 - DNA, 25 bp, Homo sapien
ccccacgccctgcattggtggagtt

SEQ ID NO: 311462 - DNA, 25 bp, Homo sapien
ggcagcctggttgtgtccccacgcc

SEQ ID NO: 311463 - DNA, 25 bp, Homo sapien
tgtttctgcccctgtatcagcgtct

SEQ ID NO: 311464 - DNA, 25 bp, Homo sapien
gtccagtacacagggatgaaggcct

SEQ ID NO: 311465 - DNA, 25 bp, Homo sapien
cagtacacagggatgaaggcctttg

SEQ ID NO: 311466 - DNA, 25 bp, Homo sapien
tacacagggatgaaggcctttgttc

SEQ ID NO: 311467 - DNA, 25 bp, Homo sapien
gtgtccagtacacagggatgaaggc

SEQ ID NO: 311468 - DNA, 25 bp, Homo sapien
gatgctccggccatgcgtgtgaccg

SEQ ID NO: 311469 - DNA, 25 bp, Homo sapien
gccatgcgtgtgaccgctggctgct

SEQ ID NO: 311470 - DNA, 25 bp, Homo sapien
tgatccggttctgccgatgctccgg

SEQ ID NO: 311471 - DNA, 25 bp, Homo sapien
ttctctgcatgtgccggctgctgtg

SEQ ID NO: 311472 - DNA, 25 bp, Homo sapien
caattctgttgccagcagcgcttct

SEQ ID NO: 311473 - DNA, 25 bp, Homo sapien
tgtttggagaagaccctccccattg

SEQ ID NO: 311474 - DNA, 25 bp, Homo sapien
cagcgcttctgtttggagaagaccc

SEQ ID NO: 311475 - DNA, 25 bp, Homo sapien
tgccagcagcgcttctgtttggaga

SEQ ID NO: 311476 - DNA, 25 bp, Homo sapien
gaacccaggatgcttggcgatcttg

SEQ ID NO: 311477 - DNA, 25 bp, Homo sapien
tctctgagtatcgtccactgctgga

SEQ ID NO: 311478 - DNA, 25 bp, Homo sapien
tgggctcccttgagtctgcaaacct

SEQ ID NO: 311479 - DNA, 25 bp, Homo sapien
gcaagccgtcctttctgcgtctggg

SEQ ID NO: 311480 - DNA, 25 bp, Homo sapien
ctttgagctccactgttccagtgcc

SEQ ID NO: 311481 - DNA, 25 bp, Homo sapien
cactgaggggccgtcacggggtgat

SEQ ID NO: 311482 - DNA, 25 bp, Homo sapien
gataggggtcgggatgtggtggtac

SEQ ID NO: 311483 - DNA, 25 bp, Homo sapien
ttgagctccactgttccagtgccca

SEQ ID NO: 311484 - DNA, 25 bp, Homo sapien
ggatcctgttctcagagagggtgaa

SEQ ID NO: 311485 - DNA, 25 bp, Homo sapien
tagaggaggatcctgttctcagaga

SEQ ID NO: 311486 - DNA, 25 bp, Homo sapien
gagggtgaagtcacctccacaggga

SEQ ID NO: 311487 - DNA, 25 bp, Homo sapien
ctggccacctatagaggaggatcct

SEQ ID NO: 311488 - DNA, 25 bp, Homo sapien
gggagcccggacaccgcacgtgagg

SEQ ID NO: 311489 - DNA, 25 bp, Homo sapien
aggtgggtgcgtctggacctcccca

SEQ ID NO: 311490 - DNA, 25 bp, Homo sapien
agccacgggcgctctgggcctcggg

SEQ ID NO: 311491 - DNA, 25 bp, Homo sapien
gacaccgcacgtgaggctgctctgc

SEQ ID NO: 311492 - DNA, 25 bp, Homo sapien
cccccggtgtgtcggcttctggaag

SEQ ID NO: 311493 - DNA, 25 bp, Homo sapien
ccggtgtgtcggcttctggaagggt

SEQ ID NO: 311494 - DNA, 25 bp, Homo sapien
cccggtgtgtcggcttctggaaggg

SEQ ID NO: 311495 - DNA, 25 bp, Homo sapien
ccccggtgtgtcggcttctggaagg

SEQ ID NO: 311496 - DNA, 25 bp, Homo sapien
ccaatcccgtttgtgtttgcgctcc

SEQ ID NO: 311497 - DNA, 25 bp, Homo sapien
tggcccaatcccgtttgtgtttgcg

SEQ ID NO: 311498 - DNA, 25 bp, Homo sapien
tcccgtttgtgtttgcgctccatcc

SEQ ID NO: 311499 - DNA, 25 bp, Homo sapien
aatcccgtttgtgtttgcgctccat

SEQ ID NO: 311500 - DNA, 25 bp, Homo sapien
ggtaacggtggtcaccatagcaaca

SEQ ID NO: 311501 - DNA, 25 bp, Homo sapien
ggcttttggacacaggtctgtcccc

SEQ ID NO: 311502 - DNA, 25 bp, Homo sapien
caggtgcccaggacgatgcggctta

SEQ ID NO: 311503 - DNA, 25 bp, Homo sapien
gatgcggcttagttgccaggtaacg

SEQ ID NO: 311504 - DNA, 25 bp, Homo sapien
agacaccaggcagcgacggcgtgat

SEQ ID NO: 311505 - DNA, 25 bp, Homo sapien
ccagacaccaggcagcgacggcgtg

SEQ ID NO: 311506 - DNA, 25 bp, Homo sapien
gacggcgtgatggagtgaagtcgct

SEQ ID NO: 311507 - DNA, 25 bp, Homo sapien
ggagtgaagtcgctgacccagaaac

SEQ ID NO: 311508 - DNA, 25 bp, Homo sapien
gcctcgggccctccatgttgcacgc

SEQ ID NO: 311509 - DNA, 25 bp, Homo sapien
tatgacggtgcctttggggtcaggc

SEQ ID NO: 311510 - DNA, 25 bp, Homo sapien
ttgcacgctgacacggccttggcca

SEQ ID NO: 311511 - DNA, 25 bp, Homo sapien
ggccacagcaccctgtcggccctca

SEQ ID NO: 311512 - DNA, 25 bp, Homo sapien
cacagggtaagctgataagtagtta

SEQ ID NO: 311513 - DNA, 25 bp, Homo sapien
tgcacagggtaagctgataagtagt

SEQ ID NO: 311514 - DNA, 25 bp, Homo sapien
cttgtgcacagggtaagctgataag

SEQ ID NO: 311515 - DNA, 25 bp, Homo sapien
tgtgcacagggtaagctgataagta

SEQ ID NO: 311516 - DNA, 25 bp, Homo sapien
tggtcgtggggttcctgcgatccct

SEQ ID NO: 311517 - DNA, 25 bp, Homo sapien
gggttcctgcgatccctgcaactca

SEQ ID NO: 311518 - DNA, 25 bp, Homo sapien
tggggttcctgcgatccctgcaact

SEQ ID NO: 311519 - DNA, 25 bp, Homo sapien
cgtggggttcctgcgatccctgcaa

SEQ ID NO: 311520 - DNA, 25 bp, Homo sapien
cagggatgcgatttgccttttgaat

SEQ ID NO: 311521 - DNA, 25 bp, Homo sapien
cctcagggatgcgatttgccttttg

SEQ ID NO: 311522 - DNA, 25 bp, Homo sapien
gggtcctcagggatgcgatttgcct

SEQ ID NO: 311523 - DNA, 25 bp, Homo sapien
gctcgagcttggcttttagtgtggg

SEQ ID NO: 311524 - DNA, 25 bp, Homo sapien
tggccagctgcaccttgaagaggtg

SEQ ID NO: 311525 - DNA, 25 bp, Homo sapien
tgaagaggtggggctggaggtccat

SEQ ID NO: 311526 - DNA, 25 bp, Homo sapien
cttgaagaggtggggctggaggtcc

SEQ ID NO: 311527 - DNA, 25 bp, Homo sapien
gccagctgcaccttgaagaggtggg

SEQ ID NO: 311528 - DNA, 25 bp, Homo sapien
cagcagctctgattaacggttttaa

SEQ ID NO: 311529 - DNA, 25 bp, Homo sapien
ttttaagttcaggccagagaccaag

SEQ ID NO: 311530 - DNA, 25 bp, Homo sapien
tgttcaaacagaggtgcagcagctc

SEQ ID NO: 311531 - DNA, 25 bp, Homo sapien
caggccagagaccaagacggtctga

SEQ ID NO: 311532 - DNA, 25 bp, Homo sapien
tcccgagcggccctgccagcagacg

SEQ ID NO: 311533 - DNA, 25 bp, Homo sapien
gcgtgtgctcccgagcggccctgcc

SEQ ID NO: 311534 - DNA, 25 bp, Homo sapien
acaggcagcagtggctttgcaccag

SEQ ID NO: 311535 - DNA, 25 bp, Homo sapien
aggagcccggggcgtttgatcttct

SEQ ID NO: 311536 - DNA, 25 bp, Homo sapien
tcacggtttaagaggtccaggctct

SEQ ID NO: 311537 - DNA, 25 bp, Homo sapien
caagacaagttttagaacagcgggt

SEQ ID NO: 311538 - DNA, 25 bp, Homo sapien
gtcatagtgatcaaggtaggtcagc

SEQ ID NO: 311539 - DNA, 25 bp, Homo sapien
tcattcaggctagtaacctcacggt

SEQ ID NO: 311540 - DNA, 25 bp, Homo sapien
catagttgagcaccacatctgtcca

SEQ ID NO: 311541 - DNA, 25 bp, Homo sapien
atagttgagcaccacatctgtccac

SEQ ID NO: 311542 - DNA, 25 bp, Homo sapien
ctcatagttgagcaccacatctgtc

SEQ ID NO: 311543 - DNA, 25 bp, Homo sapien
tcatagttgagcaccacatctgtcc

SEQ ID NO: 311544 - DNA, 25 bp, Homo sapien
ccacgtgccaggaccgtcctgacac

SEQ ID NO: 311545 - DNA, 25 bp, Homo sapien
ccaccacgtgccaggaccgtcctga

SEQ ID NO: 311546 - DNA, 25 bp, Homo sapien
accacgtgccaggaccgtcctgaca

SEQ ID NO: 311547 - DNA, 25 bp, Homo sapien
cttctctgagtgagcagatgtggcc

SEQ ID NO: 311548 - DNA, 25 bp, Homo sapien
tgcctggtagaagccgcaagtcctg

SEQ ID NO: 311549 - DNA, 25 bp, Homo sapien
tccccgaaaggattgacagtcagtg

SEQ ID NO: 311550 - DNA, 25 bp, Homo sapien
cgcaagtcctgtaccagaggccagg

SEQ ID NO: 311551 - DNA, 25 bp, Homo sapien
tctgtcccaggaatccccgaaagga

SEQ ID NO: 311552 - DNA, 25 bp, Homo sapien
cgccgctgccaccgcgcagagccag

SEQ ID NO: 311553 - DNA, 25 bp, Homo sapien
ccgctgccaccgcgcagagccagag

SEQ ID NO: 311554 - DNA, 25 bp, Homo sapien
ctgccaccgcgcagagccagagccg

SEQ ID NO: 311555 - DNA, 25 bp, Homo sapien
gctgccaccgcgcagagccagagcc

SEQ ID NO: 311556 - DNA, 25 bp, Homo sapien
cagccaggaagtggctggaggccca

SEQ ID NO: 311557 - DNA, 25 bp, Homo sapien
tgagccaggacagggctcagaaagg

SEQ ID NO: 311558 - DNA, 25 bp, Homo sapien
ccagaggccagagcggtgggggcca

SEQ ID NO: 311559 - DNA, 25 bp, Homo sapien
acaggctgagccaggacagggctca

SEQ ID NO: 311560 - DNA, 25 bp, Homo sapien
cgagtagctaagaccacaagtgcat

SEQ ID NO: 311561 - DNA, 25 bp, Homo sapien
atgcccggctgactcattttttttg

SEQ ID NO: 311562 - DNA, 25 bp, Homo sapien
ccggctgactcattttttttgtact

SEQ ID NO: 311563 - DNA, 25 bp, Homo sapien
tatgttgcccaggtttggcttaaac

SEQ ID NO: 311564 - DNA, 25 bp, Homo sapien
cattaggaggcgttcacatggccaa

SEQ ID NO: 311565 - DNA, 25 bp, Homo sapien
catgactcagcagaactcaggctgc

SEQ ID NO: 311566 - DNA, 25 bp, Homo sapien
gactgcaccctatgcagggaagccc

SEQ ID NO: 311567 - DNA, 25 bp, Homo sapien
taagcacactggatgcctggccttg

SEQ ID NO: 311568 - DNA, 25 bp, Homo sapien
catcagactgagtgtcccagagcgg

SEQ ID NO: 311569 - DNA, 25 bp, Homo sapien
gctgcgccggcatcttttccgggct

SEQ ID NO: 311570 - DNA, 25 bp, Homo sapien
ttactgggctctcaatgcacgctcg

SEQ ID NO: 311571 - DNA, 25 bp, Homo sapien
tctgtgaaagttccaaacacaccat

SEQ ID NO: 311572 - DNA, 25 bp, Homo sapien
catgggaaagtcgggcacccagggt

SEQ ID NO: 311573 - DNA, 25 bp, Homo sapien
ttccatgggaaagtcgggcacccag

SEQ ID NO: 311574 - DNA, 25 bp, Homo sapien
agcagcttccatgggaaagtcgggc

SEQ ID NO: 311575 - DNA, 25 bp, Homo sapien
gcttccatgggaaagtcgggcaccc

SEQ ID NO: 311576 - DNA, 25 bp, Homo sapien
ggtggccatgcagttagaagctccc

SEQ ID NO: 311577 - DNA, 25 bp, Homo sapien
ttagaagctcccagcttcttgcagg

SEQ ID NO: 311578 - DNA, 25 bp, Homo sapien
cagagggtggccatgcagttagaag

SEQ ID NO: 311579 - DNA, 25 bp, Homo sapien
gccatgcagttagaagctcccagct

SEQ ID NO: 311580 - DNA, 25 bp, Homo sapien
tggcttctctgaaagcgcaaggctc

SEQ ID NO: 311581 - DNA, 25 bp, Homo sapien
actggcttctctgaaagcgcaaggc

SEQ ID NO: 311582 - DNA, 25 bp, Homo sapien
gcttctctgaaagcgcaaggctccc

SEQ ID NO: 311583 - DNA, 25 bp, Homo sapien
cactggcttctctgaaagcgcaagg

SEQ ID NO: 311584 - DNA, 25 bp, Homo sapien
gaggatcgcggcttcaccacttaat

SEQ ID NO: 311585 - DNA, 25 bp, Homo sapien
taaacgtattcacagctgcaggtgc

SEQ ID NO: 311586 - DNA, 25 bp, Homo sapien
cacttaatagatgtcgacctcgggc

SEQ ID NO: 311587 - DNA, 25 bp, Homo sapien
taaagtgcgattcagagcatgggct

SEQ ID NO: 311588 - DNA, 25 bp, Homo sapien
gcttcgcagagcacttttagatgtc

SEQ ID NO: 311589 - DNA, 25 bp, Homo sapien
acaggaaaccaacacgcacaggacg

SEQ ID NO: 311590 - DNA, 25 bp, Homo sapien
ttgggtagaggccttcagtcccctc

SEQ ID NO: 311591 - DNA, 25 bp, Homo sapien
tcctcgcaaaggctgtgccacagag

SEQ ID NO: 311592 - DNA, 25 bp, Homo sapien
gccccgccgggttaatcattgcacg

SEQ ID NO: 311593 - DNA, 25 bp, Homo sapien
aaactccggcgagagcaggaagccg

SEQ ID NO: 311594 - DNA, 25 bp, Homo sapien
gcgatgcgccctctacgcggaaact

SEQ ID NO: 311595 - DNA, 25 bp, Homo sapien
tcattgcacggagaggctcagcgtg

SEQ ID NO: 311596 - DNA, 25 bp, Homo sapien
tgctgcgtgccccgctcgtccgcgg

SEQ ID NO: 311597 - DNA, 25 bp, Homo sapien
ctgttccaggtggcgttggcgcagg

SEQ ID NO: 311598 - DNA, 25 bp, Homo sapien
ttccaggtggcgttggcgcaggccc

SEQ ID NO: 311599 - DNA, 25 bp, Homo sapien
gcgctgctgcgtgccccgctcgtcc

SEQ ID NO: 311600 - DNA, 25 bp, Homo sapien
ctaaagaatgcctcgcagctgccgc

SEQ ID NO: 311601 - DNA, 25 bp, Homo sapien
taaagaatgcctcgcagctgccgca

SEQ ID NO: 311602 - DNA, 25 bp, Homo sapien
ctcgcagctgccgcaccccctgctg

SEQ ID NO: 311603 - DNA, 25 bp, Homo sapien
gcagctgccgcaccccctgctgaca

SEQ ID NO: 311604 - DNA, 25 bp, Homo sapien
tctaaatcacggcagagattcaagg

SEQ ID NO: 311605 - DNA, 25 bp, Homo sapien
ggcagagattcaaggacagagagat

SEQ ID NO: 311606 - DNA, 25 bp, Homo sapien
taaggaaattgaggacctgacttgc

SEQ ID NO: 311607 - DNA, 25 bp, Homo sapien
gcactgttatctgcccgttttatgg

SEQ ID NO: 311608 - DNA, 25 bp, Homo sapien
ggggacccgcagcaggacgccccac

SEQ ID NO: 311609 - DNA, 25 bp, Homo sapien
tctggggacccgcagcaggacgccc

SEQ ID NO: 311610 - DNA, 25 bp, Homo sapien
ctggggacccgcagcaggacgcccc

SEQ ID NO: 311611 - DNA, 25 bp, Homo sapien
ctgtctggggacccgcagcaggacg

SEQ ID NO: 311612 - DNA, 25 bp, Homo sapien
aggagtgaactggagctgcctggga

SEQ ID NO: 311613 - DNA, 25 bp, Homo sapien
ggagtgaactggagctgcctgggag

SEQ ID NO: 311614 - DNA, 25 bp, Homo sapien
cagggaggagtgaactggagctgcc

SEQ ID NO: 311615 - DNA, 25 bp, Homo sapien
agacccagggaggagtgaactggag

SEQ ID NO: 311616 - DNA, 25 bp, Homo sapien
cctccagtgggaagatgtgaaagta

SEQ ID NO: 311617 - DNA, 25 bp, Homo sapien
caagagcacggccttcatagctgga

SEQ ID NO: 311618 - DNA, 25 bp, Homo sapien
cggccttcatagctggaagccccat

SEQ ID NO: 311619 - DNA, 25 bp, Homo sapien
gcagcccaagagcacggccttcata

SEQ ID NO: 311620 - DNA, 25 bp, Homo sapien
actattgctgtgtaatggggagcac

SEQ ID NO: 311621 - DNA, 25 bp, Homo sapien
ctattgctgtgtaatggggagcacg

SEQ ID NO: 311622 - DNA, 25 bp, Homo sapien
gtgtaggtggtactattgctgtgta

SEQ ID NO: 311623 - DNA, 25 bp, Homo sapien
tcagggtgtaggtggtactattgct

SEQ ID NO: 311624 - DNA, 25 bp, Homo sapien
cacctgccagcgaacacctgcccgc

SEQ ID NO: 311625 - DNA, 25 bp, Homo sapien
tctggccgcacagagcaaagcccag

SEQ ID NO: 311626 - DNA, 25 bp, Homo sapien
agagctcctggtcgggcagcccctt

SEQ ID NO: 311627 - DNA, 25 bp, Homo sapien
agacggcgatcaccccgttgtggat

SEQ ID NO: 311628 - DNA, 25 bp, Homo sapien
agccccttgcgctggaagacggcga

SEQ ID NO: 311629 - DNA, 25 bp, Homo sapien
cggacgccctcgttgaggctgaaga

SEQ ID NO: 311630 - DNA, 25 bp, Homo sapien
cagtgggggccgtcagcgtcatctc

SEQ ID NO: 311631 - DNA, 25 bp, Homo sapien
tgggggccgtcagcgtcatctccag

SEQ ID NO: 311632 - DNA, 25 bp, Homo sapien
gtgggggccgtcagcgtcatctcca

SEQ ID NO: 311633 - DNA, 25 bp, Homo sapien
agtgggggccgtcagcgtcatctcc

SEQ ID NO: 311634 - DNA, 25 bp, Homo sapien
cagggctggaattgcttttccggga

SEQ ID NO: 311635 - DNA, 25 bp, Homo sapien
cagcttgtcgggtgtgtgtccagcc

SEQ ID NO: 311636 - DNA, 25 bp, Homo sapien
tcccggctattcacaggaaacgagg

SEQ ID NO: 311637 - DNA, 25 bp, Homo sapien
aataacactcccgtcgttaggcagg

SEQ ID NO: 311638 - DNA, 25 bp, Homo sapien
caatgaatgctaaacggacgggcaa

SEQ ID NO: 311639 - DNA, 25 bp, Homo sapien
gaatgctgccgaaggcctcgtccac

SEQ ID NO: 311640 - DNA, 25 bp, Homo sapien
cgtgtaagtagtgggtgctcacaat

SEQ ID NO: 311641 - DNA, 25 bp, Homo sapien
tcgtccacctcccaagcgtgtaagt

SEQ ID NO: 311642 - DNA, 25 bp, Homo sapien
cacaggctgaggatgagtggccagt

SEQ ID NO: 311643 - DNA, 25 bp, Homo sapien
gatgagtggccagttcaggacccac

SEQ ID NO: 311644 - DNA, 25 bp, Homo sapien
ggatgagtggccagttcaggaccca

SEQ ID NO: 311645 - DNA, 25 bp, Homo sapien
aggctgaggatgagtggccagttca

SEQ ID NO: 311646 - DNA, 25 bp, Homo sapien
aaggaccccagctctgtcttcaaca

SEQ ID NO: 311647 - DNA, 25 bp, Homo sapien
ctgcaggtactccgtgaagaaggac

SEQ ID NO: 311648 - DNA, 25 bp, Homo sapien
gcaggtactccgtgaagaaggaccc

SEQ ID NO: 311649 - DNA, 25 bp, Homo sapien
gaccccagctctgtcttcaacagct

SEQ ID NO: 311650 - DNA, 25 bp, Homo sapien
ctcggccaagaaccacgctgtgtgg

SEQ ID NO: 311651 - DNA, 25 bp, Homo sapien
aatgcagcccatctccacacaaaga

SEQ ID NO: 311652 - DNA, 25 bp, Homo sapien
cactggcttgtgctccaatgagaaa

SEQ ID NO: 311653 - DNA, 25 bp, Homo sapien
caagcacccgccaatgaaagcatgg

SEQ ID NO: 311654 - DNA, 25 bp, Homo sapien
agcgaatcttgtcccgaaggatcac

SEQ ID NO: 311655 - DNA, 25 bp, Homo sapien
tagaagcgaatcttgtcccgaagga

SEQ ID NO: 311656 - DNA, 25 bp, Homo sapien
cctcatagaagcgaatcttgtcccg

SEQ ID NO: 311657 - DNA, 25 bp, Homo sapien
gaatcttgtcccgaaggatcaccat

SEQ ID NO: 311658 - DNA, 25 bp, Homo sapien
ttgcacccagaggcccccagcacga

SEQ ID NO: 311659 - DNA, 25 bp, Homo sapien
cccagcatggcccagagtggccgcc

SEQ ID NO: 311660 - DNA, 25 bp, Homo sapien
gacccagcatggcccagagtggccg

SEQ ID NO: 311661 - DNA, 25 bp, Homo sapien
agcatggcccagagtggccgccaag

SEQ ID NO: 311662 - DNA, 25 bp, Homo sapien
tgcccgaggctctcggccacgggaa

SEQ ID NO: 311663 - DNA, 25 bp, Homo sapien
gctcctgcaaggatgcgcacgctgc

SEQ ID NO: 311664 - DNA, 25 bp, Homo sapien
aggctctcggccacgggaagcccaa

SEQ ID NO: 311665 - DNA, 25 bp, Homo sapien
ggcagctcgctcctgcaaggatgcg

SEQ ID NO: 311666 - DNA, 25 bp, Homo sapien
ctctggtagaggctctgtagggaca

SEQ ID NO: 311667 - DNA, 25 bp, Homo sapien
tctggtagaggctctgtagggacag

SEQ ID NO: 311668 - DNA, 25 bp, Homo sapien
cagtagccttggctccgtgctggct

SEQ ID NO: 311669 - DNA, 25 bp, Homo sapien
gggttctcgctgtgggcgcaggctg

SEQ ID NO: 311670 - DNA, 25 bp, Homo sapien
gcaggctggtgtccgtctttccttt

SEQ ID NO: 311671 - DNA, 25 bp, Homo sapien
atccgagtgctgagggccctgtgca

SEQ ID NO: 311672 - DNA, 25 bp, Homo sapien
ccacacacaaagtcccttcagtccc

SEQ ID NO: 311673 - DNA, 25 bp, Homo sapien
ccccgccgaactgtgcccacacaca

SEQ ID NO: 311674 - DNA, 25 bp, Homo sapien
tgttctccagcccacggggcggaaa

SEQ ID NO: 311675 - DNA, 25 bp, Homo sapien
gcagctcagttcccgggctggccgg

SEQ ID NO: 311676 - DNA, 25 bp, Homo sapien
cagcaccacgtcgaaggaagaagag

SEQ ID NO: 311677 - DNA, 25 bp, Homo sapien
tgagcaggatcataagggcagtagc

SEQ ID NO: 311678 - DNA, 25 bp, Homo sapien
tgcaccacagtcagtggcccagagg

SEQ ID NO: 311679 - DNA, 25 bp, Homo sapien
ctgggcttgccagacgtagtggtat

SEQ ID NO: 311680 - DNA, 25 bp, Homo sapien
caagtgagacccacacaggtgtgcc

SEQ ID NO: 311681 - DNA, 25 bp, Homo sapien
tacactcggcacaggtgagacctgc

SEQ ID NO: 311682 - DNA, 25 bp, Homo sapien
tgagacccgcacaggtaggtacact

SEQ ID NO: 311683 - DNA, 25 bp, Homo sapien
tacacgtacgcctgacacaggtgag

SEQ ID NO: 311684 - DNA, 25 bp, Homo sapien
tgcaccgggtagaagatggcctgca

SEQ ID NO: 311685 - DNA, 25 bp, Homo sapien
gcagcatgggcagcacgtcactgaa

SEQ ID NO: 311686 - DNA, 25 bp, Homo sapien
atgggcccgggccagcgcatcctct

SEQ ID NO: 311687 - DNA, 25 bp, Homo sapien
agctggcgcaccgatggctccttgc

SEQ ID NO: 311688 - DNA, 25 bp, Homo sapien
tagcttcacactgagggtgatggca

SEQ ID NO: 311689 - DNA, 25 bp, Homo sapien
ggtgatggcattccggaagtgcagc

SEQ ID NO: 311690 - DNA, 25 bp, Homo sapien
cttgcacagctccacactggccgcc

SEQ ID NO: 311691 - DNA, 25 bp, Homo sapien
cacactggccgccccttccttgctc

SEQ ID NO: 311692 - DNA, 25 bp, Homo sapien
ccgccccttccttgctctggttgcc

SEQ ID NO: 311693 - DNA, 25 bp, Homo sapien
acagctccacactggccgccccttc

SEQ ID NO: 311694 - DNA, 25 bp, Homo sapien
gctgacttataacgagtgcttgcac

SEQ ID NO: 311695 - DNA, 25 bp, Homo sapien
tccaggtgtatttgagccaaggccc

SEQ ID NO: 311696 - DNA, 25 bp, Homo sapien
catgcacccgagcttggtggctcca

SEQ ID NO: 311697 - DNA, 25 bp, Homo sapien
gtgccctggaaaaaggccctgtggc

SEQ ID NO: 311698 - DNA, 25 bp, Homo sapien
aggcgcaggtagtcctcagtcacgc

SEQ ID NO: 311699 - DNA, 25 bp, Homo sapien
ggtatggcgacaccaccttctggac

SEQ ID NO: 311700 - DNA, 25 bp, Homo sapien
tcgctggagtggaggccgtaggtgc

SEQ ID NO: 311701 - DNA, 25 bp, Homo sapien
tcagtcacgcccctggactcatgta

SEQ ID NO: 311702 - DNA, 25 bp, Homo sapien
gcatttgcatgttccgagcactccg

SEQ ID NO: 311703 - DNA, 25 bp, Homo sapien
caacaggtactcaagggacattgct

SEQ ID NO: 311704 - DNA, 25 bp, Homo sapien
ctccgtcaagggagcaacgtggcca

SEQ ID NO: 311705 - DNA, 25 bp, Homo sapien
ggagctctccaaggtgttgccacat

SEQ ID NO: 311706 - DNA, 25 bp, Homo sapien
caggacgtcatctccgacacagagt

SEQ ID NO: 311707 - DNA, 25 bp, Homo sapien
gccccggccaaagtcaatgaaaatc

SEQ ID NO: 311708 - DNA, 25 bp, Homo sapien
tcttggagcgcaccacagggttctt

SEQ ID NO: 311709 - DNA, 25 bp, Homo sapien
cacagagtgcctgcggatgctggta

SEQ ID NO: 311710 - DNA, 25 bp, Homo sapien
gatgcctgaaacagacctgggccga

SEQ ID NO: 311711 - DNA, 25 bp, Homo sapien
tgggtaaacgccgactcagatgcct

SEQ ID NO: 311712 - DNA, 25 bp, Homo sapien
acagaaatacaaagtgaccaaggcc

SEQ ID NO: 311713 - DNA, 25 bp, Homo sapien
gacgggacgcagtaaaaaagtctca

SEQ ID NO: 311714 - DNA, 25 bp, Homo sapien
actgagagcttagggactgccttgc

SEQ ID NO: 311715 - DNA, 25 bp, Homo sapien
tctttgggaacaaggctaggacaca

SEQ ID NO: 311716 - DNA, 25 bp, Homo sapien
ctttgggaacaaggctaggacacac

SEQ ID NO: 311717 - DNA, 25 bp, Homo sapien
ggaggactgagagcttagggactgc

SEQ ID NO: 311718 - DNA, 25 bp, Homo sapien
cctggctatagatcgggaaactgag

SEQ ID NO: 311719 - DNA, 25 bp, Homo sapien
gagtttacaatctaacagccctgct

SEQ ID NO: 311720 - DNA, 25 bp, Homo sapien
gtgcccaatttacgatcagatcctg

SEQ ID NO: 311721 - DNA, 25 bp, Homo sapien
aaaccattaagtacgcgtctgcccg

SEQ ID NO: 311722 - DNA, 25 bp, Homo sapien
tttatccctatgtagcctggcccag

SEQ ID NO: 311723 - DNA, 25 bp, Homo sapien
ggaggctgccctagaattcatcacc

SEQ ID NO: 311724 - DNA, 25 bp, Homo sapien
ggttagtaccgcctgcaaactgcct

SEQ ID NO: 311725 - DNA, 25 bp, Homo sapien
cagcaagagtatccccacatgatgg

SEQ ID NO: 311726 - DNA, 25 bp, Homo sapien
gggcgggcactttcttgctgatcca

SEQ ID NO: 311727 - DNA, 25 bp, Homo sapien
gggcactttcttgctgatccatttc

SEQ ID NO: 311728 - DNA, 25 bp, Homo sapien
cctggggcgggcactttcttgctga

SEQ ID NO: 311729 - DNA, 25 bp, Homo sapien
actttcttgctgatccatttcccca

SEQ ID NO: 311730 - DNA, 25 bp, Homo sapien
tgggcaccccgattcccggctgggc

SEQ ID NO: 311731 - DNA, 25 bp, Homo sapien
gcaccccgattcccggctgggccgc

SEQ ID NO: 311732 - DNA, 25 bp, Homo sapien
ctgggcaccccgattcccggctggg

SEQ ID NO: 311733 - DNA, 25 bp, Homo sapien
cctgggcaccccgattcccggctgg

SEQ ID NO: 311734 - DNA, 25 bp, Homo sapien
cggcccccacctgcgtgccgggtct

SEQ ID NO: 311735 - DNA, 25 bp, Homo sapien
cctgcgtgccgggtctgccgctcac

SEQ ID NO: 311736 - DNA, 25 bp, Homo sapien
cgtgccgggtctgccgctcacctgg

SEQ ID NO: 311737 - DNA, 25 bp, Homo sapien
ccacctgcgtgccgggtctgccgct

SEQ ID NO: 311738 - DNA, 25 bp, Homo sapien
tcacaagcgaagtatccctagccag

SEQ ID NO: 311739 - DNA, 25 bp, Homo sapien
tagccagtaggtgccattctcttcc

SEQ ID NO: 311740 - DNA, 25 bp, Homo sapien
tatccctagccagtaggtgccattc

SEQ ID NO: 311741 - DNA, 25 bp, Homo sapien
gaagtatccctagccagtaggtgcc

SEQ ID NO: 311742 - DNA, 25 bp, Homo sapien
gaagagctcgctgtggtatttgcac

SEQ ID NO: 311743 - DNA, 25 bp, Homo sapien
gcaagtccgatgtgcagggcataca

SEQ ID NO: 311744 - DNA, 25 bp, Homo sapien
caaacttaatttgagtggcaagtcc

SEQ ID NO: 311745 - DNA, 25 bp, Homo sapien
tgcaggctctcgttttggaactggg

SEQ ID NO: 311746 - DNA, 25 bp, Homo sapien
gctcataatcgctgggaacggtggc

SEQ ID NO: 311747 - DNA, 25 bp, Homo sapien
caaaggttgtgagggactgatagct

SEQ ID NO: 311748 - DNA, 25 bp, Homo sapien
caacttgtaatctcatggctggttc

SEQ ID NO: 311749 - DNA, 25 bp, Homo sapien
tcaggtacggtcaagagagctcata

SEQ ID NO: 311750 - DNA, 25 bp, Homo sapien
agggattccagagcattgccagagc

SEQ ID NO: 311751 - DNA, 25 bp, Homo sapien
ggtgccaagcacctgagggattcca

SEQ ID NO: 311752 - DNA, 25 bp, Homo sapien
tccagagcattgccagagcccagga

SEQ ID NO: 311753 - DNA, 25 bp, Homo sapien
gtgccaagcacctgagggattccag

SEQ ID NO: 311754 - DNA, 25 bp, Homo sapien
cacaggtaagcccagactttttggt

SEQ ID NO: 311755 - DNA, 25 bp, Homo sapien
gactttttggttttggagccaagca

SEQ ID NO: 311756 - DNA, 25 bp, Homo sapien
tgacacaggtaagcccagacttttt

SEQ ID NO: 311757 - DNA, 25 bp, Homo sapien
cttgacacaggtaagcccagacttt

SEQ ID NO: 311758 - DNA, 25 bp, Homo sapien
ccaagtccaccagaggctgatatcc

SEQ ID NO: 311759 - DNA, 25 bp, Homo sapien
caccagaggctgatatccaggcagc

SEQ ID NO: 311760 - DNA, 25 bp, Homo sapien
atccaggcagccagactctcgccat

SEQ ID NO: 311761 - DNA, 25 bp, Homo sapien
agaggctgatatccaggcagccaga

SEQ ID NO: 311762 - DNA, 25 bp, Homo sapien
ggaggactcactccatgagtgacca

SEQ ID NO: 311763 - DNA, 25 bp, Homo sapien
gagaggaggactcactccatgagtg

SEQ ID NO: 311764 - DNA, 25 bp, Homo sapien
gaggaggactcactccatgagtgac

SEQ ID NO: 311765 - DNA, 25 bp, Homo sapien
ggactcactccatgagtgaccagaa

SEQ ID NO: 311766 - DNA, 25 bp, Homo sapien
ctggctggatgcctacatattaatg

SEQ ID NO: 311767 - DNA, 25 bp, Homo sapien
tgaagttttagactacagcttggca

SEQ ID NO: 311768 - DNA, 25 bp, Homo sapien
tgggaagtgccgtgaagttttagac

SEQ ID NO: 311769 - DNA, 25 bp, Homo sapien
tgccgtgaagttttagactacagct

SEQ ID NO: 311770 - DNA, 25 bp, Homo sapien
ccaccaggccacctacagtgcgcag

SEQ ID NO: 311771 - DNA, 25 bp, Homo sapien
ggccacctacagtgcgcagcgccat

SEQ ID NO: 311772 - DNA, 25 bp, Homo sapien
ccgccaccaggccacctacagtgcg

SEQ ID NO: 311773 - DNA, 25 bp, Homo sapien
accaggccacctacagtgcgcagcg

SEQ ID NO: 311774 - DNA, 25 bp, Homo sapien
gctcaggagcctgagggcaaaaagc

SEQ ID NO: 311775 - DNA, 25 bp, Homo sapien
ctcaggagcctgagggcaaaaagcc

SEQ ID NO: 311776 - DNA, 25 bp, Homo sapien
tcaggagcctgagggcaaaaagccg

SEQ ID NO: 311777 - DNA, 25 bp, Homo sapien
ctggcagatgggacacctgctgcca

SEQ ID NO: 311778 - DNA, 25 bp, Homo sapien
gcagatgggacacctgctgccacct

SEQ ID NO: 311779 - DNA, 25 bp, Homo sapien
agcctgggggtccctccctctgaca

SEQ ID NO: 311780 - DNA, 25 bp, Homo sapien
gggacacctgctgccacctcttggg

SEQ ID NO: 311781 - DNA, 25 bp, Homo sapien
cctcaaagtccagcccggacacgct

SEQ ID NO: 311782 - DNA, 25 bp, Homo sapien
tcaaagtccagcccggacacgctca

SEQ ID NO: 311783 - DNA, 25 bp, Homo sapien
caaagtccagcccggacacgctcac

SEQ ID NO: 311784 - DNA, 25 bp, Homo sapien
ctcctcaaagtccagcccggacacg

SEQ ID NO: 311785 - DNA, 25 bp, Homo sapien
gactaatggcattggccagtggtgg

SEQ ID NO: 311786 - DNA, 25 bp, Homo sapien
taaatctgcataaagcaagtctaca

SEQ ID NO: 311787 - DNA, 25 bp, Homo sapien
atctgcataaagcaagtctacaaag

SEQ ID NO: 311788 - DNA, 25 bp, Homo sapien
tttatttaaatctgcataaagcaag

SEQ ID NO: 311789 - DNA, 25 bp, Homo sapien
tgaatctgcattaccgtcacgctgc

SEQ ID NO: 311790 - DNA, 25 bp, Homo sapien
aatgggttcctatcgctgcaagcct

SEQ ID NO: 311791 - DNA, 25 bp, Homo sapien
tgatttcttccagagcggcgggtcg

SEQ ID NO: 311792 - DNA, 25 bp, Homo sapien
tcgtcagtaggttcttaagatcgcc

SEQ ID NO: 311793 - DNA, 25 bp, Homo sapien
gatgccggttctagtgcggtggagc

SEQ ID NO: 311794 - DNA, 25 bp, Homo sapien
tgccggttctagtgcggtggagcag

SEQ ID NO: 311795 - DNA, 25 bp, Homo sapien
gccggttctagtgcggtggagcaga

SEQ ID NO: 311796 - DNA, 25 bp, Homo sapien
agggatgccggttctagtgcggtgg

SEQ ID NO: 311797 - DNA, 25 bp, Homo sapien
cagttgggcccaaagtacagttgtc

SEQ ID NO: 311798 - DNA, 25 bp, Homo sapien
tgagtgggttatcgtggattatcca

SEQ ID NO: 311799 - DNA, 25 bp, Homo sapien
tcccgtattgttcaaatcacctcta

SEQ ID NO: 311800 - DNA, 25 bp, Homo sapien
aatggcatagtgtttgcaaggaacc

SEQ ID NO: 311801 - DNA, 25 bp, Homo sapien
caaagtcaggtttgagattcactca

SEQ ID NO: 311802 - DNA, 25 bp, Homo sapien
tcttaagccgccaggttgtggcact

SEQ ID NO: 311803 - DNA, 25 bp, Homo sapien
aacaccccatcgaggagggagcgtg

SEQ ID NO: 311804 - DNA, 25 bp, Homo sapien
ttgtggcactttgctggcggcccga

SEQ ID NO: 311805 - DNA, 25 bp, Homo sapien
cctccatgaaagaccctgacactgg

SEQ ID NO: 311806 - DNA, 25 bp, Homo sapien
ctccatgaaagaccctgacactggc

SEQ ID NO: 311807 - DNA, 25 bp, Homo sapien
gcctccatgaaagaccctgacactg

SEQ ID NO: 311808 - DNA, 25 bp, Homo sapien
agccgccgccgccttgtctctctgc

SEQ ID NO: 311809 - DNA, 25 bp, Homo sapien
agggcctcttcctcactgcacccag

SEQ ID NO: 311810 - DNA, 25 bp, Homo sapien
ccgccgccgccttgtctctctgcag

SEQ ID NO: 311811 - DNA, 25 bp, Homo sapien
gggcaccaccgagggcctcttcctc

SEQ ID NO: 311812 - DNA, 25 bp, Homo sapien
agaacgggtgactcgtgctcagcgc

SEQ ID NO: 311813 - DNA, 25 bp, Homo sapien
tcagcgcaggatcctggccagccat

SEQ ID NO: 311814 - DNA, 25 bp, Homo sapien
gccatgtctggccacgtcgtagaac

SEQ ID NO: 311815 - DNA, 25 bp, Homo sapien
tgctcagcgcaggatcctggccagc

SEQ ID NO: 311816 - DNA, 25 bp, Homo sapien
gtcctggaggggtccatgccacgcc

SEQ ID NO: 311817 - DNA, 25 bp, Homo sapien
ctagtcacacctgaaggacgcagga

SEQ ID NO: 311818 - DNA, 25 bp, Homo sapien
agtcacacctgaaggacgcaggaga

SEQ ID NO: 311819 - DNA, 25 bp, Homo sapien
aagtcctggaggggtccatgccacg

SEQ ID NO: 311820 - DNA, 25 bp, Homo sapien
tgtggttccagatgttggtcatggg

SEQ ID NO: 311821 - DNA, 25 bp, Homo sapien
gctgtggttccagatgttggtcatg

SEQ ID NO: 311822 - DNA, 25 bp, Homo sapien
aaattccttttgacaggagtctggt

SEQ ID NO: 311823 - DNA, 25 bp, Homo sapien
aaaattccttttgacaggagtctgg

SEQ ID NO: 311824 - DNA, 25 bp, Homo sapien
agggacggcgggcagtggctttgct

SEQ ID NO: 311825 - DNA, 25 bp, Homo sapien
aggccggtctccagcaagagcagag

SEQ ID NO: 311826 - DNA, 25 bp, Homo sapien
agcagaagcagggacggcgggcagt

SEQ ID NO: 311827 - DNA, 25 bp, Homo sapien
ctgcccccgaggagcaaactgtggg

SEQ ID NO: 311828 - DNA, 25 bp, Homo sapien
tcaggaccagccataggaagagacg

SEQ ID NO: 311829 - DNA, 25 bp, Homo sapien
caaagacttagagctacctcgaggg

SEQ ID NO: 311830 - DNA, 25 bp, Homo sapien
agggccagccgcattccgaatgata

SEQ ID NO: 311831 - DNA, 25 bp, Homo sapien
ttctcccgtggagttaagaggcctc

SEQ ID NO: 311832 - DNA, 25 bp, Homo sapien
gccgttgcatatgggagcagctcct

SEQ ID NO: 311833 - DNA, 25 bp, Homo sapien
ccccgcatccgcaatgccctctggc

SEQ ID NO: 311834 - DNA, 25 bp, Homo sapien
tgttgccccccgcatccgcaatgcc

SEQ ID NO: 311835 - DNA, 25 bp, Homo sapien
tgcagaaaagctgttgccccccgca

SEQ ID NO: 311836 - DNA, 25 bp, Homo sapien
gcagaaaagctgttgccccccgcat

SEQ ID NO: 311837 - DNA, 25 bp, Homo sapien
ccacggctcagggacacggagaaca

SEQ ID NO: 311838 - DNA, 25 bp, Homo sapien
cgccccgcttcccagaacccacagc

SEQ ID NO: 311839 - DNA, 25 bp, Homo sapien
cacggagaacagatgggccgccccg

SEQ ID NO: 311840 - DNA, 25 bp, Homo sapien
cacggccacggctcagggacacgga

SEQ ID NO: 311841 - DNA, 25 bp, Homo sapien
ggagaggcggcccccacacacggac

SEQ ID NO: 311842 - DNA, 25 bp, Homo sapien
gagaggcggcccccacacacggaca

SEQ ID NO: 311843 - DNA, 25 bp, Homo sapien
agaggcggcccccacacacggacag

SEQ ID NO: 311844 - DNA, 25 bp, Homo sapien
cagctgcggggagaggcggccccca

SEQ ID NO: 311845 - DNA, 25 bp, Homo sapien
acagctgcggggagaggcggccccc

SEQ ID NO: 311846 - DNA, 25 bp, Homo sapien
agctgcggggagaggcggcccccac

SEQ ID NO: 311847 - DNA, 25 bp, Homo sapien
acagctgcggggagaggtgccccca

SEQ ID NO: 311848 - DNA, 25 bp, Homo sapien
atggacagctgcggggagaggtgcc

SEQ ID NO: 311849 - DNA, 25 bp, Homo sapien
cagctgcggggagaggtgcccccac

SEQ ID NO: 311850 - DNA, 25 bp, Homo sapien
ggacagctgcggggagaggtgcccc

SEQ ID NO: 311851 - DNA, 25 bp, Homo sapien
tcctagaaaatcctcaggcacttag

SEQ ID NO: 311852 - DNA, 25 bp, Homo sapien
gcacttagcaaaaagcagcctcctt

SEQ ID NO: 311853 - DNA, 25 bp, Homo sapien
tcttcatgaccagccgtacgctgga

SEQ ID NO: 311854 - DNA, 25 bp, Homo sapien
tgagcatccatcacctgtggcttta

SEQ ID NO: 311855 - DNA, 25 bp, Homo sapien
tggcatccggcagcagctgaacgtg

SEQ ID NO: 311856 - DNA, 25 bp, Homo sapien
gcagctgaacgtgacaacacgtctt

SEQ ID NO: 311857 - DNA, 25 bp, Homo sapien
aacacgtcttccaaagcggtcatcc

SEQ ID NO: 311858 - DNA, 25 bp, Homo sapien
tggtccagctcgtgggagggtggca

SEQ ID NO: 311859 - DNA, 25 bp, Homo sapien
tgtggagcccatgcgcacctgggtg

SEQ ID NO: 311860 - DNA, 25 bp, Homo sapien
ggagcccatgcgcacctgggtggca

SEQ ID NO: 311861 - DNA, 25 bp, Homo sapien
ctgtggagcccatgcgcacctgggt

SEQ ID NO: 311862 - DNA, 25 bp, Homo sapien
cagctgtggagcccatgcgcacctg

SEQ ID NO: 311863 - DNA, 25 bp, Homo sapien
ctttcaagtgaacaattcaggcatc

SEQ ID NO: 311864 - DNA, 25 bp, Homo sapien
ggcagatgcttgtcccacgctgagt

SEQ ID NO: 311865 - DNA, 25 bp, Homo sapien
ttatcaaggccgagaagcccacaga

SEQ ID NO: 311866 - DNA, 25 bp, Homo sapien
gttagccttgtgctgtgaacaacct

SEQ ID NO: 311867 - DNA, 25 bp, Homo sapien
cctcctggattcacgccgttctcgt

SEQ ID NO: 311868 - DNA, 25 bp, Homo sapien
ctggattcacgccgttctcgtgcct

SEQ ID NO: 311869 - DNA, 25 bp, Homo sapien
gcctcctggattcacgccgttctcg

SEQ ID NO: 311870 - DNA, 25 bp, Homo sapien
tcctggattcacgccgttctcgtgc

SEQ ID NO: 311871 - DNA, 25 bp, Homo sapien
cgttctcaacgtattggtccagtgt

SEQ ID NO: 311872 - DNA, 25 bp, Homo sapien
gcttgttccggctgttcagcccgta

SEQ ID NO: 311873 - DNA, 25 bp, Homo sapien
aactccttgtatgcgctctggagcc

SEQ ID NO: 311874 - DNA, 25 bp, Homo sapien
tcagcccgtagtggaaatagacgat

SEQ ID NO: 311875 - DNA, 25 bp, Homo sapien
gtccctgaaggcttgcgggcacgta

SEQ ID NO: 311876 - DNA, 25 bp, Homo sapien
tccctgaaggcttgcgggcacgtac

SEQ ID NO: 311877 - DNA, 25 bp, Homo sapien
actgcacactctgcgaccccttgtg

SEQ ID NO: 311878 - DNA, 25 bp, Homo sapien
tgcacactctgcgaccccttgtggc

SEQ ID NO: 311879 - DNA, 25 bp, Homo sapien
ccccactgcacactctgcgacccct

SEQ ID NO: 311880 - DNA, 25 bp, Homo sapien
cacactctgcgaccccttgtggcca

SEQ ID NO: 311881 - DNA, 25 bp, Homo sapien
cagcctgggccacatagtgagatcc

SEQ ID NO: 311882 - DNA, 25 bp, Homo sapien
ccagcctgggccacatagtgagatc

SEQ ID NO: 311883 - DNA, 25 bp, Homo sapien
gcctgggccacatagtgagatcccc

SEQ ID NO: 311884 - DNA, 25 bp, Homo sapien
ctgggccacatagtgagatccccgt

SEQ ID NO: 311885 - DNA, 25 bp, Homo sapien
ccctttaagaacaagagtgttggct

SEQ ID NO: 311886 - DNA, 25 bp, Homo sapien
tggaacacagtccagcagagttgtt

SEQ ID NO: 311887 - DNA, 25 bp, Homo sapien
tggccctttaagaacaagagtgttg

SEQ ID NO: 311888 - DNA, 25 bp, Homo sapien
gttgcaatagagcaacaggcctgca

SEQ ID NO: 311889 - DNA, 25 bp, Homo sapien
caagctgagtgaccacgggtaagtc

SEQ ID NO: 311890 - DNA, 25 bp, Homo sapien
tacaggctgcaagctaaaaatggct

SEQ ID NO: 311891 - DNA, 25 bp, Homo sapien
agaatgccccttgcagactgtaaag

SEQ ID NO: 311892 - DNA, 25 bp, Homo sapien
caagttgattattaggccggacgtc

SEQ ID NO: 311893 - DNA, 25 bp, Homo sapien
gatttcatccatcgaccactggcac

SEQ ID NO: 311894 - DNA, 25 bp, Homo sapien
cactccttatgtgcgaaccagcagc

SEQ ID NO: 311895 - DNA, 25 bp, Homo sapien
gcacatcttacctggctgtgaagga

SEQ ID NO: 311896 - DNA, 25 bp, Homo sapien
gctgctttctcccaagcgggagtga

SEQ ID NO: 311897 - DNA, 25 bp, Homo sapien
accacgtagagggccttcaagttct

SEQ ID NO: 311898 - DNA, 25 bp, Homo sapien
gtgcaccacgtagagggccttcaag

SEQ ID NO: 311899 - DNA, 25 bp, Homo sapien
gcaccacgtagagggccttcaagtt

SEQ ID NO: 311900 - DNA, 25 bp, Homo sapien
accttgatgaagctggtggggtgca

SEQ ID NO: 311901 - DNA, 25 bp, Homo sapien
cgtggagctcactcaggtagttgaa

SEQ ID NO: 311902 - DNA, 25 bp, Homo sapien
gagggatgaccagctggtcgtattt

SEQ ID NO: 311903 - DNA, 25 bp, Homo sapien
tatttaaggtgttcgtggagctcac

SEQ ID NO: 311904 - DNA, 25 bp, Homo sapien
gcaaaacttcgggagggatgaccag

SEQ ID NO: 311905 - DNA, 25 bp, Homo sapien
cggatctttgtcgatgccgcagatt

SEQ ID NO: 311906 - DNA, 25 bp, Homo sapien
tagcaccttttgctgcggatctttg

SEQ ID NO: 311907 - DNA, 25 bp, Homo sapien
tgtcgatgccgcagatttctgagcc

SEQ ID NO: 311908 - DNA, 25 bp, Homo sapien
ttgctgcggatctttgtcgatgccg

SEQ ID NO: 311909 - DNA, 25 bp, Homo sapien
gtgtcttggtgggaggcggcgtccg

SEQ ID NO: 311910 - DNA, 25 bp, Homo sapien
gcagactgacgccaaactgctgtgt

SEQ ID NO: 311911 - DNA, 25 bp, Homo sapien
gactgacgccaaactgctgtgtggg

SEQ ID NO: 311912 - DNA, 25 bp, Homo sapien
tattgcagactgacgccaaactgct

SEQ ID NO: 311913 - DNA, 25 bp, Homo sapien
acactggctcagttaacaccttggc

SEQ ID NO: 311914 - DNA, 25 bp, Homo sapien
tgaacactggctcagttaacacctt

SEQ ID NO: 311915 - DNA, 25 bp, Homo sapien
gaacactggctcagttaacaccttg

SEQ ID NO: 311916 - DNA, 25 bp, Homo sapien
aacactggctcagttaacaccttgg

SEQ ID NO: 311917 - DNA, 25 bp, Homo sapien
cctggaggccgatcgcaaagagaag

SEQ ID NO: 311918 - DNA, 25 bp, Homo sapien
ggccgatcgcaaagagaaggattgt

SEQ ID NO: 311919 - DNA, 25 bp, Homo sapien
gaaggattgtatagtctccagacag

SEQ ID NO: 311920 - DNA, 25 bp, Homo sapien
agagaaggattgtatagtctccaga

SEQ ID NO: 311921 - DNA, 25 bp, Homo sapien
aagttctcagtcacagagtcagcca

SEQ ID NO: 311922 - DNA, 25 bp, Homo sapien
agttctcagtcacagagtcagccag

SEQ ID NO: 311923 - DNA, 25 bp, Homo sapien
ctgcaaagttctcagtcacagagtc

SEQ ID NO: 311924 - DNA, 25 bp, Homo sapien
tgtacccctcccctcgggagatgtg

SEQ ID NO: 311925 - DNA, 25 bp, Homo sapien
cttagagtaattcagagcatgtttt

SEQ ID NO: 311926 - DNA, 25 bp, Homo sapien
attcttgcttgtacccctcccctcg

SEQ ID NO: 311927 - DNA, 25 bp, Homo sapien
tcgggagatgtgcttagagtaattc

SEQ ID NO: 311928 - DNA, 25 bp, Homo sapien
tttccgacagtcgtccacccactgg

SEQ ID NO: 311929 - DNA, 25 bp, Homo sapien
agtcgtccacccactggagggcatc

SEQ ID NO: 311930 - DNA, 25 bp, Homo sapien
tggctttccgacagtcgtccaccca

SEQ ID NO: 311931 - DNA, 25 bp, Homo sapien
cactggagggcatcggggactctca

SEQ ID NO: 311932 - DNA, 25 bp, Homo sapien
cctggggcccacagagacagtgtcc

SEQ ID NO: 311933 - DNA, 25 bp, Homo sapien
gggagaaggcgtcctggggcccaca

SEQ ID NO: 311934 - DNA, 25 bp, Homo sapien
gtcctggggcccacagagacagtgt

SEQ ID NO: 311935 - DNA, 25 bp, Homo sapien
ctgggagggagaaggcgtcctgggg

SEQ ID NO: 311936 - DNA, 25 bp, Homo sapien
ggtttcatggcaattttgcttttgc

SEQ ID NO: 311937 - DNA, 25 bp, Homo sapien
tatccaatctcgatgggtggtttgg

SEQ ID NO: 311938 - DNA, 25 bp, Homo sapien
gggctggcgtgaccttcaggaggtc

SEQ ID NO: 311939 - DNA, 25 bp, Homo sapien
gccataaggcttctgcatatccaat

SEQ ID NO: 311940 - DNA, 25 bp, Homo sapien
gtgtgtatcgtctgcctcatttcca

SEQ ID NO: 311941 - DNA, 25 bp, Homo sapien
gaagtctttcctccacgtgtgtatc

SEQ ID NO: 311942 - DNA, 25 bp, Homo sapien
tttcctccacgtgtgtatcgtctgc

SEQ ID NO: 311943 - DNA, 25 bp, Homo sapien
tccacgtgtgtatcgtctgcctcat

SEQ ID NO: 311944 - DNA, 25 bp, Homo sapien
aagcgtccccttcctctctgtgtca

SEQ ID NO: 311945 - DNA, 25 bp, Homo sapien
atcaggagccacacgggagtagact

SEQ ID NO: 311946 - DNA, 25 bp, Homo sapien
ccacacgggagtagactgtggtgcc

SEQ ID NO: 311947 - DNA, 25 bp, Homo sapien
actgtggtgccgtcaacaagcgtcc

SEQ ID NO: 311948 - DNA, 25 bp, Homo sapien
tcaacaacgtaaaccttcaccaaga

SEQ ID NO: 311949 - DNA, 25 bp, Homo sapien
gggtcctctccctgatccttagagt

SEQ ID NO: 311950 - DNA, 25 bp, Homo sapien
agtccacaggtcatcaacaacgtaa

SEQ ID NO: 311951 - DNA, 25 bp, Homo sapien
tctccctgatccttagagtccacag

SEQ ID NO: 311952 - DNA, 25 bp, Homo sapien
ttaatatattagatgtggccgggca

SEQ ID NO: 311953 - DNA, 25 bp, Homo sapien
ttttatccctctattaatatattag

SEQ ID NO: 311954 - DNA, 25 bp, Homo sapien
ttaggacttcattttatccctctat

SEQ ID NO: 311955 - DNA, 25 bp, Homo sapien
gaggccaaagtggacagaccacgag

SEQ ID NO: 311956 - DNA, 25 bp, Homo sapien
gagaggtaggctcagccctcaggaa

SEQ ID NO: 311957 - DNA, 25 bp, Homo sapien
ggaagagagaggtaggctcagccct

SEQ ID NO: 311958 - DNA, 25 bp, Homo sapien
aagagagaggtaggctcagccctca

SEQ ID NO: 311959 - DNA, 25 bp, Homo sapien
gagagaggtaggctcagccctcagg

SEQ ID NO: 311960 - DNA, 25 bp, Homo sapien
tgagaagaggcgctggtcctctcca

SEQ ID NO: 311961 - DNA, 25 bp, Homo sapien
agaagaggcgctggtcctctccaca

SEQ ID NO: 311962 - DNA, 25 bp, Homo sapien
tgatgggtgatcacaatgagaagag

SEQ ID NO: 311963 - DNA, 25 bp, Homo sapien
agaaagtcgcagtttttacctgagc

SEQ ID NO: 311964 - DNA, 25 bp, Homo sapien
tctctctcaggtacgtcactgtgaa

SEQ ID NO: 311965 - DNA, 25 bp, Homo sapien
tctctcaggtacgtcactgtgaacc

SEQ ID NO: 311966 - DNA, 25 bp, Homo sapien
cagcacaggggggatgagttcgcct

SEQ ID NO: 311967 - DNA, 25 bp, Homo sapien
ctttctctctcaggtacgtcactgt

SEQ ID NO: 311968 - DNA, 25 bp, Homo sapien
gcttccccatcccgtgtgctcactt

SEQ ID NO: 311969 - DNA, 25 bp, Homo sapien
agggccttctccctgatggaagtca

SEQ ID NO: 311970 - DNA, 25 bp, Homo sapien
ccttctccctgatggaagtcagcat

SEQ ID NO: 311971 - DNA, 25 bp, Homo sapien
cttccccatcccgtgtgctcacttt

SEQ ID NO: 311972 - DNA, 25 bp, Homo sapien
cttggttgtagagcctctggatctc

SEQ ID NO: 311973 - DNA, 25 bp, Homo sapien
tgcacgctggcggatctccggaaca

SEQ ID NO: 311974 - DNA, 25 bp, Homo sapien
atctccggaacaggccctcggtgcg

SEQ ID NO: 311975 - DNA, 25 bp, Homo sapien
atctcgcggacggtctgcacgctgg

SEQ ID NO: 311976 - DNA, 25 bp, Homo sapien
tagtcgtcaaagttcacgggcttcc

SEQ ID NO: 311977 - DNA, 25 bp, Homo sapien
tcccgagaatctgctcgtaggcctg

SEQ ID NO: 311978 - DNA, 25 bp, Homo sapien
gtgaatgtccccgtagtcgtcaaag

SEQ ID NO: 311979 - DNA, 25 bp, Homo sapien
gtcttcaggatcacggcagggatgt

SEQ ID NO: 311980 - DNA, 25 bp, Homo sapien
cacaaagcgcctgtaggatcagaca

SEQ ID NO: 311981 - DNA, 25 bp, Homo sapien
ccgagagccctttctagatgagaga

SEQ ID NO: 311982 - DNA, 25 bp, Homo sapien
tcaagcaggaacctacagaggctgg

SEQ ID NO: 311983 - DNA, 25 bp, Homo sapien
tcagggcccctgatgagtgacaaag

SEQ ID NO: 311984 - DNA, 25 bp, Homo sapien
aattgaagctccatgactttccact

SEQ ID NO: 311985 - DNA, 25 bp, Homo sapien
cctagtatcaaaacattcgggctga

SEQ ID NO: 311986 - DNA, 25 bp, Homo sapien
tatgtccagagggtgccttatctct

SEQ ID NO: 311987 - DNA, 25 bp, Homo sapien
taaagacggcggaatgacaaaagga

SEQ ID NO: 311988 - DNA, 25 bp, Homo sapien
tctgctcagaaagttcaccggaaca

SEQ ID NO: 311989 - DNA, 25 bp, Homo sapien
caacggtacagagaaatgatgctcc

SEQ ID NO: 311990 - DNA, 25 bp, Homo sapien
cccctgagttggcatgacaaagaac

SEQ ID NO: 311991 - DNA, 25 bp, Homo sapien
gatgctcccgtggaaaactacggcg

SEQ ID NO: 311992 - DNA, 25 bp, Homo sapien
gaggatggactatcccacatttggg

SEQ ID NO: 311993 - DNA, 25 bp, Homo sapien
aacctgtgtgtttggctattcttgc

SEQ ID NO: 311994 - DNA, 25 bp, Homo sapien
cacttatcttctggccgtatggctc

SEQ ID NO: 311995 - DNA, 25 bp, Homo sapien
ggtgcatcacgtggcaaaaacagga

SEQ ID NO: 311996 - DNA, 25 bp, Homo sapien
tccgtaagatctggcggcagccagt

SEQ ID NO: 311997 - DNA, 25 bp, Homo sapien
aggctccgtaagatctggcggcagc

SEQ ID NO: 311998 - DNA, 25 bp, Homo sapien
ctctgggaggctccgtaagatctgg

SEQ ID NO: 311999 - DNA, 25 bp, Homo sapien
tctggcggcagccagtgacacgcag

SEQ ID NO: 312000 - DNA, 25 bp, Homo sapien
aggtgcattcacatcggtgcccatg

SEQ ID NO: 312001 - DNA, 25 bp, Homo sapien
accagtgcacaccagctagggcaac

SEQ ID NO: 312002 - DNA, 25 bp, Homo sapien
aggagagtttagttttgggcctctg

SEQ ID NO: 312003 - DNA, 25 bp, Homo sapien
gagagaaatcagtctctcctaatga

SEQ ID NO: 312004 - DNA, 25 bp, Homo sapien
cagggagagtggaaagagcttgcct

SEQ ID NO: 312005 - DNA, 25 bp, Homo sapien
ggaaggtacaggagacttgcccaag

SEQ ID NO: 312006 - DNA, 25 bp, Homo sapien
tgcctccctacaagattcaagctgg

SEQ ID NO: 312007 - DNA, 25 bp, Homo sapien
ggccatgtggaccaacgtgagggca

SEQ ID NO: 312008 - DNA, 25 bp, Homo sapien
cagacggtacgaacttggtgacctc

SEQ ID NO: 312009 - DNA, 25 bp, Homo sapien
gggctgtagcacagacggtacgaac

SEQ ID NO: 312010 - DNA, 25 bp, Homo sapien
tggggaccagccagcacatctaggg

SEQ ID NO: 312011 - DNA, 25 bp, Homo sapien
ggctctgtgagtggcgaactgggca

SEQ ID NO: 312012 - DNA, 25 bp, Homo sapien
gccaggttagagctgttcattttgt

SEQ ID NO: 312013 - DNA, 25 bp, Homo sapien
gatcaaattcagcccgaagacacag

SEQ ID NO: 312014 - DNA, 25 bp, Homo sapien
ccctgggatggccagatcaaattca

SEQ ID NO: 312015 - DNA, 25 bp, Homo sapien
aattcagcccgaagacacaggccag

SEQ ID NO: 312016 - DNA, 25 bp, Homo sapien
tgaggcccgtggcttgtgtccgtgg

SEQ ID NO: 312017 - DNA, 25 bp, Homo sapien
ctcggaggtagggtaggcttggtga

SEQ ID NO: 312018 - DNA, 25 bp, Homo sapien
ccatcaggggactcggaggtagggt

SEQ ID NO: 312019 - DNA, 25 bp, Homo sapien
gcctccggggtgctgaagatctttt

SEQ ID NO: 312020 - DNA, 25 bp, Homo sapien
cacagctcaggaaccatggacaaga

SEQ ID NO: 312021 - DNA, 25 bp, Homo sapien
gaattcatctaatggctggttattt

SEQ ID NO: 312022 - DNA, 25 bp, Homo sapien
aaacatacaagtgcacagacaggtg

SEQ ID NO: 312023 - DNA, 25 bp, Homo sapien
tgtgggaggtagctcgaaatataca

SEQ ID NO: 312024 - DNA, 25 bp, Homo sapien
acaacaggataagcgtccaggagcc

SEQ ID NO: 312025 - DNA, 25 bp, Homo sapien
aggaggccggcaaatcccgcagctg

SEQ ID NO: 312026 - DNA, 25 bp, Homo sapien
gtgtgtgcatcgcacgcggccacga

SEQ ID NO: 312027 - DNA, 25 bp, Homo sapien
tgccgaattgcactgaacacgcgtg

SEQ ID NO: 312028 - DNA, 25 bp, Homo sapien
gaatgatgagggcaatctcacgtga

SEQ ID NO: 312029 - DNA, 25 bp, Homo sapien
aatctcacgtgagctgtgaacgtca

SEQ ID NO: 312030 - DNA, 25 bp, Homo sapien
agggcagcttcacatgggccgtgaa

SEQ ID NO: 312031 - DNA, 25 bp, Homo sapien
catgggccgtgaacatcatcgtaga

SEQ ID NO: 312032 - DNA, 25 bp, Homo sapien
ttttgatgatcaaccttgcgctgcc

SEQ ID NO: 312033 - DNA, 25 bp, Homo sapien
tgccatggctcaatagcttccaagg

SEQ ID NO: 312034 - DNA, 25 bp, Homo sapien
caccagtttgtgagggataaactcc

SEQ ID NO: 312035 - DNA, 25 bp, Homo sapien
tctgtttgtgtgtcgaagagctcac

SEQ ID NO: 312036 - DNA, 25 bp, Homo sapien
agcccacacctcctcacgggctggc

SEQ ID NO: 312037 - DNA, 25 bp, Homo sapien
acccgccttgcctggagggccagcc

SEQ ID NO: 312038 - DNA, 25 bp, Homo sapien
acagcagcacacacccgccttgcct

SEQ ID NO: 312039 - DNA, 25 bp, Homo sapien
agaggcacatgtgggcttggaaaac

SEQ ID NO: 312040 - DNA, 25 bp, Homo sapien
tctctcggggttctgcctctccgcc

SEQ ID NO: 312041 - DNA, 25 bp, Homo sapien
cgccgcctccatccgtccctctcct

SEQ ID NO: 312042 - DNA, 25 bp, Homo sapien
ctctcggggttctgcctctccgccg

SEQ ID NO: 312043 - DNA, 25 bp, Homo sapien
tgcctctccgccgcctccatccgtc

SEQ ID NO: 312044 - DNA, 25 bp, Homo sapien
ttgtatgagaactttctggttcctc

SEQ ID NO: 312045 - DNA, 25 bp, Homo sapien
cactcttggtgacccgggcaagtct

SEQ ID NO: 312046 - DNA, 25 bp, Homo sapien
ggctttgcctgagcggatggagtca

SEQ ID NO: 312047 - DNA, 25 bp, Homo sapien
cagacgcaggtgctcgtgttgttca

SEQ ID NO: 312048 - DNA, 25 bp, Homo sapien
ggctgcaggccccggacagctgttc

SEQ ID NO: 312049 - DNA, 25 bp, Homo sapien
tgggtatcggggctgtcaccagcac

SEQ ID NO: 312050 - DNA, 25 bp, Homo sapien
ggagctgctgggtatcggggctgtc

SEQ ID NO: 312051 - DNA, 25 bp, Homo sapien
agctgctgggtatcggggctgtcac

SEQ ID NO: 312052 - DNA, 25 bp, Homo sapien
ctgctgggtatcggggctgtcacca

SEQ ID NO: 312053 - DNA, 25 bp, Homo sapien
gtcatcggcattccgtggtgcaggt

SEQ ID NO: 312054 - DNA, 25 bp, Homo sapien
agttagatcccaggccgtcggaggt

SEQ ID NO: 312055 - DNA, 25 bp, Homo sapien
agattccaggccgtcatcagcgttc

SEQ ID NO: 312056 - DNA, 25 bp, Homo sapien
ggtgcaccctcagttagatcccagg

SEQ ID NO: 312057 - DNA, 25 bp, Homo sapien
gcatccctgcccacaccaaggctag

SEQ ID NO: 312058 - DNA, 25 bp, Homo sapien
atccctgcccacaccaaggctagct

SEQ ID NO: 312059 - DNA, 25 bp, Homo sapien
tgcccacaccaaggctagctccagg

SEQ ID NO: 312060 - DNA, 25 bp, Homo sapien
cacaccaaggctagctccaggaggc

SEQ ID NO: 312061 - DNA, 25 bp, Homo sapien
ttctatgtagccgagaccttcccgt

SEQ ID NO: 312062 - DNA, 25 bp, Homo sapien
tgcgggcagcacgttctgatgctca

SEQ ID NO: 312063 - DNA, 25 bp, Homo sapien
cacttccgttgagttgcgggcagca

SEQ ID NO: 312064 - DNA, 25 bp, Homo sapien
ggtctgtttccccagatcgcgggca

SEQ ID NO: 312065 - DNA, 25 bp, Homo sapien
aagcaggtgggtgaggtgcaggtga

SEQ ID NO: 312066 - DNA, 25 bp, Homo sapien
tgggtgaggtgcaggtgagggccag

SEQ ID NO: 312067 - DNA, 25 bp, Homo sapien
gtgaggtgcaggtgagggccagcgg

SEQ ID NO: 312068 - DNA, 25 bp, Homo sapien
cgccacgctccaggacaggggaagc

SEQ ID NO: 312069 - DNA, 25 bp, Homo sapien
atgtcttctcttcccacgctcctgg

SEQ ID NO: 312070 - DNA, 25 bp, Homo sapien
aaagcctagcgccacatgtcttctc

SEQ ID NO: 312071 - DNA, 25 bp, Homo sapien
ctctccaaagcctagcgccacatgt

SEQ ID NO: 312072 - DNA, 25 bp, Homo sapien
tgggacacttcccaggatggcctgg

SEQ ID NO: 312073 - DNA, 25 bp, Homo sapien
gacaggaattgctgtgagttctaat

SEQ ID NO: 312074 - DNA, 25 bp, Homo sapien
gggagcttcaaagacaggaattgct

SEQ ID NO: 312075 - DNA, 25 bp, Homo sapien
tttccagtgtgatgcgtcaaatggg

SEQ ID NO: 312076 - DNA, 25 bp, Homo sapien
aattgtaccccaactcgctagtgca

SEQ ID NO: 312077 - DNA, 25 bp, Homo sapien
ctggaggaagggcagcctgcgtgtc

SEQ ID NO: 312078 - DNA, 25 bp, Homo sapien
ggaagggcagcctgcgtgtcctgcg

SEQ ID NO: 312079 - DNA, 25 bp, Homo sapien
aggaagggcagcctgcgtgtcctgc

SEQ ID NO: 312080 - DNA, 25 bp, Homo sapien
ggaggaagggcagcctgcgtgtcct

SEQ ID NO: 312081 - DNA, 25 bp, Homo sapien
tcctcagatgtggcattgggcacca

SEQ ID NO: 312082 - DNA, 25 bp, Homo sapien
gagagaggaatctggcaagatccag

SEQ ID NO: 312083 - DNA, 25 bp, Homo sapien
ccaagatccctgagcgtgagagggc

SEQ ID NO: 312084 - DNA, 25 bp, Homo sapien
tccagatccaagatccctgagcgtg

SEQ ID NO: 312085 - DNA, 25 bp, Homo sapien
ctttccctgtggttggtgagtggat

SEQ ID NO: 312086 - DNA, 25 bp, Homo sapien
cattgtctctcttcactcggttggc

SEQ ID NO: 312087 - DNA, 25 bp, Homo sapien
gatggagcccaggactgaggcgtga

SEQ ID NO: 312088 - DNA, 25 bp, Homo sapien
tcactcggttggctcctgaatgctg

SEQ ID NO: 312089 - DNA, 25 bp, Homo sapien
ccctgtgcctaggagtccctgctga

SEQ ID NO: 312090 - DNA, 25 bp, Homo sapien
atctggcagtggctccagtgtggca

SEQ ID NO: 312091 - DNA, 25 bp, Homo sapien
tgatacatggctggcactaacccca

SEQ ID NO: 312092 - DNA, 25 bp, Homo sapien
ccctgctgagggtccttgtgataca

SEQ ID NO: 312093 - DNA, 25 bp, Homo sapien
ggcattgaggtgtggtcgtctttac

SEQ ID NO: 312094 - DNA, 25 bp, Homo sapien
cacaggggacttggccaatgggctc

SEQ ID NO: 312095 - DNA, 25 bp, Homo sapien
gagaatcgtgttttcttgcagaggc

SEQ ID NO: 312096 - DNA, 25 bp, Homo sapien
aagttcctgattcagctccacgtgg

SEQ ID NO: 312097 - DNA, 25 bp, Homo sapien
aacaggcttcatagccacgccaggg

SEQ ID NO: 312098 - DNA, 25 bp, Homo sapien
ggcccatgatggtgatctacagggt

SEQ ID NO: 312099 - DNA, 25 bp, Homo sapien
tggtgatctacagggtccagccgtg

SEQ ID NO: 312100 - DNA, 25 bp, Homo sapien
caaacaggcttcatagccacgccag

SEQ ID NO: 312101 - DNA, 25 bp, Homo sapien
aagcgatcaggtctgggaaagccca

SEQ ID NO: 312102 - DNA, 25 bp, Homo sapien
tttcattagcaacatcaaagcgatc

SEQ ID NO: 312103 - DNA, 25 bp, Homo sapien
tcaggtctgggaaagcccatctgag

SEQ ID NO: 312104 - DNA, 25 bp, Homo sapien
caacatcaaagcgatcaggtctggg

SEQ ID NO: 312105 - DNA, 25 bp, Homo sapien
catgaggagtttccactgaggagcc

SEQ ID NO: 312106 - DNA, 25 bp, Homo sapien
tgactgactgagtgagggctttcaa

SEQ ID NO: 312107 - DNA, 25 bp, Homo sapien
caccctgagccgacgtacatgagga

SEQ ID NO: 312108 - DNA, 25 bp, Homo sapien
ggtttccggcttcctcattgcactg

SEQ ID NO: 312109 - DNA, 25 bp, Homo sapien
tgggaaagattgaggacatcggcat

SEQ ID NO: 312110 - DNA, 25 bp, Homo sapien
ggtgccgtccgttcctcttctgcag

SEQ ID NO: 312111 - DNA, 25 bp, Homo sapien
tgtgttggccaccagcgggaaatgc

SEQ ID NO: 312112 - DNA, 25 bp, Homo sapien
cagggcttgtagttgtgttggccac

SEQ ID NO: 312113 - DNA, 25 bp, Homo sapien
gccaccagcgggaaatgccgaggtt

SEQ ID NO: 312114 - DNA, 25 bp, Homo sapien
actttggtggacttctagtcatttt

SEQ ID NO: 312115 - DNA, 25 bp, Homo sapien
cacatgcagctaagatgaagttata

SEQ ID NO: 312116 - DNA, 25 bp, Homo sapien
tacagttggttatgactattttgaa

SEQ ID NO: 312117 - DNA, 25 bp, Homo sapien
gacacaaatttacagttggttatga

SEQ ID NO: 312118 - DNA, 25 bp, Homo sapien
ctggagaatcaggagtccctgcagc

SEQ ID NO: 312119 - DNA, 25 bp, Homo sapien
agattggctgcagatctccaggtat

SEQ ID NO: 312120 - DNA, 25 bp, Homo sapien
gagaatcaggagtccctgcagccat

SEQ ID NO: 312121 - DNA, 25 bp, Homo sapien
tccaggtatgggtaagtttcttcac

SEQ ID NO: 312122 - DNA, 25 bp, Homo sapien
ttagagagtcgcttagggaaacgct

SEQ ID NO: 312123 - DNA, 25 bp, Homo sapien
tctgtgctggaacatcggatataaa

SEQ ID NO: 312124 - DNA, 25 bp, Homo sapien
ctgttagcagtacgccagcagcgga

SEQ ID NO: 312125 - DNA, 25 bp, Homo sapien
cagcggaatcctgtctttcagggcc

SEQ ID NO: 312126 - DNA, 25 bp, Homo sapien
tcgcacacgcaccccggcctgcaaa

SEQ ID NO: 312127 - DNA, 25 bp, Homo sapien
gcacacgcaccccggcctgcaaact

SEQ ID NO: 312128 - DNA, 25 bp, Homo sapien
cgcacacgcaccccggcctgcaaac

SEQ ID NO: 312129 - DNA, 25 bp, Homo sapien
tgtagtgggctcctctattctctgt

SEQ ID NO: 312130 - DNA, 25 bp, Homo sapien
aggtgtagtgggctcctctattctc

SEQ ID NO: 312131 - DNA, 25 bp, Homo sapien
ccaggtgtagtgggctcctctattc

SEQ ID NO: 312132 - DNA, 25 bp, Homo sapien
gtgtagtgggctcctctattctctg

SEQ ID NO: 312133 - DNA, 25 bp, Homo sapien
ccagtcctgagtccccccagattcc

SEQ ID NO: 312134 - DNA, 25 bp, Homo sapien
tgatgaccctcagtaacccctttcc

SEQ ID NO: 312135 - DNA, 25 bp, Homo sapien
tcctgatgaccctcagtaacccctt

SEQ ID NO: 312136 - DNA, 25 bp, Homo sapien
cctgatgaccctcagtaaccccttt

SEQ ID NO: 312137 - DNA, 25 bp, Homo sapien
catgaaattcatgaagattctgcat

SEQ ID NO: 312138 - DNA, 25 bp, Homo sapien
ccatgaaattcatgaagattctgca

SEQ ID NO: 312139 - DNA, 25 bp, Homo sapien
tctcctgagaatcctgcgtgggaag

SEQ ID NO: 312140 - DNA, 25 bp, Homo sapien
tctaactgtcgcttcctcctctggg

SEQ ID NO: 312141 - DNA, 25 bp, Homo sapien
agaatcctgcgtgggaagcacgtgc

SEQ ID NO: 312142 - DNA, 25 bp, Homo sapien
atctgagtttctaactgtcgcttcc

SEQ ID NO: 312143 - DNA, 25 bp, Homo sapien
gtagacaaccagatagaggacaggg

SEQ ID NO: 312144 - DNA, 25 bp, Homo sapien
tttgctgtagacaaccagatagagg

SEQ ID NO: 312145 - DNA, 25 bp, Homo sapien
tgctgtagacaaccagatagaggac

SEQ ID NO: 312146 - DNA, 25 bp, Homo sapien
ggctttgctgtagacaaccagatag

SEQ ID NO: 312147 - DNA, 25 bp, Homo sapien
gccgcttctgttcttaagggtggaa

SEQ ID NO: 312148 - DNA, 25 bp, Homo sapien
taagcttggatgtgctgcgggctct

SEQ ID NO: 312149 - DNA, 25 bp, Homo sapien
gaaagaagatgtgagtggataagct

SEQ ID NO: 312150 - DNA, 25 bp, Homo sapien
ctctaaggtgatggccaaaggacac

SEQ ID NO: 312151 - DNA, 25 bp, Homo sapien
tagagtgatctggacttgttgaatc

SEQ ID NO: 312152 - DNA, 25 bp, Homo sapien
cagaatccctagatttggaatgcag

SEQ ID NO: 312153 - DNA, 25 bp, Homo sapien
tcacaaccaggtgtatagagtgatc

SEQ ID NO: 312154 - DNA, 25 bp, Homo sapien
ccaggttagagtcttgggtcatcac

SEQ ID NO: 312155 - DNA, 25 bp, Homo sapien
cattgaactcgcaacgtcctttacc

SEQ ID NO: 312156 - DNA, 25 bp, Homo sapien
cacttcttcgtgcatccgcaaagcc

SEQ ID NO: 312157 - DNA, 25 bp, Homo sapien
tccaaagaggatccggacatcctcc

SEQ ID NO: 312158 - DNA, 25 bp, Homo sapien
gcatggacgatgacagggtttgtat

SEQ ID NO: 312159 - DNA, 25 bp, Homo sapien
gccagatcccagatcagagtccaga

SEQ ID NO: 312160 - DNA, 25 bp, Homo sapien
cagcctcgaagcctgcagcattctt

SEQ ID NO: 312161 - DNA, 25 bp, Homo sapien
agttatcaacattacagtctcgcag

SEQ ID NO: 312162 - DNA, 25 bp, Homo sapien
cagctgcttggtccacgtgcggaag

SEQ ID NO: 312163 - DNA, 25 bp, Homo sapien
gattgccttggtgcaaagtctccat

SEQ ID NO: 312164 - DNA, 25 bp, Homo sapien
cttccattgtgattgccttggtgca

SEQ ID NO: 312165 - DNA, 25 bp, Homo sapien
atccatcccttccattgtgattgcc

SEQ ID NO: 312166 - DNA, 25 bp, Homo sapien
attgtgattgccttggtgcaaagtc

SEQ ID NO: 312167 - DNA, 25 bp, Homo sapien
gtccccagctcaagctcaggtgcag

SEQ ID NO: 312168 - DNA, 25 bp, Homo sapien
cccttaaagtctgtccccagctcaa

SEQ ID NO: 312169 - DNA, 25 bp, Homo sapien
aggtgcagctgtccctgtggaatga

SEQ ID NO: 312170 - DNA, 25 bp, Homo sapien
gtgcagctgtccctgtggaatgagc

SEQ ID NO: 312171 - DNA, 25 bp, Homo sapien
tggcctccgcacgccgtgagcgtgt

SEQ ID NO: 312172 - DNA, 25 bp, Homo sapien
tgtcgagtgaatccgcgtagacgcc

SEQ ID NO: 312173 - DNA, 25 bp, Homo sapien
gtgtgggacggtgccgcgtgcaggt

SEQ ID NO: 312174 - DNA, 25 bp, Homo sapien
gtgagcgtgtcccatcagcgtgtcg

SEQ ID NO: 312175 - DNA, 25 bp, Homo sapien
cctgtgatctgagtgacaccgatcc

SEQ ID NO: 312176 - DNA, 25 bp, Homo sapien
agtgacaccgatcccagtgcctggt

SEQ ID NO: 312177 - DNA, 25 bp, Homo sapien
gcgttatcaacatctgagtgtcctg

SEQ ID NO: 312178 - DNA, 25 bp, Homo sapien
tggtccgtggcaggcatttatctgt

SEQ ID NO: 312179 - DNA, 25 bp, Homo sapien
atttccagtcaagggatatcccagg

SEQ ID NO: 312180 - DNA, 25 bp, Homo sapien
agtgtggcatgtatgatgctatttc

SEQ ID NO: 312181 - DNA, 25 bp, Homo sapien
ggcatgtatgatgctatttccagtc

SEQ ID NO: 312182 - DNA, 25 bp, Homo sapien
gctatttccagtcaagggatatccc

SEQ ID NO: 312183 - DNA, 25 bp, Homo sapien
tctcggatgatgtgtccagcactca

SEQ ID NO: 312184 - DNA, 25 bp, Homo sapien
ccttgcctggccagattgttgtaaa

SEQ ID NO: 312185 - DNA, 25 bp, Homo sapien
gcaatgcctcccttgtctcggatga

SEQ ID NO: 312186 - DNA, 25 bp, Homo sapien
tctttgcaccgaagatgtcccaact

SEQ ID NO: 312187 - DNA, 25 bp, Homo sapien
cataaagggaactttgcggccacac

SEQ ID NO: 312188 - DNA, 25 bp, Homo sapien
atacataaagggaactttgcggcca

SEQ ID NO: 312189 - DNA, 25 bp, Homo sapien
cttgggctccaaatacataaaggga

SEQ ID NO: 312190 - DNA, 25 bp, Homo sapien
ctccttgggctccaaatacataaag

SEQ ID NO: 312191 - DNA, 25 bp, Homo sapien
agtacataggaaagtcgagggcctg

SEQ ID NO: 312192 - DNA, 25 bp, Homo sapien
tacataggaaagtcgagggcctgcc

SEQ ID NO: 312193 - DNA, 25 bp, Homo sapien
ataggaaagtcgagggcctgccaga

SEQ ID NO: 312194 - DNA, 25 bp, Homo sapien
aaagtcgagggcctgccagagtttt

SEQ ID NO: 312195 - DNA, 25 bp, Homo sapien
aggccaggctgtgatgccttgaata

SEQ ID NO: 312196 - DNA, 25 bp, Homo sapien
acttctgccccatgtaccagcagaa

SEQ ID NO: 312197 - DNA, 25 bp, Homo sapien
tctgccccatgtaccagcagaaggc

SEQ ID NO: 312198 - DNA, 25 bp, Homo sapien
ccaggctgtgatgccttgaatagca

SEQ ID NO: 312199 - DNA, 25 bp, Homo sapien
tagctgcctggactttatcctgaat

SEQ ID NO: 312200 - DNA, 25 bp, Homo sapien
tggaatgtgcatgtgctcccaccca

SEQ ID NO: 312201 - DNA, 25 bp, Homo sapien
tccttgagtgacgtcatgagccctc

SEQ ID NO: 312202 - DNA, 25 bp, Homo sapien
cctggtcctgcagcggtgctctttc

SEQ ID NO: 312203 - DNA, 25 bp, Homo sapien
aaacttcccacatgctaagcaatgc

SEQ ID NO: 312204 - DNA, 25 bp, Homo sapien
cacagttagttagtggagaatctga

SEQ ID NO: 312205 - DNA, 25 bp, Homo sapien
tctacatcatgacaacacatgggca

SEQ ID NO: 312206 - DNA, 25 bp, Homo sapien
gagctcaagttctcagccaaaccct

SEQ ID NO: 312207 - DNA, 25 bp, Homo sapien
aacaccagtccctggatttctaact

SEQ ID NO: 312208 - DNA, 25 bp, Homo sapien
ccagtccctggatttctaactgcct

SEQ ID NO: 312209 - DNA, 25 bp, Homo sapien
caaatgtagtcactttttgaggtac

SEQ ID NO: 312210 - DNA, 25 bp, Homo sapien
cgaggccctttctccaaatgtagtc

SEQ ID NO: 312211 - DNA, 25 bp, Homo sapien
gagttccggcgaggaaggtcggtca

SEQ ID NO: 312212 - DNA, 25 bp, Homo sapien
ccggcaacgcgtcttccaggatgtt

SEQ ID NO: 312213 - DNA, 25 bp, Homo sapien
tgttcgcgcgctagtcgccgctgag

SEQ ID NO: 312214 - DNA, 25 bp, Homo sapien
tcggtcagtggacatggccgaggcc

SEQ ID NO: 312215 - DNA, 25 bp, Homo sapien
gaaacgcccgcgttcagctactgcg

SEQ ID NO: 312216 - DNA, 25 bp, Homo sapien
ccttacgcggcgcatgcgcccagct

SEQ ID NO: 312217 - DNA, 25 bp, Homo sapien
ggcagtagcacctccttccgccggc

SEQ ID NO: 312218 - DNA, 25 bp, Homo sapien
cgcgccggcgcttccggcagtagca

SEQ ID NO: 312219 - DNA, 25 bp, Homo sapien
gctccgggcggccattttgtaactc

SEQ ID NO: 312220 - DNA, 25 bp, Homo sapien
cgggcggccattttgtaactcgaat

SEQ ID NO: 312221 - DNA, 25 bp, Homo sapien
aacacgctccgggcggccattttgt

SEQ ID NO: 312222 - DNA, 25 bp, Homo sapien
gccgaacacgctccgggcggccatt

SEQ ID NO: 312223 - DNA, 25 bp, Homo sapien
agagcgccggttcagccagagacag

SEQ ID NO: 312224 - DNA, 25 bp, Homo sapien
gcgagagcgccggttcagccagaga

SEQ ID NO: 312225 - DNA, 25 bp, Homo sapien
ggaggcgagagcgccggttcagcca

SEQ ID NO: 312226 - DNA, 25 bp, Homo sapien
cagggaggcgagagcgccggttcag

SEQ ID NO: 312227 - DNA, 25 bp, Homo sapien
cgcttccggtgctgcgctgcggaac

SEQ ID NO: 312228 - DNA, 25 bp, Homo sapien
tgctgcgctgcggaactcagaggac

SEQ ID NO: 312229 - DNA, 25 bp, Homo sapien
tccggtgctgcgctgcggaactcag

SEQ ID NO: 312230 - DNA, 25 bp, Homo sapien
gctgcgctgcggaactcagaggact

SEQ ID NO: 312231 - DNA, 25 bp, Homo sapien
gtctcactcgagtcggacgccgcag

SEQ ID NO: 312232 - DNA, 25 bp, Homo sapien
ccgcttcaaaaacagccggggctgc

SEQ ID NO: 312233 - DNA, 25 bp, Homo sapien
gctgcgtcgccgctgtcatcccacc

SEQ ID NO: 312234 - DNA, 25 bp, Homo sapien
ggagagtctcactcgagtcggacgc

SEQ ID NO: 312235 - DNA, 25 bp, Homo sapien
tcatcttcttgatcccaattcctat

SEQ ID NO: 312236 - DNA, 25 bp, Homo sapien
agttccttctcggcatttcttttgg

SEQ ID NO: 312237 - DNA, 25 bp, Homo sapien
tcccaattcctatctgtcagttcct

SEQ ID NO: 312238 - DNA, 25 bp, Homo sapien
gtcagttccttctcggcatttcttt

SEQ ID NO: 312239 - DNA, 25 bp, Homo sapien
taggaccttgctggacaaccactgc

SEQ ID NO: 312240 - DNA, 25 bp, Homo sapien
gctgctgaatatcttcggctttagt

SEQ ID NO: 312241 - DNA, 25 bp, Homo sapien
gctcttccacagtgcgctcaaagca

SEQ ID NO: 312242 - DNA, 25 bp, Homo sapien
gatgtccacgtcagaaagctgctga

SEQ ID NO: 312243 - DNA, 25 bp, Homo sapien
atttttaagatgagtcctgcccaac

SEQ ID NO: 312244 - DNA, 25 bp, Homo sapien
tttaagatgagtcctgcccaacttg

SEQ ID NO: 312245 - DNA, 25 bp, Homo sapien
tttttaagatgagtcctgcccaact

SEQ ID NO: 312246 - DNA, 25 bp, Homo sapien
ttaagatgagtcctgcccaacttgc

SEQ ID NO: 312247 - DNA, 25 bp, Homo sapien
tctttatggctctattcttcaagac

SEQ ID NO: 312248 - DNA, 25 bp, Homo sapien
ctttatggctctattcttcaagact

SEQ ID NO: 312249 - DNA, 25 bp, Homo sapien
ttctttatggctctattcttcaaga

SEQ ID NO: 312250 - DNA, 25 bp, Homo sapien
tatttaatagcaagagctgtaaggg

SEQ ID NO: 312251 - DNA, 25 bp, Homo sapien
tatcattgctcccagcggagggatt

SEQ ID NO: 312252 - DNA, 25 bp, Homo sapien
aatgagtatttaatagcaagagctg

SEQ ID NO: 312253 - DNA, 25 bp, Homo sapien
tgtgcaacccagaaatcaaatgagt

SEQ ID NO: 312254 - DNA, 25 bp, Homo sapien
ggataagctctctttaaggtccaga

SEQ ID NO: 312255 - DNA, 25 bp, Homo sapien
gactctcagaagatccttgcgtttt

SEQ ID NO: 312256 - DNA, 25 bp, Homo sapien
gcagggagcagacaagactctcaga

SEQ ID NO: 312257 - DNA, 25 bp, Homo sapien
aggcctcaatcgcagggagcagaca

SEQ ID NO: 312258 - DNA, 25 bp, Homo sapien
tgtcccttaaggagaacgctcagga

SEQ ID NO: 312259 - DNA, 25 bp, Homo sapien
gatttccagattagagacacccaag

SEQ ID NO: 312260 - DNA, 25 bp, Homo sapien
ctctagtatagtgaaagggctcccc

SEQ ID NO: 312261 - DNA, 25 bp, Homo sapien
tgcattatgcttactggcacggcac

SEQ ID NO: 312262 - DNA, 25 bp, Homo sapien
gatctgcttcttagaccgaacatct

SEQ ID NO: 312263 - DNA, 25 bp, Homo sapien
tgtgctagcctgctcacatctctaa

SEQ ID NO: 312264 - DNA, 25 bp, Homo sapien
tccgtatgaattctaaagctcctct

SEQ ID NO: 312265 - DNA, 25 bp, Homo sapien
ggaaatgtgtggcattccgtatgaa

SEQ ID NO: 312266 - DNA, 25 bp, Homo sapien
ctgaagtatgaaggaggagcacaca

SEQ ID NO: 312267 - DNA, 25 bp, Homo sapien
gagcacacattaggtaagtgtactt

SEQ ID NO: 312268 - DNA, 25 bp, Homo sapien
gaaggaggagcacacattaggtaag

SEQ ID NO: 312269 - DNA, 25 bp, Homo sapien
tatgaaggaggagcacacattaggt

SEQ ID NO: 312270 - DNA, 25 bp, Homo sapien
tatgttgtttccattcgacagtcct

SEQ ID NO: 312271 - DNA, 25 bp, Homo sapien
tgtttccattcgacagtccttccaa

SEQ ID NO: 312272 - DNA, 25 bp, Homo sapien
tttccattcgacagtccttccaaag

SEQ ID NO: 312273 - DNA, 25 bp, Homo sapien
ctggttatgttgtttccattcgaca

SEQ ID NO: 312274 - DNA, 25 bp, Homo sapien
tcaaggagtagaatttagtaaccag

SEQ ID NO: 312275 - DNA, 25 bp, Homo sapien
ttgtgaccgctcaaaaagtatgtgt

SEQ ID NO: 312276 - DNA, 25 bp, Homo sapien
tagtaaccagttatcagtaaagccg

SEQ ID NO: 312277 - DNA, 25 bp, Homo sapien
gaacactaaccaccatatgcttgct

SEQ ID NO: 312278 - DNA, 25 bp, Homo sapien
taaagataggtgtcagatcacagag

SEQ ID NO: 312279 - DNA, 25 bp, Homo sapien
gccaactgcttgtgataggcatttc

SEQ ID NO: 312280 - DNA, 25 bp, Homo sapien
gggacagagcttaatgagcccaaaa

SEQ ID NO: 312281 - DNA, 25 bp, Homo sapien
aattaaatgaggcacttgtcgctcc

SEQ ID NO: 312282 - DNA, 25 bp, Homo sapien
ttttttatatgctaaaccatgtgtg

SEQ ID NO: 312283 - DNA, 25 bp, Homo sapien
tacagtgagatctcctaagtacaaa

SEQ ID NO: 312284 - DNA, 25 bp, Homo sapien
aattcaggggacattcatgatgaac

SEQ ID NO: 312285 - DNA, 25 bp, Homo sapien
aaactcagagaagctgattagctct

SEQ ID NO: 312286 - DNA, 25 bp, Homo sapien
actactttgggtggctcatcattct

SEQ ID NO: 312287 - DNA, 25 bp, Homo sapien
ctactactttgggtggctcatcatt

SEQ ID NO: 312288 - DNA, 25 bp, Homo sapien
taactactactttgggtggctcatc

SEQ ID NO: 312289 - DNA, 25 bp, Homo sapien
ggtaactactactttgggtggctca

SEQ ID NO: 312290 - DNA, 25 bp, Homo sapien
aaattggtgtctgcccgcaccaaaa

SEQ ID NO: 312291 - DNA, 25 bp, Homo sapien
taaattggtgtctgcccgcaccaaa

SEQ ID NO: 312292 - DNA, 25 bp, Homo sapien
gtaggttttaaatgcagagtaccta

SEQ ID NO: 312293 - DNA, 25 bp, Homo sapien
tgaaggaagaacacggtggcacaac

SEQ ID NO: 312294 - DNA, 25 bp, Homo sapien
ccttgagtcagcagggtaaacgctt

SEQ ID NO: 312295 - DNA, 25 bp, Homo sapien
gatgaatttggcctgaatgcgctct

SEQ ID NO: 312296 - DNA, 25 bp, Homo sapien
tccctgggcaaaagtgacacgacca

SEQ ID NO: 312297 - DNA, 25 bp, Homo sapien
tgaggagtggccttccgtcctccct

SEQ ID NO: 312298 - DNA, 25 bp, Homo sapien
ctcagaaccgtcagccctctcaaca

SEQ ID NO: 312299 - DNA, 25 bp, Homo sapien
agccagcagcctcgctcagaaccgt

SEQ ID NO: 312300 - DNA, 25 bp, Homo sapien
gtctctgcacccacacagcgtttct

SEQ ID NO: 312301 - DNA, 25 bp, Homo sapien
gaagctatagctccaccaaaggagt

SEQ ID NO: 312302 - DNA, 25 bp, Homo sapien
tacatctaagacagggagccaacag

SEQ ID NO: 312303 - DNA, 25 bp, Homo sapien
caaaggagtctgtaatatgctaaac

SEQ ID NO: 312304 - DNA, 25 bp, Homo sapien
gacagcacaaaatcaggactggttc

SEQ ID NO: 312305 - DNA, 25 bp, Homo sapien
tacatggcatattgggtggaatcag

SEQ ID NO: 312306 - DNA, 25 bp, Homo sapien
tggaatcagaacgttcagcaatatg

SEQ ID NO: 312307 - DNA, 25 bp, Homo sapien
ctgttcgcgtacatggcatattggg

SEQ ID NO: 312308 - DNA, 25 bp, Homo sapien
cgcgtacatggcatattgggtggaa

SEQ ID NO: 312309 - DNA, 25 bp, Homo sapien
ctggcatggtggcattcttctcgtc

SEQ ID NO: 312310 - DNA, 25 bp, Homo sapien
tttacccgaatcaacatggtgactg

SEQ ID NO: 312311 - DNA, 25 bp, Homo sapien
aattttgtgcaactcgtctgcatcc

SEQ ID NO: 312312 - DNA, 25 bp, Homo sapien
gcaactcgtctgcatcctcgctggt

SEQ ID NO: 312313 - DNA, 25 bp, Homo sapien
cttggcaataattctgcagccgact

SEQ ID NO: 312314 - DNA, 25 bp, Homo sapien
ggcaataattctgcagccgactttg

SEQ ID NO: 312315 - DNA, 25 bp, Homo sapien
caataattctgcagccgactttgcg

SEQ ID NO: 312316 - DNA, 25 bp, Homo sapien
aataattctgcagccgactttgcgt

SEQ ID NO: 312317 - DNA, 25 bp, Homo sapien
cacagggttacaggccaatgattcg

SEQ ID NO: 312318 - DNA, 25 bp, Homo sapien
gataccctgattgcagtccttgaag

SEQ ID NO: 312319 - DNA, 25 bp, Homo sapien
caatgattcgaacgctgaggtgaac

SEQ ID NO: 312320 - DNA, 25 bp, Homo sapien
gcagcccggttcatttggtaacaga

SEQ ID NO: 312321 - DNA, 25 bp, Homo sapien
aagtgacagggatattcgtgtgaat

SEQ ID NO: 312322 - DNA, 25 bp, Homo sapien
atatactgcggtctaaagttaaagg

SEQ ID NO: 312323 - DNA, 25 bp, Homo sapien
tccagacagacatatggaatcttac

SEQ ID NO: 312324 - DNA, 25 bp, Homo sapien
gatattcgtgtgaataaccatggct

SEQ ID NO: 312325 - DNA, 25 bp, Homo sapien
caagatcagctggtactagtctcaa

SEQ ID NO: 312326 - DNA, 25 bp, Homo sapien
tctaaatggagaatgtgctacgcac

SEQ ID NO: 312327 - DNA, 25 bp, Homo sapien
tactggctgagaacatacggtgacc

SEQ ID NO: 312328 - DNA, 25 bp, Homo sapien
caaagtggagaccaaccagttccta

SEQ ID NO: 312329 - DNA, 25 bp, Homo sapien
gagaacctcttaaccctcacagaaa

SEQ ID NO: 312330 - DNA, 25 bp, Homo sapien
gtaagctggctgatctaacggaaga

SEQ ID NO: 312331 - DNA, 25 bp, Homo sapien
tcgagcaggctctcgcattttccgg

SEQ ID NO: 312332 - DNA, 25 bp, Homo sapien
gatccttccgagtctgctactgcag

SEQ ID NO: 312333 - DNA, 25 bp, Homo sapien
taggacggacactccacgagataag

SEQ ID NO: 312334 - DNA, 25 bp, Homo sapien
ttttagcaaaaacacgatgctggcc

SEQ ID NO: 312335 - DNA, 25 bp, Homo sapien
cacgtgcccttgagcttgaatggaa

SEQ ID NO: 312336 - DNA, 25 bp, Homo sapien
gatcctcagtggcaaaaggacccct

SEQ ID NO: 312337 - DNA, 25 bp, Homo sapien
tcttacagctcgtgcatgtggagtc

SEQ ID NO: 312338 - DNA, 25 bp, Homo sapien
tcgggcagtatatgttgtttcaggc

SEQ ID NO: 312339 - DNA, 25 bp, Homo sapien
tcacagctcatacattggaatcggg

SEQ ID NO: 312340 - DNA, 25 bp, Homo sapien
taatgcctgcagagtgtaccatggc

SEQ ID NO: 312341 - DNA, 25 bp, Homo sapien
ggcctgagttcctctgccagggttt

SEQ ID NO: 312342 - DNA, 25 bp, Homo sapien
gagttcctctgccagggtttggcat

SEQ ID NO: 312343 - DNA, 25 bp, Homo sapien
ctgagttcctctgccagggtttggc

SEQ ID NO: 312344 - DNA, 25 bp, Homo sapien
gcctgagttcctctgccagggtttg

SEQ ID NO: 312345 - DNA, 25 bp, Homo sapien
acaagggtgggtggcattggcggat

SEQ ID NO: 312346 - DNA, 25 bp, Homo sapien
ctcagggcccgggcagggagtggag

SEQ ID NO: 312347 - DNA, 25 bp, Homo sapien
ggtgggtggcattggcggatgggtc

SEQ ID NO: 312348 - DNA, 25 bp, Homo sapien
tggcattggcggatgggtccagctg

SEQ ID NO: 312349 - DNA, 25 bp, Homo sapien
gagcgaggtattgcccacacagggc

SEQ ID NO: 312350 - DNA, 25 bp, Homo sapien
cttgagcgaggtattgcccacacag

SEQ ID NO: 312351 - DNA, 25 bp, Homo sapien
gaggtattgcccacacagggccctg

SEQ ID NO: 312352 - DNA, 25 bp, Homo sapien
cgaggtattgcccacacagggccct

SEQ ID NO: 312353 - DNA, 25 bp, Homo sapien
gagagggatctttccggtgaagagg

SEQ ID NO: 312354 - DNA, 25 bp, Homo sapien
ccggtgaagaggtgatcatttgttg

SEQ ID NO: 312355 - DNA, 25 bp, Homo sapien
ggatctttccggtgaagaggtgatc

SEQ ID NO: 312356 - DNA, 25 bp, Homo sapien
tctttccggtgaagaggtgatcatt

SEQ ID NO: 312357 - DNA, 25 bp, Homo sapien
cccctggcgtttcaggcttgtcttc

SEQ ID NO: 312358 - DNA, 25 bp, Homo sapien
tttcaggcttgtcttccccgagcag

SEQ ID NO: 312359 - DNA, 25 bp, Homo sapien
gcgtttcaggcttgtcttccccgag

SEQ ID NO: 312360 - DNA, 25 bp, Homo sapien
tggcgtttcaggcttgtcttccccg

SEQ ID NO: 312361 - DNA, 25 bp, Homo sapien
ttaaagaggccgaggaccacagctg

SEQ ID NO: 312362 - DNA, 25 bp, Homo sapien
agtttaaagaggccgaggaccacag

SEQ ID NO: 312363 - DNA, 25 bp, Homo sapien
agaggccgaggaccacagctgcatg

SEQ ID NO: 312364 - DNA, 25 bp, Homo sapien
taaagaggccgaggaccacagctgc

SEQ ID NO: 312365 - DNA, 25 bp, Homo sapien
ccgacgctcgggctgctttgagtca

SEQ ID NO: 312366 - DNA, 25 bp, Homo sapien
cgacgctcgggctgctttgagtcaa

SEQ ID NO: 312367 - DNA, 25 bp, Homo sapien
ggttgtatttatgccccgacgctcg

SEQ ID NO: 312368 - DNA, 25 bp, Homo sapien
atcagggttgtatttatgccccgac

SEQ ID NO: 312369 - DNA, 25 bp, Homo sapien
agtagaaggggagttgagcacttgc

SEQ ID NO: 312370 - DNA, 25 bp, Homo sapien
gtagaaggggagttgagcacttgct

SEQ ID NO: 312371 - DNA, 25 bp, Homo sapien
ctgcagtagaaggggagttgagcac

SEQ ID NO: 312372 - DNA, 25 bp, Homo sapien
gcagtagaaggggagttgagcactt

SEQ ID NO: 312373 - DNA, 25 bp, Homo sapien
catcgctcagctctcgtgatgaaag

SEQ ID NO: 312374 - DNA, 25 bp, Homo sapien
tgatgaaaggcaccttgtagatttc

SEQ ID NO: 312375 - DNA, 25 bp, Homo sapien
cgctcagctctcgtgatgaaaggca

SEQ ID NO: 312376 - DNA, 25 bp, Homo sapien
tgaaaggcaccttgtagatttcaca

SEQ ID NO: 312377 - DNA, 25 bp, Homo sapien
ctggcttcgtggccttgagtaagcc

SEQ ID NO: 312378 - DNA, 25 bp, Homo sapien
caaccccctggcttcgtggccttga

SEQ ID NO: 312379 - DNA, 25 bp, Homo sapien
cacaaccccctggcttcgtggcctt

SEQ ID NO: 312380 - DNA, 25 bp, Homo sapien
cctggcttcgtggccttgagtaagc

SEQ ID NO: 312381 - DNA, 25 bp, Homo sapien
ggtggtacagtgacacagttctcct

SEQ ID NO: 312382 - DNA, 25 bp, Homo sapien
ggccatgctgttctatcattgtctt

SEQ ID NO: 312383 - DNA, 25 bp, Homo sapien
agcagcgacttgcaaagccctcaga

SEQ ID NO: 312384 - DNA, 25 bp, Homo sapien
tgctgttctatcattgtcttccctc

SEQ ID NO: 312385 - DNA, 25 bp, Homo sapien
agaagcctgtgctcccggagtcgcc

SEQ ID NO: 312386 - DNA, 25 bp, Homo sapien
cccggcgctgctagggacatcagga

SEQ ID NO: 312387 - DNA, 25 bp, Homo sapien
cggagtcgcctttcagcagggacgc

SEQ ID NO: 312388 - DNA, 25 bp, Homo sapien
aaaacccagcgagcactgctgcgtg

SEQ ID NO: 312389 - DNA, 25 bp, Homo sapien
ccaactccatcctggccttcttcgc

SEQ ID NO: 312390 - DNA, 25 bp, Homo sapien
aactccatcctggccttcttcgcct

SEQ ID NO: 312391 - DNA, 25 bp, Homo sapien
ctccatcctggccttcttcgcctca

SEQ ID NO: 312392 - DNA, 25 bp, Homo sapien
tccatcctggccttcttcgcctcac

SEQ ID NO: 312393 - DNA, 25 bp, Homo sapien
gcagctgcaagttccggggccgcag

SEQ ID NO: 312394 - DNA, 25 bp, Homo sapien
tccgggtgcctaggcaggtggacac

SEQ ID NO: 312395 - DNA, 25 bp, Homo sapien
ggtgcctaggcaggtggacaccctc

SEQ ID NO: 312396 - DNA, 25 bp, Homo sapien
tgcctaggcaggtggacaccctcct

SEQ ID NO: 312397 - DNA, 25 bp, Homo sapien
agtctcagggggtagatggaggtcc

SEQ ID NO: 312398 - DNA, 25 bp, Homo sapien
tcagggggtagatggaggtcctcac

SEQ ID NO: 312399 - DNA, 25 bp, Homo sapien
ctcagggggtagatggaggtcctca

SEQ ID NO: 312400 - DNA, 25 bp, Homo sapien
tctcagggggtagatggaggtcctc

SEQ ID NO: 312401 - DNA, 25 bp, Homo sapien
gggctgcagtgtggggtggcaggca

SEQ ID NO: 312402 - DNA, 25 bp, Homo sapien
ctagccgaggcctgccagtctctgg

SEQ ID NO: 312403 - DNA, 25 bp, Homo sapien
ggctgcagtgtggggtggcaggcac

SEQ ID NO: 312404 - DNA, 25 bp, Homo sapien
ctgccagtctctggagggctgcagt

SEQ ID NO: 312405 - DNA, 25 bp, Homo sapien
ggcacagtgccccatctgttggtct

SEQ ID NO: 312406 - DNA, 25 bp, Homo sapien
gtcttgtaggtcgactgccctccag

SEQ ID NO: 312407 - DNA, 25 bp, Homo sapien
gcctctaaacttggttgctgaccca

SEQ ID NO: 312408 - DNA, 25 bp, Homo sapien
tttctggtctgcaccaggaggcaca

SEQ ID NO: 312409 - DNA, 25 bp, Homo sapien
tcaaggggtcctcttgcagaggggt

SEQ ID NO: 312410 - DNA, 25 bp, Homo sapien
gatgaagtgcagtcgtgggtgtgaa

SEQ ID NO: 312411 - DNA, 25 bp, Homo sapien
agatggggatgctcaaggggtcctc

SEQ ID NO: 312412 - DNA, 25 bp, Homo sapien
aagtgcagtcgtgggtgtgaatgtg

SEQ ID NO: 312413 - DNA, 25 bp, Homo sapien
gaggagccgccagagcgcggggcgg

SEQ ID NO: 312414 - DNA, 25 bp, Homo sapien
cccgggaggagccgccagagcgcgg

SEQ ID NO: 312415 - DNA, 25 bp, Homo sapien
gggaggagccgccagagcgcggggc

SEQ ID NO: 312416 - DNA, 25 bp, Homo sapien
cgcccgggaggagccgccagagcgc

SEQ ID NO: 312417 - DNA, 25 bp, Homo sapien
cgagccgaaccgcaggcagccgagg

SEQ ID NO: 312418 - DNA, 25 bp, Homo sapien
ccgagccgaaccgcaggcagccgag

SEQ ID NO: 312419 - DNA, 25 bp, Homo sapien
agtgagggcctctttgctgtcaaac

SEQ ID NO: 312420 - DNA, 25 bp, Homo sapien
ctttgctgtcaaacatgcagagagg

SEQ ID NO: 312421 - DNA, 25 bp, Homo sapien
catacaggtagacctcgtgggtgcc

SEQ ID NO: 312422 - DNA, 25 bp, Homo sapien
tgttggtggcgaaagtcacactggc

SEQ ID NO: 312423 - DNA, 25 bp, Homo sapien
tctgtttgtaggaacgttgagccca

SEQ ID NO: 312424 - DNA, 25 bp, Homo sapien
caggatctgtgaggccttggacaca

SEQ ID NO: 312425 - DNA, 25 bp, Homo sapien
ctgtcttgcactgaggcattcctgg

SEQ ID NO: 312426 - DNA, 25 bp, Homo sapien
tggacacatccccaatggcatccag

SEQ ID NO: 312427 - DNA, 25 bp, Homo sapien
ttccaggagacggaaatgtagacgg

SEQ ID NO: 312428 - DNA, 25 bp, Homo sapien
ggaaggagacggagccagggtgact

SEQ ID NO: 312429 - DNA, 25 bp, Homo sapien
gaaggagacggagccagggtgactt

SEQ ID NO: 312430 - DNA, 25 bp, Homo sapien
acggcagcgggggcccttccaggag

SEQ ID NO: 312431 - DNA, 25 bp, Homo sapien
caagcccgtggacatattgaccagg

SEQ ID NO: 312432 - DNA, 25 bp, Homo sapien
aagcccgtggacatattgaccagga

SEQ ID NO: 312433 - DNA, 25 bp, Homo sapien
ctggttggtgcggatggggtctgac

SEQ ID NO: 312434 - DNA, 25 bp, Homo sapien
tggttggtgcggatggggtctgacc

SEQ ID NO: 312435 - DNA, 25 bp, Homo sapien
gccttctcgggtccccttgagcatc

SEQ ID NO: 312436 - DNA, 25 bp, Homo sapien
cgccttctcgggtccccttgagcat

SEQ ID NO: 312437 - DNA, 25 bp, Homo sapien
ccttctcgggtccccttgagcatca

SEQ ID NO: 312438 - DNA, 25 bp, Homo sapien
gctcaacagctttaaggagcatttt

SEQ ID NO: 312439 - DNA, 25 bp, Homo sapien
ggctcaacagctttaaggagcattt

SEQ ID NO: 312440 - DNA, 25 bp, Homo sapien
gggcaatggcgccagcaaaacccac

SEQ ID NO: 312441 - DNA, 25 bp, Homo sapien
gaagtgatgacgatcatgcctccgc

SEQ ID NO: 312442 - DNA, 25 bp, Homo sapien
agcaaaacccacaagtagaaagaag

SEQ ID NO: 312443 - DNA, 25 bp, Homo sapien
gcctggccacgtgtcgatcgtcgag

SEQ ID NO: 312444 - DNA, 25 bp, Homo sapien
tcagacatagctttcacagatatcg

SEQ ID NO: 312445 - DNA, 25 bp, Homo sapien
ggattaggggaccagagcaaaccca

SEQ ID NO: 312446 - DNA, 25 bp, Homo sapien
aaacccaaatgcctttagctgcttg

SEQ ID NO: 312447 - DNA, 25 bp, Homo sapien
tatcgtcttcgtagacatgaattca

SEQ ID NO: 312448 - DNA, 25 bp, Homo sapien
gttcacggacgtgtaggaagactcc

SEQ ID NO: 312449 - DNA, 25 bp, Homo sapien
cgtgagtcgtttccccatcagaact

SEQ ID NO: 312450 - DNA, 25 bp, Homo sapien
tgggaacagcctcctgagtgatttg

SEQ ID NO: 312451 - DNA, 25 bp, Homo sapien
gaggcccccagcgacttgggaacag

SEQ ID NO: 312452 - DNA, 25 bp, Homo sapien
tcagtcttggagcttgctggaatac

SEQ ID NO: 312453 - DNA, 25 bp, Homo sapien
agtcttggagcttgctggaatacac

SEQ ID NO: 312454 - DNA, 25 bp, Homo sapien
cagtcttggagcttgctggaataca

SEQ ID NO: 312455 - DNA, 25 bp, Homo sapien
agggtgtgacaaccaccgctgcagg

SEQ ID NO: 312456 - DNA, 25 bp, Homo sapien
agtcagggtgtgacaaccaccgctg

SEQ ID NO: 312457 - DNA, 25 bp, Homo sapien
ggtgtgacaaccaccgctgcagggc

SEQ ID NO: 312458 - DNA, 25 bp, Homo sapien
tgaagtcagggtgtgacaaccaccg

SEQ ID NO: 312459 - DNA, 25 bp, Homo sapien
tgtgggtattgcgaggactgagatt

SEQ ID NO: 312460 - DNA, 25 bp, Homo sapien
gagattgtgcgtgggtgggctgggc

SEQ ID NO: 312461 - DNA, 25 bp, Homo sapien
tagcgatcttattactcctcctttg

SEQ ID NO: 312462 - DNA, 25 bp, Homo sapien
cacgggccccctagcgatcttatta

SEQ ID NO: 312463 - DNA, 25 bp, Homo sapien
agcttaggttcgatccggcgaggcc

SEQ ID NO: 312464 - DNA, 25 bp, Homo sapien
taaagggtgtgatcctagcacctac

SEQ ID NO: 312465 - DNA, 25 bp, Homo sapien
aatacaagaaatactcttccccagc

SEQ ID NO: 312466 - DNA, 25 bp, Homo sapien
cctgtcgcaggtgccgcgtccgtaa

SEQ ID NO: 312467 - DNA, 25 bp, Homo sapien
tcttccccgaggctgagaatttctc

SEQ ID NO: 312468 - DNA, 25 bp, Homo sapien
tcaagaaatactcttccccgaggct

SEQ ID NO: 312469 - DNA, 25 bp, Homo sapien
ccatggccgcccacatgtttgtgcg

SEQ ID NO: 312470 - DNA, 25 bp, Homo sapien
tgcgtgcgtgagtgtcttccccgcg

SEQ ID NO: 312471 - DNA, 25 bp, Homo sapien
gatcggaagcgctcctttgcaactg

SEQ ID NO: 312472 - DNA, 25 bp, Homo sapien
tttgcagggacgtggcgagcatcaa

SEQ ID NO: 312473 - DNA, 25 bp, Homo sapien
tgtcactctccgaaattaggtacgc

SEQ ID NO: 312474 - DNA, 25 bp, Homo sapien
taggtacgcttgtgactggctccca

SEQ ID NO: 312475 - DNA, 25 bp, Homo sapien
ccctccgcgttagccggcagcggcg

SEQ ID NO: 312476 - DNA, 25 bp, Homo sapien
cagccgcgtgaacgttccgtcccga

SEQ ID NO: 312477 - DNA, 25 bp, Homo sapien
ctagaagcgagagcgagagccggag

SEQ ID NO: 312478 - DNA, 25 bp, Homo sapien
agccagagcggacgccacgccgcct

SEQ ID NO: 312479 - DNA, 25 bp, Homo sapien
tccgagacgctggtcccagctcgcg

SEQ ID NO: 312480 - DNA, 25 bp, Homo sapien
acctcttcgcctccgcagccggcta

SEQ ID NO: 312481 - DNA, 25 bp, Homo sapien
ggggaggggactgcgcaggcacgcg

SEQ ID NO: 312482 - DNA, 25 bp, Homo sapien
cacccctgacgctgggcggggcaag

SEQ ID NO: 312483 - DNA, 25 bp, Homo sapien
tctcacaataatctagaaattaccc

SEQ ID NO: 312484 - DNA, 25 bp, Homo sapien
agcactcggcaccaggtcctagaag

SEQ ID NO: 312485 - DNA, 25 bp, Homo sapien
taaacatcagagtcaaatctcacaa

SEQ ID NO: 312486 - DNA, 25 bp, Homo sapien
caaaatccaagtaaggtgatctcaa

SEQ ID NO: 312487 - DNA, 25 bp, Homo sapien
gatgggcctctagactttaatactg

SEQ ID NO: 312488 - DNA, 25 bp, Homo sapien
cacggagtccaacctcaataggcag

SEQ ID NO: 312489 - DNA, 25 bp, Homo sapien
cagtatttcaaacacaaccacacgg

SEQ ID NO: 312490 - DNA, 25 bp, Homo sapien
tctgtggctcgcttaagtgctcaaa

SEQ ID NO: 312491 - DNA, 25 bp, Homo sapien
tctttcaccaagctatctccatatt

SEQ ID NO: 312492 - DNA, 25 bp, Homo sapien
ctgggtctctttcaccaagctatct

SEQ ID NO: 312493 - DNA, 25 bp, Homo sapien
tttcaccaagctatctccatattct

SEQ ID NO: 312494 - DNA, 25 bp, Homo sapien
accatctgggtctctttcaccaagc

SEQ ID NO: 312495 - DNA, 25 bp, Homo sapien
tctcgctgttctacacgggacagca

SEQ ID NO: 312496 - DNA, 25 bp, Homo sapien
accattcctcatctcatgagactca

SEQ ID NO: 312497 - DNA, 25 bp, Homo sapien
tggggttttcgctgtctcttgggac

SEQ ID NO: 312498 - DNA, 25 bp, Homo sapien
catcaggctggttggactctcgctg

SEQ ID NO: 312499 - DNA, 25 bp, Homo sapien
ttgttgtcttttccactgaatccat

SEQ ID NO: 312500 - DNA, 25 bp, Homo sapien
ctggatttttgttcacttctatttg

SEQ ID NO: 312501 - DNA, 25 bp, Homo sapien
ttttgttcacttctatttgttgtct

SEQ ID NO: 312502 - DNA, 25 bp, Homo sapien
ttgttcacttctatttgttgtcttt

SEQ ID NO: 312503 - DNA, 25 bp, Homo sapien
gatcatgggcgacaaccaacaggtc

SEQ ID NO: 312504 - DNA, 25 bp, Homo sapien
gacatcttccggatcagatcatggg

SEQ ID NO: 312505 - DNA, 25 bp, Homo sapien
gccagtcccgataaccaggagcagt

SEQ ID NO: 312506 - DNA, 25 bp, Homo sapien
gcttctccacgagcaaagggcaggg

SEQ ID NO: 312507 - DNA, 25 bp, Homo sapien
gcgcccctgtccatcaggctgagga

SEQ ID NO: 312508 - DNA, 25 bp, Homo sapien
acaggactccggatgtgctgctcca

SEQ ID NO: 312509 - DNA, 25 bp, Homo sapien
tgctgctccaggtcgtcaaacacct

SEQ ID NO: 312510 - DNA, 25 bp, Homo sapien
cagcaccacaggactccggatgtgc

SEQ ID NO: 312511 - DNA, 25 bp, Homo sapien
atgggcttgttctgccgccggccaa

SEQ ID NO: 312512 - DNA, 25 bp, Homo sapien
tgggcttgttctgccgccggccaaa

SEQ ID NO: 312513 - DNA, 25 bp, Homo sapien
ggcctcccgcacccccagcccatac

SEQ ID NO: 312514 - DNA, 25 bp, Homo sapien
tgccgccggccaaaggcctcccgca

SEQ ID NO: 312515 - DNA, 25 bp, Homo sapien
gccaaaggcctcccgcacccccagc

SEQ ID NO: 312516 - DNA, 25 bp, Homo sapien
ctgccgccggccaaaggcctcccgc

SEQ ID NO: 312517 - DNA, 25 bp, Homo sapien
aagtccagggactccatgggcttgt

SEQ ID NO: 312518 - DNA, 25 bp, Homo sapien
agtccagggactccatgggcttgtt

SEQ ID NO: 312519 - DNA, 25 bp, Homo sapien
tccttcaagtccagggactccatgg

SEQ ID NO: 312520 - DNA, 25 bp, Homo sapien
ttcaagtccagggactccatgggct

SEQ ID NO: 312521 - DNA, 25 bp, Homo sapien
gacctcccgcacccccagcccatac

SEQ ID NO: 312522 - DNA, 25 bp, Homo sapien
aagacctcccgcacccccagcccat

SEQ ID NO: 312523 - DNA, 25 bp, Homo sapien
gccgccggccaaagacctcccgcac

SEQ ID NO: 312524 - DNA, 25 bp, Homo sapien
ctgccgccggccaaagacctcccgc

SEQ ID NO: 312525 - DNA, 25 bp, Homo sapien
aagtccagggactccatgggcttgt

SEQ ID NO: 312526 - DNA, 25 bp, Homo sapien
agtccagggactccatgggcttgtt

SEQ ID NO: 312527 - DNA, 25 bp, Homo sapien
tccttcaagtccagggactccatgg

SEQ ID NO: 312528 - DNA, 25 bp, Homo sapien
ttcaagtccagggactccatgggct

SEQ ID NO: 312529 - DNA, 25 bp, Homo sapien
aagtccagggactccatgggcttgt

SEQ ID NO: 312530 - DNA, 25 bp, Homo sapien
agtccagggactccatgggcttgtt

SEQ ID NO: 312531 - DNA, 25 bp, Homo sapien
tccttcaagtccagggactccatgg

SEQ ID NO: 312532 - DNA, 25 bp, Homo sapien
ttcaagtccagggactccatgggct

SEQ ID NO: 312533 - DNA, 25 bp, Homo sapien
tgccgccggccaaaggcctcccgca

SEQ ID NO: 312534 - DNA, 25 bp, Homo sapien
ctgccgccggccaaaggcctcccgc

SEQ ID NO: 312535 - DNA, 25 bp, Homo sapien
gccgccggccaaaggcctcccgcac

SEQ ID NO: 312536 - DNA, 25 bp, Homo sapien
aagtccagggactccatgggcttgt

SEQ ID NO: 312537 - DNA, 25 bp, Homo sapien
agtccagggactccatgggcttgtt

SEQ ID NO: 312538 - DNA, 25 bp, Homo sapien
tccttcaagtccagggactccatgg

SEQ ID NO: 312539 - DNA, 25 bp, Homo sapien
ttcaagtccagggactccatgggct

SEQ ID NO: 312540 - DNA, 25 bp, Homo sapien
attcactgctacaaagtgagagcag

SEQ ID NO: 312541 - DNA, 25 bp, Homo sapien
ctcccaagttgccagtgtgccactt

SEQ ID NO: 312542 - DNA, 25 bp, Homo sapien
tagtaattcactgctacaaagtgag

SEQ ID NO: 312543 - DNA, 25 bp, Homo sapien
tactttattagtaattcactgctac

SEQ ID NO: 312544 - DNA, 25 bp, Homo sapien
gcttcgtgccatcttcgtgacagtg

SEQ ID NO: 312545 - DNA, 25 bp, Homo sapien
taacaccatgtgttggcaagataca

SEQ ID NO: 312546 - DNA, 25 bp, Homo sapien
ggaaatggatactcccacactcagc

SEQ ID NO: 312547 - DNA, 25 bp, Homo sapien
tgctatgcttcctagacagctgtgg

SEQ ID NO: 312548 - DNA, 25 bp, Homo sapien
ggctgtctgtttccaacagcaagcc

SEQ ID NO: 312549 - DNA, 25 bp, Homo sapien
tgcccatcgggtcactgtcaagtca

SEQ ID NO: 312550 - DNA, 25 bp, Homo sapien
ggaccatgtggctcagacgcagaga

SEQ ID NO: 312551 - DNA, 25 bp, Homo sapien
tactccatggcactaccggcaggag

SEQ ID NO: 312552 - DNA, 25 bp, Homo sapien
taagagtgattactttaggtgggct

SEQ ID NO: 312553 - DNA, 25 bp, Homo sapien
tgaggttacagcaaactgttaagag

SEQ ID NO: 312554 - DNA, 25 bp, Homo sapien
gaacgcaggaccttatcaagataca

SEQ ID NO: 312555 - DNA, 25 bp, Homo sapien
tcagttcaagatacagaacgcagga

SEQ ID NO: 312556 - DNA, 25 bp, Homo sapien
gaggatcggctgttagcgccagtca

SEQ ID NO: 312557 - DNA, 25 bp, Homo sapien
tgtgagccctagttattcccgtcct

SEQ ID NO: 312558 - DNA, 25 bp, Homo sapien
tcctacgacggtacagtcacacctg

SEQ ID NO: 312559 - DNA, 25 bp, Homo sapien
taagagaaacttggttgtgagccct

SEQ ID NO: 312560 - DNA, 25 bp, Homo sapien
ttataccccgatgggtccagcacca

SEQ ID NO: 312561 - DNA, 25 bp, Homo sapien
ggaggacgccgtacttcatgtgccc

SEQ ID NO: 312562 - DNA, 25 bp, Homo sapien
tagaggccgtgaatgtggaggacgc

SEQ ID NO: 312563 - DNA, 25 bp, Homo sapien
acttctgcgtcttgagtgacgtctt

SEQ ID NO: 312564 - DNA, 25 bp, Homo sapien
cgatgctaattaggacgggccgtac

SEQ ID NO: 312565 - DNA, 25 bp, Homo sapien
tcctggaaagtggtcaaaacagtcc

SEQ ID NO: 312566 - DNA, 25 bp, Homo sapien
caccttattcggcacggagtaaaga

SEQ ID NO: 312567 - DNA, 25 bp, Homo sapien
gatacaactttgattccgtgcagaa

SEQ ID NO: 312568 - DNA, 25 bp, Homo sapien
gaatatctgatcacgaagggtctcc

SEQ ID NO: 312569 - DNA, 25 bp, Homo sapien
ttggtccattttgctaattattagc

SEQ ID NO: 312570 - DNA, 25 bp, Homo sapien
tggtccattttgctaattattagca

SEQ ID NO: 312571 - DNA, 25 bp, Homo sapien
ggtccattttgctaattattagcaa

SEQ ID NO: 312572 - DNA, 25 bp, Homo sapien
tccattttgctaattattagcaatt

SEQ ID NO: 312573 - DNA, 25 bp, Homo sapien
caggtgagaatatggaactccgagc

SEQ ID NO: 312574 - DNA, 25 bp, Homo sapien
tccgagcagagggtgacacatggca

SEQ ID NO: 312575 - DNA, 25 bp, Homo sapien
acatggcaagcaggagctcttttct

SEQ ID NO: 312576 - DNA, 25 bp, Homo sapien
taagaagctgttgccctaatcatac

SEQ ID NO: 312577 - DNA, 25 bp, Homo sapien
ctcccaggcttggtgcgaggactcg

SEQ ID NO: 312578 - DNA, 25 bp, Homo sapien
gactgtcactgtcatgggcctcctc

SEQ ID NO: 312579 - DNA, 25 bp, Homo sapien
cagcatggtgtggtgtccgcgatca

SEQ ID NO: 312580 - DNA, 25 bp, Homo sapien
tctggcagcctgtcgaatccacttg

SEQ ID NO: 312581 - DNA, 25 bp, Homo sapien
agccgagacaccaagagctcgtcct

SEQ ID NO: 312582 - DNA, 25 bp, Homo sapien
tggagccgagacaccaagagctcgt

SEQ ID NO: 312583 - DNA, 25 bp, Homo sapien
gtcagtggagccgagacaccaagag

SEQ ID NO: 312584 - DNA, 25 bp, Homo sapien
aaaagcagtcagtggagccgagaca

SEQ ID NO: 312585 - DNA, 25 bp, Homo sapien
taatgtggtgctgtccacgcgatca

SEQ ID NO: 312586 - DNA, 25 bp, Homo sapien
caataatgtggtgctgtccacgcga

SEQ ID NO: 312587 - DNA, 25 bp, Homo sapien
gtggtgctgtccacgcgatcagcat

SEQ ID NO: 312588 - DNA, 25 bp, Homo sapien
ccaataatgtggtgctgtccacgcg

SEQ ID NO: 312589 - DNA, 25 bp, Homo sapien
aaaaaacaggctggcaagaagaaag

SEQ ID NO: 312590 - DNA, 25 bp, Homo sapien
caaaaaacaggctggcaagaagaaa

SEQ ID NO: 312591 - DNA, 25 bp, Homo sapien
acagttagtgacagaagacaatgga

SEQ ID NO: 312592 - DNA, 25 bp, Homo sapien
tacagttagtgacagaagacaatgg

SEQ ID NO: 312593 - DNA, 25 bp, Homo sapien
ctgattgtgtgcgtttttttgaaac

SEQ ID NO: 312594 - DNA, 25 bp, Homo sapien
cttcctctttgcacagtcctggcat

SEQ ID NO: 312595 - DNA, 25 bp, Homo sapien
tttgcacagtcctggcatgcattac

SEQ ID NO: 312596 - DNA, 25 bp, Homo sapien
gaaacttcaattccattctcttcta

SEQ ID NO: 312597 - DNA, 25 bp, Homo sapien
gctaagtaagcctcctgtgctctct

SEQ ID NO: 312598 - DNA, 25 bp, Homo sapien
aagaggtaccagtagctctgggcag

SEQ ID NO: 312599 - DNA, 25 bp, Homo sapien
attaaagcgcagcacggtccctgaa

SEQ ID NO: 312600 - DNA, 25 bp, Homo sapien
tctggccctgacagaacgtatgcac

SEQ ID NO: 312601 - DNA, 25 bp, Homo sapien
cagaccctcttcataggaaacctgg

SEQ ID NO: 312602 - DNA, 25 bp, Homo sapien
gaagcggcctcaggaggtactagca

SEQ ID NO: 312603 - DNA, 25 bp, Homo sapien
aaactcccgcgagcatgaggatggc

SEQ ID NO: 312604 - DNA, 25 bp, Homo sapien
ggaatcacaacggagaatcccatgc

SEQ ID NO: 312605 - DNA, 25 bp, Homo sapien
gttttccacctaaatacatcctcat

SEQ ID NO: 312606 - DNA, 25 bp, Homo sapien
gaaaaagaacatgtgagtaaggcag

SEQ ID NO: 312607 - DNA, 25 bp, Homo sapien
ccaactagtatgacttccagaaagg

SEQ ID NO: 312608 - DNA, 25 bp, Homo sapien
taaaagacggtggaaatcaatccag

SEQ ID NO: 312609 - DNA, 25 bp, Homo sapien
tgtgcacaccagtcagaggtaggcc

SEQ ID NO: 312610 - DNA, 25 bp, Homo sapien
gaggagcccagatatgcagaaaaca

SEQ ID NO: 312611 - DNA, 25 bp, Homo sapien
tctattgagaataatcgcccgggcc

SEQ ID NO: 312612 - DNA, 25 bp, Homo sapien
taccccggaggaaacagttcacaga

SEQ ID NO: 312613 - DNA, 25 bp, Homo sapien
catacattcctcttcgtttgggcac

SEQ ID NO: 312614 - DNA, 25 bp, Homo sapien
gtttcgcaatcagagatccacgtgg

SEQ ID NO: 312615 - DNA, 25 bp, Homo sapien
cacggattctggtccctgaggtagc

SEQ ID NO: 312616 - DNA, 25 bp, Homo sapien
aaagtccacctgaaatgtgtccgcg

SEQ ID NO: 312617 - DNA, 25 bp, Homo sapien
cgaacttgagctatcccggttgtca

SEQ ID NO: 312618 - DNA, 25 bp, Homo sapien
cacagccgtttcatgtgggtgaacc

SEQ ID NO: 312619 - DNA, 25 bp, Homo sapien
tctgccgggtcacagtcagagaagc

SEQ ID NO: 312620 - DNA, 25 bp, Homo sapien
caaagagaaccctccactgtagggc

SEQ ID NO: 312621 - DNA, 25 bp, Homo sapien
caagtgcactatgctggaattgcct

SEQ ID NO: 312622 - DNA, 25 bp, Homo sapien
gggccaactttgttacctcctgatg

SEQ ID NO: 312623 - DNA, 25 bp, Homo sapien
tctagcttgaggcagtaaacagcag

SEQ ID NO: 312624 - DNA, 25 bp, Homo sapien
taattctgctataccctgtgtctgg

SEQ ID NO: 312625 - DNA, 25 bp, Homo sapien
cacttacaaacgttattatgtgcag

SEQ ID NO: 312626 - DNA, 25 bp, Homo sapien
acaagacaggcctggagcggcagct

SEQ ID NO: 312627 - DNA, 25 bp, Homo sapien
gaatctctgttacggaaatattgaa

SEQ ID NO: 312628 - DNA, 25 bp, Homo sapien
tacagagtttctcaagtgacaactg

SEQ ID NO: 312629 - DNA, 25 bp, Homo sapien
tattagtggaaaatgctcccttaga

SEQ ID NO: 312630 - DNA, 25 bp, Homo sapien
cgattagagaagcataacttgctgc

SEQ ID NO: 312631 - DNA, 25 bp, Homo sapien
gcatcaatgagaggattctagaact

SEQ ID NO: 312632 - DNA, 25 bp, Homo sapien
cattgaagtggaggtattctagcaa

SEQ ID NO: 312633 - DNA, 25 bp, Homo sapien
tctgggaacccatggaaagcctaag

SEQ ID NO: 312634 - DNA, 25 bp, Homo sapien
ggtttttagaacacgcaggatcagg

SEQ ID NO: 312635 - DNA, 25 bp, Homo sapien
gtagcgcaggcaaggtcggctcctt

SEQ ID NO: 312636 - DNA, 25 bp, Homo sapien
aagcctttagcgcagttttccgtcg

SEQ ID NO: 312637 - DNA, 25 bp, Homo sapien
tcctctttgccaggttggcgtcctg

SEQ ID NO: 312638 - DNA, 25 bp, Homo sapien
tatcctgtttctggcgttgaagacc

SEQ ID NO: 312639 - DNA, 25 bp, Homo sapien
tggcgttgaagacccgcttctgcct

SEQ ID NO: 312640 - DNA, 25 bp, Homo sapien
ggttggcgtcctgccgcaagtccct

SEQ ID NO: 312641 - DNA, 25 bp, Homo sapien
tttttcagtagcttcttttatcttc

SEQ ID NO: 312642 - DNA, 25 bp, Homo sapien
atgaacttgaacatcccaggcttca

SEQ ID NO: 312643 - DNA, 25 bp, Homo sapien
tcttataatccacattcgaattcaa

SEQ ID NO: 312644 - DNA, 25 bp, Homo sapien
tttcttataatccacattcgaattc

SEQ ID NO: 312645 - DNA, 25 bp, Homo sapien
tataatccacattcgaattcaatag

SEQ ID NO: 312646 - DNA, 25 bp, Homo sapien
ctatttcttataatccacattcgaa

SEQ ID NO: 312647 - DNA, 25 bp, Homo sapien
gctgtccttcatagacggtcttaaa

SEQ ID NO: 312648 - DNA, 25 bp, Homo sapien
tgttgtctggtataaacagctgtcc

SEQ ID NO: 312649 - DNA, 25 bp, Homo sapien
tctctgagtcagcttgagggtgtga

SEQ ID NO: 312650 - DNA, 25 bp, Homo sapien
gagcccggacatatgtgttgtctgg

SEQ ID NO: 312651 - DNA, 25 bp, Homo sapien
ggaagtcattgatagccctacagag

SEQ ID NO: 312652 - DNA, 25 bp, Homo sapien
cattatctgactgccgggctggaag

SEQ ID NO: 312653 - DNA, 25 bp, Homo sapien
ttttgttcagcacgggcgttcttcc

SEQ ID NO: 312654 - DNA, 25 bp, Homo sapien
acagatcaaattcacggcgagtttc

SEQ ID NO: 312655 - DNA, 25 bp, Homo sapien
gtgcacattggtaggactttaaaca

SEQ ID NO: 312656 - DNA, 25 bp, Homo sapien
cacagggccaaagtagcatgtggct

SEQ ID NO: 312657 - DNA, 25 bp, Homo sapien
tggctgtctgtgcacattggtagga

SEQ ID NO: 312658 - DNA, 25 bp, Homo sapien
gccaaagtagcatgtggctgtctgt

SEQ ID NO: 312659 - DNA, 25 bp, Homo sapien
tctgcacgccggcatccaactggga

SEQ ID NO: 312660 - DNA, 25 bp, Homo sapien
tgcaggtgtttccctcctggagggc

SEQ ID NO: 312661 - DNA, 25 bp, Homo sapien
ccgacacggaaagtgttttccacat

SEQ ID NO: 312662 - DNA, 25 bp, Homo sapien
cacatgactgaggtgtcattgcagg

SEQ ID NO: 312663 - DNA, 25 bp, Homo sapien
gagcctttgcccaagaggttccctg

SEQ ID NO: 312664 - DNA, 25 bp, Homo sapien
cttggagcctttgcccaagaggttc

SEQ ID NO: 312665 - DNA, 25 bp, Homo sapien
gcagttccctcaatgagaggctgtt

SEQ ID NO: 312666 - DNA, 25 bp, Homo sapien
ctgcagttccctcaatgagaggctg

SEQ ID NO: 312667 - DNA, 25 bp, Homo sapien
agagagcagggatgttgtcgtcttc

SEQ ID NO: 312668 - DNA, 25 bp, Homo sapien
cagggatgttgtcgtcttcgttacc

SEQ ID NO: 312669 - DNA, 25 bp, Homo sapien
gtcagtgctgctcgagtgcaggcat

SEQ ID NO: 312670 - DNA, 25 bp, Homo sapien
cacagaagtggctgggcgggtcagt

SEQ ID NO: 312671 - DNA, 25 bp, Homo sapien
cctcactattccatcacccgctgac

SEQ ID NO: 312672 - DNA, 25 bp, Homo sapien
actattccatcacccgctgacacac

SEQ ID NO: 312673 - DNA, 25 bp, Homo sapien
tcactattccatcacccgctgacac

SEQ ID NO: 312674 - DNA, 25 bp, Homo sapien
gtcttcctcatagctcctcactatt

SEQ ID NO: 312675 - DNA, 25 bp, Homo sapien
tattggactcgtgctgatcttgaca

SEQ ID NO: 312676 - DNA, 25 bp, Homo sapien
taaagccatgagaccggacaagatc

SEQ ID NO: 312677 - DNA, 25 bp, Homo sapien
gaaggagtcaagattacctgggctg

SEQ ID NO: 312678 - DNA, 25 bp, Homo sapien
gccgagagatgctgatagccttagt

SEQ ID NO: 312679 - DNA, 25 bp, Homo sapien
ctgactgctgttttgggaatggacc

SEQ ID NO: 312680 - DNA, 25 bp, Homo sapien
gtggtgatccctacagatatctggg

SEQ ID NO: 312681 - DNA, 25 bp, Homo sapien
tgcatcacaagggtgacagcaggga

SEQ ID NO: 312682 - DNA, 25 bp, Homo sapien
ggatgaaccatacaacacgtcagtg

SEQ ID NO: 312683 - DNA, 25 bp, Homo sapien
agccccaagaaatgacgtttgagac

SEQ ID NO: 312684 - DNA, 25 bp, Homo sapien
cagccccaagaaatgacgtttgaga

SEQ ID NO: 312685 - DNA, 25 bp, Homo sapien
gaacaataatgacaggacctgcctc

SEQ ID NO: 312686 - DNA, 25 bp, Homo sapien
tgtggccgttcgtgcctttgcctcc

SEQ ID NO: 312687 - DNA, 25 bp, Homo sapien
ctaccacgtccttagccatgagcat

SEQ ID NO: 312688 - DNA, 25 bp, Homo sapien
gcatgaggacgggaacaataatgac

SEQ ID NO: 312689 - DNA, 25 bp, Homo sapien
cagccttgtctctgtgtagagggcc

SEQ ID NO: 312690 - DNA, 25 bp, Homo sapien
agccttgtctctgtgtagagggcct

SEQ ID NO: 312691 - DNA, 25 bp, Homo sapien
gcagccttgtctctgtgtagagggc

SEQ ID NO: 312692 - DNA, 25 bp, Homo sapien
ctgcagccttgtctctgtgtagagg

SEQ ID NO: 312693 - DNA, 25 bp, Homo sapien
ctggctcttgttgaagtctttcaca

SEQ ID NO: 312694 - DNA, 25 bp, Homo sapien
tctttcacagatgcacaaactgcct

SEQ ID NO: 312695 - DNA, 25 bp, Homo sapien
agtctttcacagatgcacaaactgc

SEQ ID NO: 312696 - DNA, 25 bp, Homo sapien
tgaagtctttcacagatgcacaaac

SEQ ID NO: 312697 - DNA, 25 bp, Homo sapien
tgtcatcaggcagcccatcagggtc

SEQ ID NO: 312698 - DNA, 25 bp, Homo sapien
tgacttccccaggttacatggctag

SEQ ID NO: 312699 - DNA, 25 bp, Homo sapien
tcggtgagcatccaagtagctgttc

SEQ ID NO: 312700 - DNA, 25 bp, Homo sapien
ggaagaatggaaaccagcaccaggc

SEQ ID NO: 312701 - DNA, 25 bp, Homo sapien
gaccatagttctagttgacgagcga

SEQ ID NO: 312702 - DNA, 25 bp, Homo sapien
gggcgagctctaatttccaaaacga

SEQ ID NO: 312703 - DNA, 25 bp, Homo sapien
tccaaaacgaaaagagggccagatg

SEQ ID NO: 312704 - DNA, 25 bp, Homo sapien
gacgagcgaacctgatcaatgaacc

SEQ ID NO: 312705 - DNA, 25 bp, Homo sapien
tgcaccaacttaccaaggcagggaa

SEQ ID NO: 312706 - DNA, 25 bp, Homo sapien
tagacaggcccaacttcaataccgg

SEQ ID NO: 312707 - DNA, 25 bp, Homo sapien
tacaagctttgtagttagacaggcc

SEQ ID NO: 312708 - DNA, 25 bp, Homo sapien
aagagctccgggtcttgcaccaact

SEQ ID NO: 312709 - DNA, 25 bp, Homo sapien
tgctgcttctggactaggcggatct

SEQ ID NO: 312710 - DNA, 25 bp, Homo sapien
ggtgatctcggccaagttgtcctct

SEQ ID NO: 312711 - DNA, 25 bp, Homo sapien
cgggttctcggagagcaggtcccca

SEQ ID NO: 312712 - DNA, 25 bp, Homo sapien
cccacgcaggaggttggtgatctcg

SEQ ID NO: 312713 - DNA, 25 bp, Homo sapien
gggtacttccccgtgtgttgtcagc

SEQ ID NO: 312714 - DNA, 25 bp, Homo sapien
ctttgttagggctgaagacgagtcc

SEQ ID NO: 312715 - DNA, 25 bp, Homo sapien
gggctgaagacgagtcccctttgcc

SEQ ID NO: 312716 - DNA, 25 bp, Homo sapien
cccgccaaataagcaaggatgtgtc

SEQ ID NO: 312717 - DNA, 25 bp, Homo sapien
agggtggcgcgagccccctgaatcc

SEQ ID NO: 312718 - DNA, 25 bp, Homo sapien
gtctcgctggcgcttttcttcctgg

SEQ ID NO: 312719 - DNA, 25 bp, Homo sapien
tgtccagagctctgcgcaggtcgcg

SEQ ID NO: 312720 - DNA, 25 bp, Homo sapien
aaacagcagggtggcgcgagccccc

SEQ ID NO: 312721 - DNA, 25 bp, Homo sapien
gaagtgataacagatggacccacaa

SEQ ID NO: 312722 - DNA, 25 bp, Homo sapien
tggagtcctgtctataaccaagaga

SEQ ID NO: 312723 - DNA, 25 bp, Homo sapien
gacccacaagcaaccagatatcgga

SEQ ID NO: 312724 - DNA, 25 bp, Homo sapien
ggaaagccgtccctgaataggcagt

SEQ ID NO: 312725 - DNA, 25 bp, Homo sapien
tatcgacttcctgtattaaattgtg

SEQ ID NO: 312726 - DNA, 25 bp, Homo sapien
ggttgatttgtatagacttcattca

SEQ ID NO: 312727 - DNA, 25 bp, Homo sapien
ttgtgtgaaatagtctcccgtgggt

SEQ ID NO: 312728 - DNA, 25 bp, Homo sapien
cgacttcctgtattaaattgtgtga

SEQ ID NO: 312729 - DNA, 25 bp, Homo sapien
tctttatacgtgaatgacgggaaca

SEQ ID NO: 312730 - DNA, 25 bp, Homo sapien
gacgggaacaagggtgtgttcctca

SEQ ID NO: 312731 - DNA, 25 bp, Homo sapien
taaggtagccactctttatacgtga

SEQ ID NO: 312732 - DNA, 25 bp, Homo sapien
gaaacgtgactctttaaggtagcca

SEQ ID NO: 312733 - DNA, 25 bp, Homo sapien
ccttcgctgagctgagttgaacaga

SEQ ID NO: 312734 - DNA, 25 bp, Homo sapien
ggcccgtgtggagctacttcctaga

SEQ ID NO: 312735 - DNA, 25 bp, Homo sapien
tcacagaaatacacgggagaggtta

SEQ ID NO: 312736 - DNA, 25 bp, Homo sapien
gatttgcacagagctcgcatttggc

SEQ ID NO: 312737 - DNA, 25 bp, Homo sapien
gcagctggctgagagttttgaagcc

SEQ ID NO: 312738 - DNA, 25 bp, Homo sapien
cagttcaggaaacaaggggtgagca

SEQ ID NO: 312739 - DNA, 25 bp, Homo sapien
gtcactgtgaaaatacgcagctcca

SEQ ID NO: 312740 - DNA, 25 bp, Homo sapien
ctggctgagagttttgaagccctgg

SEQ ID NO: 312741 - DNA, 25 bp, Homo sapien
tccactggacgaccaggaccgaagg

SEQ ID NO: 312742 - DNA, 25 bp, Homo sapien
gcttggtgagctcagcccaagagat

SEQ ID NO: 312743 - DNA, 25 bp, Homo sapien
ggattaactccaatgtccagtgcct

SEQ ID NO: 312744 - DNA, 25 bp, Homo sapien
ctgattggttaaaccatctgctgcc

SEQ ID NO: 312745 - DNA, 25 bp, Homo sapien
agggcaagcgcccagagcccattct

SEQ ID NO: 312746 - DNA, 25 bp, Homo sapien
ggctgggctcttcaaaaacagcctc

SEQ ID NO: 312747 - DNA, 25 bp, Homo sapien
atccaggccgctgacagccacaggg

SEQ ID NO: 312748 - DNA, 25 bp, Homo sapien
ggagggctgggctcttcaaaaacag

SEQ ID NO: 312749 - DNA, 25 bp, Homo sapien
ctgggcaatctggtgagaaccggtc

SEQ ID NO: 312750 - DNA, 25 bp, Homo sapien
gccagaacccgggtctgagggacac

SEQ ID NO: 312751 - DNA, 25 bp, Homo sapien
cagactcacagaggtaaagcgactt

SEQ ID NO: 312752 - DNA, 25 bp, Homo sapien
gctgagaggtaatggcttagcccga

SEQ ID NO: 312753 - DNA, 25 bp, Homo sapien
tggtgacgggagaggtgtggcttct

SEQ ID NO: 312754 - DNA, 25 bp, Homo sapien
ctggtgacgggagaggtgtggcttc

SEQ ID NO: 312755 - DNA, 25 bp, Homo sapien
catgcgaggtcttcccatttgacat

SEQ ID NO: 312756 - DNA, 25 bp, Homo sapien
tgacggttcgttggctgtgaaaaga

SEQ ID NO: 312757 - DNA, 25 bp, Homo sapien
ccacaagccagcacatgcgaggtct

SEQ ID NO: 312758 - DNA, 25 bp, Homo sapien
cacacagacggtgctcagtgacggt

SEQ ID NO: 312759 - DNA, 25 bp, Homo sapien
ccttagggatgaggacccgggatca

SEQ ID NO: 312760 - DNA, 25 bp, Homo sapien
atgaggacccgggatcatttcctgg

SEQ ID NO: 312761 - DNA, 25 bp, Homo sapien
tagggatgaggacccgggatcattt

SEQ ID NO: 312762 - DNA, 25 bp, Homo sapien
cagcctcaaagggtgaaccccttag

SEQ ID NO: 312763 - DNA, 25 bp, Homo sapien
aagccagccacttggtcaatttcag

SEQ ID NO: 312764 - DNA, 25 bp, Homo sapien
gaaagccagccacttggtcaatttc

SEQ ID NO: 312765 - DNA, 25 bp, Homo sapien
cagccacttggtcaatttcagggtg

SEQ ID NO: 312766 - DNA, 25 bp, Homo sapien
gccagccacttggtcaatttcaggg

SEQ ID NO: 312767 - DNA, 25 bp, Homo sapien
ttccaagaaatggttgttggagaac

SEQ ID NO: 312768 - DNA, 25 bp, Homo sapien
ctagaatatccatttcccaatgtgt

SEQ ID NO: 312769 - DNA, 25 bp, Homo sapien
gaaatggttgttggagaactcttct

SEQ ID NO: 312770 - DNA, 25 bp, Homo sapien
agaatatccatttcccaatgtgttt

SEQ ID NO: 312771 - DNA, 25 bp, Homo sapien
ggtctgaaagctaaaagctgacttc

SEQ ID NO: 312772 - DNA, 25 bp, Homo sapien
gggagaggtctgaaagctaaaagct

SEQ ID NO: 312773 - DNA, 25 bp, Homo sapien
gagaggtctgaaagctaaaagctga

SEQ ID NO: 312774 - DNA, 25 bp, Homo sapien
gaggtctgaaagctaaaagctgact

SEQ ID NO: 312775 - DNA, 25 bp, Homo sapien
gactgacagtgaacatgctcaagga

SEQ ID NO: 312776 - DNA, 25 bp, Homo sapien
tggtcaaggcggtccacatagactg

SEQ ID NO: 312777 - DNA, 25 bp, Homo sapien
gaatgaaaaggaactcttgaacctg

SEQ ID NO: 312778 - DNA, 25 bp, Homo sapien
gaactcttgaacctggtcaaggcgg

SEQ ID NO: 312779 - DNA, 25 bp, Homo sapien
ttcagaccaccagatgcctttaact

SEQ ID NO: 312780 - DNA, 25 bp, Homo sapien
ggtgcaatatgcaccagtgtgcaga

SEQ ID NO: 312781 - DNA, 25 bp, Homo sapien
tcagaccaccagatgcctttaactc

SEQ ID NO: 312782 - DNA, 25 bp, Homo sapien
ggtttcagggtttgatggtgcaata

SEQ ID NO: 312783 - DNA, 25 bp, Homo sapien
tcatgactcttttaggttaggccaa

SEQ ID NO: 312784 - DNA, 25 bp, Homo sapien
ggagcctgagccctatcctgaactg

SEQ ID NO: 312785 - DNA, 25 bp, Homo sapien
taggccaatccttaaaaccctctga

SEQ ID NO: 312786 - DNA, 25 bp, Homo sapien
gcctcttgtgagatcagcggcagcc

SEQ ID NO: 312787 - DNA, 25 bp, Homo sapien
attgtgccatgaggtcgttgtgccc

SEQ ID NO: 312788 - DNA, 25 bp, Homo sapien
ggttgtgtgattagccacctctcag

SEQ ID NO: 312789 - DNA, 25 bp, Homo sapien
tacttacagaagaggtcattgtgcc

SEQ ID NO: 312790 - DNA, 25 bp, Homo sapien
gttaaaagattgcaatgggcagtgc

SEQ ID NO: 312791 - DNA, 25 bp, Homo sapien
gcgctccaggttcagctgtacctct

SEQ ID NO: 312792 - DNA, 25 bp, Homo sapien
tccaggttcagctgtacctctgcgg

SEQ ID NO: 312793 - DNA, 25 bp, Homo sapien
ggttcagctgtacctctgcggctcc

SEQ ID NO: 312794 - DNA, 25 bp, Homo sapien
caggttcagctgtacctctgcggct

SEQ ID NO: 312795 - DNA, 25 bp, Homo sapien
cacatcctcttgtccctgtggctgg

SEQ ID NO: 312796 - DNA, 25 bp, Homo sapien
ggtgacttggaaagccaggcactgg

SEQ ID NO: 312797 - DNA, 25 bp, Homo sapien
tagtcctcatcccaggcctgtcctc

SEQ ID NO: 312798 - DNA, 25 bp, Homo sapien
gtgtcagggaagtaggcaccaccat

SEQ ID NO: 312799 - DNA, 25 bp, Homo sapien
ccagacttccccggagggggcacag

SEQ ID NO: 312800 - DNA, 25 bp, Homo sapien
cagagggggcgccttcgggccggat

SEQ ID NO: 312801 - DNA, 25 bp, Homo sapien
gccttcgggccggatgcccccagtc

SEQ ID NO: 312802 - DNA, 25 bp, Homo sapien
cagacttccccggagggggcacaga

SEQ ID NO: 312803 - DNA, 25 bp, Homo sapien
ggcggacaaaggcgcgggcgcggtc

SEQ ID NO: 312804 - DNA, 25 bp, Homo sapien
agcctcggcagccaacgctgggcca

SEQ ID NO: 312805 - DNA, 25 bp, Homo sapien
agggccgcgccgttcaattatcccg

SEQ ID NO: 312806 - DNA, 25 bp, Homo sapien
cacgctccggccgagcctcggcagc

SEQ ID NO: 312807 - DNA, 25 bp, Homo sapien
gccagcagcgcaaggccgccgagca

SEQ ID NO: 312808 - DNA, 25 bp, Homo sapien
agcagcgcaaggccgccgagcagca

SEQ ID NO: 312809 - DNA, 25 bp, Homo sapien
agcagcagcggaagcgggacccggc

SEQ ID NO: 312810 - DNA, 25 bp, Homo sapien
gggacccggcgcgacggcgcggcgc

SEQ ID NO: 312811 - DNA, 25 bp, Homo sapien
cgggaagcggtgaggaaagatagcc

SEQ ID NO: 312812 - DNA, 25 bp, Homo sapien
gagggcgcttccagcgtcaagtgca

SEQ ID NO: 312813 - DNA, 25 bp, Homo sapien
ccggagccggctggatttgctagga

SEQ ID NO: 312814 - DNA, 25 bp, Homo sapien
cgtcaagtgcaaggcgccctgggct

SEQ ID NO: 312815 - DNA, 25 bp, Homo sapien
tcaagtttcacatccgcaagctggg

SEQ ID NO: 312816 - DNA, 25 bp, Homo sapien
gtttcacatccgcaagctgggtaca

SEQ ID NO: 312817 - DNA, 25 bp, Homo sapien
caagtttcacatccgcaagctgggt

SEQ ID NO: 312818 - DNA, 25 bp, Homo sapien
tcacatccgcaagctgggtacaaca

SEQ ID NO: 312819 - DNA, 25 bp, Homo sapien
tccatcccccttgccgttggtggaa

SEQ ID NO: 312820 - DNA, 25 bp, Homo sapien
gttggtggaagtgaccagtccccag

SEQ ID NO: 312821 - DNA, 25 bp, Homo sapien
tgctcttggaaaactccatccccct

SEQ ID NO: 312822 - DNA, 25 bp, Homo sapien
ccgctgagcaccgagcccggcagaa

SEQ ID NO: 312823 - DNA, 25 bp, Homo sapien
ctaacaggggtggcaaatgcagccc

SEQ ID NO: 312824 - DNA, 25 bp, Homo sapien
acagactcgtgtcccctcttcaaga

SEQ ID NO: 312825 - DNA, 25 bp, Homo sapien
aggatgaggacagactcgtgtcccc

SEQ ID NO: 312826 - DNA, 25 bp, Homo sapien
caggatgaggacagactcgtgtccc

SEQ ID NO: 312827 - DNA, 25 bp, Homo sapien
aggacagactcgtgtcccctcttca

SEQ ID NO: 312828 - DNA, 25 bp, Homo sapien
ctgccccacagcattgtctaaagct

SEQ ID NO: 312829 - DNA, 25 bp, Homo sapien
caaagagttggagtggcctccgtgg

SEQ ID NO: 312830 - DNA, 25 bp, Homo sapien
cctccgtggtgtccagaaccaagga

SEQ ID NO: 312831 - DNA, 25 bp, Homo sapien
gccccacagcattgtctaaagctac

SEQ ID NO: 312832 - DNA, 25 bp, Homo sapien
agcagaacaggcactcgctggtaac

SEQ ID NO: 312833 - DNA, 25 bp, Homo sapien
cactcgctggtaactcgacactggg

SEQ ID NO: 312834 - DNA, 25 bp, Homo sapien
aacaggcactcgctggtaactcgac

SEQ ID NO: 312835 - DNA, 25 bp, Homo sapien
ccaagcagaacaggcactcgctggt

SEQ ID NO: 312836 - DNA, 25 bp, Homo sapien
tctgaccagtaccacactggacacc

SEQ ID NO: 312837 - DNA, 25 bp, Homo sapien
ctctgaccagtaccacactggacac

SEQ ID NO: 312838 - DNA, 25 bp, Homo sapien
gaccagtaccacactggacacccac

SEQ ID NO: 312839 - DNA, 25 bp, Homo sapien
tgaccagtaccacactggacaccca

SEQ ID NO: 312840 - DNA, 25 bp, Homo sapien
tcaatcaatgttgttttcatgcagt

SEQ ID NO: 312841 - DNA, 25 bp, Homo sapien
tgccttcttcaatcaatgttgtttt

SEQ ID NO: 312842 - DNA, 25 bp, Homo sapien
atcaatgttgttttcatgcagtaat

SEQ ID NO: 312843 - DNA, 25 bp, Homo sapien
ttgccttcttcaatcaatgttgttt

SEQ ID NO: 312844 - DNA, 25 bp, Homo sapien
tgctcctcctgaattaaaacctcct

SEQ ID NO: 312845 - DNA, 25 bp, Homo sapien
tcttgctcctcctgaattaaaacct

SEQ ID NO: 312846 - DNA, 25 bp, Homo sapien
cttgctcctcctgaattaaaacctc

SEQ ID NO: 312847 - DNA, 25 bp, Homo sapien
ttgctcctcctgaattaaaacctcc

SEQ ID NO: 312848 - DNA, 25 bp, Homo sapien
atcagggagtccacaaagagccaag

SEQ ID NO: 312849 - DNA, 25 bp, Homo sapien
ccatcagggagtccacaaagagcca

SEQ ID NO: 312850 - DNA, 25 bp, Homo sapien
agccccatcagggagtccacaaaga

SEQ ID NO: 312851 - DNA, 25 bp, Homo sapien
cccgtcattagccaagggagagctc

SEQ ID NO: 312852 - DNA, 25 bp, Homo sapien
cctcatagccacaaatgtcttgagg

SEQ ID NO: 312853 - DNA, 25 bp, Homo sapien
tgtccttgtatacccccgacatcca

SEQ ID NO: 312854 - DNA, 25 bp, Homo sapien
cctgtccttgtatacccccgacatc

SEQ ID NO: 312855 - DNA, 25 bp, Homo sapien
tcatagccacaaatgtcttgagggc

SEQ ID NO: 312856 - DNA, 25 bp, Homo sapien
ctcttccacagaaacggggacctgt

SEQ ID NO: 312857 - DNA, 25 bp, Homo sapien
cttccacagaaacggggacctgtga

SEQ ID NO: 312858 - DNA, 25 bp, Homo sapien
tcttccacagaaacggggacctgtg

SEQ ID NO: 312859 - DNA, 25 bp, Homo sapien
gagcagtccttctgatgagtggcca

SEQ ID NO: 312860 - DNA, 25 bp, Homo sapien
caggcctccaggaggacatccgcgt

SEQ ID NO: 312861 - DNA, 25 bp, Homo sapien
tccgtagcatatggcagcgagcagt

SEQ ID NO: 312862 - DNA, 25 bp, Homo sapien
atccggtgtccgtccgcacagcagg

SEQ ID NO: 312863 - DNA, 25 bp, Homo sapien
tatgaggaaccggtggttgagccac

SEQ ID NO: 312864 - DNA, 25 bp, Homo sapien
taaaatccccattcacaagcaaggc

SEQ ID NO: 312865 - DNA, 25 bp, Homo sapien
tctggcctccggaactatgaggaac

SEQ ID NO: 312866 - DNA, 25 bp, Homo sapien
gaaaaccaatacgttgccacagtct

SEQ ID NO: 312867 - DNA, 25 bp, Homo sapien
tgtgggctccgtctcactgtgacct

SEQ ID NO: 312868 - DNA, 25 bp, Homo sapien
actgcctcctgaacccttatgtggg

SEQ ID NO: 312869 - DNA, 25 bp, Homo sapien
tggcctctgattggcacaggctgcg

SEQ ID NO: 312870 - DNA, 25 bp, Homo sapien
agcccttgcctcaaccagacaggag

SEQ ID NO: 312871 - DNA, 25 bp, Homo sapien
actttccatactgcccacgccccat

SEQ ID NO: 312872 - DNA, 25 bp, Homo sapien
tgttccctcggcctgggatgctctt

SEQ ID NO: 312873 - DNA, 25 bp, Homo sapien
ccatactgcccacgccccattcagg

SEQ ID NO: 312874 - DNA, 25 bp, Homo sapien
tcctctgggctcttgcgctggctgt

SEQ ID NO: 312875 - DNA, 25 bp, Homo sapien
aaaatagaataatcataggacccag

SEQ ID NO: 312876 - DNA, 25 bp, Homo sapien
aatagaataatcataggacccagca

SEQ ID NO: 312877 - DNA, 25 bp, Homo sapien
aaagggtgcagctgccgtggagcac

SEQ ID NO: 312878 - DNA, 25 bp, Homo sapien
tcaaaaactattggctagccagaaa

SEQ ID NO: 312879 - DNA, 25 bp, Homo sapien
gtagtgtgatctcagctcactgcag

SEQ ID NO: 312880 - DNA, 25 bp, Homo sapien
tctttgagatggagttaggctggag

SEQ ID NO: 312881 - DNA, 25 bp, Homo sapien
tgagatggagttaggctggagtgta

SEQ ID NO: 312882 - DNA, 25 bp, Homo sapien
agcctctgcgtctcgggttcaagcg

SEQ ID NO: 312883 - DNA, 25 bp, Homo sapien
cgtggcacagcggtcctgctcgttg

SEQ ID NO: 312884 - DNA, 25 bp, Homo sapien
gggcgtggcacagcggtcctgctcg

SEQ ID NO: 312885 - DNA, 25 bp, Homo sapien
tggcacagcggtcctgctcgttggc

SEQ ID NO: 312886 - DNA, 25 bp, Homo sapien
acagcggtcctgctcgttggccagg

SEQ ID NO: 312887 - DNA, 25 bp, Homo sapien
atgtggcctccaggctggcgttgtc

SEQ ID NO: 312888 - DNA, 25 bp, Homo sapien
cttcacaaatgtggcctccaggctg

SEQ ID NO: 312889 - DNA, 25 bp, Homo sapien
gtggcctccaggctggcgttgtcac

SEQ ID NO: 312890 - DNA, 25 bp, Homo sapien
ggcctccaggctggcgttgtcaccg

SEQ ID NO: 312891 - DNA, 25 bp, Homo sapien
ccctgacgagtctgtgggtagagaa

SEQ ID NO: 312892 - DNA, 25 bp, Homo sapien
gaccctgacgagtctgtgggtagag

SEQ ID NO: 312893 - DNA, 25 bp, Homo sapien
ctggaccctgacgagtctgtgggta

SEQ ID NO: 312894 - DNA, 25 bp, Homo sapien
ctctggaccctgacgagtctgtggg

SEQ ID NO: 312895 - DNA, 25 bp, Homo sapien
ttccacggccatagcggtcctgagt

SEQ ID NO: 312896 - DNA, 25 bp, Homo sapien
cttgggtttactgcctgtaggcaat

SEQ ID NO: 312897 - DNA, 25 bp, Homo sapien
tttccacctcttgcaaagacacagc

SEQ ID NO: 312898 - DNA, 25 bp, Homo sapien
ttactgcctgtaggcaatgctgtca

SEQ ID NO: 312899 - DNA, 25 bp, Homo sapien
tcctggccgggcttgttttccttgc

SEQ ID NO: 312900 - DNA, 25 bp, Homo sapien
ccaagttcctcctggccgggcttgt

SEQ ID NO: 312901 - DNA, 25 bp, Homo sapien
ggtaagggagggatggcctggacac

SEQ ID NO: 312902 - DNA, 25 bp, Homo sapien
tccttgctggctgggtggtaaggga

SEQ ID NO: 312903 - DNA, 25 bp, Homo sapien
ccccagcagacagcaatggcagcac

SEQ ID NO: 312904 - DNA, 25 bp, Homo sapien
ccagcagacagcaatggcagcacct

SEQ ID NO: 312905 - DNA, 25 bp, Homo sapien
gctgtactcgcagctctggccctgg

SEQ ID NO: 312906 - DNA, 25 bp, Homo sapien
aggctgtactcgcagctctggccct

SEQ ID NO: 312907 - DNA, 25 bp, Homo sapien
ttggaggcccccgacatccaaatct

SEQ ID NO: 312908 - DNA, 25 bp, Homo sapien
catgcctggaagacctgtccacact

SEQ ID NO: 312909 - DNA, 25 bp, Homo sapien
acagcatgcctggaagacctgtcca

SEQ ID NO: 312910 - DNA, 25 bp, Homo sapien
cccgacatccaaatctccggtctcc

SEQ ID NO: 312911 - DNA, 25 bp, Homo sapien
ccaagaagtgggagcaaggccagcc

SEQ ID NO: 312912 - DNA, 25 bp, Homo sapien
aagaagtgggagcaaggccagccac

SEQ ID NO: 312913 - DNA, 25 bp, Homo sapien
ggagcaaggccagccacccatgctg

SEQ ID NO: 312914 - DNA, 25 bp, Homo sapien
cagccacccatgctgccccgggcag

SEQ ID NO: 312915 - DNA, 25 bp, Homo sapien
ggtcattcagatatgggtcctcttg

SEQ ID NO: 312916 - DNA, 25 bp, Homo sapien
ctcggcagcggtcattcagatatgg

SEQ ID NO: 312917 - DNA, 25 bp, Homo sapien
gcagcggtcattcagatatgggtcc

SEQ ID NO: 312918 - DNA, 25 bp, Homo sapien
cagatatgggtcctcttgttcctcc

SEQ ID NO: 312919 - DNA, 25 bp, Homo sapien
cttcccctccccagccagccctaga

SEQ ID NO: 312920 - DNA, 25 bp, Homo sapien
ccttcccctccccagccagccctag

SEQ ID NO: 312921 - DNA, 25 bp, Homo sapien
ttcccctccccagccagccctagat

SEQ ID NO: 312922 - DNA, 25 bp, Homo sapien
aagcaggagcagaccacctcgtcac

SEQ ID NO: 312923 - DNA, 25 bp, Homo sapien
acctcgtcacccgtgtctcggcact

SEQ ID NO: 312924 - DNA, 25 bp, Homo sapien
cagctggtagcccacgaagcaggag

SEQ ID NO: 312925 - DNA, 25 bp, Homo sapien
cgtcacccgtgtctcggcactgctg

SEQ ID NO: 312926 - DNA, 25 bp, Homo sapien
tgcagctattgtcctctgtgagctc

SEQ ID NO: 312927 - DNA, 25 bp, Homo sapien
ggaaagagcccactgtgttgatgca

SEQ ID NO: 312928 - DNA, 25 bp, Homo sapien
tgtcccgctggcagcggaaagagcc

SEQ ID NO: 312929 - DNA, 25 bp, Homo sapien
aggattctccaagccggcagctgtg

SEQ ID NO: 312930 - DNA, 25 bp, Homo sapien
ccaggtttgcagactcggagcgcat

SEQ ID NO: 312931 - DNA, 25 bp, Homo sapien
ccgtatctacgcctggaagaccagg

SEQ ID NO: 312932 - DNA, 25 bp, Homo sapien
cgcgccgtatctacgcctggaagac

SEQ ID NO: 312933 - DNA, 25 bp, Homo sapien
caggtttgcagactcggagcgcatg

SEQ ID NO: 312934 - DNA, 25 bp, Homo sapien
ctggtacatcataaaaaaaggaaat

SEQ ID NO: 312935 - DNA, 25 bp, Homo sapien
catcataaaaaaaggaaattgttag

SEQ ID NO: 312936 - DNA, 25 bp, Homo sapien
tcataaaaaaaggaaattgttagca

SEQ ID NO: 312937 - DNA, 25 bp, Homo sapien
taaaatcggggaggcagttatgaat

SEQ ID NO: 312938 - DNA, 25 bp, Homo sapien
aatcggggaggcagttatgaatacc

SEQ ID NO: 312939 - DNA, 25 bp, Homo sapien
ggggaggcagttatgaataccactc

SEQ ID NO: 312940 - DNA, 25 bp, Homo sapien
ctgacagataaaatcggggaggcag

SEQ ID NO: 312941 - DNA, 25 bp, Homo sapien
gcactgtagcttgggtcggcagcgg

SEQ ID NO: 312942 - DNA, 25 bp, Homo sapien
caatacagttgcctagagcatcttg

SEQ ID NO: 312943 - DNA, 25 bp, Homo sapien
tataaagccactcttgcactgtagc

SEQ ID NO: 312944 - DNA, 25 bp, Homo sapien
gggtcggcagcggaaggatcccaga

SEQ ID NO: 312945 - DNA, 25 bp, Homo sapien
ttctagaggcctgccccaaggctag

SEQ ID NO: 312946 - DNA, 25 bp, Homo sapien
catgcggccccgcagattctagagg

SEQ ID NO: 312947 - DNA, 25 bp, Homo sapien
aacccctgttctgtataccatgcgg

SEQ ID NO: 312948 - DNA, 25 bp, Homo sapien
ggcccttggccgctttagactataa

SEQ ID NO: 312949 - DNA, 25 bp, Homo sapien
tcgttgagatggtagccacggccac

SEQ ID NO: 312950 - DNA, 25 bp, Homo sapien
cgttcttctggcacgtgtaggagcc

SEQ ID NO: 312951 - DNA, 25 bp, Homo sapien
tgatgcatgtatgcccgatagggca

SEQ ID NO: 312952 - DNA, 25 bp, Homo sapien
cagcgcgttccctcctcgttgagat

SEQ ID NO: 312953 - DNA, 25 bp, Homo sapien
tgatgccgtcaaaatagtaacccgt

SEQ ID NO: 312954 - DNA, 25 bp, Homo sapien
gagagttcacgcagcgatgtccctt

SEQ ID NO: 312955 - DNA, 25 bp, Homo sapien
tcttgcattcgcagcggaaactgcc

SEQ ID NO: 312956 - DNA, 25 bp, Homo sapien
aaactgccgggagagttcacgcagc

SEQ ID NO: 312957 - DNA, 25 bp, Homo sapien
gggtagcgctggcactcgttgacat

SEQ ID NO: 312958 - DNA, 25 bp, Homo sapien
cacagagagccggaagcccacggaa

SEQ ID NO: 312959 - DNA, 25 bp, Homo sapien
ggagcccagcgtgttctcgcacttg

SEQ ID NO: 312960 - DNA, 25 bp, Homo sapien
gagccggaagcccacggaacagctg

SEQ ID NO: 312961 - DNA, 25 bp, Homo sapien
ttcacaggtgactccatccacatcg

SEQ ID NO: 312962 - DNA, 25 bp, Homo sapien
taacactggtaggagccgtagacgt

SEQ ID NO: 312963 - DNA, 25 bp, Homo sapien
tagcctcgccggcagtaacactggt

SEQ ID NO: 312964 - DNA, 25 bp, Homo sapien
cgctgagctggtagcctcgccggca

SEQ ID NO: 312965 - DNA, 25 bp, Homo sapien
tgctggccatgctacatcgccctgg

SEQ ID NO: 312966 - DNA, 25 bp, Homo sapien
gggcagcagcacaggacaagctgaa

SEQ ID NO: 312967 - DNA, 25 bp, Homo sapien
gaacacaggaagcctcagagaccat

SEQ ID NO: 312968 - DNA, 25 bp, Homo sapien
gcagcacaggacaagctgaacacag

SEQ ID NO: 312969 - DNA, 25 bp, Homo sapien
ctcagcctcagtgtcctggcacctg

SEQ ID NO: 312970 - DNA, 25 bp, Homo sapien
cacctcagcctcagtgtcctggcac

SEQ ID NO: 312971 - DNA, 25 bp, Homo sapien
ctgcaacggcaaagcccacctcagc

SEQ ID NO: 312972 - DNA, 25 bp, Homo sapien
tcagcctcagtgtcctggcacctgg

SEQ ID NO: 312973 - DNA, 25 bp, Homo sapien
tgatgcagcggtaggagcagatgtg

SEQ ID NO: 312974 - DNA, 25 bp, Homo sapien
gggccagcctgtagccagacgaggg

SEQ ID NO: 312975 - DNA, 25 bp, Homo sapien
ccagcctgtagccagacgaggggca

SEQ ID NO: 312976 - DNA, 25 bp, Homo sapien
gggatgttgatgcagcggtaggagc

SEQ ID NO: 312977 - DNA, 25 bp, Homo sapien
ctgcaagagaccccacagcagcaca

SEQ ID NO: 312978 - DNA, 25 bp, Homo sapien
cagaggctgcaggagccatacccat

SEQ ID NO: 312979 - DNA, 25 bp, Homo sapien
gcagcacagtgaaggcagaggctgc

SEQ ID NO: 312980 - DNA, 25 bp, Homo sapien
gcaagagaccccacagcagcacagt

SEQ ID NO: 312981 - DNA, 25 bp, Homo sapien
cggaagccgccctggatgttgaagc

SEQ ID NO: 312982 - DNA, 25 bp, Homo sapien
tgaagcaggtctcgttgatggagca

SEQ ID NO: 312983 - DNA, 25 bp, Homo sapien
tagttctcagggcactcgaaggcca

SEQ ID NO: 312984 - DNA, 25 bp, Homo sapien
gatggagcagttgtggatgccagtc

SEQ ID NO: 312985 - DNA, 25 bp, Homo sapien
tcagtcagagcacgttctgacatct

SEQ ID NO: 312986 - DNA, 25 bp, Homo sapien
ggctttgggctgacatggagacatt

SEQ ID NO: 312987 - DNA, 25 bp, Homo sapien
tgctacctatgcatctcagtcagag

SEQ ID NO: 312988 - DNA, 25 bp, Homo sapien
taacaacaacgtccaacaggtcaca

SEQ ID NO: 312989 - DNA, 25 bp, Homo sapien
acgaattctggctttcaggtgggca

SEQ ID NO: 312990 - DNA, 25 bp, Homo sapien
gcagccccacgtttaggatctggaa

SEQ ID NO: 312991 - DNA, 25 bp, Homo sapien
tggaatctttgatgccgttcccaca

SEQ ID NO: 312992 - DNA, 25 bp, Homo sapien
aggctggacgaattctggctttcag

SEQ ID NO: 312993 - DNA, 25 bp, Homo sapien
gacaacggggctgctcgggtaccca

SEQ ID NO: 312994 - DNA, 25 bp, Homo sapien
caggaagaatatggagggctgccag

SEQ ID NO: 312995 - DNA, 25 bp, Homo sapien
ggctgctcgggtacccagaagcctt

SEQ ID NO: 312996 - DNA, 25 bp, Homo sapien
tgctcgggtacccagaagccttgct

SEQ ID NO: 312997 - DNA, 25 bp, Homo sapien
tatcagtcccgggagtccaagggct

SEQ ID NO: 312998 - DNA, 25 bp, Homo sapien
catttcaccgcacatgtgtccatac

SEQ ID NO: 312999 - DNA, 25 bp, Homo sapien
cagcttcgatttttgatgagcagga

SEQ ID NO: 313000 - DNA, 25 bp, Homo sapien
aatcccttactgcacagcacacagg

SEQ ID NO: 313001 - DNA, 25 bp, Homo sapien
attggtgagtttctggtcgtatgaa

SEQ ID NO: 313002 - DNA, 25 bp, Homo sapien
tctggtcgtatgaagtatagttatg

SEQ ID NO: 313003 - DNA, 25 bp, Homo sapien
tgaagtatagttatgttaggtgtaa

SEQ ID NO: 313004 - DNA, 25 bp, Homo sapien
gagtttctggtcgtatgaagtatag

SEQ ID NO: 313005 - DNA, 25 bp, Homo sapien
tttgtatcacatgagagtgctcacc

SEQ ID NO: 313006 - DNA, 25 bp, Homo sapien
cctggttcacagatcattctgcacg

SEQ ID NO: 313007 - DNA, 25 bp, Homo sapien
aattcgccagtagcagagaccaaca

SEQ ID NO: 313008 - DNA, 25 bp, Homo sapien
gtatgtggatagacctctctgagtg

SEQ ID NO: 313009 - DNA, 25 bp, Homo sapien
ccagcacatttatcgagtgacctga

SEQ ID NO: 313010 - DNA, 25 bp, Homo sapien
tcacagtggcggtctctaggctttc

SEQ ID NO: 313011 - DNA, 25 bp, Homo sapien
tcgtttgagtgttactccagcacat

SEQ ID NO: 313012 - DNA, 25 bp, Homo sapien
gagaaagctctatgacaggtccagg

SEQ ID NO: 313013 - DNA, 25 bp, Homo sapien
tagacctactcaaccaagttgggag

SEQ ID NO: 313014 - DNA, 25 bp, Homo sapien
gaggaaggaccccactacattactg

SEQ ID NO: 313015 - DNA, 25 bp, Homo sapien
cagatggatcttggtgaacggcagc

SEQ ID NO: 313016 - DNA, 25 bp, Homo sapien
aacaatatcgtattcccggagggat

SEQ ID NO: 313017 - DNA, 25 bp, Homo sapien
cagggatgggtcctaacttcctgca

SEQ ID NO: 313018 - DNA, 25 bp, Homo sapien
taagccctcgtgttccaagctcagt

SEQ ID NO: 313019 - DNA, 25 bp, Homo sapien
gagggagccatatcgctactcagcc

SEQ ID NO: 313020 - DNA, 25 bp, Homo sapien
gacaggtcctaacttcctgggtgga

SEQ ID NO: 313021 - DNA, 25 bp, Homo sapien
gtccagcaagcggagaaacggcaga

SEQ ID NO: 313022 - DNA, 25 bp, Homo sapien
tctggccgattcagccaacacgaag

SEQ ID NO: 313023 - DNA, 25 bp, Homo sapien
gctgctgattcaggcactagcctct

SEQ ID NO: 313024 - DNA, 25 bp, Homo sapien
ttcagccaacacgaagggcacacct

SEQ ID NO: 313025 - DNA, 25 bp, Homo sapien
tcctcattgccgccggtgatggcca

SEQ ID NO: 313026 - DNA, 25 bp, Homo sapien
ggtggtgaaaaagccctcctcattg

SEQ ID NO: 313027 - DNA, 25 bp, Homo sapien
agcactcccgattctcatggcaagg

SEQ ID NO: 313028 - DNA, 25 bp, Homo sapien
atgcggaaaaccaccgcgggcgctt

SEQ ID NO: 313029 - DNA, 25 bp, Homo sapien
gagagatccatcttgacggtcagga

SEQ ID NO: 313030 - DNA, 25 bp, Homo sapien
ctgacggtgccgtggcgagagagat

SEQ ID NO: 313031 - DNA, 25 bp, Homo sapien
gggacaggcttggtgagggccacca

SEQ ID NO: 313032 - DNA, 25 bp, Homo sapien
catcttgacggtcaggagcaagtcc

SEQ ID NO: 313033 - DNA, 25 bp, Homo sapien
agaccccgcgacgcgaagcgagtgc

SEQ ID NO: 313034 - DNA, 25 bp, Homo sapien
gagaccccgcgacgcgaagcgagtg

SEQ ID NO: 313035 - DNA, 25 bp, Homo sapien
cagggttaggaaagcaacaggaggg

SEQ ID NO: 313036 - DNA, 25 bp, Homo sapien
gggagaccccgcgacgcgaagcgag

SEQ ID NO: 313037 - DNA, 25 bp, Homo sapien
ttgatcccgctggggtgttctgcct

SEQ ID NO: 313038 - DNA, 25 bp, Homo sapien
gatcccgctggggtgttctgccttc

SEQ ID NO: 313039 - DNA, 25 bp, Homo sapien
ctgccttcccttcttggatttctgc

SEQ ID NO: 313040 - DNA, 25 bp, Homo sapien
tcccgctggggtgttctgccttccc

SEQ ID NO: 313041 - DNA, 25 bp, Homo sapien
atggaagaaccctgcagtcctcttt

SEQ ID NO: 313042 - DNA, 25 bp, Homo sapien
ggaagaaccctgcagtcctctttac

SEQ ID NO: 313043 - DNA, 25 bp, Homo sapien
catggaagaaccctgcagtcctctt

SEQ ID NO: 313044 - DNA, 25 bp, Homo sapien
tggaagaaccctgcagtcctcttta

SEQ ID NO: 313045 - DNA, 25 bp, Homo sapien
gagactcgaggctggtgcaaacctg

SEQ ID NO: 313046 - DNA, 25 bp, Homo sapien
gaagctcagaccatcgtaaccagac

SEQ ID NO: 313047 - DNA, 25 bp, Homo sapien
tgtactacaacatgggagactcgag

SEQ ID NO: 313048 - DNA, 25 bp, Homo sapien
tccaaggaggctatgcttcatctgc

SEQ ID NO: 313049 - DNA, 25 bp, Homo sapien
cgcaaacgtcgatgggatcccaaaa

SEQ ID NO: 313050 - DNA, 25 bp, Homo sapien
gcaaagaagagtcccttggtgggaa

SEQ ID NO: 313051 - DNA, 25 bp, Homo sapien
gaatgttgcagaggagcttctggca

SEQ ID NO: 313052 - DNA, 25 bp, Homo sapien
gaaggtcactgggtagcctccaaag

SEQ ID NO: 313053 - DNA, 25 bp, Homo sapien
ccagcagtctctccctcgtgtgaga

SEQ ID NO: 313054 - DNA, 25 bp, Homo sapien
tgaactgcagacaaccataccttgt

SEQ ID NO: 313055 - DNA, 25 bp, Homo sapien
tggcccctggagtgaggaaaacgcc

SEQ ID NO: 313056 - DNA, 25 bp, Homo sapien
tcgtgtgagactctgaccttaggga

SEQ ID NO: 313057 - DNA, 25 bp, Homo sapien
gagaaagagtatcattcacagttat

SEQ ID NO: 313058 - DNA, 25 bp, Homo sapien
cagttatcttcctgactttgcagag

SEQ ID NO: 313059 - DNA, 25 bp, Homo sapien
ctttgttatagaaactcatccatgg

SEQ ID NO: 313060 - DNA, 25 bp, Homo sapien
ttgggttgatcatccttaaaggaaa

SEQ ID NO: 313061 - DNA, 25 bp, Homo sapien
ccttacagaaggagcattcccctac

SEQ ID NO: 313062 - DNA, 25 bp, Homo sapien
tcccttacagaaggagcattcccct

SEQ ID NO: 313063 - DNA, 25 bp, Homo sapien
cccttacagaaggagcattccccta

SEQ ID NO: 313064 - DNA, 25 bp, Homo sapien
ttacagaaggagcattcccctacag

SEQ ID NO: 313065 - DNA, 25 bp, Homo sapien
ggagcattctcccacagaagaggca

SEQ ID NO: 313066 - DNA, 25 bp, Homo sapien
gaaggagcattctcccacagaagag

SEQ ID NO: 313067 - DNA, 25 bp, Homo sapien
agaaggagcattctcccacagaaga

SEQ ID NO: 313068 - DNA, 25 bp, Homo sapien
aaggagcattctcccacagaagagg

SEQ ID NO: 313069 - DNA, 25 bp, Homo sapien
aacagactgggtggcctaaccaaga

SEQ ID NO: 313070 - DNA, 25 bp, Homo sapien
aattacctcgttgaatgtgactgca

SEQ ID NO: 313071 - DNA, 25 bp, Homo sapien
gacaagtcatgctcctacagaagga

SEQ ID NO: 313072 - DNA, 25 bp, Homo sapien
gtcactggaaactacggtcattgca

SEQ ID NO: 313073 - DNA, 25 bp, Homo sapien
ccctttggcaagatggtaggtggta

SEQ ID NO: 313074 - DNA, 25 bp, Homo sapien
cactggatttcttggacattggcag

SEQ ID NO: 313075 - DNA, 25 bp, Homo sapien
tgctgattgcatcctcacggtgcag

SEQ ID NO: 313076 - DNA, 25 bp, Homo sapien
ggtagtgtgtcttcagtgagagcca

SEQ ID NO: 313077 - DNA, 25 bp, Homo sapien
caggacttgatgcagcggaccgtgt

SEQ ID NO: 313078 - DNA, 25 bp, Homo sapien
gggtcgaacacgcatgtgacatcgt

SEQ ID NO: 313079 - DNA, 25 bp, Homo sapien
cttcagggcgggtgaactcgcggaa

SEQ ID NO: 313080 - DNA, 25 bp, Homo sapien
tgaactcgcggaaggtaggcagcga

SEQ ID NO: 313081 - DNA, 25 bp, Homo sapien
gatgatgtcaaaagagtcccgcagg

SEQ ID NO: 313082 - DNA, 25 bp, Homo sapien
atgtcgaagatgatgttagcctggc

SEQ ID NO: 313083 - DNA, 25 bp, Homo sapien
gtcccgcaggttcccttccgtgatg

SEQ ID NO: 313084 - DNA, 25 bp, Homo sapien
cacggtcatgccgtccatgtaacgc

SEQ ID NO: 313085 - DNA, 25 bp, Homo sapien
caaccgtcgggtttgaggcgcaaag

SEQ ID NO: 313086 - DNA, 25 bp, Homo sapien
caaagactgagcgtccaaggtccaa

SEQ ID NO: 313087 - DNA, 25 bp, Homo sapien
tataaatccgagtccaaaatggcag

SEQ ID NO: 313088 - DNA, 25 bp, Homo sapien
cacgctcgtgggttctggttaggac

SEQ ID NO: 313089 - DNA, 25 bp, Homo sapien
aagaccagggcacccgtgaccaact

SEQ ID NO: 313090 - DNA, 25 bp, Homo sapien
ctcatccacattccgttcccagaag

SEQ ID NO: 313091 - DNA, 25 bp, Homo sapien
ggcacccgtgaccaactgtgccggg

SEQ ID NO: 313092 - DNA, 25 bp, Homo sapien
ccagaattccaaagaccagggcacc

SEQ ID NO: 313093 - DNA, 25 bp, Homo sapien
ggcacgacaattccaagggccaggc

SEQ ID NO: 313094 - DNA, 25 bp, Homo sapien
tacaggcacgacaattccaagggcc

SEQ ID NO: 313095 - DNA, 25 bp, Homo sapien
gctacaggcacgacaattccaaggg

SEQ ID NO: 313096 - DNA, 25 bp, Homo sapien
agggctacaggcacgacaattccaa

SEQ ID NO: 313097 - DNA, 25 bp, Homo sapien
cacctgagatgacatgggcaccagg

SEQ ID NO: 313098 - DNA, 25 bp, Homo sapien
ccacctgagatgacatgggcaccag

SEQ ID NO: 313099 - DNA, 25 bp, Homo sapien
acctgagatgacatgggcaccaggt

SEQ ID NO: 313100 - DNA, 25 bp, Homo sapien
cctgagatgacatgggcaccaggtc

SEQ ID NO: 313101 - DNA, 25 bp, Homo sapien
ccatctattaccaggtggacaggcc

SEQ ID NO: 313102 - DNA, 25 bp, Homo sapien
gtccaacggtggaaccatctattac

SEQ ID NO: 313103 - DNA, 25 bp, Homo sapien
ctgcttcaggctgggctcgagtcca

SEQ ID NO: 313104 - DNA, 25 bp, Homo sapien
ccaggagccgtgtgccgggatggct

SEQ ID NO: 313105 - DNA, 25 bp, Homo sapien
agctgagcccttagagctgcctggg

SEQ ID NO: 313106 - DNA, 25 bp, Homo sapien
ccttcgatcatgtggacttcatcgc

SEQ ID NO: 313107 - DNA, 25 bp, Homo sapien
atgctgcttggccagacttgccccg

SEQ ID NO: 313108 - DNA, 25 bp, Homo sapien
gacttcatcgctgccatgctgcttg

SEQ ID NO: 313109 - DNA, 25 bp, Homo sapien
gagctccgaatgaatgctgtccacg

SEQ ID NO: 313110 - DNA, 25 bp, Homo sapien
gaatgctgtccacgttactgcaggt

SEQ ID NO: 313111 - DNA, 25 bp, Homo sapien
gctgtccacgttactgcaggtccag

SEQ ID NO: 313112 - DNA, 25 bp, Homo sapien
gccttgagctccgaatgaatgctgt

SEQ ID NO: 313113 - DNA, 25 bp, Homo sapien
gctacaccaaaaaggcctgtagaga

SEQ ID NO: 313114 - DNA, 25 bp, Homo sapien
ctgcgctacaccaaaaaggcctgta

SEQ ID NO: 313115 - DNA, 25 bp, Homo sapien
ggttcagcagggcaagacagtcccc

SEQ ID NO: 313116 - DNA, 25 bp, Homo sapien
ttcagcagggcaagacagtcccctc

SEQ ID NO: 313117 - DNA, 25 bp, Homo sapien
cagatgtggagctgtgtaatctccc

SEQ ID NO: 313118 - DNA, 25 bp, Homo sapien
caaggcagacgtctcaagtttggct

SEQ ID NO: 313119 - DNA, 25 bp, Homo sapien
accttgacgagcaccactgcctttg

SEQ ID NO: 313120 - DNA, 25 bp, Homo sapien
cgtccacggtgacaccgcagatgtg

SEQ ID NO: 313121 - DNA, 25 bp, Homo sapien
catgatgcgcacgtacatgacgagg

SEQ ID NO: 313122 - DNA, 25 bp, Homo sapien
gggttcgtgccttccagcgtcagga

SEQ ID NO: 313123 - DNA, 25 bp, Homo sapien
cgtgaacctcacatcccattgacaa

SEQ ID NO: 313124 - DNA, 25 bp, Homo sapien
agaggctccgtgacgtgctcgtgaa

SEQ ID NO: 313125 - DNA, 25 bp, Homo sapien
cacccttcctggcattcagaggttt

SEQ ID NO: 313126 - DNA, 25 bp, Homo sapien
cccttcctggcattcagaggtttgg

SEQ ID NO: 313127 - DNA, 25 bp, Homo sapien
cttcctggcattcagaggtttgggg

SEQ ID NO: 313128 - DNA, 25 bp, Homo sapien
ccttcctggcattcagaggtttggg

SEQ ID NO: 313129 - DNA, 25 bp, Homo sapien
aggcaaagaccgtggccagaggaca

SEQ ID NO: 313130 - DNA, 25 bp, Homo sapien
acaaagctcagccacggcagggtag

SEQ ID NO: 313131 - DNA, 25 bp, Homo sapien
gggagtgggtgccacaagtcctccc

SEQ ID NO: 313132 - DNA, 25 bp, Homo sapien
tagggatcaggcaaagaccgtggcc

SEQ ID NO: 313133 - DNA, 25 bp, Homo sapien
cagaaccagtactcagagacgaaga

SEQ ID NO: 313134 - DNA, 25 bp, Homo sapien
cttcaggacggcatgaaatgggccc

SEQ ID NO: 313135 - DNA, 25 bp, Homo sapien
caacatttcggtgggagaccacgcc

SEQ ID NO: 313136 - DNA, 25 bp, Homo sapien
gatgtggacgttgacaacatttcgg

SEQ ID NO: 313137 - DNA, 25 bp, Homo sapien
tacaatcagggcaagaactggtctt

SEQ ID NO: 313138 - DNA, 25 bp, Homo sapien
gggtgacacttagccttcgcattaa

SEQ ID NO: 313139 - DNA, 25 bp, Homo sapien
caggctgtgtctttaccaagggatt

SEQ ID NO: 313140 - DNA, 25 bp, Homo sapien
tctggctcagcttaatacatgttgg

SEQ ID NO: 313141 - DNA, 25 bp, Homo sapien
cccacctataagaaaagatggatga

SEQ ID NO: 313142 - DNA, 25 bp, Homo sapien
tcccacctataagaaaagatggatg

SEQ ID NO: 313143 - DNA, 25 bp, Homo sapien
ttcccacctataagaaaagatggat

SEQ ID NO: 313144 - DNA, 25 bp, Homo sapien
tggcctgccctaactcccgttagga

SEQ ID NO: 313145 - DNA, 25 bp, Homo sapien
gcagcctgcacctcggtcttcccac

SEQ ID NO: 313146 - DNA, 25 bp, Homo sapien
cctggcctgccctaactcccgttag

SEQ ID NO: 313147 - DNA, 25 bp, Homo sapien
caccccaccctactgaagaaggctc

SEQ ID NO: 313148 - DNA, 25 bp, Homo sapien
aaagatgccaagcttccagagcgcg

SEQ ID NO: 313149 - DNA, 25 bp, Homo sapien
gaaatgccggattgaaaagatgcca

SEQ ID NO: 313150 - DNA, 25 bp, Homo sapien
tggtcccttaatgccgctgatgcga

SEQ ID NO: 313151 - DNA, 25 bp, Homo sapien
tgtggctcgattgacagtggcaacc

SEQ ID NO: 313152 - DNA, 25 bp, Homo sapien
cgaattctagttggctggcttggct

SEQ ID NO: 313153 - DNA, 25 bp, Homo sapien
tgggccctggcaccctccactcaat

SEQ ID NO: 313154 - DNA, 25 bp, Homo sapien
ctcctcgaattctagttggctggct

SEQ ID NO: 313155 - DNA, 25 bp, Homo sapien
ccctccactcaatgcccacctgcat

SEQ ID NO: 313156 - DNA, 25 bp, Homo sapien
gtgagaccagatggtatcagatagt

SEQ ID NO: 313157 - DNA, 25 bp, Homo sapien
tatcagggagcaaagactaacgggc

SEQ ID NO: 313158 - DNA, 25 bp, Homo sapien
ccagatcaaggaggtgggatcaacg

SEQ ID NO: 313159 - DNA, 25 bp, Homo sapien
gcccagtttgtatgaggtcttagaa

SEQ ID NO: 313160 - DNA, 25 bp, Homo sapien
tcaatggccatttctgctgcgacat

SEQ ID NO: 313161 - DNA, 25 bp, Homo sapien
tgtgggactcagagagctacagtct

SEQ ID NO: 313162 - DNA, 25 bp, Homo sapien
aaacgtcaggttcaaagtggctggc

SEQ ID NO: 313163 - DNA, 25 bp, Homo sapien
tacagtctcacgtgacgatgaaacg

SEQ ID NO: 313164 - DNA, 25 bp, Homo sapien
ctcaagtttccagggcgatgcttct

SEQ ID NO: 313165 - DNA, 25 bp, Homo sapien
agcgccgttagcattcggtcctggg

SEQ ID NO: 313166 - DNA, 25 bp, Homo sapien
gacctcagcgccgttagcattcggt

SEQ ID NO: 313167 - DNA, 25 bp, Homo sapien
gttgaggtgctcaagtttccagggc

SEQ ID NO: 313168 - DNA, 25 bp, Homo sapien
tatgaatgcttcctgtctctacgaa

SEQ ID NO: 313169 - DNA, 25 bp, Homo sapien
agtattcgtccttttgtgactgcga

SEQ ID NO: 313170 - DNA, 25 bp, Homo sapien
tgactgcgactcttatttcactgag

SEQ ID NO: 313171 - DNA, 25 bp, Homo sapien
cattcatatcgtggtacagccttca

SEQ ID NO: 313172 - DNA, 25 bp, Homo sapien
gggtcctgaccagatgaagtctccc

SEQ ID NO: 313173 - DNA, 25 bp, Homo sapien
gaagtctcccactttgcctcgtctg

SEQ ID NO: 313174 - DNA, 25 bp, Homo sapien
tgtcaccagccacagctacgcggcg

SEQ ID NO: 313175 - DNA, 25 bp, Homo sapien
ggcgggcgcaccatcatgcagcagc

SEQ ID NO: 313176 - DNA, 25 bp, Homo sapien
gctgccaccatatccgtctcagaga

SEQ ID NO: 313177 - DNA, 25 bp, Homo sapien
cactattgttagagccggttgccac

SEQ ID NO: 313178 - DNA, 25 bp, Homo sapien
ccttactaggtctcgggtaccatgc

SEQ ID NO: 313179 - DNA, 25 bp, Homo sapien
cggttgccacggaaacggtgtctct

SEQ ID NO: 313180 - DNA, 25 bp, Homo sapien
gatcattgtcccttcgaggctcctt

SEQ ID NO: 313181 - DNA, 25 bp, Homo sapien
agtgcagaaccggtccgaatgggca

SEQ ID NO: 313182 - DNA, 25 bp, Homo sapien
gaaacagacaggactatttttcacc

SEQ ID NO: 313183 - DNA, 25 bp, Homo sapien
tggagttttgttaccgaaacagaca

SEQ ID NO: 313184 - DNA, 25 bp, Homo sapien
actcgcttcgttatcatcactgctg

SEQ ID NO: 313185 - DNA, 25 bp, Homo sapien
cccaggccatgtccttagaaactgg

SEQ ID NO: 313186 - DNA, 25 bp, Homo sapien
cagatttgcctttagttatcttgga

SEQ ID NO: 313187 - DNA, 25 bp, Homo sapien
tggcccttcggtgtctgcaggatgc

SEQ ID NO: 313188 - DNA, 25 bp, Homo sapien
aatagctagcaataaatcttctgaa

SEQ ID NO: 313189 - DNA, 25 bp, Homo sapien
cttctgaaagatatgtaagacctcc

SEQ ID NO: 313190 - DNA, 25 bp, Homo sapien
tagcaaggccactagacaaaatgtc

SEQ ID NO: 313191 - DNA, 25 bp, Homo sapien
caaagacaacttacagtagcaagaa

SEQ ID NO: 313192 - DNA, 25 bp, Homo sapien
ttgtctccactggaatcgggatgga

SEQ ID NO: 313193 - DNA, 25 bp, Homo sapien
agcccctctcggagcagaaagagga

SEQ ID NO: 313194 - DNA, 25 bp, Homo sapien
ttccccggcttgtctccactggaat

SEQ ID NO: 313195 - DNA, 25 bp, Homo sapien
ggatggaagggagccacggctggct

SEQ ID NO: 313196 - DNA, 25 bp, Homo sapien
gctcctggggcactcggaggttcat

SEQ ID NO: 313197 - DNA, 25 bp, Homo sapien
tctcatcgtcctcgagtggctcctg

SEQ ID NO: 313198 - DNA, 25 bp, Homo sapien
tcatcgtcctcgagtggctcctggg

SEQ ID NO: 313199 - DNA, 25 bp, Homo sapien
cttctcatcgtcctcgagtggctcc

SEQ ID NO: 313200 - DNA, 25 bp, Homo sapien
tccgcacttgttggatggcccgctt

SEQ ID NO: 313201 - DNA, 25 bp, Homo sapien
tgcacctgccttgggtggtggctca

SEQ ID NO: 313202 - DNA, 25 bp, Homo sapien
cccgctttgttgattgcacctgcct

SEQ ID NO: 313203 - DNA, 25 bp, Homo sapien
gtctcgggtcctgatactcacaatc

SEQ ID NO: 313204 - DNA, 25 bp, Homo sapien
ggctcacagctctcaggctgtggtt

SEQ ID NO: 313205 - DNA, 25 bp, Homo sapien
caggctgtggtttttctcaccttcc

SEQ ID NO: 313206 - DNA, 25 bp, Homo sapien
gctgtcctgggttcctgtccctcga

SEQ ID NO: 313207 - DNA, 25 bp, Homo sapien
aacagaattaactgccctctcctct

SEQ ID NO: 313208 - DNA, 25 bp, Homo sapien
tgtgtgcgggctaattcctcgtgga

SEQ ID NO: 313209 - DNA, 25 bp, Homo sapien
tcagccttctgatataaaacgagcc

SEQ ID NO: 313210 - DNA, 25 bp, Homo sapien
taaagctgacgtggccatgctgcag

SEQ ID NO: 313211 - DNA, 25 bp, Homo sapien
tagggaacctgtccaatttgtcagt

SEQ ID NO: 313212 - DNA, 25 bp, Homo sapien
tggagcgtgagagggcgacaggcag

SEQ ID NO: 313213 - DNA, 25 bp, Homo sapien
ctggagcgtgagagggcgacaggca

SEQ ID NO: 313214 - DNA, 25 bp, Homo sapien
ggcgacaggcaggggaccgcagaag

SEQ ID NO: 313215 - DNA, 25 bp, Homo sapien
tcagggttgtgtatgttgtaaagct

SEQ ID NO: 313216 - DNA, 25 bp, Homo sapien
gcgcggtgtggtgtagggtgttaaa

SEQ ID NO: 313217 - DNA, 25 bp, Homo sapien
tggttttgaacacgtttcctcgtca

SEQ ID NO: 313218 - DNA, 25 bp, Homo sapien
taaagtggggagatactcgctcaca

SEQ ID NO: 313219 - DNA, 25 bp, Homo sapien
aataacaacatcgtaggcagacagt

SEQ ID NO: 313220 - DNA, 25 bp, Homo sapien
agaaataacaacatcgtaggcagac

SEQ ID NO: 313221 - DNA, 25 bp, Homo sapien
aaataacaacatcgtaggcagacag

SEQ ID NO: 313222 - DNA, 25 bp, Homo sapien
taacaacatcgtaggcagacagttg

SEQ ID NO: 313223 - DNA, 25 bp, Homo sapien
tcagagctaaaaccatgcccaggaa

SEQ ID NO: 313224 - DNA, 25 bp, Homo sapien
tctaaacagtgaggcttgagaagcg

SEQ ID NO: 313225 - DNA, 25 bp, Homo sapien
caagtgtgcagaggacataagccga

SEQ ID NO: 313226 - DNA, 25 bp, Homo sapien
ggattccacggtgcgcaagtgtgca

SEQ ID NO: 313227 - DNA, 25 bp, Homo sapien
cggagagctctaggctgagcccaga

SEQ ID NO: 313228 - DNA, 25 bp, Homo sapien
cccagactcgcctcaggcgggagga

SEQ ID NO: 313229 - DNA, 25 bp, Homo sapien
aagggggaggcctcgccctacacag

SEQ ID NO: 313230 - DNA, 25 bp, Homo sapien
ggcgcggcggaagttctgggtgaga

SEQ ID NO: 313231 - DNA, 25 bp, Homo sapien
cttgccgctcacagctgggtcgagc

SEQ ID NO: 313232 - DNA, 25 bp, Homo sapien
cggttccgctgctctttgaagagcg

SEQ ID NO: 313233 - DNA, 25 bp, Homo sapien
atgggcgccggcaccatgacgcccg

SEQ ID NO: 313234 - DNA, 25 bp, Homo sapien
aagagcgccgtgagcgcgcgcaggg

SEQ ID NO: 313235 - DNA, 25 bp, Homo sapien
ccggcaccatgacgcccgacagcct

SEQ ID NO: 313236 - DNA, 25 bp, Homo sapien
tcctgagatccccttctccggaaac

SEQ ID NO: 313237 - DNA, 25 bp, Homo sapien
cacttgggggctgctaaaattgtaa

SEQ ID NO: 313238 - DNA, 25 bp, Homo sapien
aaaattcccacaatgggatgtaaga

SEQ ID NO: 313239 - DNA, 25 bp, Homo sapien
tctgataagacaggagattcaacac

SEQ ID NO: 313240 - DNA, 25 bp, Homo sapien
cagaagagcactatttccagaactt

SEQ ID NO: 313241 - DNA, 25 bp, Homo sapien
acagaagagcactatttccagaact

SEQ ID NO: 313242 - DNA, 25 bp, Homo sapien
tacacgactaagaaaaagaccaagc

SEQ ID NO: 313243 - DNA, 25 bp, Homo sapien
tatcaactctatgctagatgccagg

SEQ ID NO: 313244 - DNA, 25 bp, Homo sapien
aagctcatcaggtggaagaccaatg

SEQ ID NO: 313245 - DNA, 25 bp, Homo sapien
cattttgtctaagcagattgaagag

SEQ ID NO: 313246 - DNA, 25 bp, Homo sapien
gagtgtcattgcccacagtccagtg

SEQ ID NO: 313247 - DNA, 25 bp, Homo sapien
tggtcctctgtcacccaatatgtag

SEQ ID NO: 313248 - DNA, 25 bp, Homo sapien
tctgggcatctcagtctctgcgtgc

SEQ ID NO: 313249 - DNA, 25 bp, Homo sapien
gcttatggatctaccctgaatcaga

SEQ ID NO: 313250 - DNA, 25 bp, Homo sapien
tgaacctgtggttgtaccctctggg

SEQ ID NO: 313251 - DNA, 25 bp, Homo sapien
ggtacgctacgtttatctgctttag

SEQ ID NO: 313252 - DNA, 25 bp, Homo sapien
acgtttatctgctttagctccttaa

SEQ ID NO: 313253 - DNA, 25 bp, Homo sapien
tgtggggaggtacgctacgtttatc

SEQ ID NO: 313254 - DNA, 25 bp, Homo sapien
gctccttaatttacaacaccaaata

SEQ ID NO: 313255 - DNA, 25 bp, Homo sapien
gaagatttctttaggatatccagaa

SEQ ID NO: 313256 - DNA, 25 bp, Homo sapien
ttctttaggatatccagaactcttt

SEQ ID NO: 313257 - DNA, 25 bp, Homo sapien
tgagaagatttctttaggatatcca

SEQ ID NO: 313258 - DNA, 25 bp, Homo sapien
gatttctttaggatatccagaactc

SEQ ID NO: 313259 - DNA, 25 bp, Homo sapien
cattctgttattaactgcagactgg

SEQ ID NO: 313260 - DNA, 25 bp, Homo sapien
tctggttcacagaacactctatgca

SEQ ID NO: 313261 - DNA, 25 bp, Homo sapien
gactggaagccaggttttccacttg

SEQ ID NO: 313262 - DNA, 25 bp, Homo sapien
caagcattgcgaagacacctgaagc

SEQ ID NO: 313263 - DNA, 25 bp, Homo sapien
agaaacagaatccaaggtacgtgtg

SEQ ID NO: 313264 - DNA, 25 bp, Homo sapien
gaatccaaggtacgtgtgtaactac

SEQ ID NO: 313265 - DNA, 25 bp, Homo sapien
acaacttctaacagataaaccaaat

SEQ ID NO: 313266 - DNA, 25 bp, Homo sapien
acagaatccaaggtacgtgtgtaac

SEQ ID NO: 313267 - DNA, 25 bp, Homo sapien
tgtcaacagagattcctgttccact

SEQ ID NO: 313268 - DNA, 25 bp, Homo sapien
tgttccactcgcagttcacgaaaca

SEQ ID NO: 313269 - DNA, 25 bp, Homo sapien
cactcgcagttcacgaaacagaaga

SEQ ID NO: 313270 - DNA, 25 bp, Homo sapien
cagcaacaccaatcgtatccaagtt

SEQ ID NO: 313271 - DNA, 25 bp, Homo sapien
aacattatgttaagataataaccac

SEQ ID NO: 313272 - DNA, 25 bp, Homo sapien
cattatgttaagataataaccactg

SEQ ID NO: 313273 - DNA, 25 bp, Homo sapien
gataataaccactgtccaaaggaaa

SEQ ID NO: 313274 - DNA, 25 bp, Homo sapien
ataataaccactgtccaaaggaaag

SEQ ID NO: 313275 - DNA, 25 bp, Homo sapien
gcccacttcagcctcccaaagtgct

SEQ ID NO: 313276 - DNA, 25 bp, Homo sapien
accgtgttagccaggtagatctcct

SEQ ID NO: 313277 - DNA, 25 bp, Homo sapien
ctcgtgatccgcccacttcagcctc

SEQ ID NO: 313278 - DNA, 25 bp, Homo sapien
tggagttcagtggcggcaatctcgg

SEQ ID NO: 313279 - DNA, 25 bp, Homo sapien
ggagggcatattacttgctgatgaa

SEQ ID NO: 313280 - DNA, 25 bp, Homo sapien
gggctggctccattctaatagttat

SEQ ID NO: 313281 - DNA, 25 bp, Homo sapien
tcaggagaaaagcttctgcgtgggc

SEQ ID NO: 313282 - DNA, 25 bp, Homo sapien
gcaagtggcgatgaaatccagcaca

SEQ ID NO: 313283 - DNA, 25 bp, Homo sapien
gatatctgctccgttaaattttttc

SEQ ID NO: 313284 - DNA, 25 bp, Homo sapien
tcttaggtcatctacctgcttcagt

SEQ ID NO: 313285 - DNA, 25 bp, Homo sapien
ttcttaggtcatctacctgcttcag

SEQ ID NO: 313286 - DNA, 25 bp, Homo sapien
aactggttcataaaagtagtttcag

SEQ ID NO: 313287 - DNA, 25 bp, Homo sapien
tgaatagccaagctaacaaccaaat

SEQ ID NO: 313288 - DNA, 25 bp, Homo sapien
tgccctctctgcctagtgaatatga

SEQ ID NO: 313289 - DNA, 25 bp, Homo sapien
caggtctgtaagaatctgccctctc

SEQ ID NO: 313290 - DNA, 25 bp, Homo sapien
taaactcatacaaatgcaactacct

SEQ ID NO: 313291 - DNA, 25 bp, Homo sapien
aagcatgcacccaaacaatagactg

SEQ ID NO: 313292 - DNA, 25 bp, Homo sapien
aatcttcattccgtgaggcaatgtt

SEQ ID NO: 313293 - DNA, 25 bp, Homo sapien
tcttcattccgtgaggcaatgttgc

SEQ ID NO: 313294 - DNA, 25 bp, Homo sapien
caaacaatagactgggaatcttcat

SEQ ID NO: 313295 - DNA, 25 bp, Homo sapien
tgaagagtaggcaacaatttttttg

SEQ ID NO: 313296 - DNA, 25 bp, Homo sapien
ctttcatgattaagggatgtaaaca

SEQ ID NO: 313297 - DNA, 25 bp, Homo sapien
tctttcatgattaagggatgtaaac

SEQ ID NO: 313298 - DNA, 25 bp, Homo sapien
tttgtccggatgatttaagcaagac

SEQ ID NO: 313299 - DNA, 25 bp, Homo sapien
caattgcaatattgaggttctcctc

SEQ ID NO: 313300 - DNA, 25 bp, Homo sapien
attgcaatattgaggttctcctcca

SEQ ID NO: 313301 - DNA, 25 bp, Homo sapien
catcaattgcaatattgaggttctc

SEQ ID NO: 313302 - DNA, 25 bp, Homo sapien
tcaattgcaatattgaggttctcct

SEQ ID NO: 313303 - DNA, 25 bp, Homo sapien
ggcttttcagaaagaggtctgtaat

SEQ ID NO: 313304 - DNA, 25 bp, Homo sapien
gcttgtaccaattccgggcttttca

SEQ ID NO: 313305 - DNA, 25 bp, Homo sapien
gaaacatggcttgtaccaattccgg

SEQ ID NO: 313306 - DNA, 25 bp, Homo sapien
agtttgggaaacatggcttgtacca

SEQ ID NO: 313307 - DNA, 25 bp, Homo sapien
ggatttctgcatgaatctataatac

SEQ ID NO: 313308 - DNA, 25 bp, Homo sapien
aatcttcatcaatcacctatttttt

SEQ ID NO: 313309 - DNA, 25 bp, Homo sapien
taatgtctagctaggaaaaacatga

SEQ ID NO: 313310 - DNA, 25 bp, Homo sapien
tccttaccttgcttctaatgtctag

SEQ ID NO: 313311 - DNA, 25 bp, Homo sapien
tggctatcataaggtctaacagtgt

SEQ ID NO: 313312 - DNA, 25 bp, Homo sapien
cagcatgccgcaaaaacacagggat

SEQ ID NO: 313313 - DNA, 25 bp, Homo sapien
cactgatccacaaaggtgcttgcaa

SEQ ID NO: 313314 - DNA, 25 bp, Homo sapien
tcatccttggtgagtggctcatcac

SEQ ID NO: 313315 - DNA, 25 bp, Homo sapien
ggaggctcctcagaggccagcttga

SEQ ID NO: 313316 - DNA, 25 bp, Homo sapien
ctcatcatcaggaggctcctcagag

SEQ ID NO: 313317 - DNA, 25 bp, Homo sapien
tcatcatcaggaggctcctcagagg

SEQ ID NO: 313318 - DNA, 25 bp, Homo sapien
gaggctcctcagaggccagcttgag

SEQ ID NO: 313319 - DNA, 25 bp, Homo sapien
taaatgtccaactacagggatttgg

SEQ ID NO: 313320 - DNA, 25 bp, Homo sapien
catagtactatggacacaacagtca

SEQ ID NO: 313321 - DNA, 25 bp, Homo sapien
tcctagagcttacattccgaagaaa

SEQ ID NO: 313322 - DNA, 25 bp, Homo sapien
gtcaaaatttctgccctcctagagc

SEQ ID NO: 313323 - DNA, 25 bp, Homo sapien
tggagaatatagcaagctacgactg

SEQ ID NO: 313324 - DNA, 25 bp, Homo sapien
agcaagctacgactgcaccactacg

SEQ ID NO: 313325 - DNA, 25 bp, Homo sapien
tgatataggtaggtgggaggatcct

SEQ ID NO: 313326 - DNA, 25 bp, Homo sapien
taggatatgatataggtaggtggga

SEQ ID NO: 313327 - DNA, 25 bp, Homo sapien
gattaatgagtaaaatgcccttcca

SEQ ID NO: 313328 - DNA, 25 bp, Homo sapien
aaagattagtctcctgtctagctca

SEQ ID NO: 313329 - DNA, 25 bp, Homo sapien
aattagttatatctgcctggactgc

SEQ ID NO: 313330 - DNA, 25 bp, Homo sapien
cactgtcatttcgtatctttgagca

SEQ ID NO: 313331 - DNA, 25 bp, Homo sapien
gccgagcagctcagtattcacagtc

SEQ ID NO: 313332 - DNA, 25 bp, Homo sapien
ggacgtcgagaagcctaattgtagc

SEQ ID NO: 313333 - DNA, 25 bp, Homo sapien
gaaaacctgcagatagccgagcagc

SEQ ID NO: 313334 - DNA, 25 bp, Homo sapien
attcacagtcatttcgcacaggacg

SEQ ID NO: 313335 - DNA, 25 bp, Homo sapien
gacttaaacccattggccacattgg

SEQ ID NO: 313336 - DNA, 25 bp, Homo sapien
gccacattggagatgtcaccttctg

SEQ ID NO: 313337 - DNA, 25 bp, Homo sapien
cagacgaatgagatgagacttaaac

SEQ ID NO: 313338 - DNA, 25 bp, Homo sapien
tgctctcacgcaaccacaattactg

SEQ ID NO: 313339 - DNA, 25 bp, Homo sapien
gaatcagctagaccagttaagggct

SEQ ID NO: 313340 - DNA, 25 bp, Homo sapien
aaattcaggaaggactatgcccagt

SEQ ID NO: 313341 - DNA, 25 bp, Homo sapien
caactcgcagcaaggtgatctctgg

SEQ ID NO: 313342 - DNA, 25 bp, Homo sapien
agaaatagatgccaaccctcgacag

SEQ ID NO: 313343 - DNA, 25 bp, Homo sapien
cagagatttaggtagctgacaccca

SEQ ID NO: 313344 - DNA, 25 bp, Homo sapien
ctataaactctagggtgggagctca

SEQ ID NO: 313345 - DNA, 25 bp, Homo sapien
cagaatctgcccgtttgtgtcaaat

SEQ ID NO: 313346 - DNA, 25 bp, Homo sapien
cacgtgtgattcagccattagcaga

SEQ ID NO: 313347 - DNA, 25 bp, Homo sapien
tgtctagcgtttggttctgcgccat

SEQ ID NO: 313348 - DNA, 25 bp, Homo sapien
gctatcaacggctacataacaaatt

SEQ ID NO: 313349 - DNA, 25 bp, Homo sapien
gaggattgccaaaatggtgcgccca

SEQ ID NO: 313350 - DNA, 25 bp, Homo sapien
tactaaaagtgcaagttgtctagcg

SEQ ID NO: 313351 - DNA, 25 bp, Homo sapien
ccaaggggggaatcagtagtctcac

SEQ ID NO: 313352 - DNA, 25 bp, Homo sapien
gctttattcgctatcaactttcttt

SEQ ID NO: 313353 - DNA, 25 bp, Homo sapien
aaaggtaaagtgctttattcgctat

SEQ ID NO: 313354 - DNA, 25 bp, Homo sapien
atcagtccagtaatttcccaagggg

SEQ ID NO: 313355 - DNA, 25 bp, Homo sapien
ctgtaacacccagctggaacaagga

SEQ ID NO: 313356 - DNA, 25 bp, Homo sapien
aaagtcatctgagtgcgagtgaatt

SEQ ID NO: 313357 - DNA, 25 bp, Homo sapien
tcatctgagtgcgagtgaattccat

SEQ ID NO: 313358 - DNA, 25 bp, Homo sapien
atctgagtgcgagtgaattccatcc

SEQ ID NO: 313359 - DNA, 25 bp, Homo sapien
aattccatcccttgaggcaacaatg

SEQ ID NO: 313360 - DNA, 25 bp, Homo sapien
gacttttgctacagctcctagtgga

SEQ ID NO: 313361 - DNA, 25 bp, Homo sapien
tgtcattccaccactaaagcgactg

SEQ ID NO: 313362 - DNA, 25 bp, Homo sapien
gataccatgctcctggcagtccagt

SEQ ID NO: 313363 - DNA, 25 bp, Homo sapien
tccacagaggtatcataaggctcca

SEQ ID NO: 313364 - DNA, 25 bp, Homo sapien
cagatctacgaagcctaaacctagg

SEQ ID NO: 313365 - DNA, 25 bp, Homo sapien
tatccgagtaactgacaagtcagcc

SEQ ID NO: 313366 - DNA, 25 bp, Homo sapien
gagcaatcactcgatcaattatccg

SEQ ID NO: 313367 - DNA, 25 bp, Homo sapien
tcttggctccttgcaactagataca

SEQ ID NO: 313368 - DNA, 25 bp, Homo sapien
caaccccacaaggaggtgtaactgc

SEQ ID NO: 313369 - DNA, 25 bp, Homo sapien
gatggtcaactaagaggcaactctg

SEQ ID NO: 313370 - DNA, 25 bp, Homo sapien
tcctctataaacagcacacacgtgg

SEQ ID NO: 313371 - DNA, 25 bp, Homo sapien
cacgtggatccaatgttacaagcca

SEQ ID NO: 313372 - DNA, 25 bp, Homo sapien
cagttagcaaaattctccagatcca

SEQ ID NO: 313373 - DNA, 25 bp, Homo sapien
tccagatccaatgctaacgttttac

SEQ ID NO: 313374 - DNA, 25 bp, Homo sapien
gatgtacccaagtcagaacacctga

SEQ ID NO: 313375 - DNA, 25 bp, Homo sapien
gaacacctgacaacagagaggaaat

SEQ ID NO: 313376 - DNA, 25 bp, Homo sapien
tctcatactcttggcaccccttcat

SEQ ID NO: 313377 - DNA, 25 bp, Homo sapien
ggccaaggccaagtctgtgccaaac

SEQ ID NO: 313378 - DNA, 25 bp, Homo sapien
gcaagctattgaaccctgatgtggc

SEQ ID NO: 313379 - DNA, 25 bp, Homo sapien
tatgcggttgcacccttgattggct

SEQ ID NO: 313380 - DNA, 25 bp, Homo sapien
ttacgataacatggaaaactctggc

SEQ ID NO: 313381 - DNA, 25 bp, Homo sapien
tgggattcacacgatgagaaatcaa

SEQ ID NO: 313382 - DNA, 25 bp, Homo sapien
gattcacacgatgagaaatcaactc

SEQ ID NO: 313383 - DNA, 25 bp, Homo sapien
gggattcacacgatgagaaatcaac

SEQ ID NO: 313384 - DNA, 25 bp, Homo sapien
agtgggattcacacgatgagaaatc

SEQ ID NO: 313385 - DNA, 25 bp, Homo sapien
tccaaggccgccagtcggatttttc

SEQ ID NO: 313386 - DNA, 25 bp, Homo sapien
aaagcatctggaaccgtgtctctcg

SEQ ID NO: 313387 - DNA, 25 bp, Homo sapien
gctgcaggtgcagaccaaagccatt

SEQ ID NO: 313388 - DNA, 25 bp, Homo sapien
ttccaacaggcaaaggacacgccct

SEQ ID NO: 313389 - DNA, 25 bp, Homo sapien
gctgggccacactgttagaatcagc

SEQ ID NO: 313390 - DNA, 25 bp, Homo sapien
tcagctggtattgctccagttacac

SEQ ID NO: 313391 - DNA, 25 bp, Homo sapien
ctccagttacactgaagctctgagg

SEQ ID NO: 313392 - DNA, 25 bp, Homo sapien
gttagaatcagctggtattgctcca

SEQ ID NO: 313393 - DNA, 25 bp, Homo sapien
cctttggaacattctccagaggcct

SEQ ID NO: 313394 - DNA, 25 bp, Homo sapien
ggagcagcgaaatcctgaatcccag

SEQ ID NO: 313395 - DNA, 25 bp, Homo sapien
gaacggggagcagcgaaatcctgaa

SEQ ID NO: 313396 - DNA, 25 bp, Homo sapien
gccttgaacggggagcagcgaaatc

SEQ ID NO: 313397 - DNA, 25 bp, Homo sapien
tataaggtcagcatatgaaaaatgt

SEQ ID NO: 313398 - DNA, 25 bp, Homo sapien
tcccatccatatttactaatactgt

SEQ ID NO: 313399 - DNA, 25 bp, Homo sapien
aagtccaagttgaatcatgtaagaa

SEQ ID NO: 313400 - DNA, 25 bp, Homo sapien
tgaaaaatgtattgaatcctatgtg

SEQ ID NO: 313401 - DNA, 25 bp, Homo sapien
gagcagtgtggacgactctgagcca

SEQ ID NO: 313402 - DNA, 25 bp, Homo sapien
agctgcggaagctcaggacaacagg

SEQ ID NO: 313403 - DNA, 25 bp, Homo sapien
actctgagccaaacgtcaggcggga

SEQ ID NO: 313404 - DNA, 25 bp, Homo sapien
tgtggacgactctgagccaaacgtc

SEQ ID NO: 313405 - DNA, 25 bp, Homo sapien
aatgcatgcatatgaagacagtctg

SEQ ID NO: 313406 - DNA, 25 bp, Homo sapien
aaatgcatgcatatgaagacagtct

SEQ ID NO: 313407 - DNA, 25 bp, Homo sapien
taaatgcatgcatatgaagacagtc

SEQ ID NO: 313408 - DNA, 25 bp, Homo sapien
tgcatgcatatgaagacagtctgac

SEQ ID NO: 313409 - DNA, 25 bp, Homo sapien
ttctagggttgcgaagagcagagca

SEQ ID NO: 313410 - DNA, 25 bp, Homo sapien
tctagggttgcgaagagcagagcag

SEQ ID NO: 313411 - DNA, 25 bp, Homo sapien
tagggttgcgaagagcagagcagac

SEQ ID NO: 313412 - DNA, 25 bp, Homo sapien
attctagggttgcgaagagcagagc

SEQ ID NO: 313413 - DNA, 25 bp, Homo sapien
agtgtgcaccgtgaggaaggatttc

SEQ ID NO: 313414 - DNA, 25 bp, Homo sapien
gtattgaagatgagtgtgcaccgtg

SEQ ID NO: 313415 - DNA, 25 bp, Homo sapien
attgaagatgagtgtgcaccgtgag

SEQ ID NO: 313416 - DNA, 25 bp, Homo sapien
tcagatgctgcagtattgaagatga

SEQ ID NO: 313417 - DNA, 25 bp, Homo sapien
gggctggggggtagcggtggatcta

SEQ ID NO: 313418 - DNA, 25 bp, Homo sapien
ggctggggggtagcggtggatctaa

SEQ ID NO: 313419 - DNA, 25 bp, Homo sapien
gctggggggtagcggtggatctaac

SEQ ID NO: 313420 - DNA, 25 bp, Homo sapien
ggagccctggtaatgctgagcagga

SEQ ID NO: 313421 - DNA, 25 bp, Homo sapien
ccctggtaatgctgagcaggaaggc

SEQ ID NO: 313422 - DNA, 25 bp, Homo sapien
ggcagtgtgacaggagggaatctga

SEQ ID NO: 313423 - DNA, 25 bp, Homo sapien
gggaatctgagaggtctgggcctgg

SEQ ID NO: 313424 - DNA, 25 bp, Homo sapien
ggttatataacggaactcattcatg

SEQ ID NO: 313425 - DNA, 25 bp, Homo sapien
ggtgctgttacatttacacctgtgc

SEQ ID NO: 313426 - DNA, 25 bp, Homo sapien
cttattgcttccagactcggaggtt

SEQ ID NO: 313427 - DNA, 25 bp, Homo sapien
tttctcctaatacttgcatgggttc

SEQ ID NO: 313428 - DNA, 25 bp, Homo sapien
ggactggtagggacaggctgccatt

SEQ ID NO: 313429 - DNA, 25 bp, Homo sapien
actggtagggacaggctgccattcc

SEQ ID NO: 313430 - DNA, 25 bp, Homo sapien
agggactggtagggacaggctgcca

SEQ ID NO: 313431 - DNA, 25 bp, Homo sapien
gactggtagggacaggctgccattc

SEQ ID NO: 313432 - DNA, 25 bp, Homo sapien
gaatataaactttcagcaagcaccc

SEQ ID NO: 313433 - DNA, 25 bp, Homo sapien
cagtagcctcctgttatgtccagcc

SEQ ID NO: 313434 - DNA, 25 bp, Homo sapien
tatgttgaggtccagatgtgaacac

SEQ ID NO: 313435 - DNA, 25 bp, Homo sapien
ctccatgaagccacttaagagaggg

SEQ ID NO: 313436 - DNA, 25 bp, Homo sapien
tttcaaacaccagcaaacggatgtt

SEQ ID NO: 313437 - DNA, 25 bp, Homo sapien
gatgttaatgttacctcccggctgg

SEQ ID NO: 313438 - DNA, 25 bp, Homo sapien
gatgtcggtgcccatggtggctcca

SEQ ID NO: 313439 - DNA, 25 bp, Homo sapien
tcaaggacggaaccaatgggctgtg

SEQ ID NO: 313440 - DNA, 25 bp, Homo sapien
cgtgcaagtgcacagacatagttaa

SEQ ID NO: 313441 - DNA, 25 bp, Homo sapien
atctgaccttacattaagcactgtg

SEQ ID NO: 313442 - DNA, 25 bp, Homo sapien
gcggaggggtgcgtgcaagtgcaca

SEQ ID NO: 313443 - DNA, 25 bp, Homo sapien
tgtgatctggaaacaatgcaaagac

SEQ ID NO: 313444 - DNA, 25 bp, Homo sapien
agaaggccccacagacaagcaaaaa

SEQ ID NO: 313445 - DNA, 25 bp, Homo sapien
agacaagcaaaaagcaccattcaca

SEQ ID NO: 313446 - DNA, 25 bp, Homo sapien
caaaaagcaccattcacatccagca

SEQ ID NO: 313447 - DNA, 25 bp, Homo sapien
cccacagacaagcaaaaagcaccat

SEQ ID NO: 313448 - DNA, 25 bp, Homo sapien
tactgtcctccctcttagtgagatg

SEQ ID NO: 313449 - DNA, 25 bp, Homo sapien
gaaactacagcagaataaaagccag

SEQ ID NO: 313450 - DNA, 25 bp, Homo sapien
tagagagctcactactaaaaagtgg

SEQ ID NO: 313451 - DNA, 25 bp, Homo sapien
tagctctcaagcgagttccacccaa

SEQ ID NO: 313452 - DNA, 25 bp, Homo sapien
gctactgcccatgtcctggagaggt

SEQ ID NO: 313453 - DNA, 25 bp, Homo sapien
gtggaagccattttctataagacat

SEQ ID NO: 313454 - DNA, 25 bp, Homo sapien
cacagcaacaacctgatgacttaag

SEQ ID NO: 313455 - DNA, 25 bp, Homo sapien
tcaaagttgctgtttaccaccacca

SEQ ID NO: 313456 - DNA, 25 bp, Homo sapien
tattgagcactgttatggccccagc

SEQ ID NO: 313457 - DNA, 25 bp, Homo sapien
tcgatatggttgtgtctatgacatg

SEQ ID NO: 313458 - DNA, 25 bp, Homo sapien
catgctgttattggtgcagtgttca

SEQ ID NO: 313459 - DNA, 25 bp, Homo sapien
tctttcactgctgatagaggtcatt

SEQ ID NO: 313460 - DNA, 25 bp, Homo sapien
tcaactgagggtatgcgttcctgga

SEQ ID NO: 313461 - DNA, 25 bp, Homo sapien
gatagcagtagttggtgacattcac

SEQ ID NO: 313462 - DNA, 25 bp, Homo sapien
tactcaataaagagcactgggagtg

SEQ ID NO: 313463 - DNA, 25 bp, Homo sapien
ggcagtagctcctaaatgcatgacg

SEQ ID NO: 313464 - DNA, 25 bp, Homo sapien
ttctggaacataggtgcatctccac

SEQ ID NO: 313465 - DNA, 25 bp, Homo sapien
tctccacgccagattgaggttggtt

SEQ ID NO: 313466 - DNA, 25 bp, Homo sapien
gtttggctagaagaacatatagcat

SEQ ID NO: 313467 - DNA, 25 bp, Homo sapien
gaggttggttttcacgctcatagtt

SEQ ID NO: 313468 - DNA, 25 bp, Homo sapien
catcctgtacgtaaagtaaagtacg

SEQ ID NO: 313469 - DNA, 25 bp, Homo sapien
gccccacgtctaccagcaggatggg

SEQ ID NO: 313470 - DNA, 25 bp, Homo sapien
cagcaggatggggtacgtacgcatc

SEQ ID NO: 313471 - DNA, 25 bp, Homo sapien
gggtacgtacgcatcctgtacgtaa

SEQ ID NO: 313472 - DNA, 25 bp, Homo sapien
cctcttctaagctgggaataggaaa

SEQ ID NO: 313473 - DNA, 25 bp, Homo sapien
gctttcctaactatgattcaatccg

SEQ ID NO: 313474 - DNA, 25 bp, Homo sapien
tgttcaccaggataaactccagata

SEQ ID NO: 313475 - DNA, 25 bp, Homo sapien
gggcaagtaggtagccatataaaaa

SEQ ID NO: 313476 - DNA, 25 bp, Homo sapien
tcactgatgttgcagttgtccagga

SEQ ID NO: 313477 - DNA, 25 bp, Homo sapien
gggttactgtcactgatgttgcagt

SEQ ID NO: 313478 - DNA, 25 bp, Homo sapien
aggatcaacgggataccatccagct

SEQ ID NO: 313479 - DNA, 25 bp, Homo sapien
cagttgtccaggatcaacgggatac

SEQ ID NO: 313480 - DNA, 25 bp, Homo sapien
agggccccggctgtaaacttgtgca

SEQ ID NO: 313481 - DNA, 25 bp, Homo sapien
cttgttttgctaagggccccggctg

SEQ ID NO: 313482 - DNA, 25 bp, Homo sapien
tgtaaacttgtgcatggtaattcac

SEQ ID NO: 313483 - DNA, 25 bp, Homo sapien
ccggctgtaaacttgtgcatggtaa

SEQ ID NO: 313484 - DNA, 25 bp, Homo sapien
gccttcagggactcatgataatgcc

SEQ ID NO: 313485 - DNA, 25 bp, Homo sapien
acagctaagtttggctttcaccagg

SEQ ID NO: 313486 - DNA, 25 bp, Homo sapien
tcagtctcctcaatgctaggctagg

SEQ ID NO: 313487 - DNA, 25 bp, Homo sapien
aaacaagctgtatccggtccctggt

SEQ ID NO: 313488 - DNA, 25 bp, Homo sapien
cataataaatcatcgttttcattgg

SEQ ID NO: 313489 - DNA, 25 bp, Homo sapien
gaacattctcgtactgctttcccat

SEQ ID NO: 313490 - DNA, 25 bp, Homo sapien
tgcaacatctgcaattgtacctgaa

SEQ ID NO: 313491 - DNA, 25 bp, Homo sapien
tttcccatgactagaagctttcttc

SEQ ID NO: 313492 - DNA, 25 bp, Homo sapien
aagtggagctagagatattgttccc

SEQ ID NO: 313493 - DNA, 25 bp, Homo sapien
aagcgaggagtaaagtaggagtcat

SEQ ID NO: 313494 - DNA, 25 bp, Homo sapien
catcagtgtggttttacctagggaa

SEQ ID NO: 313495 - DNA, 25 bp, Homo sapien
tgtaaggctttttcgtttctgacca

SEQ ID NO: 313496 - DNA, 25 bp, Homo sapien
agcaatgatgcaagtgtggactgga

SEQ ID NO: 313497 - DNA, 25 bp, Homo sapien
caatgatgcaagtgtggactggatg

SEQ ID NO: 313498 - DNA, 25 bp, Homo sapien
taggaagtcactgccgaagttcagg

SEQ ID NO: 313499 - DNA, 25 bp, Homo sapien
aaactgaaagatgagttaggaagtc

SEQ ID NO: 313500 - DNA, 25 bp, Homo sapien
aaattgcctctgtggtagcggagct

SEQ ID NO: 313501 - DNA, 25 bp, Homo sapien
tccgatggcattggctactgtgtca

SEQ ID NO: 313502 - DNA, 25 bp, Homo sapien
caaaagtgagttgggcgagtgaaca

SEQ ID NO: 313503 - DNA, 25 bp, Homo sapien
ctgggcactagttgggctcgtgtcc

SEQ ID NO: 313504 - DNA, 25 bp, Homo sapien
tctgagaggaagacatacatgaccg

SEQ ID NO: 313505 - DNA, 25 bp, Homo sapien
tataacacgccaaatggaggcactc

SEQ ID NO: 313506 - DNA, 25 bp, Homo sapien
cactgaagggatctagaaagaactc

SEQ ID NO: 313507 - DNA, 25 bp, Homo sapien
gcactcagctcactgaagggatcta

SEQ ID NO: 313508 - DNA, 25 bp, Homo sapien
ttcgttccgtgcagagacaggctca

SEQ ID NO: 313509 - DNA, 25 bp, Homo sapien
tgtcctgtgactaccgaactttgtg

SEQ ID NO: 313510 - DNA, 25 bp, Homo sapien
gctgatactttaggctactttaggc

SEQ ID NO: 313511 - DNA, 25 bp, Homo sapien
ggcatgtggattttgagctgatact

SEQ ID NO: 313512 - DNA, 25 bp, Homo sapien
cgtcagtgatgtggcttggtaaagc

SEQ ID NO: 313513 - DNA, 25 bp, Homo sapien
cctgcatgggactgctgtgatcaca

SEQ ID NO: 313514 - DNA, 25 bp, Homo sapien
tcagcacttcatgcacaggcagtca

SEQ ID NO: 313515 - DNA, 25 bp, Homo sapien
tgatcacagaagtgccctagtggtt

SEQ ID NO: 313516 - DNA, 25 bp, Homo sapien
ttccaaagacgaaggcaagactctc

SEQ ID NO: 313517 - DNA, 25 bp, Homo sapien
cagggcctgttttcggctgtgctca

SEQ ID NO: 313518 - DNA, 25 bp, Homo sapien
gaaaaggtctgtccattccccaaga

SEQ ID NO: 313519 - DNA, 25 bp, Homo sapien
caaccaccattgttgggatggccgg

SEQ ID NO: 313520 - DNA, 25 bp, Homo sapien
gagacgggacactcaagaagccgcc

SEQ ID NO: 313521 - DNA, 25 bp, Homo sapien
cgggacactcaagaagccgcctagg

SEQ ID NO: 313522 - DNA, 25 bp, Homo sapien
ccatctgggtgatgcgtacatacat

SEQ ID NO: 313523 - DNA, 25 bp, Homo sapien
acgggacactcaagaagccgcctag

SEQ ID NO: 313524 - DNA, 25 bp, Homo sapien
gaacttactgcatacccactgtacc

SEQ ID NO: 313525 - DNA, 25 bp, Homo sapien
gggaaaacaggacgggctgactaca

SEQ ID NO: 313526 - DNA, 25 bp, Homo sapien
catgatgtgctttgctctcaaggag

SEQ ID NO: 313527 - DNA, 25 bp, Homo sapien
taggagttggccaaatgtagaaagg

SEQ ID NO: 313528 - DNA, 25 bp, Homo sapien
gctgccaccatatacccatggatat

SEQ ID NO: 313529 - DNA, 25 bp, Homo sapien
agtaaagacaatcactatggaaggg

SEQ ID NO: 313530 - DNA, 25 bp, Homo sapien
gagatggtgcctatgtttactctaa

SEQ ID NO: 313531 - DNA, 25 bp, Homo sapien
ttgttcccaactagcatctgatgcc

SEQ ID NO: 313532 - DNA, 25 bp, Homo sapien
ttatatgctgtgtaccccaaaaata

SEQ ID NO: 313533 - DNA, 25 bp, Homo sapien
cagcttttgttcgtctgtgaatgcc

SEQ ID NO: 313534 - DNA, 25 bp, Homo sapien
taaactagtaatcctttcagacaca

SEQ ID NO: 313535 - DNA, 25 bp, Homo sapien
tcatcctgcaggattaccttgagca

SEQ ID NO: 313536 - DNA, 25 bp, Homo sapien
cattatccagttgtagtcagaaaag

SEQ ID NO: 313537 - DNA, 25 bp, Homo sapien
taatatacactctatcctggaaaat

SEQ ID NO: 313538 - DNA, 25 bp, Homo sapien
ttgctgtgtcccataagttctgtta

SEQ ID NO: 313539 - DNA, 25 bp, Homo sapien
tgcacccagctgacctctaagtatt

SEQ ID NO: 313540 - DNA, 25 bp, Homo sapien
tattcaatgtcccttgggattccat

SEQ ID NO: 313541 - DNA, 25 bp, Homo sapien
cgatgtgttcccgtttatgtctcct

SEQ ID NO: 313542 - DNA, 25 bp, Homo sapien
cattgggatattgacatgacttgca

SEQ ID NO: 313543 - DNA, 25 bp, Homo sapien
tgctctgagcagtactgacatctta

SEQ ID NO: 313544 - DNA, 25 bp, Homo sapien
tctattgaaaagactgcgctttctc

SEQ ID NO: 313545 - DNA, 25 bp, Homo sapien
ctagatatctatcccttatcaaata

SEQ ID NO: 313546 - DNA, 25 bp, Homo sapien
tagtttccttagcaccatctattga

SEQ ID NO: 313547 - DNA, 25 bp, Homo sapien
tatatgacgttaagtaagggttcag

SEQ ID NO: 313548 - DNA, 25 bp, Homo sapien
ttcactaagtgtaaggtcctcaggg

SEQ ID NO: 313549 - DNA, 25 bp, Homo sapien
caacgttgtgtgtctatcaccacca

SEQ ID NO: 313550 - DNA, 25 bp, Homo sapien
gctgacacggtatgactggcttatt

SEQ ID NO: 313551 - DNA, 25 bp, Homo sapien
ccgcaactcgtcttgtaaactgaaa

SEQ ID NO: 313552 - DNA, 25 bp, Homo sapien
ctggtagcacttgctccaatggcat

SEQ ID NO: 313553 - DNA, 25 bp, Homo sapien
tgtctgggcatctggtagcacttgc

SEQ ID NO: 313554 - DNA, 25 bp, Homo sapien
gtgtctgggcatctggtagcacttg

SEQ ID NO: 313555 - DNA, 25 bp, Homo sapien
ttgctccaatggcattagttaccat

SEQ ID NO: 313556 - DNA, 25 bp, Homo sapien
attaaagtacaagtctaatttatgg

SEQ ID NO: 313557 - DNA, 25 bp, Homo sapien
taaagtacaagtctaatttatggtg

SEQ ID NO: 313558 - DNA, 25 bp, Homo sapien
ctgctatgatgatcttttgttctca

SEQ ID NO: 313559 - DNA, 25 bp, Homo sapien
caccttcatctgctatgatgatctt

SEQ ID NO: 313560 - DNA, 25 bp, Homo sapien
actcgaatgtcaagagatattttca

SEQ ID NO: 313561 - DNA, 25 bp, Homo sapien
tgcaaggggtcacaagtttttcaga

SEQ ID NO: 313562 - DNA, 25 bp, Homo sapien
gaataaactcgaatgtcaagagata

SEQ ID NO: 313563 - DNA, 25 bp, Homo sapien
gtttttcagaataaactcgaatgtc

SEQ ID NO: 313564 - DNA, 25 bp, Homo sapien
agggggccaggcaagatggaggtcc

SEQ ID NO: 313565 - DNA, 25 bp, Homo sapien
aagaagagctcccgctcgcagggtg

SEQ ID NO: 313566 - DNA, 25 bp, Homo sapien
aaaagaagagctcccgctcgcaggg

SEQ ID NO: 313567 - DNA, 25 bp, Homo sapien
tccaaaaagaagagctcccgctcgc

SEQ ID NO: 313568 - DNA, 25 bp, Homo sapien
caaaaagaagagctcccgctcgcag

SEQ ID NO: 313569 - DNA, 25 bp, Homo sapien
tcctggagtttcatgggacttgtgc

SEQ ID NO: 313570 - DNA, 25 bp, Homo sapien
gggcttcctggagtttcatgggact

SEQ ID NO: 313571 - DNA, 25 bp, Homo sapien
tggagtttcatgggacttgtgctac

SEQ ID NO: 313572 - DNA, 25 bp, Homo sapien
gcttcctggagtttcatgggacttg

SEQ ID NO: 313573 - DNA, 25 bp, Homo sapien
cattgaccttggccctgttctctaa

SEQ ID NO: 313574 - DNA, 25 bp, Homo sapien
gaccttggccctgttctctaagaac

SEQ ID NO: 313575 - DNA, 25 bp, Homo sapien
gccctgttctctaagaactttctta

SEQ ID NO: 313576 - DNA, 25 bp, Homo sapien
tggccctgttctctaagaactttct

SEQ ID NO: 313577 - DNA, 25 bp, Homo sapien
cagttaatattcacattgccctctt

SEQ ID NO: 313578 - DNA, 25 bp, Homo sapien
ccaggatgtcactgtcgatacacaa

SEQ ID NO: 313579 - DNA, 25 bp, Homo sapien
tgtcactgtcgatacacaaactcat

SEQ ID NO: 313580 - DNA, 25 bp, Homo sapien
ggatgtcactgtcgatacacaaact

SEQ ID NO: 313581 - DNA, 25 bp, Homo sapien
cactgtcgatacacaaactcatttt

SEQ ID NO: 313582 - DNA, 25 bp, Homo sapien
gaaggaatgtgacaacgtactttcc

SEQ ID NO: 313583 - DNA, 25 bp, Homo sapien
gaatgtgacaacgtactttcctgtt

SEQ ID NO: 313584 - DNA, 25 bp, Homo sapien
aggaatgtgacaacgtactttcctg

SEQ ID NO: 313585 - DNA, 25 bp, Homo sapien
aatgtgacaacgtactttcctgttt

SEQ ID NO: 313586 - DNA, 25 bp, Homo sapien
taaggtttcggatggcatatatcac

SEQ ID NO: 313587 - DNA, 25 bp, Homo sapien
tggttttggctgttgtcttcggtaa

SEQ ID NO: 313588 - DNA, 25 bp, Homo sapien
tgtcttcggtaaggtttcggatggc

SEQ ID NO: 313589 - DNA, 25 bp, Homo sapien
atggcatatatcacccactgggtca

SEQ ID NO: 313590 - DNA, 25 bp, Homo sapien
taagtagggatgcatctgccagccc

SEQ ID NO: 313591 - DNA, 25 bp, Homo sapien
aagtagggatgcatctgccagcccc

SEQ ID NO: 313592 - DNA, 25 bp, Homo sapien
agtagggatgcatctgccagcccct

SEQ ID NO: 313593 - DNA, 25 bp, Homo sapien
ttaagtagggatgcatctgccagcc

SEQ ID NO: 313594 - DNA, 25 bp, Homo sapien
tctctagtagatttcaggatcagct

SEQ ID NO: 313595 - DNA, 25 bp, Homo sapien
caggatcagcttttcgcctttcttt

SEQ ID NO: 313596 - DNA, 25 bp, Homo sapien
tgtctctagtagatttcaggatcag

SEQ ID NO: 313597 - DNA, 25 bp, Homo sapien
tggcttaggggtgtctctagtagat

SEQ ID NO: 313598 - DNA, 25 bp, Homo sapien
caaagggaaggacagttccctcgag

SEQ ID NO: 313599 - DNA, 25 bp, Homo sapien
catgcaatattattcaaggagttct

SEQ ID NO: 313600 - DNA, 25 bp, Homo sapien
caaaattgcagatgtagcaaatctg

SEQ ID NO: 313601 - DNA, 25 bp, Homo sapien
caaatctgttcacaagattcatcag

SEQ ID NO: 313602 - DNA, 25 bp, Homo sapien
cccagaactttggtcagtggtgaca

SEQ ID NO: 313603 - DNA, 25 bp, Homo sapien
catacggtagaagatgaaaaatcca

SEQ ID NO: 313604 - DNA, 25 bp, Homo sapien
ccacacagttacattaatgcaaaga

SEQ ID NO: 313605 - DNA, 25 bp, Homo sapien
ctttaaatgcacgttctatccaggg

SEQ ID NO: 313606 - DNA, 25 bp, Homo sapien
tagcttatacacgttaaactctact

SEQ ID NO: 313607 - DNA, 25 bp, Homo sapien
tgagaaactacttcaaccgcctgcc

SEQ ID NO: 313608 - DNA, 25 bp, Homo sapien
cctgggatgtctacttctgggatga

SEQ ID NO: 313609 - DNA, 25 bp, Homo sapien
aacatgaagagttaagtgcccacat

SEQ ID NO: 313610 - DNA, 25 bp, Homo sapien
gctgacttgccatctgaagggacaa

SEQ ID NO: 313611 - DNA, 25 bp, Homo sapien
ttaatctacggcactgcaccagagc

SEQ ID NO: 313612 - DNA, 25 bp, Homo sapien
tacggcactgcaccagagcagaaca

SEQ ID NO: 313613 - DNA, 25 bp, Homo sapien
cttcccccatgacagaggcatgaag

SEQ ID NO: 313614 - DNA, 25 bp, Homo sapien
gaacataagctattccttcccccat

SEQ ID NO: 313615 - DNA, 25 bp, Homo sapien
tgagtggcacctttatgagactggt

SEQ ID NO: 313616 - DNA, 25 bp, Homo sapien
tagatgtcaaataaactcctgctcc

SEQ ID NO: 313617 - DNA, 25 bp, Homo sapien
ggaaggttcaacacgaattgtgcaa

SEQ ID NO: 313618 - DNA, 25 bp, Homo sapien
tgaagacatggctaaaactgagtgg

SEQ ID NO: 313619 - DNA, 25 bp, Homo sapien
agcactttatttgggagcaatcagt

SEQ ID NO: 313620 - DNA, 25 bp, Homo sapien
gcactttatttgggagcaatcagta

SEQ ID NO: 313621 - DNA, 25 bp, Homo sapien
caaagcttagaagcactttatttgg

SEQ ID NO: 313622 - DNA, 25 bp, Homo sapien
ttagaagcactttatttgggagcaa

SEQ ID NO: 313623 - DNA, 25 bp, Homo sapien
tacacagagtacattagacagcaca

SEQ ID NO: 313624 - DNA, 25 bp, Homo sapien
tagctcataccgacaagtttgtgcg

SEQ ID NO: 313625 - DNA, 25 bp, Homo sapien
caggcttctatttagaggacagagc

SEQ ID NO: 313626 - DNA, 25 bp, Homo sapien
gtgcacacatccattgagacaggaa

SEQ ID NO: 313627 - DNA, 25 bp, Homo sapien
tcaaaggcagccacaatgcagtcat

SEQ ID NO: 313628 - DNA, 25 bp, Homo sapien
ggttctcaggagctccgagtcctcc

SEQ ID NO: 313629 - DNA, 25 bp, Homo sapien
tcaagaattaatccatccgagggaa

SEQ ID NO: 313630 - DNA, 25 bp, Homo sapien
gcatgttttcactatgcaagcccca

SEQ ID NO: 313631 - DNA, 25 bp, Homo sapien
tggacaagccaatatggctgaaacg

SEQ ID NO: 313632 - DNA, 25 bp, Homo sapien
gcacttatgtgtagaacttactgat

SEQ ID NO: 313633 - DNA, 25 bp, Homo sapien
tggacagcaccgagagggtgttttt

SEQ ID NO: 313634 - DNA, 25 bp, Homo sapien
tgaaacgatcagaaccttggacagc

SEQ ID NO: 313635 - DNA, 25 bp, Homo sapien
gaccgccaagtgctttgcggctgct

SEQ ID NO: 313636 - DNA, 25 bp, Homo sapien
agaagagaccgccaagtgctttgcg

SEQ ID NO: 313637 - DNA, 25 bp, Homo sapien
tcagcctcgagccagaagagaccgc

SEQ ID NO: 313638 - DNA, 25 bp, Homo sapien
tcgagccagaagagaccgccaagtg

SEQ ID NO: 313639 - DNA, 25 bp, Homo sapien
tggcatgggcgaatctcacaaaggg

SEQ ID NO: 313640 - DNA, 25 bp, Homo sapien
gatgtgcgcgtaccttctcatgcgg

SEQ ID NO: 313641 - DNA, 25 bp, Homo sapien
gaaaccaccggatggaatcctgacc

SEQ ID NO: 313642 - DNA, 25 bp, Homo sapien
tgggcaccctatggcctggtcaagt

SEQ ID NO: 313643 - DNA, 25 bp, Homo sapien
gtccccaggtagatgggctcccaga

SEQ ID NO: 313644 - DNA, 25 bp, Homo sapien
gggtccccaggtagatgggctccca

SEQ ID NO: 313645 - DNA, 25 bp, Homo sapien
cccaaggaccttcctggggagcagg

SEQ ID NO: 313646 - DNA, 25 bp, Homo sapien
ttcccaaggaccttcctggggagca

SEQ ID NO: 313647 - DNA, 25 bp, Homo sapien
acaggcaggccggtcctcccgcgct

SEQ ID NO: 313648 - DNA, 25 bp, Homo sapien
tgtggcctcgcgtccccgggccacg

SEQ ID NO: 313649 - DNA, 25 bp, Homo sapien
gggccccctttgccgggcacaggca

SEQ ID NO: 313650 - DNA, 25 bp, Homo sapien
ccgggctgtggcctcgcgtccccgg

SEQ ID NO: 313651 - DNA, 25 bp, Homo sapien
ccctcccgcgctgcaggacttgatc

SEQ ID NO: 313652 - DNA, 25 bp, Homo sapien
tcccgcgctgcaggacttgatcggg

SEQ ID NO: 313653 - DNA, 25 bp, Homo sapien
agggccctcgcagtccgccgctttg

SEQ ID NO: 313654 - DNA, 25 bp, Homo sapien
gtccgccgctttgtcgcccgtctgg

SEQ ID NO: 313655 - DNA, 25 bp, Homo sapien
ccgggggggcgcagagatccaaggg

SEQ ID NO: 313656 - DNA, 25 bp, Homo sapien
ggggcgcagagatccaaggggctcg

SEQ ID NO: 313657 - DNA, 25 bp, Homo sapien
gagacacgcagggctgtggagtggt

SEQ ID NO: 313658 - DNA, 25 bp, Homo sapien
ttgagaaagagcagagacacgcagg

SEQ ID NO: 313659 - DNA, 25 bp, Homo sapien
tgtgcgctgagcaagctgagagtct

SEQ ID NO: 313660 - DNA, 25 bp, Homo sapien
tcagggacaagtgtaaagtttgcgt

SEQ ID NO: 313661 - DNA, 25 bp, Homo sapien
tctgacggaataaacgtgagactgg

SEQ ID NO: 313662 - DNA, 25 bp, Homo sapien
tgacttaggttcagaaaggatgatg

SEQ ID NO: 313663 - DNA, 25 bp, Homo sapien
cagacgaaaagcctggtgttcccca

SEQ ID NO: 313664 - DNA, 25 bp, Homo sapien
tttgttcatgcagacgaaaagcctg

SEQ ID NO: 313665 - DNA, 25 bp, Homo sapien
caagccagacgcaacctcctggtgg

SEQ ID NO: 313666 - DNA, 25 bp, Homo sapien
catctctgcgatgccaaggctgaga

SEQ ID NO: 313667 - DNA, 25 bp, Homo sapien
tgtatgtctcataatctctgattgg

SEQ ID NO: 313668 - DNA, 25 bp, Homo sapien
acatctgtgttaatcatgggtcact

SEQ ID NO: 313669 - DNA, 25 bp, Homo sapien
cacgcccagcgataactattttaat

SEQ ID NO: 313670 - DNA, 25 bp, Homo sapien
ctctgattggatatttgacatttgg

SEQ ID NO: 313671 - DNA, 25 bp, Homo sapien
acaaagcacctcagacggtggcggc

SEQ ID NO: 313672 - DNA, 25 bp, Homo sapien
gggcgagacacaaagcacctcagac

SEQ ID NO: 313673 - DNA, 25 bp, Homo sapien
ccgagctggcacgtccctcgcgggc

SEQ ID NO: 313674 - DNA, 25 bp, Homo sapien
ctggccggggcgagacacaaagcac

SEQ ID NO: 313675 - DNA, 25 bp, Homo sapien
ctggctggggctgcttgtctatggg

SEQ ID NO: 313676 - DNA, 25 bp, Homo sapien
caggttcttgtgctctgggggaaac

SEQ ID NO: 313677 - DNA, 25 bp, Homo sapien
gctgcttgtctatggggcccaggtt

SEQ ID NO: 313678 - DNA, 25 bp, Homo sapien
ctgggggaaacgcaccctcgagcat

SEQ ID NO: 313679 - DNA, 25 bp, Homo sapien
gccactcctgagaaataggctcttc

SEQ ID NO: 313680 - DNA, 25 bp, Homo sapien
tcctgagaaataggctcttcctgcc

SEQ ID NO: 313681 - DNA, 25 bp, Homo sapien
ttggccatgacaagccactcctgag

SEQ ID NO: 313682 - DNA, 25 bp, Homo sapien
tgacaagccactcctgagaaatagg

SEQ ID NO: 313683 - DNA, 25 bp, Homo sapien
gctgccagagtcgtttcccaaatcc

SEQ ID NO: 313684 - DNA, 25 bp, Homo sapien
aaatagtggcctccctaactgcagc

SEQ ID NO: 313685 - DNA, 25 bp, Homo sapien
tttcccaaatccacacaggtcctat

SEQ ID NO: 313686 - DNA, 25 bp, Homo sapien
ctgggccgctgccagagtcgtttcc

SEQ ID NO: 313687 - DNA, 25 bp, Homo sapien
ttccggaagccccagcgagggtgag

SEQ ID NO: 313688 - DNA, 25 bp, Homo sapien
ggcctcggcgcgacctgttccggaa

SEQ ID NO: 313689 - DNA, 25 bp, Homo sapien
gggcggtgcggacgtagcgccgcag

SEQ ID NO: 313690 - DNA, 25 bp, Homo sapien
cgcggtcgcagtgccgtagccaaag

SEQ ID NO: 313691 - DNA, 25 bp, Homo sapien
tttgacaatgtatgcaaccgtgaca

SEQ ID NO: 313692 - DNA, 25 bp, Homo sapien
agcaatctgaatccaaccaccgtag

SEQ ID NO: 313693 - DNA, 25 bp, Homo sapien
tatgaactcttgctcgggatcctgc

SEQ ID NO: 313694 - DNA, 25 bp, Homo sapien
acaaaatgttccctagagccccttg

SEQ ID NO: 313695 - DNA, 25 bp, Homo sapien
acttgccaggcggttgcttttcgtg

SEQ ID NO: 313696 - DNA, 25 bp, Homo sapien
tgcttttcgtgggaaccgggatgtc

SEQ ID NO: 313697 - DNA, 25 bp, Homo sapien
cgtgggaaccgggatgtcctcacca

SEQ ID NO: 313698 - DNA, 25 bp, Homo sapien
ctccagacttgccaggcggttgctt

SEQ ID NO: 313699 - DNA, 25 bp, Homo sapien
tagaaacactagtgaggccccacag

SEQ ID NO: 313700 - DNA, 25 bp, Homo sapien
tggaatagttctgagctggccccac

SEQ ID NO: 313701 - DNA, 25 bp, Homo sapien
cctagcaggagatgtggcatgaacc

SEQ ID NO: 313702 - DNA, 25 bp, Homo sapien
cacgtgggtgctgaatgctgcctca

SEQ ID NO: 313703 - DNA, 25 bp, Homo sapien
acagcgcagggtcaagttcacgtcc

SEQ ID NO: 313704 - DNA, 25 bp, Homo sapien
aactttctgcacagtcgcggagctg

SEQ ID NO: 313705 - DNA, 25 bp, Homo sapien
taggtaaacaagcaagttccacgcc

SEQ ID NO: 313706 - DNA, 25 bp, Homo sapien
tttcagtcgcggctccgaggttggc

SEQ ID NO: 313707 - DNA, 25 bp, Homo sapien
caggtcaaaatgtgccatgccagtg

SEQ ID NO: 313708 - DNA, 25 bp, Homo sapien
ttccgggcagctcaccattgctcag

SEQ ID NO: 313709 - DNA, 25 bp, Homo sapien
tcttcctcctgttcgtattccgggc

SEQ ID NO: 313710 - DNA, 25 bp, Homo sapien
ttgctcaggtcaaaatgtgccatgc

SEQ ID NO: 313711 - DNA, 25 bp, Homo sapien
catatttaaattgggcagcagcgta

SEQ ID NO: 313712 - DNA, 25 bp, Homo sapien
tgaataattgcatcgcctcggcctg

SEQ ID NO: 313713 - DNA, 25 bp, Homo sapien
gccgcccggccctcatgaataattg

SEQ ID NO: 313714 - DNA, 25 bp, Homo sapien
tcacacacatcagaacggaggcgat

SEQ ID NO: 313715 - DNA, 25 bp, Homo sapien
gctcctggcctcgggtcctgctggt

SEQ ID NO: 313716 - DNA, 25 bp, Homo sapien
tcctggcctcgggtcctgctggtgc

SEQ ID NO: 313717 - DNA, 25 bp, Homo sapien
cctggctcctggcctcgggtcctgc

SEQ ID NO: 313718 - DNA, 25 bp, Homo sapien
tggctcctggcctcgggtcctgctg

SEQ ID NO: 313719 - DNA, 25 bp, Homo sapien
caagtcagtgggagctaagaccctc

SEQ ID NO: 313720 - DNA, 25 bp, Homo sapien
gcaaacaggcgtgctgctctgggta

SEQ ID NO: 313721 - DNA, 25 bp, Homo sapien
cagtgtggttgaaggccccaagtca

SEQ ID NO: 313722 - DNA, 25 bp, Homo sapien
tgtttaacacccaagagcaggccag

SEQ ID NO: 313723 - DNA, 25 bp, Homo sapien
ctcgcgttgttttgtgtgagctcgt

SEQ ID NO: 313724 - DNA, 25 bp, Homo sapien
ttgcatttgtggctcgcgttgtttt

SEQ ID NO: 313725 - DNA, 25 bp, Homo sapien
ttgtggctcgcgttgttttgtgtga

SEQ ID NO: 313726 - DNA, 25 bp, Homo sapien
ttttgtgtgagctcgtgggtttggg

SEQ ID NO: 313727 - DNA, 25 bp, Homo sapien
gactgggccagaacatgactaattt

SEQ ID NO: 313728 - DNA, 25 bp, Homo sapien
gaaatgcacagtccttgaatggcga

SEQ ID NO: 313729 - DNA, 25 bp, Homo sapien
gaaatctttaagtgaggagcctcta

SEQ ID NO: 313730 - DNA, 25 bp, Homo sapien
gaatggcgaacactcgcaaatgctg

SEQ ID NO: 313731 - DNA, 25 bp, Homo sapien
aatcgcggcaaaacggcgaattcca

SEQ ID NO: 313732 - DNA, 25 bp, Homo sapien
taagttaacgccaaatcgcggcaaa

SEQ ID NO: 313733 - DNA, 25 bp, Homo sapien
tccccatgggtcaataagttaacgc

SEQ ID NO: 313734 - DNA, 25 bp, Homo sapien
aaacggcgaattccatctctgaggc

SEQ ID NO: 313735 - DNA, 25 bp, Homo sapien
tgtctggcacttggaattttcaagc

SEQ ID NO: 313736 - DNA, 25 bp, Homo sapien
ggcacttggaattttcaagctgcaa

SEQ ID NO: 313737 - DNA, 25 bp, Homo sapien
tccaagaaaaatgtctggcacttgg

SEQ ID NO: 313738 - DNA, 25 bp, Homo sapien
tcaagctgcaagtagatgtacacat

SEQ ID NO: 313739 - DNA, 25 bp, Homo sapien
cagtcaatgattttaagagagggcc

SEQ ID NO: 313740 - DNA, 25 bp, Homo sapien
tactctagcttgcaaatccagtggc

SEQ ID NO: 313741 - DNA, 25 bp, Homo sapien
caaaacaaaacgatgtgagccgagc

SEQ ID NO: 313742 - DNA, 25 bp, Homo sapien
tagcacagaccggttcagtccgaga

SEQ ID NO: 313743 - DNA, 25 bp, Homo sapien
tcatcgtcgtgtattgccagaaaag

SEQ ID NO: 313744 - DNA, 25 bp, Homo sapien
gaatggtatctgtacgggtccctta

SEQ ID NO: 313745 - DNA, 25 bp, Homo sapien
gcagggactcttttccacacgatga

SEQ ID NO: 313746 - DNA, 25 bp, Homo sapien
tattagagttagtaccagcagccag

SEQ ID NO: 313747 - DNA, 25 bp, Homo sapien
tcacaaaagcccacggagttatctg

SEQ ID NO: 313748 - DNA, 25 bp, Homo sapien
ggccaaggcgacaaggaggaccaat

SEQ ID NO: 313749 - DNA, 25 bp, Homo sapien
cgacaaggaggaccaatcacaaaag

SEQ ID NO: 313750 - DNA, 25 bp, Homo sapien
gcccacggagttatctgaaaataga

SEQ ID NO: 313751 - DNA, 25 bp, Homo sapien
ctgtgctggccgtgtatctgggcta

SEQ ID NO: 313752 - DNA, 25 bp, Homo sapien
cctgaacacccagaccctgagccgg

SEQ ID NO: 313753 - DNA, 25 bp, Homo sapien
tgtatctgggctaccccaaccgggc

SEQ ID NO: 313754 - DNA, 25 bp, Homo sapien
tggccgtgtatctgggctaccccaa

SEQ ID NO: 313755 - DNA, 25 bp, Homo sapien
gatttctgcctaccaagccacttgg

SEQ ID NO: 313756 - DNA, 25 bp, Homo sapien
tcgggccctgcgagataatgggttt

SEQ ID NO: 313757 - DNA, 25 bp, Homo sapien
gaaactttgcacgtctaagaagcgg

SEQ ID NO: 313758 - DNA, 25 bp, Homo sapien
caatccgtgctgcagtgttcctggg

SEQ ID NO: 313759 - DNA, 25 bp, Homo sapien
cagaaagccccaactgaaaatcagg

SEQ ID NO: 313760 - DNA, 25 bp, Homo sapien
aggatccaagaagaagacgggcctt

SEQ ID NO: 313761 - DNA, 25 bp, Homo sapien
gtctcaccaccggagggttgtcacc

SEQ ID NO: 313762 - DNA, 25 bp, Homo sapien
caggatctacggacttctccagtaa

SEQ ID NO: 313763 - DNA, 25 bp, Homo sapien
aataagtgagaatcaggtagagggc

SEQ ID NO: 313764 - DNA, 25 bp, Homo sapien
gagaatcaggtagagggccttgcct

SEQ ID NO: 313765 - DNA, 25 bp, Homo sapien
caaaactgaaataagtgagaatcag

SEQ ID NO: 313766 - DNA, 25 bp, Homo sapien
ccttgcctggcggtgccaggaactg

SEQ ID NO: 313767 - DNA, 25 bp, Homo sapien
tcagcgggctaggtaaattcctcta

SEQ ID NO: 313768 - DNA, 25 bp, Homo sapien
gtgacttcacacaacacaggtgact

SEQ ID NO: 313769 - DNA, 25 bp, Homo sapien
tttattgtacaggtcttcagcgggc

SEQ ID NO: 313770 - DNA, 25 bp, Homo sapien
taaggtcagatttttcataggcacc

SEQ ID NO: 313771 - DNA, 25 bp, Homo sapien
tctaattaaagcaaggacggcgagt

SEQ ID NO: 313772 - DNA, 25 bp, Homo sapien
gcattatgaggacttaggaaacaga

SEQ ID NO: 313773 - DNA, 25 bp, Homo sapien
gacggcgagtgagtgaaaaattaca

SEQ ID NO: 313774 - DNA, 25 bp, Homo sapien
ttcagtggctcctggataagatgcc

SEQ ID NO: 313775 - DNA, 25 bp, Homo sapien
gaagttcaaggccacagctttgctc

SEQ ID NO: 313776 - DNA, 25 bp, Homo sapien
cctgagtggttcccaaaccgcagag

SEQ ID NO: 313777 - DNA, 25 bp, Homo sapien
ttgctctctcggagcccgatggcga

SEQ ID NO: 313778 - DNA, 25 bp, Homo sapien
ttcccggtggcaacaacttcctgct

SEQ ID NO: 313779 - DNA, 25 bp, Homo sapien
gaagctcagggtgcaaagactccag

SEQ ID NO: 313780 - DNA, 25 bp, Homo sapien
ggagctcagatgtgccagggtcacc

SEQ ID NO: 313781 - DNA, 25 bp, Homo sapien
caataagtgacaacagcagtagcca

SEQ ID NO: 313782 - DNA, 25 bp, Homo sapien
ccgacaacgtgcctggaatggtgct

SEQ ID NO: 313783 - DNA, 25 bp, Homo sapien
caacactaaccggtgaccctgcggt

SEQ ID NO: 313784 - DNA, 25 bp, Homo sapien
tgcggtaacatctctactcggaaac

SEQ ID NO: 313785 - DNA, 25 bp, Homo sapien
tttaagaaccccaaatcagcaggta

SEQ ID NO: 313786 - DNA, 25 bp, Homo sapien
gccagaagcatcagggacgattcct

SEQ ID NO: 313787 - DNA, 25 bp, Homo sapien
tgaggctgggcaaccatcgcactgt

SEQ ID NO: 313788 - DNA, 25 bp, Homo sapien
tggccgccgaggagataatggcctc

SEQ ID NO: 313789 - DNA, 25 bp, Homo sapien
aggtccccacaggtaacacccatgt

SEQ ID NO: 313790 - DNA, 25 bp, Homo sapien
cagaactgcctcgaccagaagtggc

SEQ ID NO: 313791 - DNA, 25 bp, Homo sapien
tgcataaggactcgaggtaaagggt

SEQ ID NO: 313792 - DNA, 25 bp, Homo sapien
ggaattccattccagcagcggcttg

SEQ ID NO: 313793 - DNA, 25 bp, Homo sapien
caaagcaggtaggattccgatgcca

SEQ ID NO: 313794 - DNA, 25 bp, Homo sapien
tcgctccagggatagaggccacatt

SEQ ID NO: 313795 - DNA, 25 bp, Homo sapien
ggctcgtcttcacgacagaaggaaa

SEQ ID NO: 313796 - DNA, 25 bp, Homo sapien
ttagagggaggacacgtaacaggca

SEQ ID NO: 313797 - DNA, 25 bp, Homo sapien
gatggagggctctgaaatagaattc

SEQ ID NO: 313798 - DNA, 25 bp, Homo sapien
aagcctgtagctttggatcttgaaa

SEQ ID NO: 313799 - DNA, 25 bp, Homo sapien
tagatccctaaactgtggacatggt

SEQ ID NO: 313800 - DNA, 25 bp, Homo sapien
cctgcctgccgatgagtttgctggg

SEQ ID NO: 313801 - DNA, 25 bp, Homo sapien
tcctggcgccgccaaaaattaagac

SEQ ID NO: 313802 - DNA, 25 bp, Homo sapien
catggtagcattaaagatgccggac

SEQ ID NO: 313803 - DNA, 25 bp, Homo sapien
tcatctacgaacaaaagcagccgcc

SEQ ID NO: 313804 - DNA, 25 bp, Homo sapien
gtatcgactgctggctcatctacga

SEQ ID NO: 313805 - DNA, 25 bp, Homo sapien
gagtcctcgtgtgagcttagctccg

SEQ ID NO: 313806 - DNA, 25 bp, Homo sapien
tctcagtgccgtttagaactttccg

SEQ ID NO: 313807 - DNA, 25 bp, Homo sapien
cagccgtaatgacagaccagcccat

SEQ ID NO: 313808 - DNA, 25 bp, Homo sapien
atgctgtgtgttccaacaagtaccc

SEQ ID NO: 313809 - DNA, 25 bp, Homo sapien
tgaccccagttcttcgaaattgtcg

SEQ ID NO: 313810 - DNA, 25 bp, Homo sapien
gaaattgtcgactccacaattgaaa

SEQ ID NO: 313811 - DNA, 25 bp, Homo sapien
tctcaagctgaaggcgccgtctcca

SEQ ID NO: 313812 - DNA, 25 bp, Homo sapien
cacacggactttgaagggcgtccgc

SEQ ID NO: 313813 - DNA, 25 bp, Homo sapien
cagtgtctgctcgtctggacctcga

SEQ ID NO: 313814 - DNA, 25 bp, Homo sapien
tccaaatgcggccacacggactttg

SEQ ID NO: 313815 - DNA, 25 bp, Homo sapien
ccaacagtgtgtgagggcctcctgg

SEQ ID NO: 313816 - DNA, 25 bp, Homo sapien
cagcagcatatgagggcttcctgga

SEQ ID NO: 313817 - DNA, 25 bp, Homo sapien
tgaggtggccggagagaaggcccag

SEQ ID NO: 313818 - DNA, 25 bp, Homo sapien
gaccagatgggccaaggacccagct

SEQ ID NO: 313819 - DNA, 25 bp, Homo sapien
tagcacccctgtgcaccccaatctc

SEQ ID NO: 313820 - DNA, 25 bp, Homo sapien
gttgctctcatcagccacgccagat

SEQ ID NO: 313821 - DNA, 25 bp, Homo sapien
aaagttgctctcatcagccacgcca

SEQ ID NO: 313822 - DNA, 25 bp, Homo sapien
tctcatcagccacgccagatgtggg

SEQ ID NO: 313823 - DNA, 25 bp, Homo sapien
gaggtcaaaacacacggcaaagctg

SEQ ID NO: 313824 - DNA, 25 bp, Homo sapien
tgcaggaggtcacatccccgagttt

SEQ ID NO: 313825 - DNA, 25 bp, Homo sapien
cacggcagctggtgtgttcagagca

SEQ ID NO: 313826 - DNA, 25 bp, Homo sapien
ccaaaatggctccagtagggacgtc

SEQ ID NO: 313827 - DNA, 25 bp, Homo sapien
ctcctgatgtctcgggtggtgctct

SEQ ID NO: 313828 - DNA, 25 bp, Homo sapien
ggaggatcttccctagcccacgatg

SEQ ID NO: 313829 - DNA, 25 bp, Homo sapien
ccacgatgggctcctgatgtctcgg

SEQ ID NO: 313830 - DNA, 25 bp, Homo sapien
aggatcttccctagcccacgatggg

SEQ ID NO: 313831 - DNA, 25 bp, Homo sapien
cacagtcccttgagcttcaggcatc

SEQ ID NO: 313832 - DNA, 25 bp, Homo sapien
gacacagtcccttgagcttcaggca

SEQ ID NO: 313833 - DNA, 25 bp, Homo sapien
ggacacagtcccttgagcttcaggc

SEQ ID NO: 313834 - DNA, 25 bp, Homo sapien
acacagtcccttgagcttcaggcat

SEQ ID NO: 313835 - DNA, 25 bp, Homo sapien
cctcctgagcgtgaggcccatgaga

SEQ ID NO: 313836 - DNA, 25 bp, Homo sapien
gagtcagctaaaaaacaaacgctgc

SEQ ID NO: 313837 - DNA, 25 bp, Homo sapien
gctcctgttattgccaccaagtgtg

SEQ ID NO: 313838 - DNA, 25 bp, Homo sapien
ctgccttgctggtggtcctaacgga

SEQ ID NO: 313839 - DNA, 25 bp, Homo sapien
atggggaccgccgatccagagccac

SEQ ID NO: 313840 - DNA, 25 bp, Homo sapien
gggaccgccgatccagagccacggg

SEQ ID NO: 313841 - DNA, 25 bp, Homo sapien
gcctctgatggggaccgccgatcca

SEQ ID NO: 313842 - DNA, 25 bp, Homo sapien
ctctgatggggaccgccgatccaga

SEQ ID NO: 313843 - DNA, 25 bp, Homo sapien
tgtcagagactttggctggccccaa

SEQ ID NO: 313844 - DNA, 25 bp, Homo sapien
tctaagccagaagttgggccggcca

SEQ ID NO: 313845 - DNA, 25 bp, Homo sapien
aaggcttctccgtctgctcagcagg

SEQ ID NO: 313846 - DNA, 25 bp, Homo sapien
cacttgggatcctctggctactgga

SEQ ID NO: 313847 - DNA, 25 bp, Homo sapien
gggcggtgaccagatgcaactacat

SEQ ID NO: 313848 - DNA, 25 bp, Homo sapien
caaaggcgtgtacttatctgaaaac

SEQ ID NO: 313849 - DNA, 25 bp, Homo sapien
cagggcctgggcaaacttcgtttcg

SEQ ID NO: 313850 - DNA, 25 bp, Homo sapien
tgacggaatgttctgtccaggaacc

SEQ ID NO: 313851 - DNA, 25 bp, Homo sapien
gctctggaagagacgtggccttacc

SEQ ID NO: 313852 - DNA, 25 bp, Homo sapien
agctctggaagagacgtggccttac

SEQ ID NO: 313853 - DNA, 25 bp, Homo sapien
ggctccaggtcagcgccacttcttg

SEQ ID NO: 313854 - DNA, 25 bp, Homo sapien
cactgtgaggaaggccagccccagg

SEQ ID NO: 313855 - DNA, 25 bp, Homo sapien
aggggctccaggtcagcgccacttc

SEQ ID NO: 313856 - DNA, 25 bp, Homo sapien
agctcactgtgaggaaggccagccc

SEQ ID NO: 313857 - DNA, 25 bp, Homo sapien
cgaaggtttggctgtgagaccatca

SEQ ID NO: 313858 - DNA, 25 bp, Homo sapien
atcaccatgccccaagtgcacagtg

SEQ ID NO: 313859 - DNA, 25 bp, Homo sapien
ggtgcaccaccagggtcaaagatca

SEQ ID NO: 313860 - DNA, 25 bp, Homo sapien
cagtgggcagatgaggtgggccaac

SEQ ID NO: 313861 - DNA, 25 bp, Homo sapien
ggcggtgcacacaacagagcccagg

SEQ ID NO: 313862 - DNA, 25 bp, Homo sapien
gacaggcggtgcacacaacagagcc

SEQ ID NO: 313863 - DNA, 25 bp, Homo sapien
tgcagacaggcggtgcacacaacag

SEQ ID NO: 313864 - DNA, 25 bp, Homo sapien
cccagggccagagagtgagtcttca

SEQ ID NO: 313865 - DNA, 25 bp, Homo sapien
tggcatcttgagtcatcctgggcga

SEQ ID NO: 313866 - DNA, 25 bp, Homo sapien
tgggagaagcagatgtgactcagtt

SEQ ID NO: 313867 - DNA, 25 bp, Homo sapien
tctgggctagacttacccaggtggc

SEQ ID NO: 313868 - DNA, 25 bp, Homo sapien
ctgtccccagggagtgctcgaggca

SEQ ID NO: 313869 - DNA, 25 bp, Homo sapien
caggtcgggctctataacgtgtggc

SEQ ID NO: 313870 - DNA, 25 bp, Homo sapien
aaatcccaggtccttagccagcaag

SEQ ID NO: 313871 - DNA, 25 bp, Homo sapien
agttaaacggcatgctagctctcag

SEQ ID NO: 313872 - DNA, 25 bp, Homo sapien
tggtaaggctgagatcacggatccc

SEQ ID NO: 313873 - DNA, 25 bp, Homo sapien
ggcagagccccaaactatacaacct

SEQ ID NO: 313874 - DNA, 25 bp, Homo sapien
gcagagccccaaactatacaaccta

SEQ ID NO: 313875 - DNA, 25 bp, Homo sapien
gattgtatagttatcccatagcagg

SEQ ID NO: 313876 - DNA, 25 bp, Homo sapien
tgtatagttatcccatagcagggca

SEQ ID NO: 313877 - DNA, 25 bp, Homo sapien
tgtgggacccagtgtatgcagagct

SEQ ID NO: 313878 - DNA, 25 bp, Homo sapien
gcaagtggcacctaggcctgtcaga

SEQ ID NO: 313879 - DNA, 25 bp, Homo sapien
gatgggcaacgccaatactcgcagc

SEQ ID NO: 313880 - DNA, 25 bp, Homo sapien
tcagacttctcagtgtaggcggccc

SEQ ID NO: 313881 - DNA, 25 bp, Homo sapien
tgtatagttatcttccgaggggcaa

SEQ ID NO: 313882 - DNA, 25 bp, Homo sapien
cctgaaaccacacaacctactacct

SEQ ID NO: 313883 - DNA, 25 bp, Homo sapien
tgccctgaaaccacacaacctacta

SEQ ID NO: 313884 - DNA, 25 bp, Homo sapien
gaggggcaacatcactgccctgaaa

SEQ ID NO: 313885 - DNA, 25 bp, Homo sapien
tgtcactgaggtagggggcggccct

SEQ ID NO: 313886 - DNA, 25 bp, Homo sapien
ccatggggtcgtgtcactgggctcc

SEQ ID NO: 313887 - DNA, 25 bp, Homo sapien
aacagctttattgaatctagctccc

SEQ ID NO: 313888 - DNA, 25 bp, Homo sapien
tattgaatctagctcccagatgccc

SEQ ID NO: 313889 - DNA, 25 bp, Homo sapien
gttcagcccgcctggctcaaaggca

SEQ ID NO: 313890 - DNA, 25 bp, Homo sapien
tcatgacctggaacagctcgtggcc

SEQ ID NO: 313891 - DNA, 25 bp, Homo sapien
ggtacagcacggagccaactgagga

SEQ ID NO: 313892 - DNA, 25 bp, Homo sapien
ctcaaaggcagcacgagagggcaga

SEQ ID NO: 313893 - DNA, 25 bp, Homo sapien
cccgtgctgatgtgtgacccaagaa

SEQ ID NO: 313894 - DNA, 25 bp, Homo sapien
tacgggtgccctggaaactgtcctg

SEQ ID NO: 313895 - DNA, 25 bp, Homo sapien
ccaggctgggttcgcgctatattca

SEQ ID NO: 313896 - DNA, 25 bp, Homo sapien
cacggtgtcgctgtcgggaaatgca

SEQ ID NO: 313897 - DNA, 25 bp, Homo sapien
gatggccggcggtcccggcacgtgg

SEQ ID NO: 313898 - DNA, 25 bp, Homo sapien
ctggctcgggacgatggccggcggt

SEQ ID NO: 313899 - DNA, 25 bp, Homo sapien
aacagttttgccagatgccgttggg

SEQ ID NO: 313900 - DNA, 25 bp, Homo sapien
gaggctgccaggcatgtcgctggct

SEQ ID NO: 313901 - DNA, 25 bp, Homo sapien
gatgtggctctcaactcagcgctgt

SEQ ID NO: 313902 - DNA, 25 bp, Homo sapien
tcagctcagggctcaaacatggcag

SEQ ID NO: 313903 - DNA, 25 bp, Homo sapien
tatctgagatgtgcgacctggctgg

SEQ ID NO: 313904 - DNA, 25 bp, Homo sapien
ggatgtcaccaatgcagcaccagag

SEQ ID NO: 313905 - DNA, 25 bp, Homo sapien
gccttggttcggctgtgtagaatgg

SEQ ID NO: 313906 - DNA, 25 bp, Homo sapien
ctcagtgccttggttcggctgtgta

SEQ ID NO: 313907 - DNA, 25 bp, Homo sapien
agtgccttggttcggctgtgtagaa

SEQ ID NO: 313908 - DNA, 25 bp, Homo sapien
ccttggttcggctgtgtagaatggg

SEQ ID NO: 313909 - DNA, 25 bp, Homo sapien
caggaagtatcatagtggtccaaag

SEQ ID NO: 313910 - DNA, 25 bp, Homo sapien
tatcatagtggtccaaagggggttc

SEQ ID NO: 313911 - DNA, 25 bp, Homo sapien
aggaatggacaggaagtatcatagt

SEQ ID NO: 313912 - DNA, 25 bp, Homo sapien
catagtggtccaaagggggttcctg

SEQ ID NO: 313913 - DNA, 25 bp, Homo sapien
tcgaagccttccaactcgtgggcag

SEQ ID NO: 313914 - DNA, 25 bp, Homo sapien
ggctcgaagccttccaactcgtggg

SEQ ID NO: 313915 - DNA, 25 bp, Homo sapien
aagccttccaactcgtgggcagtgg

SEQ ID NO: 313916 - DNA, 25 bp, Homo sapien
cttccaactcgtgggcagtggccca

SEQ ID NO: 313917 - DNA, 25 bp, Homo sapien
aaggtcgttggcctcctaagcagtc

SEQ ID NO: 313918 - DNA, 25 bp, Homo sapien
gacttagagtccacggatgtgctcc

SEQ ID NO: 313919 - DNA, 25 bp, Homo sapien
gactccgcggatgatgtgcagcaga

SEQ ID NO: 313920 - DNA, 25 bp, Homo sapien
gacaccgtcagagtcaggctcgtgg

SEQ ID NO: 313921 - DNA, 25 bp, Homo sapien
tcctggaagcgtgcctgcaggtcag

SEQ ID NO: 313922 - DNA, 25 bp, Homo sapien
tgcttccagggtgtcatccgccagg

SEQ ID NO: 313923 - DNA, 25 bp, Homo sapien
caggctggagtctgtttgccagcca

SEQ ID NO: 313924 - DNA, 25 bp, Homo sapien
gccagggcctgcgaagtttgctgct

SEQ ID NO: 313925 - DNA, 25 bp, Homo sapien
tggggcgaacgccgaaggaggcggc

SEQ ID NO: 313926 - DNA, 25 bp, Homo sapien
cgtggggcgaacgccgaaggaggcg

SEQ ID NO: 313927 - DNA, 25 bp, Homo sapien
gtttcctcgcctcggagatccctgg

SEQ ID NO: 313928 - DNA, 25 bp, Homo sapien
ccgaggaaagggcaagtcccgatgt

SEQ ID NO: 313929 - DNA, 25 bp, Homo sapien
gatccctggaggtctcggaaagcac

SEQ ID NO: 313930 - DNA, 25 bp, Homo sapien
cgcaagagtcctcggtgtgtgtcct

SEQ ID NO: 313931 - DNA, 25 bp, Homo sapien
cgcgtctccgtccgacggcagaagc

SEQ ID NO: 313932 - DNA, 25 bp, Homo sapien
gcgcgtctccgtccgacggcagaag

SEQ ID NO: 313933 - DNA, 25 bp, Homo sapien
cacaaactgttgagtccacagagca

SEQ ID NO: 313934 - DNA, 25 bp, Homo sapien
gagcttgtcttgccacaaactgttg

SEQ ID NO: 313935 - DNA, 25 bp, Homo sapien
gcttgtcttgccacaaactgttgag

SEQ ID NO: 313936 - DNA, 25 bp, Homo sapien
caaactgttgagtccacagagcaga

SEQ ID NO: 313937 - DNA, 25 bp, Homo sapien
tcagttcactaaaaccttcacctcc

SEQ ID NO: 313938 - DNA, 25 bp, Homo sapien
caatctcagttcactaaaaccttca

SEQ ID NO: 313939 - DNA, 25 bp, Homo sapien
tctcagttcactaaaaccttcacct

SEQ ID NO: 313940 - DNA, 25 bp, Homo sapien
aatctcagttcactaaaaccttcac

SEQ ID NO: 313941 - DNA, 25 bp, Homo sapien
gttcatggcttagtcccagcactat

SEQ ID NO: 313942 - DNA, 25 bp, Homo sapien
tgagacaggtctgaacaacatagca

SEQ ID NO: 313943 - DNA, 25 bp, Homo sapien
gtgcagtggttcatggcttagtccc

SEQ ID NO: 313944 - DNA, 25 bp, Homo sapien
gagtttgagacaggtctgaacaaca

SEQ ID NO: 313945 - DNA, 25 bp, Homo sapien
tatgcctgcatggtgctcctttcca

SEQ ID NO: 313946 - DNA, 25 bp, Homo sapien
gaagctcagtgcatgcaagcggcag

SEQ ID NO: 313947 - DNA, 25 bp, Homo sapien
tctgagtaacgagcaaatccggtcc

SEQ ID NO: 313948 - DNA, 25 bp, Homo sapien
aacatgggccgctggaacagctaag

SEQ ID NO: 313949 - DNA, 25 bp, Homo sapien
aaaggcaggagccagcggtatgtcc

SEQ ID NO: 313950 - DNA, 25 bp, Homo sapien
taagctgccacttcgagcttcacag

SEQ ID NO: 313951 - DNA, 25 bp, Homo sapien
ggtggtatggagaggaacttcattt

SEQ ID NO: 313952 - DNA, 25 bp, Homo sapien
gcggtatgtcctccttcttaagaca

SEQ ID NO: 313953 - DNA, 25 bp, Homo sapien
aggggtacggtagcatgttgctttc

SEQ ID NO: 313954 - DNA, 25 bp, Homo sapien
tgtataaggggtacggtagcatgtt

SEQ ID NO: 313955 - DNA, 25 bp, Homo sapien
ataaggggtacggtagcatgttgct

SEQ ID NO: 313956 - DNA, 25 bp, Homo sapien
ggtacggtagcatgttgctttctga

SEQ ID NO: 313957 - DNA, 25 bp, Homo sapien
gtaacaactttattgtactggtgga

SEQ ID NO: 313958 - DNA, 25 bp, Homo sapien
ctttattgtactggtggagaaatct

SEQ ID NO: 313959 - DNA, 25 bp, Homo sapien
ttattgtactggtggagaaatctca

SEQ ID NO: 313960 - DNA, 25 bp, Homo sapien
aacaactttattgtactggtggaga

SEQ ID NO: 313961 - DNA, 25 bp, Homo sapien
caggttatcaaattctacaagtagg

SEQ ID NO: 313962 - DNA, 25 bp, Homo sapien
tagtctaagtccttcaactgtgttg

SEQ ID NO: 313963 - DNA, 25 bp, Homo sapien
gaaaagtcgccatcctaagatactg

SEQ ID NO: 313964 - DNA, 25 bp, Homo sapien
catgctgaggtctgattccgattgc

SEQ ID NO: 313965 - DNA, 25 bp, Homo sapien
catacctggcctagttaatgctttt

SEQ ID NO: 313966 - DNA, 25 bp, Homo sapien
gcatacctggcctagttaatgcttt

SEQ ID NO: 313967 - DNA, 25 bp, Homo sapien
agcatacctggcctagttaatgctt

SEQ ID NO: 313968 - DNA, 25 bp, Homo sapien
ctgtaactcttggaggaagaattct

SEQ ID NO: 313969 - DNA, 25 bp, Homo sapien
ttggaggaagaattcttgtctgtca

SEQ ID NO: 313970 - DNA, 25 bp, Homo sapien
ctcttggaggaagaattcttgtctg

SEQ ID NO: 313971 - DNA, 25 bp, Homo sapien
aactcttggaggaagaattcttgtc

SEQ ID NO: 313972 - DNA, 25 bp, Homo sapien
gaggatcagctctcatagacgaggg

SEQ ID NO: 313973 - DNA, 25 bp, Homo sapien
gggcttgctcctcctactgtacctg

SEQ ID NO: 313974 - DNA, 25 bp, Homo sapien
cacttacgtatcttagaacaatgcc

SEQ ID NO: 313975 - DNA, 25 bp, Homo sapien
tgaaggcggctaagtcaccaggcca

SEQ ID NO: 313976 - DNA, 25 bp, Homo sapien
tcacctggaggagaaccctgatcac

SEQ ID NO: 313977 - DNA, 25 bp, Homo sapien
tttctaaggttctcacacacggctg

SEQ ID NO: 313978 - DNA, 25 bp, Homo sapien
caagtacccagattcacaggtaggg

SEQ ID NO: 313979 - DNA, 25 bp, Homo sapien
gctcttctcgagcatggcttccaag

SEQ ID NO: 313980 - DNA, 25 bp, Homo sapien
tctgcctcctaggatcaagcagtcc

SEQ ID NO: 313981 - DNA, 25 bp, Homo sapien
caacctctgcctcctaggatcaagc

SEQ ID NO: 313982 - DNA, 25 bp, Homo sapien
tcagccttccaagtgttaggattac

SEQ ID NO: 313983 - DNA, 25 bp, Homo sapien
tacagtggcacaatttcggctcctt

SEQ ID NO: 313984 - DNA, 25 bp, Homo sapien
gaagcacgtcctcacatgacactga

SEQ ID NO: 313985 - DNA, 25 bp, Homo sapien
tcagtcctgacatagacataatgtt

SEQ ID NO: 313986 - DNA, 25 bp, Homo sapien
aagtgctcaaaggatcacctaatga

SEQ ID NO: 313987 - DNA, 25 bp, Homo sapien
gaagaacactagtaggctattaaac

SEQ ID NO: 313988 - DNA, 25 bp, Homo sapien
caccaggaagacacgatgctcctaa

SEQ ID NO: 313989 - DNA, 25 bp, Homo sapien
ggagtccctctgtatatggcttgca

SEQ ID NO: 313990 - DNA, 25 bp, Homo sapien
gatctatctcattggtacacacctg

SEQ ID NO: 313991 - DNA, 25 bp, Homo sapien
tgcgtgagtatcaggcaccattcct

SEQ ID NO: 313992 - DNA, 25 bp, Homo sapien
ttcatgtcacgatccagcaggaagg

SEQ ID NO: 313993 - DNA, 25 bp, Homo sapien
taccttttacgcatcttgaggcagg

SEQ ID NO: 313994 - DNA, 25 bp, Homo sapien
caggaaatatgtgaggcaggaagca

SEQ ID NO: 313995 - DNA, 25 bp, Homo sapien
gcatccagaaagtcagagcaccaaa

SEQ ID NO: 313996 - DNA, 25 bp, Homo sapien
taaagcctttcagtctgggcctaaa

SEQ ID NO: 313997 - DNA, 25 bp, Homo sapien
atttattgtaccctcggctggccac

SEQ ID NO: 313998 - DNA, 25 bp, Homo sapien
gatccttagtcaaggcaggaagcca

SEQ ID NO: 313999 - DNA, 25 bp, Homo sapien
tattacggaagtttcaggtgctgct

SEQ ID NO: 314000 - DNA, 25 bp, Homo sapien
ggctggccacccgacattaaaagaa

SEQ ID NO: 314001 - DNA, 25 bp, Homo sapien
ctcagctttgaagggatccacagcc

SEQ ID NO: 314002 - DNA, 25 bp, Homo sapien
tgtgcttaacgctggagaccacaga

SEQ ID NO: 314003 - DNA, 25 bp, Homo sapien
tctcagctttgaagggatccacagc

SEQ ID NO: 314004 - DNA, 25 bp, Homo sapien
atctcagctttgaagggatccacag

SEQ ID NO: 314005 - DNA, 25 bp, Homo sapien
gctggttgtgccgccgagctccaag

SEQ ID NO: 314006 - DNA, 25 bp, Homo sapien
tgctggttgtgccgccgagctccaa

SEQ ID NO: 314007 - DNA, 25 bp, Homo sapien
cagagtgggctttccgtgtccacca

SEQ ID NO: 314008 - DNA, 25 bp, Homo sapien
agataacgggctctctagatcgccg

SEQ ID NO: 314009 - DNA, 25 bp, Homo sapien
ttccagaactatcctcgccgatgga

SEQ ID NO: 314010 - DNA, 25 bp, Homo sapien
taaatactggtattccgtaaagcca

SEQ ID NO: 314011 - DNA, 25 bp, Homo sapien
caatagtgaatagtagaaaagcaac

SEQ ID NO: 314012 - DNA, 25 bp, Homo sapien
tactgccagtgggaatataacatag

SEQ ID NO: 314013 - DNA, 25 bp, Homo sapien
tgagagaccatcacacacctactga

SEQ ID NO: 314014 - DNA, 25 bp, Homo sapien
catgtctgataaagtatttgtattc

SEQ ID NO: 314015 - DNA, 25 bp, Homo sapien
tgtccccgcagattctacattcgat

SEQ ID NO: 314016 - DNA, 25 bp, Homo sapien
ccacaggataagtcaccgaggaggg

SEQ ID NO: 314017 - DNA, 25 bp, Homo sapien
tccgtaatgatagcctgaggccttg

SEQ ID NO: 314018 - DNA, 25 bp, Homo sapien
attcgatgttcaatgctccactggg

SEQ ID NO: 314019 - DNA, 25 bp, Homo sapien
caggtcacatctgtttagggcaggc

SEQ ID NO: 314020 - DNA, 25 bp, Homo sapien
taaagggacgctgctacaggagctc

SEQ ID NO: 314021 - DNA, 25 bp, Homo sapien
gcacgtctgtgcaaccctaaaggga

SEQ ID NO: 314022 - DNA, 25 bp, Homo sapien
cataaggcgccagacttgagcacgt

SEQ ID NO: 314023 - DNA, 25 bp, Homo sapien
ttctagacagcagagtgccacagtg

SEQ ID NO: 314024 - DNA, 25 bp, Homo sapien
tccaagttagtgaacacctgcagcg

SEQ ID NO: 314025 - DNA, 25 bp, Homo sapien
tacattgtgccagaaaggcggtggc

SEQ ID NO: 314026 - DNA, 25 bp, Homo sapien
tcagggcagaatgctggtgttccaa

SEQ ID NO: 314027 - DNA, 25 bp, Homo sapien
tgtgacatcccgacagaaaggcact

SEQ ID NO: 314028 - DNA, 25 bp, Homo sapien
catacaccagcttgagtcgaatcgt

SEQ ID NO: 314029 - DNA, 25 bp, Homo sapien
gatcttgcagctgcggtcgcacttg

SEQ ID NO: 314030 - DNA, 25 bp, Homo sapien
gagtcgaatcgttcgccgaaagaag

SEQ ID NO: 314031 - DNA, 25 bp, Homo sapien
gctttctcagatcttggcattcgtc

SEQ ID NO: 314032 - DNA, 25 bp, Homo sapien
cttcaagtaggcctcgtagattctc

SEQ ID NO: 314033 - DNA, 25 bp, Homo sapien
tggattgttactggcctttcctgag

SEQ ID NO: 314034 - DNA, 25 bp, Homo sapien
tctatgtcatgttcacaggtaagaa

SEQ ID NO: 314035 - DNA, 25 bp, Homo sapien
acgacactggttccatgttgccaag

SEQ ID NO: 314036 - DNA, 25 bp, Homo sapien
ttaatcgtcctctacgacactggtt

SEQ ID NO: 314037 - DNA, 25 bp, Homo sapien
gaacccagaacagccgcaaacacct

SEQ ID NO: 314038 - DNA, 25 bp, Homo sapien
cgtcctctacgacactggttccatg

SEQ ID NO: 314039 - DNA, 25 bp, Homo sapien
gagttgttgttaagctacagctcag

SEQ ID NO: 314040 - DNA, 25 bp, Homo sapien
ttaatgctgggtgccatgactcaca

SEQ ID NO: 314041 - DNA, 25 bp, Homo sapien
tgaggtggctccaagcaagaagaaa

SEQ ID NO: 314042 - DNA, 25 bp, Homo sapien
gaactgtttccatcttcgctgtcct

SEQ ID NO: 314043 - DNA, 25 bp, Homo sapien
tctgaaaaggtccagagctacctta

SEQ ID NO: 314044 - DNA, 25 bp, Homo sapien
aacctgtttcaccatgctcatagga

SEQ ID NO: 314045 - DNA, 25 bp, Homo sapien
ggcaatttggctgcctctgaaaagg

SEQ ID NO: 314046 - DNA, 25 bp, Homo sapien
gacaggctttctataacaagtggtc

SEQ ID NO: 314047 - DNA, 25 bp, Homo sapien
tgtttaatcccaacttgcatgccag

SEQ ID NO: 314048 - DNA, 25 bp, Homo sapien
tgaaaaaataacacggcacgcccaa

SEQ ID NO: 314049 - DNA, 25 bp, Homo sapien
cccaacaatttggagcaataggaga

SEQ ID NO: 314050 - DNA, 25 bp, Homo sapien
tgcatgccagtctagctacaatgga

SEQ ID NO: 314051 - DNA, 25 bp, Homo sapien
gcaggcctggctacgtaatttacag

SEQ ID NO: 314052 - DNA, 25 bp, Homo sapien
aaacagcttgcatgcccctgaggct

SEQ ID NO: 314053 - DNA, 25 bp, Homo sapien
gaaaatagactcttaggccaccgtc

SEQ ID NO: 314054 - DNA, 25 bp, Homo sapien
ttcaagaaggcaacagcggagcatg

SEQ ID NO: 314055 - DNA, 25 bp, Homo sapien
cagcagtgaaagatgcggacctccg

SEQ ID NO: 314056 - DNA, 25 bp, Homo sapien
caatgtcacttgatcgttcaggtcc

SEQ ID NO: 314057 - DNA, 25 bp, Homo sapien
gccttggcgaattccgtgagctccg

SEQ ID NO: 314058 - DNA, 25 bp, Homo sapien
ccaagtttgcgaagcctgggatggc

SEQ ID NO: 314059 - DNA, 25 bp, Homo sapien
tgatcctcccacctcagcctctcaa

SEQ ID NO: 314060 - DNA, 25 bp, Homo sapien
aggtacatgccaccatacttgacta

SEQ ID NO: 314061 - DNA, 25 bp, Homo sapien
gcaacctttgtctcctgggcttaag

SEQ ID NO: 314062 - DNA, 25 bp, Homo sapien
accatacttgactaattttttctat

SEQ ID NO: 314063 - DNA, 25 bp, Homo sapien
gagtggctggggctataactattaa

SEQ ID NO: 314064 - DNA, 25 bp, Homo sapien
agtggctggggctataactattaag

SEQ ID NO: 314065 - DNA, 25 bp, Homo sapien
gtggctggggctataactattaagt

SEQ ID NO: 314066 - DNA, 25 bp, Homo sapien
tatcgtccgggtggttgctctgcag

SEQ ID NO: 314067 - DNA, 25 bp, Homo sapien
tgagcacatgtacaataccctcctg

SEQ ID NO: 314068 - DNA, 25 bp, Homo sapien
agctgccggaggtctgccatttttt

SEQ ID NO: 314069 - DNA, 25 bp, Homo sapien
tccgactccgtcttcttgatgatct

SEQ ID NO: 314070 - DNA, 25 bp, Homo sapien
gaagacaggccacgaattttgaggt

SEQ ID NO: 314071 - DNA, 25 bp, Homo sapien
cataacaaaagatacgggagctgcc

SEQ ID NO: 314072 - DNA, 25 bp, Homo sapien
taccacgggtgctagcttatgacag

SEQ ID NO: 314073 - DNA, 25 bp, Homo sapien
tgggctcttctacgcaaacctggaa

SEQ ID NO: 314074 - DNA, 25 bp, Homo sapien
gggtacatcagagcgagcagctgca

SEQ ID NO: 314075 - DNA, 25 bp, Homo sapien
acacaggcttggcattgggctccag

SEQ ID NO: 314076 - DNA, 25 bp, Homo sapien
caacacaggcttggcattgggctcc

SEQ ID NO: 314077 - DNA, 25 bp, Homo sapien
aatggcacagggtacatcagagcga

SEQ ID NO: 314078 - DNA, 25 bp, Homo sapien
taagaaacgtatcagcgcagcagaa

SEQ ID NO: 314079 - DNA, 25 bp, Homo sapien
gggagctaacatcgaacttgccagt

SEQ ID NO: 314080 - DNA, 25 bp, Homo sapien
gaatccaacatgtgggacacccagc

SEQ ID NO: 314081 - DNA, 25 bp, Homo sapien
gaagggtgccttgtctgctctctaa

SEQ ID NO: 314082 - DNA, 25 bp, Homo sapien
ggaagtggcttcctcgtggccagca

SEQ ID NO: 314083 - DNA, 25 bp, Homo sapien
ttggtgcatctgtttccatccgcat

SEQ ID NO: 314084 - DNA, 25 bp, Homo sapien
tgtttccatccgcatctggtagggt

SEQ ID NO: 314085 - DNA, 25 bp, Homo sapien
aggaagtcgcggtttcatcagggct

SEQ ID NO: 314086 - DNA, 25 bp, Homo sapien
acagagaggcccaggtgcaagttca

SEQ ID NO: 314087 - DNA, 25 bp, Homo sapien
aaaccctccatcatgtatgcggctg

SEQ ID NO: 314088 - DNA, 25 bp, Homo sapien
taagtagcagatgtgcgcagagata

SEQ ID NO: 314089 - DNA, 25 bp, Homo sapien
tgggaagtgcttggaaccaaacaca

SEQ ID NO: 314090 - DNA, 25 bp, Homo sapien
aaaggccacactgttgaagaggtac

SEQ ID NO: 314091 - DNA, 25 bp, Homo sapien
ccatggcatccataggtggtgagct

SEQ ID NO: 314092 - DNA, 25 bp, Homo sapien
gctgtcggtcaagccagtcttagct

SEQ ID NO: 314093 - DNA, 25 bp, Homo sapien
tgaagaggtaccagctgttgaaggt

SEQ ID NO: 314094 - DNA, 25 bp, Homo sapien
tggacgagaggttcccgtggacatt

SEQ ID NO: 314095 - DNA, 25 bp, Homo sapien
ttaacaatcatgagccttcaggtgg

SEQ ID NO: 314096 - DNA, 25 bp, Homo sapien
caggccctacatctggaggctggtg

SEQ ID NO: 314097 - DNA, 25 bp, Homo sapien
ttcatgggtgacttctatggacagc

SEQ ID NO: 314098 - DNA, 25 bp, Homo sapien
cacaactgggtggtccgtatagcct

SEQ ID NO: 314099 - DNA, 25 bp, Homo sapien
tgaatgacagcagccatcatcgctg

SEQ ID NO: 314100 - DNA, 25 bp, Homo sapien
tgccattagggaggtgcacacagcc

SEQ ID NO: 314101 - DNA, 25 bp, Homo sapien
cagcacagtcgaggcaggttaatca

SEQ ID NO: 314102 - DNA, 25 bp, Homo sapien
aagcaaatggtcagttgagggcccc

SEQ ID NO: 314103 - DNA, 25 bp, Homo sapien
taatacggagtctaaggcctcgctg

SEQ ID NO: 314104 - DNA, 25 bp, Homo sapien
gaaatcggtggcctctaatacggag

SEQ ID NO: 314105 - DNA, 25 bp, Homo sapien
taacagttccctgaagagcagacag

SEQ ID NO: 314106 - DNA, 25 bp, Homo sapien
aatgccgttgctctaagtacagtgg

SEQ ID NO: 314107 - DNA, 25 bp, Homo sapien
ggaggtcatcgaaatccagctgctt

SEQ ID NO: 314108 - DNA, 25 bp, Homo sapien
catcattgtatctgagggtagccac

SEQ ID NO: 314109 - DNA, 25 bp, Homo sapien
caacagcatgtgaaaggctgccggc

SEQ ID NO: 314110 - DNA, 25 bp, Homo sapien
ccaacagcgaggttgatgggtcctt

SEQ ID NO: 314111 - DNA, 25 bp, Homo sapien
tagagatcacacctgatgtagcgga

SEQ ID NO: 314112 - DNA, 25 bp, Homo sapien
ttaatctcacagtgggacccaacag

SEQ ID NO: 314113 - DNA, 25 bp, Homo sapien
tccttgaagaagacgacaggtgggt

SEQ ID NO: 314114 - DNA, 25 bp, Homo sapien
tgcggacagcccgttacagggactc

SEQ ID NO: 314115 - DNA, 25 bp, Homo sapien
cacagatcccagaaactacggtggg

SEQ ID NO: 314116 - DNA, 25 bp, Homo sapien
ccccgagcaggccaatctgaaatgg

SEQ ID NO: 314117 - DNA, 25 bp, Homo sapien
tcggacgccgtctatgtctggatcg

SEQ ID NO: 314118 - DNA, 25 bp, Homo sapien
cccttctcaaggatttgcagcggaa

SEQ ID NO: 314119 - DNA, 25 bp, Homo sapien
tctgcaacgcgacgggtcccttggg

SEQ ID NO: 314120 - DNA, 25 bp, Homo sapien
cagcggtcactttcaagtttatgtc

SEQ ID NO: 314121 - DNA, 25 bp, Homo sapien
tatgtcgttgcggtcggcagctacc

SEQ ID NO: 314122 - DNA, 25 bp, Homo sapien
ggtcggagtccaccgcgagctctgg

SEQ ID NO: 314123 - DNA, 25 bp, Homo sapien
cgggtcggagtccaccgcgagctct

SEQ ID NO: 314124 - DNA, 25 bp, Homo sapien
ccgggtcggagtccaccgcgagctc

SEQ ID NO: 314125 - DNA, 25 bp, Homo sapien
gggtcggagtccaccgcgagctctg

SEQ ID NO: 314126 - DNA, 25 bp, Homo sapien
cagtcgcgcagaggcgaggctgcgg

SEQ ID NO: 314127 - DNA, 25 bp, Homo sapien
gcagtcgcgcagaggcgaggctgcg

SEQ ID NO: 314128 - DNA, 25 bp, Homo sapien
tggcagtcgcgcagaggcgaggctg

SEQ ID NO: 314129 - DNA, 25 bp, Homo sapien
ctggcagtcgcgcagaggcgaggct

SEQ ID NO: 314130 - DNA, 25 bp, Homo sapien
cttgcaggcttcgttgcttgtggtg

SEQ ID NO: 314131 - DNA, 25 bp, Homo sapien
gggtcagcgtggcatcgaacagctt

SEQ ID NO: 314132 - DNA, 25 bp, Homo sapien
cgtggcatcgaacagcttgcaggct

SEQ ID NO: 314133 - DNA, 25 bp, Homo sapien
tggagagcgggagcctcgcatcctt

SEQ ID NO: 314134 - DNA, 25 bp, Homo sapien
ccctagacctccacagaaggggccg

SEQ ID NO: 314135 - DNA, 25 bp, Homo sapien
ggagagtgcagaggcccttttagga

SEQ ID NO: 314136 - DNA, 25 bp, Homo sapien
gggggggcagagatatgtccccacc

SEQ ID NO: 314137 - DNA, 25 bp, Homo sapien
gggggggggcagagatatgtcccca

SEQ ID NO: 314138 - DNA, 25 bp, Homo sapien
gaagggagagtgcagaggccctttt

SEQ ID NO: 314139 - DNA, 25 bp, Homo sapien
gcatcctcaaaaaacatccccactg

SEQ ID NO: 314140 - DNA, 25 bp, Homo sapien
ctaagcagccgagccctgcatcaga

SEQ ID NO: 314141 - DNA, 25 bp, Homo sapien
ggacaggatcccacgtcctaagcag

SEQ ID NO: 314142 - DNA, 25 bp, Homo sapien
tcagcaggccacaatgggaggcccg

SEQ ID NO: 314143 - DNA, 25 bp, Homo sapien
cagcctaggtgaaggcagtatactc

SEQ ID NO: 314144 - DNA, 25 bp, Homo sapien
ggcacagcctaggtgaaggcagtat

SEQ ID NO: 314145 - DNA, 25 bp, Homo sapien
cacagcctaggtgaaggcagtatac

SEQ ID NO: 314146 - DNA, 25 bp, Homo sapien
gcctaggtgaaggcagtatactcac

SEQ ID NO: 314147 - DNA, 25 bp, Homo sapien
cccacgccaaggtcagcttaggttt

SEQ ID NO: 314148 - DNA, 25 bp, Homo sapien
tatcagtgcagttaggcccaggttc

SEQ ID NO: 314149 - DNA, 25 bp, Homo sapien
tacctgagtcctcctgttatgtgga

SEQ ID NO: 314150 - DNA, 25 bp, Homo sapien
cccacttgtcaaggaagctagttgg

SEQ ID NO: 314151 - DNA, 25 bp, Homo sapien
ctgaaatgggaaaagcaaaacaagt

SEQ ID NO: 314152 - DNA, 25 bp, Homo sapien
tgggaaaagcaaaacaagtcctcac

SEQ ID NO: 314153 - DNA, 25 bp, Homo sapien
atgggaaaagcaaaacaagtcctca

SEQ ID NO: 314154 - DNA, 25 bp, Homo sapien
tgaaatgggaaaagcaaaacaagtc

SEQ ID NO: 314155 - DNA, 25 bp, Homo sapien
ctcgatgccaccgagactcttgtca

SEQ ID NO: 314156 - DNA, 25 bp, Homo sapien
ccgagactcttgtcattggtccatt

SEQ ID NO: 314157 - DNA, 25 bp, Homo sapien
gatgccaccgagactcttgtcattg

SEQ ID NO: 314158 - DNA, 25 bp, Homo sapien
ctttgacaggcagccctcgatgcca

SEQ ID NO: 314159 - DNA, 25 bp, Homo sapien
acaaggccagtagccatggcgtggc

SEQ ID NO: 314160 - DNA, 25 bp, Homo sapien
gcttcacggagcttccagtgccaat

SEQ ID NO: 314161 - DNA, 25 bp, Homo sapien
tactgcagacacgtgcagctgctcc

SEQ ID NO: 314162 - DNA, 25 bp, Homo sapien
cattggcaaatgtctctactgcaga

SEQ ID NO: 314163 - DNA, 25 bp, Homo sapien
ccaacatgtctgtcgggtggtcctg

SEQ ID NO: 314164 - DNA, 25 bp, Homo sapien
cccatagttcacaggctttcggaaa

SEQ ID NO: 314165 - DNA, 25 bp, Homo sapien
catctgttcctgatagcccaggtaa

SEQ ID NO: 314166 - DNA, 25 bp, Homo sapien
tcatgggaaaatttcagggccaaca

SEQ ID NO: 314167 - DNA, 25 bp, Homo sapien
aaaagagtagatgcctttcacatag

SEQ ID NO: 314168 - DNA, 25 bp, Homo sapien
ggtttccatcaagccaaaagagtag

SEQ ID NO: 314169 - DNA, 25 bp, Homo sapien
ttggcgagtttttctgcctggtcgt

SEQ ID NO: 314170 - DNA, 25 bp, Homo sapien
gcctggtcgtagaagttggtttcca

SEQ ID NO: 314171 - DNA, 25 bp, Homo sapien
gagcccatgtgttaccactcctggc

SEQ ID NO: 314172 - DNA, 25 bp, Homo sapien
gcccatgtgttaccactcctggccc

SEQ ID NO: 314173 - DNA, 25 bp, Homo sapien
agagcccatgtgttaccactcctgg

SEQ ID NO: 314174 - DNA, 25 bp, Homo sapien
acacagagcccatgtgttaccactc

SEQ ID NO: 314175 - DNA, 25 bp, Homo sapien
gataaagcagatcagtcaggctgcc

SEQ ID NO: 314176 - DNA, 25 bp, Homo sapien
cagataaagcagatcagtcaggctg

SEQ ID NO: 314177 - DNA, 25 bp, Homo sapien
taaagcagatcagtcaggctgccgg

SEQ ID NO: 314178 - DNA, 25 bp, Homo sapien
aaagcagatcagtcaggctgccggg

SEQ ID NO: 314179 - DNA, 25 bp, Homo sapien
aggtctctgagtgctgcatgaattc

SEQ ID NO: 314180 - DNA, 25 bp, Homo sapien
tgaattccaacccatccttgatctc

SEQ ID NO: 314181 - DNA, 25 bp, Homo sapien
tgctttcatctcgtggatgtgagcg

SEQ ID NO: 314182 - DNA, 25 bp, Homo sapien
tgagcgacggtgtgcaccgaccatg

SEQ ID NO: 314183 - DNA, 25 bp, Homo sapien
gctcatgtgctttgaagaggctgct

SEQ ID NO: 314184 - DNA, 25 bp, Homo sapien
tcagtagccaactcagaggttgccc

SEQ ID NO: 314185 - DNA, 25 bp, Homo sapien
agagggtccccgtcatggtgcagct

SEQ ID NO: 314186 - DNA, 25 bp, Homo sapien
gtttaatgcttcctctgcgtttcca

SEQ ID NO: 314187 - DNA, 25 bp, Homo sapien
aaagcccagtgccaatagttatgac

SEQ ID NO: 314188 - DNA, 25 bp, Homo sapien
aatagttatgacaagccaacatatc

SEQ ID NO: 314189 - DNA, 25 bp, Homo sapien
tctcaatcagatataaagcccagtg

SEQ ID NO: 314190 - DNA, 25 bp, Homo sapien
cttctcaatcagatataaagcccag

SEQ ID NO: 314191 - DNA, 25 bp, Homo sapien
tggaagaataaagttctccttatta

SEQ ID NO: 314192 - DNA, 25 bp, Homo sapien
ctggaagaataaagttctccttatt

SEQ ID NO: 314193 - DNA, 25 bp, Homo sapien
gtgggtatcgtagatggtcagcgcg

SEQ ID NO: 314194 - DNA, 25 bp, Homo sapien
cgtagatggtcagcgcggcctcata

SEQ ID NO: 314195 - DNA, 25 bp, Homo sapien
tggtcagcgcggcctcatattcgcc

SEQ ID NO: 314196 - DNA, 25 bp, Homo sapien
gtatcgtagatggtcagcgcggcct

SEQ ID NO: 314197 - DNA, 25 bp, Homo sapien
tatcagcaccctcgagttgagcagg

SEQ ID NO: 314198 - DNA, 25 bp, Homo sapien
caattgcagaggtgaggcccttaga

SEQ ID NO: 314199 - DNA, 25 bp, Homo sapien
tgctgcaacaaaccaaacacggtgt

SEQ ID NO: 314200 - DNA, 25 bp, Homo sapien
cataggcagggttacaacattgctc

SEQ ID NO: 314201 - DNA, 25 bp, Homo sapien
tacagcttcctgaccgtgtagaaag

SEQ ID NO: 314202 - DNA, 25 bp, Homo sapien
acagcttcctgaccgtgtagaaagg

SEQ ID NO: 314203 - DNA, 25 bp, Homo sapien
cttcctgaccgtgtagaaaggatta

SEQ ID NO: 314204 - DNA, 25 bp, Homo sapien
agcttcctgaccgtgtagaaaggat

SEQ ID NO: 314205 - DNA, 25 bp, Homo sapien
tgcaggcggtagagcatggagcagc

SEQ ID NO: 314206 - DNA, 25 bp, Homo sapien
gcattgcatcgttggcctgcaggct

SEQ ID NO: 314207 - DNA, 25 bp, Homo sapien
acgtccagcattgcatcgttggcct

SEQ ID NO: 314208 - DNA, 25 bp, Homo sapien
cttccatctgcaggcggtagagcat

SEQ ID NO: 314209 - DNA, 25 bp, Homo sapien
catagacgcgtaagtaggaagcaca

SEQ ID NO: 314210 - DNA, 25 bp, Homo sapien
tctaattatagaggccatagacgcg

SEQ ID NO: 314211 - DNA, 25 bp, Homo sapien
tgcttaggcctctatcaggactgtc

SEQ ID NO: 314212 - DNA, 25 bp, Homo sapien
cttggaggccttgatgaccctgtcc

SEQ ID NO: 314213 - DNA, 25 bp, Homo sapien
aggaagtgtgcgtcattgaacagca

SEQ ID NO: 314214 - DNA, 25 bp, Homo sapien
tcattgaacagcaggatgtggtctc

SEQ ID NO: 314215 - DNA, 25 bp, Homo sapien
ccatcaggaagtgtgcgtcattgaa

SEQ ID NO: 314216 - DNA, 25 bp, Homo sapien
tgtgcgtcattgaacagcaggatgt

SEQ ID NO: 314217 - DNA, 25 bp, Homo sapien
caccccgagaaggcccctctgcata

SEQ ID NO: 314218 - DNA, 25 bp, Homo sapien
accccgagaaggcccctctgcatac

SEQ ID NO: 314219 - DNA, 25 bp, Homo sapien
cccaccccgagaaggcccctctgca

SEQ ID NO: 314220 - DNA, 25 bp, Homo sapien
ccaccccgagaaggcccctctgcat

SEQ ID NO: 314221 - DNA, 25 bp, Homo sapien
ggggtctgcaccaggggatgcacat

SEQ ID NO: 314222 - DNA, 25 bp, Homo sapien
cttgggggtctgcaccaggggatgc

SEQ ID NO: 314223 - DNA, 25 bp, Homo sapien
gggggtctgcaccaggggatgcaca

SEQ ID NO: 314224 - DNA, 25 bp, Homo sapien
tgggggtctgcaccaggggatgcac

SEQ ID NO: 314225 - DNA, 25 bp, Homo sapien
gtgccaatctaacagaaccgtcagg

SEQ ID NO: 314226 - DNA, 25 bp, Homo sapien
caggacagggtactgagctcagagc

SEQ ID NO: 314227 - DNA, 25 bp, Homo sapien
catcacagaacatccgggaagggca

SEQ ID NO: 314228 - DNA, 25 bp, Homo sapien
gagccatttcttcctcagcgaggtg

SEQ ID NO: 314229 - DNA, 25 bp, Homo sapien
atccggtagcggatgggcaggagca

SEQ ID NO: 314230 - DNA, 25 bp, Homo sapien
acgcggtcagggttcccgtcctcag

SEQ ID NO: 314231 - DNA, 25 bp, Homo sapien
gcattgctcccaccgagctggacga

SEQ ID NO: 314232 - DNA, 25 bp, Homo sapien
cagctccaggacgcggtcagggttc

SEQ ID NO: 314233 - DNA, 25 bp, Homo sapien
caatcgggcatgtgagtctcctgta

SEQ ID NO: 314234 - DNA, 25 bp, Homo sapien
tggcaccaacaccatgggagaaact

SEQ ID NO: 314235 - DNA, 25 bp, Homo sapien
gacacgttcacacccacattgttgg

SEQ ID NO: 314236 - DNA, 25 bp, Homo sapien
tcaacgacgaacttacacggcggga

SEQ ID NO: 314237 - DNA, 25 bp, Homo sapien
cgggctacgttcttatggacgctgg

SEQ ID NO: 314238 - DNA, 25 bp, Homo sapien
tgcagtttaaggccgcgtgaatcag

SEQ ID NO: 314239 - DNA, 25 bp, Homo sapien
tcagcagctggttgaagacgtctct

SEQ ID NO: 314240 - DNA, 25 bp, Homo sapien
cgttcttatggacgctggaggtgca

SEQ ID NO: 314241 - DNA, 25 bp, Homo sapien
gatagaatctccctcggtcactcag

SEQ ID NO: 314242 - DNA, 25 bp, Homo sapien
gaaagggtgttccaagcgtgcaaag

SEQ ID NO: 314243 - DNA, 25 bp, Homo sapien
caaggagaggtgtcaaactcgccgc

SEQ ID NO: 314244 - DNA, 25 bp, Homo sapien
taactgagcattaggtgtcggccag

SEQ ID NO: 314245 - DNA, 25 bp, Homo sapien
gtaatccctgcacgatggaaggatg

SEQ ID NO: 314246 - DNA, 25 bp, Homo sapien
ccctgcacgatggaaggatgaggca

SEQ ID NO: 314247 - DNA, 25 bp, Homo sapien
tccctgcacgatggaaggatgaggc

SEQ ID NO: 314248 - DNA, 25 bp, Homo sapien
aatccctgcacgatggaaggatgag

SEQ ID NO: 314249 - DNA, 25 bp, Homo sapien
tgcatgaggtggacggtagctgcct

SEQ ID NO: 314250 - DNA, 25 bp, Homo sapien
tgaggtggacggtagctgccttgcg

SEQ ID NO: 314251 - DNA, 25 bp, Homo sapien
ggatgagccgctcggtcaggggcga

SEQ ID NO: 314252 - DNA, 25 bp, Homo sapien
acggtagctgccttgcggatgagcc

SEQ ID NO: 314253 - DNA, 25 bp, Homo sapien
ggaaagagcagcactcacactggct

SEQ ID NO: 314254 - DNA, 25 bp, Homo sapien
aatgaaaaggtccatcccaagggca

SEQ ID NO: 314255 - DNA, 25 bp, Homo sapien
agtcagcggcacattcagcaggcgt

SEQ ID NO: 314256 - DNA, 25 bp, Homo sapien
ggcagtagacacattcccctgggaa

SEQ ID NO: 314257 - DNA, 25 bp, Homo sapien
ctcacccagctcagcacagggcacc

SEQ ID NO: 314258 - DNA, 25 bp, Homo sapien
agtctccccagcctcacccagctca

SEQ ID NO: 314259 - DNA, 25 bp, Homo sapien
ccagctcagcacagggcaccaggca

SEQ ID NO: 314260 - DNA, 25 bp, Homo sapien
cccagcctcacccagctcagcacag

SEQ ID NO: 314261 - DNA, 25 bp, Homo sapien
gcgcctccggcacggatttaaacgc

SEQ ID NO: 314262 - DNA, 25 bp, Homo sapien
ccaaagcggcagacgatgcaggacg

SEQ ID NO: 314263 - DNA, 25 bp, Homo sapien
tccggcacggatttaaacgcggcgc

SEQ ID NO: 314264 - DNA, 25 bp, Homo sapien
ggcagacgatgcaggacgcgcctcc

SEQ ID NO: 314265 - DNA, 25 bp, Homo sapien
cgggcaagcctcgcccccgaccctg

SEQ ID NO: 314266 - DNA, 25 bp, Homo sapien
gggcaagcctcgcccccgaccctga

SEQ ID NO: 314267 - DNA, 25 bp, Homo sapien
gcaagcctcgcccccgaccctgacc

SEQ ID NO: 314268 - DNA, 25 bp, Homo sapien
ggcaagcctcgcccccgaccctgac

SEQ ID NO: 314269 - DNA, 25 bp, Homo sapien
tggaacggggccagaaagtgagtac

SEQ ID NO: 314270 - DNA, 25 bp, Homo sapien
agaaagtgagtacgtgtcagggccc

SEQ ID NO: 314271 - DNA, 25 bp, Homo sapien
gccagaaagtgagtacgtgtcaggg

SEQ ID NO: 314272 - DNA, 25 bp, Homo sapien
gggccagaaagtgagtacgtgtcag

SEQ ID NO: 314273 - DNA, 25 bp, Homo sapien
ggctgaaggctcatcgcggccgccg

SEQ ID NO: 314274 - DNA, 25 bp, Homo sapien
gctgaaggctcatcgcggccgccgc

SEQ ID NO: 314275 - DNA, 25 bp, Homo sapien
ctgaacaacaacagcgccgcagcag

SEQ ID NO: 314276 - DNA, 25 bp, Homo sapien
atcctgaacaacaacagcgccgcag

SEQ ID NO: 314277 - DNA, 25 bp, Homo sapien
aacatcctgaacaacaacagcgccg

SEQ ID NO: 314278 - DNA, 25 bp, Homo sapien
tgaacatcctgaacaacaacagcgc

SEQ ID NO: 314279 - DNA, 25 bp, Homo sapien
ttttcatcggccaaaagaagaatgt

SEQ ID NO: 314280 - DNA, 25 bp, Homo sapien
gaagacaatgaaagatcgaagtcaa

SEQ ID NO: 314281 - DNA, 25 bp, Homo sapien
aagatcgaagtcaaatttttcatcg

SEQ ID NO: 314282 - DNA, 25 bp, Homo sapien
gaagtcaaatttttcatcggccaaa

SEQ ID NO: 314283 - DNA, 25 bp, Homo sapien
ccggctgctgctctcaatgtgtaaa

SEQ ID NO: 314284 - DNA, 25 bp, Homo sapien
tgtatgaatctttccacgccctggc

SEQ ID NO: 314285 - DNA, 25 bp, Homo sapien
tctttatgtccaaagggtccgaaga

SEQ ID NO: 314286 - DNA, 25 bp, Homo sapien
caagctggcagcaatacatctttct

SEQ ID NO: 314287 - DNA, 25 bp, Homo sapien
gggctgtctgacaggtagtatgtct

SEQ ID NO: 314288 - DNA, 25 bp, Homo sapien
tatgtctcccttttaagagacgtgg

SEQ ID NO: 314289 - DNA, 25 bp, Homo sapien
tgtctgacaggtagtatgtctccct

SEQ ID NO: 314290 - DNA, 25 bp, Homo sapien
ggtagtatgtctcccttttaagaga

SEQ ID NO: 314291 - DNA, 25 bp, Homo sapien
tgagcagtgcatgattccctgggca

SEQ ID NO: 314292 - DNA, 25 bp, Homo sapien
ttcttcctctaacagaggccgctcg

SEQ ID NO: 314293 - DNA, 25 bp, Homo sapien
cctctgagtcgctgcctgacttgca

SEQ ID NO: 314294 - DNA, 25 bp, Homo sapien
gcagcagcaatttggtcccgggctt

SEQ ID NO: 314295 - DNA, 25 bp, Homo sapien
gagtaggcagactgcacccaaaggc

SEQ ID NO: 314296 - DNA, 25 bp, Homo sapien
taaactgaggcacggtcaaggaggc

SEQ ID NO: 314297 - DNA, 25 bp, Homo sapien
tgaggctttccgcatgtggcttctg

SEQ ID NO: 314298 - DNA, 25 bp, Homo sapien
tccctactgtgtggtatatccagca

SEQ ID NO: 314299 - DNA, 25 bp, Homo sapien
agctgtgcggacagtgccctgtcca

SEQ ID NO: 314300 - DNA, 25 bp, Homo sapien
ccaggaccaggagatcaaaagagat

SEQ ID NO: 314301 - DNA, 25 bp, Homo sapien
gagatacttcgatgggtctggagca

SEQ ID NO: 314302 - DNA, 25 bp, Homo sapien
gccatgagccactctagaagtgact

SEQ ID NO: 314303 - DNA, 25 bp, Homo sapien
tccttctcagctgggatttttgtcc

SEQ ID NO: 314304 - DNA, 25 bp, Homo sapien
cctggaaggactagctggaatctct

SEQ ID NO: 314305 - DNA, 25 bp, Homo sapien
cttgtttggaacagggatcgcccgc

SEQ ID NO: 314306 - DNA, 25 bp, Homo sapien
tcagggagaacatcccggtgggatt

SEQ ID NO: 314307 - DNA, 25 bp, Homo sapien
tttaacagggtcttcttcagcccca

SEQ ID NO: 314308 - DNA, 25 bp, Homo sapien
ggatgtgcacgcactggatgccccg

SEQ ID NO: 314309 - DNA, 25 bp, Homo sapien
ggccccgaggaggacttccttgcga

SEQ ID NO: 314310 - DNA, 25 bp, Homo sapien
tccttgcgagattgctggtagagcc

SEQ ID NO: 314311 - DNA, 25 bp, Homo sapien
aatgcacctcgaagaggatttcgct

SEQ ID NO: 314312 - DNA, 25 bp, Homo sapien
ccgagacgccacatggccaatgcac

SEQ ID NO: 314313 - DNA, 25 bp, Homo sapien
tgaacgaccccgagacgccacatgg

SEQ ID NO: 314314 - DNA, 25 bp, Homo sapien
atggccaatgcacctcgaagaggat

SEQ ID NO: 314315 - DNA, 25 bp, Homo sapien
gattctgaccaagcgcaactggagt

SEQ ID NO: 314316 - DNA, 25 bp, Homo sapien
gaatttagacaggaatctcgccgtc

SEQ ID NO: 314317 - DNA, 25 bp, Homo sapien
ggccgggagctatttgcaggaatac

SEQ ID NO: 314318 - DNA, 25 bp, Homo sapien
agctcagaaacatcgacccgcttgg

SEQ ID NO: 314319 - DNA, 25 bp, Homo sapien
aacgtaagacattcagggagcctcc

SEQ ID NO: 314320 - DNA, 25 bp, Homo sapien
tcctgtgagacaacgtcaagaggcc

SEQ ID NO: 314321 - DNA, 25 bp, Homo sapien
gaagcttaagaaaccctcagcggga

SEQ ID NO: 314322 - DNA, 25 bp, Homo sapien
ttacaagcagcctacgagcattggg

SEQ ID NO: 314323 - DNA, 25 bp, Homo sapien
gacattcaaaagtgtacacctgaca

SEQ ID NO: 314324 - DNA, 25 bp, Homo sapien
aaagcctcggaaggatgatctgcac

SEQ ID NO: 314325 - DNA, 25 bp, Homo sapien
gaggcggaaaggctatgctagaccc

SEQ ID NO: 314326 - DNA, 25 bp, Homo sapien
aattagtcagtcgaaacagacccca

SEQ ID NO: 314327 - DNA, 25 bp, Homo sapien
gggacacacgggtgtgcagcagagg

SEQ ID NO: 314328 - DNA, 25 bp, Homo sapien
gccttgcgggacacacgggtgtgca

SEQ ID NO: 314329 - DNA, 25 bp, Homo sapien
gccgagaaggtgtcatcttgcagca

SEQ ID NO: 314330 - DNA, 25 bp, Homo sapien
gggccgagaaggtgtcatcttgcag

SEQ ID NO: 314331 - DNA, 25 bp, Homo sapien
gaagcgtcgtactcaatgggacaca

SEQ ID NO: 314332 - DNA, 25 bp, Homo sapien
tgagaagctcatcacggcagcacag

SEQ ID NO: 314333 - DNA, 25 bp, Homo sapien
taagctaccagaacgtcaggcagac

SEQ ID NO: 314334 - DNA, 25 bp, Homo sapien
gacaacttgcagtgagggtccttga

SEQ ID NO: 314335 - DNA, 25 bp, Homo sapien
ccaggttccgccagaacctcaggga

SEQ ID NO: 314336 - DNA, 25 bp, Homo sapien
ggacactcgagtccctctctgcact

SEQ ID NO: 314337 - DNA, 25 bp, Homo sapien
agtggcagcacccaggttccgccag

SEQ ID NO: 314338 - DNA, 25 bp, Homo sapien
cagccctcctgtcacatgagtggca

SEQ ID NO: 314339 - DNA, 25 bp, Homo sapien
ccaggcctccatgttcaccccagca

SEQ ID NO: 314340 - DNA, 25 bp, Homo sapien
cgagcacgaccttcacagagcgaag

SEQ ID NO: 314341 - DNA, 25 bp, Homo sapien
gggtcaccagttaccgagctaaggc

SEQ ID NO: 314342 - DNA, 25 bp, Homo sapien
tgtatatcccatcagggccgagcac

SEQ ID NO: 314343 - DNA, 25 bp, Homo sapien
gaagtcgacttgtcagacggcacct

SEQ ID NO: 314344 - DNA, 25 bp, Homo sapien
ctgccaactgacgtgcacgactgcg

SEQ ID NO: 314345 - DNA, 25 bp, Homo sapien
acgtgcacgactgcggccgctgtgc

SEQ ID NO: 314346 - DNA, 25 bp, Homo sapien
cgctgtgcccgcgaaagctttggtg

SEQ ID NO: 314347 - DNA, 25 bp, Homo sapien
ccgcgaaagctttggtgttgagctg

SEQ ID NO: 314348 - DNA, 25 bp, Homo sapien
ctggcaaacacaacatcagtgtcgt

SEQ ID NO: 314349 - DNA, 25 bp, Homo sapien
gcaaacacaacatcagtgtcgtgag

SEQ ID NO: 314350 - DNA, 25 bp, Homo sapien
ggcaaacacaacatcagtgtcgtga

SEQ ID NO: 314351 - DNA, 25 bp, Homo sapien
tggcaaacacaacatcagtgtcgtg

SEQ ID NO: 314352 - DNA, 25 bp, Homo sapien
ggtgctggcccagatgagcgtctaa

SEQ ID NO: 314353 - DNA, 25 bp, Homo sapien
tgacacacgccatgcgctcagcagg

SEQ ID NO: 314354 - DNA, 25 bp, Homo sapien
gggctcagaggaacgtctccgagct

SEQ ID NO: 314355 - DNA, 25 bp, Homo sapien
tgggcaaggctgacacacgccatgc

SEQ ID NO: 314356 - DNA, 25 bp, Homo sapien
gaatttgagaccaatttattaccac

SEQ ID NO: 314357 - DNA, 25 bp, Homo sapien
ggaatttgagaccaatttattacca

SEQ ID NO: 314358 - DNA, 25 bp, Homo sapien
acacatccaccagcctggaatctgt

SEQ ID NO: 314359 - DNA, 25 bp, Homo sapien
gacacatccaccagcctggaatctg

SEQ ID NO: 314360 - DNA, 25 bp, Homo sapien
acatccaccagcctggaatctgtct

SEQ ID NO: 314361 - DNA, 25 bp, Homo sapien
ggacacatccaccagcctggaatct

SEQ ID NO: 314362 - DNA, 25 bp, Homo sapien
ggcttcctcccgagctacttctgtg

SEQ ID NO: 314363 - DNA, 25 bp, Homo sapien
gaaaagttaagtgcctgaggcacac

SEQ ID NO: 314364 - DNA, 25 bp, Homo sapien
tacttttggagaaagtagaatcgct

SEQ ID NO: 314365 - DNA, 25 bp, Homo sapien
cgagctacttctgtggcagtacttt

SEQ ID NO: 314366 - DNA, 25 bp, Homo sapien
ccttgccttagtcaaatgcagggct

SEQ ID NO: 314367 - DNA, 25 bp, Homo sapien
caggaatctcagctaacagaaccca

SEQ ID NO: 314368 - DNA, 25 bp, Homo sapien
ttgcttggcacggaggcactggccc

SEQ ID NO: 314369 - DNA, 25 bp, Homo sapien
acgggcttcccgagcagcctccagg

SEQ ID NO: 314370 - DNA, 25 bp, Homo sapien
caccaccggtgaaggtttggccaca

SEQ ID NO: 314371 - DNA, 25 bp, Homo sapien
tcatgaggtcgatcagaggcctgct

SEQ ID NO: 314372 - DNA, 25 bp, Homo sapien
cttgcagcatctggagtgaccgcga

SEQ ID NO: 314373 - DNA, 25 bp, Homo sapien
gaggcctgctttcagatcctacagc

SEQ ID NO: 314374 - DNA, 25 bp, Homo sapien
cctggctcgggtgcactgaaaagca

SEQ ID NO: 314375 - DNA, 25 bp, Homo sapien
actctgggccaccacgtctaagaag

SEQ ID NO: 314376 - DNA, 25 bp, Homo sapien
gactggctgcgtgggtcatcacagc

SEQ ID NO: 314377 - DNA, 25 bp, Homo sapien
gtggatccggctagggcctcccttc

SEQ ID NO: 314378 - DNA, 25 bp, Homo sapien
tggatcagaggggagctcaggtcta

SEQ ID NO: 314379 - DNA, 25 bp, Homo sapien
atcagaggggagctcaggtctatga

SEQ ID NO: 314380 - DNA, 25 bp, Homo sapien
ctcagctggatcagaggggagctca

SEQ ID NO: 314381 - DNA, 25 bp, Homo sapien
gttctccttgtcagcctcagggctc

SEQ ID NO: 314382 - DNA, 25 bp, Homo sapien
agaacttgaggagtggggaatccac

SEQ ID NO: 314383 - DNA, 25 bp, Homo sapien
tagaacttgaggagtggggaatcca

SEQ ID NO: 314384 - DNA, 25 bp, Homo sapien
ttagaacttgaggagtggggaatcc

SEQ ID NO: 314385 - DNA, 25 bp, Homo sapien
tgcgaccagcctaaagcttgtttct

SEQ ID NO: 314386 - DNA, 25 bp, Homo sapien
ccactgcgaccagcctaaagcttgt

SEQ ID NO: 314387 - DNA, 25 bp, Homo sapien
actgcgaccagcctaaagcttgttt

SEQ ID NO: 314388 - DNA, 25 bp, Homo sapien
cgaccagcctaaagcttgtttctga

SEQ ID NO: 314389 - DNA, 25 bp, Homo sapien
actgcagcctgcatctccttgagct

SEQ ID NO: 314390 - DNA, 25 bp, Homo sapien
aagacaggttctcacattggtgccc

SEQ ID NO: 314391 - DNA, 25 bp, Homo sapien
gaggccttgggtggtccgtgctggc

SEQ ID NO: 314392 - DNA, 25 bp, Homo sapien
tagagtgactgaggcttcacattcc

SEQ ID NO: 314393 - DNA, 25 bp, Homo sapien
catgaagccgctcaaccaaggtggt

SEQ ID NO: 314394 - DNA, 25 bp, Homo sapien
tccgaaatacagagtccggccgctg

SEQ ID NO: 314395 - DNA, 25 bp, Homo sapien
caaagtagcggcttcctggagctcg

SEQ ID NO: 314396 - DNA, 25 bp, Homo sapien
tttagaatcacgcagtaaccgcagg

SEQ ID NO: 314397 - DNA, 25 bp, Homo sapien
tctggcctgggtaccaaggagagcc

SEQ ID NO: 314398 - DNA, 25 bp, Homo sapien
gaaatgagggccagaccagaggttc

SEQ ID NO: 314399 - DNA, 25 bp, Homo sapien
tgaggcacagcttggttacagatga

SEQ ID NO: 314400 - DNA, 25 bp, Homo sapien
gaaaacagcctgacccatagcagag

SEQ ID NO: 314401 - DNA, 25 bp, Homo sapien
ggaactaccaacaggagagccctgg

SEQ ID NO: 314402 - DNA, 25 bp, Homo sapien
cgaggtccacgaggaatttccaaga

SEQ ID NO: 314403 - DNA, 25 bp, Homo sapien
aagaaaagcaggaactaccaacagg

SEQ ID NO: 314404 - DNA, 25 bp, Homo sapien
tagggtaaagatctcgaggtccacg

SEQ ID NO: 314405 - DNA, 25 bp, Homo sapien
tctgtctggaaaggcgcaacaactg

SEQ ID NO: 314406 - DNA, 25 bp, Homo sapien
taaactgttgcattcctttgggtct

SEQ ID NO: 314407 - DNA, 25 bp, Homo sapien
gatacatattagggagacacaggac

SEQ ID NO: 314408 - DNA, 25 bp, Homo sapien
gacacaggacatcaattaatacgtg

SEQ ID NO: 314409 - DNA, 25 bp, Homo sapien
ttgaggaaggttacgatagcctttg

SEQ ID NO: 314410 - DNA, 25 bp, Homo sapien
tattattaggcacatgtgcatgaga

SEQ ID NO: 314411 - DNA, 25 bp, Homo sapien
catgagaaccctcccttgtggtatg

SEQ ID NO: 314412 - DNA, 25 bp, Homo sapien
tcccttgtggtatgaacccaaagta

SEQ ID NO: 314413 - DNA, 25 bp, Homo sapien
acacgcgtgagccacagtgcccggc

SEQ ID NO: 314414 - DNA, 25 bp, Homo sapien
gacagtctcacttggtcactaggct

SEQ ID NO: 314415 - DNA, 25 bp, Homo sapien
tacacgcgtgagccacagtgcccgg

SEQ ID NO: 314416 - DNA, 25 bp, Homo sapien
tgagacagtctcacttggtcactag

SEQ ID NO: 314417 - DNA, 25 bp, Homo sapien
cggccgtagggtccgcgctagtggc

SEQ ID NO: 314418 - DNA, 25 bp, Homo sapien
gaagctgcggcagcttacccgcgtt

SEQ ID NO: 314419 - DNA, 25 bp, Homo sapien
tcttcttctgcgctgtaaaccaaaa

SEQ ID NO: 314420 - DNA, 25 bp, Homo sapien
gccgagactctgtcgggccgcgagg

SEQ ID NO: 314421 - DNA, 25 bp, Homo sapien
acgccgccggacagggcgcacacga

SEQ ID NO: 314422 - DNA, 25 bp, Homo sapien
ctgtccacgccgccggacagggcgc

SEQ ID NO: 314423 - DNA, 25 bp, Homo sapien
ccggacagggcgcacacgacgtgcc

SEQ ID NO: 314424 - DNA, 25 bp, Homo sapien
cggacagggcgcacacgacgtgccg

SEQ ID NO: 314425 - DNA, 25 bp, Homo sapien
ctcccaggtagtcggagctgcagtc

SEQ ID NO: 314426 - DNA, 25 bp, Homo sapien
gcacacctccgactacacaggtgga

SEQ ID NO: 314427 - DNA, 25 bp, Homo sapien
ctccgactacacaggtggagggcga

SEQ ID NO: 314428 - DNA, 25 bp, Homo sapien
ggcgaggagcctccgaaccaaagtc

SEQ ID NO: 314429 - DNA, 25 bp, Homo sapien
tgactctgtgaatgaggcctcccgc

SEQ ID NO: 314430 - DNA, 25 bp, Homo sapien
gccacacaggtgaagttaaacaagt

SEQ ID NO: 314431 - DNA, 25 bp, Homo sapien
ccaaagatggcgcaaagcagagctc

SEQ ID NO: 314432 - DNA, 25 bp, Homo sapien
ccccgtgaggcaggtgttagccgaa

SEQ ID NO: 314433 - DNA, 25 bp, Homo sapien
ccatgtggcttcagggatccggttt

SEQ ID NO: 314434 - DNA, 25 bp, Homo sapien
gttccccacacgctgtgctcctgtg

SEQ ID NO: 314435 - DNA, 25 bp, Homo sapien
cggtaaaacggcagtgatttctgag

SEQ ID NO: 314436 - DNA, 25 bp, Homo sapien
tgtggcttcagggatccggtttcca

SEQ ID NO: 314437 - DNA, 25 bp, Homo sapien
ttcacagtctttgtcggcagtacag

SEQ ID NO: 314438 - DNA, 25 bp, Homo sapien
catgttcatccagtgagtcccagtt

SEQ ID NO: 314439 - DNA, 25 bp, Homo sapien
cctttacgtaggacacttgatggaa

SEQ ID NO: 314440 - DNA, 25 bp, Homo sapien
gggatgtctaagatctggcaaactc

SEQ ID NO: 314441 - DNA, 25 bp, Homo sapien
tcttcagcggaaagaccaatgcctc

SEQ ID NO: 314442 - DNA, 25 bp, Homo sapien
tctggactctgatccttgaaggcca

SEQ ID NO: 314443 - DNA, 25 bp, Homo sapien
ttctctcagtccctatcaagcagcg

SEQ ID NO: 314444 - DNA, 25 bp, Homo sapien
gaagcctttcatgtgcctcgggagg

SEQ ID NO: 314445 - DNA, 25 bp, Homo sapien
tgtcaggattgggagtccttccttt

SEQ ID NO: 314446 - DNA, 25 bp, Homo sapien
caagattatccacagcataatgaaa

SEQ ID NO: 314447 - DNA, 25 bp, Homo sapien
gcaactaaatttgatgtgcttgttg

SEQ ID NO: 314448 - DNA, 25 bp, Homo sapien
tgttgcaaactatgtcaggattggg

SEQ ID NO: 314449 - DNA, 25 bp, Homo sapien
catagtgacctgtggcaatggcatc

SEQ ID NO: 314450 - DNA, 25 bp, Homo sapien
catttctaacttcaaaccgatttct

SEQ ID NO: 314451 - DNA, 25 bp, Homo sapien
ggcttcttaacgtgcttctgctcaa

SEQ ID NO: 314452 - DNA, 25 bp, Homo sapien
gggaagttcttgcatagtgacctgt

SEQ ID NO: 314453 - DNA, 25 bp, Homo sapien
aagaaggtctggtctttaaagctgt

SEQ ID NO: 314454 - DNA, 25 bp, Homo sapien
tcagctgcctggaggagttttaccg

SEQ ID NO: 314455 - DNA, 25 bp, Homo sapien
ctgagaaagaaggtctggtctttaa

SEQ ID NO: 314456 - DNA, 25 bp, Homo sapien
ttaaagctgtcagctgcctggagga

SEQ ID NO: 314457 - DNA, 25 bp, Homo sapien
tgaagtctattctcagcagcgattt

SEQ ID NO: 314458 - DNA, 25 bp, Homo sapien
gcacatgatgaagtctattctcagc

SEQ ID NO: 314459 - DNA, 25 bp, Homo sapien
atgatgaagtctattctcagcagcg

SEQ ID NO: 314460 - DNA, 25 bp, Homo sapien
cagagggaagatggttctcctcagg

SEQ ID NO: 314461 - DNA, 25 bp, Homo sapien
tcccgatgaaacacatgcccatgct

SEQ ID NO: 314462 - DNA, 25 bp, Homo sapien
tcttcccgatgaaacacatgcccat

SEQ ID NO: 314463 - DNA, 25 bp, Homo sapien
ttcctcttcccgatgaaacacatgc

SEQ ID NO: 314464 - DNA, 25 bp, Homo sapien
aaattcctcttcccgatgaaacaca

SEQ ID NO: 314465 - DNA, 25 bp, Homo sapien
caaacatgtcattaccgacggagat

SEQ ID NO: 314466 - DNA, 25 bp, Homo sapien
gaaataaagtgaccaggtcgaggct

SEQ ID NO: 314467 - DNA, 25 bp, Homo sapien
tggaaataaagtgaccaggtcgagg

SEQ ID NO: 314468 - DNA, 25 bp, Homo sapien
ctatggaaataaagtgaccaggtcg

SEQ ID NO: 314469 - DNA, 25 bp, Homo sapien
tatggaaataaagtgaccaggtcga

SEQ ID NO: 314470 - DNA, 25 bp, Homo sapien
caagtggaagggacgacaggaactc

SEQ ID NO: 314471 - DNA, 25 bp, Homo sapien
gaggcgcgcttttcatgaactccag

SEQ ID NO: 314472 - DNA, 25 bp, Homo sapien
gatacatgggcaatcctgtctggca

SEQ ID NO: 314473 - DNA, 25 bp, Homo sapien
taatcattcacaccatgccgggacg

SEQ ID NO: 314474 - DNA, 25 bp, Homo sapien
tcacgcctcatcatgaaggcagatg

SEQ ID NO: 314475 - DNA, 25 bp, Homo sapien
catgaggctgggcaacaagttacag

SEQ ID NO: 314476 - DNA, 25 bp, Homo sapien
caggcccagcaatggtgtaactcac

SEQ ID NO: 314477 - DNA, 25 bp, Homo sapien
aagttacagcccacatgtcacgcct

SEQ ID NO: 314478 - DNA, 25 bp, Homo sapien
tctctcaggccacctatgtttgctc

SEQ ID NO: 314479 - DNA, 25 bp, Homo sapien
tctggcccaaggtatacaggaacca

SEQ ID NO: 314480 - DNA, 25 bp, Homo sapien
aaacacgtcacccttgacgctgtcc

SEQ ID NO: 314481 - DNA, 25 bp, Homo sapien
tccttctccaccacgtaccagggct

SEQ ID NO: 314482 - DNA, 25 bp, Homo sapien
gaacagagttagtcacagcctccag

SEQ ID NO: 314483 - DNA, 25 bp, Homo sapien
gataccctaggttggttctgaggcc

SEQ ID NO: 314484 - DNA, 25 bp, Homo sapien
tgctggcaccgctcgaagtgttcta

SEQ ID NO: 314485 - DNA, 25 bp, Homo sapien
cactggatcctaccatggtgggcac

SEQ ID NO: 314486 - DNA, 25 bp, Homo sapien
tgctgcgggaggctcctccgcaatc

SEQ ID NO: 314487 - DNA, 25 bp, Homo sapien
agtgcacgcggctggtcctcagcag

SEQ ID NO: 314488 - DNA, 25 bp, Homo sapien
aatcggaagtggcactccatcatct

SEQ ID NO: 314489 - DNA, 25 bp, Homo sapien
agtgccatctggtggcggaatcgga

SEQ ID NO: 314490 - DNA, 25 bp, Homo sapien
caggcctttcctggtcgacctcagg

SEQ ID NO: 314491 - DNA, 25 bp, Homo sapien
cagtgtacacacttgcttcagccca

SEQ ID NO: 314492 - DNA, 25 bp, Homo sapien
aatctccaaatgatctccacaacgg

SEQ ID NO: 314493 - DNA, 25 bp, Homo sapien
cacaggacacgggagttctaaatac

SEQ ID NO: 314494 - DNA, 25 bp, Homo sapien
tgtggcaagggcacgcacagcctgc

SEQ ID NO: 314495 - DNA, 25 bp, Homo sapien
ctgcacagctgtcacccacacggtg

SEQ ID NO: 314496 - DNA, 25 bp, Homo sapien
ctgtggcaagggcacgcacagcctg

SEQ ID NO: 314497 - DNA, 25 bp, Homo sapien
cagcctgcacagctgtcacccacac

SEQ ID NO: 314498 - DNA, 25 bp, Homo sapien
tctcctgggactccaagggactggc

SEQ ID NO: 314499 - DNA, 25 bp, Homo sapien
cagtggcttcactagggagggtctt

SEQ ID NO: 314500 - DNA, 25 bp, Homo sapien
cagggtgcagagcagtacagtcctc

SEQ ID NO: 314501 - DNA, 25 bp, Homo sapien
tggcagccagaggatgcttccgctt

SEQ ID NO: 314502 - DNA, 25 bp, Homo sapien
tctggagcgtgtaggcagacggccc

SEQ ID NO: 314503 - DNA, 25 bp, Homo sapien
cactcgtcccccttgtagaacacag

SEQ ID NO: 314504 - DNA, 25 bp, Homo sapien
ccttctggagcgtgtaggcagacgg

SEQ ID NO: 314505 - DNA, 25 bp, Homo sapien
ccatcccagctctgcgctggccctt

SEQ ID NO: 314506 - DNA, 25 bp, Homo sapien
tcagagcaagggactcaggcctgga

SEQ ID NO: 314507 - DNA, 25 bp, Homo sapien
gagcaagggactcaggcctggacca

SEQ ID NO: 314508 - DNA, 25 bp, Homo sapien
cctggaccatcttctgggctgtcac

SEQ ID NO: 314509 - DNA, 25 bp, Homo sapien
gcctggaccatcttctgggctgtca

SEQ ID NO: 314510 - DNA, 25 bp, Homo sapien
aatgtttattccacgctgtcccgac

SEQ ID NO: 314511 - DNA, 25 bp, Homo sapien
ttgggcacctggactgctcaccagc

SEQ ID NO: 314512 - DNA, 25 bp, Homo sapien
caggttccttctagcagatccatct

SEQ ID NO: 314513 - DNA, 25 bp, Homo sapien
aggtcccctcggtgtactctgaggt

SEQ ID NO: 314514 - DNA, 25 bp, Homo sapien
tccagtgactcagacgttagacctc

SEQ ID NO: 314515 - DNA, 25 bp, Homo sapien
agccagtggaacgtgccggaacttt

SEQ ID NO: 314516 - DNA, 25 bp, Homo sapien
ttttgggtcgttgcctgcactcaca

SEQ ID NO: 314517 - DNA, 25 bp, Homo sapien
taattctgctactgaactcacccag

SEQ ID NO: 314518 - DNA, 25 bp, Homo sapien
cttaagactttatgggagagattag

SEQ ID NO: 314519 - DNA, 25 bp, Homo sapien
attacttaagactttatgggagaga

SEQ ID NO: 314520 - DNA, 25 bp, Homo sapien
ttatgggagagattagacactggag

SEQ ID NO: 314521 - DNA, 25 bp, Homo sapien
gactttatgggagagattagacact

SEQ ID NO: 314522 - DNA, 25 bp, Homo sapien
taactctctgagactgcgaggatct

SEQ ID NO: 314523 - DNA, 25 bp, Homo sapien
ggacctgggaccttaaagcgttgca

SEQ ID NO: 314524 - DNA, 25 bp, Homo sapien
caaatggccaattgtgcagagggac

SEQ ID NO: 314525 - DNA, 25 bp, Homo sapien
gccacactcttcaacggttaccaaa

SEQ ID NO: 314526 - DNA, 25 bp, Homo sapien
gctggtggccttcgtcctcctgagc

SEQ ID NO: 314527 - DNA, 25 bp, Homo sapien
tcctgagcctggtccgcatgctgcg

SEQ ID NO: 314528 - DNA, 25 bp, Homo sapien
gtccttgtcactggcagccctgctg

SEQ ID NO: 314529 - DNA, 25 bp, Homo sapien
tgtccttgtcactggcagccctgct

SEQ ID NO: 314530 - DNA, 25 bp, Homo sapien
caaccattgccaacagtgcggtggg

SEQ ID NO: 314531 - DNA, 25 bp, Homo sapien
gacagcggaacgtcaacaaccattg

SEQ ID NO: 314532 - DNA, 25 bp, Homo sapien
gaatataaggtcctccgacagcgga

SEQ ID NO: 314533 - DNA, 25 bp, Homo sapien
tcgcccaggcgcctttgttgctgtc

SEQ ID NO: 314534 - DNA, 25 bp, Homo sapien
gctcaccttcctcggtcgtctttcc

SEQ ID NO: 314535 - DNA, 25 bp, Homo sapien
accttcctcggtcgtctttccatgt

SEQ ID NO: 314536 - DNA, 25 bp, Homo sapien
ggtcgtctttccatgtctagcagga

SEQ ID NO: 314537 - DNA, 25 bp, Homo sapien
tcctcggtcgtctttccatgtctag

SEQ ID NO: 314538 - DNA, 25 bp, Homo sapien
tgagagtagtgacccagacgacctc

SEQ ID NO: 314539 - DNA, 25 bp, Homo sapien
ggcagtctctgctgtttataaccgg

SEQ ID NO: 314540 - DNA, 25 bp, Homo sapien
ttataaccggccacgatctggaccc

SEQ ID NO: 314541 - DNA, 25 bp, Homo sapien
gagagtccgaattgagcctctgccc

SEQ ID NO: 314542 - DNA, 25 bp, Homo sapien
tgtggtttaaagcacacgccgttcc

SEQ ID NO: 314543 - DNA, 25 bp, Homo sapien
gaaaagtggcctgaagacgagccgc

SEQ ID NO: 314544 - DNA, 25 bp, Homo sapien
gttccccgtgacttcgaagtctgtg

SEQ ID NO: 314545 - DNA, 25 bp, Homo sapien
gacgagccgcatgcaatagaaacct

SEQ ID NO: 314546 - DNA, 25 bp, Homo sapien
agtgaggaacaaacatctgcccaga

SEQ ID NO: 314547 - DNA, 25 bp, Homo sapien
tgcgaacgctaagcgcaggagcaga

SEQ ID NO: 314548 - DNA, 25 bp, Homo sapien
gctgttggcgcttctcactggcctg

SEQ ID NO: 314549 - DNA, 25 bp, Homo sapien
cgatgtgtttacctttgcgaacgct

SEQ ID NO: 314550 - DNA, 25 bp, Homo sapien
tagccgctggccttggcggagacaa

SEQ ID NO: 314551 - DNA, 25 bp, Homo sapien
ccagatggaggccactggttggaaa

SEQ ID NO: 314552 - DNA, 25 bp, Homo sapien
tgacgcctttaaaatctagcagaga

SEQ ID NO: 314553 - DNA, 25 bp, Homo sapien
ttgctttgaccatcgtagccgctgg

SEQ ID NO: 314554 - DNA, 25 bp, Homo sapien
ggagcagagaagtgtcctcgcagcc

SEQ ID NO: 314555 - DNA, 25 bp, Homo sapien
ttggggactctctaggacttggcca

SEQ ID NO: 314556 - DNA, 25 bp, Homo sapien
gaccctgtggtgcctgtgaacctgg

SEQ ID NO: 314557 - DNA, 25 bp, Homo sapien
tcttggggactctctaggacttggc

SEQ ID NO: 314558 - DNA, 25 bp, Homo sapien
tcctggcagaattgtaagagctgac

SEQ ID NO: 314559 - DNA, 25 bp, Homo sapien
tgacttgctgcgtttctcggaggca

SEQ ID NO: 314560 - DNA, 25 bp, Homo sapien
tagtaagggcttatgagcgccgccg

SEQ ID NO: 314561 - DNA, 25 bp, Homo sapien
ggaccccagaacctgaatgacttgc

SEQ ID NO: 314562 - DNA, 25 bp, Homo sapien
gaatgcccgagcacaccatcggttt

SEQ ID NO: 314563 - DNA, 25 bp, Homo sapien
ttaaatcagataaccgaggcctccc

SEQ ID NO: 314564 - DNA, 25 bp, Homo sapien
tctcctctaacgagactgagtgtgg

SEQ ID NO: 314565 - DNA, 25 bp, Homo sapien
catcggtttgccttgtcgcagtgca

SEQ ID NO: 314566 - DNA, 25 bp, Homo sapien
tttcaggtatgatttccctgagagc

SEQ ID NO: 314567 - DNA, 25 bp, Homo sapien
ccatgttaagatccgtattatgtac

SEQ ID NO: 314568 - DNA, 25 bp, Homo sapien
aaagtggttaccatgttaagatccg

SEQ ID NO: 314569 - DNA, 25 bp, Homo sapien
tgagagcttgagcactgaacgggtt

SEQ ID NO: 314570 - DNA, 25 bp, Homo sapien
tgtcctgcagcctagcgtggcactg

SEQ ID NO: 314571 - DNA, 25 bp, Homo sapien
agacgggtttgccaggacagtaact

SEQ ID NO: 314572 - DNA, 25 bp, Homo sapien
caaagggctactgtggccaagcttc

SEQ ID NO: 314573 - DNA, 25 bp, Homo sapien
ggagtgggcagtgtcaggtcttcct

SEQ ID NO: 314574 - DNA, 25 bp, Homo sapien
gcccacggtcctcgttgagactgga

SEQ ID NO: 314575 - DNA, 25 bp, Homo sapien
ttggctgagtatgcgtgtgacacac

SEQ ID NO: 314576 - DNA, 25 bp, Homo sapien
gaaaatgctcacattgggcttcagc

SEQ ID NO: 314577 - DNA, 25 bp, Homo sapien
tctccagtggaaacctcgaattaaa

SEQ ID NO: 314578 - DNA, 25 bp, Homo sapien
tgtccctaggtgttgggcagtccct

SEQ ID NO: 314579 - DNA, 25 bp, Homo sapien
tgtgatcatgaagccgacactctgg

SEQ ID NO: 314580 - DNA, 25 bp, Homo sapien
tctaaacgttatggtggagtcgggc

SEQ ID NO: 314581 - DNA, 25 bp, Homo sapien
gatgcaggcatagggaaaagtacgc

SEQ ID NO: 314582 - DNA, 25 bp, Homo sapien
tgtaatcccagctactagggaggct

SEQ ID NO: 314583 - DNA, 25 bp, Homo sapien
ggttgtggtaagctgagatcgtgcc

SEQ ID NO: 314584 - DNA, 25 bp, Homo sapien
attagccgggcgtgaggcgcacgcc

SEQ ID NO: 314585 - DNA, 25 bp, Homo sapien
gaggcagaattgcttgaacctggaa

SEQ ID NO: 314586 - DNA, 25 bp, Homo sapien
caactgtaaggcatcgagaggaggc

SEQ ID NO: 314587 - DNA, 25 bp, Homo sapien
tccccagggagatgcaagagcagtt

SEQ ID NO: 314588 - DNA, 25 bp, Homo sapien
cagtatgactagcagcccgtgtggc

SEQ ID NO: 314589 - DNA, 25 bp, Homo sapien
catgtagcttctggttgcggcccct

SEQ ID NO: 314590 - DNA, 25 bp, Homo sapien
tctcggaggagctgcaaatctcggc

SEQ ID NO: 314591 - DNA, 25 bp, Homo sapien
gtatgatttgccctccctgatggtg

SEQ ID NO: 314592 - DNA, 25 bp, Homo sapien
agtttcttagcttcgtgagagccca

SEQ ID NO: 314593 - DNA, 25 bp, Homo sapien
ggatctcacctgacactgcaaggca

SEQ ID NO: 314594 - DNA, 25 bp, Homo sapien
ctggactctggcagaccacgagcac

SEQ ID NO: 314595 - DNA, 25 bp, Homo sapien
gactctggcagaccacgagcactgg

SEQ ID NO: 314596 - DNA, 25 bp, Homo sapien
tggactctggcagaccacgagcact

SEQ ID NO: 314597 - DNA, 25 bp, Homo sapien
tctggcagaccacgagcactggctt

SEQ ID NO: 314598 - DNA, 25 bp, Homo sapien
ggagccaggacagcgggacatgggt

SEQ ID NO: 314599 - DNA, 25 bp, Homo sapien
ccaggacagcgggacatgggtcctt

SEQ ID NO: 314600 - DNA, 25 bp, Homo sapien
gggagccaggacagcgggacatggg

SEQ ID NO: 314601 - DNA, 25 bp, Homo sapien
agccaggacagcgggacatgggtcc

SEQ ID NO: 314602 - DNA, 25 bp, Homo sapien
tgtttcacgtgaggagcatcgcagg

SEQ ID NO: 314603 - DNA, 25 bp, Homo sapien
gaggagcatcgcaggatgcatctgt

SEQ ID NO: 314604 - DNA, 25 bp, Homo sapien
tgttctgacacgaggggcaccagat

SEQ ID NO: 314605 - DNA, 25 bp, Homo sapien
tttcatgtataggctcttcctgttt

SEQ ID NO: 314606 - DNA, 25 bp, Homo sapien
tgtagccgcaaatccagtcagctcc

SEQ ID NO: 314607 - DNA, 25 bp, Homo sapien
cctcggcacagaaggctgtaggtgt

SEQ ID NO: 314608 - DNA, 25 bp, Homo sapien
aaggctgtaggtgtggcctgcagca

SEQ ID NO: 314609 - DNA, 25 bp, Homo sapien
gggcacagccctcggcacagaaggc

SEQ ID NO: 314610 - DNA, 25 bp, Homo sapien
agtgccggcggttgctattttcatc

SEQ ID NO: 314611 - DNA, 25 bp, Homo sapien
ctggcaccaaatggcactgggaagt

SEQ ID NO: 314612 - DNA, 25 bp, Homo sapien
caccaaatggcactgggaagtgccg

SEQ ID NO: 314613 - DNA, 25 bp, Homo sapien
gaagtgccggcggttgctattttca

SEQ ID NO: 314614 - DNA, 25 bp, Homo sapien
ttgggagtcccacaggcatctccaa

SEQ ID NO: 314615 - DNA, 25 bp, Homo sapien
atctccaacctttcaatccaaagac

SEQ ID NO: 314616 - DNA, 25 bp, Homo sapien
ggcatctccaacctttcaatccaaa

SEQ ID NO: 314617 - DNA, 25 bp, Homo sapien
cttgggagtcccacaggcatctcca

SEQ ID NO: 314618 - DNA, 25 bp, Homo sapien
gctagactcgcgcagtacctggcgc

SEQ ID NO: 314619 - DNA, 25 bp, Homo sapien
gggacgcagcacgaaccccgctaga

SEQ ID NO: 314620 - DNA, 25 bp, Homo sapien
ccgcctttctagagatgggtcaggg

SEQ ID NO: 314621 - DNA, 25 bp, Homo sapien
tgcagcccgcgctgtacgggacgca

SEQ ID NO: 314622 - DNA, 25 bp, Homo sapien
cctgagcggatatcggggccaactc

SEQ ID NO: 314623 - DNA, 25 bp, Homo sapien
gcccggccgcgctacgcctgccgcc

SEQ ID NO: 314624 - DNA, 25 bp, Homo sapien
gcggatatcggggccaactctcatc

SEQ ID NO: 314625 - DNA, 25 bp, Homo sapien
gagcggatatcggggccaactctca

SEQ ID NO: 314626 - DNA, 25 bp, Homo sapien
ccgggagtggatcggcaggacgaca

SEQ ID NO: 314627 - DNA, 25 bp, Homo sapien
agtggcccagcgtcggtgacccccg

SEQ ID NO: 314628 - DNA, 25 bp, Homo sapien
caggacgacattggcgggcccgggc

SEQ ID NO: 314629 - DNA, 25 bp, Homo sapien
ccgcaaccccgggatgtcctcgtct

SEQ ID NO: 314630 - DNA, 25 bp, Homo sapien
caacttggagactttcccgtgctct

SEQ ID NO: 314631 - DNA, 25 bp, Homo sapien
cgcactccacgcatcagccataggg

SEQ ID NO: 314632 - DNA, 25 bp, Homo sapien
gtgctctccagagtgcaagacagac

SEQ ID NO: 314633 - DNA, 25 bp, Homo sapien
gtgcaagacagacatcaccggacag

SEQ ID NO: 314634 - DNA, 25 bp, Homo sapien
taaacagtagacaaacaagaacctc

SEQ ID NO: 314635 - DNA, 25 bp, Homo sapien
aacagtagacaaacaagaacctcag

SEQ ID NO: 314636 - DNA, 25 bp, Homo sapien
ttctagaagggaagcgtggtaaaca

SEQ ID NO: 314637 - DNA, 25 bp, Homo sapien
gggaagcgtggtaaacagtagacaa

SEQ ID NO: 314638 - DNA, 25 bp, Homo sapien
ctcccacaagctcccttccaccatg

SEQ ID NO: 314639 - DNA, 25 bp, Homo sapien
ttccacctcccacaagctcccttcc

SEQ ID NO: 314640 - DNA, 25 bp, Homo sapien
ctttccacctcccacaagctccctt

SEQ ID NO: 314641 - DNA, 25 bp, Homo sapien
acctcccacaagctcccttccacca

SEQ ID NO: 314642 - DNA, 25 bp, Homo sapien
aaagcatgcgaggaagtaggcgacc

SEQ ID NO: 314643 - DNA, 25 bp, Homo sapien
aggcgaccatcagcacgggctttgt

SEQ ID NO: 314644 - DNA, 25 bp, Homo sapien
tcatcagggttctgtggcaaacaag

SEQ ID NO: 314645 - DNA, 25 bp, Homo sapien
tccagcatcacagggtagttacggt

SEQ ID NO: 314646 - DNA, 25 bp, Homo sapien
ggcagcatgggcccttccagggtca

SEQ ID NO: 314647 - DNA, 25 bp, Homo sapien
cttccagggtcactgcagaggtggc

SEQ ID NO: 314648 - DNA, 25 bp, Homo sapien
ttccagggtcactgcagaggtggca

SEQ ID NO: 314649 - DNA, 25 bp, Homo sapien
tgggcccttccagggtcactgcaga

SEQ ID NO: 314650 - DNA, 25 bp, Homo sapien
gatttcactatcacacactggaccc

SEQ ID NO: 314651 - DNA, 25 bp, Homo sapien
ccttaggccattccagggctcttgc

SEQ ID NO: 314652 - DNA, 25 bp, Homo sapien
tttaagataacgagagatttcacta

SEQ ID NO: 314653 - DNA, 25 bp, Homo sapien
tggaccccgcggctgagagggcagc

SEQ ID NO: 314654 - DNA, 25 bp, Homo sapien
ctcgcaaggagcgaggacccccgtg

SEQ ID NO: 314655 - DNA, 25 bp, Homo sapien
tggtcacttgccagcacgtgcctgg

SEQ ID NO: 314656 - DNA, 25 bp, Homo sapien
gccgacgtggtcacttgccagcacg

SEQ ID NO: 314657 - DNA, 25 bp, Homo sapien
atggagagcccaccgccgacgtggt

SEQ ID NO: 314658 - DNA, 25 bp, Homo sapien
aaagcactcgcactccacaatgcgg

SEQ ID NO: 314659 - DNA, 25 bp, Homo sapien
tctctgaccatcagcgtgccgtgtc

SEQ ID NO: 314660 - DNA, 25 bp, Homo sapien
tctgctgttccacatccccaaagca

SEQ ID NO: 314661 - DNA, 25 bp, Homo sapien
aatccagtgtgtgcgtgggcctctc

SEQ ID NO: 314662 - DNA, 25 bp, Homo sapien
aacagttccatccacacctcagaag

SEQ ID NO: 314663 - DNA, 25 bp, Homo sapien
cccctaccccaatcacaatgttgaa

SEQ ID NO: 314664 - DNA, 25 bp, Homo sapien
aataagcctttctcggagtgtacaa

SEQ ID NO: 314665 - DNA, 25 bp, Homo sapien
caaagcaggatgaaaggacgagagt

SEQ ID NO: 314666 - DNA, 25 bp, Homo sapien
ctcctgggaacccgcgtgagccgcc

SEQ ID NO: 314667 - DNA, 25 bp, Homo sapien
aaatccatcaatcagctcctgggaa

SEQ ID NO: 314668 - DNA, 25 bp, Homo sapien
atgtgctacgaggacccaggaacca

SEQ ID NO: 314669 - DNA, 25 bp, Homo sapien
cagcaggcacggagagggtggtgtc

SEQ ID NO: 314670 - DNA, 25 bp, Homo sapien
tggcccagaaccaggatgtgctacg

SEQ ID NO: 314671 - DNA, 25 bp, Homo sapien
agaaccaggatgtgctacgaggacc

SEQ ID NO: 314672 - DNA, 25 bp, Homo sapien
ctgcaccttccgtcctgcgtgctgc

SEQ ID NO: 314673 - DNA, 25 bp, Homo sapien
ccgtcctgcgtgctgcagccgcgca

SEQ ID NO: 314674 - DNA, 25 bp, Homo sapien
cgtcctgcgtgctgcagccgcgcat

SEQ ID NO: 314675 - DNA, 25 bp, Homo sapien
caccttccgtcctgcgtgctgcagc

SEQ ID NO: 314676 - DNA, 25 bp, Homo sapien
gaggccaggatcagtggcccacagg

SEQ ID NO: 314677 - DNA, 25 bp, Homo sapien
aggccaggatcagtggcccacagga

SEQ ID NO: 314678 - DNA, 25 bp, Homo sapien
ggaggccaggatcagtggcccacag

SEQ ID NO: 314679 - DNA, 25 bp, Homo sapien
tactgctccccacatcgctgcccga

SEQ ID NO: 314680 - DNA, 25 bp, Homo sapien
atgtgccgtggggtactgctcccca

SEQ ID NO: 314681 - DNA, 25 bp, Homo sapien
tgccaaagggcggatgtgccgtggg

SEQ ID NO: 314682 - DNA, 25 bp, Homo sapien
cacgtgccaaagggcggatgtgccg

SEQ ID NO: 314683 - DNA, 25 bp, Homo sapien
ttcaccctaacatgacgctcgggtt

SEQ ID NO: 314684 - DNA, 25 bp, Homo sapien
caccctaacatgacgctcgggttcc

SEQ ID NO: 314685 - DNA, 25 bp, Homo sapien
tcaccctaacatgacgctcgggttc

SEQ ID NO: 314686 - DNA, 25 bp, Homo sapien
gatttcgtcgctgcattcggtgtcc

SEQ ID NO: 314687 - DNA, 25 bp, Homo sapien
ttcggtgtccgaggcatttggagac

SEQ ID NO: 314688 - DNA, 25 bp, Homo sapien
gctagatcgaggaagtcatctctct

SEQ ID NO: 314689 - DNA, 25 bp, Homo sapien
tggagactccgctagatcgaggaag

SEQ ID NO: 314690 - DNA, 25 bp, Homo sapien
cgctgtcccggggcgaggtccgcgg

SEQ ID NO: 314691 - DNA, 25 bp, Homo sapien
ctcgctgtcccggggcgaggtccgc

SEQ ID NO: 314692 - DNA, 25 bp, Homo sapien
gctcctcgctgtcccggggcgaggt

SEQ ID NO: 314693 - DNA, 25 bp, Homo sapien
tcctcgctgtcccggggcgaggtcc

SEQ ID NO: 314694 - DNA, 25 bp, Homo sapien
gtggtctgtagtgatgccccaggaa

SEQ ID NO: 314695 - DNA, 25 bp, Homo sapien
cacctgcctgatcgggcagtgtcga

SEQ ID NO: 314696 - DNA, 25 bp, Homo sapien
actctgtggtctgtagtgatgcccc

SEQ ID NO: 314697 - DNA, 25 bp, Homo sapien
ggccccacctgcctgatcgggcagt

SEQ ID NO: 314698 - DNA, 25 bp, Homo sapien
gagtgatggacgctaagagccacaa

SEQ ID NO: 314699 - DNA, 25 bp, Homo sapien
taagagccacaagcacctgcgatcc

SEQ ID NO: 314700 - DNA, 25 bp, Homo sapien
acacaggcacactcggtccagcact

SEQ ID NO: 314701 - DNA, 25 bp, Homo sapien
tcggtccagcacttccaccaaaagt

SEQ ID NO: 314702 - DNA, 25 bp, Homo sapien
agagaggacgggcatccatgccacc

SEQ ID NO: 314703 - DNA, 25 bp, Homo sapien
taaacagctctattcccacaggaaa

SEQ ID NO: 314704 - DNA, 25 bp, Homo sapien
attcccacaggaaacgtcccagtgc

SEQ ID NO: 314705 - DNA, 25 bp, Homo sapien
gagagggagccacactttaaacagc

SEQ ID NO: 314706 - DNA, 25 bp, Homo sapien
cgttccacaccctgctgatgggaca

SEQ ID NO: 314707 - DNA, 25 bp, Homo sapien
ggccgttccacaccctgctgatggg

SEQ ID NO: 314708 - DNA, 25 bp, Homo sapien
cagcaagccaggacgggctcgagtt

SEQ ID NO: 314709 - DNA, 25 bp, Homo sapien
agttacaggctacagctgcccgatg

SEQ ID NO: 314710 - DNA, 25 bp, Homo sapien
ttccaataaggcaatttccaggtga

SEQ ID NO: 314711 - DNA, 25 bp, Homo sapien
tctgtccggttaaagtcctggactc

SEQ ID NO: 314712 - DNA, 25 bp, Homo sapien
tgatctcattcagtcgatcaaactc

SEQ ID NO: 314713 - DNA, 25 bp, Homo sapien
caataaggcaatttccaggtgacct

SEQ ID NO: 314714 - DNA, 25 bp, Homo sapien
cctccaagcgctttctggtactcac

SEQ ID NO: 314715 - DNA, 25 bp, Homo sapien
atcccctccaagcgctttctggtac

SEQ ID NO: 314716 - DNA, 25 bp, Homo sapien
ccctccaagcgctttctggtactca

SEQ ID NO: 314717 - DNA, 25 bp, Homo sapien
cccctccaagcgctttctggtactc

SEQ ID NO: 314718 - DNA, 25 bp, Homo sapien
ggcctgttgccaggtgaatccacaa

SEQ ID NO: 314719 - DNA, 25 bp, Homo sapien
gatgacaatccttctggcaaaggca

SEQ ID NO: 314720 - DNA, 25 bp, Homo sapien
gccttggacccttgagcaccaggtg

SEQ ID NO: 314721 - DNA, 25 bp, Homo sapien
tgagagcactggtaaccaaggacag

SEQ ID NO: 314722 - DNA, 25 bp, Homo sapien
agtgtgacgcgcagagaacccgcag

SEQ ID NO: 314723 - DNA, 25 bp, Homo sapien
agaacccgcagggtcaagaccggag

SEQ ID NO: 314724 - DNA, 25 bp, Homo sapien
gggtcaagaccggagagagacacca

SEQ ID NO: 314725 - DNA, 25 bp, Homo sapien
gacaaaaagtgtgacgcgcagagaa

SEQ ID NO: 314726 - DNA, 25 bp, Homo sapien
gaacagggacagatgtaacccggga

SEQ ID NO: 314727 - DNA, 25 bp, Homo sapien
acagatgtaacccgggacagggaga

SEQ ID NO: 314728 - DNA, 25 bp, Homo sapien
agaacagggacaggtgtaacacgga

SEQ ID NO: 314729 - DNA, 25 bp, Homo sapien
cagggacagatgtaacccgggacag

SEQ ID NO: 314730 - DNA, 25 bp, Homo sapien
tgctccagccttcacgcctccccag

SEQ ID NO: 314731 - DNA, 25 bp, Homo sapien
tccagccttcacgcctccccagcat

SEQ ID NO: 314732 - DNA, 25 bp, Homo sapien
ctgctccagccttcacgcctcccca

SEQ ID NO: 314733 - DNA, 25 bp, Homo sapien
gctccagccttcacgcctccccagc

SEQ ID NO: 314734 - DNA, 25 bp, Homo sapien
ggtgaggttctgggacgcgtcggca

SEQ ID NO: 314735 - DNA, 25 bp, Homo sapien
gaggttctgggacgcgtcggcagca

SEQ ID NO: 314736 - DNA, 25 bp, Homo sapien
gtgaggttctgggacgcgtcggcag

SEQ ID NO: 314737 - DNA, 25 bp, Homo sapien
ggttctgggacgcgtcggcagcaga

SEQ ID NO: 314738 - DNA, 25 bp, Homo sapien
gccaggtgaccatcgctcatgtcca

SEQ ID NO: 314739 - DNA, 25 bp, Homo sapien
atgtccacgcgaccccgactctggg

SEQ ID NO: 314740 - DNA, 25 bp, Homo sapien
gagagaacggccaggtgaccatcgc

SEQ ID NO: 314741 - DNA, 25 bp, Homo sapien
gaacggccaggtgaccatcgctcat

SEQ ID NO: 314742 - DNA, 25 bp, Homo sapien
ctgccgcagcatctccgcgttggtt

SEQ ID NO: 314743 - DNA, 25 bp, Homo sapien
gccgcagcatctccgcgttggtttc

SEQ ID NO: 314744 - DNA, 25 bp, Homo sapien
agctcctgccgcagcatctccgcgt

SEQ ID NO: 314745 - DNA, 25 bp, Homo sapien
tcctgccgcagcatctccgcgttgg

SEQ ID NO: 314746 - DNA, 25 bp, Homo sapien
gggctgctgagccatctgctcctcg

SEQ ID NO: 314747 - DNA, 25 bp, Homo sapien
ctgctccattgctggcctgggcctg

SEQ ID NO: 314748 - DNA, 25 bp, Homo sapien
tgggcctgcccttttgggggctgct

SEQ ID NO: 314749 - DNA, 25 bp, Homo sapien
gctgctgagccatctgctcctcggt

SEQ ID NO: 314750 - DNA, 25 bp, Homo sapien
cacgtactccccaaaccgctcgtag

SEQ ID NO: 314751 - DNA, 25 bp, Homo sapien
gtagaaccacttctgcaggcgcgag

SEQ ID NO: 314752 - DNA, 25 bp, Homo sapien
tctcctcgggctggaaccggaagtc

SEQ ID NO: 314753 - DNA, 25 bp, Homo sapien
caggcgcgaggacagcccctggctc

SEQ ID NO: 314754 - DNA, 25 bp, Homo sapien
gagccgtctcatattttcagttaac

SEQ ID NO: 314755 - DNA, 25 bp, Homo sapien
tgagccgtctcatattttcagttaa

SEQ ID NO: 314756 - DNA, 25 bp, Homo sapien
ggcgccacgcagagccgctggtact

SEQ ID NO: 314757 - DNA, 25 bp, Homo sapien
cacactgagcatcgtgggcgccacg

SEQ ID NO: 314758 - DNA, 25 bp, Homo sapien
atcgtgggcgccacgcagagccgct

SEQ ID NO: 314759 - DNA, 25 bp, Homo sapien
actgagcatcgtgggcgccacgcag

SEQ ID NO: 314760 - DNA, 25 bp, Homo sapien
ggcagagaggttcttcacaaagtta

SEQ ID NO: 314761 - DNA, 25 bp, Homo sapien
caatggcagacgtgtagacggagta

SEQ ID NO: 314762 - DNA, 25 bp, Homo sapien
cacaaagttagtgaccggcttggca

SEQ ID NO: 314763 - DNA, 25 bp, Homo sapien
ccagtcggataaggcagagaggttc

SEQ ID NO: 314764 - DNA, 25 bp, Homo sapien
gctgcttccccggtttaagagccgc

SEQ ID NO: 314765 - DNA, 25 bp, Homo sapien
gctggctctccagacactcagggat

SEQ ID NO: 314766 - DNA, 25 bp, Homo sapien
tttaagagccgccggtggaagccag

SEQ ID NO: 314767 - DNA, 25 bp, Homo sapien
ggtgcgtctgatggggaagccggag

SEQ ID NO: 314768 - DNA, 25 bp, Homo sapien
gcgatgaggtaattgagggataacc

SEQ ID NO: 314769 - DNA, 25 bp, Homo sapien
aattgagggataacctcagaattgc

SEQ ID NO: 314770 - DNA, 25 bp, Homo sapien
ctggcgatgaggtaattgagggata

SEQ ID NO: 314771 - DNA, 25 bp, Homo sapien
tgaggtaattgagggataacctcag

SEQ ID NO: 314772 - DNA, 25 bp, Homo sapien
ggtgctggaacggccctggctctgc

SEQ ID NO: 314773 - DNA, 25 bp, Homo sapien
gggagaagccccctgcgatgttcgg

SEQ ID NO: 314774 - DNA, 25 bp, Homo sapien
cccctgcgatgttcgggcaggtgct

SEQ ID NO: 314775 - DNA, 25 bp, Homo sapien
gaagccccctgcgatgttcgggcag

SEQ ID NO: 314776 - DNA, 25 bp, Homo sapien
acacttcgggcacgatgctccactg

SEQ ID NO: 314777 - DNA, 25 bp, Homo sapien
gacacttcgggcacgatgctccact

SEQ ID NO: 314778 - DNA, 25 bp, Homo sapien
acttcgggcacgatgctccactgta

SEQ ID NO: 314779 - DNA, 25 bp, Homo sapien
cttcgggcacgatgctccactgtat

SEQ ID NO: 314780 - DNA, 25 bp, Homo sapien
tgggcgacgtccagcaccagctgga

SEQ ID NO: 314781 - DNA, 25 bp, Homo sapien
cagtcaggtcttcctttggaggttc

SEQ ID NO: 314782 - DNA, 25 bp, Homo sapien
gggcgacgtccagcaccagctggaa

SEQ ID NO: 314783 - DNA, 25 bp, Homo sapien
ggcgacgtccagcaccagctggaac

SEQ ID NO: 314784 - DNA, 25 bp, Homo sapien
tccaggatgtcagccatcttcccga

SEQ ID NO: 314785 - DNA, 25 bp, Homo sapien
caggatgtcagccatcttcccgaaa

SEQ ID NO: 314786 - DNA, 25 bp, Homo sapien
tgtcagccatcttcccgaaaaggtt

SEQ ID NO: 314787 - DNA, 25 bp, Homo sapien
gatgtcagccatcttcccgaaaagg

SEQ ID NO: 314788 - DNA, 25 bp, Homo sapien
ttctgtgtgatctccggctggaccc

SEQ ID NO: 314789 - DNA, 25 bp, Homo sapien
acggcaagccccaccaggcggtagg

SEQ ID NO: 314790 - DNA, 25 bp, Homo sapien
ccagagcgccacatacagcttctgt

SEQ ID NO: 314791 - DNA, 25 bp, Homo sapien
atacagcttctgtgtgatctccggc

SEQ ID NO: 314792 - DNA, 25 bp, Homo sapien
gggacagctcagctcaagagagccc

SEQ ID NO: 314793 - DNA, 25 bp, Homo sapien
gggccatccttgcttggagcaggca

SEQ ID NO: 314794 - DNA, 25 bp, Homo sapien
gctcagctcaagagagcccaagtcc

SEQ ID NO: 314795 - DNA, 25 bp, Homo sapien
tctaagctgaggtcccttgtcagca

SEQ ID NO: 314796 - DNA, 25 bp, Homo sapien
gcaagctccacacgcggctacattt

SEQ ID NO: 314797 - DNA, 25 bp, Homo sapien
aagctccacacgcggctacattttg

SEQ ID NO: 314798 - DNA, 25 bp, Homo sapien
gctccacacgcggctacattttgta

SEQ ID NO: 314799 - DNA, 25 bp, Homo sapien
agctccacacgcggctacattttgt

SEQ ID NO: 314800 - DNA, 25 bp, Homo sapien
aactccgcctggctcagggctgttc

SEQ ID NO: 314801 - DNA, 25 bp, Homo sapien
caactccgcctggctcagggctgtt

SEQ ID NO: 314802 - DNA, 25 bp, Homo sapien
tgatatagggcgtgtcgtacttggc

SEQ ID NO: 314803 - DNA, 25 bp, Homo sapien
cctcgggcagcgtttaaagatgaaa

SEQ ID NO: 314804 - DNA, 25 bp, Homo sapien
tgaaatcaatgaggaagaacttgat

SEQ ID NO: 314805 - DNA, 25 bp, Homo sapien
gagcgctccttgagctgcgggtcgg

SEQ ID NO: 314806 - DNA, 25 bp, Homo sapien
ttgaagatctcgtggaaattgccct

SEQ ID NO: 314807 - DNA, 25 bp, Homo sapien
cagcggacgctcgttttctgtcaga

SEQ ID NO: 314808 - DNA, 25 bp, Homo sapien
tgctgtggaagcgaccggcgtcctc

SEQ ID NO: 314809 - DNA, 25 bp, Homo sapien
tgcgctgggtacgtagctccgtgac

SEQ ID NO: 314810 - DNA, 25 bp, Homo sapien
ttctccgtgacgtagagcaccccgt

SEQ ID NO: 314811 - DNA, 25 bp, Homo sapien
tccctgttgatgaggcagcagcgcc

SEQ ID NO: 314812 - DNA, 25 bp, Homo sapien
ggcatcttccggtccctgttgatga

SEQ ID NO: 314813 - DNA, 25 bp, Homo sapien
agtccgtgggcatcttccggtccct

SEQ ID NO: 314814 - DNA, 25 bp, Homo sapien
cgtgatgtccactagcttgatgact

SEQ ID NO: 314815 - DNA, 25 bp, Homo sapien
tccactagcttgatgactttgttcc

SEQ ID NO: 314816 - DNA, 25 bp, Homo sapien
cactagcttgatgactttgttcctc

SEQ ID NO: 314817 - DNA, 25 bp, Homo sapien
tggatgtccgtgatgtccactagct

SEQ ID NO: 314818 - DNA, 25 bp, Homo sapien
tttctgggtggatggcgtcgacacg

SEQ ID NO: 314819 - DNA, 25 bp, Homo sapien
atggcgtcgacacggcaatccccat

SEQ ID NO: 314820 - DNA, 25 bp, Homo sapien
tgggtggatggcgtcgacacggcaa

SEQ ID NO: 314821 - DNA, 25 bp, Homo sapien
gtggatggcgtcgacacggcaatcc

SEQ ID NO: 314822 - DNA, 25 bp, Homo sapien
agacgctgccgctgaggtgatcttg

SEQ ID NO: 314823 - DNA, 25 bp, Homo sapien
tgtgcaccatggcaccaaacacgag

SEQ ID NO: 314824 - DNA, 25 bp, Homo sapien
cagacgctgccgctgaggtgatctt

SEQ ID NO: 314825 - DNA, 25 bp, Homo sapien
ttaatctggtgatcggcgcagctcc

SEQ ID NO: 314826 - DNA, 25 bp, Homo sapien
cagcacctaggaagaggcgctcatt

SEQ ID NO: 314827 - DNA, 25 bp, Homo sapien
gaaaattccagcaacgtcctgggca

SEQ ID NO: 314828 - DNA, 25 bp, Homo sapien
caaatgccaccttgttcccgggaag

SEQ ID NO: 314829 - DNA, 25 bp, Homo sapien
tgcaggacgagcagaatggaccaca

SEQ ID NO: 314830 - DNA, 25 bp, Homo sapien
aagtacctatgaagagaacccctgg

SEQ ID NO: 314831 - DNA, 25 bp, Homo sapien
tatttcccctagcttgcgatgccag

SEQ ID NO: 314832 - DNA, 25 bp, Homo sapien
tctttacaatcgtgcatggtccagc

SEQ ID NO: 314833 - DNA, 25 bp, Homo sapien
tgtaagctgctctagaacgaagttc

SEQ ID NO: 314834 - DNA, 25 bp, Homo sapien
tactgttcaccgcaggagtggccgt

SEQ ID NO: 314835 - DNA, 25 bp, Homo sapien
caggatatgcgtgctacactggaag

SEQ ID NO: 314836 - DNA, 25 bp, Homo sapien
gggtgttcgcgataaaggcaacact

SEQ ID NO: 314837 - DNA, 25 bp, Homo sapien
tgagtggctctggtgatactctcca

SEQ ID NO: 314838 - DNA, 25 bp, Homo sapien
agccctttgctatctgcgcgcagga

SEQ ID NO: 314839 - DNA, 25 bp, Homo sapien
gaatctcagacctcgggactgctgt

SEQ ID NO: 314840 - DNA, 25 bp, Homo sapien
tgcggtaccgtgtgtctgacacctg

SEQ ID NO: 314841 - DNA, 25 bp, Homo sapien
gagactccatcgccccccccaacaa

SEQ ID NO: 314842 - DNA, 25 bp, Homo sapien
ggagactccatcgccccccccaaca

SEQ ID NO: 314843 - DNA, 25 bp, Homo sapien
aagtttcccatacactggcctgccc

SEQ ID NO: 314844 - DNA, 25 bp, Homo sapien
aaagtttcccatacactggcctgcc

SEQ ID NO: 314845 - DNA, 25 bp, Homo sapien
gaatatgcggcttaaactttgatct

SEQ ID NO: 314846 - DNA, 25 bp, Homo sapien
ggagcacgctgtagacaccgttcct

SEQ ID NO: 314847 - DNA, 25 bp, Homo sapien
gcccacgtagatgatgtctgtaacg

SEQ ID NO: 314848 - DNA, 25 bp, Homo sapien
tagtgtgtatccgtgcccacgtaga

SEQ ID NO: 314849 - DNA, 25 bp, Homo sapien
ttctcatgagcagaccatcccagtg

SEQ ID NO: 314850 - DNA, 25 bp, Homo sapien
cataccccaggtggacatgatgagt

SEQ ID NO: 314851 - DNA, 25 bp, Homo sapien
catcccagtgaatgcaaagggcatg

SEQ ID NO: 314852 - DNA, 25 bp, Homo sapien
gggcgggtcacttacccttctgagc

SEQ ID NO: 314853 - DNA, 25 bp, Homo sapien
gaggaccgtccgcattcttctgtgt

SEQ ID NO: 314854 - DNA, 25 bp, Homo sapien
taatgccgatgacacaccgaggtga

SEQ ID NO: 314855 - DNA, 25 bp, Homo sapien
tatcgaagactagggcgtaatgccg

SEQ ID NO: 314856 - DNA, 25 bp, Homo sapien
cactgtggagtcctcagcttaacac

SEQ ID NO: 314857 - DNA, 25 bp, Homo sapien
gcctcactcgctgacatggcatttg

SEQ ID NO: 314858 - DNA, 25 bp, Homo sapien
tgcatgtcaatacgagtcactgtgg

SEQ ID NO: 314859 - DNA, 25 bp, Homo sapien
tacctctattgaagagctcactgca

SEQ ID NO: 314860 - DNA, 25 bp, Homo sapien
gtcactgtggtgtctcacgagaatt

SEQ ID NO: 314861 - DNA, 25 bp, Homo sapien
gctgattgacagcaggcactgtttt

SEQ ID NO: 314862 - DNA, 25 bp, Homo sapien
ggccactgcgcgtggctcagtttaa

SEQ ID NO: 314863 - DNA, 25 bp, Homo sapien
tccgggaacttctagtatcaaagct

SEQ ID NO: 314864 - DNA, 25 bp, Homo sapien
tatcaaagctgattgacagcaggca

SEQ ID NO: 314865 - DNA, 25 bp, Homo sapien
cacaataatagacggcatatagcaa

SEQ ID NO: 314866 - DNA, 25 bp, Homo sapien
gtttcacaccgcgagaggcaggcgt

SEQ ID NO: 314867 - DNA, 25 bp, Homo sapien
catatagcaaaggtccccagtttca

SEQ ID NO: 314868 - DNA, 25 bp, Homo sapien
ccgcgagaggcaggcgtcgtcttca

SEQ ID NO: 314869 - DNA, 25 bp, Homo sapien
tccagagcctagagccgagaagctc

SEQ ID NO: 314870 - DNA, 25 bp, Homo sapien
gcggcccagacaccccgagtgcacc

SEQ ID NO: 314871 - DNA, 25 bp, Homo sapien
tagagccgagaagctcttccgcctc

SEQ ID NO: 314872 - DNA, 25 bp, Homo sapien
gagcctagagccgagaagctcttcc

SEQ ID NO: 314873 - DNA, 25 bp, Homo sapien
tgttgctgcgcttccagaattgctt

SEQ ID NO: 314874 - DNA, 25 bp, Homo sapien
agaattgcttcctggccccgtcgct

SEQ ID NO: 314875 - DNA, 25 bp, Homo sapien
tgcgcttccagaattgcttcctggc

SEQ ID NO: 314876 - DNA, 25 bp, Homo sapien
cttgctgttgctgcgcttccagaat

SEQ ID NO: 314877 - DNA, 25 bp, Homo sapien
tggagtcgaatagggtctccggcca

SEQ ID NO: 314878 - DNA, 25 bp, Homo sapien
gagctgtcagtaactcacgctgcta

SEQ ID NO: 314879 - DNA, 25 bp, Homo sapien
tgttctcgaatcaagcacggtcctg

SEQ ID NO: 314880 - DNA, 25 bp, Homo sapien
ggccacctttgatgactcccttcat

SEQ ID NO: 314881 - DNA, 25 bp, Homo sapien
tctgtcaagtctctaggtgagcatc

SEQ ID NO: 314882 - DNA, 25 bp, Homo sapien
tttagactgatgaggaaccaaaacc

SEQ ID NO: 314883 - DNA, 25 bp, Homo sapien
gagccacagccttcaatccaaaggt

SEQ ID NO: 314884 - DNA, 25 bp, Homo sapien
tactagttgacgaactaaggcccac

SEQ ID NO: 314885 - DNA, 25 bp, Homo sapien
agtgaccactggacgctgcggcacc

SEQ ID NO: 314886 - DNA, 25 bp, Homo sapien
agcttccactcaggtgcaagccgcc

SEQ ID NO: 314887 - DNA, 25 bp, Homo sapien
aggtgcaagccgccaccaccagtga

SEQ ID NO: 314888 - DNA, 25 bp, Homo sapien
caccagtgaccactggacgctgcgg

SEQ ID NO: 314889 - DNA, 25 bp, Homo sapien
aactgcggaaagcaacagcccttcg

SEQ ID NO: 314890 - DNA, 25 bp, Homo sapien
tgcctgcataccctctgtcagcaga

SEQ ID NO: 314891 - DNA, 25 bp, Homo sapien
agcccttcgggagccaagagagtca

SEQ ID NO: 314892 - DNA, 25 bp, Homo sapien
taaagtgaagtgtggcgagaattcc

SEQ ID NO: 314893 - DNA, 25 bp, Homo sapien
gatcggttcctgctgtacagccagg

SEQ ID NO: 314894 - DNA, 25 bp, Homo sapien
cgggacctgtgtaaggaggacatga

SEQ ID NO: 314895 - DNA, 25 bp, Homo sapien
gtctcggcggaagcgggacctgtgt

SEQ ID NO: 314896 - DNA, 25 bp, Homo sapien
gaggacatgagcattccacccagtg

SEQ ID NO: 314897 - DNA, 25 bp, Homo sapien
caggatcagattcctggtgagtgag

SEQ ID NO: 314898 - DNA, 25 bp, Homo sapien
cacctgttaagtcccctagggaatg

SEQ ID NO: 314899 - DNA, 25 bp, Homo sapien
cagcctgagttcaaacaggaggatg

SEQ ID NO: 314900 - DNA, 25 bp, Homo sapien
gaagaatctctgctgccgagcacag

SEQ ID NO: 314901 - DNA, 25 bp, Homo sapien
taactctaggagctttggaggaaaa

SEQ ID NO: 314902 - DNA, 25 bp, Homo sapien
catatatgaagtaaacaggcaagtc

SEQ ID NO: 314903 - DNA, 25 bp, Homo sapien
ttctaacacatggtgatactcccca

SEQ ID NO: 314904 - DNA, 25 bp, Homo sapien
gaaaaaccatcatggcaacagtgaa

SEQ ID NO: 314905 - DNA, 25 bp, Homo sapien
gggtgctgggcaccatacacgtgct

SEQ ID NO: 314906 - DNA, 25 bp, Homo sapien
gtgccatgtaacagtggatcaaagg

SEQ ID NO: 314907 - DNA, 25 bp, Homo sapien
taacagtggatcaaagggggggtgc

SEQ ID NO: 314908 - DNA, 25 bp, Homo sapien
gtgctgggcaccatacacgtgctgg

SEQ ID NO: 314909 - DNA, 25 bp, Homo sapien
tgtggttacgcagcacacggttggc

SEQ ID NO: 314910 - DNA, 25 bp, Homo sapien
tcactggtgtggtcggcatcttggc

SEQ ID NO: 314911 - DNA, 25 bp, Homo sapien
ggcatcgctggtattgctctcaaac

SEQ ID NO: 314912 - DNA, 25 bp, Homo sapien
tggaaggtgctgaccctcttggcct

SEQ ID NO: 314913 - DNA, 25 bp, Homo sapien
aggacgtgtggctctcactgaccga

SEQ ID NO: 314914 - DNA, 25 bp, Homo sapien
gacaggacgtgtggctctcactgac

SEQ ID NO: 314915 - DNA, 25 bp, Homo sapien
gcaggacaggacgtgtggctctcac

SEQ ID NO: 314916 - DNA, 25 bp, Homo sapien
cactgaccgacttcaccagccggag

SEQ ID NO: 314917 - DNA, 25 bp, Homo sapien
ggaagagaaccataagggctctcgt

SEQ ID NO: 314918 - DNA, 25 bp, Homo sapien
agagaaccataagggctctcgtggg

SEQ ID NO: 314919 - DNA, 25 bp, Homo sapien
gaaccataagggctctcgtgggcca

SEQ ID NO: 314920 - DNA, 25 bp, Homo sapien
ccttggaagagaaccataagggctc

SEQ ID NO: 314921 - DNA, 25 bp, Homo sapien
gtcacccatggaaccatcacaagct

SEQ ID NO: 314922 - DNA, 25 bp, Homo sapien
ctccactccactcggagaagacatg

SEQ ID NO: 314923 - DNA, 25 bp, Homo sapien
ccatcacaagctggtggagttagga

SEQ ID NO: 314924 - DNA, 25 bp, Homo sapien
gacatgcacgtagctaggccagaag

SEQ ID NO: 314925 - DNA, 25 bp, Homo sapien
gtacccgcggcccacagtgggttca

SEQ ID NO: 314926 - DNA, 25 bp, Homo sapien
gcagggcacagatgtacctcagtct

SEQ ID NO: 314927 - DNA, 25 bp, Homo sapien
gcagcttttccatcacagacgtgat

SEQ ID NO: 314928 - DNA, 25 bp, Homo sapien
ggttcatcgcacaaccatgcagctt

SEQ ID NO: 314929 - DNA, 25 bp, Homo sapien
aactccgactgccacaggctgaagg

SEQ ID NO: 314930 - DNA, 25 bp, Homo sapien
cgtgtggtcctgcggtcctggccac

SEQ ID NO: 314931 - DNA, 25 bp, Homo sapien
cagggatcctgccaactccgactgc

SEQ ID NO: 314932 - DNA, 25 bp, Homo sapien
catgagcagatgaagccagggatcc

SEQ ID NO: 314933 - DNA, 25 bp, Homo sapien
tctctttcgctcagcgctgagctgc

SEQ ID NO: 314934 - DNA, 25 bp, Homo sapien
gacggtggccgagtgtgggagagac

SEQ ID NO: 314935 - DNA, 25 bp, Homo sapien
atgtgccacccagcgtgacggtggc

SEQ ID NO: 314936 - DNA, 25 bp, Homo sapien
ttgtcgagccgggaggcctctcttt

SEQ ID NO: 314937 - DNA, 25 bp, Homo sapien
gcttctccaacattggcaaatattt

SEQ ID NO: 314938 - DNA, 25 bp, Homo sapien
agtgatttgcttctccaacattggc

SEQ ID NO: 314939 - DNA, 25 bp, Homo sapien
atcagtgatttgcttctccaacatt

SEQ ID NO: 314940 - DNA, 25 bp, Homo sapien
tgatttgcttctccaacattggcaa

SEQ ID NO: 314941 - DNA, 25 bp, Homo sapien
ccgttcgaaagccttgagggccaga

SEQ ID NO: 314942 - DNA, 25 bp, Homo sapien
tcagcacgctctcataaagcctaga

SEQ ID NO: 314943 - DNA, 25 bp, Homo sapien
cgtgccttctgtcctaccgttcgaa

SEQ ID NO: 314944 - DNA, 25 bp, Homo sapien
cactccttgacggacgggtcgtcgt

SEQ ID NO: 314945 - DNA, 25 bp, Homo sapien
acactgagggcctactccaaggccg

SEQ ID NO: 314946 - DNA, 25 bp, Homo sapien
gaaacaggtaggttgagccacttca

SEQ ID NO: 314947 - DNA, 25 bp, Homo sapien
tcatgctccctctacagctgacgaa

SEQ ID NO: 314948 - DNA, 25 bp, Homo sapien
cttcatgagtaaggacacggccagc

SEQ ID NO: 314949 - DNA, 25 bp, Homo sapien
cttcagctgtaaaccagcgataagg

SEQ ID NO: 314950 - DNA, 25 bp, Homo sapien
gtaaaccagcgataaggccagcaat

SEQ ID NO: 314951 - DNA, 25 bp, Homo sapien
taaccttgtctcgagctcttcagct

SEQ ID NO: 314952 - DNA, 25 bp, Homo sapien
gagggcagccgcctgtttaaccttg

SEQ ID NO: 314953 - DNA, 25 bp, Homo sapien
ctagagggcgacgctgaacgctgac

SEQ ID NO: 314954 - DNA, 25 bp, Homo sapien
tgtctacactaaccagaaacgtgtg

SEQ ID NO: 314955 - DNA, 25 bp, Homo sapien
agcaccaagaatgcccactgtctac

SEQ ID NO: 314956 - DNA, 25 bp, Homo sapien
gctcccacagcagaagcgagatctc

SEQ ID NO: 314957 - DNA, 25 bp, Homo sapien
ggctgccttccttgacaaagccctt

SEQ ID NO: 314958 - DNA, 25 bp, Homo sapien
ctgccttccttgacaaagcccttcc

SEQ ID NO: 314959 - DNA, 25 bp, Homo sapien
gctgccttccttgacaaagcccttc

SEQ ID NO: 314960 - DNA, 25 bp, Homo sapien
gaaaacgacggtaagaacacagcag

SEQ ID NO: 314961 - DNA, 25 bp, Homo sapien
aagcccggacaggacctgacatgcg

SEQ ID NO: 314962 - DNA, 25 bp, Homo sapien
tatggaggcctctgacattacccca

SEQ ID NO: 314963 - DNA, 25 bp, Homo sapien
tgtgttagtaaatgtcgaagcccgg

SEQ ID NO: 314964 - DNA, 25 bp, Homo sapien
tcctcaatcaacttcacggaaaacc

SEQ ID NO: 314965 - DNA, 25 bp, Homo sapien
ccacagtgtgaccaacccgtgggag

SEQ ID NO: 314966 - DNA, 25 bp, Homo sapien
cattttcgctaaacacagtgagcct

SEQ ID NO: 314967 - DNA, 25 bp, Homo sapien
catcgagctaaaccaaagccacaca

SEQ ID NO: 314968 - DNA, 25 bp, Homo sapien
ttataaataggtcgtgaagataatt

SEQ ID NO: 314969 - DNA, 25 bp, Homo sapien
agaaccctgtcaatcaactctacaa

SEQ ID NO: 314970 - DNA, 25 bp, Homo sapien
ggtcgtgaagataattttaacataa

SEQ ID NO: 314971 - DNA, 25 bp, Homo sapien
actctacaacaggatagaggaaaga

SEQ ID NO: 314972 - DNA, 25 bp, Homo sapien
ccaaggatctgaaagcagaagctca

SEQ ID NO: 314973 - DNA, 25 bp, Homo sapien
ctaaccaaggatctgaaagcagaag

SEQ ID NO: 314974 - DNA, 25 bp, Homo sapien
caggtaagcagactggcctctaaca

SEQ ID NO: 314975 - DNA, 25 bp, Homo sapien
cagaagctcaggtaagcagactggc

SEQ ID NO: 314976 - DNA, 25 bp, Homo sapien
tgtgtctgcttgtacacaatctgca

SEQ ID NO: 314977 - DNA, 25 bp, Homo sapien
agaggctcacgtgctgtctacaggg

SEQ ID NO: 314978 - DNA, 25 bp, Homo sapien
ttttccttagggcagtgctcagaag

SEQ ID NO: 314979 - DNA, 25 bp, Homo sapien
aagccaggccaggtgtcacgaagct

SEQ ID NO: 314980 - DNA, 25 bp, Homo sapien
tacaaaatgcatagtgctaaccatc

SEQ ID NO: 314981 - DNA, 25 bp, Homo sapien
gataacaacttaacatcaatcgcac

SEQ ID NO: 314982 - DNA, 25 bp, Homo sapien
caatcgcacacaaaaactttatact

SEQ ID NO: 314983 - DNA, 25 bp, Homo sapien
tccatatcaactgtatgttttttct

SEQ ID NO: 314984 - DNA, 25 bp, Homo sapien
gacaccaggttcgtggatctccagc

SEQ ID NO: 314985 - DNA, 25 bp, Homo sapien
gaatgatttaactcagcagagctag

SEQ ID NO: 314986 - DNA, 25 bp, Homo sapien
gatttataagctttatgttcccata

SEQ ID NO: 314987 - DNA, 25 bp, Homo sapien
gctggcttgcatgaacaattaaatg

SEQ ID NO: 314988 - DNA, 25 bp, Homo sapien
atgagagaaactacgggaccaggcg

SEQ ID NO: 314989 - DNA, 25 bp, Homo sapien
gagctgacacttgtatccggcacct

SEQ ID NO: 314990 - DNA, 25 bp, Homo sapien
caaagaaggcatgttcggcaatcca

SEQ ID NO: 314991 - DNA, 25 bp, Homo sapien
aatgaaccgggttgtgtgacccaca

SEQ ID NO: 314992 - DNA, 25 bp, Homo sapien
gggaagcatcagaaatgcctgcagg

SEQ ID NO: 314993 - DNA, 25 bp, Homo sapien
gaacacggatggcatgcgttcccgc

SEQ ID NO: 314994 - DNA, 25 bp, Homo sapien
catgaaacgtagctctaaggcccag

SEQ ID NO: 314995 - DNA, 25 bp, Homo sapien
gcgttcccgcgactacttcatcata

SEQ ID NO: 314996 - DNA, 25 bp, Homo sapien
tgtgatcgcatgctgccctagtcct

SEQ ID NO: 314997 - DNA, 25 bp, Homo sapien
gtaagcctgtcgcacattttcgcca

SEQ ID NO: 314998 - DNA, 25 bp, Homo sapien
cccagttttctgatggaccttgaag

SEQ ID NO: 314999 - DNA, 25 bp, Homo sapien
tcaattgacgtgatttcttgccctg

SEQ ID NO: 315000 - DNA, 25 bp, Homo sapien
gcaatgggcctaggcgcctacttaa

SEQ ID NO: 315001 - DNA, 25 bp, Homo sapien
gcaaagtaaccatgcttccctgcag

SEQ ID NO: 315002 - DNA, 25 bp, Homo sapien
gtagctttacccacatgctgaatgg

SEQ ID NO: 315003 - DNA, 25 bp, Homo sapien
gacagggaagccacatgaccatcct

SEQ ID NO: 315004 - DNA, 25 bp, Homo sapien
ccacgtcattggacgcactggctta

SEQ ID NO: 315005 - DNA, 25 bp, Homo sapien
ggcttagggattccggaccagctca

SEQ ID NO: 315006 - DNA, 25 bp, Homo sapien
tgagaggagcttccacgtcattgga

SEQ ID NO: 315007 - DNA, 25 bp, Homo sapien
gaccagctcaacctccgtaattcct

SEQ ID NO: 315008 - DNA, 25 bp, Homo sapien
tacaaaccaacctgagaagtctgca

SEQ ID NO: 315009 - DNA, 25 bp, Homo sapien
ccctagacacggcacatccttaata

SEQ ID NO: 315010 - DNA, 25 bp, Homo sapien
gacacggcacatccttaataaatag

SEQ ID NO: 315011 - DNA, 25 bp, Homo sapien
ataaatagaaaacggcaattcggtg

SEQ ID NO: 315012 - DNA, 25 bp, Homo sapien
ccgaaccctcccagacaacacgctc

SEQ ID NO: 315013 - DNA, 25 bp, Homo sapien
gaaccctcccagacaacacgctcat

SEQ ID NO: 315014 - DNA, 25 bp, Homo sapien
cgaaccctcccagacaacacgctca

SEQ ID NO: 315015 - DNA, 25 bp, Homo sapien
ggctggtctccggtctacattggcg

SEQ ID NO: 315016 - DNA, 25 bp, Homo sapien
cctagaatcgtaatagtgctcaata

SEQ ID NO: 315017 - DNA, 25 bp, Homo sapien
gtcctggtgaacttcgtcgttccta

SEQ ID NO: 315018 - DNA, 25 bp, Homo sapien
tccggtctacattggcgggaaggta

SEQ ID NO: 315019 - DNA, 25 bp, Homo sapien
ggctacaccttctgctatgatctga

SEQ ID NO: 315020 - DNA, 25 bp, Homo sapien
tccatcacctagaagcagggtttgc

SEQ ID NO: 315021 - DNA, 25 bp, Homo sapien
tggctatcccacaactgaaagagaa

SEQ ID NO: 315022 - DNA, 25 bp, Homo sapien
tatgatctgaagtgtgtcccctgca

SEQ ID NO: 315023 - DNA, 25 bp, Homo sapien
ccttgggctgcaggatcaacgcttc

SEQ ID NO: 315024 - DNA, 25 bp, Homo sapien
gcaggatcaacgcttcagggctcat

SEQ ID NO: 315025 - DNA, 25 bp, Homo sapien
aacgcttcagggctcatgcgaggga

SEQ ID NO: 315026 - DNA, 25 bp, Homo sapien
cagggctcatgcgagggatgtctat

SEQ ID NO: 315027 - DNA, 25 bp, Homo sapien
cactctgagaccaagaggcctgaga

SEQ ID NO: 315028 - DNA, 25 bp, Homo sapien
taccactagccgtgactcagggtcc

SEQ ID NO: 315029 - DNA, 25 bp, Homo sapien
tcagagacaagaggaccaattgcca

SEQ ID NO: 315030 - DNA, 25 bp, Homo sapien
accaattgccaattgctaccactag

SEQ ID NO: 315031 - DNA, 25 bp, Homo sapien
gagtgacgagatcatttataccctg

SEQ ID NO: 315032 - DNA, 25 bp, Homo sapien
cctgaacgtatccactggctgggtg

SEQ ID NO: 315033 - DNA, 25 bp, Homo sapien
tcgcccatatgaacaagatcctttc

SEQ ID NO: 315034 - DNA, 25 bp, Homo sapien
ctgggtggcggatcgcccatatgaa

SEQ ID NO: 315035 - DNA, 25 bp, Homo sapien
tgtcttcagtagttgagcatgtaga

SEQ ID NO: 315036 - DNA, 25 bp, Homo sapien
attatacatagtaacacacagcaag

SEQ ID NO: 315037 - DNA, 25 bp, Homo sapien
aaagctgttgttgatgagaaaacta

SEQ ID NO: 315038 - DNA, 25 bp, Homo sapien
tcattaataacattacacttagtag

SEQ ID NO: 315039 - DNA, 25 bp, Homo sapien
tgatgaaaggccacagaaacgcaat

SEQ ID NO: 315040 - DNA, 25 bp, Homo sapien
tgttcaaccagttatttcacaagta

SEQ ID NO: 315041 - DNA, 25 bp, Homo sapien
gaaaccaaatgttactagtatagca

SEQ ID NO: 315042 - DNA, 25 bp, Homo sapien
tgactgacactctatcaccttaatc

SEQ ID NO: 315043 - DNA, 25 bp, Homo sapien
tggatatgtcctcatcttctgagga

SEQ ID NO: 315044 - DNA, 25 bp, Homo sapien
gatgggaatctgaggccgaccacaa

SEQ ID NO: 315045 - DNA, 25 bp, Homo sapien
tgtcctcgggtaaggctcatctctc

SEQ ID NO: 315046 - DNA, 25 bp, Homo sapien
tcttctgaggataatctgttcatct

SEQ ID NO: 315047 - DNA, 25 bp, Homo sapien
gcttagcaatgagacaacctcctat

SEQ ID NO: 315048 - DNA, 25 bp, Homo sapien
tgaagtctactgacagaggtcctac

SEQ ID NO: 315049 - DNA, 25 bp, Homo sapien
gtcagagggctgcagtaaaattcac

SEQ ID NO: 315050 - DNA, 25 bp, Homo sapien
aaagcaagcaccctcaggagtagcc

SEQ ID NO: 315051 - DNA, 25 bp, Homo sapien
acgcatgcgacacagtccccagatt

SEQ ID NO: 315052 - DNA, 25 bp, Homo sapien
aaagcatgacacacgcatgcgacac

SEQ ID NO: 315053 - DNA, 25 bp, Homo sapien
cacagtccccagattcgaggagcag

SEQ ID NO: 315054 - DNA, 25 bp, Homo sapien
catgacacacgcatgcgacacagtc

SEQ ID NO: 315055 - DNA, 25 bp, Homo sapien
caatcaacagcacactgaatggaca

SEQ ID NO: 315056 - DNA, 25 bp, Homo sapien
gcaatcaatacgattctatacctag

SEQ ID NO: 315057 - DNA, 25 bp, Homo sapien
tgtacactaacaatgtccaagctga

SEQ ID NO: 315058 - DNA, 25 bp, Homo sapien
tgccaaagcaatcaggcaacagaaa

SEQ ID NO: 315059 - DNA, 25 bp, Homo sapien
cctacattgtaaggttaaatgtggg

SEQ ID NO: 315060 - DNA, 25 bp, Homo sapien
gagcattatgtacagaaggtagaaa

SEQ ID NO: 315061 - DNA, 25 bp, Homo sapien
caatagagcattatgtacagaaggt

SEQ ID NO: 315062 - DNA, 25 bp, Homo sapien
aacactggatggtttcagaaattat

SEQ ID NO: 315063 - DNA, 25 bp, Homo sapien
tacatttaaatagcacggaggcatc

SEQ ID NO: 315064 - DNA, 25 bp, Homo sapien
attcaaggtgatggaacaatgctcc

SEQ ID NO: 315065 - DNA, 25 bp, Homo sapien
aaatgtggtcctattgctcgcctgc

SEQ ID NO: 315066 - DNA, 25 bp, Homo sapien
gtcactccgagttatccgtccaaag

SEQ ID NO: 315067 - DNA, 25 bp, Homo sapien
tccaggagccatatgctagagtgtc

SEQ ID NO: 315068 - DNA, 25 bp, Homo sapien
tctcatgtgtcccaccggctgtggg

SEQ ID NO: 315069 - DNA, 25 bp, Homo sapien
tatgctgctaaaatccagctgtgag

SEQ ID NO: 315070 - DNA, 25 bp, Homo sapien
gagtgtcctctctgggtaaccacat

SEQ ID NO: 315071 - DNA, 25 bp, Homo sapien
cttcatctcactttggtctcagagt

SEQ ID NO: 315072 - DNA, 25 bp, Homo sapien
ccattgtgataaggaatattgttct

SEQ ID NO: 315073 - DNA, 25 bp, Homo sapien
tagtttgttaggactttgctgagga

SEQ ID NO: 315074 - DNA, 25 bp, Homo sapien
tctcagagtaatatcggccacatag

SEQ ID NO: 315075 - DNA, 25 bp, Homo sapien
aaggagtcatctccaccgcgatcgc

SEQ ID NO: 315076 - DNA, 25 bp, Homo sapien
caaggctccgtgatgggtggaaaac

SEQ ID NO: 315077 - DNA, 25 bp, Homo sapien
cagagaatgccacactgccagtgag

SEQ ID NO: 315078 - DNA, 25 bp, Homo sapien
gaaggacaacgcacactgcactaaa

SEQ ID NO: 315079 - DNA, 25 bp, Homo sapien
tatcgtctcctctgataactatgcc

SEQ ID NO: 315080 - DNA, 25 bp, Homo sapien
tgcatttcttacagaccggcagtgc

SEQ ID NO: 315081 - DNA, 25 bp, Homo sapien
cagcacacagggagctatcgtctcc

SEQ ID NO: 315082 - DNA, 25 bp, Homo sapien
gatcaagtattatgaactgcatttc

SEQ ID NO: 315083 - DNA, 25 bp, Homo sapien
tgtagtgaccctccgtcgagcaagt

SEQ ID NO: 315084 - DNA, 25 bp, Homo sapien
tatatatgtgtgctggtgccccaac

SEQ ID NO: 315085 - DNA, 25 bp, Homo sapien
tgctttgctctattgtgcttcacag

SEQ ID NO: 315086 - DNA, 25 bp, Homo sapien
tcttgcagttgtctggaaccaaatc

SEQ ID NO: 315087 - DNA, 25 bp, Homo sapien
tcttcccgaacataagaaatggctc

SEQ ID NO: 315088 - DNA, 25 bp, Homo sapien
tgaaatcatgtttagggcgacacag

SEQ ID NO: 315089 - DNA, 25 bp, Homo sapien
cactgggctgttcagtggccagcaa

SEQ ID NO: 315090 - DNA, 25 bp, Homo sapien
tttaaacttcctctatcggtgggca

SEQ ID NO: 315091 - DNA, 25 bp, Homo sapien
gacccactgttcacaacactgcatg

SEQ ID NO: 315092 - DNA, 25 bp, Homo sapien
gggtcggtgtcaggacccactgttc

SEQ ID NO: 315093 - DNA, 25 bp, Homo sapien
ctgcgggtcggtgtcaggacccact

SEQ ID NO: 315094 - DNA, 25 bp, Homo sapien
aggacccactgttcacaacactgca

SEQ ID NO: 315095 - DNA, 25 bp, Homo sapien
caaagggccaaaagacgccaagagg

SEQ ID NO: 315096 - DNA, 25 bp, Homo sapien
gcctggactgggtatcttttgtcct

SEQ ID NO: 315097 - DNA, 25 bp, Homo sapien
cagctatgcctgtgtggtagtggca

SEQ ID NO: 315098 - DNA, 25 bp, Homo sapien
cttttgtcctcagctatgcctgtgt

SEQ ID NO: 315099 - DNA, 25 bp, Homo sapien
gacgccatcaattgtgccgcactca

SEQ ID NO: 315100 - DNA, 25 bp, Homo sapien
tctctgacgctggtgacgccatcaa

SEQ ID NO: 315101 - DNA, 25 bp, Homo sapien
tttcaaaccctgacagagccatccg

SEQ ID NO: 315102 - DNA, 25 bp, Homo sapien
tcagaccactgaccgagttcctctg

SEQ ID NO: 315103 - DNA, 25 bp, Homo sapien
caggtgtcagggagggacgtgatga

SEQ ID NO: 315104 - DNA, 25 bp, Homo sapien
agggacgtgatgaagccagcgctgt

SEQ ID NO: 315105 - DNA, 25 bp, Homo sapien
aagccagcgctgtggaaacgaggtg

SEQ ID NO: 315106 - DNA, 25 bp, Homo sapien
gcgctgtggaaacgaggtgggcaca

SEQ ID NO: 315107 - DNA, 25 bp, Homo sapien
caaccaggccctcactctcttggcc

SEQ ID NO: 315108 - DNA, 25 bp, Homo sapien
ggtgcaaccaggccctcactctctt

SEQ ID NO: 315109 - DNA, 25 bp, Homo sapien
tgcaaccaggccctcactctcttgg

SEQ ID NO: 315110 - DNA, 25 bp, Homo sapien
cgggtgcaaccaggccctcactctc

SEQ ID NO: 315111 - DNA, 25 bp, Homo sapien
tctcctgcgcactgtgaatgtgcgt

SEQ ID NO: 315112 - DNA, 25 bp, Homo sapien
tcctgatacggatgatgctgccgct

SEQ ID NO: 315113 - DNA, 25 bp, Homo sapien
ggcatcttcgcaaggaaaacgttct

SEQ ID NO: 315114 - DNA, 25 bp, Homo sapien
cgtggctatgccgagcagcctggta

SEQ ID NO: 315115 - DNA, 25 bp, Homo sapien
caaagatagaacagacaatggcgct

SEQ ID NO: 315116 - DNA, 25 bp, Homo sapien
cagaaagccgtaccacagatgtgcg

SEQ ID NO: 315117 - DNA, 25 bp, Homo sapien
gagtttccaaaactgcactgggtaa

SEQ ID NO: 315118 - DNA, 25 bp, Homo sapien
ttccatgctatgatcaaaaccccag

SEQ ID NO: 315119 - DNA, 25 bp, Homo sapien
ggcacgccggagacgtccaccgtgt

SEQ ID NO: 315120 - DNA, 25 bp, Homo sapien
tcggcctcgatgttgcacagcacct

SEQ ID NO: 315121 - DNA, 25 bp, Homo sapien
acctctgcgggcacgccggagacgt

SEQ ID NO: 315122 - DNA, 25 bp, Homo sapien
gcaccagtaggtgtcggcctcgatg

SEQ ID NO: 315123 - DNA, 25 bp, Homo sapien
tggccaccaatactgcaggcgaggg

SEQ ID NO: 315124 - DNA, 25 bp, Homo sapien
tctgaggccctttaaggaggatccc

SEQ ID NO: 315125 - DNA, 25 bp, Homo sapien
ggaggatccctcttagcacagctag

SEQ ID NO: 315126 - DNA, 25 bp, Homo sapien
taccgtgagcctgtgccctatttgg

SEQ ID NO: 315127 - DNA, 25 bp, Homo sapien
ccagccaatagatacgaggtttcca

SEQ ID NO: 315128 - DNA, 25 bp, Homo sapien
caccatcagagaagcgacatttgaa

SEQ ID NO: 315129 - DNA, 25 bp, Homo sapien
caaaaagccgaaagatctagcagaa

SEQ ID NO: 315130 - DNA, 25 bp, Homo sapien
gaacaaagtaagtcacgaggagtct

SEQ ID NO: 315131 - DNA, 25 bp, Homo sapien
cccaaagtcttccgcctctctgagc

SEQ ID NO: 315132 - DNA, 25 bp, Homo sapien
ccaaagtcttccgcctctctgagca

SEQ ID NO: 315133 - DNA, 25 bp, Homo sapien
caaagtcttccgcctctctgagcac

SEQ ID NO: 315134 - DNA, 25 bp, Homo sapien
gaacaaagaggactggccttaccca

SEQ ID NO: 315135 - DNA, 25 bp, Homo sapien
tatgctacagcagtccctggaaagc

SEQ ID NO: 315136 - DNA, 25 bp, Homo sapien
taagaaatacactacgctcacgggt

SEQ ID NO: 315137 - DNA, 25 bp, Homo sapien
cagacatcatggtgcgcaaatcagc

SEQ ID NO: 315138 - DNA, 25 bp, Homo sapien
tcctggacttgctctagccgcagaa

SEQ ID NO: 315139 - DNA, 25 bp, Homo sapien
ttgctctagccgcagaaatgctcgc

SEQ ID NO: 315140 - DNA, 25 bp, Homo sapien
tgctctagccgcagaaatgctcgcc

SEQ ID NO: 315141 - DNA, 25 bp, Homo sapien
ggacttgctctagccgcagaaatgc

SEQ ID NO: 315142 - DNA, 25 bp, Homo sapien
aaacgtggagctgagcgactgcctt

SEQ ID NO: 315143 - DNA, 25 bp, Homo sapien
ccccaggtaagacaaacgtggagct

SEQ ID NO: 315144 - DNA, 25 bp, Homo sapien
tgagcgactgccttcgggccagcag

SEQ ID NO: 315145 - DNA, 25 bp, Homo sapien
taagacaaacgtggagctgagcgac

SEQ ID NO: 315146 - DNA, 25 bp, Homo sapien
cctttccgacagtgggggatgatct

SEQ ID NO: 315147 - DNA, 25 bp, Homo sapien
ctggctcgtagcaggcagcatcagg

SEQ ID NO: 315148 - DNA, 25 bp, Homo sapien
aagtgggctcgggccaccaggcagg

SEQ ID NO: 315149 - DNA, 25 bp, Homo sapien
ggtgctggctcgtagcaggcagcat

SEQ ID NO: 315150 - DNA, 25 bp, Homo sapien
cagtgacaggtccattactcctgct

SEQ ID NO: 315151 - DNA, 25 bp, Homo sapien
agtgacaggtccattactcctgctg

SEQ ID NO: 315152 - DNA, 25 bp, Homo sapien
ggctcacgagttcttctaacatttt

SEQ ID NO: 315153 - DNA, 25 bp, Homo sapien
catcaatccggctcacgagttcttc

SEQ ID NO: 315154 - DNA, 25 bp, Homo sapien
caggttgggcaaaggtgtagttgtc

SEQ ID NO: 315155 - DNA, 25 bp, Homo sapien
aatccggctcacgagttcttctaac

SEQ ID NO: 315156 - DNA, 25 bp, Homo sapien
gatcctgagcaggccaggatgctgc

SEQ ID NO: 315157 - DNA, 25 bp, Homo sapien
tccctgtcccaccgagggctgaggg

SEQ ID NO: 315158 - DNA, 25 bp, Homo sapien
atgctgccggcggatgaggacagct

SEQ ID NO: 315159 - DNA, 25 bp, Homo sapien
cagcagctgtctcagaaggatgccc

SEQ ID NO: 315160 - DNA, 25 bp, Homo sapien
tgtcctgcaaagtgaatgtactgaa

SEQ ID NO: 315161 - DNA, 25 bp, Homo sapien
atgtactgaattctgatgatatccc

SEQ ID NO: 315162 - DNA, 25 bp, Homo sapien
ctactgtcctgcaaagtgaatgtac

SEQ ID NO: 315163 - DNA, 25 bp, Homo sapien
actgtcctgcaaagtgaatgtactg

SEQ ID NO: 315164 - DNA, 25 bp, Homo sapien
cgtgaagactgctgttacggccttc

SEQ ID NO: 315165 - DNA, 25 bp, Homo sapien
ccgtgaagactgctgttacggcctt

SEQ ID NO: 315166 - DNA, 25 bp, Homo sapien
cccgtgaagactgctgttacggcct

SEQ ID NO: 315167 - DNA, 25 bp, Homo sapien
tcccgtgaagactgctgttacggcc

SEQ ID NO: 315168 - DNA, 25 bp, Homo sapien
tccaaattcagtggctccagtcacc

SEQ ID NO: 315169 - DNA, 25 bp, Homo sapien
tgccacgactgaaaacgcacgttcc

SEQ ID NO: 315170 - DNA, 25 bp, Homo sapien
cagggagttccccatctgcgggctt

SEQ ID NO: 315171 - DNA, 25 bp, Homo sapien
tacaatgtctgtcccgaaggataca

SEQ ID NO: 315172 - DNA, 25 bp, Homo sapien
cacaaactgtatgggcatttctcag

SEQ ID NO: 315173 - DNA, 25 bp, Homo sapien
actaatcgggttggatgcaggcact

SEQ ID NO: 315174 - DNA, 25 bp, Homo sapien
ttttatgagggagtatcacgtccac

SEQ ID NO: 315175 - DNA, 25 bp, Homo sapien
cagatccctatcctgactaatcggg

SEQ ID NO: 315176 - DNA, 25 bp, Homo sapien
gaggtagtcaagacaactttcagag

SEQ ID NO: 315177 - DNA, 25 bp, Homo sapien
aggtagtcaagacaactttcagaga

SEQ ID NO: 315178 - DNA, 25 bp, Homo sapien
ttgacccagaaggtactcacagtcc

SEQ ID NO: 315179 - DNA, 25 bp, Homo sapien
ccagaaggtactcacagtccagggt

SEQ ID NO: 315180 - DNA, 25 bp, Homo sapien
gacccagaaggtactcacagtccag

SEQ ID NO: 315181 - DNA, 25 bp, Homo sapien
gttgacccagaaggtactcacagtc

SEQ ID NO: 315182 - DNA, 25 bp, Homo sapien
gctccacctccatatccataagcag

SEQ ID NO: 315183 - DNA, 25 bp, Homo sapien
acctccatatccataagcagcccca

SEQ ID NO: 315184 - DNA, 25 bp, Homo sapien
gcaggaatggaacgtattaaaggga

SEQ ID NO: 315185 - DNA, 25 bp, Homo sapien
cagcatgcaggaatggaacgtatta

SEQ ID NO: 315186 - DNA, 25 bp, Homo sapien
tctgtctaaactcagggagacctgc

SEQ ID NO: 315187 - DNA, 25 bp, Homo sapien
cagttgattcaagcagcagagtgag

SEQ ID NO: 315188 - DNA, 25 bp, Homo sapien
catgcaatcatggagctcaccctgt

SEQ ID NO: 315189 - DNA, 25 bp, Homo sapien
taacatcaatgttgaccggaaacag

SEQ ID NO: 315190 - DNA, 25 bp, Homo sapien
gctggcttgattctggagcccatgg

SEQ ID NO: 315191 - DNA, 25 bp, Homo sapien
gagcccatgggacatccatccagaa

SEQ ID NO: 315192 - DNA, 25 bp, Homo sapien
cttagcacgactccgtggcttctct

SEQ ID NO: 315193 - DNA, 25 bp, Homo sapien
tccttcttcacacggaagtggtcac

SEQ ID NO: 315194 - DNA, 25 bp, Homo sapien
cacagctctgcgtggacgtctgggc

SEQ ID NO: 315195 - DNA, 25 bp, Homo sapien
cactggcgtgaatgaagctctgccg

SEQ ID NO: 315196 - DNA, 25 bp, Homo sapien
tgccgtggagataagctgaagtcag

SEQ ID NO: 315197 - DNA, 25 bp, Homo sapien
ggtgccgccttgcactggcgtgaat

SEQ ID NO: 315198 - DNA, 25 bp, Homo sapien
aaacacttcacagggatcgccattc

SEQ ID NO: 315199 - DNA, 25 bp, Homo sapien
agaagtgaccccgaaacacttcaca

SEQ ID NO: 315200 - DNA, 25 bp, Homo sapien
ccctgagaagtgaccccgaaacact

SEQ ID NO: 315201 - DNA, 25 bp, Homo sapien
aagtgaccccgaaacacttcacagg

SEQ ID NO: 315202 - DNA, 25 bp, Homo sapien
ttccaagttacacctcccttctctc

SEQ ID NO: 315203 - DNA, 25 bp, Homo sapien
gcttccaagttacacctcccttctc

SEQ ID NO: 315204 - DNA, 25 bp, Homo sapien
cttccaagttacacctcccttctct

SEQ ID NO: 315205 - DNA, 25 bp, Homo sapien
gtatctcacttcgtgttggtccagg

SEQ ID NO: 315206 - DNA, 25 bp, Homo sapien
cacttcgtgttggtccaggtgccgg

SEQ ID NO: 315207 - DNA, 25 bp, Homo sapien
tgcaggtatctcacttcgtgttggt

SEQ ID NO: 315208 - DNA, 25 bp, Homo sapien
ccacaggcggatggtacaacgcagg

SEQ ID NO: 315209 - DNA, 25 bp, Homo sapien
tcctcctagcacactgctcaggatg

SEQ ID NO: 315210 - DNA, 25 bp, Homo sapien
taaaaagcatgccaggagtatactc

SEQ ID NO: 315211 - DNA, 25 bp, Homo sapien
cctgagcgtgagttttttggcagaa

SEQ ID NO: 315212 - DNA, 25 bp, Homo sapien
tagacaaggtgtgagtcctgagcgt

SEQ ID NO: 315213 - DNA, 25 bp, Homo sapien
aatgagagactggagagcacggagg

SEQ ID NO: 315214 - DNA, 25 bp, Homo sapien
aaaaacaggctcagaatgagagact

SEQ ID NO: 315215 - DNA, 25 bp, Homo sapien
gactggagagcacggaggcccagca

SEQ ID NO: 315216 - DNA, 25 bp, Homo sapien
gagagactggagagcacggaggccc

SEQ ID NO: 315217 - DNA, 25 bp, Homo sapien
aatttcatggttacttggccctgta

SEQ ID NO: 315218 - DNA, 25 bp, Homo sapien
tatcagttcaagaatgagtccctgg

SEQ ID NO: 315219 - DNA, 25 bp, Homo sapien
tattgacacgtgtcccaagaggact

SEQ ID NO: 315220 - DNA, 25 bp, Homo sapien
gagtccctggtacaaatgagtcaat

SEQ ID NO: 315221 - DNA, 25 bp, Homo sapien
tgcatcacgttttcccgcagagtcc

SEQ ID NO: 315222 - DNA, 25 bp, Homo sapien
cagccgtgaccgtggctctgcatca

SEQ ID NO: 315223 - DNA, 25 bp, Homo sapien
cagagtccgagggacagtgaacaca

SEQ ID NO: 315224 - DNA, 25 bp, Homo sapien
atgggacttccaaaccgcggaggag

SEQ ID NO: 315225 - DNA, 25 bp, Homo sapien
tctgaaagcttaccaaaaatgcccc

SEQ ID NO: 315226 - DNA, 25 bp, Homo sapien
gcttaaggtcacactgcagataaaa

SEQ ID NO: 315227 - DNA, 25 bp, Homo sapien
tgctgttcccgcagccttggtctgg

SEQ ID NO: 315228 - DNA, 25 bp, Homo sapien
tcaactcagatgtcaacggctctct

SEQ ID NO: 315229 - DNA, 25 bp, Homo sapien
gcaaagccgaaggttggcccaggaa

SEQ ID NO: 315230 - DNA, 25 bp, Homo sapien
gaccctgatgtggacgtgaacccag

SEQ ID NO: 315231 - DNA, 25 bp, Homo sapien
tactggaacagtggcgcaaagccga

SEQ ID NO: 315232 - DNA, 25 bp, Homo sapien
taagtaccaagaggttcgcccagga

SEQ ID NO: 315233 - DNA, 25 bp, Homo sapien
acaggcatgagccaccacacccttg

SEQ ID NO: 315234 - DNA, 25 bp, Homo sapien
gtgcagcagagcgatctgggctcac

SEQ ID NO: 315235 - DNA, 25 bp, Homo sapien
ctggagtgcagcagagcgatctggg

SEQ ID NO: 315236 - DNA, 25 bp, Homo sapien
ttacaggcatgagccaccacaccct

SEQ ID NO: 315237 - DNA, 25 bp, Homo sapien
ggcctccctggaaaacggcatctgg

SEQ ID NO: 315238 - DNA, 25 bp, Homo sapien
ccacacaatgggagaaggctacgta

SEQ ID NO: 315239 - DNA, 25 bp, Homo sapien
gctacgtagcgacagaggcaaagac

SEQ ID NO: 315240 - DNA, 25 bp, Homo sapien
agttcaccacagagagagcacgggt

SEQ ID NO: 315241 - DNA, 25 bp, Homo sapien
taatgggccagcgatcctgagtaag

SEQ ID NO: 315242 - DNA, 25 bp, Homo sapien
caaatcatctggtcctgcgttacgg

SEQ ID NO: 315243 - DNA, 25 bp, Homo sapien
cagcgtttatgaatacccagatgcc

SEQ ID NO: 315244 - DNA, 25 bp, Homo sapien
gacacttagagggacaatctcagcg

SEQ ID NO: 315245 - DNA, 25 bp, Homo sapien
ctttccgagcacactcggagggctg

SEQ ID NO: 315246 - DNA, 25 bp, Homo sapien
gaaatcattgataccgagcagtcct

SEQ ID NO: 315247 - DNA, 25 bp, Homo sapien
gaggcttcatggtttttccccgcag

SEQ ID NO: 315248 - DNA, 25 bp, Homo sapien
caatgtgggcgatctcagctagcag

SEQ ID NO: 315249 - DNA, 25 bp, Homo sapien
gaaaacaagggagtctgcagaggcc

SEQ ID NO: 315250 - DNA, 25 bp, Homo sapien
tattacacccctttgttcaatctga

SEQ ID NO: 315251 - DNA, 25 bp, Homo sapien
ttcaatctgattaacccaggaggtc

SEQ ID NO: 315252 - DNA, 25 bp, Homo sapien
ctgggcctaacccagagtagatgct

SEQ ID NO: 315253 - DNA, 25 bp, Homo sapien
cctggccctttggttctctattaca

SEQ ID NO: 315254 - DNA, 25 bp, Homo sapien
atcatggtgattcgttactgagtac

SEQ ID NO: 315255 - DNA, 25 bp, Homo sapien
tgaatcgcggattatttaaaagcat

SEQ ID NO: 315256 - DNA, 25 bp, Homo sapien
gatccttgtcttacggcccaggaaa

SEQ ID NO: 315257 - DNA, 25 bp, Homo sapien
ggtatatggttagctccccaagcac

SEQ ID NO: 315258 - DNA, 25 bp, Homo sapien
caagagctcactagctgcagacgga

SEQ ID NO: 315259 - DNA, 25 bp, Homo sapien
tatgcgtgtacgctcatactctgcc

SEQ ID NO: 315260 - DNA, 25 bp, Homo sapien
tccagtaaacagtgaggcaaccaag

SEQ ID NO: 315261 - DNA, 25 bp, Homo sapien
tgatgggatatgacacacacagttc

SEQ ID NO: 315262 - DNA, 25 bp, Homo sapien
gcagtctgctcccagggcatgcatg

SEQ ID NO: 315263 - DNA, 25 bp, Homo sapien
ggcatgcatgcaaggtgcccaccaa

SEQ ID NO: 315264 - DNA, 25 bp, Homo sapien
cacaccagtgtgcagcctgcagtct

SEQ ID NO: 315265 - DNA, 25 bp, Homo sapien
acaccagtgtgcagcctgcagtctg

SEQ ID NO: 315266 - DNA, 25 bp, Homo sapien
ctctctctcatcctttgctgctgct

SEQ ID NO: 315267 - DNA, 25 bp, Homo sapien
ctgctctctctcatcctttgctgct

SEQ ID NO: 315268 - DNA, 25 bp, Homo sapien
ctctctcatcctttgctgctgctgg

SEQ ID NO: 315269 - DNA, 25 bp, Homo sapien
ctctcatcctttgctgctgctggcc

SEQ ID NO: 315270 - DNA, 25 bp, Homo sapien
cactacacgttctgtggcggattta

SEQ ID NO: 315271 - DNA, 25 bp, Homo sapien
ggaaatcctgatgccttaccacatg

SEQ ID NO: 315272 - DNA, 25 bp, Homo sapien
tcactgggaaaggtgcataggcctg

SEQ ID NO: 315273 - DNA, 25 bp, Homo sapien
caaatggccttctggcctcacgaga

SEQ ID NO: 315274 - DNA, 25 bp, Homo sapien
agggctgtgtttggacacgccccat

SEQ ID NO: 315275 - DNA, 25 bp, Homo sapien
aaaacaagtccatgagaagaatctc

SEQ ID NO: 315276 - DNA, 25 bp, Homo sapien
tgtgtttggacacgccccatgctgc

SEQ ID NO: 315277 - DNA, 25 bp, Homo sapien
gagaagaatctcctcttaaaacgct

SEQ ID NO: 315278 - DNA, 25 bp, Homo sapien
ctgctgtgcagtacacagggaagag

SEQ ID NO: 315279 - DNA, 25 bp, Homo sapien
gtggtgcggccccacaatgcacagg

SEQ ID NO: 315280 - DNA, 25 bp, Homo sapien
ctgtggtgcggccccacaatgcaca

SEQ ID NO: 315281 - DNA, 25 bp, Homo sapien
ttctgctgtgcagtacacagggaag

SEQ ID NO: 315282 - DNA, 25 bp, Homo sapien
gcatggagtcggggagatgcctcac

SEQ ID NO: 315283 - DNA, 25 bp, Homo sapien
gcctggtgcatggagtcggggagat

SEQ ID NO: 315284 - DNA, 25 bp, Homo sapien
agggcagcctggtgcatggagtcgg

SEQ ID NO: 315285 - DNA, 25 bp, Homo sapien
gtgcatggagtcggggagatgcctc

SEQ ID NO: 315286 - DNA, 25 bp, Homo sapien
ctttagaaagcagggacgaggccag

SEQ ID NO: 315287 - DNA, 25 bp, Homo sapien
ttagaaagcagggacgaggccaggt

SEQ ID NO: 315288 - DNA, 25 bp, Homo sapien
actttagaaagcagggacgaggcca

SEQ ID NO: 315289 - DNA, 25 bp, Homo sapien
tagaaagcagggacgaggccaggtg

SEQ ID NO: 315290 - DNA, 25 bp, Homo sapien
gggacaagtgaaaggtggcagcagc

SEQ ID NO: 315291 - DNA, 25 bp, Homo sapien
ggtggcagcagcaacggtcgggggg

SEQ ID NO: 315292 - DNA, 25 bp, Homo sapien
caggcgataggtgaatttatacatg

SEQ ID NO: 315293 - DNA, 25 bp, Homo sapien
tttatacatgttctagttgacaact

SEQ ID NO: 315294 - DNA, 25 bp, Homo sapien
tggttgtaaaccctctcagagttca

SEQ ID NO: 315295 - DNA, 25 bp, Homo sapien
gatgttttgcggtttccttgtgata

SEQ ID NO: 315296 - DNA, 25 bp, Homo sapien
ctttctgggacaagtactttcctca

SEQ ID NO: 315297 - DNA, 25 bp, Homo sapien
tagcctccgctattgaatgctatca

SEQ ID NO: 315298 - DNA, 25 bp, Homo sapien
gcacacgtacaagtggaaatgagaa

SEQ ID NO: 315299 - DNA, 25 bp, Homo sapien
gaaatgagaaaagccgtccggttca

SEQ ID NO: 315300 - DNA, 25 bp, Homo sapien
gaaaagcagcgcacacgtacaagtg

SEQ ID NO: 315301 - DNA, 25 bp, Homo sapien
ttcctccatctcacgagaaaagcag

SEQ ID NO: 315302 - DNA, 25 bp, Homo sapien
acatggtctgttgttagcatgggcc

SEQ ID NO: 315303 - DNA, 25 bp, Homo sapien
ccattcctcgcatatgtgtggctta

SEQ ID NO: 315304 - DNA, 25 bp, Homo sapien
catttggagagcaagtcccctggga

SEQ ID NO: 315305 - DNA, 25 bp, Homo sapien
tctggagacgatgagacatggtctg

SEQ ID NO: 315306 - DNA, 25 bp, Homo sapien
ggctgccatcaattccgtttcttgg

SEQ ID NO: 315307 - DNA, 25 bp, Homo sapien
cgtttcttggtccaagtctgcccct

SEQ ID NO: 315308 - DNA, 25 bp, Homo sapien
agaaaagcccaatgagctgcggcag

SEQ ID NO: 315309 - DNA, 25 bp, Homo sapien
aaaagcccaatgagctgcggcaggg

SEQ ID NO: 315310 - DNA, 25 bp, Homo sapien
agagcaatgtctccggcccaacagc

SEQ ID NO: 315311 - DNA, 25 bp, Homo sapien
ctaatagcagcagagcaatgtctcc

SEQ ID NO: 315312 - DNA, 25 bp, Homo sapien
tagcagcagagcaatgtctccggcc

SEQ ID NO: 315313 - DNA, 25 bp, Homo sapien
tctccggcccaacagcaaacacaat

SEQ ID NO: 315314 - DNA, 25 bp, Homo sapien
tcaagacagcaatggactggcccaa

SEQ ID NO: 315315 - DNA, 25 bp, Homo sapien
tgcagcattgcaagatcagtcccat

SEQ ID NO: 315316 - DNA, 25 bp, Homo sapien
tttgacagagacatggcccactgcc

SEQ ID NO: 315317 - DNA, 25 bp, Homo sapien
tggcccaaaaggatgctggaactcc

SEQ ID NO: 315318 - DNA, 25 bp, Homo sapien
cctacgtatcctggtgagctggcat

SEQ ID NO: 315319 - DNA, 25 bp, Homo sapien
tcttcactctgctgacggtcctgtt

SEQ ID NO: 315320 - DNA, 25 bp, Homo sapien
tgataaacggcaaaaaacgagaggc

SEQ ID NO: 315321 - DNA, 25 bp, Homo sapien
tggcatcgtagacatgcacccggct

SEQ ID NO: 315322 - DNA, 25 bp, Homo sapien
catgtgggatcgctctcaaggaggc

SEQ ID NO: 315323 - DNA, 25 bp, Homo sapien
gagagccagggtcactgtgcactga

SEQ ID NO: 315324 - DNA, 25 bp, Homo sapien
tgcactgatgggcagatgctccctt

SEQ ID NO: 315325 - DNA, 25 bp, Homo sapien
cacagacaggctgggataagcccca

SEQ ID NO: 315326 - DNA, 25 bp, Homo sapien
caaggccctggttcgaactgaaatc

SEQ ID NO: 315327 - DNA, 25 bp, Homo sapien
tttagatcacatggcgtttccgcgg

SEQ ID NO: 315328 - DNA, 25 bp, Homo sapien
gccttcaagccaacgtgatgtggga

SEQ ID NO: 315329 - DNA, 25 bp, Homo sapien
cagcaaccgtggcagacaatgagag

SEQ ID NO: 315330 - DNA, 25 bp, Homo sapien
ctccctcaggaaggctggatgccag

SEQ ID NO: 315331 - DNA, 25 bp, Homo sapien
ggatgccagggcattttacacccca

SEQ ID NO: 315332 - DNA, 25 bp, Homo sapien
ctactcctcccaacgtcctacagct

SEQ ID NO: 315333 - DNA, 25 bp, Homo sapien
cacacacaaactgaggacaaccaac

SEQ ID NO: 315334 - DNA, 25 bp, Homo sapien
gaaatgaacacaccgtacagatcca

SEQ ID NO: 315335 - DNA, 25 bp, Homo sapien
ctggaagtggatcacgagacggcac

SEQ ID NO: 315336 - DNA, 25 bp, Homo sapien
gaaaggccactcagaatccctaggg

SEQ ID NO: 315337 - DNA, 25 bp, Homo sapien
gacctaccgtgagatgggacaccgg

SEQ ID NO: 315338 - DNA, 25 bp, Homo sapien
tatctccatgagtgccggagcctct

SEQ ID NO: 315339 - DNA, 25 bp, Homo sapien
tccggcatttgcaacaactctgaga

SEQ ID NO: 315340 - DNA, 25 bp, Homo sapien
gactgcggctcacaaggtatctcca

SEQ ID NO: 315341 - DNA, 25 bp, Homo sapien
atcacacggatggagatgctgagcc

SEQ ID NO: 315342 - DNA, 25 bp, Homo sapien
tccaccgtgtgaggacatggcagag

SEQ ID NO: 315343 - DNA, 25 bp, Homo sapien
cggttaaaatcctcacgccaaggtg

SEQ ID NO: 315344 - DNA, 25 bp, Homo sapien
tcctctatgaaggagacgccgagag

SEQ ID NO: 315345 - DNA, 25 bp, Homo sapien
tccccgcccctagatctgagaaata

SEQ ID NO: 315346 - DNA, 25 bp, Homo sapien
actcagcacgcgcattcagagcctg

SEQ ID NO: 315347 - DNA, 25 bp, Homo sapien
gggtgtcaccagtgctcctagctac

SEQ ID NO: 315348 - DNA, 25 bp, Homo sapien
tgctcaacattaggtctgtggctcc

SEQ ID NO: 315349 - DNA, 25 bp, Homo sapien
cctgggccaccgagaagaataggca

SEQ ID NO: 315350 - DNA, 25 bp, Homo sapien
gcctgtgccagaaaagggccctttc

SEQ ID NO: 315351 - DNA, 25 bp, Homo sapien
tctgacagcgatgagaagtgagcac

SEQ ID NO: 315352 - DNA, 25 bp, Homo sapien
tgacaccgtctagggacatcgggct

SEQ ID NO: 315353 - DNA, 25 bp, Homo sapien
taaaggcttgattcggagtgtggcc

SEQ ID NO: 315354 - DNA, 25 bp, Homo sapien
tccacgggaatcccacctgtccgat

SEQ ID NO: 315355 - DNA, 25 bp, Homo sapien
tttcatcagttcagaccagctttgt

SEQ ID NO: 315356 - DNA, 25 bp, Homo sapien
cccagacgttgtcactatggcagga

SEQ ID NO: 315357 - DNA, 25 bp, Homo sapien
gcagaggtccctgtgttgggaggtg

SEQ ID NO: 315358 - DNA, 25 bp, Homo sapien
gacgaatgacagtgctaaagaaccc

SEQ ID NO: 315359 - DNA, 25 bp, Homo sapien
gtgcttaagcgtctgggtcacgtag

SEQ ID NO: 315360 - DNA, 25 bp, Homo sapien
tccactctcatccaagacgaatgac

SEQ ID NO: 315361 - DNA, 25 bp, Homo sapien
atgtgcttaagcgtctgggtcacgt

SEQ ID NO: 315362 - DNA, 25 bp, Homo sapien
ttctagaggtttctcctggcagtgc

SEQ ID NO: 315363 - DNA, 25 bp, Homo sapien
ccgcaggagggtggaagactggcta

SEQ ID NO: 315364 - DNA, 25 bp, Homo sapien
tccaggcaccgtctctttctagagg

SEQ ID NO: 315365 - DNA, 25 bp, Homo sapien
gcctgaccagcatgtgctgtggcag

SEQ ID NO: 315366 - DNA, 25 bp, Homo sapien
tatttttaatccacttcgcttcata

SEQ ID NO: 315367 - DNA, 25 bp, Homo sapien
catgacctcgctccttgcaaggtga

SEQ ID NO: 315368 - DNA, 25 bp, Homo sapien
aaggtgagaagcagtaccctcccat

SEQ ID NO: 315369 - DNA, 25 bp, Homo sapien
tcgcttcatattatcatgacctcgc

SEQ ID NO: 315370 - DNA, 25 bp, Homo sapien
cctttcgcattttggatactttcag

SEQ ID NO: 315371 - DNA, 25 bp, Homo sapien
ttcctttcgcattttggatactttc

SEQ ID NO: 315372 - DNA, 25 bp, Homo sapien
tttcgcattttggatactttcagtg

SEQ ID NO: 315373 - DNA, 25 bp, Homo sapien
tcgcattttggatactttcagtggg

SEQ ID NO: 315374 - DNA, 25 bp, Homo sapien
ctcactgaggcaggccccccggcca

SEQ ID NO: 315375 - DNA, 25 bp, Homo sapien
tcactgaggcaggccccccggccat

SEQ ID NO: 315376 - DNA, 25 bp, Homo sapien
cctcactgaggcaggccccccggcc

SEQ ID NO: 315377 - DNA, 25 bp, Homo sapien
agcgggcacactgggtggacacaca

SEQ ID NO: 315378 - DNA, 25 bp, Homo sapien
tcactgagcgggcacactgggtgga

SEQ ID NO: 315379 - DNA, 25 bp, Homo sapien
caggctcactgagcgggcacactgg

SEQ ID NO: 315380 - DNA, 25 bp, Homo sapien
actgagcgggcacactgggtggaca

SEQ ID NO: 315381 - DNA, 25 bp, Homo sapien
cctggtgccctggaacaatgactcc

SEQ ID NO: 315382 - DNA, 25 bp, Homo sapien
tagggaactatagggaataagcaac

SEQ ID NO: 315383 - DNA, 25 bp, Homo sapien
cagactcttaaaattcaggtaggat

SEQ ID NO: 315384 - DNA, 25 bp, Homo sapien
atcacagaacggagccggctcaggc

SEQ ID NO: 315385 - DNA, 25 bp, Homo sapien
ggggcgtcggcaaaagcaaacttga

SEQ ID NO: 315386 - DNA, 25 bp, Homo sapien
caaaagcaaacttgaggcggtaggc

SEQ ID NO: 315387 - DNA, 25 bp, Homo sapien
tcttgtagtgattgggggcgtcggc

SEQ ID NO: 315388 - DNA, 25 bp, Homo sapien
ggtaggcctcggccagcaacaggct

SEQ ID NO: 315389 - DNA, 25 bp, Homo sapien
tcacaaggccttttagcagcccggg

SEQ ID NO: 315390 - DNA, 25 bp, Homo sapien
tatgagatggccactacctcgttcc

SEQ ID NO: 315391 - DNA, 25 bp, Homo sapien
cagcacgaggcagtcatttggcaag

SEQ ID NO: 315392 - DNA, 25 bp, Homo sapien
ttgtcagccctagaccaggtctgtg

SEQ ID NO: 315393 - DNA, 25 bp, Homo sapien
aaagtaaggcgatggcgaggcctcc

SEQ ID NO: 315394 - DNA, 25 bp, Homo sapien
tccacggaggaaccggtccatggag

SEQ ID NO: 315395 - DNA, 25 bp, Homo sapien
tggaggaaccggtccatgatggaac

SEQ ID NO: 315396 - DNA, 25 bp, Homo sapien
cagccacgtttaaaccaagcaagca

SEQ ID NO: 315397 - DNA, 25 bp, Homo sapien
gggcaggagtggtccatggcggaac

SEQ ID NO: 315398 - DNA, 25 bp, Homo sapien
cagggcaggagtggtccatggcgga

SEQ ID NO: 315399 - DNA, 25 bp, Homo sapien
ggagtggtccatggcggaaccggtc

SEQ ID NO: 315400 - DNA, 25 bp, Homo sapien
gcaggagtggtccatggcggaaccg

SEQ ID NO: 315401 - DNA, 25 bp, Homo sapien
cctgggctcagggatcagacagact

SEQ ID NO: 315402 - DNA, 25 bp, Homo sapien
tggccacacggcatgatctgagctg

SEQ ID NO: 315403 - DNA, 25 bp, Homo sapien
ccgcatctgatgtgaagcaagccca

SEQ ID NO: 315404 - DNA, 25 bp, Homo sapien
gctgatctcggcaaagcgacatggg

SEQ ID NO: 315405 - DNA, 25 bp, Homo sapien
taaaacatcaaccacctcgagaagc

SEQ ID NO: 315406 - DNA, 25 bp, Homo sapien
atctgctcagacttaaggcccgcgg

SEQ ID NO: 315407 - DNA, 25 bp, Homo sapien
cacagggctgaactccgtggagctt

SEQ ID NO: 315408 - DNA, 25 bp, Homo sapien
gtgtttttagcgcaccacatccaga

SEQ ID NO: 315409 - DNA, 25 bp, Homo sapien
gatgatcatagacactgcccaaggt

SEQ ID NO: 315410 - DNA, 25 bp, Homo sapien
tctgaatccgccttgcctaggtgaa

SEQ ID NO: 315411 - DNA, 25 bp, Homo sapien
tcaacaaaatggactacggctgggt

SEQ ID NO: 315412 - DNA, 25 bp, Homo sapien
tttccaggaactccgcatgctgagg

SEQ ID NO: 315413 - DNA, 25 bp, Homo sapien
ttctgtatatggagattcagctttc

SEQ ID NO: 315414 - DNA, 25 bp, Homo sapien
tttatgtggccatgataaattagat

SEQ ID NO: 315415 - DNA, 25 bp, Homo sapien
tatatggagattcagctttcccagc

SEQ ID NO: 315416 - DNA, 25 bp, Homo sapien
tgtatatggagattcagctttccca

SEQ ID NO: 315417 - DNA, 25 bp, Homo sapien
gcctctggtcatcaaccatctgttc

SEQ ID NO: 315418 - DNA, 25 bp, Homo sapien
ccacacaaccctccactaccatttc

SEQ ID NO: 315419 - DNA, 25 bp, Homo sapien
tgtaaatgatgggatctcatgcttt

SEQ ID NO: 315420 - DNA, 25 bp, Homo sapien
gtgttgcaataaacaggagtgctga

SEQ ID NO: 315421 - DNA, 25 bp, Homo sapien
tccagaggctgcgtcatgacgttgg

SEQ ID NO: 315422 - DNA, 25 bp, Homo sapien
tctccagaggctgcgtcatgacgtt

SEQ ID NO: 315423 - DNA, 25 bp, Homo sapien
cagaggctgcgtcatgacgttggct

SEQ ID NO: 315424 - DNA, 25 bp, Homo sapien
tgcgtcatgacgttggctggggctg

SEQ ID NO: 315425 - DNA, 25 bp, Homo sapien
tctgagccccagtcgtgtcctctga

SEQ ID NO: 315426 - DNA, 25 bp, Homo sapien
tctgagaatgatggtaatgaaaacc

SEQ ID NO: 315427 - DNA, 25 bp, Homo sapien
tgagccccagtcgtgtcctctgaga

SEQ ID NO: 315428 - DNA, 25 bp, Homo sapien
agaatgatggtaatgaaaacctctg

SEQ ID NO: 315429 - DNA, 25 bp, Homo sapien
ctgacagttctgatatgcgggttta

SEQ ID NO: 315430 - DNA, 25 bp, Homo sapien
ttttgctctgaagacgatctgacag

SEQ ID NO: 315431 - DNA, 25 bp, Homo sapien
gggtttattatctggctgtcatgca

SEQ ID NO: 315432 - DNA, 25 bp, Homo sapien
ctcgggagagcatgttgccttttgc

SEQ ID NO: 315433 - DNA, 25 bp, Homo sapien
cacatatttgagtgtggacacgcac

SEQ ID NO: 315434 - DNA, 25 bp, Homo sapien
cacgcatgtttgagtgtggacggtc

SEQ ID NO: 315435 - DNA, 25 bp, Homo sapien
tcagtgtggacacgcgcatgtttga

SEQ ID NO: 315436 - DNA, 25 bp, Homo sapien
gacggtcagtgtggacacgcgcata

SEQ ID NO: 315437 - DNA, 25 bp, Homo sapien
tgcacacagcctctaaatagcaatt

SEQ ID NO: 315438 - DNA, 25 bp, Homo sapien
caaatacgctctcgtgtgtgtgaaa

SEQ ID NO: 315439 - DNA, 25 bp, Homo sapien
gcaagacgcattcattatagcattg

SEQ ID NO: 315440 - DNA, 25 bp, Homo sapien
gctggtaagagaatcagggtacatt

SEQ ID NO: 315441 - DNA, 25 bp, Homo sapien
tgtgagaaaataggcagctcaatgc

SEQ ID NO: 315442 - DNA, 25 bp, Homo sapien
caatttcatgttgctataggtgtga

SEQ ID NO: 315443 - DNA, 25 bp, Homo sapien
tttgtcaatttcatgttgctatagg

SEQ ID NO: 315444 - DNA, 25 bp, Homo sapien
tcaatgcactggttaagagcatggg

SEQ ID NO: 315445 - DNA, 25 bp, Homo sapien
cttcattactgccacaccgaacaaa

SEQ ID NO: 315446 - DNA, 25 bp, Homo sapien
tactgccacaccgaacaaaaggtct

SEQ ID NO: 315447 - DNA, 25 bp, Homo sapien
caaaaggtctattcagagcacaggc

SEQ ID NO: 315448 - DNA, 25 bp, Homo sapien
cacaccgaacaaaaggtctattcag

SEQ ID NO: 315449 - DNA, 25 bp, Homo sapien
gaacatctcgctttgcactggctgc

SEQ ID NO: 315450 - DNA, 25 bp, Homo sapien
cagcctgtggaacatctcgctttgc

SEQ ID NO: 315451 - DNA, 25 bp, Homo sapien
atccaagactgtgaggcccaccagc

SEQ ID NO: 315452 - DNA, 25 bp, Homo sapien
ccgggcagcacattgtgttgccagc

SEQ ID NO: 315453 - DNA, 25 bp, Homo sapien
aagatgggcggaacttctctgtgag

SEQ ID NO: 315454 - DNA, 25 bp, Homo sapien
ctctcagtgctctgaagatgggcgg

SEQ ID NO: 315455 - DNA, 25 bp, Homo sapien
gcagatattgagtgaaccccactat

SEQ ID NO: 315456 - DNA, 25 bp, Homo sapien
cagatattgagtgaaccccactatg

SEQ ID NO: 315457 - DNA, 25 bp, Homo sapien
agatattgagtgaaccccactatgt

SEQ ID NO: 315458 - DNA, 25 bp, Homo sapien
gatattgagtgaaccccactatgtg

SEQ ID NO: 315459 - DNA, 25 bp, Homo sapien
gtgagtgtgaccctgctcggtgatg

SEQ ID NO: 315460 - DNA, 25 bp, Homo sapien
ttcagcggccgtcttgagttcctgg

SEQ ID NO: 315461 - DNA, 25 bp, Homo sapien
catgtgttcagcggccgtcttgagt

SEQ ID NO: 315462 - DNA, 25 bp, Homo sapien
ctgctcggtgatggccccacgcagg

SEQ ID NO: 315463 - DNA, 25 bp, Homo sapien
tttcccagcataacaattgctcgat

SEQ ID NO: 315464 - DNA, 25 bp, Homo sapien
cccaaattactcaggagtcgctcat

SEQ ID NO: 315465 - DNA, 25 bp, Homo sapien
taacaattgctcgatactctcccaa

SEQ ID NO: 315466 - DNA, 25 bp, Homo sapien
tcgatactctcccaaattactcagg

SEQ ID NO: 315467 - DNA, 25 bp, Homo sapien
cgctgacagtcacacggaggccttt

SEQ ID NO: 315468 - DNA, 25 bp, Homo sapien
gccaggcatcactcgctgaaatgag

SEQ ID NO: 315469 - DNA, 25 bp, Homo sapien
cagcgttcgaggtgacaagggtaat

SEQ ID NO: 315470 - DNA, 25 bp, Homo sapien
tgaaatgagatcctcaatgccgctg

SEQ ID NO: 315471 - DNA, 25 bp, Homo sapien
cctgggtagagctggggatgaattc

SEQ ID NO: 315472 - DNA, 25 bp, Homo sapien
agcctggcgcgtggcctgggtagag

SEQ ID NO: 315473 - DNA, 25 bp, Homo sapien
cagggctcagcctggcgcgtggcct

SEQ ID NO: 315474 - DNA, 25 bp, Homo sapien
tcagcctggcgcgtggcctgggtag

SEQ ID NO: 315475 - DNA, 25 bp, Homo sapien
cagctgtggaggctccgtctcaggc

SEQ ID NO: 315476 - DNA, 25 bp, Homo sapien
tgggttgctgccctcgtacatccca

SEQ ID NO: 315477 - DNA, 25 bp, Homo sapien
ctccaggttgacttgtaagcagccc

SEQ ID NO: 315478 - DNA, 25 bp, Homo sapien
caggccaccaaactgaaagacgcca

SEQ ID NO: 315479 - DNA, 25 bp, Homo sapien
ggacatcttacttccgtaattggga

SEQ ID NO: 315480 - DNA, 25 bp, Homo sapien
gacatcttacttccgtaattgggaa

SEQ ID NO: 315481 - DNA, 25 bp, Homo sapien
catcttacttccgtaattgggaaat

SEQ ID NO: 315482 - DNA, 25 bp, Homo sapien
tttcctgtctttgatctttcagctc

SEQ ID NO: 315483 - DNA, 25 bp, Homo sapien
attcctgtgtccagatgccgggtcc

SEQ ID NO: 315484 - DNA, 25 bp, Homo sapien
ctgtgtccagatgccgggtccatgg

SEQ ID NO: 315485 - DNA, 25 bp, Homo sapien
tcagctcgagtttctcgggtattcc

SEQ ID NO: 315486 - DNA, 25 bp, Homo sapien
gttctgcgggtggttctgtggcagg

SEQ ID NO: 315487 - DNA, 25 bp, Homo sapien
cgggtggttctgtggcaggcggcca

SEQ ID NO: 315488 - DNA, 25 bp, Homo sapien
tgcgggtggttctgtggcaggcggc

SEQ ID NO: 315489 - DNA, 25 bp, Homo sapien
tggttctgtggcaggcggccaatca

SEQ ID NO: 315490 - DNA, 25 bp, Homo sapien
gtgtaatatacttggacttcctggt

SEQ ID NO: 315491 - DNA, 25 bp, Homo sapien
tgtaatatacttggacttcctggtt

SEQ ID NO: 315492 - DNA, 25 bp, Homo sapien
agatgtctaacaccaggaccaaggg

SEQ ID NO: 315493 - DNA, 25 bp, Homo sapien
gccagtggccacagcgtctctggga

SEQ ID NO: 315494 - DNA, 25 bp, Homo sapien
gaccaagggtgtaggggcaatcacc

SEQ ID NO: 315495 - DNA, 25 bp, Homo sapien
ctgggaactggaggggtccacacca

SEQ ID NO: 315496 - DNA, 25 bp, Homo sapien
gcagtgctcgccacgtgcatggagc

SEQ ID NO: 315497 - DNA, 25 bp, Homo sapien
tgaggcagtgctcgccacgtgcatg

SEQ ID NO: 315498 - DNA, 25 bp, Homo sapien
agtgctcgccacgtgcatggagccc

SEQ ID NO: 315499 - DNA, 25 bp, Homo sapien
tcctgaggcagtgctcgccacgtgc

SEQ ID NO: 315500 - DNA, 25 bp, Homo sapien
actgtgtctgcggtctccaaactcc

SEQ ID NO: 315501 - DNA, 25 bp, Homo sapien
gtgtctgcggtctccaaactccagg

SEQ ID NO: 315502 - DNA, 25 bp, Homo sapien
tccaggtacttcagtgagatgttgt

SEQ ID NO: 315503 - DNA, 25 bp, Homo sapien
ttccactgtgtctgcggtctccaaa

SEQ ID NO: 315504 - DNA, 25 bp, Homo sapien
tgcattatcaggctgaatgtgggat

SEQ ID NO: 315505 - DNA, 25 bp, Homo sapien
gagtctgcattatcaggctgaatgt

SEQ ID NO: 315506 - DNA, 25 bp, Homo sapien
tctgcattatcaggctgaatgtggg

SEQ ID NO: 315507 - DNA, 25 bp, Homo sapien
aaagagtctgcattatcaggctgaa

SEQ ID NO: 315508 - DNA, 25 bp, Homo sapien
gaacattgtttccaggctctgaccc

SEQ ID NO: 315509 - DNA, 25 bp, Homo sapien
caaaggattgaaggaacattgtttc

SEQ ID NO: 315510 - DNA, 25 bp, Homo sapien
ctggcaaaggattgaaggaacattg

SEQ ID NO: 315511 - DNA, 25 bp, Homo sapien
ttttacaccagtggcccttattggc

SEQ ID NO: 315512 - DNA, 25 bp, Homo sapien
tcctcaaatctgtccactgtaaagt

SEQ ID NO: 315513 - DNA, 25 bp, Homo sapien
tgtcagatcattaccacctaacgga

SEQ ID NO: 315514 - DNA, 25 bp, Homo sapien
caccattttggtggagcaagctaga

SEQ ID NO: 315515 - DNA, 25 bp, Homo sapien
gcagagtttcccatgtgcaccattt

SEQ ID NO: 315516 - DNA, 25 bp, Homo sapien
ggatggcatggtgccgtcaccagcc

SEQ ID NO: 315517 - DNA, 25 bp, Homo sapien
agaggatggcatggtgccgtcacca

SEQ ID NO: 315518 - DNA, 25 bp, Homo sapien
ggcagaggatggcatggtgccgtca

SEQ ID NO: 315519 - DNA, 25 bp, Homo sapien
gcatggtgccgtcaccagccaagga

SEQ ID NO: 315520 - DNA, 25 bp, Homo sapien
cccacaggccctctgttgacctcca

SEQ ID NO: 315521 - DNA, 25 bp, Homo sapien
ggccctctgttgacctccacacttc

SEQ ID NO: 315522 - DNA, 25 bp, Homo sapien
acacttccgggcttgaccctccgag

SEQ ID NO: 315523 - DNA, 25 bp, Homo sapien
cacttccgggcttgaccctccgagg

SEQ ID NO: 315524 - DNA, 25 bp, Homo sapien
cagatggcggaagcacaaatggtcc

SEQ ID NO: 315525 - DNA, 25 bp, Homo sapien
tctcgtcccgaaagctgctgatctg

SEQ ID NO: 315526 - DNA, 25 bp, Homo sapien
gatgtcccgagctcatgctgccatg

SEQ ID NO: 315527 - DNA, 25 bp, Homo sapien
taggcacttggtaacgactcctctc

SEQ ID NO: 315528 - DNA, 25 bp, Homo sapien
ttccactctactgctcgcgggtggg

SEQ ID NO: 315529 - DNA, 25 bp, Homo sapien
cgcaaggtgctttcgaggtaggagc

SEQ ID NO: 315530 - DNA, 25 bp, Homo sapien
tggggcagcaatgcccgcaaggtgc

SEQ ID NO: 315531 - DNA, 25 bp, Homo sapien
ccagggagtgacactcccatttcca

SEQ ID NO: 315532 - DNA, 25 bp, Homo sapien
gtggaaggattgtgtgagcccagga

SEQ ID NO: 315533 - DNA, 25 bp, Homo sapien
aggaggtggaggttgcagcgagctg

SEQ ID NO: 315534 - DNA, 25 bp, Homo sapien
gctactccagatgctgaggtggaag

SEQ ID NO: 315535 - DNA, 25 bp, Homo sapien
cagcgagctgagatcacaccactgc

SEQ ID NO: 315536 - DNA, 25 bp, Homo sapien
acatttgttttatagatggagccca

SEQ ID NO: 315537 - DNA, 25 bp, Homo sapien
tttatagatggagcccagaggactg

SEQ ID NO: 315538 - DNA, 25 bp, Homo sapien
tttgttttatagatggagcccagag

SEQ ID NO: 315539 - DNA, 25 bp, Homo sapien
gttttatagatggagcccagaggac

SEQ ID NO: 315540 - DNA, 25 bp, Homo sapien
gagacacgtgtgaatggaagccagc

SEQ ID NO: 315541 - DNA, 25 bp, Homo sapien
ggtttagccccacagcgagttctga

SEQ ID NO: 315542 - DNA, 25 bp, Homo sapien
tttcgacaacagaacgtgaggccgg

SEQ ID NO: 315543 - DNA, 25 bp, Homo sapien
gaggcggccttgtcatcctatgaaa

SEQ ID NO: 315544 - DNA, 25 bp, Homo sapien
ccccaaatggcagcgatgtgtaaac

SEQ ID NO: 315545 - DNA, 25 bp, Homo sapien
tgctgcaacactccacaatgaggct

SEQ ID NO: 315546 - DNA, 25 bp, Homo sapien
catggacttggtggctgtcacatca

SEQ ID NO: 315547 - DNA, 25 bp, Homo sapien
gctgaactgtattccatgctggctg

SEQ ID NO: 315548 - DNA, 25 bp, Homo sapien
gaagccgggcctgagaaatgacagc

SEQ ID NO: 315549 - DNA, 25 bp, Homo sapien
tgtgcttgagcagaacccttgtttc

SEQ ID NO: 315550 - DNA, 25 bp, Homo sapien
tgaactctcctggtacaatgcagtg

SEQ ID NO: 315551 - DNA, 25 bp, Homo sapien
aatgcagtgtcttcatccgcggtac

SEQ ID NO: 315552 - DNA, 25 bp, Homo sapien
tgggacgggcactcttcatggttct

SEQ ID NO: 315553 - DNA, 25 bp, Homo sapien
catggttctgcgtgtgcacaggtca

SEQ ID NO: 315554 - DNA, 25 bp, Homo sapien
gagccttctgcgtattaaccccatg

SEQ ID NO: 315555 - DNA, 25 bp, Homo sapien
gaatcagaatagtgcttggtccaga

SEQ ID NO: 315556 - DNA, 25 bp, Homo sapien
gatacgtatgaacaagagagccagg

SEQ ID NO: 315557 - DNA, 25 bp, Homo sapien
tataatggacaagctattctcagac

SEQ ID NO: 315558 - DNA, 25 bp, Homo sapien
gtgtggcacgcacccaggaaacatt

SEQ ID NO: 315559 - DNA, 25 bp, Homo sapien
tatattcatgacagacctcaaagtg

SEQ ID NO: 315560 - DNA, 25 bp, Homo sapien
gccctgacaaatctcagacaagctc

SEQ ID NO: 315561 - DNA, 25 bp, Homo sapien
tagaacattgaagttggcccgaagt

SEQ ID NO: 315562 - DNA, 25 bp, Homo sapien
caaatctcagacaagctcagctttc

SEQ ID NO: 315563 - DNA, 25 bp, Homo sapien
agttgatttccaaactcggaattag

SEQ ID NO: 315564 - DNA, 25 bp, Homo sapien
catggctggtggtctctcgtcagga

SEQ ID NO: 315565 - DNA, 25 bp, Homo sapien
actggcagcattaaggtgacccgaa

SEQ ID NO: 315566 - DNA, 25 bp, Homo sapien
cacacggaagctgtcactgggcatc

SEQ ID NO: 315567 - DNA, 25 bp, Homo sapien
cgaaggtggagattttggccctcta

SEQ ID NO: 315568 - DNA, 25 bp, Homo sapien
tggcagccaattccgtgtctttctg

SEQ ID NO: 315569 - DNA, 25 bp, Homo sapien
cagggttgcgatcctcctaggcatg

SEQ ID NO: 315570 - DNA, 25 bp, Homo sapien
tgcatgcagttcagggaagctgact

SEQ ID NO: 315571 - DNA, 25 bp, Homo sapien
tctggtctagctctggattctgtct

SEQ ID NO: 315572 - DNA, 25 bp, Homo sapien
accatgaccaccctcagaagctcgg

SEQ ID NO: 315573 - DNA, 25 bp, Homo sapien
cagagtggcctccaatacactaggc

SEQ ID NO: 315574 - DNA, 25 bp, Homo sapien
tgaccaccctcagaagctcggggga

SEQ ID NO: 315575 - DNA, 25 bp, Homo sapien
gagtgcgcgcagagtggcctccaat

SEQ ID NO: 315576 - DNA, 25 bp, Homo sapien
gggggccggcgggatcagatgctgg

SEQ ID NO: 315577 - DNA, 25 bp, Homo sapien
gcacagctgtgcaaggtcccctgat

SEQ ID NO: 315578 - DNA, 25 bp, Homo sapien
gctgtgcaaggtcccctgatgggcc

SEQ ID NO: 315579 - DNA, 25 bp, Homo sapien
cagctgtgcaaggtcccctgatggg

SEQ ID NO: 315580 - DNA, 25 bp, Homo sapien
ctctcgacattttggttttggcatg

SEQ ID NO: 315581 - DNA, 25 bp, Homo sapien
accacagtgggccagccagcatgac

SEQ ID NO: 315582 - DNA, 25 bp, Homo sapien
ccagccagcatgaccccctgaccag

SEQ ID NO: 315583 - DNA, 25 bp, Homo sapien
tggcatggtgaatggggctaccaca

SEQ ID NO: 315584 - DNA, 25 bp, Homo sapien
ggcccttccgacagccggcctgcag

SEQ ID NO: 315585 - DNA, 25 bp, Homo sapien
gactcgctgtttcaagcccggctct

SEQ ID NO: 315586 - DNA, 25 bp, Homo sapien
cttgactcgctgtttcaagcccggc

SEQ ID NO: 315587 - DNA, 25 bp, Homo sapien
ccaggcccttccgacagccggcctg

SEQ ID NO: 315588 - DNA, 25 bp, Homo sapien
gcgagttcatcgactgtgccgagcc

SEQ ID NO: 315589 - DNA, 25 bp, Homo sapien
gagttcatcgactgtgccgagcctg

SEQ ID NO: 315590 - DNA, 25 bp, Homo sapien
cctggccagggcgagttcatcgact

SEQ ID NO: 315591 - DNA, 25 bp, Homo sapien
tggccagggcgagttcatcgactgt

SEQ ID NO: 315592 - DNA, 25 bp, Homo sapien
cagcaaagagtaaccagacactggg

SEQ ID NO: 315593 - DNA, 25 bp, Homo sapien
taggttcaccccagaaggctggctt

SEQ ID NO: 315594 - DNA, 25 bp, Homo sapien
tcccaggaaaatgtaggtggatgtg

SEQ ID NO: 315595 - DNA, 25 bp, Homo sapien
gcaaggacctaggttcaccccagaa

SEQ ID NO: 315596 - DNA, 25 bp, Homo sapien
tgcagtgcacactgttccgtgccag

SEQ ID NO: 315597 - DNA, 25 bp, Homo sapien
gagcgaggtccgtcctcagcatgga

SEQ ID NO: 315598 - DNA, 25 bp, Homo sapien
gtcctcaaaacacgccgccatctgg

SEQ ID NO: 315599 - DNA, 25 bp, Homo sapien
tcagggatggctgagatccaagtcc

SEQ ID NO: 315600 - DNA, 25 bp, Homo sapien
cacgtttccgagagaaagcgggcga

SEQ ID NO: 315601 - DNA, 25 bp, Homo sapien
gaggccacacttcacgtttccgaga

SEQ ID NO: 315602 - DNA, 25 bp, Homo sapien
tacagagtgggtacgtgacttccgg

SEQ ID NO: 315603 - DNA, 25 bp, Homo sapien
tctgagggataactggctcgtccgc

SEQ ID NO: 315604 - DNA, 25 bp, Homo sapien
caggagtcgacgctacagtcttaag

SEQ ID NO: 315605 - DNA, 25 bp, Homo sapien
gcaggagtcgacgctacagtcttaa

SEQ ID NO: 315606 - DNA, 25 bp, Homo sapien
ggagtcgacgctacagtcttaagtt

SEQ ID NO: 315607 - DNA, 25 bp, Homo sapien
tggaaattccggcaggagtcgacgc

SEQ ID NO: 315608 - DNA, 25 bp, Homo sapien
tattcttgtcccttggctagagcga

SEQ ID NO: 315609 - DNA, 25 bp, Homo sapien
gagattctgggcctaacttaagccc

SEQ ID NO: 315610 - DNA, 25 bp, Homo sapien
ccttccgagtgacacccaggttttg

SEQ ID NO: 315611 - DNA, 25 bp, Homo sapien
tatatctctattgccttgctgaggc

SEQ ID NO: 315612 - DNA, 25 bp, Homo sapien
gagctgggagcttaggttacttatt

SEQ ID NO: 315613 - DNA, 25 bp, Homo sapien
tattcataacctagtttgagtccac

SEQ ID NO: 315614 - DNA, 25 bp, Homo sapien
tccactgtgatcaaagaacaagtgc

SEQ ID NO: 315615 - DNA, 25 bp, Homo sapien
ggatacattctatcttgtaacctgc

SEQ ID NO: 315616 - DNA, 25 bp, Homo sapien
gccactgactctgccctaactttgc

SEQ ID NO: 315617 - DNA, 25 bp, Homo sapien
gactctgccctaactttgctaccat

SEQ ID NO: 315618 - DNA, 25 bp, Homo sapien
gctaccatcctatggctgtcatcca

SEQ ID NO: 315619 - DNA, 25 bp, Homo sapien
ccaccatctaaaggccactgactct

SEQ ID NO: 315620 - DNA, 25 bp, Homo sapien
tagttcatcacctatcatggcggtc

SEQ ID NO: 315621 - DNA, 25 bp, Homo sapien
gttcatcacctatcatggcggtcca

SEQ ID NO: 315622 - DNA, 25 bp, Homo sapien
agttcatcacctatcatggcggtcc

SEQ ID NO: 315623 - DNA, 25 bp, Homo sapien
tcatcacctatcatggcggtccacc

SEQ ID NO: 315624 - DNA, 25 bp, Homo sapien
tggacggcctggcaaaaaggtctgt

SEQ ID NO: 315625 - DNA, 25 bp, Homo sapien
tccacagctaccagatgaacagagg

SEQ ID NO: 315626 - DNA, 25 bp, Homo sapien
gaagatgatcacgacgacagtgacg

SEQ ID NO: 315627 - DNA, 25 bp, Homo sapien
cctaatcccagtagcgtggcgggtg

SEQ ID NO: 315628 - DNA, 25 bp, Homo sapien
atcaatgcatagaagggcaaatcca

SEQ ID NO: 315629 - DNA, 25 bp, Homo sapien
aatccatgatctcaatgagccctta

SEQ ID NO: 315630 - DNA, 25 bp, Homo sapien
caatgagcccttagggttcctccgc

SEQ ID NO: 315631 - DNA, 25 bp, Homo sapien
tgatctcaatgagcccttagggttc

SEQ ID NO: 315632 - DNA, 25 bp, Homo sapien
ggagaactgggcccaagcttcagag

SEQ ID NO: 315633 - DNA, 25 bp, Homo sapien
cagtgggatctgaaacccggagaaa

SEQ ID NO: 315634 - DNA, 25 bp, Homo sapien
cagagtccagggctcgggatctgtt

SEQ ID NO: 315635 - DNA, 25 bp, Homo sapien
gcagcctctgtttgaagatctcagt

SEQ ID NO: 315636 - DNA, 25 bp, Homo sapien
cagagaactttacacccagaagggt

SEQ ID NO: 315637 - DNA, 25 bp, Homo sapien
gggaatccatgtaaggcatctcaga

SEQ ID NO: 315638 - DNA, 25 bp, Homo sapien
tggcttccccgggtcctgaatcaga

SEQ ID NO: 315639 - DNA, 25 bp, Homo sapien
aagaggcaccgatgctcatgcccct

SEQ ID NO: 315640 - DNA, 25 bp, Homo sapien
tacgctctgctggtcataacacttt

SEQ ID NO: 315641 - DNA, 25 bp, Homo sapien
aattacgctctgctggtcataacac

SEQ ID NO: 315642 - DNA, 25 bp, Homo sapien
acttcaattacgctctgctggtcat

SEQ ID NO: 315643 - DNA, 25 bp, Homo sapien
aatgcacttcaattacgctctgctg

SEQ ID NO: 315644 - DNA, 25 bp, Homo sapien
cttcagggaaatcgccttacgtgtg

SEQ ID NO: 315645 - DNA, 25 bp, Homo sapien
ggacacagccacagtcaagctgcat

SEQ ID NO: 315646 - DNA, 25 bp, Homo sapien
cagggaaatcgccttacgtgtgtgg

SEQ ID NO: 315647 - DNA, 25 bp, Homo sapien
gaaatcgccttacgtgtgtggacac

SEQ ID NO: 315648 - DNA, 25 bp, Homo sapien
ctgcagggctctcgagcccagtgga

SEQ ID NO: 315649 - DNA, 25 bp, Homo sapien
cctgcagggctctcgagcccagtgg

SEQ ID NO: 315650 - DNA, 25 bp, Homo sapien
tgcagggctctcgagcccagtggag

SEQ ID NO: 315651 - DNA, 25 bp, Homo sapien
gtgagccatgcaccattttggctgg

SEQ ID NO: 315652 - DNA, 25 bp, Homo sapien
catttgcttagtggtatcagcaaac

SEQ ID NO: 315653 - DNA, 25 bp, Homo sapien
tgttcatttgcttagtggtatcagc

SEQ ID NO: 315654 - DNA, 25 bp, Homo sapien
ggtgtggcgtgaatcctgggtgagc

SEQ ID NO: 315655 - DNA, 25 bp, Homo sapien
gacgccccattgtgcagagagaagg

SEQ ID NO: 315656 - DNA, 25 bp, Homo sapien
agccctgcaaagacgccccattgtg

SEQ ID NO: 315657 - DNA, 25 bp, Homo sapien
tggagatggcagatccagtgcagaa

SEQ ID NO: 315658 - DNA, 25 bp, Homo sapien
gatccagtgcagaagccaatagcaa

SEQ ID NO: 315659 - DNA, 25 bp, Homo sapien
tcagatttggtcaagcctgaagcct

SEQ ID NO: 315660 - DNA, 25 bp, Homo sapien
gatcacatgatgatcaaatgaggcc

SEQ ID NO: 315661 - DNA, 25 bp, Homo sapien
gtttggcaaggataatcaagcccag

SEQ ID NO: 315662 - DNA, 25 bp, Homo sapien
atgggtagcagtgtctccggcagcc

SEQ ID NO: 315663 - DNA, 25 bp, Homo sapien
gaagttgagtcctcatgatggctgc

SEQ ID NO: 315664 - DNA, 25 bp, Homo sapien
cagcacaggcagaactgaatgtcca

SEQ ID NO: 315665 - DNA, 25 bp, Homo sapien
ttacctagaggcaagtgagacagaa

SEQ ID NO: 315666 - DNA, 25 bp, Homo sapien
tgagtaaagtacaggtgcatccaaa

SEQ ID NO: 315667 - DNA, 25 bp, Homo sapien
taaagtcatggcaacacgtgcccac

SEQ ID NO: 315668 - DNA, 25 bp, Homo sapien
gtggtcgcggaacaataacagctca

SEQ ID NO: 315669 - DNA, 25 bp, Homo sapien
ccctggagatctcattggaatgtca

SEQ ID NO: 315670 - DNA, 25 bp, Homo sapien
taacagctcacaaaccctggagatc

SEQ ID NO: 315671 - DNA, 25 bp, Homo sapien
gagaggctatccgtctgcagtgcat

SEQ ID NO: 315672 - DNA, 25 bp, Homo sapien
ctctgtcgcccaagggtttacatga

SEQ ID NO: 315673 - DNA, 25 bp, Homo sapien
ttacatgatggcgaaacctttgatt

SEQ ID NO: 315674 - DNA, 25 bp, Homo sapien
gctggcaatgaagatagcatcgaaa

SEQ ID NO: 315675 - DNA, 25 bp, Homo sapien
atctgacaggttccctgggtcagga

SEQ ID NO: 315676 - DNA, 25 bp, Homo sapien
catctgacaggttccctgggtcagg

SEQ ID NO: 315677 - DNA, 25 bp, Homo sapien
tgagtcagcccgaggaagaccctct

SEQ ID NO: 315678 - DNA, 25 bp, Homo sapien
tccctgatgcaattcccagcatgca

SEQ ID NO: 315679 - DNA, 25 bp, Homo sapien
gtgcacagctgtcaccgaagcccac

SEQ ID NO: 315680 - DNA, 25 bp, Homo sapien
ccagcatgcacctgagtcagcccga

SEQ ID NO: 315681 - DNA, 25 bp, Homo sapien
agaagaggcttcctgcacctcaggg

SEQ ID NO: 315682 - DNA, 25 bp, Homo sapien
ttccaatagtgaggccaggatcagc

SEQ ID NO: 315683 - DNA, 25 bp, Homo sapien
tcaaaggaaatccacgaagacagcc

SEQ ID NO: 315684 - DNA, 25 bp, Homo sapien
aggacttgctggcacctttacatgg

SEQ ID NO: 315685 - DNA, 25 bp, Homo sapien
accccctctaccacgccgtcgtgct

SEQ ID NO: 315686 - DNA, 25 bp, Homo sapien
tgaatccgggctgctaacgtccaca

SEQ ID NO: 315687 - DNA, 25 bp, Homo sapien
tctaccacgccgtcgtgctgcacct

SEQ ID NO: 315688 - DNA, 25 bp, Homo sapien
tgtggaattggagtcgcagccaggg

SEQ ID NO: 315689 - DNA, 25 bp, Homo sapien
tttgagtatggtacaaagtagttct

SEQ ID NO: 315690 - DNA, 25 bp, Homo sapien
tagatcccaagtctaacaaattgtt

SEQ ID NO: 315691 - DNA, 25 bp, Homo sapien
ccaattgatcaatagctggtcagaa

SEQ ID NO: 315692 - DNA, 25 bp, Homo sapien
tagcacatatattcagcctaacatt

SEQ ID NO: 315693 - DNA, 25 bp, Homo sapien
gatccattgggccacctgtgtccct

SEQ ID NO: 315694 - DNA, 25 bp, Homo sapien
gaaagcattctacctcgtccacaaa

SEQ ID NO: 315695 - DNA, 25 bp, Homo sapien
ttcgatggtagttgacaaaggaccc

SEQ ID NO: 315696 - DNA, 25 bp, Homo sapien
ctgacagctgatgtggcttctcggg

SEQ ID NO: 315697 - DNA, 25 bp, Homo sapien
cagatcctactttgaccaggtcatt

SEQ ID NO: 315698 - DNA, 25 bp, Homo sapien
cctgaatgcccagatcctactttga

SEQ ID NO: 315699 - DNA, 25 bp, Homo sapien
cattatgtccaaggtgccctgaatg

SEQ ID NO: 315700 - DNA, 25 bp, Homo sapien
actttgaccaggtcatttttcctgg

SEQ ID NO: 315701 - DNA, 25 bp, Homo sapien
cctgatgggtgagatgtactctcct

SEQ ID NO: 315702 - DNA, 25 bp, Homo sapien
gcctgatgggtgagatgtactctcc

SEQ ID NO: 315703 - DNA, 25 bp, Homo sapien
ggcctgatgggtgagatgtactctc

SEQ ID NO: 315704 - DNA, 25 bp, Homo sapien
tgatgggtgagatgtactctcctca

SEQ ID NO: 315705 - DNA, 25 bp, Homo sapien
tgtccatctgcacaaaccgtacaat

SEQ ID NO: 315706 - DNA, 25 bp, Homo sapien
tggcaacttcccaatactgtggcga

SEQ ID NO: 315707 - DNA, 25 bp, Homo sapien
ttaagtgagggaagacgatccaacc

SEQ ID NO: 315708 - DNA, 25 bp, Homo sapien
catcctgactgttgggtgaagttcc

SEQ ID NO: 315709 - DNA, 25 bp, Homo sapien
gaagatgaaggcgtcatatgtttag

SEQ ID NO: 315710 - DNA, 25 bp, Homo sapien
aaaagatggctttcccggtgctggc

SEQ ID NO: 315711 - DNA, 25 bp, Homo sapien
aaaaaagatggctttcccggtgctg

SEQ ID NO: 315712 - DNA, 25 bp, Homo sapien
cgtcatatgtttagaagaagagcac

SEQ ID NO: 315713 - DNA, 25 bp, Homo sapien
aggatgcagcagcaggattctccat

SEQ ID NO: 315714 - DNA, 25 bp, Homo sapien
ctgtgcaggatgcagcagcaggatt

SEQ ID NO: 315715 - DNA, 25 bp, Homo sapien
gcaggatgcagcagcaggattctcc

SEQ ID NO: 315716 - DNA, 25 bp, Homo sapien
gtgcaggatgcagcagcaggattct

SEQ ID NO: 315717 - DNA, 25 bp, Homo sapien
tcaggtcggtgatttactgtgccag

SEQ ID NO: 315718 - DNA, 25 bp, Homo sapien
gaactgctgagattccgcgtgatcc

SEQ ID NO: 315719 - DNA, 25 bp, Homo sapien
tcagtgctggcaaagccccttggat

SEQ ID NO: 315720 - DNA, 25 bp, Homo sapien
tgagaatgtccacgatccagtaaga

SEQ ID NO: 315721 - DNA, 25 bp, Homo sapien
tcacagtagccccaatgttcttgaa

SEQ ID NO: 315722 - DNA, 25 bp, Homo sapien
gagctcctcggtctgtctcacagta

SEQ ID NO: 315723 - DNA, 25 bp, Homo sapien
gaccaatgtgtatgccagtgatgct

SEQ ID NO: 315724 - DNA, 25 bp, Homo sapien
tgtgcctgtgaccaatgtgtatgcc

SEQ ID NO: 315725 - DNA, 25 bp, Homo sapien
ccccaggaataggacatgcctttga

SEQ ID NO: 315726 - DNA, 25 bp, Homo sapien
ccacttggagatgagctgctgtctc

SEQ ID NO: 315727 - DNA, 25 bp, Homo sapien
ccttcaggcggatgaggcactgtga

SEQ ID NO: 315728 - DNA, 25 bp, Homo sapien
tttactcatgcacgtcgtcagggct

SEQ ID NO: 315729 - DNA, 25 bp, Homo sapien
tctcatgagggtatccatgggtctt

SEQ ID NO: 315730 - DNA, 25 bp, Homo sapien
cctgggatcttctgagctttatggc

SEQ ID NO: 315731 - DNA, 25 bp, Homo sapien
tctgggtcatctcatgagggtatcc

SEQ ID NO: 315732 - DNA, 25 bp, Homo sapien
gggccggcctccttcagatagtcga

SEQ ID NO: 315733 - DNA, 25 bp, Homo sapien
aacatcattcagagcccacgcaatt

SEQ ID NO: 315734 - DNA, 25 bp, Homo sapien
ctaaaatatctgtctgaggaacaac

SEQ ID NO: 315735 - DNA, 25 bp, Homo sapien
tcagagcccacgcaattggggccat

SEQ ID NO: 315736 - DNA, 25 bp, Homo sapien
aaaatatctgtctgaggaacaacat

SEQ ID NO: 315737 - DNA, 25 bp, Homo sapien
caccagcaaggtcactcatagacac

SEQ ID NO: 315738 - DNA, 25 bp, Homo sapien
tagcactaaacacaacgttgccacc

SEQ ID NO: 315739 - DNA, 25 bp, Homo sapien
gcactaaacacaacgttgccaccag

SEQ ID NO: 315740 - DNA, 25 bp, Homo sapien
catagacactcgagttcctttattg

SEQ ID NO: 315741 - DNA, 25 bp, Homo sapien
tctcattccaggtggaacaagagcc

SEQ ID NO: 315742 - DNA, 25 bp, Homo sapien
tatctaagttctaccacacgccaag

SEQ ID NO: 315743 - DNA, 25 bp, Homo sapien
ttttggagaagacaactcagtccgc

SEQ ID NO: 315744 - DNA, 25 bp, Homo sapien
caccgcccagtgacttaaagagcag

SEQ ID NO: 315745 - DNA, 25 bp, Homo sapien
aagttgtggtggcagattctgtcat

SEQ ID NO: 315746 - DNA, 25 bp, Homo sapien
cattaagaataaggaggccaggctc

SEQ ID NO: 315747 - DNA, 25 bp, Homo sapien
cattggattccaagtggtcattaag

SEQ ID NO: 315748 - DNA, 25 bp, Homo sapien
ctgggaagaaatccttgaaagtggg

SEQ ID NO: 315749 - DNA, 25 bp, Homo sapien
aaacaggagtgatgaccaagactgt

SEQ ID NO: 315750 - DNA, 25 bp, Homo sapien
aacaggagtgatgaccaagactgtg

SEQ ID NO: 315751 - DNA, 25 bp, Homo sapien
acaggagtgatgaccaagactgtgg

SEQ ID NO: 315752 - DNA, 25 bp, Homo sapien
caggagtgatgaccaagactgtggt

SEQ ID NO: 315753 - DNA, 25 bp, Homo sapien
tggagaacagcacgctacgtgaggt

SEQ ID NO: 315754 - DNA, 25 bp, Homo sapien
tagccaaactcgtagaaacgaggag

SEQ ID NO: 315755 - DNA, 25 bp, Homo sapien
aacgaggagtagaacgtggttgcca

SEQ ID NO: 315756 - DNA, 25 bp, Homo sapien
tacgtgaggtgagccggtcacagaa

SEQ ID NO: 315757 - DNA, 25 bp, Homo sapien
taagttaaaaagttaatgcatatgg

SEQ ID NO: 315758 - DNA, 25 bp, Homo sapien
cccagccagcaatttactaaattta

SEQ ID NO: 315759 - DNA, 25 bp, Homo sapien
gcccagccagcaatttactaaattt

SEQ ID NO: 315760 - DNA, 25 bp, Homo sapien
agccagcaatttactaaatttaagt

SEQ ID NO: 315761 - DNA, 25 bp, Homo sapien
caaagtgggaaccacagtagcacat

SEQ ID NO: 315762 - DNA, 25 bp, Homo sapien
cctcagatgcaaagtgggaaccaca

SEQ ID NO: 315763 - DNA, 25 bp, Homo sapien
gcaaagtgggaaccacagtagcaca

SEQ ID NO: 315764 - DNA, 25 bp, Homo sapien
tttcctcagatgcaaagtgggaacc

SEQ ID NO: 315765 - DNA, 25 bp, Homo sapien
gggaaccaacaatgttgaccatcct

SEQ ID NO: 315766 - DNA, 25 bp, Homo sapien
accaacaatgttgaccatcctgctg

SEQ ID NO: 315767 - DNA, 25 bp, Homo sapien
ggaaccaacaatgttgaccatcctg

SEQ ID NO: 315768 - DNA, 25 bp, Homo sapien
gaaccaacaatgttgaccatcctgc

SEQ ID NO: 315769 - DNA, 25 bp, Homo sapien
tcccgttctctgagagtttatggaa

SEQ ID NO: 315770 - DNA, 25 bp, Homo sapien
gagatgggtatctctctttcccgtt

SEQ ID NO: 315771 - DNA, 25 bp, Homo sapien
gacatttactgatataaatggcacc

SEQ ID NO: 315772 - DNA, 25 bp, Homo sapien
aaatggcacctttagctattactgt

SEQ ID NO: 315773 - DNA, 25 bp, Homo sapien
ctgggcatgcgtgatctccgggcat

SEQ ID NO: 315774 - DNA, 25 bp, Homo sapien
gggcatacagctcgggccccttgtt

SEQ ID NO: 315775 - DNA, 25 bp, Homo sapien
gggtcaaatgcagagagactgccca

SEQ ID NO: 315776 - DNA, 25 bp, Homo sapien
tgggagctgcatcatgaaagggtca

SEQ ID NO: 315777 - DNA, 25 bp, Homo sapien
tctaggtacagacagccaaatgtgg

SEQ ID NO: 315778 - DNA, 25 bp, Homo sapien
caaatgtggacaatggcccacaggt

SEQ ID NO: 315779 - DNA, 25 bp, Homo sapien
aaaccattgttgacaacagcctgaa

SEQ ID NO: 315780 - DNA, 25 bp, Homo sapien
catccatcagtgcaggtctaggtac

SEQ ID NO: 315781 - DNA, 25 bp, Homo sapien
ttctaactccatcatcctgtgccat

SEQ ID NO: 315782 - DNA, 25 bp, Homo sapien
tgtgcgattgggttgtccgagtcct

SEQ ID NO: 315783 - DNA, 25 bp, Homo sapien
tgactgtctacagcgtcttctgtcc

SEQ ID NO: 315784 - DNA, 25 bp, Homo sapien
agacagcagcgctcaagggcatctt

SEQ ID NO: 315785 - DNA, 25 bp, Homo sapien
tactgccagaagagattcttgttcc

SEQ ID NO: 315786 - DNA, 25 bp, Homo sapien
caggtctgtgctcgtactgccagaa

SEQ ID NO: 315787 - DNA, 25 bp, Homo sapien
gccagaagagattcttgttccctgc

SEQ ID NO: 315788 - DNA, 25 bp, Homo sapien
tgctcgtactgccagaagagattct

SEQ ID NO: 315789 - DNA, 25 bp, Homo sapien
gatccagggtgacacataactctga

SEQ ID NO: 315790 - DNA, 25 bp, Homo sapien
cttgcagggttgctgttgggatcca

SEQ ID NO: 315791 - DNA, 25 bp, Homo sapien
ggtgacacataactctgaatggtag

SEQ ID NO: 315792 - DNA, 25 bp, Homo sapien
cacataactctgaatggtagttttg

SEQ ID NO: 315793 - DNA, 25 bp, Homo sapien
ctgctgaagcccaggtcctgcccgg

SEQ ID NO: 315794 - DNA, 25 bp, Homo sapien
agctccacaccaagcgtgtggccac

SEQ ID NO: 315795 - DNA, 25 bp, Homo sapien
cgggagaagagacgaaggcgtccag

SEQ ID NO: 315796 - DNA, 25 bp, Homo sapien
caccaagcgtgtggccaccttgttc

SEQ ID NO: 315797 - DNA, 25 bp, Homo sapien
ctgcacacgcacagggttcacaggc

SEQ ID NO: 315798 - DNA, 25 bp, Homo sapien
cacggggccacaggcctgctgcaca

SEQ ID NO: 315799 - DNA, 25 bp, Homo sapien
tgctgcacacgcacagggttcacag

SEQ ID NO: 315800 - DNA, 25 bp, Homo sapien
aggcctgctgcacacgcacagggtt

SEQ ID NO: 315801 - DNA, 25 bp, Homo sapien
ctctgcggtcggcacccagcttggc

SEQ ID NO: 315802 - DNA, 25 bp, Homo sapien
aagctgaagtcaacacccactcctt

SEQ ID NO: 315803 - DNA, 25 bp, Homo sapien
tgcagctggactggaacaggcttct

SEQ ID NO: 315804 - DNA, 25 bp, Homo sapien
agagagctgcacctgcaccaagctg

SEQ ID NO: 315805 - DNA, 25 bp, Homo sapien
cacctgcatggatgatgacactgcc

SEQ ID NO: 315806 - DNA, 25 bp, Homo sapien
gatgaagaagcgaggctgaaagtca

SEQ ID NO: 315807 - DNA, 25 bp, Homo sapien
cactgttaccacattgcagatgaag

SEQ ID NO: 315808 - DNA, 25 bp, Homo sapien
gttctccgagcacctgcatggatga

SEQ ID NO: 315809 - DNA, 25 bp, Homo sapien
tgggaagtccaagacggaggcatcg

SEQ ID NO: 315810 - DNA, 25 bp, Homo sapien
tcttctataaggtcatgaattccat

SEQ ID NO: 315811 - DNA, 25 bp, Homo sapien
agacggaggcatcggcagattccaa

SEQ ID NO: 315812 - DNA, 25 bp, Homo sapien
tgtcctcacgtggtaaaaaggacaa

SEQ ID NO: 315813 - DNA, 25 bp, Homo sapien
acctgctggtttcagcactgacaga

SEQ ID NO: 315814 - DNA, 25 bp, Homo sapien
ggtttcagcactgacagatcaacag

SEQ ID NO: 315815 - DNA, 25 bp, Homo sapien
gtttggaagctgtcactccttcccc

SEQ ID NO: 315816 - DNA, 25 bp, Homo sapien
agtttggaagctgtcactccttccc

SEQ ID NO: 315817 - DNA, 25 bp, Homo sapien
aattggtgtgtggatgccagactcc

SEQ ID NO: 315818 - DNA, 25 bp, Homo sapien
gctgacccagagagggcatcatata

SEQ ID NO: 315819 - DNA, 25 bp, Homo sapien
caaagggcgcttcagttttgcaggt

SEQ ID NO: 315820 - DNA, 25 bp, Homo sapien
tgtgatgtcgcagaaccagcagctg

SEQ ID NO: 315821 - DNA, 25 bp, Homo sapien
cacaggcattattcctgcgaaatga

SEQ ID NO: 315822 - DNA, 25 bp, Homo sapien
ttccacacaggcattattcctgcga

SEQ ID NO: 315823 - DNA, 25 bp, Homo sapien
tcgccatggtatcccaggaattgaa

SEQ ID NO: 315824 - DNA, 25 bp, Homo sapien
ggggagcatgtaggtatacattgaa

SEQ ID NO: 315825 - DNA, 25 bp, Homo sapien
cccaagtctccatactgagcatcat

SEQ ID NO: 315826 - DNA, 25 bp, Homo sapien
tgttaattttactctcgtcatcttt

SEQ ID NO: 315827 - DNA, 25 bp, Homo sapien
tactgagcatcataaggatgtatat

SEQ ID NO: 315828 - DNA, 25 bp, Homo sapien
ttttactctcgtcatctttctccag

SEQ ID NO: 315829 - DNA, 25 bp, Homo sapien
tgtatccaccttgcgtccaagggtc

SEQ ID NO: 315830 - DNA, 25 bp, Homo sapien
gctgtatccaccttgcgtccaaggg

SEQ ID NO: 315831 - DNA, 25 bp, Homo sapien
ggctgtatccaccttgcgtccaagg

SEQ ID NO: 315832 - DNA, 25 bp, Homo sapien
tatccaccttgcgtccaagggtcat

SEQ ID NO: 315833 - DNA, 25 bp, Homo sapien
gacattctcgccagacagacacaag

SEQ ID NO: 315834 - DNA, 25 bp, Homo sapien
ggcctggacattctcgccagacaga

SEQ ID NO: 315835 - DNA, 25 bp, Homo sapien
tcaggcctggacattctcgccagac

SEQ ID NO: 315836 - DNA, 25 bp, Homo sapien
cctggacattctcgccagacagaca

SEQ ID NO: 315837 - DNA, 25 bp, Homo sapien
tcatcctgtgatgcactgatggaca

SEQ ID NO: 315838 - DNA, 25 bp, Homo sapien
attgtcatcctgtgatgcactgatg

SEQ ID NO: 315839 - DNA, 25 bp, Homo sapien
gacactccaggatggcatctggccc

SEQ ID NO: 315840 - DNA, 25 bp, Homo sapien
ctgatggacaggtggacactccagg

SEQ ID NO: 315841 - DNA, 25 bp, Homo sapien
gactattgcctcacgtgggacaagg

SEQ ID NO: 315842 - DNA, 25 bp, Homo sapien
ctgacctcgggagactattgcctca

SEQ ID NO: 315843 - DNA, 25 bp, Homo sapien
ccggaccctgacctcgggagactat

SEQ ID NO: 315844 - DNA, 25 bp, Homo sapien
tcgggagactattgcctcacgtggg

SEQ ID NO: 315845 - DNA, 25 bp, Homo sapien
tccttctgggatctttcttgtgcct

SEQ ID NO: 315846 - DNA, 25 bp, Homo sapien
tctgggatctttcttgtgcctccgt

SEQ ID NO: 315847 - DNA, 25 bp, Homo sapien
ttctgggatctttcttgtgcctccg

SEQ ID NO: 315848 - DNA, 25 bp, Homo sapien
ttccttctgggatctttcttgtgcc

SEQ ID NO: 315849 - DNA, 25 bp, Homo sapien
tctgctcatacaggtaagaaagggt

SEQ ID NO: 315850 - DNA, 25 bp, Homo sapien
cccagccatgtggatgtcagcacca

SEQ ID NO: 315851 - DNA, 25 bp, Homo sapien
cacagatggccgtagtgacaaccca

SEQ ID NO: 315852 - DNA, 25 bp, Homo sapien
agaaacaccgtgcttgcggcctctg

SEQ ID NO: 315853 - DNA, 25 bp, Homo sapien
taagctggttctaggacacctttcc

SEQ ID NO: 315854 - DNA, 25 bp, Homo sapien
gaaatagaacgtgcttttaacatca

SEQ ID NO: 315855 - DNA, 25 bp, Homo sapien
ttaaaaagcaaacgcgcaggcccat

SEQ ID NO: 315856 - DNA, 25 bp, Homo sapien
agtggacactctcataatcaccaga

SEQ ID NO: 315857 - DNA, 25 bp, Homo sapien
gtcctggcgattttcctccttcacg

SEQ ID NO: 315858 - DNA, 25 bp, Homo sapien
cctggcgattttcctccttcacgtt

SEQ ID NO: 315859 - DNA, 25 bp, Homo sapien
tggcgattttcctccttcacgtttc

SEQ ID NO: 315860 - DNA, 25 bp, Homo sapien
tcctggcgattttcctccttcacgt

SEQ ID NO: 315861 - DNA, 25 bp, Homo sapien
agacatctggcggagacccagggtg

SEQ ID NO: 315862 - DNA, 25 bp, Homo sapien
acatctggcggagacccagggtggc

SEQ ID NO: 315863 - DNA, 25 bp, Homo sapien
tcagacatctggcggagacccaggg

SEQ ID NO: 315864 - DNA, 25 bp, Homo sapien
cagacatctggcggagacccagggt

SEQ ID NO: 315865 - DNA, 25 bp, Homo sapien
aggatcccagatcttcagaggccca

SEQ ID NO: 315866 - DNA, 25 bp, Homo sapien
aaggtttggccatcaatgaagggct

SEQ ID NO: 315867 - DNA, 25 bp, Homo sapien
gggctttcattaccccaggcctgga

SEQ ID NO: 315868 - DNA, 25 bp, Homo sapien
cagagccgtgaccttctgggaggaa

SEQ ID NO: 315869 - DNA, 25 bp, Homo sapien
aaatgaacagagcttgggaacagag

SEQ ID NO: 315870 - DNA, 25 bp, Homo sapien
tcatgcaggggaaaatgaacagagc

SEQ ID NO: 315871 - DNA, 25 bp, Homo sapien
gagcactggggtcccggagccttgg

SEQ ID NO: 315872 - DNA, 25 bp, Homo sapien
ggaacagagcactggggtcccggag

SEQ ID NO: 315873 - DNA, 25 bp, Homo sapien
atgtggtccccataagaagcctcat

SEQ ID NO: 315874 - DNA, 25 bp, Homo sapien
aaaatgtggtccccataagaagcct

SEQ ID NO: 315875 - DNA, 25 bp, Homo sapien
aaatgtggtccccataagaagcctc

SEQ ID NO: 315876 - DNA, 25 bp, Homo sapien
aatgtggtccccataagaagcctca

SEQ ID NO: 315877 - DNA, 25 bp, Homo sapien
agctcccacgtcaaagatgttttat

SEQ ID NO: 315878 - DNA, 25 bp, Homo sapien
cagctcccacgtcaaagatgtttta

SEQ ID NO: 315879 - DNA, 25 bp, Homo sapien
cagtactgcagctcccacgtcaaag

SEQ ID NO: 315880 - DNA, 25 bp, Homo sapien
tgggagctactcacccctgggcctc

SEQ ID NO: 315881 - DNA, 25 bp, Homo sapien
ctgggagctactcacccctgggcct

SEQ ID NO: 315882 - DNA, 25 bp, Homo sapien
cgttgactccgcatagagaatggct

SEQ ID NO: 315883 - DNA, 25 bp, Homo sapien
gaccttgctcccaacatgaggaagc

SEQ ID NO: 315884 - DNA, 25 bp, Homo sapien
gaaagcagttcgaacactgacacag

SEQ ID NO: 315885 - DNA, 25 bp, Homo sapien
catgcgactgaaaagtgggtttccg

SEQ ID NO: 315886 - DNA, 25 bp, Homo sapien
tggcctccatggtctggtccctgtt

SEQ ID NO: 315887 - DNA, 25 bp, Homo sapien
ccatggtctggtccctgttattctc

SEQ ID NO: 315888 - DNA, 25 bp, Homo sapien
tggtccctgttattctctgagctgt

SEQ ID NO: 315889 - DNA, 25 bp, Homo sapien
tggtctggtccctgttattctctga

SEQ ID NO: 315890 - DNA, 25 bp, Homo sapien
ggcctgaggttcatacaagcaaaga

SEQ ID NO: 315891 - DNA, 25 bp, Homo sapien
ccaagagcacgtcctggtagacaca

SEQ ID NO: 315892 - DNA, 25 bp, Homo sapien
caaagagatgacctgggtgaagcca

SEQ ID NO: 315893 - DNA, 25 bp, Homo sapien
caggacatgggctttacagtggaca

SEQ ID NO: 315894 - DNA, 25 bp, Homo sapien
ccgggctttgccaacatctgtggca

SEQ ID NO: 315895 - DNA, 25 bp, Homo sapien
tctgtggcagccacttcaaagagtt

SEQ ID NO: 315896 - DNA, 25 bp, Homo sapien
caggccgggctttgccaacatctgt

SEQ ID NO: 315897 - DNA, 25 bp, Homo sapien
agccacttcaaagagttccagctgc

SEQ ID NO: 315898 - DNA, 25 bp, Homo sapien
ttccaggtgaatatgcagcagaggc

SEQ ID NO: 315899 - DNA, 25 bp, Homo sapien
ccgtgttgaacgcagtccaatggca

SEQ ID NO: 315900 - DNA, 25 bp, Homo sapien
gcttgtctgtatccctgcagccgtg

SEQ ID NO: 315901 - DNA, 25 bp, Homo sapien
aggcaccgtggacatgctctgggca

SEQ ID NO: 315902 - DNA, 25 bp, Homo sapien
cctgcgagaagtcactgacagagct

SEQ ID NO: 315903 - DNA, 25 bp, Homo sapien
tgctgcctgcgagaagtcactgaca

SEQ ID NO: 315904 - DNA, 25 bp, Homo sapien
aggccttgctgcctgcgagaagtca

SEQ ID NO: 315905 - DNA, 25 bp, Homo sapien
cttgctgcctgcgagaagtcactga

SEQ ID NO: 315906 - DNA, 25 bp, Homo sapien
ctcgagatgtgctgggttccatctt

SEQ ID NO: 315907 - DNA, 25 bp, Homo sapien
tgtgcagtgggctctcgagatgtgc

SEQ ID NO: 315908 - DNA, 25 bp, Homo sapien
tctcgagatgtgctgggttccatct

SEQ ID NO: 315909 - DNA, 25 bp, Homo sapien
gtgcagtgggctctcgagatgtgct

SEQ ID NO: 315910 - DNA, 25 bp, Homo sapien
tgtgagccagcggtccctcagtgtc

SEQ ID NO: 315911 - DNA, 25 bp, Homo sapien
acatatttcaacatgcgtgtgagcc

SEQ ID NO: 315912 - DNA, 25 bp, Homo sapien
ttcaacatgcgtgtgagccagcggt

SEQ ID NO: 315913 - DNA, 25 bp, Homo sapien
atgcgtgtgagccagcggtccctca

SEQ ID NO: 315914 - DNA, 25 bp, Homo sapien
ggacactgtgtggtcctgtcctgca

SEQ ID NO: 315915 - DNA, 25 bp, Homo sapien
gcaggagggctcacttgggaagaca

SEQ ID NO: 315916 - DNA, 25 bp, Homo sapien
ctgcaggagggctcacttgggaaga

SEQ ID NO: 315917 - DNA, 25 bp, Homo sapien
ctggggcgctttttgaggacactgt

SEQ ID NO: 315918 - DNA, 25 bp, Homo sapien
tctttgaacatctcattagatagaa

SEQ ID NO: 315919 - DNA, 25 bp, Homo sapien
cctcagggttaacaaatggctgctg

SEQ ID NO: 315920 - DNA, 25 bp, Homo sapien
cagaagatgtctttgaacatctcat

SEQ ID NO: 315921 - DNA, 25 bp, Homo sapien
gcagatagaagaagaaaccacaggg

SEQ ID NO: 315922 - DNA, 25 bp, Homo sapien
ccaaagatagtagagccaaggtctt

SEQ ID NO: 315923 - DNA, 25 bp, Homo sapien
ggttcaatggcccaaagatagtaga

SEQ ID NO: 315924 - DNA, 25 bp, Homo sapien
tttaaggagaaatgcgacttgctac

SEQ ID NO: 315925 - DNA, 25 bp, Homo sapien
gacttgctacctctggttcaatggc

SEQ ID NO: 315926 - DNA, 25 bp, Homo sapien
tccagcacgaggccgtgtagcacag

SEQ ID NO: 315927 - DNA, 25 bp, Homo sapien
cacagccagtccctgtgtccagcac

SEQ ID NO: 315928 - DNA, 25 bp, Homo sapien
agccagtccctgtgtccagcacgag

SEQ ID NO: 315929 - DNA, 25 bp, Homo sapien
gccagtccctgtgtccagcacgagg

SEQ ID NO: 315930 - DNA, 25 bp, Homo sapien
agggacaacccacgcctgacagtgc

SEQ ID NO: 315931 - DNA, 25 bp, Homo sapien
gtgccgtggtgcatttttgggtaca

SEQ ID NO: 315932 - DNA, 25 bp, Homo sapien
ggctccttgtcagggacaacccacg

SEQ ID NO: 315933 - DNA, 25 bp, Homo sapien
aacccacgcctgacagtgccgtggt

SEQ ID NO: 315934 - DNA, 25 bp, Homo sapien
gggcgtgcctgtgggcgtcaggggg

SEQ ID NO: 315935 - DNA, 25 bp, Homo sapien
gcgtgcctgtgggcgtcagggggtg

SEQ ID NO: 315936 - DNA, 25 bp, Homo sapien
ggcgtgcctgtgggcgtcagggggt

SEQ ID NO: 315937 - DNA, 25 bp, Homo sapien
cgggcgtgcctgtgggcgtcagggg

SEQ ID NO: 315938 - DNA, 25 bp, Homo sapien
tcaagtcctccggtggagcacggag

SEQ ID NO: 315939 - DNA, 25 bp, Homo sapien
tccggtggagcacggagtgcctctc

SEQ ID NO: 315940 - DNA, 25 bp, Homo sapien
tcctccggtggagcacggagtgcct

SEQ ID NO: 315941 - DNA, 25 bp, Homo sapien
ggtggagcacggagtgcctctcctc

SEQ ID NO: 315942 - DNA, 25 bp, Homo sapien
tgcgagtgggatttttcgggaggcg

SEQ ID NO: 315943 - DNA, 25 bp, Homo sapien
tcagaatgatgatgatggctccggg

SEQ ID NO: 315944 - DNA, 25 bp, Homo sapien
ggctccggggcttgagtgtttgcga

SEQ ID NO: 315945 - DNA, 25 bp, Homo sapien
tgagtgtttgcgagtgggatttttc

SEQ ID NO: 315946 - DNA, 25 bp, Homo sapien
tacaagtccagtaagcgaatgctag

SEQ ID NO: 315947 - DNA, 25 bp, Homo sapien
catggagcttaaactaaagtacaga

SEQ ID NO: 315948 - DNA, 25 bp, Homo sapien
tagtgtgcgtgctgccttgaaggta

SEQ ID NO: 315949 - DNA, 25 bp, Homo sapien
gcatcatggagcttaaactaaagta

SEQ ID NO: 315950 - DNA, 25 bp, Homo sapien
aaatgcttttgtgtcgtacattgtg

SEQ ID NO: 315951 - DNA, 25 bp, Homo sapien
ttgtgtcgtacattgtgtagtgcat

SEQ ID NO: 315952 - DNA, 25 bp, Homo sapien
ttttgtgtcgtacattgtgtagtgc

SEQ ID NO: 315953 - DNA, 25 bp, Homo sapien
tgcttttgtgtcgtacattgtgtag

SEQ ID NO: 315954 - DNA, 25 bp, Homo sapien
catagtcttcgagacacacacatac

SEQ ID NO: 315955 - DNA, 25 bp, Homo sapien
tattaccacatagtcttcgagacac

SEQ ID NO: 315956 - DNA, 25 bp, Homo sapien
ttgcatttgttgtaacctctaaggg

SEQ ID NO: 315957 - DNA, 25 bp, Homo sapien
caactgagaccatgcagctcatcca

SEQ ID NO: 315958 - DNA, 25 bp, Homo sapien
gctctcaagtgtgccagtattctgg

SEQ ID NO: 315959 - DNA, 25 bp, Homo sapien
tgttccctcagtggttcaacaaagg

SEQ ID NO: 315960 - DNA, 25 bp, Homo sapien
gagaggctcgattcccaatgtgatc

SEQ ID NO: 315961 - DNA, 25 bp, Homo sapien
ccccaggaggtgtgatgaaatggca

SEQ ID NO: 315962 - DNA, 25 bp, Homo sapien
tctgaaaggttatacctgttattct

SEQ ID NO: 315963 - DNA, 25 bp, Homo sapien
ttctgaaaggttatacctgttattc

SEQ ID NO: 315964 - DNA, 25 bp, Homo sapien
ctgaaaggttatacctgttattctt

SEQ ID NO: 315965 - DNA, 25 bp, Homo sapien
ttacaacctggtgacacattctgaa

SEQ ID NO: 315966 - DNA, 25 bp, Homo sapien
ctacctagaattatgggcccacggt

SEQ ID NO: 315967 - DNA, 25 bp, Homo sapien
acctagaattatgggcccacggtgc

SEQ ID NO: 315968 - DNA, 25 bp, Homo sapien
cccacggtgcacgtccctaatagat

SEQ ID NO: 315969 - DNA, 25 bp, Homo sapien
ctaatagatgctgcctcataggact

SEQ ID NO: 315970 - DNA, 25 bp, Homo sapien
gtcttgaaggctctttggttctctc

SEQ ID NO: 315971 - DNA, 25 bp, Homo sapien
acaggggcggccctgtccttctcca

SEQ ID NO: 315972 - DNA, 25 bp, Homo sapien
tgatgtgagccatgtacgtctcccc

SEQ ID NO: 315973 - DNA, 25 bp, Homo sapien
tctgtgttgtaagcacaggggcggc

SEQ ID NO: 315974 - DNA, 25 bp, Homo sapien
ggcttctgacgcttcctggatggtt

SEQ ID NO: 315975 - DNA, 25 bp, Homo sapien
aagcacatgcacgtaagccgttgag

SEQ ID NO: 315976 - DNA, 25 bp, Homo sapien
caaggcaaggcctgggataattcca

SEQ ID NO: 315977 - DNA, 25 bp, Homo sapien
tagaggaaggctgtccaagcacatg

SEQ ID NO: 315978 - DNA, 25 bp, Homo sapien
tggaagaaccataataacaggagtt

SEQ ID NO: 315979 - DNA, 25 bp, Homo sapien
gaaggcgtctttactggttgagtta

SEQ ID NO: 315980 - DNA, 25 bp, Homo sapien
taactcaaggtgttcatggcaaggg

SEQ ID NO: 315981 - DNA, 25 bp, Homo sapien
taggtctctgagtccagacatgggc

SEQ ID NO: 315982 - DNA, 25 bp, Homo sapien
gatgctctgtcaatgttttgctgaa

SEQ ID NO: 315983 - DNA, 25 bp, Homo sapien
taggctccaggactaatgacacggc

SEQ ID NO: 315984 - DNA, 25 bp, Homo sapien
tgtcctagcgagctttgcagatcct

SEQ ID NO: 315985 - DNA, 25 bp, Homo sapien
ttgaattcgcccgaaggcatccggc

SEQ ID NO: 315986 - DNA, 25 bp, Homo sapien
gtagccagatgccacgtgccagcca

SEQ ID NO: 315987 - DNA, 25 bp, Homo sapien
cacagggaaacgtggaagtgcagct

SEQ ID NO: 315988 - DNA, 25 bp, Homo sapien
cagatccacacctgaggttccaagc

SEQ ID NO: 315989 - DNA, 25 bp, Homo sapien
gatggtggagaaagccccattgtaa

SEQ ID NO: 315990 - DNA, 25 bp, Homo sapien
gaagccactgaaagatgcgtcctct

SEQ ID NO: 315991 - DNA, 25 bp, Homo sapien
gccactgaaagatgcgtcctctgac

SEQ ID NO: 315992 - DNA, 25 bp, Homo sapien
ctgaaagatgcgtcctctgactctg

SEQ ID NO: 315993 - DNA, 25 bp, Homo sapien
tcaaagaagccactgaaagatgcgt

SEQ ID NO: 315994 - DNA, 25 bp, Homo sapien
tcttgttcacaagcagagcccggca

SEQ ID NO: 315995 - DNA, 25 bp, Homo sapien
tgcccagcacttgggtgcgtgccat

SEQ ID NO: 315996 - DNA, 25 bp, Homo sapien
agagggctcttgttcacaagcagag

SEQ ID NO: 315997 - DNA, 25 bp, Homo sapien
catcatcaccagagcttgtgcttct

SEQ ID NO: 315998 - DNA, 25 bp, Homo sapien
tagttaatctccaagtcctgctcaa

SEQ ID NO: 315999 - DNA, 25 bp, Homo sapien
tgctgccctggattgacagcacagc

SEQ ID NO: 316000 - DNA, 25 bp, Homo sapien
cagctaggagaatctgcctggatct

SEQ ID NO: 316001 - DNA, 25 bp, Homo sapien
aatctgcctggatctcgccagggcc

SEQ ID NO: 316002 - DNA, 25 bp, Homo sapien
gattgacagcacagctaggagaatc

SEQ ID NO: 316003 - DNA, 25 bp, Homo sapien
caatggcagcgtgggacagaaggaa

SEQ ID NO: 316004 - DNA, 25 bp, Homo sapien
cagcgtgggacagaaggaagccttc

SEQ ID NO: 316005 - DNA, 25 bp, Homo sapien
gggacagaaggaagccttcagatga

SEQ ID NO: 316006 - DNA, 25 bp, Homo sapien
tggcaagtggcaatggcagcgtggg

SEQ ID NO: 316007 - DNA, 25 bp, Homo sapien
gcttgccacgtttctcaattccagg

SEQ ID NO: 316008 - DNA, 25 bp, Homo sapien
tctaaggtcattgtagacacgtcct

SEQ ID NO: 316009 - DNA, 25 bp, Homo sapien
caattccaggtttactgttccatgc

SEQ ID NO: 316010 - DNA, 25 bp, Homo sapien
gatgttgatcctgcgttctaaggtc

SEQ ID NO: 316011 - DNA, 25 bp, Homo sapien
tcctgggagaaagaacgtggcggca

SEQ ID NO: 316012 - DNA, 25 bp, Homo sapien
gtgagatccagagagccgcacaggt

SEQ ID NO: 316013 - DNA, 25 bp, Homo sapien
caacatgaaacggagcagagtgaga

SEQ ID NO: 316014 - DNA, 25 bp, Homo sapien
gcagcagcaacccaatgcacatttg

SEQ ID NO: 316015 - DNA, 25 bp, Homo sapien
taacggtgacatgtatcggtccaac

SEQ ID NO: 316016 - DNA, 25 bp, Homo sapien
cttctccccagtaacggtgacatgt

SEQ ID NO: 316017 - DNA, 25 bp, Homo sapien
gacatgtatcggtccaacttttgac

SEQ ID NO: 316018 - DNA, 25 bp, Homo sapien
tccccagtaacggtgacatgtatcg

SEQ ID NO: 316019 - DNA, 25 bp, Homo sapien
ggaggggaacggggcatgagatgac

SEQ ID NO: 316020 - DNA, 25 bp, Homo sapien
gggaggggaacggggcatgagatga

SEQ ID NO: 316021 - DNA, 25 bp, Homo sapien
taatgaattcagtgacaatcgtgct

SEQ ID NO: 316022 - DNA, 25 bp, Homo sapien
aattcagtgacaatcgtgcttccgt

SEQ ID NO: 316023 - DNA, 25 bp, Homo sapien
tccaataatgaattcagtgacaatc

SEQ ID NO: 316024 - DNA, 25 bp, Homo sapien
gtgacaatcgtgcttccgtcagcgc

SEQ ID NO: 316025 - DNA, 25 bp, Homo sapien
cactcaggacggatgctggatgcct

SEQ ID NO: 316026 - DNA, 25 bp, Homo sapien
ggcattcattgttagtgagaaaccg

SEQ ID NO: 316027 - DNA, 25 bp, Homo sapien
cagagccccgttttgctgttgataa

SEQ ID NO: 316028 - DNA, 25 bp, Homo sapien
tctgagccacggatacttctccagg

SEQ ID NO: 316029 - DNA, 25 bp, Homo sapien
acctctgcagtctcaccagacccac

SEQ ID NO: 316030 - DNA, 25 bp, Homo sapien
cacctctgcagtctcaccagaccca

SEQ ID NO: 316031 - DNA, 25 bp, Homo sapien
tcacctctgcagtctcaccagaccc

SEQ ID NO: 316032 - DNA, 25 bp, Homo sapien
tatagtgacggttttatggacttgc

SEQ ID NO: 316033 - DNA, 25 bp, Homo sapien
tgacggttttatggacttgcaagtg

SEQ ID NO: 316034 - DNA, 25 bp, Homo sapien
tggaaatctatagtgacggttttat

SEQ ID NO: 316035 - DNA, 25 bp, Homo sapien
gttttatggacttgcaagtggccca

SEQ ID NO: 316036 - DNA, 25 bp, Homo sapien
cgccaagtcacggtgccgtcctgtt

SEQ ID NO: 316037 - DNA, 25 bp, Homo sapien
ctggttcctgagctagattcgagag

SEQ ID NO: 316038 - DNA, 25 bp, Homo sapien
tcacggtgccgtcctgttctggttc

SEQ ID NO: 316039 - DNA, 25 bp, Homo sapien
gcctagaggtcatcctccggagagt

SEQ ID NO: 316040 - DNA, 25 bp, Homo sapien
aacttgtccacgtggacaaatagaa

SEQ ID NO: 316041 - DNA, 25 bp, Homo sapien
gaagtcctgaagcacacactgaatg

SEQ ID NO: 316042 - DNA, 25 bp, Homo sapien
aaatagaagtcctgaagcacacact

SEQ ID NO: 316043 - DNA, 25 bp, Homo sapien
ttgtccacgtggacaaatagaagtc

SEQ ID NO: 316044 - DNA, 25 bp, Homo sapien
cgtctgattaaaaccgtgtgcttca

SEQ ID NO: 316045 - DNA, 25 bp, Homo sapien
cctaaagcactgacaaccagctcct

SEQ ID NO: 316046 - DNA, 25 bp, Homo sapien
ctaaagcactgacaaccagctcctc

SEQ ID NO: 316047 - DNA, 25 bp, Homo sapien
gtcgtaacagtctgagtggctttct

SEQ ID NO: 316048 - DNA, 25 bp, Homo sapien
catgggcagtagtggagtctctggg

SEQ ID NO: 316049 - DNA, 25 bp, Homo sapien
gaggtggtcgtaacagtctgagtgg

SEQ ID NO: 316050 - DNA, 25 bp, Homo sapien
gtggtcgtaacagtctgagtggctt

SEQ ID NO: 316051 - DNA, 25 bp, Homo sapien
ccggcattgggtagaatggagccca

SEQ ID NO: 316052 - DNA, 25 bp, Homo sapien
ggtcataggatacacgtgtttgagg

SEQ ID NO: 316053 - DNA, 25 bp, Homo sapien
gacatgcaaggtcataggatacacg

SEQ ID NO: 316054 - DNA, 25 bp, Homo sapien
gaggtggtcgtaacagtcatcatgg

SEQ ID NO: 316055 - DNA, 25 bp, Homo sapien
cccgcggatgcgctgacttcctgtg

SEQ ID NO: 316056 - DNA, 25 bp, Homo sapien
tgggcccacgccttgctccatgagg

SEQ ID NO: 316057 - DNA, 25 bp, Homo sapien
atgaggatccaaacaagggccccgg

SEQ ID NO: 316058 - DNA, 25 bp, Homo sapien
cgcggatgcgctgacttcctgtggc

SEQ ID NO: 316059 - DNA, 25 bp, Homo sapien
tcctagggttgtcctaagacctgcc

SEQ ID NO: 316060 - DNA, 25 bp, Homo sapien
caggtcttgtccaatgagggattgc

SEQ ID NO: 316061 - DNA, 25 bp, Homo sapien
tcccactgtggatgctttcactatg

SEQ ID NO: 316062 - DNA, 25 bp, Homo sapien
gggtttctgtgctcaccgccagctg

SEQ ID NO: 316063 - DNA, 25 bp, Homo sapien
ctgcactgaacagggcactgaacac

SEQ ID NO: 316064 - DNA, 25 bp, Homo sapien
gaacagggcactgaacacgtggcag

SEQ ID NO: 316065 - DNA, 25 bp, Homo sapien
cggcaaatgcgagctcatactccat

SEQ ID NO: 316066 - DNA, 25 bp, Homo sapien
catttgctccttcggcaaatgcgag

SEQ ID NO: 316067 - DNA, 25 bp, Homo sapien
gactccagtaccttgtgcaactctg

SEQ ID NO: 316068 - DNA, 25 bp, Homo sapien
tgagatgcccatttggactccagta

SEQ ID NO: 316069 - DNA, 25 bp, Homo sapien
ggattttcatgagcgcccttcacca

SEQ ID NO: 316070 - DNA, 25 bp, Homo sapien
cagtgcatccatcctgacaaagcat

SEQ ID NO: 316071 - DNA, 25 bp, Homo sapien
cgggaacacactgctccaacagcat

SEQ ID NO: 316072 - DNA, 25 bp, Homo sapien
gaacacactgctccaacagcatggc

SEQ ID NO: 316073 - DNA, 25 bp, Homo sapien
gtgcgggaacacactgctccaacag

SEQ ID NO: 316074 - DNA, 25 bp, Homo sapien
ggaacacactgctccaacagcatgg

SEQ ID NO: 316075 - DNA, 25 bp, Homo sapien
aggatcccacattacttttagtcat

SEQ ID NO: 316076 - DNA, 25 bp, Homo sapien
cagattttcgagttgttcacggaca

SEQ ID NO: 316077 - DNA, 25 bp, Homo sapien
cattacttttagtcatcatgttgcc

SEQ ID NO: 316078 - DNA, 25 bp, Homo sapien
ttattcagattttcgagttgttcac

SEQ ID NO: 316079 - DNA, 25 bp, Homo sapien
tcattttctgcttgctctaggcttc

SEQ ID NO: 316080 - DNA, 25 bp, Homo sapien
gcttctgttccttcctgcctggctg

SEQ ID NO: 316081 - DNA, 25 bp, Homo sapien
ttctgttccttcctgcctggctgtg

SEQ ID NO: 316082 - DNA, 25 bp, Homo sapien
ggcttctgttccttcctgcctggct

SEQ ID NO: 316083 - DNA, 25 bp, Homo sapien
ctgttccttcctgcctggctgtgac

SEQ ID NO: 316084 - DNA, 25 bp, Homo sapien
aacatggatcccagcgcgggctttg

SEQ ID NO: 316085 - DNA, 25 bp, Homo sapien
atggatcccagcgcgggctttgctg

SEQ ID NO: 316086 - DNA, 25 bp, Homo sapien
ccaacatggatcccagcgcgggctt

SEQ ID NO: 316087 - DNA, 25 bp, Homo sapien
atcccagcgcgggctttgctggcca

SEQ ID NO: 316088 - DNA, 25 bp, Homo sapien
ctcagcaatgcaccaggagcccttt

SEQ ID NO: 316089 - DNA, 25 bp, Homo sapien
cagcaatgcaccaggagccctttgt

SEQ ID NO: 316090 - DNA, 25 bp, Homo sapien
tgcaccaggagccctttgttgtccc

SEQ ID NO: 316091 - DNA, 25 bp, Homo sapien
caccaggagccctttgttgtcccat

SEQ ID NO: 316092 - DNA, 25 bp, Homo sapien
cagaccgcagatgccctgtgtgggc

SEQ ID NO: 316093 - DNA, 25 bp, Homo sapien
tccaaggtgctactggctctgggct

SEQ ID NO: 316094 - DNA, 25 bp, Homo sapien
cacagacttccaaggtgctactggc

SEQ ID NO: 316095 - DNA, 25 bp, Homo sapien
ccaacagaccgcagatgccctgtgt

SEQ ID NO: 316096 - DNA, 25 bp, Homo sapien
gtgttctgtttcgtcatttatttcg

SEQ ID NO: 316097 - DNA, 25 bp, Homo sapien
gccgaaggcagccagtgattcctcc

SEQ ID NO: 316098 - DNA, 25 bp, Homo sapien
ttttgatgtggatgcagccgaaggc

SEQ ID NO: 316099 - DNA, 25 bp, Homo sapien
cgatgtgagcacaactttttacaaa

SEQ ID NO: 316100 - DNA, 25 bp, Homo sapien
ccccaggcctgaagggttctcacaa

SEQ ID NO: 316101 - DNA, 25 bp, Homo sapien
ccaggcctgaagggttctcacaaga

SEQ ID NO: 316102 - DNA, 25 bp, Homo sapien
cccaggcctgaagggttctcacaag

SEQ ID NO: 316103 - DNA, 25 bp, Homo sapien
atgtctcctctgacgtcattcttgg

SEQ ID NO: 316104 - DNA, 25 bp, Homo sapien
gcatgtctcctctgacgtcattctt

SEQ ID NO: 316105 - DNA, 25 bp, Homo sapien
cgcatgtctcctctgacgtcattct

SEQ ID NO: 316106 - DNA, 25 bp, Homo sapien
catgtctcctctgacgtcattcttg

SEQ ID NO: 316107 - DNA, 25 bp, Homo sapien
tcagctcgccaagctggaccttgct

SEQ ID NO: 316108 - DNA, 25 bp, Homo sapien
gcctccgcaggctctaactgggtgt

SEQ ID NO: 316109 - DNA, 25 bp, Homo sapien
ttctttccggatcccgagagggctg

SEQ ID NO: 316110 - DNA, 25 bp, Homo sapien
cccatgtagaaagggcggcgtccag

SEQ ID NO: 316111 - DNA, 25 bp, Homo sapien
gcctctgctgccatcccagagaatg

SEQ ID NO: 316112 - DNA, 25 bp, Homo sapien
ctctgctgccatcccagagaatgaa

SEQ ID NO: 316113 - DNA, 25 bp, Homo sapien
agcctctgctgccatcccagagaat

SEQ ID NO: 316114 - DNA, 25 bp, Homo sapien
ctgctgccatcccagagaatgaatc

SEQ ID NO: 316115 - DNA, 25 bp, Homo sapien
ttgttgacgtccttgacaacccacc

SEQ ID NO: 316116 - DNA, 25 bp, Homo sapien
gctgtggacatgccgcaaggtctgg

SEQ ID NO: 316117 - DNA, 25 bp, Homo sapien
gaccttgttgacgtccttgacaacc

SEQ ID NO: 316118 - DNA, 25 bp, Homo sapien
ggcagaccttgttgacgtccttgac

SEQ ID NO: 316119 - DNA, 25 bp, Homo sapien
ctctgatccctgatatgaggatgaa

SEQ ID NO: 316120 - DNA, 25 bp, Homo sapien
cggccggagcccgtctcttgggcct

SEQ ID NO: 316121 - DNA, 25 bp, Homo sapien
gaggatgaagattgcagggctctct

SEQ ID NO: 316122 - DNA, 25 bp, Homo sapien
cctgactctgttgtgtgggtccggg

SEQ ID NO: 316123 - DNA, 25 bp, Homo sapien
taggatgcacgtcccctggacactt

SEQ ID NO: 316124 - DNA, 25 bp, Homo sapien
ctgggcacctcctaggatgcacgtc

SEQ ID NO: 316125 - DNA, 25 bp, Homo sapien
accaaagtcgcaccttcttgctact

SEQ ID NO: 316126 - DNA, 25 bp, Homo sapien
gctccaccaaagtcgcaccttcttg

SEQ ID NO: 316127 - DNA, 25 bp, Homo sapien
ggtggcgggatcagggttccaggga

SEQ ID NO: 316128 - DNA, 25 bp, Homo sapien
acagggtggcgggatcagggttcca

SEQ ID NO: 316129 - DNA, 25 bp, Homo sapien
ctggaaggacagaccacagggtggc

SEQ ID NO: 316130 - DNA, 25 bp, Homo sapien
ccacagggtggcgggatcagggttc

SEQ ID NO: 316131 - DNA, 25 bp, Homo sapien
ggcatagccacagggaatggctcca

SEQ ID NO: 316132 - DNA, 25 bp, Homo sapien
ctggcatagccacagggaatggctc

SEQ ID NO: 316133 - DNA, 25 bp, Homo sapien
cagcaagctgatgtccagaggcgga

SEQ ID NO: 316134 - DNA, 25 bp, Homo sapien
aagctgatgtccagaggcggaagaa

SEQ ID NO: 316135 - DNA, 25 bp, Homo sapien
tgacagggcaggggaccaggtgagt

SEQ ID NO: 316136 - DNA, 25 bp, Homo sapien
cagggcaggggaccaggtgagtgcc

SEQ ID NO: 316137 - DNA, 25 bp, Homo sapien
cacgtgatcatgagtgacagggcag

SEQ ID NO: 316138 - DNA, 25 bp, Homo sapien
tcacgtgatcatgagtgacagggca

SEQ ID NO: 316139 - DNA, 25 bp, Homo sapien
tctgattggacggaggagaggtggt

SEQ ID NO: 316140 - DNA, 25 bp, Homo sapien
cgtgggtctgattggacggaggaga

SEQ ID NO: 316141 - DNA, 25 bp, Homo sapien
ggaggccgtgggtctgattggacgg

SEQ ID NO: 316142 - DNA, 25 bp, Homo sapien
ctgattggacggaggagaggtggtc

SEQ ID NO: 316143 - DNA, 25 bp, Homo sapien
taaccgacaagatcataagtgaatc

SEQ ID NO: 316144 - DNA, 25 bp, Homo sapien
aaatatcactggctgtgcattttga

SEQ ID NO: 316145 - DNA, 25 bp, Homo sapien
tgcgggctgcaatttataaccgaca

SEQ ID NO: 316146 - DNA, 25 bp, Homo sapien
ttttgatatgagaaatgcgggctgc

SEQ ID NO: 316147 - DNA, 25 bp, Homo sapien
ggcatcgttctctccttggttaaat

SEQ ID NO: 316148 - DNA, 25 bp, Homo sapien
aaattcagtgagtaatttctgactg

SEQ ID NO: 316149 - DNA, 25 bp, Homo sapien
ctatatggcatcgttctctccttgg

SEQ ID NO: 316150 - DNA, 25 bp, Homo sapien
tatggcatcgttctctccttggtta

SEQ ID NO: 316151 - DNA, 25 bp, Homo sapien
ccagatggtggttggaatccacaaa

SEQ ID NO: 316152 - DNA, 25 bp, Homo sapien
cctccagattttgtcgttagcttca

SEQ ID NO: 316153 - DNA, 25 bp, Homo sapien
tagcatccacttagatggtaccagg

SEQ ID NO: 316154 - DNA, 25 bp, Homo sapien
tgggccatcagttgtgaccagatgg

SEQ ID NO: 316155 - DNA, 25 bp, Homo sapien
tgagagccacgtcagcttgagagac

SEQ ID NO: 316156 - DNA, 25 bp, Homo sapien
cttgagagacctcgggaacccatca

SEQ ID NO: 316157 - DNA, 25 bp, Homo sapien
gaaggtctccgcgtcaaactcagaa

SEQ ID NO: 316158 - DNA, 25 bp, Homo sapien
caaaggatgctgtgagttataggtc

SEQ ID NO: 316159 - DNA, 25 bp, Homo sapien
gcagaatatgacatttgtgagtcac

SEQ ID NO: 316160 - DNA, 25 bp, Homo sapien
agtcacggtaaggtggctttttcat

SEQ ID NO: 316161 - DNA, 25 bp, Homo sapien
cccaagtctgattccttgcagaata

SEQ ID NO: 316162 - DNA, 25 bp, Homo sapien
caagtctgattccttgcagaatatg

SEQ ID NO: 316163 - DNA, 25 bp, Homo sapien
caaagtcacaggaacgaggccggga

SEQ ID NO: 316164 - DNA, 25 bp, Homo sapien
tcggtgtcggggaggccactttctg

SEQ ID NO: 316165 - DNA, 25 bp, Homo sapien
gcccaaagtcacaggaacgaggccg

SEQ ID NO: 316166 - DNA, 25 bp, Homo sapien
gggcccaaagtcacaggaacgaggc

SEQ ID NO: 316167 - DNA, 25 bp, Homo sapien
tctagtaggacctaggaccactcca

SEQ ID NO: 316168 - DNA, 25 bp, Homo sapien
tccttggctactgcgaggctccagt

SEQ ID NO: 316169 - DNA, 25 bp, Homo sapien
ggtgaacctcttccgagtcctgagg

SEQ ID NO: 316170 - DNA, 25 bp, Homo sapien
aagacaggccctcctcgtgctttca

SEQ ID NO: 316171 - DNA, 25 bp, Homo sapien
cagccaatgggtcgtgtttggaaca

SEQ ID NO: 316172 - DNA, 25 bp, Homo sapien
tcttagcaatagcattttggagcag

SEQ ID NO: 316173 - DNA, 25 bp, Homo sapien
tggagcagtcagcaactgagccgca

SEQ ID NO: 316174 - DNA, 25 bp, Homo sapien
gggaagtcgcctccgcttgctgaac

SEQ ID NO: 316175 - DNA, 25 bp, Homo sapien
tggacccaaacggtggctgatgaag

SEQ ID NO: 316176 - DNA, 25 bp, Homo sapien
gctggcaacacatccttccttgaag

SEQ ID NO: 316177 - DNA, 25 bp, Homo sapien
gtcccactgttcgtggatgtggcca

SEQ ID NO: 316178 - DNA, 25 bp, Homo sapien
gatgaaggccgtgtgtaggcagcac

SEQ ID NO: 316179 - DNA, 25 bp, Homo sapien
gctggttgcttcgcagggccgtggg

SEQ ID NO: 316180 - DNA, 25 bp, Homo sapien
ttcagttccttagtcgtggagcccc

SEQ ID NO: 316181 - DNA, 25 bp, Homo sapien
ccgtggggcgatttgactgacagac

SEQ ID NO: 316182 - DNA, 25 bp, Homo sapien
gatttgactgacagactcggtcttc

SEQ ID NO: 316183 - DNA, 25 bp, Homo sapien
tgccctgtgaggccatcatgtgcag

SEQ ID NO: 316184 - DNA, 25 bp, Homo sapien
ggatgccctgtgaggccatcatgtg

SEQ ID NO: 316185 - DNA, 25 bp, Homo sapien
gccctgtgaggccatcatgtgcagg

SEQ ID NO: 316186 - DNA, 25 bp, Homo sapien
gaggatgccctgtgaggccatcatg

SEQ ID NO: 316187 - DNA, 25 bp, Homo sapien
acagagtaccatccttcagacgtga

SEQ ID NO: 316188 - DNA, 25 bp, Homo sapien
gtgcagcgggaagaaaaggccactc

SEQ ID NO: 316189 - DNA, 25 bp, Homo sapien
catgttgtcaggtgcttgccaagga

SEQ ID NO: 316190 - DNA, 25 bp, Homo sapien
tcatccgtccagtcaaaggcaagtg

SEQ ID NO: 316191 - DNA, 25 bp, Homo sapien
caaagaatgctaagccagggtggag

SEQ ID NO: 316192 - DNA, 25 bp, Homo sapien
gatgcaagcaaagaatgctaagcca

SEQ ID NO: 316193 - DNA, 25 bp, Homo sapien
agcaaagaatgctaagccagggtgg

SEQ ID NO: 316194 - DNA, 25 bp, Homo sapien
caagcaaagaatgctaagccagggt

SEQ ID NO: 316195 - DNA, 25 bp, Homo sapien
ttctgttccttgacttttccaaatg

SEQ ID NO: 316196 - DNA, 25 bp, Homo sapien
cgttcctcatcattctgttccttga

SEQ ID NO: 316197 - DNA, 25 bp, Homo sapien
ggtgagcagagattcccccccacat

SEQ ID NO: 316198 - DNA, 25 bp, Homo sapien
ttccaaatgcctgcagctgtggtga

SEQ ID NO: 316199 - DNA, 25 bp, Homo sapien
tccccagaacacagcgctctgagta

SEQ ID NO: 316200 - DNA, 25 bp, Homo sapien
taccaggtactgtttcaacgtttgc

SEQ ID NO: 316201 - DNA, 25 bp, Homo sapien
cacagcgctctgagtaccaggtact

SEQ ID NO: 316202 - DNA, 25 bp, Homo sapien
gcctctgatccttcccgtgttctca

SEQ ID NO: 316203 - DNA, 25 bp, Homo sapien
tggggccttgaattctaagtccctg

SEQ ID NO: 316204 - DNA, 25 bp, Homo sapien
gggccttgaattctaagtccctgga

SEQ ID NO: 316205 - DNA, 25 bp, Homo sapien
ggccttgaattctaagtccctggag

SEQ ID NO: 316206 - DNA, 25 bp, Homo sapien
ctggggccttgaattctaagtccct

SEQ ID NO: 316207 - DNA, 25 bp, Homo sapien
tgagccgctgtagaccaaactccag

SEQ ID NO: 316208 - DNA, 25 bp, Homo sapien
gggctgcttttgacgcacttctgca

SEQ ID NO: 316209 - DNA, 25 bp, Homo sapien
catggccttaagtacaatgtaaacg

SEQ ID NO: 316210 - DNA, 25 bp, Homo sapien
aatgtaaacgatcagcaaagtttgc

SEQ ID NO: 316211 - DNA, 25 bp, Homo sapien
tgatcccgctgttctgggacttcag

SEQ ID NO: 316212 - DNA, 25 bp, Homo sapien
ctctttcgagtgtgtgctttggaga

SEQ ID NO: 316213 - DNA, 25 bp, Homo sapien
cgggaggctgatcccgctgttctgg

SEQ ID NO: 316214 - DNA, 25 bp, Homo sapien
cagctcctctttcgagtgtgtgctt

SEQ ID NO: 316215 - DNA, 25 bp, Homo sapien
tagaaaagtgacgatgatagcagtg

SEQ ID NO: 316216 - DNA, 25 bp, Homo sapien
gtgttagaaaagtgacgatgatagc

SEQ ID NO: 316217 - DNA, 25 bp, Homo sapien
gtgaagtgttagaaaagtgacgatg

SEQ ID NO: 316218 - DNA, 25 bp, Homo sapien
atatcactttgatcattgaagtggg

SEQ ID NO: 316219 - DNA, 25 bp, Homo sapien
ttctgtttgtggccttgctgattcc

SEQ ID NO: 316220 - DNA, 25 bp, Homo sapien
gttctctttctgtttgtggccttgc

SEQ ID NO: 316221 - DNA, 25 bp, Homo sapien
tgtttgtggccttgctgattcccag

SEQ ID NO: 316222 - DNA, 25 bp, Homo sapien
gtttgtggccttgctgattcccaga

SEQ ID NO: 316223 - DNA, 25 bp, Homo sapien
tggtcaagggccatgttcctgctct

SEQ ID NO: 316224 - DNA, 25 bp, Homo sapien
acattctgtggagcctgagagccag

SEQ ID NO: 316225 - DNA, 25 bp, Homo sapien
tccccacagtctgcgtcagctgata

SEQ ID NO: 316226 - DNA, 25 bp, Homo sapien
caaggactgtcagccacattctgtg

SEQ ID NO: 316227 - DNA, 25 bp, Homo sapien
cttcacaagtgagtgcctggcgctg

SEQ ID NO: 316228 - DNA, 25 bp, Homo sapien
aggatctgcccagctgtacttctac

SEQ ID NO: 316229 - DNA, 25 bp, Homo sapien
ggatctgcccagctgtacttctacc

SEQ ID NO: 316230 - DNA, 25 bp, Homo sapien
caagtgagtgcctggcgctgcagtg

SEQ ID NO: 316231 - DNA, 25 bp, Homo sapien
acagtcccattctcactctttccca

SEQ ID NO: 316232 - DNA, 25 bp, Homo sapien
cattggcggcacaaggcccccagga

SEQ ID NO: 316233 - DNA, 25 bp, Homo sapien
tgaggacctccccattggcggcaca

SEQ ID NO: 316234 - DNA, 25 bp, Homo sapien
tttcccagcacaccaaggcgcgtgt

SEQ ID NO: 316235 - DNA, 25 bp, Homo sapien
ccccccgtttatttctgtgcaggtg

SEQ ID NO: 316236 - DNA, 25 bp, Homo sapien
cgtttatttctgtgcaggtgactca

SEQ ID NO: 316237 - DNA, 25 bp, Homo sapien
ccccgtttatttctgtgcaggtgac

SEQ ID NO: 316238 - DNA, 25 bp, Homo sapien
gtttatttctgtgcaggtgactcat

SEQ ID NO: 316239 - DNA, 25 bp, Homo sapien
cgattgtctcctgggttggttgtcc

SEQ ID NO: 316240 - DNA, 25 bp, Homo sapien
ttgtaccctgggtctatcgcatcct

SEQ ID NO: 316241 - DNA, 25 bp, Homo sapien
gtaccctgggtctatcgcatcctga

SEQ ID NO: 316242 - DNA, 25 bp, Homo sapien
tgtaccctgggtcgattgtctcctg

SEQ ID NO: 316243 - DNA, 25 bp, Homo sapien
gtcccaggtctgttgtctcctgggt

SEQ ID NO: 316244 - DNA, 25 bp, Homo sapien
tcccaggtctgttgtctcctgggtc

SEQ ID NO: 316245 - DNA, 25 bp, Homo sapien
gctgtgtcccaggtctgttgtctcc

SEQ ID NO: 316246 - DNA, 25 bp, Homo sapien
gctcaagtgacgagagaaggtggac

SEQ ID NO: 316247 - DNA, 25 bp, Homo sapien
tgctcaagtgacgagagaaggtgga

SEQ ID NO: 316248 - DNA, 25 bp, Homo sapien
ctgctcaagtgacgagagaaggtgg

SEQ ID NO: 316249 - DNA, 25 bp, Homo sapien
ggacttgttatcttgccccgaatgt

SEQ ID NO: 316250 - DNA, 25 bp, Homo sapien
aagtcggacttgttatcttgccccg

SEQ ID NO: 316251 - DNA, 25 bp, Homo sapien
tgccccgaatgtcgtctttctccag

SEQ ID NO: 316252 - DNA, 25 bp, Homo sapien
tttctcccaagtcggacttgttatc

SEQ ID NO: 316253 - DNA, 25 bp, Homo sapien
tgaggccggcttcgctggcctggcc

SEQ ID NO: 316254 - DNA, 25 bp, Homo sapien
gatgctgccacgctgaggccggctt

SEQ ID NO: 316255 - DNA, 25 bp, Homo sapien
tgctgccacgctgaggccggcttcg

SEQ ID NO: 316256 - DNA, 25 bp, Homo sapien
cgctgaggccggcttcgctggcctg

SEQ ID NO: 316257 - DNA, 25 bp, Homo sapien
cctgctgatgctacatagccacacc

SEQ ID NO: 316258 - DNA, 25 bp, Homo sapien
ctgctgatgctacatagccacaccc

SEQ ID NO: 316259 - DNA, 25 bp, Homo sapien
tgctgatgctacatagccacaccct

SEQ ID NO: 316260 - DNA, 25 bp, Homo sapien
cttccgaatacaatcattggcctca

SEQ ID NO: 316261 - DNA, 25 bp, Homo sapien
tggtcggcacttcctttgagagctg

SEQ ID NO: 316262 - DNA, 25 bp, Homo sapien
ggagaacacgctgatgatacatgga

SEQ ID NO: 316263 - DNA, 25 bp, Homo sapien
gatgtcctgaaaacccagacgtctg

SEQ ID NO: 316264 - DNA, 25 bp, Homo sapien
tctctccgtttgtgcgtgactccac

SEQ ID NO: 316265 - DNA, 25 bp, Homo sapien
tctgcttctctccgtttgtgcgtga

SEQ ID NO: 316266 - DNA, 25 bp, Homo sapien
gggccacgcttcctgccggctctgc

SEQ ID NO: 316267 - DNA, 25 bp, Homo sapien
tcgcctgaatgctgtgatggtgacg

SEQ ID NO: 316268 - DNA, 25 bp, Homo sapien
acaccattgcacaatctcgcctgaa

SEQ ID NO: 316269 - DNA, 25 bp, Homo sapien
gcacaatctcgcctgaatgctgtga

SEQ ID NO: 316270 - DNA, 25 bp, Homo sapien
ctgaagcctgagtatccagcgacat

SEQ ID NO: 316271 - DNA, 25 bp, Homo sapien
gagaaagttagagggctctgaagcc

SEQ ID NO: 316272 - DNA, 25 bp, Homo sapien
cctgtctctgagaaagttagagggc

SEQ ID NO: 316273 - DNA, 25 bp, Homo sapien
cctgagtatccagcgacatgcttgg

SEQ ID NO: 316274 - DNA, 25 bp, Homo sapien
ctggagaacgaagaagctgtacagc

SEQ ID NO: 316275 - DNA, 25 bp, Homo sapien
atgtctgagcatgcccttgtgctct

SEQ ID NO: 316276 - DNA, 25 bp, Homo sapien
ccttgtgctctccaactggagaacg

SEQ ID NO: 316277 - DNA, 25 bp, Homo sapien
tccaactggagaacgaagaagctgt

SEQ ID NO: 316278 - DNA, 25 bp, Homo sapien
gcttttgtgatgttgtccatcaggc

SEQ ID NO: 316279 - DNA, 25 bp, Homo sapien
cagtatgacgactggaaaatccaag

SEQ ID NO: 316280 - DNA, 25 bp, Homo sapien
catcgccaggatgagaactgattgt

SEQ ID NO: 316281 - DNA, 25 bp, Homo sapien
aggccgcctggctccagtatgacga

SEQ ID NO: 316282 - DNA, 25 bp, Homo sapien
gagctatcagcttggaattcacacc

SEQ ID NO: 316283 - DNA, 25 bp, Homo sapien
gatagctgttgggtttgtaattcac

SEQ ID NO: 316284 - DNA, 25 bp, Homo sapien
gtgcaaaaacacgtttatacatggg

SEQ ID NO: 316285 - DNA, 25 bp, Homo sapien
agcaaatagttgtataaacgctgcc

SEQ ID NO: 316286 - DNA, 25 bp, Homo sapien
gccttggctgtcctactgacgactg

SEQ ID NO: 316287 - DNA, 25 bp, Homo sapien
gcttctagggatgccttggctgtcc

SEQ ID NO: 316288 - DNA, 25 bp, Homo sapien
aagtgccagcttctagggatgcctt

SEQ ID NO: 316289 - DNA, 25 bp, Homo sapien
tagggatgccttggctgtcctactg

SEQ ID NO: 316290 - DNA, 25 bp, Homo sapien
agcaagctcatcccttgtgaggctc

SEQ ID NO: 316291 - DNA, 25 bp, Homo sapien
gcaagctcatcccttgtgaggctcc

SEQ ID NO: 316292 - DNA, 25 bp, Homo sapien
aagctcatcccttgtgaggctcctc

SEQ ID NO: 316293 - DNA, 25 bp, Homo sapien
caagctcatcccttgtgaggctcct

SEQ ID NO: 316294 - DNA, 25 bp, Homo sapien
ctgtccctgctgcgtgcagccggtg

SEQ ID NO: 316295 - DNA, 25 bp, Homo sapien
gctgcgtgcagccggtggatgtcca

SEQ ID NO: 316296 - DNA, 25 bp, Homo sapien
tccctgctgcgtgcagccggtggat

SEQ ID NO: 316297 - DNA, 25 bp, Homo sapien
ctgcgtgcagccggtggatgtccat

SEQ ID NO: 316298 - DNA, 25 bp, Homo sapien
ccccaactcttgatcttggggagga

SEQ ID NO: 316299 - DNA, 25 bp, Homo sapien
ccagagggcccaccatggacagatg

SEQ ID NO: 316300 - DNA, 25 bp, Homo sapien
gcctgccaagaactggaagccagag

SEQ ID NO: 316301 - DNA, 25 bp, Homo sapien
ccatggacagatggcctcgtgctgg

SEQ ID NO: 316302 - DNA, 25 bp, Homo sapien
ggctggacagcatgcctgccaagaa

SEQ ID NO: 316303 - DNA, 25 bp, Homo sapien
cccagacggcgctgctacacatgct

SEQ ID NO: 316304 - DNA, 25 bp, Homo sapien
gttcccagacggcgctgctacacat

SEQ ID NO: 316305 - DNA, 25 bp, Homo sapien
agttcccagacggcgctgctacaca

SEQ ID NO: 316306 - DNA, 25 bp, Homo sapien
ttcccagacggcgctgctacacatg

SEQ ID NO: 316307 - DNA, 25 bp, Homo sapien
tctggggaatatgctgctgaaggcc

SEQ ID NO: 316308 - DNA, 25 bp, Homo sapien
tctccagttcaaccaatgctccttt

SEQ ID NO: 316309 - DNA, 25 bp, Homo sapien
tagctgcaaggtctcatctcctcgg

SEQ ID NO: 316310 - DNA, 25 bp, Homo sapien
ggccaggtagctgcaaggtctcatc

SEQ ID NO: 316311 - DNA, 25 bp, Homo sapien
tgcatgacggatttgggcctgtttc

SEQ ID NO: 316312 - DNA, 25 bp, Homo sapien
gcatgacggatttgggcctgtttct

SEQ ID NO: 316313 - DNA, 25 bp, Homo sapien
ggtcacacatgtgcctcctaggccg

SEQ ID NO: 316314 - DNA, 25 bp, Homo sapien
taggccgttctgcacattctcctta

SEQ ID NO: 316315 - DNA, 25 bp, Homo sapien
aggcgttggaaatgcagatcttggt

SEQ ID NO: 316316 - DNA, 25 bp, Homo sapien
tgattggtgcccagaaacgcatacc

SEQ ID NO: 316317 - DNA, 25 bp, Homo sapien
ggcagacgggcagccaggaggagcc

SEQ ID NO: 316318 - DNA, 25 bp, Homo sapien
aggcagacgggcagccaggaggagc

SEQ ID NO: 316319 - DNA, 25 bp, Homo sapien
caggcagacgggcagccaggaggag

SEQ ID NO: 316320 - DNA, 25 bp, Homo sapien
tgcagacactgaaaccagctgtggc

SEQ ID NO: 316321 - DNA, 25 bp, Homo sapien
gcagacactgaaaccagctgtggct

SEQ ID NO: 316322 - DNA, 25 bp, Homo sapien
atgcagacactgaaaccagctgtgg

SEQ ID NO: 316323 - DNA, 25 bp, Homo sapien
ggggtgtctccaaggattctgtcct

SEQ ID NO: 316324 - DNA, 25 bp, Homo sapien
cccctttcctgtggcaagagaaact

SEQ ID NO: 316325 - DNA, 25 bp, Homo sapien
ctcacaccagctctagtgtatgagg

SEQ ID NO: 316326 - DNA, 25 bp, Homo sapien
cacaccagctctagtgtatgaggag

SEQ ID NO: 316327 - DNA, 25 bp, Homo sapien
caccagctctagtgtatgaggaggg

SEQ ID NO: 316328 - DNA, 25 bp, Homo sapien
agtgtatgaggaggggttgataaag

SEQ ID NO: 316329 - DNA, 25 bp, Homo sapien
tgcccagggttctgactgtcccagg

SEQ ID NO: 316330 - DNA, 25 bp, Homo sapien
cgtgtttgtgataaagggactctgc

SEQ ID NO: 316331 - DNA, 25 bp, Homo sapien
cagctggaattcactcccgtgtttg

SEQ ID NO: 316332 - DNA, 25 bp, Homo sapien
taaagggactctgcattggagctgg

SEQ ID NO: 316333 - DNA, 25 bp, Homo sapien
caggcaactgctttcgcccgggttg

SEQ ID NO: 316334 - DNA, 25 bp, Homo sapien
ctggcggagacatcccctgtgatgt

SEQ ID NO: 316335 - DNA, 25 bp, Homo sapien
tagctttgcccgaagaaggtgcagg

SEQ ID NO: 316336 - DNA, 25 bp, Homo sapien
ctgtgatgtccaccagaaccccagg

SEQ ID NO: 316337 - DNA, 25 bp, Homo sapien
aacaatttccccagcggttgtgctg

SEQ ID NO: 316338 - DNA, 25 bp, Homo sapien
ttctcggatctggaattgcctcgct

SEQ ID NO: 316339 - DNA, 25 bp, Homo sapien
cccagcggttgtgctggtgtcctgc

SEQ ID NO: 316340 - DNA, 25 bp, Homo sapien
cggttctcggatctggaattgcctc

SEQ ID NO: 316341 - DNA, 25 bp, Homo sapien
aatgggcgttgcgttgttgccgaca

SEQ ID NO: 316342 - DNA, 25 bp, Homo sapien
gtcctggtgacagctaatgggcgtt

SEQ ID NO: 316343 - DNA, 25 bp, Homo sapien
cagctaatgggcgttgcgttgttgc

SEQ ID NO: 316344 - DNA, 25 bp, Homo sapien
cctggtgacagctaatgggcgttgc

SEQ ID NO: 316345 - DNA, 25 bp, Homo sapien
gctcagggcttagggagcgtccact

SEQ ID NO: 316346 - DNA, 25 bp, Homo sapien
gcacggtgactgcacaggagacgcc

SEQ ID NO: 316347 - DNA, 25 bp, Homo sapien
aggagacgccgctgctctccgggct

SEQ ID NO: 316348 - DNA, 25 bp, Homo sapien
gcttagggagcgtccactgtggtct

SEQ ID NO: 316349 - DNA, 25 bp, Homo sapien
agaggccaagtgctccaagcagtcc

SEQ ID NO: 316350 - DNA, 25 bp, Homo sapien
cagaggccaagtgctccaagcagtc

SEQ ID NO: 316351 - DNA, 25 bp, Homo sapien
ggaggacagcccgagagagacgggg

SEQ ID NO: 316352 - DNA, 25 bp, Homo sapien
tgcgagcaggggcactgcactgtgc

SEQ ID NO: 316353 - DNA, 25 bp, Homo sapien
ctgcgagcaggggcactgcactgtg

SEQ ID NO: 316354 - DNA, 25 bp, Homo sapien
gcaggggcactgcactgtgccgagc

SEQ ID NO: 316355 - DNA, 25 bp, Homo sapien
gagcaggggcactgcactgtgccga

SEQ ID NO: 316356 - DNA, 25 bp, Homo sapien
agatgccgatagaagaggacctgct

SEQ ID NO: 316357 - DNA, 25 bp, Homo sapien
cttcaggcagatgccgatagaagag

SEQ ID NO: 316358 - DNA, 25 bp, Homo sapien
cacagccctgaacggctgcctctcc

SEQ ID NO: 316359 - DNA, 25 bp, Homo sapien
gggcctcgtacctctcatgggtgca

SEQ ID NO: 316360 - DNA, 25 bp, Homo sapien
atctgcatcggtgagcacatgggca

SEQ ID NO: 316361 - DNA, 25 bp, Homo sapien
gcatctgtgaggcatctcctgggcg

SEQ ID NO: 316362 - DNA, 25 bp, Homo sapien
ggcatctgtgaggcatctcctgggc

SEQ ID NO: 316363 - DNA, 25 bp, Homo sapien
ccagatctgcatcggtgagcacatg

SEQ ID NO: 316364 - DNA, 25 bp, Homo sapien
caggaaacatggcctacattgcagc

SEQ ID NO: 316365 - DNA, 25 bp, Homo sapien
gtgtgtgtcttatgcctcctccctc

SEQ ID NO: 316366 - DNA, 25 bp, Homo sapien
ggaaacatggcctacattgcagcct

SEQ ID NO: 316367 - DNA, 25 bp, Homo sapien
ctgtgtgtgtcttatgcctcctccc

SEQ ID NO: 316368 - DNA, 25 bp, Homo sapien
cagcagacgatagagaaaatgtcac

SEQ ID NO: 316369 - DNA, 25 bp, Homo sapien
tggaagaggcaactgcatttcggcc

SEQ ID NO: 316370 - DNA, 25 bp, Homo sapien
agttctggagggctcgctggaagag

SEQ ID NO: 316371 - DNA, 25 bp, Homo sapien
catttcggccaggtcttgaggattc

SEQ ID NO: 316372 - DNA, 25 bp, Homo sapien
caggagttaaaatgtgccatagact

SEQ ID NO: 316373 - DNA, 25 bp, Homo sapien
gagttaaaatgtgccatagacttac

SEQ ID NO: 316374 - DNA, 25 bp, Homo sapien
catgtaaccaggagttaaaatgtgc

SEQ ID NO: 316375 - DNA, 25 bp, Homo sapien
accaggagttaaaatgtgccataga

SEQ ID NO: 316376 - DNA, 25 bp, Homo sapien
agagctaggcgtgcccgtgaacctc

SEQ ID NO: 316377 - DNA, 25 bp, Homo sapien
ccaaatcttgggcacccctcagtcc

SEQ ID NO: 316378 - DNA, 25 bp, Homo sapien
agtgagcatgccttttgatggtagt

SEQ ID NO: 316379 - DNA, 25 bp, Homo sapien
ctcctggattcttcatatacctcaa

SEQ ID NO: 316380 - DNA, 25 bp, Homo sapien
ggtcgggactcatcctgaccagctc

SEQ ID NO: 316381 - DNA, 25 bp, Homo sapien
caggtcgggactcatcctgaccagc

SEQ ID NO: 316382 - DNA, 25 bp, Homo sapien
cctgcaggtcgggactcatcctgac

SEQ ID NO: 316383 - DNA, 25 bp, Homo sapien
tgcaggtcgggactcatcctgacca

SEQ ID NO: 316384 - DNA, 25 bp, Homo sapien
gggaagctgggcaagtgtgactcac

SEQ ID NO: 316385 - DNA, 25 bp, Homo sapien
cactttctcgatggctggcaggaac

SEQ ID NO: 316386 - DNA, 25 bp, Homo sapien
ggcagagatctctggccatgaagac

SEQ ID NO: 316387 - DNA, 25 bp, Homo sapien
agacctcactttctcgatggctggc

SEQ ID NO: 316388 - DNA, 25 bp, Homo sapien
gatctctggccatgaagacctcact

SEQ ID NO: 316389 - DNA, 25 bp, Homo sapien
gttgggcagagcagcataagaaagt

SEQ ID NO: 316390 - DNA, 25 bp, Homo sapien
aagaaagtaaggctgttgttggctg

SEQ ID NO: 316391 - DNA, 25 bp, Homo sapien
catgggaagcagactgttggtggct

SEQ ID NO: 316392 - DNA, 25 bp, Homo sapien
ggacggccgactgttgctggttcta

SEQ ID NO: 316393 - DNA, 25 bp, Homo sapien
gcgttgtctacactccgaaaggcca

SEQ ID NO: 316394 - DNA, 25 bp, Homo sapien
cagcatcatgggagggcgaactgtt

SEQ ID NO: 316395 - DNA, 25 bp, Homo sapien
ataagactgttgaatccgcccaccg

SEQ ID NO: 316396 - DNA, 25 bp, Homo sapien
gacacagctgctgaacgacagagct

SEQ ID NO: 316397 - DNA, 25 bp, Homo sapien
taagatttagcatagacggtgccct

SEQ ID NO: 316398 - DNA, 25 bp, Homo sapien
gataagatttagcatagacggtgcc

SEQ ID NO: 316399 - DNA, 25 bp, Homo sapien
atttagcatagacggtgccctggga

SEQ ID NO: 316400 - DNA, 25 bp, Homo sapien
gaagataagatttagcatagacggt

SEQ ID NO: 316401 - DNA, 25 bp, Homo sapien
ctctggggctcatcagcttgtgcac

SEQ ID NO: 316402 - DNA, 25 bp, Homo sapien
gcttgtgcacgagggtggcccctgg

SEQ ID NO: 316403 - DNA, 25 bp, Homo sapien
cgcaggactcaggtgcagtctgggg

SEQ ID NO: 316404 - DNA, 25 bp, Homo sapien
gtctgggggctacacctgccatctc

SEQ ID NO: 316405 - DNA, 25 bp, Homo sapien
gaatggctgttggatggcccaccct

SEQ ID NO: 316406 - DNA, 25 bp, Homo sapien
tgctcacagccaagggatcagctcc

SEQ ID NO: 316407 - DNA, 25 bp, Homo sapien
ttaggacgtgttgcacggtggtggg

SEQ ID NO: 316408 - DNA, 25 bp, Homo sapien
gacgtggcagtgcaggaatggctgt

SEQ ID NO: 316409 - DNA, 25 bp, Homo sapien
tgttgacaactagtttttcttgatc

SEQ ID NO: 316410 - DNA, 25 bp, Homo sapien
agtgcttgatactcctccgcccaca

SEQ ID NO: 316411 - DNA, 25 bp, Homo sapien
ccccgaggatatgggagtgcttgat

SEQ ID NO: 316412 - DNA, 25 bp, Homo sapien
ttagattgtttctaagtgagtgggc

SEQ ID NO: 316413 - DNA, 25 bp, Homo sapien
caaacctgtacagtgtgtactgagt

SEQ ID NO: 316414 - DNA, 25 bp, Homo sapien
aaccaagatggtgtaacctactgca

SEQ ID NO: 316415 - DNA, 25 bp, Homo sapien
cctgtacagtgtgtactgagtactg

SEQ ID NO: 316416 - DNA, 25 bp, Homo sapien
ccaaaccaagatggtgtaacctact

SEQ ID NO: 316417 - DNA, 25 bp, Homo sapien
cggcctccacgtgcgggccccgcgc

SEQ ID NO: 316418 - DNA, 25 bp, Homo sapien
cgcggggggcagcagcgcgtctcag

SEQ ID NO: 316419 - DNA, 25 bp, Homo sapien
cgcgccggcctccacgtgcgggccc

SEQ ID NO: 316420 - DNA, 25 bp, Homo sapien
gcgcggggggcagcagcgcgtctca

SEQ ID NO: 316421 - DNA, 25 bp, Homo sapien
agggcggtcgcatcttgccggctgc

SEQ ID NO: 316422 - DNA, 25 bp, Homo sapien
tgcagtaggcgatgagcaggctggc

SEQ ID NO: 316423 - DNA, 25 bp, Homo sapien
ggccaggatcatgaacgcccagaaa

SEQ ID NO: 316424 - DNA, 25 bp, Homo sapien
tgccggtcctgggcgatggcgccat

SEQ ID NO: 316425 - DNA, 25 bp, Homo sapien
gaagtgctcgagcgcccggaacccg

SEQ ID NO: 316426 - DNA, 25 bp, Homo sapien
ctcggccgggaagccgctggctggg

SEQ ID NO: 316427 - DNA, 25 bp, Homo sapien
gggaccatgcgcccggcgctcgtaa

SEQ ID NO: 316428 - DNA, 25 bp, Homo sapien
gcgcagcgttggaccggccgggact

SEQ ID NO: 316429 - DNA, 25 bp, Homo sapien
gaaggcgcctgacgagcccgtttcc

SEQ ID NO: 316430 - DNA, 25 bp, Homo sapien
agggcgctccgcagacaccccggca

SEQ ID NO: 316431 - DNA, 25 bp, Homo sapien
tccagaaggcgcctgacgagcccgt

SEQ ID NO: 316432 - DNA, 25 bp, Homo sapien
ctctttccagaaggcgcctgacgag

SEQ ID NO: 316433 - DNA, 25 bp, Homo sapien
cgggcgcccactggcccgcaccacc

SEQ ID NO: 316434 - DNA, 25 bp, Homo sapien
agctcgggccccagacacgacccga

SEQ ID NO: 316435 - DNA, 25 bp, Homo sapien
ccagtcccgccggtcaccagctcgg

SEQ ID NO: 316436 - DNA, 25 bp, Homo sapien
agacacgacccgagaaacgtccgcg

SEQ ID NO: 316437 - DNA, 25 bp, Homo sapien
gggccctggtgtcaagtacttcgca

SEQ ID NO: 316438 - DNA, 25 bp, Homo sapien
cttaggattcaggatgcagcgcagg

SEQ ID NO: 316439 - DNA, 25 bp, Homo sapien
tgagcccgtccggatgaacaacgtg

SEQ ID NO: 316440 - DNA, 25 bp, Homo sapien
catcctcagcgtgtctaagcagcag

SEQ ID NO: 316441 - DNA, 25 bp, Homo sapien
aaggctgtttccagaacgctgggga

SEQ ID NO: 316442 - DNA, 25 bp, Homo sapien
ccttgtcctggcgaaaggctgtttc

SEQ ID NO: 316443 - DNA, 25 bp, Homo sapien
ttgtcctggcgaaaggctgtttcca

SEQ ID NO: 316444 - DNA, 25 bp, Homo sapien
gtccttgtcctggcgaaaggctgtt

SEQ ID NO: 316445 - DNA, 25 bp, Homo sapien
aaaaaatgtgcttcacccaagcttc

SEQ ID NO: 316446 - DNA, 25 bp, Homo sapien
tgcagttccaagctataaattatta

SEQ ID NO: 316447 - DNA, 25 bp, Homo sapien
gggtgtgtctcttattgtcaattat

SEQ ID NO: 316448 - DNA, 25 bp, Homo sapien
ccattacatggagatggaaacagcc

SEQ ID NO: 316449 - DNA, 25 bp, Homo sapien
gatgccgtgaccaaaagcatctgtc

SEQ ID NO: 316450 - DNA, 25 bp, Homo sapien
catcattgtatagaagggtttccac

SEQ ID NO: 316451 - DNA, 25 bp, Homo sapien
gctcactgcccagcagatgccgtga

SEQ ID NO: 316452 - DNA, 25 bp, Homo sapien
agaagacatcgcctaccacaagtgg

SEQ ID NO: 316453 - DNA, 25 bp, Homo sapien
tcacgggaagcgcaagtcaggcctg

SEQ ID NO: 316454 - DNA, 25 bp, Homo sapien
gtcaggcctgctaagtatgcgtgtt

SEQ ID NO: 316455 - DNA, 25 bp, Homo sapien
agaagaggcggacagcacagcccgc

SEQ ID NO: 316456 - DNA, 25 bp, Homo sapien
agtatgcgtgtttcacagggtttac

SEQ ID NO: 316457 - DNA, 25 bp, Homo sapien
gggggtgcgagtgtcatctaacatc

SEQ ID NO: 316458 - DNA, 25 bp, Homo sapien
tgcgagtgtcatctaacatcaccat

SEQ ID NO: 316459 - DNA, 25 bp, Homo sapien
gggtgcgagtgtcatctaacatcac

SEQ ID NO: 316460 - DNA, 25 bp, Homo sapien
atgggggtgcgagtgtcatctaaca

SEQ ID NO: 316461 - DNA, 25 bp, Homo sapien
ggatgctccccactggtccacaggt

SEQ ID NO: 316462 - DNA, 25 bp, Homo sapien
tgcagacagagatgccgactgcaag

SEQ ID NO: 316463 - DNA, 25 bp, Homo sapien
aaagctgtaggctgatggcagtgcc

SEQ ID NO: 316464 - DNA, 25 bp, Homo sapien
gcaagtgtggcctgggatgccttct

SEQ ID NO: 316465 - DNA, 25 bp, Homo sapien
agggcatgcttcgggtgacgctcac

SEQ ID NO: 316466 - DNA, 25 bp, Homo sapien
cagggcatgcttcgggtgacgctca

SEQ ID NO: 316467 - DNA, 25 bp, Homo sapien
ctgcacggattgtgctgaaagagca

SEQ ID NO: 316468 - DNA, 25 bp, Homo sapien
tcatgaaaggtcatggagaccaggg

SEQ ID NO: 316469 - DNA, 25 bp, Homo sapien
cttctctaaggctgcacggattgtg

SEQ ID NO: 316470 - DNA, 25 bp, Homo sapien
tccatgcaaggtcaagtcatgaaag

SEQ ID NO: 316471 - DNA, 25 bp, Homo sapien
ctgggcccttcggaaaggattctgg

SEQ ID NO: 316472 - DNA, 25 bp, Homo sapien
ccttcggaaaggattctggaggtgc

SEQ ID NO: 316473 - DNA, 25 bp, Homo sapien
aggtgcccatgttcccccatggagc

SEQ ID NO: 316474 - DNA, 25 bp, Homo sapien
agctcctccccgaagctgggccctt

SEQ ID NO: 316475 - DNA, 25 bp, Homo sapien
tcggtgcccagtcccccctctgctg

SEQ ID NO: 316476 - DNA, 25 bp, Homo sapien
gcaaggctcagccacggggttctcc

SEQ ID NO: 316477 - DNA, 25 bp, Homo sapien
cccagtcccccctctgctgtgggct

SEQ ID NO: 316478 - DNA, 25 bp, Homo sapien
cggctgtccccttgctcggcaaggc

SEQ ID NO: 316479 - DNA, 25 bp, Homo sapien
cagagtccatacacatccaaatcca

SEQ ID NO: 316480 - DNA, 25 bp, Homo sapien
tcagagtccatacacatccaaatcc

SEQ ID NO: 316481 - DNA, 25 bp, Homo sapien
gttgttcctgaagccagggagctca

SEQ ID NO: 316482 - DNA, 25 bp, Homo sapien
cacctcttccttgatgttgttcctg

SEQ ID NO: 316483 - DNA, 25 bp, Homo sapien
aggccagcccgagaaggtggctttt

SEQ ID NO: 316484 - DNA, 25 bp, Homo sapien
cctgtgggattccagactggttgga

SEQ ID NO: 316485 - DNA, 25 bp, Homo sapien
tgggattccagactggttggacttc

SEQ ID NO: 316486 - DNA, 25 bp, Homo sapien
attccagactggttggacttctctg

SEQ ID NO: 316487 - DNA, 25 bp, Homo sapien
agcgcccagacagggctgccaactt

SEQ ID NO: 316488 - DNA, 25 bp, Homo sapien
ttggcccccacagcgcccagacagg

SEQ ID NO: 316489 - DNA, 25 bp, Homo sapien
tcatccaagctgagaacaccaggcc

SEQ ID NO: 316490 - DNA, 25 bp, Homo sapien
caggccaagccctcttcttggcccc

SEQ ID NO: 316491 - DNA, 25 bp, Homo sapien
tgcccaccgagactgatggagaccc

SEQ ID NO: 316492 - DNA, 25 bp, Homo sapien
tggaggaacgacacctgcccaccga

SEQ ID NO: 316493 - DNA, 25 bp, Homo sapien
gacacctgcccaccgagactgatgg

SEQ ID NO: 316494 - DNA, 25 bp, Homo sapien
caccgagactgatggagacccctgg

SEQ ID NO: 316495 - DNA, 25 bp, Homo sapien
tgccgtgggtatggccttctccaag

SEQ ID NO: 316496 - DNA, 25 bp, Homo sapien
cttgccgtgggtatggccttctcca

SEQ ID NO: 316497 - DNA, 25 bp, Homo sapien
ttgccgtgggtatggccttctccaa

SEQ ID NO: 316498 - DNA, 25 bp, Homo sapien
gactgtcaccaggacgcaattcaag

SEQ ID NO: 316499 - DNA, 25 bp, Homo sapien
cccggcgggctatcagaacccggat

SEQ ID NO: 316500 - DNA, 25 bp, Homo sapien
ccaggatcctcagtggagagtagca

SEQ ID NO: 316501 - DNA, 25 bp, Homo sapien
cccggatgcccgtacgcgggacaga

SEQ ID NO: 316502 - DNA, 25 bp, Homo sapien
cagagaggacgtggggcctgggccc

SEQ ID NO: 316503 - DNA, 25 bp, Homo sapien
gtgaccacggccagcgttcagagag

SEQ ID NO: 316504 - DNA, 25 bp, Homo sapien
ctgtgaccacggccagcgttcagag

SEQ ID NO: 316505 - DNA, 25 bp, Homo sapien
accacggccagcgttcagagaggac

SEQ ID NO: 316506 - DNA, 25 bp, Homo sapien
tgggcctgggggattcttccttgaa

SEQ ID NO: 316507 - DNA, 25 bp, Homo sapien
gcctgggggattcttccttgaagtc

SEQ ID NO: 316508 - DNA, 25 bp, Homo sapien
atgtgagaggagcccccggaaagca

SEQ ID NO: 316509 - DNA, 25 bp, Homo sapien
cgggtggcctgacaatgtgagagga

SEQ ID NO: 316510 - DNA, 25 bp, Homo sapien
tgattgtgctaggtcaaagccggtg

SEQ ID NO: 316511 - DNA, 25 bp, Homo sapien
cctccagggtgtccgacagctcttg

SEQ ID NO: 316512 - DNA, 25 bp, Homo sapien
cagggtgtccgacagctcttgacgg

SEQ ID NO: 316513 - DNA, 25 bp, Homo sapien
aggctgttgattgtgctaggtcaaa

SEQ ID NO: 316514 - DNA, 25 bp, Homo sapien
caacaaaggcactgctgggtgcagg

SEQ ID NO: 316515 - DNA, 25 bp, Homo sapien
gccacttcaccagcgagaagggtaa

SEQ ID NO: 316516 - DNA, 25 bp, Homo sapien
tgcccattcccctggtctgagagct

SEQ ID NO: 316517 - DNA, 25 bp, Homo sapien
gtccccgatggcaggcattctgact

SEQ ID NO: 316518 - DNA, 25 bp, Homo sapien
cagtgggcttttcccgaccttccag

SEQ ID NO: 316519 - DNA, 25 bp, Homo sapien
tgggcttttcccgaccttccagatc

SEQ ID NO: 316520 - DNA, 25 bp, Homo sapien
ctgaaagacagtgggcttttcccga

SEQ ID NO: 316521 - DNA, 25 bp, Homo sapien
gggtctgaaagacagtgggcttttc

SEQ ID NO: 316522 - DNA, 25 bp, Homo sapien
tgagcctgtaaaagcaatgtcctgc

SEQ ID NO: 316523 - DNA, 25 bp, Homo sapien
ccagaggagcgatgatagggcaata

SEQ ID NO: 316524 - DNA, 25 bp, Homo sapien
tacggccgtggtgggaagaattcaa

SEQ ID NO: 316525 - DNA, 25 bp, Homo sapien
tgccctggatcctgcacggttacgg

SEQ ID NO: 316526 - DNA, 25 bp, Homo sapien
gctgcctggcaagagaatgtctgca

SEQ ID NO: 316527 - DNA, 25 bp, Homo sapien
gaagcaaaggcgagcaaaagtcaga

SEQ ID NO: 316528 - DNA, 25 bp, Homo sapien
tccctgggccgtgatctggaacctt

SEQ ID NO: 316529 - DNA, 25 bp, Homo sapien
tgtggcaccgagaacaaacaatatc

SEQ ID NO: 316530 - DNA, 25 bp, Homo sapien
taaacaccattcatcgcaggcacga

SEQ ID NO: 316531 - DNA, 25 bp, Homo sapien
tctcccgtgcggctggctgggatgg

SEQ ID NO: 316532 - DNA, 25 bp, Homo sapien
tacacctaacggatcgggtccatct

SEQ ID NO: 316533 - DNA, 25 bp, Homo sapien
gatggctccccgaaactcacatttg

SEQ ID NO: 316534 - DNA, 25 bp, Homo sapien
tcaacgaagattggggcagttccag

SEQ ID NO: 316535 - DNA, 25 bp, Homo sapien
taatgacaaattcaacgaagattgg

SEQ ID NO: 316536 - DNA, 25 bp, Homo sapien
gatggaaacttctcgccgtatttac

SEQ ID NO: 316537 - DNA, 25 bp, Homo sapien
tggtgatggaaacttctcgccgtat

SEQ ID NO: 316538 - DNA, 25 bp, Homo sapien
ctacagatacaaggcccagaactgc

SEQ ID NO: 316539 - DNA, 25 bp, Homo sapien
ccacctacagatacaaggcccagaa

SEQ ID NO: 316540 - DNA, 25 bp, Homo sapien
cctacagatacaaggcccagaactg

SEQ ID NO: 316541 - DNA, 25 bp, Homo sapien
acagatacaaggcccagaactgcca

SEQ ID NO: 316542 - DNA, 25 bp, Homo sapien
ccagtggatgggaggtggccgcctc

SEQ ID NO: 316543 - DNA, 25 bp, Homo sapien
ggagactctaaggacagagccaagc

SEQ ID NO: 316544 - DNA, 25 bp, Homo sapien
cagccactgagggagggagactcta

SEQ ID NO: 316545 - DNA, 25 bp, Homo sapien
agagccaagccctggggccgccggt

SEQ ID NO: 316546 - DNA, 25 bp, Homo sapien
tgccttcaaaggccagcgccagccg

SEQ ID NO: 316547 - DNA, 25 bp, Homo sapien
tgagccctggcacacttctcgccag

SEQ ID NO: 316548 - DNA, 25 bp, Homo sapien
ctcgcctgggcggcctgtggtgcct

SEQ ID NO: 316549 - DNA, 25 bp, Homo sapien
ctgggcggcctgtggtgccttcaaa

SEQ ID NO: 316550 - DNA, 25 bp, Homo sapien
agaatgagccgtgcacaccaccgtg

SEQ ID NO: 316551 - DNA, 25 bp, Homo sapien
ggagagtaaggcgagaatgagccgt

SEQ ID NO: 316552 - DNA, 25 bp, Homo sapien
aggcgagaatgagccgtgcacacca

SEQ ID NO: 316553 - DNA, 25 bp, Homo sapien
tccacagatggggagagtaaggcga

SEQ ID NO: 316554 - DNA, 25 bp, Homo sapien
caatgaggatgcacccgcaggagct

SEQ ID NO: 316555 - DNA, 25 bp, Homo sapien
aatgaggatgcacccgcaggagctc

SEQ ID NO: 316556 - DNA, 25 bp, Homo sapien
ctccgaacttcagcgtccttaactg

SEQ ID NO: 316557 - DNA, 25 bp, Homo sapien
atcatcgacgccatcagagccatcg

SEQ ID NO: 316558 - DNA, 25 bp, Homo sapien
ttcagcgtccttaactgagaatcag

SEQ ID NO: 316559 - DNA, 25 bp, Homo sapien
tgagaatcagcatcatcgacgccat

SEQ ID NO: 316560 - DNA, 25 bp, Homo sapien
agaatcagacccagaagcgtcacca

SEQ ID NO: 316561 - DNA, 25 bp, Homo sapien
gacaggaaacgggagctcagctgca

SEQ ID NO: 316562 - DNA, 25 bp, Homo sapien
tgcagacaggaaacgggagctcagc

SEQ ID NO: 316563 - DNA, 25 bp, Homo sapien
agacccagaagcgtcaccagctgtg

SEQ ID NO: 316564 - DNA, 25 bp, Homo sapien
accagcgacagtgcgtaatcgttga

SEQ ID NO: 316565 - DNA, 25 bp, Homo sapien
gcgacagtgcgtaatcgttgactga

SEQ ID NO: 316566 - DNA, 25 bp, Homo sapien
aaccccaccagcgacagtgcgtaat

SEQ ID NO: 316567 - DNA, 25 bp, Homo sapien
gcgtaatcgttgactgatcccaata

SEQ ID NO: 316568 - DNA, 25 bp, Homo sapien
ccagcccgtcttcccgatgggagcc

SEQ ID NO: 316569 - DNA, 25 bp, Homo sapien
cagcccgtcttcccgatgggagccg

SEQ ID NO: 316570 - DNA, 25 bp, Homo sapien
agcccgtcttcccgatgggagccgg

SEQ ID NO: 316571 - DNA, 25 bp, Homo sapien
tagtaacagcttgtggccatccgca

SEQ ID NO: 316572 - DNA, 25 bp, Homo sapien
ggaatcaaccctcctgaaacagcgg

SEQ ID NO: 316573 - DNA, 25 bp, Homo sapien
tgctgaacggagtcaagacagtcgg

SEQ ID NO: 316574 - DNA, 25 bp, Homo sapien
gaaacagcggatggcctagtgagcc

SEQ ID NO: 316575 - DNA, 25 bp, Homo sapien
gccttccagggtgctgcaggcccag

SEQ ID NO: 316576 - DNA, 25 bp, Homo sapien
tgcaggcccagccttgtccaggtca

SEQ ID NO: 316577 - DNA, 25 bp, Homo sapien
agccttgtccaggtcagggtcaggg

SEQ ID NO: 316578 - DNA, 25 bp, Homo sapien
agcccaggctgaggggtcttcagca

SEQ ID NO: 316579 - DNA, 25 bp, Homo sapien
ggaatttccgtatcttctttgatgc

SEQ ID NO: 316580 - DNA, 25 bp, Homo sapien
gggaatttccgtatcttctttgatg

SEQ ID NO: 316581 - DNA, 25 bp, Homo sapien
gaatttccgtatcttctttgatgct

SEQ ID NO: 316582 - DNA, 25 bp, Homo sapien
ctgggaagccggtcgtgccgcttag

SEQ ID NO: 316583 - DNA, 25 bp, Homo sapien
cgcttaggaagagcgctgagcccac

SEQ ID NO: 316584 - DNA, 25 bp, Homo sapien
gaagccggtcgtgccgcttaggaag

SEQ ID NO: 316585 - DNA, 25 bp, Homo sapien
tcgtgccgcttaggaagagcgctga

SEQ ID NO: 316586 - DNA, 25 bp, Homo sapien
ccggaaatccctcgcaggacacggt

SEQ ID NO: 316587 - DNA, 25 bp, Homo sapien
tcgcaggacacggtctgagcaccag

SEQ ID NO: 316588 - DNA, 25 bp, Homo sapien
ggctgagctccgcttgctctgctgg

SEQ ID NO: 316589 - DNA, 25 bp, Homo sapien
ggagcagccgccctccccggaaatc

SEQ ID NO: 316590 - DNA, 25 bp, Homo sapien
gaatgagctgggagcccacgtcctc

SEQ ID NO: 316591 - DNA, 25 bp, Homo sapien
gtcaggaaaagccacaggaatgagc

SEQ ID NO: 316592 - DNA, 25 bp, Homo sapien
aaagccacaggaatgagctgggagc

SEQ ID NO: 316593 - DNA, 25 bp, Homo sapien
gttgtcagagtgagagtcaggaaaa

SEQ ID NO: 316594 - DNA, 25 bp, Homo sapien
cgtatcttgcccgatgccctcgggt

SEQ ID NO: 316595 - DNA, 25 bp, Homo sapien
cgatgccctcgggtaggtctcctgg

SEQ ID NO: 316596 - DNA, 25 bp, Homo sapien
gtctcaggggatcggacaaggtccc

SEQ ID NO: 316597 - DNA, 25 bp, Homo sapien
gccttgctgatgacggggtcacctg

SEQ ID NO: 316598 - DNA, 25 bp, Homo sapien
ttccttgagagatggcttggcagcc

SEQ ID NO: 316599 - DNA, 25 bp, Homo sapien
ctgttccttgagagatggcttggca

SEQ ID NO: 316600 - DNA, 25 bp, Homo sapien
gcagctgttccttgagagatggctt

SEQ ID NO: 316601 - DNA, 25 bp, Homo sapien
ttgaagcagctgttccttgagagat

SEQ ID NO: 316602 - DNA, 25 bp, Homo sapien
acaggacaggacacctccagggagg

SEQ ID NO: 316603 - DNA, 25 bp, Homo sapien
gaagactctgcccacaggacaggac

SEQ ID NO: 316604 - DNA, 25 bp, Homo sapien
tcagaagactctgcccacaggacag

SEQ ID NO: 316605 - DNA, 25 bp, Homo sapien
ccacaggacaggacacctccaggga

SEQ ID NO: 316606 - DNA, 25 bp, Homo sapien
atgccgggagcctgacggcaccagc

SEQ ID NO: 316607 - DNA, 25 bp, Homo sapien
agcctgggcgcacgacagggacaga

SEQ ID NO: 316608 - DNA, 25 bp, Homo sapien
gggcgcacgacagggacagacgcct

SEQ ID NO: 316609 - DNA, 25 bp, Homo sapien
accaatgccggggtgcaccaatgcc

SEQ ID NO: 316610 - DNA, 25 bp, Homo sapien
cctgctggggccatatgaatgccag

SEQ ID NO: 316611 - DNA, 25 bp, Homo sapien
ccacgtgtggtctccagggattgga

SEQ ID NO: 316612 - DNA, 25 bp, Homo sapien
attggaggccgagaatggaaatgct

SEQ ID NO: 316613 - DNA, 25 bp, Homo sapien
gcctgctggggccatatgaatgcca

SEQ ID NO: 316614 - DNA, 25 bp, Homo sapien
agtgtcacccacacagggaaccgct

SEQ ID NO: 316615 - DNA, 25 bp, Homo sapien
agccagacccagacaaatcccagtg

SEQ ID NO: 316616 - DNA, 25 bp, Homo sapien
cagacaaatcccagtgtcacccaca

SEQ ID NO: 316617 - DNA, 25 bp, Homo sapien
aatcccagtgtcacccacacaggga

SEQ ID NO: 316618 - DNA, 25 bp, Homo sapien
aaacattgcagccaggggactcggc

SEQ ID NO: 316619 - DNA, 25 bp, Homo sapien
agaaacattgcagccaggggactcg

SEQ ID NO: 316620 - DNA, 25 bp, Homo sapien
ttgcagccaggggactcggctatcc

SEQ ID NO: 316621 - DNA, 25 bp, Homo sapien
acattgcagccaggggactcggcta

SEQ ID NO: 316622 - DNA, 25 bp, Homo sapien
atgacccccaatgggcatcgcggat

SEQ ID NO: 316623 - DNA, 25 bp, Homo sapien
tggtttattgatttttcgacacctg

SEQ ID NO: 316624 - DNA, 25 bp, Homo sapien
gagcattgtttgtgccagtggccca

SEQ ID NO: 316625 - DNA, 25 bp, Homo sapien
cgtggccaccgtcatcatcacaaag

SEQ ID NO: 316626 - DNA, 25 bp, Homo sapien
cctccgcacagacgggcatcccggg

SEQ ID NO: 316627 - DNA, 25 bp, Homo sapien
caagcgggcggctcggtccagccca

SEQ ID NO: 316628 - DNA, 25 bp, Homo sapien
ccagggcctccgcacagacgggcat

SEQ ID NO: 316629 - DNA, 25 bp, Homo sapien
gcggctgtgcaggagcaagcgggcg

SEQ ID NO: 316630 - DNA, 25 bp, Homo sapien
gactggaggcgccactccgggaggc

SEQ ID NO: 316631 - DNA, 25 bp, Homo sapien
ccgcgctccgccgcgactggaggcg

SEQ ID NO: 316632 - DNA, 25 bp, Homo sapien
cgccgcgactggaggcgccactccg

SEQ ID NO: 316633 - DNA, 25 bp, Homo sapien
tggaggcgccactccgggaggcgat

SEQ ID NO: 316634 - DNA, 25 bp, Homo sapien
gccgggtgcagcctccgcggccgcc

SEQ ID NO: 316635 - DNA, 25 bp, Homo sapien
cgccgggtgcagcctccgcggccgc

SEQ ID NO: 316636 - DNA, 25 bp, Homo sapien
ccgggtgcagcctccgcggccgccc

SEQ ID NO: 316637 - DNA, 25 bp, Homo sapien
ccgaagtcgcgcagcgaaggtccag

SEQ ID NO: 316638 - DNA, 25 bp, Homo sapien
gacgcccccgaagtcgcgcagcgaa

SEQ ID NO: 316639 - DNA, 25 bp, Homo sapien
cgcggagtcccaactcggccgacgc

SEQ ID NO: 316640 - DNA, 25 bp, Homo sapien
gcggagtcccaactcggccgacgcc

SEQ ID NO: 316641 - DNA, 25 bp, Homo sapien
gtgcccagagcgccttcaggagctg

SEQ ID NO: 316642 - DNA, 25 bp, Homo sapien
agtgcccagagcgccttcaggagct

SEQ ID NO: 316643 - DNA, 25 bp, Homo sapien
aggacgaggaagcagcagagcgcgg

SEQ ID NO: 316644 - DNA, 25 bp, Homo sapien
tcactaggacgaggaagcagcagag

SEQ ID NO: 316645 - DNA, 25 bp, Homo sapien
acgaggaagcagcagagcgcggccc

SEQ ID NO: 316646 - DNA, 25 bp, Homo sapien
aggaagcagcagagcgcggcccctg

SEQ ID NO: 316647 - DNA, 25 bp, Homo sapien
agcgcggaggaccggtccgcgcgcc

SEQ ID NO: 316648 - DNA, 25 bp, Homo sapien
tggaagccgggtcgggcgccggagc

SEQ ID NO: 316649 - DNA, 25 bp, Homo sapien
gcgcggaggaccggtccgcgcgccc

SEQ ID NO: 316650 - DNA, 25 bp, Homo sapien
ctggaagccgggtcgggcgccggag

SEQ ID NO: 316651 - DNA, 25 bp, Homo sapien
gccgagcgcggcggcagcggaacgt

SEQ ID NO: 316652 - DNA, 25 bp, Homo sapien
agccgagcgcggcggcagcggaacg

SEQ ID NO: 316653 - DNA, 25 bp, Homo sapien
ccgagcgcggcggcagcggaacgtg

SEQ ID NO: 316654 - DNA, 25 bp, Homo sapien
tcagccgagcgcggcggcagcggaa

SEQ ID NO: 316655 - DNA, 25 bp, Homo sapien
ctatgggtctctggaaggcggcttg

SEQ ID NO: 316656 - DNA, 25 bp, Homo sapien
aaagcgcttctggaatcgaggcccg

SEQ ID NO: 316657 - DNA, 25 bp, Homo sapien
cagcacgttcaagccgtcgaatgca

SEQ ID NO: 316658 - DNA, 25 bp, Homo sapien
ggccgctggacgcaaagttctcaat

SEQ ID NO: 316659 - DNA, 25 bp, Homo sapien
caatggaagttgaatccgttgactc

SEQ ID NO: 316660 - DNA, 25 bp, Homo sapien
tagccagcgagagcccaaactcctc

SEQ ID NO: 316661 - DNA, 25 bp, Homo sapien
agccagcgagagcccaaactcctca

SEQ ID NO: 316662 - DNA, 25 bp, Homo sapien
gccagcgagagcccaaactcctcat

SEQ ID NO: 316663 - DNA, 25 bp, Homo sapien
gaacacattgctgcagggccgagct

SEQ ID NO: 316664 - DNA, 25 bp, Homo sapien
agaacacattgctgcagggccgagc

SEQ ID NO: 316665 - DNA, 25 bp, Homo sapien
cagggcatcctgcaaggtcgaaggt

SEQ ID NO: 316666 - DNA, 25 bp, Homo sapien
ctggagtttgtgctcaccgccgcca

SEQ ID NO: 316667 - DNA, 25 bp, Homo sapien
atcccaccgccgtcagggcatcctg

SEQ ID NO: 316668 - DNA, 25 bp, Homo sapien
cctgcaaggtcgaaggtgacagctg

SEQ ID NO: 316669 - DNA, 25 bp, Homo sapien
cgcagggccacgcaacaggctgcgg

SEQ ID NO: 316670 - DNA, 25 bp, Homo sapien
cagggccacgcaacaggctgcggct

SEQ ID NO: 316671 - DNA, 25 bp, Homo sapien
accgcgcagggccacgcaacaggct

SEQ ID NO: 316672 - DNA, 25 bp, Homo sapien
cgcgcagggccacgcaacaggctgc

SEQ ID NO: 316673 - DNA, 25 bp, Homo sapien
aaacacatcacgggctgcgtcccgt

SEQ ID NO: 316674 - DNA, 25 bp, Homo sapien
acacatcacgggctgcgtcccgtcc

SEQ ID NO: 316675 - DNA, 25 bp, Homo sapien
aacacatcacgggctgcgtcccgtc

SEQ ID NO: 316676 - DNA, 25 bp, Homo sapien
cggcgccctctgggtgctgacgcat

SEQ ID NO: 316677 - DNA, 25 bp, Homo sapien
agcagcatcacaggcactctttgcg

SEQ ID NO: 316678 - DNA, 25 bp, Homo sapien
ttgcgtgcgctgtcgcgacccctgg

SEQ ID NO: 316679 - DNA, 25 bp, Homo sapien
cactctttgcgtgcgctgtcgcgac

SEQ ID NO: 316680 - DNA, 25 bp, Homo sapien
gcgacatgatctgaacaggagagat

SEQ ID NO: 316681 - DNA, 25 bp, Homo sapien
ggaagctgtgatcggcgacatgatc

SEQ ID NO: 316682 - DNA, 25 bp, Homo sapien
aggagagatcttctgggcctggaac

SEQ ID NO: 316683 - DNA, 25 bp, Homo sapien
tgatcggcgacatgatctgaacagg

SEQ ID NO: 316684 - DNA, 25 bp, Homo sapien
tcctctgccgggaggacactcggcg

SEQ ID NO: 316685 - DNA, 25 bp, Homo sapien
gcgttgccgggtggcatctgccctc

SEQ ID NO: 316686 - DNA, 25 bp, Homo sapien
tttaaagcacgtgaccccagctcag

SEQ ID NO: 316687 - DNA, 25 bp, Homo sapien
tccccagccaacactggagcccaag

SEQ ID NO: 316688 - DNA, 25 bp, Homo sapien
ctcacagcagtcgtgaggatgctgc

SEQ ID NO: 316689 - DNA, 25 bp, Homo sapien
caggggctctggtccaagagctccc

SEQ ID NO: 316690 - DNA, 25 bp, Homo sapien
ctcgggaggccggtgtgacgccggg

SEQ ID NO: 316691 - DNA, 25 bp, Homo sapien
tcttctgcagttaacacggggctcg

SEQ ID NO: 316692 - DNA, 25 bp, Homo sapien
gctggctccgcacatcaattaggat

SEQ ID NO: 316693 - DNA, 25 bp, Homo sapien
gatacgagaccagcagggataacgg

SEQ ID NO: 316694 - DNA, 25 bp, Homo sapien
tattttgggtgaaactagccagcca

SEQ ID NO: 316695 - DNA, 25 bp, Homo sapien
tttgctgccgataacgctggctccg

SEQ ID NO: 316696 - DNA, 25 bp, Homo sapien
tgcatgggcaccatctctgagctgg

SEQ ID NO: 316697 - DNA, 25 bp, Homo sapien
ctgcatgggcaccatctctgagctg

SEQ ID NO: 316698 - DNA, 25 bp, Homo sapien
atgggcaccatctctgagctggggc

SEQ ID NO: 316699 - DNA, 25 bp, Homo sapien
gcatgggcaccatctctgagctggg

SEQ ID NO: 316700 - DNA, 25 bp, Homo sapien
cacaggccttgggcggcggggttgg

SEQ ID NO: 316701 - DNA, 25 bp, Homo sapien
ctgatgccacaggccttgggcggcg

SEQ ID NO: 316702 - DNA, 25 bp, Homo sapien
tgccacaggccttgggcggcggggt

SEQ ID NO: 316703 - DNA, 25 bp, Homo sapien
gatgccacaggccttgggcggcggg

SEQ ID NO: 316704 - DNA, 25 bp, Homo sapien
ttcttatcccatggcgctggaggcc

SEQ ID NO: 316705 - DNA, 25 bp, Homo sapien
agtctttctgggctgtcgcgacccc

SEQ ID NO: 316706 - DNA, 25 bp, Homo sapien
tctgagatccacatggcagccgggt

SEQ ID NO: 316707 - DNA, 25 bp, Homo sapien
gctggaggccgtgcatctgagatcc

SEQ ID NO: 316708 - DNA, 25 bp, Homo sapien
gaacgagcaggcgggcaccactgtg

SEQ ID NO: 316709 - DNA, 25 bp, Homo sapien
ggaacgagcaggcgggcaccactgt

SEQ ID NO: 316710 - DNA, 25 bp, Homo sapien
ttgtcaaaagttgtgtggaaccagc

SEQ ID NO: 316711 - DNA, 25 bp, Homo sapien
gaaccagccacgctgccagggagga

SEQ ID NO: 316712 - DNA, 25 bp, Homo sapien
tggagccggaaaataggtcagaccc

SEQ ID NO: 316713 - DNA, 25 bp, Homo sapien
aagccgggctgtacgaggcacagtg

SEQ ID NO: 316714 - DNA, 25 bp, Homo sapien
ggtgccggcgatctgcccctttcta

SEQ ID NO: 316715 - DNA, 25 bp, Homo sapien
tgtcccggtccaaggtcacaatctc

SEQ ID NO: 316716 - DNA, 25 bp, Homo sapien
tttctacacgcacagcgggcggtct

SEQ ID NO: 316717 - DNA, 25 bp, Homo sapien
gggcgatcgtcctccgaggctggct

SEQ ID NO: 316718 - DNA, 25 bp, Homo sapien
gagggccagtggcatacggctgcta

SEQ ID NO: 316719 - DNA, 25 bp, Homo sapien
ggccagtggcatacggctgctaggt

SEQ ID NO: 316720 - DNA, 25 bp, Homo sapien
gggccagtggcatacggctgctagg

SEQ ID NO: 316721 - DNA, 25 bp, Homo sapien
cctcagccagcaggcggggctcccc

SEQ ID NO: 316722 - DNA, 25 bp, Homo sapien
tcaggcctcagccagcaggcggggc

SEQ ID NO: 316723 - DNA, 25 bp, Homo sapien
aggcctcagccagcaggcggggctc

SEQ ID NO: 316724 - DNA, 25 bp, Homo sapien
gcctcagccagcaggcggggctccc

SEQ ID NO: 316725 - DNA, 25 bp, Homo sapien
taaaattgtttcagcccatcagcat

SEQ ID NO: 316726 - DNA, 25 bp, Homo sapien
tcaagaacacgggaaggtcactaca

SEQ ID NO: 316727 - DNA, 25 bp, Homo sapien
gacgtccgagccaaggcgtgatgac

SEQ ID NO: 316728 - DNA, 25 bp, Homo sapien
tgatgaccaaaggtgtcgggagcac

SEQ ID NO: 316729 - DNA, 25 bp, Homo sapien
tcctcaagttcctcctgcaaacttc

SEQ ID NO: 316730 - DNA, 25 bp, Homo sapien
agtttcttcctcaagttcctcctgc

SEQ ID NO: 316731 - DNA, 25 bp, Homo sapien
cctctgggccttggcgctcaggggt

SEQ ID NO: 316732 - DNA, 25 bp, Homo sapien
cctgcaaacttccaaccaggagctg

SEQ ID NO: 316733 - DNA, 25 bp, Homo sapien
atcagctgcacagagccggcgggag

SEQ ID NO: 316734 - DNA, 25 bp, Homo sapien
cagagccggcgggagagagcccctc

SEQ ID NO: 316735 - DNA, 25 bp, Homo sapien
cagctgcacagagccggcgggagag

SEQ ID NO: 316736 - DNA, 25 bp, Homo sapien
agccggcgggagagagcccctccct

SEQ ID NO: 316737 - DNA, 25 bp, Homo sapien
gtaagctcaggaggcgaggcgtcct

SEQ ID NO: 316738 - DNA, 25 bp, Homo sapien
ctgtgcctggatcaactcatcatag

SEQ ID NO: 316739 - DNA, 25 bp, Homo sapien
gaccccatccagatgtggggtaagc

SEQ ID NO: 316740 - DNA, 25 bp, Homo sapien
gctctgtgcctggatcaactcatca

SEQ ID NO: 316741 - DNA, 25 bp, Homo sapien
tgggagcagaattatgggatgaaaa

SEQ ID NO: 316742 - DNA, 25 bp, Homo sapien
ctgggagcagaattatgggatgaaa

SEQ ID NO: 316743 - DNA, 25 bp, Homo sapien
ctttcaattactctcttagggcaaa

SEQ ID NO: 316744 - DNA, 25 bp, Homo sapien
tggccattcccggtggtggtacatt

SEQ ID NO: 316745 - DNA, 25 bp, Homo sapien
tacatttcgggtgtttgtgctttcc

SEQ ID NO: 316746 - DNA, 25 bp, Homo sapien
cattcccggtggtggtacatttcgg

SEQ ID NO: 316747 - DNA, 25 bp, Homo sapien
atgacgcgcacggatctccgactca

SEQ ID NO: 316748 - DNA, 25 bp, Homo sapien
tcatctacccatggttgagtcacag

SEQ ID NO: 316749 - DNA, 25 bp, Homo sapien
tcctttactgcctgcacgggctgca

SEQ ID NO: 316750 - DNA, 25 bp, Homo sapien
gccatctgcaagagtcgcagtccct

SEQ ID NO: 316751 - DNA, 25 bp, Homo sapien
ggtcagaggcacagcgccgggccac

SEQ ID NO: 316752 - DNA, 25 bp, Homo sapien
ccacttcctgctggagacggtcaga

SEQ ID NO: 316753 - DNA, 25 bp, Homo sapien
cttcctgctggagacggtcagaggc

SEQ ID NO: 316754 - DNA, 25 bp, Homo sapien
tcctgctggagacggtcagaggcac

SEQ ID NO: 316755 - DNA, 25 bp, Homo sapien
tgtctacggaaaggaccctcatccc

SEQ ID NO: 316756 - DNA, 25 bp, Homo sapien
tggctgtctacggaaaggaccctca

SEQ ID NO: 316757 - DNA, 25 bp, Homo sapien
ggggtgatgtgccagctttcagcat

SEQ ID NO: 316758 - DNA, 25 bp, Homo sapien
gcccactggctgtctacggaaagga

SEQ ID NO: 316759 - DNA, 25 bp, Homo sapien
tctcggtcaggctaggatgcaagcc

SEQ ID NO: 316760 - DNA, 25 bp, Homo sapien
tgagggtggatacggcgcaggccac

SEQ ID NO: 316761 - DNA, 25 bp, Homo sapien
ccagcacaaggctcggctggccaga

SEQ ID NO: 316762 - DNA, 25 bp, Homo sapien
agaacctacaggctgtgttgttggg

SEQ ID NO: 316763 - DNA, 25 bp, Homo sapien
catgctctgggctgggaaatcccgg

SEQ ID NO: 316764 - DNA, 25 bp, Homo sapien
aaatccttcactaccgagctcagct

SEQ ID NO: 316765 - DNA, 25 bp, Homo sapien
ccttcactaccgagctcagctggga

SEQ ID NO: 316766 - DNA, 25 bp, Homo sapien
tcatgcccaccacgaagctcatgct

SEQ ID NO: 316767 - DNA, 25 bp, Homo sapien
cttgtctggaatccacttgagagcc

SEQ ID NO: 316768 - DNA, 25 bp, Homo sapien
caggacatcctcagatacagcgagg

SEQ ID NO: 316769 - DNA, 25 bp, Homo sapien
catcctcagatacagcgagggcagc

SEQ ID NO: 316770 - DNA, 25 bp, Homo sapien
tggaatccacttgagagccagaaga

SEQ ID NO: 316771 - DNA, 25 bp, Homo sapien
gccctcaggcaatgcccggcgtggc

SEQ ID NO: 316772 - DNA, 25 bp, Homo sapien
gagcagcaagcaatgatcgagggag

SEQ ID NO: 316773 - DNA, 25 bp, Homo sapien
caagtcccgctctgccatcggccag

SEQ ID NO: 316774 - DNA, 25 bp, Homo sapien
tcctggtttagtgcttgctccccaa

SEQ ID NO: 316775 - DNA, 25 bp, Homo sapien
tctcatggatcgtgagggtgttgct

SEQ ID NO: 316776 - DNA, 25 bp, Homo sapien
atcagcgtgctactctcatggatcg

SEQ ID NO: 316777 - DNA, 25 bp, Homo sapien
tgctactctcatggatcgtgagggt

SEQ ID NO: 316778 - DNA, 25 bp, Homo sapien
aagagagaggcaatcagcgtgctac

SEQ ID NO: 316779 - DNA, 25 bp, Homo sapien
tggtctttatcctcccgccgggctg

SEQ ID NO: 316780 - DNA, 25 bp, Homo sapien
ccggttgattaacaagtcgcagcct

SEQ ID NO: 316781 - DNA, 25 bp, Homo sapien
gcacgtccagcctgaccggttgatt

SEQ ID NO: 316782 - DNA, 25 bp, Homo sapien
cctccagacacggaagcatgtcaca

SEQ ID NO: 316783 - DNA, 25 bp, Homo sapien
caaaagcgtctgctgtctcccatgg

SEQ ID NO: 316784 - DNA, 25 bp, Homo sapien
catgctaagccctcagaatccgaga

SEQ ID NO: 316785 - DNA, 25 bp, Homo sapien
ggtttgagcttgctaccgcacagat

SEQ ID NO: 316786 - DNA, 25 bp, Homo sapien
gaacgaagagacctcacggtttgag

SEQ ID NO: 316787 - DNA, 25 bp, Homo sapien
cctacagggggttccagaaggcaca

SEQ ID NO: 316788 - DNA, 25 bp, Homo sapien
tgtcaccctacagggggttccagaa

SEQ ID NO: 316789 - DNA, 25 bp, Homo sapien
ctgtcaccctacagggggttccaga

SEQ ID NO: 316790 - DNA, 25 bp, Homo sapien
acagggggttccagaaggcacataa

SEQ ID NO: 316791 - DNA, 25 bp, Homo sapien
gattttcacctaatcgcctggtttc

SEQ ID NO: 316792 - DNA, 25 bp, Homo sapien
ttggctgtgtttccgctgcagggtc

SEQ ID NO: 316793 - DNA, 25 bp, Homo sapien
ctcagaacgtcgattttcacctaat

SEQ ID NO: 316794 - DNA, 25 bp, Homo sapien
taatcgcctggtttccagaagttcc

SEQ ID NO: 316795 - DNA, 25 bp, Homo sapien
gatactctggaagataccacatgtg

SEQ ID NO: 316796 - DNA, 25 bp, Homo sapien
tatcatcccatgaacctgaagggtc

SEQ ID NO: 316797 - DNA, 25 bp, Homo sapien
taatcgggcatgtagacattccagg

SEQ ID NO: 316798 - DNA, 25 bp, Homo sapien
ttttggtacaatggccgcatccctg

SEQ ID NO: 316799 - DNA, 25 bp, Homo sapien
taaaccggcagaggtcaatcaatcc

SEQ ID NO: 316800 - DNA, 25 bp, Homo sapien
tcaatcctggtctagaatgagccat

SEQ ID NO: 316801 - DNA, 25 bp, Homo sapien
ccactccgggatggcctgaaaggtc

SEQ ID NO: 316802 - DNA, 25 bp, Homo sapien
tcttcacaggatgcccgacaggctt

SEQ ID NO: 316803 - DNA, 25 bp, Homo sapien
cagcacagtgtgcggtgccctctcc

SEQ ID NO: 316804 - DNA, 25 bp, Homo sapien
agcacagtgtgcggtgccctctccc

SEQ ID NO: 316805 - DNA, 25 bp, Homo sapien
ccccaggagaagaccccggctggca

SEQ ID NO: 316806 - DNA, 25 bp, Homo sapien
ctggcatcaggggcgaccacagcat

SEQ ID NO: 316807 - DNA, 25 bp, Homo sapien
gagccggtgacaatgcatttgggcc

SEQ ID NO: 316808 - DNA, 25 bp, Homo sapien
tccaggtgagatgctcatacgaggg

SEQ ID NO: 316809 - DNA, 25 bp, Homo sapien
tgcgacggccgattaactctcagga

SEQ ID NO: 316810 - DNA, 25 bp, Homo sapien
tcaaggtgccatgtcgggctgcctg

SEQ ID NO: 316811 - DNA, 25 bp, Homo sapien
gcccttctgtgccatgaggtggaga

SEQ ID NO: 316812 - DNA, 25 bp, Homo sapien
gacacagcacctgcatgcaggtgtc

SEQ ID NO: 316813 - DNA, 25 bp, Homo sapien
agaccgccctaaccaaggctgggat

SEQ ID NO: 316814 - DNA, 25 bp, Homo sapien
gattagtgtgcacaggcattcgcta

SEQ ID NO: 316815 - DNA, 25 bp, Homo sapien
acggcaaatgcacggggaggcgctg

SEQ ID NO: 316816 - DNA, 25 bp, Homo sapien
ctgtgcacggcaaatgcacggggag

SEQ ID NO: 316817 - DNA, 25 bp, Homo sapien
aatgcacggggaggcgctgtcagct

SEQ ID NO: 316818 - DNA, 25 bp, Homo sapien
caaatgcacggggaggcgctgtcag

SEQ ID NO: 316819 - DNA, 25 bp, Homo sapien
cgtcctgacggccagattgctgcca

SEQ ID NO: 316820 - DNA, 25 bp, Homo sapien
tcaacgtcctgacggccagattgct

SEQ ID NO: 316821 - DNA, 25 bp, Homo sapien
atggagtaatcgtgcctcgcgccgg

SEQ ID NO: 316822 - DNA, 25 bp, Homo sapien
attgctgccatagaccatggagtaa

SEQ ID NO: 316823 - DNA, 25 bp, Homo sapien
accgatcagactcccacttagaaag

SEQ ID NO: 316824 - DNA, 25 bp, Homo sapien
ggacaccgatcagactcccacttag

SEQ ID NO: 316825 - DNA, 25 bp, Homo sapien
tcagcacatccggacaccgatcaga

SEQ ID NO: 316826 - DNA, 25 bp, Homo sapien
agcacatccggacaccgatcagact

SEQ ID NO: 316827 - DNA, 25 bp, Homo sapien
ctgagacggttctgaagccacgacg

SEQ ID NO: 316828 - DNA, 25 bp, Homo sapien
tcactaagcagtgggaaatggttac

SEQ ID NO: 316829 - DNA, 25 bp, Homo sapien
tggtaagcccacttttgctcactaa

SEQ ID NO: 316830 - DNA, 25 bp, Homo sapien
gaaggagacagtacgaggcagatcc

SEQ ID NO: 316831 - DNA, 25 bp, Homo sapien
cccagggttctcaggggtgagggcg

SEQ ID NO: 316832 - DNA, 25 bp, Homo sapien
ctggcacagtcccagggttctcagg

SEQ ID NO: 316833 - DNA, 25 bp, Homo sapien
gagggcggggggtcactgagctccc

SEQ ID NO: 316834 - DNA, 25 bp, Homo sapien
gggtgagggcggggggtcactgagc

SEQ ID NO: 316835 - DNA, 25 bp, Homo sapien
gggtctccacttcctacagggatga

SEQ ID NO: 316836 - DNA, 25 bp, Homo sapien
cttcctacagggatgacgcagcctc

SEQ ID NO: 316837 - DNA, 25 bp, Homo sapien
gacctgcggccatgttctcatcact

SEQ ID NO: 316838 - DNA, 25 bp, Homo sapien
catcctcggggacgttgggtctcca

SEQ ID NO: 316839 - DNA, 25 bp, Homo sapien
gtgaggacgactccggcttcgcagt

SEQ ID NO: 316840 - DNA, 25 bp, Homo sapien
ttcgcagtgtgggaacggggggcag

SEQ ID NO: 316841 - DNA, 25 bp, Homo sapien
ggtggaatcacggactcctcacttc

SEQ ID NO: 316842 - DNA, 25 bp, Homo sapien
tgggacccagcggtgaggacgactc

SEQ ID NO: 316843 - DNA, 25 bp, Homo sapien
caggaccatcctcgtgggggtcagt

SEQ ID NO: 316844 - DNA, 25 bp, Homo sapien
tgtctgtgtcctccgctgtgaagca

SEQ ID NO: 316845 - DNA, 25 bp, Homo sapien
gaccatcctcgtgggggtcagttct

SEQ ID NO: 316846 - DNA, 25 bp, Homo sapien
gtcagttcttttcccgaacctggca

SEQ ID NO: 316847 - DNA, 25 bp, Homo sapien
tcctctgacgcgtgtgtggtgaagc

SEQ ID NO: 316848 - DNA, 25 bp, Homo sapien
caggaccttccttcccgtggtgctg

SEQ ID NO: 316849 - DNA, 25 bp, Homo sapien
gccaggagaggtgcctgacaccaag

SEQ ID NO: 316850 - DNA, 25 bp, Homo sapien
gtgaagcgaggcctctcaggacctt

SEQ ID NO: 316851 - DNA, 25 bp, Homo sapien
cagaggaataaagcggcctgcgttc

SEQ ID NO: 316852 - DNA, 25 bp, Homo sapien
gctggacagaccgaagctcaggatg

SEQ ID NO: 316853 - DNA, 25 bp, Homo sapien
tcacggaccacagggaaacggagtg

SEQ ID NO: 316854 - DNA, 25 bp, Homo sapien
cgtattgctgatgccaggtgccgcc

SEQ ID NO: 316855 - DNA, 25 bp, Homo sapien
taaatggggtatcgatgaggcagca

SEQ ID NO: 316856 - DNA, 25 bp, Homo sapien
agcagtcacgggagacccaacatgc

SEQ ID NO: 316857 - DNA, 25 bp, Homo sapien
caagtgttactcgagttttctttgc

SEQ ID NO: 316858 - DNA, 25 bp, Homo sapien
gggagacccaacatgctcttggcag

SEQ ID NO: 316859 - DNA, 25 bp, Homo sapien
gccgggactgccacgttaattgtta

SEQ ID NO: 316860 - DNA, 25 bp, Homo sapien
cctcaaggtccgtgagtggcgaaag

SEQ ID NO: 316861 - DNA, 25 bp, Homo sapien
gatattgtacgctcaagtgttgacc

SEQ ID NO: 316862 - DNA, 25 bp, Homo sapien
aagggccgtcaactggcctcaaggt

SEQ ID NO: 316863 - DNA, 25 bp, Homo sapien
gacagaggacttctcagaacgcggg

SEQ ID NO: 316864 - DNA, 25 bp, Homo sapien
aattgtcgcttattcctcggccctg

SEQ ID NO: 316865 - DNA, 25 bp, Homo sapien
tcctcatggataccggaacaggtct

SEQ ID NO: 316866 - DNA, 25 bp, Homo sapien
gcgcgactttctggacctagtgaca

SEQ ID NO: 316867 - DNA, 25 bp, Homo sapien
tagctgaatcaacacaaaattgaat

SEQ ID NO: 316868 - DNA, 25 bp, Homo sapien
gtaacatcttaaatctcccgatctc

SEQ ID NO: 316869 - DNA, 25 bp, Homo sapien
ccgatctctgccctcgaaggtgtct

SEQ ID NO: 316870 - DNA, 25 bp, Homo sapien
gccctcgaaggtgtctacacttgct

SEQ ID NO: 316871 - DNA, 25 bp, Homo sapien
ggaagaatctgcaagggtaacttac

SEQ ID NO: 316872 - DNA, 25 bp, Homo sapien
caaaaatcgattgtgcatgaggtca

SEQ ID NO: 316873 - DNA, 25 bp, Homo sapien
tatgtctaaatacagaccctccctg

SEQ ID NO: 316874 - DNA, 25 bp, Homo sapien
taattagagttaggcaaccaacaga

SEQ ID NO: 316875 - DNA, 25 bp, Homo sapien
tctaggaacaatgtggtctgactgg

SEQ ID NO: 316876 - DNA, 25 bp, Homo sapien
tgaggatctagttgtctaggaacaa

SEQ ID NO: 316877 - DNA, 25 bp, Homo sapien
gactggcagtcatgctttcttgtca

SEQ ID NO: 316878 - DNA, 25 bp, Homo sapien
gagtgttttgaggatctagttgtct

SEQ ID NO: 316879 - DNA, 25 bp, Homo sapien
gcctgttccggcccggatgagagcc

SEQ ID NO: 316880 - DNA, 25 bp, Homo sapien
cactttgcaggctggtcaaggcgga

SEQ ID NO: 316881 - DNA, 25 bp, Homo sapien
tgcccgactgaatgggcctgttccg

SEQ ID NO: 316882 - DNA, 25 bp, Homo sapien
caggccctgattgtctgggggtcac

SEQ ID NO: 316883 - DNA, 25 bp, Homo sapien
aggaagcaggccagcgcggtgggcc

SEQ ID NO: 316884 - DNA, 25 bp, Homo sapien
ggaagcaggccagcgcggtgggccg

SEQ ID NO: 316885 - DNA, 25 bp, Homo sapien
agcaccgtggtccaggaggcccgga

SEQ ID NO: 316886 - DNA, 25 bp, Homo sapien
ctcgggcatggctgtcctgagcgtc

SEQ ID NO: 316887 - DNA, 25 bp, Homo sapien
ttggccttcgcccaggagaagacgc

SEQ ID NO: 316888 - DNA, 25 bp, Homo sapien
actggctggagagctgcatgtactt

SEQ ID NO: 316889 - DNA, 25 bp, Homo sapien
cgggcagctgcgagtttgcccattg

SEQ ID NO: 316890 - DNA, 25 bp, Homo sapien
aacaccaggatgactgatgtggtga

SEQ ID NO: 316891 - DNA, 25 bp, Homo sapien
cagctgcgagtttgcccattgaggg

SEQ ID NO: 316892 - DNA, 25 bp, Homo sapien
ggatgactgatgtggtgactgctcc

SEQ ID NO: 316893 - DNA, 25 bp, Homo sapien
tggcttggagttcccggtaggacca

SEQ ID NO: 316894 - DNA, 25 bp, Homo sapien
tggagttcccggtaggaccaagtga

SEQ ID NO: 316895 - DNA, 25 bp, Homo sapien
ttcattgtttacttccagcaggatg

SEQ ID NO: 316896 - DNA, 25 bp, Homo sapien
attgtttacttccagcaggatggtg

SEQ ID NO: 316897 - DNA, 25 bp, Homo sapien
ggccccttcattgtttacttccagc

SEQ ID NO: 316898 - DNA, 25 bp, Homo sapien
tttacttccagcaggatggtgcgcc

SEQ ID NO: 316899 - DNA, 25 bp, Homo sapien
gtggttttgcggtgggctctggagg

SEQ ID NO: 316900 - DNA, 25 bp, Homo sapien
ttgactctcggggtacggagcctgc

SEQ ID NO: 316901 - DNA, 25 bp, Homo sapien
acaggcttgactctcggggtacgga

SEQ ID NO: 316902 - DNA, 25 bp, Homo sapien
tctcggggtacggagcctgcagccc

SEQ ID NO: 316903 - DNA, 25 bp, Homo sapien
tcatcatgtcagcacttttcacagt

SEQ ID NO: 316904 - DNA, 25 bp, Homo sapien
atgaaatggcatgtgcacgcactga

SEQ ID NO: 316905 - DNA, 25 bp, Homo sapien
aagagatgagaacgcacacaacggc

SEQ ID NO: 316906 - DNA, 25 bp, Homo sapien
acacaacggcgtagggcaggtgcac

SEQ ID NO: 316907 - DNA, 25 bp, Homo sapien
atagaggcggctgtaccaagaggct

SEQ ID NO: 316908 - DNA, 25 bp, Homo sapien
aattgtgaagggtgggatacggttg

SEQ ID NO: 316909 - DNA, 25 bp, Homo sapien
aggcgctggccaacggccctcagtg

SEQ ID NO: 316910 - DNA, 25 bp, Homo sapien
gaaaccttctggtgtagattccaaa

SEQ ID NO: 316911 - DNA, 25 bp, Homo sapien
aactccagggatcaacgcccagtgc

SEQ ID NO: 316912 - DNA, 25 bp, Homo sapien
tcagggagaaccaggatgacctgag

SEQ ID NO: 316913 - DNA, 25 bp, Homo sapien
gcatcgtcagggagaaccaggatga

SEQ ID NO: 316914 - DNA, 25 bp, Homo sapien
tccagggatcaacgcccagtgccga

SEQ ID NO: 316915 - DNA, 25 bp, Homo sapien
agctgcgtcttccagggagccacag

SEQ ID NO: 316916 - DNA, 25 bp, Homo sapien
gcagaagctgcgtcttccagggagc

SEQ ID NO: 316917 - DNA, 25 bp, Homo sapien
tcaaagccagccttttggagcggct

SEQ ID NO: 316918 - DNA, 25 bp, Homo sapien
gctgaagatagccaagccctgcatc

SEQ ID NO: 316919 - DNA, 25 bp, Homo sapien
ctgcgcgtgatcttcccgctggtgc

SEQ ID NO: 316920 - DNA, 25 bp, Homo sapien
gcgcgtgatcttcccgctggtgctg

SEQ ID NO: 316921 - DNA, 25 bp, Homo sapien
tgcgcgtgatcttcccgctggtgct

SEQ ID NO: 316922 - DNA, 25 bp, Homo sapien
cgcgtgatcttcccgctggtgctgc

SEQ ID NO: 316923 - DNA, 25 bp, Homo sapien
gtggctcaaggcctctctcgcactg

SEQ ID NO: 316924 - DNA, 25 bp, Homo sapien
cgtgccggcagacccactgtcagga

SEQ ID NO: 316925 - DNA, 25 bp, Homo sapien
cacagcgtcttgaaagcacgcagca

SEQ ID NO: 316926 - DNA, 25 bp, Homo sapien
ccttcacggcgtttccaggtgtgac

SEQ ID NO: 316927 - DNA, 25 bp, Homo sapien
ctggagggtttgccaccgcctggat

SEQ ID NO: 316928 - DNA, 25 bp, Homo sapien
ttgtaaacaccaggttgtttgagct

SEQ ID NO: 316929 - DNA, 25 bp, Homo sapien
aaacaccaggttgtttgagctggag

SEQ ID NO: 316930 - DNA, 25 bp, Homo sapien
agctggagggtttgccaccgcctgg

SEQ ID NO: 316931 - DNA, 25 bp, Homo sapien
ggaggatcactcttccgcagtggga

SEQ ID NO: 316932 - DNA, 25 bp, Homo sapien
cgctgcaccctcgtcaggaggatca

SEQ ID NO: 316933 - DNA, 25 bp, Homo sapien
caccctcgtcaggaggatcactctt

SEQ ID NO: 316934 - DNA, 25 bp, Homo sapien
atcactcttccgcagtgggagctgg

SEQ ID NO: 316935 - DNA, 25 bp, Homo sapien
tatcgctgcctggagtgaaaccact

SEQ ID NO: 316936 - DNA, 25 bp, Homo sapien
tgtgtgtcccccgaatctgtgagcc

SEQ ID NO: 316937 - DNA, 25 bp, Homo sapien
ctcaagtgtgaggacccatatcgct

SEQ ID NO: 316938 - DNA, 25 bp, Homo sapien
tgagccaggggcactcgatgtccag

SEQ ID NO: 316939 - DNA, 25 bp, Homo sapien
tggagggcctcgatgtccagcctgc

SEQ ID NO: 316940 - DNA, 25 bp, Homo sapien
caatagagggcaatcgtgtggcccc

SEQ ID NO: 316941 - DNA, 25 bp, Homo sapien
ctatgaacggcaatagagggcaatc

SEQ ID NO: 316942 - DNA, 25 bp, Homo sapien
tagagggcaatcgtgtggccccagt

SEQ ID NO: 316943 - DNA, 25 bp, Homo sapien
tgtcagaacggccgtaaagccagcc

SEQ ID NO: 316944 - DNA, 25 bp, Homo sapien
cagaacggccgtaaagccagccaat

SEQ ID NO: 316945 - DNA, 25 bp, Homo sapien
ctgtgtcagaacggccgtaaagcca

SEQ ID NO: 316946 - DNA, 25 bp, Homo sapien
gtcagaacggccgtaaagccagcca

SEQ ID NO: 316947 - DNA, 25 bp, Homo sapien
gagaagaaactgagtgcagagccct

SEQ ID NO: 316948 - DNA, 25 bp, Homo sapien
cttggagaagaaactgagtgcagag

SEQ ID NO: 316949 - DNA, 25 bp, Homo sapien
tccaggatctggcaggcctcgtcta

SEQ ID NO: 316950 - DNA, 25 bp, Homo sapien
ggcctcgtctacacgcccccatctg

SEQ ID NO: 316951 - DNA, 25 bp, Homo sapien
ctggggctccgtggtcccccttcat

SEQ ID NO: 316952 - DNA, 25 bp, Homo sapien
gctccgtggtcccccttcattccca

SEQ ID NO: 316953 - DNA, 25 bp, Homo sapien
cttcattcccacgggtgggtgacca

SEQ ID NO: 316954 - DNA, 25 bp, Homo sapien
cattcccacgggtgggtgaccagca

SEQ ID NO: 316955 - DNA, 25 bp, Homo sapien
gacatgcacaggactatcacacagc

SEQ ID NO: 316956 - DNA, 25 bp, Homo sapien
tgaaaaggcaataccaaacctgagt

SEQ ID NO: 316957 - DNA, 25 bp, Homo sapien
taagaaaccacacattcccaatggg

SEQ ID NO: 316958 - DNA, 25 bp, Homo sapien
gaatcacctgtgatgcatgtcctgg

SEQ ID NO: 316959 - DNA, 25 bp, Homo sapien
gggtctgacacgtcgcacatccggc

SEQ ID NO: 316960 - DNA, 25 bp, Homo sapien
gataaataactgttacacgggtctg

SEQ ID NO: 316961 - DNA, 25 bp, Homo sapien
tcatcccaccaggtgacacgcattt

SEQ ID NO: 316962 - DNA, 25 bp, Homo sapien
ccaggtgacacgcatttgataaata

SEQ ID NO: 316963 - DNA, 25 bp, Homo sapien
ctgtaggaagatgggaacggcctca

SEQ ID NO: 316964 - DNA, 25 bp, Homo sapien
actgtaggaagatgggaacggcctc

SEQ ID NO: 316965 - DNA, 25 bp, Homo sapien
tctgccacttaagcaccaaaaatgg

SEQ ID NO: 316966 - DNA, 25 bp, Homo sapien
caactaatccaggaacatgtggcaa

SEQ ID NO: 316967 - DNA, 25 bp, Homo sapien
catccagacaaaggcaagcaagagg

SEQ ID NO: 316968 - DNA, 25 bp, Homo sapien
agccacgtaaggaggagacaggatc

SEQ ID NO: 316969 - DNA, 25 bp, Homo sapien
tgttatggatctcagcaaagagacc

SEQ ID NO: 316970 - DNA, 25 bp, Homo sapien
gaagtcatatcccattccacagaga

SEQ ID NO: 316971 - DNA, 25 bp, Homo sapien
tgaaaggcggtgagaaatacctgca

SEQ ID NO: 316972 - DNA, 25 bp, Homo sapien
agagttgtaactgcctgaacaggta

SEQ ID NO: 316973 - DNA, 25 bp, Homo sapien
ctgtggcagtccacccggcaggatt

SEQ ID NO: 316974 - DNA, 25 bp, Homo sapien
tgttgcgtgtctctccctcggtcct

SEQ ID NO: 316975 - DNA, 25 bp, Homo sapien
ccaggtcgggagctgtggcagtcca

SEQ ID NO: 316976 - DNA, 25 bp, Homo sapien
agcccgtgggtgttgcgtgtctctc

SEQ ID NO: 316977 - DNA, 25 bp, Homo sapien
gggtgctgactctgcgcccagctct

SEQ ID NO: 316978 - DNA, 25 bp, Homo sapien
ctgtgaccataaacgtgggcaagca

SEQ ID NO: 316979 - DNA, 25 bp, Homo sapien
ggcaagcaactgctgtcctgggtgc

SEQ ID NO: 316980 - DNA, 25 bp, Homo sapien
ctgggtgctgactctgcgcccagct

SEQ ID NO: 316981 - DNA, 25 bp, Homo sapien
catcggcatgtgtgtcttcgtgtcc

SEQ ID NO: 316982 - DNA, 25 bp, Homo sapien
gtgtgtcttcgtgtccagagcccag

SEQ ID NO: 316983 - DNA, 25 bp, Homo sapien
tcttcgaaggccgacatcggcatgt

SEQ ID NO: 316984 - DNA, 25 bp, Homo sapien
ccagtctctgctcttcgaaggccga

SEQ ID NO: 316985 - DNA, 25 bp, Homo sapien
catgacggatgtttgccgagagctt

SEQ ID NO: 316986 - DNA, 25 bp, Homo sapien
tgaccagtgaaaacgcaggtgccag

SEQ ID NO: 316987 - DNA, 25 bp, Homo sapien
tctgtgccgtaacggactggtccac

SEQ ID NO: 316988 - DNA, 25 bp, Homo sapien
cctgtgctggttaccccatgacgga

SEQ ID NO: 316989 - DNA, 25 bp, Homo sapien
acttgttcatctggtctacccacct

SEQ ID NO: 316990 - DNA, 25 bp, Homo sapien
gttctggtcataatctggggacacc

SEQ ID NO: 316991 - DNA, 25 bp, Homo sapien
ccaacacttgttcatctggtctacc

SEQ ID NO: 316992 - DNA, 25 bp, Homo sapien
tggtcataatctggggacaccatct

SEQ ID NO: 316993 - DNA, 25 bp, Homo sapien
aggggcacaatatctccgtcctcac

SEQ ID NO: 316994 - DNA, 25 bp, Homo sapien
cagaggggcacaatatctccgtcct

SEQ ID NO: 316995 - DNA, 25 bp, Homo sapien
gaggggcacaatatctccgtcctca

SEQ ID NO: 316996 - DNA, 25 bp, Homo sapien
tcagaggggcacaatatctccgtcc

SEQ ID NO: 316997 - DNA, 25 bp, Homo sapien
gaggctccaggtattatttggagct

SEQ ID NO: 316998 - DNA, 25 bp, Homo sapien
cagtgcaatgatcaattgtctggca

SEQ ID NO: 316999 - DNA, 25 bp, Homo sapien
gatcaacttgtacccagcagctctc

SEQ ID NO: 317000 - DNA, 25 bp, Homo sapien
tgggtatctaacaccggcatcatga

SEQ ID NO: 317001 - DNA, 25 bp, Homo sapien
ttaactctcgcattgcagatggtca

SEQ ID NO: 317002 - DNA, 25 bp, Homo sapien
aactctcgcattgcagatggtcact

SEQ ID NO: 317003 - DNA, 25 bp, Homo sapien
taactctcgcattgcagatggtcac

SEQ ID NO: 317004 - DNA, 25 bp, Homo sapien
actctcgcattgcagatggtcactg

SEQ ID NO: 317005 - DNA, 25 bp, Homo sapien
cagactccggggtcccactttactg

SEQ ID NO: 317006 - DNA, 25 bp, Homo sapien
gacagtcgggatccccagcgacaga

SEQ ID NO: 317007 - DNA, 25 bp, Homo sapien
atccgagccacccgacagtcgggat

SEQ ID NO: 317008 - DNA, 25 bp, Homo sapien
gccacccgacagtcgggatccccag

SEQ ID NO: 317009 - DNA, 25 bp, Homo sapien
tgtccagtgccatccgagccacccg

SEQ ID NO: 317010 - DNA, 25 bp, Homo sapien
tgctgcctgaaagaaggccttgtca

SEQ ID NO: 317011 - DNA, 25 bp, Homo sapien
cacaggctggagtgtcagcttcttc

SEQ ID NO: 317012 - DNA, 25 bp, Homo sapien
gaacaaggccacttagtcctcacag

SEQ ID NO: 317013 - DNA, 25 bp, Homo sapien
cctcacaggccagggtttcagcatc

SEQ ID NO: 317014 - DNA, 25 bp, Homo sapien
ctgcaccaagagaggatggcctgtg

SEQ ID NO: 317015 - DNA, 25 bp, Homo sapien
cacagtgtcccactcgtagatgtga

SEQ ID NO: 317016 - DNA, 25 bp, Homo sapien
tgcccggtgctctggcaggcgccac

SEQ ID NO: 317017 - DNA, 25 bp, Homo sapien
aggcgccacagtgtcccactcgtag

SEQ ID NO: 317018 - DNA, 25 bp, Homo sapien
tcccactcgtagatgtgatttagca

SEQ ID NO: 317019 - DNA, 25 bp, Homo sapien
ggacaggtggctgtgacctgcgccc

SEQ ID NO: 317020 - DNA, 25 bp, Homo sapien
acaggtggctgtgacctgcgcccac

SEQ ID NO: 317021 - DNA, 25 bp, Homo sapien
gacaggtggctgtgacctgcgccca

SEQ ID NO: 317022 - DNA, 25 bp, Homo sapien
gcttctcggagacaacgtagttaaa

SEQ ID NO: 317023 - DNA, 25 bp, Homo sapien
ccacatctgcttctcggagacaacg

SEQ ID NO: 317024 - DNA, 25 bp, Homo sapien
tagttaaatgggtgagacttgagtc

SEQ ID NO: 317025 - DNA, 25 bp, Homo sapien
gagacaacgtagttaaatgggtgag

SEQ ID NO: 317026 - DNA, 25 bp, Homo sapien
gtacatgcgtgttgtagtgaacagc

SEQ ID NO: 317027 - DNA, 25 bp, Homo sapien
ttgtagtgaacagcgagccagccat

SEQ ID NO: 317028 - DNA, 25 bp, Homo sapien
gcacctagggtacatgcgtgttgta

SEQ ID NO: 317029 - DNA, 25 bp, Homo sapien
ctttttaaagcacctagggtacatg

SEQ ID NO: 317030 - DNA, 25 bp, Homo sapien
ctgcaatgcagtgaccagcttcaca

SEQ ID NO: 317031 - DNA, 25 bp, Homo sapien
tgccggggacctgcaatgcagtgac

SEQ ID NO: 317032 - DNA, 25 bp, Homo sapien
agccgatgttcgttgtgtggctgcc

SEQ ID NO: 317033 - DNA, 25 bp, Homo sapien
ctccagccgatgttcgttgtgtggc

SEQ ID NO: 317034 - DNA, 25 bp, Homo sapien
ccacaccatgcagacagcagaggcc

SEQ ID NO: 317035 - DNA, 25 bp, Homo sapien
gagtttccatttctagcaggagagg

SEQ ID NO: 317036 - DNA, 25 bp, Homo sapien
agagtttccatttctagcaggagag

SEQ ID NO: 317037 - DNA, 25 bp, Homo sapien
ctgcctcatcacctagcgctgtgcc

SEQ ID NO: 317038 - DNA, 25 bp, Homo sapien
acctgcctcatcacctagcgctgtg

SEQ ID NO: 317039 - DNA, 25 bp, Homo sapien
catcacctagcgctgtgcccagtcc

SEQ ID NO: 317040 - DNA, 25 bp, Homo sapien
cctcatcacctagcgctgtgcccag

SEQ ID NO: 317041 - DNA, 25 bp, Homo sapien
agccagtaggaccaagacgccgcgt

SEQ ID NO: 317042 - DNA, 25 bp, Homo sapien
agacgccgcgtgtaccccaggtctt

SEQ ID NO: 317043 - DNA, 25 bp, Homo sapien
caggtggccagagccagtaggacca

SEQ ID NO: 317044 - DNA, 25 bp, Homo sapien
gtaggaccaagacgccgcgtgtacc

SEQ ID NO: 317045 - DNA, 25 bp, Homo sapien
gcacaggccgcaggaaatatttggt

SEQ ID NO: 317046 - DNA, 25 bp, Homo sapien
aatatttggttggtgccacagcttc

SEQ ID NO: 317047 - DNA, 25 bp, Homo sapien
gaggtgtcagtcactcggagggagt

SEQ ID NO: 317048 - DNA, 25 bp, Homo sapien
agttggtgtaggtctcttcaagcac

SEQ ID NO: 317049 - DNA, 25 bp, Homo sapien
attcacacatgccagctggggtgct

SEQ ID NO: 317050 - DNA, 25 bp, Homo sapien
ttgctcgttccggttccatttccac

SEQ ID NO: 317051 - DNA, 25 bp, Homo sapien
agaggagcaacttccggctcagacc

SEQ ID NO: 317052 - DNA, 25 bp, Homo sapien
aggtggtgcctggactctccttgct

SEQ ID NO: 317053 - DNA, 25 bp, Homo sapien
tgttggccagaaagatccacccggc

SEQ ID NO: 317054 - DNA, 25 bp, Homo sapien
ctacctgagccccacgacagggctg

SEQ ID NO: 317055 - DNA, 25 bp, Homo sapien
cagaaagatccacccggctacctga

SEQ ID NO: 317056 - DNA, 25 bp, Homo sapien
tggccagaaagatccacccggctac

SEQ ID NO: 317057 - DNA, 25 bp, Homo sapien
gcatgcattgaagcctggagcgtgt

SEQ ID NO: 317058 - DNA, 25 bp, Homo sapien
gccacagatgcaggccccacgcagg

SEQ ID NO: 317059 - DNA, 25 bp, Homo sapien
ctgcatgcattgaagcctggagcgt

SEQ ID NO: 317060 - DNA, 25 bp, Homo sapien
cagatgcaggccccacgcaggtgat

SEQ ID NO: 317061 - DNA, 25 bp, Homo sapien
cataaagaggcaagattcgtggtgg

SEQ ID NO: 317062 - DNA, 25 bp, Homo sapien
tacctggttcacatgcataaagagg

SEQ ID NO: 317063 - DNA, 25 bp, Homo sapien
tctgacccacggtctgagcacaggg

SEQ ID NO: 317064 - DNA, 25 bp, Homo sapien
tcccgcagggcgtatgaaaacgtca

SEQ ID NO: 317065 - DNA, 25 bp, Homo sapien
cccagttgcccagcggtgcacgtgt

SEQ ID NO: 317066 - DNA, 25 bp, Homo sapien
tgcccccattggctgcccaaccctc

SEQ ID NO: 317067 - DNA, 25 bp, Homo sapien
ggctgccccccagttgcccagcggt

SEQ ID NO: 317068 - DNA, 25 bp, Homo sapien
tgccccccagttgcccagcggtgca

SEQ ID NO: 317069 - DNA, 25 bp, Homo sapien
agtcagatgggagcgggcagcagct

SEQ ID NO: 317070 - DNA, 25 bp, Homo sapien
tcttcagttcgcagctcaagcaggg

SEQ ID NO: 317071 - DNA, 25 bp, Homo sapien
gagccttctactgctgagcactttg

SEQ ID NO: 317072 - DNA, 25 bp, Homo sapien
ggaagctgcagtctcgctatctggg

SEQ ID NO: 317073 - DNA, 25 bp, Homo sapien
cagcatttccgggaagggttggcat

SEQ ID NO: 317074 - DNA, 25 bp, Homo sapien
caccaaaggcattgaatgccttgat

SEQ ID NO: 317075 - DNA, 25 bp, Homo sapien
ggcattgaatgccttgatgtctagg

SEQ ID NO: 317076 - DNA, 25 bp, Homo sapien
tgccttgatgtctaggatgtgaatt

SEQ ID NO: 317077 - DNA, 25 bp, Homo sapien
aaggaaaagtggagggcatgacggt

SEQ ID NO: 317078 - DNA, 25 bp, Homo sapien
agggcatgacggtgggaagggctgg

SEQ ID NO: 317079 - DNA, 25 bp, Homo sapien
tggagggcatgacggtgggaagggc

SEQ ID NO: 317080 - DNA, 25 bp, Homo sapien
aaaagtggagggcatgacggtggga

SEQ ID NO: 317081 - DNA, 25 bp, Homo sapien
gcttcatggaggagggggtatttgg

SEQ ID NO: 317082 - DNA, 25 bp, Homo sapien
tggaggagggggtatttggatacac

SEQ ID NO: 317083 - DNA, 25 bp, Homo sapien
ggtgactggggcctcgagggctgga

SEQ ID NO: 317084 - DNA, 25 bp, Homo sapien
ccctcggatggctgcatggacacca

SEQ ID NO: 317085 - DNA, 25 bp, Homo sapien
ccttcagaactgctcccacccgcct

SEQ ID NO: 317086 - DNA, 25 bp, Homo sapien
tccttcagaactgctcccacccgcc

SEQ ID NO: 317087 - DNA, 25 bp, Homo sapien
tgagattccgggcattttctaaact

SEQ ID NO: 317088 - DNA, 25 bp, Homo sapien
gagtttactgagattccgggcattt

SEQ ID NO: 317089 - DNA, 25 bp, Homo sapien
aggcagggagagtttactgagattc

SEQ ID NO: 317090 - DNA, 25 bp, Homo sapien
ggagagtttactgagattccgggca

SEQ ID NO: 317091 - DNA, 25 bp, Homo sapien
ttctgaaaaatgcaaactcacggct

SEQ ID NO: 317092 - DNA, 25 bp, Homo sapien
cacagcagggattgagccttctgaa

SEQ ID NO: 317093 - DNA, 25 bp, Homo sapien
tgtcctcggcatccggagcatccgt

SEQ ID NO: 317094 - DNA, 25 bp, Homo sapien
ggagcatccgtataattcatgccca

SEQ ID NO: 317095 - DNA, 25 bp, Homo sapien
gaagtcactgtccaggtagaaccac

SEQ ID NO: 317096 - DNA, 25 bp, Homo sapien
ttagaagtcactgtccaggtagaac

SEQ ID NO: 317097 - DNA, 25 bp, Homo sapien
agaagtcactgtccaggtagaacca

SEQ ID NO: 317098 - DNA, 25 bp, Homo sapien
tagaagtcactgtccaggtagaacc

SEQ ID NO: 317099 - DNA, 25 bp, Homo sapien
cggagcctgccagacaaagctctcc

SEQ ID NO: 317100 - DNA, 25 bp, Homo sapien
gtccagcaggggtaccatggccagc

SEQ ID NO: 317101 - DNA, 25 bp, Homo sapien
agagactccggaccatatcgatggg

SEQ ID NO: 317102 - DNA, 25 bp, Homo sapien
ctccgcctggttactgtccagcagg

SEQ ID NO: 317103 - DNA, 25 bp, Homo sapien
atgtcacagaagcggtcataatcag

SEQ ID NO: 317104 - DNA, 25 bp, Homo sapien
gtcacagaagcggtcataatcagcc

SEQ ID NO: 317105 - DNA, 25 bp, Homo sapien
cacagaagcggtcataatcagcctc

SEQ ID NO: 317106 - DNA, 25 bp, Homo sapien
cagaagcggtcataatcagcctcat

SEQ ID NO: 317107 - DNA, 25 bp, Homo sapien
cacaggaacggacgtcaggctttga

SEQ ID NO: 317108 - DNA, 25 bp, Homo sapien
tgaaagcacaggaacggacgtcagg

SEQ ID NO: 317109 - DNA, 25 bp, Homo sapien
caggaacggacgtcaggctttgagt

SEQ ID NO: 317110 - DNA, 25 bp, Homo sapien
agcacaggaacggacgtcaggcttt

SEQ ID NO: 317111 - DNA, 25 bp, Homo sapien
agggacggggatgcctgcgccagca

SEQ ID NO: 317112 - DNA, 25 bp, Homo sapien
ccatatgcatcttagggacggggat

SEQ ID NO: 317113 - DNA, 25 bp, Homo sapien
cttccatatgcatcttagggacggg

SEQ ID NO: 317114 - DNA, 25 bp, Homo sapien
cactcgccttccatatgcatcttag

SEQ ID NO: 317115 - DNA, 25 bp, Homo sapien
ttcagtgtgcatgggtaactctcca

SEQ ID NO: 317116 - DNA, 25 bp, Homo sapien
gatgttcagtgtgcatgggtaactc

SEQ ID NO: 317117 - DNA, 25 bp, Homo sapien
cagatgtgacagcagccgtggctgc

SEQ ID NO: 317118 - DNA, 25 bp, Homo sapien
tgtgcatgggtaactctccaggccc

SEQ ID NO: 317119 - DNA, 25 bp, Homo sapien
ctcggccactaggcagatggtgatg

SEQ ID NO: 317120 - DNA, 25 bp, Homo sapien
gagcctgagtgcagctcctgtggca

SEQ ID NO: 317121 - DNA, 25 bp, Homo sapien
ctgaccctcggtggaggaccggcca

SEQ ID NO: 317122 - DNA, 25 bp, Homo sapien
accggccagcgtgtgtgccgacagt

SEQ ID NO: 317123 - DNA, 25 bp, Homo sapien
cgtgtgtgccgacagtgtgtccaca

SEQ ID NO: 317124 - DNA, 25 bp, Homo sapien
ggaggacacggccagactgcaccga

SEQ ID NO: 317125 - DNA, 25 bp, Homo sapien
aggacacggccagactgcaccgaac

SEQ ID NO: 317126 - DNA, 25 bp, Homo sapien
tcacgcaagaagaatctgaaaccgc

SEQ ID NO: 317127 - DNA, 25 bp, Homo sapien
tgaaaccgcgagaagaggaggacac

SEQ ID NO: 317128 - DNA, 25 bp, Homo sapien
gggctgactgttcctgcatttgcac

SEQ ID NO: 317129 - DNA, 25 bp, Homo sapien
ttcaccaccaaggctaaaccacatt

SEQ ID NO: 317130 - DNA, 25 bp, Homo sapien
tggaagaaaaactcgttgtccaaga

SEQ ID NO: 317131 - DNA, 25 bp, Homo sapien
ttggctgctggagcaacaacattca

SEQ ID NO: 317132 - DNA, 25 bp, Homo sapien
tgctttcttcactgcacagggcagc

SEQ ID NO: 317133 - DNA, 25 bp, Homo sapien
cactgcacagggcagcatcatcctc

SEQ ID NO: 317134 - DNA, 25 bp, Homo sapien
ctgcacagggcagcatcatcctcac

SEQ ID NO: 317135 - DNA, 25 bp, Homo sapien
cctgctttcttcactgcacagggca

SEQ ID NO: 317136 - DNA, 25 bp, Homo sapien
gagctgcgagccatccggggcttat

SEQ ID NO: 317137 - DNA, 25 bp, Homo sapien
aggcgagaagcaccggccgtgggcc

SEQ ID NO: 317138 - DNA, 25 bp, Homo sapien
aaagatttgacttgaagaagacaca

SEQ ID NO: 317139 - DNA, 25 bp, Homo sapien
accagggggagacatccatagagga

SEQ ID NO: 317140 - DNA, 25 bp, Homo sapien
cgcgaggtgtaaaatgactctgtaa

SEQ ID NO: 317141 - DNA, 25 bp, Homo sapien
taagtggtctctgtcctcgtgaact

SEQ ID NO: 317142 - DNA, 25 bp, Homo sapien
ctgtaagtggtctctgtcctcgtga

SEQ ID NO: 317143 - DNA, 25 bp, Homo sapien
ctgctacgcgaggtgtaaaatgact

SEQ ID NO: 317144 - DNA, 25 bp, Homo sapien
aggtaggcgccttcatggttcccca

SEQ ID NO: 317145 - DNA, 25 bp, Homo sapien
agggcgaactgtgccgctctcctct

SEQ ID NO: 317146 - DNA, 25 bp, Homo sapien
ggacagagggcgaactgtgccgctc

SEQ ID NO: 317147 - DNA, 25 bp, Homo sapien
ctggacagagggcgaactgtgccgc

SEQ ID NO: 317148 - DNA, 25 bp, Homo sapien
ggcgaactgtgccgctctcctctgg

SEQ ID NO: 317149 - DNA, 25 bp, Homo sapien
accccgtcaccatctgtgttgcgga

SEQ ID NO: 317150 - DNA, 25 bp, Homo sapien
tgcggaattctgtggtcactctgca

SEQ ID NO: 317151 - DNA, 25 bp, Homo sapien
gaggtcactgaaagacgagctccca

SEQ ID NO: 317152 - DNA, 25 bp, Homo sapien
gaaagacgagctcccatgagctggt

SEQ ID NO: 317153 - DNA, 25 bp, Homo sapien
aagaatctgtgcccgtgttgtggga

SEQ ID NO: 317154 - DNA, 25 bp, Homo sapien
gagaagaatctgtgcccgtgttgtg

SEQ ID NO: 317155 - DNA, 25 bp, Homo sapien
agaagaatctgtgcccgtgttgtgg

SEQ ID NO: 317156 - DNA, 25 bp, Homo sapien
aatctgtgcccgtgttgtgggagct

SEQ ID NO: 317157 - DNA, 25 bp, Homo sapien
acctgcatccttgcggttgttcacg

SEQ ID NO: 317158 - DNA, 25 bp, Homo sapien
tcacgtctgtgagctcttgtgtatc

SEQ ID NO: 317159 - DNA, 25 bp, Homo sapien
gcggttgttcacgtctgtgagctct

SEQ ID NO: 317160 - DNA, 25 bp, Homo sapien
catgacctgcatccttgcggttgtt

SEQ ID NO: 317161 - DNA, 25 bp, Homo sapien
agacccacagccccagggaagtggc

SEQ ID NO: 317162 - DNA, 25 bp, Homo sapien
aaagacccacagccccagggaagtg

SEQ ID NO: 317163 - DNA, 25 bp, Homo sapien
ctaaagacccacagccccagggaag

SEQ ID NO: 317164 - DNA, 25 bp, Homo sapien
aagacccacagccccagggaagtgg

SEQ ID NO: 317165 - DNA, 25 bp, Homo sapien
tgatggagttaaaattggatttctg

SEQ ID NO: 317166 - DNA, 25 bp, Homo sapien
tgttgatggagttaaaattggattt

SEQ ID NO: 317167 - DNA, 25 bp, Homo sapien
gatggagttaaaattggatttctgc

SEQ ID NO: 317168 - DNA, 25 bp, Homo sapien
ggagttaaaattggatttctgctct

SEQ ID NO: 317169 - DNA, 25 bp, Homo sapien
cgtctgcttgcagctttacactcag

SEQ ID NO: 317170 - DNA, 25 bp, Homo sapien
tgcttgcagctttacactcagggca

SEQ ID NO: 317171 - DNA, 25 bp, Homo sapien
tttgacgtctgcttgcagctttaca

SEQ ID NO: 317172 - DNA, 25 bp, Homo sapien
tctctttgacgtctgcttgcagctt

SEQ ID NO: 317173 - DNA, 25 bp, Homo sapien
cacgggtagtttggacacttggcga

SEQ ID NO: 317174 - DNA, 25 bp, Homo sapien
cccgtggcatgatcaggcagtcgaa

SEQ ID NO: 317175 - DNA, 25 bp, Homo sapien
ggtgcacagactcaacacagagggc

SEQ ID NO: 317176 - DNA, 25 bp, Homo sapien
gaactgttctgcgtcggttgtccag

SEQ ID NO: 317177 - DNA, 25 bp, Homo sapien
cagcccatgtctaggtcataaaagg

SEQ ID NO: 317178 - DNA, 25 bp, Homo sapien
tgtctaggtcataaaaggatgaggc

SEQ ID NO: 317179 - DNA, 25 bp, Homo sapien
gcccatgtctaggtcataaaaggat

SEQ ID NO: 317180 - DNA, 25 bp, Homo sapien
catgtctaggtcataaaaggatgag

SEQ ID NO: 317181 - DNA, 25 bp, Homo sapien
ttgcactgtcctggcggtcctccag

SEQ ID NO: 317182 - DNA, 25 bp, Homo sapien
ggcccctttgcactgtcctggcggt

SEQ ID NO: 317183 - DNA, 25 bp, Homo sapien
aaggcccctttgcactgtcctggcg

SEQ ID NO: 317184 - DNA, 25 bp, Homo sapien
ctttgcactgtcctggcggtcctcc

SEQ ID NO: 317185 - DNA, 25 bp, Homo sapien
gctccagattggagcctgcagcagc

SEQ ID NO: 317186 - DNA, 25 bp, Homo sapien
tgggctggtgatggccgtccactct

SEQ ID NO: 317187 - DNA, 25 bp, Homo sapien
atcatgcttggactgcggcccgtgg

SEQ ID NO: 317188 - DNA, 25 bp, Homo sapien
catccatcatgcttggactgcggcc

SEQ ID NO: 317189 - DNA, 25 bp, Homo sapien
tagtaaagacggcagctctgctgcg

SEQ ID NO: 317190 - DNA, 25 bp, Homo sapien
gacactttcacgatggctgcagaga

SEQ ID NO: 317191 - DNA, 25 bp, Homo sapien
cacactgaaaatcgcactgctggag

SEQ ID NO: 317192 - DNA, 25 bp, Homo sapien
tccaagggaaatgctaatggcccca

SEQ ID NO: 317193 - DNA, 25 bp, Homo sapien
gtggcgggggctgcggccctgcgag

SEQ ID NO: 317194 - DNA, 25 bp, Homo sapien
aggccagcatccgggtggcgggggc

SEQ ID NO: 317195 - DNA, 25 bp, Homo sapien
cgggggctgcggccctgcgaggcat

SEQ ID NO: 317196 - DNA, 25 bp, Homo sapien
caggccagcatccgggtggcggggg

SEQ ID NO: 317197 - DNA, 25 bp, Homo sapien
agaggtggggaggaagctctcgctg

SEQ ID NO: 317198 - DNA, 25 bp, Homo sapien
ggtggggaggaagctctcgctgatg

SEQ ID NO: 317199 - DNA, 25 bp, Homo sapien
gtggggaggaagctctcgctgatgg

SEQ ID NO: 317200 - DNA, 25 bp, Homo sapien
gaggtggggaggaagctctcgctga

SEQ ID NO: 317201 - DNA, 25 bp, Homo sapien
cggccctgcacggatgctgttagtg

SEQ ID NO: 317202 - DNA, 25 bp, Homo sapien
cagtcgtctgcgtgaaaaaggcaag

SEQ ID NO: 317203 - DNA, 25 bp, Homo sapien
cgccgggatgtgtgcagtcgtctgc

SEQ ID NO: 317204 - DNA, 25 bp, Homo sapien
gctgttagtgtgaagttgtccttgg

SEQ ID NO: 317205 - DNA, 25 bp, Homo sapien
caacatctgctgccgatgccacctg

SEQ ID NO: 317206 - DNA, 25 bp, Homo sapien
caggtgcagagcccggcgctcactg

SEQ ID NO: 317207 - DNA, 25 bp, Homo sapien
gcaggtgcagagcccggcgctcact

SEQ ID NO: 317208 - DNA, 25 bp, Homo sapien
ccggcgctcactgccccgagcctgc

SEQ ID NO: 317209 - DNA, 25 bp, Homo sapien
ctgcaatgcggaaagacagaggctg

SEQ ID NO: 317210 - DNA, 25 bp, Homo sapien
catggagaggcgctgaagctgaatg

SEQ ID NO: 317211 - DNA, 25 bp, Homo sapien
tcatcctccttaggcctgtgagaga

SEQ ID NO: 317212 - DNA, 25 bp, Homo sapien
acaggtgatctgcatggagaggcgc

SEQ ID NO: 317213 - DNA, 25 bp, Homo sapien
atgagggatacctgcgcgcctgggc

SEQ ID NO: 317214 - DNA, 25 bp, Homo sapien
aggtctgatgcatgagggatacctg

SEQ ID NO: 317215 - DNA, 25 bp, Homo sapien
taggtctgatgcatgagggatacct

SEQ ID NO: 317216 - DNA, 25 bp, Homo sapien
tgagggatacctgcgcgcctgggca

SEQ ID NO: 317217 - DNA, 25 bp, Homo sapien
ggtcccgatgtcactggttggaaga

SEQ ID NO: 317218 - DNA, 25 bp, Homo sapien
catcagtgttgacaacgatgacagt

SEQ ID NO: 317219 - DNA, 25 bp, Homo sapien
ggttggaagatgtacgcatttgccc

SEQ ID NO: 317220 - DNA, 25 bp, Homo sapien
gttctggctcatacgctgccccaga

SEQ ID NO: 317221 - DNA, 25 bp, Homo sapien
cagtacagacgggaaaacaggtatt

SEQ ID NO: 317222 - DNA, 25 bp, Homo sapien
agcaaggattcaccagacattcaag

SEQ ID NO: 317223 - DNA, 25 bp, Homo sapien
gacattcaagacaacaccagtacag

SEQ ID NO: 317224 - DNA, 25 bp, Homo sapien
ggcatagcaaggattcaccagacat

SEQ ID NO: 317225 - DNA, 25 bp, Homo sapien
gcccacgaacgaggctggttttgct

SEQ ID NO: 317226 - DNA, 25 bp, Homo sapien
gatccctgcagtaattgtcctttgt

SEQ ID NO: 317227 - DNA, 25 bp, Homo sapien
cataggcccacgaacgaggctggtt

SEQ ID NO: 317228 - DNA, 25 bp, Homo sapien
ggctggttttgctcagatccctgca

SEQ ID NO: 317229 - DNA, 25 bp, Homo sapien
gggagcgagcatctttggctccgta

SEQ ID NO: 317230 - DNA, 25 bp, Homo sapien
gaagcccttcccaatgttcagtgtg

SEQ ID NO: 317231 - DNA, 25 bp, Homo sapien
tctttggctccgtagaagaagccct

SEQ ID NO: 317232 - DNA, 25 bp, Homo sapien
cagctgcaaaggtgagcacctccca

SEQ ID NO: 317233 - DNA, 25 bp, Homo sapien
gacgtcgtccatgccgtgatgtcca

SEQ ID NO: 317234 - DNA, 25 bp, Homo sapien
caacggtgcagagactgagctcgga

SEQ ID NO: 317235 - DNA, 25 bp, Homo sapien
tgtccagggcttgggatcatcccag

SEQ ID NO: 317236 - DNA, 25 bp, Homo sapien
cgagggctcctgattcaacggtgca

SEQ ID NO: 317237 - DNA, 25 bp, Homo sapien
caggatgaaggctgtctgtgtccct

SEQ ID NO: 317238 - DNA, 25 bp, Homo sapien
ccccatgtcggttctgtggatgctg

SEQ ID NO: 317239 - DNA, 25 bp, Homo sapien
atgaaggctgtctgtgtccctggct

SEQ ID NO: 317240 - DNA, 25 bp, Homo sapien
cagctcccccatgtcggttctgtgg

SEQ ID NO: 317241 - DNA, 25 bp, Homo sapien
gggttccagagagccggactctttc

SEQ ID NO: 317242 - DNA, 25 bp, Homo sapien
gctgggttccagagagccggactct

SEQ ID NO: 317243 - DNA, 25 bp, Homo sapien
tccagagagccggactctttctggg

SEQ ID NO: 317244 - DNA, 25 bp, Homo sapien
cagagagccggactctttctgggct

SEQ ID NO: 317245 - DNA, 25 bp, Homo sapien
gccagtgtctcgggcccacagagga

SEQ ID NO: 317246 - DNA, 25 bp, Homo sapien
agctgctcgatgactagggagccag

SEQ ID NO: 317247 - DNA, 25 bp, Homo sapien
tctcgggcccacagaggattcaggg

SEQ ID NO: 317248 - DNA, 25 bp, Homo sapien
gagctgctcgatgactagggagcca

SEQ ID NO: 317249 - DNA, 25 bp, Homo sapien
taacgctggagttggcagtggaaca

SEQ ID NO: 317250 - DNA, 25 bp, Homo sapien
ctgagcaaccctttgttcaaagaga

SEQ ID NO: 317251 - DNA, 25 bp, Homo sapien
agagctgctttgctaacgctggagt

SEQ ID NO: 317252 - DNA, 25 bp, Homo sapien
gcaagagctgggtctcggatgcctc

SEQ ID NO: 317253 - DNA, 25 bp, Homo sapien
aaacagagggcttgctccatcatcc

SEQ ID NO: 317254 - DNA, 25 bp, Homo sapien
aaaacagagggcttgctccatcatc

SEQ ID NO: 317255 - DNA, 25 bp, Homo sapien
cttagaacctcgtcccttgatgggt

SEQ ID NO: 317256 - DNA, 25 bp, Homo sapien
ggtaagtcctgtccacaggccacgg

SEQ ID NO: 317257 - DNA, 25 bp, Homo sapien
ggttctgcaggacgcatggctttgc

SEQ ID NO: 317258 - DNA, 25 bp, Homo sapien
ggcagccccgtcagcatccttagaa

SEQ ID NO: 317259 - DNA, 25 bp, Homo sapien
gatttctactgaaggacgcaactct

SEQ ID NO: 317260 - DNA, 25 bp, Homo sapien
tactgaaggacgcaactctttatct

SEQ ID NO: 317261 - DNA, 25 bp, Homo sapien
tttctactgaaggacgcaactcttt

SEQ ID NO: 317262 - DNA, 25 bp, Homo sapien
gaaggacgcaactctttatctccat

SEQ ID NO: 317263 - DNA, 25 bp, Homo sapien
gaaatgtcactttatccaagcacag

SEQ ID NO: 317264 - DNA, 25 bp, Homo sapien
ggcctctgtagttcacggtatcttg

SEQ ID NO: 317265 - DNA, 25 bp, Homo sapien
tgaccatgttttgttcgcaactccc

SEQ ID NO: 317266 - DNA, 25 bp, Homo sapien
ggtgggatcctctaacttatggttg

SEQ ID NO: 317267 - DNA, 25 bp, Homo sapien
tagtcccagatgaacctccagacct

SEQ ID NO: 317268 - DNA, 25 bp, Homo sapien
gcgttagtcccagatgaacctccag

SEQ ID NO: 317269 - DNA, 25 bp, Homo sapien
ctggcctggcaaagcgttagtccca

SEQ ID NO: 317270 - DNA, 25 bp, Homo sapien
gcaaagcgttagtcccagatgaacc

SEQ ID NO: 317271 - DNA, 25 bp, Homo sapien
gaattatgggccttgtcttggtcct

SEQ ID NO: 317272 - DNA, 25 bp, Homo sapien
ggaattatgggccttgtcttggtcc

SEQ ID NO: 317273 - DNA, 25 bp, Homo sapien
ccctctggaattatgggccttgtct

SEQ ID NO: 317274 - DNA, 25 bp, Homo sapien
gaattcttttatggctcctgataaa

SEQ ID NO: 317275 - DNA, 25 bp, Homo sapien
gggaattcttttatggctcctgata

SEQ ID NO: 317276 - DNA, 25 bp, Homo sapien
ggaattcttttatggctcctgataa

SEQ ID NO: 317277 - DNA, 25 bp, Homo sapien
tgggaattcttttatggctcctgat

SEQ ID NO: 317278 - DNA, 25 bp, Homo sapien
ttcagtgatttgtcaccacggctga

SEQ ID NO: 317279 - DNA, 25 bp, Homo sapien
tcagtgatttgtcaccacggctgac

SEQ ID NO: 317280 - DNA, 25 bp, Homo sapien
cttcagtgatttgtcaccacggctg

SEQ ID NO: 317281 - DNA, 25 bp, Homo sapien
ccttacacatgggagtccatggagt

SEQ ID NO: 317282 - DNA, 25 bp, Homo sapien
gcctctggacaaagctggactccaa

SEQ ID NO: 317283 - DNA, 25 bp, Homo sapien
atggagtgtgggcatccacacctcc

SEQ ID NO: 317284 - DNA, 25 bp, Homo sapien
tgggcctctggacaaagctggactc

SEQ ID NO: 317285 - DNA, 25 bp, Homo sapien
accagggaaacccacggctctcatg

SEQ ID NO: 317286 - DNA, 25 bp, Homo sapien
cagggaaacccacggctctcatggc

SEQ ID NO: 317287 - DNA, 25 bp, Homo sapien
agaccagggaaacccacggctctca

SEQ ID NO: 317288 - DNA, 25 bp, Homo sapien
tcaagaccagggaaacccacggctc

SEQ ID NO: 317289 - DNA, 25 bp, Homo sapien
gggagccggatgtcgtgaaatccat

SEQ ID NO: 317290 - DNA, 25 bp, Homo sapien
cagctgtcgccagttgggtcctgtg

SEQ ID NO: 317291 - DNA, 25 bp, Homo sapien
tctgccattcagtgtcggtggtggt

SEQ ID NO: 317292 - DNA, 25 bp, Homo sapien
tgtggctgagcttccatggacgcca

SEQ ID NO: 317293 - DNA, 25 bp, Homo sapien
gaagaagaggaactgctgaaacagc

SEQ ID NO: 317294 - DNA, 25 bp, Homo sapien
gcctgagaccctcgagggaagaaga

SEQ ID NO: 317295 - DNA, 25 bp, Homo sapien
tgtcccagctgcgtgtcactaaagt

SEQ ID NO: 317296 - DNA, 25 bp, Homo sapien
tgtgttctcatggttattaaccaga

SEQ ID NO: 317297 - DNA, 25 bp, Homo sapien
ctccagcggtgctcactgtgtgggc

SEQ ID NO: 317298 - DNA, 25 bp, Homo sapien
gcggtgctcactgtgtgggccacgc

SEQ ID NO: 317299 - DNA, 25 bp, Homo sapien
ccagcggtgctcactgtgtgggcca

SEQ ID NO: 317300 - DNA, 25 bp, Homo sapien
cagcggtgctcactgtgtgggccac

SEQ ID NO: 317301 - DNA, 25 bp, Homo sapien
cagaaagcgtctgaagagcgtggcc

SEQ ID NO: 317302 - DNA, 25 bp, Homo sapien
tgggctttggcacgaactgtggtct

SEQ ID NO: 317303 - DNA, 25 bp, Homo sapien
gaactgggcacttgaagctctgcag

SEQ ID NO: 317304 - DNA, 25 bp, Homo sapien
aatccttggtggcaggaacgccctg

SEQ ID NO: 317305 - DNA, 25 bp, Homo sapien
catgctgaaggcgagataggctcaa

SEQ ID NO: 317306 - DNA, 25 bp, Homo sapien
gagaatctcatcctttgcactgctg

SEQ ID NO: 317307 - DNA, 25 bp, Homo sapien
ttatctcggtttcccaagctgatga

SEQ ID NO: 317308 - DNA, 25 bp, Homo sapien
gcaaagccatccgtgtctgagacgt

SEQ ID NO: 317309 - DNA, 25 bp, Homo sapien
ctctcccaaaaccaggcctttcagg

SEQ ID NO: 317310 - DNA, 25 bp, Homo sapien
ccaggcctttcagggcctccatcac

SEQ ID NO: 317311 - DNA, 25 bp, Homo sapien
ttctctcccaaaaccaggcctttca

SEQ ID NO: 317312 - DNA, 25 bp, Homo sapien
aaaccaggcctttcagggcctccat

SEQ ID NO: 317313 - DNA, 25 bp, Homo sapien
tgatgtcagctacagccgccctgac

SEQ ID NO: 317314 - DNA, 25 bp, Homo sapien
atgtcagctacagccgccctgactt

SEQ ID NO: 317315 - DNA, 25 bp, Homo sapien
gatgtcagctacagccgccctgact

SEQ ID NO: 317316 - DNA, 25 bp, Homo sapien
gggcagtctgggcatagacacgaat

SEQ ID NO: 317317 - DNA, 25 bp, Homo sapien
tctgggcatagacacgaatggcagg

SEQ ID NO: 317318 - DNA, 25 bp, Homo sapien
cacttgggactctgggtgtgtgcaa

SEQ ID NO: 317319 - DNA, 25 bp, Homo sapien
tcaggaccacttgggactctgggtg

SEQ ID NO: 317320 - DNA, 25 bp, Homo sapien
ttgctgctctctcccagccattacc

SEQ ID NO: 317321 - DNA, 25 bp, Homo sapien
tttgctgctctctcccagccattac

SEQ ID NO: 317322 - DNA, 25 bp, Homo sapien
gctgctctctcccagccattaccac

SEQ ID NO: 317323 - DNA, 25 bp, Homo sapien
ctttgctgctctctcccagccatta

SEQ ID NO: 317324 - DNA, 25 bp, Homo sapien
tggacgtaacatctggccagctggg

SEQ ID NO: 317325 - DNA, 25 bp, Homo sapien
ggtcacgttcatatctctgctgagg

SEQ ID NO: 317326 - DNA, 25 bp, Homo sapien
caacttggcatggattggacgtaac

SEQ ID NO: 317327 - DNA, 25 bp, Homo sapien
cagtacagccctgatgctggagcca

SEQ ID NO: 317328 - DNA, 25 bp, Homo sapien
tctcttctcatggacgtttttgtgg

SEQ ID NO: 317329 - DNA, 25 bp, Homo sapien
aatcctctgcggttccaggaccctg

SEQ ID NO: 317330 - DNA, 25 bp, Homo sapien
gcaggctgagagaatcctctgcggt

SEQ ID NO: 317331 - DNA, 25 bp, Homo sapien
tcatggacgtttttgtggttcctcc

SEQ ID NO: 317332 - DNA, 25 bp, Homo sapien
tcagatgtccttcgaatggtcattt

SEQ ID NO: 317333 - DNA, 25 bp, Homo sapien
gctttgctcatctttgtgactgtga

SEQ ID NO: 317334 - DNA, 25 bp, Homo sapien
gatgtccttcgaatggtcatttagt

SEQ ID NO: 317335 - DNA, 25 bp, Homo sapien
gctcatctttgtgactgtgagaacc

SEQ ID NO: 317336 - DNA, 25 bp, Homo sapien
tgactcctggacgtctaaagggctc

SEQ ID NO: 317337 - DNA, 25 bp, Homo sapien
ggtgtgactcctggacgtctaaagg

SEQ ID NO: 317338 - DNA, 25 bp, Homo sapien
tcctggacgtctaaagggctcctga

SEQ ID NO: 317339 - DNA, 25 bp, Homo sapien
tggacgtctaaagggctcctgacca

SEQ ID NO: 317340 - DNA, 25 bp, Homo sapien
gctcccccttcctaaatgacatttc

SEQ ID NO: 317341 - DNA, 25 bp, Homo sapien
cccttcctaaatgacatttcttcct

SEQ ID NO: 317342 - DNA, 25 bp, Homo sapien
tgctcccccttcctaaatgacattt

SEQ ID NO: 317343 - DNA, 25 bp, Homo sapien
tcctaaatgacatttcttcctgcat

SEQ ID NO: 317344 - DNA, 25 bp, Homo sapien
aggtccctcaggttgtctcctgagc

SEQ ID NO: 317345 - DNA, 25 bp, Homo sapien
cagagagagcggtgtcagaagtcca

SEQ ID NO: 317346 - DNA, 25 bp, Homo sapien
aaggccaccatgtgaggcagagagg

SEQ ID NO: 317347 - DNA, 25 bp, Homo sapien
tggtggaggccgaaatactaatgat

SEQ ID NO: 317348 - DNA, 25 bp, Homo sapien
aatgatggttacacttatgtggcgc

SEQ ID NO: 317349 - DNA, 25 bp, Homo sapien
tgggaaacaccccttcttctcagag

SEQ ID NO: 317350 - DNA, 25 bp, Homo sapien
gaaacaccccttcttctcagaggca

SEQ ID NO: 317351 - DNA, 25 bp, Homo sapien
ggaaacaccccttcttctcagaggc

SEQ ID NO: 317352 - DNA, 25 bp, Homo sapien
caatgggaaacaccccttcttctca

SEQ ID NO: 317353 - DNA, 25 bp, Homo sapien
ctcctctcctccaccgggaagctct

SEQ ID NO: 317354 - DNA, 25 bp, Homo sapien
ctcctccaccgggaagctctgggcc

SEQ ID NO: 317355 - DNA, 25 bp, Homo sapien
tctcctccaccgggaagctctgggc

SEQ ID NO: 317356 - DNA, 25 bp, Homo sapien
caatacctctaccagggaagtggca

SEQ ID NO: 317357 - DNA, 25 bp, Homo sapien
gatgattaaactggatttctgctcc

SEQ ID NO: 317358 - DNA, 25 bp, Homo sapien
agaagtctgacacagaagctgcctt

SEQ ID NO: 317359 - DNA, 25 bp, Homo sapien
tctgtattagaggagaccaccactc

SEQ ID NO: 317360 - DNA, 25 bp, Homo sapien
cgtggcagcgttgacccttcttggg

SEQ ID NO: 317361 - DNA, 25 bp, Homo sapien
ggcagcgttgacccttcttggggcc

SEQ ID NO: 317362 - DNA, 25 bp, Homo sapien
gtggcagcgttgacccttcttgggg

SEQ ID NO: 317363 - DNA, 25 bp, Homo sapien
tggcagcgttgacccttcttggggc

SEQ ID NO: 317364 - DNA, 25 bp, Homo sapien
tcttctgcaaacagggcctggaggc

SEQ ID NO: 317365 - DNA, 25 bp, Homo sapien
tgcaaacagggcctggaggcacctc

SEQ ID NO: 317366 - DNA, 25 bp, Homo sapien
cggattctcaggccctccccaggtc

SEQ ID NO: 317367 - DNA, 25 bp, Homo sapien
ccccaggtcctgctgtcttctgcaa

SEQ ID NO: 317368 - DNA, 25 bp, Homo sapien
atcccttgagtccactgcccgtgtc

SEQ ID NO: 317369 - DNA, 25 bp, Homo sapien
gggggcactgttggccagcgctggc

SEQ ID NO: 317370 - DNA, 25 bp, Homo sapien
tgagctggcagcttcggagtggccg

SEQ ID NO: 317371 - DNA, 25 bp, Homo sapien
tcggagtggccggaccagctccatg

SEQ ID NO: 317372 - DNA, 25 bp, Homo sapien
ggtggccgcgatgcttgagctccct

SEQ ID NO: 317373 - DNA, 25 bp, Homo sapien
gtgactcctgcttcgtcggcctctg

SEQ ID NO: 317374 - DNA, 25 bp, Homo sapien
cctcttccacgtccgtcctcttcca

SEQ ID NO: 317375 - DNA, 25 bp, Homo sapien
tcttccacgtccgtcctcttccacc

SEQ ID NO: 317376 - DNA, 25 bp, Homo sapien
tctccagtgctccatgtagcttctc

SEQ ID NO: 317377 - DNA, 25 bp, Homo sapien
tgctcggtcccaggagaagactgtc

SEQ ID NO: 317378 - DNA, 25 bp, Homo sapien
ctgcactttctcataagcttgcttt

SEQ ID NO: 317379 - DNA, 25 bp, Homo sapien
tcaaaactgcgagtcgtgctcggtc

SEQ ID NO: 317380 - DNA, 25 bp, Homo sapien
tttcaggtaactgaatcaggggcat

SEQ ID NO: 317381 - DNA, 25 bp, Homo sapien
tgtttcaggtaactgaatcaggggc

SEQ ID NO: 317382 - DNA, 25 bp, Homo sapien
ctgtttcaggtaactgaatcagggg

SEQ ID NO: 317383 - DNA, 25 bp, Homo sapien
gtttcaggtaactgaatcaggggca

SEQ ID NO: 317384 - DNA, 25 bp, Homo sapien
gacagggacagaggtgcagggtggc

SEQ ID NO: 317385 - DNA, 25 bp, Homo sapien
agggacagaggtgcagggtggcttc

SEQ ID NO: 317386 - DNA, 25 bp, Homo sapien
ggacagaggtgcagggtggcttcct

SEQ ID NO: 317387 - DNA, 25 bp, Homo sapien
acagggacagaggtgcagggtggct

SEQ ID NO: 317388 - DNA, 25 bp, Homo sapien
tgtcgtggaatgatcagcacagcac

SEQ ID NO: 317389 - DNA, 25 bp, Homo sapien
gctgcccggagccactcggggtatc

SEQ ID NO: 317390 - DNA, 25 bp, Homo sapien
cactcggggtatcggtgtcagtcat

SEQ ID NO: 317391 - DNA, 25 bp, Homo sapien
cgaagtgcagaaaccgggcttgtcg

SEQ ID NO: 317392 - DNA, 25 bp, Homo sapien
ctccaccgccgaatccccagcgagc

SEQ ID NO: 317393 - DNA, 25 bp, Homo sapien
tccaccgccgaatccccagcgagca

SEQ ID NO: 317394 - DNA, 25 bp, Homo sapien
accgccgaatccccagcgagcacac

SEQ ID NO: 317395 - DNA, 25 bp, Homo sapien
ccaccgccgaatccccagcgagcac

SEQ ID NO: 317396 - DNA, 25 bp, Homo sapien
tttgccacgggagggacagcttcct

SEQ ID NO: 317397 - DNA, 25 bp, Homo sapien
atttgccacgggagggacagcttcc

SEQ ID NO: 317398 - DNA, 25 bp, Homo sapien
gtatttgccacgggagggacagctt

SEQ ID NO: 317399 - DNA, 25 bp, Homo sapien
tcagtatttgccacgggagggacag

SEQ ID NO: 317400 - DNA, 25 bp, Homo sapien
ggaagtggcagagctcattcgtcca

SEQ ID NO: 317401 - DNA, 25 bp, Homo sapien
gagctcattcgtccacttacaggaa

SEQ ID NO: 317402 - DNA, 25 bp, Homo sapien
ggcagagctcattcgtccacttaca

SEQ ID NO: 317403 - DNA, 25 bp, Homo sapien
cattcgtccacttacaggaagatcc

SEQ ID NO: 317404 - DNA, 25 bp, Homo sapien
ggactgggctgtgccgtcccttcca

SEQ ID NO: 317405 - DNA, 25 bp, Homo sapien
tggactgggctgtgccgtcccttcc

SEQ ID NO: 317406 - DNA, 25 bp, Homo sapien
actgggctgtgccgtcccttccagt

SEQ ID NO: 317407 - DNA, 25 bp, Homo sapien
gactgggctgtgccgtcccttccag

SEQ ID NO: 317408 - DNA, 25 bp, Homo sapien
ggcggcccacaggatgcactcacag

SEQ ID NO: 317409 - DNA, 25 bp, Homo sapien
aagctggcggcccacaggatgcact

SEQ ID NO: 317410 - DNA, 25 bp, Homo sapien
ccaaggggtacagccaaagctggcg

SEQ ID NO: 317411 - DNA, 25 bp, Homo sapien
ctccattctgtctcccaaggggtac

SEQ ID NO: 317412 - DNA, 25 bp, Homo sapien
cttctgggctcacaccgccagcacg

SEQ ID NO: 317413 - DNA, 25 bp, Homo sapien
ggctcacaccgccagcacggcaggc

SEQ ID NO: 317414 - DNA, 25 bp, Homo sapien
ttcttctccgactgcggagcccgtg

SEQ ID NO: 317415 - DNA, 25 bp, Homo sapien
gtgtgcttcttctccgactgcggag

SEQ ID NO: 317416 - DNA, 25 bp, Homo sapien
ttgctgacccaataggtcttctaga

SEQ ID NO: 317417 - DNA, 25 bp, Homo sapien
gcccgagggccttgctgacccaata

SEQ ID NO: 317418 - DNA, 25 bp, Homo sapien
gagggccttgctgacccaataggtc

SEQ ID NO: 317419 - DNA, 25 bp, Homo sapien
tgacccaataggtcttctagaagtt

SEQ ID NO: 317420 - DNA, 25 bp, Homo sapien
ccaggaaaccttcgtgacctgtggg

SEQ ID NO: 317421 - DNA, 25 bp, Homo sapien
caataacaggattggtgactgcatc

SEQ ID NO: 317422 - DNA, 25 bp, Homo sapien
gggcctgggagtcgtattctctgca

SEQ ID NO: 317423 - DNA, 25 bp, Homo sapien
gctgggatttacagccccatccagg

SEQ ID NO: 317424 - DNA, 25 bp, Homo sapien
acatccggcttgacaatgaggcgcg

SEQ ID NO: 317425 - DNA, 25 bp, Homo sapien
aagttgaaggagtgatacgaggccc

SEQ ID NO: 317426 - DNA, 25 bp, Homo sapien
tatggtgagttgtgaacatccggct

SEQ ID NO: 317427 - DNA, 25 bp, Homo sapien
tacgaggccctgtcgtaggtccagg

SEQ ID NO: 317428 - DNA, 25 bp, Homo sapien
tggtgaattctccaatccttccaaa

SEQ ID NO: 317429 - DNA, 25 bp, Homo sapien
tatccctatagctagtaaagacatt

SEQ ID NO: 317430 - DNA, 25 bp, Homo sapien
ggtgaattctccaatccttccaaac

SEQ ID NO: 317431 - DNA, 25 bp, Homo sapien
tagctagtaaagacatttcagataa

SEQ ID NO: 317432 - DNA, 25 bp, Homo sapien
cacggacgccccttgcgggtaggct

SEQ ID NO: 317433 - DNA, 25 bp, Homo sapien
ggtaggctcctccatgcaggtattt

SEQ ID NO: 317434 - DNA, 25 bp, Homo sapien
tgaggcaggctgacacggacgcccc

SEQ ID NO: 317435 - DNA, 25 bp, Homo sapien
tgtgcaaggtgatgtcacacagccg

SEQ ID NO: 317436 - DNA, 25 bp, Homo sapien
ttggagatatgcgtggacagcaatt

SEQ ID NO: 317437 - DNA, 25 bp, Homo sapien
ctgaagttggagatatgcgtggaca

SEQ ID NO: 317438 - DNA, 25 bp, Homo sapien
aagttggagatatgcgtggacagca

SEQ ID NO: 317439 - DNA, 25 bp, Homo sapien
cttctgaagttggagatatgcgtgg

SEQ ID NO: 317440 - DNA, 25 bp, Homo sapien
ggttccctgtgagctcctctatgat

SEQ ID NO: 317441 - DNA, 25 bp, Homo sapien
taccggatgcagacaggttccctgt

SEQ ID NO: 317442 - DNA, 25 bp, Homo sapien
gagggccctgtgagatcctctatga

SEQ ID NO: 317443 - DNA, 25 bp, Homo sapien
tccagggtacagagagcgccctgca

SEQ ID NO: 317444 - DNA, 25 bp, Homo sapien
ctgctctgccggcttgtccccttgg

SEQ ID NO: 317445 - DNA, 25 bp, Homo sapien
tgctctgccggcttgtccccttggt

SEQ ID NO: 317446 - DNA, 25 bp, Homo sapien
cggcttgtccccttggtcacttggc

SEQ ID NO: 317447 - DNA, 25 bp, Homo sapien
tgtccccttggtcacttggctccag

SEQ ID NO: 317448 - DNA, 25 bp, Homo sapien
tccatcggcaccaggaggcgtgaaa

SEQ ID NO: 317449 - DNA, 25 bp, Homo sapien
gcaagttgtggtgtagaaagcgcca

SEQ ID NO: 317450 - DNA, 25 bp, Homo sapien
tggcagaaaggcaccgggaagtact

SEQ ID NO: 317451 - DNA, 25 bp, Homo sapien
cgtgaaacggccatgttcacggaca

SEQ ID NO: 317452 - DNA, 25 bp, Homo sapien
gattgttgtgacagtaacaaaacca

SEQ ID NO: 317453 - DNA, 25 bp, Homo sapien
ggtctccgtggatgattgttgtgac

SEQ ID NO: 317454 - DNA, 25 bp, Homo sapien
aaccagcagccatcatttgtggggc

SEQ ID NO: 317455 - DNA, 25 bp, Homo sapien
gccatcatttgtggggctgcgctca

SEQ ID NO: 317456 - DNA, 25 bp, Homo sapien
gagtcaggctttcccccgtgaggct

SEQ ID NO: 317457 - DNA, 25 bp, Homo sapien
agggtctccttgaagtcccctcagg

SEQ ID NO: 317458 - DNA, 25 bp, Homo sapien
gcactttccagtggtgactcagagt

SEQ ID NO: 317459 - DNA, 25 bp, Homo sapien
gagcagctggcgttgcccgtttcat

SEQ ID NO: 317460 - DNA, 25 bp, Homo sapien
cccttggggggtcgtgctctttgca

SEQ ID NO: 317461 - DNA, 25 bp, Homo sapien
gctctttgcaggaacgtgggggcaa

SEQ ID NO: 317462 - DNA, 25 bp, Homo sapien
ctgagctcccttggggggtcgtgct

SEQ ID NO: 317463 - DNA, 25 bp, Homo sapien
agctcccttggggggtcgtgctctt

SEQ ID NO: 317464 - DNA, 25 bp, Homo sapien
caggaacctctctggtgaggtgagg

SEQ ID NO: 317465 - DNA, 25 bp, Homo sapien
tgagggccctgagggtgggtagaac

SEQ ID NO: 317466 - DNA, 25 bp, Homo sapien
gctgcttgcaggaacctctctggtg

SEQ ID NO: 317467 - DNA, 25 bp, Homo sapien
gcttgcaggaacctctctggtgagg

SEQ ID NO: 317468 - DNA, 25 bp, Homo sapien
agtggggtcctattttggagcagct

SEQ ID NO: 317469 - DNA, 25 bp, Homo sapien
aagtggggtcctattttggagcagc

SEQ ID NO: 317470 - DNA, 25 bp, Homo sapien
tgaagtggggtcctattttggagca

SEQ ID NO: 317471 - DNA, 25 bp, Homo sapien
ggctgaagtggggtcctattttgga

SEQ ID NO: 317472 - DNA, 25 bp, Homo sapien
gtttccactgtcagccgggagacct

SEQ ID NO: 317473 - DNA, 25 bp, Homo sapien
tgtttccactgtcagccgggagacc

SEQ ID NO: 317474 - DNA, 25 bp, Homo sapien
tttccactgtcagccgggagacctc

SEQ ID NO: 317475 - DNA, 25 bp, Homo sapien
tgaaggacagggagggccgtcactg

SEQ ID NO: 317476 - DNA, 25 bp, Homo sapien
gaaggacagggagggccgtcactgg

SEQ ID NO: 317477 - DNA, 25 bp, Homo sapien
aaggacagggagggccgtcactggc

SEQ ID NO: 317478 - DNA, 25 bp, Homo sapien
ctgaaggacagggagggccgtcact

SEQ ID NO: 317479 - DNA, 25 bp, Homo sapien
tacgaagcttgcgaacagggtgctg

SEQ ID NO: 317480 - DNA, 25 bp, Homo sapien
gctgggtggacttgctttacgaagc

SEQ ID NO: 317481 - DNA, 25 bp, Homo sapien
taccggttcccatcttcgtggtggc

SEQ ID NO: 317482 - DNA, 25 bp, Homo sapien
aacagggtgctgtaccggttcccat

SEQ ID NO: 317483 - DNA, 25 bp, Homo sapien
agtggaaatgcacgtgctgctgggc

SEQ ID NO: 317484 - DNA, 25 bp, Homo sapien
gtcttctgtggggtcacagctgaag

SEQ ID NO: 317485 - DNA, 25 bp, Homo sapien
tggaaatgcacgtgctgctgggcat

SEQ ID NO: 317486 - DNA, 25 bp, Homo sapien
ctgtccccgggccgtgtcttctgtg

SEQ ID NO: 317487 - DNA, 25 bp, Homo sapien
cctttccagcccgaggacggcctgg

SEQ ID NO: 317488 - DNA, 25 bp, Homo sapien
ctgtctggtcataggcgggggcggc

SEQ ID NO: 317489 - DNA, 25 bp, Homo sapien
tccagcccgaggacggcctggcagt

SEQ ID NO: 317490 - DNA, 25 bp, Homo sapien
agggccacccaatggctggtcattc

SEQ ID NO: 317491 - DNA, 25 bp, Homo sapien
cagctcctttatcccctgttttgct

SEQ ID NO: 317492 - DNA, 25 bp, Homo sapien
tctgaaacagctcctttatcccctg

SEQ ID NO: 317493 - DNA, 25 bp, Homo sapien
ctttccttccggactctggggctga

SEQ ID NO: 317494 - DNA, 25 bp, Homo sapien
tgaggcctcccgggccctgctttcc

SEQ ID NO: 317495 - DNA, 25 bp, Homo sapien
ggtggacgtctccctgtgcttcccc

SEQ ID NO: 317496 - DNA, 25 bp, Homo sapien
gggtggacgtctccctgtgcttccc

SEQ ID NO: 317497 - DNA, 25 bp, Homo sapien
aggcaggccgtagggaaagagaacg

SEQ ID NO: 317498 - DNA, 25 bp, Homo sapien
tcccaggacgctgcagtcccggggt

SEQ ID NO: 317499 - DNA, 25 bp, Homo sapien
aagagaacgcctcggccggggagct

SEQ ID NO: 317500 - DNA, 25 bp, Homo sapien
gggcttcgggcacctggtcgctccc

SEQ ID NO: 317501 - DNA, 25 bp, Homo sapien
tattgaaggcacctgtaccaaggct

SEQ ID NO: 317502 - DNA, 25 bp, Homo sapien
acctgaggtttatgggcactgatcc

SEQ ID NO: 317503 - DNA, 25 bp, Homo sapien
tcgtcgtcttcacgtcaagtgggct

SEQ ID NO: 317504 - DNA, 25 bp, Homo sapien
gctcctgagggccaactgttgactg

SEQ ID NO: 317505 - DNA, 25 bp, Homo sapien
cgcagaagacggaaacttctccgga

SEQ ID NO: 317506 - DNA, 25 bp, Homo sapien
ccctgggatagatctcagatggaga

SEQ ID NO: 317507 - DNA, 25 bp, Homo sapien
acttctccggagatgatgccctggg

SEQ ID NO: 317508 - DNA, 25 bp, Homo sapien
ggagacaagaatcccacataattcc

SEQ ID NO: 317509 - DNA, 25 bp, Homo sapien
tgtgtgttgcttgcagggatatttg

SEQ ID NO: 317510 - DNA, 25 bp, Homo sapien
gtgttgcttgcagggatatttgcat

SEQ ID NO: 317511 - DNA, 25 bp, Homo sapien
ctgtgtgtgttgcttgcagggatat

SEQ ID NO: 317512 - DNA, 25 bp, Homo sapien
cctgtgtgtgttgcttgcagggata

SEQ ID NO: 317513 - DNA, 25 bp, Homo sapien
gtcgcttgcagggatctttgcatac

SEQ ID NO: 317514 - DNA, 25 bp, Homo sapien
tgcttgcaagaatctttgcatactg

SEQ ID NO: 317515 - DNA, 25 bp, Homo sapien
catcctgtgcgtgttgcttgcaaga

SEQ ID NO: 317516 - DNA, 25 bp, Homo sapien
gggaagacacgccaaggctctctga

SEQ ID NO: 317517 - DNA, 25 bp, Homo sapien
aagacacgccaaggctctctgagga

SEQ ID NO: 317518 - DNA, 25 bp, Homo sapien
tgctctgactccaggttggataaag

SEQ ID NO: 317519 - DNA, 25 bp, Homo sapien
caagtgtccagatgattgggcttcc

SEQ ID NO: 317520 - DNA, 25 bp, Homo sapien
ccaggttggataaagtgaggttgaa

SEQ ID NO: 317521 - DNA, 25 bp, Homo sapien
cccaagtgtccagatgattgggctt

SEQ ID NO: 317522 - DNA, 25 bp, Homo sapien
tcagaccttggagcctgctgcattt

SEQ ID NO: 317523 - DNA, 25 bp, Homo sapien
gagcagaaccataaccaagctcaga

SEQ ID NO: 317524 - DNA, 25 bp, Homo sapien
ttggtgttgactgaggactgccctc

SEQ ID NO: 317525 - DNA, 25 bp, Homo sapien
ctcagcctgcctggcgagtcaacac

SEQ ID NO: 317526 - DNA, 25 bp, Homo sapien
atgagttgacgagcagctgtgttga

SEQ ID NO: 317527 - DNA, 25 bp, Homo sapien
ggatgagttgacgagcagctgtgtt

SEQ ID NO: 317528 - DNA, 25 bp, Homo sapien
gatgagttgacgagcagctgtgttg

SEQ ID NO: 317529 - DNA, 25 bp, Homo sapien
tggatggggagagcggacacccgaa

SEQ ID NO: 317530 - DNA, 25 bp, Homo sapien
ggggagagcggacacccgaactcca

SEQ ID NO: 317531 - DNA, 25 bp, Homo sapien
atggggagagcggacacccgaactc

SEQ ID NO: 317532 - DNA, 25 bp, Homo sapien
ctggatggggagagcggacacccga

SEQ ID NO: 317533 - DNA, 25 bp, Homo sapien
tcccataaggaaaccgcctgggtgc

SEQ ID NO: 317534 - DNA, 25 bp, Homo sapien
agctccatctgggtcccataaggaa

SEQ ID NO: 317535 - DNA, 25 bp, Homo sapien
tgctcggggcacctgttaccttcct

SEQ ID NO: 317536 - DNA, 25 bp, Homo sapien
tgttaccttcctttcgtccctgcag

SEQ ID NO: 317537 - DNA, 25 bp, Homo sapien
agacaggtcccgcaaacaggtcacc

SEQ ID NO: 317538 - DNA, 25 bp, Homo sapien
gacaggtcccgcaaacaggtcacct

SEQ ID NO: 317539 - DNA, 25 bp, Homo sapien
gagacaggtcccgcaaacaggtcac

SEQ ID NO: 317540 - DNA, 25 bp, Homo sapien
tgagacaggtcccgcaaacaggtca

SEQ ID NO: 317541 - DNA, 25 bp, Homo sapien
gggatcgtgcacacggcaggataaa

SEQ ID NO: 317542 - DNA, 25 bp, Homo sapien
gggccaggtgagttcttgaagcttc

SEQ ID NO: 317543 - DNA, 25 bp, Homo sapien
aggataaagcctgagcaggcatccc

SEQ ID NO: 317544 - DNA, 25 bp, Homo sapien
cgaggagttgctcgggaaacacaca

SEQ ID NO: 317545 - DNA, 25 bp, Homo sapien
cagacaacggctgccaagatgtgtc

SEQ ID NO: 317546 - DNA, 25 bp, Homo sapien
aagtgagcatatgcattgccagaca

SEQ ID NO: 317547 - DNA, 25 bp, Homo sapien
taacagattcgatgaagtgagcata

SEQ ID NO: 317548 - DNA, 25 bp, Homo sapien
aagatttaacagattcgatgaagtg

SEQ ID NO: 317549 - DNA, 25 bp, Homo sapien
ctgcagtgccggtcccaagcttggg

SEQ ID NO: 317550 - DNA, 25 bp, Homo sapien
tccttcaggctatgcaggcctgttc

SEQ ID NO: 317551 - DNA, 25 bp, Homo sapien
gaaagaaacgttgagtctctgggac

SEQ ID NO: 317552 - DNA, 25 bp, Homo sapien
atccctaggtggatctgccccactg

SEQ ID NO: 317553 - DNA, 25 bp, Homo sapien
gagggaatcggctcgaactgcgatc

SEQ ID NO: 317554 - DNA, 25 bp, Homo sapien
acgaaaacaccgtggctcctctagg

SEQ ID NO: 317555 - DNA, 25 bp, Homo sapien
cattattcacaggaggcttatggcc

SEQ ID NO: 317556 - DNA, 25 bp, Homo sapien
tatgcaatgctaacctgtggcgtgg

SEQ ID NO: 317557 - DNA, 25 bp, Homo sapien
catgcatggccacctctggtagtcc

SEQ ID NO: 317558 - DNA, 25 bp, Homo sapien
ttgggggccctctggcagtcccact

SEQ ID NO: 317559 - DNA, 25 bp, Homo sapien
ggtgcaagctctccatcgatgctcc

SEQ ID NO: 317560 - DNA, 25 bp, Homo sapien
cagtcccactcacggggtgcaagct

SEQ ID NO: 317561 - DNA, 25 bp, Homo sapien
tcccactcgaattcaaagaccaaat

SEQ ID NO: 317562 - DNA, 25 bp, Homo sapien
gtggggctcccactcgaattcaaag

SEQ ID NO: 317563 - DNA, 25 bp, Homo sapien
gggctcccactcgaattcaaagacc

SEQ ID NO: 317564 - DNA, 25 bp, Homo sapien
cactcgaattcaaagaccaaatttc

SEQ ID NO: 317565 - DNA, 25 bp, Homo sapien
tcaaaaaagactggcgaccccaggc

SEQ ID NO: 317566 - DNA, 25 bp, Homo sapien
gaagcttctgacattccgaggacac

SEQ ID NO: 317567 - DNA, 25 bp, Homo sapien
cagcctgcaggaatgacggcacagt

SEQ ID NO: 317568 - DNA, 25 bp, Homo sapien
gaacagaaattcctcgcgctttacg

SEQ ID NO: 317569 - DNA, 25 bp, Homo sapien
tgacgggctgtgcttactgctctgg

SEQ ID NO: 317570 - DNA, 25 bp, Homo sapien
gagctgggttctcacagtcagcccc

SEQ ID NO: 317571 - DNA, 25 bp, Homo sapien
cggtctcaggaagcgcagtgcgtct

SEQ ID NO: 317572 - DNA, 25 bp, Homo sapien
ccaacatgcccgctgtgatgagcag

SEQ ID NO: 317573 - DNA, 25 bp, Homo sapien
tgcggcccctttcaacaccctgaag

SEQ ID NO: 317574 - DNA, 25 bp, Homo sapien
tcagccgtcagtcatcccagcgcag

SEQ ID NO: 317575 - DNA, 25 bp, Homo sapien
ccgcgcccccgctgagagctgtgat

SEQ ID NO: 317576 - DNA, 25 bp, Homo sapien
agcagtcatcatccccggctttcaa

SEQ ID NO: 317577 - DNA, 25 bp, Homo sapien
tgccgtgaaggctgatgcccgcagc

SEQ ID NO: 317578 - DNA, 25 bp, Homo sapien
aggcccacagactggtccaaggctc

SEQ ID NO: 317579 - DNA, 25 bp, Homo sapien
gggaagcctcctgtgaacgctgatg

SEQ ID NO: 317580 - DNA, 25 bp, Homo sapien
ggcactagggaagcctcccgtgaac

SEQ ID NO: 317581 - DNA, 25 bp, Homo sapien
gttgagtcctgctactaacactgga

SEQ ID NO: 317582 - DNA, 25 bp, Homo sapien
gctatggctgtgcatcctggctgca

SEQ ID NO: 317583 - DNA, 25 bp, Homo sapien
gaatagaacgtaatccagccaggct

SEQ ID NO: 317584 - DNA, 25 bp, Homo sapien
tatgagccaggcgatctagggttga

SEQ ID NO: 317585 - DNA, 25 bp, Homo sapien
ttgctgagctcccaactggtgacgc

SEQ ID NO: 317586 - DNA, 25 bp, Homo sapien
gcagacaaaccttggccttgtttgt

SEQ ID NO: 317587 - DNA, 25 bp, Homo sapien
caactggtgacgctcaccaggagga

SEQ ID NO: 317588 - DNA, 25 bp, Homo sapien
ggatgtccgtgtggcaagaaggatg

SEQ ID NO: 317589 - DNA, 25 bp, Homo sapien
gaagaaacacaggctattggctcag

SEQ ID NO: 317590 - DNA, 25 bp, Homo sapien
tgaagaagaaacacaggctattggc

SEQ ID NO: 317591 - DNA, 25 bp, Homo sapien
gaagaagaaacacaggctattggct

SEQ ID NO: 317592 - DNA, 25 bp, Homo sapien
cttgaagaagaaacacaggctattg

SEQ ID NO: 317593 - DNA, 25 bp, Homo sapien
tgggatctgctgagtcctacgaggc

SEQ ID NO: 317594 - DNA, 25 bp, Homo sapien
catggcccatgcagaactgcttctc

SEQ ID NO: 317595 - DNA, 25 bp, Homo sapien
tgcagtgggaccgagtgggaaccat

SEQ ID NO: 317596 - DNA, 25 bp, Homo sapien
ccgtggcaggaacgccgtgggatct

SEQ ID NO: 317597 - DNA, 25 bp, Homo sapien
tcccgcttccttggcaatttccatg

SEQ ID NO: 317598 - DNA, 25 bp, Homo sapien
tgatcccgcttccttggcaatttcc

SEQ ID NO: 317599 - DNA, 25 bp, Homo sapien
gatcccgcttccttggcaatttcca

SEQ ID NO: 317600 - DNA, 25 bp, Homo sapien
ttctgatcccgcttccttggcaatt

SEQ ID NO: 317601 - DNA, 25 bp, Homo sapien
agctctgcagacaggtggtgactcg

SEQ ID NO: 317602 - DNA, 25 bp, Homo sapien
ctctgcagacaggtggtgactcggg

SEQ ID NO: 317603 - DNA, 25 bp, Homo sapien
gagtctcacaccctggtgtgggctg

SEQ ID NO: 317604 - DNA, 25 bp, Homo sapien
ccaggagtctcacaccctggtgtgg

SEQ ID NO: 317605 - DNA, 25 bp, Homo sapien
gaggcaggggtacgattaatcaggg

SEQ ID NO: 317606 - DNA, 25 bp, Homo sapien
gggtacgattaatcagggcaggata

SEQ ID NO: 317607 - DNA, 25 bp, Homo sapien
ggcaggggtacgattaatcagggca

SEQ ID NO: 317608 - DNA, 25 bp, Homo sapien
caggggtacgattaatcagggcagg

SEQ ID NO: 317609 - DNA, 25 bp, Homo sapien
tcaactccccggcatttctcatgat

SEQ ID NO: 317610 - DNA, 25 bp, Homo sapien
ggggcagtactggtgaccttcccca

SEQ ID NO: 317611 - DNA, 25 bp, Homo sapien
tctgcttcccggcagggagagggcg

SEQ ID NO: 317612 - DNA, 25 bp, Homo sapien
cggatggacggccgctgcctcagct

SEQ ID NO: 317613 - DNA, 25 bp, Homo sapien
gacttgagtccatgtgggcgctgca

SEQ ID NO: 317614 - DNA, 25 bp, Homo sapien
cagaccgagggttttgtgagaaatc

SEQ ID NO: 317615 - DNA, 25 bp, Homo sapien
tctgtattcctgacatgacaggcag

SEQ ID NO: 317616 - DNA, 25 bp, Homo sapien
taaggtgcgtatacatgactgtgct

SEQ ID NO: 317617 - DNA, 25 bp, Homo sapien
gtctttttgttgacccataagatgc

SEQ ID NO: 317618 - DNA, 25 bp, Homo sapien
gttgacccataagatgctgttattt

SEQ ID NO: 317619 - DNA, 25 bp, Homo sapien
gcggaaggaaaacccatcaattgtc

SEQ ID NO: 317620 - DNA, 25 bp, Homo sapien
gctgttatttagcttaatgcggaag

SEQ ID NO: 317621 - DNA, 25 bp, Homo sapien
ttaattgtagccaaaaggcacagac

SEQ ID NO: 317622 - DNA, 25 bp, Homo sapien
agctgtgcccgagcaggtggatttg

SEQ ID NO: 317623 - DNA, 25 bp, Homo sapien
gggatcctcgtgcagctctgggctc

SEQ ID NO: 317624 - DNA, 25 bp, Homo sapien
gacgtgaggaatgggccacgctgct

SEQ ID NO: 317625 - DNA, 25 bp, Homo sapien
tgggctctggcgtcgtgactgggac

SEQ ID NO: 317626 - DNA, 25 bp, Homo sapien
tactctcaccccaggcgctggaaag

SEQ ID NO: 317627 - DNA, 25 bp, Homo sapien
gaggtgcagcagtaggtaatcttta

SEQ ID NO: 317628 - DNA, 25 bp, Homo sapien
gcgtacgagaagaccgtgtcgctac

SEQ ID NO: 317629 - DNA, 25 bp, Homo sapien
aaacaccgaggtgcagcagtaggta

SEQ ID NO: 317630 - DNA, 25 bp, Homo sapien
agaggtggacggatgggctctcttc

SEQ ID NO: 317631 - DNA, 25 bp, Homo sapien
ggtggacggatgggctctcttctgt

SEQ ID NO: 317632 - DNA, 25 bp, Homo sapien
ctgggcgagaggtggacggatgggc

SEQ ID NO: 317633 - DNA, 25 bp, Homo sapien
aggtggacggatgggctctcttctg

SEQ ID NO: 317634 - DNA, 25 bp, Homo sapien
gctgggcgagaggtggacgggtggg

SEQ ID NO: 317635 - DNA, 25 bp, Homo sapien
gtggacgggtgggcacacgtcggtg

SEQ ID NO: 317636 - DNA, 25 bp, Homo sapien
tggacgggtgggcacacgtcggtga

SEQ ID NO: 317637 - DNA, 25 bp, Homo sapien
tgtgaattctgagctgcagcctccc

SEQ ID NO: 317638 - DNA, 25 bp, Homo sapien
tgtcactgagaactgcgcgtggacg

SEQ ID NO: 317639 - DNA, 25 bp, Homo sapien
gatgtctgtttaatgcaaccccgtg

SEQ ID NO: 317640 - DNA, 25 bp, Homo sapien
tgcttcaccgggaaacttcgacgac

SEQ ID NO: 317641 - DNA, 25 bp, Homo sapien
tgtcacagagcaaattggcacagcc

SEQ ID NO: 317642 - DNA, 25 bp, Homo sapien
cgtccactgccgtgcttaatgagaa

SEQ ID NO: 317643 - DNA, 25 bp, Homo sapien
gactgacagtcctggcttaaagagg

SEQ ID NO: 317644 - DNA, 25 bp, Homo sapien
aaagcttcttcagagcgtccactgc

SEQ ID NO: 317645 - DNA, 25 bp, Homo sapien
gatataacagctcctcatagaaagg

SEQ ID NO: 317646 - DNA, 25 bp, Homo sapien
gcaggtttccaaagcccaacagcct

SEQ ID NO: 317647 - DNA, 25 bp, Homo sapien
tttagtctccaattcaaccgcacac

SEQ ID NO: 317648 - DNA, 25 bp, Homo sapien
aaatcctcgttgtatttattggaga

SEQ ID NO: 317649 - DNA, 25 bp, Homo sapien
gccacgttgccttcactggttcggg

SEQ ID NO: 317650 - DNA, 25 bp, Homo sapien
tgaggcgaggctactgaccacagct

SEQ ID NO: 317651 - DNA, 25 bp, Homo sapien
ttgtgaatttgctggctgcagaagc

SEQ ID NO: 317652 - DNA, 25 bp, Homo sapien
cagtcaggaagcgtggcacactgga

SEQ ID NO: 317653 - DNA, 25 bp, Homo sapien
ggattctgtcctcacactgaggcat

SEQ ID NO: 317654 - DNA, 25 bp, Homo sapien
caggattctgtcctcacactgaggc

SEQ ID NO: 317655 - DNA, 25 bp, Homo sapien
ctgtccaggattctgtcctcacact

SEQ ID NO: 317656 - DNA, 25 bp, Homo sapien
tccaggattctgtcctcacactgag

SEQ ID NO: 317657 - DNA, 25 bp, Homo sapien
gtttgcaggcgagcacgtgcacaca

SEQ ID NO: 317658 - DNA, 25 bp, Homo sapien
gtcaccaagaccaatgatgaccgcc

SEQ ID NO: 317659 - DNA, 25 bp, Homo sapien
ttcctcggcgtcacctgcatttcct

SEQ ID NO: 317660 - DNA, 25 bp, Homo sapien
tgtcctgggcgcctttcctcggcgt

SEQ ID NO: 317661 - DNA, 25 bp, Homo sapien
ctgccacagccgaagaaacattggt

SEQ ID NO: 317662 - DNA, 25 bp, Homo sapien
cgaagaaacattggtgaacacgtca

SEQ ID NO: 317663 - DNA, 25 bp, Homo sapien
cattggtgaacacgtcacgagtccc

SEQ ID NO: 317664 - DNA, 25 bp, Homo sapien
gtgaacacgtcacgagtccctgtcc

SEQ ID NO: 317665 - DNA, 25 bp, Homo sapien
gcttacggtgtcattgcaggataag

SEQ ID NO: 317666 - DNA, 25 bp, Homo sapien
agcttacggtgtcattgcaggataa

SEQ ID NO: 317667 - DNA, 25 bp, Homo sapien
ctgtccctgaatctcctctagaaaa

SEQ ID NO: 317668 - DNA, 25 bp, Homo sapien
tctttgctggagttgattctgccat

SEQ ID NO: 317669 - DNA, 25 bp, Homo sapien
gtccctgaatctcctctagaaaatt

SEQ ID NO: 317670 - DNA, 25 bp, Homo sapien
aaaattctttgctggagttgattct

SEQ ID NO: 317671 - DNA, 25 bp, Homo sapien
cccgcacttacagggaggaggtagc

SEQ ID NO: 317672 - DNA, 25 bp, Homo sapien
agataaattcttgaaagagtgcccc

SEQ ID NO: 317673 - DNA, 25 bp, Homo sapien
ttgagggagaagtcagacagagttc

SEQ ID NO: 317674 - DNA, 25 bp, Homo sapien
tgtgaattattagcgggctcccgca

SEQ ID NO: 317675 - DNA, 25 bp, Homo sapien
cccagcgagtgggaccaatggttgt

SEQ ID NO: 317676 - DNA, 25 bp, Homo sapien
taaactgtggaagtgcggccgcagc

SEQ ID NO: 317677 - DNA, 25 bp, Homo sapien
caatggttgtttcatccacggctga

SEQ ID NO: 317678 - DNA, 25 bp, Homo sapien
gtaaaccctcatgggataaacagtg

SEQ ID NO: 317679 - DNA, 25 bp, Homo sapien
ttgtttgaaggttgataaacttgca

SEQ ID NO: 317680 - DNA, 25 bp, Homo sapien
ctgttgtttgaaggttgataaactt

SEQ ID NO: 317681 - DNA, 25 bp, Homo sapien
gttgtttgaaggttgataaacttgc

SEQ ID NO: 317682 - DNA, 25 bp, Homo sapien
tgtttgaaggttgataaacttgcac

SEQ ID NO: 317683 - DNA, 25 bp, Homo sapien
ttcttggagaatcgtctgtgagcct

SEQ ID NO: 317684 - DNA, 25 bp, Homo sapien
tgaacggtcaccaccgatgccgcgg

SEQ ID NO: 317685 - DNA, 25 bp, Homo sapien
gagaatcgtctgtgagcctgcagag

SEQ ID NO: 317686 - DNA, 25 bp, Homo sapien
gccgcggtcaactgccaggcaattt

SEQ ID NO: 317687 - DNA, 25 bp, Homo sapien
ccgtggcagccggggttgaagcctg

SEQ ID NO: 317688 - DNA, 25 bp, Homo sapien
gtggcagccggggttgaagcctggg

SEQ ID NO: 317689 - DNA, 25 bp, Homo sapien
gccgtggcagccggggttgaagcct

SEQ ID NO: 317690 - DNA, 25 bp, Homo sapien
gggccgtggcagccggggttgaagc

SEQ ID NO: 317691 - DNA, 25 bp, Homo sapien
gaattgggagaagaccgggctgctc

SEQ ID NO: 317692 - DNA, 25 bp, Homo sapien
ttagggaagtaccagaagaagcgca

SEQ ID NO: 317693 - DNA, 25 bp, Homo sapien
gaagcgcaagatatagggcggacct

SEQ ID NO: 317694 - DNA, 25 bp, Homo sapien
tatcatagattcttccgcgatctgg

SEQ ID NO: 317695 - DNA, 25 bp, Homo sapien
tcgccgttcacatgggtccaggcgg

SEQ ID NO: 317696 - DNA, 25 bp, Homo sapien
gtccaggcggtctgtgggttgggac

SEQ ID NO: 317697 - DNA, 25 bp, Homo sapien
ttgaggttttagttgcgctatgggc

SEQ ID NO: 317698 - DNA, 25 bp, Homo sapien
gacagatttgctcgaggtctccgcg

SEQ ID NO: 317699 - DNA, 25 bp, Homo sapien
atcctgccggcagcaaacactgcat

SEQ ID NO: 317700 - DNA, 25 bp, Homo sapien
gtgagctcccatgcgctgccttctt

SEQ ID NO: 317701 - DNA, 25 bp, Homo sapien
tgggctcatcctgccggcagcaaac

SEQ ID NO: 317702 - DNA, 25 bp, Homo sapien
tcaggacaccggtcctgggccttgt

SEQ ID NO: 317703 - DNA, 25 bp, Homo sapien
gattctctcggttaagtaattgatg

SEQ ID NO: 317704 - DNA, 25 bp, Homo sapien
cattttagcagtaattgagtgaacc

SEQ ID NO: 317705 - DNA, 25 bp, Homo sapien
gtgaacccggcaatttgtactttga

SEQ ID NO: 317706 - DNA, 25 bp, Homo sapien
taagtaattgatgatcaccagccat

SEQ ID NO: 317707 - DNA, 25 bp, Homo sapien
ggtttttgaatccatttgctgggtg

SEQ ID NO: 317708 - DNA, 25 bp, Homo sapien
aaacttcaactaaacagcggaatgg

SEQ ID NO: 317709 - DNA, 25 bp, Homo sapien
gctccaagctaagataaacttcaac

SEQ ID NO: 317710 - DNA, 25 bp, Homo sapien
tcagctggaaaatcagctccaagct

SEQ ID NO: 317711 - DNA, 25 bp, Homo sapien
ctggcagctgcttccgaacagggtg

SEQ ID NO: 317712 - DNA, 25 bp, Homo sapien
aagtgtgagtcctgaactggcagct

SEQ ID NO: 317713 - DNA, 25 bp, Homo sapien
cagctcccctgagtgtcatgatgtc

SEQ ID NO: 317714 - DNA, 25 bp, Homo sapien
ctggcgtgtggagaggaagtgtgag

SEQ ID NO: 317715 - DNA, 25 bp, Homo sapien
tataatagatgttcggtaagtggca

SEQ ID NO: 317716 - DNA, 25 bp, Homo sapien
tattaaaatgcctatgtcttggcat

SEQ ID NO: 317717 - DNA, 25 bp, Homo sapien
tgaaacatccaagggtcttgaagaa

SEQ ID NO: 317718 - DNA, 25 bp, Homo sapien
gaacaggaccatctatactggaact

SEQ ID NO: 317719 - DNA, 25 bp, Homo sapien
ccttcagggtcgtcctgtgccagtg

SEQ ID NO: 317720 - DNA, 25 bp, Homo sapien
cagttttggtgaactgcgcttcaca

SEQ ID NO: 317721 - DNA, 25 bp, Homo sapien
tgaactgcgcttcacactgtggctg

SEQ ID NO: 317722 - DNA, 25 bp, Homo sapien
tggtgtttgatgacaccgggatgca

SEQ ID NO: 317723 - DNA, 25 bp, Homo sapien
gatgcatggcagtttccagttttgg

SEQ ID NO: 317724 - DNA, 25 bp, Homo sapien
tatccattcggatgacgtctcctgc

SEQ ID NO: 317725 - DNA, 25 bp, Homo sapien
taagatgacacgcagtgcatgacag

SEQ ID NO: 317726 - DNA, 25 bp, Homo sapien
tgcttgcacgctgtggcatggctcg

SEQ ID NO: 317727 - DNA, 25 bp, Homo sapien
tgaaactctgggaggatgatcccca

SEQ ID NO: 317728 - DNA, 25 bp, Homo sapien
ctggtggcatgttttcattaagtat

SEQ ID NO: 317729 - DNA, 25 bp, Homo sapien
ggtggcatgttttcattaagtattt

SEQ ID NO: 317730 - DNA, 25 bp, Homo sapien
ttaagtattttatgagcctgcgttg

SEQ ID NO: 317731 - DNA, 25 bp, Homo sapien
tattttatgagcctgcgttggatcc

SEQ ID NO: 317732 - DNA, 25 bp, Homo sapien
cagtgcacgcagttggcagccggca

SEQ ID NO: 317733 - DNA, 25 bp, Homo sapien
tcatcggccgcttccagctgtgaat

SEQ ID NO: 317734 - DNA, 25 bp, Homo sapien
ttacgggtcggaaaccagtgcacgc

SEQ ID NO: 317735 - DNA, 25 bp, Homo sapien
tgaatcttctgggctgccggtcaga

SEQ ID NO: 317736 - DNA, 25 bp, Homo sapien
ctaatgcaagctccttcgcagccat

SEQ ID NO: 317737 - DNA, 25 bp, Homo sapien
cctgctgaccccctaatgcaagctc

SEQ ID NO: 317738 - DNA, 25 bp, Homo sapien
gatattctgtcagtattacagccag

SEQ ID NO: 317739 - DNA, 25 bp, Homo sapien
ctgtcagtattacagccagtgtggc

SEQ ID NO: 317740 - DNA, 25 bp, Homo sapien
ccagggcccgtgtcgtgcaccttct

SEQ ID NO: 317741 - DNA, 25 bp, Homo sapien
accacattcccctctgtggtcagat

SEQ ID NO: 317742 - DNA, 25 bp, Homo sapien
gggcaccacgtgtgcgcagcagagc

SEQ ID NO: 317743 - DNA, 25 bp, Homo sapien
tcccctctgtggtcagatatcagct

SEQ ID NO: 317744 - DNA, 25 bp, Homo sapien
tataaaacaccagtttgtcaacaaa

SEQ ID NO: 317745 - DNA, 25 bp, Homo sapien
cagccggatgatgcctccgtataaa

SEQ ID NO: 317746 - DNA, 25 bp, Homo sapien
agctccattccagccggatgatgcc

SEQ ID NO: 317747 - DNA, 25 bp, Homo sapien
tgcctccgtataaaacaccagtttg

SEQ ID NO: 317748 - DNA, 25 bp, Homo sapien
cagataacagaatcttaactgcaaa

SEQ ID NO: 317749 - DNA, 25 bp, Homo sapien
ccagataacagaatcttaactgcaa

SEQ ID NO: 317750 - DNA, 25 bp, Homo sapien
gccagataacagaatcttaactgca

SEQ ID NO: 317751 - DNA, 25 bp, Homo sapien
ccagaggcgctggttttcctttgta

SEQ ID NO: 317752 - DNA, 25 bp, Homo sapien
aggcgctggttttcctttgtagtct

SEQ ID NO: 317753 - DNA, 25 bp, Homo sapien
cagaggcgctggttttcctttgtag

SEQ ID NO: 317754 - DNA, 25 bp, Homo sapien
gaggcgctggttttcctttgtagtc

SEQ ID NO: 317755 - DNA, 25 bp, Homo sapien
catcaaaggagggtatggcatttca

SEQ ID NO: 317756 - DNA, 25 bp, Homo sapien
aggagggtatggcatttcagctgct

SEQ ID NO: 317757 - DNA, 25 bp, Homo sapien
gatcccaccccaggcatcaaaggag

SEQ ID NO: 317758 - DNA, 25 bp, Homo sapien
ccaggcatcaaaggagggtatggca

SEQ ID NO: 317759 - DNA, 25 bp, Homo sapien
gctgagcagcaggagatctgtaggc

SEQ ID NO: 317760 - DNA, 25 bp, Homo sapien
ctgagcagcaggagatctgtaggcc

SEQ ID NO: 317761 - DNA, 25 bp, Homo sapien
ccccccgactcacctgctcaagtct

SEQ ID NO: 317762 - DNA, 25 bp, Homo sapien
cgactcacctgctcaagtctcacag

SEQ ID NO: 317763 - DNA, 25 bp, Homo sapien
ccccgactcacctgctcaagtctca

SEQ ID NO: 317764 - DNA, 25 bp, Homo sapien
acccccccgactcacctgctcaagt

SEQ ID NO: 317765 - DNA, 25 bp, Homo sapien
aactttcttctggtaggagacgcag

SEQ ID NO: 317766 - DNA, 25 bp, Homo sapien
tctctaacagctcaacaatcacagg

SEQ ID NO: 317767 - DNA, 25 bp, Homo sapien
ttgactggtcaagaggctgattgca

SEQ ID NO: 317768 - DNA, 25 bp, Homo sapien
cagctcatgaaccatcagacagtga

SEQ ID NO: 317769 - DNA, 25 bp, Homo sapien
atgtcgccaagcatgggctcctcca

SEQ ID NO: 317770 - DNA, 25 bp, Homo sapien
aggtgcatgggcacagccgccttcc

SEQ ID NO: 317771 - DNA, 25 bp, Homo sapien
ttccttgtggccctttatttcatta

SEQ ID NO: 317772 - DNA, 25 bp, Homo sapien
ccaatgtcgccaagcatgggctcct

SEQ ID NO: 317773 - DNA, 25 bp, Homo sapien
ctagggacggccgtgctgggctgac

SEQ ID NO: 317774 - DNA, 25 bp, Homo sapien
acggccgtgctgggctgacacagac

SEQ ID NO: 317775 - DNA, 25 bp, Homo sapien
gggacggccgtgctgggctgacaca

SEQ ID NO: 317776 - DNA, 25 bp, Homo sapien
tagggacggccgtgctgggctgaca

SEQ ID NO: 317777 - DNA, 25 bp, Homo sapien
ttcagtctgtacacccacggagagg

SEQ ID NO: 317778 - DNA, 25 bp, Homo sapien
tggctggcaggctcgatacatcttg

SEQ ID NO: 317779 - DNA, 25 bp, Homo sapien
tcttttggaggcacgattcagtctg

SEQ ID NO: 317780 - DNA, 25 bp, Homo sapien
gaggagaccctacttccaagtcagg

SEQ ID NO: 317781 - DNA, 25 bp, Homo sapien
gaaaggcacagagatggggacacgc

SEQ ID NO: 317782 - DNA, 25 bp, Homo sapien
agaaaggcacagagatggggacacg

SEQ ID NO: 317783 - DNA, 25 bp, Homo sapien
ctgggtgggggagaaaggcacagag

SEQ ID NO: 317784 - DNA, 25 bp, Homo sapien
tgggggagaaaggcacagagatggg

SEQ ID NO: 317785 - DNA, 25 bp, Homo sapien
tcagctggactctgtcactggcaac

SEQ ID NO: 317786 - DNA, 25 bp, Homo sapien
gctggactctgtcactggcaaccat

SEQ ID NO: 317787 - DNA, 25 bp, Homo sapien
tggtgtcagctggactctgtcactg

SEQ ID NO: 317788 - DNA, 25 bp, Homo sapien
tgtctcttcaaggctgaagctggtg

SEQ ID NO: 317789 - DNA, 25 bp, Homo sapien
cttcacagcagggcgagggaccctg

SEQ ID NO: 317790 - DNA, 25 bp, Homo sapien
cacttcacagcagggcgagggaccc

SEQ ID NO: 317791 - DNA, 25 bp, Homo sapien
acttcacagcagggcgagggaccct

SEQ ID NO: 317792 - DNA, 25 bp, Homo sapien
ctgtgttagagtcggtgacagatgg

SEQ ID NO: 317793 - DNA, 25 bp, Homo sapien
cctccctggctacctgcagggagat

SEQ ID NO: 317794 - DNA, 25 bp, Homo sapien
tccctggctacctgcagggagatgc

SEQ ID NO: 317795 - DNA, 25 bp, Homo sapien
cccttgtccactctcaagggtctgc

SEQ ID NO: 317796 - DNA, 25 bp, Homo sapien
aagccctccctggctacctgcaggg

SEQ ID NO: 317797 - DNA, 25 bp, Homo sapien
gagacggcacgtgcaggagccctcc

SEQ ID NO: 317798 - DNA, 25 bp, Homo sapien
tcaataccggaccacatgccttagt

SEQ ID NO: 317799 - DNA, 25 bp, Homo sapien
ggtgtctcgggctcactgtgatcaa

SEQ ID NO: 317800 - DNA, 25 bp, Homo sapien
gatgcttccatggtcagcgtgccta

SEQ ID NO: 317801 - DNA, 25 bp, Homo sapien
gcatctgtatcagttgaagggctta

SEQ ID NO: 317802 - DNA, 25 bp, Homo sapien
agacaactctcacacctaaaataat

SEQ ID NO: 317803 - DNA, 25 bp, Homo sapien
gaagggcttaagagaagtgggcagt

SEQ ID NO: 317804 - DNA, 25 bp, Homo sapien
gcaaagcgtgttaaagggccagcat

SEQ ID NO: 317805 - DNA, 25 bp, Homo sapien
gtgcaccttagggtcagacacagag

SEQ ID NO: 317806 - DNA, 25 bp, Homo sapien
cacgtgcaccttagggtcagacaca

SEQ ID NO: 317807 - DNA, 25 bp, Homo sapien
ggccacgtgcaccttagggtcagac

SEQ ID NO: 317808 - DNA, 25 bp, Homo sapien
caccttagggtcagacacagagcca

SEQ ID NO: 317809 - DNA, 25 bp, Homo sapien
acttaacaaaagagggaggcgcagg

SEQ ID NO: 317810 - DNA, 25 bp, Homo sapien
cagctccagagtcatcagcgtgagg

SEQ ID NO: 317811 - DNA, 25 bp, Homo sapien
gtgacggcggcaaaacagctccaga

SEQ ID NO: 317812 - DNA, 25 bp, Homo sapien
ggcgcagggggtgacggcggcaaaa

SEQ ID NO: 317813 - DNA, 25 bp, Homo sapien
gattgagcctgcaaagcttttgccc

SEQ ID NO: 317814 - DNA, 25 bp, Homo sapien
tgcagctccattgatgccgcgaacg

SEQ ID NO: 317815 - DNA, 25 bp, Homo sapien
gcactgggggccgtcatcaccattt

SEQ ID NO: 317816 - DNA, 25 bp, Homo sapien
gaacgcccagcgccgggttgatgtt

SEQ ID NO: 317817 - DNA, 25 bp, Homo sapien
cactccacacccccagggccgccat

SEQ ID NO: 317818 - DNA, 25 bp, Homo sapien
aggcagcggcctgctctccactcca

SEQ ID NO: 317819 - DNA, 25 bp, Homo sapien
tctccactccacacccccagggccg

SEQ ID NO: 317820 - DNA, 25 bp, Homo sapien
cgcccggggccctcgggaggcagcg

SEQ ID NO: 317821 - DNA, 25 bp, Homo sapien
ccgccccggcgtgaacagcaggtcc

SEQ ID NO: 317822 - DNA, 25 bp, Homo sapien
gcccgccccggcgtgaacagcaggt

SEQ ID NO: 317823 - DNA, 25 bp, Homo sapien
gctcaggcggacacagccagcggcc

SEQ ID NO: 317824 - DNA, 25 bp, Homo sapien
tcaggcggacacagccagcggcccg

SEQ ID NO: 317825 - DNA, 25 bp, Homo sapien
aggacgggtggggacacagggcagc

SEQ ID NO: 317826 - DNA, 25 bp, Homo sapien
ggcagcctaggggtcaggacgggtg

SEQ ID NO: 317827 - DNA, 25 bp, Homo sapien
ctggcagcctaggggtcaggacggg

SEQ ID NO: 317828 - DNA, 25 bp, Homo sapien
gggacacagggcagcagacagtggg

SEQ ID NO: 317829 - DNA, 25 bp, Homo sapien
gccacaatttgagccaaaagaacct

SEQ ID NO: 317830 - DNA, 25 bp, Homo sapien
caacatgccacaatttgagccaaaa

SEQ ID NO: 317831 - DNA, 25 bp, Homo sapien
tgacgggtctccaacatgccacaat

SEQ ID NO: 317832 - DNA, 25 bp, Homo sapien
gttgatgacgggtctccaacatgcc

SEQ ID NO: 317833 - DNA, 25 bp, Homo sapien
ggttccatgattgaaacctgctttc

SEQ ID NO: 317834 - DNA, 25 bp, Homo sapien
tcttgctaacgtgaaggtgactgtg

SEQ ID NO: 317835 - DNA, 25 bp, Homo sapien
ggtgaccgagctccacgttcacact

SEQ ID NO: 317836 - DNA, 25 bp, Homo sapien
gtgactgtgtggtgaccgagctcca

SEQ ID NO: 317837 - DNA, 25 bp, Homo sapien
gggtacatgagcatcaaatgagaag

SEQ ID NO: 317838 - DNA, 25 bp, Homo sapien
ggggtacatgagcatcaaatgagaa

SEQ ID NO: 317839 - DNA, 25 bp, Homo sapien
tggggtacatgagcatcaaatgaga

SEQ ID NO: 317840 - DNA, 25 bp, Homo sapien
gggtacatgagcatcaaatgagaag

SEQ ID NO: 317841 - DNA, 25 bp, Homo sapien
ggggtacatgagcatcaaatgagaa

SEQ ID NO: 317842 - DNA, 25 bp, Homo sapien
tggggtacatgagcatcaaatgaga

SEQ ID NO: 317843 - DNA, 25 bp, Homo sapien
gactctgccgacagaagggagtgcc

SEQ ID NO: 317844 - DNA, 25 bp, Homo sapien
ccaatgcagaggtgcgctgacagcg

SEQ ID NO: 317845 - DNA, 25 bp, Homo sapien
gacagaagggagtgcccaatgcaga

SEQ ID NO: 317846 - DNA, 25 bp, Homo sapien
acagagcacgactctgccgacagaa

SEQ ID NO: 317847 - DNA, 25 bp, Homo sapien
agtttgcataggttgcagggatatc

SEQ ID NO: 317848 - DNA, 25 bp, Homo sapien
agggctggaactcagtttgcatagg

SEQ ID NO: 317849 - DNA, 25 bp, Homo sapien
cagggccacggagggtttggcagca

SEQ ID NO: 317850 - DNA, 25 bp, Homo sapien
ctggaactcagtttgcataggttgc

SEQ ID NO: 317851 - DNA, 25 bp, Homo sapien
agcggaccctgtagtgggtgggaga

SEQ ID NO: 317852 - DNA, 25 bp, Homo sapien
gcggaccctgtagtgggtgggagaa

SEQ ID NO: 317853 - DNA, 25 bp, Homo sapien
cggggagcggaccctgtagtgggtg

SEQ ID NO: 317854 - DNA, 25 bp, Homo sapien
ggagcggaccctgtagtgggtggga

SEQ ID NO: 317855 - DNA, 25 bp, Homo sapien
gggcagtcggagtcctgcgtcaact

SEQ ID NO: 317856 - DNA, 25 bp, Homo sapien
agtcctgcgtcaactctgtgctttc

SEQ ID NO: 317857 - DNA, 25 bp, Homo sapien
tcggagtcctgcgtcaactctgtgc

SEQ ID NO: 317858 - DNA, 25 bp, Homo sapien
cagtcggagtcctgcgtcaactctg

SEQ ID NO: 317859 - DNA, 25 bp, Homo sapien
aatgcaatgatgtccatcgggtgct

SEQ ID NO: 317860 - DNA, 25 bp, Homo sapien
catctccaacatcagcatcaatgca

SEQ ID NO: 317861 - DNA, 25 bp, Homo sapien
tttgcgcaccatggaccactcagga

SEQ ID NO: 317862 - DNA, 25 bp, Homo sapien
tccatcttcagacacacggccctca

SEQ ID NO: 317863 - DNA, 25 bp, Homo sapien
ctgcgtggtgcaggcaattgcagca

SEQ ID NO: 317864 - DNA, 25 bp, Homo sapien
ttgtgacattcacgggggaggtgga

SEQ ID NO: 317865 - DNA, 25 bp, Homo sapien
acattcacgggggaggtggagacgg

SEQ ID NO: 317866 - DNA, 25 bp, Homo sapien
gggcctgcgtggtgcaggcaattgc

SEQ ID NO: 317867 - DNA, 25 bp, Homo sapien
gcgcatcctctcagtcagattattt

SEQ ID NO: 317868 - DNA, 25 bp, Homo sapien
acaggagtaactccgtgtttactgg

SEQ ID NO: 317869 - DNA, 25 bp, Homo sapien
ctcagctcagtacaggagtaactcc

SEQ ID NO: 317870 - DNA, 25 bp, Homo sapien
tgaggtcagcgcatcctctcagtca

SEQ ID NO: 317871 - DNA, 25 bp, Homo sapien
cttggtaccaaacgcagttgtcgaa

SEQ ID NO: 317872 - DNA, 25 bp, Homo sapien
ttggtaccaaacgcagttgtcgaaa

SEQ ID NO: 317873 - DNA, 25 bp, Homo sapien
caaagctgctccgtggagcccttgc

SEQ ID NO: 317874 - DNA, 25 bp, Homo sapien
ccaaagctgctccgtggagcccttg

SEQ ID NO: 317875 - DNA, 25 bp, Homo sapien
aggctcccaggacgtgtcgggtggg

SEQ ID NO: 317876 - DNA, 25 bp, Homo sapien
acgaggctcccaggacgtgtcgggt

SEQ ID NO: 317877 - DNA, 25 bp, Homo sapien
cccaaggtcactgcgggtgagaagt

SEQ ID NO: 317878 - DNA, 25 bp, Homo sapien
cctgagtggcatcccgagttaggcc

SEQ ID NO: 317879 - DNA, 25 bp, Homo sapien
tgcctaggctgcagttagcgtgcct

SEQ ID NO: 317880 - DNA, 25 bp, Homo sapien
ccaaggaatgaatgccctgcccaag

SEQ ID NO: 317881 - DNA, 25 bp, Homo sapien
cgtgttcccggatgctgcgtgttcc

SEQ ID NO: 317882 - DNA, 25 bp, Homo sapien
tcttgtgtttgggtggccgtgtgct

SEQ ID NO: 317883 - DNA, 25 bp, Homo sapien
tgttcctaggatcacggaggcctgg

SEQ ID NO: 317884 - DNA, 25 bp, Homo sapien
tactttccgtgttcccggatgctgc

SEQ ID NO: 317885 - DNA, 25 bp, Homo sapien
tctctggacatcagaaggccggtgt

SEQ ID NO: 317886 - DNA, 25 bp, Homo sapien
cttcttgcggcaggtcgctctggcc

SEQ ID NO: 317887 - DNA, 25 bp, Homo sapien
gccctctctccggacatttcaggga

SEQ ID NO: 317888 - DNA, 25 bp, Homo sapien
cagttctggtctcaagcagctcatc

SEQ ID NO: 317889 - DNA, 25 bp, Homo sapien
cagtcataataagctaggtgtcccc

SEQ ID NO: 317890 - DNA, 25 bp, Homo sapien
tgtttttacagcatggtacctgggc

SEQ ID NO: 317891 - DNA, 25 bp, Homo sapien
tcactgcacaggtctctagaggcca

SEQ ID NO: 317892 - DNA, 25 bp, Homo sapien
taatgtaccccgtttgctgctgtgg

SEQ ID NO: 317893 - DNA, 25 bp, Homo sapien
gtcccatggatgatgctgagggaca

SEQ ID NO: 317894 - DNA, 25 bp, Homo sapien
tgcccagcccctccgagtgccacca

SEQ ID NO: 317895 - DNA, 25 bp, Homo sapien
ggaggatcgcgcctgcccagcccct

SEQ ID NO: 317896 - DNA, 25 bp, Homo sapien
agggcctgggaggatcgcgcctgcc

SEQ ID NO: 317897 - DNA, 25 bp, Homo sapien
ctcagttgctgcgtcgaccgggcct

SEQ ID NO: 317898 - DNA, 25 bp, Homo sapien
cactctcagttgctgcgtcgaccgg

SEQ ID NO: 317899 - DNA, 25 bp, Homo sapien
ttgctgcgtcgaccgggcctctgcg

SEQ ID NO: 317900 - DNA, 25 bp, Homo sapien
cctctgcgccgggcaccttgtccat

SEQ ID NO: 317901 - DNA, 25 bp, Homo sapien
ggcggctggtatccccactgtgacc

SEQ ID NO: 317902 - DNA, 25 bp, Homo sapien
tatggcctttgtgtggtcccgacct

SEQ ID NO: 317903 - DNA, 25 bp, Homo sapien
gattttcctgcccagcatttgtgct

SEQ ID NO: 317904 - DNA, 25 bp, Homo sapien
gggcagatctgcagttatggccttt

SEQ ID NO: 317905 - DNA, 25 bp, Homo sapien
ggggcgttcagagggcagtgggtgg

SEQ ID NO: 317906 - DNA, 25 bp, Homo sapien
ggcgttcagagggcagtgggtggag

SEQ ID NO: 317907 - DNA, 25 bp, Homo sapien
ttcagagggcagtgggtggaggggc

SEQ ID NO: 317908 - DNA, 25 bp, Homo sapien
cgttcagagggcagtgggtggaggg

SEQ ID NO: 317909 - DNA, 25 bp, Homo sapien
gcgtttgggccggagagactcagga

SEQ ID NO: 317910 - DNA, 25 bp, Homo sapien
atgggagcgtttgggccggagagac

SEQ ID NO: 317911 - DNA, 25 bp, Homo sapien
cgtttgggccggagagactcaggac

SEQ ID NO: 317912 - DNA, 25 bp, Homo sapien
gaggatgggagcgtttgggccggag

SEQ ID NO: 317913 - DNA, 25 bp, Homo sapien
ccttggaaaattgcacgatcggcgt

SEQ ID NO: 317914 - DNA, 25 bp, Homo sapien
catctcccggaaacgtggtggtgtg

SEQ ID NO: 317915 - DNA, 25 bp, Homo sapien
ggtgtagccacagaggaggttttca

SEQ ID NO: 317916 - DNA, 25 bp, Homo sapien
gctcagtaagcacctgatgtccctg

SEQ ID NO: 317917 - DNA, 25 bp, Homo sapien
ggcgcagcatagaacagcacgtgga

SEQ ID NO: 317918 - DNA, 25 bp, Homo sapien
tgctgatggcactgaattccgtagg

SEQ ID NO: 317919 - DNA, 25 bp, Homo sapien
tcaagtgcccaacctgtgaccagat

SEQ ID NO: 317920 - DNA, 25 bp, Homo sapien
tctttggtagcagaaggcctgatac

SEQ ID NO: 317921 - DNA, 25 bp, Homo sapien
gaccagggcggccacttgcattcct

SEQ ID NO: 317922 - DNA, 25 bp, Homo sapien
gcttttcacttccatcgcccgggac

SEQ ID NO: 317923 - DNA, 25 bp, Homo sapien
agggcggccacttgcattcctgcct

SEQ ID NO: 317924 - DNA, 25 bp, Homo sapien
ccaaggctttctccttagatgctgc

SEQ ID NO: 317925 - DNA, 25 bp, Homo sapien
ctccaagtttctgccaggtgtctgt

SEQ ID NO: 317926 - DNA, 25 bp, Homo sapien
gctctggaaccggtgtttgcggaaa

SEQ ID NO: 317927 - DNA, 25 bp, Homo sapien
cgacccaggaacagaatccgcacag

SEQ ID NO: 317928 - DNA, 25 bp, Homo sapien
agaatccgcacagcggaagctctgg

SEQ ID NO: 317929 - DNA, 25 bp, Homo sapien
cagcggaagctctggaaccggtgtt

SEQ ID NO: 317930 - DNA, 25 bp, Homo sapien
ctgatggacatgggttggtggcagc

SEQ ID NO: 317931 - DNA, 25 bp, Homo sapien
gctgctgtggaagattctccgtctc

SEQ ID NO: 317932 - DNA, 25 bp, Homo sapien
tgatggacatgggttggtggcagct

SEQ ID NO: 317933 - DNA, 25 bp, Homo sapien
tgctgtggaagattctccgtctcac

SEQ ID NO: 317934 - DNA, 25 bp, Homo sapien
aaagtttgtcactatgtggagcatg

SEQ ID NO: 317935 - DNA, 25 bp, Homo sapien
agtttgtcactatgtggagcatggg

SEQ ID NO: 317936 - DNA, 25 bp, Homo sapien
tcactatgtggagcatggggccctg

SEQ ID NO: 317937 - DNA, 25 bp, Homo sapien
tcaaaagtttgtcactatgtggagc

SEQ ID NO: 317938 - DNA, 25 bp, Homo sapien
tgttgcttggactgaacccatgggt

SEQ ID NO: 317939 - DNA, 25 bp, Homo sapien
gacttggtcttggaggagttctgtc

SEQ ID NO: 317940 - DNA, 25 bp, Homo sapien
cgcacacgggaaccgggtcttgtcg

SEQ ID NO: 317941 - DNA, 25 bp, Homo sapien
gaacccatgggttgcgaaggaagca

SEQ ID NO: 317942 - DNA, 25 bp, Homo sapien
cacgggtcttggtgaggaacgggct

SEQ ID NO: 317943 - DNA, 25 bp, Homo sapien
gactctctttcctccgctgggtagg

SEQ ID NO: 317944 - DNA, 25 bp, Homo sapien
gggcagctgagactctctttcctcc

SEQ ID NO: 317945 - DNA, 25 bp, Homo sapien
tctttcctccgctgggtaggccctg

SEQ ID NO: 317946 - DNA, 25 bp, Homo sapien
ttgttgctggagtcactacgcagac

SEQ ID NO: 317947 - DNA, 25 bp, Homo sapien
tcttgttgctggagtcactacgcag

SEQ ID NO: 317948 - DNA, 25 bp, Homo sapien
cttgttgctggagtcactacgcaga

SEQ ID NO: 317949 - DNA, 25 bp, Homo sapien
atcttgttgctggagtcactacgca

SEQ ID NO: 317950 - DNA, 25 bp, Homo sapien
ttgaaacgctttcttgtgaatagag

SEQ ID NO: 317951 - DNA, 25 bp, Homo sapien
gcgacacgaatttgctctgaagcct

SEQ ID NO: 317952 - DNA, 25 bp, Homo sapien
aacgctttcttgtgaatagagaggg

SEQ ID NO: 317953 - DNA, 25 bp, Homo sapien
gcactttctgttttgcgacacgaat

SEQ ID NO: 317954 - DNA, 25 bp, Homo sapien
aggccagccaggagcacgtggcgtg

SEQ ID NO: 317955 - DNA, 25 bp, Homo sapien
cacgtggcgtgggaccctccttgag

SEQ ID NO: 317956 - DNA, 25 bp, Homo sapien
cctccttgaggaatggcccggggat

SEQ ID NO: 317957 - DNA, 25 bp, Homo sapien
ggcctggctccacttccaggccagc

SEQ ID NO: 317958 - DNA, 25 bp, Homo sapien
tggtcgtagtggctttggtcctgac

SEQ ID NO: 317959 - DNA, 25 bp, Homo sapien
tttgtctttagagggcagtttcagc

SEQ ID NO: 317960 - DNA, 25 bp, Homo sapien
ttgtctttagagggcagtttcagct

SEQ ID NO: 317961 - DNA, 25 bp, Homo sapien
tgtctttagagggcagtttcagctg

SEQ ID NO: 317962 - DNA, 25 bp, Homo sapien
gtttgtctttagagggcagtttcag

SEQ ID NO: 317963 - DNA, 25 bp, Homo sapien
ccttcctggtggaagtcattctcag

SEQ ID NO: 317964 - DNA, 25 bp, Homo sapien
cactggtacattctattcccacaag

SEQ ID NO: 317965 - DNA, 25 bp, Homo sapien
tagaggccggttcaccgatccttcc

SEQ ID NO: 317966 - DNA, 25 bp, Homo sapien
aagacggccctgtgtcccctagagg

SEQ ID NO: 317967 - DNA, 25 bp, Homo sapien
tctgtgaccatactgagtcccgtgt

SEQ ID NO: 317968 - DNA, 25 bp, Homo sapien
cacttaaactactggatgggctctc

SEQ ID NO: 317969 - DNA, 25 bp, Homo sapien
tcaccatgtttcttcgcgacagagg

SEQ ID NO: 317970 - DNA, 25 bp, Homo sapien
gacagaggccgtcttctgcccagtt

SEQ ID NO: 317971 - DNA, 25 bp, Homo sapien
tccgcggaggcgtggactttcttct

SEQ ID NO: 317972 - DNA, 25 bp, Homo sapien
ggattcatgacccttcgcgcagttg

SEQ ID NO: 317973 - DNA, 25 bp, Homo sapien
cggccggcacctttcagacggaagt

SEQ ID NO: 317974 - DNA, 25 bp, Homo sapien
gatccacgtgcaggactggtctcgc

SEQ ID NO: 317975 - DNA, 25 bp, Homo sapien
acaggccgcgccgaggtgtttccag

SEQ ID NO: 317976 - DNA, 25 bp, Homo sapien
gggattcagattgaccggccgcgtc

SEQ ID NO: 317977 - DNA, 25 bp, Homo sapien
ttgaccggccgcgtcgaggtgtttc

SEQ ID NO: 317978 - DNA, 25 bp, Homo sapien
aggtgtttccgggttcagactgaca

SEQ ID NO: 317979 - DNA, 25 bp, Homo sapien
ggagtgccagctctttgctcagagc

SEQ ID NO: 317980 - DNA, 25 bp, Homo sapien
ggaggacccagagccaccggggcac

SEQ ID NO: 317981 - DNA, 25 bp, Homo sapien
aggacccagagccaccggggcacag

SEQ ID NO: 317982 - DNA, 25 bp, Homo sapien
acagcctcctgatgggggagtgcca

SEQ ID NO: 317983 - DNA, 25 bp, Homo sapien
tgcaggcacgcacgttattctcggg

SEQ ID NO: 317984 - DNA, 25 bp, Homo sapien
gcttgggccgttgtggtggaggaca

SEQ ID NO: 317985 - DNA, 25 bp, Homo sapien
gaggacatggtacgtgtgatgcttc

SEQ ID NO: 317986 - DNA, 25 bp, Homo sapien
ccagcatggctggtcgagagggcat

SEQ ID NO: 317987 - DNA, 25 bp, Homo sapien
tgtgccccgatgacatccggcccat

SEQ ID NO: 317988 - DNA, 25 bp, Homo sapien
taaccaggatgtggccacaatcacc

SEQ ID NO: 317989 - DNA, 25 bp, Homo sapien
tgatggtgccgcataaccaggatgt

SEQ ID NO: 317990 - DNA, 25 bp, Homo sapien
ggatgtggccacaatcacctgtgcc

SEQ ID NO: 317991 - DNA, 25 bp, Homo sapien
tgtattggtgactctgtgctgcctg

SEQ ID NO: 317992 - DNA, 25 bp, Homo sapien
tctgcactggtcactgtgtttttcc

SEQ ID NO: 317993 - DNA, 25 bp, Homo sapien
tgcactggtcactgtgtttttcctg

SEQ ID NO: 317994 - DNA, 25 bp, Homo sapien
tcctccgacggctggtcactgtgtc

SEQ ID NO: 317995 - DNA, 25 bp, Homo sapien
tcggaagcccgtgggcttcctggag

SEQ ID NO: 317996 - DNA, 25 bp, Homo sapien
ccactcggaagcccgtgggcttcct

SEQ ID NO: 317997 - DNA, 25 bp, Homo sapien
actcggaagcccgtgggcttcctgg

SEQ ID NO: 317998 - DNA, 25 bp, Homo sapien
ggaagcccgtgggcttcctggagat

SEQ ID NO: 317999 - DNA, 25 bp, Homo sapien
tcggctgcaaatgagtgcctccgct

SEQ ID NO: 318000 - DNA, 25 bp, Homo sapien
caaatgagtgcctccgctcctggca

SEQ ID NO: 318001 - DNA, 25 bp, Homo sapien
tggttttcgctgagggcatttcctg

SEQ ID NO: 318002 - DNA, 25 bp, Homo sapien
ctgaggattcggctgcaaatgagtg

SEQ ID NO: 318003 - DNA, 25 bp, Homo sapien
gagatgatttagagcaacagtgggc

SEQ ID NO: 318004 - DNA, 25 bp, Homo sapien
acacacttgaccaggtcaccacaga

SEQ ID NO: 318005 - DNA, 25 bp, Homo sapien
gagctctgcagcacgtgggtccaat

SEQ ID NO: 318006 - DNA, 25 bp, Homo sapien
cagtgggcagtttgcctacagccac

SEQ ID NO: 318007 - DNA, 25 bp, Homo sapien
gactgagctcccgatcgttctgaga

SEQ ID NO: 318008 - DNA, 25 bp, Homo sapien
cgggctccacgaagtccttggctga

SEQ ID NO: 318009 - DNA, 25 bp, Homo sapien
cacagtggacgtggaaggctttgat

SEQ ID NO: 318010 - DNA, 25 bp, Homo sapien
ccttggctgagaacggtgccactga

SEQ ID NO: 318011 - DNA, 25 bp, Homo sapien
gggtggatccccctctgcacggagc

SEQ ID NO: 318012 - DNA, 25 bp, Homo sapien
atccccccctgcacggagcgtgggc

SEQ ID NO: 318013 - DNA, 25 bp, Homo sapien
gatccccctctgcacggagcgtggg

SEQ ID NO: 318014 - DNA, 25 bp, Homo sapien
gtggatccccccctgcacggagcgt

SEQ ID NO: 318015 - DNA, 25 bp, Homo sapien
caaaacgtacagtttggagtggagc

SEQ ID NO: 318016 - DNA, 25 bp, Homo sapien
aaacgtacagtttggagtggagcct

SEQ ID NO: 318017 - DNA, 25 bp, Homo sapien
ttacatccaaaacgtacagtttgga

SEQ ID NO: 318018 - DNA, 25 bp, Homo sapien
catccaaaacgtacagtttggagtg

SEQ ID NO: 318019 - DNA, 25 bp, Homo sapien
tccctggcagggatgacccatgttc

SEQ ID NO: 318020 - DNA, 25 bp, Homo sapien
gccattgtcggagctgattgcaatt

SEQ ID NO: 318021 - DNA, 25 bp, Homo sapien
cattgggtgggtgcccttaactagg

SEQ ID NO: 318022 - DNA, 25 bp, Homo sapien
gcagcaatgtgtccggttggcaacg

SEQ ID NO: 318023 - DNA, 25 bp, Homo sapien
atgggagccacgagcgcagacgaca

SEQ ID NO: 318024 - DNA, 25 bp, Homo sapien
ccgggtgcgtagataccctggtatc

SEQ ID NO: 318025 - DNA, 25 bp, Homo sapien
ccgattccaaatcctcccgctgagt

SEQ ID NO: 318026 - DNA, 25 bp, Homo sapien
gctgagtctgcgcagagcttggttc

SEQ ID NO: 318027 - DNA, 25 bp, Homo sapien
tgcgcagagcttggttccctgaact

SEQ ID NO: 318028 - DNA, 25 bp, Homo sapien
tgcacccggtgtgccctgaaacaca

SEQ ID NO: 318029 - DNA, 25 bp, Homo sapien
ccgtgtgtcctgaaacacgtgtgcc

SEQ ID NO: 318030 - DNA, 25 bp, Homo sapien
gaaacacttgcaccccgcgtgtcct

SEQ ID NO: 318031 - DNA, 25 bp, Homo sapien
aaacacacgcgtatgccccgaaaca

SEQ ID NO: 318032 - DNA, 25 bp, Homo sapien
tcgctccgggagagcaggatccccg

SEQ ID NO: 318033 - DNA, 25 bp, Homo sapien
gagccagtgtcttccgaacatgagc

SEQ ID NO: 318034 - DNA, 25 bp, Homo sapien
gctggccgctggtgcctgccggaca

SEQ ID NO: 318035 - DNA, 25 bp, Homo sapien
atcggcacctcggtcctcgggtgag

SEQ ID NO: 318036 - DNA, 25 bp, Homo sapien
cagattttgagggccgaaggctgtc

SEQ ID NO: 318037 - DNA, 25 bp, Homo sapien
tcacagattttgagggccgaaggct

SEQ ID NO: 318038 - DNA, 25 bp, Homo sapien
cacagattttgagggccgaaggctg

SEQ ID NO: 318039 - DNA, 25 bp, Homo sapien
attttgagggccgaaggctgtctcc

SEQ ID NO: 318040 - DNA, 25 bp, Homo sapien
gttctcagcataggctgccacccag

SEQ ID NO: 318041 - DNA, 25 bp, Homo sapien
tcttggcgacttgttcttcagcccc

SEQ ID NO: 318042 - DNA, 25 bp, Homo sapien
cagaggcccgttggctcctcctggg

SEQ ID NO: 318043 - DNA, 25 bp, Homo sapien
cgacttccagtggtcggcagaggcc

SEQ ID NO: 318044 - DNA, 25 bp, Homo sapien
tcctgtgttgttggcgaggcattcc

SEQ ID NO: 318045 - DNA, 25 bp, Homo sapien
gtgaccttgcgtttcttttgtgacc

SEQ ID NO: 318046 - DNA, 25 bp, Homo sapien
tgacctcggcttcatgggaccttgc

SEQ ID NO: 318047 - DNA, 25 bp, Homo sapien
cattgctgcgcttctttgtgacctt

SEQ ID NO: 318048 - DNA, 25 bp, Homo sapien
gaagcagatttgaagtccgaccagg

SEQ ID NO: 318049 - DNA, 25 bp, Homo sapien
acaattcccatgtggtgttgtgact

SEQ ID NO: 318050 - DNA, 25 bp, Homo sapien
cagatttgaagtccgaccagggcct

SEQ ID NO: 318051 - DNA, 25 bp, Homo sapien
agccacacaattcccatgtggtgtt

SEQ ID NO: 318052 - DNA, 25 bp, Homo sapien
gagttggcagaactggaggccttgg

SEQ ID NO: 318053 - DNA, 25 bp, Homo sapien
gccttggctggcccacatcccctgc

SEQ ID NO: 318054 - DNA, 25 bp, Homo sapien
agagttggcagaactggaggccttg

SEQ ID NO: 318055 - DNA, 25 bp, Homo sapien
gggtgtcttcgcactcccagctttg

SEQ ID NO: 318056 - DNA, 25 bp, Homo sapien
ccagtgccttgtgcgtgttgggacc

SEQ ID NO: 318057 - DNA, 25 bp, Homo sapien
ctggaggagcttgcgatgctgctcc

SEQ ID NO: 318058 - DNA, 25 bp, Homo sapien
catcctgccaagtcgatggcgggtg

SEQ ID NO: 318059 - DNA, 25 bp, Homo sapien
gggcctgggtgcctttggctcctcc

SEQ ID NO: 318060 - DNA, 25 bp, Homo sapien
atacgggccgggcagggaggtgcca

SEQ ID NO: 318061 - DNA, 25 bp, Homo sapien
gggtgggcctgggtgcctttggctc

SEQ ID NO: 318062 - DNA, 25 bp, Homo sapien
cctggccttggctctctcatccaac

SEQ ID NO: 318063 - DNA, 25 bp, Homo sapien
cagctcccacacacgtctgcaccgt

SEQ ID NO: 318064 - DNA, 25 bp, Homo sapien
gggacaccggagcagacatgatgac

SEQ ID NO: 318065 - DNA, 25 bp, Homo sapien
catgatgacagtgcccttgtccctg

SEQ ID NO: 318066 - DNA, 25 bp, Homo sapien
cacgtctgcaccgtcctgctcccga

SEQ ID NO: 318067 - DNA, 25 bp, Homo sapien
tctcttctgaaaggcggttgtttgc

SEQ ID NO: 318068 - DNA, 25 bp, Homo sapien
aggaatctggatgctcgtctccggg

SEQ ID NO: 318069 - DNA, 25 bp, Homo sapien
tactagagtctctggccatgatgga

SEQ ID NO: 318070 - DNA, 25 bp, Homo sapien
tttctgcttgccgactgtggggcca

SEQ ID NO: 318071 - DNA, 25 bp, Homo sapien
tggatagatcagacatggagcaaaa

SEQ ID NO: 318072 - DNA, 25 bp, Homo sapien
gtggatagatcagacatggagcaaa

SEQ ID NO: 318073 - DNA, 25 bp, Homo sapien
tgtggatagatcagacatggagcaa

SEQ ID NO: 318074 - DNA, 25 bp, Homo sapien
ttctcgctgtagtgtagttgcagga

SEQ ID NO: 318075 - DNA, 25 bp, Homo sapien
gggcttctcgctgtagtgtagttgc

SEQ ID NO: 318076 - DNA, 25 bp, Homo sapien
tgattggattcccgggcctgcgatg

SEQ ID NO: 318077 - DNA, 25 bp, Homo sapien
ctgattggattcccgggcctgcgat

SEQ ID NO: 318078 - DNA, 25 bp, Homo sapien
ccctgagagatggtggtctgctccc

SEQ ID NO: 318079 - DNA, 25 bp, Homo sapien
tttgtggctcgagcctctaggaggc

SEQ ID NO: 318080 - DNA, 25 bp, Homo sapien
tctgctgtttgggtagggaaaacga

SEQ ID NO: 318081 - DNA, 25 bp, Homo sapien
tggcgtccactcaggctctttggca

SEQ ID NO: 318082 - DNA, 25 bp, Homo sapien
cctgtaaatcaaatgggcggcggca

SEQ ID NO: 318083 - DNA, 25 bp, Homo sapien
gctgcagcaggtggaaataggaccc

SEQ ID NO: 318084 - DNA, 25 bp, Homo sapien
cagttccagagcgaattacccagag

SEQ ID NO: 318085 - DNA, 25 bp, Homo sapien
caaggccgtttctggagtcttctgg

SEQ ID NO: 318086 - DNA, 25 bp, Homo sapien
caggggatgcactttggccctggag

SEQ ID NO: 318087 - DNA, 25 bp, Homo sapien
ggatgcactttggccctggagggcg

SEQ ID NO: 318088 - DNA, 25 bp, Homo sapien
tctgtgggggttccatgggtggagg

SEQ ID NO: 318089 - DNA, 25 bp, Homo sapien
ggcggagcttgttggggacccagta

SEQ ID NO: 318090 - DNA, 25 bp, Homo sapien
ctccagacccacagtctgtatgctt

SEQ ID NO: 318091 - DNA, 25 bp, Homo sapien
atctccagacccacagtctgtatgc

SEQ ID NO: 318092 - DNA, 25 bp, Homo sapien
tctccagacccacagtctgtatgct

SEQ ID NO: 318093 - DNA, 25 bp, Homo sapien
tccagacccacagtctgtatgcttg

SEQ ID NO: 318094 - DNA, 25 bp, Homo sapien
tgtgcacacgggacggtgatcccat

SEQ ID NO: 318095 - DNA, 25 bp, Homo sapien
gggtcggcctcatctgtgcacacgg

SEQ ID NO: 318096 - DNA, 25 bp, Homo sapien
cgggacggtgatcccatcccctaag

SEQ ID NO: 318097 - DNA, 25 bp, Homo sapien
gcctcatctgtgcacacgggacggt

SEQ ID NO: 318098 - DNA, 25 bp, Homo sapien
ctggctggcagatgctgttggactt

SEQ ID NO: 318099 - DNA, 25 bp, Homo sapien
ggctggcagatgctgttggacttac

SEQ ID NO: 318100 - DNA, 25 bp, Homo sapien
tggctggcagatgctgttggactta

SEQ ID NO: 318101 - DNA, 25 bp, Homo sapien
cggccacggtaacagtgtttctgta

SEQ ID NO: 318102 - DNA, 25 bp, Homo sapien
caggctgcggctcggccacggtaac

SEQ ID NO: 318103 - DNA, 25 bp, Homo sapien
cctcttaacgaagccgtcagcaagg

SEQ ID NO: 318104 - DNA, 25 bp, Homo sapien
gtccagtctcctcttaacgaagccg

SEQ ID NO: 318105 - DNA, 25 bp, Homo sapien
gagtggcatccacttaacaccagga

SEQ ID NO: 318106 - DNA, 25 bp, Homo sapien
tggcatccacttaacaccaggagcc

SEQ ID NO: 318107 - DNA, 25 bp, Homo sapien
caatttcatcctggagtggcatcca

SEQ ID NO: 318108 - DNA, 25 bp, Homo sapien
tcctggagtggcatccacttaacac

SEQ ID NO: 318109 - DNA, 25 bp, Homo sapien
cagagcactgcttgtgtgatggttc

SEQ ID NO: 318110 - DNA, 25 bp, Homo sapien
aaggtgttcgagtccgcctgagcgc

SEQ ID NO: 318111 - DNA, 25 bp, Homo sapien
cactgttgtgtggaactgcattaac

SEQ ID NO: 318112 - DNA, 25 bp, Homo sapien
tcagtgtattttttcgaggttcaaa

SEQ ID NO: 318113 - DNA, 25 bp, Homo sapien
tgcagattccgacactggtccctgg

SEQ ID NO: 318114 - DNA, 25 bp, Homo sapien
cacactttacccagcagagctccag

SEQ ID NO: 318115 - DNA, 25 bp, Homo sapien
ctggaggtgtgcgtgctcccagcaa

SEQ ID NO: 318116 - DNA, 25 bp, Homo sapien
gagcgaccgcagaccctgttgatat

SEQ ID NO: 318117 - DNA, 25 bp, Homo sapien
gccatgccctctcgggctcggttga

SEQ ID NO: 318118 - DNA, 25 bp, Homo sapien
aatgcgctcggacggaacgttagga

SEQ ID NO: 318119 - DNA, 25 bp, Homo sapien
aggactggcttctccggccctctgc

SEQ ID NO: 318120 - DNA, 25 bp, Homo sapien
gccctctgccctttcgggcagaaca

SEQ ID NO: 318121 - DNA, 25 bp, Homo sapien
cagcgggcagagatggggcagaggt

SEQ ID NO: 318122 - DNA, 25 bp, Homo sapien
gcagagatggggcagaggtgcggct

SEQ ID NO: 318123 - DNA, 25 bp, Homo sapien
gagatggggcagaggtgcggctgtc

SEQ ID NO: 318124 - DNA, 25 bp, Homo sapien
atggggcagaggtgcggctgtctac

SEQ ID NO: 318125 - DNA, 25 bp, Homo sapien
tcaggctcacactggtgctccgtgg

SEQ ID NO: 318126 - DNA, 25 bp, Homo sapien
gaagagcaggggataggtggaaccg

SEQ ID NO: 318127 - DNA, 25 bp, Homo sapien
caggggataggtggaaccgtgtgag

SEQ ID NO: 318128 - DNA, 25 bp, Homo sapien
aggctcacactggtgctccgtggag

SEQ ID NO: 318129 - DNA, 25 bp, Homo sapien
cagagggggttaacagcatccagtg

SEQ ID NO: 318130 - DNA, 25 bp, Homo sapien
ggcattcagggtggcgggaacagca

SEQ ID NO: 318131 - DNA, 25 bp, Homo sapien
ctgggcacccatggttcacgttgtg

SEQ ID NO: 318132 - DNA, 25 bp, Homo sapien
tgctggccaaggatgcctggaaggg

SEQ ID NO: 318133 - DNA, 25 bp, Homo sapien
gctgggcccttagcgccagctgagc

SEQ ID NO: 318134 - DNA, 25 bp, Homo sapien
gacagctgggcccttagcgccagct

SEQ ID NO: 318135 - DNA, 25 bp, Homo sapien
tccccgacagctgggcccttagcgc

SEQ ID NO: 318136 - DNA, 25 bp, Homo sapien
cagctgggcccttagcgccagctga

SEQ ID NO: 318137 - DNA, 25 bp, Homo sapien
cacagtcgcgtttttcagaacaaaa

SEQ ID NO: 318138 - DNA, 25 bp, Homo sapien
cactttcaagatcacagtcgcgttt

SEQ ID NO: 318139 - DNA, 25 bp, Homo sapien
agccccgtgcgtttgtgcgtggcca

SEQ ID NO: 318140 - DNA, 25 bp, Homo sapien
tggagaattaactggagccccgtgc

SEQ ID NO: 318141 - DNA, 25 bp, Homo sapien
agctgcacttctcccaagccgatgg

SEQ ID NO: 318142 - DNA, 25 bp, Homo sapien
ccctgaagcgacatgaggctgggtc

SEQ ID NO: 318143 - DNA, 25 bp, Homo sapien
caagcgaagtgaagtaacattcctg

SEQ ID NO: 318144 - DNA, 25 bp, Homo sapien
agaggccaagctccgtgaagcccag

SEQ ID NO: 318145 - DNA, 25 bp, Homo sapien
tttccaattcattatgaagtgccat

SEQ ID NO: 318146 - DNA, 25 bp, Homo sapien
tcagaggtttagctagtttactggc

SEQ ID NO: 318147 - DNA, 25 bp, Homo sapien
caattaaacatgttttgctggttga

SEQ ID NO: 318148 - DNA, 25 bp, Homo sapien
gatttttcaatgatccagggataaa

SEQ ID NO: 318149 - DNA, 25 bp, Homo sapien
tgcctagatgctggcaccccagata

SEQ ID NO: 318150 - DNA, 25 bp, Homo sapien
tcaggcacctgagacacatgaggtg

SEQ ID NO: 318151 - DNA, 25 bp, Homo sapien
gacacaaaaggcaccccagatatgc

SEQ ID NO: 318152 - DNA, 25 bp, Homo sapien
gaaaccccagataactcaggcacct

SEQ ID NO: 318153 - DNA, 25 bp, Homo sapien
ggccaaggcctaaccattccattga

SEQ ID NO: 318154 - DNA, 25 bp, Homo sapien
tgttgagtacctgtctgtgcccagc

SEQ ID NO: 318155 - DNA, 25 bp, Homo sapien
catggaacaaggaatgtaaacccca

SEQ ID NO: 318156 - DNA, 25 bp, Homo sapien
tttacacacatccatggtttaggcc

SEQ ID NO: 318157 - DNA, 25 bp, Homo sapien
atcccgtgggttctcttcatagcag

SEQ ID NO: 318158 - DNA, 25 bp, Homo sapien
gagaacatcccgtgggttctcttca

SEQ ID NO: 318159 - DNA, 25 bp, Homo sapien
tcactgtgagaacatcccgtgggtt

SEQ ID NO: 318160 - DNA, 25 bp, Homo sapien
cactgtgagaacatcccgtgggttc

SEQ ID NO: 318161 - DNA, 25 bp, Homo sapien
tataacccatcctggagcgtccaca

SEQ ID NO: 318162 - DNA, 25 bp, Homo sapien
ttaaaagcacatgggagtcttctcc

SEQ ID NO: 318163 - DNA, 25 bp, Homo sapien
aaaagcacatgggagtcttctcctc

SEQ ID NO: 318164 - DNA, 25 bp, Homo sapien
cctcctctataacccatcctggagc

SEQ ID NO: 318165 - DNA, 25 bp, Homo sapien
ggtccagtcgatgcctgatttcagg

SEQ ID NO: 318166 - DNA, 25 bp, Homo sapien
tgaggtccagtcgatgcctgatttc

SEQ ID NO: 318167 - DNA, 25 bp, Homo sapien
cagtcgatgcctgatttcaggcctc

SEQ ID NO: 318168 - DNA, 25 bp, Homo sapien
tccagtcgatgcctgatttcaggcc

SEQ ID NO: 318169 - DNA, 25 bp, Homo sapien
tacaatctccaattctgcgccgagg

SEQ ID NO: 318170 - DNA, 25 bp, Homo sapien
tcagcgattgaaaactccgacggca

SEQ ID NO: 318171 - DNA, 25 bp, Homo sapien
gacgcgactgtatcatagattgccg

SEQ ID NO: 318172 - DNA, 25 bp, Homo sapien
cagcaattcaagctctctgcggagg

SEQ ID NO: 318173 - DNA, 25 bp, Homo sapien
catcttctcccatccagcaggagct

SEQ ID NO: 318174 - DNA, 25 bp, Homo sapien
tccatcttctcccatccagcaggag

SEQ ID NO: 318175 - DNA, 25 bp, Homo sapien
tcttctcccatccagcaggagctca

SEQ ID NO: 318176 - DNA, 25 bp, Homo sapien
aaatctcaggctgcctctccatctt

SEQ ID NO: 318177 - DNA, 25 bp, Homo sapien
gtcctgtcaccttgcagctttgccc

SEQ ID NO: 318178 - DNA, 25 bp, Homo sapien
agacatggaggctctttcgtcactc

SEQ ID NO: 318179 - DNA, 25 bp, Homo sapien
tcgtcactcctcgaatctgggctgg

SEQ ID NO: 318180 - DNA, 25 bp, Homo sapien
ctgggcctgaggcttactttggcca

SEQ ID NO: 318181 - DNA, 25 bp, Homo sapien
gctgggtcgtgatgccatcttctcc

SEQ ID NO: 318182 - DNA, 25 bp, Homo sapien
tgagcatcatcacgtgtgccaggct

SEQ ID NO: 318183 - DNA, 25 bp, Homo sapien
ctgcggttcctgcgggatcagccag

SEQ ID NO: 318184 - DNA, 25 bp, Homo sapien
actcagacgtgtggtccggagaaga

SEQ ID NO: 318185 - DNA, 25 bp, Homo sapien
ccccaggggtccagcccaggaggtg

SEQ ID NO: 318186 - DNA, 25 bp, Homo sapien
gctgggaagtgcaggccccccaggg

SEQ ID NO: 318187 - DNA, 25 bp, Homo sapien
ggctgctgggctccacccaaggaga

SEQ ID NO: 318188 - DNA, 25 bp, Homo sapien
cacccaaggagaggagcctgtgcct

SEQ ID NO: 318189 - DNA, 25 bp, Homo sapien
tccgggcacagttctcggggagtcc

SEQ ID NO: 318190 - DNA, 25 bp, Homo sapien
tcagccgtccgtggctatggctgga

SEQ ID NO: 318191 - DNA, 25 bp, Homo sapien
attctgcagacagcgccgagtgccg

SEQ ID NO: 318192 - DNA, 25 bp, Homo sapien
gctgtgcagggagacgctcggctgc

SEQ ID NO: 318193 - DNA, 25 bp, Homo sapien
caggatggtgctctggggataaaac

SEQ ID NO: 318194 - DNA, 25 bp, Homo sapien
ctgctgtgtccttggttttctccag

SEQ ID NO: 318195 - DNA, 25 bp, Homo sapien
gttttctccaggatggtgctctggg

SEQ ID NO: 318196 - DNA, 25 bp, Homo sapien
tctggggataaaaccagacgaccca

SEQ ID NO: 318197 - DNA, 25 bp, Homo sapien
taagctcattctgaaccaggaaccc

SEQ ID NO: 318198 - DNA, 25 bp, Homo sapien
gctcattctgaaccaggaacccatg

SEQ ID NO: 318199 - DNA, 25 bp, Homo sapien
tttgtttaagctcattctgaaccag

SEQ ID NO: 318200 - DNA, 25 bp, Homo sapien
ttctgaaccaggaacccatgctcct

SEQ ID NO: 318201 - DNA, 25 bp, Homo sapien
tataagggtccattttacatgattc

SEQ ID NO: 318202 - DNA, 25 bp, Homo sapien
cttataagggtccattttacatgat

SEQ ID NO: 318203 - DNA, 25 bp, Homo sapien
ataagggtccattttacatgattct

SEQ ID NO: 318204 - DNA, 25 bp, Homo sapien
cccttataagggtccattttacatg

SEQ ID NO: 318205 - DNA, 25 bp, Homo sapien
gatctagagggtaagttggcccagt

SEQ ID NO: 318206 - DNA, 25 bp, Homo sapien
ccaagtgtgatgagtacgcagggca

SEQ ID NO: 318207 - DNA, 25 bp, Homo sapien
tgcactcgccgatgtgatgcggaat

SEQ ID NO: 318208 - DNA, 25 bp, Homo sapien
tagataaggtcagacgaagccaccc

SEQ ID NO: 318209 - DNA, 25 bp, Homo sapien
tcaaccacggagaggccctcgctgt

SEQ ID NO: 318210 - DNA, 25 bp, Homo sapien
atcccgggagcagcgtgcgggctcg

SEQ ID NO: 318211 - DNA, 25 bp, Homo sapien
tccctgccctcaaccacggagaggc

SEQ ID NO: 318212 - DNA, 25 bp, Homo sapien
ctgccctcaaccacggagaggccct

SEQ ID NO: 318213 - DNA, 25 bp, Homo sapien
ttggacccctctgttctcgctgctg

SEQ ID NO: 318214 - DNA, 25 bp, Homo sapien
agagacgttcaggacctcggacagc

SEQ ID NO: 318215 - DNA, 25 bp, Homo sapien
ggccggatccctgaatccgtcttga

SEQ ID NO: 318216 - DNA, 25 bp, Homo sapien
ccctgagtatcagagatgcccagga

SEQ ID NO: 318217 - DNA, 25 bp, Homo sapien
ggtggaggtggcatcccccccatgg

SEQ ID NO: 318218 - DNA, 25 bp, Homo sapien
gtggaggtggcatcccccccatggc

SEQ ID NO: 318219 - DNA, 25 bp, Homo sapien
cattgcttgcgggggcaagtgagag

SEQ ID NO: 318220 - DNA, 25 bp, Homo sapien
gcattgcttgcgggggcaagtgaga

SEQ ID NO: 318221 - DNA, 25 bp, Homo sapien
aggggcattgcttgcgggggcaagt

SEQ ID NO: 318222 - DNA, 25 bp, Homo sapien
gggcattgcttgcgggggcaagtga

SEQ ID NO: 318223 - DNA, 25 bp, Homo sapien
gggaacgccgctgagctggccacat

SEQ ID NO: 318224 - DNA, 25 bp, Homo sapien
tcagtggaatcaaacctggtaatca

SEQ ID NO: 318225 - DNA, 25 bp, Homo sapien
cggacaccccggactgaagaatggt

SEQ ID NO: 318226 - DNA, 25 bp, Homo sapien
gcacatggagtggtcaggcgggaag

SEQ ID NO: 318227 - DNA, 25 bp, Homo sapien
tgcgcagggaatcggctctgtcccc

SEQ ID NO: 318228 - DNA, 25 bp, Homo sapien
acgggagtccccagaaggccgccat

SEQ ID NO: 318229 - DNA, 25 bp, Homo sapien
cgatcccaacgggagtccccagaag

SEQ ID NO: 318230 - DNA, 25 bp, Homo sapien
caaaccacacctgcgcagggaatcg

SEQ ID NO: 318231 - DNA, 25 bp, Homo sapien
ctggggtgtttcttcgcagcccggg

SEQ ID NO: 318232 - DNA, 25 bp, Homo sapien
ggtgtttcttcgcagcccggggcgc

SEQ ID NO: 318233 - DNA, 25 bp, Homo sapien
tgaaatgtggcttctcttcgaggtc

SEQ ID NO: 318234 - DNA, 25 bp, Homo sapien
ttagtgtgtggaccttcatctgagt

SEQ ID NO: 318235 - DNA, 25 bp, Homo sapien
tcctccagatctgcatttagtgtgt

SEQ ID NO: 318236 - DNA, 25 bp, Homo sapien
aatgtggcttctcttcgaggtcaca

SEQ ID NO: 318237 - DNA, 25 bp, Homo sapien
ctgcccactcggccgcaggcttggc

SEQ ID NO: 318238 - DNA, 25 bp, Homo sapien
ccactcggccgcaggcttggcctgg

SEQ ID NO: 318239 - DNA, 25 bp, Homo sapien
cccactcggccgcaggcttggcctg

SEQ ID NO: 318240 - DNA, 25 bp, Homo sapien
ctgccgtccctggcggttctgagaa

SEQ ID NO: 318241 - DNA, 25 bp, Homo sapien
ccgtccctggcggttctgagaaatt

SEQ ID NO: 318242 - DNA, 25 bp, Homo sapien
cgtccctggcggttctgagaaattg

SEQ ID NO: 318243 - DNA, 25 bp, Homo sapien
tccctggcggttctgagaaattgca

SEQ ID NO: 318244 - DNA, 25 bp, Homo sapien
tgtcccatgcgatgcttctccgggc

SEQ ID NO: 318245 - DNA, 25 bp, Homo sapien
tccgggcctttgacgagtacttcag

SEQ ID NO: 318246 - DNA, 25 bp, Homo sapien
tgagccctggagaacagggttgttc

SEQ ID NO: 318247 - DNA, 25 bp, Homo sapien
tcctgcgtcctgcaagacaggctgt

SEQ ID NO: 318248 - DNA, 25 bp, Homo sapien
agagaccttcaaccacgggcttgtg

SEQ ID NO: 318249 - DNA, 25 bp, Homo sapien
caggaagagaccttcaaccacgggc

SEQ ID NO: 318250 - DNA, 25 bp, Homo sapien
agcaacaggaagagaccttcaacca

SEQ ID NO: 318251 - DNA, 25 bp, Homo sapien
gagaccttcaaccacgggcttgtgg

SEQ ID NO: 318252 - DNA, 25 bp, Homo sapien
ggtaccaaacaattccctggtcatg

SEQ ID NO: 318253 - DNA, 25 bp, Homo sapien
taccaaacaattccctggtcatgat

SEQ ID NO: 318254 - DNA, 25 bp, Homo sapien
gtaccaaacaattccctggtcatga

SEQ ID NO: 318255 - DNA, 25 bp, Homo sapien
accaaacaattccctggtcatgatt

SEQ ID NO: 318256 - DNA, 25 bp, Homo sapien
ctgcagtgtattgtcctggcctgct

SEQ ID NO: 318257 - DNA, 25 bp, Homo sapien
cgatgaatacagtgtggagagcata

SEQ ID NO: 318258 - DNA, 25 bp, Homo sapien
gatgaatacagtgtggagagcatag

SEQ ID NO: 318259 - DNA, 25 bp, Homo sapien
tgacactgcagtgtattgtcctggc

SEQ ID NO: 318260 - DNA, 25 bp, Homo sapien
ggcgagggtaaaactgatcactatg

SEQ ID NO: 318261 - DNA, 25 bp, Homo sapien
agtgaaatttagacgatgaggcgag

SEQ ID NO: 318262 - DNA, 25 bp, Homo sapien
gatgaggcgagggtaaaactgatca

SEQ ID NO: 318263 - DNA, 25 bp, Homo sapien
tttagacgatgaggcgagggtaaaa

SEQ ID NO: 318264 - DNA, 25 bp, Homo sapien
tgttaaaattaagaataaggcctgc

SEQ ID NO: 318265 - DNA, 25 bp, Homo sapien
tgttgagccacagacgtgggtctct

SEQ ID NO: 318266 - DNA, 25 bp, Homo sapien
cgtgggtctctgttccataggatgg

SEQ ID NO: 318267 - DNA, 25 bp, Homo sapien
aattaagaataaggcctgctttaag

SEQ ID NO: 318268 - DNA, 25 bp, Homo sapien
gctttgaccttcctctggcaaaggt

SEQ ID NO: 318269 - DNA, 25 bp, Homo sapien
aagtggatcccggaagaggcctgca

SEQ ID NO: 318270 - DNA, 25 bp, Homo sapien
tgagaagtggatcccggaagaggcc

SEQ ID NO: 318271 - DNA, 25 bp, Homo sapien
tcccggaagaggcctgcaagggtcc

SEQ ID NO: 318272 - DNA, 25 bp, Homo sapien
agcagctccggcatccggcctgtga

SEQ ID NO: 318273 - DNA, 25 bp, Homo sapien
cggccttcctcgagctttccgtcgg

SEQ ID NO: 318274 - DNA, 25 bp, Homo sapien
tggagcagctccggcatccggcctg

SEQ ID NO: 318275 - DNA, 25 bp, Homo sapien
cctgtgacccccgaagctcggcctt

SEQ ID NO: 318276 - DNA, 25 bp, Homo sapien
atggccgagcgctcacccccaggct

SEQ ID NO: 318277 - DNA, 25 bp, Homo sapien
gccgtggcactgagtcctgtgagca

SEQ ID NO: 318278 - DNA, 25 bp, Homo sapien
caggctgggccgtggcactgagtcc

SEQ ID NO: 318279 - DNA, 25 bp, Homo sapien
ctgatggccgagcgctcacccccag

SEQ ID NO: 318280 - DNA, 25 bp, Homo sapien
tcggtccagccctgcggtcttgtgg

SEQ ID NO: 318281 - DNA, 25 bp, Homo sapien
catccccacagagcctcggtccagc

SEQ ID NO: 318282 - DNA, 25 bp, Homo sapien
agcctcctctgtgcgccatcaccat

SEQ ID NO: 318283 - DNA, 25 bp, Homo sapien
cctgcggtcttgtggacagtgaccc

SEQ ID NO: 318284 - DNA, 25 bp, Homo sapien
cagagcactcagggcaggaagccgc

SEQ ID NO: 318285 - DNA, 25 bp, Homo sapien
cccagagcactcagggcaggaagcc

SEQ ID NO: 318286 - DNA, 25 bp, Homo sapien
ccccggaggagcgcctcggcgtcgg

SEQ ID NO: 318287 - DNA, 25 bp, Homo sapien
ccagagcactcagggcaggaagccg

SEQ ID NO: 318288 - DNA, 25 bp, Homo sapien
ggcgtccgcgccctgttccaatgct

SEQ ID NO: 318289 - DNA, 25 bp, Homo sapien
ttactccatgctcggaggactggcg

SEQ ID NO: 318290 - DNA, 25 bp, Homo sapien
aatcggggccttggactggaccctg

SEQ ID NO: 318291 - DNA, 25 bp, Homo sapien
tccatgctcggaggactggcgtccg

SEQ ID NO: 318292 - DNA, 25 bp, Homo sapien
ggtgtgcctcccagcggattattta

SEQ ID NO: 318293 - DNA, 25 bp, Homo sapien
taggaacccatctccgtctgggcgc

SEQ ID NO: 318294 - DNA, 25 bp, Homo sapien
tcatgctctttacacagagtaccac

SEQ ID NO: 318295 - DNA, 25 bp, Homo sapien
gttatgctgtgtacatcacttgcag

SEQ ID NO: 318296 - DNA, 25 bp, Homo sapien
tactgtaaggactatgctcgggaac

SEQ ID NO: 318297 - DNA, 25 bp, Homo sapien
gcttcatggtgagtgaggccagaca

SEQ ID NO: 318298 - DNA, 25 bp, Homo sapien
ggtgctcagcaaactactacgatcg

SEQ ID NO: 318299 - DNA, 25 bp, Homo sapien
gatcggagccgactgcagtttgtta

SEQ ID NO: 318300 - DNA, 25 bp, Homo sapien
tgacgggcaggcttccggggactgc

SEQ ID NO: 318301 - DNA, 25 bp, Homo sapien
gctgggctgtgggacacctttgcgc

SEQ ID NO: 318302 - DNA, 25 bp, Homo sapien
gggctgtgggacacctttgcgccat

SEQ ID NO: 318303 - DNA, 25 bp, Homo sapien
gtgacgggcaggcttccggggactg

SEQ ID NO: 318304 - DNA, 25 bp, Homo sapien
gcgggtcccagcaacataggccttg

SEQ ID NO: 318305 - DNA, 25 bp, Homo sapien
tcacggagcgggtcccagcaacatg

SEQ ID NO: 318306 - DNA, 25 bp, Homo sapien
tcacggagcgggtcccagcaacata

SEQ ID NO: 318307 - DNA, 25 bp, Homo sapien
ccccggctgcattgtcacggagcaa

SEQ ID NO: 318308 - DNA, 25 bp, Homo sapien
cgagtcccagcacgatgggccttgg

SEQ ID NO: 318309 - DNA, 25 bp, Homo sapien
gagcgagtcccagcacgatgggcct

SEQ ID NO: 318310 - DNA, 25 bp, Homo sapien
tcacggagcgagtcccagcacgatg

SEQ ID NO: 318311 - DNA, 25 bp, Homo sapien
tcccagcacgatgggccttgggtct

SEQ ID NO: 318312 - DNA, 25 bp, Homo sapien
caagagcaggtctcgtgcaggcgtc

SEQ ID NO: 318313 - DNA, 25 bp, Homo sapien
accatcccagctgcattgtcgcgga

SEQ ID NO: 318314 - DNA, 25 bp, Homo sapien
attgtcgcggagtgggtcccagcaa

SEQ ID NO: 318315 - DNA, 25 bp, Homo sapien
cacagagcaagtcttgtgcaggcat

SEQ ID NO: 318316 - DNA, 25 bp, Homo sapien
ccagtggattcttgagcagtgctgc

SEQ ID NO: 318317 - DNA, 25 bp, Homo sapien
gtttgtctcttgctggtcaccacgc

SEQ ID NO: 318318 - DNA, 25 bp, Homo sapien
gcatctgtgcgtgggatcttgtgca

SEQ ID NO: 318319 - DNA, 25 bp, Homo sapien
tgcccctgcggccaactgagaagtc

SEQ ID NO: 318320 - DNA, 25 bp, Homo sapien
cgtgagagcgcgggggtgtcttcag

SEQ ID NO: 318321 - DNA, 25 bp, Homo sapien
gagagcgcgggggtgtcttcagtgt

SEQ ID NO: 318322 - DNA, 25 bp, Homo sapien
tgagagcgcgggggtgtcttcagtg

SEQ ID NO: 318323 - DNA, 25 bp, Homo sapien
ggcgtgagagcgcgggggtgtcttc

SEQ ID NO: 318324 - DNA, 25 bp, Homo sapien
tgttgcgagtctccatgtgcacgtg

SEQ ID NO: 318325 - DNA, 25 bp, Homo sapien
ccctgctgcgagtctctgtgtgcat

SEQ ID NO: 318326 - DNA, 25 bp, Homo sapien
tttgtccactcgctgccgttgcgga

SEQ ID NO: 318327 - DNA, 25 bp, Homo sapien
ccgttgcggagacccctgttgcgag

SEQ ID NO: 318328 - DNA, 25 bp, Homo sapien
ggcttctgttcctgcgatggcccag

SEQ ID NO: 318329 - DNA, 25 bp, Homo sapien
tctggccctgactcgtggcttcctt

SEQ ID NO: 318330 - DNA, 25 bp, Homo sapien
tgtgctgtgcgccaggcttctgttc

SEQ ID NO: 318331 - DNA, 25 bp, Homo sapien
gcagtgaaccgtcacctgaagcggc

SEQ ID NO: 318332 - DNA, 25 bp, Homo sapien
tccgggccactgtcttacattggag

SEQ ID NO: 318333 - DNA, 25 bp, Homo sapien
ccttgtagaagagcacgtgtcccct

SEQ ID NO: 318334 - DNA, 25 bp, Homo sapien
tctcaggctcgttcatcagatgtcc

SEQ ID NO: 318335 - DNA, 25 bp, Homo sapien
tgttttgcgggcttcccgtggtgac

SEQ ID NO: 318336 - DNA, 25 bp, Homo sapien
tggtggtttccaccaggtggcccca

SEQ ID NO: 318337 - DNA, 25 bp, Homo sapien
tggcggagccagcaagcgatgtaaa

SEQ ID NO: 318338 - DNA, 25 bp, Homo sapien
tcagagcgcactggtaagcggacgc

SEQ ID NO: 318339 - DNA, 25 bp, Homo sapien
gcgatgtaaacagacgcacttctgt

SEQ ID NO: 318340 - DNA, 25 bp, Homo sapien
gataatgaatcacatagcgcttgca

SEQ ID NO: 318341 - DNA, 25 bp, Homo sapien
tcgcatgtgcccctgccttgggatc

SEQ ID NO: 318342 - DNA, 25 bp, Homo sapien
tctaaggcgccgagtgtcatttaaa

SEQ ID NO: 318343 - DNA, 25 bp, Homo sapien
cggctgacacgggaggctttttgtt

SEQ ID NO: 318344 - DNA, 25 bp, Homo sapien
tttaaaatcagaggcacctcgcagc

SEQ ID NO: 318345 - DNA, 25 bp, Homo sapien
ttcagcagcccttctccgcattgcc

SEQ ID NO: 318346 - DNA, 25 bp, Homo sapien
cttctccgcattgcccagttccctc

SEQ ID NO: 318347 - DNA, 25 bp, Homo sapien
tgcccagttccctccggccagtgtt

SEQ ID NO: 318348 - DNA, 25 bp, Homo sapien
gcattgcccagttccctccggccag

SEQ ID NO: 318349 - DNA, 25 bp, Homo sapien
tgcgtcaggacgctgcaggctcagt

SEQ ID NO: 318350 - DNA, 25 bp, Homo sapien
cagctgcgtcaggacgctgcaggct

SEQ ID NO: 318351 - DNA, 25 bp, Homo sapien
tcaggacgctgcaggctcagtgctg

SEQ ID NO: 318352 - DNA, 25 bp, Homo sapien
gctgcgtcaggacgctgcaggctca

SEQ ID NO: 318353 - DNA, 25 bp, Homo sapien
cgggtgctgttgcacccatagaggc

SEQ ID NO: 318354 - DNA, 25 bp, Homo sapien
tctgagggttgcaccagaagcagga

SEQ ID NO: 318355 - DNA, 25 bp, Homo sapien
cccgttagatagctgtggagaaggt

SEQ ID NO: 318356 - DNA, 25 bp, Homo sapien
tacggtgcccgttagatagctgtgg

SEQ ID NO: 318357 - DNA, 25 bp, Homo sapien
gggcgtgtggggtgcatgcatggct

SEQ ID NO: 318358 - DNA, 25 bp, Homo sapien
gggtgcatgcatggctgagacaggg

SEQ ID NO: 318359 - DNA, 25 bp, Homo sapien
ggccaggggcgtgtggggtgcatgc

SEQ ID NO: 318360 - DNA, 25 bp, Homo sapien
gtggggtgcatgcatggctgagaca

SEQ ID NO: 318361 - DNA, 25 bp, Homo sapien
aggaactgaggcactgaacggtccg

SEQ ID NO: 318362 - DNA, 25 bp, Homo sapien
catttccactcgagggacgggttgg

SEQ ID NO: 318363 - DNA, 25 bp, Homo sapien
catcctttagcctgcgtgctggcgg

SEQ ID NO: 318364 - DNA, 25 bp, Homo sapien
tggtcagtgctgcaggaacgcatcc

SEQ ID NO: 318365 - DNA, 25 bp, Homo sapien
tgctgcccacatcgtccttgctgtg

SEQ ID NO: 318366 - DNA, 25 bp, Homo sapien
cctgtggcatgctgggcgctgctgc

SEQ ID NO: 318367 - DNA, 25 bp, Homo sapien
tgcccacatcgtccttgctgtgctg

SEQ ID NO: 318368 - DNA, 25 bp, Homo sapien
tcctgtggcatgctgggcgctgctg

SEQ ID NO: 318369 - DNA, 25 bp, Homo sapien
cgagggtgctgcagcgatggcgggt

SEQ ID NO: 318370 - DNA, 25 bp, Homo sapien
cagcgatggcgggtctgtgctggct

SEQ ID NO: 318371 - DNA, 25 bp, Homo sapien
aactggacggggtctcttgagaggc

SEQ ID NO: 318372 - DNA, 25 bp, Homo sapien
ccagcaggcgccgagggtgctgcag

SEQ ID NO: 318373 - DNA, 25 bp, Homo sapien
cagaatacgtttgtaaggagagaac

SEQ ID NO: 318374 - DNA, 25 bp, Homo sapien
tgtgtgcagaatacgtttgtaagga

SEQ ID NO: 318375 - DNA, 25 bp, Homo sapien
ccacagcccggccagagcagctctt

SEQ ID NO: 318376 - DNA, 25 bp, Homo sapien
cctgttgtgtgcagaatacgtttgt

SEQ ID NO: 318377 - DNA, 25 bp, Homo sapien
tcctcacctcgtagcctccagggct

SEQ ID NO: 318378 - DNA, 25 bp, Homo sapien
gctgttgaatgagttaaccgcatct

SEQ ID NO: 318379 - DNA, 25 bp, Homo sapien
gagttaaccgcatcttccgttccat

SEQ ID NO: 318380 - DNA, 25 bp, Homo sapien
aatgtcttttggctgttgaatgagt

SEQ ID NO: 318381 - DNA, 25 bp, Homo sapien
gtgccgtccacctgggttgccccac

SEQ ID NO: 318382 - DNA, 25 bp, Homo sapien
ccaaagttttctgacggccttggtg

SEQ ID NO: 318383 - DNA, 25 bp, Homo sapien
ttggctgtggaatattccaggtctc

SEQ ID NO: 318384 - DNA, 25 bp, Homo sapien
ggcaggtctgtgagccagcccctct

SEQ ID NO: 318385 - DNA, 25 bp, Homo sapien
ggatgctcagggatgtgttatgctg

SEQ ID NO: 318386 - DNA, 25 bp, Homo sapien
atgctcagggatgtgttatgctgtg

SEQ ID NO: 318387 - DNA, 25 bp, Homo sapien
ctcagggatgtgttatgctgtggct

SEQ ID NO: 318388 - DNA, 25 bp, Homo sapien
gatgtgttatgctgtggctgcatga

SEQ ID NO: 318389 - DNA, 25 bp, Homo sapien
gcctgtcactgggtgtttcttccgt

SEQ ID NO: 318390 - DNA, 25 bp, Homo sapien
tgggctcaggctccccgttgggaag

SEQ ID NO: 318391 - DNA, 25 bp, Homo sapien
actgggctctggatctgcgactcgg

SEQ ID NO: 318392 - DNA, 25 bp, Homo sapien
tcttccgttttgagttgcgctcccc

SEQ ID NO: 318393 - DNA, 25 bp, Homo sapien
ctctcccatggcgtctgagtggaca

SEQ ID NO: 318394 - DNA, 25 bp, Homo sapien
gtctaaggttttgggcccgctgaca

SEQ ID NO: 318395 - DNA, 25 bp, Homo sapien
ttgggcccgctgacacagatgtggt

SEQ ID NO: 318396 - DNA, 25 bp, Homo sapien
tctgagtggacagtgtctaaggttt

SEQ ID NO: 318397 - DNA, 25 bp, Homo sapien
tctctcttcttggaggtgacatggg

SEQ ID NO: 318398 - DNA, 25 bp, Homo sapien
tcttcttggaggtgacatggggacc

SEQ ID NO: 318399 - DNA, 25 bp, Homo sapien
aggtgacatggggaccagtgcccac

SEQ ID NO: 318400 - DNA, 25 bp, Homo sapien
tctgtctctcttcttggaggtgaca

SEQ ID NO: 318401 - DNA, 25 bp, Homo sapien
ggctgtgcttcgtgggcaggcgttt

SEQ ID NO: 318402 - DNA, 25 bp, Homo sapien
tcgtgggcaggcgtttggtgtcctg

SEQ ID NO: 318403 - DNA, 25 bp, Homo sapien
ccttccgttggctgtccttggaggg

SEQ ID NO: 318404 - DNA, 25 bp, Homo sapien
ggcttccttccgttggctgtccttg

SEQ ID NO: 318405 - DNA, 25 bp, Homo sapien
gatttggctgttgggtgttccttga

SEQ ID NO: 318406 - DNA, 25 bp, Homo sapien
tcaggaagcgtgacttttacagctt

SEQ ID NO: 318407 - DNA, 25 bp, Homo sapien
cctagtgcatttagtgggtcccatg

SEQ ID NO: 318408 - DNA, 25 bp, Homo sapien
gatcactttcggtggtattgacatc

SEQ ID NO: 318409 - DNA, 25 bp, Homo sapien
tgtcaagttttaggagtttctggat

SEQ ID NO: 318410 - DNA, 25 bp, Homo sapien
atcccatttcagatacgtgatttga

SEQ ID NO: 318411 - DNA, 25 bp, Homo sapien
aggtgacatcatagtttggatttgc

SEQ ID NO: 318412 - DNA, 25 bp, Homo sapien
tcttgccggcggtgcgcaagggttc

SEQ ID NO: 318413 - DNA, 25 bp, Homo sapien
ggctgaataaccctctgtatgtgga

SEQ ID NO: 318414 - DNA, 25 bp, Homo sapien
tggctgcgggcgttcaccgttctac

SEQ ID NO: 318415 - DNA, 25 bp, Homo sapien
cacataagcgcaatcaggcagtatt

SEQ ID NO: 318416 - DNA, 25 bp, Homo sapien
cattgcatgcattggaacttccttg

SEQ ID NO: 318417 - DNA, 25 bp, Homo sapien
cctcagttcagctgatcggtcagca

SEQ ID NO: 318418 - DNA, 25 bp, Homo sapien
ttccttcgatcatggtccagtagcc

SEQ ID NO: 318419 - DNA, 25 bp, Homo sapien
cttaatgtacacctgaacattttcc

SEQ ID NO: 318420 - DNA, 25 bp, Homo sapien
gatcatggtccagtagccctcatag

SEQ ID NO: 318421 - DNA, 25 bp, Homo sapien
gcagcctgcaggagcgcctgctctc

SEQ ID NO: 318422 - DNA, 25 bp, Homo sapien
acgacacattggaaggaggagctgc

SEQ ID NO: 318423 - DNA, 25 bp, Homo sapien
agggcacctgggtggacgcagcctg

SEQ ID NO: 318424 - DNA, 25 bp, Homo sapien
agtggcgggcactcgggaaggaagc

SEQ ID NO: 318425 - DNA, 25 bp, Homo sapien
tcactgtcgggaggcgttgtctccc

SEQ ID NO: 318426 - DNA, 25 bp, Homo sapien
ctgcacagccgtcctcagagggtgg

SEQ ID NO: 318427 - DNA, 25 bp, Homo sapien
gttgtctcccttgagcacttgctgc

SEQ ID NO: 318428 - DNA, 25 bp, Homo sapien
agccccaggctgttgacctgcacag

SEQ ID NO: 318429 - DNA, 25 bp, Homo sapien
cttgaactatctcacatgaagaaag

SEQ ID NO: 318430 - DNA, 25 bp, Homo sapien
agagcagcttatggatttcctggaa

SEQ ID NO: 318431 - DNA, 25 bp, Homo sapien
tcagtgggaactcatttgggaaccc

SEQ ID NO: 318432 - DNA, 25 bp, Homo sapien
tgttagcaggaagtctgaacttgaa

SEQ ID NO: 318433 - DNA, 25 bp, Homo sapien
ccagctgattgtttgagcttgggct

SEQ ID NO: 318434 - DNA, 25 bp, Homo sapien
caccagctgattgtttgagcttggg

SEQ ID NO: 318435 - DNA, 25 bp, Homo sapien
accagctgattgtttgagcttgggc

SEQ ID NO: 318436 - DNA, 25 bp, Homo sapien
cagctgattgtttgagcttgggctt

SEQ ID NO: 318437 - DNA, 25 bp, Homo sapien
tcacggacaagaacctcagataggc

SEQ ID NO: 318438 - DNA, 25 bp, Homo sapien
actcaggtgaaaatacgtggcgaac

SEQ ID NO: 318439 - DNA, 25 bp, Homo sapien
tgtctttgacgcagctgcatctgga

SEQ ID NO: 318440 - DNA, 25 bp, Homo sapien
gtgaacagagcagtctagggcccct

SEQ ID NO: 318441 - DNA, 25 bp, Homo sapien
caaaaagacagatgacgaccgctgg

SEQ ID NO: 318442 - DNA, 25 bp, Homo sapien
tgtggatcccagaggtcggctttgc

SEQ ID NO: 318443 - DNA, 25 bp, Homo sapien
ccatgtgacgtgtgcccagaaggct

SEQ ID NO: 318444 - DNA, 25 bp, Homo sapien
ccagcccggtggaaactgacatgct

SEQ ID NO: 318445 - DNA, 25 bp, Homo sapien
tacaagttcatcgagaagtcggccg

SEQ ID NO: 318446 - DNA, 25 bp, Homo sapien
tatgcctggctggagatcgtcaatg

SEQ ID NO: 318447 - DNA, 25 bp, Homo sapien
tgaagggcgcttgcacaggatcagt

SEQ ID NO: 318448 - DNA, 25 bp, Homo sapien
caaggtgcgcatcgtggagtacagc

SEQ ID NO: 318449 - DNA, 25 bp, Homo sapien
gggtctgaggtttggccgaccacat

SEQ ID NO: 318450 - DNA, 25 bp, Homo sapien
ggggtctgaggtttggccgaccaca

SEQ ID NO: 318451 - DNA, 25 bp, Homo sapien
gtcccgggtgcactagggtcgctct

SEQ ID NO: 318452 - DNA, 25 bp, Homo sapien
ctagggtcgctctctgcaggctgtg

SEQ ID NO: 318453 - DNA, 25 bp, Homo sapien
cagtaatgacgcgtgtcggcgtccc

SEQ ID NO: 318454 - DNA, 25 bp, Homo sapien
tcggcgtcccgggtgcactagggtc

SEQ ID NO: 318455 - DNA, 25 bp, Homo sapien
ttgcgatgaagagcttcacggctcc

SEQ ID NO: 318456 - DNA, 25 bp, Homo sapien
ccccgggtcccagttgcatgttgag

SEQ ID NO: 318457 - DNA, 25 bp, Homo sapien
ccgtgaagccttcggttcagttctc

SEQ ID NO: 318458 - DNA, 25 bp, Homo sapien
cccttgtagaaagtgttgcgatgaa

SEQ ID NO: 318459 - DNA, 25 bp, Homo sapien
gcggcccctgtggccttgaccgaga

SEQ ID NO: 318460 - DNA, 25 bp, Homo sapien
tggaagcggccgtcttgtgggcagc

SEQ ID NO: 318461 - DNA, 25 bp, Homo sapien
cgggcggtgggaagatggaagcggc

SEQ ID NO: 318462 - DNA, 25 bp, Homo sapien
gaggcccggcgcgtggccggcttct

SEQ ID NO: 318463 - DNA, 25 bp, Homo sapien
gaagcgttcgggctcagcttgcttg

SEQ ID NO: 318464 - DNA, 25 bp, Homo sapien
aatggaggtgacacgaagctcctgg

SEQ ID NO: 318465 - DNA, 25 bp, Homo sapien
tgtgttgtggagaacctccagcttg

SEQ ID NO: 318466 - DNA, 25 bp, Homo sapien
gcttgtttggccacaggtaaacaga

SEQ ID NO: 318467 - DNA, 25 bp, Homo sapien
cttctccgagctgttaggtggggag

SEQ ID NO: 318468 - DNA, 25 bp, Homo sapien
agattcccctatgggagggctgtgg

SEQ ID NO: 318469 - DNA, 25 bp, Homo sapien
gggagtgggcggacctggtgccagc

SEQ ID NO: 318470 - DNA, 25 bp, Homo sapien
gtgccagcaagttccggctccgcct

SEQ ID NO: 318471 - DNA, 25 bp, Homo sapien
cagtaccacaggattgctcatgtcg

SEQ ID NO: 318472 - DNA, 25 bp, Homo sapien
aaatcacatagtaggctgagtgcag

SEQ ID NO: 318473 - DNA, 25 bp, Homo sapien
tgtcgtccatctatagtcacacccg

SEQ ID NO: 318474 - DNA, 25 bp, Homo sapien
cagcctgacatgaatctctggcaaa

SEQ ID NO: 318475 - DNA, 25 bp, Homo sapien
gattgcgcgcctctgtccaggcggc

SEQ ID NO: 318476 - DNA, 25 bp, Homo sapien
cgcagcgggccaacttccctaaagg

SEQ ID NO: 318477 - DNA, 25 bp, Homo sapien
ttcctgagaaatcggaacgccggcg

SEQ ID NO: 318478 - DNA, 25 bp, Homo sapien
ggaactgtcgggagggcgcccagaa

SEQ ID NO: 318479 - DNA, 25 bp, Homo sapien
cccccgttgcatcgcccccacgcgg

SEQ ID NO: 318480 - DNA, 25 bp, Homo sapien
aggcatctcccccgttgcatcgccc

SEQ ID NO: 318481 - DNA, 25 bp, Homo sapien
cgttgcatcgcccccacgcgggcat

SEQ ID NO: 318482 - DNA, 25 bp, Homo sapien
atctcccccgttgcatcgcccccac

SEQ ID NO: 318483 - DNA, 25 bp, Homo sapien
gggtcacacaggtatcggaagccca

SEQ ID NO: 318484 - DNA, 25 bp, Homo sapien
tcacacaggtatcggaagcccacgc

SEQ ID NO: 318485 - DNA, 25 bp, Homo sapien
cgtcacccgcccaacccacgcggag

SEQ ID NO: 318486 - DNA, 25 bp, Homo sapien
ctggggtcacacaggtatcggaagc

SEQ ID NO: 318487 - DNA, 25 bp, Homo sapien
cccgttggtgacacggctttcggca

SEQ ID NO: 318488 - DNA, 25 bp, Homo sapien
gaccaaataaactctgcatgctgaa

SEQ ID NO: 318489 - DNA, 25 bp, Homo sapien
catgctgaatgtggccccgaggtcc

SEQ ID NO: 318490 - DNA, 25 bp, Homo sapien
tcggcattttctcggcctgagtgtg

SEQ ID NO: 318491 - DNA, 25 bp, Homo sapien
ccgcggctttgtctgcccccgcgcc

SEQ ID NO: 318492 - DNA, 25 bp, Homo sapien
accgcggctttgtctgcccccgcgc

SEQ ID NO: 318493 - DNA, 25 bp, Homo sapien
cgcggctttgtctgcccccgcgccc

SEQ ID NO: 318494 - DNA, 25 bp, Homo sapien
taccgcggctttgtctgcccccgcg

SEQ ID NO: 318495 - DNA, 25 bp, Homo sapien
cggccggctgcggacgacggcggcg

SEQ ID NO: 318496 - DNA, 25 bp, Homo sapien
tcccggccggctgcggacgacggcg

SEQ ID NO: 318497 - DNA, 25 bp, Homo sapien
cggcgcgggcggacgctccattcat

SEQ ID NO: 318498 - DNA, 25 bp, Homo sapien
gacggcggcgcgggcggacgctcca

SEQ ID NO: 318499 - DNA, 25 bp, Homo sapien
ctgagacatgaagcagggcccaggt

SEQ ID NO: 318500 - DNA, 25 bp, Homo sapien
ggtcatccccagaaccacgtacaat

SEQ ID NO: 318501 - DNA, 25 bp, Homo sapien
accacgtacaataacctgcctcggg

SEQ ID NO: 318502 - DNA, 25 bp, Homo sapien
cgcgtcgcaaggacccgtctgggct

SEQ ID NO: 318503 - DNA, 25 bp, Homo sapien
cagggccttctttgaaaaccaccat

SEQ ID NO: 318504 - DNA, 25 bp, Homo sapien
tccctacggccagggccttctttga

SEQ ID NO: 318505 - DNA, 25 bp, Homo sapien
ttttctctggtttacgctgctcctc

SEQ ID NO: 318506 - DNA, 25 bp, Homo sapien
tctggtttacgctgctcctcaccac

SEQ ID NO: 318507 - DNA, 25 bp, Homo sapien
ttctctggtttacgctgctcctcac

SEQ ID NO: 318508 - DNA, 25 bp, Homo sapien
ctctggtttacgctgctcctcacca

SEQ ID NO: 318509 - DNA, 25 bp, Homo sapien
cggtgtttctccttgaagcacttac

SEQ ID NO: 318510 - DNA, 25 bp, Homo sapien
tgccggtgtttctccttgaagcact

SEQ ID NO: 318511 - DNA, 25 bp, Homo sapien
ctgccggtgtttctccttgaagcac

SEQ ID NO: 318512 - DNA, 25 bp, Homo sapien
gccggtgtttctccttgaagcactt

SEQ ID NO: 318513 - DNA, 25 bp, Homo sapien
tctatgacggagcaaccagagctct

SEQ ID NO: 318514 - DNA, 25 bp, Homo sapien
gagaccaccaggtgggcctcgatga

SEQ ID NO: 318515 - DNA, 25 bp, Homo sapien
cagagctctccgaaatgcacatgct

SEQ ID NO: 318516 - DNA, 25 bp, Homo sapien
ttctatgacggagcaaccagagctc

SEQ ID NO: 318517 - DNA, 25 bp, Homo sapien
gatacaccgagcatccccaagtagc

SEQ ID NO: 318518 - DNA, 25 bp, Homo sapien
ccaagtagccaacaggtatcactgg

SEQ ID NO: 318519 - DNA, 25 bp, Homo sapien
aggtatcactggacggcccacagaa

SEQ ID NO: 318520 - DNA, 25 bp, Homo sapien
tcaagcgtgtgatacaccgagcatc

SEQ ID NO: 318521 - DNA, 25 bp, Homo sapien
gatctggcagctggaaaagaaagat

SEQ ID NO: 318522 - DNA, 25 bp, Homo sapien
ttagatctggcagctggaaaagaaa

SEQ ID NO: 318523 - DNA, 25 bp, Homo sapien
tctggcagctggaaaagaaagatgt

SEQ ID NO: 318524 - DNA, 25 bp, Homo sapien
tagatctggcagctggaaaagaaag

SEQ ID NO: 318525 - DNA, 25 bp, Homo sapien
gactgaccataactactccggctgt

SEQ ID NO: 318526 - DNA, 25 bp, Homo sapien
gtcctgctactaaacactcatggtg

SEQ ID NO: 318527 - DNA, 25 bp, Homo sapien
aatgtgtgcagcagagacgtgcttc

SEQ ID NO: 318528 - DNA, 25 bp, Homo sapien
tcttgagagcatacacgtgaccctt

SEQ ID NO: 318529 - DNA, 25 bp, Homo sapien
tatcagaaacgaaatcaccgtcctc

SEQ ID NO: 318530 - DNA, 25 bp, Homo sapien
tattttatcagaaacgaaatcaccg

SEQ ID NO: 318531 - DNA, 25 bp, Homo sapien
agaaacgaaatcaccgtcctctttg

SEQ ID NO: 318532 - DNA, 25 bp, Homo sapien
aaatcaccgtcctctttgggacaag

SEQ ID NO: 318533 - DNA, 25 bp, Homo sapien
tctctgcagacaagtacttccccgg

SEQ ID NO: 318534 - DNA, 25 bp, Homo sapien
tgctgtactgggagaacagcgcgcc

SEQ ID NO: 318535 - DNA, 25 bp, Homo sapien
catgtcctcctgctcgcttttaaag

SEQ ID NO: 318536 - DNA, 25 bp, Homo sapien
ccatggccacgtcgtatagggtgct

SEQ ID NO: 318537 - DNA, 25 bp, Homo sapien
ctcatgttccggctggaaaggaggc

SEQ ID NO: 318538 - DNA, 25 bp, Homo sapien
gagctcatgttccggctggaaagga

SEQ ID NO: 318539 - DNA, 25 bp, Homo sapien
ctggagctcatgttccggctggaaa

SEQ ID NO: 318540 - DNA, 25 bp, Homo sapien
tggagctcatgttccggctggaaag

SEQ ID NO: 318541 - DNA, 25 bp, Homo sapien
tgagacaactggtactcaagtcttt

SEQ ID NO: 318542 - DNA, 25 bp, Homo sapien
tgctgtctcggggagagataaaaaa

SEQ ID NO: 318543 - DNA, 25 bp, Homo sapien
gtgcctcatgagacaactggtactc

SEQ ID NO: 318544 - DNA, 25 bp, Homo sapien
ttcacacagtacatgcatattgctt

SEQ ID NO: 318545 - DNA, 25 bp, Homo sapien
agcacggtcgggtgtgcgcgcctca

SEQ ID NO: 318546 - DNA, 25 bp, Homo sapien
ttcctgaatgagcacggtcgggtgt

SEQ ID NO: 318547 - DNA, 25 bp, Homo sapien
ttttcctgaatgagcacggtcgggt

SEQ ID NO: 318548 - DNA, 25 bp, Homo sapien
cattttcctgaatgagcacggtcgg

SEQ ID NO: 318549 - DNA, 25 bp, Homo sapien
aggtcacccgcgtccgcaggctgtg

SEQ ID NO: 318550 - DNA, 25 bp, Homo sapien
tctccgaaacggacatgtcagagga

SEQ ID NO: 318551 - DNA, 25 bp, Homo sapien
gatcttagacgccactttctggaca

SEQ ID NO: 318552 - DNA, 25 bp, Homo sapien
cagactcctctgttattcgatcggg

SEQ ID NO: 318553 - DNA, 25 bp, Homo sapien
aggttcatcgtaatggagagcaggg

SEQ ID NO: 318554 - DNA, 25 bp, Homo sapien
gcaggttcatcgtaatggagagcag

SEQ ID NO: 318555 - DNA, 25 bp, Homo sapien
ggttcatcgtaatggagagcaggga

SEQ ID NO: 318556 - DNA, 25 bp, Homo sapien
caggttcatcgtaatggagagcagg

SEQ ID NO: 318557 - DNA, 25 bp, Homo sapien
gttctcctgcaacacgatggcgcgg

SEQ ID NO: 318558 - DNA, 25 bp, Homo sapien
tccagtggcgacaggtagaagtgct

SEQ ID NO: 318559 - DNA, 25 bp, Homo sapien
gggactctctgaccggctttactgg

SEQ ID NO: 318560 - DNA, 25 bp, Homo sapien
gcaagtcctcagtcagcctgtcagg

SEQ ID NO: 318561 - DNA, 25 bp, Homo sapien
ggaagatggcgccagattcaaacaa

SEQ ID NO: 318562 - DNA, 25 bp, Homo sapien
gcctcccctatgtcatcggaagatg

SEQ ID NO: 318563 - DNA, 25 bp, Homo sapien
gattcaaacaatctaggactcagcc

SEQ ID NO: 318564 - DNA, 25 bp, Homo sapien
catcggaagatgagaaggccgccac

SEQ ID NO: 318565 - DNA, 25 bp, Homo sapien
gagtttgccagacttgcacccagga

SEQ ID NO: 318566 - DNA, 25 bp, Homo sapien
gatcagctctcggaagttacactcg

SEQ ID NO: 318567 - DNA, 25 bp, Homo sapien
acaacttctggatggcgccggtaga

SEQ ID NO: 318568 - DNA, 25 bp, Homo sapien
gtgtcatcaaaagaggaagcgcctg

SEQ ID NO: 318569 - DNA, 25 bp, Homo sapien
cgcagcctcgaagggctttagcgca

SEQ ID NO: 318570 - DNA, 25 bp, Homo sapien
tgcgtgctcatctcccggctcgcag

SEQ ID NO: 318571 - DNA, 25 bp, Homo sapien
tcgaagggctttagcgcacggcaca

SEQ ID NO: 318572 - DNA, 25 bp, Homo sapien
ccggctcgcagcctcgaagggcttt

SEQ ID NO: 318573 - DNA, 25 bp, Homo sapien
tccgtaaacagggaggccttgtagc

SEQ ID NO: 318574 - DNA, 25 bp, Homo sapien
taaatcctgtttgtactgctccgcc

SEQ ID NO: 318575 - DNA, 25 bp, Homo sapien
tcttcaggttccagtaggtgagcgg

SEQ ID NO: 318576 - DNA, 25 bp, Homo sapien
cttgtagcgaggatccagcagcgtg

SEQ ID NO: 318577 - DNA, 25 bp, Homo sapien
catcatgagcctggattggccaagg

SEQ ID NO: 318578 - DNA, 25 bp, Homo sapien
caaggctaccgttctcagtgggtgt

SEQ ID NO: 318579 - DNA, 25 bp, Homo sapien
cctggattggccaaggctaccgttc

SEQ ID NO: 318580 - DNA, 25 bp, Homo sapien
ctcagtgggtgtgttgaacagcttt

SEQ ID NO: 318581 - DNA, 25 bp, Homo sapien
cccgcgaaacttggcctgaaggaga

SEQ ID NO: 318582 - DNA, 25 bp, Homo sapien
tctgatgtcgtacacagccgtgggc

SEQ ID NO: 318583 - DNA, 25 bp, Homo sapien
taactgaccatgtaaagcctgaatg

SEQ ID NO: 318584 - DNA, 25 bp, Homo sapien
aatattatctgtactccgcgggaca

SEQ ID NO: 318585 - DNA, 25 bp, Homo sapien
gaagcaggctgttctcacgggaaca

SEQ ID NO: 318586 - DNA, 25 bp, Homo sapien
taaaggcaggctagctcaagggcca

SEQ ID NO: 318587 - DNA, 25 bp, Homo sapien
aaatgtccaccaacgaaatgaaggg

SEQ ID NO: 318588 - DNA, 25 bp, Homo sapien
gagtgccggtttcaacaaatgtcca

SEQ ID NO: 318589 - DNA, 25 bp, Homo sapien
gttgttgtcattgttggtggtttta

SEQ ID NO: 318590 - DNA, 25 bp, Homo sapien
tgtcattgttggtggttttaagaga

SEQ ID NO: 318591 - DNA, 25 bp, Homo sapien
tggtggttttaagagagaggatctt

SEQ ID NO: 318592 - DNA, 25 bp, Homo sapien
cattgttggtggttttaagagagag

SEQ ID NO: 318593 - DNA, 25 bp, Homo sapien
aatccatactttcaccccttgcagg

SEQ ID NO: 318594 - DNA, 25 bp, Homo sapien
tagcggttaccctagagatcacgtc

SEQ ID NO: 318595 - DNA, 25 bp, Homo sapien
gccatgatgtgcctaggtgcaggtt

SEQ ID NO: 318596 - DNA, 25 bp, Homo sapien
tcaagtgtccacctggagaattccc

SEQ ID NO: 318597 - DNA, 25 bp, Homo sapien
tccttggactcgatatgtgaagcct

SEQ ID NO: 318598 - DNA, 25 bp, Homo sapien
gctgaggcaagtgttcagatctctc

SEQ ID NO: 318599 - DNA, 25 bp, Homo sapien
gaagcctgtgaatgaacatagctgg

SEQ ID NO: 318600 - DNA, 25 bp, Homo sapien
tgcctgaggccgtgctgtcagatgt

SEQ ID NO: 318601 - DNA, 25 bp, Homo sapien
aacaatgtgattgaggccggacgtg

SEQ ID NO: 318602 - DNA, 25 bp, Homo sapien
aaagtatatattgaactggtatcca

SEQ ID NO: 318603 - DNA, 25 bp, Homo sapien
aagtatatattgaactggtatccaa

SEQ ID NO: 318604 - DNA, 25 bp, Homo sapien
gtctccaatatatacaaagtatata

SEQ ID NO: 318605 - DNA, 25 bp, Homo sapien
cacgtgcacactatgcatacagtgc

SEQ ID NO: 318606 - DNA, 25 bp, Homo sapien
cactatgcatacagtgcacacatgc

SEQ ID NO: 318607 - DNA, 25 bp, Homo sapien
gcacacgtgcacactatgcatacag

SEQ ID NO: 318608 - DNA, 25 bp, Homo sapien
gcacactatgcatacagtgcacaca

SEQ ID NO: 318609 - DNA, 25 bp, Homo sapien
catgactaatcaggagcagcgggct

SEQ ID NO: 318610 - DNA, 25 bp, Homo sapien
tttcaactacccaggtggcgtcgca

SEQ ID NO: 318611 - DNA, 25 bp, Homo sapien
tcatcccacaggtacgacaagaggg

SEQ ID NO: 318612 - DNA, 25 bp, Homo sapien
gtttctccaagtcaacagcgcctgg

SEQ ID NO: 318613 - DNA, 25 bp, Homo sapien
tgtcctgaacaaaagctccaactgg

SEQ ID NO: 318614 - DNA, 25 bp, Homo sapien
tatttttggcggcagctcacttggc

SEQ ID NO: 318615 - DNA, 25 bp, Homo sapien
tcacttggccggaaggaaaggtgct

SEQ ID NO: 318616 - DNA, 25 bp, Homo sapien
gactgacggttgctgtggactctta

SEQ ID NO: 318617 - DNA, 25 bp, Homo sapien
gaagtccacaggcaattccggggct

SEQ ID NO: 318618 - DNA, 25 bp, Homo sapien
ttgggaacggaaacccaccatggca

SEQ ID NO: 318619 - DNA, 25 bp, Homo sapien
taagaagtagcacgttcctggggaa

SEQ ID NO: 318620 - DNA, 25 bp, Homo sapien
aagccgtgcatgtcctgtagaggca

SEQ ID NO: 318621 - DNA, 25 bp, Homo sapien
cacgggcccctgaggttgtcctgtt

SEQ ID NO: 318622 - DNA, 25 bp, Homo sapien
gtgtagcagctggacatgttgctgg

SEQ ID NO: 318623 - DNA, 25 bp, Homo sapien
tagtgtttgggggacccattgccag

SEQ ID NO: 318624 - DNA, 25 bp, Homo sapien
gctcatggccagtgtggtgccacct

SEQ ID NO: 318625 - DNA, 25 bp, Homo sapien
cttgttgggtccgaggaggtgctgg

SEQ ID NO: 318626 - DNA, 25 bp, Homo sapien
cgtaatgttttcaccccacagctga

SEQ ID NO: 318627 - DNA, 25 bp, Homo sapien
cacagctgaactcttccttgctggg

SEQ ID NO: 318628 - DNA, 25 bp, Homo sapien
gcccgccaggagtgtcagagtcagc

SEQ ID NO: 318629 - DNA, 25 bp, Homo sapien
gtgagctgtgctggtcatcagcaga

SEQ ID NO: 318630 - DNA, 25 bp, Homo sapien
tcatgccctcgaaagtgagctgtgc

SEQ ID NO: 318631 - DNA, 25 bp, Homo sapien
gagctgtgctggtcatcagcagaag

SEQ ID NO: 318632 - DNA, 25 bp, Homo sapien
tgagctgtgctggtcatcagcagaa

SEQ ID NO: 318633 - DNA, 25 bp, Homo sapien
gctctgttctgtttccgccgtcctg

SEQ ID NO: 318634 - DNA, 25 bp, Homo sapien
aggactttagattcgggctctgttc

SEQ ID NO: 318635 - DNA, 25 bp, Homo sapien
gctgcggtagccactttagatttgg

SEQ ID NO: 318636 - DNA, 25 bp, Homo sapien
aggcagccgcgcttcgaaggacgcc

SEQ ID NO: 318637 - DNA, 25 bp, Homo sapien
cgcagcccgcggcggccatctttac

SEQ ID NO: 318638 - DNA, 25 bp, Homo sapien
ctcgcgcgcagcccgcggcggccat

SEQ ID NO: 318639 - DNA, 25 bp, Homo sapien
ctccccgcccctcgcgcgcagcccg

SEQ ID NO: 318640 - DNA, 25 bp, Homo sapien
ccgcccctcgcgcgcagcccgcggc

SEQ ID NO: 318641 - DNA, 25 bp, Homo sapien
ctgcgggaagacgcagccggagctc

SEQ ID NO: 318642 - DNA, 25 bp, Homo sapien
tgcgggaagacgcagccggagctcc

SEQ ID NO: 318643 - DNA, 25 bp, Homo sapien
gcgggaagacgcagccggagctcca

SEQ ID NO: 318644 - DNA, 25 bp, Homo sapien
ccggtggcagggcgtcggcttcttg

SEQ ID NO: 318645 - DNA, 25 bp, Homo sapien
gcaccggtggcagggcgtcggcttc

SEQ ID NO: 318646 - DNA, 25 bp, Homo sapien
gcagggcgtcggcttcttggcggcc

SEQ ID NO: 318647 - DNA, 25 bp, Homo sapien
gtggcagggcgtcggcttcttggcg

SEQ ID NO: 318648 - DNA, 25 bp, Homo sapien
gaccccggatccagggtgagggcga

SEQ ID NO: 318649 - DNA, 25 bp, Homo sapien
gacggtgagggggatcccgaatcca

SEQ ID NO: 318650 - DNA, 25 bp, Homo sapien
ctggatcgacggtgagggggatccc

SEQ ID NO: 318651 - DNA, 25 bp, Homo sapien
gatcccgaatccagggtgaggggga

SEQ ID NO: 318652 - DNA, 25 bp, Homo sapien
caggtcgagggtgaggggactccag

SEQ ID NO: 318653 - DNA, 25 bp, Homo sapien
caggcccacggtggcgtcgaccctg

SEQ ID NO: 318654 - DNA, 25 bp, Homo sapien
ccaggtcgagggtgaggggactcca

SEQ ID NO: 318655 - DNA, 25 bp, Homo sapien
tggcgtcgaccctggttccacggtg

SEQ ID NO: 318656 - DNA, 25 bp, Homo sapien
gacagtgcccatagtgcttggtacc

SEQ ID NO: 318657 - DNA, 25 bp, Homo sapien
agacagtgcccatagtgcttggtac

SEQ ID NO: 318658 - DNA, 25 bp, Homo sapien
cagtgcccatagtgcttggtaccac

SEQ ID NO: 318659 - DNA, 25 bp, Homo sapien
acagtgcccatagtgcttggtacca

SEQ ID NO: 318660 - DNA, 25 bp, Homo sapien
aagttcttctttgcggtgtccacca

SEQ ID NO: 318661 - DNA, 25 bp, Homo sapien
ccaagccgtgttcccgccgccaaag

SEQ ID NO: 318662 - DNA, 25 bp, Homo sapien
gccgccaaagttcttctttgcggtg

SEQ ID NO: 318663 - DNA, 25 bp, Homo sapien
caaagttcttctttgcggtgtccac

SEQ ID NO: 318664 - DNA, 25 bp, Homo sapien
tgaagaaaaatccgaaccaatacgc

SEQ ID NO: 318665 - DNA, 25 bp, Homo sapien
cagtgaagaaaaatccgaaccaata

SEQ ID NO: 318666 - DNA, 25 bp, Homo sapien
ttcgaagtcgctgctctcgcacagc

SEQ ID NO: 318667 - DNA, 25 bp, Homo sapien
tagcatctgattgcattcgaagtcg

SEQ ID NO: 318668 - DNA, 25 bp, Homo sapien
tctgattgcattcgaagtcgctgct

SEQ ID NO: 318669 - DNA, 25 bp, Homo sapien
cctgcgcctctagcatctgattgca

SEQ ID NO: 318670 - DNA, 25 bp, Homo sapien
ctttcagtgtcttcacacaaaacca

SEQ ID NO: 318671 - DNA, 25 bp, Homo sapien
cacaaaaccactcgaataagtcagg

SEQ ID NO: 318672 - DNA, 25 bp, Homo sapien
agacagtcgggaccgtaggttcctg

SEQ ID NO: 318673 - DNA, 25 bp, Homo sapien
tgtcttcacacaaaaccactcgaat

SEQ ID NO: 318674 - DNA, 25 bp, Homo sapien
catggcacccaaaccctgtacgatt

SEQ ID NO: 318675 - DNA, 25 bp, Homo sapien
gcggtgttctcacacggagagaacg

SEQ ID NO: 318676 - DNA, 25 bp, Homo sapien
tctgaggacgtacatgagcctgaag

SEQ ID NO: 318677 - DNA, 25 bp, Homo sapien
tctcacacggagagaacgcatggca

SEQ ID NO: 318678 - DNA, 25 bp, Homo sapien
atgtggcaccggcaggacccgtcgc

SEQ ID NO: 318679 - DNA, 25 bp, Homo sapien
tccatgcagtcagtgcacagcgggc

SEQ ID NO: 318680 - DNA, 25 bp, Homo sapien
gatgctgtgggtctcgttccggagc

SEQ ID NO: 318681 - DNA, 25 bp, Homo sapien
gcgagctgaagtagccgtccatgca

SEQ ID NO: 318682 - DNA, 25 bp, Homo sapien
gacagacagcaaggcgggtaagaat

SEQ ID NO: 318683 - DNA, 25 bp, Homo sapien
cacgccaacatccaagagacagaca

SEQ ID NO: 318684 - DNA, 25 bp, Homo sapien
gttccggccacggatccatgcgtgg

SEQ ID NO: 318685 - DNA, 25 bp, Homo sapien
tatccatactctggagctgtagcct

SEQ ID NO: 318686 - DNA, 25 bp, Homo sapien
cacgtcttgcaggactcgtcacagg

SEQ ID NO: 318687 - DNA, 25 bp, Homo sapien
agcccacttcacactcgccgcagtc

SEQ ID NO: 318688 - DNA, 25 bp, Homo sapien
ctctgttggtcaggcccgagcacgt

SEQ ID NO: 318689 - DNA, 25 bp, Homo sapien
tcacactcgccgcagtctctgttgg

SEQ ID NO: 318690 - DNA, 25 bp, Homo sapien
tcctccacccccgggccgctcctca

SEQ ID NO: 318691 - DNA, 25 bp, Homo sapien
ctgacacagcccgtggccagggccg

SEQ ID NO: 318692 - DNA, 25 bp, Homo sapien
gggaaggaccgatcatggcctgaca

SEQ ID NO: 318693 - DNA, 25 bp, Homo sapien
aaggaccgatcatggcctgacacag

SEQ ID NO: 318694 - DNA, 25 bp, Homo sapien
tgagcggcccaggacagcccggcca

SEQ ID NO: 318695 - DNA, 25 bp, Homo sapien
cgttggcgttcttacagaactgcgc

SEQ ID NO: 318696 - DNA, 25 bp, Homo sapien
cttcgcacgtgtaggagccgttggc

SEQ ID NO: 318697 - DNA, 25 bp, Homo sapien
cgtgtaggagccgttggcgttctta

SEQ ID NO: 318698 - DNA, 25 bp, Homo sapien
tacagaactgcgcagcgctgcaggg

SEQ ID NO: 318699 - DNA, 25 bp, Homo sapien
tattagtggctcactgagggaccca

SEQ ID NO: 318700 - DNA, 25 bp, Homo sapien
ttgacaaaggcagcaacgaaacccg

SEQ ID NO: 318701 - DNA, 25 bp, Homo sapien
gagacgttcgcaacaagctgctgag

SEQ ID NO: 318702 - DNA, 25 bp, Homo sapien
tcattagcgtgacagagaaaccaca

SEQ ID NO: 318703 - DNA, 25 bp, Homo sapien
ccagagatacactctttacagtttc

SEQ ID NO: 318704 - DNA, 25 bp, Homo sapien
gagatacactctttacagtttcctg

SEQ ID NO: 318705 - DNA, 25 bp, Homo sapien
acactgtccgtgctccctcgcgtag

SEQ ID NO: 318706 - DNA, 25 bp, Homo sapien
gctccctcgcgtagccagagataca

SEQ ID NO: 318707 - DNA, 25 bp, Homo sapien
tggcaggcctggacttaagcctcgg

SEQ ID NO: 318708 - DNA, 25 bp, Homo sapien
tctgcaggacgggtctcaactgctt

SEQ ID NO: 318709 - DNA, 25 bp, Homo sapien
gtctcacgtggacctcagggcgagt

SEQ ID NO: 318710 - DNA, 25 bp, Homo sapien
catcatggtcacttgggaagggtcc

SEQ ID NO: 318711 - DNA, 25 bp, Homo sapien
gaatttcacgtctccaagttgggcc

SEQ ID NO: 318712 - DNA, 25 bp, Homo sapien
taaagaaagcacaacgatgacaaac

SEQ ID NO: 318713 - DNA, 25 bp, Homo sapien
ttactttgctcagcagacgcgcagc

SEQ ID NO: 318714 - DNA, 25 bp, Homo sapien
gacgcgcagcggattatgaaattca

SEQ ID NO: 318715 - DNA, 25 bp, Homo sapien
tagctccctggagtattgtagcagt

SEQ ID NO: 318716 - DNA, 25 bp, Homo sapien
ccgtttcttcgaagccgtcaggaca

SEQ ID NO: 318717 - DNA, 25 bp, Homo sapien
ttttctgctagtgagcactcgtcca

SEQ ID NO: 318718 - DNA, 25 bp, Homo sapien
tcaggacacacacagacgtagctcc

SEQ ID NO: 318719 - DNA, 25 bp, Homo sapien
gaccaagcagccagtctacgtgcaa

SEQ ID NO: 318720 - DNA, 25 bp, Homo sapien
tcagaccaagcagccagtctacgtg

SEQ ID NO: 318721 - DNA, 25 bp, Homo sapien
gatttcagaccaagcagccagtcta

SEQ ID NO: 318722 - DNA, 25 bp, Homo sapien
ccaagcagccagtctacgtgcaagc

SEQ ID NO: 318723 - DNA, 25 bp, Homo sapien
ttccttgcggcctggcagaatggga

SEQ ID NO: 318724 - DNA, 25 bp, Homo sapien
tcccaggacagcagcgcatgtgcag

SEQ ID NO: 318725 - DNA, 25 bp, Homo sapien
agtcctggctcaaagccccggacgc

SEQ ID NO: 318726 - DNA, 25 bp, Homo sapien
cagacggcatttcagagcccccacg

SEQ ID NO: 318727 - DNA, 25 bp, Homo sapien
gggcagctgtgtcgggctttctcct

SEQ ID NO: 318728 - DNA, 25 bp, Homo sapien
agggcagctgtgtcgggctttctcc

SEQ ID NO: 318729 - DNA, 25 bp, Homo sapien
ttacaggtcttcgcgggagggcagc

SEQ ID NO: 318730 - DNA, 25 bp, Homo sapien
caggtcttcgcgggagggcagctgt

SEQ ID NO: 318731 - DNA, 25 bp, Homo sapien
attttccacgggacatccttctgaa

SEQ ID NO: 318732 - DNA, 25 bp, Homo sapien
tgcaggagacggcatcctcagggcc

SEQ ID NO: 318733 - DNA, 25 bp, Homo sapien
aatcaaccgttagagagcaggcagc

SEQ ID NO: 318734 - DNA, 25 bp, Homo sapien
gcagctgtttaagggacaaatgaga

SEQ ID NO: 318735 - DNA, 25 bp, Homo sapien
ggcccagtgagcataggtgcactga

SEQ ID NO: 318736 - DNA, 25 bp, Homo sapien
acatggaggtcagtagtgccaggat

SEQ ID NO: 318737 - DNA, 25 bp, Homo sapien
aatacccaggtaagcgtgaccacct

SEQ ID NO: 318738 - DNA, 25 bp, Homo sapien
cttccaatacccaggtaagcgtgac

SEQ ID NO: 318739 - DNA, 25 bp, Homo sapien
tggacgtgcgggtcagtagtgccag

SEQ ID NO: 318740 - DNA, 25 bp, Homo sapien
gtctccagcgtggacgtgcgggtca

SEQ ID NO: 318741 - DNA, 25 bp, Homo sapien
ggtcagtagtgccaggacggtgcac

SEQ ID NO: 318742 - DNA, 25 bp, Homo sapien
tgcgggtcagtagtgccaggacggt

SEQ ID NO: 318743 - DNA, 25 bp, Homo sapien
ctgctcccaacgtccggaaccgcgg

SEQ ID NO: 318744 - DNA, 25 bp, Homo sapien
ctagcgttcactggcgacaaagtgg

SEQ ID NO: 318745 - DNA, 25 bp, Homo sapien
tcactggcgacaaagtggatatgcg

SEQ ID NO: 318746 - DNA, 25 bp, Homo sapien
gcgacaaagtggatatgcgcgcccg

SEQ ID NO: 318747 - DNA, 25 bp, Homo sapien
ccagccgccaccctatctaggaagt

SEQ ID NO: 318748 - DNA, 25 bp, Homo sapien
gcctggccgctgtgcaatcttccaa

SEQ ID NO: 318749 - DNA, 25 bp, Homo sapien
ctattgtcctatgactctgacatat

SEQ ID NO: 318750 - DNA, 25 bp, Homo sapien
tgcaggtgtatccaacagctgtgaa

SEQ ID NO: 318751 - DNA, 25 bp, Homo sapien
ggagccacaggaaccgtgagtacat

SEQ ID NO: 318752 - DNA, 25 bp, Homo sapien
ctgggctaggagcagaagtccaggt

SEQ ID NO: 318753 - DNA, 25 bp, Homo sapien
ggctaggagcagaagtccaggtctc

SEQ ID NO: 318754 - DNA, 25 bp, Homo sapien
taggagcagaagtccaggtctccat

SEQ ID NO: 318755 - DNA, 25 bp, Homo sapien
gctaggagcagaagtccaggtctcc

SEQ ID NO: 318756 - DNA, 25 bp, Homo sapien
gactgagggtcactgactgccgcca

SEQ ID NO: 318757 - DNA, 25 bp, Homo sapien
ccaggttttgcagatgcacgggaaa

SEQ ID NO: 318758 - DNA, 25 bp, Homo sapien
tcactgactgccgccacccatgtgg

SEQ ID NO: 318759 - DNA, 25 bp, Homo sapien
cactgactgccgccacccatgtggc

SEQ ID NO: 318760 - DNA, 25 bp, Homo sapien
ctggaacagaaaacagttcactagt

SEQ ID NO: 318761 - DNA, 25 bp, Homo sapien
cagttcactagtagcacgtgattcc

SEQ ID NO: 318762 - DNA, 25 bp, Homo sapien
gaaaacagttcactagtagcacgtg

SEQ ID NO: 318763 - DNA, 25 bp, Homo sapien
tcactagtagcacgtgattccacac

SEQ ID NO: 318764 - DNA, 25 bp, Homo sapien
ggcttccatcaggacgctgggtcca

SEQ ID NO: 318765 - DNA, 25 bp, Homo sapien
gggtggtcggcaaatgggtagagac

SEQ ID NO: 318766 - DNA, 25 bp, Homo sapien
gggtccagcctgtatactccgccca

SEQ ID NO: 318767 - DNA, 25 bp, Homo sapien
ggcggcgggtttcgtggccatggca

SEQ ID NO: 318768 - DNA, 25 bp, Homo sapien
agagagagcagacgcccttcgcctc

SEQ ID NO: 318769 - DNA, 25 bp, Homo sapien
tctcctgaaggtggatgcggggagt

SEQ ID NO: 318770 - DNA, 25 bp, Homo sapien
ggcggggcagaaccgcgcgacgttc

SEQ ID NO: 318771 - DNA, 25 bp, Homo sapien
tggatgcggggagtccaggccacag

SEQ ID NO: 318772 - DNA, 25 bp, Homo sapien
cctccttcacttagggtgggcccag

SEQ ID NO: 318773 - DNA, 25 bp, Homo sapien
gcatgctccattaatcacgcacaga

SEQ ID NO: 318774 - DNA, 25 bp, Homo sapien
tccgtgcgtctctccgctgggatga

SEQ ID NO: 318775 - DNA, 25 bp, Homo sapien
tgctcggttagctcatgcatgctcc

SEQ ID NO: 318776 - DNA, 25 bp, Homo sapien
catttcgtcagatggagtagtgcac

SEQ ID NO: 318777 - DNA, 25 bp, Homo sapien
tggaggagtacacatcatctgatgg

SEQ ID NO: 318778 - DNA, 25 bp, Homo sapien
tagatggaggagttcacgtcaaatg

SEQ ID NO: 318779 - DNA, 25 bp, Homo sapien
cgtcagatggaggagtacacattgt

SEQ ID NO: 318780 - DNA, 25 bp, Homo sapien
ctgtgaggtctgtccacgctgatac

SEQ ID NO: 318781 - DNA, 25 bp, Homo sapien
gtccgtccacactgatacacgtggg

SEQ ID NO: 318782 - DNA, 25 bp, Homo sapien
tctgtccacgctgatacatgtgagg

SEQ ID NO: 318783 - DNA, 25 bp, Homo sapien
catgaggtccgtccacactgataca

SEQ ID NO: 318784 - DNA, 25 bp, Homo sapien
acatgaggtccgtgaggtccgtcca

SEQ ID NO: 318785 - DNA, 25 bp, Homo sapien
acacatgaggtccgtgaggtccgtc

SEQ ID NO: 318786 - DNA, 25 bp, Homo sapien
atgaggtccgtgaggtccgtccaca

SEQ ID NO: 318787 - DNA, 25 bp, Homo sapien
ctggcacacatgaggtccgtgaggt

SEQ ID NO: 318788 - DNA, 25 bp, Homo sapien
ctgtgaggtctgtccctgctggcac

SEQ ID NO: 318789 - DNA, 25 bp, Homo sapien
gtctgtccctgctggcacacatgag

SEQ ID NO: 318790 - DNA, 25 bp, Homo sapien
cctgctggcacacatgaggtctgtg

SEQ ID NO: 318791 - DNA, 25 bp, Homo sapien
catgaggtctgtgaggtccatccaa

SEQ ID NO: 318792 - DNA, 25 bp, Homo sapien
tctgtgaggtccgtccacgctggca

SEQ ID NO: 318793 - DNA, 25 bp, Homo sapien
gtgaggtccgtccacgctggcacac

SEQ ID NO: 318794 - DNA, 25 bp, Homo sapien
gggtctgtgaggtccgtccacgctg

SEQ ID NO: 318795 - DNA, 25 bp, Homo sapien
tggggtctgtgaggtccgtccacgc

SEQ ID NO: 318796 - DNA, 25 bp, Homo sapien
tacgccggcacaagtgaggtccatc

SEQ ID NO: 318797 - DNA, 25 bp, Homo sapien
gtgaggtccgtgagctctgtccaca

SEQ ID NO: 318798 - DNA, 25 bp, Homo sapien
ctacgccggcacaagtgaggtccat

SEQ ID NO: 318799 - DNA, 25 bp, Homo sapien
gagtcagtgccattcctacagagca

SEQ ID NO: 318800 - DNA, 25 bp, Homo sapien
tacagagcatcctgggtgctccagc

SEQ ID NO: 318801 - DNA, 25 bp, Homo sapien
cctgcttcatggacggctggcttct

SEQ ID NO: 318802 - DNA, 25 bp, Homo sapien
gcccagatttgatgaggcgcctccc

SEQ ID NO: 318803 - DNA, 25 bp, Homo sapien
agcgcgtgacccggggctacactcg

SEQ ID NO: 318804 - DNA, 25 bp, Homo sapien
tgtgacccgcgggtctttgtgacct

SEQ ID NO: 318805 - DNA, 25 bp, Homo sapien
tccagcctcgcgtcggggaagggcc

SEQ ID NO: 318806 - DNA, 25 bp, Homo sapien
gggatggagtgtgacctccacaggg

SEQ ID NO: 318807 - DNA, 25 bp, Homo sapien
ccacgagtggttctgcggataccaa

SEQ ID NO: 318808 - DNA, 25 bp, Homo sapien
tgcggataccaaggccctcccaagt

SEQ ID NO: 318809 - DNA, 25 bp, Homo sapien
cagcggcgtgggaccccacgagtgg

SEQ ID NO: 318810 - DNA, 25 bp, Homo sapien
gggcgctgatacggtcaccccgtcg

SEQ ID NO: 318811 - DNA, 25 bp, Homo sapien
catttttgtttaatacgcttgagca

SEQ ID NO: 318812 - DNA, 25 bp, Homo sapien
gagtcagaattaggcacttggagcg

SEQ ID NO: 318813 - DNA, 25 bp, Homo sapien
ttcagagtcagaattaggcacttgg

SEQ ID NO: 318814 - DNA, 25 bp, Homo sapien
ttttgtttaatacgcttgagcaata

SEQ ID NO: 318815 - DNA, 25 bp, Homo sapien
ggcctggggccatcaagatcaaaga

SEQ ID NO: 318816 - DNA, 25 bp, Homo sapien
gcctggggccatcaagatcaaagaa

SEQ ID NO: 318817 - DNA, 25 bp, Homo sapien
cctggggccatcaagatcaaagaac

SEQ ID NO: 318818 - DNA, 25 bp, Homo sapien
actttgtcttgatcctcactgagaa

SEQ ID NO: 318819 - DNA, 25 bp, Homo sapien
agggtacagcccaggcggtcactgc

SEQ ID NO: 318820 - DNA, 25 bp, Homo sapien
tcttctccatctccgctgttttggg

SEQ ID NO: 318821 - DNA, 25 bp, Homo sapien
ctcctagcaagtactttgtcttgat

SEQ ID NO: 318822 - DNA, 25 bp, Homo sapien
tggagtctctcgagcgtggtcctgc

SEQ ID NO: 318823 - DNA, 25 bp, Homo sapien
taaaccaatggttgaggaacagaga

SEQ ID NO: 318824 - DNA, 25 bp, Homo sapien
gagagcacagatatgaatgtcaagg

SEQ ID NO: 318825 - DNA, 25 bp, Homo sapien
caggcatcaggctatctgggagagc

SEQ ID NO: 318826 - DNA, 25 bp, Homo sapien
ccaggctcccctgctcggagcccat

SEQ ID NO: 318827 - DNA, 25 bp, Homo sapien
tttgcactggcagcccctcagctcc

SEQ ID NO: 318828 - DNA, 25 bp, Homo sapien
ggcctttgcactggcagcccctcag

SEQ ID NO: 318829 - DNA, 25 bp, Homo sapien
agcccctcagctccccagtcttctc

SEQ ID NO: 318830 - DNA, 25 bp, Homo sapien
tcttcctgaagctgccgaggcccat

SEQ ID NO: 318831 - DNA, 25 bp, Homo sapien
gaatggtgagcacccagcatcagct

SEQ ID NO: 318832 - DNA, 25 bp, Homo sapien
tggtatggccgggtggactgcggag

SEQ ID NO: 318833 - DNA, 25 bp, Homo sapien
gattttgcccctgctctcttatgta

SEQ ID NO: 318834 - DNA, 25 bp, Homo sapien
ggccctcgcccggcctaggctgccg

SEQ ID NO: 318835 - DNA, 25 bp, Homo sapien
cagctgcccggcttcctccctaggg

SEQ ID NO: 318836 - DNA, 25 bp, Homo sapien
ggtgtccgccgtcctccagaagaag

SEQ ID NO: 318837 - DNA, 25 bp, Homo sapien
ggggtgtccgccgtcctccagaaga

SEQ ID NO: 318838 - DNA, 25 bp, Homo sapien
tgtccgccgtcctccagaagaaggc

SEQ ID NO: 318839 - DNA, 25 bp, Homo sapien
tccctcgtggccgacacgcgagggc

SEQ ID NO: 318840 - DNA, 25 bp, Homo sapien
actcaaagacctatgggcgcggctc

SEQ ID NO: 318841 - DNA, 25 bp, Homo sapien
gggatccccgccagcggagatgagg

SEQ ID NO: 318842 - DNA, 25 bp, Homo sapien
ctgccggcccgcactgcactcaaag

SEQ ID NO: 318843 - DNA, 25 bp, Homo sapien
gtgtcaccggagagacctcacagag

SEQ ID NO: 318844 - DNA, 25 bp, Homo sapien
ccgccaatgacgctgcggacaggga

SEQ ID NO: 318845 - DNA, 25 bp, Homo sapien
cgacatggagagacgacttggcagc

SEQ ID NO: 318846 - DNA, 25 bp, Homo sapien
tgctcggcgtaaacacacaaagtga

SEQ ID NO: 318847 - DNA, 25 bp, Homo sapien
gctgagcgcgtgttctaccgaagag

SEQ ID NO: 318848 - DNA, 25 bp, Homo sapien
tcacagaaggcaattagggacccac

SEQ ID NO: 318849 - DNA, 25 bp, Homo sapien
taccgaagagatccacggagcaagt

SEQ ID NO: 318850 - DNA, 25 bp, Homo sapien
tacaggcataggatctgagcgctgc

SEQ ID NO: 318851 - DNA, 25 bp, Homo sapien
ctgggcagacaagtctggcccagga

SEQ ID NO: 318852 - DNA, 25 bp, Homo sapien
caaacacggtgctggaaaaggttcg

SEQ ID NO: 318853 - DNA, 25 bp, Homo sapien
gagtcctgaacgtgcctttactgca

SEQ ID NO: 318854 - DNA, 25 bp, Homo sapien
gcagcagcctcggaagactggagaa

SEQ ID NO: 318855 - DNA, 25 bp, Homo sapien
taatcgctgcagtaccttgtcacga

SEQ ID NO: 318856 - DNA, 25 bp, Homo sapien
aatcacttcctgtccaacattcaga

SEQ ID NO: 318857 - DNA, 25 bp, Homo sapien
cactggagaagtagatcatatcatc

SEQ ID NO: 318858 - DNA, 25 bp, Homo sapien
tcacgacaccccgtacagttttcag

SEQ ID NO: 318859 - DNA, 25 bp, Homo sapien
gggccgcagtctgagggactcccat

SEQ ID NO: 318860 - DNA, 25 bp, Homo sapien
ccaatcaacactcgggggccgcagt

SEQ ID NO: 318861 - DNA, 25 bp, Homo sapien
tcttcccacttatcagagacagctt

SEQ ID NO: 318862 - DNA, 25 bp, Homo sapien
gtctgactgatacagcctgcgccct

SEQ ID NO: 318863 - DNA, 25 bp, Homo sapien
ttttccaattcctgccctaccacaa

SEQ ID NO: 318864 - DNA, 25 bp, Homo sapien
tgccctaccacaatgtatgcacagg

SEQ ID NO: 318865 - DNA, 25 bp, Homo sapien
cacaatgtatgcacaggtctgtttc

SEQ ID NO: 318866 - DNA, 25 bp, Homo sapien
aattcctgccctaccacaatgtatg

SEQ ID NO: 318867 - DNA, 25 bp, Homo sapien
gtggtccaagccatggcctgccgga

SEQ ID NO: 318868 - DNA, 25 bp, Homo sapien
ctgagtggtgctgacagaacagaga

SEQ ID NO: 318869 - DNA, 25 bp, Homo sapien
ggtggaaaactgcaggttcagtgac

SEQ ID NO: 318870 - DNA, 25 bp, Homo sapien
tgccggacgcaagacaccgctgggc

SEQ ID NO: 318871 - DNA, 25 bp, Homo sapien
tgtccacgcgcttgtatctcagtgg

SEQ ID NO: 318872 - DNA, 25 bp, Homo sapien
gaggtggcttcgctgctccacgtgc

SEQ ID NO: 318873 - DNA, 25 bp, Homo sapien
cagtctcccttgcagggctcgaagc

SEQ ID NO: 318874 - DNA, 25 bp, Homo sapien
gtgccaggccggatccggtactcag

SEQ ID NO: 318875 - DNA, 25 bp, Homo sapien
agaggagccactagtcggcacgcta

SEQ ID NO: 318876 - DNA, 25 bp, Homo sapien
agttacccctgatggcaggtctgcc

SEQ ID NO: 318877 - DNA, 25 bp, Homo sapien
gaagcctgggccgtgcaagttaccc

SEQ ID NO: 318878 - DNA, 25 bp, Homo sapien
acagagaggagccactagtcggcac

SEQ ID NO: 318879 - DNA, 25 bp, Homo sapien
attgaccacgtcacctctccggggt

SEQ ID NO: 318880 - DNA, 25 bp, Homo sapien
aagatgctttcctctaacaccccgt

SEQ ID NO: 318881 - DNA, 25 bp, Homo sapien
catagcatgactggctgctctccac

SEQ ID NO: 318882 - DNA, 25 bp, Homo sapien
tcaaggagtccaaggtaaagaagat

SEQ ID NO: 318883 - DNA, 25 bp, Homo sapien
tgtctactatttggcttattaaagt

SEQ ID NO: 318884 - DNA, 25 bp, Homo sapien
gtgctagggatgctctcctcttacc

SEQ ID NO: 318885 - DNA, 25 bp, Homo sapien
taccccaacaactcagggcttgaaa

SEQ ID NO: 318886 - DNA, 25 bp, Homo sapien
gtgcccggcctcgcttggctaattt

SEQ ID NO: 318887 - DNA, 25 bp, Homo sapien
cctgggcctgatgcaagaatgggac

SEQ ID NO: 318888 - DNA, 25 bp, Homo sapien
tctactctgtggtcaggaggcctca

SEQ ID NO: 318889 - DNA, 25 bp, Homo sapien
tagcggccctagtgagttcctgaag

SEQ ID NO: 318890 - DNA, 25 bp, Homo sapien
agaagctgcggagctcttgccacgg

SEQ ID NO: 318891 - DNA, 25 bp, Homo sapien
gcgtcacctgtgtaacttcaatatc

SEQ ID NO: 318892 - DNA, 25 bp, Homo sapien
cagcaaaatcgttccatagaaatga

SEQ ID NO: 318893 - DNA, 25 bp, Homo sapien
ttagggttccaaaatgcgtcacctg

SEQ ID NO: 318894 - DNA, 25 bp, Homo sapien
tctatccagatcaccatggttttac

SEQ ID NO: 318895 - DNA, 25 bp, Homo sapien
aaactgctctccgacatctgagagg

SEQ ID NO: 318896 - DNA, 25 bp, Homo sapien
catctgatgaattctccttctcagg

SEQ ID NO: 318897 - DNA, 25 bp, Homo sapien
tttatccagcatttggaatctgaat

SEQ ID NO: 318898 - DNA, 25 bp, Homo sapien
taccacggggcacatctggtcttta

SEQ ID NO: 318899 - DNA, 25 bp, Homo sapien
cagtgacagccgaaacgtccactac

SEQ ID NO: 318900 - DNA, 25 bp, Homo sapien
ccgacctcacgcagtgacagccgaa

SEQ ID NO: 318901 - DNA, 25 bp, Homo sapien
tctgcttccttgatagaatgttgtc

SEQ ID NO: 318902 - DNA, 25 bp, Homo sapien
tccattttctcctttacaggtacaa

SEQ ID NO: 318903 - DNA, 25 bp, Homo sapien
caggctctgtcatctgcttccttga

SEQ ID NO: 318904 - DNA, 25 bp, Homo sapien
ttttctcctttacaggtacaatcac

SEQ ID NO: 318905 - DNA, 25 bp, Homo sapien
gatgaccacaatgaaggtttttccc

SEQ ID NO: 318906 - DNA, 25 bp, Homo sapien
tttccgtcacagatgaccacaatga

SEQ ID NO: 318907 - DNA, 25 bp, Homo sapien
cgtcacagatgaccacaatgaaggt

SEQ ID NO: 318908 - DNA, 25 bp, Homo sapien
cacagatgaccacaatgaaggtttt

SEQ ID NO: 318909 - DNA, 25 bp, Homo sapien
caacaactgtagtttttgcggatgt

SEQ ID NO: 318910 - DNA, 25 bp, Homo sapien
tgcggatgttaacgcttgtgaactt

SEQ ID NO: 318911 - DNA, 25 bp, Homo sapien
ggtatcgcccaattaggaaatcgga

SEQ ID NO: 318912 - DNA, 25 bp, Homo sapien
ccaagaaaatggttcgcgcgcagca

SEQ ID NO: 318913 - DNA, 25 bp, Homo sapien
tcagagctccgtggaaatgcactcc

SEQ ID NO: 318914 - DNA, 25 bp, Homo sapien
tgcagagacagaacttgaccttcag

SEQ ID NO: 318915 - DNA, 25 bp, Homo sapien
caaatacaatcatggaaagaggctt

SEQ ID NO: 318916 - DNA, 25 bp, Homo sapien
tcttcaaacaggcttcaggtgaccc

SEQ ID NO: 318917 - DNA, 25 bp, Homo sapien
agtctatctgggattggatattggg

SEQ ID NO: 318918 - DNA, 25 bp, Homo sapien
ttttctaagtctatctgggattgga

SEQ ID NO: 318919 - DNA, 25 bp, Homo sapien
tctgcaagtaatggctggaaagtca

SEQ ID NO: 318920 - DNA, 25 bp, Homo sapien
acttggaagttgtcgtcttgagttc

SEQ ID NO: 318921 - DNA, 25 bp, Homo sapien
tccttcttaagatgatcccgctcat

SEQ ID NO: 318922 - DNA, 25 bp, Homo sapien
gatcccgctcatgttatactctttc

SEQ ID NO: 318923 - DNA, 25 bp, Homo sapien
tcaagccacagcaaagtcgaaaact

SEQ ID NO: 318924 - DNA, 25 bp, Homo sapien
catttctgcataaatctcctcaagc

SEQ ID NO: 318925 - DNA, 25 bp, Homo sapien
ttcgatggcatgtccattgtactct

SEQ ID NO: 318926 - DNA, 25 bp, Homo sapien
cacgtagctgatgtattcgatggca

SEQ ID NO: 318927 - DNA, 25 bp, Homo sapien
gctgatgtattcgatggcatgtcca

SEQ ID NO: 318928 - DNA, 25 bp, Homo sapien
ctcagtcacgtagctgatgtattcg

SEQ ID NO: 318929 - DNA, 25 bp, Homo sapien
tattcacttggctgtagcctctcct

SEQ ID NO: 318930 - DNA, 25 bp, Homo sapien
ttctattcacttggctgtagcctct

SEQ ID NO: 318931 - DNA, 25 bp, Homo sapien
cttggctgtagcctctcctaaggct

SEQ ID NO: 318932 - DNA, 25 bp, Homo sapien
tgaacttctattcacttggctgtag

SEQ ID NO: 318933 - DNA, 25 bp, Homo sapien
caaagttataggcttgttcaaattc

SEQ ID NO: 318934 - DNA, 25 bp, Homo sapien
ttaagagttacatcttcttcatgaa

SEQ ID NO: 318935 - DNA, 25 bp, Homo sapien
tgtaaattccacatccataggttca

SEQ ID NO: 318936 - DNA, 25 bp, Homo sapien
atccataggttcaaagttataggct

SEQ ID NO: 318937 - DNA, 25 bp, Homo sapien
tcctgtatctctttggtcaccaatt

SEQ ID NO: 318938 - DNA, 25 bp, Homo sapien
ctcctgtatctctttggtcaccaat

SEQ ID NO: 318939 - DNA, 25 bp, Homo sapien
tcctcctgtatctctttggtcacca

SEQ ID NO: 318940 - DNA, 25 bp, Homo sapien
cctcctgtatctctttggtcaccaa

SEQ ID NO: 318941 - DNA, 25 bp, Homo sapien
taattcattggagaaagggcagttt

SEQ ID NO: 318942 - DNA, 25 bp, Homo sapien
aaatgtacaggataaagctgccaag

SEQ ID NO: 318943 - DNA, 25 bp, Homo sapien
cgtatctgataaagcactgtactga

SEQ ID NO: 318944 - DNA, 25 bp, Homo sapien
gaaaatacaagctgtagtctgagga

SEQ ID NO: 318945 - DNA, 25 bp, Homo sapien
cttttacacctaagtggatgacgtg

SEQ ID NO: 318946 - DNA, 25 bp, Homo sapien
cacctaagtggatgacgtgttcaag

SEQ ID NO: 318947 - DNA, 25 bp, Homo sapien
tgacgtgttcaagtgcaaagtgaca

SEQ ID NO: 318948 - DNA, 25 bp, Homo sapien
aaagtgacaccgtctgcttgtggtc

SEQ ID NO: 318949 - DNA, 25 bp, Homo sapien
aaatggtaagagcacgggtataact

SEQ ID NO: 318950 - DNA, 25 bp, Homo sapien
aatggtaagagcacgggtataacta

SEQ ID NO: 318951 - DNA, 25 bp, Homo sapien
atggtaagagcacgggtataactaa

SEQ ID NO: 318952 - DNA, 25 bp, Homo sapien
tggtaagagcacgggtataactaaa

SEQ ID NO: 318953 - DNA, 25 bp, Homo sapien
ttccaatttcccgtcacttgtggag

SEQ ID NO: 318954 - DNA, 25 bp, Homo sapien
ccaatttcccgtcacttgtggagac

SEQ ID NO: 318955 - DNA, 25 bp, Homo sapien
caatttcccgtcacttgtggagact

SEQ ID NO: 318956 - DNA, 25 bp, Homo sapien
tccaatttcccgtcacttgtggaga

SEQ ID NO: 318957 - DNA, 25 bp, Homo sapien
tttttgctggtggactgtccactgc

SEQ ID NO: 318958 - DNA, 25 bp, Homo sapien
tttgctggtggactgtccactgctt

SEQ ID NO: 318959 - DNA, 25 bp, Homo sapien
tgctggtggactgtccactgctttt

SEQ ID NO: 318960 - DNA, 25 bp, Homo sapien
ctggtggactgtccactgcttttgg

SEQ ID NO: 318961 - DNA, 25 bp, Homo sapien
tgtaaagacagccacgtcgctgagc

SEQ ID NO: 318962 - DNA, 25 bp, Homo sapien
taaagacagccacgtcgctgagcca

SEQ ID NO: 318963 - DNA, 25 bp, Homo sapien
ctatgtaaagacagccacgtcgctg

SEQ ID NO: 318964 - DNA, 25 bp, Homo sapien
aagacagccacgtcgctgagccatc

SEQ ID NO: 318965 - DNA, 25 bp, Homo sapien
gctttccaggctggacagtggggga

SEQ ID NO: 318966 - DNA, 25 bp, Homo sapien
tttccaggctggacagtgggggaac

SEQ ID NO: 318967 - DNA, 25 bp, Homo sapien
ctgctttccaggctggacagtgggg

SEQ ID NO: 318968 - DNA, 25 bp, Homo sapien
ctttccaggctggacagtgggggaa

SEQ ID NO: 318969 - DNA, 25 bp, Homo sapien
cttgtcaccaacacgcctctcctct

SEQ ID NO: 318970 - DNA, 25 bp, Homo sapien
atctctgcagtaaagggtgccagca

SEQ ID NO: 318971 - DNA, 25 bp, Homo sapien
ggtgccagcaccggcaggtccttgt

SEQ ID NO: 318972 - DNA, 25 bp, Homo sapien
catctctgcagtaaagggtgccagc

SEQ ID NO: 318973 - DNA, 25 bp, Homo sapien
tcaacagctgtggacacgtcctcac

SEQ ID NO: 318974 - DNA, 25 bp, Homo sapien
agtttcagttagatgcaaacagctc

SEQ ID NO: 318975 - DNA, 25 bp, Homo sapien
aagtttcagttagatgcaaacagct

SEQ ID NO: 318976 - DNA, 25 bp, Homo sapien
gtttcagttagatgcaaacagctct

SEQ ID NO: 318977 - DNA, 25 bp, Homo sapien
gtctttccagtaccaggaggtccaa

SEQ ID NO: 318978 - DNA, 25 bp, Homo sapien
tcaccactcagaatccttttaactg

SEQ ID NO: 318979 - DNA, 25 bp, Homo sapien
tagcactgggttgaaaaactccatc

SEQ ID NO: 318980 - DNA, 25 bp, Homo sapien
aaaacagcctctattattgtcactg

SEQ ID NO: 318981 - DNA, 25 bp, Homo sapien
tggtggccggctgtagcaccttgct

SEQ ID NO: 318982 - DNA, 25 bp, Homo sapien
tcctcgaacctgcaggtggcgttca

SEQ ID NO: 318983 - DNA, 25 bp, Homo sapien
taaaatccgactgtccggcaaggca

SEQ ID NO: 318984 - DNA, 25 bp, Homo sapien
gttggagggcgcacagactaaaatc

SEQ ID NO: 318985 - DNA, 25 bp, Homo sapien
ctgcatgtggtgatgattatccgga

SEQ ID NO: 318986 - DNA, 25 bp, Homo sapien
tgcaatacggtttgacggcgtcaat

SEQ ID NO: 318987 - DNA, 25 bp, Homo sapien
tcctatttggtaaaacagccctgag

SEQ ID NO: 318988 - DNA, 25 bp, Homo sapien
tatccggaagcgtgaggctttccag

SEQ ID NO: 318989 - DNA, 25 bp, Homo sapien
ctccagggtgcagggtccatgcagt

SEQ ID NO: 318990 - DNA, 25 bp, Homo sapien
cagggtccatgcagtgcccgctctg

SEQ ID NO: 318991 - DNA, 25 bp, Homo sapien
gaacatcagctccagggtgcagggt

SEQ ID NO: 318992 - DNA, 25 bp, Homo sapien
agggtccatgcagtgcccgctctgc

SEQ ID NO: 318993 - DNA, 25 bp, Homo sapien
gagagcaggagctcgctcggcacat

SEQ ID NO: 318994 - DNA, 25 bp, Homo sapien
ggagagcaggagctcgctcggcaca

SEQ ID NO: 318995 - DNA, 25 bp, Homo sapien
gtccacagcgttgctgatggacggg

SEQ ID NO: 318996 - DNA, 25 bp, Homo sapien
gctcttccttctccgtgtgacaagg

SEQ ID NO: 318997 - DNA, 25 bp, Homo sapien
gattttgcgggaaggagtcgtcagg

SEQ ID NO: 318998 - DNA, 25 bp, Homo sapien
ttctccgtgtgacaagggaggtaag

SEQ ID NO: 318999 - DNA, 25 bp, Homo sapien
atgcaggcggccacagatggcagcc

SEQ ID NO: 319000 - DNA, 25 bp, Homo sapien
tttcctcctgactcatccttgtgag

SEQ ID NO: 319001 - DNA, 25 bp, Homo sapien
ctcccacgtgtctctcgggaggtgg

SEQ ID NO: 319002 - DNA, 25 bp, Homo sapien
tgaactggccgctgtaaagcgctga

SEQ ID NO: 319003 - DNA, 25 bp, Homo sapien
gaattgttttagcaattgatgcctc

SEQ ID NO: 319004 - DNA, 25 bp, Homo sapien
tgttttagcaattgatgcctctgac

SEQ ID NO: 319005 - DNA, 25 bp, Homo sapien
ttagcaattgatgcctctgacacac

SEQ ID NO: 319006 - DNA, 25 bp, Homo sapien
ctgccgaattgttttagcaattgat

SEQ ID NO: 319007 - DNA, 25 bp, Homo sapien
ctagagcaaagatgttctaaatggt

SEQ ID NO: 319008 - DNA, 25 bp, Homo sapien
agagcaaagatgttctaaatggtaa

SEQ ID NO: 319009 - DNA, 25 bp, Homo sapien
agcaaagatgttctaaatggtaatt

SEQ ID NO: 319010 - DNA, 25 bp, Homo sapien
gagcaaagatgttctaaatggtaat

SEQ ID NO: 319011 - DNA, 25 bp, Homo sapien
tggccactgatgtccgacatcagcc

SEQ ID NO: 319012 - DNA, 25 bp, Homo sapien
caaacacgtgagtgaagtgcccaac

SEQ ID NO: 319013 - DNA, 25 bp, Homo sapien
gaggaatgaggcattccggctcact

SEQ ID NO: 319014 - DNA, 25 bp, Homo sapien
atgtccgacatcagccccagaggaa

SEQ ID NO: 319015 - DNA, 25 bp, Homo sapien
cactcctacgggctcaggtgggaat

SEQ ID NO: 319016 - DNA, 25 bp, Homo sapien
gctgtgcgcaggatggccccatgct

SEQ ID NO: 319017 - DNA, 25 bp, Homo sapien
gcaggatggccccatgctcactctt

SEQ ID NO: 319018 - DNA, 25 bp, Homo sapien
gctgccactcctacgggctcaggtg

SEQ ID NO: 319019 - DNA, 25 bp, Homo sapien
cattttcgtccctctggtacgcggg

SEQ ID NO: 319020 - DNA, 25 bp, Homo sapien
gacttaatgactgggccgagctgca

SEQ ID NO: 319021 - DNA, 25 bp, Homo sapien
gattatgtgcgccacaagcaccgaa

SEQ ID NO: 319022 - DNA, 25 bp, Homo sapien
tacgcgggtcgagacatcagccgtt

SEQ ID NO: 319023 - DNA, 25 bp, Homo sapien
ccagcaaagcagctagcgggtacag

SEQ ID NO: 319024 - DNA, 25 bp, Homo sapien
cgcacagcggcactggaggatgagg

SEQ ID NO: 319025 - DNA, 25 bp, Homo sapien
gatgaggcgaacctccgggggacag

SEQ ID NO: 319026 - DNA, 25 bp, Homo sapien
agcagctgctcacggccggccatct

SEQ ID NO: 319027 - DNA, 25 bp, Homo sapien
gctgtatgcacctgccctgaaggct

SEQ ID NO: 319028 - DNA, 25 bp, Homo sapien
ggacggcagcgtgctggtctctcct

SEQ ID NO: 319029 - DNA, 25 bp, Homo sapien
tggtctctcctgctgcggccacgtc

SEQ ID NO: 319030 - DNA, 25 bp, Homo sapien
tggccctgtgctgtatgcacctgcc

SEQ ID NO: 319031 - DNA, 25 bp, Homo sapien
tgctgagagcttcaccctggaaaca

SEQ ID NO: 319032 - DNA, 25 bp, Homo sapien
tgtgctgagagcttcaccctggaaa

SEQ ID NO: 319033 - DNA, 25 bp, Homo sapien
aacagcatcttgttggcccacacag

SEQ ID NO: 319034 - DNA, 25 bp, Homo sapien
tccgcttggccacagggaaggaaga

SEQ ID NO: 319035 - DNA, 25 bp, Homo sapien
agacctcgagttccctgtggtagaa

SEQ ID NO: 319036 - DNA, 25 bp, Homo sapien
agaacagccgtgagggcagcatcag

SEQ ID NO: 319037 - DNA, 25 bp, Homo sapien
cgcacagacctcgagttccctgtgg

SEQ ID NO: 319038 - DNA, 25 bp, Homo sapien
tcgtgggaccggtagttcttcacca

SEQ ID NO: 319039 - DNA, 25 bp, Homo sapien
cctcctgccatactgtccttacccg

SEQ ID NO: 319040 - DNA, 25 bp, Homo sapien
tgggaggaaggacctcctgccatac

SEQ ID NO: 319041 - DNA, 25 bp, Homo sapien
gggaggaaggacctcctgccatact

SEQ ID NO: 319042 - DNA, 25 bp, Homo sapien
cctgccatactgtccttacccgaca

SEQ ID NO: 319043 - DNA, 25 bp, Homo sapien
tcatctggcaggagaagtcagcatc

SEQ ID NO: 319044 - DNA, 25 bp, Homo sapien
gagagtggtgcctgtgatgcctcct

SEQ ID NO: 319045 - DNA, 25 bp, Homo sapien
tgcctccttggtgccaggcacaact

SEQ ID NO: 319046 - DNA, 25 bp, Homo sapien
agcatccatcttggggggcacaagc

SEQ ID NO: 319047 - DNA, 25 bp, Homo sapien
ttccggtagggcgtgatgacgccaa

SEQ ID NO: 319048 - DNA, 25 bp, Homo sapien
cctcggccgggttgaaccacgatgg

SEQ ID NO: 319049 - DNA, 25 bp, Homo sapien
cgccaatgtcgctggcagacacctg

SEQ ID NO: 319050 - DNA, 25 bp, Homo sapien
tagggcgtgatgacgccaatgtcgc

SEQ ID NO: 319051 - DNA, 25 bp, Homo sapien
taaaaacctgctgctgctcacaagg

SEQ ID NO: 319052 - DNA, 25 bp, Homo sapien
ccatggatggcagttgggtgacctc

SEQ ID NO: 319053 - DNA, 25 bp, Homo sapien
taaaaactgttcgaggctctggccg

SEQ ID NO: 319054 - DNA, 25 bp, Homo sapien
tcatacgaaatgagaagcgtcccat

SEQ ID NO: 319055 - DNA, 25 bp, Homo sapien
tgttcggcatgggaggcacctgtgt

SEQ ID NO: 319056 - DNA, 25 bp, Homo sapien
ctggtgttcggcatgggaggcacct

SEQ ID NO: 319057 - DNA, 25 bp, Homo sapien
ttcggcatgggaggcacctgtgtcc

SEQ ID NO: 319058 - DNA, 25 bp, Homo sapien
ggtgttcggcatgggaggcacctgt

SEQ ID NO: 319059 - DNA, 25 bp, Homo sapien
tctttccaagttctgcttggtggtg

SEQ ID NO: 319060 - DNA, 25 bp, Homo sapien
ttggtggtgtgaacaccacagggac

SEQ ID NO: 319061 - DNA, 25 bp, Homo sapien
ggttctttccaagttctgcttggtg

SEQ ID NO: 319062 - DNA, 25 bp, Homo sapien
gggacacatgcttcatgaatgaaac

SEQ ID NO: 319063 - DNA, 25 bp, Homo sapien
gcaggatggcacctacaagctgagg

SEQ ID NO: 319064 - DNA, 25 bp, Homo sapien
cacacgcgcggtacaggtgatctgt

SEQ ID NO: 319065 - DNA, 25 bp, Homo sapien
cataacatctttgacgggctctgcg

SEQ ID NO: 319066 - DNA, 25 bp, Homo sapien
cttcaggagaaacgagatgcatgtc

SEQ ID NO: 319067 - DNA, 25 bp, Homo sapien
tcaacattacgcaaaagaattctga

SEQ ID NO: 319068 - DNA, 25 bp, Homo sapien
aaatgatgatgaccagatactcttg

SEQ ID NO: 319069 - DNA, 25 bp, Homo sapien
tgatccaacctttatatccatcaga

SEQ ID NO: 319070 - DNA, 25 bp, Homo sapien
tcttgtccttgaaactcctctactg

SEQ ID NO: 319071 - DNA, 25 bp, Homo sapien
ctaaaagcacacagagatgaataaa

SEQ ID NO: 319072 - DNA, 25 bp, Homo sapien
cagagatgaataaaaatggcacttg

SEQ ID NO: 319073 - DNA, 25 bp, Homo sapien
gatgaataaaaatggcacttgaagt

SEQ ID NO: 319074 - DNA, 25 bp, Homo sapien
cacagagatgaataaaaatggcact

SEQ ID NO: 319075 - DNA, 25 bp, Homo sapien
caaagctttgggtctggtgattgca

SEQ ID NO: 319076 - DNA, 25 bp, Homo sapien
gggtctggtgattgcaacattaaat

SEQ ID NO: 319077 - DNA, 25 bp, Homo sapien
atcagcaaagctttgggtctggtga

SEQ ID NO: 319078 - DNA, 25 bp, Homo sapien
atgggggtttcccagcactatcagc

SEQ ID NO: 319079 - DNA, 25 bp, Homo sapien
gcccacccagtgcctgaaaactcac

SEQ ID NO: 319080 - DNA, 25 bp, Homo sapien
acagcccacccagtgcctgaaaact

SEQ ID NO: 319081 - DNA, 25 bp, Homo sapien
agcccacccagtgcctgaaaactca

SEQ ID NO: 319082 - DNA, 25 bp, Homo sapien
tcacagcccacccagtgcctgaaaa

SEQ ID NO: 319083 - DNA, 25 bp, Homo sapien
tcgcatcccatgtaaacaccgtttg

SEQ ID NO: 319084 - DNA, 25 bp, Homo sapien
tgtaaacaccgtttgtaatactgta

SEQ ID NO: 319085 - DNA, 25 bp, Homo sapien
gaggtaaatcgcatcccatgtaaac

SEQ ID NO: 319086 - DNA, 25 bp, Homo sapien
actgcagtgcaggaggtaaatcgca

SEQ ID NO: 319087 - DNA, 25 bp, Homo sapien
agctgggctcctgatgcttctctgg

SEQ ID NO: 319088 - DNA, 25 bp, Homo sapien
cactgggtaggaggggtctgccacc

SEQ ID NO: 319089 - DNA, 25 bp, Homo sapien
ctctggtcctgtggattctggcacc

SEQ ID NO: 319090 - DNA, 25 bp, Homo sapien
tggattctggcaccactgggtagga

SEQ ID NO: 319091 - DNA, 25 bp, Homo sapien
ggcatatgccaaagtcagggcagca

SEQ ID NO: 319092 - DNA, 25 bp, Homo sapien
gagccacggagcagactgtaacggc

SEQ ID NO: 319093 - DNA, 25 bp, Homo sapien
tggctgcgagacaagggcaggccac

SEQ ID NO: 319094 - DNA, 25 bp, Homo sapien
tgtaacggcaacgtggccaggctga

SEQ ID NO: 319095 - DNA, 25 bp, Homo sapien
gtttatttcagggtaggcggcagtg

SEQ ID NO: 319096 - DNA, 25 bp, Homo sapien
tcactcgagggtttatttcagggta

SEQ ID NO: 319097 - DNA, 25 bp, Homo sapien
tatttcagggtaggcggcagtgact

SEQ ID NO: 319098 - DNA, 25 bp, Homo sapien
cactcgagggtttatttcagggtag

SEQ ID NO: 319099 - DNA, 25 bp, Homo sapien
gttcaggtgaagtggacagcaagcc

SEQ ID NO: 319100 - DNA, 25 bp, Homo sapien
aaaactgcgccagcagggctgagag

SEQ ID NO: 319101 - DNA, 25 bp, Homo sapien
catgaaaccctggtcaccactgaca

SEQ ID NO: 319102 - DNA, 25 bp, Homo sapien
tgacacgggcacacatctcgaggtg

SEQ ID NO: 319103 - DNA, 25 bp, Homo sapien
gcagagagagtccagcaaacgctgg

SEQ ID NO: 319104 - DNA, 25 bp, Homo sapien
ccagcaaacgctggctgcaggagca

SEQ ID NO: 319105 - DNA, 25 bp, Homo sapien
catcccttcgatttggggttgacag

SEQ ID NO: 319106 - DNA, 25 bp, Homo sapien
gaggtccttgccctaggacttctgc

SEQ ID NO: 319107 - DNA, 25 bp, Homo sapien
tggtgagggaggtgggggtgaaatc

SEQ ID NO: 319108 - DNA, 25 bp, Homo sapien
tggtggtgagggaggtgggggtgaa

SEQ ID NO: 319109 - DNA, 25 bp, Homo sapien
taatcgtaagaataacaatcggcca

SEQ ID NO: 319110 - DNA, 25 bp, Homo sapien
ttggtagggacaggccagaccatgc

SEQ ID NO: 319111 - DNA, 25 bp, Homo sapien
acagcccaggttgtttggccccaca

SEQ ID NO: 319112 - DNA, 25 bp, Homo sapien
gtaatagacgtcaacaacagcccag

SEQ ID NO: 319113 - DNA, 25 bp, Homo sapien
ttgagccacgctgggatcggagacg

SEQ ID NO: 319114 - DNA, 25 bp, Homo sapien
cttgagccacgctgggatcggagac

SEQ ID NO: 319115 - DNA, 25 bp, Homo sapien
cgtgagccacgctgggattgcaggt

SEQ ID NO: 319116 - DNA, 25 bp, Homo sapien
gcgtgagccacgctgggattgcagg

SEQ ID NO: 319117 - DNA, 25 bp, Homo sapien
aggcatgagccatgctgggattgca

SEQ ID NO: 319118 - DNA, 25 bp, Homo sapien
aggtgtgagccacgctgggactgca

SEQ ID NO: 319119 - DNA, 25 bp, Homo sapien
ggtttgtgtgcacgctctcttcaaa

SEQ ID NO: 319120 - DNA, 25 bp, Homo sapien
ctagcggtttgtgtgcacgctctct

SEQ ID NO: 319121 - DNA, 25 bp, Homo sapien
gcggtttgtgtgcacgctctcttca

SEQ ID NO: 319122 - DNA, 25 bp, Homo sapien
ttgtgtgcacgctctcttcaaaccc

SEQ ID NO: 319123 - DNA, 25 bp, Homo sapien
caagtcacccttcaggtaaccagat

SEQ ID NO: 319124 - DNA, 25 bp, Homo sapien
ggtaaccagataaaccagtcatctc

SEQ ID NO: 319125 - DNA, 25 bp, Homo sapien
aggtaaccagataaaccagtcatct

SEQ ID NO: 319126 - DNA, 25 bp, Homo sapien
agtcacccttcaggtaaccagataa

SEQ ID NO: 319127 - DNA, 25 bp, Homo sapien
tattttgagcccgtgttcacaggcc

SEQ ID NO: 319128 - DNA, 25 bp, Homo sapien
aaaatgtattttgagcccgtgttca

SEQ ID NO: 319129 - DNA, 25 bp, Homo sapien
aaatgtattttgagcccgtgttcac

SEQ ID NO: 319130 - DNA, 25 bp, Homo sapien
tttgagcccgtgttcacaggcccgg

SEQ ID NO: 319131 - DNA, 25 bp, Homo sapien
tccgccgactgctccaggaggtggt

SEQ ID NO: 319132 - DNA, 25 bp, Homo sapien
cgccgactgctccaggaggtggtgc

SEQ ID NO: 319133 - DNA, 25 bp, Homo sapien
gtccgccgactgctccaggaggtgg

SEQ ID NO: 319134 - DNA, 25 bp, Homo sapien
ccgactgctccaggaggtggtgcat

SEQ ID NO: 319135 - DNA, 25 bp, Homo sapien
cggtcgaacggcagctccagcttca

SEQ ID NO: 319136 - DNA, 25 bp, Homo sapien
caccagcacggtgccgatggtgacc

SEQ ID NO: 319137 - DNA, 25 bp, Homo sapien
aagttcttggtgaagaccagggtga

SEQ ID NO: 319138 - DNA, 25 bp, Homo sapien
tcttggtgaagaccagggtgaccag

SEQ ID NO: 319139 - DNA, 25 bp, Homo sapien
gagatttgggaagcgccagtgctga

SEQ ID NO: 319140 - DNA, 25 bp, Homo sapien
tttgggaagcgccagtgctgaggca

SEQ ID NO: 319141 - DNA, 25 bp, Homo sapien
ggagatttgggaagcgccagtgctg

SEQ ID NO: 319142 - DNA, 25 bp, Homo sapien
gatttgggaagcgccagtgctgagg

SEQ ID NO: 319143 - DNA, 25 bp, Homo sapien
ccagactccagtagggccgcaggga

SEQ ID NO: 319144 - DNA, 25 bp, Homo sapien
tttgtgtcccgtcctgagctgggcc

SEQ ID NO: 319145 - DNA, 25 bp, Homo sapien
ccttgctgggcatgtgtggccaaca

SEQ ID NO: 319146 - DNA, 25 bp, Homo sapien
tcactgtctccctgccggatggcgg

SEQ ID NO: 319147 - DNA, 25 bp, Homo sapien
caggagccagagaagagcgtccacc

SEQ ID NO: 319148 - DNA, 25 bp, Homo sapien
ttggggatgtcaccagctggactgc

SEQ ID NO: 319149 - DNA, 25 bp, Homo sapien
accagctggactgcggtatctgccg

SEQ ID NO: 319150 - DNA, 25 bp, Homo sapien
ggatgtcaccagctggactgcggta

SEQ ID NO: 319151 - DNA, 25 bp, Homo sapien
cctggggacaccagacaccaggtgg

SEQ ID NO: 319152 - DNA, 25 bp, Homo sapien
gccctgactacccccacgaggtcag

SEQ ID NO: 319153 - DNA, 25 bp, Homo sapien
ctgactacccccacgaggtcagctg

SEQ ID NO: 319154 - DNA, 25 bp, Homo sapien
cccacgaggtcagctgcggggcacc

SEQ ID NO: 319155 - DNA, 25 bp, Homo sapien
ctacccccacgaggtcagctgcggg

SEQ ID NO: 319156 - DNA, 25 bp, Homo sapien
cgtccagcagtagccgcgggcgtac

SEQ ID NO: 319157 - DNA, 25 bp, Homo sapien
tacagcgcctggtcgcgcgtgaagt

SEQ ID NO: 319158 - DNA, 25 bp, Homo sapien
agttgtgcggggtgtaacagtaaat

SEQ ID NO: 319159 - DNA, 25 bp, Homo sapien
gctcaaacagcgacggccacaggct

SEQ ID NO: 319160 - DNA, 25 bp, Homo sapien
cttctgcgtggcgtagtaggtgcac

SEQ ID NO: 319161 - DNA, 25 bp, Homo sapien
taacagttgtcgatctcctgcagca

SEQ ID NO: 319162 - DNA, 25 bp, Homo sapien
tctgcttctcgatcttgggcgcgcg

SEQ ID NO: 319163 - DNA, 25 bp, Homo sapien
atgaggttcatgacgcacagcagca

SEQ ID NO: 319164 - DNA, 25 bp, Homo sapien
actgccggcgcgtcttgatgcccac

SEQ ID NO: 319165 - DNA, 25 bp, Homo sapien
gcgccactgccggcgcgtcttgatg

SEQ ID NO: 319166 - DNA, 25 bp, Homo sapien
tgcgagcggcgccactgccggcgcg

SEQ ID NO: 319167 - DNA, 25 bp, Homo sapien
agcggcgccactgccggcgcgtctt

SEQ ID NO: 319168 - DNA, 25 bp, Homo sapien
catgaggtcgctctcgttggtgatg

SEQ ID NO: 319169 - DNA, 25 bp, Homo sapien
tccagccggttgagcgacttgatgt

SEQ ID NO: 319170 - DNA, 25 bp, Homo sapien
agctgccggaccacgttgtcgtaca

SEQ ID NO: 319171 - DNA, 25 bp, Homo sapien
gacttgatgtggtcgcggttctcgt

SEQ ID NO: 319172 - DNA, 25 bp, Homo sapien
tgcgcggccgcttgaccacgggcgg
